United States Patent Application Publication US 2005/0136395 A1 - sequence listing, part 2

SEQ ID NO: 39449 - DNA, 25 bp, SARS Virus
acgagatatattgttcatgttcata

SEQ ID NO: 39450 - DNA, 25 bp, SARS Virus
cgagatatattggtcatgttcataa

SEQ ID NO: 39451 - DNA, 25 bp, SARS Virus
gagatatattgtgcatgttcataaa

SEQ ID NO: 39452 - DNA, 25 bp, SARS Virus
agatatattgttgatgttcataaag

SEQ ID NO: 39453 - DNA, 25 bp, SARS Virus
gatatattgttcgtgttcataaagt

SEQ ID NO: 39454 - DNA, 25 bp, SARS Virus
atatattgttcaggttcataaagtc

SEQ ID NO: 39455 - DNA, 25 bp, SARS Virus
tatattgttcatgttcataaagtca

SEQ ID NO: 39456 - DNA, 25 bp, SARS Virus
atattgttcatggtcataaagtcac

SEQ ID NO: 39457 - DNA, 25 bp, SARS Virus
tattgttcatgtgcataaagtcacc

SEQ ID NO: 39458 - DNA, 25 bp, SARS Virus
attgttcatgttgataaagtcacct

SEQ ID NO: 39459 - DNA, 25 bp, SARS Virus
ttgttcatgttcgtaaagtcacctc

SEQ ID NO: 39460 - DNA, 25 bp, SARS Virus
tgttcatgttcagaaagtcacctcg

SEQ ID NO: 39461 - DNA, 25 bp, SARS Virus
gttcatgttcatgaagtcacctcgg

SEQ ID NO: 39462 - DNA, 25 bp, SARS Virus
ttcatgttcatagagtcacctcgga

SEQ ID NO: 39463 - DNA, 25 bp, SARS Virus
tcatgttcataaggtcacctcggaa

SEQ ID NO: 39464 - DNA, 25 bp, SARS Virus
catgttcataaagtcacctcggaat

SEQ ID NO: 39465 - DNA, 25 bp, SARS Virus
atgttcataaaggcacctcggaatc

SEQ ID NO: 39466 - DNA, 25 bp, SARS Virus
tgttcataaagtgacctcggaatct

SEQ ID NO: 39467 - DNA, 25 bp, SARS Virus
gttcataaagtcgcctcggaatcta

SEQ ID NO: 39468 - DNA, 25 bp, SARS Virus
ttcataaagtcagctcggaatctat

SEQ ID NO: 39469 - DNA, 25 bp, SARS Virus
tcataaagtcacgtcggaatctatg

SEQ ID NO: 39470 - DNA, 25 bp, SARS Virus
cataaagtcaccgcggaatctatga

SEQ ID NO: 39471 - DNA, 25 bp, SARS Virus
ataaagtcacctgggaatctatgat

SEQ ID NO: 39472 - DNA, 25 bp, SARS Virus
taaagtcacctcggaatctatgatg

SEQ ID NO: 39473 - DNA, 25 bp, SARS Virus
aaagtcacctcggaatctatgatgg

SEQ ID NO: 39474 - DNA, 25 bp, SARS Virus
aagtcacctcgggatctatgatggt

SEQ ID NO: 39475 - DNA, 25 bp, SARS Virus
agtcacctcggagtctatgatggtc

SEQ ID NO: 39476 - DNA, 25 bp, SARS Virus
gtcacctcggaagctatgatggtcg

SEQ ID NO: 39477 - DNA, 25 bp, SARS Virus
tcacctcggaatgtatgatggtcga

SEQ ID NO: 39478 - DNA, 25 bp, SARS Virus
cacctcggaatcgatgatggtcgat

SEQ ID NO: 39479 - DNA, 25 bp, SARS Virus
acctcggaatctgtgatggtcgata

SEQ ID NO: 39480 - DNA, 25 bp, SARS Virus
cctcggaatctaggatggtcgatag

SEQ ID NO: 39481 - DNA, 25 bp, SARS Virus
ctcggaatctatgatggtcgatagc

SEQ ID NO: 39482 - DNA, 25 bp, SARS Virus
tcggaatctatggtggtcgatagca

SEQ ID NO: 39483 - DNA, 25 bp, SARS Virus
cggaatctatgagggtcgatagcac

SEQ ID NO: 39484 - DNA, 25 bp, SARS Virus
ggaatctatgatggtcgatagcact

SEQ ID NO: 39485 - DNA, 25 bp, SARS Virus
gaatctatgatggtcgatagcactt

SEQ ID NO: 39486 - DNA, 25 bp, SARS Virus
aatctatgatgggcgatagcacttc

SEQ ID NO: 39487 - DNA, 25 bp, SARS Virus
atctatgatggtggatagcacttcg

SEQ ID NO: 39488 - DNA, 25 bp, SARS Virus
tctatgatggtcgatagcacttcgt

SEQ ID NO: 39489 - DNA, 25 bp, SARS Virus
ctatgatggtcggtagcacttcgtc

SEQ ID NO: 39490 - DNA, 25 bp, SARS Virus
tatgatggtcgagagcacttcgtcg

SEQ ID NO: 39491 - DNA, 25 bp, SARS Virus
atgatggtcgatggcacttcgtcga

SEQ ID NO: 39492 - DNA, 25 bp, SARS Virus
tgatggtcgatagcacttcgtcgaa

SEQ ID NO: 39493 - DNA, 25 bp, SARS Virus
gatggtcgataggacttcgtcgaac

SEQ ID NO: 39494 - DNA, 25 bp, SARS Virus
atggtcgatagcgcttcgtcgaacg

SEQ ID NO: 39495 - DNA, 25 bp, SARS Virus
tggtcgatagcagttcgtcgaacga

SEQ ID NO: 39496 - DNA, 25 bp, SARS Virus
ggtcgatagcacgtcgtcgaacgac

SEQ ID NO: 39497 - DNA, 25 bp, SARS Virus
gtcgatagcactgcgtcgaacgacg

SEQ ID NO: 39498 - DNA, 25 bp, SARS Virus
tcgatagcacttggtcgaacgacgg

SEQ ID NO: 39499 - DNA, 25 bp, SARS Virus
cgatagcacttcgtcgaacgacggt

SEQ ID NO: 39500 - DNA, 25 bp, SARS Virus
gatagcacttcggcgaacgacggtg

SEQ ID NO: 39501 - DNA, 25 bp, SARS Virus
atagcacttcgtggaacgacggtga

SEQ ID NO: 39502 - DNA, 25 bp, SARS Virus
tagcacttcgtcgaacgacggtgaa

SEQ ID NO: 39503 - DNA, 25 bp, SARS Virus
agcacttcgtcggacgacggtgaat

SEQ ID NO: 39504 - DNA, 25 bp, SARS Virus
gcacttcgtcgagcgacggtgaatc

SEQ ID NO: 39505 - DNA, 25 bp, SARS Virus
cacttcgtcgaaggacggtgaatcg

SEQ ID NO: 39506 - DNA, 25 bp, SARS Virus
acttcgtcgaacgacggtgaatcgt

SEQ ID NO: 39507 - DNA, 25 bp, SARS Virus
cttcgtcgaacggcggtgaatcgtt

SEQ ID NO: 39508 - DNA, 25 bp, SARS Virus
ttcgtcgaacgagggtgaatcgttt

SEQ ID NO: 39509 - DNA, 25 bp, SARS Virus
tcgtcgaacgacggtgaatcgtttc

SEQ ID NO: 39510 - DNA, 25 bp, SARS Virus
cgtcgaacgacggtgaatcgtttcc

SEQ ID NO: 39511 - DNA, 25 bp, SARS Virus
gtcgaacgacggggaatcgtttccg

SEQ ID NO: 39512 - DNA, 25 bp, SARS Virus
tcgaacgacggtgaatcgtttccga

SEQ ID NO: 39513 - DNA, 25 bp, SARS Virus
cgaacgacggtggatcgtttccgag

SEQ ID NO: 39514 - DNA, 25 bp, SARS Virus
gaacgacggtgagtcgtttccgaga

SEQ ID NO: 39515 - DNA, 25 bp, SARS Virus
aacgacggtgaagcgtttccgagat

SEQ ID NO: 39516 - DNA, 25 bp, SARS Virus
acgacggtgaatggtttccgagatt

SEQ ID NO: 39517 - DNA, 25 bp, SARS Virus
cgacggtgaatcgtttccgagattt

SEQ ID NO: 39518 - DNA, 25 bp, SARS Virus
gacggtgaatcggttccgagattta

SEQ ID NO: 39519 - DNA, 25 bp, SARS Virus
acggtgaatcgtgtccgagatttac

SEQ ID NO: 39520 - DNA, 25 bp, SARS Virus
cggtgaatcgttgccgagatttact

SEQ ID NO: 39521 - DNA, 25 bp, SARS Virus
ggtgaatcgtttgcgagatttactg

SEQ ID NO: 39522 - DNA, 25 bp, SARS Virus
gtgaatcgtttcggagatttactga

SEQ ID NO: 39523 - DNA, 25 bp, SARS Virus
tgaatcgtttccgagatttactgaa

SEQ ID NO: 39524 - DNA, 25 bp, SARS Virus
gaatcgtttccgggatttactgaaa

SEQ ID NO: 39525 - DNA, 25 bp, SARS Virus
aatcgtttccgagatttactgaaat

SEQ ID NO: 39526 - DNA, 25 bp, SARS Virus
atcgtttccgaggtttactgaaatc

SEQ ID NO: 39527 - DNA, 25 bp, SARS Virus
tcgtttccgagagttactgaaatcg

SEQ ID NO: 39528 - DNA, 25 bp, SARS Virus
cgtttccgagatgtactgaaatcgt

SEQ ID NO: 39529 - DNA, 25 bp, SARS Virus
gtttccgagattgactgaaatcgtt

SEQ ID NO: 39530 - DNA, 25 bp, SARS Virus
tttccgagatttgctgaaatcgttg

SEQ ID NO: 39531 - DNA, 25 bp, SARS Virus
ttccgagatttagtgaaatcgttga

SEQ ID NO: 39532 - DNA, 25 bp, SARS Virus
tccgagatttacggaaatcgttgag

SEQ ID NO: 39533 - DNA, 25 bp, SARS Virus
ccgagatttactgaaatcgttgagt

SEQ ID NO: 39534 - DNA, 25 bp, SARS Virus
cgagatttactggaatcgttgagtc

SEQ ID NO: 39535 - DNA, 25 bp, SARS Virus
gagatttactgagatcgttgagtcc

SEQ ID NO: 39536 - DNA, 25 bp, SARS Virus
agatttactgaagtcgttgagtcca

SEQ ID NO: 39537 - DNA, 25 bp, SARS Virus
gatttactgaaagcgttgagtccac

SEQ ID NO: 39538 - DNA, 25 bp, SARS Virus
atttactgaaatggttgagtccacg

SEQ ID NO: 39539 - DNA, 25 bp, SARS Virus
tttactgaaatcgttgagtccacga

SEQ ID NO: 39540 - DNA, 25 bp, SARS Virus
ttactgaaatcggtgagtccacgac

SEQ ID NO: 39541 - DNA, 25 bp, SARS Virus
tactgaaatcgtggagtccacgact

SEQ ID NO: 39542 - DNA, 25 bp, SARS Virus
actgaaatcgttgagtccacgacta

SEQ ID NO: 39543 - DNA, 25 bp, SARS Virus
ctgaaatcgttgggtccacgactac

SEQ ID NO: 39544 - DNA, 25 bp, SARS Virus
tgaaatcgttgagtccacgactaca

SEQ ID NO: 39545 - DNA, 25 bp, SARS Virus
gaaatcgttgaggccacgactacaa

SEQ ID NO: 39546 - DNA, 25 bp, SARS Virus
aaatcgttgagtgcacgactacaag

SEQ ID NO: 39547 - DNA, 25 bp, SARS Virus
aatcgttgagtcgacgactacaaga

SEQ ID NO: 39548 - DNA, 25 bp, SARS Virus
atcgttgagtccgcgactacaagag

SEQ ID NO: 39549 - DNA, 25 bp, SARS Virus
tcgttgagtccaggactacaagaga

SEQ ID NO: 39550 - DNA, 25 bp, SARS Virus
cgttgagtccacgactacaagagat

SEQ ID NO: 39551 - DNA, 25 bp, SARS Virus
gttgagtccacggctacaagagatg

SEQ ID NO: 39552 - DNA, 25 bp, SARS Virus
ttgagtccacgagtacaagagatgg

SEQ ID NO: 39553 - DNA, 25 bp, SARS Virus
tgagtccacgacgacaagagatggt

SEQ ID NO: 39554 - DNA, 25 bp, SARS Virus
gagtccacgactgcaagagatggtt

SEQ ID NO: 39555 - DNA, 25 bp, SARS Virus
agtccacgactagaagagatggttg

SEQ ID NO: 39556 - DNA, 25 bp, SARS Virus
gtccacgactacgagagatggttgg

SEQ ID NO: 39557 - DNA, 25 bp, SARS Virus
tccacgactacaggagatggttggt

SEQ ID NO: 39558 - DNA, 25 bp, SARS Virus
ccacgactacaagagatggttggtg

SEQ ID NO: 39559 - DNA, 25 bp, SARS Virus
cacgactacaagggatggttggtgg

SEQ ID NO: 39560 - DNA, 25 bp, SARS Virus
acgactacaagagatggttggtggt

SEQ ID NO: 39561 - DNA, 25 bp, SARS Virus
cgactacaagaggtggttggtggtg

SEQ ID NO: 39562 - DNA, 25 bp, SARS Virus
gactacaagagagggttggtggtgt

SEQ ID NO: 39563 - DNA, 25 bp, SARS Virus
actacaagagatggttggtggtgtc

SEQ ID NO: 39564 - DNA, 25 bp, SARS Virus
ctacaagagatggttggtggtgtct

SEQ ID NO: 39565 - DNA, 25 bp, SARS Virus
tacaagagatgggtggtggtgtctg

SEQ ID NO: 39566 - DNA, 25 bp, SARS Virus
acaagagatggtgggtggtgtctgt

SEQ ID NO: 39567 - DNA, 25 bp, SARS Virus
caagagatggttggtggtgtctgta

SEQ ID NO: 39568 - DNA, 25 bp, SARS Virus
aagagatggttggtggtgtctgtag

SEQ ID NO: 39569 - DNA, 25 bp, SARS Virus
agagatggttgggggtgtctgtagt

SEQ ID NO: 39570 - DNA, 25 bp, SARS Virus
gagatggttggtggtgtctgtagtt

SEQ ID NO: 39571 - DNA, 25 bp, SARS Virus
agatggttggtggtgtctgtagtta

SEQ ID NO: 39572 - DNA, 25 bp, SARS Virus
gatggttggtggggtctgtagttag

SEQ ID NO: 39573 - DNA, 25 bp, SARS Virus
atggttggtggtgtctgtagttagt

SEQ ID NO: 39574 - DNA, 25 bp, SARS Virus
tggttggtggtggctgtagttagtg

SEQ ID NO: 39575 - DNA, 25 bp, SARS Virus
ggttggtggtgtgtgtagttagtga

SEQ ID NO: 39576 - DNA, 25 bp, SARS Virus
gttggtggtgtcggtagttagtgaa

SEQ ID NO: 39577 - DNA, 25 bp, SARS Virus
ttggtggtgtctgtagttagtgaag

SEQ ID NO: 39578 - DNA, 25 bp, SARS Virus
tggtggtgtctggagttagtgaaga

SEQ ID NO: 39579 - DNA, 25 bp, SARS Virus
ggtggtgtctgtggttagtgaagac

SEQ ID NO: 39580 - DNA, 25 bp, SARS Virus
gtggtgtctgtagttagtgaagacg

SEQ ID NO: 39581 - DNA, 25 bp, SARS Virus
tggtgtctgtaggtagtgaagacga

SEQ ID NO: 39582 - DNA, 25 bp, SARS Virus
ggtgtctgtagtgagtgaagacgac

SEQ ID NO: 39583 - DNA, 25 bp, SARS Virus
gtgtctgtagttggtgaagacgaca

SEQ ID NO: 39584 - DNA, 25 bp, SARS Virus
tgtctgtagttagtgaagacgacaa

SEQ ID NO: 39585 - DNA, 25 bp, SARS Virus
gtctgtagttagggaagacgacaag

SEQ ID NO: 39586 - DNA, 25 bp, SARS Virus
tctgtagttagtgaagacgacaaga

SEQ ID NO: 39587 - DNA, 25 bp, SARS Virus
ctgtagttagtggagacgacaagac

SEQ ID NO: 39588 - DNA, 25 bp, SARS Virus
tgtagttagtgaggacgacaagacg

SEQ ID NO: 39589 - DNA, 25 bp, SARS Virus
gtagttagtgaagacgacaagacgt

SEQ ID NO: 39590 - DNA, 25 bp, SARS Virus
tagttagtgaaggcgacaagacgtc

SEQ ID NO: 39591 - DNA, 25 bp, SARS Virus
agttagtgaagaggacaagacgtct

SEQ ID NO: 39592 - DNA, 25 bp, SARS Virus
gttagtgaagacgacaagacgtctc

SEQ ID NO: 39593 - DNA, 25 bp, SARS Virus
ttagtgaagacggcaagacgtctca

SEQ ID NO: 39594 - DNA, 25 bp, SARS Virus
tagtgaagacgagaagacgtctcac

SEQ ID NO: 39595 - DNA, 25 bp, SARS Virus
agtgaagacgacgagacgtctcacc

SEQ ID NO: 39596 - DNA, 25 bp, SARS Virus
gtgaagacgacaggacgtctcacca

SEQ ID NO: 39597 - DNA, 25 bp, SARS Virus
tgaagacgacaagacgtctcaccaa

SEQ ID NO: 39598 - DNA, 25 bp, SARS Virus
gaagacgacaaggcgtctcaccaaa

SEQ ID NO: 39599 - DNA, 25 bp, SARS Virus
aagacgacaagaggtctcaccaaaa

SEQ ID NO: 39600 - DNA, 25 bp, SARS Virus
agacgacaagacgtctcaccaaaat

SEQ ID NO: 39601 - DNA, 25 bp, SARS Virus
gacgacaagacggctcaccaaaatc

SEQ ID NO: 39602 - DNA, 25 bp, SARS Virus
acgacaagacgtgtcaccaaaatcc

SEQ ID NO: 39603 - DNA, 25 bp, SARS Virus
cgacaagacgtcgcaccaaaatcct

SEQ ID NO: 39604 - DNA, 25 bp, SARS Virus
gacaagacgtctgaccaaaatcctt

SEQ ID NO: 39605 - DNA, 25 bp, SARS Virus
acaagacgtctcgccaaaatccttt

SEQ ID NO: 39606 - DNA, 25 bp, SARS Virus
caagacgtctcagcaaaatcctttt

SEQ ID NO: 39607 - DNA, 25 bp, SARS Virus
aagacgtctcacgaaaatcctttta

SEQ ID NO: 39608 - DNA, 25 bp, SARS Virus
agacgtctcaccgaaatccttttac

SEQ ID NO: 39609 - DNA, 25 bp, SARS Virus
gacgtctcaccagaatccttttacc

SEQ ID NO: 39610 - DNA, 25 bp, SARS Virus
acgtctcaccaagatccttttaccg

SEQ ID NO: 39611 - DNA, 25 bp, SARS Virus
cgtctcaccaaagtccttttaccgt

SEQ ID NO: 39612 - DNA, 25 bp, SARS Virus
gtctcaccaaaagccttttaccgta

SEQ ID NO: 39613 - DNA, 25 bp, SARS Virus
tctcaccaaaatgcttttaccgtaa

SEQ ID NO: 39614 - DNA, 25 bp, SARS Virus
ctcaccaaaatcgttttaccgtaag

SEQ ID NO: 39615 - DNA, 25 bp, SARS Virus
tcaccaaaatccgtttaccgtaagg

SEQ ID NO: 39616 - DNA, 25 bp, SARS Virus
caccaaaatcctgttaccgtaaggg

SEQ ID NO: 39617 - DNA, 25 bp, SARS Virus
accaaaatccttgtaccgtaagggc

SEQ ID NO: 39618 - DNA, 25 bp, SARS Virus
ccaaaatcctttgaccgtaagggca

SEQ ID NO: 39619 - DNA, 25 bp, SARS Virus
caaaatccttttgccgtaagggcag

SEQ ID NO: 39620 - DNA, 25 bp, SARS Virus
aaaatccttttagcgtaagggcagt

SEQ ID NO: 39621 - DNA, 25 bp, SARS Virus
aaatccttttacggtaagggcagtc

SEQ ID NO: 39622 - DNA, 25 bp, SARS Virus
aatccttttaccgtaagggcagtcc

SEQ ID NO: 39623 - DNA, 25 bp, SARS Virus
atccttttaccggaagggcagtccg

SEQ ID NO: 39624 - DNA, 25 bp, SARS Virus
tccttttaccgtgagggcagtccgt

SEQ ID NO: 39625 - DNA, 25 bp, SARS Virus
ccttttaccgtaggggcagtccgtt

SEQ ID NO: 39626 - DNA, 25 bp, SARS Virus
cttttaccgtaagggcagtccgttt

SEQ ID NO: 39627 - DNA, 25 bp, SARS Virus
ttttaccgtaagggcagtccgtttc

SEQ ID NO: 39628 - DNA, 25 bp, SARS Virus
tttaccgtaagggcagtccgtttca

SEQ ID NO: 39629 - DNA, 25 bp, SARS Virus
ttaccgtaaggggagtccgtttcaa

SEQ ID NO: 39630 - DNA, 25 bp, SARS Virus
taccgtaagggcggtccgtttcaac

SEQ ID NO: 39631 - DNA, 25 bp, SARS Virus
accgtaagggcagtccgtttcaact

SEQ ID NO: 39632 - DNA, 25 bp, SARS Virus
ccgtaagggcaggccgtttcaactt

SEQ ID NO: 39633 - DNA, 25 bp, SARS Virus
cgtaagggcagtgcgtttcaacttc

SEQ ID NO: 39634 - DNA, 25 bp, SARS Virus
gtaagggcagtcggtttcaacttcc

SEQ ID NO: 39635 - DNA, 25 bp, SARS Virus
taagggcagtccgtttcaacttccc

SEQ ID NO: 39636 - DNA, 25 bp, SARS Virus
aagggcagtccggttcaacttccca

SEQ ID NO: 39637 - DNA, 25 bp, SARS Virus
agggcagtccgtgtcaacttcccac

SEQ ID NO: 39638 - DNA, 25 bp, SARS Virus
gggcagtccgttgcaacttcccacg

SEQ ID NO: 39639 - DNA, 25 bp, SARS Virus
ggcagtccgtttgaacttcccacgt

SEQ ID NO: 39640 - DNA, 25 bp, SARS Virus
gcagtccgtttcgacttcccacgta

SEQ ID NO: 39641 - DNA, 25 bp, SARS Virus
cagtccgtttcagcttcccacgtac

SEQ ID NO: 39642 - DNA, 25 bp, SARS Virus
agtccgtttcaagttcccacgtacc

SEQ ID NO: 39643 - DNA, 25 bp, SARS Virus
gtccgtttcaacgtcccacgtacca

SEQ ID NO: 39644 - DNA, 25 bp, SARS Virus
tccgtttcaactgcccacgtaccat

SEQ ID NO: 39645 - DNA, 25 bp, SARS Virus
ccgtttcaacttgccacgtaccatg

SEQ ID NO: 39646 - DNA, 25 bp, SARS Virus
cgtttcaacttcgcacgtaccatgt

SEQ ID NO: 39647 - DNA, 25 bp, SARS Virus
gtttcaacttccgacgtaccatgtt

SEQ ID NO: 39648 - DNA, 25 bp, SARS Virus
tttcaacttcccgcgtaccatgttc

SEQ ID NO: 39649 - DNA, 25 bp, SARS Virus
ttcaacttcccaggtaccatgttca

SEQ ID NO: 39650 - DNA, 25 bp, SARS Virus
tcaacttcccacgtaccatgttcat

SEQ ID NO: 39651 - DNA, 25 bp, SARS Virus
caacttcccacggaccatgttcatt

SEQ ID NO: 39652 - DNA, 25 bp, SARS Virus
aacttcccacgtgccatgttcattg

SEQ ID NO: 39653 - DNA, 25 bp, SARS Virus
acttcccacgtagcatgttcattgg

SEQ ID NO: 39654 - DNA, 25 bp, SARS Virus
cttcccacgtacgatgttcattgga

SEQ ID NO: 39655 - DNA, 25 bp, SARS Virus
ttcccacgtaccgtgttcattggac

SEQ ID NO: 39656 - DNA, 25 bp, SARS Virus
tcccacgtaccaggttcattggaca

SEQ ID NO: 39657 - DNA, 25 bp, SARS Virus
taaagtggttactacaaagtaagaa

SEQ ID NO: 39658 - DNA, 25 bp, SARS Virus
aaagtggttacttcaaagtaagaac

SEQ ID NO: 39659 - DNA, 25 bp, SARS Virus
aagtggttactataaagtaagaacc

SEQ ID NO: 39660 - DNA, 25 bp, SARS Virus
agtggttactactaagtaagaaccg

SEQ ID NO: 39661 - DNA, 25 bp, SARS Virus
gtggttactacatagtaagaaccga

SEQ ID NO: 39662 - DNA, 25 bp, SARS Virus
tggttactacaatgtaagaaccgag

SEQ ID NO: 39663 - DNA, 25 bp, SARS Virus
ggttactacaaattaagaaccgagt

SEQ ID NO: 39664 - DNA, 25 bp, SARS Virus
gttactacaaagtaagaaccgagtg

SEQ ID NO: 39665 - DNA, 25 bp, SARS Virus
ttactacaaagttagaaccgagtgg

SEQ ID NO: 39666 - DNA, 25 bp, SARS Virus
tactacaaagtatgaaccgagtgga

SEQ ID NO: 39667 - DNA, 25 bp, SARS Virus
actacaaagtaataaccgagtggaa

SEQ ID NO: 39668 - DNA, 25 bp, SARS Virus
ctacaaagtaagtaccgagtggaag

SEQ ID NO: 39669 - DNA, 25 bp, SARS Virus
tacaaagtaagatccgagtggaagt

SEQ ID NO: 39670 - DNA, 25 bp, SARS Virus
acaaagtaagaatcgagtggaagtt

SEQ ID NO: 39671 - DNA, 25 bp, SARS Virus
caaagtaagaactgagtggaagtta

SEQ ID NO: 39672 - DNA, 25 bp, SARS Virus
aaagtaagaacctagtggaagttac

SEQ ID NO: 39673 - DNA, 25 bp, SARS Virus
aagtaagaaccgtgtggaagttacc

SEQ ID NO: 39674 - DNA, 25 bp, SARS Virus
agtaagaaccgattggaagttacca

SEQ ID NO: 39675 - DNA, 25 bp, SARS Virus
gtaagaaccgagtggaagttaccaa

SEQ ID NO: 39676 - DNA, 25 bp, SARS Virus
taagaaccgagttgaagttaccaaa

SEQ ID NO: 39677 - DNA, 25 bp, SARS Virus
aagaaccgagtgtaagttaccaaac

SEQ ID NO: 39678 - DNA, 25 bp, SARS Virus
agaaccgagtggtagttaccaaacg

SEQ ID NO: 39679 - DNA, 25 bp, SARS Virus
gaaccgagtggatgttaccaaacgg

SEQ ID NO: 39680 - DNA, 25 bp, SARS Virus
aaccgagtggaatttaccaaacggt

SEQ ID NO: 39681 - DNA, 25 bp, SARS Virus
accgagtggaagttaccaaacggta

SEQ ID NO: 39682 - DNA, 25 bp, SARS Virus
ccgagtggaagttaccaaacggtac

SEQ ID NO: 39683 - DNA, 25 bp, SARS Virus
cgagtggaagtttccaaacggtaca

SEQ ID NO: 39684 - DNA, 25 bp, SARS Virus
gagtggaagttatcaaacggtacaa

SEQ ID NO: 39685 - DNA, 25 bp, SARS Virus
agtggaagttactaaacggtacaaa

SEQ ID NO: 39686 - DNA, 25 bp, SARS Virus
gtggaagttacctaacggtacaaaa

SEQ ID NO: 39687 - DNA, 25 bp, SARS Virus
tggaagttaccatacggtacaaaag

SEQ ID NO: 39688 - DNA, 25 bp, SARS Virus
ggaagttaccaatcggtacaaaaga

SEQ ID NO: 39689 - DNA, 25 bp, SARS Virus
gaagttaccaaatggtacaaaagag

SEQ ID NO: 39690 - DNA, 25 bp, SARS Virus
aagttaccaaactgtacaaaagagg

SEQ ID NO: 39691 - DNA, 25 bp, SARS Virus
agttaccaaacgttacaaaagagga

SEQ ID NO: 39692 - DNA, 25 bp, SARS Virus
gttaccaaacggtacaaaagaggat

SEQ ID NO: 39693 - DNA, 25 bp, SARS Virus
ttaccaaacggttcaaaagaggata

SEQ ID NO: 39694 - DNA, 25 bp, SARS Virus
taccaaacggtataaaagaggataa

SEQ ID NO: 39695 - DNA, 25 bp, SARS Virus
accaaacggtactaaagaggataac

SEQ ID NO: 39696 - DNA, 25 bp, SARS Virus
ccaaacggtacataagaggataaca

SEQ ID NO: 39697 - DNA, 25 bp, SARS Virus
caaacggtacaatagaggataacac

SEQ ID NO: 39698 - DNA, 25 bp, SARS Virus
aaacggtacaaatgaggataacacg

SEQ ID NO: 39699 - DNA, 25 bp, SARS Virus
aacggtacaaaataggataacacgg

SEQ ID NO: 39700 - DNA, 25 bp, SARS Virus
acggtacaaaagtggataacacgga

SEQ ID NO: 39701 - DNA, 25 bp, SARS Virus
cggtacaaaagatgataacacggaa

SEQ ID NO: 39702 - DNA, 25 bp, SARS Virus
ggtacaaaagagtataacacggaaa

SEQ ID NO: 39703 - DNA, 25 bp, SARS Virus
gtacaaaagaggttaacacggaaaa

SEQ ID NO: 39704 - DNA, 25 bp, SARS Virus
tacaaaagaggataacacggaaaaa

SEQ ID NO: 39705 - DNA, 25 bp, SARS Virus
acaaaagaggattacacggaaaaac

SEQ ID NO: 39706 - DNA, 25 bp, SARS Virus
caaaagaggatatcacggaaaaacc

SEQ ID NO: 39707 - DNA, 25 bp, SARS Virus
aaaagaggataatacggaaaaacct

SEQ ID NO: 39708 - DNA, 25 bp, SARS Virus
aaagaggataactcggaaaaaccta

SEQ ID NO: 39709 - DNA, 25 bp, SARS Virus
aagaggataacatggaaaaacctat

SEQ ID NO: 39710 - DNA, 25 bp, SARS Virus
agaggataacactgaaaaacctatt

SEQ ID NO: 39711 - DNA, 25 bp, SARS Virus
gaggataacacgtaaaaacctattg

SEQ ID NO: 39712 - DNA, 25 bp, SARS Virus
aggataacacggtaaaacctattgt

SEQ ID NO: 39713 - DNA, 25 bp, SARS Virus
ggataacacggataaacctattgtc

SEQ ID NO: 39714 - DNA, 25 bp, SARS Virus
gataacacggaataacctattgtcg

SEQ ID NO: 39715 - DNA, 25 bp, SARS Virus
ataacacggaaatacctattgtcgt

SEQ ID NO: 39716 - DNA, 25 bp, SARS Virus
taacacggaaaatcctattgtcgtt

SEQ ID NO: 39717 - DNA, 25 bp, SARS Virus
aacacggaaaaatctattgtcgtta

SEQ ID NO: 39718 - DNA, 25 bp, SARS Virus
acacggaaaaacttattgtcgttag

SEQ ID NO: 39719 - DNA, 25 bp, SARS Virus
cacggaaaaacctattgtcgttaga

SEQ ID NO: 39720 - DNA, 25 bp, SARS Virus
acggaaaaaccttttgtcgttagat

SEQ ID NO: 39721 - DNA, 25 bp, SARS Virus
cggaaaaacctattgtcgttagata

SEQ ID NO: 39722 - DNA, 25 bp, SARS Virus
ggaaaaacctattgtcgttagatac

SEQ ID NO: 39723 - DNA, 25 bp, SARS Virus
gaaaaacctattttcgttagataca

SEQ ID NO: 39724 - DNA, 25 bp, SARS Virus
aaaaacctattgtcgttagatacat

SEQ ID NO: 39725 - DNA, 25 bp, SARS Virus
aaaacctattgttgttagatacata

SEQ ID NO: 39726 - DNA, 25 bp, SARS Virus
aaacctattgtctttagatacataa

SEQ ID NO: 39727 - DNA, 25 bp, SARS Virus
aacctattgtcgttagatacataag

SEQ ID NO: 39728 - DNA, 25 bp, SARS Virus
acctattgtcgttagatacataaga

SEQ ID NO: 39729 - DNA, 25 bp, SARS Virus
cctattgtcgtttgatacataagac

SEQ ID NO: 39730 - DNA, 25 bp, SARS Virus
ctattgtcgttatatacataagaca

SEQ ID NO: 39731 - DNA, 25 bp, SARS Virus
tattgtcgttagttacataagacat

SEQ ID NO: 39732 - DNA, 25 bp, SARS Virus
attgtcgttagatacataagacata

SEQ ID NO: 39733 - DNA, 25 bp, SARS Virus
ttgtcgttagattcataagacataa

SEQ ID NO: 39734 - DNA, 25 bp, SARS Virus
tgtcgttagatatataagacataaa

SEQ ID NO: 39735 - DNA, 25 bp, SARS Virus
gtcgttagatacttaagacataaag

SEQ ID NO: 39736 - DNA, 25 bp, SARS Virus
tcgttagatacataagacataaaga

SEQ ID NO: 39737 - DNA, 25 bp, SARS Virus
cgttagatacattagacataaagag

SEQ ID NO: 39738 - DNA, 25 bp, SARS Virus
gttagatacatatgacataaagaga

SEQ ID NO: 39739 - DNA, 25 bp, SARS Virus
ttagatacataatacataaagagac

SEQ ID NO: 39740 - DNA, 25 bp, SARS Virus
tagatacataagtcataaagagact

SEQ ID NO: 39741 - DNA, 25 bp, SARS Virus
agatacataagatataaagagactt

SEQ ID NO: 39742 - DNA, 25 bp, SARS Virus
gatacataagacttaaagagacttc

SEQ ID NO: 39743 - DNA, 25 bp, SARS Virus
atacataagacataaagagacttcg

SEQ ID NO: 39744 - DNA, 25 bp, SARS Virus
tacataagacattaagagacttcgt

SEQ ID NO: 39745 - DNA, 25 bp, SARS Virus
acataagacatatagagacttcgtg

SEQ ID NO: 39746 - DNA, 25 bp, SARS Virus
cataagacataatgagacttcgtga

SEQ ID NO: 39747 - DNA, 25 bp, SARS Virus
ataagacataaatagacttcgtgac

SEQ ID NO: 39748 - DNA, 25 bp, SARS Virus
taagacataaagtgacttcgtgacg

SEQ ID NO: 39749 - DNA, 25 bp, SARS Virus
aagacataaagatacttcgtgacgg

SEQ ID NO: 39750 - DNA, 25 bp, SARS Virus
agacataaagagtcttcgtgacggt

SEQ ID NO: 39751 - DNA, 25 bp, SARS Virus
gacataaagagatttcgtgacggta

SEQ ID NO: 39752 - DNA, 25 bp, SARS Virus
acataaagagacttcgtgacggtaa

SEQ ID NO: 39753 - DNA, 25 bp, SARS Virus
cataaagagacttcgtgacggtaac

SEQ ID NO: 39754 - DNA, 25 bp, SARS Virus
ataaagagactttgtgacggtaacc

SEQ ID NO: 39755 - DNA, 25 bp, SARS Virus
taaagagacttcttgacggtaacca

SEQ ID NO: 39756 - DNA, 25 bp, SARS Virus
aaagagacttcgtgacggtaaccaa

SEQ ID NO: 39757 - DNA, 25 bp, SARS Virus
aagagacttcgttacggtaaccaag

SEQ ID NO: 39758 - DNA, 25 bp, SARS Virus
agagacttcgtgtcggtaaccaaga

SEQ ID NO: 39759 - DNA, 25 bp, SARS Virus
gagacttcgtgatggtaaccaagaa

SEQ ID NO: 39760 - DNA, 25 bp, SARS Virus
agacttcgtgactgtaaccaagaaa

SEQ ID NO: 39761 - DNA, 25 bp, SARS Virus
gacttcgtgacgttaaccaagaaat

SEQ ID NO: 39762 - DNA, 25 bp, SARS Virus
acttcgtgacggtaaccaagaaatt

SEQ ID NO: 39763 - DNA, 25 bp, SARS Virus
cttcgtgacggttaccaagaaattg

SEQ ID NO: 39764 - DNA, 25 bp, SARS Virus
ttcgtgacggtatccaagaaattgt

SEQ ID NO: 39765 - DNA, 25 bp, SARS Virus
tcgtgacggtaatcaagaaattgtt

SEQ ID NO: 39766 - DNA, 25 bp, SARS Virus
cgtgacggtaactaagaaattgttg

SEQ ID NO: 39767 - DNA, 25 bp, SARS Virus
gtgacggtaacctagaaattgttga

SEQ ID NO: 39768 - DNA, 25 bp, SARS Virus
tgacggtaaccatgaaattgttgat

SEQ ID NO: 39769 - DNA, 25 bp, SARS Virus
gacggtaaccaataaattgttgata

SEQ ID NO: 39770 - DNA, 25 bp, SARS Virus
acggtaaccaagtaattgttgatag

SEQ ID NO: 39771 - DNA, 25 bp, SARS Virus
cggtaaccaagatattgttgataga

SEQ ID NO: 39772 - DNA, 25 bp, SARS Virus
ggtaaccaagaatttgttgatagaa

SEQ ID NO: 39773 - DNA, 25 bp, SARS Virus
gtaaccaagaaattgttgatagaat

SEQ ID NO: 39774 - DNA, 25 bp, SARS Virus
taaccaagaaattgttgatagaatc

SEQ ID NO: 39775 - DNA, 25 bp, SARS Virus
aaccaagaaatttttgatagaatcc

SEQ ID NO: 39776 - DNA, 25 bp, SARS Virus
accaagaaattgttgatagaatcct

SEQ ID NO: 39777 - DNA, 25 bp, SARS Virus
ccaagaaattgttgatagaatcctt

SEQ ID NO: 39778 - DNA, 25 bp, SARS Virus
caagaaattgtttatagaatccttt

SEQ ID NO: 39779 - DNA, 25 bp, SARS Virus
aagaaattgttgttagaatcctttt

SEQ ID NO: 39780 - DNA, 25 bp, SARS Virus
agaaattgttgatagaatccttttc

SEQ ID NO: 39781 - DNA, 25 bp, SARS Virus
gaaattgttgattgaatccttttct

SEQ ID NO: 39782 - DNA, 25 bp, SARS Virus
aaattgttgatataatccttttctc

SEQ ID NO: 39783 - DNA, 25 bp, SARS Virus
aattgttgatagtatccttttctca

SEQ ID NO: 39784 - DNA, 25 bp, SARS Virus
attgttgatagattccttttctcag

SEQ ID NO: 39785 - DNA, 25 bp, SARS Virus
ttgttgatagaatccttttctcagt

SEQ ID NO: 39786 - DNA, 25 bp, SARS Virus
tgttgatagaattcttttctcagta

SEQ ID NO: 39787 - DNA, 25 bp, SARS Virus
gttgatagaatctttttctcagtac

SEQ ID NO: 39788 - DNA, 25 bp, SARS Virus
ttgatagaatccttttctcagtaca

SEQ ID NO: 39789 - DNA, 25 bp, SARS Virus
tgatagaatccttttctcagtacaa

SEQ ID NO: 39790 - DNA, 25 bp, SARS Virus
gatagaatccttttctcagtacaaa

SEQ ID NO: 39791 - DNA, 25 bp, SARS Virus
atagaatccttttctcagtacaaat

SEQ ID NO: 39792 - DNA, 25 bp, SARS Virus
tagaatccttttttcagtacaaatt

SEQ ID NO: 39793 - DNA, 25 bp, SARS Virus
agaatccttttctcagtacaaatta

SEQ ID NO: 39794 - DNA, 25 bp, SARS Virus
gaatccttttcttagtacaaattac

SEQ ID NO: 39795 - DNA, 25 bp, SARS Virus
aatccttttctctgtacaaattacc

SEQ ID NO: 39796 - DNA, 25 bp, SARS Virus
atccttttctcattacaaattacct

SEQ ID NO: 39797 - DNA, 25 bp, SARS Virus
tccttttctcagtacaaattacctc

SEQ ID NO: 39798 - DNA, 25 bp, SARS Virus
ccttttctcagttcaaattacctca

SEQ ID NO: 39799 - DNA, 25 bp, SARS Virus
cttttctcagtataaattacctcaa

SEQ ID NO: 39800 - DNA, 25 bp, SARS Virus
ttttctcagtactaattacctcaat

SEQ ID NO: 39801 - DNA, 25 bp, SARS Virus
tttctcagtacatattacctcaatg

SEQ ID NO: 39802 - DNA, 25 bp, SARS Virus
ttctcagtacaatttacctcaatgt

SEQ ID NO: 39803 - DNA, 25 bp, SARS Virus
tctcagtacaaattacctcaatgta

SEQ ID NO: 39804 - DNA, 25 bp, SARS Virus
ctcagtacaaattacctcaatgtaa

SEQ ID NO: 39805 - DNA, 25 bp, SARS Virus
tcagtacaaatttcctcaatgtaaa

SEQ ID NO: 39806 - DNA, 25 bp, SARS Virus
cagtacaaattatctcaatgtaaat

SEQ ID NO: 39807 - DNA, 25 bp, SARS Virus
agtacaaattacttcaatgtaaatc

SEQ ID NO: 39808 - DNA, 25 bp, SARS Virus
gtacaaattacctcaatgtaaatca

SEQ ID NO: 39809 - DNA, 25 bp, SARS Virus
tacaaattaccttaatgtaaatcat

SEQ ID NO: 39810 - DNA, 25 bp, SARS Virus
acaaattacctctatgtaaatcatg

SEQ ID NO: 39811 - DNA, 25 bp, SARS Virus
caaattacctcattgtaaatcatgg

SEQ ID NO: 39812 - DNA, 25 bp, SARS Virus
aaattacctcaatgtaaatcatgga

SEQ ID NO: 39813 - DNA, 25 bp, SARS Virus
aattacctcaatttaaatcatggaa

SEQ ID NO: 39814 - DNA, 25 bp, SARS Virus
attacctcaatgtaaatcatggaag

SEQ ID NO: 39815 - DNA, 25 bp, SARS Virus
ttacctcaatgttaatcatggaagc

SEQ ID NO: 39816 - DNA, 25 bp, SARS Virus
tacctcaatgtatatcatggaagct

SEQ ID NO: 39817 - DNA, 25 bp, SARS Virus
acctcaatgtaattcatggaagctc

SEQ ID NO: 39818 - DNA, 25 bp, SARS Virus
cctcaatgtaaatcatggaagctcc

SEQ ID NO: 39819 - DNA, 25 bp, SARS Virus
ctcaatgtaaattatggaagctcct

SEQ ID NO: 39820 - DNA, 25 bp, SARS Virus
tcaatgtaaatcttggaagctcctc

SEQ ID NO: 39821 - DNA, 25 bp, SARS Virus
caatgtaaatcatggaagctcctcc

SEQ ID NO: 39822 - DNA, 25 bp, SARS Virus
aatgtaaatcattgaagctcctccg

SEQ ID NO: 39823 - DNA, 25 bp, SARS Virus
atgtaaatcatgtaagctcctccga

SEQ ID NO: 39824 - DNA, 25 bp, SARS Virus
tgtaaatcatggtagctcctccgac

SEQ ID NO: 39825 - DNA, 25 bp, SARS Virus
gtaaatcatggatgctcctccgacg

SEQ ID NO: 39826 - DNA, 25 bp, SARS Virus
taaatcatggaatctcctccgacga

SEQ ID NO: 39827 - DNA, 25 bp, SARS Virus
aaatcatggaagttcctccgacgaa

SEQ ID NO: 39828 - DNA, 25 bp, SARS Virus
aatcatggaagctcctccgacgaaa

SEQ ID NO: 39829 - DNA, 25 bp, SARS Virus
atcatggaagcttctccgacgaaac

SEQ ID NO: 39830 - DNA, 25 bp, SARS Virus
tcatggaagctcttccgacgaaaca

SEQ ID NO: 39831 - DNA, 25 bp, SARS Virus
catggaagctcctccgacgaaacac

SEQ ID NO: 39832 - DNA, 25 bp, SARS Virus
atggaagctccttcgacgaaacaca

SEQ ID NO: 39833 - DNA, 25 bp, SARS Virus
tggaagctcctctgacgaaacacat

SEQ ID NO: 39834 - DNA, 25 bp, SARS Virus
ggaagctcctcctacgaaacacatg

SEQ ID NO: 39835 - DNA, 25 bp, SARS Virus
gaagctcctccgtcgaaacacatgg

SEQ ID NO: 39836 - DNA, 25 bp, SARS Virus
aagctcctccgatgaaacacatgga

SEQ ID NO: 39837 - DNA, 25 bp, SARS Virus
agctcctccgactaaacacatggaa

SEQ ID NO: 39838 - DNA, 25 bp, SARS Virus
gctcctccgacgtaacacatggaaa

SEQ ID NO: 39839 - DNA, 25 bp, SARS Virus
ctcctccgacgatacacatggaaaa

SEQ ID NO: 39840 - DNA, 25 bp, SARS Virus
tcctccgacgaatcacatggaaaaa

SEQ ID NO: 39841 - DNA, 25 bp, SARS Virus
cctccgacgaaatacatggaaaaac

SEQ ID NO: 39842 - DNA, 25 bp, SARS Virus
ctccgacgaaactcatggaaaaacg

SEQ ID NO: 39843 - DNA, 25 bp, SARS Virus
tccgacgaaacatatggaaaaacga

SEQ ID NO: 39844 - DNA, 25 bp, SARS Virus
ccgacgaaacacttggaaaaacgag

SEQ ID NO: 39845 - DNA, 25 bp, SARS Virus
cgacgaaacacatggaaaaacgagt

SEQ ID NO: 39846 - DNA, 25 bp, SARS Virus
gacgaaacacattgaaaaacgagtt

SEQ ID NO: 39847 - DNA, 25 bp, SARS Virus
acgaaacacatgtaaaaacgagttg

SEQ ID NO: 39848 - DNA, 25 bp, SARS Virus
cgaaacacatggtaaaacgagttgt

SEQ ID NO: 39849 - DNA, 25 bp, SARS Virus
gaaacacatggataaacgagttgtt

SEQ ID NO: 39850 - DNA, 25 bp, SARS Virus
aaacacatggaataacgagttgttc

SEQ ID NO: 39851 - DNA, 25 bp, SARS Virus
aacacatggaaatacgagttgttcc

SEQ ID NO: 39852 - DNA, 25 bp, SARS Virus
acacatggaaaatcgagttgttcct

SEQ ID NO: 39853 - DNA, 25 bp, SARS Virus
cacatggaaaaatgagttgttcctt

SEQ ID NO: 39854 - DNA, 25 bp, SARS Virus
acatggaaaaactagttgttccttt

SEQ ID NO: 39855 - DNA, 25 bp, SARS Virus
catggaaaaacgtgttgttccttta

SEQ ID NO: 39856 - DNA, 25 bp, SARS Virus
atggaaaaacgatttgttcctttac

SEQ ID NO: 39857 - DNA, 25 bp, SARS Virus
tggaaaaacgagttgttcctttaca

SEQ ID NO: 39858 - DNA, 25 bp, SARS Virus
ggaaaaacgagttgttcctttacat

SEQ ID NO: 39859 - DNA, 25 bp, SARS Virus
gaaaaacgagtttttcctttacatg

SEQ ID NO: 39860 - DNA, 25 bp, SARS Virus
aaaaacgagttgttcctttacatgg

SEQ ID NO: 39861 - DNA, 25 bp, SARS Virus
aaaacgagttgttcctttacatgga

SEQ ID NO: 39862 - DNA, 25 bp, SARS Virus
aaacgagttgtttctttacatggat

SEQ ID NO: 39863 - DNA, 25 bp, SARS Virus
aacgagttgttcttttacatggatt

SEQ ID NO: 39864 - DNA, 25 bp, SARS Virus
acgagttgttcctttacatggattt

SEQ ID NO: 39865 - DNA, 25 bp, SARS Virus
cgagttgttcctttacatggatttt

SEQ ID NO: 39866 - DNA, 25 bp, SARS Virus
gagttgttcctttacatggatttta

SEQ ID NO: 39867 - DNA, 25 bp, SARS Virus
agttgttccttttcatggattttaa

SEQ ID NO: 39868 - DNA, 25 bp, SARS Virus
gttgttcctttatatggattttaac

SEQ ID NO: 39869 - DNA, 25 bp, SARS Virus
ttgttcctttacttggattttaacg

SEQ ID NO: 39870 - DNA, 25 bp, SARS Virus
tgttcctttacatggattttaacgc

SEQ ID NO: 39871 - DNA, 25 bp, SARS Virus
gttcctttacattgattttaacgca

SEQ ID NO: 39872 - DNA, 25 bp, SARS Virus
ttcctttacatgtattttaacgcat

SEQ ID NO: 39873 - DNA, 25 bp, SARS Virus
tcctttacatggtttttaacgcatc

SEQ ID NO: 39874 - DNA, 25 bp, SARS Virus
cctttacatggattttaacgcatcg

SEQ ID NO: 39875 - DNA, 25 bp, SARS Virus
ctttacatggattttaacgcatcgc

SEQ ID NO: 39876 - DNA, 25 bp, SARS Virus
tttacatggattttaacgcatcgct

SEQ ID NO: 39877 - DNA, 25 bp, SARS Virus
ttacatggattttaacgcatcgctc

SEQ ID NO: 39878 - DNA, 25 bp, SARS Virus
tacatggatttttacgcatcgctct

SEQ ID NO: 39879 - DNA, 25 bp, SARS Virus
acatggattttatcgcatcgctctg

SEQ ID NO: 39880 - DNA, 25 bp, SARS Virus
catggattttaatgcatcgctctgt

SEQ ID NO: 39881 - DNA, 25 bp, SARS Virus
atggattttaactcatcgctctgtg

SEQ ID NO: 39882 - DNA, 25 bp, SARS Virus
tggattttaacgtatcgctctgtga

SEQ ID NO: 39883 - DNA, 25 bp, SARS Virus
ggattttaacgcttcgctctgtgac

SEQ ID NO: 39884 - DNA, 25 bp, SARS Virus
gattttaacgcatcgctctgtgaca

SEQ ID NO: 39885 - DNA, 25 bp, SARS Virus
attttaacgcattgctctgtgacaa

SEQ ID NO: 39886 - DNA, 25 bp, SARS Virus
ttttaacgcatctctctgtgacaac

SEQ ID NO: 39887 - DNA, 25 bp, SARS Virus
tttaacgcatcgttctgtgacaacg

SEQ ID NO: 39888 - DNA, 25 bp, SARS Virus
ttaacgcatcgctctgtgacaacgg

SEQ ID NO: 39889 - DNA, 25 bp, SARS Virus
taacgcatcgctttgtgacaacggt

SEQ ID NO: 39890 - DNA, 25 bp, SARS Virus
aacgcatcgctctgtgacaacggtg

SEQ ID NO: 39891 - DNA, 25 bp, SARS Virus
acgcatcgctctttgacaacggtga

SEQ ID NO: 39892 - DNA, 25 bp, SARS Virus
cgcatcgctctgtgacaacggtgaa

SEQ ID NO: 39893 - DNA, 25 bp, SARS Virus
gcatcgctctgttacaacggtgaat

SEQ ID NO: 39894 - DNA, 25 bp, SARS Virus
catcgctctgtgtcaacggtgaatg

SEQ ID NO: 39895 - DNA, 25 bp, SARS Virus
atcgctctgtgataacggtgaatgt

SEQ ID NO: 39896 - DNA, 25 bp, SARS Virus
tcgctctgtgactacggtgaatgtg

SEQ ID NO: 39897 - DNA, 25 bp, SARS Virus
cgctctgtgacatcggtgaatgtgt

SEQ ID NO: 39898 - DNA, 25 bp, SARS Virus
gctctgtgacaatggtgaatgtgtc

SEQ ID NO: 39899 - DNA, 25 bp, SARS Virus
ctctgtgacaactgtgaatgtgtca

SEQ ID NO: 39900 - DNA, 25 bp, SARS Virus
tctgtgacaacgttgaatgtgtcat

SEQ ID NO: 39901 - DNA, 25 bp, SARS Virus
ctgtgacaacggtgaatgtgtcata

SEQ ID NO: 39902 - DNA, 25 bp, SARS Virus
tgtgacaacggttaatgtgtcatat

SEQ ID NO: 39903 - DNA, 25 bp, SARS Virus
gtgacaacggtgtatgtgtcatatt

SEQ ID NO: 39904 - DNA, 25 bp, SARS Virus
tgacaacggtgattgtgtcatattg

SEQ ID NO: 39905 - DNA, 25 bp, SARS Virus
gacaacggtgaatgtgtcatattgt

SEQ ID NO: 39906 - DNA, 25 bp, SARS Virus
acaacggtgaatttgtcatattgtc

SEQ ID NO: 39907 - DNA, 25 bp, SARS Virus
caacggtgaatgtgtcatattgtcc

SEQ ID NO: 39908 - DNA, 25 bp, SARS Virus
aacggtgaatgtttcatattgtcca

SEQ ID NO: 39909 - DNA, 25 bp, SARS Virus
acggtgaatgtgtcatattgtccat

SEQ ID NO: 39910 - DNA, 25 bp, SARS Virus
cggtgaatgtgttatattgtccata

SEQ ID NO: 39911 - DNA, 25 bp, SARS Virus
ggtgaatgtgtcttattgtccatag

SEQ ID NO: 39912 - DNA, 25 bp, SARS Virus
gtgaatgtgtcatattgtccataga

SEQ ID NO: 39913 - DNA, 25 bp, SARS Virus
tgaatgtgtcattttgtccatagaa

SEQ ID NO: 39914 - DNA, 25 bp, SARS Virus
gaatgtgtcatattgtccatagaac

SEQ ID NO: 39915 - DNA, 25 bp, SARS Virus
aatgtgtcatattgtccatagaacg

SEQ ID NO: 39916 - DNA, 25 bp, SARS Virus
atgtgtcatattttccatagaacga

SEQ ID NO: 39917 - DNA, 25 bp, SARS Virus
tgtgtcatattgtccatagaacgag

SEQ ID NO: 39918 - DNA, 25 bp, SARS Virus
gtgtcatattgttcatagaacgaga

SEQ ID NO: 39919 - DNA, 25 bp, SARS Virus
tgtcatattgtctatagaacgagat

SEQ ID NO: 39920 - DNA, 25 bp, SARS Virus
gtcatattgtccttagaacgagata

SEQ ID NO: 39921 - DNA, 25 bp, SARS Virus
tcatattgtccatagaacgagatat

SEQ ID NO: 39922 - DNA, 25 bp, SARS Virus
catattgtccattgaacgagatata

SEQ ID NO: 39923 - DNA, 25 bp, SARS Virus
atattgtccatataacgagatatat

SEQ ID NO: 39924 - DNA, 25 bp, SARS Virus
tattgtccatagtacgagatatatt

SEQ ID NO: 39925 - DNA, 25 bp, SARS Virus
attgtccatagatcgagatatattg

SEQ ID NO: 39926 - DNA, 25 bp, SARS Virus
ttgtccatagaatgagatatattgt

SEQ ID NO: 39927 - DNA, 25 bp, SARS Virus
tgtccatagaactagatatattgtt

SEQ ID NO: 39928 - DNA, 25 bp, SARS Virus
gtccatagaacgtgatatattgttc

SEQ ID NO: 39929 - DNA, 25 bp, SARS Virus
tccatagaacgatatatattgttca

SEQ ID NO: 39930 - DNA, 25 bp, SARS Virus
ccatagaacgagttatattgttcat

SEQ ID NO: 39931 - DNA, 25 bp, SARS Virus
catagaacgagatatattgttcatg

SEQ ID NO: 39932 - DNA, 25 bp, SARS Virus
atagaacgagatttattgttcatgt

SEQ ID NO: 39933 - DNA, 25 bp, SARS Virus
tagaacgagatatattgttcatgtt

SEQ ID NO: 39934 - DNA, 25 bp, SARS Virus
agaacgagatattttgttcatgttc

SEQ ID NO: 39935 - DNA, 25 bp, SARS Virus
gaacgagatatattgttcatgttca

SEQ ID NO: 39936 - DNA, 25 bp, SARS Virus
aacgagatatattgttcatgttcat

SEQ ID NO: 39937 - DNA, 25 bp, SARS Virus
acgagatatatttttcatgttcata

SEQ ID NO: 39938 - DNA, 25 bp, SARS Virus
cgagatatattgttcatgttcataa

SEQ ID NO: 39939 - DNA, 25 bp, SARS Virus
gagatatattgttcatgttcataaa

SEQ ID NO: 39940 - DNA, 25 bp, SARS Virus
agatatattgtttatgttcataaag

SEQ ID NO: 39941 - DNA, 25 bp, SARS Virus
gatatattgttcttgttcataaagt

SEQ ID NO: 39942 - DNA, 25 bp, SARS Virus
atatattgttcatgttcataaagtc

SEQ ID NO: 39943 - DNA, 25 bp, SARS Virus
tatattgttcattttcataaagtca

SEQ ID NO: 39944 - DNA, 25 bp, SARS Virus
atattgttcatgttcataaagtcac

SEQ ID NO: 39945 - DNA, 25 bp, SARS Virus
tattgttcatgttcataaagtcacc

SEQ ID NO: 39946 - DNA, 25 bp, SARS Virus
attgttcatgtttataaagtcacct

SEQ ID NO: 39947 - DNA, 25 bp, SARS Virus
ttgttcatgttcttaaagtcacctc

SEQ ID NO: 39948 - DNA, 25 bp, SARS Virus
tgttcatgttcataaagtcacctcg

SEQ ID NO: 39949 - DNA, 25 bp, SARS Virus
gttcatgttcattaagtcacctcgg

SEQ ID NO: 39950 - DNA, 25 bp, SARS Virus
ttcatgttcatatagtcacctcgga

SEQ ID NO: 39951 - DNA, 25 bp, SARS Virus
tcatgttcataatgtcacctcggaa

SEQ ID NO: 39952 - DNA, 25 bp, SARS Virus
catgttcataaattcacctcggaat

SEQ ID NO: 39953 - DNA, 25 bp, SARS Virus
atgttcataaagtcacctcggaatc

SEQ ID NO: 39954 - DNA, 25 bp, SARS Virus
tgttcataaagttacctcggaatct

SEQ ID NO: 39955 - DNA, 25 bp, SARS Virus
gttcataaagtctcctcggaatcta

SEQ ID NO: 39956 - DNA, 25 bp, SARS Virus
ttcataaagtcatctcggaatctat

SEQ ID NO: 39957 - DNA, 25 bp, SARS Virus
tcataaagtcacttcggaatctatg

SEQ ID NO: 39958 - DNA, 25 bp, SARS Virus
cataaagtcacctcggaatctatga

SEQ ID NO: 39959 - DNA, 25 bp, SARS Virus
ataaagtcaccttggaatctatgat

SEQ ID NO: 39960 - DNA, 25 bp, SARS Virus
taaagtcacctctgaatctatgatg

SEQ ID NO: 39961 - DNA, 25 bp, SARS Virus
aaagtcacctcgtaatctatgatgg

SEQ ID NO: 39962 - DNA, 25 bp, SARS Virus
aagtcacctcggtatctatgatggt

SEQ ID NO: 39963 - DNA, 25 bp, SARS Virus
agtcacctcggattctatgatggtc

SEQ ID NO: 39964 - DNA, 25 bp, SARS Virus
gtcacctcggaatctatgatggtcg

SEQ ID NO: 39965 - DNA, 25 bp, SARS Virus
tcacctcggaatttatgatggtcga

SEQ ID NO: 39966 - DNA, 25 bp, SARS Virus
cacctcggaatctatgatggtcgat

SEQ ID NO: 39967 - DNA, 25 bp, SARS Virus
acctcggaatctttgatggtcgata

SEQ ID NO: 39968 - DNA, 25 bp, SARS Virus
cctcggaatctatgatggtcgatag

SEQ ID NO: 39969 - DNA, 25 bp, SARS Virus
ctcggaatctattatggtcgatagc

SEQ ID NO: 39970 - DNA, 25 bp, SARS Virus
tcggaatctatgttggtcgatagca

SEQ ID NO: 39971 - DNA, 25 bp, SARS Virus
cggaatctatgatggtcgatagcac

SEQ ID NO: 39972 - DNA, 25 bp, SARS Virus
ggaatctatgattgtcgatagcact

SEQ ID NO: 39973 - DNA, 25 bp, SARS Virus
gaatctatgatgttcgatagcactt

SEQ ID NO: 39974 - DNA, 25 bp, SARS Virus
aatctatgatggtcgatagcacttc

SEQ ID NO: 39975 - DNA, 25 bp, SARS Virus
atctatgatggttgatagcacttcg

SEQ ID NO: 39976 - DNA, 25 bp, SARS Virus
tctatgatggtctatagcacttcgt

SEQ ID NO: 39977 - DNA, 25 bp, SARS Virus
ctatgatggtcgttagcacttcgtc

SEQ ID NO: 39978 - DNA, 25 bp, SARS Virus
tatgatggtcgatagcacttcgtcg

SEQ ID NO: 39979 - DNA, 25 bp, SARS Virus
atgatggtcgattgcacttcgtcga

SEQ ID NO: 39980 - DNA, 25 bp, SARS Virus
tgatggtcgatatcacttcgtcgaa

SEQ ID NO: 39981 - DNA, 25 bp, SARS Virus
gatggtcgatagtacttcgtcgaac

SEQ ID NO: 39982 - DNA, 25 bp, SARS Virus
atggtcgatagctcttcgtcgaacg

SEQ ID NO: 39983 - DNA, 25 bp, SARS Virus
tggtcgatagcatttcgtcgaacga

SEQ ID NO: 39984 - DNA, 25 bp, SARS Virus
ggtcgatagcacttcgtcgaacgac

SEQ ID NO: 39985 - DNA, 25 bp, SARS Virus
gtcgatagcacttcgtcgaacgacg

SEQ ID NO: 39986 - DNA, 25 bp, SARS Virus
tcgatagcactttgtcgaacgacgg

SEQ ID NO: 39987 - DNA, 25 bp, SARS Virus
cgatagcacttcttcgaacgacggt

SEQ ID NO: 39988 - DNA, 25 bp, SARS Virus
gatagcacttcgtcgaacgacggtg

SEQ ID NO: 39989 - DNA, 25 bp, SARS Virus
atagcacttcgttgaacgacggtga

SEQ ID NO: 39990 - DNA, 25 bp, SARS Virus
tagcacttcgtctaacgacggtgaa

SEQ ID NO: 39991 - DNA, 25 bp, SARS Virus
agcacttcgtcgtacgacggtgaat

SEQ ID NO: 39992 - DNA, 25 bp, SARS Virus
gcacttcgtcgatcgacggtgaatc

SEQ ID NO: 39993 - DNA, 25 bp, SARS Virus
cacttcgtcgaatgacggtgaatcg

SEQ ID NO: 39994 - DNA, 25 bp, SARS Virus
acttcgtcgaactacggtgaatcgt

SEQ ID NO: 39995 - DNA, 25 bp, SARS Virus
cttcgtcgaacgtcggtgaatcgtt

SEQ ID NO: 39996 - DNA, 25 bp, SARS Virus
ttcgtcgaacgatggtgaatcgttt

SEQ ID NO: 39997 - DNA, 25 bp, SARS Virus
tcgtcgaacgactgtgaatcgtttc

SEQ ID NO: 39998 - DNA, 25 bp, SARS Virus
cgtcgaacgacgttgaatcgtttcc

SEQ ID NO: 39999 - DNA, 25 bp, SARS Virus
gtcgaacgacggtgaatcgtttccg

SEQ ID NO: 40000 - DNA, 25 bp, SARS Virus
tcgaacgacggttaatcgtttccga

SEQ ID NO: 40001 - DNA, 25 bp, SARS Virus
cgaacgacggtgtatcgtttccgag

SEQ ID NO: 40002 - DNA, 25 bp, SARS Virus
gaacgacggtgattcgtttccgaga

SEQ ID NO: 40003 - DNA, 25 bp, SARS Virus
aacgacggtgaatcgtttccgagat

SEQ ID NO: 40004 - DNA, 25 bp, SARS Virus
acgacggtgaattgtttccgagatt

SEQ ID NO: 40005 - DNA, 25 bp, SARS Virus
cgacggtgaatcttttccgagattt

SEQ ID NO: 40006 - DNA, 25 bp, SARS Virus
gacggtgaatcgtttccgagattta

SEQ ID NO: 40007 - DNA, 25 bp, SARS Virus
acggtgaatcgtttccgagatttac

SEQ ID NO: 40008 - DNA, 25 bp, SARS Virus
cggtgaatcgtttccgagatttact

SEQ ID NO: 40009 - DNA, 25 bp, SARS Virus
ggtgaatcgttttcgagatttactg

SEQ ID NO: 40010 - DNA, 25 bp, SARS Virus
gtgaatcgtttctgagatttactga

SEQ ID NO: 40011 - DNA, 25 bp, SARS Virus
tgaatcgtttcctagatttactgaa

SEQ ID NO: 40012 - DNA, 25 bp, SARS Virus
gaatcgtttccgtgatttactgaaa

SEQ ID NO: 40013 - DNA, 25 bp, SARS Virus
aatcgtttccgatatttactgaaat

SEQ ID NO: 40014 - DNA, 25 bp, SARS Virus
atcgtttccgagttttactgaaatc

SEQ ID NO: 40015 - DNA, 25 bp, SARS Virus
tcgtttccgagatttactgaaatcg

SEQ ID NO: 40016 - DNA, 25 bp, SARS Virus
cgtttccgagatttactgaaatcgt

SEQ ID NO: 40017 - DNA, 25 bp, SARS Virus
gtttccgagatttactgaaatcgtt

SEQ ID NO: 40018 - DNA, 25 bp, SARS Virus
tttccgagattttctgaaatcgttg

SEQ ID NO: 40019 - DNA, 25 bp, SARS Virus
ttccgagatttattgaaatcgttga

SEQ ID NO: 40020 - DNA, 25 bp, SARS Virus
tccgagatttactgaaatcgttgag

SEQ ID NO: 40021 - DNA, 25 bp, SARS Virus
ccgagatttacttaaatcgttgagt

SEQ ID NO: 40022 - DNA, 25 bp, SARS Virus
cgagatttactgtaatcgttgagtc

SEQ ID NO: 40023 - DNA, 25 bp, SARS Virus
gagatttactgatatcgttgagtcc

SEQ ID NO: 40024 - DNA, 25 bp, SARS Virus
agatttactgaattcgttgagtcca

SEQ ID NO: 40025 - DNA, 25 bp, SARS Virus
gatttactgaaatcgttgagtccac

SEQ ID NO: 40026 - DNA, 25 bp, SARS Virus
atttactgaaattgttgagtccacg

SEQ ID NO: 40027 - DNA, 25 bp, SARS Virus
tttactgaaatctttgagtccacga

SEQ ID NO: 40028 - DNA, 25 bp, SARS Virus
ttactgaaatcgttgagtccacgac

SEQ ID NO: 40029 - DNA, 25 bp, SARS Virus
tactgaaatcgttgagtccacgact

SEQ ID NO: 40030 - DNA, 25 bp, SARS Virus
actgaaatcgtttagtccacgacta

SEQ ID NO: 40031 - DNA, 25 bp, SARS Virus
ctgaaatcgttgtgtccacgactac

SEQ ID NO: 40032 - DNA, 25 bp, SARS Virus
tgaaatcgttgattccacgactaca

SEQ ID NO: 40033 - DNA, 25 bp, SARS Virus
gaaatcgttgagtccacgactacaa

SEQ ID NO: 40034 - DNA, 25 bp, SARS Virus
aaatcgttgagttcacgactacaag

SEQ ID NO: 40035 - DNA, 25 bp, SARS Virus
aatcgttgagtctacgactacaaga

SEQ ID NO: 40036 - DNA, 25 bp, SARS Virus
atcgttgagtcctcgactacaagag

SEQ ID NO: 40037 - DNA, 25 bp, SARS Virus
tcgttgagtccatgactacaagaga

SEQ ID NO: 40038 - DNA, 25 bp, SARS Virus
cgttgagtccactactacaagagat

SEQ ID NO: 40039 - DNA, 25 bp, SARS Virus
gttgagtccacgtctacaagagatg

SEQ ID NO: 40040 - DNA, 25 bp, SARS Virus
ttgagtccacgattacaagagatgg

SEQ ID NO: 40041 - DNA, 25 bp, SARS Virus
tgagtccacgactacaagagatggt

SEQ ID NO: 40042 - DNA, 25 bp, SARS Virus
gagtccacgacttcaagagatggtt

SEQ ID NO: 40043 - DNA, 25 bp, SARS Virus
agtccacgactataagagatggttg

SEQ ID NO: 40044 - DNA, 25 bp, SARS Virus
gtccacgactactagagatggttgg

SEQ ID NO: 40045 - DNA, 25 bp, SARS Virus
tccacgactacatgagatggttggt

SEQ ID NO: 40046 - DNA, 25 bp, SARS Virus
ccacgactacaatagatggttggtg

SEQ ID NO: 40047 - DNA, 25 bp, SARS Virus
cacgactacaagtgatggttggtgg

SEQ ID NO: 40048 - DNA, 25 bp, SARS Virus
acgactacaagatatggttggtggt

SEQ ID NO: 40049 - DNA, 25 bp, SARS Virus
cgactacaagagttggttggtggtg

SEQ ID NO: 40050 - DNA, 25 bp, SARS Virus
gactacaagagatggttggtggtgt

SEQ ID NO: 40051 - DNA, 25 bp, SARS Virus
actacaagagattgttggtggtgtc

SEQ ID NO: 40052 - DNA, 25 bp, SARS Virus
ctacaagagatgtttggtggtgtct

SEQ ID NO: 40053 - DNA, 25 bp, SARS Virus
tacaagagatggttggtggtgtctg

SEQ ID NO: 40054 - DNA, 25 bp, SARS Virus
acaagagatggttggtggtgtctgt

SEQ ID NO: 40055 - DNA, 25 bp, SARS Virus
caagagatggtttgtggtgtctgta

SEQ ID NO: 40056 - DNA, 25 bp, SARS Virus
aagagatggttgttggtgtctgtag

SEQ ID NO: 40057 - DNA, 25 bp, SARS Virus
agagatggttggtggtgtctgtagt

SEQ ID NO: 40058 - DNA, 25 bp, SARS Virus
gagatggttggttgtgtctgtagtt

SEQ ID NO: 40059 - DNA, 25 bp, SARS Virus
agatggttggtgttgtctgtagtta

SEQ ID NO: 40060 - DNA, 25 bp, SARS Virus
gatggttggtggtgtctgtagttag

SEQ ID NO: 40061 - DNA, 25 bp, SARS Virus
atggttggtggtttctgtagttagt

SEQ ID NO: 40062 - DNA, 25 bp, SARS Virus
tggttggtggtgtctgtagttagtg

SEQ ID NO: 40063 - DNA, 25 bp, SARS Virus
ggttggtggtgtttgtagttagtga

SEQ ID NO: 40064 - DNA, 25 bp, SARS Virus
gttggtggtgtctgtagttagtgaa

SEQ ID NO: 40065 - DNA, 25 bp, SARS Virus
ttggtggtgtctttagttagtgaag

SEQ ID NO: 40066 - DNA, 25 bp, SARS Virus
tggtggtgtctgtagttagtgaaga

SEQ ID NO: 40067 - DNA, 25 bp, SARS Virus
ggtggtgtctgttgttagtgaagac

SEQ ID NO: 40068 - DNA, 25 bp, SARS Virus
gtggtgtctgtatttagtgaagacg

SEQ ID NO: 40069 - DNA, 25 bp, SARS Virus
tggtgtctgtagttagtgaagacga

SEQ ID NO: 40070 - DNA, 25 bp, SARS Virus
ggtgtctgtagttagtgaagacgac

SEQ ID NO: 40071 - DNA, 25 bp, SARS Virus
gtgtctgtagtttgtgaagacgaca

SEQ ID NO: 40072 - DNA, 25 bp, SARS Virus
tgtctgtagttattgaagacgacaa

SEQ ID NO: 40073 - DNA, 25 bp, SARS Virus
gtctgtagttagtgaagacgacaag

SEQ ID NO: 40074 - DNA, 25 bp, SARS Virus
tctgtagttagttaagacgacaaga

SEQ ID NO: 40075 - DNA, 25 bp, SARS Virus
ctgtagttagtgtagacgacaagac

SEQ ID NO: 40076 - DNA, 25 bp, SARS Virus
tgtagttagtgatgacgacaagacg

SEQ ID NO: 40077 - DNA, 25 bp, SARS Virus
gtagttagtgaatacgacaagacgt

SEQ ID NO: 40078 - DNA, 25 bp, SARS Virus
tagttagtgaagtcgacaagacgtc

SEQ ID NO: 40079 - DNA, 25 bp, SARS Virus
agttagtgaagatgacaagacgtct

SEQ ID NO: 40080 - DNA, 25 bp, SARS Virus
gttagtgaagactacaagacgtctc

SEQ ID NO: 40081 - DNA, 25 bp, SARS Virus
ttagtgaagacgtcaagacgtctca

SEQ ID NO: 40082 - DNA, 25 bp, SARS Virus
tagtgaagacgataagacgtctcac

SEQ ID NO: 40083 - DNA, 25 bp, SARS Virus
agtgaagacgactagacgtctcacc

SEQ ID NO: 40084 - DNA, 25 bp, SARS Virus
gtgaagacgacatgacgtctcacca

SEQ ID NO: 40085 - DNA, 25 bp, SARS Virus
tgaagacgacaatacgtctcaccaa

SEQ ID NO: 40086 - DNA, 25 bp, SARS Virus
gaagacgacaagtcgtctcaccaaa

SEQ ID NO: 40087 - DNA, 25 bp, SARS Virus
aagacgacaagatgtctcaccaaaa

SEQ ID NO: 40088 - DNA, 25 bp, SARS Virus
agacgacaagacttctcaccaaaat

SEQ ID NO: 40089 - DNA, 25 bp, SARS Virus
gacgacaagacgtctcaccaaaatc

SEQ ID NO: 40090 - DNA, 25 bp, SARS Virus
acgacaagacgtttcaccaaaatcc

SEQ ID NO: 40091 - DNA, 25 bp, SARS Virus
cgacaagacgtctcaccaaaatcct

SEQ ID NO: 40092 - DNA, 25 bp, SARS Virus
gacaagacgtcttaccaaaatcctt

SEQ ID NO: 40093 - DNA, 25 bp, SARS Virus
acaagacgtctctccaaaatccttt

SEQ ID NO: 40094 - DNA, 25 bp, SARS Virus
caagacgtctcatcaaaatcctttt

SEQ ID NO: 40095 - DNA, 25 bp, SARS Virus
aagacgtctcactaaaatcctttta

SEQ ID NO: 40096 - DNA, 25 bp, SARS Virus
agacgtctcacctaaatccttttac

SEQ ID NO: 40097 - DNA, 25 bp, SARS Virus
gacgtctcaccataatccttttacc

SEQ ID NO: 40098 - DNA, 25 bp, SARS Virus
acgtctcaccaatatccttttaccg

SEQ ID NO: 40099 - DNA, 25 bp, SARS Virus
cgtctcaccaaattccttttaccgt

SEQ ID NO: 40100 - DNA, 25 bp, SARS Virus
gtctcaccaaaatccttttaccgta

SEQ ID NO: 40101 - DNA, 25 bp, SARS Virus
tctcaccaaaattcttttaccgtaa

SEQ ID NO: 40102 - DNA, 25 bp, SARS Virus
ctcaccaaaatctttttaccgtaag

SEQ ID NO: 40103 - DNA, 25 bp, SARS Virus
tcaccaaaatccttttaccgtaagg

SEQ ID NO: 40104 - DNA, 25 bp, SARS Virus
caccaaaatccttttaccgtaaggg

SEQ ID NO: 40105 - DNA, 25 bp, SARS Virus
accaaaatccttttaccgtaagggc

SEQ ID NO: 40106 - DNA, 25 bp, SARS Virus
ccaaaatccttttaccgtaagggca

SEQ ID NO: 40107 - DNA, 25 bp, SARS Virus
caaaatcctttttccgtaagggcag

SEQ ID NO: 40108 - DNA, 25 bp, SARS Virus
aaaatccttttatcgtaagggcagt

SEQ ID NO: 40109 - DNA, 25 bp, SARS Virus
aaatccttttactgtaagggcagtc

SEQ ID NO: 40110 - DNA, 25 bp, SARS Virus
aatccttttaccttaagggcagtcc

SEQ ID NO: 40111 - DNA, 25 bp, SARS Virus
atccttttaccgtaagggcagtccg

SEQ ID NO: 40112 - DNA, 25 bp, SARS Virus
tccttttaccgttagggcagtccgt

SEQ ID NO: 40113 - DNA, 25 bp, SARS Virus
ccttttaccgtatgggcagtccgtt

SEQ ID NO: 40114 - DNA, 25 bp, SARS Virus
cttttaccgtaatggcagtccgttt

SEQ ID NO: 40115 - DNA, 25 bp, SARS Virus
ttttaccgtaagtgcagtccgtttc

SEQ ID NO: 40116 - DNA, 25 bp, SARS Virus
tttaccgtaaggtcagtccgtttca

SEQ ID NO: 40117 - DNA, 25 bp, SARS Virus
ttaccgtaagggtagtccgtttcaa

SEQ ID NO: 40118 - DNA, 25 bp, SARS Virus
taccgtaagggctgtccgtttcaac

SEQ ID NO: 40119 - DNA, 25 bp, SARS Virus
accgtaagggcattccgtttcaact

SEQ ID NO: 40120 - DNA, 25 bp, SARS Virus
ccgtaagggcagtccgtttcaactt

SEQ ID NO: 40121 - DNA, 25 bp, SARS Virus
cgtaagggcagttcgtttcaacttc

SEQ ID NO: 40122 - DNA, 25 bp, SARS Virus
gtaagggcagtctgtttcaacttcc

SEQ ID NO: 40123 - DNA, 25 bp, SARS Virus
taagggcagtccttttcaacttccc

SEQ ID NO: 40124 - DNA, 25 bp, SARS Virus
aagggcagtccgtttcaacttccca

SEQ ID NO: 40125 - DNA, 25 bp, SARS Virus
agggcagtccgtttcaacttcccac

SEQ ID NO: 40126 - DNA, 25 bp, SARS Virus
gggcagtccgtttcaacttcccacg

SEQ ID NO: 40127 - DNA, 25 bp, SARS Virus
ggcagtccgttttaacttcccacgt

SEQ ID NO: 40128 - DNA, 25 bp, SARS Virus
gcagtccgtttctacttcccacgta

SEQ ID NO: 40129 - DNA, 25 bp, SARS Virus
cagtccgtttcatcttcccacgtac

SEQ ID NO: 40130 - DNA, 25 bp, SARS Virus
agtccgtttcaatttcccacgtacc

SEQ ID NO: 40131 - DNA, 25 bp, SARS Virus
gtccgtttcaacttcccacgtacca

SEQ ID NO: 40132 - DNA, 25 bp, SARS Virus
tccgtttcaacttcccacgtaccat

SEQ ID NO: 40133 - DNA, 25 bp, SARS Virus
ccgtttcaactttccacgtaccatg

SEQ ID NO: 40134 - DNA, 25 bp, SARS Virus
cgtttcaacttctcacgtaccatgt

SEQ ID NO: 40135 - DNA, 25 bp, SARS Virus
gtttcaacttcctacgtaccatgtt

SEQ ID NO: 40136 - DNA, 25 bp, SARS Virus
tttcaacttccctcgtaccatgttc

SEQ ID NO: 40137 - DNA, 25 bp, SARS Virus
ttcaacttcccatgtaccatgttca

SEQ ID NO: 40138 - DNA, 25 bp, SARS Virus
tcaacttcccacttaccatgttcat

SEQ ID NO: 40139 - DNA, 25 bp, SARS Virus
caacttcccacgtaccatgttcatt

SEQ ID NO: 40140 - DNA, 25 bp, SARS Virus
aacttcccacgttccatgttcattg

SEQ ID NO: 40141 - DNA, 25 bp, SARS Virus
acttcccacgtatcatgttcattgg

SEQ ID NO: 40142 - DNA, 25 bp, SARS Virus
cttcccacgtactatgttcattgga

SEQ ID NO: 40143 - DNA, 25 bp, SARS Virus
ttcccacgtaccttgttcattggac

SEQ ID NO: 40144 - DNA, 25 bp, SARS Virus
tcccacgtaccatgttcattggaca

SEQ ID NO: 40145 - DNA, 25 bp, SARS Virus
cccacgtaccatattcattggacac

SEQ ID NO: 40146 - DNA, 25 bp, SARS Virus
ccacgtaccatgatcattggacacc

SEQ ID NO: 40147 - DNA, 25 bp, SARS Virus
cacgtaccatgtacattggacacct

SEQ ID NO: 40148 - DNA, 25 bp, SARS Virus
acgtaccatgttaattggacacctt

SEQ ID NO: 40149 - DNA, 25 bp, SARS Virus
cgtaccatgttcattggacaccttg

SEQ ID NO: 40150 - DNA, 25 bp, SARS Virus
gtaccatgttcaatggacaccttga

SEQ ID NO: 40151 - DNA, 25 bp, SARS Virus
taccatgttcataggacaccttgat

SEQ ID NO: 40152 - DNA, 25 bp, SARS Virus
accatgttcattagacaccttgatg

SEQ ID NO: 40153 - DNA, 25 bp, SARS Virus
ccatgttcattgaacaccttgatgt

SEQ ID NO: 40154 - DNA, 25 bp, SARS Virus
catgttcattggacaccttgatgtt

SEQ ID NO: 40155 - DNA, 25 bp, SARS Virus
atgttcattggaaaccttgatgttg

SEQ ID NO: 40156 - DNA, 25 bp, SARS Virus
tgttcattggacaccttgatgttga

SEQ ID NO: 40157 - DNA, 25 bp, SARS Virus
gttcattggacaacttgatgttgag

SEQ ID NO: 40158 - DNA, 25 bp, SARS Virus
ttcattggacacattgatgttgaga

SEQ ID NO: 40159 - DNA, 25 bp, SARS Virus
tcattggacaccatgatgttgagaa

SEQ ID NO: 40160 - DNA, 25 bp, SARS Virus
cattggacacctagatgttgagaat

SEQ ID NO: 40161 - DNA, 25 bp, SARS Virus
attggacaccttaatgttgagaatt

SEQ ID NO: 40162 - DNA, 25 bp, SARS Virus
ttggacaccttgatgttgagaatta

SEQ ID NO: 40163 - DNA, 25 bp, SARS Virus
tggacaccttgaagttgagaattac

SEQ ID NO: 40164 - DNA, 25 bp, SARS Virus
ggacaccttgatattgagaattacc

SEQ ID NO: 40165 - DNA, 25 bp, SARS Virus
gacaccttgatgatgagaattacct

SEQ ID NO: 40166 - DNA, 25 bp, SARS Virus
acaccttgatgtagagaattaccta

SEQ ID NO: 40167 - DNA, 25 bp, SARS Virus
caccttgatgttaagaattacctaa

SEQ ID NO: 40168 - DNA, 25 bp, SARS Virus
accttgatgttgagaattacctaac

SEQ ID NO: 40169 - DNA, 25 bp, SARS Virus
ccttgatgttgaaaattacctaaca

SEQ ID NO: 40170 - DNA, 25 bp, SARS Virus
cttgatgttgagaattacctaacac

SEQ ID NO: 40171 - DNA, 25 bp, SARS Virus
ttgatgttgagaattacctaacacc

SEQ ID NO: 40172 - DNA, 25 bp, SARS Virus
tgatgttgagaaatacctaacacca

SEQ ID NO: 40173 - DNA, 25 bp, SARS Virus
gatgttgagaataacctaacaccaa

SEQ ID NO: 40174 - DNA, 25 bp, SARS Virus
atgttgagaattacctaacaccaac

SEQ ID NO: 40175 - DNA, 25 bp, SARS Virus
tgttgagaattaactaacaccaacc

SEQ ID NO: 40176 - DNA, 25 bp, SARS Virus
gttgagaattacataacaccaacct

SEQ ID NO: 40177 - DNA, 25 bp, SARS Virus
ttgagaattaccaaacaccaaccta

SEQ ID NO: 40178 - DNA, 25 bp, SARS Virus
tgagaattacctaacaccaacctac

SEQ ID NO: 40179 - DNA, 25 bp, SARS Virus
gagaattacctaacaccaacctact

SEQ ID NO: 40180 - DNA, 25 bp, SARS Virus
agaattacctaaaaccaacctactg

SEQ ID NO: 40181 - DNA, 25 bp, SARS Virus
gaattacctaacaccaacctactgt

SEQ ID NO: 40182 - DNA, 25 bp, SARS Virus
aattacctaacaacaacctactgtg

SEQ ID NO: 40183 - DNA, 25 bp, SARS Virus
attacctaacacaaacctactgtgt

SEQ ID NO: 40184 - DNA, 25 bp, SARS Virus
ttacctaacaccaacctactgtgtc

SEQ ID NO: 40185 - DNA, 25 bp, SARS Virus
tacctaacaccaacctactgtgtca

SEQ ID NO: 40186 - DNA, 25 bp, SARS Virus
acctaacaccaaactactgtgtcat

SEQ ID NO: 40187 - DNA, 25 bp, SARS Virus
cctaacaccaacatactgtgtcata

SEQ ID NO: 40188 - DNA, 25 bp, SARS Virus
ctaacaccaaccaactgtgtcatat

SEQ ID NO: 40189 - DNA, 25 bp, SARS Virus
taacaccaacctactgtgtcatatg

SEQ ID NO: 40190 - DNA, 25 bp, SARS Virus
aacaccaacctaatgtgtcatatga

SEQ ID NO: 40191 - DNA, 25 bp, SARS Virus
acaccaacctacagtgtcatatgac

SEQ ID NO: 40192 - DNA, 25 bp, SARS Virus
caccaacctactatgtcatatgaca

SEQ ID NO: 40193 - DNA, 25 bp, SARS Virus
accaacctactgagtcatatgacag

SEQ ID NO: 40194 - DNA, 25 bp, SARS Virus
ccaacctactgtatcatatgacagg

SEQ ID NO: 40195 - DNA, 25 bp, SARS Virus
caacctactgtgacatatgacaggt

SEQ ID NO: 40196 - DNA, 25 bp, SARS Virus
aacctactgtgtaatatgacaggtt

SEQ ID NO: 40197 - DNA, 25 bp, SARS Virus
acctactgtgtcatatgacaggttc

SEQ ID NO: 40198 - DNA, 25 bp, SARS Virus
cctactgtgtcaaatgacaggttct

SEQ ID NO: 40199 - DNA, 25 bp, SARS Virus
ctactgtgtcatatgacaggttctg

SEQ ID NO: 40200 - DNA, 25 bp, SARS Virus
tactgtgtcataagacaggttctgt

SEQ ID NO: 40201 - DNA, 25 bp, SARS Virus
actgtgtcatataacaggttctgta

SEQ ID NO: 40202 - DNA, 25 bp, SARS Virus
ctgtgtcatatgacaggttctgtac

SEQ ID NO: 40203 - DNA, 25 bp, SARS Virus
tgtgtcatatgaaaggttctgtaca

SEQ ID NO: 40204 - DNA, 25 bp, SARS Virus
gtgtcatatgacaggttctgtacag

SEQ ID NO: 40205 - DNA, 25 bp, SARS Virus
tgtcatatgacaagttctgtacagt

SEQ ID NO: 40206 - DNA, 25 bp, SARS Virus
gtcatatgacagattctgtacagta

SEQ ID NO: 40207 - DNA, 25 bp, SARS Virus
tcatatgacaggatctgtacagtaa

SEQ ID NO: 40208 - DNA, 25 bp, SARS Virus
catatgacaggtactgtacagtaaa

SEQ ID NO: 40209 - DNA, 25 bp, SARS Virus
atatgacaggttatgtacagtaaac

SEQ ID NO: 40210 - DNA, 25 bp, SARS Virus
tatgacaggttcagtacagtaaacg

SEQ ID NO: 40211 - DNA, 25 bp, SARS Virus
atgacaggttctatacagtaaacgt

SEQ ID NO: 40212 - DNA, 25 bp, SARS Virus
tgacaggttctgaacagtaaacgtg

SEQ ID NO: 40213 - DNA, 25 bp, SARS Virus
gacaggttctgtacagtaaacgtgt

SEQ ID NO: 40214 - DNA, 25 bp, SARS Virus
acaggttctgtaaagtaaacgtgtc

SEQ ID NO: 40215 - DNA, 25 bp, SARS Virus
caggttctgtacagtaaacgtgtcg

SEQ ID NO: 40216 - DNA, 25 bp, SARS Virus
aggttctgtacaataaacgtgtcgt

SEQ ID NO: 40217 - DNA, 25 bp, SARS Virus
ggttctgtacagaaaacgtgtcgtc

SEQ ID NO: 40218 - DNA, 25 bp, SARS Virus
gttctgtacagtaaacgtgtcgtct

SEQ ID NO: 40219 - DNA, 25 bp, SARS Virus
ttctgtacagtaaacgtgtcgtctt

SEQ ID NO: 40220 - DNA, 25 bp, SARS Virus
tctgtacagtaaacgtgtcgtcttc

SEQ ID NO: 40221 - DNA, 25 bp, SARS Virus
ctgtacagtaaaagtgtcgtcttct

SEQ ID NO: 40222 - DNA, 25 bp, SARS Virus
tgtacagtaaacatgtcgtcttctg

SEQ ID NO: 40223 - DNA, 25 bp, SARS Virus
gtacagtaaacgagtcgtcttctgt

SEQ ID NO: 40224 - DNA, 25 bp, SARS Virus
tacagtaaacgtatcgtcttctgta

SEQ ID NO: 40225 - DNA, 25 bp, SARS Virus
acagtaaacgtgacgtcttctgtac

SEQ ID NO: 40226 - DNA, 25 bp, SARS Virus
cagtaaacgtgtagtcttctgtacg

SEQ ID NO: 40227 - DNA, 25 bp, SARS Virus
agtaaacgtgtcatcttctgtacga

SEQ ID NO: 40228 - DNA, 25 bp, SARS Virus
gtaaacgtgtcgacttctgtacgaa

SEQ ID NO: 40229 - DNA, 25 bp, SARS Virus
taaacgtgtcgtattctgtacgaat

SEQ ID NO: 40230 - DNA, 25 bp, SARS Virus
aaacgtgtcgtcatctgtacgaatt

SEQ ID NO: 40231 - DNA, 25 bp, SARS Virus
aacgtgtcgtctactgtacgaatta

SEQ ID NO: 40232 - DNA, 25 bp, SARS Virus
acgtgtcgtcttatgtacgaattag

SEQ ID NO: 40233 - DNA, 25 bp, SARS Virus
cgtgtcgtcttcagtacgaattagg

SEQ ID NO: 40234 - DNA, 25 bp, SARS Virus
gtgtcgtcttctatacgaattagga

SEQ ID NO: 40235 - DNA, 25 bp, SARS Virus
tgtcgtcttctgaacgaattaggat

SEQ ID NO: 40236 - DNA, 25 bp, SARS Virus
gtcgtcttctgtacgaattaggatt

SEQ ID NO: 40237 - DNA, 25 bp, SARS Virus
tcgtcttctgtaagaattaggattg

SEQ ID NO: 40238 - DNA, 25 bp, SARS Virus
cgtcttctgtacaaattaggattga

SEQ ID NO: 40239 - DNA, 25 bp, SARS Virus
gtcttctgtacgaattaggattgat

SEQ ID NO: 40240 - DNA, 25 bp, SARS Virus
tcttctgtacgaattaggattgata

SEQ ID NO: 40241 - DNA, 25 bp, SARS Virus
cttctgtacgaaataggattgatac

SEQ ID NO: 40242 - DNA, 25 bp, SARS Virus
ttctgtacgaataaggattgatact

SEQ ID NO: 40243 - DNA, 25 bp, SARS Virus
tctgtacgaattaggattgatactt

SEQ ID NO: 40244 - DNA, 25 bp, SARS Virus
ctgtacgaattaagattgatacttc

SEQ ID NO: 40245 - DNA, 25 bp, SARS Virus
tgtacgaattagaattgatacttct

SEQ ID NO: 40246 - DNA, 25 bp, SARS Virus
gtacgaattaggattgatacttcta

SEQ ID NO: 40247 - DNA, 25 bp, SARS Virus
tacgaattaggaatgatacttctag

SEQ ID NO: 40248 - DNA, 25 bp, SARS Virus
acgaattaggatagatacttctaga

SEQ ID NO: 40249 - DNA, 25 bp, SARS Virus
cgaattaggattaatacttctagac

SEQ ID NO: 40250 - DNA, 25 bp, SARS Virus
gaattaggattgatacttctagacg

SEQ ID NO: 40251 - DNA, 25 bp, SARS Virus
aattaggattgaaacttctagacga

SEQ ID NO: 40252 - DNA, 25 bp, SARS Virus
attaggattgatacttctagacgag

SEQ ID NO: 40253 - DNA, 25 bp, SARS Virus
ttaggattgataattctagacgagt

SEQ ID NO: 40254 - DNA, 25 bp, SARS Virus
taggattgatacatctagacgagta

SEQ ID NO: 40255 - DNA, 25 bp, SARS Virus
aggattgatactactagacgagtaa

SEQ ID NO: 40256 - DNA, 25 bp, SARS Virus
ggattgatacttatagacgagtaag

SEQ ID NO: 40257 - DNA, 25 bp, SARS Virus
gattgatacttcaagacgagtaagc

SEQ ID NO: 40258 - DNA, 25 bp, SARS Virus
attgatacttctagacgagtaagcg

SEQ ID NO: 40259 - DNA, 25 bp, SARS Virus
ttgatacttctaaacgagtaagcgt

SEQ ID NO: 40260 - DNA, 25 bp, SARS Virus
tgatacttctagacgagtaagcgtt

SEQ ID NO: 40261 - DNA, 25 bp, SARS Virus
gatacttctagaagagtaagcgttt

SEQ ID NO: 40262 - DNA, 25 bp, SARS Virus
atacttctagacaagtaagcgttta

SEQ ID NO: 40263 - DNA, 25 bp, SARS Virus
tacttctagacgagtaagcgtttag

SEQ ID NO: 40264 - DNA, 25 bp, SARS Virus
acttctagacgaataagcgtttagg

SEQ ID NO: 40265 - DNA, 25 bp, SARS Virus
cttctagacgagaaagcgtttaggt

SEQ ID NO: 40266 - DNA, 25 bp, SARS Virus
ttctagacgagtaagcgtttaggtt

SEQ ID NO: 40267 - DNA, 25 bp, SARS Virus
tctagacgagtaagcgtttaggttg

SEQ ID NO: 40268 - DNA, 25 bp, SARS Virus
ctagacgagtaaacgtttaggttgg

SEQ ID NO: 40269 - DNA, 25 bp, SARS Virus
tagacgagtaagagtttaggttggt

SEQ ID NO: 40270 - DNA, 25 bp, SARS Virus
agacgagtaagcatttaggttggta

SEQ ID NO: 40271 - DNA, 25 bp, SARS Virus
gacgagtaagcgattaggttggtat

SEQ ID NO: 40272 - DNA, 25 bp, SARS Virus
acgagtaagcgtataggttggtatc

SEQ ID NO: 40273 - DNA, 25 bp, SARS Virus
cgagtaagcgttaaggttggtatcg

SEQ ID NO: 40274 - DNA, 25 bp, SARS Virus
gagtaagcgtttaggttggtatcga

SEQ ID NO: 40275 - DNA, 25 bp, SARS Virus
agtaagcgtttaagttggtatcgaa

SEQ ID NO: 40276 - DNA, 25 bp, SARS Virus
gtaagcgtttagattggtatcgaaa

SEQ ID NO: 40277 - DNA, 25 bp, SARS Virus
taagcgtttaggatggtatcgaaag

SEQ ID NO: 40278 - DNA, 25 bp, SARS Virus
aagcgtttaggtaggtatcgaaaga

SEQ ID NO: 40279 - DNA, 25 bp, SARS Virus
agcgtttaggttagtatcgaaagaa

SEQ ID NO: 40280 - DNA, 25 bp, SARS Virus
gcgtttaggttgatatcgaaagaac

SEQ ID NO: 40281 - DNA, 25 bp, SARS Virus
cgtttaggttggaatcgaaagaaca

SEQ ID NO: 40282 - DNA, 25 bp, SARS Virus
gtttaggttggtatcgaaagaacaa

SEQ ID NO: 40283 - DNA, 25 bp, SARS Virus
tttaggttggtaacgaaagaacaag

SEQ ID NO: 40284 - DNA, 25 bp, SARS Virus
ttaggttggtatagaaagaacaagt

SEQ ID NO: 40285 - DNA, 25 bp, SARS Virus
taggttggtatcaaaagaacaagtc

SEQ ID NO: 40286 - DNA, 25 bp, SARS Virus
aggttggtatcgaaagaacaagtcc

SEQ ID NO: 40287 - DNA, 25 bp, SARS Virus
ggttggtatcgaaagaacaagtccg

SEQ ID NO: 40288 - DNA, 25 bp, SARS Virus
gttggtatcgaaagaacaagtccga

SEQ ID NO: 40289 - DNA, 25 bp, SARS Virus
ttggtatcgaaaaaacaagtccgac

SEQ ID NO: 40290 - DNA, 25 bp, SARS Virus
tggtatcgaaagaacaagtccgacc

SEQ ID NO: 40291 - DNA, 25 bp, SARS Virus
ggtatcgaaagaacaagtccgaccg

SEQ ID NO: 40292 - DNA, 25 bp, SARS Virus
gtatcgaaagaaaaagtccgaccgt

SEQ ID NO: 40293 - DNA, 25 bp, SARS Virus
tatcgaaagaacaagtccgaccgtt

SEQ ID NO: 40294 - DNA, 25 bp, SARS Virus
atcgaaagaacaagtccgaccgtta

SEQ ID NO: 40295 - DNA, 25 bp, SARS Virus
tcgaaagaacaaatccgaccgttac

SEQ ID NO: 40296 - DNA, 25 bp, SARS Virus
cgaaagaacaagaccgaccgttaca

SEQ ID NO: 40297 - DNA, 25 bp, SARS Virus
gaaagaacaagtacgaccgttacaa

SEQ ID NO: 40298 - DNA, 25 bp, SARS Virus
aaagaacaagtcagaccgttacaag

SEQ ID NO: 40299 - DNA, 25 bp, SARS Virus
aagaacaagtccaaccgttacaagt

SEQ ID NO: 40300 - DNA, 25 bp, SARS Virus
agaacaagtccgaccgttacaagtt

SEQ ID NO: 40301 - DNA, 25 bp, SARS Virus
gaacaagtccgaacgttacaagttg

SEQ ID NO: 40302 - DNA, 25 bp, SARS Virus
aacaagtccgacagttacaagttga

SEQ ID NO: 40303 - DNA, 25 bp, SARS Virus
acaagtccgaccattacaagttgaa

SEQ ID NO: 40304 - DNA, 25 bp, SARS Virus
caagtccgaccgatacaagttgaag

SEQ ID NO: 40305 - DNA, 25 bp, SARS Virus
aagtccgaccgtaacaagttgaagc

SEQ ID NO: 40306 - DNA, 25 bp, SARS Virus
agtccgaccgttacaagttgaagca

SEQ ID NO: 40307 - DNA, 25 bp, SARS Virus
gtccgaccgttaaaagttgaagcac

SEQ ID NO: 40308 - DNA, 25 bp, SARS Virus
tccgaccgttacaagttgaagcaca

SEQ ID NO: 40309 - DNA, 25 bp, SARS Virus
ccgaccgttacaagttgaagcacaa

SEQ ID NO: 40310 - DNA, 25 bp, SARS Virus
cgaccgttacaaattgaagcacaat

SEQ ID NO: 40311 - DNA, 25 bp, SARS Virus
gaccgttacaagatgaagcacaata

SEQ ID NO: 40312 - DNA, 25 bp, SARS Virus
accgttacaagtagaagcacaataa

SEQ ID NO: 40313 - DNA, 25 bp, SARS Virus
ccgttacaagttaaagcacaataac

SEQ ID NO: 40314 - DNA, 25 bp, SARS Virus
cgttacaagttgaagcacaataacc

SEQ ID NO: 40315 - DNA, 25 bp, SARS Virus
gttacaagttgaagcacaataaccg

SEQ ID NO: 40316 - DNA, 25 bp, SARS Virus
ttacaagttgaaacacaataaccgg

SEQ ID NO: 40317 - DNA, 25 bp, SARS Virus
tacaagttgaagaacaataaccggt

SEQ ID NO: 40318 - DNA, 25 bp, SARS Virus
acaagttgaagcacaataaccggta

SEQ ID NO: 40319 - DNA, 25 bp, SARS Virus
caagttgaagcaaaataaccggtaa

SEQ ID NO: 40320 - DNA, 25 bp, SARS Virus
aagttgaagcacaataaccggtaag

SEQ ID NO: 40321 - DNA, 25 bp, SARS Virus
agttgaagcacaataaccggtaaga

SEQ ID NO: 40322 - DNA, 25 bp, SARS Virus
gttgaagcacaaaaaccggtaagat

SEQ ID NO: 40323 - DNA, 25 bp, SARS Virus
ttgaagcacaataaccggtaagata

SEQ ID NO: 40324 - DNA, 25 bp, SARS Virus
tgaagcacaataaccggtaagatac

SEQ ID NO: 40325 - DNA, 25 bp, SARS Virus
gaagcacaataaacggtaagatacg

SEQ ID NO: 40326 - DNA, 25 bp, SARS Virus
aagcacaataacaggtaagatacgt

SEQ ID NO: 40327 - DNA, 25 bp, SARS Virus
agcacaataaccagtaagatacgtt

SEQ ID NO: 40328 - DNA, 25 bp, SARS Virus
gcacaataaccgataagatacgttt

SEQ ID NO: 40329 - DNA, 25 bp, SARS Virus
cacaataaccggaaagatacgtttt

SEQ ID NO: 40330 - DNA, 25 bp, SARS Virus
acaataaccggtaagatacgtttta

SEQ ID NO: 40331 - DNA, 25 bp, SARS Virus
caataaccggtaagatacgttttaa

SEQ ID NO: 40332 - DNA, 25 bp, SARS Virus
aataaccggtaaaatacgttttaac

SEQ ID NO: 40333 - DNA, 25 bp, SARS Virus
ataaccggtaagatacgttttaaca

SEQ ID NO: 40334 - DNA, 25 bp, SARS Virus
taaccggtaagaaacgttttaacag

SEQ ID NO: 40335 - DNA, 25 bp, SARS Virus
aaccggtaagatacgttttaacaga

SEQ ID NO: 40336 - DNA, 25 bp, SARS Virus
accggtaagataagttttaacagac

SEQ ID NO: 40337 - DNA, 25 bp, SARS Virus
ccggtaagatacattttaacagacg

SEQ ID NO: 40338 - DNA, 25 bp, SARS Virus
cggtaagatacgatttaacagacga

SEQ ID NO: 40339 - DNA, 25 bp, SARS Virus
ggtaagatacgtattaacagacgaa

SEQ ID NO: 40340 - DNA, 25 bp, SARS Virus
gtaagatacgttataacagacgaat

SEQ ID NO: 40341 - DNA, 25 bp, SARS Virus
taagatacgtttaaacagacgaatc

SEQ ID NO: 40342 - DNA, 25 bp, SARS Virus
aagatacgttttaacagacgaatcc

SEQ ID NO: 40343 - DNA, 25 bp, SARS Virus
agatacgttttaacagacgaatccg

SEQ ID NO: 40344 - DNA, 25 bp, SARS Virus
gatacgttttaaaagacgaatccga

SEQ ID NO: 40345 - DNA, 25 bp, SARS Virus
atacgttttaacagacgaatccgaa

SEQ ID NO: 40346 - DNA, 25 bp, SARS Virus
tacgttttaacaaacgaatccgaat

SEQ ID NO: 40347 - DNA, 25 bp, SARS Virus
acgttttaacagacgaatccgaatt

SEQ ID NO: 40348 - DNA, 25 bp, SARS Virus
cgttttaacagaagaatccgaattt

SEQ ID NO: 40349 - DNA, 25 bp, SARS Virus
gttttaacagacaaatccgaatttc

SEQ ID NO: 40350 - DNA, 25 bp, SARS Virus
ttttaacagacgaatccgaatttca

SEQ ID NO: 40351 - DNA, 25 bp, SARS Virus
tttaacagacgaatccgaatttcaa

SEQ ID NO: 40352 - DNA, 25 bp, SARS Virus
ttaacagacgaaaccgaatttcaac

SEQ ID NO: 40353 - DNA, 25 bp, SARS Virus
taacagacgaatacgaatttcaact

SEQ ID NO: 40354 - DNA, 25 bp, SARS Virus
aacagacgaatcagaatttcaacta

SEQ ID NO: 40355 - DNA, 25 bp, SARS Virus
acagacgaatccaaatttcaactat

SEQ ID NO: 40356 - DNA, 25 bp, SARS Virus
cagacgaatccgaatttcaactatg

SEQ ID NO: 40357 - DNA, 25 bp, SARS Virus
agacgaatccgaatttcaactatga

SEQ ID NO: 40358 - DNA, 25 bp, SARS Virus
gacgaatccgaaattcaactatgaa

SEQ ID NO: 40359 - DNA, 25 bp, SARS Virus
acgaatccgaatatcaactatgaag

SEQ ID NO: 40360 - DNA, 25 bp, SARS Virus
cgaatccgaattacaactatgaaga

SEQ ID NO: 40361 - DNA, 25 bp, SARS Virus
gaatccgaatttaaactatgaagat

SEQ ID NO: 40362 - DNA, 25 bp, SARS Virus
aatccgaatttcaactatgaagatt

SEQ ID NO: 40363 - DNA, 25 bp, SARS Virus
atccgaatttcaactatgaagattg

SEQ ID NO: 40364 - DNA, 25 bp, SARS Virus
tccgaatttcaaatatgaagattgg

SEQ ID NO: 40365 - DNA, 25 bp, SARS Virus
ccgaatttcaacaatgaagattggg

SEQ ID NO: 40366 - DNA, 25 bp, SARS Virus
cgaatttcaactatgaagattggga

SEQ ID NO: 40367 - DNA, 25 bp, SARS Virus
gaatttcaactaagaagattgggat

SEQ ID NO: 40368 - DNA, 25 bp, SARS Virus
aatttcaactataaagattgggatt

SEQ ID NO: 40369 - DNA, 25 bp, SARS Virus
atttcaactatgaagattgggattc

SEQ ID NO: 40370 - DNA, 25 bp, SARS Virus
tttcaactatgaagattgggattct

SEQ ID NO: 40371 - DNA, 25 bp, SARS Virus
ttcaactatgaaaattgggattctg

SEQ ID NO: 40372 - DNA, 25 bp, SARS Virus
tcaactatgaagattgggattctgt

SEQ ID NO: 40373 - DNA, 25 bp, SARS Virus
caactatgaagaatgggattctgtg

SEQ ID NO: 40374 - DNA, 25 bp, SARS Virus
aactatgaagatagggattctgtgg

SEQ ID NO: 40375 - DNA, 25 bp, SARS Virus
actatgaagattaggattctgtggg

SEQ ID NO: 40376 - DNA, 25 bp, SARS Virus
ctatgaagattgagattctgtgggt

SEQ ID NO: 40377 - DNA, 25 bp, SARS Virus
tatgaagattggaattctgtgggtt

SEQ ID NO: 40378 - DNA, 25 bp, SARS Virus
atgaagattgggattctgtgggttc

SEQ ID NO: 40379 - DNA, 25 bp, SARS Virus
tgaagattgggaatctgtgggttca

SEQ ID NO: 40380 - DNA, 25 bp, SARS Virus
gaagattgggatactgtgggttcat

SEQ ID NO: 40381 - DNA, 25 bp, SARS Virus
aagattgggattatgtgggttcata

SEQ ID NO: 40382 - DNA, 25 bp, SARS Virus
agattgggattcagtgggttcatat

SEQ ID NO: 40383 - DNA, 25 bp, SARS Virus
gattgggattctatgggttcatatt

SEQ ID NO: 40384 - DNA, 25 bp, SARS Virus
attgggattctgagggttcatattt

SEQ ID NO: 40385 - DNA, 25 bp, SARS Virus
ttgggattctgtaggttcatattta

SEQ ID NO: 40386 - DNA, 25 bp, SARS Virus
tgggattctgtgagttcatatttaa

SEQ ID NO: 40387 - DNA, 25 bp, SARS Virus
gggattctgtggattcatatttaaa

SEQ ID NO: 40388 - DNA, 25 bp, SARS Virus
ggattctgtgggatcatatttaaac

SEQ ID NO: 40389 - DNA, 25 bp, SARS Virus
gattctgtgggtacatatttaaaca

SEQ ID NO: 40390 - DNA, 25 bp, SARS Virus
attctgtgggttaatatttaaacag

SEQ ID NO: 40391 - DNA, 25 bp, SARS Virus
ttctgtgggttcatatttaaacagg

SEQ ID NO: 40392 - DNA, 25 bp, SARS Virus
tctgtgggttcaaatttaaacaggc

SEQ ID NO: 40393 - DNA, 25 bp, SARS Virus
ctgtgggttcatatttaaacaggca

SEQ ID NO: 40394 - DNA, 25 bp, SARS Virus
tgtgggttcataattaaacaggcat

SEQ ID NO: 40395 - DNA, 25 bp, SARS Virus
gtgggttcatatataaacaggcata

SEQ ID NO: 40396 - DNA, 25 bp, SARS Virus
tgggttcatattaaaacaggcatag

SEQ ID NO: 40397 - DNA, 25 bp, SARS Virus
gggttcatatttaaacaggcatagg

SEQ ID NO: 40398 - DNA, 25 bp, SARS Virus
ggttcatatttaaacaggcataggt

SEQ ID NO: 40399 - DNA, 25 bp, SARS Virus
gttcatatttaaacaggcataggtt

SEQ ID NO: 40400 - DNA, 25 bp, SARS Virus
ttcatatttaaaaaggcataggttg

SEQ ID NO: 40401 - DNA, 25 bp, SARS Virus
tcatatttaaacaggcataggttgg

SEQ ID NO: 40402 - DNA, 25 bp, SARS Virus
catatttaaacaagcataggttgga

SEQ ID NO: 40403 - DNA, 25 bp, SARS Virus
atatttaaacagacataggttggac

SEQ ID NO: 40404 - DNA, 25 bp, SARS Virus
tatttaaacaggaataggttggacc

SEQ ID NO: 40405 - DNA, 25 bp, SARS Virus
atttaaacaggcataggttggacca

SEQ ID NO: 40406 - DNA, 25 bp, SARS Virus
tttaaacaggcaaaggttggaccag

SEQ ID NO: 40407 - DNA, 25 bp, SARS Virus
ttaaacaggcataggttggaccagt

SEQ ID NO: 40408 - DNA, 25 bp, SARS Virus
taaacaggcataagttggaccagtt

SEQ ID NO: 40409 - DNA, 25 bp, SARS Virus
aaacaggcatagattggaccagttt

SEQ ID NO: 40410 - DNA, 25 bp, SARS Virus
aacaggcataggatggaccagtttg

SEQ ID NO: 40411 - DNA, 25 bp, SARS Virus
acaggcataggtaggaccagtttgt

SEQ ID NO: 40412 - DNA, 25 bp, SARS Virus
caggcataggttagaccagtttgta

SEQ ID NO: 40413 - DNA, 25 bp, SARS Virus
aggcataggttgaaccagtttgtaa

SEQ ID NO: 40414 - DNA, 25 bp, SARS Virus
ggcataggttggaccagtttgtaaa

SEQ ID NO: 40415 - DNA, 25 bp, SARS Virus
gcataggttggaacagtttgtaaaa

SEQ ID NO: 40416 - DNA, 25 bp, SARS Virus
cataggttggacaagtttgtaaaag

SEQ ID NO: 40417 - DNA, 25 bp, SARS Virus
ataggttggaccagtttgtaaaagt

SEQ ID NO: 40418 - DNA, 25 bp, SARS Virus
taggttggaccaatttgtaaaagtc

SEQ ID NO: 40419 - DNA, 25 bp, SARS Virus
aggttggaccagattgtaaaagtca

SEQ ID NO: 40420 - DNA, 25 bp, SARS Virus
ggttggaccagtatgtaaaagtcaa

SEQ ID NO: 40421 - DNA, 25 bp, SARS Virus
gttggaccagttagtaaaagtcaag

SEQ ID NO: 40422 - DNA, 25 bp, SARS Virus
ttggaccagtttataaaagtcaaga

SEQ ID NO: 40423 - DNA, 25 bp, SARS Virus
tggaccagtttgaaaaagtcaagat

SEQ ID NO: 40424 - DNA, 25 bp, SARS Virus
ggaccagtttgtaaaagtcaagatc

SEQ ID NO: 40425 - DNA, 25 bp, SARS Virus
gaccagtttgtaaaagtcaagatcg

SEQ ID NO: 40426 - DNA, 25 bp, SARS Virus
accagtttgtaaaagtcaagatcgt

SEQ ID NO: 40427 - DNA, 25 bp, SARS Virus
ccagtttgtaaaagtcaagatcgta

SEQ ID NO: 40428 - DNA, 25 bp, SARS Virus
cagtttgtaaaaatcaagatcgtac

SEQ ID NO: 40429 - DNA, 25 bp, SARS Virus
agtttgtaaaagacaagatcgtacg

SEQ ID NO: 40430 - DNA, 25 bp, SARS Virus
gtttgtaaaagtaaagatcgtacga

SEQ ID NO: 40431 - DNA, 25 bp, SARS Virus
tttgtaaaagtcaagatcgtacgat

SEQ ID NO: 40432 - DNA, 25 bp, SARS Virus
ttgtaaaagtcaagatcgtacgatg

SEQ ID NO: 40433 - DNA, 25 bp, SARS Virus
tgtaaaagtcaaaatcgtacgatgt

SEQ ID NO: 40434 - DNA, 25 bp, SARS Virus
gtaaaagtcaagatcgtacgatgtt

SEQ ID NO: 40435 - DNA, 25 bp, SARS Virus
taaaagtcaagaacgtacgatgtta

SEQ ID NO: 40436 - DNA, 25 bp, SARS Virus
aaaagtcaagatagtacgatgttac

SEQ ID NO: 40437 - DNA, 25 bp, SARS Virus
aaagtcaagatcatacgatgttacc

SEQ ID NO: 40438 - DNA, 25 bp, SARS Virus
aagtcaagatcgaacgatgttacca

SEQ ID NO: 40439 - DNA, 25 bp, SARS Virus
agtcaagatcgtacgatgttaccaa

SEQ ID NO: 40440 - DNA, 25 bp, SARS Virus
gtcaagatcgtaagatgttaccaag

SEQ ID NO: 40441 - DNA, 25 bp, SARS Virus
tcaagatcgtacaatgttaccaagt

SEQ ID NO: 40442 - DNA, 25 bp, SARS Virus
caagatcgtacgatgttaccaagtg

SEQ ID NO: 40443 - DNA, 25 bp, SARS Virus
aagatcgtacgaagttaccaagtgg

SEQ ID NO: 40444 - DNA, 25 bp, SARS Virus
agatcgtacgatattaccaagtggt

SEQ ID NO: 40445 - DNA, 25 bp, SARS Virus
gatcgtacgatgataccaagtggta

SEQ ID NO: 40446 - DNA, 25 bp, SARS Virus
atcgtacgatgtaaccaagtggtag

SEQ ID NO: 40447 - DNA, 25 bp, SARS Virus
tcgtacgatgttaccaagtggtaga

SEQ ID NO: 40448 - DNA, 25 bp, SARS Virus
cgtacgatgttaacaagtggtagac

SEQ ID NO: 40449 - DNA, 25 bp, SARS Virus
gtacgatgttacaaagtggtagacc

SEQ ID NO: 40450 - DNA, 25 bp, SARS Virus
tacgatgttaccaagtggtagacca

SEQ ID NO: 40451 - DNA, 25 bp, SARS Virus
acgatgttaccaagtggtagaccac

SEQ ID NO: 40452 - DNA, 25 bp, SARS Virus
cgatgttaccaaatggtagaccaca

SEQ ID NO: 40453 - DNA, 25 bp, SARS Virus
gatgttaccaagaggtagaccacaa

SEQ ID NO: 40454 - DNA, 25 bp, SARS Virus
atgttaccaagtagtagaccacaaa

SEQ ID NO: 40455 - DNA, 25 bp, SARS Virus
tgttaccaagtgatagaccacaaat

SEQ ID NO: 40456 - DNA, 25 bp, SARS Virus
gttaccaagtggaagaccacaaata

SEQ ID NO: 40457 - DNA, 25 bp, SARS Virus
ttaccaagtggtagaccacaaatag

SEQ ID NO: 40458 - DNA, 25 bp, SARS Virus
taccaagtggtaaaccacaaatagt

SEQ ID NO: 40459 - DNA, 25 bp, SARS Virus
accaagtggtagaccacaaatagtc

SEQ ID NO: 40460 - DNA, 25 bp, SARS Virus
ccaagtggtagaacacaaatagtca

SEQ ID NO: 40461 - DNA, 25 bp, SARS Virus
caagtggtagacaacaaatagtcac

SEQ ID NO: 40462 - DNA, 25 bp, SARS Virus
aagtggtagaccacaaatagtcaca

SEQ ID NO: 40463 - DNA, 25 bp, SARS Virus
agtggtagaccaaaaatagtcacac

SEQ ID NO: 40464 - DNA, 25 bp, SARS Virus
gtggtagaccacaaatagtcacacg

SEQ ID NO: 40465 - DNA, 25 bp, SARS Virus
tggtagaccacaaatagtcacacgg

SEQ ID NO: 40466 - DNA, 25 bp, SARS Virus
ggtagaccacaaatagtcacacggt

SEQ ID NO: 40467 - DNA, 25 bp, SARS Virus
gtagaccacaaaaagtcacacggta

SEQ ID NO: 40468 - DNA, 25 bp, SARS Virus
tagaccacaaatagtcacacggtac

SEQ ID NO: 40469 - DNA, 25 bp, SARS Virus
agaccacaaataatcacacggtact

SEQ ID NO: 40470 - DNA, 25 bp, SARS Virus
gaccacaaatagacacacggtactc

SEQ ID NO: 40471 - DNA, 25 bp, SARS Virus
accacaaatagtaacacggtactct

SEQ ID NO: 40472 - DNA, 25 bp, SARS Virus
ccacaaatagtcacacggtactctg

SEQ ID NO: 40473 - DNA, 25 bp, SARS Virus
cacaaatagtcaaacggtactctgg

SEQ ID NO: 40474 - DNA, 25 bp, SARS Virus
acaaatagtcacacggtactctgga

SEQ ID NO: 40475 - DNA, 25 bp, SARS Virus
caaatagtcacaaggtactctggat

SEQ ID NO: 40476 - DNA, 25 bp, SARS Virus
aaatagtcacacagtactctggatt

SEQ ID NO: 40477 - DNA, 25 bp, SARS Virus
aatagtcacacgatactctggatta

SEQ ID NO: 40478 - DNA, 25 bp, SARS Virus
atagtcacacggaactctggattag

SEQ ID NO: 40479 - DNA, 25 bp, SARS Virus
tagtcacacggtactctggattagt

SEQ ID NO: 40480 - DNA, 25 bp, SARS Virus
agtcacacggtaatctggattagta

SEQ ID NO: 40481 - DNA, 25 bp, SARS Virus
gtcacacggtacactggattagtat

SEQ ID NO: 40482 - DNA, 25 bp, SARS Virus
tcacacggtactatggattagtatg

SEQ ID NO: 40483 - DNA, 25 bp, SARS Virus
cacacggtactcaggattagtatgg

SEQ ID NO: 40484 - DNA, 25 bp, SARS Virus
acacggtactctagattagtatggt

SEQ ID NO: 40485 - DNA, 25 bp, SARS Virus
cacggtactctgaattagtatggta

SEQ ID NO: 40486 - DNA, 25 bp, SARS Virus
acggtactctggattagtatggtaa

SEQ ID NO: 40487 - DNA, 25 bp, SARS Virus
cggtactctggaatagtatggtaat

SEQ ID NO: 40488 - DNA, 25 bp, SARS Virus
ggtactctggataagtatggtaatt

SEQ ID NO: 40489 - DNA, 25 bp, SARS Virus
gtactctggattagtatggtaattt

SEQ ID NO: 40490 - DNA, 25 bp, SARS Virus
tactctggattaatatggtaatttc

SEQ ID NO: 40491 - DNA, 25 bp, SARS Virus
actctggattagaatggtaatttcc

SEQ ID NO: 40492 - DNA, 25 bp, SARS Virus
ctctggattagtatggtaatttcca

SEQ ID NO: 40493 - DNA, 25 bp, SARS Virus
tctggattagtaaggtaatttccaa

SEQ ID NO: 40494 - DNA, 25 bp, SARS Virus
ctggattagtatagtaatttccaag

SEQ ID NO: 40495 - DNA, 25 bp, SARS Virus
tggattagtatgataatttccaaga

SEQ ID NO: 40496 - DNA, 25 bp, SARS Virus
ggattagtatggaaatttccaagaa

SEQ ID NO: 40497 - DNA, 25 bp, SARS Virus
gattagtatggtaatttccaagaaa

SEQ ID NO: 40498 - DNA, 25 bp, SARS Virus
attagtatggtaatttccaagaaag

SEQ ID NO: 40499 - DNA, 25 bp, SARS Virus
ttagtatggtaaattccaagaaagg

SEQ ID NO: 40500 - DNA, 25 bp, SARS Virus
tagtatggtaatatccaagaaagga

SEQ ID NO: 40501 - DNA, 25 bp, SARS Virus
agtatggtaattaccaagaaaggaa

SEQ ID NO: 40502 - DNA, 25 bp, SARS Virus
gtatggtaatttacaagaaaggaat

SEQ ID NO: 40503 - DNA, 25 bp, SARS Virus
tatggtaatttcaaagaaaggaatt

SEQ ID NO: 40504 - DNA, 25 bp, SARS Virus
atggtaatttccaagaaaggaatta

SEQ ID NO: 40505 - DNA, 25 bp, SARS Virus
tggtaatttccaagaaaggaattac

SEQ ID NO: 40506 - DNA, 25 bp, SARS Virus
ggtaatttccaaaaaaggaattacc

SEQ ID NO: 40507 - DNA, 25 bp, SARS Virus
gtaatttccaagaaaggaattacct

SEQ ID NO: 40508 - DNA, 25 bp, SARS Virus
taatttccaagaaaggaattaccta

SEQ ID NO: 40509 - DNA, 25 bp, SARS Virus
aatttccaagaaaggaattacctag

SEQ ID NO: 40510 - DNA, 25 bp, SARS Virus
atttccaagaaaagaattacctagt

SEQ ID NO: 40511 - DNA, 25 bp, SARS Virus
tttccaagaaagaaattacctagta

SEQ ID NO: 40512 - DNA, 25 bp, SARS Virus
ttccaagaaaggaattacctagtac

SEQ ID NO: 40513 - DNA, 25 bp, SARS Virus
tccaagaaaggaattacctagtaca

SEQ ID NO: 40514 - DNA, 25 bp, SARS Virus
ccaagaaaggaaatacctagtacac

SEQ ID NO: 40515 - DNA, 25 bp, SARS Virus
caagaaaggaataacctagtacacc

SEQ ID NO: 40516 - DNA, 25 bp, SARS Virus
aagaaaggaattacctagtacacca

SEQ ID NO: 40517 - DNA, 25 bp, SARS Virus
agaaaggaattaactagtacaccat

SEQ ID NO: 40518 - DNA, 25 bp, SARS Virus
gaaaggaattacatagtacaccatc

SEQ ID NO: 40519 - DNA, 25 bp, SARS Virus
aaaggaattaccaagtacaccatca

SEQ ID NO: 40520 - DNA, 25 bp, SARS Virus
aaggaattacctagtacaccatcac

SEQ ID NO: 40521 - DNA, 25 bp, SARS Virus
aggaattacctaatacaccatcaca

SEQ ID NO: 40522 - DNA, 25 bp, SARS Virus
ggaattacctagaacaccatcacaa

SEQ ID NO: 40523 - DNA, 25 bp, SARS Virus
gaattacctagtacaccatcacaac

SEQ ID NO: 40524 - DNA, 25 bp, SARS Virus
aattacctagtaaaccatcacaacc

SEQ ID NO: 40525 - DNA, 25 bp, SARS Virus
attacctagtacaccatcacaacca

SEQ ID NO: 40526 - DNA, 25 bp, SARS Virus
ttacctagtacaacatcacaaccaa

SEQ ID NO: 40527 - DNA, 25 bp, SARS Virus
tacctagtacacaatcacaaccaaa

SEQ ID NO: 40528 - DNA, 25 bp, SARS Virus
acctagtacaccatcacaaccaaaa

SEQ ID NO: 40529 - DNA, 25 bp, SARS Virus
cctagtacaccaacacaaccaaaat

SEQ ID NO: 40530 - DNA, 25 bp, SARS Virus
ctagtacaccataacaaccaaaatt

SEQ ID NO: 40531 - DNA, 25 bp, SARS Virus
tagtacaccatcacaaccaaaattg

SEQ ID NO: 40532 - DNA, 25 bp, SARS Virus
agtacaccatcaaaaccaaaattgt

SEQ ID NO: 40533 - DNA, 25 bp, SARS Virus
gtacaccatcacaaccaaaattgta

SEQ ID NO: 40534 - DNA, 25 bp, SARS Virus
tacaccatcacaaccaaaattgtaa

SEQ ID NO: 40535 - DNA, 25 bp, SARS Virus
acaccatcacaaacaaaattgtaac

SEQ ID NO: 40536 - DNA, 25 bp, SARS Virus
caccatcacaacaaaaattgtaact

SEQ ID NO: 40537 - DNA, 25 bp, SARS Virus
accatcacaaccaaaattgtaacta

SEQ ID NO: 40538 - DNA, 25 bp, SARS Virus
ccatcacaaccaaaattgtaactaa

SEQ ID NO: 40539 - DNA, 25 bp, SARS Virus
catcacaaccaaaattgtaactaat

SEQ ID NO: 40540 - DNA, 25 bp, SARS Virus
atcacaaccaaaattgtaactaata

SEQ ID NO: 40541 - DNA, 25 bp, SARS Virus
tcacaaccaaaaatgtaactaatac

SEQ ID NO: 40542 - DNA, 25 bp, SARS Virus
cacaaccaaaatagtaactaatact

SEQ ID NO: 40543 - DNA, 25 bp, SARS Virus
acaaccaaaattataactaatacta

SEQ ID NO: 40544 - DNA, 25 bp, SARS Virus
caaccaaaattgaaactaatactaa

SEQ ID NO: 40545 - DNA, 25 bp, SARS Virus
aaccaaaattgtaactaatactaac

SEQ ID NO: 40546 - DNA, 25 bp, SARS Virus
accaaaattgtaactaatactaacg

SEQ ID NO: 40547 - DNA, 25 bp, SARS Virus
ccaaaattgtaaataatactaacgc

SEQ ID NO: 40548 - DNA, 25 bp, SARS Virus
caaaattgtaacaaatactaacgca

SEQ ID NO: 40549 - DNA, 25 bp, SARS Virus
aaaattgtaactaatactaacgcac

SEQ ID NO: 40550 - DNA, 25 bp, SARS Virus
aaattgtaactaatactaacgcaca

SEQ ID NO: 40551 - DNA, 25 bp, SARS Virus
aattgtaactaaaactaacgcacag

SEQ ID NO: 40552 - DNA, 25 bp, SARS Virus
attgtaactaatactaacgcacaga

SEQ ID NO: 40553 - DNA, 25 bp, SARS Virus
ttgtaactaataataacgcacagaa

SEQ ID NO: 40554 - DNA, 25 bp, SARS Virus
tgtaactaatacaaacgcacagaaa

SEQ ID NO: 40555 - DNA, 25 bp, SARS Virus
gtaactaatactaacgcacagaaag

SEQ ID NO: 40556 - DNA, 25 bp, SARS Virus
taactaatactaacgcacagaaaga

SEQ ID NO: 40557 - DNA, 25 bp, SARS Virus
aactaatactaaagcacagaaagac

SEQ ID NO: 40558 - DNA, 25 bp, SARS Virus
actaatactaacacacagaaagacg

SEQ ID NO: 40559 - DNA, 25 bp, SARS Virus
ctaatactaacgaacagaaagacga

SEQ ID NO: 40560 - DNA, 25 bp, SARS Virus
taatactaacgcacagaaagacgat

SEQ ID NO: 40561 - DNA, 25 bp, SARS Virus
aatactaacgcaaagaaagacgata

SEQ ID NO: 40562 - DNA, 25 bp, SARS Virus
atactaacgcacagaaagacgatat

SEQ ID NO: 40563 - DNA, 25 bp, SARS Virus
tactaacgcacaaaaagacgatata

SEQ ID NO: 40564 - DNA, 25 bp, SARS Virus
actaacgcacagaaagacgatatac

SEQ ID NO: 40565 - DNA, 25 bp, SARS Virus
ctaacgcacagaaagacgatatacg

SEQ ID NO: 40566 - DNA, 25 bp, SARS Virus
taacgcacagaaagacgatatacgt

SEQ ID NO: 40567 - DNA, 25 bp, SARS Virus
aacgcacagaaaaacgatatacgta

SEQ ID NO: 40568 - DNA, 25 bp, SARS Virus
acgcacagaaagacgatatacgtag

SEQ ID NO: 40569 - DNA, 25 bp, SARS Virus
cgcacagaaagaagatatacgtagt

SEQ ID NO: 40570 - DNA, 25 bp, SARS Virus
gcacagaaagacaatatacgtagta

SEQ ID NO: 40571 - DNA, 25 bp, SARS Virus
cacagaaagacgatatacgtagtat

SEQ ID NO: 40572 - DNA, 25 bp, SARS Virus
acagaaagacgaaatacgtagtata

SEQ ID NO: 40573 - DNA, 25 bp, SARS Virus
cagaaagacgatatacgtagtatac

SEQ ID NO: 40574 - DNA, 25 bp, SARS Virus
agaaagacgataaacgtagtatacc

SEQ ID NO: 40575 - DNA, 25 bp, SARS Virus
gaaagacgatatacgtagtatacct

SEQ ID NO: 40576 - DNA, 25 bp, SARS Virus
aaagacgatataagtagtatacctc

SEQ ID NO: 40577 - DNA, 25 bp, SARS Virus
aagacgatatacatagtatacctcg

SEQ ID NO: 40578 - DNA, 25 bp, SARS Virus
agacgatatacgaagtatacctcga

SEQ ID NO: 40579 - DNA, 25 bp, SARS Virus
gacgatatacgtagtatacctcgaa

SEQ ID NO: 40580 - DNA, 25 bp, SARS Virus
acgatatacgtaatatacctcgaag

SEQ ID NO: 40581 - DNA, 25 bp, SARS Virus
cgatatacgtagaatacctcgaagg

SEQ ID NO: 40582 - DNA, 25 bp, SARS Virus
gatatacgtagtatacctcgaaggt

SEQ ID NO: 40583 - DNA, 25 bp, SARS Virus
atatacgtagtaaacctcgaaggtt

SEQ ID NO: 40584 - DNA, 25 bp, SARS Virus
tatacgtagtatacctcgaaggttg

SEQ ID NO: 40585 - DNA, 25 bp, SARS Virus
atacgtagtataactcgaaggttgt

SEQ ID NO: 40586 - DNA, 25 bp, SARS Virus
tacgtagtatacatcgaaggttgtc

SEQ ID NO: 40587 - DNA, 25 bp, SARS Virus
acgtagtataccacgaaggttgtcc

SEQ ID NO: 40588 - DNA, 25 bp, SARS Virus
cgtagtatacctagaaggttgtcct

SEQ ID NO: 40589 - DNA, 25 bp, SARS Virus
gtagtatacctcaaaggttgtcctc

SEQ ID NO: 40590 - DNA, 25 bp, SARS Virus
tagtatacctcgaaggttgtcctca

SEQ ID NO: 40591 - DNA, 25 bp, SARS Virus
agtatacctcgaaggttgtcctcat

SEQ ID NO: 40592 - DNA, 25 bp, SARS Virus
gtatacctcgaaagttgtcctcatg

SEQ ID NO: 40593 - DNA, 25 bp, SARS Virus
tatacctcgaagattgtcctcatgt

SEQ ID NO: 40594 - DNA, 25 bp, SARS Virus
atacctcgaaggatgtcctcatgtg

SEQ ID NO: 40595 - DNA, 25 bp, SARS Virus
tacctcgaaggtagtcctcatgtgc

SEQ ID NO: 40596 - DNA, 25 bp, SARS Virus
acctcgaaggttatcctcatgtgcg

SEQ ID NO: 40597 - DNA, 25 bp, SARS Virus
cctcgaaggttgacctcatgtgcga

SEQ ID NO: 40598 - DNA, 25 bp, SARS Virus
ctcgaaggttgtactcatgtgcgac

SEQ ID NO: 40599 - DNA, 25 bp, SARS Virus
tcgaaggttgtcatcatgtgcgacc

SEQ ID NO: 40600 - DNA, 25 bp, SARS Virus
cgaaggttgtccacatgtgcgacca

SEQ ID NO: 40601 - DNA, 25 bp, SARS Virus
gaaggttgtcctaatgtgcgaccat

SEQ ID NO: 40602 - DNA, 25 bp, SARS Virus
aaggttgtcctcatgtgcgaccatg

SEQ ID NO: 40603 - DNA, 25 bp, SARS Virus
aggttgtcctcaagtgcgaccatga

SEQ ID NO: 40604 - DNA, 25 bp, SARS Virus
ggttgtcctcatatgcgaccatgac

SEQ ID NO: 40605 - DNA, 25 bp, SARS Virus
gttgtcctcatgagcgaccatgact

SEQ ID NO: 40606 - DNA, 25 bp, SARS Virus
ttgtcctcatgtacgaccatgactg

SEQ ID NO: 40607 - DNA, 25 bp, SARS Virus
tgtcctcatgtgagaccatgactga

SEQ ID NO: 40608 - DNA, 25 bp, SARS Virus
gtcctcatgtgcaaccatgactgaa

SEQ ID NO: 40609 - DNA, 25 bp, SARS Virus
tcctcatgtgcgaccatgactgaat

SEQ ID NO: 40610 - DNA, 25 bp, SARS Virus
cctcatgtgcgaacatgactgaatc

SEQ ID NO: 40611 - DNA, 25 bp, SARS Virus
ctcatgtgcgacaatgactgaatct

SEQ ID NO: 40612 - DNA, 25 bp, SARS Virus
tcatgtgcgaccatgactgaatctt

SEQ ID NO: 40613 - DNA, 25 bp, SARS Virus
catgtgcgaccaagactgaatcttc

SEQ ID NO: 40614 - DNA, 25 bp, SARS Virus
atgtgcgaccataactgaatcttcc

SEQ ID NO: 40615 - DNA, 25 bp, SARS Virus
tgtgcgaccatgactgaatcttcca

SEQ ID NO: 40616 - DNA, 25 bp, SARS Virus
gtgcgaccatgaatgaatcttccat

SEQ ID NO: 40617 - DNA, 25 bp, SARS Virus
tgcgaccatgacagaatcttccatt

SEQ ID NO: 40618 - DNA, 25 bp, SARS Virus
gcgaccatgactaaatcttccattt

SEQ ID NO: 40619 - DNA, 25 bp, SARS Virus
cgaccatgactgaatcttccattta

SEQ ID NO: 40620 - DNA, 25 bp, SARS Virus
gaccatgactgaatcttccatttaa

SEQ ID NO: 40621 - DNA, 25 bp, SARS Virus
accatgactgaaacttccatttaag

SEQ ID NO: 40622 - DNA, 25 bp, SARS Virus
ccatgactgaatattccatttaaga

SEQ ID NO: 40623 - DNA, 25 bp, SARS Virus
catgactgaatcatccatttaagat

SEQ ID NO: 40624 - DNA, 25 bp, SARS Virus
atgactgaatctaccatttaagata

SEQ ID NO: 40625 - DNA, 25 bp, SARS Virus
tgactgaatcttacatttaagatac

SEQ ID NO: 40626 - DNA, 25 bp, SARS Virus
gactgaatcttcaatttaagatacc

SEQ ID NO: 40627 - DNA, 25 bp, SARS Virus
actgaatcttccatttaagatacca

SEQ ID NO: 40628 - DNA, 25 bp, SARS Virus
ctgaatcttccaattaagataccag

SEQ ID NO: 40629 - DNA, 25 bp, SARS Virus
tgaatcttccatataagataccagg

SEQ ID NO: 40630 - DNA, 25 bp, SARS Virus
gaatcttccattaaagataccaggt

SEQ ID NO: 40631 - DNA, 25 bp, SARS Virus
aatcttccatttaagataccaggta

SEQ ID NO: 40632 - DNA, 25 bp, SARS Virus
atcttccatttaagataccaggtaa

SEQ ID NO: 40633 - DNA, 25 bp, SARS Virus
cccacgtaccatcttcattggacac

SEQ ID NO: 40634 - DNA, 25 bp, SARS Virus
ccacgtaccatgctcattggacacc

SEQ ID NO: 40635 - DNA, 25 bp, SARS Virus
cacgtaccatgtccattggacacct

SEQ ID NO: 40636 - DNA, 25 bp, SARS Virus
acgtaccatgttcattggacacctt

SEQ ID NO: 40637 - DNA, 25 bp, SARS Virus
cgtaccatgttccttggacaccttg

SEQ ID NO: 40638 - DNA, 25 bp, SARS Virus
gtaccatgttcactggacaccttga

SEQ ID NO: 40639 - DNA, 25 bp, SARS Virus
taccatgttcatcggacaccttgat

SEQ ID NO: 40640 - DNA, 25 bp, SARS Virus
accatgttcattcgacaccttgatg

SEQ ID NO: 40641 - DNA, 25 bp, SARS Virus
ccatgttcattgcacaccttgatgt

SEQ ID NO: 40642 - DNA, 25 bp, SARS Virus
catgttcattggccaccttgatgtt

SEQ ID NO: 40643 - DNA, 25 bp, SARS Virus
atgttcattggacaccttgatgttg

SEQ ID NO: 40644 - DNA, 25 bp, SARS Virus
tgttcattggaccccttgatgttga

SEQ ID NO: 40645 - DNA, 25 bp, SARS Virus
gttcattggacaccttgatgttgag

SEQ ID NO: 40646 - DNA, 25 bp, SARS Virus
ttcattggacaccttgatgttgaga

SEQ ID NO: 40647 - DNA, 25 bp, SARS Virus
tcattggacaccctgatgttgagaa

SEQ ID NO: 40648 - DNA, 25 bp, SARS Virus
cattggacacctcgatgttgagaat

SEQ ID NO: 40649 - DNA, 25 bp, SARS Virus
attggacaccttcatgttgagaatt

SEQ ID NO: 40650 - DNA, 25 bp, SARS Virus
ttggacaccttgctgttgagaatta

SEQ ID NO: 40651 - DNA, 25 bp, SARS Virus
tggacaccttgacgttgagaattac

SEQ ID NO: 40652 - DNA, 25 bp, SARS Virus
ggacaccttgatcttgagaattacc

SEQ ID NO: 40653 - DNA, 25 bp, SARS Virus
gacaccttgatgctgagaattacct

SEQ ID NO: 40654 - DNA, 25 bp, SARS Virus
acaccttgatgtcgagaattaccta

SEQ ID NO: 40655 - DNA, 25 bp, SARS Virus
caccttgatgttcagaattacctaa

SEQ ID NO: 40656 - DNA, 25 bp, SARS Virus
accttgatgttgcgaattacctaac

SEQ ID NO: 40657 - DNA, 25 bp, SARS Virus
ccttgatgttgacaattacctaaca

SEQ ID NO: 40658 - DNA, 25 bp, SARS Virus
cttgatgttgagcattacctaacac

SEQ ID NO: 40659 - DNA, 25 bp, SARS Virus
ttgatgttgagacttacctaacacc

SEQ ID NO: 40660 - DNA, 25 bp, SARS Virus
tgatgttgagaactacctaacacca

SEQ ID NO: 40661 - DNA, 25 bp, SARS Virus
gatgttgagaatcacctaacaccaa

SEQ ID NO: 40662 - DNA, 25 bp, SARS Virus
atgttgagaattccctaacaccaac

SEQ ID NO: 40663 - DNA, 25 bp, SARS Virus
tgttgagaattacctaacaccaacc

SEQ ID NO: 40664 - DNA, 25 bp, SARS Virus
gttgagaattacctaacaccaacct

SEQ ID NO: 40665 - DNA, 25 bp, SARS Virus
ttgagaattacccaacaccaaccta

SEQ ID NO: 40666 - DNA, 25 bp, SARS Virus
tgagaattacctcacaccaacctac

SEQ ID NO: 40667 - DNA, 25 bp, SARS Virus
gagaattacctaccaccaacctact

SEQ ID NO: 40668 - DNA, 25 bp, SARS Virus
agaattacctaacaccaacctactg

SEQ ID NO: 40669 - DNA, 25 bp, SARS Virus
gaattacctaaccccaacctactgt

SEQ ID NO: 40670 - DNA, 25 bp, SARS Virus
aattacctaacaccaacctactgtg

SEQ ID NO: 40671 - DNA, 25 bp, SARS Virus
attacctaacaccaacctactgtgt

SEQ ID NO: 40672 - DNA, 25 bp, SARS Virus
ttacctaacacccacctactgtgtc

SEQ ID NO: 40673 - DNA, 25 bp, SARS Virus
tacctaacaccaccctactgtgtca

SEQ ID NO: 40674 - DNA, 25 bp, SARS Virus
acctaacaccaacctactgtgtcat

SEQ ID NO: 40675 - DNA, 25 bp, SARS Virus
cctaacaccaacctactgtgtcata

SEQ ID NO: 40676 - DNA, 25 bp, SARS Virus
ctaacaccaacccactgtgtcatat

SEQ ID NO: 40677 - DNA, 25 bp, SARS Virus
taacaccaacctcctgtgtcatatg

SEQ ID NO: 40678 - DNA, 25 bp, SARS Virus
aacaccaacctactgtgtcatatga

SEQ ID NO: 40679 - DNA, 25 bp, SARS Virus
acaccaacctaccgtgtcatatgac

SEQ ID NO: 40680 - DNA, 25 bp, SARS Virus
caccaacctactctgtcatatgaca

SEQ ID NO: 40681 - DNA, 25 bp, SARS Virus
accaacctactgcgtcatatgacag

SEQ ID NO: 40682 - DNA, 25 bp, SARS Virus
ccaacctactgtctcatatgacagg

SEQ ID NO: 40683 - DNA, 25 bp, SARS Virus
caacctactgtgccatatgacaggt

SEQ ID NO: 40684 - DNA, 25 bp, SARS Virus
aacctactgtgtcatatgacaggtt

SEQ ID NO: 40685 - DNA, 25 bp, SARS Virus
acctactgtgtcctatgacaggttc

SEQ ID NO: 40686 - DNA, 25 bp, SARS Virus
cctactgtgtcacatgacaggttct

SEQ ID NO: 40687 - DNA, 25 bp, SARS Virus
ctactgtgtcatctgacaggttctg

SEQ ID NO: 40688 - DNA, 25 bp, SARS Virus
tactgtgtcatacgacaggttctgt

SEQ ID NO: 40689 - DNA, 25 bp, SARS Virus
actgtgtcatatcacaggttctgta

SEQ ID NO: 40690 - DNA, 25 bp, SARS Virus
ctgtgtcatatgccaggttctgtac

SEQ ID NO: 40691 - DNA, 25 bp, SARS Virus
tgtgtcatatgacaggttctgtaca

SEQ ID NO: 40692 - DNA, 25 bp, SARS Virus
gtgtcatatgaccggttctgtacag

SEQ ID NO: 40693 - DNA, 25 bp, SARS Virus
tgtcatatgacacgttctgtacagt

SEQ ID NO: 40694 - DNA, 25 bp, SARS Virus
gtcatatgacagcttctgtacagta

SEQ ID NO: 40695 - DNA, 25 bp, SARS Virus
tcatatgacaggctctgtacagtaa

SEQ ID NO: 40696 - DNA, 25 bp, SARS Virus
catatgacaggtcctgtacagtaaa

SEQ ID NO: 40697 - DNA, 25 bp, SARS Virus
atatgacaggttctgtacagtaaac

SEQ ID NO: 40698 - DNA, 25 bp, SARS Virus
tatgacaggttccgtacagtaaacg

SEQ ID NO: 40699 - DNA, 25 bp, SARS Virus
atgacaggttctctacagtaaacgt

SEQ ID NO: 40700 - DNA, 25 bp, SARS Virus
tgacaggttctgcacagtaaacgtg

SEQ ID NO: 40701 - DNA, 25 bp, SARS Virus
gacaggttctgtccagtaaacgtgt

SEQ ID NO: 40702 - DNA, 25 bp, SARS Virus
acaggttctgtacagtaaacgtgtc

SEQ ID NO: 40703 - DNA, 25 bp, SARS Virus
caggttctgtaccgtaaacgtgtcg

SEQ ID NO: 40704 - DNA, 25 bp, SARS Virus
aggttctgtacactaaacgtgtcgt

SEQ ID NO: 40705 - DNA, 25 bp, SARS Virus
ggttctgtacagcaaacgtgtcgtc

SEQ ID NO: 40706 - DNA, 25 bp, SARS Virus
gttctgtacagtcaacgtgtcgtct

SEQ ID NO: 40707 - DNA, 25 bp, SARS Virus
ttctgtacagtacacgtgtcgtctt

SEQ ID NO: 40708 - DNA, 25 bp, SARS Virus
tctgtacagtaaccgtgtcgtcttc

SEQ ID NO: 40709 - DNA, 25 bp, SARS Virus
ctgtacagtaaacgtgtcgtcttct

SEQ ID NO: 40710 - DNA, 25 bp, SARS Virus
tgtacagtaaacctgtcgtcttctg

SEQ ID NO: 40711 - DNA, 25 bp, SARS Virus
gtacagtaaacgcgtcgtcttctgt

SEQ ID NO: 40712 - DNA, 25 bp, SARS Virus
tacagtaaacgtctcgtcttctgta

SEQ ID NO: 40713 - DNA, 25 bp, SARS Virus
acagtaaacgtgccgtcttctgtac

SEQ ID NO: 40714 - DNA, 25 bp, SARS Virus
cagtaaacgtgtcgtcttctgtacg

SEQ ID NO: 40715 - DNA, 25 bp, SARS Virus
agtaaacgtgtcctcttctgtacga

SEQ ID NO: 40716 - DNA, 25 bp, SARS Virus
gtaaacgtgtcgccttctgtacgaa

SEQ ID NO: 40717 - DNA, 25 bp, SARS Virus
taaacgtgtcgtcttctgtacgaat

SEQ ID NO: 40718 - DNA, 25 bp, SARS Virus
aaacgtgtcgtcctctgtacgaatt

SEQ ID NO: 40719 - DNA, 25 bp, SARS Virus
aacgtgtcgtctcctgtacgaatta

SEQ ID NO: 40720 - DNA, 25 bp, SARS Virus
acgtgtcgtcttctgtacgaattag

SEQ ID NO: 40721 - DNA, 25 bp, SARS Virus
cgtgtcgtcttccgtacgaattagg

SEQ ID NO: 40722 - DNA, 25 bp, SARS Virus
gtgtcgtcttctctacgaattagga

SEQ ID NO: 40723 - DNA, 25 bp, SARS Virus
tgtcgtcttctgcacgaattaggat

SEQ ID NO: 40724 - DNA, 25 bp, SARS Virus
gtcgtcttctgtccgaattaggatt

SEQ ID NO: 40725 - DNA, 25 bp, SARS Virus
tcgtcttctgtacgaattaggattg

SEQ ID NO: 40726 - DNA, 25 bp, SARS Virus
cgtcttctgtaccaattaggattga

SEQ ID NO: 40727 - DNA, 25 bp, SARS Virus
gtcttctgtacgcattaggattgat

SEQ ID NO: 40728 - DNA, 25 bp, SARS Virus
tcttctgtacgacttaggattgata

SEQ ID NO: 40729 - DNA, 25 bp, SARS Virus
cttctgtacgaactaggattgatac

SEQ ID NO: 40730 - DNA, 25 bp, SARS Virus
ttctgtacgaatcaggattgatact

SEQ ID NO: 40731 - DNA, 25 bp, SARS Virus
tctgtacgaattcggattgatactt

SEQ ID NO: 40732 - DNA, 25 bp, SARS Virus
ctgtacgaattacgattgatacttc

SEQ ID NO: 40733 - DNA, 25 bp, SARS Virus
tgtacgaattagcattgatacttct

SEQ ID NO: 40734 - DNA, 25 bp, SARS Virus
gtacgaattaggcttgatacttcta

SEQ ID NO: 40735 - DNA, 25 bp, SARS Virus
tacgaattaggactgatacttctag

SEQ ID NO: 40736 - DNA, 25 bp, SARS Virus
acgaattaggatcgatacttctaga

SEQ ID NO: 40737 - DNA, 25 bp, SARS Virus
cgaattaggattcatacttctagac

SEQ ID NO: 40738 - DNA, 25 bp, SARS Virus
gaattaggattgctacttctagacg

SEQ ID NO: 40739 - DNA, 25 bp, SARS Virus
aattaggattgacacttctagacga

SEQ ID NO: 40740 - DNA, 25 bp, SARS Virus
attaggattgatccttctagacgag

SEQ ID NO: 40741 - DNA, 25 bp, SARS Virus
ttaggattgatacttctagacgagt

SEQ ID NO: 40742 - DNA, 25 bp, SARS Virus
taggattgatacctctagacgagta

SEQ ID NO: 40743 - DNA, 25 bp, SARS Virus
aggattgatactcctagacgagtaa

SEQ ID NO: 40744 - DNA, 25 bp, SARS Virus
ggattgatacttctagacgagtaag

SEQ ID NO: 40745 - DNA, 25 bp, SARS Virus
gattgatacttccagacgagtaagc

SEQ ID NO: 40746 - DNA, 25 bp, SARS Virus
attgatacttctcgacgagtaagcg

SEQ ID NO: 40747 - DNA, 25 bp, SARS Virus
ttgatacttctacacgagtaagcgt

SEQ ID NO: 40748 - DNA, 25 bp, SARS Virus
tgatacttctagccgagtaagcgtt

SEQ ID NO: 40749 - DNA, 25 bp, SARS Virus
gatacttctagacgagtaagcgttt

SEQ ID NO: 40750 - DNA, 25 bp, SARS Virus
atacttctagaccagtaagcgttta

SEQ ID NO: 40751 - DNA, 25 bp, SARS Virus
tacttctagacgcgtaagcgtttag

SEQ ID NO: 40752 - DNA, 25 bp, SARS Virus
acttctagacgactaagcgtttagg

SEQ ID NO: 40753 - DNA, 25 bp, SARS Virus
cttctagacgagcaagcgtttaggt

SEQ ID NO: 40754 - DNA, 25 bp, SARS Virus
ttctagacgagtcagcgtttaggtt

SEQ ID NO: 40755 - DNA, 25 bp, SARS Virus
tctagacgagtacgcgtttaggttg

SEQ ID NO: 40756 - DNA, 25 bp, SARS Virus
ctagacgagtaaccgtttaggttgg

SEQ ID NO: 40757 - DNA, 25 bp, SARS Virus
tagacgagtaagcgtttaggttggt

SEQ ID NO: 40758 - DNA, 25 bp, SARS Virus
agacgagtaagcctttaggttggta

SEQ ID NO: 40759 - DNA, 25 bp, SARS Virus
gacgagtaagcgcttaggttggtat

SEQ ID NO: 40760 - DNA, 25 bp, SARS Virus
acgagtaagcgtctaggttggtatc

SEQ ID NO: 40761 - DNA, 25 bp, SARS Virus
cgagtaagcgttcaggttggtatcg

SEQ ID NO: 40762 - DNA, 25 bp, SARS Virus
gagtaagcgtttcggttggtatcga

SEQ ID NO: 40763 - DNA, 25 bp, SARS Virus
agtaagcgtttacgttggtatcgaa

SEQ ID NO: 40764 - DNA, 25 bp, SARS Virus
gtaagcgtttagcttggtatcgaaa

SEQ ID NO: 40765 - DNA, 25 bp, SARS Virus
taagcgtttaggctggtatcgaaag

SEQ ID NO: 40766 - DNA, 25 bp, SARS Virus
aagcgtttaggtcggtatcgaaaga

SEQ ID NO: 40767 - DNA, 25 bp, SARS Virus
agcgtttaggttcgtatcgaaagaa

SEQ ID NO: 40768 - DNA, 25 bp, SARS Virus
gcgtttaggttgctatcgaaagaac

SEQ ID NO: 40769 - DNA, 25 bp, SARS Virus
cgtttaggttggcatcgaaagaaca

SEQ ID NO: 40770 - DNA, 25 bp, SARS Virus
gtttaggttggtctcgaaagaacaa

SEQ ID NO: 40771 - DNA, 25 bp, SARS Virus
tttaggttggtaccgaaagaacaag

SEQ ID NO: 40772 - DNA, 25 bp, SARS Virus
ttaggttggtatcgaaagaacaagt

SEQ ID NO: 40773 - DNA, 25 bp, SARS Virus
taggttggtatccaaagaacaagtc

SEQ ID NO: 40774 - DNA, 25 bp, SARS Virus
aggttggtatcgcaagaacaagtcc

SEQ ID NO: 40775 - DNA, 25 bp, SARS Virus
ggttggtatcgacagaacaagtccg

SEQ ID NO: 40776 - DNA, 25 bp, SARS Virus
gttggtatcgaacgaacaagtccga

SEQ ID NO: 40777 - DNA, 25 bp, SARS Virus
ttggtatcgaaacaacaagtccgac

SEQ ID NO: 40778 - DNA, 25 bp, SARS Virus
tggtatcgaaagcacaagtccgacc

SEQ ID NO: 40779 - DNA, 25 bp, SARS Virus
ggtatcgaaagaccaagtccgaccg

SEQ ID NO: 40780 - DNA, 25 bp, SARS Virus
gtatcgaaagaacaagtccgaccgt

SEQ ID NO: 40781 - DNA, 25 bp, SARS Virus
tatcgaaagaaccagtccgaccgtt

SEQ ID NO: 40782 - DNA, 25 bp, SARS Virus
atcgaaagaacacgtccgaccgtta

SEQ ID NO: 40783 - DNA, 25 bp, SARS Virus
tcgaaagaacaactccgaccgttac

SEQ ID NO: 40784 - DNA, 25 bp, SARS Virus
cgaaagaacaagcccgaccgttaca

SEQ ID NO: 40785 - DNA, 25 bp, SARS Virus
gaaagaacaagtccgaccgttacaa

SEQ ID NO: 40786 - DNA, 25 bp, SARS Virus
aaagaacaagtccgaccgttacaag

SEQ ID NO: 40787 - DNA, 25 bp, SARS Virus
aagaacaagtcccaccgttacaagt

SEQ ID NO: 40788 - DNA, 25 bp, SARS Virus
agaacaagtccgcccgttacaagtt

SEQ ID NO: 40789 - DNA, 25 bp, SARS Virus
gaacaagtccgaccgttacaagttg

SEQ ID NO: 40790 - DNA, 25 bp, SARS Virus
aacaagtccgaccgttacaagttga

SEQ ID NO: 40791 - DNA, 25 bp, SARS Virus
acaagtccgacccttacaagttgaa

SEQ ID NO: 40792 - DNA, 25 bp, SARS Virus
caagtccgaccgctacaagttgaag

SEQ ID NO: 40793 - DNA, 25 bp, SARS Virus
aagtccgaccgtcacaagttgaagc

SEQ ID NO: 40794 - DNA, 25 bp, SARS Virus
agtccgaccgttccaagttgaagca

SEQ ID NO: 40795 - DNA, 25 bp, SARS Virus
gtccgaccgttacaagttgaagcac

SEQ ID NO: 40796 - DNA, 25 bp, SARS Virus
tccgaccgttaccagttgaagcaca

SEQ ID NO: 40797 - DNA, 25 bp, SARS Virus
ccgaccgttacacgttgaagcacaa

SEQ ID NO: 40798 - DNA, 25 bp, SARS Virus
cgaccgttacaacttgaagcacaat

SEQ ID NO: 40799 - DNA, 25 bp, SARS Virus
gaccgttacaagctgaagcacaata

SEQ ID NO: 40800 - DNA, 25 bp, SARS Virus
accgttacaagtcgaagcacaataa

SEQ ID NO: 40801 - DNA, 25 bp, SARS Virus
ccgttacaagttcaagcacaataac

SEQ ID NO: 40802 - DNA, 25 bp, SARS Virus
cgttacaagttgcagcacaataacc

SEQ ID NO: 40803 - DNA, 25 bp, SARS Virus
gttacaagttgacgcacaataaccg

SEQ ID NO: 40804 - DNA, 25 bp, SARS Virus
ttacaagttgaaccacaataaccgg

SEQ ID NO: 40805 - DNA, 25 bp, SARS Virus
tacaagttgaagcacaataaccggt

SEQ ID NO: 40806 - DNA, 25 bp, SARS Virus
acaagttgaagcccaataaccggta

SEQ ID NO: 40807 - DNA, 25 bp, SARS Virus
caagttgaagcacaataaccggtaa

SEQ ID NO: 40808 - DNA, 25 bp, SARS Virus
aagttgaagcaccataaccggtaag

SEQ ID NO: 40809 - DNA, 25 bp, SARS Virus
agttgaagcacactaaccggtaaga

SEQ ID NO: 40810 - DNA, 25 bp, SARS Virus
gttgaagcacaacaaccggtaagat

SEQ ID NO: 40811 - DNA, 25 bp, SARS Virus
ttgaagcacaatcaccggtaagata

SEQ ID NO: 40812 - DNA, 25 bp, SARS Virus
tgaagcacaatacccggtaagatac

SEQ ID NO: 40813 - DNA, 25 bp, SARS Virus
gaagcacaataaccggtaagatacg

SEQ ID NO: 40814 - DNA, 25 bp, SARS Virus
aagcacaataaccggtaagatacgt

SEQ ID NO: 40815 - DNA, 25 bp, SARS Virus
agcacaataacccgtaagatacgtt

SEQ ID NO: 40816 - DNA, 25 bp, SARS Virus
gcacaataaccgctaagatacgttt

SEQ ID NO: 40817 - DNA, 25 bp, SARS Virus
cacaataaccggcaagatacgtttt

SEQ ID NO: 40818 - DNA, 25 bp, SARS Virus
acaataaccggtcagatacgtttta

SEQ ID NO: 40819 - DNA, 25 bp, SARS Virus
caataaccggtacgatacgttttaa

SEQ ID NO: 40820 - DNA, 25 bp, SARS Virus
aataaccggtaacatacgttttaac

SEQ ID NO: 40821 - DNA, 25 bp, SARS Virus
ataaccggtaagctacgttttaaca

SEQ ID NO: 40822 - DNA, 25 bp, SARS Virus
taaccggtaagacacgttttaacag

SEQ ID NO: 40823 - DNA, 25 bp, SARS Virus
aaccggtaagatccgttttaacaga

SEQ ID NO: 40824 - DNA, 25 bp, SARS Virus
accggtaagatacgttttaacagac

SEQ ID NO: 40825 - DNA, 25 bp, SARS Virus
ccggtaagataccttttaacagacg

SEQ ID NO: 40826 - DNA, 25 bp, SARS Virus
cggtaagatacgctttaacagacga

SEQ ID NO: 40827 - DNA, 25 bp, SARS Virus
ggtaagatacgtcttaacagacgaa

SEQ ID NO: 40828 - DNA, 25 bp, SARS Virus
gtaagatacgttctaacagacgaat

SEQ ID NO: 40829 - DNA, 25 bp, SARS Virus
taagatacgtttcaacagacgaatc

SEQ ID NO: 40830 - DNA, 25 bp, SARS Virus
aagatacgttttcacagacgaatcc

SEQ ID NO: 40831 - DNA, 25 bp, SARS Virus
agatacgttttaccagacgaatccg

SEQ ID NO: 40832 - DNA, 25 bp, SARS Virus
gatacgttttaacagacgaatccga

SEQ ID NO: 40833 - DNA, 25 bp, SARS Virus
atacgttttaaccgacgaatccgaa

SEQ ID NO: 40834 - DNA, 25 bp, SARS Virus
tacgttttaacacacgaatccgaat

SEQ ID NO: 40835 - DNA, 25 bp, SARS Virus
acgttttaacagccgaatccgaatt

SEQ ID NO: 40836 - DNA, 25 bp, SARS Virus
cgttttaacagacgaatccgaattt

SEQ ID NO: 40837 - DNA, 25 bp, SARS Virus
gttttaacagaccaatccgaatttc

SEQ ID NO: 40838 - DNA, 25 bp, SARS Virus
ttttaacagacgcatccgaatttca

SEQ ID NO: 40839 - DNA, 25 bp, SARS Virus
tttaacagacgactccgaatttcaa

SEQ ID NO: 40840 - DNA, 25 bp, SARS Virus
ttaacagacgaacccgaatttcaac

SEQ ID NO: 40841 - DNA, 25 bp, SARS Virus
taacagacgaatccgaatttcaact

SEQ ID NO: 40842 - DNA, 25 bp, SARS Virus
aacagacgaatccgaatttcaacta

SEQ ID NO: 40843 - DNA, 25 bp, SARS Virus
acagacgaatcccaatttcaactat

SEQ ID NO: 40844 - DNA, 25 bp, SARS Virus
cagacgaatccgcatttcaactatg

SEQ ID NO: 40845 - DNA, 25 bp, SARS Virus
agacgaatccgactttcaactatga

SEQ ID NO: 40846 - DNA, 25 bp, SARS Virus
gacgaatccgaacttcaactatgaa

SEQ ID NO: 40847 - DNA, 25 bp, SARS Virus
acgaatccgaatctcaactatgaag

SEQ ID NO: 40848 - DNA, 25 bp, SARS Virus
cgaatccgaattccaactatgaaga

SEQ ID NO: 40849 - DNA, 25 bp, SARS Virus
gaatccgaatttcaactatgaagat

SEQ ID NO: 40850 - DNA, 25 bp, SARS Virus
aatccgaatttccactatgaagatt

SEQ ID NO: 40851 - DNA, 25 bp, SARS Virus
atccgaatttcacctatgaagattg

SEQ ID NO: 40852 - DNA, 25 bp, SARS Virus
tccgaatttcaactatgaagattgg

SEQ ID NO: 40853 - DNA, 25 bp, SARS Virus
ccgaatttcaaccatgaagattggg

SEQ ID NO: 40854 - DNA, 25 bp, SARS Virus
cgaatttcaactctgaagattggga

SEQ ID NO: 40855 - DNA, 25 bp, SARS Virus
gaatttcaactacgaagattgggat

SEQ ID NO: 40856 - DNA, 25 bp, SARS Virus
aatttcaactatcaagattgggatt

SEQ ID NO: 40857 - DNA, 25 bp, SARS Virus
atttcaactatgcagattgggattc

SEQ ID NO: 40858 - DNA, 25 bp, SARS Virus
tttcaactatgacgattgggattct

SEQ ID NO: 40859 - DNA, 25 bp, SARS Virus
ttcaactatgaacattgggattctg

SEQ ID NO: 40860 - DNA, 25 bp, SARS Virus
tcaactatgaagcttgggattctgt

SEQ ID NO: 40861 - DNA, 25 bp, SARS Virus
caactatgaagactgggattctgtg

SEQ ID NO: 40862 - DNA, 25 bp, SARS Virus
aactatgaagatcgggattctgtgg

SEQ ID NO: 40863 - DNA, 25 bp, SARS Virus
actatgaagattcggattctgtggg

SEQ ID NO: 40864 - DNA, 25 bp, SARS Virus
ctatgaagattgcgattctgtgggt

SEQ ID NO: 40865 - DNA, 25 bp, SARS Virus
tatgaagattggcattctgtgggtt

SEQ ID NO: 40866 - DNA, 25 bp, SARS Virus
atgaagattgggcttctgtgggttc

SEQ ID NO: 40867 - DNA, 25 bp, SARS Virus
tgaagattgggactctgtgggttca

SEQ ID NO: 40868 - DNA, 25 bp, SARS Virus
gaagattgggatcctgtgggttcat

SEQ ID NO: 40869 - DNA, 25 bp, SARS Virus
aagattgggattctgtgggttcata

SEQ ID NO: 40870 - DNA, 25 bp, SARS Virus
agattgggattccgtgggttcatat

SEQ ID NO: 40871 - DNA, 25 bp, SARS Virus
gattgggattctctgggttcatatt

SEQ ID NO: 40872 - DNA, 25 bp, SARS Virus
attgggattctgcgggttcatattt

SEQ ID NO: 40873 - DNA, 25 bp, SARS Virus
ttgggattctgtcggttcatattta

SEQ ID NO: 40874 - DNA, 25 bp, SARS Virus
tgggattctgtgcgttcatatttaa

SEQ ID NO: 40875 - DNA, 25 bp, SARS Virus
gggattctgtggcttcatatttaaa

SEQ ID NO: 40876 - DNA, 25 bp, SARS Virus
ggattctgtgggctcatatttaaac

SEQ ID NO: 40877 - DNA, 25 bp, SARS Virus
gattctgtgggtccatatttaaaca

SEQ ID NO: 40878 - DNA, 25 bp, SARS Virus
attctgtgggttcatatttaaacag

SEQ ID NO: 40879 - DNA, 25 bp, SARS Virus
ttctgtgggttcctatttaaacagg

SEQ ID NO: 40880 - DNA, 25 bp, SARS Virus
tctgtgggttcacatttaaacaggc

SEQ ID NO: 40881 - DNA, 25 bp, SARS Virus
ctgtgggttcatctttaaacaggca

SEQ ID NO: 40882 - DNA, 25 bp, SARS Virus
tgtgggttcatacttaaacaggcat

SEQ ID NO: 40883 - DNA, 25 bp, SARS Virus
gtgggttcatatctaaacaggcata

SEQ ID NO: 40884 - DNA, 25 bp, SARS Virus
tgggttcatattcaaacaggcatag

SEQ ID NO: 40885 - DNA, 25 bp, SARS Virus
gggttcatatttcaacaggcatagg

SEQ ID NO: 40886 - DNA, 25 bp, SARS Virus
ggttcatatttacacaggcataggt

SEQ ID NO: 40887 - DNA, 25 bp, SARS Virus
gttcatatttaaccaggcataggtt

SEQ ID NO: 40888 - DNA, 25 bp, SARS Virus
ttcatatttaaacaggcataggttg

SEQ ID NO: 40889 - DNA, 25 bp, SARS Virus
tcatatttaaaccggcataggttgg

SEQ ID NO: 40890 - DNA, 25 bp, SARS Virus
catatttaaacacgcataggttgga

SEQ ID NO: 40891 - DNA, 25 bp, SARS Virus
atatttaaacagccataggttggac

SEQ ID NO: 40892 - DNA, 25 bp, SARS Virus
tatttaaacaggcataggttggacc

SEQ ID NO: 40893 - DNA, 25 bp, SARS Virus
atttaaacaggcctaggttggacca

SEQ ID NO: 40894 - DNA, 25 bp, SARS Virus
tttaaacaggcacaggttggaccag

SEQ ID NO: 40895 - DNA, 25 bp, SARS Virus
ttaaacaggcatcggttggaccagt

SEQ ID NO: 40896 - DNA, 25 bp, SARS Virus
taaacaggcatacgttggaccagtt

SEQ ID NO: 40897 - DNA, 25 bp, SARS Virus
aaacaggcatagcttggaccagttt

SEQ ID NO: 40898 - DNA, 25 bp, SARS Virus
aacaggcataggctggaccagtttg

SEQ ID NO: 40899 - DNA, 25 bp, SARS Virus
acaggcataggtcggaccagtttgt

SEQ ID NO: 40900 - DNA, 25 bp, SARS Virus
caggcataggttcgaccagtttgta

SEQ ID NO: 40901 - DNA, 25 bp, SARS Virus
aggcataggttgcaccagtttgtaa

SEQ ID NO: 40902 - DNA, 25 bp, SARS Virus
ggcataggttggcccagtttgtaaa

SEQ ID NO: 40903 - DNA, 25 bp, SARS Virus
gcataggttggaccagtttgtaaaa

SEQ ID NO: 40904 - DNA, 25 bp, SARS Virus
cataggttggaccagtttgtaaaag

SEQ ID NO: 40905 - DNA, 25 bp, SARS Virus
ataggttggacccgtttgtaaaagt

SEQ ID NO: 40906 - DNA, 25 bp, SARS Virus
taggttggaccactttgtaaaagtc

SEQ ID NO: 40907 - DNA, 25 bp, SARS Virus
aggttggaccagcttgtaaaagtca

SEQ ID NO: 40908 - DNA, 25 bp, SARS Virus
ggttggaccagtctgtaaaagtcaa

SEQ ID NO: 40909 - DNA, 25 bp, SARS Virus
gttggaccagttcgtaaaagtcaag

SEQ ID NO: 40910 - DNA, 25 bp, SARS Virus
ttggaccagtttctaaaagtcaaga

SEQ ID NO: 40911 - DNA, 25 bp, SARS Virus
tggaccagtttgcaaaagtcaagat

SEQ ID NO: 40912 - DNA, 25 bp, SARS Virus
ggaccagtttgtcaaagtcaagatc

SEQ ID NO: 40913 - DNA, 25 bp, SARS Virus
gaccagtttgtacaagtcaagatcg

SEQ ID NO: 40914 - DNA, 25 bp, SARS Virus
accagtttgtaacagtcaagatcgt

SEQ ID NO: 40915 - DNA, 25 bp, SARS Virus
ccagtttgtaaacgtcaagatcgta

SEQ ID NO: 40916 - DNA, 25 bp, SARS Virus
cagtttgtaaaactcaagatcgtac

SEQ ID NO: 40917 - DNA, 25 bp, SARS Virus
agtttgtaaaagccaagatcgtacg

SEQ ID NO: 40918 - DNA, 25 bp, SARS Virus
gtttgtaaaagtcaagatcgtacga

SEQ ID NO: 40919 - DNA, 25 bp, SARS Virus
tttgtaaaagtccagatcgtacgat

SEQ ID NO: 40920 - DNA, 25 bp, SARS Virus
ttgtaaaagtcacgatcgtacgatg

SEQ ID NO: 40921 - DNA, 25 bp, SARS Virus
tgtaaaagtcaacatcgtacgatgt

SEQ ID NO: 40922 - DNA, 25 bp, SARS Virus
gtaaaagtcaagctcgtacgatgtt

SEQ ID NO: 40923 - DNA, 25 bp, SARS Virus
taaaagtcaagaccgtacgatgtta

SEQ ID NO: 40924 - DNA, 25 bp, SARS Virus
aaaagtcaagatcgtacgatgttac

SEQ ID NO: 40925 - DNA, 25 bp, SARS Virus
aaagtcaagatcctacgatgttacc

SEQ ID NO: 40926 - DNA, 25 bp, SARS Virus
aagtcaagatcgcacgatgttacca

SEQ ID NO: 40927 - DNA, 25 bp, SARS Virus
agtcaagatcgtccgatgttaccaa

SEQ ID NO: 40928 - DNA, 25 bp, SARS Virus
gtcaagatcgtacgatgttaccaag

SEQ ID NO: 40929 - DNA, 25 bp, SARS Virus
tcaagatcgtaccatgttaccaagt

SEQ ID NO: 40930 - DNA, 25 bp, SARS Virus
caagatcgtacgctgttaccaagtg

SEQ ID NO: 40931 - DNA, 25 bp, SARS Virus
aagatcgtacgacgttaccaagtgg

SEQ ID NO: 40932 - DNA, 25 bp, SARS Virus
agatcgtacgatcttaccaagtggt

SEQ ID NO: 40933 - DNA, 25 bp, SARS Virus
gatcgtacgatgctaccaagtggta

SEQ ID NO: 40934 - DNA, 25 bp, SARS Virus
atcgtacgatgtcaccaagtggtag

SEQ ID NO: 40935 - DNA, 25 bp, SARS Virus
tcgtacgatgttcccaagtggtaga

SEQ ID NO: 40936 - DNA, 25 bp, SARS Virus
cgtacgatgttaccaagtggtagac

SEQ ID NO: 40937 - DNA, 25 bp, SARS Virus
gtacgatgttaccaagtggtagacc

SEQ ID NO: 40938 - DNA, 25 bp, SARS Virus
tacgatgttacccagtggtagacca

SEQ ID NO: 40939 - DNA, 25 bp, SARS Virus
acgatgttaccacgtggtagaccac

SEQ ID NO: 40940 - DNA, 25 bp, SARS Virus
cgatgttaccaactggtagaccaca

SEQ ID NO: 40941 - DNA, 25 bp, SARS Virus
gatgttaccaagcggtagaccacaa

SEQ ID NO: 40942 - DNA, 25 bp, SARS Virus
atgttaccaagtcgtagaccacaaa

SEQ ID NO: 40943 - DNA, 25 bp, SARS Virus
tgttaccaagtgctagaccacaaat

SEQ ID NO: 40944 - DNA, 25 bp, SARS Virus
gttaccaagtggcagaccacaaata

SEQ ID NO: 40945 - DNA, 25 bp, SARS Virus
ttaccaagtggtcgaccacaaatag

SEQ ID NO: 40946 - DNA, 25 bp, SARS Virus
taccaagtggtacaccacaaatagt

SEQ ID NO: 40947 - DNA, 25 bp, SARS Virus
accaagtggtagcccacaaatagtc

SEQ ID NO: 40948 - DNA, 25 bp, SARS Virus
ccaagtggtagaccacaaatagtca

SEQ ID NO: 40949 - DNA, 25 bp, SARS Virus
caagtggtagaccacaaatagtcac

SEQ ID NO: 40950 - DNA, 25 bp, SARS Virus
aagtggtagaccccaaatagtcaca

SEQ ID NO: 40951 - DNA, 25 bp, SARS Virus
agtggtagaccacaaatagtcacac

SEQ ID NO: 40952 - DNA, 25 bp, SARS Virus
gtggtagaccaccaatagtcacacg

SEQ ID NO: 40953 - DNA, 25 bp, SARS Virus
tggtagaccacacatagtcacacgg

SEQ ID NO: 40954 - DNA, 25 bp, SARS Virus
ggtagaccacaactagtcacacggt

SEQ ID NO: 40955 - DNA, 25 bp, SARS Virus
gtagaccacaaacagtcacacggta

SEQ ID NO: 40956 - DNA, 25 bp, SARS Virus
tagaccacaaatcgtcacacggtac

SEQ ID NO: 40957 - DNA, 25 bp, SARS Virus
agaccacaaatactcacacggtact

SEQ ID NO: 40958 - DNA, 25 bp, SARS Virus
gaccacaaatagccacacggtactc

SEQ ID NO: 40959 - DNA, 25 bp, SARS Virus
accacaaatagtcacacggtactct

SEQ ID NO: 40960 - DNA, 25 bp, SARS Virus
ccacaaatagtcccacggtactctg

SEQ ID NO: 40961 - DNA, 25 bp, SARS Virus
cacaaatagtcacacggtactctgg

SEQ ID NO: 40962 - DNA, 25 bp, SARS Virus
acaaatagtcacccggtactctgga

SEQ ID NO: 40963 - DNA, 25 bp, SARS Virus
caaatagtcacacggtactctggat

SEQ ID NO: 40964 - DNA, 25 bp, SARS Virus
aaatagtcacaccgtactctggatt

SEQ ID NO: 40965 - DNA, 25 bp, SARS Virus
aatagtcacacgctactctggatta

SEQ ID NO: 40966 - DNA, 25 bp, SARS Virus
atagtcacacggcactctggattag

SEQ ID NO: 40967 - DNA, 25 bp, SARS Virus
tagtcacacggtcctctggattagt

SEQ ID NO: 40968 - DNA, 25 bp, SARS Virus
agtcacacggtactctggattagta

SEQ ID NO: 40969 - DNA, 25 bp, SARS Virus
gtcacacggtaccctggattagtat

SEQ ID NO: 40970 - DNA, 25 bp, SARS Virus
tcacacggtactctggattagtatg

SEQ ID NO: 40971 - DNA, 25 bp, SARS Virus
cacacggtactccggattagtatgg

SEQ ID NO: 40972 - DNA, 25 bp, SARS Virus
acacggtactctcgattagtatggt

SEQ ID NO: 40973 - DNA, 25 bp, SARS Virus
cacggtactctgcattagtatggta

SEQ ID NO: 40974 - DNA, 25 bp, SARS Virus
acggtactctggcttagtatggtaa

SEQ ID NO: 40975 - DNA, 25 bp, SARS Virus
cggtactctggactagtatggtaat

SEQ ID NO: 40976 - DNA, 25 bp, SARS Virus
ggtactctggatcagtatggtaatt

SEQ ID NO: 40977 - DNA, 25 bp, SARS Virus
gtactctggattcgtatggtaattt

SEQ ID NO: 40978 - DNA, 25 bp, SARS Virus
tactctggattactatggtaatttc

SEQ ID NO: 40979 - DNA, 25 bp, SARS Virus
actctggattagcatggtaatttcc

SEQ ID NO: 40980 - DNA, 25 bp, SARS Virus
ctctggattagtctggtaatttcca

SEQ ID NO: 40981 - DNA, 25 bp, SARS Virus
tctggattagtacggtaatttccaa

SEQ ID NO: 40982 - DNA, 25 bp, SARS Virus
ctggattagtatcgtaatttccaag

SEQ ID NO: 40983 - DNA, 25 bp, SARS Virus
tggattagtatgctaatttccaaga

SEQ ID NO: 40984 - DNA, 25 bp, SARS Virus
ggattagtatggcaatttccaagaa

SEQ ID NO: 40985 - DNA, 25 bp, SARS Virus
gattagtatggtcatttccaagaaa

SEQ ID NO: 40986 - DNA, 25 bp, SARS Virus
attagtatggtactttccaagaaag

SEQ ID NO: 40987 - DNA, 25 bp, SARS Virus
ttagtatggtaacttccaagaaagg

SEQ ID NO: 40988 - DNA, 25 bp, SARS Virus
tagtatggtaatctccaagaaagga

SEQ ID NO: 40989 - DNA, 25 bp, SARS Virus
agtatggtaattcccaagaaaggaa

SEQ ID NO: 40990 - DNA, 25 bp, SARS Virus
gtatggtaatttccaagaaaggaat

SEQ ID NO: 40991 - DNA, 25 bp, SARS Virus
tatggtaatttccaagaaaggaatt

SEQ ID NO: 40992 - DNA, 25 bp, SARS Virus
atggtaatttcccagaaaggaatta

SEQ ID NO: 40993 - DNA, 25 bp, SARS Virus
tggtaatttccacgaaaggaattac

SEQ ID NO: 40994 - DNA, 25 bp, SARS Virus
ggtaatttccaacaaaggaattacc

SEQ ID NO: 40995 - DNA, 25 bp, SARS Virus
gtaatttccaagcaaggaattacct

SEQ ID NO: 40996 - DNA, 25 bp, SARS Virus
taatttccaagacaggaattaccta

SEQ ID NO: 40997 - DNA, 25 bp, SARS Virus
aatttccaagaacggaattacctag

SEQ ID NO: 40998 - DNA, 25 bp, SARS Virus
atttccaagaaacgaattacctagt

SEQ ID NO: 40999 - DNA, 25 bp, SARS Virus
tttccaagaaagcaattacctagta

SEQ ID NO: 41000 - DNA, 25 bp, SARS Virus
ttccaagaaaggcattacctagtac

SEQ ID NO: 41001 - DNA, 25 bp, SARS Virus
tccaagaaaggacttacctagtaca

SEQ ID NO: 41002 - DNA, 25 bp, SARS Virus
ccaagaaaggaactacctagtacac

SEQ ID NO: 41003 - DNA, 25 bp, SARS Virus
caagaaaggaatcacctagtacacc

SEQ ID NO: 41004 - DNA, 25 bp, SARS Virus
aagaaaggaattccctagtacacca

SEQ ID NO: 41005 - DNA, 25 bp, SARS Virus
agaaaggaattacctagtacaccat

SEQ ID NO: 41006 - DNA, 25 bp, SARS Virus
gaaaggaattacctagtacaccatc

SEQ ID NO: 41007 - DNA, 25 bp, SARS Virus
aaaggaattacccagtacaccatca

SEQ ID NO: 41008 - DNA, 25 bp, SARS Virus
aaggaattacctcgtacaccatcac

SEQ ID NO: 41009 - DNA, 25 bp, SARS Virus
aggaattacctactacaccatcaca

SEQ ID NO: 41010 - DNA, 25 bp, SARS Virus
ggaattacctagcacaccatcacaa

SEQ ID NO: 41011 - DNA, 25 bp, SARS Virus
gaattacctagtccaccatcacaac

SEQ ID NO: 41012 - DNA, 25 bp, SARS Virus
aattacctagtacaccatcacaacc

SEQ ID NO: 41013 - DNA, 25 bp, SARS Virus
attacctagtaccccatcacaacca

SEQ ID NO: 41014 - DNA, 25 bp, SARS Virus
ttacctagtacaccatcacaaccaa

SEQ ID NO: 41015 - DNA, 25 bp, SARS Virus
tacctagtacaccatcacaaccaaa

SEQ ID NO: 41016 - DNA, 25 bp, SARS Virus
acctagtacaccctcacaaccaaaa

SEQ ID NO: 41017 - DNA, 25 bp, SARS Virus
cctagtacaccaccacaaccaaaat

SEQ ID NO: 41018 - DNA, 25 bp, SARS Virus
ctagtacaccatcacaaccaaaatt

SEQ ID NO: 41019 - DNA, 25 bp, SARS Virus
tagtacaccatcccaaccaaaattg

SEQ ID NO: 41020 - DNA, 25 bp, SARS Virus
agtacaccatcacaaccaaaattgt

SEQ ID NO: 41021 - DNA, 25 bp, SARS Virus
gtacaccatcaccaccaaaattgta

SEQ ID NO: 41022 - DNA, 25 bp, SARS Virus
tacaccatcacacccaaaattgtaa

SEQ ID NO: 41023 - DNA, 25 bp, SARS Virus
acaccatcacaaccaaaattgtaac

SEQ ID NO: 41024 - DNA, 25 bp, SARS Virus
caccatcacaaccaaaattgtaact

SEQ ID NO: 41025 - DNA, 25 bp, SARS Virus
accatcacaacccaaattgtaacta

SEQ ID NO: 41026 - DNA, 25 bp, SARS Virus
ccatcacaaccacaattgtaactaa

SEQ ID NO: 41027 - DNA, 25 bp, SARS Virus
catcacaaccaacattgtaactaat

SEQ ID NO: 41028 - DNA, 25 bp, SARS Virus
atcacaaccaaacttgtaactaata

SEQ ID NO: 41029 - DNA, 25 bp, SARS Virus
tcacaaccaaaactgtaactaatac

SEQ ID NO: 41030 - DNA, 25 bp, SARS Virus
cacaaccaaaatcgtaactaatact

SEQ ID NO: 41031 - DNA, 25 bp, SARS Virus
acaaccaaaattctaactaatacta

SEQ ID NO: 41032 - DNA, 25 bp, SARS Virus
caaccaaaattgcaactaatactaa

SEQ ID NO: 41033 - DNA, 25 bp, SARS Virus
aaccaaaattgtcactaatactaac

SEQ ID NO: 41034 - DNA, 25 bp, SARS Virus
accaaaattgtacctaatactaacg

SEQ ID NO: 41035 - DNA, 25 bp, SARS Virus
ccaaaattgtaactaatactaacgc

SEQ ID NO: 41036 - DNA, 25 bp, SARS Virus
caaaattgtaaccaatactaacgca

SEQ ID NO: 41037 - DNA, 25 bp, SARS Virus
aaaattgtaactcatactaacgcac

SEQ ID NO: 41038 - DNA, 25 bp, SARS Virus
aaattgtaactactactaacgcaca

SEQ ID NO: 41039 - DNA, 25 bp, SARS Virus
aattgtaactaacactaacgcacag

SEQ ID NO: 41040 - DNA, 25 bp, SARS Virus
attgtaactaatcctaacgcacaga

SEQ ID NO: 41041 - DNA, 25 bp, SARS Virus
ttgtaactaatactaacgcacagaa

SEQ ID NO: 41042 - DNA, 25 bp, SARS Virus
tgtaactaataccaacgcacagaaa

SEQ ID NO: 41043 - DNA, 25 bp, SARS Virus
gtaactaatactcacgcacagaaag

SEQ ID NO: 41044 - DNA, 25 bp, SARS Virus
taactaatactaccgcacagaaaga

SEQ ID NO: 41045 - DNA, 25 bp, SARS Virus
aactaatactaacgcacagaaagac

SEQ ID NO: 41046 - DNA, 25 bp, SARS Virus
actaatactaacccacagaaagacg

SEQ ID NO: 41047 - DNA, 25 bp, SARS Virus
ctaatactaacgcacagaaagacga

SEQ ID NO: 41048 - DNA, 25 bp, SARS Virus
taatactaacgcccagaaagacgat

SEQ ID NO: 41049 - DNA, 25 bp, SARS Virus
aatactaacgcacagaaagacgata

SEQ ID NO: 41050 - DNA, 25 bp, SARS Virus
atactaacgcaccgaaagacgatat

SEQ ID NO: 41051 - DNA, 25 bp, SARS Virus
tactaacgcacacaaagacgatata

SEQ ID NO: 41052 - DNA, 25 bp, SARS Virus
actaacgcacagcaagacgatatac

SEQ ID NO: 41053 - DNA, 25 bp, SARS Virus
ctaacgcacagacagacgatatacg

SEQ ID NO: 41054 - DNA, 25 bp, SARS Virus
taacgcacagaacgacgatatacgt

SEQ ID NO: 41055 - DNA, 25 bp, SARS Virus
aacgcacagaaacacgatatacgta

SEQ ID NO: 41056 - DNA, 25 bp, SARS Virus
acgcacagaaagccgatatacgtag

SEQ ID NO: 41057 - DNA, 25 bp, SARS Virus
cgcacagaaagacgatatacgtagt

SEQ ID NO: 41058 - DNA, 25 bp, SARS Virus
gcacagaaagaccatatacgtagta

SEQ ID NO: 41059 - DNA, 25 bp, SARS Virus
cacagaaagacgctatacgtagtat

SEQ ID NO: 41060 - DNA, 25 bp, SARS Virus
acagaaagacgacatacgtagtata

SEQ ID NO: 41061 - DNA, 25 bp, SARS Virus
cagaaagacgatctacgtagtatac

SEQ ID NO: 41062 - DNA, 25 bp, SARS Virus
agaaagacgatacacgtagtatacc

SEQ ID NO: 41063 - DNA, 25 bp, SARS Virus
gaaagacgatatccgtagtatacct

SEQ ID NO: 41064 - DNA, 25 bp, SARS Virus
aaagacgatatacgtagtatacctc

SEQ ID NO: 41065 - DNA, 25 bp, SARS Virus
aagacgatatacctagtatacctcg

SEQ ID NO: 41066 - DNA, 25 bp, SARS Virus
agacgatatacgcagtatacctcga

SEQ ID NO: 41067 - DNA, 25 bp, SARS Virus
gacgatatacgtcgtatacctcgaa

SEQ ID NO: 41068 - DNA, 25 bp, SARS Virus
acgatatacgtactatacctcgaag

SEQ ID NO: 41069 - DNA, 25 bp, SARS Virus
cgatatacgtagcatacctcgaagg

SEQ ID NO: 41070 - DNA, 25 bp, SARS Virus
gatatacgtagtctacctcgaaggt

SEQ ID NO: 41071 - DNA, 25 bp, SARS Virus
atatacgtagtacacctcgaaggtt

SEQ ID NO: 41072 - DNA, 25 bp, SARS Virus
tatacgtagtatccctcgaaggttg

SEQ ID NO: 41073 - DNA, 25 bp, SARS Virus
atacgtagtatacctcgaaggttgt

SEQ ID NO: 41074 - DNA, 25 bp, SARS Virus
tacgtagtatacctcgaaggttgtc

SEQ ID NO: 41075 - DNA, 25 bp, SARS Virus
acgtagtataccccgaaggttgtcc

SEQ ID NO: 41076 - DNA, 25 bp, SARS Virus
cgtagtatacctcgaaggttgtcct

SEQ ID NO: 41077 - DNA, 25 bp, SARS Virus
gtagtatacctccaaggttgtcctc

SEQ ID NO: 41078 - DNA, 25 bp, SARS Virus
tagtatacctcgcaggttgtcctca

SEQ ID NO: 41079 - DNA, 25 bp, SARS Virus
agtatacctcgacggttgtcctcat

SEQ ID NO: 41080 - DNA, 25 bp, SARS Virus
gtatacctcgaacgttgtcctcatg

SEQ ID NO: 41081 - DNA, 25 bp, SARS Virus
tatacctcgaagcttgtcctcatgt

SEQ ID NO: 41082 - DNA, 25 bp, SARS Virus
atacctcgaaggctgtcctcatgtg

SEQ ID NO: 41083 - DNA, 25 bp, SARS Virus
tacctcgaaggtcgtcctcatgtgc

SEQ ID NO: 41084 - DNA, 25 bp, SARS Virus
acctcgaaggttctcctcatgtgcg

SEQ ID NO: 41085 - DNA, 25 bp, SARS Virus
cctcgaaggttgccctcatgtgcga

SEQ ID NO: 41086 - DNA, 25 bp, SARS Virus
ctcgaaggttgtcctcatgtgcgac

SEQ ID NO: 41087 - DNA, 25 bp, SARS Virus
tcgaaggttgtcctcatgtgcgacc

SEQ ID NO: 41088 - DNA, 25 bp, SARS Virus
cgaaggttgtccccatgtgcgacca

SEQ ID NO: 41089 - DNA, 25 bp, SARS Virus
gaaggttgtcctcatgtgcgaccat

SEQ ID NO: 41090 - DNA, 25 bp, SARS Virus
aaggttgtcctcctgtgcgaccatg

SEQ ID NO: 41091 - DNA, 25 bp, SARS Virus
aggttgtcctcacgtgcgaccatga

SEQ ID NO: 41092 - DNA, 25 bp, SARS Virus
ggttgtcctcatctgcgaccatgac

SEQ ID NO: 41093 - DNA, 25 bp, SARS Virus
gttgtcctcatgcgcgaccatgact

SEQ ID NO: 41094 - DNA, 25 bp, SARS Virus
ttgtcctcatgtccgaccatgactg

SEQ ID NO: 41095 - DNA, 25 bp, SARS Virus
tgtcctcatgtgcgaccatgactga

SEQ ID NO: 41096 - DNA, 25 bp, SARS Virus
gtcctcatgtgccaccatgactgaa

SEQ ID NO: 41097 - DNA, 25 bp, SARS Virus
tcctcatgtgcgcccatgactgaat

SEQ ID NO: 41098 - DNA, 25 bp, SARS Virus
cctcatgtgcgaccatgactgaatc

SEQ ID NO: 41099 - DNA, 25 bp, SARS Virus
ctcatgtgcgaccatgactgaatct

SEQ ID NO: 41100 - DNA, 25 bp, SARS Virus
tcatgtgcgaccctgactgaatctt

SEQ ID NO: 41101 - DNA, 25 bp, SARS Virus
catgtgcgaccacgactgaatcttc

SEQ ID NO: 41102 - DNA, 25 bp, SARS Virus
atgtgcgaccatcactgaatcttcc

SEQ ID NO: 41103 - DNA, 25 bp, SARS Virus
tgtgcgaccatgcctgaatcttcca

SEQ ID NO: 41104 - DNA, 25 bp, SARS Virus
gtgcgaccatgactgaatcttccat

SEQ ID NO: 41105 - DNA, 25 bp, SARS Virus
tgcgaccatgaccgaatcttccatt

SEQ ID NO: 41106 - DNA, 25 bp, SARS Virus
gcgaccatgactcaatcttccattt

SEQ ID NO: 41107 - DNA, 25 bp, SARS Virus
cgaccatgactgcatcttccattta

SEQ ID NO: 41108 - DNA, 25 bp, SARS Virus
gaccatgactgactcttccatttaa

SEQ ID NO: 41109 - DNA, 25 bp, SARS Virus
accatgactgaaccttccatttaag

SEQ ID NO: 41110 - DNA, 25 bp, SARS Virus
ccatgactgaatcttccatttaaga

SEQ ID NO: 41111 - DNA, 25 bp, SARS Virus
catgactgaatcctccatttaagat

SEQ ID NO: 41112 - DNA, 25 bp, SARS Virus
atgactgaatctcccatttaagata

SEQ ID NO: 41113 - DNA, 25 bp, SARS Virus
tgactgaatcttccatttaagatac

SEQ ID NO: 41114 - DNA, 25 bp, SARS Virus
gactgaatcttccatttaagatacc

SEQ ID NO: 41115 - DNA, 25 bp, SARS Virus
actgaatcttccctttaagatacca

SEQ ID NO: 41116 - DNA, 25 bp, SARS Virus
ctgaatcttccacttaagataccag

SEQ ID NO: 41117 - DNA, 25 bp, SARS Virus
tgaatcttccatctaagataccagg

SEQ ID NO: 41118 - DNA, 25 bp, SARS Virus
gaatcttccattcaagataccaggt

SEQ ID NO: 41119 - DNA, 25 bp, SARS Virus
aatcttccatttcagataccaggta

SEQ ID NO: 41120 - DNA, 25 bp, SARS Virus
atcttccatttacgataccaggtaa

SEQ ID NO: 41121 - DNA, 25 bp, SARS Virus
cccacgtaccatgttcattggacac

SEQ ID NO: 41122 - DNA, 25 bp, SARS Virus
ccacgtaccatggtcattggacacc

SEQ ID NO: 41123 - DNA, 25 bp, SARS Virus
cacgtaccatgtgcattggacacct

SEQ ID NO: 41124 - DNA, 25 bp, SARS Virus
acgtaccatgttgattggacacctt

SEQ ID NO: 41125 - DNA, 25 bp, SARS Virus
cgtaccatgttcgttggacaccttg

SEQ ID NO: 41126 - DNA, 25 bp, SARS Virus
gtaccatgttcagtggacaccttga

SEQ ID NO: 41127 - DNA, 25 bp, SARS Virus
taccatgttcatgggacaccttgat

SEQ ID NO: 41128 - DNA, 25 bp, SARS Virus
accatgttcattggacaccttgatg

SEQ ID NO: 41129 - DNA, 25 bp, SARS Virus
ccatgttcattggacaccttgatgt

SEQ ID NO: 41130 - DNA, 25 bp, SARS Virus
catgttcattgggcaccttgatgtt

SEQ ID NO: 41131 - DNA, 25 bp, SARS Virus
atgttcattggagaccttgatgttg

SEQ ID NO: 41132 - DNA, 25 bp, SARS Virus
tgttcattggacgccttgatgttga

SEQ ID NO: 41133 - DNA, 25 bp, SARS Virus
gttcattggacagcttgatgttgag

SEQ ID NO: 41134 - DNA, 25 bp, SARS Virus
ttcattggacacgttgatgttgaga

SEQ ID NO: 41135 - DNA, 25 bp, SARS Virus
tcattggacaccgtgatgttgagaa

SEQ ID NO: 41136 - DNA, 25 bp, SARS Virus
cattggacacctggatgttgagaat

SEQ ID NO: 41137 - DNA, 25 bp, SARS Virus
attggacaccttgatgttgagaatt

SEQ ID NO: 41138 - DNA, 25 bp, SARS Virus
ttggacaccttggtgttgagaatta

SEQ ID NO: 41139 - DNA, 25 bp, SARS Virus
tggacaccttgaggttgagaattac

SEQ ID NO: 41140 - DNA, 25 bp, SARS Virus
ggacaccttgatgttgagaattacc

SEQ ID NO: 41141 - DNA, 25 bp, SARS Virus
gacaccttgatggtgagaattacct

SEQ ID NO: 41142 - DNA, 25 bp, SARS Virus
acaccttgatgtggagaattaccta

SEQ ID NO: 41143 - DNA, 25 bp, SARS Virus
caccttgatgttgagaattacctaa

SEQ ID NO: 41144 - DNA, 25 bp, SARS Virus
accttgatgttgggaattacctaac

SEQ ID NO: 41145 - DNA, 25 bp, SARS Virus
ccttgatgttgagaattacctaaca

SEQ ID NO: 41146 - DNA, 25 bp, SARS Virus
cttgatgttgaggattacctaacac

SEQ ID NO: 41147 - DNA, 25 bp, SARS Virus
ttgatgttgagagttacctaacacc

SEQ ID NO: 41148 - DNA, 25 bp, SARS Virus
tgatgttgagaagtacctaacacca

SEQ ID NO: 41149 - DNA, 25 bp, SARS Virus
gatgttgagaatgacctaacaccaa

SEQ ID NO: 41150 - DNA, 25 bp, SARS Virus
atgttgagaattgcctaacaccaac

SEQ ID NO: 41151 - DNA, 25 bp, SARS Virus
tgttgagaattagctaacaccaacc

SEQ ID NO: 41152 - DNA, 25 bp, SARS Virus
gttgagaattacgtaacaccaacct

SEQ ID NO: 41153 - DNA, 25 bp, SARS Virus
ttgagaattaccgaacaccaaccta

SEQ ID NO: 41154 - DNA, 25 bp, SARS Virus
tgagaattacctgacaccaacctac

SEQ ID NO: 41155 - DNA, 25 bp, SARS Virus
gagaattacctagcaccaacctact

SEQ ID NO: 41156 - DNA, 25 bp, SARS Virus
agaattacctaagaccaacctactg

SEQ ID NO: 41157 - DNA, 25 bp, SARS Virus
gaattacctaacgccaacctactgt

SEQ ID NO: 41158 - DNA, 25 bp, SARS Virus
aattacctaacagcaacctactgtg

SEQ ID NO: 41159 - DNA, 25 bp, SARS Virus
attacctaacacgaacctactgtgt

SEQ ID NO: 41160 - DNA, 25 bp, SARS Virus
ttacctaacaccgacctactgtgtc

SEQ ID NO: 41161 - DNA, 25 bp, SARS Virus
tacctaacaccagcctactgtgtca

SEQ ID NO: 41162 - DNA, 25 bp, SARS Virus
acctaacaccaagctactgtgtcat

SEQ ID NO: 41163 - DNA, 25 bp, SARS Virus
cctaacaccaacgtactgtgtcata

SEQ ID NO: 41164 - DNA, 25 bp, SARS Virus
ctaacaccaaccgactgtgtcatat

SEQ ID NO: 41165 - DNA, 25 bp, SARS Virus
taacaccaacctgctgtgtcatatg

SEQ ID NO: 41166 - DNA, 25 bp, SARS Virus
aacaccaacctagtgtgtcatatga

SEQ ID NO: 41167 - DNA, 25 bp, SARS Virus
acaccaacctacggtgtcatatgac

SEQ ID NO: 41168 - DNA, 25 bp, SARS Virus
caccaacctactgtgtcatatgaca

SEQ ID NO: 41169 - DNA, 25 bp, SARS Virus
accaacctactgggtcatatgacag

SEQ ID NO: 41170 - DNA, 25 bp, SARS Virus
ccaacctactgtgtcatatgacagg

SEQ ID NO: 41171 - DNA, 25 bp, SARS Virus
caacctactgtggcatatgacaggt

SEQ ID NO: 41172 - DNA, 25 bp, SARS Virus
aacctactgtgtgatatgacaggtt

SEQ ID NO: 41173 - DNA, 25 bp, SARS Virus
acctactgtgtcgtatgacaggttc

SEQ ID NO: 41174 - DNA, 25 bp, SARS Virus
cctactgtgtcagatgacaggttct

SEQ ID NO: 41175 - DNA, 25 bp, SARS Virus
ctactgtgtcatgtgacaggttctg

SEQ ID NO: 41176 - DNA, 25 bp, SARS Virus
tactgtgtcataggacaggttctgt

SEQ ID NO: 41177 - DNA, 25 bp, SARS Virus
actgtgtcatatgacaggttctgta

SEQ ID NO: 41178 - DNA, 25 bp, SARS Virus
ctgtgtcatatggcaggttctgtac

SEQ ID NO: 41179 - DNA, 25 bp, SARS Virus
tgtgtcatatgagaggttctgtaca

SEQ ID NO: 41180 - DNA, 25 bp, SARS Virus
gtgtcatatgacgggttctgtacag

SEQ ID NO: 41181 - DNA, 25 bp, SARS Virus
tgtcatatgacaggttctgtacagt

SEQ ID NO: 41182 - DNA, 25 bp, SARS Virus
gtcatatgacaggttctgtacagta

SEQ ID NO: 41183 - DNA, 25 bp, SARS Virus
tcatatgacagggtctgtacagtaa

SEQ ID NO: 41184 - DNA, 25 bp, SARS Virus
catatgacaggtgctgtacagtaaa

SEQ ID NO: 41185 - DNA, 25 bp, SARS Virus
atatgacaggttgtgtacagtaaac

SEQ ID NO: 41186 - DNA, 25 bp, SARS Virus
tatgacaggttcggtacagtaaacg

SEQ ID NO: 41187 - DNA, 25 bp, SARS Virus
atgacaggttctgtacagtaaacgt

SEQ ID NO: 41188 - DNA, 25 bp, SARS Virus
tgacaggttctggacagtaaacgtg

SEQ ID NO: 41189 - DNA, 25 bp, SARS Virus
gacaggttctgtgcagtaaacgtgt

SEQ ID NO: 41190 - DNA, 25 bp, SARS Virus
acaggttctgtagagtaaacgtgtc

SEQ ID NO: 41191 - DNA, 25 bp, SARS Virus
caggttctgtacggtaaacgtgtcg

SEQ ID NO: 41192 - DNA, 25 bp, SARS Virus
aggttctgtacagtaaacgtgtcgt

SEQ ID NO: 41193 - DNA, 25 bp, SARS Virus
ggttctgtacaggaaacgtgtcgtc

SEQ ID NO: 41194 - DNA, 25 bp, SARS Virus
gttctgtacagtgaacgtgtcgtct

SEQ ID NO: 41195 - DNA, 25 bp, SARS Virus
ttctgtacagtagacgtgtcgtctt

SEQ ID NO: 41196 - DNA, 25 bp, SARS Virus
tctgtacagtaagcgtgtcgtcttc

SEQ ID NO: 41197 - DNA, 25 bp, SARS Virus
ctgtacagtaaaggtgtcgtcttct

SEQ ID NO: 41198 - DNA, 25 bp, SARS Virus
tgtacagtaaacgtgtcgtcttctg

SEQ ID NO: 41199 - DNA, 25 bp, SARS Virus
gtacagtaaacgggtcgtcttctgt

SEQ ID NO: 41200 - DNA, 25 bp, SARS Virus
tacagtaaacgtgtcgtcttctgta

SEQ ID NO: 41201 - DNA, 25 bp, SARS Virus
acagtaaacgtggcgtcttctgtac

SEQ ID NO: 41202 - DNA, 25 bp, SARS Virus
cagtaaacgtgtggtcttctgtacg

SEQ ID NO: 41203 - DNA, 25 bp, SARS Virus
agtaaacgtgtcgtcttctgtacga

SEQ ID NO: 41204 - DNA, 25 bp, SARS Virus
gtaaacgtgtcggcttctgtacgaa

SEQ ID NO: 41205 - DNA, 25 bp, SARS Virus
taaacgtgtcgtgttctgtacgaat

SEQ ID NO: 41206 - DNA, 25 bp, SARS Virus
aaacgtgtcgtcgtctgtacgaatt

SEQ ID NO: 41207 - DNA, 25 bp, SARS Virus
aacgtgtcgtctgctgtacgaatta

SEQ ID NO: 41208 - DNA, 25 bp, SARS Virus
acgtgtcgtcttgtgtacgaattag

SEQ ID NO: 41209 - DNA, 25 bp, SARS Virus
cgtgtcgtcttcggtacgaattagg

SEQ ID NO: 41210 - DNA, 25 bp, SARS Virus
gtgtcgtcttctgtacgaattagga

SEQ ID NO: 41211 - DNA, 25 bp, SARS Virus
tgtcgtcttctggacgaattaggat

SEQ ID NO: 41212 - DNA, 25 bp, SARS Virus
gtcgtcttctgtgcgaattaggatt

SEQ ID NO: 41213 - DNA, 25 bp, SARS Virus
tcgtcttctgtaggaattaggattg

SEQ ID NO: 41214 - DNA, 25 bp, SARS Virus
cgtcttctgtacgaattaggattga

SEQ ID NO: 41215 - DNA, 25 bp, SARS Virus
gtcttctgtacggattaggattgat

SEQ ID NO: 41216 - DNA, 25 bp, SARS Virus
tcttctgtacgagttaggattgata

SEQ ID NO: 41217 - DNA, 25 bp, SARS Virus
cttctgtacgaagtaggattgatac

SEQ ID NO: 41218 - DNA, 25 bp, SARS Virus
ttctgtacgaatgaggattgatact

SEQ ID NO: 41219 - DNA, 25 bp, SARS Virus
tctgtacgaattgggattgatactt

SEQ ID NO: 41220 - DNA, 25 bp, SARS Virus
ctgtacgaattaggattgatacttc

SEQ ID NO: 41221 - DNA, 25 bp, SARS Virus
tgtacgaattaggattgatacttct

SEQ ID NO: 41222 - DNA, 25 bp, SARS Virus
gtacgaattagggttgatacttcta

SEQ ID NO: 41223 - DNA, 25 bp, SARS Virus
tacgaattaggagtgatacttctag

SEQ ID NO: 41224 - DNA, 25 bp, SARS Virus
acgaattaggatggatacttctaga

SEQ ID NO: 41225 - DNA, 25 bp, SARS Virus
cgaattaggattgatacttctagac

SEQ ID NO: 41226 - DNA, 25 bp, SARS Virus
gaattaggattggtacttctagacg

SEQ ID NO: 41227 - DNA, 25 bp, SARS Virus
aattaggattgagacttctagacga

SEQ ID NO: 41228 - DNA, 25 bp, SARS Virus
attaggattgatgcttctagacgag

SEQ ID NO: 41229 - DNA, 25 bp, SARS Virus
ttaggattgatagttctagacgagt

SEQ ID NO: 41230 - DNA, 25 bp, SARS Virus
taggattgatacgtctagacgagta

SEQ ID NO: 41231 - DNA, 25 bp, SARS Virus
aggattgatactgctagacgagtaa

SEQ ID NO: 41232 - DNA, 25 bp, SARS Virus
ggattgatacttgtagacgagtaag

SEQ ID NO: 41233 - DNA, 25 bp, SARS Virus
gattgatacttcgagacgagtaagc

SEQ ID NO: 41234 - DNA, 25 bp, SARS Virus
attgatacttctggacgagtaagcg

SEQ ID NO: 41235 - DNA, 25 bp, SARS Virus
ttgatacttctagacgagtaagcgt

SEQ ID NO: 41236 - DNA, 25 bp, SARS Virus
tgatacttctaggcgagtaagcgtt

SEQ ID NO: 41237 - DNA, 25 bp, SARS Virus
gatacttctagaggagtaagcgttt

SEQ ID NO: 41238 - DNA, 25 bp, SARS Virus
atacttctagacgagtaagcgttta

SEQ ID NO: 41239 - DNA, 25 bp, SARS Virus
tacttctagacgggtaagcgtttag

SEQ ID NO: 41240 - DNA, 25 bp, SARS Virus
acttctagacgagtaagcgtttagg

SEQ ID NO: 41241 - DNA, 25 bp, SARS Virus
cttctagacgaggaagcgtttaggt

SEQ ID NO: 41242 - DNA, 25 bp, SARS Virus
ttctagacgagtgagcgtttaggtt

SEQ ID NO: 41243 - DNA, 25 bp, SARS Virus
tctagacgagtaggcgtttaggttg

SEQ ID NO: 41244 - DNA, 25 bp, SARS Virus
ctagacgagtaagcgtttaggttgg

SEQ ID NO: 41245 - DNA, 25 bp, SARS Virus
tagacgagtaagggtttaggttggt

SEQ ID NO: 41246 - DNA, 25 bp, SARS Virus
agacgagtaagcgtttaggttggta

SEQ ID NO: 41247 - DNA, 25 bp, SARS Virus
gacgagtaagcggttaggttggtat

SEQ ID NO: 41248 - DNA, 25 bp, SARS Virus
acgagtaagcgtgtaggttggtatc

SEQ ID NO: 41249 - DNA, 25 bp, SARS Virus
cgagtaagcgttgaggttggtatcg

SEQ ID NO: 41250 - DNA, 25 bp, SARS Virus
gagtaagcgtttgggttggtatcga

SEQ ID NO: 41251 - DNA, 25 bp, SARS Virus
agtaagcgtttaggttggtatcgaa

SEQ ID NO: 41252 - DNA, 25 bp, SARS Virus
gtaagcgtttaggttggtatcgaaa

SEQ ID NO: 41253 - DNA, 25 bp, SARS Virus
taagcgtttagggtggtatcgaaag

SEQ ID NO: 41254 - DNA, 25 bp, SARS Virus
aagcgtttaggtgggtatcgaaaga

SEQ ID NO: 41255 - DNA, 25 bp, SARS Virus
agcgtttaggttggtatcgaaagaa

SEQ ID NO: 41256 - DNA, 25 bp, SARS Virus
gcgtttaggttggtatcgaaagaac

SEQ ID NO: 41257 - DNA, 25 bp, SARS Virus
cgtttaggttgggatcgaaagaaca

SEQ ID NO: 41258 - DNA, 25 bp, SARS Virus
gtttaggttggtgtcgaaagaacaa

SEQ ID NO: 41259 - DNA, 25 bp, SARS Virus
tttaggttggtagcgaaagaacaag

SEQ ID NO: 41260 - DNA, 25 bp, SARS Virus
ttaggttggtatggaaagaacaagt

SEQ ID NO: 41261 - DNA, 25 bp, SARS Virus
taggttggtatcgaaagaacaagtc

SEQ ID NO: 41262 - DNA, 25 bp, SARS Virus
aggttggtatcggaagaacaagtcc

SEQ ID NO: 41263 - DNA, 25 bp, SARS Virus
ggttggtatcgagagaacaagtccg

SEQ ID NO: 41264 - DNA, 25 bp, SARS Virus
gttggtatcgaaggaacaagtccga

SEQ ID NO: 41265 - DNA, 25 bp, SARS Virus
ttggtatcgaaagaacaagtccgac

SEQ ID NO: 41266 - DNA, 25 bp, SARS Virus
tggtatcgaaaggacaagtccgacc

SEQ ID NO: 41267 - DNA, 25 bp, SARS Virus
ggtatcgaaagagcaagtccgaccg

SEQ ID NO: 41268 - DNA, 25 bp, SARS Virus
gtatcgaaagaagaagtccgaccgt

SEQ ID NO: 41269 - DNA, 25 bp, SARS Virus
tatcgaaagaacgagtccgaccgtt

SEQ ID NO: 41270 - DNA, 25 bp, SARS Virus
atcgaaagaacaggtccgaccgtta

SEQ ID NO: 41271 - DNA, 25 bp, SARS Virus
tcgaaagaacaagtccgaccgttac

SEQ ID NO: 41272 - DNA, 25 bp, SARS Virus
cgaaagaacaaggccgaccgttaca

SEQ ID NO: 41273 - DNA, 25 bp, SARS Virus
gaaagaacaagtgcgaccgttacaa

SEQ ID NO: 41274 - DNA, 25 bp, SARS Virus
aaagaacaagtcggaccgttacaag

SEQ ID NO: 41275 - DNA, 25 bp, SARS Virus
aagaacaagtccgaccgttacaagt

SEQ ID NO: 41276 - DNA, 25 bp, SARS Virus
agaacaagtccggccgttacaagtt

SEQ ID NO: 41277 - DNA, 25 bp, SARS Virus
gaacaagtccgagcgttacaagttg

SEQ ID NO: 41278 - DNA, 25 bp, SARS Virus
aacaagtccgacggttacaagttga

SEQ ID NO: 41279 - DNA, 25 bp, SARS Virus
acaagtccgaccgttacaagttgaa

SEQ ID NO: 41280 - DNA, 25 bp, SARS Virus
caagtccgaccggtacaagttgaag

SEQ ID NO: 41281 - DNA, 25 bp, SARS Virus
aagtccgaccgtgacaagttgaagc

SEQ ID NO: 41282 - DNA, 25 bp, SARS Virus
agtccgaccgttgcaagttgaagca

SEQ ID NO: 41283 - DNA, 25 bp, SARS Virus
gtccgaccgttagaagttgaagcac

SEQ ID NO: 41284 - DNA, 25 bp, SARS Virus
tccgaccgttacgagttgaagcaca

SEQ ID NO: 41285 - DNA, 25 bp, SARS Virus
ccgaccgttacaggttgaagcacaa

SEQ ID NO: 41286 - DNA, 25 bp, SARS Virus
cgaccgttacaagttgaagcacaat

SEQ ID NO: 41287 - DNA, 25 bp, SARS Virus
gaccgttacaaggtgaagcacaata

SEQ ID NO: 41288 - DNA, 25 bp, SARS Virus
accgttacaagtggaagcacaataa

SEQ ID NO: 41289 - DNA, 25 bp, SARS Virus
ccgttacaagttgaagcacaataac

SEQ ID NO: 41290 - DNA, 25 bp, SARS Virus
cgttacaagttggagcacaataacc

SEQ ID NO: 41291 - DNA, 25 bp, SARS Virus
gttacaagttgaggcacaataaccg

SEQ ID NO: 41292 - DNA, 25 bp, SARS Virus
ttacaagttgaagcacaataaccgg

SEQ ID NO: 41293 - DNA, 25 bp, SARS Virus
tacaagttgaaggacaataaccggt

SEQ ID NO: 41294 - DNA, 25 bp, SARS Virus
acaagttgaagcgcaataaccggta

SEQ ID NO: 41295 - DNA, 25 bp, SARS Virus
caagttgaagcagaataaccggtaa

SEQ ID NO: 41296 - DNA, 25 bp, SARS Virus
aagttgaagcacgataaccggtaag

SEQ ID NO: 41297 - DNA, 25 bp, SARS Virus
agttgaagcacagtaaccggtaaga

SEQ ID NO: 41298 - DNA, 25 bp, SARS Virus
gttgaagcacaagaaccggtaagat

SEQ ID NO: 41299 - DNA, 25 bp, SARS Virus
ttgaagcacaatgaccggtaagata

SEQ ID NO: 41300 - DNA, 25 bp, SARS Virus
tgaagcacaatagccggtaagatac

SEQ ID NO: 41301 - DNA, 25 bp, SARS Virus
gaagcacaataagcggtaagatacg

SEQ ID NO: 41302 - DNA, 25 bp, SARS Virus
aagcacaataacgggtaagatacgt

SEQ ID NO: 41303 - DNA, 25 bp, SARS Virus
agcacaataaccggtaagatacgtt

SEQ ID NO: 41304 - DNA, 25 bp, SARS Virus
gcacaataaccggtaagatacgttt

SEQ ID NO: 41305 - DNA, 25 bp, SARS Virus
cacaataaccgggaagatacgtttt

SEQ ID NO: 41306 - DNA, 25 bp, SARS Virus
acaataaccggtgagatacgtttta

SEQ ID NO: 41307 - DNA, 25 bp, SARS Virus
caataaccggtaggatacgttttaa

SEQ ID NO: 41308 - DNA, 25 bp, SARS Virus
aataaccggtaagatacgttttaac

SEQ ID NO: 41309 - DNA, 25 bp, SARS Virus
ataaccggtaaggtacgttttaaca

SEQ ID NO: 41310 - DNA, 25 bp, SARS Virus
taaccggtaagagacgttttaacag

SEQ ID NO: 41311 - DNA, 25 bp, SARS Virus
aaccggtaagatgcgttttaacaga

SEQ ID NO: 41312 - DNA, 25 bp, SARS Virus
accggtaagataggttttaacagac

SEQ ID NO: 41313 - DNA, 25 bp, SARS Virus
ccggtaagatacgttttaacagacg

SEQ ID NO: 41314 - DNA, 25 bp, SARS Virus
cggtaagatacggtttaacagacga

SEQ ID NO: 41315 - DNA, 25 bp, SARS Virus
ggtaagatacgtgttaacagacgaa

SEQ ID NO: 41316 - DNA, 25 bp, SARS Virus
gtaagatacgttgtaacagacgaat

SEQ ID NO: 41317 - DNA, 25 bp, SARS Virus
taagatacgtttgaacagacgaatc

SEQ ID NO: 41318 - DNA, 25 bp, SARS Virus
aagatacgttttgacagacgaatcc

SEQ ID NO: 41319 - DNA, 25 bp, SARS Virus
agatacgttttagcagacgaatccg

SEQ ID NO: 41320 - DNA, 25 bp, SARS Virus
gatacgttttaagagacgaatccga

SEQ ID NO: 41321 - DNA, 25 bp, SARS Virus
atacgttttaacggacgaatccgaa

SEQ ID NO: 41322 - DNA, 25 bp, SARS Virus
tacgttttaacagacgaatccgaat

SEQ ID NO: 41323 - DNA, 25 bp, SARS Virus
acgttttaacaggcgaatccgaatt

SEQ ID NO: 41324 - DNA, 25 bp, SARS Virus
cgttttaacagaggaatccgaattt

SEQ ID NO: 41325 - DNA, 25 bp, SARS Virus
gttttaacagacgaatccgaatttc

SEQ ID NO: 41326 - DNA, 25 bp, SARS Virus
ttttaacagacggatccgaatttca

SEQ ID NO: 41327 - DNA, 25 bp, SARS Virus
tttaacagacgagtccgaatttcaa

SEQ ID NO: 41328 - DNA, 25 bp, SARS Virus
ttaacagacgaagccgaatttcaac

SEQ ID NO: 41329 - DNA, 25 bp, SARS Virus
taacagacgaatgcgaatttcaact

SEQ ID NO: 41330 - DNA, 25 bp, SARS Virus
aacagacgaatcggaatttcaacta

SEQ ID NO: 41331 - DNA, 25 bp, SARS Virus
acagacgaatccgaatttcaactat

SEQ ID NO: 41332 - DNA, 25 bp, SARS Virus
cagacgaatccggatttcaactatg

SEQ ID NO: 41333 - DNA, 25 bp, SARS Virus
agacgaatccgagtttcaactatga

SEQ ID NO: 41334 - DNA, 25 bp, SARS Virus
gacgaatccgaagttcaactatgaa

SEQ ID NO: 41335 - DNA, 25 bp, SARS Virus
acgaatccgaatgtcaactatgaag

SEQ ID NO: 41336 - DNA, 25 bp, SARS Virus
cgaatccgaattgcaactatgaaga

SEQ ID NO: 41337 - DNA, 25 bp, SARS Virus
gaatccgaatttgaactatgaagat

SEQ ID NO: 41338 - DNA, 25 bp, SARS Virus
aatccgaatttcgactatgaagatt

SEQ ID NO: 41339 - DNA, 25 bp, SARS Virus
atccgaatttcagctatgaagattg

SEQ ID NO: 41340 - DNA, 25 bp, SARS Virus
tccgaatttcaagtatgaagattgg

SEQ ID NO: 41341 - DNA, 25 bp, SARS Virus
ccgaatttcaacgatgaagattggg

SEQ ID NO: 41342 - DNA, 25 bp, SARS Virus
cgaatttcaactgtgaagattggga

SEQ ID NO: 41343 - DNA, 25 bp, SARS Virus
gaatttcaactaggaagattgggat

SEQ ID NO: 41344 - DNA, 25 bp, SARS Virus
aatttcaactatgaagattgggatt

SEQ ID NO: 41345 - DNA, 25 bp, SARS Virus
atttcaactatggagattgggattc

SEQ ID NO: 41346 - DNA, 25 bp, SARS Virus
tttcaactatgaggattgggattct

SEQ ID NO: 41347 - DNA, 25 bp, SARS Virus
ttcaactatgaagattgggattctg

SEQ ID NO: 41348 - DNA, 25 bp, SARS Virus
tcaactatgaaggttgggattctgt

SEQ ID NO: 41349 - DNA, 25 bp, SARS Virus
caactatgaagagtgggattctgtg

SEQ ID NO: 41350 - DNA, 25 bp, SARS Virus
aactatgaagatggggattctgtgg

SEQ ID NO: 41351 - DNA, 25 bp, SARS Virus
actatgaagattgggattctgtggg

SEQ ID NO: 41352 - DNA, 25 bp, SARS Virus
ctatgaagattgggattctgtgggt

SEQ ID NO: 41353 - DNA, 25 bp, SARS Virus
tatgaagattgggattctgtgggtt

SEQ ID NO: 41354 - DNA, 25 bp, SARS Virus
atgaagattggggttctgtgggttc

SEQ ID NO: 41355 - DNA, 25 bp, SARS Virus
tgaagattgggagtctgtgggttca

SEQ ID NO: 41356 - DNA, 25 bp, SARS Virus
gaagattgggatgctgtgggttcat

SEQ ID NO: 41357 - DNA, 25 bp, SARS Virus
aagattgggattgtgtgggttcata

SEQ ID NO: 41358 - DNA, 25 bp, SARS Virus
agattgggattcggtgggttcatat

SEQ ID NO: 41359 - DNA, 25 bp, SARS Virus
gattgggattctgtgggttcatatt

SEQ ID NO: 41360 - DNA, 25 bp, SARS Virus
attgggattctgggggttcatattt

SEQ ID NO: 41361 - DNA, 25 bp, SARS Virus
ttgggattctgtgggttcatattta

SEQ ID NO: 41362 - DNA, 25 bp, SARS Virus
tgggattctgtgggttcatatttaa

SEQ ID NO: 41363 - DNA, 25 bp, SARS Virus
gggattctgtgggttcatatttaaa

SEQ ID NO: 41364 - DNA, 25 bp, SARS Virus
ggattctgtggggtcatatttaaac

SEQ ID NO: 41365 - DNA, 25 bp, SARS Virus
gattctgtgggtgcatatttaaaca

SEQ ID NO: 41366 - DNA, 25 bp, SARS Virus
attctgtgggttgatatttaaacag

SEQ ID NO: 41367 - DNA, 25 bp, SARS Virus
ttctgtgggttcgtatttaaacagg

SEQ ID NO: 41368 - DNA, 25 bp, SARS Virus
tctgtgggttcagatttaaacaggc

SEQ ID NO: 41369 - DNA, 25 bp, SARS Virus
ctgtgggttcatgtttaaacaggca

SEQ ID NO: 41370 - DNA, 25 bp, SARS Virus
tgtgggttcatagttaaacaggcat

SEQ ID NO: 41371 - DNA, 25 bp, SARS Virus
gtgggttcatatgtaaacaggcata

SEQ ID NO: 41372 - DNA, 25 bp, SARS Virus
tgggttcatattgaaacaggcatag

SEQ ID NO: 41373 - DNA, 25 bp, SARS Virus
gggttcatatttgaacaggcatagg

SEQ ID NO: 41374 - DNA, 25 bp, SARS Virus
ggttcatatttagacaggcataggt

SEQ ID NO: 41375 - DNA, 25 bp, SARS Virus
gttcatatttaagcaggcataggtt

SEQ ID NO: 41376 - DNA, 25 bp, SARS Virus
ttcatatttaaagaggcataggttg

SEQ ID NO: 41377 - DNA, 25 bp, SARS Virus
tcatatttaaacgggcataggttgg

SEQ ID NO: 41378 - DNA, 25 bp, SARS Virus
catatttaaacaggcataggttgga

SEQ ID NO: 41379 - DNA, 25 bp, SARS Virus
atatttaaacaggcataggttggac

SEQ ID NO: 41380 - DNA, 25 bp, SARS Virus
tatttaaacagggataggttggacc

SEQ ID NO: 41381 - DNA, 25 bp, SARS Virus
atttaaacaggcgtaggttggacca

SEQ ID NO: 41382 - DNA, 25 bp, SARS Virus
tttaaacaggcagaggttggaccag

SEQ ID NO: 41383 - DNA, 25 bp, SARS Virus
ttaaacaggcatgggttggaccagt

SEQ ID NO: 41384 - DNA, 25 bp, SARS Virus
taaacaggcataggttggaccagtt

SEQ ID NO: 41385 - DNA, 25 bp, SARS Virus
aaacaggcataggttggaccagttt

SEQ ID NO: 41386 - DNA, 25 bp, SARS Virus
aacaggcatagggtggaccagtttg

SEQ ID NO: 41387 - DNA, 25 bp, SARS Virus
acaggcataggtgggaccagtttgt

SEQ ID NO: 41388 - DNA, 25 bp, SARS Virus
caggcataggttggaccagtttgta

SEQ ID NO: 41389 - DNA, 25 bp, SARS Virus
aggcataggttggaccagtttgtaa

SEQ ID NO: 41390 - DNA, 25 bp, SARS Virus
ggcataggttgggccagtttgtaaa

SEQ ID NO: 41391 - DNA, 25 bp, SARS Virus
gcataggttggagcagtttgtaaaa

SEQ ID NO: 41392 - DNA, 25 bp, SARS Virus
cataggttggacgagtttgtaaaag

SEQ ID NO: 41393 - DNA, 25 bp, SARS Virus
ataggttggaccggtttgtaaaagt

SEQ ID NO: 41394 - DNA, 25 bp, SARS Virus
taggttggaccagtttgtaaaagtc

SEQ ID NO: 41395 - DNA, 25 bp, SARS Virus
aggttggaccaggttgtaaaagtca

SEQ ID NO: 41396 - DNA, 25 bp, SARS Virus
ggttggaccagtgtgtaaaagtcaa

SEQ ID NO: 41397 - DNA, 25 bp, SARS Virus
gttggaccagttggtaaaagtcaag

SEQ ID NO: 41398 - DNA, 25 bp, SARS Virus
ttggaccagtttgtaaaagtcaaga

SEQ ID NO: 41399 - DNA, 25 bp, SARS Virus
tggaccagtttggaaaagtcaagat

SEQ ID NO: 41400 - DNA, 25 bp, SARS Virus
ggaccagtttgtgaaagtcaagatc

SEQ ID NO: 41401 - DNA, 25 bp, SARS Virus
gaccagtttgtagaagtcaagatcg

SEQ ID NO: 41402 - DNA, 25 bp, SARS Virus
accagtttgtaagagtcaagatcgt

SEQ ID NO: 41403 - DNA, 25 bp, SARS Virus
ccagtttgtaaaggtcaagatcgta

SEQ ID NO: 41404 - DNA, 25 bp, SARS Virus
cagtttgtaaaagtcaagatcgtac

SEQ ID NO: 41405 - DNA, 25 bp, SARS Virus
agtttgtaaaaggcaagatcgtacg

SEQ ID NO: 41406 - DNA, 25 bp, SARS Virus
gtttgtaaaagtgaagatcgtacga

SEQ ID NO: 41407 - DNA, 25 bp, SARS Virus
tttgtaaaagtcgagatcgtacgat

SEQ ID NO: 41408 - DNA, 25 bp, SARS Virus
ttgtaaaagtcaggatcgtacgatg

SEQ ID NO: 41409 - DNA, 25 bp, SARS Virus
tgtaaaagtcaagatcgtacgatgt

SEQ ID NO: 41410 - DNA, 25 bp, SARS Virus
gtaaaagtcaaggtcgtacgatgtt

SEQ ID NO: 41411 - DNA, 25 bp, SARS Virus
taaaagtcaagagcgtacgatgtta

SEQ ID NO: 41412 - DNA, 25 bp, SARS Virus
aaaagtcaagatggtacgatgttac

SEQ ID NO: 41413 - DNA, 25 bp, SARS Virus
aaagtcaagatcgtacgatgttacc

SEQ ID NO: 41414 - DNA, 25 bp, SARS Virus
aagtcaagatcggacgatgttacca

SEQ ID NO: 41415 - DNA, 25 bp, SARS Virus
agtcaagatcgtgcgatgttaccaa

SEQ ID NO: 41416 - DNA, 25 bp, SARS Virus
gtcaagatcgtaggatgttaccaag

SEQ ID NO: 41417 - DNA, 25 bp, SARS Virus
tcaagatcgtacgatgttaccaagt

SEQ ID NO: 41418 - DNA, 25 bp, SARS Virus
caagatcgtacggtgttaccaagtg

SEQ ID NO: 41419 - DNA, 25 bp, SARS Virus
aagatcgtacgaggttaccaagtgg

SEQ ID NO: 41420 - DNA, 25 bp, SARS Virus
agatcgtacgatgttaccaagtggt

SEQ ID NO: 41421 - DNA, 25 bp, SARS Virus
gatcgtacgatggtaccaagtggta

SEQ ID NO: 41422 - DNA, 25 bp, SARS Virus
atcgtacgatgtgaccaagtggtag

SEQ ID NO: 41423 - DNA, 25 bp, SARS Virus
tcgtacgatgttgccaagtggtaga

SEQ ID NO: 41424 - DNA, 25 bp, SARS Virus
cgtacgatgttagcaagtggtagac

SEQ ID NO: 41425 - DNA, 25 bp, SARS Virus
gtacgatgttacgaagtggtagacc

SEQ ID NO: 41426 - DNA, 25 bp, SARS Virus
tacgatgttaccgagtggtagacca

SEQ ID NO: 41427 - DNA, 25 bp, SARS Virus
acgatgttaccaggtggtagaccac

SEQ ID NO: 41428 - DNA, 25 bp, SARS Virus
cgatgttaccaagtggtagaccaca

SEQ ID NO: 41429 - DNA, 25 bp, SARS Virus
gatgttaccaaggggtagaccacaa

SEQ ID NO: 41430 - DNA, 25 bp, SARS Virus
atgttaccaagtggtagaccacaaa

SEQ ID NO: 41431 - DNA, 25 bp, SARS Virus
tgttaccaagtggtagaccacaaat

SEQ ID NO: 41432 - DNA, 25 bp, SARS Virus
gttaccaagtgggagaccacaaata

SEQ ID NO: 41433 - DNA, 25 bp, SARS Virus
ttaccaagtggtggaccacaaatag

SEQ ID NO: 41434 - DNA, 25 bp, SARS Virus
taccaagtggtagaccacaaatagt

SEQ ID NO: 41435 - DNA, 25 bp, SARS Virus
accaagtggtaggccacaaatagtc

SEQ ID NO: 41436 - DNA, 25 bp, SARS Virus
ccaagtggtagagcacaaatagtca

SEQ ID NO: 41437 - DNA, 25 bp, SARS Virus
caagtggtagacgacaaatagtcac

SEQ ID NO: 41438 - DNA, 25 bp, SARS Virus
aagtggtagaccgcaaatagtcaca

SEQ ID NO: 41439 - DNA, 25 bp, SARS Virus
agtggtagaccagaaatagtcacac

SEQ ID NO: 41440 - DNA, 25 bp, SARS Virus
gtggtagaccacgaatagtcacacg

SEQ ID NO: 41441 - DNA, 25 bp, SARS Virus
tggtagaccacagatagtcacacgg

SEQ ID NO: 41442 - DNA, 25 bp, SARS Virus
ggtagaccacaagtagtcacacggt

SEQ ID NO: 41443 - DNA, 25 bp, SARS Virus
gtagaccacaaagagtcacacggta

SEQ ID NO: 41444 - DNA, 25 bp, SARS Virus
tagaccacaaatggtcacacggtac

SEQ ID NO: 41445 - DNA, 25 bp, SARS Virus
agaccacaaatagtcacacggtact

SEQ ID NO: 41446 - DNA, 25 bp, SARS Virus
gaccacaaataggcacacggtactc

SEQ ID NO: 41447 - DNA, 25 bp, SARS Virus
accacaaatagtgacacggtactct

SEQ ID NO: 41448 - DNA, 25 bp, SARS Virus
ccacaaatagtcgcacggtactctg

SEQ ID NO: 41449 - DNA, 25 bp, SARS Virus
cacaaatagtcagacggtactctgg

SEQ ID NO: 41450 - DNA, 25 bp, SARS Virus
acaaatagtcacgcggtactctgga

SEQ ID NO: 41451 - DNA, 25 bp, SARS Virus
caaatagtcacagggtactctggat

SEQ ID NO: 41452 - DNA, 25 bp, SARS Virus
aaatagtcacacggtactctggatt

SEQ ID NO: 41453 - DNA, 25 bp, SARS Virus
aatagtcacacggtactctggatta

SEQ ID NO: 41454 - DNA, 25 bp, SARS Virus
atagtcacacgggactctggattag

SEQ ID NO: 41455 - DNA, 25 bp, SARS Virus
tagtcacacggtgctctggattagt

SEQ ID NO: 41456 - DNA, 25 bp, SARS Virus
agtcacacggtagtctggattagta

SEQ ID NO: 41457 - DNA, 25 bp, SARS Virus
gtcacacggtacgctggattagtat

SEQ ID NO: 41458 - DNA, 25 bp, SARS Virus
tcacacggtactgtggattagtatg

SEQ ID NO: 41459 - DNA, 25 bp, SARS Virus
cacacggtactcgggattagtatgg

SEQ ID NO: 41460 - DNA, 25 bp, SARS Virus
acacggtactctggattagtatggt

SEQ ID NO: 41461 - DNA, 25 bp, SARS Virus
cacggtactctggattagtatggta

SEQ ID NO: 41462 - DNA, 25 bp, SARS Virus
acggtactctgggttagtatggtaa

SEQ ID NO: 41463 - DNA, 25 bp, SARS Virus
cggtactctggagtagtatggtaat

SEQ ID NO: 41464 - DNA, 25 bp, SARS Virus
ggtactctggatgagtatggtaatt

SEQ ID NO: 41465 - DNA, 25 bp, SARS Virus
gtactctggattggtatggtaattt

SEQ ID NO: 41466 - DNA, 25 bp, SARS Virus
tactctggattagtatggtaatttc

SEQ ID NO: 41467 - DNA, 25 bp, SARS Virus
actctggattaggatggtaatttcc

SEQ ID NO: 41468 - DNA, 25 bp, SARS Virus
ctctggattagtgtggtaatttcca

SEQ ID NO: 41469 - DNA, 25 bp, SARS Virus
tctggattagtagggtaatttccaa

SEQ ID NO: 41470 - DNA, 25 bp, SARS Virus
ctggattagtatggtaatttccaag

SEQ ID NO: 41471 - DNA, 25 bp, SARS Virus
tggattagtatggtaatttccaaga

SEQ ID NO: 41472 - DNA, 25 bp, SARS Virus
ggattagtatgggaatttccaagaa

SEQ ID NO: 41473 - DNA, 25 bp, SARS Virus
gattagtatggtgatttccaagaaa

SEQ ID NO: 41474 - DNA, 25 bp, SARS Virus
attagtatggtagtttccaagaaag

SEQ ID NO: 41475 - DNA, 25 bp, SARS Virus
ttagtatggtaagttccaagaaagg

SEQ ID NO: 41476 - DNA, 25 bp, SARS Virus
tagtatggtaatgtccaagaaagga

SEQ ID NO: 41477 - DNA, 25 bp, SARS Virus
agtatggtaattgccaagaaaggaa

SEQ ID NO: 41478 - DNA, 25 bp, SARS Virus
gtatggtaatttgcaagaaaggaat

SEQ ID NO: 41479 - DNA, 25 bp, SARS Virus
tatggtaatttcgaagaaaggaatt

SEQ ID NO: 41480 - DNA, 25 bp, SARS Virus
atggtaatttccgagaaaggaatta

SEQ ID NO: 41481 - DNA, 25 bp, SARS Virus
tggtaatttccaggaaaggaattac

SEQ ID NO: 41482 - DNA, 25 bp, SARS Virus
ggtaatttccaagaaaggaattacc

SEQ ID NO: 41483 - DNA, 25 bp, SARS Virus
gtaatttccaaggaaggaattacct

SEQ ID NO: 41484 - DNA, 25 bp, SARS Virus
taatttccaagagaggaattaccta

SEQ ID NO: 41485 - DNA, 25 bp, SARS Virus
aatttccaagaagggaattacctag

SEQ ID NO: 41486 - DNA, 25 bp, SARS Virus
atttccaagaaaggaattacctagt

SEQ ID NO: 41487 - DNA, 25 bp, SARS Virus
tttccaagaaaggaattacctagta

SEQ ID NO: 41488 - DNA, 25 bp, SARS Virus
ttccaagaaagggattacctagtac

SEQ ID NO: 41489 - DNA, 25 bp, SARS Virus
tccaagaaaggagttacctagtaca

SEQ ID NO: 41490 - DNA, 25 bp, SARS Virus
ccaagaaaggaagtacctagtacac

SEQ ID NO: 41491 - DNA, 25 bp, SARS Virus
caagaaaggaatgacctagtacacc

SEQ ID NO: 41492 - DNA, 25 bp, SARS Virus
aagaaaggaattgcctagtacacca

SEQ ID NO: 41493 - DNA, 25 bp, SARS Virus
agaaaggaattagctagtacaccat

SEQ ID NO: 41494 - DNA, 25 bp, SARS Virus
gaaaggaattacgtagtacaccatc

SEQ ID NO: 41495 - DNA, 25 bp, SARS Virus
aaaggaattaccgagtacaccatca

SEQ ID NO: 41496 - DNA, 25 bp, SARS Virus
aaggaattacctggtacaccatcac

SEQ ID NO: 41497 - DNA, 25 bp, SARS Virus
aggaattacctagtacaccatcaca

SEQ ID NO: 41498 - DNA, 25 bp, SARS Virus
ggaattacctaggacaccatcacaa

SEQ ID NO: 41499 - DNA, 25 bp, SARS Virus
gaattacctagtgcaccatcacaac

SEQ ID NO: 41500 - DNA, 25 bp, SARS Virus
aattacctagtagaccatcacaacc

SEQ ID NO: 41501 - DNA, 25 bp, SARS Virus
attacctagtacgccatcacaacca

SEQ ID NO: 41502 - DNA, 25 bp, SARS Virus
ttacctagtacagcatcacaaccaa

SEQ ID NO: 41503 - DNA, 25 bp, SARS Virus
tacctagtacacgatcacaaccaaa

SEQ ID NO: 41504 - DNA, 25 bp, SARS Virus
acctagtacaccgtcacaaccaaaa

SEQ ID NO: 41505 - DNA, 25 bp, SARS Virus
cctagtacaccagcacaaccaaaat

SEQ ID NO: 41506 - DNA, 25 bp, SARS Virus
ctagtacaccatgacaaccaaaatt

SEQ ID NO: 41507 - DNA, 25 bp, SARS Virus
tagtacaccatcgcaaccaaaattg

SEQ ID NO: 41508 - DNA, 25 bp, SARS Virus
agtacaccatcagaaccaaaattgt

SEQ ID NO: 41509 - DNA, 25 bp, SARS Virus
gtacaccatcacgaccaaaattgta

SEQ ID NO: 41510 - DNA, 25 bp, SARS Virus
tacaccatcacagccaaaattgtaa

SEQ ID NO: 41511 - DNA, 25 bp, SARS Virus
acaccatcacaagcaaaattgtaac

SEQ ID NO: 41512 - DNA, 25 bp, SARS Virus
caccatcacaacgaaaattgtaact

SEQ ID NO: 41513 - DNA, 25 bp, SARS Virus
accatcacaaccgaaattgtaacta

SEQ ID NO: 41514 - DNA, 25 bp, SARS Virus
ccatcacaaccagaattgtaactaa

SEQ ID NO: 41515 - DNA, 25 bp, SARS Virus
catcacaaccaagattgtaactaat

SEQ ID NO: 41516 - DNA, 25 bp, SARS Virus
atcacaaccaaagttgtaactaata

SEQ ID NO: 41517 - DNA, 25 bp, SARS Virus
tcacaaccaaaagtgtaactaatac

SEQ ID NO: 41518 - DNA, 25 bp, SARS Virus
cacaaccaaaatggtaactaatact

SEQ ID NO: 41519 - DNA, 25 bp, SARS Virus
acaaccaaaattgtaactaatacta

SEQ ID NO: 41520 - DNA, 25 bp, SARS Virus
caaccaaaattggaactaatactaa

SEQ ID NO: 41521 - DNA, 25 bp, SARS Virus
aaccaaaattgtgactaatactaac

SEQ ID NO: 41522 - DNA, 25 bp, SARS Virus
accaaaattgtagctaatactaacg

SEQ ID NO: 41523 - DNA, 25 bp, SARS Virus
ccaaaattgtaagtaatactaacgc

SEQ ID NO: 41524 - DNA, 25 bp, SARS Virus
caaaattgtaacgaatactaacgca

SEQ ID NO: 41525 - DNA, 25 bp, SARS Virus
aaaattgtaactgatactaacgcac

SEQ ID NO: 41526 - DNA, 25 bp, SARS Virus
aaattgtaactagtactaacgcaca

SEQ ID NO: 41527 - DNA, 25 bp, SARS Virus
aattgtaactaagactaacgcacag

SEQ ID NO: 41528 - DNA, 25 bp, SARS Virus
attgtaactaatgctaacgcacaga

SEQ ID NO: 41529 - DNA, 25 bp, SARS Virus
ttgtaactaatagtaacgcacagaa

SEQ ID NO: 41530 - DNA, 25 bp, SARS Virus
tgtaactaatacgaacgcacagaaa

SEQ ID NO: 41531 - DNA, 25 bp, SARS Virus
gtaactaatactgacgcacagaaag

SEQ ID NO: 41532 - DNA, 25 bp, SARS Virus
taactaatactagcgcacagaaaga

SEQ ID NO: 41533 - DNA, 25 bp, SARS Virus
aactaatactaaggcacagaaagac

SEQ ID NO: 41534 - DNA, 25 bp, SARS Virus
actaatactaacgcacagaaagacg

SEQ ID NO: 41535 - DNA, 25 bp, SARS Virus
ctaatactaacggacagaaagacga

SEQ ID NO: 41536 - DNA, 25 bp, SARS Virus
taatactaacgcgcagaaagacgat

SEQ ID NO: 41537 - DNA, 25 bp, SARS Virus
aatactaacgcagagaaagacgata

SEQ ID NO: 41538 - DNA, 25 bp, SARS Virus
atactaacgcacggaaagacgatat

SEQ ID NO: 41539 - DNA, 25 bp, SARS Virus
tactaacgcacagaaagacgatata

SEQ ID NO: 41540 - DNA, 25 bp, SARS Virus
actaacgcacaggaagacgatatac

SEQ ID NO: 41541 - DNA, 25 bp, SARS Virus
ctaacgcacagagagacgatatacg

SEQ ID NO: 41542 - DNA, 25 bp, SARS Virus
taacgcacagaaggacgatatacgt

SEQ ID NO: 41543 - DNA, 25 bp, SARS Virus
aacgcacagaaagacgatatacgta

SEQ ID NO: 41544 - DNA, 25 bp, SARS Virus
acgcacagaaaggcgatatacgtag

SEQ ID NO: 41545 - DNA, 25 bp, SARS Virus
cgcacagaaagaggatatacgtagt

SEQ ID NO: 41546 - DNA, 25 bp, SARS Virus
gcacagaaagacgatatacgtagta

SEQ ID NO: 41547 - DNA, 25 bp, SARS Virus
cacagaaagacggtatacgtagtat

SEQ ID NO: 41548 - DNA, 25 bp, SARS Virus
acagaaagacgagatacgtagtata

SEQ ID NO: 41549 - DNA, 25 bp, SARS Virus
cagaaagacgatgtacgtagtatac

SEQ ID NO: 41550 - DNA, 25 bp, SARS Virus
agaaagacgatagacgtagtatacc

SEQ ID NO: 41551 - DNA, 25 bp, SARS Virus
gaaagacgatatgcgtagtatacct

SEQ ID NO: 41552 - DNA, 25 bp, SARS Virus
aaagacgatataggtagtatacctc

SEQ ID NO: 41553 - DNA, 25 bp, SARS Virus
aagacgatatacgtagtatacctcg

SEQ ID NO: 41554 - DNA, 25 bp, SARS Virus
agacgatatacggagtatacctcga

SEQ ID NO: 41555 - DNA, 25 bp, SARS Virus
gacgatatacgtggtatacctcgaa

SEQ ID NO: 41556 - DNA, 25 bp, SARS Virus
acgatatacgtagtatacctcgaag

SEQ ID NO: 41557 - DNA, 25 bp, SARS Virus
cgatatacgtaggatacctcgaagg

SEQ ID NO: 41558 - DNA, 25 bp, SARS Virus
gatatacgtagtgtacctcgaaggt

SEQ ID NO: 41559 - DNA, 25 bp, SARS Virus
atatacgtagtagacctcgaaggtt

SEQ ID NO: 41560 - DNA, 25 bp, SARS Virus
tatacgtagtatgcctcgaaggttg

SEQ ID NO: 41561 - DNA, 25 bp, SARS Virus
atacgtagtatagctcgaaggttgt

SEQ ID NO: 41562 - DNA, 25 bp, SARS Virus
tacgtagtatacgtcgaaggttgtc

SEQ ID NO: 41563 - DNA, 25 bp, SARS Virus
acgtagtataccgcgaaggttgtcc

SEQ ID NO: 41564 - DNA, 25 bp, SARS Virus
cgtagtatacctggaaggttgtcct

SEQ ID NO: 41565 - DNA, 25 bp, SARS Virus
gtagtatacctcgaaggttgtcctc

SEQ ID NO: 41566 - DNA, 25 bp, SARS Virus
tagtatacctcggaggttgtcctca

SEQ ID NO: 41567 - DNA, 25 bp, SARS Virus
agtatacctcgagggttgtcctcat

SEQ ID NO: 41568 - DNA, 25 bp, SARS Virus
gtatacctcgaaggttgtcctcatg

SEQ ID NO: 41569 - DNA, 25 bp, SARS Virus
tatacctcgaaggttgtcctcatgt

SEQ ID NO: 41570 - DNA, 25 bp, SARS Virus
atacctcgaagggtgtcctcatgtg

SEQ ID NO: 41571 - DNA, 25 bp, SARS Virus
tacctcgaaggtggtcctcatgtgc

SEQ ID NO: 41572 - DNA, 25 bp, SARS Virus
acctcgaaggttgtcctcatgtgcg

SEQ ID NO: 41573 - DNA, 25 bp, SARS Virus
cctcgaaggttggcctcatgtgcga

SEQ ID NO: 41574 - DNA, 25 bp, SARS Virus
ctcgaaggttgtgctcatgtgcgac

SEQ ID NO: 41575 - DNA, 25 bp, SARS Virus
tcgaaggttgtcgtcatgtgcgacc

SEQ ID NO: 41576 - DNA, 25 bp, SARS Virus
cgaaggttgtccgcatgtgcgacca

SEQ ID NO: 41577 - DNA, 25 bp, SARS Virus
gaaggttgtcctgatgtgcgaccat

SEQ ID NO: 41578 - DNA, 25 bp, SARS Virus
aaggttgtcctcgtgtgcgaccatg

SEQ ID NO: 41579 - DNA, 25 bp, SARS Virus
aggttgtcctcaggtgcgaccatga

SEQ ID NO: 41580 - DNA, 25 bp, SARS Virus
ggttgtcctcatgtgcgaccatgac

SEQ ID NO: 41581 - DNA, 25 bp, SARS Virus
gttgtcctcatgggcgaccatgact

SEQ ID NO: 41582 - DNA, 25 bp, SARS Virus
ttgtcctcatgtgcgaccatgactg

SEQ ID NO: 41583 - DNA, 25 bp, SARS Virus
tgtcctcatgtgggaccatgactga

SEQ ID NO: 41584 - DNA, 25 bp, SARS Virus
gtcctcatgtgcgaccatgactgaa

SEQ ID NO: 41585 - DNA, 25 bp, SARS Virus
tcctcatgtgcggccatgactgaat

SEQ ID NO: 41586 - DNA, 25 bp, SARS Virus
cctcatgtgcgagcatgactgaatc

SEQ ID NO: 41587 - DNA, 25 bp, SARS Virus
ctcatgtgcgacgatgactgaatct

SEQ ID NO: 41588 - DNA, 25 bp, SARS Virus
tcatgtgcgaccgtgactgaatctt

SEQ ID NO: 41589 - DNA, 25 bp, SARS Virus
catgtgcgaccaggactgaatcttc

SEQ ID NO: 41590 - DNA, 25 bp, SARS Virus
atgtgcgaccatgactgaatcttcc

SEQ ID NO: 41591 - DNA, 25 bp, SARS Virus
tgtgcgaccatggctgaatcttcca

SEQ ID NO: 41592 - DNA, 25 bp, SARS Virus
gtgcgaccatgagtgaatcttccat

SEQ ID NO: 41593 - DNA, 25 bp, SARS Virus
tgcgaccatgacggaatcttccatt

SEQ ID NO: 41594 - DNA, 25 bp, SARS Virus
gcgaccatgactgaatcttccattt

SEQ ID NO: 41595 - DNA, 25 bp, SARS Virus
cgaccatgactggatcttccattta

SEQ ID NO: 41596 - DNA, 25 bp, SARS Virus
gaccatgactgagtcttccatttaa

SEQ ID NO: 41597 - DNA, 25 bp, SARS Virus
accatgactgaagcttccatttaag

SEQ ID NO: 41598 - DNA, 25 bp, SARS Virus
ccatgactgaatgttccatttaaga

SEQ ID NO: 41599 - DNA, 25 bp, SARS Virus
catgactgaatcgtccatttaagat

SEQ ID NO: 41600 - DNA, 25 bp, SARS Virus
atgactgaatctgccatttaagata

SEQ ID NO: 41601 - DNA, 25 bp, SARS Virus
tgactgaatcttgcatttaagatac

SEQ ID NO: 41602 - DNA, 25 bp, SARS Virus
gactgaatcttcgatttaagatacc

SEQ ID NO: 41603 - DNA, 25 bp, SARS Virus
actgaatcttccgtttaagatacca

SEQ ID NO: 41604 - DNA, 25 bp, SARS Virus
ctgaatcttccagttaagataccag

SEQ ID NO: 41605 - DNA, 25 bp, SARS Virus
tgaatcttccatgtaagataccagg

SEQ ID NO: 41606 - DNA, 25 bp, SARS Virus
gaatcttccattgaagataccaggt

SEQ ID NO: 41607 - DNA, 25 bp, SARS Virus
aatcttccatttgagataccaggta

SEQ ID NO: 41608 - DNA, 25 bp, SARS Virus
atcttccatttaggataccaggtaa

SEQ ID NO: 41609 - DNA, 25 bp, SARS Virus
cccacgtaccattttcattggacac

SEQ ID NO: 41610 - DNA, 25 bp, SARS Virus
ccacgtaccatgttcattggacacc

SEQ ID NO: 41611 - DNA, 25 bp, SARS Virus
cacgtaccatgttcattggacacct

SEQ ID NO: 41612 - DNA, 25 bp, SARS Virus
acgtaccatgtttattggacacctt

SEQ ID NO: 41613 - DNA, 25 bp, SARS Virus
cgtaccatgttctttggacaccttg

SEQ ID NO: 41614 - DNA, 25 bp, SARS Virus
gtaccatgttcattggacaccttga

SEQ ID NO: 41615 - DNA, 25 bp, SARS Virus
taccatgttcattggacaccttgat

SEQ ID NO: 41616 - DNA, 25 bp, SARS Virus
accatgttcatttgacaccttgatg

SEQ ID NO: 41617 - DNA, 25 bp, SARS Virus
ccatgttcattgtacaccttgatgt

SEQ ID NO: 41618 - DNA, 25 bp, SARS Virus
catgttcattggtcaccttgatgtt

SEQ ID NO: 41619 - DNA, 25 bp, SARS Virus
atgttcattggataccttgatgttg

SEQ ID NO: 41620 - DNA, 25 bp, SARS Virus
tgttcattggactccttgatgttga

SEQ ID NO: 41621 - DNA, 25 bp, SARS Virus
gttcattggacatcttgatgttgag

SEQ ID NO: 41622 - DNA, 25 bp, SARS Virus
ttcattggacactttgatgttgaga

SEQ ID NO: 41623 - DNA, 25 bp, SARS Virus
tcattggacaccttgatgttgagaa

SEQ ID NO: 41624 - DNA, 25 bp, SARS Virus
cattggacaccttgatgttgagaat

SEQ ID NO: 41625 - DNA, 25 bp, SARS Virus
attggacacctttatgttgagaatt

SEQ ID NO: 41626 - DNA, 25 bp, SARS Virus
ttggacaccttgttgttgagaatta

SEQ ID NO: 41627 - DNA, 25 bp, SARS Virus
tggacaccttgatgttgagaattac

SEQ ID NO: 41628 - DNA, 25 bp, SARS Virus
ggacaccttgattttgagaattacc

SEQ ID NO: 41629 - DNA, 25 bp, SARS Virus
gacaccttgatgttgagaattacct

SEQ ID NO: 41630 - DNA, 25 bp, SARS Virus
acaccttgatgttgagaattaccta

SEQ ID NO: 41631 - DNA, 25 bp, SARS Virus
caccttgatgtttagaattacctaa

SEQ ID NO: 41632 - DNA, 25 bp, SARS Virus
accttgatgttgtgaattacctaac

SEQ ID NO: 41633 - DNA, 25 bp, SARS Virus
ccttgatgttgataattacctaaca

SEQ ID NO: 41634 - DNA, 25 bp, SARS Virus
cttgatgttgagtattacctaacac

SEQ ID NO: 41635 - DNA, 25 bp, SARS Virus
ttgatgttgagatttacctaacacc

SEQ ID NO: 41636 - DNA, 25 bp, SARS Virus
tgatgttgagaattacctaacacca

SEQ ID NO: 41637 - DNA, 25 bp, SARS Virus
gatgttgagaattacctaacaccaa

SEQ ID NO: 41638 - DNA, 25 bp, SARS Virus
atgttgagaatttcctaacaccaac

SEQ ID NO: 41639 - DNA, 25 bp, SARS Virus
tgttgagaattatctaacaccaacc

SEQ ID NO: 41640 - DNA, 25 bp, SARS Virus
gttgagaattacttaacaccaacct

SEQ ID NO: 41641 - DNA, 25 bp, SARS Virus
ttgagaattacctaacaccaaccta

SEQ ID NO: 41642 - DNA, 25 bp, SARS Virus
tgagaattaccttacaccaacctac

SEQ ID NO: 41643 - DNA, 25 bp, SARS Virus
gagaattacctatcaccaacctact

SEQ ID NO: 41644 - DNA, 25 bp, SARS Virus
agaattacctaataccaacctactg

SEQ ID NO: 41645 - DNA, 25 bp, SARS Virus
gaattacctaactccaacctactgt

SEQ ID NO: 41646 - DNA, 25 bp, SARS Virus
aattacctaacatcaacctactgtg

SEQ ID NO: 41647 - DNA, 25 bp, SARS Virus
attacctaacactaacctactgtgt

SEQ ID NO: 41648 - DNA, 25 bp, SARS Virus
ttacctaacacctacctactgtgtc

SEQ ID NO: 41649 - DNA, 25 bp, SARS Virus
tacctaacaccatcctactgtgtca

SEQ ID NO: 41650 - DNA, 25 bp, SARS Virus
acctaacaccaatctactgtgtcat

SEQ ID NO: 41651 - DNA, 25 bp, SARS Virus
cctaacaccaacttactgtgtcata

SEQ ID NO: 41652 - DNA, 25 bp, SARS Virus
ctaacaccaacctactgtgtcatat

SEQ ID NO: 41653 - DNA, 25 bp, SARS Virus
taacaccaaccttctgtgtcatatg

SEQ ID NO: 41654 - DNA, 25 bp, SARS Virus
aacaccaacctattgtgtcatatga

SEQ ID NO: 41655 - DNA, 25 bp, SARS Virus
acaccaacctactgtgtcatatgac

SEQ ID NO: 41656 - DNA, 25 bp, SARS Virus
caccaacctactttgtcatatgaca

SEQ ID NO: 41657 - DNA, 25 bp, SARS Virus
accaacctactgtgtcatatgacag

SEQ ID NO: 41658 - DNA, 25 bp, SARS Virus
ccaacctactgtttcatatgacagg

SEQ ID NO: 41659 - DNA, 25 bp, SARS Virus
caacctactgtgtcatatgacaggt

SEQ ID NO: 41660 - DNA, 25 bp, SARS Virus
aacctactgtgttatatgacaggtt

SEQ ID NO: 41661 - DNA, 25 bp, SARS Virus
acctactgtgtcttatgacaggttc

SEQ ID NO: 41662 - DNA, 25 bp, SARS Virus
cctactgtgtcatatgacaggttct

SEQ ID NO: 41663 - DNA, 25 bp, SARS Virus
ctactgtgtcatttgacaggttctg

SEQ ID NO: 41664 - DNA, 25 bp, SARS Virus
tactgtgtcatatgacaggttctgt

SEQ ID NO: 41665 - DNA, 25 bp, SARS Virus
actgtgtcatattacaggttctgta

SEQ ID NO: 41666 - DNA, 25 bp, SARS Virus
ctgtgtcatatgtcaggttctgtac

SEQ ID NO: 41667 - DNA, 25 bp, SARS Virus
tgtgtcatatgataggttctgtaca

SEQ ID NO: 41668 - DNA, 25 bp, SARS Virus
gtgtcatatgactggttctgtacag

SEQ ID NO: 41669 - DNA, 25 bp, SARS Virus
tgtcatatgacatgttctgtacagt

SEQ ID NO: 41670 - DNA, 25 bp, SARS Virus
gtcatatgacagtttctgtacagta

SEQ ID NO: 41671 - DNA, 25 bp, SARS Virus
tcatatgacaggttctgtacagtaa

SEQ ID NO: 41672 - DNA, 25 bp, SARS Virus
catatgacaggttctgtacagtaaa

SEQ ID NO: 41673 - DNA, 25 bp, SARS Virus
atatgacaggttttgtacagtaaac

SEQ ID NO: 41674 - DNA, 25 bp, SARS Virus
tatgacaggttctgtacagtaaacg

SEQ ID NO: 41675 - DNA, 25 bp, SARS Virus
atgacaggttctttacagtaaacgt

SEQ ID NO: 41676 - DNA, 25 bp, SARS Virus
tgacaggttctgtacagtaaacgtg

SEQ ID NO: 41677 - DNA, 25 bp, SARS Virus
gacaggttctgttcagtaaacgtgt

SEQ ID NO: 41678 - DNA, 25 bp, SARS Virus
acaggttctgtatagtaaacgtgtc

SEQ ID NO: 41679 - DNA, 25 bp, SARS Virus
caggttctgtactgtaaacgtgtcg

SEQ ID NO: 41680 - DNA, 25 bp, SARS Virus
aggttctgtacattaaacgtgtcgt

SEQ ID NO: 41681 - DNA, 25 bp, SARS Virus
ggttctgtacagtaaacgtgtcgtc

SEQ ID NO: 41682 - DNA, 25 bp, SARS Virus
gttctgtacagttaacgtgtcgtct

SEQ ID NO: 41683 - DNA, 25 bp, SARS Virus
ttctgtacagtatacgtgtcgtctt

SEQ ID NO: 41684 - DNA, 25 bp, SARS Virus
tctgtacagtaatcgtgtcgtcttc

SEQ ID NO: 41685 - DNA, 25 bp, SARS Virus
ctgtacagtaaatgtgtcgtcttct

SEQ ID NO: 41686 - DNA, 25 bp, SARS Virus
tgtacagtaaacttgtcgtcttctg

SEQ ID NO: 41687 - DNA, 25 bp, SARS Virus
gtacagtaaacgtgtcgtcttctgt

SEQ ID NO: 41688 - DNA, 25 bp, SARS Virus
tacagtaaacgtttcgtcttctgta

SEQ ID NO: 41689 - DNA, 25 bp, SARS Virus
acagtaaacgtgtcgtcttctgtac

SEQ ID NO: 41690 - DNA, 25 bp, SARS Virus
cagtaaacgtgttgtcttctgtacg

SEQ ID NO: 41691 - DNA, 25 bp, SARS Virus
agtaaacgtgtcttcttctgtacga

SEQ ID NO: 41692 - DNA, 25 bp, SARS Virus
gtaaacgtgtcgtcttctgtacgaa

SEQ ID NO: 41693 - DNA, 25 bp, SARS Virus
taaacgtgtcgttttctgtacgaat

SEQ ID NO: 41694 - DNA, 25 bp, SARS Virus
aaacgtgtcgtcttctgtacgaatt

SEQ ID NO: 41695 - DNA, 25 bp, SARS Virus
aacgtgtcgtcttctgtacgaatta

SEQ ID NO: 41696 - DNA, 25 bp, SARS Virus
acgtgtcgtcttttgtacgaattag

SEQ ID NO: 41697 - DNA, 25 bp, SARS Virus
cgtgtcgtcttctgtacgaattagg

SEQ ID NO: 41698 - DNA, 25 bp, SARS Virus
gtgtcgtcttctttacgaattagga

SEQ ID NO: 41699 - DNA, 25 bp, SARS Virus
tgtcgtcttctgtacgaattaggat

SEQ ID NO: 41700 - DNA, 25 bp, SARS Virus
gtcgtcttctgttcgaattaggatt

SEQ ID NO: 41701 - DNA, 25 bp, SARS Virus
tcgtcttctgtatgaattaggattg

SEQ ID NO: 41702 - DNA, 25 bp, SARS Virus
cgtcttctgtactaattaggattga

SEQ ID NO: 41703 - DNA, 25 bp, SARS Virus
gtcttctgtacgtattaggattgat

SEQ ID NO: 41704 - DNA, 25 bp, SARS Virus
tcttctgtacgatttaggattgata

SEQ ID NO: 41705 - DNA, 25 bp, SARS Virus
cttctgtacgaattaggattgatac

SEQ ID NO: 41706 - DNA, 25 bp, SARS Virus
ttctgtacgaattaggattgatact

SEQ ID NO: 41707 - DNA, 25 bp, SARS Virus
tctgtacgaatttggattgatactt

SEQ ID NO: 41708 - DNA, 25 bp, SARS Virus
ctgtacgaattatgattgatacttc

SEQ ID NO: 41709 - DNA, 25 bp, SARS Virus
tgtacgaattagtattgatacttct

SEQ ID NO: 41710 - DNA, 25 bp, SARS Virus
gtacgaattaggtttgatacttcta

SEQ ID NO: 41711 - DNA, 25 bp, SARS Virus
tacgaattaggattgatacttctag

SEQ ID NO: 41712 - DNA, 25 bp, SARS Virus
acgaattaggattgatacttctaga

SEQ ID NO: 41713 - DNA, 25 bp, SARS Virus
cgaattaggatttatacttctagac

SEQ ID NO: 41714 - DNA, 25 bp, SARS Virus
gaattaggattgttacttctagacg

SEQ ID NO: 41715 - DNA, 25 bp, SARS Virus
aattaggattgatacttctagacga

SEQ ID NO: 41716 - DNA, 25 bp, SARS Virus
attaggattgattcttctagacgag

SEQ ID NO: 41717 - DNA, 25 bp, SARS Virus
ttaggattgatatttctagacgagt

SEQ ID NO: 41718 - DNA, 25 bp, SARS Virus
taggattgatacttctagacgagta

SEQ ID NO: 41719 - DNA, 25 bp, SARS Virus
aggattgatacttctagacgagtaa

SEQ ID NO: 41720 - DNA, 25 bp, SARS Virus
ggattgatacttttagacgagtaag

SEQ ID NO: 41721 - DNA, 25 bp, SARS Virus
gattgatacttctagacgagtaagc

SEQ ID NO: 41722 - DNA, 25 bp, SARS Virus
attgatacttcttgacgagtaagcg

SEQ ID NO: 41723 - DNA, 25 bp, SARS Virus
ttgatacttctatacgagtaagcgt

SEQ ID NO: 41724 - DNA, 25 bp, SARS Virus
tgatacttctagtcgagtaagcgtt

SEQ ID NO: 41725 - DNA, 25 bp, SARS Virus
gatacttctagatgagtaagcgttt

SEQ ID NO: 41726 - DNA, 25 bp, SARS Virus
atacttctagactagtaagcgttta

SEQ ID NO: 41727 - DNA, 25 bp, SARS Virus
tacttctagacgtgtaagcgtttag

SEQ ID NO: 41728 - DNA, 25 bp, SARS Virus
acttctagacgattaagcgtttagg

SEQ ID NO: 41729 - DNA, 25 bp, SARS Virus
cttctagacgagtaagcgtttaggt

SEQ ID NO: 41730 - DNA, 25 bp, SARS Virus
ttctagacgagttagcgtttaggtt

SEQ ID NO: 41731 - DNA, 25 bp, SARS Virus
tctagacgagtatgcgtttaggttg

SEQ ID NO: 41732 - DNA, 25 bp, SARS Virus
ctagacgagtaatcgtttaggttgg

SEQ ID NO: 41733 - DNA, 25 bp, SARS Virus
tagacgagtaagtgtttaggttggt

SEQ ID NO: 41734 - DNA, 25 bp, SARS Virus
agacgagtaagcttttaggttggta

SEQ ID NO: 41735 - DNA, 25 bp, SARS Virus
gacgagtaagcgtttaggttggtat

SEQ ID NO: 41736 - DNA, 25 bp, SARS Virus
acgagtaagcgtttaggttggtatc

SEQ ID NO: 41737 - DNA, 25 bp, SARS Virus
cgagtaagcgtttaggttggtatcg

SEQ ID NO: 41738 - DNA, 25 bp, SARS Virus
gagtaagcgttttggttggtatcga

SEQ ID NO: 41739 - DNA, 25 bp, SARS Virus
agtaagcgtttatgttggtatcgaa

SEQ ID NO: 41740 - DNA, 25 bp, SARS Virus
gtaagcgtttagtttggtatcgaaa

SEQ ID NO: 41741 - DNA, 25 bp, SARS Virus
taagcgtttaggttggtatcgaaag

SEQ ID NO: 41742 - DNA, 25 bp, SARS Virus
aagcgtttaggttggtatcgaaaga

SEQ ID NO: 41743 - DNA, 25 bp, SARS Virus
agcgtttaggtttgtatcgaaagaa

SEQ ID NO: 41744 - DNA, 25 bp, SARS Virus
gcgtttaggttgttatcgaaagaac

SEQ ID NO: 41745 - DNA, 25 bp, SARS Virus
cgtttaggttggtatcgaaagaaca

SEQ ID NO: 41746 - DNA, 25 bp, SARS Virus
gtttaggttggtttcgaaagaacaa

SEQ ID NO: 41747 - DNA, 25 bp, SARS Virus
tttaggttggtatcgaaagaacaag

SEQ ID NO: 41748 - DNA, 25 bp, SARS Virus
ttaggttggtattgaaagaacaagt

SEQ ID NO: 41749 - DNA, 25 bp, SARS Virus
taggttggtatctaaagaacaagtc

SEQ ID NO: 41750 - DNA, 25 bp, SARS Virus
aggttggtatcgtaagaacaagtcc

SEQ ID NO: 41751 - DNA, 25 bp, SARS Virus
ggttggtatcgatagaacaagtccg

SEQ ID NO: 41752 - DNA, 25 bp, SARS Virus
gttggtatcgaatgaacaagtccga

SEQ ID NO: 41753 - DNA, 25 bp, SARS Virus
ttggtatcgaaataacaagtccgac

SEQ ID NO: 41754 - DNA, 25 bp, SARS Virus
tggtatcgaaagtacaagtccgacc

SEQ ID NO: 41755 - DNA, 25 bp, SARS Virus
ggtatcgaaagatcaagtccgaccg

SEQ ID NO: 41756 - DNA, 25 bp, SARS Virus
gtatcgaaagaataagtccgaccgt

SEQ ID NO: 41757 - DNA, 25 bp, SARS Virus
tatcgaaagaactagtccgaccgtt

SEQ ID NO: 41758 - DNA, 25 bp, SARS Virus
atcgaaagaacatgtccgaccgtta

SEQ ID NO: 41759 - DNA, 25 bp, SARS Virus
tcgaaagaacaattccgaccgttac

SEQ ID NO: 41760 - DNA, 25 bp, SARS Virus
cgaaagaacaagtccgaccgttaca

SEQ ID NO: 41761 - DNA, 25 bp, SARS Virus
gaaagaacaagttcgaccgttacaa

SEQ ID NO: 41762 - DNA, 25 bp, SARS Virus
aaagaacaagtctgaccgttacaag

SEQ ID NO: 41763 - DNA, 25 bp, SARS Virus
aagaacaagtcctaccgttacaagt

SEQ ID NO: 41764 - DNA, 25 bp, SARS Virus
agaacaagtccgtccgttacaagtt

SEQ ID NO: 41765 - DNA, 25 bp, SARS Virus
gaacaagtccgatcgttacaagttg

SEQ ID NO: 41766 - DNA, 25 bp, SARS Virus
aacaagtccgactgttacaagttga

SEQ ID NO: 41767 - DNA, 25 bp, SARS Virus
acaagtccgacctttacaagttgaa

SEQ ID NO: 41768 - DNA, 25 bp, SARS Virus
caagtccgaccgttacaagttgaag

SEQ ID NO: 41769 - DNA, 25 bp, SARS Virus
aagtccgaccgttacaagttgaagc

SEQ ID NO: 41770 - DNA, 25 bp, SARS Virus
agtccgaccgtttcaagttgaagca

SEQ ID NO: 41771 - DNA, 25 bp, SARS Virus
gtccgaccgttataagttgaagcac

SEQ ID NO: 41772 - DNA, 25 bp, SARS Virus
tccgaccgttactagttgaagcaca

SEQ ID NO: 41773 - DNA, 25 bp, SARS Virus
ccgaccgttacatgttgaagcacaa

SEQ ID NO: 41774 - DNA, 25 bp, SARS Virus
cgaccgttacaatttgaagcacaat

SEQ ID NO: 41775 - DNA, 25 bp, SARS Virus
gaccgttacaagttgaagcacaata

SEQ ID NO: 41776 - DNA, 25 bp, SARS Virus
accgttacaagttgaagcacaataa

SEQ ID NO: 41777 - DNA, 25 bp, SARS Virus
ccgttacaagtttaagcacaataac

SEQ ID NO: 41778 - DNA, 25 bp, SARS Virus
cgttacaagttgtagcacaataacc

SEQ ID NO: 41779 - DNA, 25 bp, SARS Virus
gttacaagttgatgcacaataaccg

SEQ ID NO: 41780 - DNA, 25 bp, SARS Virus
ttacaagttgaatcacaataaccgg

SEQ ID NO: 41781 - DNA, 25 bp, SARS Virus
tacaagttgaagtacaataaccggt

SEQ ID NO: 41782 - DNA, 25 bp, SARS Virus
acaagttgaagctcaataaccggta

SEQ ID NO: 41783 - DNA, 25 bp, SARS Virus
caagttgaagcataataaccggtaa

SEQ ID NO: 41784 - DNA, 25 bp, SARS Virus
aagttgaagcactataaccggtaag

SEQ ID NO: 41785 - DNA, 25 bp, SARS Virus
agttgaagcacattaaccggtaaga

SEQ ID NO: 41786 - DNA, 25 bp, SARS Virus
gttgaagcacaataaccggtaagat

SEQ ID NO: 41787 - DNA, 25 bp, SARS Virus
ttgaagcacaattaccggtaagata

SEQ ID NO: 41788 - DNA, 25 bp, SARS Virus
tgaagcacaatatccggtaagatac

SEQ ID NO: 41789 - DNA, 25 bp, SARS Virus
gaagcacaataatcggtaagatacg

SEQ ID NO: 41790 - DNA, 25 bp, SARS Virus
aagcacaataactggtaagatacgt

SEQ ID NO: 41791 - DNA, 25 bp, SARS Virus
agcacaataacctgtaagatacgtt

SEQ ID NO: 41792 - DNA, 25 bp, SARS Virus
gcacaataaccgttaagatacgttt

SEQ ID NO: 41793 - DNA, 25 bp, SARS Virus
cacaataaccggtaagatacgtttt

SEQ ID NO: 41794 - DNA, 25 bp, SARS Virus
acaataaccggttagatacgtttta

SEQ ID NO: 41795 - DNA, 25 bp, SARS Virus
caataaccggtatgatacgttttaa

SEQ ID NO: 41796 - DNA, 25 bp, SARS Virus
aataaccggtaatatacgttttaac

SEQ ID NO: 41797 - DNA, 25 bp, SARS Virus
ataaccggtaagttacgttttaaca

SEQ ID NO: 41798 - DNA, 25 bp, SARS Virus
taaccggtaagatacgttttaacag

SEQ ID NO: 41799 - DNA, 25 bp, SARS Virus
aaccggtaagattcgttttaacaga

SEQ ID NO: 41800 - DNA, 25 bp, SARS Virus
accggtaagatatgttttaacagac

SEQ ID NO: 41801 - DNA, 25 bp, SARS Virus
ccggtaagatactttttaacagacg

SEQ ID NO: 41802 - DNA, 25 bp, SARS Virus
cggtaagatacgttttaacagacga

SEQ ID NO: 41803 - DNA, 25 bp, SARS Virus
ggtaagatacgttttaacagacgaa

SEQ ID NO: 41804 - DNA, 25 bp, SARS Virus
gtaagatacgttttaacagacgaat

SEQ ID NO: 41805 - DNA, 25 bp, SARS Virus
taagatacgttttaacagacgaatc

SEQ ID NO: 41806 - DNA, 25 bp, SARS Virus
aagatacgtttttacagacgaatcc

SEQ ID NO: 41807 - DNA, 25 bp, SARS Virus
agatacgttttatcagacgaatccg

SEQ ID NO: 41808 - DNA, 25 bp, SARS Virus
gatacgttttaatagacgaatccga

SEQ ID NO: 41809 - DNA, 25 bp, SARS Virus
atacgttttaactgacgaatccgaa

SEQ ID NO: 41810 - DNA, 25 bp, SARS Virus
tacgttttaacatacgaatccgaat

SEQ ID NO: 41811 - DNA, 25 bp, SARS Virus
acgttttaacagtcgaatccgaatt

SEQ ID NO: 41812 - DNA, 25 bp, SARS Virus
cgttttaacagatgaatccgaattt

SEQ ID NO: 41813 - DNA, 25 bp, SARS Virus
gttttaacagactaatccgaatttc

SEQ ID NO: 41814 - DNA, 25 bp, SARS Virus
ttttaacagacgtatccgaatttca

SEQ ID NO: 41815 - DNA, 25 bp, SARS Virus
tttaacagacgattccgaatttcaa

SEQ ID NO: 41816 - DNA, 25 bp, SARS Virus
ttaacagacgaatccgaatttcaac

SEQ ID NO: 41817 - DNA, 25 bp, SARS Virus
taacagacgaattcgaatttcaact

SEQ ID NO: 41818 - DNA, 25 bp, SARS Virus
aacagacgaatctgaatttcaacta

SEQ ID NO: 41819 - DNA, 25 bp, SARS Virus
acagacgaatcctaatttcaactat

SEQ ID NO: 41820 - DNA, 25 bp, SARS Virus
cagacgaatccgtatttcaactatg

SEQ ID NO: 41821 - DNA, 25 bp, SARS Virus
agacgaatccgattttcaactatga

SEQ ID NO: 41822 - DNA, 25 bp, SARS Virus
gacgaatccgaatttcaactatgaa

SEQ ID NO: 41823 - DNA, 25 bp, SARS Virus
acgaatccgaatttcaactatgaag

SEQ ID NO: 41824 - DNA, 25 bp, SARS Virus
cgaatccgaatttcaactatgaaga

SEQ ID NO: 41825 - DNA, 25 bp, SARS Virus
gaatccgaattttaactatgaagat

SEQ ID NO: 41826 - DNA, 25 bp, SARS Virus
aatccgaatttctactatgaagatt

SEQ ID NO: 41827 - DNA, 25 bp, SARS Virus
atccgaatttcatctatgaagattg

SEQ ID NO: 41828 - DNA, 25 bp, SARS Virus
tccgaatttcaattatgaagattgg

SEQ ID NO: 41829 - DNA, 25 bp, SARS Virus
ccgaatttcaactatgaagattggg

SEQ ID NO: 41830 - DNA, 25 bp, SARS Virus
cgaatttcaactttgaagattggga

SEQ ID NO: 41831 - DNA, 25 bp, SARS Virus
gaatttcaactatgaagattgggat

SEQ ID NO: 41832 - DNA, 25 bp, SARS Virus
aatttcaactattaagattgggatt

SEQ ID NO: 41833 - DNA, 25 bp, SARS Virus
atttcaactatgtagattgggattc

SEQ ID NO: 41834 - DNA, 25 bp, SARS Virus
tttcaactatgatgattgggattct

SEQ ID NO: 41835 - DNA, 25 bp, SARS Virus
ttcaactatgaatattgggattctg

SEQ ID NO: 41836 - DNA, 25 bp, SARS Virus
tcaactatgaagtttgggattctgt

SEQ ID NO: 41837 - DNA, 25 bp, SARS Virus
caactatgaagattgggattctgtg

SEQ ID NO: 41838 - DNA, 25 bp, SARS Virus
aactatgaagattgggattctgtgg

SEQ ID NO: 41839 - DNA, 25 bp, SARS Virus
actatgaagatttggattctgtggg

SEQ ID NO: 41840 - DNA, 25 bp, SARS Virus
ctatgaagattgtgattctgtgggt

SEQ ID NO: 41841 - DNA, 25 bp, SARS Virus
tatgaagattggtattctgtgggtt

SEQ ID NO: 41842 - DNA, 25 bp, SARS Virus
atgaagattgggtttctgtgggttc

SEQ ID NO: 41843 - DNA, 25 bp, SARS Virus
tgaagattgggattctgtgggttca

SEQ ID NO: 41844 - DNA, 25 bp, SARS Virus
gaagattgggattctgtgggttcat

SEQ ID NO: 41845 - DNA, 25 bp, SARS Virus
aagattgggattttgtgggttcata

SEQ ID NO: 41846 - DNA, 25 bp, SARS Virus
agattgggattctgtgggttcatat

SEQ ID NO: 41847 - DNA, 25 bp, SARS Virus
gattgggattctttgggttcatatt

SEQ ID NO: 41848 - DNA, 25 bp, SARS Virus
attgggattctgtgggttcatattt

SEQ ID NO: 41849 - DNA, 25 bp, SARS Virus
ttgggattctgttggttcatattta

SEQ ID NO: 41850 - DNA, 25 bp, SARS Virus
tgggattctgtgtgttcatatttaa

SEQ ID NO: 41851 - DNA, 25 bp, SARS Virus
gggattctgtggtttcatatttaaa

SEQ ID NO: 41852 - DNA, 25 bp, SARS Virus
ggattctgtgggttcatatttaaac

SEQ ID NO: 41853 - DNA, 25 bp, SARS Virus
gattctgtgggttcatatttaaaca

SEQ ID NO: 41854 - DNA, 25 bp, SARS Virus
attctgtgggtttatatttaaacag

SEQ ID NO: 41855 - DNA, 25 bp, SARS Virus
ttctgtgggttcttatttaaacagg

SEQ ID NO: 41856 - DNA, 25 bp, SARS Virus
tctgtgggttcatatttaaacaggc

SEQ ID NO: 41857 - DNA, 25 bp, SARS Virus
ctgtgggttcatttttaaacaggca

SEQ ID NO: 41858 - DNA, 25 bp, SARS Virus
tgtgggttcatatttaaacaggcat

SEQ ID NO: 41859 - DNA, 25 bp, SARS Virus
gtgggttcatatttaaacaggcata

SEQ ID NO: 41860 - DNA, 25 bp, SARS Virus
tgggttcatatttaaacaggcatag

SEQ ID NO: 41861 - DNA, 25 bp, SARS Virus
gggttcatattttaacaggcatagg

SEQ ID NO: 41862 - DNA, 25 bp, SARS Virus
ggttcatatttatacaggcataggt

SEQ ID NO: 41863 - DNA, 25 bp, SARS Virus
gttcatatttaatcaggcataggtt

SEQ ID NO: 41864 - DNA, 25 bp, SARS Virus
ttcatatttaaataggcataggttg

SEQ ID NO: 41865 - DNA, 25 bp, SARS Virus
tcatatttaaactggcataggttgg

SEQ ID NO: 41866 - DNA, 25 bp, SARS Virus
catatttaaacatgcataggttgga

SEQ ID NO: 41867 - DNA, 25 bp, SARS Virus
atatttaaacagtcataggttggac

SEQ ID NO: 41868 - DNA, 25 bp, SARS Virus
tatttaaacaggtataggttggacc

SEQ ID NO: 41869 - DNA, 25 bp, SARS Virus
atttaaacaggcttaggttggacca

SEQ ID NO: 41870 - DNA, 25 bp, SARS Virus
tttaaacaggcataggttggaccag

SEQ ID NO: 41871 - DNA, 25 bp, SARS Virus
ttaaacaggcattggttggaccagt

SEQ ID NO: 41872 - DNA, 25 bp, SARS Virus
taaacaggcatatgttggaccagtt

SEQ ID NO: 41873 - DNA, 25 bp, SARS Virus
aaacaggcatagtttggaccagttt

SEQ ID NO: 41874 - DNA, 25 bp, SARS Virus
aacaggcataggttggaccagtttg

SEQ ID NO: 41875 - DNA, 25 bp, SARS Virus
acaggcataggttggaccagtttgt

SEQ ID NO: 41876 - DNA, 25 bp, SARS Virus
caggcataggtttgaccagtttgta

SEQ ID NO: 41877 - DNA, 25 bp, SARS Virus
aggcataggttgtaccagtttgtaa

SEQ ID NO: 41878 - DNA, 25 bp, SARS Virus
ggcataggttggtccagtttgtaaa

SEQ ID NO: 41879 - DNA, 25 bp, SARS Virus
gcataggttggatcagtttgtaaaa

SEQ ID NO: 41880 - DNA, 25 bp, SARS Virus
cataggttggactagtttgtaaaag

SEQ ID NO: 41881 - DNA, 25 bp, SARS Virus
ataggttggacctgtttgtaaaagt

SEQ ID NO: 41882 - DNA, 25 bp, SARS Virus
taggttggaccattttgtaaaagtc

SEQ ID NO: 41883 - DNA, 25 bp, SARS Virus
aggttggaccagtttgtaaaagtca

SEQ ID NO: 41884 - DNA, 25 bp, SARS Virus
ggttggaccagtttgtaaaagtcaa

SEQ ID NO: 41885 - DNA, 25 bp, SARS Virus
gttggaccagtttgtaaaagtcaag

SEQ ID NO: 41886 - DNA, 25 bp, SARS Virus
ttggaccagtttttaaaagtcaaga

SEQ ID NO: 41887 - DNA, 25 bp, SARS Virus
tggaccagtttgtaaaagtcaagat

SEQ ID NO: 41888 - DNA, 25 bp, SARS Virus
ggaccagtttgttaaagtcaagatc

SEQ ID NO: 41889 - DNA, 25 bp, SARS Virus
gaccagtttgtataagtcaagatcg

SEQ ID NO: 41890 - DNA, 25 bp, SARS Virus
accagtttgtaatagtcaagatcgt

SEQ ID NO: 41891 - DNA, 25 bp, SARS Virus
ccagtttgtaaatgtcaagatcgta

SEQ ID NO: 41892 - DNA, 25 bp, SARS Virus
cagtttgtaaaattcaagatcgtac

SEQ ID NO: 41893 - DNA, 25 bp, SARS Virus
agtttgtaaaagtcaagatcgtacg

SEQ ID NO: 41894 - DNA, 25 bp, SARS Virus
gtttgtaaaagttaagatcgtacga

SEQ ID NO: 41895 - DNA, 25 bp, SARS Virus
tttgtaaaagtctagatcgtacgat

SEQ ID NO: 41896 - DNA, 25 bp, SARS Virus
ttgtaaaagtcatgatcgtacgatg

SEQ ID NO: 41897 - DNA, 25 bp, SARS Virus
tgtaaaagtcaatatcgtacgatgt

SEQ ID NO: 41898 - DNA, 25 bp, SARS Virus
gtaaaagtcaagttcgtacgatgtt

SEQ ID NO: 41899 - DNA, 25 bp, SARS Virus
taaaagtcaagatcgtacgatgtta

SEQ ID NO: 41900 - DNA, 25 bp, SARS Virus
aaaagtcaagattgtacgatgttac

SEQ ID NO: 41901 - DNA, 25 bp, SARS Virus
aaagtcaagatcttacgatgttacc

SEQ ID NO: 41902 - DNA, 25 bp, SARS Virus
aagtcaagatcgtacgatgttacca

SEQ ID NO: 41903 - DNA, 25 bp, SARS Virus
agtcaagatcgttcgatgttaccaa

SEQ ID NO: 41904 - DNA, 25 bp, SARS Virus
gtcaagatcgtatgatgttaccaag

SEQ ID NO: 41905 - DNA, 25 bp, SARS Virus
tcaagatcgtactatgttaccaagt

SEQ ID NO: 41906 - DNA, 25 bp, SARS Virus
caagatcgtacgttgttaccaagtg

SEQ ID NO: 41907 - DNA, 25 bp, SARS Virus
aagatcgtacgatgttaccaagtgg

SEQ ID NO: 41908 - DNA, 25 bp, SARS Virus
agatcgtacgattttaccaagtggt

SEQ ID NO: 41909 - DNA, 25 bp, SARS Virus
gatcgtacgatgttaccaagtggta

SEQ ID NO: 41910 - DNA, 25 bp, SARS Virus
atcgtacgatgttaccaagtggtag

SEQ ID NO: 41911 - DNA, 25 bp, SARS Virus
tcgtacgatgtttccaagtggtaga

SEQ ID NO: 41912 - DNA, 25 bp, SARS Virus
cgtacgatgttatcaagtggtagac

SEQ ID NO: 41913 - DNA, 25 bp, SARS Virus
gtacgatgttactaagtggtagacc

SEQ ID NO: 41914 - DNA, 25 bp, SARS Virus
tacgatgttacctagtggtagacca

SEQ ID NO: 41915 - DNA, 25 bp, SARS Virus
acgatgttaccatgtggtagaccac

SEQ ID NO: 41916 - DNA, 25 bp, SARS Virus
cgatgttaccaattggtagaccaca

SEQ ID NO: 41917 - DNA, 25 bp, SARS Virus
gatgttaccaagtggtagaccacaa

SEQ ID NO: 41918 - DNA, 25 bp, SARS Virus
atgttaccaagttgtagaccacaaa

SEQ ID NO: 41919 - DNA, 25 bp, SARS Virus
tgttaccaagtgttagaccacaaat

SEQ ID NO: 41920 - DNA, 25 bp, SARS Virus
gttaccaagtggtagaccacaaata

SEQ ID NO: 41921 - DNA, 25 bp, SARS Virus
ttaccaagtggttgaccacaaatag

SEQ ID NO: 41922 - DNA, 25 bp, SARS Virus
taccaagtggtataccacaaatagt

SEQ ID NO: 41923 - DNA, 25 bp, SARS Virus
accaagtggtagtccacaaatagtc

SEQ ID NO: 41924 - DNA, 25 bp, SARS Virus
ccaagtggtagatcacaaatagtca

SEQ ID NO: 41925 - DNA, 25 bp, SARS Virus
caagtggtagactacaaatagtcac

SEQ ID NO: 41926 - DNA, 25 bp, SARS Virus
aagtggtagacctcaaatagtcaca

SEQ ID NO: 41927 - DNA, 25 bp, SARS Virus
agtggtagaccataaatagtcacac

SEQ ID NO: 41928 - DNA, 25 bp, SARS Virus
gtggtagaccactaatagtcacacg

SEQ ID NO: 41929 - DNA, 25 bp, SARS Virus
tggtagaccacatatagtcacacgg

SEQ ID NO: 41930 - DNA, 25 bp, SARS Virus
ggtagaccacaattagtcacacggt

SEQ ID NO: 41931 - DNA, 25 bp, SARS Virus
gtagaccacaaatagtcacacggta

SEQ ID NO: 41932 - DNA, 25 bp, SARS Virus
tagaccacaaattgtcacacggtac

SEQ ID NO: 41933 - DNA, 25 bp, SARS Virus
agaccacaaatattcacacggtact

SEQ ID NO: 41934 - DNA, 25 bp, SARS Virus
gaccacaaatagtcacacggtactc

SEQ ID NO: 41935 - DNA, 25 bp, SARS Virus
accacaaatagttacacggtactct

SEQ ID NO: 41936 - DNA, 25 bp, SARS Virus
ccacaaatagtctcacggtactctg

SEQ ID NO: 41937 - DNA, 25 bp, SARS Virus
cacaaatagtcatacggtactctgg

SEQ ID NO: 41938 - DNA, 25 bp, SARS Virus
acaaatagtcactcggtactctgga

SEQ ID NO: 41939 - DNA, 25 bp, SARS Virus
caaatagtcacatggtactctggat

SEQ ID NO: 41940 - DNA, 25 bp, SARS Virus
aaatagtcacactgtactctggatt

SEQ ID NO: 41941 - DNA, 25 bp, SARS Virus
aatagtcacacgttactctggatta

SEQ ID NO: 41942 - DNA, 25 bp, SARS Virus
atagtcacacggtactctggattag

SEQ ID NO: 41943 - DNA, 25 bp, SARS Virus
tagtcacacggttctctggattagt

SEQ ID NO: 41944 - DNA, 25 bp, SARS Virus
agtcacacggtattctggattagta

SEQ ID NO: 41945 - DNA, 25 bp, SARS Virus
gtcacacggtactctggattagtat

SEQ ID NO: 41946 - DNA, 25 bp, SARS Virus
tcacacggtactttggattagtatg

SEQ ID NO: 41947 - DNA, 25 bp, SARS Virus
cacacggtactctggattagtatgg

SEQ ID NO: 41948 - DNA, 25 bp, SARS Virus
acacggtactcttgattagtatggt

SEQ ID NO: 41949 - DNA, 25 bp, SARS Virus
cacggtactctgtattagtatggta

SEQ ID NO: 41950 - DNA, 25 bp, SARS Virus
acggtactctggtttagtatggtaa

SEQ ID NO: 41951 - DNA, 25 bp, SARS Virus
cggtactctggattagtatggtaat

SEQ ID NO: 41952 - DNA, 25 bp, SARS Virus
ggtactctggattagtatggtaatt

SEQ ID NO: 41953 - DNA, 25 bp, SARS Virus
gtactctggatttgtatggtaattt

SEQ ID NO: 41954 - DNA, 25 bp, SARS Virus
tactctggattattatggtaatttc

SEQ ID NO: 41955 - DNA, 25 bp, SARS Virus
actctggattagtatggtaatttcc

SEQ ID NO: 41956 - DNA, 25 bp, SARS Virus
ctctggattagtttggtaatttcca

SEQ ID NO: 41957 - DNA, 25 bp, SARS Virus
tctggattagtatggtaatttccaa

SEQ ID NO: 41958 - DNA, 25 bp, SARS Virus
ctggattagtattgtaatttccaag

SEQ ID NO: 41959 - DNA, 25 bp, SARS Virus
tggattagtatgttaatttccaaga

SEQ ID NO: 41960 - DNA, 25 bp, SARS Virus
ggattagtatggtaatttccaagaa

SEQ ID NO: 41961 - DNA, 25 bp, SARS Virus
gattagtatggttatttccaagaaa

SEQ ID NO: 41962 - DNA, 25 bp, SARS Virus
attagtatggtattttccaagaaag

SEQ ID NO: 41963 - DNA, 25 bp, SARS Virus
ttagtatggtaatttccaagaaagg

SEQ ID NO: 41964 - DNA, 25 bp, SARS Virus
tagtatggtaatttccaagaaagga

SEQ ID NO: 41965 - DNA, 25 bp, SARS Virus
agtatggtaatttccaagaaaggaa

SEQ ID NO: 41966 - DNA, 25 bp, SARS Virus
gtatggtaattttcaagaaaggaat

SEQ ID NO: 41967 - DNA, 25 bp, SARS Virus
tatggtaatttctaagaaaggaatt

SEQ ID NO: 41968 - DNA, 25 bp, SARS Virus
atggtaatttcctagaaaggaatta

SEQ ID NO: 41969 - DNA, 25 bp, SARS Virus
tggtaatttccatgaaaggaattac

SEQ ID NO: 41970 - DNA, 25 bp, SARS Virus
ggtaatttccaataaaggaattacc

SEQ ID NO: 41971 - DNA, 25 bp, SARS Virus
gtaatttccaagtaaggaattacct

SEQ ID NO: 41972 - DNA, 25 bp, SARS Virus
taatttccaagataggaattaccta

SEQ ID NO: 41973 - DNA, 25 bp, SARS Virus
aatttccaagaatggaattacctag

SEQ ID NO: 41974 - DNA, 25 bp, SARS Virus
atttccaagaaatgaattacctagt

SEQ ID NO: 41975 - DNA, 25 bp, SARS Virus
tttccaagaaagtaattacctagta

SEQ ID NO: 41976 - DNA, 25 bp, SARS Virus
ttccaagaaaggtattacctagtac

SEQ ID NO: 41977 - DNA, 25 bp, SARS Virus
tccaagaaaggatttacctagtaca

SEQ ID NO: 41978 - DNA, 25 bp, SARS Virus
ccaagaaaggaattacctagtacac

SEQ ID NO: 41979 - DNA, 25 bp, SARS Virus
caagaaaggaattacctagtacacc

SEQ ID NO: 41980 - DNA, 25 bp, SARS Virus
aagaaaggaatttcctagtacacca

SEQ ID NO: 41981 - DNA, 25 bp, SARS Virus
agaaaggaattatctagtacaccat

SEQ ID NO: 41982 - DNA, 25 bp, SARS Virus
gaaaggaattacttagtacaccatc

SEQ ID NO: 41983 - DNA, 25 bp, SARS Virus
aaaggaattacctagtacaccatca

SEQ ID NO: 41984 - DNA, 25 bp, SARS Virus
aaggaattaccttgtacaccatcac

SEQ ID NO: 41985 - DNA, 25 bp, SARS Virus
aggaattacctattacaccatcaca

SEQ ID NO: 41986 - DNA, 25 bp, SARS Virus
ggaattacctagtacaccatcacaa

SEQ ID NO: 41987 - DNA, 25 bp, SARS Virus
gaattacctagttcaccatcacaac

SEQ ID NO: 41988 - DNA, 25 bp, SARS Virus
aattacctagtataccatcacaacc

SEQ ID NO: 41989 - DNA, 25 bp, SARS Virus
attacctagtactccatcacaacca

SEQ ID NO: 41990 - DNA, 25 bp, SARS Virus
ttacctagtacatcatcacaaccaa

SEQ ID NO: 41991 - DNA, 25 bp, SARS Virus
tacctagtacactatcacaaccaaa

SEQ ID NO: 41992 - DNA, 25 bp, SARS Virus
acctagtacaccttcacaaccaaaa

SEQ ID NO: 41993 - DNA, 25 bp, SARS Virus
cctagtacaccatcacaaccaaaat

SEQ ID NO: 41994 - DNA, 25 bp, SARS Virus
ctagtacaccattacaaccaaaatt

SEQ ID NO: 41995 - DNA, 25 bp, SARS Virus
tagtacaccatctcaaccaaaattg

SEQ ID NO: 41996 - DNA, 25 bp, SARS Virus
agtacaccatcataaccaaaattgt

SEQ ID NO: 41997 - DNA, 25 bp, SARS Virus
gtacaccatcactaccaaaattgta

SEQ ID NO: 41998 - DNA, 25 bp, SARS Virus
tacaccatcacatccaaaattgtaa

SEQ ID NO: 41999 - DNA, 25 bp, SARS Virus
acaccatcacaatcaaaattgtaac

SEQ ID NO: 42000 - DNA, 25 bp, SARS Virus
caccatcacaactaaaattgtaact

SEQ ID NO: 42001 - DNA, 25 bp, SARS Virus
accatcacaacctaaattgtaacta

SEQ ID NO: 42002 - DNA, 25 bp, SARS Virus
ccatcacaaccataattgtaactaa

SEQ ID NO: 42003 - DNA, 25 bp, SARS Virus
catcacaaccaatattgtaactaat

SEQ ID NO: 42004 - DNA, 25 bp, SARS Virus
atcacaaccaaatttgtaactaata

SEQ ID NO: 42005 - DNA, 25 bp, SARS Virus
tcacaaccaaaattgtaactaatac

SEQ ID NO: 42006 - DNA, 25 bp, SARS Virus
cacaaccaaaattgtaactaatact

SEQ ID NO: 42007 - DNA, 25 bp, SARS Virus
acaaccaaaattttaactaatacta

SEQ ID NO: 42008 - DNA, 25 bp, SARS Virus
caaccaaaattgtaactaatactaa

SEQ ID NO: 42009 - DNA, 25 bp, SARS Virus
aaccaaaattgttactaatactaac

SEQ ID NO: 42010 - DNA, 25 bp, SARS Virus
accaaaattgtatctaatactaacg

SEQ ID NO: 42011 - DNA, 25 bp, SARS Virus
ccaaaattgtaattaatactaacgc

SEQ ID NO: 42012 - DNA, 25 bp, SARS Virus
caaaattgtaactaatactaacgca

SEQ ID NO: 42013 - DNA, 25 bp, SARS Virus
aaaattgtaacttatactaacgcac

SEQ ID NO: 42014 - DNA, 25 bp, SARS Virus
aaattgtaactattactaacgcaca

SEQ ID NO: 42015 - DNA, 25 bp, SARS Virus
aattgtaactaatactaacgcacag

SEQ ID NO: 42016 - DNA, 25 bp, SARS Virus
attgtaactaattctaacgcacaga

SEQ ID NO: 42017 - DNA, 25 bp, SARS Virus
ttgtaactaatattaacgcacagaa

SEQ ID NO: 42018 - DNA, 25 bp, SARS Virus
tgtaactaatactaacgcacagaaa

SEQ ID NO: 42019 - DNA, 25 bp, SARS Virus
gtaactaatacttacgcacagaaag

SEQ ID NO: 42020 - DNA, 25 bp, SARS Virus
taactaatactatcgcacagaaaga

SEQ ID NO: 42021 - DNA, 25 bp, SARS Virus
aactaatactaatgcacagaaagac

SEQ ID NO: 42022 - DNA, 25 bp, SARS Virus
actaatactaactcacagaaagacg

SEQ ID NO: 42023 - DNA, 25 bp, SARS Virus
ctaatactaacgtacagaaagacga

SEQ ID NO: 42024 - DNA, 25 bp, SARS Virus
taatactaacgctcagaaagacgat

SEQ ID NO: 42025 - DNA, 25 bp, SARS Virus
aatactaacgcatagaaagacgata

SEQ ID NO: 42026 - DNA, 25 bp, SARS Virus
atactaacgcactgaaagacgatat

SEQ ID NO: 42027 - DNA, 25 bp, SARS Virus
tactaacgcacataaagacgatata

SEQ ID NO: 42028 - DNA, 25 bp, SARS Virus
actaacgcacagtaagacgatatac

SEQ ID NO: 42029 - DNA, 25 bp, SARS Virus
ctaacgcacagatagacgatatacg

SEQ ID NO: 42030 - DNA, 25 bp, SARS Virus
taacgcacagaatgacgatatacgt

SEQ ID NO: 42031 - DNA, 25 bp, SARS Virus
aacgcacagaaatacgatatacgta

SEQ ID NO: 42032 - DNA, 25 bp, SARS Virus
acgcacagaaagtcgatatacgtag

SEQ ID NO: 42033 - DNA, 25 bp, SARS Virus
cgcacagaaagatgatatacgtagt

SEQ ID NO: 42034 - DNA, 25 bp, SARS Virus
gcacagaaagactatatacgtagta

SEQ ID NO: 42035 - DNA, 25 bp, SARS Virus
cacagaaagacgttatacgtagtat

SEQ ID NO: 42036 - DNA, 25 bp, SARS Virus
acagaaagacgatatacgtagtata

SEQ ID NO: 42037 - DNA, 25 bp, SARS Virus
cagaaagacgatttacgtagtatac

SEQ ID NO: 42038 - DNA, 25 bp, SARS Virus
agaaagacgatatacgtagtatacc

SEQ ID NO: 42039 - DNA, 25 bp, SARS Virus
gaaagacgatattcgtagtatacct

SEQ ID NO: 42040 - DNA, 25 bp, SARS Virus
aaagacgatatatgtagtatacctc

SEQ ID NO: 42041 - DNA, 25 bp, SARS Virus
aagacgatatacttagtatacctcg

SEQ ID NO: 42042 - DNA, 25 bp, SARS Virus
agacgatatacgtagtatacctcga

SEQ ID NO: 42043 - DNA, 25 bp, SARS Virus
gacgatatacgttgtatacctcgaa

SEQ ID NO: 42044 - DNA, 25 bp, SARS Virus
acgatatacgtattatacctcgaag

SEQ ID NO: 42045 - DNA, 25 bp, SARS Virus
cgatatacgtagtatacctcgaagg

SEQ ID NO: 42046 - DNA, 25 bp, SARS Virus
gatatacgtagtttacctcgaaggt

SEQ ID NO: 42047 - DNA, 25 bp, SARS Virus
atatacgtagtatacctcgaaggtt

SEQ ID NO: 42048 - DNA, 25 bp, SARS Virus
tatacgtagtattcctcgaaggttg

SEQ ID NO: 42049 - DNA, 25 bp, SARS Virus
atacgtagtatatctcgaaggttgt

SEQ ID NO: 42050 - DNA, 25 bp, SARS Virus
tacgtagtatacttcgaaggttgtc

SEQ ID NO: 42051 - DNA, 25 bp, SARS Virus
acgtagtatacctcgaaggttgtcc

SEQ ID NO: 42052 - DNA, 25 bp, SARS Virus
cgtagtataccttgaaggttgtcct

SEQ ID NO: 42053 - DNA, 25 bp, SARS Virus
gtagtatacctctaaggttgtcctc

SEQ ID NO: 42054 - DNA, 25 bp, SARS Virus
tagtatacctcgtaggttgtcctca

SEQ ID NO: 42055 - DNA, 25 bp, SARS Virus
agtatacctcgatggttgtcctcat

SEQ ID NO: 42056 - DNA, 25 bp, SARS Virus
gtatacctcgaatgttgtcctcatg

SEQ ID NO: 42057 - DNA, 25 bp, SARS Virus
tatacctcgaagtttgtcctcatgt

SEQ ID NO: 42058 - DNA, 25 bp, SARS Virus
atacctcgaaggttgtcctcatgtg

SEQ ID NO: 42059 - DNA, 25 bp, SARS Virus
tacctcgaaggttgtcctcatgtgc

SEQ ID NO: 42060 - DNA, 25 bp, SARS Virus
acctcgaaggttttcctcatgtgcg

SEQ ID NO: 42061 - DNA, 25 bp, SARS Virus
cctcgaaggttgtcctcatgtgcga

SEQ ID NO: 42062 - DNA, 25 bp, SARS Virus
ctcgaaggttgttctcatgtgcgac

SEQ ID NO: 42063 - DNA, 25 bp, SARS Virus
tcgaaggttgtcttcatgtgcgacc

SEQ ID NO: 42064 - DNA, 25 bp, SARS Virus
cgaaggttgtcctcatgtgcgacca

SEQ ID NO: 42065 - DNA, 25 bp, SARS Virus
gaaggttgtccttatgtgcgaccat

SEQ ID NO: 42066 - DNA, 25 bp, SARS Virus
aaggttgtcctcttgtgcgaccatg

SEQ ID NO: 42067 - DNA, 25 bp, SARS Virus
aggttgtcctcatgtgcgaccatga

SEQ ID NO: 42068 - DNA, 25 bp, SARS Virus
ggttgtcctcatttgcgaccatgac

SEQ ID NO: 42069 - DNA, 25 bp, SARS Virus
gttgtcctcatgtgcgaccatgact

SEQ ID NO: 42070 - DNA, 25 bp, SARS Virus
ttgtcctcatgttcgaccatgactg

SEQ ID NO: 42071 - DNA, 25 bp, SARS Virus
tgtcctcatgtgtgaccatgactga

SEQ ID NO: 42072 - DNA, 25 bp, SARS Virus
gtcctcatgtgctaccatgactgaa

SEQ ID NO: 42073 - DNA, 25 bp, SARS Virus
tcctcatgtgcgtccatgactgaat

SEQ ID NO: 42074 - DNA, 25 bp, SARS Virus
cctcatgtgcgatcatgactgaatc

SEQ ID NO: 42075 - DNA, 25 bp, SARS Virus
ctcatgtgcgactatgactgaatct

SEQ ID NO: 42076 - DNA, 25 bp, SARS Virus
tcatgtgcgaccttgactgaatctt

SEQ ID NO: 42077 - DNA, 25 bp, SARS Virus
catgtgcgaccatgactgaatcttc

SEQ ID NO: 42078 - DNA, 25 bp, SARS Virus
atgtgcgaccattactgaatcttcc

SEQ ID NO: 42079 - DNA, 25 bp, SARS Virus
tgtgcgaccatgtctgaatcttcca

SEQ ID NO: 42080 - DNA, 25 bp, SARS Virus
gtgcgaccatgattgaatcttccat

SEQ ID NO: 42081 - DNA, 25 bp, SARS Virus
tgcgaccatgactgaatcttccatt

SEQ ID NO: 42082 - DNA, 25 bp, SARS Virus
gcgaccatgacttaatcttccattt

SEQ ID NO: 42083 - DNA, 25 bp, SARS Virus
cgaccatgactgtatcttccattta

SEQ ID NO: 42084 - DNA, 25 bp, SARS Virus
gaccatgactgattcttccatttaa

SEQ ID NO: 42085 - DNA, 25 bp, SARS Virus
accatgactgaatcttccatttaag

SEQ ID NO: 42086 - DNA, 25 bp, SARS Virus
ccatgactgaattttccatttaaga

SEQ ID NO: 42087 - DNA, 25 bp, SARS Virus
catgactgaatcttccatttaagat

SEQ ID NO: 42088 - DNA, 25 bp, SARS Virus
atgactgaatcttccatttaagata

SEQ ID NO: 42089 - DNA, 25 bp, SARS Virus
tgactgaatctttcatttaagatac

SEQ ID NO: 42090 - DNA, 25 bp, SARS Virus
gactgaatcttctatttaagatacc

SEQ ID NO: 42091 - DNA, 25 bp, SARS Virus
actgaatcttccttttaagatacca

SEQ ID NO: 42092 - DNA, 25 bp, SARS Virus
ctgaatcttccatttaagataccag

SEQ ID NO: 42093 - DNA, 25 bp, SARS Virus
tgaatcttccatttaagataccagg

SEQ ID NO: 42094 - DNA, 25 bp, SARS Virus
gaatcttccatttaagataccaggt

SEQ ID NO: 42095 - DNA, 25 bp, SARS Virus
aatcttccattttagataccaggta

SEQ ID NO: 42096 - DNA, 25 bp, SARS Virus
atcttccatttatgataccaggtaa

SEQ ID NO: 42097 - DNA, 25 bp, SARS Virus
tcttccatttaaaataccaggtaaa

SEQ ID NO: 42098 - DNA, 25 bp, SARS Virus
cttccatttaagataccaggtaaac

SEQ ID NO: 42099 - DNA, 25 bp, SARS Virus
ttccatttaagaaaccaggtaaaca

SEQ ID NO: 42100 - DNA, 25 bp, SARS Virus
tccatttaagataccaggtaaacaa

SEQ ID NO: 42101 - DNA, 25 bp, SARS Virus
ccatttaagataacaggtaaacaac

SEQ ID NO: 42102 - DNA, 25 bp, SARS Virus
catttaagatacaaggtaaacaact

SEQ ID NO: 42103 - DNA, 25 bp, SARS Virus
atttaagataccaggtaaacaactg

SEQ ID NO: 42104 - DNA, 25 bp, SARS Virus
tttaagataccaagtaaacaactgt

SEQ ID NO: 42105 - DNA, 25 bp, SARS Virus
ttaagataccagataaacaactgtc

SEQ ID NO: 42106 - DNA, 25 bp, SARS Virus
taagataccaggaaaacaactgtct

SEQ ID NO: 42107 - DNA, 25 bp, SARS Virus
aagataccaggtaaacaactgtctg

SEQ ID NO: 42108 - DNA, 25 bp, SARS Virus
agataccaggtaaacaactgtctgt

SEQ ID NO: 42109 - DNA, 25 bp, SARS Virus
gataccaggtaaacaactgtctgtt

SEQ ID NO: 42110 - DNA, 25 bp, SARS Virus
ataccaggtaaaaaactgtctgttt

SEQ ID NO: 42111 - DNA, 25 bp, SARS Virus
taccaggtaaacaactgtctgtttg

SEQ ID NO: 42112 - DNA, 25 bp, SARS Virus
accaggtaaacaactgtctgtttga

SEQ ID NO: 42113 - DNA, 25 bp, SARS Virus
ccaggtaaacaaatgtctgtttgac

SEQ ID NO: 42114 - DNA, 25 bp, SARS Virus
caggtaaacaacagtctgtttgacg

SEQ ID NO: 42115 - DNA, 25 bp, SARS Virus
aggtaaacaactatctgtttgacgt

SEQ ID NO: 42116 - DNA, 25 bp, SARS Virus
ggtaaacaactgactgtttgacgtg

SEQ ID NO: 42117 - DNA, 25 bp, SARS Virus
gtaaacaactgtatgtttgacgtgt

SEQ ID NO: 42118 - DNA, 25 bp, SARS Virus
taaacaactgtcagtttgacgtgtc

SEQ ID NO: 42119 - DNA, 25 bp, SARS Virus
aaacaactgtctatttgacgtgtcc

SEQ ID NO: 42120 - DNA, 25 bp, SARS Virus
aacaactgtctgattgacgtgtccg

SEQ ID NO: 42121 - DNA, 25 bp, SARS Virus
acaactgtctgtatgacgtgtccga

SEQ ID NO: 42122 - DNA, 25 bp, SARS Virus
caactgtctgttagacgtgtccgac

SEQ ID NO: 42123 - DNA, 25 bp, SARS Virus
aactgtctgtttaacgtgtccgacg

SEQ ID NO: 42124 - DNA, 25 bp, SARS Virus
actgtctgtttgacgtgtccgacgt

SEQ ID NO: 42125 - DNA, 25 bp, SARS Virus
ctgtctgtttgaagtgtccgacgtc

SEQ ID NO: 42126 - DNA, 25 bp, SARS Virus
tgtctgtttgacatgtccgacgtcc

SEQ ID NO: 42127 - DNA, 25 bp, SARS Virus
gtctgtttgacgagtccgacgtcca

SEQ ID NO: 42128 - DNA, 25 bp, SARS Virus
tctgtttgacgtatccgacgtccat

SEQ ID NO: 42129 - DNA, 25 bp, SARS Virus
ctgtttgacgtgaccgacgtccatg

SEQ ID NO: 42130 - DNA, 25 bp, SARS Virus
tgtttgacgtgtacgacgtccatgt

SEQ ID NO: 42131 - DNA, 25 bp, SARS Virus
gtttgacgtgtcagacgtccatgtc

SEQ ID NO: 42132 - DNA, 25 bp, SARS Virus
tttgacgtgtccaacgtccatgtct

SEQ ID NO: 42133 - DNA, 25 bp, SARS Virus
ttgacgtgtccgacgtccatgtctg

SEQ ID NO: 42134 - DNA, 25 bp, SARS Virus
tgacgtgtccgaagtccatgtctgt

SEQ ID NO: 42135 - DNA, 25 bp, SARS Virus
gacgtgtccgacatccatgtctgtg

SEQ ID NO: 42136 - DNA, 25 bp, SARS Virus
acgtgtccgacgaccatgtctgtgt

SEQ ID NO: 42137 - DNA, 25 bp, SARS Virus
cgtgtccgacgtacatgtctgtgtt

SEQ ID NO: 42138 - DNA, 25 bp, SARS Virus
gtgtccgacgtcaatgtctgtgttg

SEQ ID NO: 42139 - DNA, 25 bp, SARS Virus
tgtccgacgtccatgtctgtgttgg

SEQ ID NO: 42140 - DNA, 25 bp, SARS Virus
gtccgacgtccaagtctgtgttggt

SEQ ID NO: 42141 - DNA, 25 bp, SARS Virus
tccgacgtccatatctgtgttggta

SEQ ID NO: 42142 - DNA, 25 bp, SARS Virus
ccgacgtccatgactgtgttggtat

SEQ ID NO: 42143 - DNA, 25 bp, SARS Virus
cgacgtccatgtatgtgttggtatt

SEQ ID NO: 42144 - DNA, 25 bp, SARS Virus
gacgtccatgtcagtgttggtattg

SEQ ID NO: 42145 - DNA, 25 bp, SARS Virus
acgtccatgtctatgttggtattgt

SEQ ID NO: 42146 - DNA, 25 bp, SARS Virus
cgtccatgtctgagttggtattgta

SEQ ID NO: 42147 - DNA, 25 bp, SARS Virus
gtccatgtctgtattggtattgtaa

SEQ ID NO: 42148 - DNA, 25 bp, SARS Virus
tccatgtctgtgatggtattgtaat

SEQ ID NO: 42149 - DNA, 25 bp, SARS Virus
ccatgtctgtgtaggtattgtaatt

SEQ ID NO: 42150 - DNA, 25 bp, SARS Virus
catgtctgtgttagtattgtaattt

SEQ ID NO: 42151 - DNA, 25 bp, SARS Virus
atgtctgtgttgatattgtaattta

SEQ ID NO: 42152 - DNA, 25 bp, SARS Virus
tgtctgtgttggaattgtaatttac

SEQ ID NO: 42153 - DNA, 25 bp, SARS Virus
gtctgtgttggtattgtaatttaca

SEQ ID NO: 42154 - DNA, 25 bp, SARS Virus
tctgtgttggtaatgtaatttacaa

SEQ ID NO: 42155 - DNA, 25 bp, SARS Virus
ctgtgttggtatagtaatttacaaa

SEQ ID NO: 42156 - DNA, 25 bp, SARS Virus
tgtgttggtattataatttacaaaa

SEQ ID NO: 42157 - DNA, 25 bp, SARS Virus
gtgttggtattgaaatttacaaaac

SEQ ID NO: 42158 - DNA, 25 bp, SARS Virus
tgttggtattgtaatttacaaaacc

SEQ ID NO: 42159 - DNA, 25 bp, SARS Virus
gttggtattgtaatttacaaaaccg

SEQ ID NO: 42160 - DNA, 25 bp, SARS Virus
ttggtattgtaaattacaaaaccgt

SEQ ID NO: 42161 - DNA, 25 bp, SARS Virus
tggtattgtaatatacaaaaccgta

SEQ ID NO: 42162 - DNA, 25 bp, SARS Virus
ggtattgtaattaacaaaaccgtac

SEQ ID NO: 42163 - DNA, 25 bp, SARS Virus
gtattgtaatttacaaaaccgtacc

SEQ ID NO: 42164 - DNA, 25 bp, SARS Virus
tattgtaatttaaaaaaccgtaccg

SEQ ID NO: 42165 - DNA, 25 bp, SARS Virus
attgtaatttacaaaaccgtaccga

SEQ ID NO: 42166 - DNA, 25 bp, SARS Virus
ttgtaatttacaaaaccgtaccgac

SEQ ID NO: 42167 - DNA, 25 bp, SARS Virus
tgtaatttacaaaaccgtaccgaca

SEQ ID NO: 42168 - DNA, 25 bp, SARS Virus
gtaatttacaaaaccgtaccgacat

SEQ ID NO: 42169 - DNA, 25 bp, SARS Virus
taatttacaaaaacgtaccgacata

SEQ ID NO: 42170 - DNA, 25 bp, SARS Virus
aatttacaaaacagtaccgacatac

SEQ ID NO: 42171 - DNA, 25 bp, SARS Virus
atttacaaaaccataccgacatacg

SEQ ID NO: 42172 - DNA, 25 bp, SARS Virus
tttacaaaaccgaaccgacatacga

SEQ ID NO: 42173 - DNA, 25 bp, SARS Virus
ttacaaaaccgtaccgacatacgac

SEQ ID NO: 42174 - DNA, 25 bp, SARS Virus
tacaaaaccgtaacgacatacgacg

SEQ ID NO: 42175 - DNA, 25 bp, SARS Virus
acaaaaccgtacagacatacgacga

SEQ ID NO: 42176 - DNA, 25 bp, SARS Virus
caaaaccgtaccaacatacgacgac

SEQ ID NO: 42177 - DNA, 25 bp, SARS Virus
aaaaccgtaccgacatacgacgaca

SEQ ID NO: 42178 - DNA, 25 bp, SARS Virus
aaaccgtaccgaaatacgacgacaa

SEQ ID NO: 42179 - DNA, 25 bp, SARS Virus
aaccgtaccgacatacgacgacaat

SEQ ID NO: 42180 - DNA, 25 bp, SARS Virus
accgtaccgacaaacgacgacaata

SEQ ID NO: 42181 - DNA, 25 bp, SARS Virus
ccgtaccgacatacgacgacaatag

SEQ ID NO: 42182 - DNA, 25 bp, SARS Virus
cgtaccgacataagacgacaatagt

SEQ ID NO: 42183 - DNA, 25 bp, SARS Virus
gtaccgacatacaacgacaatagtt

SEQ ID NO: 42184 - DNA, 25 bp, SARS Virus
taccgacatacgacgacaatagtta

SEQ ID NO: 42185 - DNA, 25 bp, SARS Virus
accgacatacgaagacaatagttac

SEQ ID NO: 42186 - DNA, 25 bp, SARS Virus
ccgacatacgacaacaatagttacc

SEQ ID NO: 42187 - DNA, 25 bp, SARS Virus
cgacatacgacgacaatagttacca

SEQ ID NO: 42188 - DNA, 25 bp, SARS Virus
gacatacgacgaaaatagttaccac

SEQ ID NO: 42189 - DNA, 25 bp, SARS Virus
acatacgacgacaatagttaccact

SEQ ID NO: 42190 - DNA, 25 bp, SARS Virus
catacgacgacaatagttaccacta

SEQ ID NO: 42191 - DNA, 25 bp, SARS Virus
atacgacgacaaaagttaccactat

SEQ ID NO: 42192 - DNA, 25 bp, SARS Virus
tacgacgacaatagttaccactatc

SEQ ID NO: 42193 - DNA, 25 bp, SARS Virus
acgacgacaataattaccactatcc

SEQ ID NO: 42194 - DNA, 25 bp, SARS Virus
cgacgacaatagataccactatcca

SEQ ID NO: 42195 - DNA, 25 bp, SARS Virus
gacgacaatagtaaccactatccac

SEQ ID NO: 42196 - DNA, 25 bp, SARS Virus
acgacaatagttaccactatccacc

SEQ ID NO: 42197 - DNA, 25 bp, SARS Virus
cgacaatagttaacactatccacca

SEQ ID NO: 42198 - DNA, 25 bp, SARS Virus
gacaatagttacaactatccaccaa

SEQ ID NO: 42199 - DNA, 25 bp, SARS Virus
acaatagttaccactatccaccaaa

SEQ ID NO: 42200 - DNA, 25 bp, SARS Virus
caatagttaccaatatccaccaaag

SEQ ID NO: 42201 - DNA, 25 bp, SARS Virus
aatagttaccacaatccaccaaaga

SEQ ID NO: 42202 - DNA, 25 bp, SARS Virus
atagttaccactatccaccaaagaa

SEQ ID NO: 42203 - DNA, 25 bp, SARS Virus
tagttaccactaaccaccaaagaat

SEQ ID NO: 42204 - DNA, 25 bp, SARS Virus
agttaccactatacaccaaagaatt

SEQ ID NO: 42205 - DNA, 25 bp, SARS Virus
gttaccactatcaaccaaagaatta

SEQ ID NO: 42206 - DNA, 25 bp, SARS Virus
ttaccactatccaccaaagaattat

SEQ ID NO: 42207 - DNA, 25 bp, SARS Virus
taccactatccaacaaagaattatc

SEQ ID NO: 42208 - DNA, 25 bp, SARS Virus
accactatccacaaaagaattatct

SEQ ID NO: 42209 - DNA, 25 bp, SARS Virus
ccactatccaccaaagaattatcta

SEQ ID NO: 42210 - DNA, 25 bp, SARS Virus
cactatccaccaaagaattatctaa

SEQ ID NO: 42211 - DNA, 25 bp, SARS Virus
actatccaccaaagaattatctaag

SEQ ID NO: 42212 - DNA, 25 bp, SARS Virus
ctatccaccaaaaaattatctaagt

SEQ ID NO: 42213 - DNA, 25 bp, SARS Virus
tatccaccaaagaattatctaagtg

SEQ ID NO: 42214 - DNA, 25 bp, SARS Virus
atccaccaaagaattatctaagtgg

SEQ ID NO: 42215 - DNA, 25 bp, SARS Virus
tccaccaaagaaatatctaagtggt

SEQ ID NO: 42216 - DNA, 25 bp, SARS Virus
ccaccaaagaataatctaagtggtg

SEQ ID NO: 42217 - DNA, 25 bp, SARS Virus
caccaaagaattatctaagtggtga

SEQ ID NO: 42218 - DNA, 25 bp, SARS Virus
accaaagaattaactaagtggtgat

SEQ ID NO: 42219 - DNA, 25 bp, SARS Virus
ccaaagaattatataagtggtgatg

SEQ ID NO: 42220 - DNA, 25 bp, SARS Virus
caaagaattatcaaagtggtgatga

SEQ ID NO: 42221 - DNA, 25 bp, SARS Virus
aaagaattatctaagtggtgatgaa

SEQ ID NO: 42222 - DNA, 25 bp, SARS Virus
aagaattatctaagtggtgatgaaa

SEQ ID NO: 42223 - DNA, 25 bp, SARS Virus
agaattatctaaatggtgatgaaac

SEQ ID NO: 42224 - DNA, 25 bp, SARS Virus
gaattatctaagaggtgatgaaact

SEQ ID NO: 42225 - DNA, 25 bp, SARS Virus
aattatctaagtagtgatgaaactt

SEQ ID NO: 42226 - DNA, 25 bp, SARS Virus
attatctaagtgatgatgaaactta

SEQ ID NO: 42227 - DNA, 25 bp, SARS Virus
ttatctaagtggagatgaaacttac

SEQ ID NO: 42228 - DNA, 25 bp, SARS Virus
tatctaagtggtaatgaaacttact

SEQ ID NO: 42229 - DNA, 25 bp, SARS Virus
atctaagtggtgatgaaacttactg

SEQ ID NO: 42230 - DNA, 25 bp, SARS Virus
tctaagtggtgaagaaacttactga

SEQ ID NO: 42231 - DNA, 25 bp, SARS Virus
ctaagtggtgataaaacttactgaa

SEQ ID NO: 42232 - DNA, 25 bp, SARS Virus
taagtggtgatgaaacttactgaaa

SEQ ID NO: 42233 - DNA, 25 bp, SARS Virus
aagtggtgatgaaacttactgaaat

SEQ ID NO: 42234 - DNA, 25 bp, SARS Virus
agtggtgatgaaacttactgaaatt

SEQ ID NO: 42235 - DNA, 25 bp, SARS Virus
gtggtgatgaaaattactgaaattg

SEQ ID NO: 42236 - DNA, 25 bp, SARS Virus
tggtgatgaaacatactgaaattgg

SEQ ID NO: 42237 - DNA, 25 bp, SARS Virus
ggtgatgaaactaactgaaattgga

SEQ ID NO: 42238 - DNA, 25 bp, SARS Virus
gtgatgaaacttactgaaattggaa

SEQ ID NO: 42239 - DNA, 25 bp, SARS Virus
tgatgaaacttaatgaaattggaac

SEQ ID NO: 42240 - DNA, 25 bp, SARS Virus
gatgaaacttacagaaattggaaca

SEQ ID NO: 42241 - DNA, 25 bp, SARS Virus
atgaaacttactaaaattggaacac

SEQ ID NO: 42242 - DNA, 25 bp, SARS Virus
tgaaacttactgaaattggaacacc

SEQ ID NO: 42243 - DNA, 25 bp, SARS Virus
gaaacttactgaaattggaacaccg

SEQ ID NO: 42244 - DNA, 25 bp, SARS Virus
aaacttactgaaattggaacaccgt

SEQ ID NO: 42245 - DNA, 25 bp, SARS Virus
aacttactgaaaatggaacaccgtt

SEQ ID NO: 42246 - DNA, 25 bp, SARS Virus
acttactgaaataggaacaccgtta

SEQ ID NO: 42247 - DNA, 25 bp, SARS Virus
cttactgaaattagaacaccgttac

SEQ ID NO: 42248 - DNA, 25 bp, SARS Virus
ttactgaaattgaaacaccgttact

SEQ ID NO: 42249 - DNA, 25 bp, SARS Virus
tactgaaattggaacaccgttactt

SEQ ID NO: 42250 - DNA, 25 bp, SARS Virus
actgaaattggaacaccgttacttc

SEQ ID NO: 42251 - DNA, 25 bp, SARS Virus
ctgaaattggaaaaccgttacttca

SEQ ID NO: 42252 - DNA, 25 bp, SARS Virus
tgaaattggaacaccgttacttcat

SEQ ID NO: 42253 - DNA, 25 bp, SARS Virus
gaaattggaacaacgttacttcatg

SEQ ID NO: 42254 - DNA, 25 bp, SARS Virus
aaattggaacacagttacttcatgt

SEQ ID NO: 42255 - DNA, 25 bp, SARS Virus
aattggaacaccattacttcatgtt

SEQ ID NO: 42256 - DNA, 25 bp, SARS Virus
attggaacaccgatacttcatgttg

SEQ ID NO: 42257 - DNA, 25 bp, SARS Virus
ttggaacaccgtaacttcatgttga

SEQ ID NO: 42258 - DNA, 25 bp, SARS Virus
tggaacaccgttacttcatgttgat

SEQ ID NO: 42259 - DNA, 25 bp, SARS Virus
ggaacaccgttaattcatgttgata

SEQ ID NO: 42260 - DNA, 25 bp, SARS Virus
gaacaccgttacatcatgttgatac

SEQ ID NO: 42261 - DNA, 25 bp, SARS Virus
aacaccgttactacatgttgatact

SEQ ID NO: 42262 - DNA, 25 bp, SARS Virus
acaccgttacttaatgttgatactt

SEQ ID NO: 42263 - DNA, 25 bp, SARS Virus
caccgttacttcatgttgatacttg

SEQ ID NO: 42264 - DNA, 25 bp, SARS Virus
accgttacttcaagttgatacttgg

SEQ ID NO: 42265 - DNA, 25 bp, SARS Virus
ccgttacttcatattgatacttgga

SEQ ID NO: 42266 - DNA, 25 bp, SARS Virus
cgttacttcatgatgatacttggaa

SEQ ID NO: 42267 - DNA, 25 bp, SARS Virus
gttacttcatgtagatacttggaaa

SEQ ID NO: 42268 - DNA, 25 bp, SARS Virus
ttacttcatgttaatacttggaaac

SEQ ID NO: 42269 - DNA, 25 bp, SARS Virus
tacttcatgttgatacttggaaact

SEQ ID NO: 42270 - DNA, 25 bp, SARS Virus
acttcatgttgaaacttggaaactg

SEQ ID NO: 42271 - DNA, 25 bp, SARS Virus
cttcatgttgatacttggaaactgt

SEQ ID NO: 42272 - DNA, 25 bp, SARS Virus
ttcatgttgataattggaaactgtg

SEQ ID NO: 42273 - DNA, 25 bp, SARS Virus
tcatgttgatacatggaaactgtgt

SEQ ID NO: 42274 - DNA, 25 bp, SARS Virus
catgttgatactaggaaactgtgtt

SEQ ID NO: 42275 - DNA, 25 bp, SARS Virus
atgttgatacttagaaactgtgttc

SEQ ID NO: 42276 - DNA, 25 bp, SARS Virus
tgttgatacttgaaaactgtgttct

SEQ ID NO: 42277 - DNA, 25 bp, SARS Virus
gttgatacttggaaactgtgttcta

SEQ ID NO: 42278 - DNA, 25 bp, SARS Virus
ttgatacttggaaactgtgttctag

SEQ ID NO: 42279 - DNA, 25 bp, SARS Virus
tgatacttggaaactgtgttctagt

SEQ ID NO: 42280 - DNA, 25 bp, SARS Virus
gatacttggaaaatgtgttctagta

SEQ ID NO: 42281 - DNA, 25 bp, SARS Virus
atacttggaaacagtgttctagtac

SEQ ID NO: 42282 - DNA, 25 bp, SARS Virus
tacttggaaactatgttctagtaca

SEQ ID NO: 42283 - DNA, 25 bp, SARS Virus
acttggaaactgagttctagtacaa

SEQ ID NO: 42284 - DNA, 25 bp, SARS Virus
cttggaaactgtattctagtacaac

SEQ ID NO: 42285 - DNA, 25 bp, SARS Virus
ttggaaactgtgatctagtacaact

SEQ ID NO: 42286 - DNA, 25 bp, SARS Virus
tggaaactgtgtactagtacaactg

SEQ ID NO: 42287 - DNA, 25 bp, SARS Virus
ggaaactgtgttatagtacaactgt

SEQ ID NO: 42288 - DNA, 25 bp, SARS Virus
gaaactgtgttcaagtacaactgta

SEQ ID NO: 42289 - DNA, 25 bp, SARS Virus
aaactgtgttctagtacaactgtat

SEQ ID NO: 42290 - DNA, 25 bp, SARS Virus
aactgtgttctaatacaactgtata

SEQ ID NO: 42291 - DNA, 25 bp, SARS Virus
actgtgttctagaacaactgtataa

SEQ ID NO: 42292 - DNA, 25 bp, SARS Virus
ctgtgttctagtacaactgtataac

SEQ ID NO: 42293 - DNA, 25 bp, SARS Virus
tgtgttctagtaaaactgtataacc

SEQ ID NO: 42294 - DNA, 25 bp, SARS Virus
gtgttctagtacaactgtataaccc

SEQ ID NO: 42295 - DNA, 25 bp, SARS Virus
tgttctagtacaactgtataaccct

SEQ ID NO: 42296 - DNA, 25 bp, SARS Virus
gttctagtacaaatgtataaccctg

SEQ ID NO: 42297 - DNA, 25 bp, SARS Virus
ttctagtacaacagtataaccctgg

SEQ ID NO: 42298 - DNA, 25 bp, SARS Virus
tctagtacaactatataaccctgga

SEQ ID NO: 42299 - DNA, 25 bp, SARS Virus
ctagtacaactgaataaccctggag

SEQ ID NO: 42300 - DNA, 25 bp, SARS Virus
tagtacaactgtataaccctggaga

SEQ ID NO: 42301 - DNA, 25 bp, SARS Virus
agtacaactgtaaaaccctggagaa

SEQ ID NO: 42302 - DNA, 25 bp, SARS Virus
gtacaactgtataaccctggagaaa

SEQ ID NO: 42303 - DNA, 25 bp, SARS Virus
tacaactgtataaccctggagaaag

SEQ ID NO: 42304 - DNA, 25 bp, SARS Virus
acaactgtataaacctggagaaaga

SEQ ID NO: 42305 - DNA, 25 bp, SARS Virus
caactgtataacactggagaaagac

SEQ ID NO: 42306 - DNA, 25 bp, SARS Virus
aactgtataaccatggagaaagacg

SEQ ID NO: 42307 - DNA, 25 bp, SARS Virus
actgtataacccaggagaaagacga

SEQ ID NO: 42308 - DNA, 25 bp, SARS Virus
ctgtataaccctagagaaagacgag

SEQ ID NO: 42309 - DNA, 25 bp, SARS Virus
tgtataaccctgaagaaagacgagt

SEQ ID NO: 42310 - DNA, 25 bp, SARS Virus
gtataaccctggagaaagacgagtt

SEQ ID NO: 42311 - DNA, 25 bp, SARS Virus
tataaccctggaaaaagacgagttt

SEQ ID NO: 42312 - DNA, 25 bp, SARS Virus
ataaccctggagaaagacgagtttg

SEQ ID NO: 42313 - DNA, 25 bp, SARS Virus
taaccctggagaaagacgagtttgt

SEQ ID NO: 42314 - DNA, 25 bp, SARS Virus
aaccctggagaaagacgagtttgtc

SEQ ID NO: 42315 - DNA, 25 bp, SARS Virus
accctggagaaaaacgagtttgtcc

SEQ ID NO: 42316 - DNA, 25 bp, SARS Virus
ccctggagaaagacgagtttgtcct

SEQ ID NO: 42317 - DNA, 25 bp, SARS Virus
cctggagaaagaagagtttgtcctt

SEQ ID NO: 42318 - DNA, 25 bp, SARS Virus
ctggagaaagacaagtttgtcctta

SEQ ID NO: 42319 - DNA, 25 bp, SARS Virus
tggagaaagacgagtttgtccttaa

SEQ ID NO: 42320 - DNA, 25 bp, SARS Virus
ggagaaagacgaatttgtccttaac

SEQ ID NO: 42321 - DNA, 25 bp, SARS Virus
gagaaagacgagattgtccttaacg

SEQ ID NO: 42322 - DNA, 25 bp, SARS Virus
agaaagacgagtatgtccttaacgg

SEQ ID NO: 42323 - DNA, 25 bp, SARS Virus
gaaagacgagttagtccttaacggc

SEQ ID NO: 42324 - DNA, 25 bp, SARS Virus
aaagacgagtttatccttaacggca

SEQ ID NO: 42325 - DNA, 25 bp, SARS Virus
aagacgagtttgaccttaacggcag

SEQ ID NO: 42326 - DNA, 25 bp, SARS Virus
agacgagtttgtacttaacggcaga

SEQ ID NO: 42327 - DNA, 25 bp, SARS Virus
gacgagtttgtcattaacggcagaa

SEQ ID NO: 42328 - DNA, 25 bp, SARS Virus
acgagtttgtccataacggcagaat

SEQ ID NO: 42329 - DNA, 25 bp, SARS Virus
cgagtttgtcctaaacggcagaatc

SEQ ID NO: 42330 - DNA, 25 bp, SARS Virus
gagtttgtccttaacggcagaatct

SEQ ID NO: 42331 - DNA, 25 bp, SARS Virus
agtttgtccttaacggcagaatcta

SEQ ID NO: 42332 - DNA, 25 bp, SARS Virus
gtttgtccttaaaggcagaatctat

SEQ ID NO: 42333 - DNA, 25 bp, SARS Virus
tttgtccttaacagcagaatctata

SEQ ID NO: 42334 - DNA, 25 bp, SARS Virus
ttgtccttaacgacagaatctatac

SEQ ID NO: 42335 - DNA, 25 bp, SARS Virus
tgtccttaacggaagaatctataca

SEQ ID NO: 42336 - DNA, 25 bp, SARS Virus
gtccttaacggcagaatctatacac

SEQ ID NO: 42337 - DNA, 25 bp, SARS Virus
tccttaacggcaaaatctatacaca

SEQ ID NO: 42338 - DNA, 25 bp, SARS Virus
ccttaacggcagaatctatacacac

SEQ ID NO: 42339 - DNA, 25 bp, SARS Virus
cttaacggcagaatctatacacacg

SEQ ID NO: 42340 - DNA, 25 bp, SARS Virus
ttaacggcagaaactatacacacga

SEQ ID NO: 42341 - DNA, 25 bp, SARS Virus
taacggcagaatatatacacacgac

SEQ ID NO: 42342 - DNA, 25 bp, SARS Virus
aacggcagaatcaatacacacgacg

SEQ ID NO: 42343 - DNA, 25 bp, SARS Virus
acggcagaatctatacacacgacga

SEQ ID NO: 42344 - DNA, 25 bp, SARS Virus
cggcagaatctaaacacacgacgaa

SEQ ID NO: 42345 - DNA, 25 bp, SARS Virus
ggcagaatctatacacacgacgaaa

SEQ ID NO: 42346 - DNA, 25 bp, SARS Virus
gcagaatctataaacacgacgaaac

SEQ ID NO: 42347 - DNA, 25 bp, SARS Virus
cagaatctatacacacgacgaaact

SEQ ID NO: 42348 - DNA, 25 bp, SARS Virus
agaatctatacaaacgacgaaactt

SEQ ID NO: 42349 - DNA, 25 bp, SARS Virus
gaatctatacacacgacgaaacttt

SEQ ID NO: 42350 - DNA, 25 bp, SARS Virus
aatctatacacaagacgaaactttc

SEQ ID NO: 42351 - DNA, 25 bp, SARS Virus
atctatacacacaacgaaactttct

SEQ ID NO: 42352 - DNA, 25 bp, SARS Virus
tctatacacacgacgaaactttctc

SEQ ID NO: 42353 - DNA, 25 bp, SARS Virus
ctatacacacgaagaaactttctcg

SEQ ID NO: 42354 - DNA, 25 bp, SARS Virus
tatacacacgacaaaactttctcga

SEQ ID NO: 42355 - DNA, 25 bp, SARS Virus
atacacacgacgaaactttctcgac

SEQ ID NO: 42356 - DNA, 25 bp, SARS Virus
tacacacgacgaaactttctcgacg

SEQ ID NO: 42357 - DNA, 25 bp, SARS Virus
acacacgacgaaactttctcgacga

SEQ ID NO: 42358 - DNA, 25 bp, SARS Virus
cacacgacgaaaatttctcgacgac

SEQ ID NO: 42359 - DNA, 25 bp, SARS Virus
acacgacgaaacattctcgacgacg

SEQ ID NO: 42360 - DNA, 25 bp, SARS Virus
cacgacgaaactatctcgacgacgt

SEQ ID NO: 42361 - DNA, 25 bp, SARS Virus
acgacgaaacttactcgacgacgtc

SEQ ID NO: 42362 - DNA, 25 bp, SARS Virus
cgacgaaactttatcgacgacgtct

SEQ ID NO: 42363 - DNA, 25 bp, SARS Virus
gacgaaactttcacgacgacgtctt

SEQ ID NO: 42364 - DNA, 25 bp, SARS Virus
acgaaactttctagacgacgtctta

SEQ ID NO: 42365 - DNA, 25 bp, SARS Virus
cgaaactttctcaacgacgtcttac

SEQ ID NO: 42366 - DNA, 25 bp, SARS Virus
gaaactttctcgacgacgtcttacc

SEQ ID NO: 42367 - DNA, 25 bp, SARS Virus
aaactttctcgaagacgtcttacca

SEQ ID NO: 42368 - DNA, 25 bp, SARS Virus
aactttctcgacaacgtcttaccat

SEQ ID NO: 42369 - DNA, 25 bp, SARS Virus
actttctcgacgacgtcttaccata

SEQ ID NO: 42370 - DNA, 25 bp, SARS Virus
ctttctcgacgaagtcttaccatac

SEQ ID NO: 42371 - DNA, 25 bp, SARS Virus
tttctcgacgacatcttaccatact

SEQ ID NO: 42372 - DNA, 25 bp, SARS Virus
ttctcgacgacgacttaccatactt

SEQ ID NO: 42373 - DNA, 25 bp, SARS Virus
tctcgacgacgtattaccatactta

SEQ ID NO: 42374 - DNA, 25 bp, SARS Virus
ctcgacgacgtcataccatacttac

SEQ ID NO: 42375 - DNA, 25 bp, SARS Virus
tcgacgacgtctaaccatacttacc

SEQ ID NO: 42376 - DNA, 25 bp, SARS Virus
cgacgacgtcttaccatacttacca

SEQ ID NO: 42377 - DNA, 25 bp, SARS Virus
gacgacgtcttaacatacttaccag

SEQ ID NO: 42378 - DNA, 25 bp, SARS Virus
acgacgtcttacaatacttaccagc

SEQ ID NO: 42379 - DNA, 25 bp, SARS Virus
cgacgtcttaccatacttaccagca

SEQ ID NO: 42380 - DNA, 25 bp, SARS Virus
gacgtcttaccaaacttaccagcat

SEQ ID NO: 42381 - DNA, 25 bp, SARS Virus
acgtcttaccatacttaccagcatg

SEQ ID NO: 42382 - DNA, 25 bp, SARS Virus
cgtcttaccataattaccagcatga

SEQ ID NO: 42383 - DNA, 25 bp, SARS Virus
gtcttaccatacataccagcatgat

SEQ ID NO: 42384 - DNA, 25 bp, SARS Virus
tcttaccatactaaccagcatgata

SEQ ID NO: 42385 - DNA, 25 bp, SARS Virus
cttaccatacttaccagcatgatag

SEQ ID NO: 42386 - DNA, 25 bp, SARS Virus
ttaccatacttaacagcatgatagg

SEQ ID NO: 42387 - DNA, 25 bp, SARS Virus
taccatacttacaagcatgatagga

SEQ ID NO: 42388 - DNA, 25 bp, SARS Virus
accatacttaccagcatgataggaa

SEQ ID NO: 42389 - DNA, 25 bp, SARS Virus
ccatacttaccaacatgataggaac

SEQ ID NO: 42390 - DNA, 25 bp, SARS Virus
catacttaccagaatgataggaacc

SEQ ID NO: 42391 - DNA, 25 bp, SARS Virus
atacttaccagcatgataggaacca

SEQ ID NO: 42392 - DNA, 25 bp, SARS Virus
tacttaccagcaagataggaaccat

SEQ ID NO: 42393 - DNA, 25 bp, SARS Virus
acttaccagcataataggaaccatc

SEQ ID NO: 42394 - DNA, 25 bp, SARS Virus
cttaccagcatgataggaaccatcg

SEQ ID NO: 42395 - DNA, 25 bp, SARS Virus
ttaccagcatgaaaggaaccatcgt

SEQ ID NO: 42396 - DNA, 25 bp, SARS Virus
taccagcatgataggaaccatcgtg

SEQ ID NO: 42397 - DNA, 25 bp, SARS Virus
accagcatgataagaaccatcgtga

SEQ ID NO: 42398 - DNA, 25 bp, SARS Virus
ccagcatgatagaaaccatcgtgat

SEQ ID NO: 42399 - DNA, 25 bp, SARS Virus
cagcatgataggaaccatcgtgata

SEQ ID NO: 42400 - DNA, 25 bp, SARS Virus
agcatgataggaaccatcgtgataa

SEQ ID NO: 42401 - DNA, 25 bp, SARS Virus
gcatgataggaaacatcgtgataaa

SEQ ID NO: 42402 - DNA, 25 bp, SARS Virus
catgataggaacaatcgtgataaaa

SEQ ID NO: 42403 - DNA, 25 bp, SARS Virus
atgataggaaccatcgtgataaaat

SEQ ID NO: 42404 - DNA, 25 bp, SARS Virus
tgataggaaccaacgtgataaaatc

SEQ ID NO: 42405 - DNA, 25 bp, SARS Virus
gataggaaccatagtgataaaatct

SEQ ID NO: 42406 - DNA, 25 bp, SARS Virus
ataggaaccatcatgataaaatctt

SEQ ID NO: 42407 - DNA, 25 bp, SARS Virus
taggaaccatcgagataaaatcttc

SEQ ID NO: 42408 - DNA, 25 bp, SARS Virus
aggaaccatcgtaataaaatcttct

SEQ ID NO: 42409 - DNA, 25 bp, SARS Virus
ggaaccatcgtgataaaatcttcta

SEQ ID NO: 42410 - DNA, 25 bp, SARS Virus
gaaccatcgtgaaaaaatcttctac

SEQ ID NO: 42411 - DNA, 25 bp, SARS Virus
aaccatcgtgataaaatcttctact

SEQ ID NO: 42412 - DNA, 25 bp, SARS Virus
accatcgtgataaaatcttctactc

SEQ ID NO: 42413 - DNA, 25 bp, SARS Virus
ccatcgtgataaaatcttctactca

SEQ ID NO: 42414 - DNA, 25 bp, SARS Virus
catcgtgataaaatcttctactcaa

SEQ ID NO: 42415 - DNA, 25 bp, SARS Virus
atcgtgataaaaacttctactcaaa

SEQ ID NO: 42416 - DNA, 25 bp, SARS Virus
tcgtgataaaatattctactcaaat

SEQ ID NO: 42417 - DNA, 25 bp, SARS Virus
cgtgataaaatcatctactcaaatg

SEQ ID NO: 42418 - DNA, 25 bp, SARS Virus
gtgataaaatctactactcaaatgt

SEQ ID NO: 42419 - DNA, 25 bp, SARS Virus
tgataaaatcttatactcaaatgtg

SEQ ID NO: 42420 - DNA, 25 bp, SARS Virus
gataaaatcttcaactcaaatgtgg

SEQ ID NO: 42421 - DNA, 25 bp, SARS Virus
ataaaatcttctactcaaatgtggt

SEQ ID NO: 42422 - DNA, 25 bp, SARS Virus
taaaatcttctaatcaaatgtggta

SEQ ID NO: 42423 - DNA, 25 bp, SARS Virus
aaaatcttctacacaaatgtggtaa

SEQ ID NO: 42424 - DNA, 25 bp, SARS Virus
aaatcttctactaaaatgtggtaaa

SEQ ID NO: 42425 - DNA, 25 bp, SARS Virus
aatcttctactcaaatgtggtaaac

SEQ ID NO: 42426 - DNA, 25 bp, SARS Virus
atcttctactcaaatgtggtaaact

SEQ ID NO: 42427 - DNA, 25 bp, SARS Virus
tcttctactcaaatgtggtaaacta

SEQ ID NO: 42428 - DNA, 25 bp, SARS Virus
cttctactcaaaagtggtaaactac

SEQ ID NO: 42429 - DNA, 25 bp, SARS Virus
ttctactcaaatatggtaaactaca

SEQ ID NO: 42430 - DNA, 25 bp, SARS Virus
tctactcaaatgaggtaaactacaa

SEQ ID NO: 42431 - DNA, 25 bp, SARS Virus
ctactcaaatgtagtaaactacaac

SEQ ID NO: 42432 - DNA, 25 bp, SARS Virus
tactcaaatgtgataaactacaaca

SEQ ID NO: 42433 - DNA, 25 bp, SARS Virus
actcaaatgtggaaaactacaacaa

SEQ ID NO: 42434 - DNA, 25 bp, SARS Virus
ctcaaatgtggtaaactacaacaat

SEQ ID NO: 42435 - DNA, 25 bp, SARS Virus
tcaaatgtggtaaactacaacaatc

SEQ ID NO: 42436 - DNA, 25 bp, SARS Virus
caaatgtggtaaactacaacaatct

SEQ ID NO: 42437 - DNA, 25 bp, SARS Virus
aaatgtggtaaaatacaacaatctg

SEQ ID NO: 42438 - DNA, 25 bp, SARS Virus
aatgtggtaaacaacaacaatctgt

SEQ ID NO: 42439 - DNA, 25 bp, SARS Virus
atgtggtaaactacaacaatctgtt

SEQ ID NO: 42440 - DNA, 25 bp, SARS Virus
tgtggtaaactaaaacaatctgtta

SEQ ID NO: 42441 - DNA, 25 bp, SARS Virus
gtggtaaactacaacaatctgttac

SEQ ID NO: 42442 - DNA, 25 bp, SARS Virus
tggtaaactacaacaatctgttacg

SEQ ID NO: 42443 - DNA, 25 bp, SARS Virus
ggtaaactacaaaaatctgttacga

SEQ ID NO: 42444 - DNA, 25 bp, SARS Virus
gtaaactacaacaatctgttacgag

SEQ ID NO: 42445 - DNA, 25 bp, SARS Virus
taaactacaacaatctgttacgaga

SEQ ID NO: 42446 - DNA, 25 bp, SARS Virus
aaactacaacaaactgttacgagac

SEQ ID NO: 42447 - DNA, 25 bp, SARS Virus
aactacaacaatatgttacgagacc

SEQ ID NO: 42448 - DNA, 25 bp, SARS Virus
actacaacaatcagttacgagacca

SEQ ID NO: 42449 - DNA, 25 bp, SARS Virus
ctacaacaatctattacgagaccac

SEQ ID NO: 42450 - DNA, 25 bp, SARS Virus
tacaacaatctgatacgagaccaca

SEQ ID NO: 42451 - DNA, 25 bp, SARS Virus
acaacaatctgtaacgagaccacaa

SEQ ID NO: 42452 - DNA, 25 bp, SARS Virus
caacaatctgttacgagaccacaat

SEQ ID NO: 42453 - DNA, 25 bp, SARS Virus
aacaatctgttaagagaccacaatg

SEQ ID NO: 42454 - DNA, 25 bp, SARS Virus
acaatctgttacaagaccacaatgg

SEQ ID NO: 42455 - DNA, 25 bp, SARS Virus
caatctgttacgagaccacaatgga

SEQ ID NO: 42456 - DNA, 25 bp, SARS Virus
aatctgttacgaaaccacaatggaa

SEQ ID NO: 42457 - DNA, 25 bp, SARS Virus
atctgttacgagaccacaatggaag

SEQ ID NO: 42458 - DNA, 25 bp, SARS Virus
tctgttacgagaacacaatggaagg

SEQ ID NO: 42459 - DNA, 25 bp, SARS Virus
ctgttacgagacaacaatggaaggt

SEQ ID NO: 42460 - DNA, 25 bp, SARS Virus
tgttacgagaccacaatggaaggtt

SEQ ID NO: 42461 - DNA, 25 bp, SARS Virus
gttacgagaccaaaatggaaggttc

SEQ ID NO: 42462 - DNA, 25 bp, SARS Virus
ttacgagaccacaatggaaggttcc

SEQ ID NO: 42463 - DNA, 25 bp, SARS Virus
tacgagaccacaatggaaggttcca

SEQ ID NO: 42464 - DNA, 25 bp, SARS Virus
acgagaccacaaaggaaggttccat

SEQ ID NO: 42465 - DNA, 25 bp, SARS Virus
cgagaccacaatagaaggttccatt

SEQ ID NO: 42466 - DNA, 25 bp, SARS Virus
gagaccacaatgaaaggttccattc

SEQ ID NO: 42467 - DNA, 25 bp, SARS Virus
agaccacaatggaaggttccattca

SEQ ID NO: 42468 - DNA, 25 bp, SARS Virus
gaccacaatggaaggttccattcaa

SEQ ID NO: 42469 - DNA, 25 bp, SARS Virus
accacaatggaaagttccattcaag

SEQ ID NO: 42470 - DNA, 25 bp, SARS Virus
ccacaatggaagattccattcaagt

SEQ ID NO: 42471 - DNA, 25 bp, SARS Virus
cacaatggaaggatccattcaagtt

SEQ ID NO: 42472 - DNA, 25 bp, SARS Virus
acaatggaaggtaccattcaagttc

SEQ ID NO: 42473 - DNA, 25 bp, SARS Virus
caatggaaggttacattcaagttct

SEQ ID NO: 42474 - DNA, 25 bp, SARS Virus
aatggaaggttcaattcaagttctt

SEQ ID NO: 42475 - DNA, 25 bp, SARS Virus
atggaaggttccattcaagttcttt

SEQ ID NO: 42476 - DNA, 25 bp, SARS Virus
tggaaggttccaatcaagttctttt

SEQ ID NO: 42477 - DNA, 25 bp, SARS Virus
ggaaggttccatacaagttctttta

SEQ ID NO: 42478 - DNA, 25 bp, SARS Virus
gaaggttccattaaagttcttttaa

SEQ ID NO: 42479 - DNA, 25 bp, SARS Virus
aaggttccattcaagttcttttaac

SEQ ID NO: 42480 - DNA, 25 bp, SARS Virus
aggttccattcaagttcttttaaca

SEQ ID NO: 42481 - DNA, 25 bp, SARS Virus
ggttccattcaaattcttttaacaa

SEQ ID NO: 42482 - DNA, 25 bp, SARS Virus
gttccattcaagatcttttaacaat

SEQ ID NO: 42483 - DNA, 25 bp, SARS Virus
ttccattcaagtacttttaacaatt

SEQ ID NO: 42484 - DNA, 25 bp, SARS Virus
tccattcaagttattttaacaattc

SEQ ID NO: 42485 - DNA, 25 bp, SARS Virus
ccattcaagttcatttaacaattcc

SEQ ID NO: 42486 - DNA, 25 bp, SARS Virus
cattcaagttctattaacaattccc

SEQ ID NO: 42487 - DNA, 25 bp, SARS Virus
attcaagttcttataacaattcccg

SEQ ID NO: 42488 - DNA, 25 bp, SARS Virus
ttcaagttctttaaacaattcccgt

SEQ ID NO: 42489 - DNA, 25 bp, SARS Virus
tcaagttcttttaacaattcccgtg

SEQ ID NO: 42490 - DNA, 25 bp, SARS Virus
caagttcttttaacaattcccgtga

SEQ ID NO: 42491 - DNA, 25 bp, SARS Virus
aagttcttttaaaaattcccgtgag

SEQ ID NO: 42492 - DNA, 25 bp, SARS Virus
agttcttttaacaattcccgtgagt

SEQ ID NO: 42493 - DNA, 25 bp, SARS Virus
gttcttttaacaattcccgtgagta

SEQ ID NO: 42494 - DNA, 25 bp, SARS Virus
ttcttttaacaaatcccgtgagtag

SEQ ID NO: 42495 - DNA, 25 bp, SARS Virus
tcttttaacaatacccgtgagtagt

SEQ ID NO: 42496 - DNA, 25 bp, SARS Virus
cttttaacaattaccgtgagtagta

SEQ ID NO: 42497 - DNA, 25 bp, SARS Virus
ttttaacaattcacgtgagtagtaa

SEQ ID NO: 42498 - DNA, 25 bp, SARS Virus
tttaacaattccagtgagtagtaac

SEQ ID NO: 42499 - DNA, 25 bp, SARS Virus
ttaacaattcccatgagtagtaacc

SEQ ID NO: 42500 - DNA, 25 bp, SARS Virus
taacaattcccgagagtagtaacct

SEQ ID NO: 42501 - DNA, 25 bp, SARS Virus
aacaattcccgtaagtagtaaccta

SEQ ID NO: 42502 - DNA, 25 bp, SARS Virus
acaattcccgtgagtagtaacctac

SEQ ID NO: 42503 - DNA, 25 bp, SARS Virus
caattcccgtgaatagtaacctacg

SEQ ID NO: 42504 - DNA, 25 bp, SARS Virus
aattcccgtgagaagtaacctacga

SEQ ID NO: 42505 - DNA, 25 bp, SARS Virus
attcccgtgagtagtaacctacgaa

SEQ ID NO: 42506 - DNA, 25 bp, SARS Virus
ttcccgtgagtaataacctacgaaa

SEQ ID NO: 42507 - DNA, 25 bp, SARS Virus
tcccgtgagtagaaacctacgaaaa

SEQ ID NO: 42508 - DNA, 25 bp, SARS Virus
cccgtgagtagtaacctacgaaaat

SEQ ID NO: 42509 - DNA, 25 bp, SARS Virus
ccgtgagtagtaacctacgaaaatt

SEQ ID NO: 42510 - DNA, 25 bp, SARS Virus
cgtgagtagtaaactacgaaaattg

SEQ ID NO: 42511 - DNA, 25 bp, SARS Virus
gtgagtagtaacatacgaaaattga

SEQ ID NO: 42512 - DNA, 25 bp, SARS Virus
tgagtagtaaccaacgaaaattgaa

SEQ ID NO: 42513 - DNA, 25 bp, SARS Virus
gagtagtaacctacgaaaattgaaa

SEQ ID NO: 42514 - DNA, 25 bp, SARS Virus
agtagtaacctaagaaaattgaaag

SEQ ID NO: 42515 - DNA, 25 bp, SARS Virus
gtagtaacctacaaaaattgaaaga

SEQ ID NO: 42516 - DNA, 25 bp, SARS Virus
tagtaacctacgaaaattgaaagaa

SEQ ID NO: 42517 - DNA, 25 bp, SARS Virus
agtaacctacgaaaattgaaagaac

SEQ ID NO: 42518 - DNA, 25 bp, SARS Virus
gtaacctacgaaaattgaaagaact

SEQ ID NO: 42519 - DNA, 25 bp, SARS Virus
taacctacgaaaattgaaagaactg

SEQ ID NO: 42520 - DNA, 25 bp, SARS Virus
aacctacgaaaaatgaaagaactgt

SEQ ID NO: 42521 - DNA, 25 bp, SARS Virus
acctacgaaaatagaaagaactgta

SEQ ID NO: 42522 - DNA, 25 bp, SARS Virus
cctacgaaaattaaaagaactgtag

SEQ ID NO: 42523 - DNA, 25 bp, SARS Virus
ctacgaaaattgaaagaactgtagt

SEQ ID NO: 42524 - DNA, 25 bp, SARS Virus
tacgaaaattgaaagaactgtagtg

SEQ ID NO: 42525 - DNA, 25 bp, SARS Virus
acgaaaattgaaagaactgtagtga

SEQ ID NO: 42526 - DNA, 25 bp, SARS Virus
cgaaaattgaaaaaactgtagtgat

SEQ ID NO: 42527 - DNA, 25 bp, SARS Virus
gaaaattgaaagaactgtagtgata

SEQ ID NO: 42528 - DNA, 25 bp, SARS Virus
aaaattgaaagaactgtagtgataa

SEQ ID NO: 42529 - DNA, 25 bp, SARS Virus
aaattgaaagaaatgtagtgataac

SEQ ID NO: 42530 - DNA, 25 bp, SARS Virus
aattgaaagaacagtagtgataact

SEQ ID NO: 42531 - DNA, 25 bp, SARS Virus
attgaaagaactatagtgataacta

SEQ ID NO: 42532 - DNA, 25 bp, SARS Virus
ttgaaagaactgaagtgataactaa

SEQ ID NO: 42533 - DNA, 25 bp, SARS Virus
tgaaagaactgtagtgataactaag

SEQ ID NO: 42534 - DNA, 25 bp, SARS Virus
gaaagaactgtaatgataactaaga

SEQ ID NO: 42535 - DNA, 25 bp, SARS Virus
aaagaactgtagagataactaagaa

SEQ ID NO: 42536 - DNA, 25 bp, SARS Virus
aagaactgtagtaataactaagaac

SEQ ID NO: 42537 - DNA, 25 bp, SARS Virus
agaactgtagtgataactaagaaca

SEQ ID NO: 42538 - DNA, 25 bp, SARS Virus
gaactgtagtgaaaactaagaacaa

SEQ ID NO: 42539 - DNA, 25 bp, SARS Virus
aactgtagtgataactaagaacaag

SEQ ID NO: 42540 - DNA, 25 bp, SARS Virus
actgtagtgataactaagaacaagt

SEQ ID NO: 42541 - DNA, 25 bp, SARS Virus
ctgtagtgataaataagaacaagtt

SEQ ID NO: 42542 - DNA, 25 bp, SARS Virus
tgtagtgataacaaagaacaagttt

SEQ ID NO: 42543 - DNA, 25 bp, SARS Virus
gtagtgataactaagaacaagtttc

SEQ ID NO: 42544 - DNA, 25 bp, SARS Virus
tagtgataactaagaacaagtttca

SEQ ID NO: 42545 - DNA, 25 bp, SARS Virus
agtgataactaaaaacaagtttcat

SEQ ID NO: 42546 - DNA, 25 bp, SARS Virus
gtgataactaagaacaagtttcatg

SEQ ID NO: 42547 - DNA, 25 bp, SARS Virus
tgataactaagaacaagtttcatgt

SEQ ID NO: 42548 - DNA, 25 bp, SARS Virus
gataactaagaaaaagtttcatgtg

SEQ ID NO: 42549 - DNA, 25 bp, SARS Virus
ataactaagaacaagtttcatgtgt

SEQ ID NO: 42550 - DNA, 25 bp, SARS Virus
taactaagaacaagtttcatgtgtc

SEQ ID NO: 42551 - DNA, 25 bp, SARS Virus
aactaagaacaaatttcatgtgtca

SEQ ID NO: 42552 - DNA, 25 bp, SARS Virus
actaagaacaagattcatgtgtcac

SEQ ID NO: 42553 - DNA, 25 bp, SARS Virus
ctaagaacaagtatcatgtgtcacc

SEQ ID NO: 42554 - DNA, 25 bp, SARS Virus
taagaacaagttacatgtgtcacca

SEQ ID NO: 42555 - DNA, 25 bp, SARS Virus
aagaacaagtttaatgtgtcaccag

SEQ ID NO: 42556 - DNA, 25 bp, SARS Virus
agaacaagtttcatgtgtcaccagt

SEQ ID NO: 42557 - DNA, 25 bp, SARS Virus
gaacaagtttcaagtgtcaccagtg

SEQ ID NO: 42558 - DNA, 25 bp, SARS Virus
aacaagtttcatatgtcaccagtga

SEQ ID NO: 42559 - DNA, 25 bp, SARS Virus
acaagtttcatgagtcaccagtgac

SEQ ID NO: 42560 - DNA, 25 bp, SARS Virus
caagtttcatgtatcaccagtgaca

SEQ ID NO: 42561 - DNA, 25 bp, SARS Virus
aagtttcatgtgacaccagtgacaa

SEQ ID NO: 42562 - DNA, 25 bp, SARS Virus
agtttcatgtgtaaccagtgacaaa

SEQ ID NO: 42563 - DNA, 25 bp, SARS Virus
gtttcatgtgtcaccagtgacaaaa

SEQ ID NO: 42564 - DNA, 25 bp, SARS Virus
tttcatgtgtcaacagtgacaaaaa

SEQ ID NO: 42565 - DNA, 25 bp, SARS Virus
ttcatgtgtcacaagtgacaaaaag

SEQ ID NO: 42566 - DNA, 25 bp, SARS Virus
tcatgtgtcaccagtgacaaaaaga

SEQ ID NO: 42567 - DNA, 25 bp, SARS Virus
catgtgtcaccaatgacaaaaagaa

SEQ ID NO: 42568 - DNA, 25 bp, SARS Virus
atgtgtcaccagagacaaaaagaaa

SEQ ID NO: 42569 - DNA, 25 bp, SARS Virus
tgtgtcaccagtaacaaaaagaaac

SEQ ID NO: 42570 - DNA, 25 bp, SARS Virus
gtgtcaccagtgacaaaaagaaaca

SEQ ID NO: 42571 - DNA, 25 bp, SARS Virus
tgtcaccagtgaaaaaaagaaacaa

SEQ ID NO: 42572 - DNA, 25 bp, SARS Virus
gtcaccagtgacaaaaagaaacaaa

SEQ ID NO: 42573 - DNA, 25 bp, SARS Virus
tcaccagtgacaaaaagaaacaaat

SEQ ID NO: 42574 - DNA, 25 bp, SARS Virus
caccagtgacaaaaagaaacaaatg

SEQ ID NO: 42575 - DNA, 25 bp, SARS Virus
accagtgacaaaaagaaacaaatgc

SEQ ID NO: 42576 - DNA, 25 bp, SARS Virus
ccagtgacaaaaagaaacaaatgct

SEQ ID NO: 42577 - DNA, 25 bp, SARS Virus
cagtgacaaaaaaaaacaaatgctc

SEQ ID NO: 42578 - DNA, 25 bp, SARS Virus
agtgacaaaaagaaacaaatgctct

SEQ ID NO: 42579 - DNA, 25 bp, SARS Virus
gtgacaaaaagaaacaaatgctctt

SEQ ID NO: 42580 - DNA, 25 bp, SARS Virus
tgacaaaaagaaacaaatgctctta

SEQ ID NO: 42581 - DNA, 25 bp, SARS Virus
gacaaaaagaaaaaaatgctcttac

SEQ ID NO: 42582 - DNA, 25 bp, SARS Virus
acaaaaagaaacaaatgctcttacg

SEQ ID NO: 42583 - DNA, 25 bp, SARS Virus
caaaaagaaacaaatgctcttacga

SEQ ID NO: 42584 - DNA, 25 bp, SARS Virus
aaaaagaaacaaatgctcttacgaa

SEQ ID NO: 42585 - DNA, 25 bp, SARS Virus
tcttccatttaacataccaggtaaa

SEQ ID NO: 42586 - DNA, 25 bp, SARS Virus
cttccatttaagctaccaggtaaac

SEQ ID NO: 42587 - DNA, 25 bp, SARS Virus
ttccatttaagacaccaggtaaaca

SEQ ID NO: 42588 - DNA, 25 bp, SARS Virus
tccatttaagatcccaggtaaacaa

SEQ ID NO: 42589 - DNA, 25 bp, SARS Virus
ccatttaagataccaggtaaacaac

SEQ ID NO: 42590 - DNA, 25 bp, SARS Virus
catttaagataccaggtaaacaact

SEQ ID NO: 42591 - DNA, 25 bp, SARS Virus
atttaagatacccggtaaacaactg

SEQ ID NO: 42592 - DNA, 25 bp, SARS Virus
tttaagataccacgtaaacaactgt

SEQ ID NO: 42593 - DNA, 25 bp, SARS Virus
ttaagataccagctaaacaactgtc

SEQ ID NO: 42594 - DNA, 25 bp, SARS Virus
taagataccaggcaaacaactgtct

SEQ ID NO: 42595 - DNA, 25 bp, SARS Virus
aagataccaggtcaacaactgtctg

SEQ ID NO: 42596 - DNA, 25 bp, SARS Virus
agataccaggtacacaactgtctgt

SEQ ID NO: 42597 - DNA, 25 bp, SARS Virus
gataccaggtaaccaactgtctgtt

SEQ ID NO: 42598 - DNA, 25 bp, SARS Virus
ataccaggtaaacaactgtctgttt

SEQ ID NO: 42599 - DNA, 25 bp, SARS Virus
taccaggtaaaccactgtctgtttg

SEQ ID NO: 42600 - DNA, 25 bp, SARS Virus
accaggtaaacacctgtctgtttga

SEQ ID NO: 42601 - DNA, 25 bp, SARS Virus
ccaggtaaacaactgtctgtttgac

SEQ ID NO: 42602 - DNA, 25 bp, SARS Virus
caggtaaacaaccgtctgtttgacg

SEQ ID NO: 42603 - DNA, 25 bp, SARS Virus
aggtaaacaactctctgtttgacgt

SEQ ID NO: 42604 - DNA, 25 bp, SARS Virus
ggtaaacaactgcctgtttgacgtg

SEQ ID NO: 42605 - DNA, 25 bp, SARS Virus
gtaaacaactgtctgtttgacgtgt

SEQ ID NO: 42606 - DNA, 25 bp, SARS Virus
taaacaactgtccgtttgacgtgtc

SEQ ID NO: 42607 - DNA, 25 bp, SARS Virus
aaacaactgtctctttgacgtgtcc

SEQ ID NO: 42608 - DNA, 25 bp, SARS Virus
aacaactgtctgcttgacgtgtccg

SEQ ID NO: 42609 - DNA, 25 bp, SARS Virus
acaactgtctgtctgacgtgtccga

SEQ ID NO: 42610 - DNA, 25 bp, SARS Virus
caactgtctgttcgacgtgtccgac

SEQ ID NO: 42611 - DNA, 25 bp, SARS Virus
aactgtctgtttcacgtgtccgacg

SEQ ID NO: 42612 - DNA, 25 bp, SARS Virus
actgtctgtttgccgtgtccgacgt

SEQ ID NO: 42613 - DNA, 25 bp, SARS Virus
ctgtctgtttgacgtgtccgacgtc

SEQ ID NO: 42614 - DNA, 25 bp, SARS Virus
tgtctgtttgacctgtccgacgtcc

SEQ ID NO: 42615 - DNA, 25 bp, SARS Virus
gtctgtttgacgcgtccgacgtcca

SEQ ID NO: 42616 - DNA, 25 bp, SARS Virus
tctgtttgacgtctccgacgtccat

SEQ ID NO: 42617 - DNA, 25 bp, SARS Virus
ctgtttgacgtgcccgacgtccatg

SEQ ID NO: 42618 - DNA, 25 bp, SARS Virus
tgtttgacgtgtccgacgtccatgt

SEQ ID NO: 42619 - DNA, 25 bp, SARS Virus
gtttgacgtgtccgacgtccatgtc

SEQ ID NO: 42620 - DNA, 25 bp, SARS Virus
tttgacgtgtcccacgtccatgtct

SEQ ID NO: 42621 - DNA, 25 bp, SARS Virus
ttgacgtgtccgccgtccatgtctg

SEQ ID NO: 42622 - DNA, 25 bp, SARS Virus
tgacgtgtccgacgtccatgtctgt

SEQ ID NO: 42623 - DNA, 25 bp, SARS Virus
gacgtgtccgacctccatgtctgtg

SEQ ID NO: 42624 - DNA, 25 bp, SARS Virus
acgtgtccgacgcccatgtctgtgt

SEQ ID NO: 42625 - DNA, 25 bp, SARS Virus
cgtgtccgacgtccatgtctgtgtt

SEQ ID NO: 42626 - DNA, 25 bp, SARS Virus
gtgtccgacgtccatgtctgtgttg

SEQ ID NO: 42627 - DNA, 25 bp, SARS Virus
tgtccgacgtccctgtctgtgttgg

SEQ ID NO: 42628 - DNA, 25 bp, SARS Virus
gtccgacgtccacgtctgtgttggt

SEQ ID NO: 42629 - DNA, 25 bp, SARS Virus
tccgacgtccatctctgtgttggta

SEQ ID NO: 42630 - DNA, 25 bp, SARS Virus
ccgacgtccatgcctgtgttggtat

SEQ ID NO: 42631 - DNA, 25 bp, SARS Virus
cgacgtccatgtctgtgttggtatt

SEQ ID NO: 42632 - DNA, 25 bp, SARS Virus
gacgtccatgtccgtgttggtattg

SEQ ID NO: 42633 - DNA, 25 bp, SARS Virus
acgtccatgtctctgttggtattgt

SEQ ID NO: 42634 - DNA, 25 bp, SARS Virus
cgtccatgtctgcgttggtattgta

SEQ ID NO: 42635 - DNA, 25 bp, SARS Virus
gtccatgtctgtcttggtattgtaa

SEQ ID NO: 42636 - DNA, 25 bp, SARS Virus
tccatgtctgtgctggtattgtaat

SEQ ID NO: 42637 - DNA, 25 bp, SARS Virus
ccatgtctgtgtcggtattgtaatt

SEQ ID NO: 42638 - DNA, 25 bp, SARS Virus
catgtctgtgttcgtattgtaattt

SEQ ID NO: 42639 - DNA, 25 bp, SARS Virus
atgtctgtgttgctattgtaattta

SEQ ID NO: 42640 - DNA, 25 bp, SARS Virus
tgtctgtgttggcattgtaatttac

SEQ ID NO: 42641 - DNA, 25 bp, SARS Virus
gtctgtgttggtcttgtaatttaca

SEQ ID NO: 42642 - DNA, 25 bp, SARS Virus
tctgtgttggtactgtaatttacaa

SEQ ID NO: 42643 - DNA, 25 bp, SARS Virus
ctgtgttggtatcgtaatttacaaa

SEQ ID NO: 42644 - DNA, 25 bp, SARS Virus
tgtgttggtattctaatttacaaaa

SEQ ID NO: 42645 - DNA, 25 bp, SARS Virus
gtgttggtattgcaatttacaaaac

SEQ ID NO: 42646 - DNA, 25 bp, SARS Virus
tgttggtattgtcatttacaaaacc

SEQ ID NO: 42647 - DNA, 25 bp, SARS Virus
gttggtattgtactttacaaaaccg

SEQ ID NO: 42648 - DNA, 25 bp, SARS Virus
ttggtattgtaacttacaaaaccgt

SEQ ID NO: 42649 - DNA, 25 bp, SARS Virus
tggtattgtaatctacaaaaccgta

SEQ ID NO: 42650 - DNA, 25 bp, SARS Virus
ggtattgtaattcacaaaaccgtac

SEQ ID NO: 42651 - DNA, 25 bp, SARS Virus
gtattgtaatttccaaaaccgtacc

SEQ ID NO: 42652 - DNA, 25 bp, SARS Virus
tattgtaatttacaaaaccgtaccg

SEQ ID NO: 42653 - DNA, 25 bp, SARS Virus
attgtaatttaccaaaccgtaccga

SEQ ID NO: 42654 - DNA, 25 bp, SARS Virus
ttgtaatttacacaaccgtaccgac

SEQ ID NO: 42655 - DNA, 25 bp, SARS Virus
tgtaatttacaacaccgtaccgaca

SEQ ID NO: 42656 - DNA, 25 bp, SARS Virus
gtaatttacaaacccgtaccgacat

SEQ ID NO: 42657 - DNA, 25 bp, SARS Virus
taatttacaaaaccgtaccgacata

SEQ ID NO: 42658 - DNA, 25 bp, SARS Virus
aatttacaaaaccgtaccgacatac

SEQ ID NO: 42659 - DNA, 25 bp, SARS Virus
atttacaaaaccctaccgacatacg

SEQ ID NO: 42660 - DNA, 25 bp, SARS Virus
tttacaaaaccgcaccgacatacga

SEQ ID NO: 42661 - DNA, 25 bp, SARS Virus
ttacaaaaccgtcccgacatacgac

SEQ ID NO: 42662 - DNA, 25 bp, SARS Virus
tacaaaaccgtaccgacatacgacg

SEQ ID NO: 42663 - DNA, 25 bp, SARS Virus
acaaaaccgtaccgacatacgacga

SEQ ID NO: 42664 - DNA, 25 bp, SARS Virus
caaaaccgtacccacatacgacgac

SEQ ID NO: 42665 - DNA, 25 bp, SARS Virus
aaaaccgtaccgccatacgacgaca

SEQ ID NO: 42666 - DNA, 25 bp, SARS Virus
aaaccgtaccgacatacgacgacaa

SEQ ID NO: 42667 - DNA, 25 bp, SARS Virus
aaccgtaccgacctacgacgacaat

SEQ ID NO: 42668 - DNA, 25 bp, SARS Virus
accgtaccgacacacgacgacaata

SEQ ID NO: 42669 - DNA, 25 bp, SARS Virus
ccgtaccgacatccgacgacaatag

SEQ ID NO: 42670 - DNA, 25 bp, SARS Virus
cgtaccgacatacgacgacaatagt

SEQ ID NO: 42671 - DNA, 25 bp, SARS Virus
gtaccgacataccacgacaatagtt

SEQ ID NO: 42672 - DNA, 25 bp, SARS Virus
taccgacatacgccgacaatagtta

SEQ ID NO: 42673 - DNA, 25 bp, SARS Virus
accgacatacgacgacaatagttac

SEQ ID NO: 42674 - DNA, 25 bp, SARS Virus
ccgacatacgaccacaatagttacc

SEQ ID NO: 42675 - DNA, 25 bp, SARS Virus
cgacatacgacgccaatagttacca

SEQ ID NO: 42676 - DNA, 25 bp, SARS Virus
gacatacgacgacaatagttaccac

SEQ ID NO: 42677 - DNA, 25 bp, SARS Virus
acatacgacgaccatagttaccact

SEQ ID NO: 42678 - DNA, 25 bp, SARS Virus
catacgacgacactagttaccacta

SEQ ID NO: 42679 - DNA, 25 bp, SARS Virus
atacgacgacaacagttaccactat

SEQ ID NO: 42680 - DNA, 25 bp, SARS Virus
tacgacgacaatcgttaccactatc

SEQ ID NO: 42681 - DNA, 25 bp, SARS Virus
acgacgacaatacttaccactatcc

SEQ ID NO: 42682 - DNA, 25 bp, SARS Virus
cgacgacaatagctaccactatcca

SEQ ID NO: 42683 - DNA, 25 bp, SARS Virus
gacgacaatagtcaccactatccac

SEQ ID NO: 42684 - DNA, 25 bp, SARS Virus
acgacaatagttcccactatccacc

SEQ ID NO: 42685 - DNA, 25 bp, SARS Virus
cgacaatagttaccactatccacca

SEQ ID NO: 42686 - DNA, 25 bp, SARS Virus
gacaatagttaccactatccaccaa

SEQ ID NO: 42687 - DNA, 25 bp, SARS Virus
acaatagttacccctatccaccaaa

SEQ ID NO: 42688 - DNA, 25 bp, SARS Virus
caatagttaccactatccaccaaag

SEQ ID NO: 42689 - DNA, 25 bp, SARS Virus
aatagttaccaccatccaccaaaga

SEQ ID NO: 42690 - DNA, 25 bp, SARS Virus
atagttaccactctccaccaaagaa

SEQ ID NO: 42691 - DNA, 25 bp, SARS Virus
tagttaccactacccaccaaagaat

SEQ ID NO: 42692 - DNA, 25 bp, SARS Virus
agttaccactatccaccaaagaatt

SEQ ID NO: 42693 - DNA, 25 bp, SARS Virus
gttaccactatccaccaaagaatta

SEQ ID NO: 42694 - DNA, 25 bp, SARS Virus
ttaccactatcccccaaagaattat

SEQ ID NO: 42695 - DNA, 25 bp, SARS Virus
taccactatccaccaaagaattatc

SEQ ID NO: 42696 - DNA, 25 bp, SARS Virus
accactatccaccaaagaattatct

SEQ ID NO: 42697 - DNA, 25 bp, SARS Virus
ccactatccacccaagaattatcta

SEQ ID NO: 42698 - DNA, 25 bp, SARS Virus
cactatccaccacagaattatctaa

SEQ ID NO: 42699 - DNA, 25 bp, SARS Virus
actatccaccaacgaattatctaag

SEQ ID NO: 42700 - DNA, 25 bp, SARS Virus
ctatccaccaaacaattatctaagt

SEQ ID NO: 42701 - DNA, 25 bp, SARS Virus
tatccaccaaagcattatctaagtg

SEQ ID NO: 42702 - DNA, 25 bp, SARS Virus
atccaccaaagacttatctaagtgg

SEQ ID NO: 42703 - DNA, 25 bp, SARS Virus
tccaccaaagaactatctaagtggt

SEQ ID NO: 42704 - DNA, 25 bp, SARS Virus
ccaccaaagaatcatctaagtggtg

SEQ ID NO: 42705 - DNA, 25 bp, SARS Virus
caccaaagaattctctaagtggtga

SEQ ID NO: 42706 - DNA, 25 bp, SARS Virus
accaaagaattacctaagtggtgat

SEQ ID NO: 42707 - DNA, 25 bp, SARS Virus
ccaaagaattatctaagtggtgatg

SEQ ID NO: 42708 - DNA, 25 bp, SARS Virus
caaagaattatccaagtggtgatga

SEQ ID NO: 42709 - DNA, 25 bp, SARS Virus
aaagaattatctcagtggtgatgaa

SEQ ID NO: 42710 - DNA, 25 bp, SARS Virus
aagaattatctacgtggtgatgaaa

SEQ ID NO: 42711 - DNA, 25 bp, SARS Virus
agaattatctaactggtgatgaaac

SEQ ID NO: 42712 - DNA, 25 bp, SARS Virus
gaattatctaagcggtgatgaaact

SEQ ID NO: 42713 - DNA, 25 bp, SARS Virus
aattatctaagtcgtgatgaaactt

SEQ ID NO: 42714 - DNA, 25 bp, SARS Virus
attatctaagtgctgatgaaactta

SEQ ID NO: 42715 - DNA, 25 bp, SARS Virus
ttatctaagtggcgatgaaacttac

SEQ ID NO: 42716 - DNA, 25 bp, SARS Virus
tatctaagtggtcatgaaacttact

SEQ ID NO: 42717 - DNA, 25 bp, SARS Virus
atctaagtggtgctgaaacttactg

SEQ ID NO: 42718 - DNA, 25 bp, SARS Virus
tctaagtggtgacgaaacttactga

SEQ ID NO: 42719 - DNA, 25 bp, SARS Virus
ctaagtggtgatcaaacttactgaa

SEQ ID NO: 42720 - DNA, 25 bp, SARS Virus
taagtggtgatgcaacttactgaaa

SEQ ID NO: 42721 - DNA, 25 bp, SARS Virus
aagtggtgatgacacttactgaaat

SEQ ID NO: 42722 - DNA, 25 bp, SARS Virus
agtggtgatgaaccttactgaaatt

SEQ ID NO: 42723 - DNA, 25 bp, SARS Virus
gtggtgatgaaacttactgaaattg

SEQ ID NO: 42724 - DNA, 25 bp, SARS Virus
tggtgatgaaacctactgaaattgg

SEQ ID NO: 42725 - DNA, 25 bp, SARS Virus
ggtgatgaaactcactgaaattgga

SEQ ID NO: 42726 - DNA, 25 bp, SARS Virus
gtgatgaaacttcctgaaattggaa

SEQ ID NO: 42727 - DNA, 25 bp, SARS Virus
tgatgaaacttactgaaattggaac

SEQ ID NO: 42728 - DNA, 25 bp, SARS Virus
gatgaaacttaccgaaattggaaca

SEQ ID NO: 42729 - DNA, 25 bp, SARS Virus
atgaaacttactcaaattggaacac

SEQ ID NO: 42730 - DNA, 25 bp, SARS Virus
tgaaacttactgcaattggaacacc

SEQ ID NO: 42731 - DNA, 25 bp, SARS Virus
gaaacttactgacattggaacaccg

SEQ ID NO: 42732 - DNA, 25 bp, SARS Virus
aaacttactgaacttggaacaccgt

SEQ ID NO: 42733 - DNA, 25 bp, SARS Virus
aacttactgaaactggaacaccgtt

SEQ ID NO: 42734 - DNA, 25 bp, SARS Virus
acttactgaaatcggaacaccgtta

SEQ ID NO: 42735 - DNA, 25 bp, SARS Virus
cttactgaaattcgaacaccgttac

SEQ ID NO: 42736 - DNA, 25 bp, SARS Virus
ttactgaaattgcaacaccgttact

SEQ ID NO: 42737 - DNA, 25 bp, SARS Virus
tactgaaattggcacaccgttactt

SEQ ID NO: 42738 - DNA, 25 bp, SARS Virus
actgaaattggaccaccgttacttc

SEQ ID NO: 42739 - DNA, 25 bp, SARS Virus
ctgaaattggaacaccgttacttca

SEQ ID NO: 42740 - DNA, 25 bp, SARS Virus
tgaaattggaaccccgttacttcat

SEQ ID NO: 42741 - DNA, 25 bp, SARS Virus
gaaattggaacaccgttacttcatg

SEQ ID NO: 42742 - DNA, 25 bp, SARS Virus
aaattggaacaccgttacttcatgt

SEQ ID NO: 42743 - DNA, 25 bp, SARS Virus
aattggaacacccttacttcatgtt

SEQ ID NO: 42744 - DNA, 25 bp, SARS Virus
attggaacaccgctacttcatgttg

SEQ ID NO: 42745 - DNA, 25 bp, SARS Virus
ttggaacaccgtcacttcatgttga

SEQ ID NO: 42746 - DNA, 25 bp, SARS Virus
tggaacaccgttccttcatgttgat

SEQ ID NO: 42747 - DNA, 25 bp, SARS Virus
ggaacaccgttacttcatgttgata

SEQ ID NO: 42748 - DNA, 25 bp, SARS Virus
gaacaccgttacctcatgttgatac

SEQ ID NO: 42749 - DNA, 25 bp, SARS Virus
aacaccgttactccatgttgatact

SEQ ID NO: 42750 - DNA, 25 bp, SARS Virus
acaccgttacttcatgttgatactt

SEQ ID NO: 42751 - DNA, 25 bp, SARS Virus
caccgttacttcctgttgatacttg

SEQ ID NO: 42752 - DNA, 25 bp, SARS Virus
accgttacttcacgttgatacttgg

SEQ ID NO: 42753 - DNA, 25 bp, SARS Virus
ccgttacttcatcttgatacttgga

SEQ ID NO: 42754 - DNA, 25 bp, SARS Virus
cgttacttcatgctgatacttggaa

SEQ ID NO: 42755 - DNA, 25 bp, SARS Virus
gttacttcatgtcgatacttggaaa

SEQ ID NO: 42756 - DNA, 25 bp, SARS Virus
ttacttcatgttcatacttggaaac

SEQ ID NO: 42757 - DNA, 25 bp, SARS Virus
tacttcatgttgctacttggaaact

SEQ ID NO: 42758 - DNA, 25 bp, SARS Virus
acttcatgttgacacttggaaactg

SEQ ID NO: 42759 - DNA, 25 bp, SARS Virus
cttcatgttgatccttggaaactgt

SEQ ID NO: 42760 - DNA, 25 bp, SARS Virus
ttcatgttgatacttggaaactgtg

SEQ ID NO: 42761 - DNA, 25 bp, SARS Virus
tcatgttgatacctggaaactgtgt

SEQ ID NO: 42762 - DNA, 25 bp, SARS Virus
catgttgatactcggaaactgtgtt

SEQ ID NO: 42763 - DNA, 25 bp, SARS Virus
atgttgatacttcgaaactgtgttc

SEQ ID NO: 42764 - DNA, 25 bp, SARS Virus
tgttgatacttgcaaactgtgttct

SEQ ID NO: 42765 - DNA, 25 bp, SARS Virus
gttgatacttggcaactgtgttcta

SEQ ID NO: 42766 - DNA, 25 bp, SARS Virus
ttgatacttggacactgtgttctag

SEQ ID NO: 42767 - DNA, 25 bp, SARS Virus
tgatacttggaacctgtgttctagt

SEQ ID NO: 42768 - DNA, 25 bp, SARS Virus
gatacttggaaactgtgttctagta

SEQ ID NO: 42769 - DNA, 25 bp, SARS Virus
atacttggaaaccgtgttctagtac

SEQ ID NO: 42770 - DNA, 25 bp, SARS Virus
tacttggaaactctgttctagtaca

SEQ ID NO: 42771 - DNA, 25 bp, SARS Virus
acttggaaactgcgttctagtacaa

SEQ ID NO: 42772 - DNA, 25 bp, SARS Virus
cttggaaactgtcttctagtacaac

SEQ ID NO: 42773 - DNA, 25 bp, SARS Virus
ttggaaactgtgctctagtacaact

SEQ ID NO: 42774 - DNA, 25 bp, SARS Virus
tggaaactgtgtcctagtacaactg

SEQ ID NO: 42775 - DNA, 25 bp, SARS Virus
ggaaactgtgttctagtacaactgt

SEQ ID NO: 42776 - DNA, 25 bp, SARS Virus
gaaactgtgttccagtacaactgta

SEQ ID NO: 42777 - DNA, 25 bp, SARS Virus
aaactgtgttctcgtacaactgtat

SEQ ID NO: 42778 - DNA, 25 bp, SARS Virus
aactgtgttctactacaactgtata

SEQ ID NO: 42779 - DNA, 25 bp, SARS Virus
actgtgttctagcacaactgtataa

SEQ ID NO: 42780 - DNA, 25 bp, SARS Virus
ctgtgttctagtccaactgtataac

SEQ ID NO: 42781 - DNA, 25 bp, SARS Virus
tgtgttctagtacaactgtataacc

SEQ ID NO: 42782 - DNA, 25 bp, SARS Virus
gtgttctagtaccactgtataaccc

SEQ ID NO: 42783 - DNA, 25 bp, SARS Virus
tgttctagtacacctgtataaccct

SEQ ID NO: 42784 - DNA, 25 bp, SARS Virus
gttctagtacaactgtataaccctg

SEQ ID NO: 42785 - DNA, 25 bp, SARS Virus
ttctagtacaaccgtataaccctgg

SEQ ID NO: 42786 - DNA, 25 bp, SARS Virus
tctagtacaactctataaccctgga

SEQ ID NO: 42787 - DNA, 25 bp, SARS Virus
ctagtacaactgcataaccctggag

SEQ ID NO: 42788 - DNA, 25 bp, SARS Virus
tagtacaactgtctaaccctggaga

SEQ ID NO: 42789 - DNA, 25 bp, SARS Virus
agtacaactgtacaaccctggagaa

SEQ ID NO: 42790 - DNA, 25 bp, SARS Virus
gtacaactgtatcaccctggagaaa

SEQ ID NO: 42791 - DNA, 25 bp, SARS Virus
tacaactgtatacccctggagaaag

SEQ ID NO: 42792 - DNA, 25 bp, SARS Virus
acaactgtataaccctggagaaaga

SEQ ID NO: 42793 - DNA, 25 bp, SARS Virus
caactgtataaccctggagaaagac

SEQ ID NO: 42794 - DNA, 25 bp, SARS Virus
aactgtataaccctggagaaagacg

SEQ ID NO: 42795 - DNA, 25 bp, SARS Virus
actgtataaccccggagaaagacga

SEQ ID NO: 42796 - DNA, 25 bp, SARS Virus
ctgtataaccctcgagaaagacgag

SEQ ID NO: 42797 - DNA, 25 bp, SARS Virus
tgtataaccctgcagaaagacgagt

SEQ ID NO: 42798 - DNA, 25 bp, SARS Virus
gtataaccctggcgaaagacgagtt

SEQ ID NO: 42799 - DNA, 25 bp, SARS Virus
tataaccctggacaaagacgagttt

SEQ ID NO: 42800 - DNA, 25 bp, SARS Virus
ataaccctggagcaagacgagtttg

SEQ ID NO: 42801 - DNA, 25 bp, SARS Virus
taaccctggagacagacgagtttgt

SEQ ID NO: 42802 - DNA, 25 bp, SARS Virus
aaccctggagaacgacgagtttgtc

SEQ ID NO: 42803 - DNA, 25 bp, SARS Virus
accctggagaaacacgagtttgtcc

SEQ ID NO: 42804 - DNA, 25 bp, SARS Virus
ccctggagaaagccgagtttgtcct

SEQ ID NO: 42805 - DNA, 25 bp, SARS Virus
cctggagaaagacgagtttgtcctt

SEQ ID NO: 42806 - DNA, 25 bp, SARS Virus
ctggagaaagaccagtttgtcctta

SEQ ID NO: 42807 - DNA, 25 bp, SARS Virus
tggagaaagacgcgtttgtccttaa

SEQ ID NO: 42808 - DNA, 25 bp, SARS Virus
ggagaaagacgactttgtccttaac

SEQ ID NO: 42809 - DNA, 25 bp, SARS Virus
gagaaagacgagcttgtccttaacg

SEQ ID NO: 42810 - DNA, 25 bp, SARS Virus
agaaagacgagtctgtccttaacgg

SEQ ID NO: 42811 - DNA, 25 bp, SARS Virus
gaaagacgagttcgtccttaacggc

SEQ ID NO: 42812 - DNA, 25 bp, SARS Virus
aaagacgagtttctccttaacggca

SEQ ID NO: 42813 - DNA, 25 bp, SARS Virus
aagacgagtttgcccttaacggcag

SEQ ID NO: 42814 - DNA, 25 bp, SARS Virus
agacgagtttgtccttaacggcaga

SEQ ID NO: 42815 - DNA, 25 bp, SARS Virus
gacgagtttgtccttaacggcagaa

SEQ ID NO: 42816 - DNA, 25 bp, SARS Virus
acgagtttgtccctaacggcagaat

SEQ ID NO: 42817 - DNA, 25 bp, SARS Virus
cgagtttgtcctcaacggcagaatc

SEQ ID NO: 42818 - DNA, 25 bp, SARS Virus
gagtttgtccttcacggcagaatct

SEQ ID NO: 42819 - DNA, 25 bp, SARS Virus
agtttgtccttaccggcagaatcta

SEQ ID NO: 42820 - DNA, 25 bp, SARS Virus
gtttgtccttaacggcagaatctat

SEQ ID NO: 42821 - DNA, 25 bp, SARS Virus
tttgtccttaaccgcagaatctata

SEQ ID NO: 42822 - DNA, 25 bp, SARS Virus
ttgtccttaacgccagaatctatac

SEQ ID NO: 42823 - DNA, 25 bp, SARS Virus
tgtccttaacggcagaatctataca

SEQ ID NO: 42824 - DNA, 25 bp, SARS Virus
gtccttaacggccgaatctatacac

SEQ ID NO: 42825 - DNA, 25 bp, SARS Virus
tccttaacggcacaatctatacaca

SEQ ID NO: 42826 - DNA, 25 bp, SARS Virus
ccttaacggcagcatctatacacac

SEQ ID NO: 42827 - DNA, 25 bp, SARS Virus
cttaacggcagactctatacacacg

SEQ ID NO: 42828 - DNA, 25 bp, SARS Virus
ttaacggcagaacctatacacacga

SEQ ID NO: 42829 - DNA, 25 bp, SARS Virus
taacggcagaatctatacacacgac

SEQ ID NO: 42830 - DNA, 25 bp, SARS Virus
aacggcagaatccatacacacgacg

SEQ ID NO: 42831 - DNA, 25 bp, SARS Virus
acggcagaatctctacacacgacga

SEQ ID NO: 42832 - DNA, 25 bp, SARS Virus
cggcagaatctacacacacgacgaa

SEQ ID NO: 42833 - DNA, 25 bp, SARS Virus
ggcagaatctatccacacgacgaaa

SEQ ID NO: 42834 - DNA, 25 bp, SARS Virus
gcagaatctatacacacgacgaaac

SEQ ID NO: 42835 - DNA, 25 bp, SARS Virus
cagaatctatacccacgacgaaact

SEQ ID NO: 42836 - DNA, 25 bp, SARS Virus
agaatctatacacacgacgaaactt

SEQ ID NO: 42837 - DNA, 25 bp, SARS Virus
gaatctatacacccgacgaaacttt

SEQ ID NO: 42838 - DNA, 25 bp, SARS Virus
aatctatacacacgacgaaactttc

SEQ ID NO: 42839 - DNA, 25 bp, SARS Virus
atctatacacaccacgaaactttct

SEQ ID NO: 42840 - DNA, 25 bp, SARS Virus
tctatacacacgccgaaactttctc

SEQ ID NO: 42841 - DNA, 25 bp, SARS Virus
ctatacacacgacgaaactttctcg

SEQ ID NO: 42842 - DNA, 25 bp, SARS Virus
tatacacacgaccaaactttctcga

SEQ ID NO: 42843 - DNA, 25 bp, SARS Virus
atacacacgacgcaactttctcgac

SEQ ID NO: 42844 - DNA, 25 bp, SARS Virus
tacacacgacgacactttctcgacg

SEQ ID NO: 42845 - DNA, 25 bp, SARS Virus
acacacgacgaacctttctcgacga

SEQ ID NO: 42846 - DNA, 25 bp, SARS Virus
cacacgacgaaactttctcgacgac

SEQ ID NO: 42847 - DNA, 25 bp, SARS Virus
acacgacgaaaccttctcgacgacg

SEQ ID NO: 42848 - DNA, 25 bp, SARS Virus
cacgacgaaactctctcgacgacgt

SEQ ID NO: 42849 - DNA, 25 bp, SARS Virus
acgacgaaacttcctcgacgacgtc

SEQ ID NO: 42850 - DNA, 25 bp, SARS Virus
cgacgaaactttctcgacgacgtct

SEQ ID NO: 42851 - DNA, 25 bp, SARS Virus
gacgaaactttcccgacgacgtctt

SEQ ID NO: 42852 - DNA, 25 bp, SARS Virus
acgaaactttctcgacgacgtctta

SEQ ID NO: 42853 - DNA, 25 bp, SARS Virus
cgaaactttctccacgacgtcttac

SEQ ID NO: 42854 - DNA, 25 bp, SARS Virus
gaaactttctcgccgacgtcttacc

SEQ ID NO: 42855 - DNA, 25 bp, SARS Virus
aaactttctcgacgacgtcttacca

SEQ ID NO: 42856 - DNA, 25 bp, SARS Virus
aactttctcgaccacgtcttaccat

SEQ ID NO: 42857 - DNA, 25 bp, SARS Virus
actttctcgacgccgtcttaccata

SEQ ID NO: 42858 - DNA, 25 bp, SARS Virus
ctttctcgacgacgtcttaccatac

SEQ ID NO: 42859 - DNA, 25 bp, SARS Virus
tttctcgacgacctcttaccatact

SEQ ID NO: 42860 - DNA, 25 bp, SARS Virus
ttctcgacgacgccttaccatactt

SEQ ID NO: 42861 - DNA, 25 bp, SARS Virus
tctcgacgacgtcttaccatactta

SEQ ID NO: 42862 - DNA, 25 bp, SARS Virus
ctcgacgacgtcctaccatacttac

SEQ ID NO: 42863 - DNA, 25 bp, SARS Virus
tcgacgacgtctcaccatacttacc

SEQ ID NO: 42864 - DNA, 25 bp, SARS Virus
cgacgacgtcttcccatacttacca

SEQ ID NO: 42865 - DNA, 25 bp, SARS Virus
gacgacgtcttaccatacttaccag

SEQ ID NO: 42866 - DNA, 25 bp, SARS Virus
acgacgtcttaccatacttaccagc

SEQ ID NO: 42867 - DNA, 25 bp, SARS Virus
cgacgtcttaccctacttaccagca

SEQ ID NO: 42868 - DNA, 25 bp, SARS Virus
gacgtcttaccacacttaccagcat

SEQ ID NO: 42869 - DNA, 25 bp, SARS Virus
acgtcttaccatccttaccagcatg

SEQ ID NO: 42870 - DNA, 25 bp, SARS Virus
cgtcttaccatacttaccagcatga

SEQ ID NO: 42871 - DNA, 25 bp, SARS Virus
gtcttaccatacctaccagcatgat

SEQ ID NO: 42872 - DNA, 25 bp, SARS Virus
tcttaccatactcaccagcatgata

SEQ ID NO: 42873 - DNA, 25 bp, SARS Virus
cttaccatacttcccagcatgatag

SEQ ID NO: 42874 - DNA, 25 bp, SARS Virus
ttaccatacttaccagcatgatagg

SEQ ID NO: 42875 - DNA, 25 bp, SARS Virus
taccatacttaccagcatgatagga

SEQ ID NO: 42876 - DNA, 25 bp, SARS Virus
accatacttacccgcatgataggaa

SEQ ID NO: 42877 - DNA, 25 bp, SARS Virus
ccatacttaccaccatgataggaac

SEQ ID NO: 42878 - DNA, 25 bp, SARS Virus
catacttaccagcatgataggaacc

SEQ ID NO: 42879 - DNA, 25 bp, SARS Virus
atacttaccagcctgataggaacca

SEQ ID NO: 42880 - DNA, 25 bp, SARS Virus
tacttaccagcacgataggaaccat

SEQ ID NO: 42881 - DNA, 25 bp, SARS Virus
acttaccagcatcataggaaccatc

SEQ ID NO: 42882 - DNA, 25 bp, SARS Virus
cttaccagcatgctaggaaccatcg

SEQ ID NO: 42883 - DNA, 25 bp, SARS Virus
ttaccagcatgacaggaaccatcgt

SEQ ID NO: 42884 - DNA, 25 bp, SARS Virus
taccagcatgatcggaaccatcgtg

SEQ ID NO: 42885 - DNA, 25 bp, SARS Virus
accagcatgatacgaaccatcgtga

SEQ ID NO: 42886 - DNA, 25 bp, SARS Virus
ccagcatgatagcaaccatcgtgat

SEQ ID NO: 42887 - DNA, 25 bp, SARS Virus
cagcatgataggcaccatcgtgata

SEQ ID NO: 42888 - DNA, 25 bp, SARS Virus
agcatgataggacccatcgtgataa

SEQ ID NO: 42889 - DNA, 25 bp, SARS Virus
gcatgataggaaccatcgtgataaa

SEQ ID NO: 42890 - DNA, 25 bp, SARS Virus
catgataggaaccatcgtgataaaa

SEQ ID NO: 42891 - DNA, 25 bp, SARS Virus
atgataggaaccctcgtgataaaat

SEQ ID NO: 42892 - DNA, 25 bp, SARS Virus
tgataggaaccaccgtgataaaatc

SEQ ID NO: 42893 - DNA, 25 bp, SARS Virus
gataggaaccatcgtgataaaatct

SEQ ID NO: 42894 - DNA, 25 bp, SARS Virus
ataggaaccatcctgataaaatctt

SEQ ID NO: 42895 - DNA, 25 bp, SARS Virus
taggaaccatcgcgataaaatcttc

SEQ ID NO: 42896 - DNA, 25 bp, SARS Virus
aggaaccatcgtcataaaatcttct

SEQ ID NO: 42897 - DNA, 25 bp, SARS Virus
ggaaccatcgtgctaaaatcttcta

SEQ ID NO: 42898 - DNA, 25 bp, SARS Virus
gaaccatcgtgacaaaatcttctac

SEQ ID NO: 42899 - DNA, 25 bp, SARS Virus
aaccatcgtgatcaaatcttctact

SEQ ID NO: 42900 - DNA, 25 bp, SARS Virus
accatcgtgatacaatcttctactc

SEQ ID NO: 42901 - DNA, 25 bp, SARS Virus
ccatcgtgataacatcttctactca

SEQ ID NO: 42902 - DNA, 25 bp, SARS Virus
catcgtgataaactcttctactcaa

SEQ ID NO: 42903 - DNA, 25 bp, SARS Virus
atcgtgataaaaccttctactcaaa

SEQ ID NO: 42904 - DNA, 25 bp, SARS Virus
tcgtgataaaatcttctactcaaat

SEQ ID NO: 42905 - DNA, 25 bp, SARS Virus
cgtgataaaatcctctactcaaatg

SEQ ID NO: 42906 - DNA, 25 bp, SARS Virus
gtgataaaatctcctactcaaatgt

SEQ ID NO: 42907 - DNA, 25 bp, SARS Virus
tgataaaatcttctactcaaatgtg

SEQ ID NO: 42908 - DNA, 25 bp, SARS Virus
gataaaatcttccactcaaatgtgg

SEQ ID NO: 42909 - DNA, 25 bp, SARS Virus
ataaaatcttctcctcaaatgtggt

SEQ ID NO: 42910 - DNA, 25 bp, SARS Virus
taaaatcttctactcaaatgtggta

SEQ ID NO: 42911 - DNA, 25 bp, SARS Virus
aaaatcttctacccaaatgtggtaa

SEQ ID NO: 42912 - DNA, 25 bp, SARS Virus
aaatcttctactcaaatgtggtaaa

SEQ ID NO: 42913 - DNA, 25 bp, SARS Virus
aatcttctactccaatgtggtaaac

SEQ ID NO: 42914 - DNA, 25 bp, SARS Virus
atcttctactcacatgtggtaaact

SEQ ID NO: 42915 - DNA, 25 bp, SARS Virus
tcttctactcaactgtggtaaacta

SEQ ID NO: 42916 - DNA, 25 bp, SARS Virus
cttctactcaaacgtggtaaactac

SEQ ID NO: 42917 - DNA, 25 bp, SARS Virus
ttctactcaaatctggtaaactaca

SEQ ID NO: 42918 - DNA, 25 bp, SARS Virus
tctactcaaatgcggtaaactacaa

SEQ ID NO: 42919 - DNA, 25 bp, SARS Virus
ctactcaaatgtcgtaaactacaac

SEQ ID NO: 42920 - DNA, 25 bp, SARS Virus
tactcaaatgtgctaaactacaaca

SEQ ID NO: 42921 - DNA, 25 bp, SARS Virus
actcaaatgtggcaaactacaacaa

SEQ ID NO: 42922 - DNA, 25 bp, SARS Virus
ctcaaatgtggtcaactacaacaat

SEQ ID NO: 42923 - DNA, 25 bp, SARS Virus
tcaaatgtggtacactacaacaatc

SEQ ID NO: 42924 - DNA, 25 bp, SARS Virus
caaatgtggtaacctacaacaatct

SEQ ID NO: 42925 - DNA, 25 bp, SARS Virus
aaatgtggtaaactacaacaatctg

SEQ ID NO: 42926 - DNA, 25 bp, SARS Virus
aatgtggtaaaccacaacaatctgt

SEQ ID NO: 42927 - DNA, 25 bp, SARS Virus
atgtggtaaactccaacaatctgtt

SEQ ID NO: 42928 - DNA, 25 bp, SARS Virus
tgtggtaaactacaacaatctgtta

SEQ ID NO: 42929 - DNA, 25 bp, SARS Virus
gtggtaaactaccacaatctgttac

SEQ ID NO: 42930 - DNA, 25 bp, SARS Virus
tggtaaactacaccaatctgttacg

SEQ ID NO: 42931 - DNA, 25 bp, SARS Virus
ggtaaactacaacaatctgttacga

SEQ ID NO: 42932 - DNA, 25 bp, SARS Virus
gtaaactacaaccatctgttacgag

SEQ ID NO: 42933 - DNA, 25 bp, SARS Virus
taaactacaacactctgttacgaga

SEQ ID NO: 42934 - DNA, 25 bp, SARS Virus
aaactacaacaacctgttacgagac

SEQ ID NO: 42935 - DNA, 25 bp, SARS Virus
aactacaacaatctgttacgagacc

SEQ ID NO: 42936 - DNA, 25 bp, SARS Virus
actacaacaatccgttacgagacca

SEQ ID NO: 42937 - DNA, 25 bp, SARS Virus
ctacaacaatctcttacgagaccac

SEQ ID NO: 42938 - DNA, 25 bp, SARS Virus
tacaacaatctgctacgagaccaca

SEQ ID NO: 42939 - DNA, 25 bp, SARS Virus
acaacaatctgtcacgagaccacaa

SEQ ID NO: 42940 - DNA, 25 bp, SARS Virus
caacaatctgttccgagaccacaat

SEQ ID NO: 42941 - DNA, 25 bp, SARS Virus
aacaatctgttacgagaccacaatg

SEQ ID NO: 42942 - DNA, 25 bp, SARS Virus
acaatctgttaccagaccacaatgg

SEQ ID NO: 42943 - DNA, 25 bp, SARS Virus
caatctgttacgcgaccacaatgga

SEQ ID NO: 42944 - DNA, 25 bp, SARS Virus
aatctgttacgacaccacaatggaa

SEQ ID NO: 42945 - DNA, 25 bp, SARS Virus
atctgttacgagcccacaatggaag

SEQ ID NO: 42946 - DNA, 25 bp, SARS Virus
tctgttacgagaccacaatggaagg

SEQ ID NO: 42947 - DNA, 25 bp, SARS Virus
ctgttacgagaccacaatggaaggt

SEQ ID NO: 42948 - DNA, 25 bp, SARS Virus
tgttacgagaccccaatggaaggtt

SEQ ID NO: 42949 - DNA, 25 bp, SARS Virus
gttacgagaccacaatggaaggttc

SEQ ID NO: 42950 - DNA, 25 bp, SARS Virus
ttacgagaccaccatggaaggttcc

SEQ ID NO: 42951 - DNA, 25 bp, SARS Virus
tacgagaccacactggaaggttcca

SEQ ID NO: 42952 - DNA, 25 bp, SARS Virus
acgagaccacaacggaaggttccat

SEQ ID NO: 42953 - DNA, 25 bp, SARS Virus
cgagaccacaatcgaaggttccatt

SEQ ID NO: 42954 - DNA, 25 bp, SARS Virus
gagaccacaatgcaaggttccattc

SEQ ID NO: 42955 - DNA, 25 bp, SARS Virus
agaccacaatggcaggttccattca

SEQ ID NO: 42956 - DNA, 25 bp, SARS Virus
gaccacaatggacggttccattcaa

SEQ ID NO: 42957 - DNA, 25 bp, SARS Virus
accacaatggaacgttccattcaag

SEQ ID NO: 42958 - DNA, 25 bp, SARS Virus
ccacaatggaagcttccattcaagt

SEQ ID NO: 42959 - DNA, 25 bp, SARS Virus
cacaatggaaggctccattcaagtt

SEQ ID NO: 42960 - DNA, 25 bp, SARS Virus
acaatggaaggtcccattcaagttc

SEQ ID NO: 42961 - DNA, 25 bp, SARS Virus
caatggaaggttccattcaagttct

SEQ ID NO: 42962 - DNA, 25 bp, SARS Virus
aatggaaggttccattcaagttctt

SEQ ID NO: 42963 - DNA, 25 bp, SARS Virus
atggaaggttcccttcaagttcttt

SEQ ID NO: 42964 - DNA, 25 bp, SARS Virus
tggaaggttccactcaagttctttt

SEQ ID NO: 42965 - DNA, 25 bp, SARS Virus
ggaaggttccatccaagttctttta

SEQ ID NO: 42966 - DNA, 25 bp, SARS Virus
gaaggttccattcaagttcttttaa

SEQ ID NO: 42967 - DNA, 25 bp, SARS Virus
aaggttccattccagttcttttaac

SEQ ID NO: 42968 - DNA, 25 bp, SARS Virus
aggttccattcacgttcttttaaca

SEQ ID NO: 42969 - DNA, 25 bp, SARS Virus
ggttccattcaacttcttttaacaa

SEQ ID NO: 42970 - DNA, 25 bp, SARS Virus
gttccattcaagctcttttaacaat

SEQ ID NO: 42971 - DNA, 25 bp, SARS Virus
ttccattcaagtccttttaacaatt

SEQ ID NO: 42972 - DNA, 25 bp, SARS Virus
tccattcaagttcttttaacaattc

SEQ ID NO: 42973 - DNA, 25 bp, SARS Virus
ccattcaagttcctttaacaattcc

SEQ ID NO: 42974 - DNA, 25 bp, SARS Virus
cattcaagttctcttaacaattccc

SEQ ID NO: 42975 - DNA, 25 bp, SARS Virus
attcaagttcttctaacaattcccg

SEQ ID NO: 42976 - DNA, 25 bp, SARS Virus
ttcaagttctttcaacaattcccgt

SEQ ID NO: 42977 - DNA, 25 bp, SARS Virus
tcaagttcttttcacaattcccgtg

SEQ ID NO: 42978 - DNA, 25 bp, SARS Virus
caagttcttttaccaattcccgtga

SEQ ID NO: 42979 - DNA, 25 bp, SARS Virus
aagttcttttaacaattcccgtgag

SEQ ID NO: 42980 - DNA, 25 bp, SARS Virus
agttcttttaaccattcccgtgagt

SEQ ID NO: 42981 - DNA, 25 bp, SARS Virus
gttcttttaacacttcccgtgagta

SEQ ID NO: 42982 - DNA, 25 bp, SARS Virus
ttcttttaacaactcccgtgagtag

SEQ ID NO: 42983 - DNA, 25 bp, SARS Virus
tcttttaacaatccccgtgagtagt

SEQ ID NO: 42984 - DNA, 25 bp, SARS Virus
cttttaacaattcccgtgagtagta

SEQ ID NO: 42985 - DNA, 25 bp, SARS Virus
ttttaacaattcccgtgagtagtaa

SEQ ID NO: 42986 - DNA, 25 bp, SARS Virus
tttaacaattcccgtgagtagtaac

SEQ ID NO: 42987 - DNA, 25 bp, SARS Virus
ttaacaattcccctgagtagtaacc

SEQ ID NO: 42988 - DNA, 25 bp, SARS Virus
taacaattcccgcgagtagtaacct

SEQ ID NO: 42989 - DNA, 25 bp, SARS Virus
aacaattcccgtcagtagtaaccta

SEQ ID NO: 42990 - DNA, 25 bp, SARS Virus
acaattcccgtgcgtagtaacctac

SEQ ID NO: 42991 - DNA, 25 bp, SARS Virus
caattcccgtgactagtaacctacg

SEQ ID NO: 42992 - DNA, 25 bp, SARS Virus
aattcccgtgagcagtaacctacga

SEQ ID NO: 42993 - DNA, 25 bp, SARS Virus
attcccgtgagtcgtaacctacgaa

SEQ ID NO: 42994 - DNA, 25 bp, SARS Virus
ttcccgtgagtactaacctacgaaa

SEQ ID NO: 42995 - DNA, 25 bp, SARS Virus
tcccgtgagtagcaacctacgaaaa

SEQ ID NO: 42996 - DNA, 25 bp, SARS Virus
cccgtgagtagtcacctacgaaaat

SEQ ID NO: 42997 - DNA, 25 bp, SARS Virus
ccgtgagtagtaccctacgaaaatt

SEQ ID NO: 42998 - DNA, 25 bp, SARS Virus
cgtgagtagtaacctacgaaaattg

SEQ ID NO: 42999 - DNA, 25 bp, SARS Virus
gtgagtagtaacctacgaaaattga

SEQ ID NO: 43000 - DNA, 25 bp, SARS Virus
tgagtagtaacccacgaaaattgaa

SEQ ID NO: 43001 - DNA, 25 bp, SARS Virus
gagtagtaacctccgaaaattgaaa

SEQ ID NO: 43002 - DNA, 25 bp, SARS Virus
agtagtaacctacgaaaattgaaag

SEQ ID NO: 43003 - DNA, 25 bp, SARS Virus
gtagtaacctaccaaaattgaaaga

SEQ ID NO: 43004 - DNA, 25 bp, SARS Virus
tagtaacctacgcaaattgaaagaa

SEQ ID NO: 43005 - DNA, 25 bp, SARS Virus
agtaacctacgacaattgaaagaac

SEQ ID NO: 43006 - DNA, 25 bp, SARS Virus
gtaacctacgaacattgaaagaact

SEQ ID NO: 43007 - DNA, 25 bp, SARS Virus
taacctacgaaacttgaaagaactg

SEQ ID NO: 43008 - DNA, 25 bp, SARS Virus
aacctacgaaaactgaaagaactgt

SEQ ID NO: 43009 - DNA, 25 bp, SARS Virus
acctacgaaaatcgaaagaactgta

SEQ ID NO: 43010 - DNA, 25 bp, SARS Virus
cctacgaaaattcaaagaactgtag

SEQ ID NO: 43011 - DNA, 25 bp, SARS Virus
ctacgaaaattgcaagaactgtagt

SEQ ID NO: 43012 - DNA, 25 bp, SARS Virus
tacgaaaattgacagaactgtagtg

SEQ ID NO: 43013 - DNA, 25 bp, SARS Virus
acgaaaattgaacgaactgtagtga

SEQ ID NO: 43014 - DNA, 25 bp, SARS Virus
cgaaaattgaaacaactgtagtgat

SEQ ID NO: 43015 - DNA, 25 bp, SARS Virus
gaaaattgaaagcactgtagtgata

SEQ ID NO: 43016 - DNA, 25 bp, SARS Virus
aaaattgaaagacctgtagtgataa

SEQ ID NO: 43017 - DNA, 25 bp, SARS Virus
aaattgaaagaactgtagtgataac

SEQ ID NO: 43018 - DNA, 25 bp, SARS Virus
aattgaaagaaccgtagtgataact

SEQ ID NO: 43019 - DNA, 25 bp, SARS Virus
attgaaagaactctagtgataacta

SEQ ID NO: 43020 - DNA, 25 bp, SARS Virus
ttgaaagaactgcagtgataactaa

SEQ ID NO: 43021 - DNA, 25 bp, SARS Virus
tgaaagaactgtcgtgataactaag

SEQ ID NO: 43022 - DNA, 25 bp, SARS Virus
gaaagaactgtactgataactaaga

SEQ ID NO: 43023 - DNA, 25 bp, SARS Virus
aaagaactgtagcgataactaagaa

SEQ ID NO: 43024 - DNA, 25 bp, SARS Virus
aagaactgtagtcataactaagaac

SEQ ID NO: 43025 - DNA, 25 bp, SARS Virus
agaactgtagtgctaactaagaaca

SEQ ID NO: 43026 - DNA, 25 bp, SARS Virus
gaactgtagtgacaactaagaacaa

SEQ ID NO: 43027 - DNA, 25 bp, SARS Virus
aactgtagtgatcactaagaacaag

SEQ ID NO: 43028 - DNA, 25 bp, SARS Virus
actgtagtgatacctaagaacaagt

SEQ ID NO: 43029 - DNA, 25 bp, SARS Virus
ctgtagtgataactaagaacaagtt

SEQ ID NO: 43030 - DNA, 25 bp, SARS Virus
tgtagtgataaccaagaacaagttt

SEQ ID NO: 43031 - DNA, 25 bp, SARS Virus
gtagtgataactcagaacaagtttc

SEQ ID NO: 43032 - DNA, 25 bp, SARS Virus
tagtgataactacgaacaagtttca

SEQ ID NO: 43033 - DNA, 25 bp, SARS Virus
agtgataactaacaacaagtttcat

SEQ ID NO: 43034 - DNA, 25 bp, SARS Virus
gtgataactaagcacaagtttcatg

SEQ ID NO: 43035 - DNA, 25 bp, SARS Virus
tgataactaagaccaagtttcatgt

SEQ ID NO: 43036 - DNA, 25 bp, SARS Virus
gataactaagaacaagtttcatgtg

SEQ ID NO: 43037 - DNA, 25 bp, SARS Virus
ataactaagaaccagtttcatgtgt

SEQ ID NO: 43038 - DNA, 25 bp, SARS Virus
taactaagaacacgtttcatgtgtc

SEQ ID NO: 43039 - DNA, 25 bp, SARS Virus
aactaagaacaactttcatgtgtca

SEQ ID NO: 43040 - DNA, 25 bp, SARS Virus
actaagaacaagcttcatgtgtcac

SEQ ID NO: 43041 - DNA, 25 bp, SARS Virus
ctaagaacaagtctcatgtgtcacc

SEQ ID NO: 43042 - DNA, 25 bp, SARS Virus
taagaacaagttccatgtgtcacca

SEQ ID NO: 43043 - DNA, 25 bp, SARS Virus
aagaacaagtttcatgtgtcaccag

SEQ ID NO: 43044 - DNA, 25 bp, SARS Virus
agaacaagtttcctgtgtcaccagt

SEQ ID NO: 43045 - DNA, 25 bp, SARS Virus
gaacaagtttcacgtgtcaccagtg

SEQ ID NO: 43046 - DNA, 25 bp, SARS Virus
aacaagtttcatctgtcaccagtga

SEQ ID NO: 43047 - DNA, 25 bp, SARS Virus
acaagtttcatgcgtcaccagtgac

SEQ ID NO: 43048 - DNA, 25 bp, SARS Virus
caagtttcatgtctcaccagtgaca

SEQ ID NO: 43049 - DNA, 25 bp, SARS Virus
aagtttcatgtgccaccagtgacaa

SEQ ID NO: 43050 - DNA, 25 bp, SARS Virus
agtttcatgtgtcaccagtgacaaa

SEQ ID NO: 43051 - DNA, 25 bp, SARS Virus
gtttcatgtgtccccagtgacaaaa

SEQ ID NO: 43052 - DNA, 25 bp, SARS Virus
tttcatgtgtcaccagtgacaaaaa

SEQ ID NO: 43053 - DNA, 25 bp, SARS Virus
ttcatgtgtcaccagtgacaaaaag

SEQ ID NO: 43054 - DNA, 25 bp, SARS Virus
tcatgtgtcacccgtgacaaaaaga

SEQ ID NO: 43055 - DNA, 25 bp, SARS Virus
catgtgtcaccactgacaaaaagaa

SEQ ID NO: 43056 - DNA, 25 bp, SARS Virus
atgtgtcaccagcgacaaaaagaaa

SEQ ID NO: 43057 - DNA, 25 bp, SARS Virus
tgtgtcaccagtcacaaaaagaaac

SEQ ID NO: 43058 - DNA, 25 bp, SARS Virus
gtgtcaccagtgccaaaaagaaaca

SEQ ID NO: 43059 - DNA, 25 bp, SARS Virus
tgtcaccagtgacaaaaagaaacaa

SEQ ID NO: 43060 - DNA, 25 bp, SARS Virus
gtcaccagtgaccaaaagaaacaaa

SEQ ID NO: 43061 - DNA, 25 bp, SARS Virus
tcaccagtgacacaaagaaacaaat

SEQ ID NO: 43062 - DNA, 25 bp, SARS Virus
caccagtgacaacaagaaacaaatg

SEQ ID NO: 43063 - DNA, 25 bp, SARS Virus
accagtgacaaacagaaacaaatgc

SEQ ID NO: 43064 - DNA, 25 bp, SARS Virus
ccagtgacaaaacgaaacaaatgct

SEQ ID NO: 43065 - DNA, 25 bp, SARS Virus
cagtgacaaaaacaaacaaatgctc

SEQ ID NO: 43066 - DNA, 25 bp, SARS Virus
agtgacaaaaagcaacaaatgctct

SEQ ID NO: 43067 - DNA, 25 bp, SARS Virus
gtgacaaaaagacacaaatgctctt

SEQ ID NO: 43068 - DNA, 25 bp, SARS Virus
tgacaaaaagaaccaaatgctctta

SEQ ID NO: 43069 - DNA, 25 bp, SARS Virus
gacaaaaagaaacaaatgctcttac

SEQ ID NO: 43070 - DNA, 25 bp, SARS Virus
acaaaaagaaaccaatgctcttacg

SEQ ID NO: 43071 - DNA, 25 bp, SARS Virus
caaaaagaaacacatgctcttacga

SEQ ID NO: 43072 - DNA, 25 bp, SARS Virus
aaaaagaaacaactgctcttacgaa

SEQ ID NO: 43073 - DNA, 25 bp, SARS Virus
tcttccatttaagataccaggtaaa

SEQ ID NO: 43074 - DNA, 25 bp, SARS Virus
cttccatttaaggtaccaggtaaac

SEQ ID NO: 43075 - DNA, 25 bp, SARS Virus
ttccatttaagagaccaggtaaaca

SEQ ID NO: 43076 - DNA, 25 bp, SARS Virus
tccatttaagatgccaggtaaacaa

SEQ ID NO: 43077 - DNA, 25 bp, SARS Virus
ccatttaagatagcaggtaaacaac

SEQ ID NO: 43078 - DNA, 25 bp, SARS Virus
catttaagatacgaggtaaacaact

SEQ ID NO: 43079 - DNA, 25 bp, SARS Virus
atttaagataccgggtaaacaactg

SEQ ID NO: 43080 - DNA, 25 bp, SARS Virus
tttaagataccaggtaaacaactgt

SEQ ID NO: 43081 - DNA, 25 bp, SARS Virus
ttaagataccaggtaaacaactgtc

SEQ ID NO: 43082 - DNA, 25 bp, SARS Virus
taagataccagggaaacaactgtct

SEQ ID NO: 43083 - DNA, 25 bp, SARS Virus
aagataccaggtgaacaactgtctg

SEQ ID NO: 43084 - DNA, 25 bp, SARS Virus
agataccaggtagacaactgtctgt

SEQ ID NO: 43085 - DNA, 25 bp, SARS Virus
gataccaggtaagcaactgtctgtt

SEQ ID NO: 43086 - DNA, 25 bp, SARS Virus
ataccaggtaaagaactgtctgttt

SEQ ID NO: 43087 - DNA, 25 bp, SARS Virus
taccaggtaaacgactgtctgtttg

SEQ ID NO: 43088 - DNA, 25 bp, SARS Virus
accaggtaaacagctgtctgtttga

SEQ ID NO: 43089 - DNA, 25 bp, SARS Virus
ccaggtaaacaagtgtctgtttgac

SEQ ID NO: 43090 - DNA, 25 bp, SARS Virus
caggtaaacaacggtctgtttgacg

SEQ ID NO: 43091 - DNA, 25 bp, SARS Virus
aggtaaacaactgtctgtttgacgt

SEQ ID NO: 43092 - DNA, 25 bp, SARS Virus
ggtaaacaactggctgtttgacgtg

SEQ ID NO: 43093 - DNA, 25 bp, SARS Virus
gtaaacaactgtgtgtttgacgtgt

SEQ ID NO: 43094 - DNA, 25 bp, SARS Virus
taaacaactgtcggtttgacgtgtc

SEQ ID NO: 43095 - DNA, 25 bp, SARS Virus
aaacaactgtctgtttgacgtgtcc

SEQ ID NO: 43096 - DNA, 25 bp, SARS Virus
aacaactgtctggttgacgtgtccg

SEQ ID NO: 43097 - DNA, 25 bp, SARS Virus
acaactgtctgtgtgacgtgtccga

SEQ ID NO: 43098 - DNA, 25 bp, SARS Virus
caactgtctgttggacgtgtccgac

SEQ ID NO: 43099 - DNA, 25 bp, SARS Virus
aactgtctgtttgacgtgtccgacg

SEQ ID NO: 43100 - DNA, 25 bp, SARS Virus
actgtctgtttggcgtgtccgacgt

SEQ ID NO: 43101 - DNA, 25 bp, SARS Virus
ctgtctgtttgaggtgtccgacgtc

SEQ ID NO: 43102 - DNA, 25 bp, SARS Virus
tgtctgtttgacgtgtccgacgtcc

SEQ ID NO: 43103 - DNA, 25 bp, SARS Virus
gtctgtttgacgggtccgacgtcca

SEQ ID NO: 43104 - DNA, 25 bp, SARS Virus
tctgtttgacgtgtccgacgtccat

SEQ ID NO: 43105 - DNA, 25 bp, SARS Virus
ctgtttgacgtggccgacgtccatg

SEQ ID NO: 43106 - DNA, 25 bp, SARS Virus
tgtttgacgtgtgcgacgtccatgt

SEQ ID NO: 43107 - DNA, 25 bp, SARS Virus
gtttgacgtgtcggacgtccatgtc

SEQ ID NO: 43108 - DNA, 25 bp, SARS Virus
tttgacgtgtccgacgtccatgtct

SEQ ID NO: 43109 - DNA, 25 bp, SARS Virus
ttgacgtgtccggcgtccatgtctg

SEQ ID NO: 43110 - DNA, 25 bp, SARS Virus
tgacgtgtccgaggtccatgtctgt

SEQ ID NO: 43111 - DNA, 25 bp, SARS Virus
gacgtgtccgacgtccatgtctgtg

SEQ ID NO: 43112 - DNA, 25 bp, SARS Virus
acgtgtccgacggccatgtctgtgt

SEQ ID NO: 43113 - DNA, 25 bp, SARS Virus
cgtgtccgacgtgcatgtctgtgtt

SEQ ID NO: 43114 - DNA, 25 bp, SARS Virus
gtgtccgacgtcgatgtctgtgttg

SEQ ID NO: 43115 - DNA, 25 bp, SARS Virus
tgtccgacgtccgtgtctgtgttgg

SEQ ID NO: 43116 - DNA, 25 bp, SARS Virus
gtccgacgtccaggtctgtgttggt

SEQ ID NO: 43117 - DNA, 25 bp, SARS Virus
tccgacgtccatgtctgtgttggta

SEQ ID NO: 43118 - DNA, 25 bp, SARS Virus
ccgacgtccatggctgtgttggtat

SEQ ID NO: 43119 - DNA, 25 bp, SARS Virus
cgacgtccatgtgtgtgttggtatt

SEQ ID NO: 43120 - DNA, 25 bp, SARS Virus
gacgtccatgtcggtgttggtattg

SEQ ID NO: 43121 - DNA, 25 bp, SARS Virus
acgtccatgtctgtgttggtattgt

SEQ ID NO: 43122 - DNA, 25 bp, SARS Virus
cgtccatgtctgggttggtattgta

SEQ ID NO: 43123 - DNA, 25 bp, SARS Virus
gtccatgtctgtgttggtattgtaa

SEQ ID NO: 43124 - DNA, 25 bp, SARS Virus
tccatgtctgtggtggtattgtaat

SEQ ID NO: 43125 - DNA, 25 bp, SARS Virus
ccatgtctgtgtgggtattgtaatt

SEQ ID NO: 43126 - DNA, 25 bp, SARS Virus
catgtctgtgttggtattgtaattt

SEQ ID NO: 43127 - DNA, 25 bp, SARS Virus
atgtctgtgttggtattgtaattta

SEQ ID NO: 43128 - DNA, 25 bp, SARS Virus
tgtctgtgttgggattgtaatttac

SEQ ID NO: 43129 - DNA, 25 bp, SARS Virus
gtctgtgttggtgttgtaatttaca

SEQ ID NO: 43130 - DNA, 25 bp, SARS Virus
tctgtgttggtagtgtaatttacaa

SEQ ID NO: 43131 - DNA, 25 bp, SARS Virus
ctgtgttggtatggtaatttacaaa

SEQ ID NO: 43132 - DNA, 25 bp, SARS Virus
tgtgttggtattgtaatttacaaaa

SEQ ID NO: 43133 - DNA, 25 bp, SARS Virus
gtgttggtattggaatttacaaaac

SEQ ID NO: 43134 - DNA, 25 bp, SARS Virus
tgttggtattgtgatttacaaaacc

SEQ ID NO: 43135 - DNA, 25 bp, SARS Virus
gttggtattgtagtttacaaaaccg

SEQ ID NO: 43136 - DNA, 25 bp, SARS Virus
ttggtattgtaagttacaaaaccgt

SEQ ID NO: 43137 - DNA, 25 bp, SARS Virus
tggtattgtaatgtacaaaaccgta

SEQ ID NO: 43138 - DNA, 25 bp, SARS Virus
ggtattgtaattgacaaaaccgtac

SEQ ID NO: 43139 - DNA, 25 bp, SARS Virus
gtattgtaatttgcaaaaccgtacc

SEQ ID NO: 43140 - DNA, 25 bp, SARS Virus
tattgtaatttagaaaaccgtaccg

SEQ ID NO: 43141 - DNA, 25 bp, SARS Virus
attgtaatttacgaaaccgtaccga

SEQ ID NO: 43142 - DNA, 25 bp, SARS Virus
ttgtaatttacagaaccgtaccgac

SEQ ID NO: 43143 - DNA, 25 bp, SARS Virus
tgtaatttacaagaccgtaccgaca

SEQ ID NO: 43144 - DNA, 25 bp, SARS Virus
gtaatttacaaagccgtaccgacat

SEQ ID NO: 43145 - DNA, 25 bp, SARS Virus
taatttacaaaagcgtaccgacata

SEQ ID NO: 43146 - DNA, 25 bp, SARS Virus
aatttacaaaacggtaccgacatac

SEQ ID NO: 43147 - DNA, 25 bp, SARS Virus
atttacaaaaccgtaccgacatacg

SEQ ID NO: 43148 - DNA, 25 bp, SARS Virus
tttacaaaaccggaccgacatacga

SEQ ID NO: 43149 - DNA, 25 bp, SARS Virus
ttacaaaaccgtgccgacatacgac

SEQ ID NO: 43150 - DNA, 25 bp, SARS Virus
tacaaaaccgtagcgacatacgacg

SEQ ID NO: 43151 - DNA, 25 bp, SARS Virus
acaaaaccgtacggacatacgacga

SEQ ID NO: 43152 - DNA, 25 bp, SARS Virus
caaaaccgtaccgacatacgacgac

SEQ ID NO: 43153 - DNA, 25 bp, SARS Virus
aaaaccgtaccggcatacgacgaca

SEQ ID NO: 43154 - DNA, 25 bp, SARS Virus
aaaccgtaccgagatacgacgacaa

SEQ ID NO: 43155 - DNA, 25 bp, SARS Virus
aaccgtaccgacgtacgacgacaat

SEQ ID NO: 43156 - DNA, 25 bp, SARS Virus
accgtaccgacagacgacgacaata

SEQ ID NO: 43157 - DNA, 25 bp, SARS Virus
ccgtaccgacatgcgacgacaatag

SEQ ID NO: 43158 - DNA, 25 bp, SARS Virus
cgtaccgacataggacgacaatagt

SEQ ID NO: 43159 - DNA, 25 bp, SARS Virus
gtaccgacatacgacgacaatagtt

SEQ ID NO: 43160 - DNA, 25 bp, SARS Virus
taccgacatacggcgacaatagtta

SEQ ID NO: 43161 - DNA, 25 bp, SARS Virus
accgacatacgaggacaatagttac

SEQ ID NO: 43162 - DNA, 25 bp, SARS Virus
ccgacatacgacgacaatagttacc

SEQ ID NO: 43163 - DNA, 25 bp, SARS Virus
cgacatacgacggcaatagttacca

SEQ ID NO: 43164 - DNA, 25 bp, SARS Virus
gacatacgacgagaatagttaccac

SEQ ID NO: 43165 - DNA, 25 bp, SARS Virus
acatacgacgacgatagttaccact

SEQ ID NO: 43166 - DNA, 25 bp, SARS Virus
catacgacgacagtagttaccacta

SEQ ID NO: 43167 - DNA, 25 bp, SARS Virus
atacgacgacaagagttaccactat

SEQ ID NO: 43168 - DNA, 25 bp, SARS Virus
tacgacgacaatggttaccactatc

SEQ ID NO: 43169 - DNA, 25 bp, SARS Virus
acgacgacaatagttaccactatcc

SEQ ID NO: 43170 - DNA, 25 bp, SARS Virus
cgacgacaataggtaccactatcca

SEQ ID NO: 43171 - DNA, 25 bp, SARS Virus
gacgacaatagtgaccactatccac

SEQ ID NO: 43172 - DNA, 25 bp, SARS Virus
acgacaatagttgccactatccacc

SEQ ID NO: 43173 - DNA, 25 bp, SARS Virus
cgacaatagttagcactatccacca

SEQ ID NO: 43174 - DNA, 25 bp, SARS Virus
gacaatagttacgactatccaccaa

SEQ ID NO: 43175 - DNA, 25 bp, SARS Virus
acaatagttaccgctatccaccaaa

SEQ ID NO: 43176 - DNA, 25 bp, SARS Virus
caatagttaccagtatccaccaaag

SEQ ID NO: 43177 - DNA, 25 bp, SARS Virus
aatagttaccacgatccaccaaaga

SEQ ID NO: 43178 - DNA, 25 bp, SARS Virus
atagttaccactgtccaccaaagaa

SEQ ID NO: 43179 - DNA, 25 bp, SARS Virus
tagttaccactagccaccaaagaat

SEQ ID NO: 43180 - DNA, 25 bp, SARS Virus
agttaccactatgcaccaaagaatt

SEQ ID NO: 43181 - DNA, 25 bp, SARS Virus
gttaccactatcgaccaaagaatta

SEQ ID NO: 43182 - DNA, 25 bp, SARS Virus
ttaccactatccgccaaagaattat

SEQ ID NO: 43183 - DNA, 25 bp, SARS Virus
taccactatccagcaaagaattatc

SEQ ID NO: 43184 - DNA, 25 bp, SARS Virus
accactatccacgaaagaattatct

SEQ ID NO: 43185 - DNA, 25 bp, SARS Virus
ccactatccaccgaagaattatcta

SEQ ID NO: 43186 - DNA, 25 bp, SARS Virus
cactatccaccagagaattatctaa

SEQ ID NO: 43187 - DNA, 25 bp, SARS Virus
actatccaccaaggaattatctaag

SEQ ID NO: 43188 - DNA, 25 bp, SARS Virus
ctatccaccaaagaattatctaagt

SEQ ID NO: 43189 - DNA, 25 bp, SARS Virus
tatccaccaaaggattatctaagtg

SEQ ID NO: 43190 - DNA, 25 bp, SARS Virus
atccaccaaagagttatctaagtgg

SEQ ID NO: 43191 - DNA, 25 bp, SARS Virus
tccaccaaagaagtatctaagtggt

SEQ ID NO: 43192 - DNA, 25 bp, SARS Virus
ccaccaaagaatgatctaagtggtg

SEQ ID NO: 43193 - DNA, 25 bp, SARS Virus
caccaaagaattgtctaagtggtga

SEQ ID NO: 43194 - DNA, 25 bp, SARS Virus
accaaagaattagctaagtggtgat

SEQ ID NO: 43195 - DNA, 25 bp, SARS Virus
ccaaagaattatgtaagtggtgatg

SEQ ID NO: 43196 - DNA, 25 bp, SARS Virus
caaagaattatcgaagtggtgatga

SEQ ID NO: 43197 - DNA, 25 bp, SARS Virus
aaagaattatctgagtggtgatgaa

SEQ ID NO: 43198 - DNA, 25 bp, SARS Virus
aagaattatctaggtggtgatgaaa

SEQ ID NO: 43199 - DNA, 25 bp, SARS Virus
agaattatctaagtggtgatgaaac

SEQ ID NO: 43200 - DNA, 25 bp, SARS Virus
gaattatctaaggggtgatgaaact

SEQ ID NO: 43201 - DNA, 25 bp, SARS Virus
aattatctaagtggtgatgaaactt

SEQ ID NO: 43202 - DNA, 25 bp, SARS Virus
attatctaagtggtgatgaaactta

SEQ ID NO: 43203 - DNA, 25 bp, SARS Virus
ttatctaagtggggatgaaacttac

SEQ ID NO: 43204 - DNA, 25 bp, SARS Virus
tatctaagtggtgatgaaacttact

SEQ ID NO: 43205 - DNA, 25 bp, SARS Virus
atctaagtggtggtgaaacttactg

SEQ ID NO: 43206 - DNA, 25 bp, SARS Virus
tctaagtggtgaggaaacttactga

SEQ ID NO: 43207 - DNA, 25 bp, SARS Virus
ctaagtggtgatgaaacttactgaa

SEQ ID NO: 43208 - DNA, 25 bp, SARS Virus
taagtggtgatggaacttactgaaa

SEQ ID NO: 43209 - DNA, 25 bp, SARS Virus
aagtggtgatgagacttactgaaat

SEQ ID NO: 43210 - DNA, 25 bp, SARS Virus
agtggtgatgaagcttactgaaatt

SEQ ID NO: 43211 - DNA, 25 bp, SARS Virus
gtggtgatgaaagttactgaaattg

SEQ ID NO: 43212 - DNA, 25 bp, SARS Virus
tggtgatgaaacgtactgaaattgg

SEQ ID NO: 43213 - DNA, 25 bp, SARS Virus
ggtgatgaaactgactgaaattgga

SEQ ID NO: 43214 - DNA, 25 bp, SARS Virus
gtgatgaaacttgctgaaattggaa

SEQ ID NO: 43215 - DNA, 25 bp, SARS Virus
tgatgaaacttagtgaaattggaac

SEQ ID NO: 43216 - DNA, 25 bp, SARS Virus
gatgaaacttacggaaattggaaca

SEQ ID NO: 43217 - DNA, 25 bp, SARS Virus
atgaaacttactgaaattggaacac

SEQ ID NO: 43218 - DNA, 25 bp, SARS Virus
tgaaacttactggaattggaacacc

SEQ ID NO: 43219 - DNA, 25 bp, SARS Virus
gaaacttactgagattggaacaccg

SEQ ID NO: 43220 - DNA, 25 bp, SARS Virus
aaacttactgaagttggaacaccgt

SEQ ID NO: 43221 - DNA, 25 bp, SARS Virus
aacttactgaaagtggaacaccgtt

SEQ ID NO: 43222 - DNA, 25 bp, SARS Virus
acttactgaaatgggaacaccgtta

SEQ ID NO: 43223 - DNA, 25 bp, SARS Virus
cttactgaaattggaacaccgttac

SEQ ID NO: 43224 - DNA, 25 bp, SARS Virus
ttactgaaattggaacaccgttact

SEQ ID NO: 43225 - DNA, 25 bp, SARS Virus
tactgaaattgggacaccgttactt

SEQ ID NO: 43226 - DNA, 25 bp, SARS Virus
actgaaattggagcaccgttacttc

SEQ ID NO: 43227 - DNA, 25 bp, SARS Virus
ctgaaattggaagaccgttacttca

SEQ ID NO: 43228 - DNA, 25 bp, SARS Virus
tgaaattggaacgccgttacttcat

SEQ ID NO: 43229 - DNA, 25 bp, SARS Virus
gaaattggaacagcgttacttcatg

SEQ ID NO: 43230 - DNA, 25 bp, SARS Virus
aaattggaacacggttacttcatgt

SEQ ID NO: 43231 - DNA, 25 bp, SARS Virus
aattggaacaccgttacttcatgtt

SEQ ID NO: 43232 - DNA, 25 bp, SARS Virus
attggaacaccggtacttcatgttg

SEQ ID NO: 43233 - DNA, 25 bp, SARS Virus
ttggaacaccgtgacttcatgttga

SEQ ID NO: 43234 - DNA, 25 bp, SARS Virus
tggaacaccgttgcttcatgttgat

SEQ ID NO: 43235 - DNA, 25 bp, SARS Virus
ggaacaccgttagttcatgttgata

SEQ ID NO: 43236 - DNA, 25 bp, SARS Virus
gaacaccgttacgtcatgttgatac

SEQ ID NO: 43237 - DNA, 25 bp, SARS Virus
aacaccgttactgcatgttgatact

SEQ ID NO: 43238 - DNA, 25 bp, SARS Virus
acaccgttacttgatgttgatactt

SEQ ID NO: 43239 - DNA, 25 bp, SARS Virus
caccgttacttcgtgttgatacttg

SEQ ID NO: 43240 - DNA, 25 bp, SARS Virus
accgttacttcaggttgatacttgg

SEQ ID NO: 43241 - DNA, 25 bp, SARS Virus
ccgttacttcatgttgatacttgga

SEQ ID NO: 43242 - DNA, 25 bp, SARS Virus
cgttacttcatggtgatacttggaa

SEQ ID NO: 43243 - DNA, 25 bp, SARS Virus
gttacttcatgtggatacttggaaa

SEQ ID NO: 43244 - DNA, 25 bp, SARS Virus
ttacttcatgttgatacttggaaac

SEQ ID NO: 43245 - DNA, 25 bp, SARS Virus
tacttcatgttggtacttggaaact

SEQ ID NO: 43246 - DNA, 25 bp, SARS Virus
acttcatgttgagacttggaaactg

SEQ ID NO: 43247 - DNA, 25 bp, SARS Virus
cttcatgttgatgcttggaaactgt

SEQ ID NO: 43248 - DNA, 25 bp, SARS Virus
ttcatgttgatagttggaaactgtg

SEQ ID NO: 43249 - DNA, 25 bp, SARS Virus
tcatgttgatacgtggaaactgtgt

SEQ ID NO: 43250 - DNA, 25 bp, SARS Virus
catgttgatactgggaaactgtgtt

SEQ ID NO: 43251 - DNA, 25 bp, SARS Virus
atgttgatacttggaaactgtgttc

SEQ ID NO: 43252 - DNA, 25 bp, SARS Virus
tgttgatacttggaaactgtgttct

SEQ ID NO: 43253 - DNA, 25 bp, SARS Virus
gttgatacttgggaactgtgttcta

SEQ ID NO: 43254 - DNA, 25 bp, SARS Virus
ttgatacttggagactgtgttctag

SEQ ID NO: 43255 - DNA, 25 bp, SARS Virus
tgatacttggaagctgtgttctagt

SEQ ID NO: 43256 - DNA, 25 bp, SARS Virus
gatacttggaaagtgtgttctagta

SEQ ID NO: 43257 - DNA, 25 bp, SARS Virus
atacttggaaacggtgttctagtac

SEQ ID NO: 43258 - DNA, 25 bp, SARS Virus
tacttggaaactgtgttctagtaca

SEQ ID NO: 43259 - DNA, 25 bp, SARS Virus
acttggaaactgggttctagtacaa

SEQ ID NO: 43260 - DNA, 25 bp, SARS Virus
cttggaaactgtgttctagtacaac

SEQ ID NO: 43261 - DNA, 25 bp, SARS Virus
ttggaaactgtggtctagtacaact

SEQ ID NO: 43262 - DNA, 25 bp, SARS Virus
tggaaactgtgtgctagtacaactg

SEQ ID NO: 43263 - DNA, 25 bp, SARS Virus
ggaaactgtgttgtagtacaactgt

SEQ ID NO: 43264 - DNA, 25 bp, SARS Virus
gaaactgtgttcgagtacaactgta

SEQ ID NO: 43265 - DNA, 25 bp, SARS Virus
aaactgtgttctggtacaactgtat

SEQ ID NO: 43266 - DNA, 25 bp, SARS Virus
aactgtgttctagtacaactgtata

SEQ ID NO: 43267 - DNA, 25 bp, SARS Virus
actgtgttctaggacaactgtataa

SEQ ID NO: 43268 - DNA, 25 bp, SARS Virus
ctgtgttctagtgcaactgtataac

SEQ ID NO: 43269 - DNA, 25 bp, SARS Virus
tgtgttctagtagaactgtataacc

SEQ ID NO: 43270 - DNA, 25 bp, SARS Virus
gtgttctagtacgactgtataaccc

SEQ ID NO: 43271 - DNA, 25 bp, SARS Virus
tgttctagtacagctgtataaccct

SEQ ID NO: 43272 - DNA, 25 bp, SARS Virus
gttctagtacaagtgtataaccctg

SEQ ID NO: 43273 - DNA, 25 bp, SARS Virus
ttctagtacaacggtataaccctgg

SEQ ID NO: 43274 - DNA, 25 bp, SARS Virus
tctagtacaactgtataaccctgga

SEQ ID NO: 43275 - DNA, 25 bp, SARS Virus
ctagtacaactggataaccctggag

SEQ ID NO: 43276 - DNA, 25 bp, SARS Virus
tagtacaactgtgtaaccctggaga

SEQ ID NO: 43277 - DNA, 25 bp, SARS Virus
agtacaactgtagaaccctggagaa

SEQ ID NO: 43278 - DNA, 25 bp, SARS Virus
gtacaactgtatgaccctggagaaa

SEQ ID NO: 43279 - DNA, 25 bp, SARS Virus
tacaactgtatagccctggagaaag

SEQ ID NO: 43280 - DNA, 25 bp, SARS Virus
acaactgtataagcctggagaaaga

SEQ ID NO: 43281 - DNA, 25 bp, SARS Virus
caactgtataacgctggagaaagac

SEQ ID NO: 43282 - DNA, 25 bp, SARS Virus
aactgtataaccgtggagaaagacg

SEQ ID NO: 43283 - DNA, 25 bp, SARS Virus
actgtataacccgggagaaagacga

SEQ ID NO: 43284 - DNA, 25 bp, SARS Virus
ctgtataaccctggagaaagacgag

SEQ ID NO: 43285 - DNA, 25 bp, SARS Virus
tgtataaccctggagaaagacgagt

SEQ ID NO: 43286 - DNA, 25 bp, SARS Virus
gtataaccctggggaaagacgagtt

SEQ ID NO: 43287 - DNA, 25 bp, SARS Virus
tataaccctggagaaagacgagttt

SEQ ID NO: 43288 - DNA, 25 bp, SARS Virus
ataaccctggaggaagacgagtttg

SEQ ID NO: 43289 - DNA, 25 bp, SARS Virus
taaccctggagagagacgagtttgt

SEQ ID NO: 43290 - DNA, 25 bp, SARS Virus
aaccctggagaaggacgagtttgtc

SEQ ID NO: 43291 - DNA, 25 bp, SARS Virus
accctggagaaagacgagtttgtcc

SEQ ID NO: 43292 - DNA, 25 bp, SARS Virus
ccctggagaaaggcgagtttgtcct

SEQ ID NO: 43293 - DNA, 25 bp, SARS Virus
cctggagaaagaggagtttgtcctt

SEQ ID NO: 43294 - DNA, 25 bp, SARS Virus
ctggagaaagacgagtttgtcctta

SEQ ID NO: 43295 - DNA, 25 bp, SARS Virus
tggagaaagacgggtttgtccttaa

SEQ ID NO: 43296 - DNA, 25 bp, SARS Virus
ggagaaagacgagtttgtccttaac

SEQ ID NO: 43297 - DNA, 25 bp, SARS Virus
gagaaagacgaggttgtccttaacg

SEQ ID NO: 43298 - DNA, 25 bp, SARS Virus
agaaagacgagtgtgtccttaacgg

SEQ ID NO: 43299 - DNA, 25 bp, SARS Virus
gaaagacgagttggtccttaacggc

SEQ ID NO: 43300 - DNA, 25 bp, SARS Virus
aaagacgagtttgtccttaacggca

SEQ ID NO: 43301 - DNA, 25 bp, SARS Virus
aagacgagtttggccttaacggcag

SEQ ID NO: 43302 - DNA, 25 bp, SARS Virus
agacgagtttgtgcttaacggcaga

SEQ ID NO: 43303 - DNA, 25 bp, SARS Virus
gacgagtttgtcgttaacggcagaa

SEQ ID NO: 43304 - DNA, 25 bp, SARS Virus
acgagtttgtccgtaacggcagaat

SEQ ID NO: 43305 - DNA, 25 bp, SARS Virus
cgagtttgtcctgaacggcagaatc

SEQ ID NO: 43306 - DNA, 25 bp, SARS Virus
gagtttgtccttgacggcagaatct

SEQ ID NO: 43307 - DNA, 25 bp, SARS Virus
agtttgtccttagcggcagaatcta

SEQ ID NO: 43308 - DNA, 25 bp, SARS Virus
gtttgtccttaagggcagaatctat

SEQ ID NO: 43309 - DNA, 25 bp, SARS Virus
tttgtccttaacggcagaatctata

SEQ ID NO: 43310 - DNA, 25 bp, SARS Virus
ttgtccttaacggcagaatctatac

SEQ ID NO: 43311 - DNA, 25 bp, SARS Virus
tgtccttaacgggagaatctataca

SEQ ID NO: 43312 - DNA, 25 bp, SARS Virus
gtccttaacggcggaatctatacac

SEQ ID NO: 43313 - DNA, 25 bp, SARS Virus
tccttaacggcagaatctatacaca

SEQ ID NO: 43314 - DNA, 25 bp, SARS Virus
ccttaacggcaggatctatacacac

SEQ ID NO: 43315 - DNA, 25 bp, SARS Virus
cttaacggcagagtctatacacacg

SEQ ID NO: 43316 - DNA, 25 bp, SARS Virus
ttaacggcagaagctatacacacga

SEQ ID NO: 43317 - DNA, 25 bp, SARS Virus
taacggcagaatgtatacacacgac

SEQ ID NO: 43318 - DNA, 25 bp, SARS Virus
aacggcagaatcgatacacacgacg

SEQ ID NO: 43319 - DNA, 25 bp, SARS Virus
acggcagaatctgtacacacgacga

SEQ ID NO: 43320 - DNA, 25 bp, SARS Virus
cggcagaatctagacacacgacgaa

SEQ ID NO: 43321 - DNA, 25 bp, SARS Virus
ggcagaatctatgcacacgacgaaa

SEQ ID NO: 43322 - DNA, 25 bp, SARS Virus
gcagaatctatagacacgacgaaac

SEQ ID NO: 43323 - DNA, 25 bp, SARS Virus
cagaatctatacgcacgacgaaact

SEQ ID NO: 43324 - DNA, 25 bp, SARS Virus
agaatctatacagacgacgaaactt

SEQ ID NO: 43325 - DNA, 25 bp, SARS Virus
gaatctatacacgcgacgaaacttt

SEQ ID NO: 43326 - DNA, 25 bp, SARS Virus
aatctatacacaggacgaaactttc

SEQ ID NO: 43327 - DNA, 25 bp, SARS Virus
atctatacacacgacgaaactttct

SEQ ID NO: 43328 - DNA, 25 bp, SARS Virus
tctatacacacggcgaaactttctc

SEQ ID NO: 43329 - DNA, 25 bp, SARS Virus
ctatacacacgaggaaactttctcg

SEQ ID NO: 43330 - DNA, 25 bp, SARS Virus
tatacacacgacgaaactttctcga

SEQ ID NO: 43331 - DNA, 25 bp, SARS Virus
atacacacgacggaactttctcgac

SEQ ID NO: 43332 - DNA, 25 bp, SARS Virus
tacacacgacgagactttctcgacg

SEQ ID NO: 43333 - DNA, 25 bp, SARS Virus
acacacgacgaagctttctcgacga

SEQ ID NO: 43334 - DNA, 25 bp, SARS Virus
cacacgacgaaagtttctcgacgac

SEQ ID NO: 43335 - DNA, 25 bp, SARS Virus
acacgacgaaacgttctcgacgacg

SEQ ID NO: 43336 - DNA, 25 bp, SARS Virus
cacgacgaaactgtctcgacgacgt

SEQ ID NO: 43337 - DNA, 25 bp, SARS Virus
acgacgaaacttgctcgacgacgtc

SEQ ID NO: 43338 - DNA, 25 bp, SARS Virus
cgacgaaactttgtcgacgacgtct

SEQ ID NO: 43339 - DNA, 25 bp, SARS Virus
gacgaaactttcgcgacgacgtctt

SEQ ID NO: 43340 - DNA, 25 bp, SARS Virus
acgaaactttctggacgacgtctta

SEQ ID NO: 43341 - DNA, 25 bp, SARS Virus
cgaaactttctcgacgacgtcttac

SEQ ID NO: 43342 - DNA, 25 bp, SARS Virus
gaaactttctcggcgacgtcttacc

SEQ ID NO: 43343 - DNA, 25 bp, SARS Virus
aaactttctcgaggacgtcttacca

SEQ ID NO: 43344 - DNA, 25 bp, SARS Virus
aactttctcgacgacgtcttaccat

SEQ ID NO: 43345 - DNA, 25 bp, SARS Virus
actttctcgacggcgtcttaccata

SEQ ID NO: 43346 - DNA, 25 bp, SARS Virus
ctttctcgacgaggtcttaccatac

SEQ ID NO: 43347 - DNA, 25 bp, SARS Virus
tttctcgacgacgtcttaccatact

SEQ ID NO: 43348 - DNA, 25 bp, SARS Virus
ttctcgacgacggcttaccatactt

SEQ ID NO: 43349 - DNA, 25 bp, SARS Virus
tctcgacgacgtgttaccatactta

SEQ ID NO: 43350 - DNA, 25 bp, SARS Virus
ctcgacgacgtcgtaccatacttac

SEQ ID NO: 43351 - DNA, 25 bp, SARS Virus
tcgacgacgtctgaccatacttacc

SEQ ID NO: 43352 - DNA, 25 bp, SARS Virus
cgacgacgtcttgccatacttacca

SEQ ID NO: 43353 - DNA, 25 bp, SARS Virus
gacgacgtcttagcatacttaccag

SEQ ID NO: 43354 - DNA, 25 bp, SARS Virus
acgacgtcttacgatacttaccagc

SEQ ID NO: 43355 - DNA, 25 bp, SARS Virus
cgacgtcttaccgtacttaccagca

SEQ ID NO: 43356 - DNA, 25 bp, SARS Virus
gacgtcttaccagacttaccagcat

SEQ ID NO: 43357 - DNA, 25 bp, SARS Virus
acgtcttaccatgcttaccagcatg

SEQ ID NO: 43358 - DNA, 25 bp, SARS Virus
cgtcttaccatagttaccagcatga

SEQ ID NO: 43359 - DNA, 25 bp, SARS Virus
gtcttaccatacgtaccagcatgat

SEQ ID NO: 43360 - DNA, 25 bp, SARS Virus
tcttaccatactgaccagcatgata

SEQ ID NO: 43361 - DNA, 25 bp, SARS Virus
cttaccatacttgccagcatgatag

SEQ ID NO: 43362 - DNA, 25 bp, SARS Virus
ttaccatacttagcagcatgatagg

SEQ ID NO: 43363 - DNA, 25 bp, SARS Virus
taccatacttacgagcatgatagga

SEQ ID NO: 43364 - DNA, 25 bp, SARS Virus
accatacttaccggcatgataggaa

SEQ ID NO: 43365 - DNA, 25 bp, SARS Virus
ccatacttaccagcatgataggaac

SEQ ID NO: 43366 - DNA, 25 bp, SARS Virus
catacttaccaggatgataggaacc

SEQ ID NO: 43367 - DNA, 25 bp, SARS Virus
atacttaccagcgtgataggaacca

SEQ ID NO: 43368 - DNA, 25 bp, SARS Virus
tacttaccagcaggataggaaccat

SEQ ID NO: 43369 - DNA, 25 bp, SARS Virus
acttaccagcatgataggaaccatc

SEQ ID NO: 43370 - DNA, 25 bp, SARS Virus
cttaccagcatggtaggaaccatcg

SEQ ID NO: 43371 - DNA, 25 bp, SARS Virus
ttaccagcatgagaggaaccatcgt

SEQ ID NO: 43372 - DNA, 25 bp, SARS Virus
taccagcatgatgggaaccatcgtg

SEQ ID NO: 43373 - DNA, 25 bp, SARS Virus
accagcatgataggaaccatcgtga

SEQ ID NO: 43374 - DNA, 25 bp, SARS Virus
ccagcatgataggaaccatcgtgat

SEQ ID NO: 43375 - DNA, 25 bp, SARS Virus
cagcatgatagggaccatcgtgata

SEQ ID NO: 43376 - DNA, 25 bp, SARS Virus
agcatgataggagccatcgtgataa

SEQ ID NO: 43377 - DNA, 25 bp, SARS Virus
gcatgataggaagcatcgtgataaa

SEQ ID NO: 43378 - DNA, 25 bp, SARS Virus
catgataggaacgatcgtgataaaa

SEQ ID NO: 43379 - DNA, 25 bp, SARS Virus
atgataggaaccgtcgtgataaaat

SEQ ID NO: 43380 - DNA, 25 bp, SARS Virus
tgataggaaccagcgtgataaaatc

SEQ ID NO: 43381 - DNA, 25 bp, SARS Virus
gataggaaccatggtgataaaatct

SEQ ID NO: 43382 - DNA, 25 bp, SARS Virus
ataggaaccatcgtgataaaatctt

SEQ ID NO: 43383 - DNA, 25 bp, SARS Virus
taggaaccatcgggataaaatcttc

SEQ ID NO: 43384 - DNA, 25 bp, SARS Virus
aggaaccatcgtgataaaatcttct

SEQ ID NO: 43385 - DNA, 25 bp, SARS Virus
ggaaccatcgtggtaaaatcttcta

SEQ ID NO: 43386 - DNA, 25 bp, SARS Virus
gaaccatcgtgagaaaatcttctac

SEQ ID NO: 43387 - DNA, 25 bp, SARS Virus
aaccatcgtgatgaaatcttctact

SEQ ID NO: 43388 - DNA, 25 bp, SARS Virus
accatcgtgatagaatcttctactc

SEQ ID NO: 43389 - DNA, 25 bp, SARS Virus
ccatcgtgataagatcttctactca

SEQ ID NO: 43390 - DNA, 25 bp, SARS Virus
catcgtgataaagtcttctactcaa

SEQ ID NO: 43391 - DNA, 25 bp, SARS Virus
atcgtgataaaagcttctactcaaa

SEQ ID NO: 43392 - DNA, 25 bp, SARS Virus
tcgtgataaaatgttctactcaaat

SEQ ID NO: 43393 - DNA, 25 bp, SARS Virus
cgtgataaaatcgtctactcaaatg

SEQ ID NO: 43394 - DNA, 25 bp, SARS Virus
gtgataaaatctgctactcaaatgt

SEQ ID NO: 43395 - DNA, 25 bp, SARS Virus
tgataaaatcttgtactcaaatgtg

SEQ ID NO: 43396 - DNA, 25 bp, SARS Virus
gataaaatcttcgactcaaatgtgg

SEQ ID NO: 43397 - DNA, 25 bp, SARS Virus
ataaaatcttctgctcaaatgtggt

SEQ ID NO: 43398 - DNA, 25 bp, SARS Virus
taaaatcttctagtcaaatgtggta

SEQ ID NO: 43399 - DNA, 25 bp, SARS Virus
aaaatcttctacgcaaatgtggtaa

SEQ ID NO: 43400 - DNA, 25 bp, SARS Virus
aaatcttctactgaaatgtggtaaa

SEQ ID NO: 43401 - DNA, 25 bp, SARS Virus
aatcttctactcgaatgtggtaaac

SEQ ID NO: 43402 - DNA, 25 bp, SARS Virus
atcttctactcagatgtggtaaact

SEQ ID NO: 43403 - DNA, 25 bp, SARS Virus
tcttctactcaagtgtggtaaacta

SEQ ID NO: 43404 - DNA, 25 bp, SARS Virus
cttctactcaaaggtggtaaactac

SEQ ID NO: 43405 - DNA, 25 bp, SARS Virus
ttctactcaaatgtggtaaactaca

SEQ ID NO: 43406 - DNA, 25 bp, SARS Virus
tctactcaaatggggtaaactacaa

SEQ ID NO: 43407 - DNA, 25 bp, SARS Virus
ctactcaaatgtggtaaactacaac

SEQ ID NO: 43408 - DNA, 25 bp, SARS Virus
tactcaaatgtggtaaactacaaca

SEQ ID NO: 43409 - DNA, 25 bp, SARS Virus
actcaaatgtgggaaactacaacaa

SEQ ID NO: 43410 - DNA, 25 bp, SARS Virus
ctcaaatgtggtgaactacaacaat

SEQ ID NO: 43411 - DNA, 25 bp, SARS Virus
tcaaatgtggtagactacaacaatc

SEQ ID NO: 43412 - DNA, 25 bp, SARS Virus
caaatgtggtaagctacaacaatct

SEQ ID NO: 43413 - DNA, 25 bp, SARS Virus
aaatgtggtaaagtacaacaatctg

SEQ ID NO: 43414 - DNA, 25 bp, SARS Virus
aatgtggtaaacgacaacaatctgt

SEQ ID NO: 43415 - DNA, 25 bp, SARS Virus
atgtggtaaactgcaacaatctgtt

SEQ ID NO: 43416 - DNA, 25 bp, SARS Virus
tgtggtaaactagaacaatctgtta

SEQ ID NO: 43417 - DNA, 25 bp, SARS Virus
gtggtaaactacgacaatctgttac

SEQ ID NO: 43418 - DNA, 25 bp, SARS Virus
tggtaaactacagcaatctgttacg

SEQ ID NO: 43419 - DNA, 25 bp, SARS Virus
ggtaaactacaagaatctgttacga

SEQ ID NO: 43420 - DNA, 25 bp, SARS Virus
gtaaactacaacgatctgttacgag

SEQ ID NO: 43421 - DNA, 25 bp, SARS Virus
taaactacaacagtctgttacgaga

SEQ ID NO: 43422 - DNA, 25 bp, SARS Virus
aaactacaacaagctgttacgagac

SEQ ID NO: 43423 - DNA, 25 bp, SARS Virus
aactacaacaatgtgttacgagacc

SEQ ID NO: 43424 - DNA, 25 bp, SARS Virus
actacaacaatcggttacgagacca

SEQ ID NO: 43425 - DNA, 25 bp, SARS Virus
ctacaacaatctgttacgagaccac

SEQ ID NO: 43426 - DNA, 25 bp, SARS Virus
tacaacaatctggtacgagaccaca

SEQ ID NO: 43427 - DNA, 25 bp, SARS Virus
acaacaatctgtgacgagaccacaa

SEQ ID NO: 43428 - DNA, 25 bp, SARS Virus
caacaatctgttgcgagaccacaat

SEQ ID NO: 43429 - DNA, 25 bp, SARS Virus
aacaatctgttaggagaccacaatg

SEQ ID NO: 43430 - DNA, 25 bp, SARS Virus
acaatctgttacgagaccacaatgg

SEQ ID NO: 43431 - DNA, 25 bp, SARS Virus
caatctgttacgggaccacaatgga

SEQ ID NO: 43432 - DNA, 25 bp, SARS Virus
aatctgttacgagaccacaatggaa

SEQ ID NO: 43433 - DNA, 25 bp, SARS Virus
atctgttacgaggccacaatggaag

SEQ ID NO: 43434 - DNA, 25 bp, SARS Virus
tctgttacgagagcacaatggaagg

SEQ ID NO: 43435 - DNA, 25 bp, SARS Virus
ctgttacgagacgacaatggaaggt

SEQ ID NO: 43436 - DNA, 25 bp, SARS Virus
tgttacgagaccgcaatggaaggtt

SEQ ID NO: 43437 - DNA, 25 bp, SARS Virus
gttacgagaccagaatggaaggttc

SEQ ID NO: 43438 - DNA, 25 bp, SARS Virus
ttacgagaccacgatggaaggttcc

SEQ ID NO: 43439 - DNA, 25 bp, SARS Virus
tacgagaccacagtggaaggttcca

SEQ ID NO: 43440 - DNA, 25 bp, SARS Virus
acgagaccacaagggaaggttccat

SEQ ID NO: 43441 - DNA, 25 bp, SARS Virus
cgagaccacaatggaaggttccatt

SEQ ID NO: 43442 - DNA, 25 bp, SARS Virus
gagaccacaatggaaggttccattc

SEQ ID NO: 43443 - DNA, 25 bp, SARS Virus
agaccacaatgggaggttccattca

SEQ ID NO: 43444 - DNA, 25 bp, SARS Virus
gaccacaatggagggttccattcaa

SEQ ID NO: 43445 - DNA, 25 bp, SARS Virus
accacaatggaaggttccattcaag

SEQ ID NO: 43446 - DNA, 25 bp, SARS Virus
ccacaatggaaggttccattcaagt

SEQ ID NO: 43447 - DNA, 25 bp, SARS Virus
cacaatggaagggtccattcaagtt

SEQ ID NO: 43448 - DNA, 25 bp, SARS Virus
acaatggaaggtgccattcaagttc

SEQ ID NO: 43449 - DNA, 25 bp, SARS Virus
caatggaaggttgcattcaagttct

SEQ ID NO: 43450 - DNA, 25 bp, SARS Virus
aatggaaggttcgattcaagttctt

SEQ ID NO: 43451 - DNA, 25 bp, SARS Virus
atggaaggttccgttcaagttcttt

SEQ ID NO: 43452 - DNA, 25 bp, SARS Virus
tggaaggttccagtcaagttctttt

SEQ ID NO: 43453 - DNA, 25 bp, SARS Virus
ggaaggttccatgcaagttctttta

SEQ ID NO: 43454 - DNA, 25 bp, SARS Virus
gaaggttccattgaagttcttttaa

SEQ ID NO: 43455 - DNA, 25 bp, SARS Virus
aaggttccattcgagttcttttaac

SEQ ID NO: 43456 - DNA, 25 bp, SARS Virus
aggttccattcaggttcttttaaca

SEQ ID NO: 43457 - DNA, 25 bp, SARS Virus
ggttccattcaagttcttttaacaa

SEQ ID NO: 43458 - DNA, 25 bp, SARS Virus
gttccattcaaggtcttttaacaat

SEQ ID NO: 43459 - DNA, 25 bp, SARS Virus
ttccattcaagtgcttttaacaatt

SEQ ID NO: 43460 - DNA, 25 bp, SARS Virus
tccattcaagttgttttaacaattc

SEQ ID NO: 43461 - DNA, 25 bp, SARS Virus
ccattcaagttcgtttaacaattcc

SEQ ID NO: 43462 - DNA, 25 bp, SARS Virus
cattcaagttctgttaacaattccc

SEQ ID NO: 43463 - DNA, 25 bp, SARS Virus
attcaagttcttgtaacaattcccg

SEQ ID NO: 43464 - DNA, 25 bp, SARS Virus
ttcaagttctttgaacaattcccgt

SEQ ID NO: 43465 - DNA, 25 bp, SARS Virus
tcaagttcttttgacaattcccgtg

SEQ ID NO: 43466 - DNA, 25 bp, SARS Virus
caagttcttttagcaattcccgtga

SEQ ID NO: 43467 - DNA, 25 bp, SARS Virus
aagttcttttaagaattcccgtgag

SEQ ID NO: 43468 - DNA, 25 bp, SARS Virus
agttcttttaacgattcccgtgagt

SEQ ID NO: 43469 - DNA, 25 bp, SARS Virus
gttcttttaacagttcccgtgagta

SEQ ID NO: 43470 - DNA, 25 bp, SARS Virus
ttcttttaacaagtcccgtgagtag

SEQ ID NO: 43471 - DNA, 25 bp, SARS Virus
tcttttaacaatgcccgtgagtagt

SEQ ID NO: 43472 - DNA, 25 bp, SARS Virus
cttttaacaattgccgtgagtagta

SEQ ID NO: 43473 - DNA, 25 bp, SARS Virus
ttttaacaattcgcgtgagtagtaa

SEQ ID NO: 43474 - DNA, 25 bp, SARS Virus
tttaacaattccggtgagtagtaac

SEQ ID NO: 43475 - DNA, 25 bp, SARS Virus
ttaacaattcccgtgagtagtaacc

SEQ ID NO: 43476 - DNA, 25 bp, SARS Virus
taacaattcccgggagtagtaacct

SEQ ID NO: 43477 - DNA, 25 bp, SARS Virus
aacaattcccgtgagtagtaaccta

SEQ ID NO: 43478 - DNA, 25 bp, SARS Virus
acaattcccgtgggtagtaacctac

SEQ ID NO: 43479 - DNA, 25 bp, SARS Virus
caattcccgtgagtagtaacctacg

SEQ ID NO: 43480 - DNA, 25 bp, SARS Virus
aattcccgtgaggagtaacctacga

SEQ ID NO: 43481 - DNA, 25 bp, SARS Virus
attcccgtgagtggtaacctacgaa

SEQ ID NO: 43482 - DNA, 25 bp, SARS Virus
ttcccgtgagtagtaacctacgaaa

SEQ ID NO: 43483 - DNA, 25 bp, SARS Virus
tcccgtgagtaggaacctacgaaaa

SEQ ID NO: 43484 - DNA, 25 bp, SARS Virus
cccgtgagtagtgacctacgaaaat

SEQ ID NO: 43485 - DNA, 25 bp, SARS Virus
ccgtgagtagtagcctacgaaaatt

SEQ ID NO: 43486 - DNA, 25 bp, SARS Virus
cgtgagtagtaagctacgaaaattg

SEQ ID NO: 43487 - DNA, 25 bp, SARS Virus
gtgagtagtaacgtacgaaaattga

SEQ ID NO: 43488 - DNA, 25 bp, SARS Virus
tgagtagtaaccgacgaaaattgaa

SEQ ID NO: 43489 - DNA, 25 bp, SARS Virus
gagtagtaacctgcgaaaattgaaa

SEQ ID NO: 43490 - DNA, 25 bp, SARS Virus
agtagtaacctaggaaaattgaaag

SEQ ID NO: 43491 - DNA, 25 bp, SARS Virus
gtagtaacctacgaaaattgaaaga

SEQ ID NO: 43492 - DNA, 25 bp, SARS Virus
tagtaacctacggaaattgaaagaa

SEQ ID NO: 43493 - DNA, 25 bp, SARS Virus
agtaacctacgagaattgaaagaac

SEQ ID NO: 43494 - DNA, 25 bp, SARS Virus
gtaacctacgaagattgaaagaact

SEQ ID NO: 43495 - DNA, 25 bp, SARS Virus
taacctacgaaagttgaaagaactg

SEQ ID NO: 43496 - DNA, 25 bp, SARS Virus
aacctacgaaaagtgaaagaactgt

SEQ ID NO: 43497 - DNA, 25 bp, SARS Virus
acctacgaaaatggaaagaactgta

SEQ ID NO: 43498 - DNA, 25 bp, SARS Virus
cctacgaaaattgaaagaactgtag

SEQ ID NO: 43499 - DNA, 25 bp, SARS Virus
ctacgaaaattggaagaactgtagt

SEQ ID NO: 43500 - DNA, 25 bp, SARS Virus
tacgaaaattgagagaactgtagtg

SEQ ID NO: 43501 - DNA, 25 bp, SARS Virus
acgaaaattgaaggaactgtagtga

SEQ ID NO: 43502 - DNA, 25 bp, SARS Virus
cgaaaattgaaagaactgtagtgat

SEQ ID NO: 43503 - DNA, 25 bp, SARS Virus
gaaaattgaaaggactgtagtgata

SEQ ID NO: 43504 - DNA, 25 bp, SARS Virus
aaaattgaaagagctgtagtgataa

SEQ ID NO: 43505 - DNA, 25 bp, SARS Virus
aaattgaaagaagtgtagtgataac

SEQ ID NO: 43506 - DNA, 25 bp, SARS Virus
aattgaaagaacggtagtgataact

SEQ ID NO: 43507 - DNA, 25 bp, SARS Virus
attgaaagaactgtagtgataacta

SEQ ID NO: 43508 - DNA, 25 bp, SARS Virus
ttgaaagaactggagtgataactaa

SEQ ID NO: 43509 - DNA, 25 bp, SARS Virus
tgaaagaactgtggtgataactaag

SEQ ID NO: 43510 - DNA, 25 bp, SARS Virus
gaaagaactgtagtgataactaaga

SEQ ID NO: 43511 - DNA, 25 bp, SARS Virus
aaagaactgtagggataactaagaa

SEQ ID NO: 43512 - DNA, 25 bp, SARS Virus
aagaactgtagtgataactaagaac

SEQ ID NO: 43513 - DNA, 25 bp, SARS Virus
agaactgtagtggtaactaagaaca

SEQ ID NO: 43514 - DNA, 25 bp, SARS Virus
gaactgtagtgagaactaagaacaa

SEQ ID NO: 43515 - DNA, 25 bp, SARS Virus
aactgtagtgatgactaagaacaag

SEQ ID NO: 43516 - DNA, 25 bp, SARS Virus
actgtagtgatagctaagaacaagt

SEQ ID NO: 43517 - DNA, 25 bp, SARS Virus
ctgtagtgataagtaagaacaagtt

SEQ ID NO: 43518 - DNA, 25 bp, SARS Virus
tgtagtgataacgaagaacaagttt

SEQ ID NO: 43519 - DNA, 25 bp, SARS Virus
gtagtgataactgagaacaagtttc

SEQ ID NO: 43520 - DNA, 25 bp, SARS Virus
tagtgataactaggaacaagtttca

SEQ ID NO: 43521 - DNA, 25 bp, SARS Virus
agtgataactaagaacaagtttcat

SEQ ID NO: 43522 - DNA, 25 bp, SARS Virus
gtgataactaaggacaagtttcatg

SEQ ID NO: 43523 - DNA, 25 bp, SARS Virus
tgataactaagagcaagtttcatgt

SEQ ID NO: 43524 - DNA, 25 bp, SARS Virus
gataactaagaagaagtttcatgtg

SEQ ID NO: 43525 - DNA, 25 bp, SARS Virus
ataactaagaacgagtttcatgtgt

SEQ ID NO: 43526 - DNA, 25 bp, SARS Virus
taactaagaacaggtttcatgtgtc

SEQ ID NO: 43527 - DNA, 25 bp, SARS Virus
aactaagaacaagtttcatgtgtca

SEQ ID NO: 43528 - DNA, 25 bp, SARS Virus
actaagaacaaggttcatgtgtcac

SEQ ID NO: 43529 - DNA, 25 bp, SARS Virus
ctaagaacaagtgtcatgtgtcacc

SEQ ID NO: 43530 - DNA, 25 bp, SARS Virus
taagaacaagttgcatgtgtcacca

SEQ ID NO: 43531 - DNA, 25 bp, SARS Virus
aagaacaagtttgatgtgtcaccag

SEQ ID NO: 43532 - DNA, 25 bp, SARS Virus
agaacaagtttcgtgtgtcaccagt

SEQ ID NO: 43533 - DNA, 25 bp, SARS Virus
gaacaagtttcaggtgtcaccagtg

SEQ ID NO: 43534 - DNA, 25 bp, SARS Virus
aacaagtttcatgtgtcaccagtga

SEQ ID NO: 43535 - DNA, 25 bp, SARS Virus
acaagtttcatgggtcaccagtgac

SEQ ID NO: 43536 - DNA, 25 bp, SARS Virus
caagtttcatgtgtcaccagtgaca

SEQ ID NO: 43537 - DNA, 25 bp, SARS Virus
aagtttcatgtggcaccagtgacaa

SEQ ID NO: 43538 - DNA, 25 bp, SARS Virus
agtttcatgtgtgaccagtgacaaa

SEQ ID NO: 43539 - DNA, 25 bp, SARS Virus
gtttcatgtgtcgccagtgacaaaa

SEQ ID NO: 43540 - DNA, 25 bp, SARS Virus
tttcatgtgtcagcagtgacaaaaa

SEQ ID NO: 43541 - DNA, 25 bp, SARS Virus
ttcatgtgtcacgagtgacaaaaag

SEQ ID NO: 43542 - DNA, 25 bp, SARS Virus
tcatgtgtcaccggtgacaaaaaga

SEQ ID NO: 43543 - DNA, 25 bp, SARS Virus
catgtgtcaccagtgacaaaaagaa

SEQ ID NO: 43544 - DNA, 25 bp, SARS Virus
atgtgtcaccagggacaaaaagaaa

SEQ ID NO: 43545 - DNA, 25 bp, SARS Virus
tgtgtcaccagtgacaaaaagaaac

SEQ ID NO: 43546 - DNA, 25 bp, SARS Virus
gtgtcaccagtggcaaaaagaaaca

SEQ ID NO: 43547 - DNA, 25 bp, SARS Virus
tgtcaccagtgagaaaaagaaacaa

SEQ ID NO: 43548 - DNA, 25 bp, SARS Virus
gtcaccagtgacgaaaagaaacaaa

SEQ ID NO: 43549 - DNA, 25 bp, SARS Virus
tcaccagtgacagaaagaaacaaat

SEQ ID NO: 43550 - DNA, 25 bp, SARS Virus
caccagtgacaagaagaaacaaatg

SEQ ID NO: 43551 - DNA, 25 bp, SARS Virus
accagtgacaaagagaaacaaatgc

SEQ ID NO: 43552 - DNA, 25 bp, SARS Virus
ccagtgacaaaaggaaacaaatgct

SEQ ID NO: 43553 - DNA, 25 bp, SARS Virus
cagtgacaaaaagaaacaaatgctc

SEQ ID NO: 43554 - DNA, 25 bp, SARS Virus
agtgacaaaaaggaacaaatgctct

SEQ ID NO: 43555 - DNA, 25 bp, SARS Virus
gtgacaaaaagagacaaatgctctt

SEQ ID NO: 43556 - DNA, 25 bp, SARS Virus
tgacaaaaagaagcaaatgctctta

SEQ ID NO: 43557 - DNA, 25 bp, SARS Virus
gacaaaaagaaagaaatgctcttac

SEQ ID NO: 43558 - DNA, 25 bp, SARS Virus
acaaaaagaaacgaatgctcttacg

SEQ ID NO: 43559 - DNA, 25 bp, SARS Virus
caaaaagaaacagatgctcttacga

SEQ ID NO: 43560 - DNA, 25 bp, SARS Virus
aaaaagaaacaagtgctcttacgaa

SEQ ID NO: 43561 - DNA, 25 bp, SARS Virus
tcttccatttaatataccaggtaaa

SEQ ID NO: 43562 - DNA, 25 bp, SARS Virus
cttccatttaagttaccaggtaaac

SEQ ID NO: 43563 - DNA, 25 bp, SARS Virus
ttccatttaagataccaggtaaaca

SEQ ID NO: 43564 - DNA, 25 bp, SARS Virus
tccatttaagattccaggtaaacaa

SEQ ID NO: 43565 - DNA, 25 bp, SARS Virus
ccatttaagatatcaggtaaacaac

SEQ ID NO: 43566 - DNA, 25 bp, SARS Virus
catttaagatactaggtaaacaact

SEQ ID NO: 43567 - DNA, 25 bp, SARS Virus
atttaagatacctggtaaacaactg

SEQ ID NO: 43568 - DNA, 25 bp, SARS Virus
tttaagataccatgtaaacaactgt

SEQ ID NO: 43569 - DNA, 25 bp, SARS Virus
ttaagataccagttaaacaactgtc

SEQ ID NO: 43570 - DNA, 25 bp, SARS Virus
taagataccaggtaaacaactgtct

SEQ ID NO: 43571 - DNA, 25 bp, SARS Virus
aagataccaggttaacaactgtctg

SEQ ID NO: 43572 - DNA, 25 bp, SARS Virus
agataccaggtatacaactgtctgt

SEQ ID NO: 43573 - DNA, 25 bp, SARS Virus
gataccaggtaatcaactgtctgtt

SEQ ID NO: 43574 - DNA, 25 bp, SARS Virus
ataccaggtaaataactgtctgttt

SEQ ID NO: 43575 - DNA, 25 bp, SARS Virus
taccaggtaaactactgtctgtttg

SEQ ID NO: 43576 - DNA, 25 bp, SARS Virus
accaggtaaacatctgtctgtttga

SEQ ID NO: 43577 - DNA, 25 bp, SARS Virus
ccaggtaaacaattgtctgtttgac

SEQ ID NO: 43578 - DNA, 25 bp, SARS Virus
caggtaaacaactgtctgtttgacg

SEQ ID NO: 43579 - DNA, 25 bp, SARS Virus
aggtaaacaactttctgtttgacgt

SEQ ID NO: 43580 - DNA, 25 bp, SARS Virus
ggtaaacaactgtctgtttgacgtg

SEQ ID NO: 43581 - DNA, 25 bp, SARS Virus
gtaaacaactgtttgtttgacgtgt

SEQ ID NO: 43582 - DNA, 25 bp, SARS Virus
taaacaactgtctgtttgacgtgtc

SEQ ID NO: 43583 - DNA, 25 bp, SARS Virus
aaacaactgtctttttgacgtgtcc

SEQ ID NO: 43584 - DNA, 25 bp, SARS Virus
aacaactgtctgtttgacgtgtccg

SEQ ID NO: 43585 - DNA, 25 bp, SARS Virus
acaactgtctgtttgacgtgtccga

SEQ ID NO: 43586 - DNA, 25 bp, SARS Virus
caactgtctgtttgacgtgtccgac

SEQ ID NO: 43587 - DNA, 25 bp, SARS Virus
aactgtctgttttacgtgtccgacg

SEQ ID NO: 43588 - DNA, 25 bp, SARS Virus
actgtctgtttgtcgtgtccgacgt

SEQ ID NO: 43589 - DNA, 25 bp, SARS Virus
ctgtctgtttgatgtgtccgacgtc

SEQ ID NO: 43590 - DNA, 25 bp, SARS Virus
tgtctgtttgacttgtccgacgtcc

SEQ ID NO: 43591 - DNA, 25 bp, SARS Virus
gtctgtttgacgtgtccgacgtcca

SEQ ID NO: 43592 - DNA, 25 bp, SARS Virus
tctgtttgacgtttccgacgtccat

SEQ ID NO: 43593 - DNA, 25 bp, SARS Virus
ctgtttgacgtgtccgacgtccatg

SEQ ID NO: 43594 - DNA, 25 bp, SARS Virus
tgtttgacgtgttcgacgtccatgt

SEQ ID NO: 43595 - DNA, 25 bp, SARS Virus
gtttgacgtgtctgacgtccatgtc

SEQ ID NO: 43596 - DNA, 25 bp, SARS Virus
tttgacgtgtcctacgtccatgtct

SEQ ID NO: 43597 - DNA, 25 bp, SARS Virus
ttgacgtgtccgtcgtccatgtctg

SEQ ID NO: 43598 - DNA, 25 bp, SARS Virus
tgacgtgtccgatgtccatgtctgt

SEQ ID NO: 43599 - DNA, 25 bp, SARS Virus
gacgtgtccgacttccatgtctgtg

SEQ ID NO: 43600 - DNA, 25 bp, SARS Virus
acgtgtccgacgtccatgtctgtgt

SEQ ID NO: 43601 - DNA, 25 bp, SARS Virus
cgtgtccgacgttcatgtctgtgtt

SEQ ID NO: 43602 - DNA, 25 bp, SARS Virus
gtgtccgacgtctatgtctgtgttg

SEQ ID NO: 43603 - DNA, 25 bp, SARS Virus
tgtccgacgtccttgtctgtgttgg

SEQ ID NO: 43604 - DNA, 25 bp, SARS Virus
gtccgacgtccatgtctgtgttggt

SEQ ID NO: 43605 - DNA, 25 bp, SARS Virus
tccgacgtccatttctgtgttggta

SEQ ID NO: 43606 - DNA, 25 bp, SARS Virus
ccgacgtccatgtctgtgttggtat

SEQ ID NO: 43607 - DNA, 25 bp, SARS Virus
cgacgtccatgtttgtgttggtatt

SEQ ID NO: 43608 - DNA, 25 bp, SARS Virus
gacgtccatgtctgtgttggtattg

SEQ ID NO: 43609 - DNA, 25 bp, SARS Virus
acgtccatgtctttgttggtattgt

SEQ ID NO: 43610 - DNA, 25 bp, SARS Virus
cgtccatgtctgtgttggtattgta

SEQ ID NO: 43611 - DNA, 25 bp, SARS Virus
gtccatgtctgttttggtattgtaa

SEQ ID NO: 43612 - DNA, 25 bp, SARS Virus
tccatgtctgtgttggtattgtaat

SEQ ID NO: 43613 - DNA, 25 bp, SARS Virus
ccatgtctgtgttggtattgtaatt

SEQ ID NO: 43614 - DNA, 25 bp, SARS Virus
catgtctgtgtttgtattgtaattt

SEQ ID NO: 43615 - DNA, 25 bp, SARS Virus
atgtctgtgttgttattgtaattta

SEQ ID NO: 43616 - DNA, 25 bp, SARS Virus
tgtctgtgttggtattgtaatttac

SEQ ID NO: 43617 - DNA, 25 bp, SARS Virus
gtctgtgttggttttgtaatttaca

SEQ ID NO: 43618 - DNA, 25 bp, SARS Virus
tctgtgttggtattgtaatttacaa

SEQ ID NO: 43619 - DNA, 25 bp, SARS Virus
ctgtgttggtattgtaatttacaaa

SEQ ID NO: 43620 - DNA, 25 bp, SARS Virus
tgtgttggtattttaatttacaaaa

SEQ ID NO: 43621 - DNA, 25 bp, SARS Virus
gtgttggtattgtaatttacaaaac

SEQ ID NO: 43622 - DNA, 25 bp, SARS Virus
tgttggtattgttatttacaaaacc

SEQ ID NO: 43623 - DNA, 25 bp, SARS Virus
gttggtattgtattttacaaaaccg

SEQ ID NO: 43624 - DNA, 25 bp, SARS Virus
ttggtattgtaatttacaaaaccgt

SEQ ID NO: 43625 - DNA, 25 bp, SARS Virus
tggtattgtaatttacaaaaccgta

SEQ ID NO: 43626 - DNA, 25 bp, SARS Virus
ggtattgtaatttacaaaaccgtac

SEQ ID NO: 43627 - DNA, 25 bp, SARS Virus
gtattgtaattttcaaaaccgtacc

SEQ ID NO: 43628 - DNA, 25 bp, SARS Virus
tattgtaatttataaaaccgtaccg

SEQ ID NO: 43629 - DNA, 25 bp, SARS Virus
attgtaatttactaaaccgtaccga

SEQ ID NO: 43630 - DNA, 25 bp, SARS Virus
ttgtaatttacataaccgtaccgac

SEQ ID NO: 43631 - DNA, 25 bp, SARS Virus
tgtaatttacaataccgtaccgaca

SEQ ID NO: 43632 - DNA, 25 bp, SARS Virus
gtaatttacaaatccgtaccgacat

SEQ ID NO: 43633 - DNA, 25 bp, SARS Virus
taatttacaaaatcgtaccgacata

SEQ ID NO: 43634 - DNA, 25 bp, SARS Virus
aatttacaaaactgtaccgacatac

SEQ ID NO: 43635 - DNA, 25 bp, SARS Virus
atttacaaaaccttaccgacatacg

SEQ ID NO: 43636 - DNA, 25 bp, SARS Virus
tttacaaaaccgtaccgacatacga

SEQ ID NO: 43637 - DNA, 25 bp, SARS Virus
ttacaaaaccgttccgacatacgac

SEQ ID NO: 43638 - DNA, 25 bp, SARS Virus
tacaaaaccgtatcgacatacgacg

SEQ ID NO: 43639 - DNA, 25 bp, SARS Virus
acaaaaccgtactgacatacgacga

SEQ ID NO: 43640 - DNA, 25 bp, SARS Virus
caaaaccgtacctacatacgacgac

SEQ ID NO: 43641 - DNA, 25 bp, SARS Virus
aaaaccgtaccgtcatacgacgaca

SEQ ID NO: 43642 - DNA, 25 bp, SARS Virus
aaaccgtaccgatatacgacgacaa

SEQ ID NO: 43643 - DNA, 25 bp, SARS Virus
aaccgtaccgacttacgacgacaat

SEQ ID NO: 43644 - DNA, 25 bp, SARS Virus
accgtaccgacatacgacgacaata

SEQ ID NO: 43645 - DNA, 25 bp, SARS Virus
ccgtaccgacattcgacgacaatag

SEQ ID NO: 43646 - DNA, 25 bp, SARS Virus
cgtaccgacatatgacgacaatagt

SEQ ID NO: 43647 - DNA, 25 bp, SARS Virus
gtaccgacatactacgacaatagtt

SEQ ID NO: 43648 - DNA, 25 bp, SARS Virus
taccgacatacgtcgacaatagtta

SEQ ID NO: 43649 - DNA, 25 bp, SARS Virus
accgacatacgatgacaatagttac

SEQ ID NO: 43650 - DNA, 25 bp, SARS Virus
ccgacatacgactacaatagttacc

SEQ ID NO: 43651 - DNA, 25 bp, SARS Virus
cgacatacgacgtcaatagttacca

SEQ ID NO: 43652 - DNA, 25 bp, SARS Virus
gacatacgacgataatagttaccac

SEQ ID NO: 43653 - DNA, 25 bp, SARS Virus
acatacgacgactatagttaccact

SEQ ID NO: 43654 - DNA, 25 bp, SARS Virus
catacgacgacattagttaccacta

SEQ ID NO: 43655 - DNA, 25 bp, SARS Virus
atacgacgacaatagttaccactat

SEQ ID NO: 43656 - DNA, 25 bp, SARS Virus
tacgacgacaattgttaccactatc

SEQ ID NO: 43657 - DNA, 25 bp, SARS Virus
acgacgacaatatttaccactatcc

SEQ ID NO: 43658 - DNA, 25 bp, SARS Virus
cgacgacaatagttaccactatcca

SEQ ID NO: 43659 - DNA, 25 bp, SARS Virus
gacgacaatagttaccactatccac

SEQ ID NO: 43660 - DNA, 25 bp, SARS Virus
acgacaatagtttccactatccacc

SEQ ID NO: 43661 - DNA, 25 bp, SARS Virus
cgacaatagttatcactatccacca

SEQ ID NO: 43662 - DNA, 25 bp, SARS Virus
gacaatagttactactatccaccaa

SEQ ID NO: 43663 - DNA, 25 bp, SARS Virus
acaatagttacctctatccaccaaa

SEQ ID NO: 43664 - DNA, 25 bp, SARS Virus
caatagttaccattatccaccaaag

SEQ ID NO: 43665 - DNA, 25 bp, SARS Virus
aatagttaccactatccaccaaaga

SEQ ID NO: 43666 - DNA, 25 bp, SARS Virus
atagttaccactttccaccaaagaa

SEQ ID NO: 43667 - DNA, 25 bp, SARS Virus
tagttaccactatccaccaaagaat

SEQ ID NO: 43668 - DNA, 25 bp, SARS Virus
agttaccactattcaccaaagaatt

SEQ ID NO: 43669 - DNA, 25 bp, SARS Virus
gttaccactatctaccaaagaatta

SEQ ID NO: 43670 - DNA, 25 bp, SARS Virus
ttaccactatcctccaaagaattat

SEQ ID NO: 43671 - DNA, 25 bp, SARS Virus
taccactatccatcaaagaattatc

SEQ ID NO: 43672 - DNA, 25 bp, SARS Virus
accactatccactaaagaattatct

SEQ ID NO: 43673 - DNA, 25 bp, SARS Virus
ccactatccacctaagaattatcta

SEQ ID NO: 43674 - DNA, 25 bp, SARS Virus
cactatccaccatagaattatctaa

SEQ ID NO: 43675 - DNA, 25 bp, SARS Virus
actatccaccaatgaattatctaag

SEQ ID NO: 43676 - DNA, 25 bp, SARS Virus
ctatccaccaaataattatctaagt

SEQ ID NO: 43677 - DNA, 25 bp, SARS Virus
tatccaccaaagtattatctaagtg

SEQ ID NO: 43678 - DNA, 25 bp, SARS Virus
atccaccaaagatttatctaagtgg

SEQ ID NO: 43679 - DNA, 25 bp, SARS Virus
tccaccaaagaattatctaagtggt

SEQ ID NO: 43680 - DNA, 25 bp, SARS Virus
ccaccaaagaattatctaagtggtg

SEQ ID NO: 43681 - DNA, 25 bp, SARS Virus
caccaaagaattttctaagtggtga

SEQ ID NO: 43682 - DNA, 25 bp, SARS Virus
accaaagaattatctaagtggtgat

SEQ ID NO: 43683 - DNA, 25 bp, SARS Virus
ccaaagaattatttaagtggtgatg

SEQ ID NO: 43684 - DNA, 25 bp, SARS Virus
caaagaattatctaagtggtgatga

SEQ ID NO: 43685 - DNA, 25 bp, SARS Virus
aaagaattatcttagtggtgatgaa

SEQ ID NO: 43686 - DNA, 25 bp, SARS Virus
aagaattatctatgtggtgatgaaa

SEQ ID NO: 43687 - DNA, 25 bp, SARS Virus
agaattatctaattggtgatgaaac

SEQ ID NO: 43688 - DNA, 25 bp, SARS Virus
gaattatctaagtggtgatgaaact

SEQ ID NO: 43689 - DNA, 25 bp, SARS Virus
aattatctaagttgtgatgaaactt

SEQ ID NO: 43690 - DNA, 25 bp, SARS Virus
attatctaagtgttgatgaaactta

SEQ ID NO: 43691 - DNA, 25 bp, SARS Virus
ttatctaagtggtgatgaaacttac

SEQ ID NO: 43692 - DNA, 25 bp, SARS Virus
tatctaagtggttatgaaacttact

SEQ ID NO: 43693 - DNA, 25 bp, SARS Virus
atctaagtggtgttgaaacttactg

SEQ ID NO: 43694 - DNA, 25 bp, SARS Virus
tctaagtggtgatgaaacttactga

SEQ ID NO: 43695 - DNA, 25 bp, SARS Virus
ctaagtggtgattaaacttactgaa

SEQ ID NO: 43696 - DNA, 25 bp, SARS Virus
taagtggtgatgtaacttactgaaa

SEQ ID NO: 43697 - DNA, 25 bp, SARS Virus
aagtggtgatgatacttactgaaat

SEQ ID NO: 43698 - DNA, 25 bp, SARS Virus
agtggtgatgaatcttactgaaatt

SEQ ID NO: 43699 - DNA, 25 bp, SARS Virus
gtggtgatgaaatttactgaaattg

SEQ ID NO: 43700 - DNA, 25 bp, SARS Virus
tggtgatgaaacttactgaaattgg

SEQ ID NO: 43701 - DNA, 25 bp, SARS Virus
ggtgatgaaacttactgaaattgga

SEQ ID NO: 43702 - DNA, 25 bp, SARS Virus
gtgatgaaactttctgaaattggaa

SEQ ID NO: 43703 - DNA, 25 bp, SARS Virus
tgatgaaacttattgaaattggaac

SEQ ID NO: 43704 - DNA, 25 bp, SARS Virus
gatgaaacttactgaaattggaaca

SEQ ID NO: 43705 - DNA, 25 bp, SARS Virus
atgaaacttacttaaattggaacac

SEQ ID NO: 43706 - DNA, 25 bp, SARS Virus
tgaaacttactgtaattggaacacc

SEQ ID NO: 43707 - DNA, 25 bp, SARS Virus
gaaacttactgatattggaacaccg

SEQ ID NO: 43708 - DNA, 25 bp, SARS Virus
aaacttactgaatttggaacaccgt

SEQ ID NO: 43709 - DNA, 25 bp, SARS Virus
aacttactgaaattggaacaccgtt

SEQ ID NO: 43710 - DNA, 25 bp, SARS Virus
acttactgaaattggaacaccgtta

SEQ ID NO: 43711 - DNA, 25 bp, SARS Virus
cttactgaaatttgaacaccgttac

SEQ ID NO: 43712 - DNA, 25 bp, SARS Virus
ttactgaaattgtaacaccgttact

SEQ ID NO: 43713 - DNA, 25 bp, SARS Virus
tactgaaattggtacaccgttactt

SEQ ID NO: 43714 - DNA, 25 bp, SARS Virus
actgaaattggatcaccgttacttc

SEQ ID NO: 43715 - DNA, 25 bp, SARS Virus
ctgaaattggaataccgttacttca

SEQ ID NO: 43716 - DNA, 25 bp, SARS Virus
tgaaattggaactccgttacttcat

SEQ ID NO: 43717 - DNA, 25 bp, SARS Virus
gaaattggaacatcgttacttcatg

SEQ ID NO: 43718 - DNA, 25 bp, SARS Virus
aaattggaacactgttacttcatgt

SEQ ID NO: 43719 - DNA, 25 bp, SARS Virus
aattggaacacctttacttcatgtt

SEQ ID NO: 43720 - DNA, 25 bp, SARS Virus
attggaacaccgttacttcatgttg

SEQ ID NO: 43721 - DNA, 25 bp, SARS Virus
ttggaacaccgttacttcatgttga

SEQ ID NO: 43722 - DNA, 25 bp, SARS Virus
tggaacaccgtttcttcatgttgat

SEQ ID NO: 43723 - DNA, 25 bp, SARS Virus
ggaacaccgttatttcatgttgata

SEQ ID NO: 43724 - DNA, 25 bp, SARS Virus
gaacaccgttacttcatgttgatac

SEQ ID NO: 43725 - DNA, 25 bp, SARS Virus
aacaccgttacttcatgttgatact

SEQ ID NO: 43726 - DNA, 25 bp, SARS Virus
acaccgttactttatgttgatactt

SEQ ID NO: 43727 - DNA, 25 bp, SARS Virus
caccgttacttcttgttgatacttg

SEQ ID NO: 43728 - DNA, 25 bp, SARS Virus
accgttacttcatgttgatacttgg

SEQ ID NO: 43729 - DNA, 25 bp, SARS Virus
ccgttacttcattttgatacttgga

SEQ ID NO: 43730 - DNA, 25 bp, SARS Virus
cgttacttcatgttgatacttggaa

SEQ ID NO: 43731 - DNA, 25 bp, SARS Virus
gttacttcatgttgatacttggaaa

SEQ ID NO: 43732 - DNA, 25 bp, SARS Virus
ttacttcatgtttatacttggaaac

SEQ ID NO: 43733 - DNA, 25 bp, SARS Virus
tacttcatgttgttacttggaaact

SEQ ID NO: 43734 - DNA, 25 bp, SARS Virus
acttcatgttgatacttggaaactg

SEQ ID NO: 43735 - DNA, 25 bp, SARS Virus
cttcatgttgattcttggaaactgt

SEQ ID NO: 43736 - DNA, 25 bp, SARS Virus
ttcatgttgatatttggaaactgtg

SEQ ID NO: 43737 - DNA, 25 bp, SARS Virus
tcatgttgatacttggaaactgtgt

SEQ ID NO: 43738 - DNA, 25 bp, SARS Virus
catgttgatacttggaaactgtgtt

SEQ ID NO: 43739 - DNA, 25 bp, SARS Virus
atgttgatactttgaaactgtgttc

SEQ ID NO: 43740 - DNA, 25 bp, SARS Virus
tgttgatacttgtaaactgtgttct

SEQ ID NO: 43741 - DNA, 25 bp, SARS Virus
gttgatacttggtaactgtgttcta

SEQ ID NO: 43742 - DNA, 25 bp, SARS Virus
ttgatacttggatactgtgttctag

SEQ ID NO: 43743 - DNA, 25 bp, SARS Virus
tgatacttggaatctgtgttctagt

SEQ ID NO: 43744 - DNA, 25 bp, SARS Virus
gatacttggaaattgtgttctagta

SEQ ID NO: 43745 - DNA, 25 bp, SARS Virus
atacttggaaactgtgttctagtac

SEQ ID NO: 43746 - DNA, 25 bp, SARS Virus
tacttggaaactttgttctagtaca

SEQ ID NO: 43747 - DNA, 25 bp, SARS Virus
acttggaaactgtgttctagtacaa

SEQ ID NO: 43748 - DNA, 25 bp, SARS Virus
cttggaaactgttttctagtacaac

SEQ ID NO: 43749 - DNA, 25 bp, SARS Virus
ttggaaactgtgttctagtacaact

SEQ ID NO: 43750 - DNA, 25 bp, SARS Virus
tggaaactgtgttctagtacaactg

SEQ ID NO: 43751 - DNA, 25 bp, SARS Virus
ggaaactgtgttttagtacaactgt

SEQ ID NO: 43752 - DNA, 25 bp, SARS Virus
gaaactgtgttctagtacaactgta

SEQ ID NO: 43753 - DNA, 25 bp, SARS Virus
aaactgtgttcttgtacaactgtat

SEQ ID NO: 43754 - DNA, 25 bp, SARS Virus
aactgtgttctattacaactgtata

SEQ ID NO: 43755 - DNA, 25 bp, SARS Virus
actgtgttctagtacaactgtataa

SEQ ID NO: 43756 - DNA, 25 bp, SARS Virus
ctgtgttctagttcaactgtataac

SEQ ID NO: 43757 - DNA, 25 bp, SARS Virus
tgtgttctagtataactgtataacc

SEQ ID NO: 43758 - DNA, 25 bp, SARS Virus
gtgttctagtactactgtataaccc

SEQ ID NO: 43759 - DNA, 25 bp, SARS Virus
tgttctagtacatctgtataaccct

SEQ ID NO: 43760 - DNA, 25 bp, SARS Virus
gttctagtacaattgtataaccctg

SEQ ID NO: 43761 - DNA, 25 bp, SARS Virus
ttctagtacaactgtataaccctgg

SEQ ID NO: 43762 - DNA, 25 bp, SARS Virus
tctagtacaactttataaccctgga

SEQ ID NO: 43763 - DNA, 25 bp, SARS Virus
ctagtacaactgtataaccctggag

SEQ ID NO: 43764 - DNA, 25 bp, SARS Virus
tagtacaactgtttaaccctggaga

SEQ ID NO: 43765 - DNA, 25 bp, SARS Virus
agtacaactgtataaccctggagaa

SEQ ID NO: 43766 - DNA, 25 bp, SARS Virus
gtacaactgtattaccctggagaaa

SEQ ID NO: 43767 - DNA, 25 bp, SARS Virus
tacaactgtatatccctggagaaag

SEQ ID NO: 43768 - DNA, 25 bp, SARS Virus
acaactgtataatcctggagaaaga

SEQ ID NO: 43769 - DNA, 25 bp, SARS Virus
caactgtataactctggagaaagac

SEQ ID NO: 43770 - DNA, 25 bp, SARS Virus
aactgtataaccttggagaaagacg

SEQ ID NO: 43771 - DNA, 25 bp, SARS Virus
actgtataaccctggagaaagacga

SEQ ID NO: 43772 - DNA, 25 bp, SARS Virus
ctgtataacccttgagaaagacgag

SEQ ID NO: 43773 - DNA, 25 bp, SARS Virus
tgtataaccctgtagaaagacgagt

SEQ ID NO: 43774 - DNA, 25 bp, SARS Virus
gtataaccctggtgaaagacgagtt

SEQ ID NO: 43775 - DNA, 25 bp, SARS Virus
tataaccctggataaagacgagttt

SEQ ID NO: 43776 - DNA, 25 bp, SARS Virus
ataaccctggagtaagacgagtttg

SEQ ID NO: 43777 - DNA, 25 bp, SARS Virus
taaccctggagatagacgagtttgt

SEQ ID NO: 43778 - DNA, 25 bp, SARS Virus
aaccctggagaatgacgagtttgtc

SEQ ID NO: 43779 - DNA, 25 bp, SARS Virus
accctggagaaatacgagtttgtcc

SEQ ID NO: 43780 - DNA, 25 bp, SARS Virus
ccctggagaaagtcgagtttgtcct

SEQ ID NO: 43781 - DNA, 25 bp, SARS Virus
cctggagaaagatgagtttgtcctt

SEQ ID NO: 43782 - DNA, 25 bp, SARS Virus
ctggagaaagactagtttgtcctta

SEQ ID NO: 43783 - DNA, 25 bp, SARS Virus
tggagaaagacgtgtttgtccttaa

SEQ ID NO: 43784 - DNA, 25 bp, SARS Virus
ggagaaagacgattttgtccttaac

SEQ ID NO: 43785 - DNA, 25 bp, SARS Virus
gagaaagacgagtttgtccttaacg

SEQ ID NO: 43786 - DNA, 25 bp, SARS Virus
agaaagacgagtttgtccttaacgg

SEQ ID NO: 43787 - DNA, 25 bp, SARS Virus
gaaagacgagtttgtccttaacggc

SEQ ID NO: 43788 - DNA, 25 bp, SARS Virus
aaagacgagtttttccttaacggca

SEQ ID NO: 43789 - DNA, 25 bp, SARS Virus
aagacgagtttgtccttaacggcag

SEQ ID NO: 43790 - DNA, 25 bp, SARS Virus
agacgagtttgttcttaacggcaga

SEQ ID NO: 43791 - DNA, 25 bp, SARS Virus
gacgagtttgtctttaacggcagaa

SEQ ID NO: 43792 - DNA, 25 bp, SARS Virus
acgagtttgtccttaacggcagaat

SEQ ID NO: 43793 - DNA, 25 bp, SARS Virus
cgagtttgtccttaacggcagaatc

SEQ ID NO: 43794 - DNA, 25 bp, SARS Virus
gagtttgtcctttacggcagaatct

SEQ ID NO: 43795 - DNA, 25 bp, SARS Virus
agtttgtccttatcggcagaatcta

SEQ ID NO: 43796 - DNA, 25 bp, SARS Virus
gtttgtccttaatggcagaatctat

SEQ ID NO: 43797 - DNA, 25 bp, SARS Virus
tttgtccttaactgcagaatctata

SEQ ID NO: 43798 - DNA, 25 bp, SARS Virus
ttgtccttaacgtcagaatctatac

SEQ ID NO: 43799 - DNA, 25 bp, SARS Virus
tgtccttaacggtagaatctataca

SEQ ID NO: 43800 - DNA, 25 bp, SARS Virus
gtccttaacggctgaatctatacac

SEQ ID NO: 43801 - DNA, 25 bp, SARS Virus
tccttaacggcataatctatacaca

SEQ ID NO: 43802 - DNA, 25 bp, SARS Virus
ccttaacggcagtatctatacacac

SEQ ID NO: 43803 - DNA, 25 bp, SARS Virus
cttaacggcagattctatacacacg

SEQ ID NO: 43804 - DNA, 25 bp, SARS Virus
ttaacggcagaatctatacacacga

SEQ ID NO: 43805 - DNA, 25 bp, SARS Virus
taacggcagaatttatacacacgac

SEQ ID NO: 43806 - DNA, 25 bp, SARS Virus
aacggcagaatctatacacacgacg

SEQ ID NO: 43807 - DNA, 25 bp, SARS Virus
acggcagaatctttacacacgacga

SEQ ID NO: 43808 - DNA, 25 bp, SARS Virus
cggcagaatctatacacacgacgaa

SEQ ID NO: 43809 - DNA, 25 bp, SARS Virus
ggcagaatctattcacacgacgaaa

SEQ ID NO: 43810 - DNA, 25 bp, SARS Virus
gcagaatctatatacacgacgaaac

SEQ ID NO: 43811 - DNA, 25 bp, SARS Virus
cagaatctatactcacgacgaaact

SEQ ID NO: 43812 - DNA, 25 bp, SARS Virus
agaatctatacatacgacgaaactt

SEQ ID NO: 43813 - DNA, 25 bp, SARS Virus
gaatctatacactcgacgaaacttt

SEQ ID NO: 43814 - DNA, 25 bp, SARS Virus
aatctatacacatgacgaaactttc

SEQ ID NO: 43815 - DNA, 25 bp, SARS Virus
atctatacacactacgaaactttct

SEQ ID NO: 43816 - DNA, 25 bp, SARS Virus
tctatacacacgtcgaaactttctc

SEQ ID NO: 43817 - DNA, 25 bp, SARS Virus
ctatacacacgatgaaactttctcg

SEQ ID NO: 43818 - DNA, 25 bp, SARS Virus
tatacacacgactaaactttctcga

SEQ ID NO: 43819 - DNA, 25 bp, SARS Virus
atacacacgacgtaactttctcgac

SEQ ID NO: 43820 - DNA, 25 bp, SARS Virus
tacacacgacgatactttctcgacg

SEQ ID NO: 43821 - DNA, 25 bp, SARS Virus
acacacgacgaatctttctcgacga

SEQ ID NO: 43822 - DNA, 25 bp, SARS Virus
cacacgacgaaattttctcgacgac

SEQ ID NO: 43823 - DNA, 25 bp, SARS Virus
acacgacgaaactttctcgacgacg

SEQ ID NO: 43824 - DNA, 25 bp, SARS Virus
cacgacgaaactttctcgacgacgt

SEQ ID NO: 43825 - DNA, 25 bp, SARS Virus
acgacgaaactttctcgacgacgtc

SEQ ID NO: 43826 - DNA, 25 bp, SARS Virus
cgacgaaactttttcgacgacgtct

SEQ ID NO: 43827 - DNA, 25 bp, SARS Virus
gacgaaactttctcgacgacgtctt

SEQ ID NO: 43828 - DNA, 25 bp, SARS Virus
acgaaactttcttgacgacgtctta

SEQ ID NO: 43829 - DNA, 25 bp, SARS Virus
cgaaactttctctacgacgtcttac

SEQ ID NO: 43830 - DNA, 25 bp, SARS Virus
gaaactttctcgtcgacgtcttacc

SEQ ID NO: 43831 - DNA, 25 bp, SARS Virus
aaactttctcgatgacgtcttacca

SEQ ID NO: 43832 - DNA, 25 bp, SARS Virus
aactttctcgactacgtcttaccat

SEQ ID NO: 43833 - DNA, 25 bp, SARS Virus
actttctcgacgtcgtcttaccata

SEQ ID NO: 43834 - DNA, 25 bp, SARS Virus
ctttctcgacgatgtcttaccatac

SEQ ID NO: 43835 - DNA, 25 bp, SARS Virus
tttctcgacgacttcttaccatact

SEQ ID NO: 43836 - DNA, 25 bp, SARS Virus
ttctcgacgacgtcttaccatactt

SEQ ID NO: 43837 - DNA, 25 bp, SARS Virus
tctcgacgacgttttaccatactta

SEQ ID NO: 43838 - DNA, 25 bp, SARS Virus
ctcgacgacgtcttaccatacttac

SEQ ID NO: 43839 - DNA, 25 bp, SARS Virus
tcgacgacgtcttaccatacttacc

SEQ ID NO: 43840 - DNA, 25 bp, SARS Virus
cgacgacgtctttccatacttacca

SEQ ID NO: 43841 - DNA, 25 bp, SARS Virus
gacgacgtcttatcatacttaccag

SEQ ID NO: 43842 - DNA, 25 bp, SARS Virus
acgacgtcttactatacttaccagc

SEQ ID NO: 43843 - DNA, 25 bp, SARS Virus
cgacgtcttaccttacttaccagca

SEQ ID NO: 43844 - DNA, 25 bp, SARS Virus
gacgtcttaccatacttaccagcat

SEQ ID NO: 43845 - DNA, 25 bp, SARS Virus
acgtcttaccattcttaccagcatg

SEQ ID NO: 43846 - DNA, 25 bp, SARS Virus
cgtcttaccatatttaccagcatga

SEQ ID NO: 43847 - DNA, 25 bp, SARS Virus
gtcttaccatacttaccagcatgat

SEQ ID NO: 43848 - DNA, 25 bp, SARS Virus
tcttaccatacttaccagcatgata

SEQ ID NO: 43849 - DNA, 25 bp, SARS Virus
cttaccatactttccagcatgatag

SEQ ID NO: 43850 - DNA, 25 bp, SARS Virus
ttaccatacttatcagcatgatagg

SEQ ID NO: 43851 - DNA, 25 bp, SARS Virus
taccatacttactagcatgatagga

SEQ ID NO: 43852 - DNA, 25 bp, SARS Virus
accatacttacctgcatgataggaa

SEQ ID NO: 43853 - DNA, 25 bp, SARS Virus
ccatacttaccatcatgataggaac

SEQ ID NO: 43854 - DNA, 25 bp, SARS Virus
catacttaccagtatgataggaacc

SEQ ID NO: 43855 - DNA, 25 bp, SARS Virus
atacttaccagcttgataggaacca

SEQ ID NO: 43856 - DNA, 25 bp, SARS Virus
tacttaccagcatgataggaaccat

SEQ ID NO: 43857 - DNA, 25 bp, SARS Virus
acttaccagcattataggaaccatc

SEQ ID NO: 43858 - DNA, 25 bp, SARS Virus
cttaccagcatgttaggaaccatcg

SEQ ID NO: 43859 - DNA, 25 bp, SARS Virus
ttaccagcatgataggaaccatcgt

SEQ ID NO: 43860 - DNA, 25 bp, SARS Virus
taccagcatgattggaaccatcgtg

SEQ ID NO: 43861 - DNA, 25 bp, SARS Virus
accagcatgatatgaaccatcgtga

SEQ ID NO: 43862 - DNA, 25 bp, SARS Virus
ccagcatgatagtaaccatcgtgat

SEQ ID NO: 43863 - DNA, 25 bp, SARS Virus
cagcatgataggtaccatcgtgata

SEQ ID NO: 43864 - DNA, 25 bp, SARS Virus
agcatgataggatccatcgtgataa

SEQ ID NO: 43865 - DNA, 25 bp, SARS Virus
gcatgataggaatcatcgtgataaa

SEQ ID NO: 43866 - DNA, 25 bp, SARS Virus
catgataggaactatcgtgataaaa

SEQ ID NO: 43867 - DNA, 25 bp, SARS Virus
atgataggaaccttcgtgataaaat

SEQ ID NO: 43868 - DNA, 25 bp, SARS Virus
tgataggaaccatcgtgataaaatc

SEQ ID NO: 43869 - DNA, 25 bp, SARS Virus
gataggaaccattgtgataaaatct

SEQ ID NO: 43870 - DNA, 25 bp, SARS Virus
ataggaaccatcttgataaaatctt

SEQ ID NO: 43871 - DNA, 25 bp, SARS Virus
taggaaccatcgtgataaaatcttc

SEQ ID NO: 43872 - DNA, 25 bp, SARS Virus
aggaaccatcgttataaaatcttct

SEQ ID NO: 43873 - DNA, 25 bp, SARS Virus
ggaaccatcgtgttaaaatcttcta

SEQ ID NO: 43874 - DNA, 25 bp, SARS Virus
gaaccatcgtgataaaatcttctac

SEQ ID NO: 43875 - DNA, 25 bp, SARS Virus
aaccatcgtgattaaatcttctact

SEQ ID NO: 43876 - DNA, 25 bp, SARS Virus
accatcgtgatataatcttctactc

SEQ ID NO: 43877 - DNA, 25 bp, SARS Virus
ccatcgtgataatatcttctactca

SEQ ID NO: 43878 - DNA, 25 bp, SARS Virus
catcgtgataaattcttctactcaa

SEQ ID NO: 43879 - DNA, 25 bp, SARS Virus
atcgtgataaaatcttctactcaaa

SEQ ID NO: 43880 - DNA, 25 bp, SARS Virus
tcgtgataaaattttctactcaaat

SEQ ID NO: 43881 - DNA, 25 bp, SARS Virus
cgtgataaaatcttctactcaaatg

SEQ ID NO: 43882 - DNA, 25 bp, SARS Virus
gtgataaaatcttctactcaaatgt

SEQ ID NO: 43883 - DNA, 25 bp, SARS Virus
tgataaaatcttttactcaaatgtg

SEQ ID NO: 43884 - DNA, 25 bp, SARS Virus
gataaaatcttctactcaaatgtgg

SEQ ID NO: 43885 - DNA, 25 bp, SARS Virus
ataaaatcttcttctcaaatgtggt

SEQ ID NO: 43886 - DNA, 25 bp, SARS Virus
taaaatcttctattcaaatgtggta

SEQ ID NO: 43887 - DNA, 25 bp, SARS Virus
aaaatcttctactcaaatgtggtaa

SEQ ID NO: 43888 - DNA, 25 bp, SARS Virus
aaatcttctacttaaatgtggtaaa

SEQ ID NO: 43889 - DNA, 25 bp, SARS Virus
aatcttctactctaatgtggtaaac

SEQ ID NO: 43890 - DNA, 25 bp, SARS Virus
atcttctactcatatgtggtaaact

SEQ ID NO: 43891 - DNA, 25 bp, SARS Virus
tcttctactcaattgtggtaaacta

SEQ ID NO: 43892 - DNA, 25 bp, SARS Virus
cttctactcaaatgtggtaaactac

SEQ ID NO: 43893 - DNA, 25 bp, SARS Virus
ttctactcaaatttggtaaactaca

SEQ ID NO: 43894 - DNA, 25 bp, SARS Virus
tctactcaaatgtggtaaactacaa

SEQ ID NO: 43895 - DNA, 25 bp, SARS Virus
ctactcaaatgttgtaaactacaac

SEQ ID NO: 43896 - DNA, 25 bp, SARS Virus
tactcaaatgtgttaaactacaaca

SEQ ID NO: 43897 - DNA, 25 bp, SARS Virus
actcaaatgtggtaaactacaacaa

SEQ ID NO: 43898 - DNA, 25 bp, SARS Virus
ctcaaatgtggttaactacaacaat

SEQ ID NO: 43899 - DNA, 25 bp, SARS Virus
tcaaatgtggtatactacaacaatc

SEQ ID NO: 43900 - DNA, 25 bp, SARS Virus
caaatgtggtaatctacaacaatct

SEQ ID NO: 43901 - DNA, 25 bp, SARS Virus
aaatgtggtaaattacaacaatctg

SEQ ID NO: 43902 - DNA, 25 bp, SARS Virus
aatgtggtaaactacaacaatctgt

SEQ ID NO: 43903 - DNA, 25 bp, SARS Virus
atgtggtaaacttcaacaatctgtt

SEQ ID NO: 43904 - DNA, 25 bp, SARS Virus
tgtggtaaactataacaatctgtta

SEQ ID NO: 43905 - DNA, 25 bp, SARS Virus
gtggtaaactactacaatctgttac

SEQ ID NO: 43906 - DNA, 25 bp, SARS Virus
tggtaaactacatcaatctgttacg

SEQ ID NO: 43907 - DNA, 25 bp, SARS Virus
ggtaaactacaataatctgttacga

SEQ ID NO: 43908 - DNA, 25 bp, SARS Virus
gtaaactacaactatctgttacgag

SEQ ID NO: 43909 - DNA, 25 bp, SARS Virus
taaactacaacattctgttacgaga

SEQ ID NO: 43910 - DNA, 25 bp, SARS Virus
aaactacaacaatctgttacgagac

SEQ ID NO: 43911 - DNA, 25 bp, SARS Virus
aactacaacaatttgttacgagacc

SEQ ID NO: 43912 - DNA, 25 bp, SARS Virus
actacaacaatctgttacgagacca

SEQ ID NO: 43913 - DNA, 25 bp, SARS Virus
ctacaacaatcttttacgagaccac

SEQ ID NO: 43914 - DNA, 25 bp, SARS Virus
tacaacaatctgttacgagaccaca

SEQ ID NO: 43915 - DNA, 25 bp, SARS Virus
acaacaatctgttacgagaccacaa

SEQ ID NO: 43916 - DNA, 25 bp, SARS Virus
caacaatctgtttcgagaccacaat

SEQ ID NO: 43917 - DNA, 25 bp, SARS Virus
aacaatctgttatgagaccacaatg

SEQ ID NO: 43918 - DNA, 25 bp, SARS Virus
acaatctgttactagaccacaatgg

SEQ ID NO: 43919 - DNA, 25 bp, SARS Virus
caatctgttacgtgaccacaatgga

SEQ ID NO: 43920 - DNA, 25 bp, SARS Virus
aatctgttacgataccacaatggaa

SEQ ID NO: 43921 - DNA, 25 bp, SARS Virus
atctgttacgagtccacaatggaag

SEQ ID NO: 43922 - DNA, 25 bp, SARS Virus
tctgttacgagatcacaatggaagg

SEQ ID NO: 43923 - DNA, 25 bp, SARS Virus
ctgttacgagactacaatggaaggt

SEQ ID NO: 43924 - DNA, 25 bp, SARS Virus
tgttacgagacctcaatggaaggtt

SEQ ID NO: 43925 - DNA, 25 bp, SARS Virus
gttacgagaccataatggaaggttc

SEQ ID NO: 43926 - DNA, 25 bp, SARS Virus
ttacgagaccactatggaaggttcc

SEQ ID NO: 43927 - DNA, 25 bp, SARS Virus
tacgagaccacattggaaggttcca

SEQ ID NO: 43928 - DNA, 25 bp, SARS Virus
acgagaccacaatggaaggttccat

SEQ ID NO: 43929 - DNA, 25 bp, SARS Virus
cgagaccacaattgaaggttccatt

SEQ ID NO: 43930 - DNA, 25 bp, SARS Virus
gagaccacaatgtaaggttccattc

SEQ ID NO: 43931 - DNA, 25 bp, SARS Virus
agaccacaatggtaggttccattca

SEQ ID NO: 43932 - DNA, 25 bp, SARS Virus
gaccacaatggatggttccattcaa

SEQ ID NO: 43933 - DNA, 25 bp, SARS Virus
accacaatggaatgttccattcaag

SEQ ID NO: 43934 - DNA, 25 bp, SARS Virus
ccacaatggaagtttccattcaagt

SEQ ID NO: 43935 - DNA, 25 bp, SARS Virus
cacaatggaaggttccattcaagtt

SEQ ID NO: 43936 - DNA, 25 bp, SARS Virus
acaatggaaggttccattcaagttc

SEQ ID NO: 43937 - DNA, 25 bp, SARS Virus
caatggaaggtttcattcaagttct

SEQ ID NO: 43938 - DNA, 25 bp, SARS Virus
aatggaaggttctattcaagttctt

SEQ ID NO: 43939 - DNA, 25 bp, SARS Virus
atggaaggttcctttcaagttcttt

SEQ ID NO: 43940 - DNA, 25 bp, SARS Virus
tggaaggttccattcaagttctttt

SEQ ID NO: 43941 - DNA, 25 bp, SARS Virus
ggaaggttccattcaagttctttta

SEQ ID NO: 43942 - DNA, 25 bp, SARS Virus
gaaggttccatttaagttcttttaa

SEQ ID NO: 43943 - DNA, 25 bp, SARS Virus
aaggttccattctagttcttttaac

SEQ ID NO: 43944 - DNA, 25 bp, SARS Virus
aggttccattcatgttcttttaaca

SEQ ID NO: 43945 - DNA, 25 bp, SARS Virus
ggttccattcaatttcttttaacaa

SEQ ID NO: 43946 - DNA, 25 bp, SARS Virus
gttccattcaagttcttttaacaat

SEQ ID NO: 43947 - DNA, 25 bp, SARS Virus
ttccattcaagttcttttaacaatt

SEQ ID NO: 43948 - DNA, 25 bp, SARS Virus
tccattcaagtttttttaacaattc

SEQ ID NO: 43949 - DNA, 25 bp, SARS Virus
ccattcaagttcttttaacaattcc

SEQ ID NO: 43950 - DNA, 25 bp, SARS Virus
cattcaagttcttttaacaattccc

SEQ ID NO: 43951 - DNA, 25 bp, SARS Virus
attcaagttcttttaacaattcccg

SEQ ID NO: 43952 - DNA, 25 bp, SARS Virus
ttcaagttcttttaacaattcccgt

SEQ ID NO: 43953 - DNA, 25 bp, SARS Virus
tcaagttctttttacaattcccgtg

SEQ ID NO: 43954 - DNA, 25 bp, SARS Virus
caagttcttttatcaattcccgtga

SEQ ID NO: 43955 - DNA, 25 bp, SARS Virus
aagttcttttaataattcccgtgag

SEQ ID NO: 43956 - DNA, 25 bp, SARS Virus
agttcttttaactattcccgtgagt

SEQ ID NO: 43957 - DNA, 25 bp, SARS Virus
gttcttttaacatttcccgtgagta

SEQ ID NO: 43958 - DNA, 25 bp, SARS Virus
ttcttttaacaattcccgtgagtag

SEQ ID NO: 43959 - DNA, 25 bp, SARS Virus
tcttttaacaattcccgtgagtagt

SEQ ID NO: 43960 - DNA, 25 bp, SARS Virus
cttttaacaatttccgtgagtagta

SEQ ID NO: 43961 - DNA, 25 bp, SARS Virus
ttttaacaattctcgtgagtagtaa

SEQ ID NO: 43962 - DNA, 25 bp, SARS Virus
tttaacaattcctgtgagtagtaac

SEQ ID NO: 43963 - DNA, 25 bp, SARS Virus
ttaacaattcccttgagtagtaacc

SEQ ID NO: 43964 - DNA, 25 bp, SARS Virus
taacaattcccgtgagtagtaacct

SEQ ID NO: 43965 - DNA, 25 bp, SARS Virus
aacaattcccgttagtagtaaccta

SEQ ID NO: 43966 - DNA, 25 bp, SARS Virus
acaattcccgtgtgtagtaacctac

SEQ ID NO: 43967 - DNA, 25 bp, SARS Virus
caattcccgtgattagtaacctacg

SEQ ID NO: 43968 - DNA, 25 bp, SARS Virus
aattcccgtgagtagtaacctacga

SEQ ID NO: 43969 - DNA, 25 bp, SARS Virus
attcccgtgagttgtaacctacgaa

SEQ ID NO: 43970 - DNA, 25 bp, SARS Virus
ttcccgtgagtattaacctacgaaa

SEQ ID NO: 43971 - DNA, 25 bp, SARS Virus
tcccgtgagtagtaacctacgaaaa

SEQ ID NO: 43972 - DNA, 25 bp, SARS Virus
cccgtgagtagttacctacgaaaat

SEQ ID NO: 43973 - DNA, 25 bp, SARS Virus
ccgtgagtagtatcctacgaaaatt

SEQ ID NO: 43974 - DNA, 25 bp, SARS Virus
cgtgagtagtaatctacgaaaattg

SEQ ID NO: 43975 - DNA, 25 bp, SARS Virus
gtgagtagtaacttacgaaaattga

SEQ ID NO: 43976 - DNA, 25 bp, SARS Virus
tgagtagtaacctacgaaaattgaa

SEQ ID NO: 43977 - DNA, 25 bp, SARS Virus
gagtagtaaccttcgaaaattgaaa

SEQ ID NO: 43978 - DNA, 25 bp, SARS Virus
agtagtaacctatgaaaattgaaag

SEQ ID NO: 43979 - DNA, 25 bp, SARS Virus
gtagtaacctactaaaattgaaaga

SEQ ID NO: 43980 - DNA, 25 bp, SARS Virus
tagtaacctacgtaaattgaaagaa

SEQ ID NO: 43981 - DNA, 25 bp, SARS Virus
agtaacctacgataattgaaagaac

SEQ ID NO: 43982 - DNA, 25 bp, SARS Virus
gtaacctacgaatattgaaagaact

SEQ ID NO: 43983 - DNA, 25 bp, SARS Virus
taacctacgaaatttgaaagaactg

SEQ ID NO: 43984 - DNA, 25 bp, SARS Virus
aacctacgaaaattgaaagaactgt

SEQ ID NO: 43985 - DNA, 25 bp, SARS Virus
acctacgaaaattgaaagaactgta

SEQ ID NO: 43986 - DNA, 25 bp, SARS Virus
cctacgaaaatttaaagaactgtag

SEQ ID NO: 43987 - DNA, 25 bp, SARS Virus
ctacgaaaattgtaagaactgtagt

SEQ ID NO: 43988 - DNA, 25 bp, SARS Virus
tacgaaaattgatagaactgtagtg

SEQ ID NO: 43989 - DNA, 25 bp, SARS Virus
acgaaaattgaatgaactgtagtga

SEQ ID NO: 43990 - DNA, 25 bp, SARS Virus
cgaaaattgaaataactgtagtgat

SEQ ID NO: 43991 - DNA, 25 bp, SARS Virus
gaaaattgaaagtactgtagtgata

SEQ ID NO: 43992 - DNA, 25 bp, SARS Virus
aaaattgaaagatctgtagtgataa

SEQ ID NO: 43993 - DNA, 25 bp, SARS Virus
aaattgaaagaattgtagtgataac

SEQ ID NO: 43994 - DNA, 25 bp, SARS Virus
aattgaaagaactgtagtgataact

SEQ ID NO: 43995 - DNA, 25 bp, SARS Virus
attgaaagaactttagtgataacta

SEQ ID NO: 43996 - DNA, 25 bp, SARS Virus
ttgaaagaactgtagtgataactaa

SEQ ID NO: 43997 - DNA, 25 bp, SARS Virus
tgaaagaactgttgtgataactaag

SEQ ID NO: 43998 - DNA, 25 bp, SARS Virus
gaaagaactgtattgataactaaga

SEQ ID NO: 43999 - DNA, 25 bp, SARS Virus
aaagaactgtagtgataactaagaa

SEQ ID NO: 44000 - DNA, 25 bp, SARS Virus
aagaactgtagttataactaagaac

SEQ ID NO: 44001 - DNA, 25 bp, SARS Virus
agaactgtagtgttaactaagaaca

SEQ ID NO: 44002 - DNA, 25 bp, SARS Virus
gaactgtagtgataactaagaacaa

SEQ ID NO: 44003 - DNA, 25 bp, SARS Virus
aactgtagtgattactaagaacaag

SEQ ID NO: 44004 - DNA, 25 bp, SARS Virus
actgtagtgatatctaagaacaagt

SEQ ID NO: 44005 - DNA, 25 bp, SARS Virus
ctgtagtgataattaagaacaagtt

SEQ ID NO: 44006 - DNA, 25 bp, SARS Virus
tgtagtgataactaagaacaagttt

SEQ ID NO: 44007 - DNA, 25 bp, SARS Virus
gtagtgataacttagaacaagtttc

SEQ ID NO: 44008 - DNA, 25 bp, SARS Virus
tagtgataactatgaacaagtttca

SEQ ID NO: 44009 - DNA, 25 bp, SARS Virus
agtgataactaataacaagtttcat

SEQ ID NO: 44010 - DNA, 25 bp, SARS Virus
gtgataactaagtacaagtttcatg

SEQ ID NO: 44011 - DNA, 25 bp, SARS Virus
tgataactaagatcaagtttcatgt

SEQ ID NO: 44012 - DNA, 25 bp, SARS Virus
gataactaagaataagtttcatgtg

SEQ ID NO: 44013 - DNA, 25 bp, SARS Virus
ataactaagaactagtttcatgtgt

SEQ ID NO: 44014 - DNA, 25 bp, SARS Virus
taactaagaacatgtttcatgtgtc

SEQ ID NO: 44015 - DNA, 25 bp, SARS Virus
aactaagaacaattttcatgtgtca

SEQ ID NO: 44016 - DNA, 25 bp, SARS Virus
actaagaacaagtttcatgtgtcac

SEQ ID NO: 44017 - DNA, 25 bp, SARS Virus
ctaagaacaagtttcatgtgtcacc

SEQ ID NO: 44018 - DNA, 25 bp, SARS Virus
taagaacaagtttcatgtgtcacca

SEQ ID NO: 44019 - DNA, 25 bp, SARS Virus
aagaacaagttttatgtgtcaccag

SEQ ID NO: 44020 - DNA, 25 bp, SARS Virus
agaacaagtttcttgtgtcaccagt

SEQ ID NO: 44021 - DNA, 25 bp, SARS Virus
gaacaagtttcatgtgtcaccagtg

SEQ ID NO: 44022 - DNA, 25 bp, SARS Virus
aacaagtttcatttgtcaccagtga

SEQ ID NO: 44023 - DNA, 25 bp, SARS Virus
acaagtttcatgtgtcaccagtgac

SEQ ID NO: 44024 - DNA, 25 bp, SARS Virus
caagtttcatgtttcaccagtgaca

SEQ ID NO: 44025 - DNA, 25 bp, SARS Virus
aagtttcatgtgtcaccagtgacaa

SEQ ID NO: 44026 - DNA, 25 bp, SARS Virus
agtttcatgtgttaccagtgacaaa

SEQ ID NO: 44027 - DNA, 25 bp, SARS Virus
gtttcatgtgtctccagtgacaaaa

SEQ ID NO: 44028 - DNA, 25 bp, SARS Virus
tttcatgtgtcatcagtgacaaaaa

SEQ ID NO: 44029 - DNA, 25 bp, SARS Virus
ttcatgtgtcactagtgacaaaaag

SEQ ID NO: 44030 - DNA, 25 bp, SARS Virus
tcatgtgtcacctgtgacaaaaaga

SEQ ID NO: 44031 - DNA, 25 bp, SARS Virus
catgtgtcaccattgacaaaaagaa

SEQ ID NO: 44032 - DNA, 25 bp, SARS Virus
atgtgtcaccagtgacaaaaagaaa

SEQ ID NO: 44033 - DNA, 25 bp, SARS Virus
tgtgtcaccagttacaaaaagaaac

SEQ ID NO: 44034 - DNA, 25 bp, SARS Virus
gtgtcaccagtgtcaaaaagaaaca

SEQ ID NO: 44035 - DNA, 25 bp, SARS Virus
tgtcaccagtgataaaaagaaacaa

SEQ ID NO: 44036 - DNA, 25 bp, SARS Virus
gtcaccagtgactaaaagaaacaaa

SEQ ID NO: 44037 - DNA, 25 bp, SARS Virus
tcaccagtgacataaagaaacaaat

SEQ ID NO: 44038 - DNA, 25 bp, SARS Virus
caccagtgacaataagaaacaaatg

SEQ ID NO: 44039 - DNA, 25 bp, SARS Virus
accagtgacaaatagaaacaaatgc

SEQ ID NO: 44040 - DNA, 25 bp, SARS Virus
ccagtgacaaaatgaaacaaatgct

SEQ ID NO: 44041 - DNA, 25 bp, SARS Virus
cagtgacaaaaataaacaaatgctc

SEQ ID NO: 44042 - DNA, 25 bp, SARS Virus
agtgacaaaaagtaacaaatgctct

SEQ ID NO: 44043 - DNA, 25 bp, SARS Virus
gtgacaaaaagatacaaatgctctt

SEQ ID NO: 44044 - DNA, 25 bp, SARS Virus
tgacaaaaagaatcaaatgctctta

SEQ ID NO: 44045 - DNA, 25 bp, SARS Virus
gacaaaaagaaataaatgctcttac

SEQ ID NO: 44046 - DNA, 25 bp, SARS Virus
acaaaaagaaactaatgctcttacg

SEQ ID NO: 44047 - DNA, 25 bp, SARS Virus
caaaaagaaacatatgctcttacga

SEQ ID NO: 44048 - DNA, 25 bp, SARS Virus
aaaaagaaacaattgctcttacgaa

SEQ ID NO: 44049 - DNA, 25 bp, SARS Virus
aaaagaaacaaaagctcttacgaaa

SEQ ID NO: 44050 - DNA, 25 bp, SARS Virus
aaagaaacaaatactcttacgaaag

SEQ ID NO: 44051 - DNA, 25 bp, SARS Virus
aagaaacaaatgatcttacgaaaga

SEQ ID NO: 44052 - DNA, 25 bp, SARS Virus
agaaacaaatgcacttacgaaagaa

SEQ ID NO: 44053 - DNA, 25 bp, SARS Virus
gaaacaaatgctattacgaaagaac

SEQ ID NO: 44054 - DNA, 25 bp, SARS Virus
aaacaaatgctcatacgaaagaacg

SEQ ID NO: 44055 - DNA, 25 bp, SARS Virus
aacaaatgctctaacgaaagaacgg

SEQ ID NO: 44056 - DNA, 25 bp, SARS Virus
acaaatgctcttacgaaagaacggt

SEQ ID NO: 44057 - DNA, 25 bp, SARS Virus
caaatgctcttaagaaagaacggta

SEQ ID NO: 44058 - DNA, 25 bp, SARS Virus
aaatgctcttacaaaagaacggtaa

SEQ ID NO: 44059 - DNA, 25 bp, SARS Virus
aatgctcttacgaaagaacggtaaa

SEQ ID NO: 44060 - DNA, 25 bp, SARS Virus
atgctcttacgaaagaacggtaaat

SEQ ID NO: 44061 - DNA, 25 bp, SARS Virus
tgctcttacgaaagaacggtaaatg

SEQ ID NO: 44062 - DNA, 25 bp, SARS Virus
gctcttacgaaaaaacggtaaatga

SEQ ID NO: 44063 - DNA, 25 bp, SARS Virus
ctcttacgaaagaacggtaaatgag

SEQ ID NO: 44064 - DNA, 25 bp, SARS Virus
tcttacgaaagaacggtaaatgaga

SEQ ID NO: 44065 - DNA, 25 bp, SARS Virus
cttacgaaagaaaggtaaatgagaa

SEQ ID NO: 44066 - DNA, 25 bp, SARS Virus
ttacgaaagaacagtaaatgagaac

SEQ ID NO: 44067 - DNA, 25 bp, SARS Virus
tacgaaagaacgataaatgagaacc

SEQ ID NO: 44068 - DNA, 25 bp, SARS Virus
acgaaagaacggaaaatgagaacca

SEQ ID NO: 44069 - DNA, 25 bp, SARS Virus
cgaaagaacggtaaatgagaaccat

SEQ ID NO: 44070 - DNA, 25 bp, SARS Virus
gaaagaacggtaaatgagaaccata

SEQ ID NO: 44071 - DNA, 25 bp, SARS Virus
aaagaacggtaaatgagaaccataa

SEQ ID NO: 44072 - DNA, 25 bp, SARS Virus
aagaacggtaaaagagaaccataat

SEQ ID NO: 44073 - DNA, 25 bp, SARS Virus
agaacggtaaataagaaccataata

SEQ ID NO: 44074 - DNA, 25 bp, SARS Virus
gaacggtaaatgagaaccataatac

SEQ ID NO: 44075 - DNA, 25 bp, SARS Virus
aacggtaaatgaaaaccataatacc

SEQ ID NO: 44076 - DNA, 25 bp, SARS Virus
acggtaaatgagaaccataataccg

SEQ ID NO: 44077 - DNA, 25 bp, SARS Virus
cggtaaatgagaaccataataccgt

SEQ ID NO: 44078 - DNA, 25 bp, SARS Virus
ggtaaatgagaaacataataccgtt

SEQ ID NO: 44079 - DNA, 25 bp, SARS Virus
gtaaatgagaacaataataccgtta

SEQ ID NO: 44080 - DNA, 25 bp, SARS Virus
taaatgagaaccataataccgttaa

SEQ ID NO: 44081 - DNA, 25 bp, SARS Virus
aaatgagaaccaaaataccgttaac

SEQ ID NO: 44082 - DNA, 25 bp, SARS Virus
aatgagaaccataataccgttaacg

SEQ ID NO: 44083 - DNA, 25 bp, SARS Virus
atgagaaccataataccgttaacga

SEQ ID NO: 44084 - DNA, 25 bp, SARS Virus
tgagaaccataaaaccgttaacgac

SEQ ID NO: 44085 - DNA, 25 bp, SARS Virus
gagaaccataataccgttaacgacg

SEQ ID NO: 44086 - DNA, 25 bp, SARS Virus
agaaccataataacgttaacgacgt

SEQ ID NO: 44087 - DNA, 25 bp, SARS Virus
gaaccataatacagttaacgacgta

SEQ ID NO: 44088 - DNA, 25 bp, SARS Virus
aaccataataccattaacgacgtac

SEQ ID NO: 44089 - DNA, 25 bp, SARS Virus
accataataccgataacgacgtaca

SEQ ID NO: 44090 - DNA, 25 bp, SARS Virus
ccataataccgtaaacgacgtacac

SEQ ID NO: 44091 - DNA, 25 bp, SARS Virus
cataataccgttaacgacgtacacg

SEQ ID NO: 44092 - DNA, 25 bp, SARS Virus
ataataccgttaacgacgtacacga

SEQ ID NO: 44093 - DNA, 25 bp, SARS Virus
taataccgttaaagacgtacacgat

SEQ ID NO: 44094 - DNA, 25 bp, SARS Virus
aataccgttaacaacgtacacgata

SEQ ID NO: 44095 - DNA, 25 bp, SARS Virus
ataccgttaacgacgtacacgatac

SEQ ID NO: 44096 - DNA, 25 bp, SARS Virus
taccgttaacgaagtacacgatacg

SEQ ID NO: 44097 - DNA, 25 bp, SARS Virus
accgttaacgacatacacgatacga

SEQ ID NO: 44098 - DNA, 25 bp, SARS Virus
ccgttaacgacgaacacgatacgac

SEQ ID NO: 44099 - DNA, 25 bp, SARS Virus
cgttaacgacgtacacgatacgacg

SEQ ID NO: 44100 - DNA, 25 bp, SARS Virus
gttaacgacgtaaacgatacgacga

SEQ ID NO: 44101 - DNA, 25 bp, SARS Virus
ttaacgacgtacacgatacgacgaa

SEQ ID NO: 44102 - DNA, 25 bp, SARS Virus
taacgacgtacaagatacgacgaac

SEQ ID NO: 44103 - DNA, 25 bp, SARS Virus
aacgacgtacacaatacgacgaaca

SEQ ID NO: 44104 - DNA, 25 bp, SARS Virus
acgacgtacacgatacgacgaacaa

SEQ ID NO: 44105 - DNA, 25 bp, SARS Virus
cgacgtacacgaaacgacgaacaat

SEQ ID NO: 44106 - DNA, 25 bp, SARS Virus
gacgtacacgatacgacgaacaatt

SEQ ID NO: 44107 - DNA, 25 bp, SARS Virus
acgtacacgataagacgaacaattc

SEQ ID NO: 44108 - DNA, 25 bp, SARS Virus
cgtacacgatacaacgaacaattcg

SEQ ID NO: 44109 - DNA, 25 bp, SARS Virus
gtacacgatacgacgaacaattcgt

SEQ ID NO: 44110 - DNA, 25 bp, SARS Virus
tacacgatacgaagaacaattcgta

SEQ ID NO: 44111 - DNA, 25 bp, SARS Virus
acacgatacgacaaacaattcgtat

SEQ ID NO: 44112 - DNA, 25 bp, SARS Virus
cacgatacgacgaacaattcgtatt

SEQ ID NO: 44113 - DNA, 25 bp, SARS Virus
acgatacgacgaacaattcgtattc

SEQ ID NO: 44114 - DNA, 25 bp, SARS Virus
cgatacgacgaaaaattcgtattcg

SEQ ID NO: 44115 - DNA, 25 bp, SARS Virus
gatacgacgaacaattcgtattcgt

SEQ ID NO: 44116 - DNA, 25 bp, SARS Virus
atacgacgaacaattcgtattcgtg

SEQ ID NO: 44117 - DNA, 25 bp, SARS Virus
tacgacgaacaaatcgtattcgtgc

SEQ ID NO: 44118 - DNA, 25 bp, SARS Virus
acgacgaacaatacgtattcgtgcg

SEQ ID NO: 44119 - DNA, 25 bp, SARS Virus
cgacgaacaattagtattcgtgcgt

SEQ ID NO: 44120 - DNA, 25 bp, SARS Virus
gacgaacaattcatattcgtgcgta

SEQ ID NO: 44121 - DNA, 25 bp, SARS Virus
acgaacaattcgaattcgtgcgtaa

SEQ ID NO: 44122 - DNA, 25 bp, SARS Virus
cgaacaattcgtattcgtgcgtaag

SEQ ID NO: 44123 - DNA, 25 bp, SARS Virus
gaacaattcgtaatcgtgcgtaaga

SEQ ID NO: 44124 - DNA, 25 bp, SARS Virus
aacaattcgtatacgtgcgtaagaa

SEQ ID NO: 44125 - DNA, 25 bp, SARS Virus
acaattcgtattagtgcgtaagaac

SEQ ID NO: 44126 - DNA, 25 bp, SARS Virus
caattcgtattcatgcgtaagaaca

SEQ ID NO: 44127 - DNA, 25 bp, SARS Virus
aattcgtattcgagcgtaagaacac

SEQ ID NO: 44128 - DNA, 25 bp, SARS Virus
attcgtattcgtacgtaagaacacg

SEQ ID NO: 44129 - DNA, 25 bp, SARS Virus
ttcgtattcgtgagtaagaacacga

SEQ ID NO: 44130 - DNA, 25 bp, SARS Virus
tcgtattcgtgcataagaacacgaa

SEQ ID NO: 44131 - DNA, 25 bp, SARS Virus
cgtattcgtgcgaaagaacacgaac

SEQ ID NO: 44132 - DNA, 25 bp, SARS Virus
gtattcgtgcgtaagaacacgaaca

SEQ ID NO: 44133 - DNA, 25 bp, SARS Virus
tattcgtgcgtaagaacacgaacaa

SEQ ID NO: 44134 - DNA, 25 bp, SARS Virus
attcgtgcgtaaaaacacgaacaaa

SEQ ID NO: 44135 - DNA, 25 bp, SARS Virus
ttcgtgcgtaagaacacgaacaaag

SEQ ID NO: 44136 - DNA, 25 bp, SARS Virus
tcgtgcgtaagaacacgaacaaaga

SEQ ID NO: 44137 - DNA, 25 bp, SARS Virus
cgtgcgtaagaaaacgaacaaagac

SEQ ID NO: 44138 - DNA, 25 bp, SARS Virus
gtgcgtaagaacacgaacaaagaca

SEQ ID NO: 44139 - DNA, 25 bp, SARS Virus
tgcgtaagaacaagaacaaagacaa

SEQ ID NO: 44140 - DNA, 25 bp, SARS Virus
gcgtaagaacacaaacaaagacaat

SEQ ID NO: 44141 - DNA, 25 bp, SARS Virus
cgtaagaacacgaacaaagacaatg

SEQ ID NO: 44142 - DNA, 25 bp, SARS Virus
gtaagaacacgaacaaagacaatgg

SEQ ID NO: 44143 - DNA, 25 bp, SARS Virus
taagaacacgaaaaaagacaatgga

SEQ ID NO: 44144 - DNA, 25 bp, SARS Virus
aagaacacgaacaaagacaatggaa

SEQ ID NO: 44145 - DNA, 25 bp, SARS Virus
agaacacgaacaaagacaatggaag

SEQ ID NO: 44146 - DNA, 25 bp, SARS Virus
gaacacgaacaaagacaatggaaga

SEQ ID NO: 44147 - DNA, 25 bp, SARS Virus
aacacgaacaaaaacaatggaagag

SEQ ID NO: 44148 - DNA, 25 bp, SARS Virus
acacgaacaaagacaatggaagaga

SEQ ID NO: 44149 - DNA, 25 bp, SARS Virus
cacgaacaaagaaaatggaagagaa

SEQ ID NO: 44150 - DNA, 25 bp, SARS Virus
acgaacaaagacaatggaagagaac

SEQ ID NO: 44151 - DNA, 25 bp, SARS Virus
cgaacaaagacaatggaagagaacg

SEQ ID NO: 44152 - DNA, 25 bp, SARS Virus
gaacaaagacaaaggaagagaacgt

SEQ ID NO: 44153 - DNA, 25 bp, SARS Virus
aacaaagacaatagaagagaacgtt

SEQ ID NO: 44154 - DNA, 25 bp, SARS Virus
acaaagacaatgaaagagaacgttg

SEQ ID NO: 44155 - DNA, 25 bp, SARS Virus
caaagacaatggaagagaacgttgt

SEQ ID NO: 44156 - DNA, 25 bp, SARS Virus
aaagacaatggaagagaacgttgtc

SEQ ID NO: 44157 - DNA, 25 bp, SARS Virus
aagacaatggaaaagaacgttgtca

SEQ ID NO: 44158 - DNA, 25 bp, SARS Virus
agacaatggaagagaacgttgtcaa

SEQ ID NO: 44159 - DNA, 25 bp, SARS Virus
gacaatggaagaaaacgttgtcaac

SEQ ID NO: 44160 - DNA, 25 bp, SARS Virus
acaatggaagagaacgttgtcaacg

SEQ ID NO: 44161 - DNA, 25 bp, SARS Virus
caatggaagagaacgttgtcaacga

SEQ ID NO: 44162 - DNA, 25 bp, SARS Virus
aatggaagagaaagttgtcaacgaa

SEQ ID NO: 44163 - DNA, 25 bp, SARS Virus
atggaagagaacattgtcaacgaat

SEQ ID NO: 44164 - DNA, 25 bp, SARS Virus
tggaagagaacgatgtcaacgaatg

SEQ ID NO: 44165 - DNA, 25 bp, SARS Virus
ggaagagaacgtagtcaacgaatga

SEQ ID NO: 44166 - DNA, 25 bp, SARS Virus
gaagagaacgttatcaacgaatgaa

SEQ ID NO: 44167 - DNA, 25 bp, SARS Virus
aagagaacgttgacaacgaatgaaa

SEQ ID NO: 44168 - DNA, 25 bp, SARS Virus
agagaacgttgtaaacgaatgaaat

SEQ ID NO: 44169 - DNA, 25 bp, SARS Virus
gagaacgttgtcaacgaatgaaatt

SEQ ID NO: 44170 - DNA, 25 bp, SARS Virus
agaacgttgtcaacgaatgaaatta

SEQ ID NO: 44171 - DNA, 25 bp, SARS Virus
gaacgttgtcaaagaatgaaattat

SEQ ID NO: 44172 - DNA, 25 bp, SARS Virus
aacgttgtcaacaaatgaaattata

SEQ ID NO: 44173 - DNA, 25 bp, SARS Virus
acgttgtcaacgaatgaaattatac

SEQ ID NO: 44174 - DNA, 25 bp, SARS Virus
cgttgtcaacgaatgaaattatacc

SEQ ID NO: 44175 - DNA, 25 bp, SARS Virus
gttgtcaacgaaagaaattatacca

SEQ ID NO: 44176 - DNA, 25 bp, SARS Virus
ttgtcaacgaataaaattataccag

SEQ ID NO: 44177 - DNA, 25 bp, SARS Virus
tgtcaacgaatgaaattataccaga

SEQ ID NO: 44178 - DNA, 25 bp, SARS Virus
gtcaacgaatgaaattataccagat

SEQ ID NO: 44179 - DNA, 25 bp, SARS Virus
tcaacgaatgaaattataccagatg

SEQ ID NO: 44180 - DNA, 25 bp, SARS Virus
caacgaatgaaaatataccagatgt

SEQ ID NO: 44181 - DNA, 25 bp, SARS Virus
aacgaatgaaataataccagatgta

SEQ ID NO: 44182 - DNA, 25 bp, SARS Virus
acgaatgaaattataccagatgtac

SEQ ID NO: 44183 - DNA, 25 bp, SARS Virus
cgaatgaaattaaaccagatgtacg

SEQ ID NO: 44184 - DNA, 25 bp, SARS Virus
gaatgaaattataccagatgtacgg

SEQ ID NO: 44185 - DNA, 25 bp, SARS Virus
aatgaaattataacagatgtacgga

SEQ ID NO: 44186 - DNA, 25 bp, SARS Virus
atgaaattatacaagatgtacggac

SEQ ID NO: 44187 - DNA, 25 bp, SARS Virus
tgaaattataccagatgtacggacg

SEQ ID NO: 44188 - DNA, 25 bp, SARS Virus
gaaattataccaaatgtacggacga

SEQ ID NO: 44189 - DNA, 25 bp, SARS Virus
aaattataccagatgtacggacgat

SEQ ID NO: 44190 - DNA, 25 bp, SARS Virus
aattataccagaagtacggacgatc

SEQ ID NO: 44191 - DNA, 25 bp, SARS Virus
attataccagatatacggacgatcg

SEQ ID NO: 44192 - DNA, 25 bp, SARS Virus
ttataccagatgaacggacgatcga

SEQ ID NO: 44193 - DNA, 25 bp, SARS Virus
tataccagatgtacggacgatcgac

SEQ ID NO: 44194 - DNA, 25 bp, SARS Virus
ataccagatgtaaggacgatcgacc

SEQ ID NO: 44195 - DNA, 25 bp, SARS Virus
taccagatgtacagacgatcgaccc

SEQ ID NO: 44196 - DNA, 25 bp, SARS Virus
accagatgtacgaacgatcgaccca

SEQ ID NO: 44197 - DNA, 25 bp, SARS Virus
ccagatgtacggacgatcgacccac

SEQ ID NO: 44198 - DNA, 25 bp, SARS Virus
cagatgtacggaagatcgacccact

SEQ ID NO: 44199 - DNA, 25 bp, SARS Virus
agatgtacggacaatcgacccacta

SEQ ID NO: 44200 - DNA, 25 bp, SARS Virus
gatgtacggacgatcgacccactac

SEQ ID NO: 44201 - DNA, 25 bp, SARS Virus
atgtacggacgaacgacccactacg

SEQ ID NO: 44202 - DNA, 25 bp, SARS Virus
tgtacggacgatagacccactacgc

SEQ ID NO: 44203 - DNA, 25 bp, SARS Virus
gtacggacgatcaacccactacgca

SEQ ID NO: 44204 - DNA, 25 bp, SARS Virus
tacggacgatcgacccactacgcat

SEQ ID NO: 44205 - DNA, 25 bp, SARS Virus
acggacgatcgaaccactacgcata

SEQ ID NO: 44206 - DNA, 25 bp, SARS Virus
cggacgatcgacacactacgcatag

SEQ ID NO: 44207 - DNA, 25 bp, SARS Virus
ggacgatcgaccaactacgcatagt

SEQ ID NO: 44208 - DNA, 25 bp, SARS Virus
gacgatcgacccactacgcatagta

SEQ ID NO: 44209 - DNA, 25 bp, SARS Virus
acgatcgacccaatacgcatagtac

SEQ ID NO: 44210 - DNA, 25 bp, SARS Virus
cgatcgacccacaacgcatagtact

SEQ ID NO: 44211 - DNA, 25 bp, SARS Virus
gatcgacccactacgcatagtactg

SEQ ID NO: 44212 - DNA, 25 bp, SARS Virus
atcgacccactaagcatagtactgt

SEQ ID NO: 44213 - DNA, 25 bp, SARS Virus
tcgacccactacacatagtactgta

SEQ ID NO: 44214 - DNA, 25 bp, SARS Virus
cgacccactacgaatagtactgtac

SEQ ID NO: 44215 - DNA, 25 bp, SARS Virus
gacccactacgcatagtactgtacc

SEQ ID NO: 44216 - DNA, 25 bp, SARS Virus
acccactacgcaaagtactgtaccg

SEQ ID NO: 44217 - DNA, 25 bp, SARS Virus
cccactacgcatagtactgtaccga

SEQ ID NO: 44218 - DNA, 25 bp, SARS Virus
ccactacgcataatactgtaccgaa

SEQ ID NO: 44219 - DNA, 25 bp, SARS Virus
cactacgcatagaactgtaccgaac

SEQ ID NO: 44220 - DNA, 25 bp, SARS Virus
actacgcatagtactgtaccgaact

SEQ ID NO: 44221 - DNA, 25 bp, SARS Virus
ctacgcatagtaatgtaccgaactt

SEQ ID NO: 44222 - DNA, 25 bp, SARS Virus
tacgcatagtacagtaccgaactta

SEQ ID NO: 44223 - DNA, 25 bp, SARS Virus
acgcatagtactataccgaacttaa

SEQ ID NO: 44224 - DNA, 25 bp, SARS Virus
cgcatagtactgaaccgaacttaac

SEQ ID NO: 44225 - DNA, 25 bp, SARS Virus
gcatagtactgtaccgaacttaacc

SEQ ID NO: 44226 - DNA, 25 bp, SARS Virus
catagtactgtaacgaacttaaccg

SEQ ID NO: 44227 - DNA, 25 bp, SARS Virus
atagtactgtacagaacttaaccga

SEQ ID NO: 44228 - DNA, 25 bp, SARS Virus
tagtactgtaccaaacttaaccgac

SEQ ID NO: 44229 - DNA, 25 bp, SARS Virus
agtactgtaccgaacttaaccgact

SEQ ID NO: 44230 - DNA, 25 bp, SARS Virus
gtactgtaccgaacttaaccgactg

SEQ ID NO: 44231 - DNA, 25 bp, SARS Virus
tactgtaccgaaattaaccgactgt

SEQ ID NO: 44232 - DNA, 25 bp, SARS Virus
actgtaccgaacataaccgactgtg

SEQ ID NO: 44233 - DNA, 25 bp, SARS Virus
ctgtaccgaactaaaccgactgtga

SEQ ID NO: 44234 - DNA, 25 bp, SARS Virus
tgtaccgaacttaaccgactgtgat

SEQ ID NO: 44235 - DNA, 25 bp, SARS Virus
gtaccgaacttaaccgactgtgatc

SEQ ID NO: 44236 - DNA, 25 bp, SARS Virus
taccgaacttaaacgactgtgatcg

SEQ ID NO: 44237 - DNA, 25 bp, SARS Virus
accgaacttaacagactgtgatcga

SEQ ID NO: 44238 - DNA, 25 bp, SARS Virus
ccgaacttaaccaactgtgatcgaa

SEQ ID NO: 44239 - DNA, 25 bp, SARS Virus
cgaacttaaccgactgtgatcgaac

SEQ ID NO: 44240 - DNA, 25 bp, SARS Virus
gaacttaaccgaatgtgatcgaaca

SEQ ID NO: 44241 - DNA, 25 bp, SARS Virus
aacttaaccgacagtgatcgaacag

SEQ ID NO: 44242 - DNA, 25 bp, SARS Virus
acttaaccgactatgatcgaacaga

SEQ ID NO: 44243 - DNA, 25 bp, SARS Virus
cttaaccgactgagatcgaacagac

SEQ ID NO: 44244 - DNA, 25 bp, SARS Virus
ttaaccgactgtaatcgaacagacc

SEQ ID NO: 44245 - DNA, 25 bp, SARS Virus
taaccgactgtgatcgaacagacca

SEQ ID NO: 44246 - DNA, 25 bp, SARS Virus
aaccgactgtgaacgaacagaccaa

SEQ ID NO: 44247 - DNA, 25 bp, SARS Virus
accgactgtgatagaacagaccaat

SEQ ID NO: 44248 - DNA, 25 bp, SARS Virus
ccgactgtgatcaaacagaccaata

SEQ ID NO: 44249 - DNA, 25 bp, SARS Virus
cgactgtgatcgaacagaccaatat

SEQ ID NO: 44250 - DNA, 25 bp, SARS Virus
gactgtgatcgaacagaccaatatc

SEQ ID NO: 44251 - DNA, 25 bp, SARS Virus
actgtgatcgaaaagaccaatatcc

SEQ ID NO: 44252 - DNA, 25 bp, SARS Virus
ctgtgatcgaacagaccaatatccg

SEQ ID NO: 44253 - DNA, 25 bp, SARS Virus
tgtgatcgaacaaaccaatatccga

SEQ ID NO: 44254 - DNA, 25 bp, SARS Virus
gtgatcgaacagaccaatatccgaa

SEQ ID NO: 44255 - DNA, 25 bp, SARS Virus
tgatcgaacagaacaatatccgaat

SEQ ID NO: 44256 - DNA, 25 bp, SARS Virus
gatcgaacagacaaatatccgaatt

SEQ ID NO: 44257 - DNA, 25 bp, SARS Virus
atcgaacagaccaatatccgaattc

SEQ ID NO: 44258 - DNA, 25 bp, SARS Virus
tcgaacagaccaatatccgaattcc

SEQ ID NO: 44259 - DNA, 25 bp, SARS Virus
cgaacagaccaaaatccgaattcct

SEQ ID NO: 44260 - DNA, 25 bp, SARS Virus
gaacagaccaatatccgaattccta

SEQ ID NO: 44261 - DNA, 25 bp, SARS Virus
aacagaccaataaccgaattcctaa

SEQ ID NO: 44262 - DNA, 25 bp, SARS Virus
acagaccaatatacgaattcctaac

SEQ ID NO: 44263 - DNA, 25 bp, SARS Virus
cagaccaatatcagaattcctaaca

SEQ ID NO: 44264 - DNA, 25 bp, SARS Virus
agaccaatatccaaattcctaacac

SEQ ID NO: 44265 - DNA, 25 bp, SARS Virus
gaccaatatccgaattcctaacaca

SEQ ID NO: 44266 - DNA, 25 bp, SARS Virus
accaatatccgaattcctaacacaa

SEQ ID NO: 44267 - DNA, 25 bp, SARS Virus
ccaatatccgaaatcctaacacaat

SEQ ID NO: 44268 - DNA, 25 bp, SARS Virus
caatatccgaatacctaacacaata

SEQ ID NO: 44269 - DNA, 25 bp, SARS Virus
aatatccgaattactaacacaatac

SEQ ID NO: 44270 - DNA, 25 bp, SARS Virus
atatccgaattcataacacaataca

SEQ ID NO: 44271 - DNA, 25 bp, SARS Virus
tatccgaattccaaacacaatacat

SEQ ID NO: 44272 - DNA, 25 bp, SARS Virus
atccgaattcctaacacaatacata

SEQ ID NO: 44273 - DNA, 25 bp, SARS Virus
tccgaattcctaacacaatacatac

SEQ ID NO: 44274 - DNA, 25 bp, SARS Virus
ccgaattcctaaaacaatacatacg

SEQ ID NO: 44275 - DNA, 25 bp, SARS Virus
cgaattcctaacacaatacatacga

SEQ ID NO: 44276 - DNA, 25 bp, SARS Virus
gaattcctaacaaaatacatacgaa

SEQ ID NO: 44277 - DNA, 25 bp, SARS Virus
aattcctaacacaatacatacgaag

SEQ ID NO: 44278 - DNA, 25 bp, SARS Virus
attcctaacacaatacatacgaagt

SEQ ID NO: 44279 - DNA, 25 bp, SARS Virus
ttcctaacacaaaacatacgaagtc

SEQ ID NO: 44280 - DNA, 25 bp, SARS Virus
tcctaacacaatacatacgaagtcg

SEQ ID NO: 44281 - DNA, 25 bp, SARS Virus
cctaacacaataaatacgaagtcga

SEQ ID NO: 44282 - DNA, 25 bp, SARS Virus
ctaacacaatacatacgaagtcgaa

SEQ ID NO: 44283 - DNA, 25 bp, SARS Virus
taacacaatacaaacgaagtcgaaa

SEQ ID NO: 44284 - DNA, 25 bp, SARS Virus
aacacaatacatacgaagtcgaaat

SEQ ID NO: 44285 - DNA, 25 bp, SARS Virus
acacaatacataagaagtcgaaatc

SEQ ID NO: 44286 - DNA, 25 bp, SARS Virus
cacaatacatacaaagtcgaaatca

SEQ ID NO: 44287 - DNA, 25 bp, SARS Virus
acaatacatacgaagtcgaaatcaa

SEQ ID NO: 44288 - DNA, 25 bp, SARS Virus
caatacatacgaagtcgaaatcaaa

SEQ ID NO: 44289 - DNA, 25 bp, SARS Virus
aatacatacgaaatcgaaatcaaaa

SEQ ID NO: 44290 - DNA, 25 bp, SARS Virus
atacatacgaagacgaaatcaaaac

SEQ ID NO: 44291 - DNA, 25 bp, SARS Virus
tacatacgaagtagaaatcaaaacg

SEQ ID NO: 44292 - DNA, 25 bp, SARS Virus
acatacgaagtcaaaatcaaaacga

SEQ ID NO: 44293 - DNA, 25 bp, SARS Virus
catacgaagtcgaaatcaaaacgaa

SEQ ID NO: 44294 - DNA, 25 bp, SARS Virus
atacgaagtcgaaatcaaaacgaat

SEQ ID NO: 44295 - DNA, 25 bp, SARS Virus
tacgaagtcgaaatcaaaacgaata

SEQ ID NO: 44296 - DNA, 25 bp, SARS Virus
acgaagtcgaaaacaaaacgaataa

SEQ ID NO: 44297 - DNA, 25 bp, SARS Virus
cgaagtcgaaataaaaacgaataag

SEQ ID NO: 44298 - DNA, 25 bp, SARS Virus
gaagtcgaaatcaaaacgaataaga

SEQ ID NO: 44299 - DNA, 25 bp, SARS Virus
aagtcgaaatcaaaacgaataagag

SEQ ID NO: 44300 - DNA, 25 bp, SARS Virus
agtcgaaatcaaaacgaataagagt

SEQ ID NO: 44301 - DNA, 25 bp, SARS Virus
gtcgaaatcaaaacgaataagagta

SEQ ID NO: 44302 - DNA, 25 bp, SARS Virus
tcgaaatcaaaaagaataagagtac

SEQ ID NO: 44303 - DNA, 25 bp, SARS Virus
cgaaatcaaaacaaataagagtact

SEQ ID NO: 44304 - DNA, 25 bp, SARS Virus
gaaatcaaaacgaataagagtactg

SEQ ID NO: 44305 - DNA, 25 bp, SARS Virus
aaatcaaaacgaataagagtactgt

SEQ ID NO: 44306 - DNA, 25 bp, SARS Virus
aatcaaaacgaaaaagagtactgtc

SEQ ID NO: 44307 - DNA, 25 bp, SARS Virus
atcaaaacgaataagagtactgtcg

SEQ ID NO: 44308 - DNA, 25 bp, SARS Virus
tcaaaacgaataagagtactgtcga

SEQ ID NO: 44309 - DNA, 25 bp, SARS Virus
caaaacgaataaaagtactgtcgag

SEQ ID NO: 44310 - DNA, 25 bp, SARS Virus
aaaacgaataagagtactgtcgagc

SEQ ID NO: 44311 - DNA, 25 bp, SARS Virus
aaacgaataagaatactgtcgagcg

SEQ ID NO: 44312 - DNA, 25 bp, SARS Virus
aacgaataagagaactgtcgagcgt

SEQ ID NO: 44313 - DNA, 25 bp, SARS Virus
acgaataagagtactgtcgagcgtg

SEQ ID NO: 44314 - DNA, 25 bp, SARS Virus
cgaataagagtaatgtcgagcgtga

SEQ ID NO: 44315 - DNA, 25 bp, SARS Virus
gaataagagtacagtcgagcgtgac

SEQ ID NO: 44316 - DNA, 25 bp, SARS Virus
aataagagtactatcgagcgtgaca

SEQ ID NO: 44317 - DNA, 25 bp, SARS Virus
ataagagtactgacgagcgtgacaa

SEQ ID NO: 44318 - DNA, 25 bp, SARS Virus
taagagtactgtagagcgtgacaaa

SEQ ID NO: 44319 - DNA, 25 bp, SARS Virus
aagagtactgtcaagcgtgacaaat

SEQ ID NO: 44320 - DNA, 25 bp, SARS Virus
agagtactgtcgagcgtgacaaata

SEQ ID NO: 44321 - DNA, 25 bp, SARS Virus
gagtactgtcgaacgtgacaaatac

SEQ ID NO: 44322 - DNA, 25 bp, SARS Virus
agtactgtcgagagtgacaaatact

SEQ ID NO: 44323 - DNA, 25 bp, SARS Virus
gtactgtcgagcatgacaaatacta

SEQ ID NO: 44324 - DNA, 25 bp, SARS Virus
tactgtcgagcgagacaaatactac

SEQ ID NO: 44325 - DNA, 25 bp, SARS Virus
actgtcgagcgtaacaaatactact

SEQ ID NO: 44326 - DNA, 25 bp, SARS Virus
ctgtcgagcgtgacaaatactacta

SEQ ID NO: 44327 - DNA, 25 bp, SARS Virus
tgtcgagcgtgaaaaatactactac

SEQ ID NO: 44328 - DNA, 25 bp, SARS Virus
gtcgagcgtgacaaatactactacg

SEQ ID NO: 44329 - DNA, 25 bp, SARS Virus
tcgagcgtgacaaatactactacga

SEQ ID NO: 44330 - DNA, 25 bp, SARS Virus
cgagcgtgacaaatactactacgac

SEQ ID NO: 44331 - DNA, 25 bp, SARS Virus
gagcgtgacaaaaactactacgacg

SEQ ID NO: 44332 - DNA, 25 bp, SARS Virus
agcgtgacaaatactactacgacga

SEQ ID NO: 44333 - DNA, 25 bp, SARS Virus
gcgtgacaaataatactacgacgat

SEQ ID NO: 44334 - DNA, 25 bp, SARS Virus
cgtgacaaatacaactacgacgatc

SEQ ID NO: 44335 - DNA, 25 bp, SARS Virus
gtgacaaatactactacgacgatct

SEQ ID NO: 44336 - DNA, 25 bp, SARS Virus
tgacaaatactaatacgacgatctg

SEQ ID NO: 44337 - DNA, 25 bp, SARS Virus
gacaaatactacaacgacgatctgc

SEQ ID NO: 44338 - DNA, 25 bp, SARS Virus
acaaatactactacgacgatctgca

SEQ ID NO: 44339 - DNA, 25 bp, SARS Virus
caaatactactaagacgatctgcac

SEQ ID NO: 44340 - DNA, 25 bp, SARS Virus
aaatactactacaacgatctgcaca

SEQ ID NO: 44341 - DNA, 25 bp, SARS Virus
aatactactacgacgatctgcacaa

SEQ ID NO: 44342 - DNA, 25 bp, SARS Virus
atactactacgaagatctgcacaaa

SEQ ID NO: 44343 - DNA, 25 bp, SARS Virus
tactactacgacaatctgcacaaac

SEQ ID NO: 44344 - DNA, 25 bp, SARS Virus
actactacgacgatctgcacaaacc

SEQ ID NO: 44345 - DNA, 25 bp, SARS Virus
ctactacgacgaactgcacaaacct

SEQ ID NO: 44346 - DNA, 25 bp, SARS Virus
tactacgacgatatgcacaaacctg

SEQ ID NO: 44347 - DNA, 25 bp, SARS Virus
actacgacgatcagcacaaacctgt

SEQ ID NO: 44348 - DNA, 25 bp, SARS Virus
ctacgacgatctacacaaacctgtg

SEQ ID NO: 44349 - DNA, 25 bp, SARS Virus
tacgacgatctgaacaaacctgtga

SEQ ID NO: 44350 - DNA, 25 bp, SARS Virus
acgacgatctgcacaaacctgtgac

SEQ ID NO: 44351 - DNA, 25 bp, SARS Virus
cgacgatctgcaaaaacctgtgact

SEQ ID NO: 44352 - DNA, 25 bp, SARS Virus
gacgatctgcacaaacctgtgacta

SEQ ID NO: 44353 - DNA, 25 bp, SARS Virus
acgatctgcacaaacctgtgactac

SEQ ID NO: 44354 - DNA, 25 bp, SARS Virus
cgatctgcacaaacctgtgactact

SEQ ID NO: 44355 - DNA, 25 bp, SARS Virus
gatctgcacaaaactgtgactactt

SEQ ID NO: 44356 - DNA, 25 bp, SARS Virus
atctgcacaaacatgtgactactta

SEQ ID NO: 44357 - DNA, 25 bp, SARS Virus
tctgcacaaaccagtgactacttac

SEQ ID NO: 44358 - DNA, 25 bp, SARS Virus
ctgcacaaacctatgactacttaca

SEQ ID NO: 44359 - DNA, 25 bp, SARS Virus
tgcacaaacctgagactacttacag

SEQ ID NO: 44360 - DNA, 25 bp, SARS Virus
gcacaaacctgtaactacttacagt

SEQ ID NO: 44361 - DNA, 25 bp, SARS Virus
cacaaacctgtgactacttacagta

SEQ ID NO: 44362 - DNA, 25 bp, SARS Virus
acaaacctgtgaatacttacagtaa

SEQ ID NO: 44363 - DNA, 25 bp, SARS Virus
caaacctgtgacaacttacagtaat

SEQ ID NO: 44364 - DNA, 25 bp, SARS Virus
aaacctgtgactacttacagtaatg

SEQ ID NO: 44365 - DNA, 25 bp, SARS Virus
aacctgtgactaattacagtaatgt

SEQ ID NO: 44366 - DNA, 25 bp, SARS Virus
acctgtgactacatacagtaatgtg

SEQ ID NO: 44367 - DNA, 25 bp, SARS Virus
cctgtgactactaacagtaatgtga

SEQ ID NO: 44368 - DNA, 25 bp, SARS Virus
ctgtgactacttacagtaatgtgaa

SEQ ID NO: 44369 - DNA, 25 bp, SARS Virus
tgtgactacttaaagtaatgtgaac

SEQ ID NO: 44370 - DNA, 25 bp, SARS Virus
gtgactacttacagtaatgtgaaca

SEQ ID NO: 44371 - DNA, 25 bp, SARS Virus
tgactacttacaataatgtgaacaa

SEQ ID NO: 44372 - DNA, 25 bp, SARS Virus
gactacttacagaaatgtgaacaaa

SEQ ID NO: 44373 - DNA, 25 bp, SARS Virus
actacttacagtaatgtgaacaaat

SEQ ID NO: 44374 - DNA, 25 bp, SARS Virus
ctacttacagtaatgtgaacaaatg

SEQ ID NO: 44375 - DNA, 25 bp, SARS Virus
tacttacagtaaagtgaacaaatgt

SEQ ID NO: 44376 - DNA, 25 bp, SARS Virus
acttacagtaatatgaacaaatgtt

SEQ ID NO: 44377 - DNA, 25 bp, SARS Virus
cttacagtaatgagaacaaatgttt

SEQ ID NO: 44378 - DNA, 25 bp, SARS Virus
ttacagtaatgtaaacaaatgtttc

SEQ ID NO: 44379 - DNA, 25 bp, SARS Virus
tacagtaatgtgaacaaatgtttca

SEQ ID NO: 44380 - DNA, 25 bp, SARS Virus
acagtaatgtgaacaaatgtttcag

SEQ ID NO: 44381 - DNA, 25 bp, SARS Virus
cagtaatgtgaaaaaatgtttcaga

SEQ ID NO: 44382 - DNA, 25 bp, SARS Virus
agtaatgtgaacaaatgtttcagat

SEQ ID NO: 44383 - DNA, 25 bp, SARS Virus
gtaatgtgaacaaatgtttcagatg

SEQ ID NO: 44384 - DNA, 25 bp, SARS Virus
taatgtgaacaaatgtttcagatga

SEQ ID NO: 44385 - DNA, 25 bp, SARS Virus
aatgtgaacaaaagtttcagatgat

SEQ ID NO: 44386 - DNA, 25 bp, SARS Virus
atgtgaacaaatatttcagatgata

SEQ ID NO: 44387 - DNA, 25 bp, SARS Virus
tgtgaacaaatgattcagatgatac

SEQ ID NO: 44388 - DNA, 25 bp, SARS Virus
gtgaacaaatgtatcagatgatacc

SEQ ID NO: 44389 - DNA, 25 bp, SARS Virus
tgaacaaatgttacagatgatacca

SEQ ID NO: 44390 - DNA, 25 bp, SARS Virus
gaacaaatgtttaagatgataccat

SEQ ID NO: 44391 - DNA, 25 bp, SARS Virus
aacaaatgtttcagatgataccatt

SEQ ID NO: 44392 - DNA, 25 bp, SARS Virus
acaaatgtttcaaatgataccatta

SEQ ID NO: 44393 - DNA, 25 bp, SARS Virus
caaatgtttcagatgataccattac

SEQ ID NO: 44394 - DNA, 25 bp, SARS Virus
aaatgtttcagaagataccattacg

SEQ ID NO: 44395 - DNA, 25 bp, SARS Virus
aatgtttcagataataccattacga

SEQ ID NO: 44396 - DNA, 25 bp, SARS Virus
atgtttcagatgataccattacgaa

SEQ ID NO: 44397 - DNA, 25 bp, SARS Virus
tgtttcagatgaaaccattacgaaa

SEQ ID NO: 44398 - DNA, 25 bp, SARS Virus
gtttcagatgataccattacgaaat

SEQ ID NO: 44399 - DNA, 25 bp, SARS Virus
tttcagatgataacattacgaaatc

SEQ ID NO: 44400 - DNA, 25 bp, SARS Virus
ttcagatgatacaattacgaaatct

SEQ ID NO: 44401 - DNA, 25 bp, SARS Virus
tcagatgataccattacgaaatcta

SEQ ID NO: 44402 - DNA, 25 bp, SARS Virus
cagatgataccaatacgaaatctag

SEQ ID NO: 44403 - DNA, 25 bp, SARS Virus
agatgataccataacgaaatctagt

SEQ ID NO: 44404 - DNA, 25 bp, SARS Virus
gatgataccattacgaaatctagtt

SEQ ID NO: 44405 - DNA, 25 bp, SARS Virus
atgataccattaagaaatctagttc

SEQ ID NO: 44406 - DNA, 25 bp, SARS Virus
tgataccattacaaaatctagttcg

SEQ ID NO: 44407 - DNA, 25 bp, SARS Virus
gataccattacgaaatctagttcga

SEQ ID NO: 44408 - DNA, 25 bp, SARS Virus
ataccattacgaaatctagttcgat

SEQ ID NO: 44409 - DNA, 25 bp, SARS Virus
taccattacgaaatctagttcgata

SEQ ID NO: 44410 - DNA, 25 bp, SARS Virus
accattacgaaaactagttcgataa

SEQ ID NO: 44411 - DNA, 25 bp, SARS Virus
ccattacgaaatatagttcgataaa

SEQ ID NO: 44412 - DNA, 25 bp, SARS Virus
cattacgaaatcaagttcgataaag

SEQ ID NO: 44413 - DNA, 25 bp, SARS Virus
attacgaaatctagttcgataaagg

SEQ ID NO: 44414 - DNA, 25 bp, SARS Virus
ttacgaaatctaattcgataaaggt

SEQ ID NO: 44415 - DNA, 25 bp, SARS Virus
tacgaaatctagatcgataaaggta

SEQ ID NO: 44416 - DNA, 25 bp, SARS Virus
acgaaatctagtacgataaaggtac

SEQ ID NO: 44417 - DNA, 25 bp, SARS Virus
cgaaatctagttagataaaggtaca

SEQ ID NO: 44418 - DNA, 25 bp, SARS Virus
gaaatctagttcaataaaggtacac

SEQ ID NO: 44419 - DNA, 25 bp, SARS Virus
aaatctagttcgataaaggtacacc

SEQ ID NO: 44420 - DNA, 25 bp, SARS Virus
aatctagttcgaaaaaggtacaccc

SEQ ID NO: 44421 - DNA, 25 bp, SARS Virus
atctagttcgataaaggtacacccg

SEQ ID NO: 44422 - DNA, 25 bp, SARS Virus
tctagttcgataaaggtacacccgg

SEQ ID NO: 44423 - DNA, 25 bp, SARS Virus
ctagttcgataaaggtacacccgga

SEQ ID NO: 44424 - DNA, 25 bp, SARS Virus
tagttcgataaaagtacacccggaa

SEQ ID NO: 44425 - DNA, 25 bp, SARS Virus
agttcgataaagatacacccggaat

SEQ ID NO: 44426 - DNA, 25 bp, SARS Virus
gttcgataaaggaacacccggaatc

SEQ ID NO: 44427 - DNA, 25 bp, SARS Virus
ttcgataaaggtacacccggaatca

SEQ ID NO: 44428 - DNA, 25 bp, SARS Virus
tcgataaaggtaaacccggaatcaa

SEQ ID NO: 44429 - DNA, 25 bp, SARS Virus
cgataaaggtacacccggaatcaat

SEQ ID NO: 44430 - DNA, 25 bp, SARS Virus
gataaaggtacaaccggaatcaata

SEQ ID NO: 44431 - DNA, 25 bp, SARS Virus
ataaaggtacacacggaatcaataa

SEQ ID NO: 44432 - DNA, 25 bp, SARS Virus
taaaggtacaccaggaatcaataaa

SEQ ID NO: 44433 - DNA, 25 bp, SARS Virus
aaaggtacacccagaatcaataaag

SEQ ID NO: 44434 - DNA, 25 bp, SARS Virus
aaggtacacccgaaatcaataaaga

SEQ ID NO: 44435 - DNA, 25 bp, SARS Virus
aggtacacccggaatcaataaagac

SEQ ID NO: 44436 - DNA, 25 bp, SARS Virus
ggtacacccggaatcaataaagaca

SEQ ID NO: 44437 - DNA, 25 bp, SARS Virus
gtacacccggaaacaataaagacat

SEQ ID NO: 44438 - DNA, 25 bp, SARS Virus
tacacccggaataaataaagacatt

SEQ ID NO: 44439 - DNA, 25 bp, SARS Virus
acacccggaatcaataaagacattg

SEQ ID NO: 44440 - DNA, 25 bp, SARS Virus
cacccggaatcaataaagacattgg

SEQ ID NO: 44441 - DNA, 25 bp, SARS Virus
acccggaatcaaaaaagacattgga

SEQ ID NO: 44442 - DNA, 25 bp, SARS Virus
cccggaatcaataaagacattggag

SEQ ID NO: 44443 - DNA, 25 bp, SARS Virus
ccggaatcaataaagacattggaga

SEQ ID NO: 44444 - DNA, 25 bp, SARS Virus
cggaatcaataaagacattggagat

SEQ ID NO: 44445 - DNA, 25 bp, SARS Virus
ggaatcaataaaaacattggagatt

SEQ ID NO: 44446 - DNA, 25 bp, SARS Virus
gaatcaataaagacattggagattg

SEQ ID NO: 44447 - DNA, 25 bp, SARS Virus
aatcaataaagaaattggagattga

SEQ ID NO: 44448 - DNA, 25 bp, SARS Virus
atcaataaagacattggagattgat

SEQ ID NO: 44449 - DNA, 25 bp, SARS Virus
tcaataaagacaatggagattgata

SEQ ID NO: 44450 - DNA, 25 bp, SARS Virus
caataaagacataggagattgataa

SEQ ID NO: 44451 - DNA, 25 bp, SARS Virus
aataaagacattagagattgataag

SEQ ID NO: 44452 - DNA, 25 bp, SARS Virus
ataaagacattgaagattgataaga

SEQ ID NO: 44453 - DNA, 25 bp, SARS Virus
taaagacattggagattgataagac

SEQ ID NO: 44454 - DNA, 25 bp, SARS Virus
aaagacattggaaattgataagacc

SEQ ID NO: 44455 - DNA, 25 bp, SARS Virus
aagacattggagattgataagacca

SEQ ID NO: 44456 - DNA, 25 bp, SARS Virus
agacattggagaatgataagaccac

SEQ ID NO: 44457 - DNA, 25 bp, SARS Virus
gacattggagatagataagaccaca

SEQ ID NO: 44458 - DNA, 25 bp, SARS Virus
acattggagattaataagaccacag

SEQ ID NO: 44459 - DNA, 25 bp, SARS Virus
cattggagattgataagaccacagc

SEQ ID NO: 44460 - DNA, 25 bp, SARS Virus
attggagattgaaaagaccacagca

SEQ ID NO: 44461 - DNA, 25 bp, SARS Virus
ttggagattgataagaccacagcaa

SEQ ID NO: 44462 - DNA, 25 bp, SARS Virus
tggagattgataagaccacagcaat

SEQ ID NO: 44463 - DNA, 25 bp, SARS Virus
ggagattgataaaaccacagcaatg

SEQ ID NO: 44464 - DNA, 25 bp, SARS Virus
gagattgataagaccacagcaatgc

SEQ ID NO: 44465 - DNA, 25 bp, SARS Virus
agattgataagaacacagcaatgct

SEQ ID NO: 44466 - DNA, 25 bp, SARS Virus
gattgataagacaacagcaatgctg

SEQ ID NO: 44467 - DNA, 25 bp, SARS Virus
attgataagaccacagcaatgctga

SEQ ID NO: 44468 - DNA, 25 bp, SARS Virus
ttgataagaccaaagcaatgctgat

SEQ ID NO: 44469 - DNA, 25 bp, SARS Virus
tgataagaccacagcaatgctgata

SEQ ID NO: 44470 - DNA, 25 bp, SARS Virus
gataagaccacaacaatgctgatag

SEQ ID NO: 44471 - DNA, 25 bp, SARS Virus
ataagaccacagaaatgctgatagt

SEQ ID NO: 44472 - DNA, 25 bp, SARS Virus
taagaccacagcaatgctgatagta

SEQ ID NO: 44473 - DNA, 25 bp, SARS Virus
aagaccacagcaatgctgatagtac

SEQ ID NO: 44474 - DNA, 25 bp, SARS Virus
agaccacagcaaagctgatagtaca

SEQ ID NO: 44475 - DNA, 25 bp, SARS Virus
gaccacagcaatactgatagtacaa

SEQ ID NO: 44476 - DNA, 25 bp, SARS Virus
accacagcaatgatgatagtacaaa

SEQ ID NO: 44477 - DNA, 25 bp, SARS Virus
ccacagcaatgcagatagtacaaaa

SEQ ID NO: 44478 - DNA, 25 bp, SARS Virus
cacagcaatgctaatagtacaaaaa

SEQ ID NO: 44479 - DNA, 25 bp, SARS Virus
acagcaatgctgatagtacaaaaat

SEQ ID NO: 44480 - DNA, 25 bp, SARS Virus
cagcaatgctgaaagtacaaaaatc

SEQ ID NO: 44481 - DNA, 25 bp, SARS Virus
agcaatgctgatagtacaaaaatcg

SEQ ID NO: 44482 - DNA, 25 bp, SARS Virus
gcaatgctgataatacaaaaatcga

SEQ ID NO: 44483 - DNA, 25 bp, SARS Virus
caatgctgatagaacaaaaatcgat

SEQ ID NO: 44484 - DNA, 25 bp, SARS Virus
aatgctgatagtacaaaaatcgatc

SEQ ID NO: 44485 - DNA, 25 bp, SARS Virus
atgctgatagtaaaaaaatcgatct

SEQ ID NO: 44486 - DNA, 25 bp, SARS Virus
tgctgatagtacaaaaatcgatctc

SEQ ID NO: 44487 - DNA, 25 bp, SARS Virus
gctgatagtacaaaaatcgatctcg

SEQ ID NO: 44488 - DNA, 25 bp, SARS Virus
ctgatagtacaaaaatcgatctcga

SEQ ID NO: 44489 - DNA, 25 bp, SARS Virus
tgatagtacaaaaatcgatctcgat

SEQ ID NO: 44490 - DNA, 25 bp, SARS Virus
gatagtacaaaaatcgatctcgata

SEQ ID NO: 44491 - DNA, 25 bp, SARS Virus
atagtacaaaaaacgatctcgatat

SEQ ID NO: 44492 - DNA, 25 bp, SARS Virus
tagtacaaaaatagatctcgatatc

SEQ ID NO: 44493 - DNA, 25 bp, SARS Virus
agtacaaaaatcaatctcgatatca

SEQ ID NO: 44494 - DNA, 25 bp, SARS Virus
gtacaaaaatcgatctcgatatcac

SEQ ID NO: 44495 - DNA, 25 bp, SARS Virus
tacaaaaatcgaactcgatatcaca

SEQ ID NO: 44496 - DNA, 25 bp, SARS Virus
acaaaaatcgatatcgatatcacaa

SEQ ID NO: 44497 - DNA, 25 bp, SARS Virus
caaaaatcgatcacgatatcacaaa

SEQ ID NO: 44498 - DNA, 25 bp, SARS Virus
aaaaatcgatctagatatcacaaac

SEQ ID NO: 44499 - DNA, 25 bp, SARS Virus
aaaatcgatctcaatatcacaaaca

SEQ ID NO: 44500 - DNA, 25 bp, SARS Virus
aaatcgatctcgatatcacaaacac

SEQ ID NO: 44501 - DNA, 25 bp, SARS Virus
aatcgatctcgaaatcacaaacaca

SEQ ID NO: 44502 - DNA, 25 bp, SARS Virus
atcgatctcgatatcacaaacacac

SEQ ID NO: 44503 - DNA, 25 bp, SARS Virus
tcgatctcgataacacaaacacaca

SEQ ID NO: 44504 - DNA, 25 bp, SARS Virus
cgatctcgatataacaaacacacac

SEQ ID NO: 44505 - DNA, 25 bp, SARS Virus
gatctcgatatcacaaacacacaca

SEQ ID NO: 44506 - DNA, 25 bp, SARS Virus
atctcgatatcaaaaacacacacaa

SEQ ID NO: 44507 - DNA, 25 bp, SARS Virus
tctcgatatcacaaacacacacaac

SEQ ID NO: 44508 - DNA, 25 bp, SARS Virus
ctcgatatcacaaacacacacaact

SEQ ID NO: 44509 - DNA, 25 bp, SARS Virus
tcgatatcacaaacacacacaactc

SEQ ID NO: 44510 - DNA, 25 bp, SARS Virus
cgatatcacaaaaacacacaactca

SEQ ID NO: 44511 - DNA, 25 bp, SARS Virus
gatatcacaaacacacacaactcat

SEQ ID NO: 44512 - DNA, 25 bp, SARS Virus
atatcacaaacaaacacaactcata

SEQ ID NO: 44513 - DNA, 25 bp, SARS Virus
tatcacaaacacacacaactcataa

SEQ ID NO: 44514 - DNA, 25 bp, SARS Virus
atcacaaacacaaacaactcataat

SEQ ID NO: 44515 - DNA, 25 bp, SARS Virus
tcacaaacacacacaactcataatg

SEQ ID NO: 44516 - DNA, 25 bp, SARS Virus
cacaaacacacaaaactcataatgg

SEQ ID NO: 44517 - DNA, 25 bp, SARS Virus
acaaacacacacaactcataatggg

SEQ ID NO: 44518 - DNA, 25 bp, SARS Virus
caaacacacacaactcataatgggt

SEQ ID NO: 44519 - DNA, 25 bp, SARS Virus
aaacacacacaaatcataatgggta

SEQ ID NO: 44520 - DNA, 25 bp, SARS Virus
aacacacacaacacataatgggtaa

SEQ ID NO: 44521 - DNA, 25 bp, SARS Virus
acacacacaactaataatgggtaac

SEQ ID NO: 44522 - DNA, 25 bp, SARS Virus
cacacacaactcataatgggtaaca

SEQ ID NO: 44523 - DNA, 25 bp, SARS Virus
acacacaactcaaaatgggtaacaa

SEQ ID NO: 44524 - DNA, 25 bp, SARS Virus
cacacaactcataatgggtaacaat

SEQ ID NO: 44525 - DNA, 25 bp, SARS Virus
acacaactcataatgggtaacaata

SEQ ID NO: 44526 - DNA, 25 bp, SARS Virus
cacaactcataaagggtaacaataa

SEQ ID NO: 44527 - DNA, 25 bp, SARS Virus
acaactcataataggtaacaataaa

SEQ ID NO: 44528 - DNA, 25 bp, SARS Virus
caactcataatgagtaacaataaat

SEQ ID NO: 44529 - DNA, 25 bp, SARS Virus
aactcataatggataacaataaata

SEQ ID NO: 44530 - DNA, 25 bp, SARS Virus
actcataatgggaaacaataaataa

SEQ ID NO: 44531 - DNA, 25 bp, SARS Virus
ctcataatgggtaacaataaataat

SEQ ID NO: 44532 - DNA, 25 bp, SARS Virus
tcataatgggtaacaataaataatg

SEQ ID NO: 44533 - DNA, 25 bp, SARS Virus
cataatgggtaaaaataaataatga

SEQ ID NO: 44534 - DNA, 25 bp, SARS Virus
ataatgggtaacaataaataatgac

SEQ ID NO: 44535 - DNA, 25 bp, SARS Virus
taatgggtaacaataaataatgacc

SEQ ID NO: 44536 - DNA, 25 bp, SARS Virus
aatgggtaacaaaaaataatgaccg

SEQ ID NO: 44537 - DNA, 25 bp, SARS Virus
aaaagaaacaaacgctcttacgaaa

SEQ ID NO: 44538 - DNA, 25 bp, SARS Virus
aaagaaacaaatcctcttacgaaag

SEQ ID NO: 44539 - DNA, 25 bp, SARS Virus
aagaaacaaatgctcttacgaaaga

SEQ ID NO: 44540 - DNA, 25 bp, SARS Virus
agaaacaaatgcccttacgaaagaa

SEQ ID NO: 44541 - DNA, 25 bp, SARS Virus
gaaacaaatgctcttacgaaagaac

SEQ ID NO: 44542 - DNA, 25 bp, SARS Virus
aaacaaatgctcctacgaaagaacg

SEQ ID NO: 44543 - DNA, 25 bp, SARS Virus
aacaaatgctctcacgaaagaacgg

SEQ ID NO: 44544 - DNA, 25 bp, SARS Virus
acaaatgctcttccgaaagaacggt

SEQ ID NO: 44545 - DNA, 25 bp, SARS Virus
caaatgctcttacgaaagaacggta

SEQ ID NO: 44546 - DNA, 25 bp, SARS Virus
aaatgctcttaccaaagaacggtaa

SEQ ID NO: 44547 - DNA, 25 bp, SARS Virus
aatgctcttacgcaagaacggtaaa

SEQ ID NO: 44548 - DNA, 25 bp, SARS Virus
atgctcttacgacagaacggtaaat

SEQ ID NO: 44549 - DNA, 25 bp, SARS Virus
tgctcttacgaacgaacggtaaatg

SEQ ID NO: 44550 - DNA, 25 bp, SARS Virus
gctcttacgaaacaacggtaaatga

SEQ ID NO: 44551 - DNA, 25 bp, SARS Virus
ctcttacgaaagcacggtaaatgag

SEQ ID NO: 44552 - DNA, 25 bp, SARS Virus
tcttacgaaagaccggtaaatgaga

SEQ ID NO: 44553 - DNA, 25 bp, SARS Virus
cttacgaaagaacggtaaatgagaa

SEQ ID NO: 44554 - DNA, 25 bp, SARS Virus
ttacgaaagaaccgtaaatgagaac

SEQ ID NO: 44555 - DNA, 25 bp, SARS Virus
tacgaaagaacgctaaatgagaacc

SEQ ID NO: 44556 - DNA, 25 bp, SARS Virus
acgaaagaacggcaaatgagaacca

SEQ ID NO: 44557 - DNA, 25 bp, SARS Virus
cgaaagaacggtcaatgagaaccat

SEQ ID NO: 44558 - DNA, 25 bp, SARS Virus
gaaagaacggtacatgagaaccata

SEQ ID NO: 44559 - DNA, 25 bp, SARS Virus
aaagaacggtaactgagaaccataa

SEQ ID NO: 44560 - DNA, 25 bp, SARS Virus
aagaacggtaaacgagaaccataat

SEQ ID NO: 44561 - DNA, 25 bp, SARS Virus
agaacggtaaatcagaaccataata

SEQ ID NO: 44562 - DNA, 25 bp, SARS Virus
gaacggtaaatgcgaaccataatac

SEQ ID NO: 44563 - DNA, 25 bp, SARS Virus
aacggtaaatgacaaccataatacc

SEQ ID NO: 44564 - DNA, 25 bp, SARS Virus
acggtaaatgagcaccataataccg

SEQ ID NO: 44565 - DNA, 25 bp, SARS Virus
cggtaaatgagacccataataccgt

SEQ ID NO: 44566 - DNA, 25 bp, SARS Virus
ggtaaatgagaaccataataccgtt

SEQ ID NO: 44567 - DNA, 25 bp, SARS Virus
gtaaatgagaaccataataccgtta

SEQ ID NO: 44568 - DNA, 25 bp, SARS Virus
taaatgagaaccctaataccgttaa

SEQ ID NO: 44569 - DNA, 25 bp, SARS Virus
aaatgagaaccacaataccgttaac

SEQ ID NO: 44570 - DNA, 25 bp, SARS Virus
aatgagaaccatcataccgttaacg

SEQ ID NO: 44571 - DNA, 25 bp, SARS Virus
atgagaaccatactaccgttaacga

SEQ ID NO: 44572 - DNA, 25 bp, SARS Virus
tgagaaccataacaccgttaacgac

SEQ ID NO: 44573 - DNA, 25 bp, SARS Virus
gagaaccataatcccgttaacgacg

SEQ ID NO: 44574 - DNA, 25 bp, SARS Virus
agaaccataataccgttaacgacgt

SEQ ID NO: 44575 - DNA, 25 bp, SARS Virus
gaaccataataccgttaacgacgta

SEQ ID NO: 44576 - DNA, 25 bp, SARS Virus
aaccataatacccttaacgacgtac

SEQ ID NO: 44577 - DNA, 25 bp, SARS Virus
accataataccgctaacgacgtaca

SEQ ID NO: 44578 - DNA, 25 bp, SARS Virus
ccataataccgtcaacgacgtacac

SEQ ID NO: 44579 - DNA, 25 bp, SARS Virus
cataataccgttcacgacgtacacg

SEQ ID NO: 44580 - DNA, 25 bp, SARS Virus
ataataccgttaccgacgtacacga

SEQ ID NO: 44581 - DNA, 25 bp, SARS Virus
taataccgttaacgacgtacacgat

SEQ ID NO: 44582 - DNA, 25 bp, SARS Virus
aataccgttaaccacgtacacgata

SEQ ID NO: 44583 - DNA, 25 bp, SARS Virus
ataccgttaacgccgtacacgatac

SEQ ID NO: 44584 - DNA, 25 bp, SARS Virus
taccgttaacgacgtacacgatacg

SEQ ID NO: 44585 - DNA, 25 bp, SARS Virus
accgttaacgacctacacgatacga

SEQ ID NO: 44586 - DNA, 25 bp, SARS Virus
ccgttaacgacgcacacgatacgac

SEQ ID NO: 44587 - DNA, 25 bp, SARS Virus
cgttaacgacgtccacgatacgacg

SEQ ID NO: 44588 - DNA, 25 bp, SARS Virus
gttaacgacgtacacgatacgacga

SEQ ID NO: 44589 - DNA, 25 bp, SARS Virus
ttaacgacgtacccgatacgacgaa

SEQ ID NO: 44590 - DNA, 25 bp, SARS Virus
taacgacgtacacgatacgacgaac

SEQ ID NO: 44591 - DNA, 25 bp, SARS Virus
aacgacgtacaccatacgacgaaca

SEQ ID NO: 44592 - DNA, 25 bp, SARS Virus
acgacgtacacgctacgacgaacaa

SEQ ID NO: 44593 - DNA, 25 bp, SARS Virus
cgacgtacacgacacgacgaacaat

SEQ ID NO: 44594 - DNA, 25 bp, SARS Virus
gacgtacacgatccgacgaacaatt

SEQ ID NO: 44595 - DNA, 25 bp, SARS Virus
acgtacacgatacgacgaacaattc

SEQ ID NO: 44596 - DNA, 25 bp, SARS Virus
cgtacacgataccacgaacaattcg

SEQ ID NO: 44597 - DNA, 25 bp, SARS Virus
gtacacgatacgccgaacaattcgt

SEQ ID NO: 44598 - DNA, 25 bp, SARS Virus
tacacgatacgacgaacaattcgta

SEQ ID NO: 44599 - DNA, 25 bp, SARS Virus
acacgatacgaccaacaattcgtat

SEQ ID NO: 44600 - DNA, 25 bp, SARS Virus
cacgatacgacgcacaattcgtatt

SEQ ID NO: 44601 - DNA, 25 bp, SARS Virus
acgatacgacgaccaattcgtattc

SEQ ID NO: 44602 - DNA, 25 bp, SARS Virus
cgatacgacgaacaattcgtattcg

SEQ ID NO: 44603 - DNA, 25 bp, SARS Virus
gatacgacgaaccattcgtattcgt

SEQ ID NO: 44604 - DNA, 25 bp, SARS Virus
atacgacgaacacttcgtattcgtg

SEQ ID NO: 44605 - DNA, 25 bp, SARS Virus
tacgacgaacaactcgtattcgtgc

SEQ ID NO: 44606 - DNA, 25 bp, SARS Virus
acgacgaacaatccgtattcgtgcg

SEQ ID NO: 44607 - DNA, 25 bp, SARS Virus
cgacgaacaattcgtattcgtgcgt

SEQ ID NO: 44608 - DNA, 25 bp, SARS Virus
gacgaacaattcctattcgtgcgta

SEQ ID NO: 44609 - DNA, 25 bp, SARS Virus
acgaacaattcgcattcgtgcgtaa

SEQ ID NO: 44610 - DNA, 25 bp, SARS Virus
cgaacaattcgtcttcgtgcgtaag

SEQ ID NO: 44611 - DNA, 25 bp, SARS Virus
gaacaattcgtactcgtgcgtaaga

SEQ ID NO: 44612 - DNA, 25 bp, SARS Virus
aacaattcgtatccgtgcgtaagaa

SEQ ID NO: 44613 - DNA, 25 bp, SARS Virus
acaattcgtattcgtgcgtaagaac

SEQ ID NO: 44614 - DNA, 25 bp, SARS Virus
caattcgtattcctgcgtaagaaca

SEQ ID NO: 44615 - DNA, 25 bp, SARS Virus
aattcgtattcgcgcgtaagaacac

SEQ ID NO: 44616 - DNA, 25 bp, SARS Virus
attcgtattcgtccgtaagaacacg

SEQ ID NO: 44617 - DNA, 25 bp, SARS Virus
ttcgtattcgtgcgtaagaacacga

SEQ ID NO: 44618 - DNA, 25 bp, SARS Virus
tcgtattcgtgcctaagaacacgaa

SEQ ID NO: 44619 - DNA, 25 bp, SARS Virus
cgtattcgtgcgcaagaacacgaac

SEQ ID NO: 44620 - DNA, 25 bp, SARS Virus
gtattcgtgcgtcagaacacgaaca

SEQ ID NO: 44621 - DNA, 25 bp, SARS Virus
tattcgtgcgtacgaacacgaacaa

SEQ ID NO: 44622 - DNA, 25 bp, SARS Virus
attcgtgcgtaacaacacgaacaaa

SEQ ID NO: 44623 - DNA, 25 bp, SARS Virus
ttcgtgcgtaagcacacgaacaaag

SEQ ID NO: 44624 - DNA, 25 bp, SARS Virus
tcgtgcgtaagaccacgaacaaaga

SEQ ID NO: 44625 - DNA, 25 bp, SARS Virus
cgtgcgtaagaacacgaacaaagac

SEQ ID NO: 44626 - DNA, 25 bp, SARS Virus
gtgcgtaagaacccgaacaaagaca

SEQ ID NO: 44627 - DNA, 25 bp, SARS Virus
tgcgtaagaacacgaacaaagacaa

SEQ ID NO: 44628 - DNA, 25 bp, SARS Virus
gcgtaagaacaccaacaaagacaat

SEQ ID NO: 44629 - DNA, 25 bp, SARS Virus
cgtaagaacacgcacaaagacaatg

SEQ ID NO: 44630 - DNA, 25 bp, SARS Virus
gtaagaacacgaccaaagacaatgg

SEQ ID NO: 44631 - DNA, 25 bp, SARS Virus
taagaacacgaacaaagacaatgga

SEQ ID NO: 44632 - DNA, 25 bp, SARS Virus
aagaacacgaaccaagacaatggaa

SEQ ID NO: 44633 - DNA, 25 bp, SARS Virus
agaacacgaacacagacaatggaag

SEQ ID NO: 44634 - DNA, 25 bp, SARS Virus
gaacacgaacaacgacaatggaaga

SEQ ID NO: 44635 - DNA, 25 bp, SARS Virus
aacacgaacaaacacaatggaagag

SEQ ID NO: 44636 - DNA, 25 bp, SARS Virus
acacgaacaaagccaatggaagaga

SEQ ID NO: 44637 - DNA, 25 bp, SARS Virus
cacgaacaaagacaatggaagagaa

SEQ ID NO: 44638 - DNA, 25 bp, SARS Virus
acgaacaaagaccatggaagagaac

SEQ ID NO: 44639 - DNA, 25 bp, SARS Virus
cgaacaaagacactggaagagaacg

SEQ ID NO: 44640 - DNA, 25 bp, SARS Virus
gaacaaagacaacggaagagaacgt

SEQ ID NO: 44641 - DNA, 25 bp, SARS Virus
aacaaagacaatcgaagagaacgtt

SEQ ID NO: 44642 - DNA, 25 bp, SARS Virus
acaaagacaatgcaagagaacgttg

SEQ ID NO: 44643 - DNA, 25 bp, SARS Virus
caaagacaatggcagagaacgttgt

SEQ ID NO: 44644 - DNA, 25 bp, SARS Virus
aaagacaatggacgagaacgttgtc

SEQ ID NO: 44645 - DNA, 25 bp, SARS Virus
aagacaatggaacagaacgttgtca

SEQ ID NO: 44646 - DNA, 25 bp, SARS Virus
agacaatggaagcgaacgttgtcaa

SEQ ID NO: 44647 - DNA, 25 bp, SARS Virus
gacaatggaagacaacgttgtcaac

SEQ ID NO: 44648 - DNA, 25 bp, SARS Virus
acaatggaagagcacgttgtcaacg

SEQ ID NO: 44649 - DNA, 25 bp, SARS Virus
caatggaagagaccgttgtcaacga

SEQ ID NO: 44650 - DNA, 25 bp, SARS Virus
aatggaagagaacgttgtcaacgaa

SEQ ID NO: 44651 - DNA, 25 bp, SARS Virus
atggaagagaaccttgtcaacgaat

SEQ ID NO: 44652 - DNA, 25 bp, SARS Virus
tggaagagaacgctgtcaacgaatg

SEQ ID NO: 44653 - DNA, 25 bp, SARS Virus
ggaagagaacgtcgtcaacgaatga

SEQ ID NO: 44654 - DNA, 25 bp, SARS Virus
gaagagaacgttctcaacgaatgaa

SEQ ID NO: 44655 - DNA, 25 bp, SARS Virus
aagagaacgttgccaacgaatgaaa

SEQ ID NO: 44656 - DNA, 25 bp, SARS Virus
agagaacgttgtcaacgaatgaaat

SEQ ID NO: 44657 - DNA, 25 bp, SARS Virus
gagaacgttgtccacgaatgaaatt

SEQ ID NO: 44658 - DNA, 25 bp, SARS Virus
agaacgttgtcaccgaatgaaatta

SEQ ID NO: 44659 - DNA, 25 bp, SARS Virus
gaacgttgtcaacgaatgaaattat

SEQ ID NO: 44660 - DNA, 25 bp, SARS Virus
aacgttgtcaaccaatgaaattata

SEQ ID NO: 44661 - DNA, 25 bp, SARS Virus
acgttgtcaacgcatgaaattatac

SEQ ID NO: 44662 - DNA, 25 bp, SARS Virus
cgttgtcaacgactgaaattatacc

SEQ ID NO: 44663 - DNA, 25 bp, SARS Virus
gttgtcaacgaacgaaattatacca

SEQ ID NO: 44664 - DNA, 25 bp, SARS Virus
ttgtcaacgaatcaaattataccag

SEQ ID NO: 44665 - DNA, 25 bp, SARS Virus
tgtcaacgaatgcaattataccaga

SEQ ID NO: 44666 - DNA, 25 bp, SARS Virus
gtcaacgaatgacattataccagat

SEQ ID NO: 44667 - DNA, 25 bp, SARS Virus
tcaacgaatgaacttataccagatg

SEQ ID NO: 44668 - DNA, 25 bp, SARS Virus
caacgaatgaaactataccagatgt

SEQ ID NO: 44669 - DNA, 25 bp, SARS Virus
aacgaatgaaatcataccagatgta

SEQ ID NO: 44670 - DNA, 25 bp, SARS Virus
acgaatgaaattctaccagatgtac

SEQ ID NO: 44671 - DNA, 25 bp, SARS Virus
cgaatgaaattacaccagatgtacg

SEQ ID NO: 44672 - DNA, 25 bp, SARS Virus
gaatgaaattatcccagatgtacgg

SEQ ID NO: 44673 - DNA, 25 bp, SARS Virus
aatgaaattataccagatgtacgga

SEQ ID NO: 44674 - DNA, 25 bp, SARS Virus
atgaaattataccagatgtacggac

SEQ ID NO: 44675 - DNA, 25 bp, SARS Virus
tgaaattatacccgatgtacggacg

SEQ ID NO: 44676 - DNA, 25 bp, SARS Virus
gaaattataccacatgtacggacga

SEQ ID NO: 44677 - DNA, 25 bp, SARS Virus
aaattataccagctgtacggacgat

SEQ ID NO: 44678 - DNA, 25 bp, SARS Virus
aattataccagacgtacggacgatc

SEQ ID NO: 44679 - DNA, 25 bp, SARS Virus
attataccagatctacggacgatcg

SEQ ID NO: 44680 - DNA, 25 bp, SARS Virus
ttataccagatgcacggacgatcga

SEQ ID NO: 44681 - DNA, 25 bp, SARS Virus
tataccagatgtccggacgatcgac

SEQ ID NO: 44682 - DNA, 25 bp, SARS Virus
ataccagatgtacggacgatcgacc

SEQ ID NO: 44683 - DNA, 25 bp, SARS Virus
taccagatgtaccgacgatcgaccc

SEQ ID NO: 44684 - DNA, 25 bp, SARS Virus
accagatgtacgcacgatcgaccca

SEQ ID NO: 44685 - DNA, 25 bp, SARS Virus
ccagatgtacggccgatcgacccac

SEQ ID NO: 44686 - DNA, 25 bp, SARS Virus
cagatgtacggacgatcgacccact

SEQ ID NO: 44687 - DNA, 25 bp, SARS Virus
agatgtacggaccatcgacccacta

SEQ ID NO: 44688 - DNA, 25 bp, SARS Virus
gatgtacggacgctcgacccactac

SEQ ID NO: 44689 - DNA, 25 bp, SARS Virus
atgtacggacgaccgacccactacg

SEQ ID NO: 44690 - DNA, 25 bp, SARS Virus
tgtacggacgatcgacccactacgc

SEQ ID NO: 44691 - DNA, 25 bp, SARS Virus
gtacggacgatccacccactacgca

SEQ ID NO: 44692 - DNA, 25 bp, SARS Virus
tacggacgatcgccccactacgcat

SEQ ID NO: 44693 - DNA, 25 bp, SARS Virus
acggacgatcgacccactacgcata

SEQ ID NO: 44694 - DNA, 25 bp, SARS Virus
cggacgatcgacccactacgcatag

SEQ ID NO: 44695 - DNA, 25 bp, SARS Virus
ggacgatcgacccactacgcatagt

SEQ ID NO: 44696 - DNA, 25 bp, SARS Virus
gacgatcgaccccctacgcatagta

SEQ ID NO: 44697 - DNA, 25 bp, SARS Virus
acgatcgacccactacgcatagtac

SEQ ID NO: 44698 - DNA, 25 bp, SARS Virus
cgatcgacccaccacgcatagtact

SEQ ID NO: 44699 - DNA, 25 bp, SARS Virus
gatcgacccactccgcatagtactg

SEQ ID NO: 44700 - DNA, 25 bp, SARS Virus
atcgacccactacgcatagtactgt

SEQ ID NO: 44701 - DNA, 25 bp, SARS Virus
tcgacccactacccatagtactgta

SEQ ID NO: 44702 - DNA, 25 bp, SARS Virus
cgacccactacgcatagtactgtac

SEQ ID NO: 44703 - DNA, 25 bp, SARS Virus
gacccactacgcctagtactgtacc

SEQ ID NO: 44704 - DNA, 25 bp, SARS Virus
acccactacgcacagtactgtaccg

SEQ ID NO: 44705 - DNA, 25 bp, SARS Virus
cccactacgcatcgtactgtaccga

SEQ ID NO: 44706 - DNA, 25 bp, SARS Virus
ccactacgcatactactgtaccgaa

SEQ ID NO: 44707 - DNA, 25 bp, SARS Virus
cactacgcatagcactgtaccgaac

SEQ ID NO: 44708 - DNA, 25 bp, SARS Virus
actacgcatagtcctgtaccgaact

SEQ ID NO: 44709 - DNA, 25 bp, SARS Virus
ctacgcatagtactgtaccgaactt

SEQ ID NO: 44710 - DNA, 25 bp, SARS Virus
tacgcatagtaccgtaccgaactta

SEQ ID NO: 44711 - DNA, 25 bp, SARS Virus
acgcatagtactctaccgaacttaa

SEQ ID NO: 44712 - DNA, 25 bp, SARS Virus
cgcatagtactgcaccgaacttaac

SEQ ID NO: 44713 - DNA, 25 bp, SARS Virus
gcatagtactgtcccgaacttaacc

SEQ ID NO: 44714 - DNA, 25 bp, SARS Virus
catagtactgtaccgaacttaaccg

SEQ ID NO: 44715 - DNA, 25 bp, SARS Virus
atagtactgtaccgaacttaaccga

SEQ ID NO: 44716 - DNA, 25 bp, SARS Virus
tagtactgtacccaacttaaccgac

SEQ ID NO: 44717 - DNA, 25 bp, SARS Virus
agtactgtaccgcacttaaccgact

SEQ ID NO: 44718 - DNA, 25 bp, SARS Virus
gtactgtaccgaccttaaccgactg

SEQ ID NO: 44719 - DNA, 25 bp, SARS Virus
tactgtaccgaacttaaccgactgt

SEQ ID NO: 44720 - DNA, 25 bp, SARS Virus
actgtaccgaacctaaccgactgtg

SEQ ID NO: 44721 - DNA, 25 bp, SARS Virus
ctgtaccgaactcaaccgactgtga

SEQ ID NO: 44722 - DNA, 25 bp, SARS Virus
tgtaccgaacttcaccgactgtgat

SEQ ID NO: 44723 - DNA, 25 bp, SARS Virus
gtaccgaacttacccgactgtgatc

SEQ ID NO: 44724 - DNA, 25 bp, SARS Virus
taccgaacttaaccgactgtgatcg

SEQ ID NO: 44725 - DNA, 25 bp, SARS Virus
accgaacttaaccgactgtgatcga

SEQ ID NO: 44726 - DNA, 25 bp, SARS Virus
ccgaacttaacccactgtgatcgaa

SEQ ID NO: 44727 - DNA, 25 bp, SARS Virus
cgaacttaaccgcctgtgatcgaac

SEQ ID NO: 44728 - DNA, 25 bp, SARS Virus
gaacttaaccgactgtgatcgaaca

SEQ ID NO: 44729 - DNA, 25 bp, SARS Virus
aacttaaccgaccgtgatcgaacag

SEQ ID NO: 44730 - DNA, 25 bp, SARS Virus
acttaaccgactctgatcgaacaga

SEQ ID NO: 44731 - DNA, 25 bp, SARS Virus
cttaaccgactgcgatcgaacagac

SEQ ID NO: 44732 - DNA, 25 bp, SARS Virus
ttaaccgactgtcatcgaacagacc

SEQ ID NO: 44733 - DNA, 25 bp, SARS Virus
taaccgactgtgctcgaacagacca

SEQ ID NO: 44734 - DNA, 25 bp, SARS Virus
aaccgactgtgaccgaacagaccaa

SEQ ID NO: 44735 - DNA, 25 bp, SARS Virus
accgactgtgatcgaacagaccaat

SEQ ID NO: 44736 - DNA, 25 bp, SARS Virus
ccgactgtgatccaacagaccaata

SEQ ID NO: 44737 - DNA, 25 bp, SARS Virus
cgactgtgatcgcacagaccaatat

SEQ ID NO: 44738 - DNA, 25 bp, SARS Virus
gactgtgatcgaccagaccaatatc

SEQ ID NO: 44739 - DNA, 25 bp, SARS Virus
actgtgatcgaacagaccaatatcc

SEQ ID NO: 44740 - DNA, 25 bp, SARS Virus
ctgtgatcgaaccgaccaatatccg

SEQ ID NO: 44741 - DNA, 25 bp, SARS Virus
tgtgatcgaacacaccaatatccga

SEQ ID NO: 44742 - DNA, 25 bp, SARS Virus
gtgatcgaacagcccaatatccgaa

SEQ ID NO: 44743 - DNA, 25 bp, SARS Virus
tgatcgaacagaccaatatccgaat

SEQ ID NO: 44744 - DNA, 25 bp, SARS Virus
gatcgaacagaccaatatccgaatt

SEQ ID NO: 44745 - DNA, 25 bp, SARS Virus
atcgaacagacccatatccgaattc

SEQ ID NO: 44746 - DNA, 25 bp, SARS Virus
tcgaacagaccactatccgaattcc

SEQ ID NO: 44747 - DNA, 25 bp, SARS Virus
cgaacagaccaacatccgaattcct

SEQ ID NO: 44748 - DNA, 25 bp, SARS Virus
gaacagaccaatctccgaattccta

SEQ ID NO: 44749 - DNA, 25 bp, SARS Virus
aacagaccaatacccgaattcctaa

SEQ ID NO: 44750 - DNA, 25 bp, SARS Virus
acagaccaatatccgaattcctaac

SEQ ID NO: 44751 - DNA, 25 bp, SARS Virus
cagaccaatatccgaattcctaaca

SEQ ID NO: 44752 - DNA, 25 bp, SARS Virus
agaccaatatcccaattcctaacac

SEQ ID NO: 44753 - DNA, 25 bp, SARS Virus
gaccaatatccgcattcctaacaca

SEQ ID NO: 44754 - DNA, 25 bp, SARS Virus
accaatatccgacttcctaacacaa

SEQ ID NO: 44755 - DNA, 25 bp, SARS Virus
ccaatatccgaactcctaacacaat

SEQ ID NO: 44756 - DNA, 25 bp, SARS Virus
caatatccgaatccctaacacaata

SEQ ID NO: 44757 - DNA, 25 bp, SARS Virus
aatatccgaattcctaacacaatac

SEQ ID NO: 44758 - DNA, 25 bp, SARS Virus
atatccgaattcctaacacaataca

SEQ ID NO: 44759 - DNA, 25 bp, SARS Virus
tatccgaattcccaacacaatacat

SEQ ID NO: 44760 - DNA, 25 bp, SARS Virus
atccgaattcctcacacaatacata

SEQ ID NO: 44761 - DNA, 25 bp, SARS Virus
tccgaattcctaccacaatacatac

SEQ ID NO: 44762 - DNA, 25 bp, SARS Virus
ccgaattcctaacacaatacatacg

SEQ ID NO: 44763 - DNA, 25 bp, SARS Virus
cgaattcctaacccaatacatacga

SEQ ID NO: 44764 - DNA, 25 bp, SARS Virus
gaattcctaacacaatacatacgaa

SEQ ID NO: 44765 - DNA, 25 bp, SARS Virus
aattcctaacaccatacatacgaag

SEQ ID NO: 44766 - DNA, 25 bp, SARS Virus
attcctaacacactacatacgaagt

SEQ ID NO: 44767 - DNA, 25 bp, SARS Virus
ttcctaacacaacacatacgaagtc

SEQ ID NO: 44768 - DNA, 25 bp, SARS Virus
tcctaacacaatccatacgaagtcg

SEQ ID NO: 44769 - DNA, 25 bp, SARS Virus
cctaacacaatacatacgaagtcga

SEQ ID NO: 44770 - DNA, 25 bp, SARS Virus
ctaacacaatacctacgaagtcgaa

SEQ ID NO: 44771 - DNA, 25 bp, SARS Virus
taacacaatacacacgaagtcgaaa

SEQ ID NO: 44772 - DNA, 25 bp, SARS Virus
aacacaatacatccgaagtcgaaat

SEQ ID NO: 44773 - DNA, 25 bp, SARS Virus
acacaatacatacgaagtcgaaatc

SEQ ID NO: 44774 - DNA, 25 bp, SARS Virus
cacaatacataccaagtcgaaatca

SEQ ID NO: 44775 - DNA, 25 bp, SARS Virus
acaatacatacgcagtcgaaatcaa

SEQ ID NO: 44776 - DNA, 25 bp, SARS Virus
caatacatacgacgtcgaaatcaaa

SEQ ID NO: 44777 - DNA, 25 bp, SARS Virus
aatacatacgaactcgaaatcaaaa

SEQ ID NO: 44778 - DNA, 25 bp, SARS Virus
atacatacgaagccgaaatcaaaac

SEQ ID NO: 44779 - DNA, 25 bp, SARS Virus
tacatacgaagtcgaaatcaaaacg

SEQ ID NO: 44780 - DNA, 25 bp, SARS Virus
acatacgaagtccaaatcaaaacga

SEQ ID NO: 44781 - DNA, 25 bp, SARS Virus
catacgaagtcgcaatcaaaacgaa

SEQ ID NO: 44782 - DNA, 25 bp, SARS Virus
atacgaagtcgacatcaaaacgaat

SEQ ID NO: 44783 - DNA, 25 bp, SARS Virus
tacgaagtcgaactcaaaacgaata

SEQ ID NO: 44784 - DNA, 25 bp, SARS Virus
acgaagtcgaaaccaaaacgaataa

SEQ ID NO: 44785 - DNA, 25 bp, SARS Virus
cgaagtcgaaatcaaaacgaataag

SEQ ID NO: 44786 - DNA, 25 bp, SARS Virus
gaagtcgaaatccaaacgaataaga

SEQ ID NO: 44787 - DNA, 25 bp, SARS Virus
aagtcgaaatcacaacgaataagag

SEQ ID NO: 44788 - DNA, 25 bp, SARS Virus
agtcgaaatcaacacgaataagagt

SEQ ID NO: 44789 - DNA, 25 bp, SARS Virus
gtcgaaatcaaaccgaataagagta

SEQ ID NO: 44790 - DNA, 25 bp, SARS Virus
tcgaaatcaaaacgaataagagtac

SEQ ID NO: 44791 - DNA, 25 bp, SARS Virus
cgaaatcaaaaccaataagagtact

SEQ ID NO: 44792 - DNA, 25 bp, SARS Virus
gaaatcaaaacgcataagagtactg

SEQ ID NO: 44793 - DNA, 25 bp, SARS Virus
aaatcaaaacgactaagagtactgt

SEQ ID NO: 44794 - DNA, 25 bp, SARS Virus
aatcaaaacgaacaagagtactgtc

SEQ ID NO: 44795 - DNA, 25 bp, SARS Virus
atcaaaacgaatcagagtactgtcg

SEQ ID NO: 44796 - DNA, 25 bp, SARS Virus
tcaaaacgaatacgagtactgtcga

SEQ ID NO: 44797 - DNA, 25 bp, SARS Virus
caaaacgaataacagtactgtcgag

SEQ ID NO: 44798 - DNA, 25 bp, SARS Virus
aaaacgaataagcgtactgtcgagc

SEQ ID NO: 44799 - DNA, 25 bp, SARS Virus
aaacgaataagactactgtcgagcg

SEQ ID NO: 44800 - DNA, 25 bp, SARS Virus
aacgaataagagcactgtcgagcgt

SEQ ID NO: 44801 - DNA, 25 bp, SARS Virus
acgaataagagtcctgtcgagcgtg

SEQ ID NO: 44802 - DNA, 25 bp, SARS Virus
cgaataagagtactgtcgagcgtga

SEQ ID NO: 44803 - DNA, 25 bp, SARS Virus
gaataagagtaccgtcgagcgtgac

SEQ ID NO: 44804 - DNA, 25 bp, SARS Virus
aataagagtactctcgagcgtgaca

SEQ ID NO: 44805 - DNA, 25 bp, SARS Virus
ataagagtactgccgagcgtgacaa

SEQ ID NO: 44806 - DNA, 25 bp, SARS Virus
taagagtactgtcgagcgtgacaaa

SEQ ID NO: 44807 - DNA, 25 bp, SARS Virus
aagagtactgtccagcgtgacaaat

SEQ ID NO: 44808 - DNA, 25 bp, SARS Virus
agagtactgtcgcgcgtgacaaata

SEQ ID NO: 44809 - DNA, 25 bp, SARS Virus
gagtactgtcgaccgtgacaaatac

SEQ ID NO: 44810 - DNA, 25 bp, SARS Virus
agtactgtcgagcgtgacaaatact

SEQ ID NO: 44811 - DNA, 25 bp, SARS Virus
gtactgtcgagcctgacaaatacta

SEQ ID NO: 44812 - DNA, 25 bp, SARS Virus
tactgtcgagcgcgacaaatactac

SEQ ID NO: 44813 - DNA, 25 bp, SARS Virus
actgtcgagcgtcacaaatactact

SEQ ID NO: 44814 - DNA, 25 bp, SARS Virus
ctgtcgagcgtgccaaatactacta

SEQ ID NO: 44815 - DNA, 25 bp, SARS Virus
tgtcgagcgtgacaaatactactac

SEQ ID NO: 44816 - DNA, 25 bp, SARS Virus
gtcgagcgtgaccaatactactacg

SEQ ID NO: 44817 - DNA, 25 bp, SARS Virus
tcgagcgtgacacatactactacga

SEQ ID NO: 44818 - DNA, 25 bp, SARS Virus
cgagcgtgacaactactactacgac

SEQ ID NO: 44819 - DNA, 25 bp, SARS Virus
gagcgtgacaaacactactacgacg

SEQ ID NO: 44820 - DNA, 25 bp, SARS Virus
agcgtgacaaatcctactacgacga

SEQ ID NO: 44821 - DNA, 25 bp, SARS Virus
gcgtgacaaatactactacgacgat

SEQ ID NO: 44822 - DNA, 25 bp, SARS Virus
cgtgacaaataccactacgacgatc

SEQ ID NO: 44823 - DNA, 25 bp, SARS Virus
gtgacaaatactcctacgacgatct

SEQ ID NO: 44824 - DNA, 25 bp, SARS Virus
tgacaaatactactacgacgatctg

SEQ ID NO: 44825 - DNA, 25 bp, SARS Virus
gacaaatactaccacgacgatctgc

SEQ ID NO: 44826 - DNA, 25 bp, SARS Virus
acaaatactactccgacgatctgca

SEQ ID NO: 44827 - DNA, 25 bp, SARS Virus
caaatactactacgacgatctgcac

SEQ ID NO: 44828 - DNA, 25 bp, SARS Virus
aaatactactaccacgatctgcaca

SEQ ID NO: 44829 - DNA, 25 bp, SARS Virus
aatactactacgccgatctgcacaa

SEQ ID NO: 44830 - DNA, 25 bp, SARS Virus
atactactacgacgatctgcacaaa

SEQ ID NO: 44831 - DNA, 25 bp, SARS Virus
tactactacgaccatctgcacaaac

SEQ ID NO: 44832 - DNA, 25 bp, SARS Virus
actactacgacgctctgcacaaacc

SEQ ID NO: 44833 - DNA, 25 bp, SARS Virus
ctactacgacgacctgcacaaacct

SEQ ID NO: 44834 - DNA, 25 bp, SARS Virus
tactacgacgatctgcacaaacctg

SEQ ID NO: 44835 - DNA, 25 bp, SARS Virus
actacgacgatccgcacaaacctgt

SEQ ID NO: 44836 - DNA, 25 bp, SARS Virus
ctacgacgatctccacaaacctgtg

SEQ ID NO: 44837 - DNA, 25 bp, SARS Virus
tacgacgatctgcacaaacctgtga

SEQ ID NO: 44838 - DNA, 25 bp, SARS Virus
acgacgatctgcccaaacctgtgac

SEQ ID NO: 44839 - DNA, 25 bp, SARS Virus
cgacgatctgcacaaacctgtgact

SEQ ID NO: 44840 - DNA, 25 bp, SARS Virus
gacgatctgcaccaacctgtgacta

SEQ ID NO: 44841 - DNA, 25 bp, SARS Virus
acgatctgcacacacctgtgactac

SEQ ID NO: 44842 - DNA, 25 bp, SARS Virus
cgatctgcacaaccctgtgactact

SEQ ID NO: 44843 - DNA, 25 bp, SARS Virus
gatctgcacaaacctgtgactactt

SEQ ID NO: 44844 - DNA, 25 bp, SARS Virus
atctgcacaaacctgtgactactta

SEQ ID NO: 44845 - DNA, 25 bp, SARS Virus
tctgcacaaacccgtgactacttac

SEQ ID NO: 44846 - DNA, 25 bp, SARS Virus
ctgcacaaacctctgactacttaca

SEQ ID NO: 44847 - DNA, 25 bp, SARS Virus
tgcacaaacctgcgactacttacag

SEQ ID NO: 44848 - DNA, 25 bp, SARS Virus
gcacaaacctgtcactacttacagt

SEQ ID NO: 44849 - DNA, 25 bp, SARS Virus
cacaaacctgtgcctacttacagta

SEQ ID NO: 44850 - DNA, 25 bp, SARS Virus
acaaacctgtgactacttacagtaa

SEQ ID NO: 44851 - DNA, 25 bp, SARS Virus
caaacctgtgaccacttacagtaat

SEQ ID NO: 44852 - DNA, 25 bp, SARS Virus
aaacctgtgactccttacagtaatg

SEQ ID NO: 44853 - DNA, 25 bp, SARS Virus
aacctgtgactacttacagtaatgt

SEQ ID NO: 44854 - DNA, 25 bp, SARS Virus
acctgtgactacctacagtaatgtg

SEQ ID NO: 44855 - DNA, 25 bp, SARS Virus
cctgtgactactcacagtaatgtga

SEQ ID NO: 44856 - DNA, 25 bp, SARS Virus
ctgtgactacttccagtaatgtgaa

SEQ ID NO: 44857 - DNA, 25 bp, SARS Virus
tgtgactacttacagtaatgtgaac

SEQ ID NO: 44858 - DNA, 25 bp, SARS Virus
gtgactacttaccgtaatgtgaaca

SEQ ID NO: 44859 - DNA, 25 bp, SARS Virus
tgactacttacactaatgtgaacaa

SEQ ID NO: 44860 - DNA, 25 bp, SARS Virus
gactacttacagcaatgtgaacaaa

SEQ ID NO: 44861 - DNA, 25 bp, SARS Virus
actacttacagtcatgtgaacaaat

SEQ ID NO: 44862 - DNA, 25 bp, SARS Virus
ctacttacagtactgtgaacaaatg

SEQ ID NO: 44863 - DNA, 25 bp, SARS Virus
tacttacagtaacgtgaacaaatgt

SEQ ID NO: 44864 - DNA, 25 bp, SARS Virus
acttacagtaatctgaacaaatgtt

SEQ ID NO: 44865 - DNA, 25 bp, SARS Virus
cttacagtaatgcgaacaaatgttt

SEQ ID NO: 44866 - DNA, 25 bp, SARS Virus
ttacagtaatgtcaacaaatgtttc

SEQ ID NO: 44867 - DNA, 25 bp, SARS Virus
tacagtaatgtgcacaaatgtttca

SEQ ID NO: 44868 - DNA, 25 bp, SARS Virus
acagtaatgtgaccaaatgtttcag

SEQ ID NO: 44869 - DNA, 25 bp, SARS Virus
cagtaatgtgaacaaatgtttcaga

SEQ ID NO: 44870 - DNA, 25 bp, SARS Virus
agtaatgtgaaccaatgtttcagat

SEQ ID NO: 44871 - DNA, 25 bp, SARS Virus
gtaatgtgaacacatgtttcagatg

SEQ ID NO: 44872 - DNA, 25 bp, SARS Virus
taatgtgaacaactgtttcagatga

SEQ ID NO: 44873 - DNA, 25 bp, SARS Virus
aatgtgaacaaacgtttcagatgat

SEQ ID NO: 44874 - DNA, 25 bp, SARS Virus
atgtgaacaaatctttcagatgata

SEQ ID NO: 44875 - DNA, 25 bp, SARS Virus
tgtgaacaaatgcttcagatgatac

SEQ ID NO: 44876 - DNA, 25 bp, SARS Virus
gtgaacaaatgtctcagatgatacc

SEQ ID NO: 44877 - DNA, 25 bp, SARS Virus
tgaacaaatgttccagatgatacca

SEQ ID NO: 44878 - DNA, 25 bp, SARS Virus
gaacaaatgtttcagatgataccat

SEQ ID NO: 44879 - DNA, 25 bp, SARS Virus
aacaaatgtttccgatgataccatt

SEQ ID NO: 44880 - DNA, 25 bp, SARS Virus
acaaatgtttcacatgataccatta

SEQ ID NO: 44881 - DNA, 25 bp, SARS Virus
caaatgtttcagctgataccattac

SEQ ID NO: 44882 - DNA, 25 bp, SARS Virus
aaatgtttcagacgataccattacg

SEQ ID NO: 44883 - DNA, 25 bp, SARS Virus
aatgtttcagatcataccattacga

SEQ ID NO: 44884 - DNA, 25 bp, SARS Virus
atgtttcagatgctaccattacgaa

SEQ ID NO: 44885 - DNA, 25 bp, SARS Virus
tgtttcagatgacaccattacgaaa

SEQ ID NO: 44886 - DNA, 25 bp, SARS Virus
gtttcagatgatcccattacgaaat

SEQ ID NO: 44887 - DNA, 25 bp, SARS Virus
tttcagatgataccattacgaaatc

SEQ ID NO: 44888 - DNA, 25 bp, SARS Virus
ttcagatgataccattacgaaatct

SEQ ID NO: 44889 - DNA, 25 bp, SARS Virus
tcagatgatacccttacgaaatcta

SEQ ID NO: 44890 - DNA, 25 bp, SARS Virus
cagatgataccactacgaaatctag

SEQ ID NO: 44891 - DNA, 25 bp, SARS Virus
agatgataccatcacgaaatctagt

SEQ ID NO: 44892 - DNA, 25 bp, SARS Virus
gatgataccattccgaaatctagtt

SEQ ID NO: 44893 - DNA, 25 bp, SARS Virus
atgataccattacgaaatctagttc

SEQ ID NO: 44894 - DNA, 25 bp, SARS Virus
tgataccattaccaaatctagttcg

SEQ ID NO: 44895 - DNA, 25 bp, SARS Virus
gataccattacgcaatctagttcga

SEQ ID NO: 44896 - DNA, 25 bp, SARS Virus
ataccattacgacatctagttcgat

SEQ ID NO: 44897 - DNA, 25 bp, SARS Virus
taccattacgaactctagttcgata

SEQ ID NO: 44898 - DNA, 25 bp, SARS Virus
accattacgaaacctagttcgataa

SEQ ID NO: 44899 - DNA, 25 bp, SARS Virus
ccattacgaaatctagttcgataaa

SEQ ID NO: 44900 - DNA, 25 bp, SARS Virus
cattacgaaatccagttcgataaag

SEQ ID NO: 44901 - DNA, 25 bp, SARS Virus
attacgaaatctcgttcgataaagg

SEQ ID NO: 44902 - DNA, 25 bp, SARS Virus
ttacgaaatctacttcgataaaggt

SEQ ID NO: 44903 - DNA, 25 bp, SARS Virus
tacgaaatctagctcgataaaggta

SEQ ID NO: 44904 - DNA, 25 bp, SARS Virus
acgaaatctagtccgataaaggtac

SEQ ID NO: 44905 - DNA, 25 bp, SARS Virus
cgaaatctagttcgataaaggtaca

SEQ ID NO: 44906 - DNA, 25 bp, SARS Virus
gaaatctagttccataaaggtacac

SEQ ID NO: 44907 - DNA, 25 bp, SARS Virus
aaatctagttcgctaaaggtacacc

SEQ ID NO: 44908 - DNA, 25 bp, SARS Virus
aatctagttcgacaaaggtacaccc

SEQ ID NO: 44909 - DNA, 25 bp, SARS Virus
atctagttcgatcaaggtacacccg

SEQ ID NO: 44910 - DNA, 25 bp, SARS Virus
tctagttcgatacaggtacacccgg

SEQ ID NO: 44911 - DNA, 25 bp, SARS Virus
ctagttcgataacggtacacccgga

SEQ ID NO: 44912 - DNA, 25 bp, SARS Virus
tagttcgataaacgtacacccggaa

SEQ ID NO: 44913 - DNA, 25 bp, SARS Virus
agttcgataaagctacacccggaat

SEQ ID NO: 44914 - DNA, 25 bp, SARS Virus
gttcgataaaggcacacccggaatc

SEQ ID NO: 44915 - DNA, 25 bp, SARS Virus
ttcgataaaggtccacccggaatca

SEQ ID NO: 44916 - DNA, 25 bp, SARS Virus
tcgataaaggtacacccggaatcaa

SEQ ID NO: 44917 - DNA, 25 bp, SARS Virus
cgataaaggtacccccggaatcaat

SEQ ID NO: 44918 - DNA, 25 bp, SARS Virus
gataaaggtacacccggaatcaata

SEQ ID NO: 44919 - DNA, 25 bp, SARS Virus
ataaaggtacacccggaatcaataa

SEQ ID NO: 44920 - DNA, 25 bp, SARS Virus
taaaggtacacccggaatcaataaa

SEQ ID NO: 44921 - DNA, 25 bp, SARS Virus
aaaggtacaccccgaatcaataaag

SEQ ID NO: 44922 - DNA, 25 bp, SARS Virus
aaggtacacccgcaatcaataaaga

SEQ ID NO: 44923 - DNA, 25 bp, SARS Virus
aggtacacccggcatcaataaagac

SEQ ID NO: 44924 - DNA, 25 bp, SARS Virus
ggtacacccggactcaataaagaca

SEQ ID NO: 44925 - DNA, 25 bp, SARS Virus
gtacacccggaaccaataaagacat

SEQ ID NO: 44926 - DNA, 25 bp, SARS Virus
tacacccggaatcaataaagacatt

SEQ ID NO: 44927 - DNA, 25 bp, SARS Virus
acacccggaatccataaagacattg

SEQ ID NO: 44928 - DNA, 25 bp, SARS Virus
cacccggaatcactaaagacattgg

SEQ ID NO: 44929 - DNA, 25 bp, SARS Virus
acccggaatcaacaaagacattgga

SEQ ID NO: 44930 - DNA, 25 bp, SARS Virus
cccggaatcaatcaagacattggag

SEQ ID NO: 44931 - DNA, 25 bp, SARS Virus
ccggaatcaatacagacattggaga

SEQ ID NO: 44932 - DNA, 25 bp, SARS Virus
cggaatcaataacgacattggagat

SEQ ID NO: 44933 - DNA, 25 bp, SARS Virus
ggaatcaataaacacattggagatt

SEQ ID NO: 44934 - DNA, 25 bp, SARS Virus
gaatcaataaagccattggagattg

SEQ ID NO: 44935 - DNA, 25 bp, SARS Virus
aatcaataaagacattggagattga

SEQ ID NO: 44936 - DNA, 25 bp, SARS Virus
atcaataaagaccttggagattgat

SEQ ID NO: 44937 - DNA, 25 bp, SARS Virus
tcaataaagacactggagattgata

SEQ ID NO: 44938 - DNA, 25 bp, SARS Virus
caataaagacatcggagattgataa

SEQ ID NO: 44939 - DNA, 25 bp, SARS Virus
aataaagacattcgagattgataag

SEQ ID NO: 44940 - DNA, 25 bp, SARS Virus
ataaagacattgcagattgataaga

SEQ ID NO: 44941 - DNA, 25 bp, SARS Virus
taaagacattggcgattgataagac

SEQ ID NO: 44942 - DNA, 25 bp, SARS Virus
aaagacattggacattgataagacc

SEQ ID NO: 44943 - DNA, 25 bp, SARS Virus
aagacattggagcttgataagacca

SEQ ID NO: 44944 - DNA, 25 bp, SARS Virus
agacattggagactgataagaccac

SEQ ID NO: 44945 - DNA, 25 bp, SARS Virus
gacattggagatcgataagaccaca

SEQ ID NO: 44946 - DNA, 25 bp, SARS Virus
acattggagattcataagaccacag

SEQ ID NO: 44947 - DNA, 25 bp, SARS Virus
cattggagattgctaagaccacagc

SEQ ID NO: 44948 - DNA, 25 bp, SARS Virus
attggagattgacaagaccacagca

SEQ ID NO: 44949 - DNA, 25 bp, SARS Virus
ttggagattgatcagaccacagcaa

SEQ ID NO: 44950 - DNA, 25 bp, SARS Virus
tggagattgatacgaccacagcaat

SEQ ID NO: 44951 - DNA, 25 bp, SARS Virus
ggagattgataacaccacagcaatg

SEQ ID NO: 44952 - DNA, 25 bp, SARS Virus
gagattgataagcccacagcaatgc

SEQ ID NO: 44953 - DNA, 25 bp, SARS Virus
agattgataagaccacagcaatgct

SEQ ID NO: 44954 - DNA, 25 bp, SARS Virus
gattgataagaccacagcaatgctg

SEQ ID NO: 44955 - DNA, 25 bp, SARS Virus
attgataagaccccagcaatgctga

SEQ ID NO: 44956 - DNA, 25 bp, SARS Virus
ttgataagaccacagcaatgctgat

SEQ ID NO: 44957 - DNA, 25 bp, SARS Virus
tgataagaccaccgcaatgctgata

SEQ ID NO: 44958 - DNA, 25 bp, SARS Virus
gataagaccacaccaatgctgatag

SEQ ID NO: 44959 - DNA, 25 bp, SARS Virus
ataagaccacagcaatgctgatagt

SEQ ID NO: 44960 - DNA, 25 bp, SARS Virus
taagaccacagccatgctgatagta

SEQ ID NO: 44961 - DNA, 25 bp, SARS Virus
aagaccacagcactgctgatagtac

SEQ ID NO: 44962 - DNA, 25 bp, SARS Virus
agaccacagcaacgctgatagtaca

SEQ ID NO: 44963 - DNA, 25 bp, SARS Virus
gaccacagcaatcctgatagtacaa

SEQ ID NO: 44964 - DNA, 25 bp, SARS Virus
accacagcaatgctgatagtacaaa

SEQ ID NO: 44965 - DNA, 25 bp, SARS Virus
ccacagcaatgccgatagtacaaaa

SEQ ID NO: 44966 - DNA, 25 bp, SARS Virus
cacagcaatgctcatagtacaaaaa

SEQ ID NO: 44967 - DNA, 25 bp, SARS Virus
acagcaatgctgctagtacaaaaat

SEQ ID NO: 44968 - DNA, 25 bp, SARS Virus
cagcaatgctgacagtacaaaaatc

SEQ ID NO: 44969 - DNA, 25 bp, SARS Virus
agcaatgctgatcgtacaaaaatcg

SEQ ID NO: 44970 - DNA, 25 bp, SARS Virus
gcaatgctgatactacaaaaatcga

SEQ ID NO: 44971 - DNA, 25 bp, SARS Virus
caatgctgatagcacaaaaatcgat

SEQ ID NO: 44972 - DNA, 25 bp, SARS Virus
aatgctgatagtccaaaaatcgatc

SEQ ID NO: 44973 - DNA, 25 bp, SARS Virus
atgctgatagtacaaaaatcgatct

SEQ ID NO: 44974 - DNA, 25 bp, SARS Virus
tgctgatagtaccaaaatcgatctc

SEQ ID NO: 44975 - DNA, 25 bp, SARS Virus
gctgatagtacacaaatcgatctcg

SEQ ID NO: 44976 - DNA, 25 bp, SARS Virus
ctgatagtacaacaatcgatctcga

SEQ ID NO: 44977 - DNA, 25 bp, SARS Virus
tgatagtacaaacatcgatctcgat

SEQ ID NO: 44978 - DNA, 25 bp, SARS Virus
gatagtacaaaactcgatctcgata

SEQ ID NO: 44979 - DNA, 25 bp, SARS Virus
atagtacaaaaaccgatctcgatat

SEQ ID NO: 44980 - DNA, 25 bp, SARS Virus
tagtacaaaaatcgatctcgatatc

SEQ ID NO: 44981 - DNA, 25 bp, SARS Virus
agtacaaaaatccatctcgatatca

SEQ ID NO: 44982 - DNA, 25 bp, SARS Virus
gtacaaaaatcgctctcgatatcac

SEQ ID NO: 44983 - DNA, 25 bp, SARS Virus
tacaaaaatcgacctcgatatcaca

SEQ ID NO: 44984 - DNA, 25 bp, SARS Virus
acaaaaatcgatctcgatatcacaa

SEQ ID NO: 44985 - DNA, 25 bp, SARS Virus
caaaaatcgatcccgatatcacaaa

SEQ ID NO: 44986 - DNA, 25 bp, SARS Virus
aaaaatcgatctcgatatcacaaac

SEQ ID NO: 44987 - DNA, 25 bp, SARS Virus
aaaatcgatctccatatcacaaaca

SEQ ID NO: 44988 - DNA, 25 bp, SARS Virus
aaatcgatctcgctatcacaaacac

SEQ ID NO: 44989 - DNA, 25 bp, SARS Virus
aatcgatctcgacatcacaaacaca

SEQ ID NO: 44990 - DNA, 25 bp, SARS Virus
atcgatctcgatctcacaaacacac

SEQ ID NO: 44991 - DNA, 25 bp, SARS Virus
tcgatctcgataccacaaacacaca

SEQ ID NO: 44992 - DNA, 25 bp, SARS Virus
cgatctcgatatcacaaacacacac

SEQ ID NO: 44993 - DNA, 25 bp, SARS Virus
gatctcgatatcccaaacacacaca

SEQ ID NO: 44994 - DNA, 25 bp, SARS Virus
atctcgatatcacaaacacacacaa

SEQ ID NO: 44995 - DNA, 25 bp, SARS Virus
tctcgatatcaccaacacacacaac

SEQ ID NO: 44996 - DNA, 25 bp, SARS Virus
ctcgatatcacacacacacacaact

SEQ ID NO: 44997 - DNA, 25 bp, SARS Virus
tcgatatcacaaccacacacaactc

SEQ ID NO: 44998 - DNA, 25 bp, SARS Virus
cgatatcacaaacacacacaactca

SEQ ID NO: 44999 - DNA, 25 bp, SARS Virus
gatatcacaaacccacacaactcat

SEQ ID NO: 45000 - DNA, 25 bp, SARS Virus
atatcacaaacacacacaactcata

SEQ ID NO: 45001 - DNA, 25 bp, SARS Virus
tatcacaaacacccacaactcataa

SEQ ID NO: 45002 - DNA, 25 bp, SARS Virus
atcacaaacacacacaactcataat

SEQ ID NO: 45003 - DNA, 25 bp, SARS Virus
tcacaaacacacccaactcataatg

SEQ ID NO: 45004 - DNA, 25 bp, SARS Virus
cacaaacacacacaactcataatgg

SEQ ID NO: 45005 - DNA, 25 bp, SARS Virus
acaaacacacaccactcataatggg

SEQ ID NO: 45006 - DNA, 25 bp, SARS Virus
caaacacacacacctcataatgggt

SEQ ID NO: 45007 - DNA, 25 bp, SARS Virus
aaacacacacaactcataatgggta

SEQ ID NO: 45008 - DNA, 25 bp, SARS Virus
aacacacacaacccataatgggtaa

SEQ ID NO: 45009 - DNA, 25 bp, SARS Virus
acacacacaactcataatgggtaac

SEQ ID NO: 45010 - DNA, 25 bp, SARS Virus
cacacacaactcctaatgggtaaca

SEQ ID NO: 45011 - DNA, 25 bp, SARS Virus
acacacaactcacaatgggtaacaa

SEQ ID NO: 45012 - DNA, 25 bp, SARS Virus
cacacaactcatcatgggtaacaat

SEQ ID NO: 45013 - DNA, 25 bp, SARS Virus
acacaactcatactgggtaacaata

SEQ ID NO: 45014 - DNA, 25 bp, SARS Virus
cacaactcataacgggtaacaataa

SEQ ID NO: 45015 - DNA, 25 bp, SARS Virus
acaactcataatcggtaacaataaa

SEQ ID NO: 45016 - DNA, 25 bp, SARS Virus
caactcataatgcgtaacaataaat

SEQ ID NO: 45017 - DNA, 25 bp, SARS Virus
aactcataatggctaacaataaata

SEQ ID NO: 45018 - DNA, 25 bp, SARS Virus
actcataatgggcaacaataaataa

SEQ ID NO: 45019 - DNA, 25 bp, SARS Virus
ctcataatgggtcacaataaataat

SEQ ID NO: 45020 - DNA, 25 bp, SARS Virus
tcataatgggtaccaataaataatg

SEQ ID NO: 45021 - DNA, 25 bp, SARS Virus
cataatgggtaacaataaataatga

SEQ ID NO: 45022 - DNA, 25 bp, SARS Virus
ataatgggtaaccataaataatgac

SEQ ID NO: 45023 - DNA, 25 bp, SARS Virus
taatgggtaacactaaataatgacc

SEQ ID NO: 45024 - DNA, 25 bp, SARS Virus
aatgggtaacaacaaataatgaccg

SEQ ID NO: 45025 - DNA, 25 bp, SARS Virus
aaaagaaacaaaggctcttacgaaa

SEQ ID NO: 45026 - DNA, 25 bp, SARS Virus
aaagaaacaaatgctcttacgaaag

SEQ ID NO: 45027 - DNA, 25 bp, SARS Virus
aagaaacaaatggtcttacgaaaga

SEQ ID NO: 45028 - DNA, 25 bp, SARS Virus
agaaacaaatgcgcttacgaaagaa

SEQ ID NO: 45029 - DNA, 25 bp, SARS Virus
gaaacaaatgctgttacgaaagaac

SEQ ID NO: 45030 - DNA, 25 bp, SARS Virus
aaacaaatgctcgtacgaaagaacg

SEQ ID NO: 45031 - DNA, 25 bp, SARS Virus
aacaaatgctctgacgaaagaacgg

SEQ ID NO: 45032 - DNA, 25 bp, SARS Virus
acaaatgctcttgcgaaagaacggt

SEQ ID NO: 45033 - DNA, 25 bp, SARS Virus
caaatgctcttaggaaagaacggta

SEQ ID NO: 45034 - DNA, 25 bp, SARS Virus
aaatgctcttacgaaagaacggtaa

SEQ ID NO: 45035 - DNA, 25 bp, SARS Virus
aatgctcttacggaagaacggtaaa

SEQ ID NO: 45036 - DNA, 25 bp, SARS Virus
atgctcttacgagagaacggtaaat

SEQ ID NO: 45037 - DNA, 25 bp, SARS Virus
tgctcttacgaaggaacggtaaatg

SEQ ID NO: 45038 - DNA, 25 bp, SARS Virus
gctcttacgaaagaacggtaaatga

SEQ ID NO: 45039 - DNA, 25 bp, SARS Virus
ctcttacgaaaggacggtaaatgag

SEQ ID NO: 45040 - DNA, 25 bp, SARS Virus
tcttacgaaagagcggtaaatgaga

SEQ ID NO: 45041 - DNA, 25 bp, SARS Virus
cttacgaaagaagggtaaatgagaa

SEQ ID NO: 45042 - DNA, 25 bp, SARS Virus
ttacgaaagaacggtaaatgagaac

SEQ ID NO: 45043 - DNA, 25 bp, SARS Virus
tacgaaagaacggtaaatgagaacc

SEQ ID NO: 45044 - DNA, 25 bp, SARS Virus
acgaaagaacgggaaatgagaacca

SEQ ID NO: 45045 - DNA, 25 bp, SARS Virus
cgaaagaacggtgaatgagaaccat

SEQ ID NO: 45046 - DNA, 25 bp, SARS Virus
gaaagaacggtagatgagaaccata

SEQ ID NO: 45047 - DNA, 25 bp, SARS Virus
aaagaacggtaagtgagaaccataa

SEQ ID NO: 45048 - DNA, 25 bp, SARS Virus
aagaacggtaaaggagaaccataat

SEQ ID NO: 45049 - DNA, 25 bp, SARS Virus
agaacggtaaatgagaaccataata

SEQ ID NO: 45050 - DNA, 25 bp, SARS Virus
gaacggtaaatgggaaccataatac

SEQ ID NO: 45051 - DNA, 25 bp, SARS Virus
aacggtaaatgagaaccataatacc

SEQ ID NO: 45052 - DNA, 25 bp, SARS Virus
acggtaaatgaggaccataataccg

SEQ ID NO: 45053 - DNA, 25 bp, SARS Virus
cggtaaatgagagccataataccgt

SEQ ID NO: 45054 - DNA, 25 bp, SARS Virus
ggtaaatgagaagcataataccgtt

SEQ ID NO: 45055 - DNA, 25 bp, SARS Virus
gtaaatgagaacgataataccgtta

SEQ ID NO: 45056 - DNA, 25 bp, SARS Virus
taaatgagaaccgtaataccgttaa

SEQ ID NO: 45057 - DNA, 25 bp, SARS Virus
aaatgagaaccagaataccgttaac

SEQ ID NO: 45058 - DNA, 25 bp, SARS Virus
aatgagaaccatgataccgttaacg

SEQ ID NO: 45059 - DNA, 25 bp, SARS Virus
atgagaaccatagtaccgttaacga

SEQ ID NO: 45060 - DNA, 25 bp, SARS Virus
tgagaaccataagaccgttaacgac

SEQ ID NO: 45061 - DNA, 25 bp, SARS Virus
gagaaccataatgccgttaacgacg

SEQ ID NO: 45062 - DNA, 25 bp, SARS Virus
agaaccataatagcgttaacgacgt

SEQ ID NO: 45063 - DNA, 25 bp, SARS Virus
gaaccataatacggttaacgacgta

SEQ ID NO: 45064 - DNA, 25 bp, SARS Virus
aaccataataccgttaacgacgtac

SEQ ID NO: 45065 - DNA, 25 bp, SARS Virus
accataataccggtaacgacgtaca

SEQ ID NO: 45066 - DNA, 25 bp, SARS Virus
ccataataccgtgaacgacgtacac

SEQ ID NO: 45067 - DNA, 25 bp, SARS Virus
cataataccgttgacgacgtacacg

SEQ ID NO: 45068 - DNA, 25 bp, SARS Virus
ataataccgttagcgacgtacacga

SEQ ID NO: 45069 - DNA, 25 bp, SARS Virus
taataccgttaaggacgtacacgat

SEQ ID NO: 45070 - DNA, 25 bp, SARS Virus
aataccgttaacgacgtacacgata

SEQ ID NO: 45071 - DNA, 25 bp, SARS Virus
ataccgttaacggcgtacacgatac

SEQ ID NO: 45072 - DNA, 25 bp, SARS Virus
taccgttaacgaggtacacgatacg

SEQ ID NO: 45073 - DNA, 25 bp, SARS Virus
accgttaacgacgtacacgatacga

SEQ ID NO: 45074 - DNA, 25 bp, SARS Virus
ccgttaacgacggacacgatacgac

SEQ ID NO: 45075 - DNA, 25 bp, SARS Virus
cgttaacgacgtgcacgatacgacg

SEQ ID NO: 45076 - DNA, 25 bp, SARS Virus
gttaacgacgtagacgatacgacga

SEQ ID NO: 45077 - DNA, 25 bp, SARS Virus
ttaacgacgtacgcgatacgacgaa

SEQ ID NO: 45078 - DNA, 25 bp, SARS Virus
taacgacgtacaggatacgacgaac

SEQ ID NO: 45079 - DNA, 25 bp, SARS Virus
aacgacgtacacgatacgacgaaca

SEQ ID NO: 45080 - DNA, 25 bp, SARS Virus
acgacgtacacggtacgacgaacaa

SEQ ID NO: 45081 - DNA, 25 bp, SARS Virus
cgacgtacacgagacgacgaacaat

SEQ ID NO: 45082 - DNA, 25 bp, SARS Virus
gacgtacacgatgcgacgaacaatt

SEQ ID NO: 45083 - DNA, 25 bp, SARS Virus
acgtacacgataggacgaacaattc

SEQ ID NO: 45084 - DNA, 25 bp, SARS Virus
cgtacacgatacgacgaacaattcg

SEQ ID NO: 45085 - DNA, 25 bp, SARS Virus
gtacacgatacggcgaacaattcgt

SEQ ID NO: 45086 - DNA, 25 bp, SARS Virus
tacacgatacgaggaacaattcgta

SEQ ID NO: 45087 - DNA, 25 bp, SARS Virus
acacgatacgacgaacaattcgtat

SEQ ID NO: 45088 - DNA, 25 bp, SARS Virus
cacgatacgacggacaattcgtatt

SEQ ID NO: 45089 - DNA, 25 bp, SARS Virus
acgatacgacgagcaattcgtattc

SEQ ID NO: 45090 - DNA, 25 bp, SARS Virus
cgatacgacgaagaattcgtattcg

SEQ ID NO: 45091 - DNA, 25 bp, SARS Virus
gatacgacgaacgattcgtattcgt

SEQ ID NO: 45092 - DNA, 25 bp, SARS Virus
atacgacgaacagttcgtattcgtg

SEQ ID NO: 45093 - DNA, 25 bp, SARS Virus
tacgacgaacaagtcgtattcgtgc

SEQ ID NO: 45094 - DNA, 25 bp, SARS Virus
acgacgaacaatgcgtattcgtgcg

SEQ ID NO: 45095 - DNA, 25 bp, SARS Virus
cgacgaacaattggtattcgtgcgt

SEQ ID NO: 45096 - DNA, 25 bp, SARS Virus
gacgaacaattcgtattcgtgcgta

SEQ ID NO: 45097 - DNA, 25 bp, SARS Virus
acgaacaattcggattcgtgcgtaa

SEQ ID NO: 45098 - DNA, 25 bp, SARS Virus
cgaacaattcgtgttcgtgcgtaag

SEQ ID NO: 45099 - DNA, 25 bp, SARS Virus
gaacaattcgtagtcgtgcgtaaga

SEQ ID NO: 45100 - DNA, 25 bp, SARS Virus
aacaattcgtatgcgtgcgtaagaa

SEQ ID NO: 45101 - DNA, 25 bp, SARS Virus
acaattcgtattggtgcgtaagaac

SEQ ID NO: 45102 - DNA, 25 bp, SARS Virus
caattcgtattcgtgcgtaagaaca

SEQ ID NO: 45103 - DNA, 25 bp, SARS Virus
aattcgtattcgggcgtaagaacac

SEQ ID NO: 45104 - DNA, 25 bp, SARS Virus
attcgtattcgtgcgtaagaacacg

SEQ ID NO: 45105 - DNA, 25 bp, SARS Virus
ttcgtattcgtgggtaagaacacga

SEQ ID NO: 45106 - DNA, 25 bp, SARS Virus
tcgtattcgtgcgtaagaacacgaa

SEQ ID NO: 45107 - DNA, 25 bp, SARS Virus
cgtattcgtgcggaagaacacgaac

SEQ ID NO: 45108 - DNA, 25 bp, SARS Virus
gtattcgtgcgtgagaacacgaaca

SEQ ID NO: 45109 - DNA, 25 bp, SARS Virus
tattcgtgcgtaggaacacgaacaa

SEQ ID NO: 45110 - DNA, 25 bp, SARS Virus
attcgtgcgtaagaacacgaacaaa

SEQ ID NO: 45111 - DNA, 25 bp, SARS Virus
ttcgtgcgtaaggacacgaacaaag

SEQ ID NO: 45112 - DNA, 25 bp, SARS Virus
tcgtgcgtaagagcacgaacaaaga

SEQ ID NO: 45113 - DNA, 25 bp, SARS Virus
cgtgcgtaagaagacgaacaaagac

SEQ ID NO: 45114 - DNA, 25 bp, SARS Virus
gtgcgtaagaacgcgaacaaagaca

SEQ ID NO: 45115 - DNA, 25 bp, SARS Virus
tgcgtaagaacaggaacaaagacaa

SEQ ID NO: 45116 - DNA, 25 bp, SARS Virus
gcgtaagaacacgaacaaagacaat

SEQ ID NO: 45117 - DNA, 25 bp, SARS Virus
cgtaagaacacggacaaagacaatg

SEQ ID NO: 45118 - DNA, 25 bp, SARS Virus
gtaagaacacgagcaaagacaatgg

SEQ ID NO: 45119 - DNA, 25 bp, SARS Virus
taagaacacgaagaaagacaatgga

SEQ ID NO: 45120 - DNA, 25 bp, SARS Virus
aagaacacgaacgaagacaatggaa

SEQ ID NO: 45121 - DNA, 25 bp, SARS Virus
agaacacgaacagagacaatggaag

SEQ ID NO: 45122 - DNA, 25 bp, SARS Virus
gaacacgaacaaggacaatggaaga

SEQ ID NO: 45123 - DNA, 25 bp, SARS Virus
aacacgaacaaagacaatggaagag

SEQ ID NO: 45124 - DNA, 25 bp, SARS Virus
acacgaacaaaggcaatggaagaga

SEQ ID NO: 45125 - DNA, 25 bp, SARS Virus
cacgaacaaagagaatggaagagaa

SEQ ID NO: 45126 - DNA, 25 bp, SARS Virus
acgaacaaagacgatggaagagaac

SEQ ID NO: 45127 - DNA, 25 bp, SARS Virus
cgaacaaagacagtggaagagaacg

SEQ ID NO: 45128 - DNA, 25 bp, SARS Virus
gaacaaagacaagggaagagaacgt

SEQ ID NO: 45129 - DNA, 25 bp, SARS Virus
aacaaagacaatggaagagaacgtt

SEQ ID NO: 45130 - DNA, 25 bp, SARS Virus
acaaagacaatggaagagaacgttg

SEQ ID NO: 45131 - DNA, 25 bp, SARS Virus
caaagacaatgggagagaacgttgt

SEQ ID NO: 45132 - DNA, 25 bp, SARS Virus
aaagacaatggaggagaacgttgtc

SEQ ID NO: 45133 - DNA, 25 bp, SARS Virus
aagacaatggaagagaacgttgtca

SEQ ID NO: 45134 - DNA, 25 bp, SARS Virus
agacaatggaagggaacgttgtcaa

SEQ ID NO: 45135 - DNA, 25 bp, SARS Virus
gacaatggaagagaacgttgtcaac

SEQ ID NO: 45136 - DNA, 25 bp, SARS Virus
acaatggaagaggacgttgtcaacg

SEQ ID NO: 45137 - DNA, 25 bp, SARS Virus
caatggaagagagcgttgtcaacga

SEQ ID NO: 45138 - DNA, 25 bp, SARS Virus
aatggaagagaaggttgtcaacgaa

SEQ ID NO: 45139 - DNA, 25 bp, SARS Virus
atggaagagaacgttgtcaacgaat

SEQ ID NO: 45140 - DNA, 25 bp, SARS Virus
tggaagagaacggtgtcaacgaatg

SEQ ID NO: 45141 - DNA, 25 bp, SARS Virus
ggaagagaacgtggtcaacgaatga

SEQ ID NO: 45142 - DNA, 25 bp, SARS Virus
gaagagaacgttgtcaacgaatgaa

SEQ ID NO: 45143 - DNA, 25 bp, SARS Virus
aagagaacgttggcaacgaatgaaa

SEQ ID NO: 45144 - DNA, 25 bp, SARS Virus
agagaacgttgtgaacgaatgaaat

SEQ ID NO: 45145 - DNA, 25 bp, SARS Virus
gagaacgttgtcgacgaatgaaatt

SEQ ID NO: 45146 - DNA, 25 bp, SARS Virus
agaacgttgtcagcgaatgaaatta

SEQ ID NO: 45147 - DNA, 25 bp, SARS Virus
gaacgttgtcaaggaatgaaattat

SEQ ID NO: 45148 - DNA, 25 bp, SARS Virus
aacgttgtcaacgaatgaaattata

SEQ ID NO: 45149 - DNA, 25 bp, SARS Virus
acgttgtcaacggatgaaattatac

SEQ ID NO: 45150 - DNA, 25 bp, SARS Virus
cgttgtcaacgagtgaaattatacc

SEQ ID NO: 45151 - DNA, 25 bp, SARS Virus
gttgtcaacgaaggaaattatacca

SEQ ID NO: 45152 - DNA, 25 bp, SARS Virus
ttgtcaacgaatgaaattataccag

SEQ ID NO: 45153 - DNA, 25 bp, SARS Virus
tgtcaacgaatggaattataccaga

SEQ ID NO: 45154 - DNA, 25 bp, SARS Virus
gtcaacgaatgagattataccagat

SEQ ID NO: 45155 - DNA, 25 bp, SARS Virus
tcaacgaatgaagttataccagatg

SEQ ID NO: 45156 - DNA, 25 bp, SARS Virus
caacgaatgaaagtataccagatgt

SEQ ID NO: 45157 - DNA, 25 bp, SARS Virus
aacgaatgaaatgataccagatgta

SEQ ID NO: 45158 - DNA, 25 bp, SARS Virus
acgaatgaaattgtaccagatgtac

SEQ ID NO: 45159 - DNA, 25 bp, SARS Virus
cgaatgaaattagaccagatgtacg

SEQ ID NO: 45160 - DNA, 25 bp, SARS Virus
gaatgaaattatgccagatgtacgg

SEQ ID NO: 45161 - DNA, 25 bp, SARS Virus
aatgaaattatagcagatgtacgga

SEQ ID NO: 45162 - DNA, 25 bp, SARS Virus
atgaaattatacgagatgtacggac

SEQ ID NO: 45163 - DNA, 25 bp, SARS Virus
tgaaattataccggatgtacggacg

SEQ ID NO: 45164 - DNA, 25 bp, SARS Virus
gaaattataccagatgtacggacga

SEQ ID NO: 45165 - DNA, 25 bp, SARS Virus
aaattataccaggtgtacggacgat

SEQ ID NO: 45166 - DNA, 25 bp, SARS Virus
aattataccagaggtacggacgatc

SEQ ID NO: 45167 - DNA, 25 bp, SARS Virus
attataccagatgtacggacgatcg

SEQ ID NO: 45168 - DNA, 25 bp, SARS Virus
ttataccagatggacggacgatcga

SEQ ID NO: 45169 - DNA, 25 bp, SARS Virus
tataccagatgtgcggacgatcgac

SEQ ID NO: 45170 - DNA, 25 bp, SARS Virus
ataccagatgtagggacgatcgacc

SEQ ID NO: 45171 - DNA, 25 bp, SARS Virus
taccagatgtacggacgatcgaccc

SEQ ID NO: 45172 - DNA, 25 bp, SARS Virus
accagatgtacggacgatcgaccca

SEQ ID NO: 45173 - DNA, 25 bp, SARS Virus
ccagatgtacgggcgatcgacccac

SEQ ID NO: 45174 - DNA, 25 bp, SARS Virus
cagatgtacggaggatcgacccact

SEQ ID NO: 45175 - DNA, 25 bp, SARS Virus
agatgtacggacgatcgacccacta

SEQ ID NO: 45176 - DNA, 25 bp, SARS Virus
gatgtacggacggtcgacccactac

SEQ ID NO: 45177 - DNA, 25 bp, SARS Virus
atgtacggacgagcgacccactacg

SEQ ID NO: 45178 - DNA, 25 bp, SARS Virus
tgtacggacgatggacccactacgc

SEQ ID NO: 45179 - DNA, 25 bp, SARS Virus
gtacggacgatcgacccactacgca

SEQ ID NO: 45180 - DNA, 25 bp, SARS Virus
tacggacgatcggcccactacgcat

SEQ ID NO: 45181 - DNA, 25 bp, SARS Virus
acggacgatcgagccactacgcata

SEQ ID NO: 45182 - DNA, 25 bp, SARS Virus
cggacgatcgacgcactacgcatag

SEQ ID NO: 45183 - DNA, 25 bp, SARS Virus
ggacgatcgaccgactacgcatagt

SEQ ID NO: 45184 - DNA, 25 bp, SARS Virus
gacgatcgacccgctacgcatagta

SEQ ID NO: 45185 - DNA, 25 bp, SARS Virus
acgatcgacccagtacgcatagtac

SEQ ID NO: 45186 - DNA, 25 bp, SARS Virus
cgatcgacccacgacgcatagtact

SEQ ID NO: 45187 - DNA, 25 bp, SARS Virus
gatcgacccactgcgcatagtactg

SEQ ID NO: 45188 - DNA, 25 bp, SARS Virus
atcgacccactaggcatagtactgt

SEQ ID NO: 45189 - DNA, 25 bp, SARS Virus
tcgacccactacgcatagtactgta

SEQ ID NO: 45190 - DNA, 25 bp, SARS Virus
cgacccactacggatagtactgtac

SEQ ID NO: 45191 - DNA, 25 bp, SARS Virus
gacccactacgcgtagtactgtacc

SEQ ID NO: 45192 - DNA, 25 bp, SARS Virus
acccactacgcagagtactgtaccg

SEQ ID NO: 45193 - DNA, 25 bp, SARS Virus
cccactacgcatggtactgtaccga

SEQ ID NO: 45194 - DNA, 25 bp, SARS Virus
ccactacgcatagtactgtaccgaa

SEQ ID NO: 45195 - DNA, 25 bp, SARS Virus
cactacgcataggactgtaccgaac

SEQ ID NO: 45196 - DNA, 25 bp, SARS Virus
actacgcatagtgctgtaccgaact

SEQ ID NO: 45197 - DNA, 25 bp, SARS Virus
ctacgcatagtagtgtaccgaactt

SEQ ID NO: 45198 - DNA, 25 bp, SARS Virus
tacgcatagtacggtaccgaactta

SEQ ID NO: 45199 - DNA, 25 bp, SARS Virus
acgcatagtactgtaccgaacttaa

SEQ ID NO: 45200 - DNA, 25 bp, SARS Virus
cgcatagtactggaccgaacttaac

SEQ ID NO: 45201 - DNA, 25 bp, SARS Virus
gcatagtactgtgccgaacttaacc

SEQ ID NO: 45202 - DNA, 25 bp, SARS Virus
catagtactgtagcgaacttaaccg

SEQ ID NO: 45203 - DNA, 25 bp, SARS Virus
atagtactgtacggaacttaaccga

SEQ ID NO: 45204 - DNA, 25 bp, SARS Virus
tagtactgtaccgaacttaaccgac

SEQ ID NO: 45205 - DNA, 25 bp, SARS Virus
agtactgtaccggacttaaccgact

SEQ ID NO: 45206 - DNA, 25 bp, SARS Virus
gtactgtaccgagcttaaccgactg

SEQ ID NO: 45207 - DNA, 25 bp, SARS Virus
tactgtaccgaagttaaccgactgt

SEQ ID NO: 45208 - DNA, 25 bp, SARS Virus
actgtaccgaacgtaaccgactgtg

SEQ ID NO: 45209 - DNA, 25 bp, SARS Virus
ctgtaccgaactgaaccgactgtga

SEQ ID NO: 45210 - DNA, 25 bp, SARS Virus
tgtaccgaacttgaccgactgtgat

SEQ ID NO: 45211 - DNA, 25 bp, SARS Virus
gtaccgaacttagccgactgtgatc

SEQ ID NO: 45212 - DNA, 25 bp, SARS Virus
taccgaacttaagcgactgtgatcg

SEQ ID NO: 45213 - DNA, 25 bp, SARS Virus
accgaacttaacggactgtgatcga

SEQ ID NO: 45214 - DNA, 25 bp, SARS Virus
ccgaacttaaccgactgtgatcgaa

SEQ ID NO: 45215 - DNA, 25 bp, SARS Virus
cgaacttaaccggctgtgatcgaac

SEQ ID NO: 45216 - DNA, 25 bp, SARS Virus
gaacttaaccgagtgtgatcgaaca

SEQ ID NO: 45217 - DNA, 25 bp, SARS Virus
aacttaaccgacggtgatcgaacag

SEQ ID NO: 45218 - DNA, 25 bp, SARS Virus
acttaaccgactgtgatcgaacaga

SEQ ID NO: 45219 - DNA, 25 bp, SARS Virus
cttaaccgactgggatcgaacagac

SEQ ID NO: 45220 - DNA, 25 bp, SARS Virus
ttaaccgactgtgatcgaacagacc

SEQ ID NO: 45221 - DNA, 25 bp, SARS Virus
taaccgactgtggtcgaacagacca

SEQ ID NO: 45222 - DNA, 25 bp, SARS Virus
aaccgactgtgagcgaacagaccaa

SEQ ID NO: 45223 - DNA, 25 bp, SARS Virus
accgactgtgatggaacagaccaat

SEQ ID NO: 45224 - DNA, 25 bp, SARS Virus
ccgactgtgatcgaacagaccaata

SEQ ID NO: 45225 - DNA, 25 bp, SARS Virus
cgactgtgatcggacagaccaatat

SEQ ID NO: 45226 - DNA, 25 bp, SARS Virus
gactgtgatcgagcagaccaatatc

SEQ ID NO: 45227 - DNA, 25 bp, SARS Virus
actgtgatcgaagagaccaatatcc

SEQ ID NO: 45228 - DNA, 25 bp, SARS Virus
ctgtgatcgaacggaccaatatccg

SEQ ID NO: 45229 - DNA, 25 bp, SARS Virus
tgtgatcgaacagaccaatatccga

SEQ ID NO: 45230 - DNA, 25 bp, SARS Virus
gtgatcgaacaggccaatatccgaa

SEQ ID NO: 45231 - DNA, 25 bp, SARS Virus
tgatcgaacagagcaatatccgaat

SEQ ID NO: 45232 - DNA, 25 bp, SARS Virus
gatcgaacagacgaatatccgaatt

SEQ ID NO: 45233 - DNA, 25 bp, SARS Virus
atcgaacagaccgatatccgaattc

SEQ ID NO: 45234 - DNA, 25 bp, SARS Virus
tcgaacagaccagtatccgaattcc

SEQ ID NO: 45235 - DNA, 25 bp, SARS Virus
cgaacagaccaagatccgaattcct

SEQ ID NO: 45236 - DNA, 25 bp, SARS Virus
gaacagaccaatgtccgaattccta

SEQ ID NO: 45237 - DNA, 25 bp, SARS Virus
aacagaccaatagccgaattcctaa

SEQ ID NO: 45238 - DNA, 25 bp, SARS Virus
acagaccaatatgcgaattcctaac

SEQ ID NO: 45239 - DNA, 25 bp, SARS Virus
cagaccaatatcggaattcctaaca

SEQ ID NO: 45240 - DNA, 25 bp, SARS Virus
agaccaatatccgaattcctaacac

SEQ ID NO: 45241 - DNA, 25 bp, SARS Virus
gaccaatatccggattcctaacaca

SEQ ID NO: 45242 - DNA, 25 bp, SARS Virus
accaatatccgagttcctaacacaa

SEQ ID NO: 45243 - DNA, 25 bp, SARS Virus
ccaatatccgaagtcctaacacaat

SEQ ID NO: 45244 - DNA, 25 bp, SARS Virus
caatatccgaatgcctaacacaata

SEQ ID NO: 45245 - DNA, 25 bp, SARS Virus
aatatccgaattgctaacacaatac

SEQ ID NO: 45246 - DNA, 25 bp, SARS Virus
atatccgaattcgtaacacaataca

SEQ ID NO: 45247 - DNA, 25 bp, SARS Virus
tatccgaattccgaacacaatacat

SEQ ID NO: 45248 - DNA, 25 bp, SARS Virus
atccgaattcctgacacaatacata

SEQ ID NO: 45249 - DNA, 25 bp, SARS Virus
tccgaattcctagcacaatacatac

SEQ ID NO: 45250 - DNA, 25 bp, SARS Virus
ccgaattcctaagacaatacatacg

SEQ ID NO: 45251 - DNA, 25 bp, SARS Virus
cgaattcctaacgcaatacatacga

SEQ ID NO: 45252 - DNA, 25 bp, SARS Virus
gaattcctaacagaatacatacgaa

SEQ ID NO: 45253 - DNA, 25 bp, SARS Virus
aattcctaacacgatacatacgaag

SEQ ID NO: 45254 - DNA, 25 bp, SARS Virus
attcctaacacagtacatacgaagt

SEQ ID NO: 45255 - DNA, 25 bp, SARS Virus
ttcctaacacaagacatacgaagtc

SEQ ID NO: 45256 - DNA, 25 bp, SARS Virus
tcctaacacaatgcatacgaagtcg

SEQ ID NO: 45257 - DNA, 25 bp, SARS Virus
cctaacacaatagatacgaagtcga

SEQ ID NO: 45258 - DNA, 25 bp, SARS Virus
ctaacacaatacgtacgaagtcgaa

SEQ ID NO: 45259 - DNA, 25 bp, SARS Virus
taacacaatacagacgaagtcgaaa

SEQ ID NO: 45260 - DNA, 25 bp, SARS Virus
aacacaatacatgcgaagtcgaaat

SEQ ID NO: 45261 - DNA, 25 bp, SARS Virus
acacaatacataggaagtcgaaatc

SEQ ID NO: 45262 - DNA, 25 bp, SARS Virus
cacaatacatacgaagtcgaaatca

SEQ ID NO: 45263 - DNA, 25 bp, SARS Virus
acaatacatacggagtcgaaatcaa

SEQ ID NO: 45264 - DNA, 25 bp, SARS Virus
caatacatacgaggtcgaaatcaaa

SEQ ID NO: 45265 - DNA, 25 bp, SARS Virus
aatacatacgaagtcgaaatcaaaa

SEQ ID NO: 45266 - DNA, 25 bp, SARS Virus
atacatacgaaggcgaaatcaaaac

SEQ ID NO: 45267 - DNA, 25 bp, SARS Virus
tacatacgaagtggaaatcaaaacg

SEQ ID NO: 45268 - DNA, 25 bp, SARS Virus
acatacgaagtcgaaatcaaaacga

SEQ ID NO: 45269 - DNA, 25 bp, SARS Virus
catacgaagtcggaatcaaaacgaa

SEQ ID NO: 45270 - DNA, 25 bp, SARS Virus
atacgaagtcgagatcaaaacgaat

SEQ ID NO: 45271 - DNA, 25 bp, SARS Virus
tacgaagtcgaagtcaaaacgaata

SEQ ID NO: 45272 - DNA, 25 bp, SARS Virus
acgaagtcgaaagcaaaacgaataa

SEQ ID NO: 45273 - DNA, 25 bp, SARS Virus
cgaagtcgaaatgaaaacgaataag

SEQ ID NO: 45274 - DNA, 25 bp, SARS Virus
gaagtcgaaatcgaaacgaataaga

SEQ ID NO: 45275 - DNA, 25 bp, SARS Virus
aagtcgaaatcagaacgaataagag

SEQ ID NO: 45276 - DNA, 25 bp, SARS Virus
agtcgaaatcaagacgaataagagt

SEQ ID NO: 45277 - DNA, 25 bp, SARS Virus
gtcgaaatcaaagcgaataagagta

SEQ ID NO: 45278 - DNA, 25 bp, SARS Virus
tcgaaatcaaaaggaataagagtac

SEQ ID NO: 45279 - DNA, 25 bp, SARS Virus
cgaaatcaaaacgaataagagtact

SEQ ID NO: 45280 - DNA, 25 bp, SARS Virus
gaaatcaaaacggataagagtactg

SEQ ID NO: 45281 - DNA, 25 bp, SARS Virus
aaatcaaaacgagtaagagtactgt

SEQ ID NO: 45282 - DNA, 25 bp, SARS Virus
aatcaaaacgaagaagagtactgtc

SEQ ID NO: 45283 - DNA, 25 bp, SARS Virus
atcaaaacgaatgagagtactgtcg

SEQ ID NO: 45284 - DNA, 25 bp, SARS Virus
tcaaaacgaataggagtactgtcga

SEQ ID NO: 45285 - DNA, 25 bp, SARS Virus
caaaacgaataagagtactgtcgag

SEQ ID NO: 45286 - DNA, 25 bp, SARS Virus
aaaacgaataagggtactgtcgagc

SEQ ID NO: 45287 - DNA, 25 bp, SARS Virus
aaacgaataagagtactgtcgagcg

SEQ ID NO: 45288 - DNA, 25 bp, SARS Virus
aacgaataagaggactgtcgagcgt

SEQ ID NO: 45289 - DNA, 25 bp, SARS Virus
acgaataagagtgctgtcgagcgtg

SEQ ID NO: 45290 - DNA, 25 bp, SARS Virus
cgaataagagtagtgtcgagcgtga

SEQ ID NO: 45291 - DNA, 25 bp, SARS Virus
gaataagagtacggtcgagcgtgac

SEQ ID NO: 45292 - DNA, 25 bp, SARS Virus
aataagagtactgtcgagcgtgaca

SEQ ID NO: 45293 - DNA, 25 bp, SARS Virus
ataagagtactggcgagcgtgacaa

SEQ ID NO: 45294 - DNA, 25 bp, SARS Virus
taagagtactgtggagcgtgacaaa

SEQ ID NO: 45295 - DNA, 25 bp, SARS Virus
aagagtactgtcgagcgtgacaaat

SEQ ID NO: 45296 - DNA, 25 bp, SARS Virus
agagtactgtcgggcgtgacaaata

SEQ ID NO: 45297 - DNA, 25 bp, SARS Virus
gagtactgtcgagcgtgacaaatac

SEQ ID NO: 45298 - DNA, 25 bp, SARS Virus
agtactgtcgagggtgacaaatact

SEQ ID NO: 45299 - DNA, 25 bp, SARS Virus
gtactgtcgagcgtgacaaatacta

SEQ ID NO: 45300 - DNA, 25 bp, SARS Virus
tactgtcgagcgggacaaatactac

SEQ ID NO: 45301 - DNA, 25 bp, SARS Virus
actgtcgagcgtgacaaatactact

SEQ ID NO: 45302 - DNA, 25 bp, SARS Virus
ctgtcgagcgtggcaaatactacta

SEQ ID NO: 45303 - DNA, 25 bp, SARS Virus
tgtcgagcgtgagaaatactactac

SEQ ID NO: 45304 - DNA, 25 bp, SARS Virus
gtcgagcgtgacgaatactactacg

SEQ ID NO: 45305 - DNA, 25 bp, SARS Virus
tcgagcgtgacagatactactacga

SEQ ID NO: 45306 - DNA, 25 bp, SARS Virus
cgagcgtgacaagtactactacgac

SEQ ID NO: 45307 - DNA, 25 bp, SARS Virus
gagcgtgacaaagactactacgacg

SEQ ID NO: 45308 - DNA, 25 bp, SARS Virus
agcgtgacaaatgctactacgacga

SEQ ID NO: 45309 - DNA, 25 bp, SARS Virus
gcgtgacaaatagtactacgacgat

SEQ ID NO: 45310 - DNA, 25 bp, SARS Virus
cgtgacaaatacgactacgacgatc

SEQ ID NO: 45311 - DNA, 25 bp, SARS Virus
gtgacaaatactgctacgacgatct

SEQ ID NO: 45312 - DNA, 25 bp, SARS Virus
tgacaaatactagtacgacgatctg

SEQ ID NO: 45313 - DNA, 25 bp, SARS Virus
gacaaatactacgacgacgatctgc

SEQ ID NO: 45314 - DNA, 25 bp, SARS Virus
acaaatactactgcgacgatctgca

SEQ ID NO: 45315 - DNA, 25 bp, SARS Virus
caaatactactaggacgatctgcac

SEQ ID NO: 45316 - DNA, 25 bp, SARS Virus
aaatactactacgacgatctgcaca

SEQ ID NO: 45317 - DNA, 25 bp, SARS Virus
aatactactacggcgatctgcacaa

SEQ ID NO: 45318 - DNA, 25 bp, SARS Virus
atactactacgaggatctgcacaaa

SEQ ID NO: 45319 - DNA, 25 bp, SARS Virus
tactactacgacgatctgcacaaac

SEQ ID NO: 45320 - DNA, 25 bp, SARS Virus
actactacgacggtctgcacaaacc

SEQ ID NO: 45321 - DNA, 25 bp, SARS Virus
ctactacgacgagctgcacaaacct

SEQ ID NO: 45322 - DNA, 25 bp, SARS Virus
tactacgacgatgtgcacaaacctg

SEQ ID NO: 45323 - DNA, 25 bp, SARS Virus
actacgacgatcggcacaaacctgt

SEQ ID NO: 45324 - DNA, 25 bp, SARS Virus
ctacgacgatctgcacaaacctgtg

SEQ ID NO: 45325 - DNA, 25 bp, SARS Virus
tacgacgatctggacaaacctgtga

SEQ ID NO: 45326 - DNA, 25 bp, SARS Virus
acgacgatctgcgcaaacctgtgac

SEQ ID NO: 45327 - DNA, 25 bp, SARS Virus
cgacgatctgcagaaacctgtgact

SEQ ID NO: 45328 - DNA, 25 bp, SARS Virus
gacgatctgcacgaacctgtgacta

SEQ ID NO: 45329 - DNA, 25 bp, SARS Virus
acgatctgcacagacctgtgactac

SEQ ID NO: 45330 - DNA, 25 bp, SARS Virus
cgatctgcacaagcctgtgactact

SEQ ID NO: 45331 - DNA, 25 bp, SARS Virus
gatctgcacaaagctgtgactactt

SEQ ID NO: 45332 - DNA, 25 bp, SARS Virus
atctgcacaaacgtgtgactactta

SEQ ID NO: 45333 - DNA, 25 bp, SARS Virus
tctgcacaaaccggtgactacttac

SEQ ID NO: 45334 - DNA, 25 bp, SARS Virus
ctgcacaaacctgtgactacttaca

SEQ ID NO: 45335 - DNA, 25 bp, SARS Virus
tgcacaaacctgggactacttacag

SEQ ID NO: 45336 - DNA, 25 bp, SARS Virus
gcacaaacctgtgactacttacagt

SEQ ID NO: 45337 - DNA, 25 bp, SARS Virus
cacaaacctgtggctacttacagta

SEQ ID NO: 45338 - DNA, 25 bp, SARS Virus
acaaacctgtgagtacttacagtaa

SEQ ID NO: 45339 - DNA, 25 bp, SARS Virus
caaacctgtgacgacttacagtaat

SEQ ID NO: 45340 - DNA, 25 bp, SARS Virus
aaacctgtgactgcttacagtaatg

SEQ ID NO: 45341 - DNA, 25 bp, SARS Virus
aacctgtgactagttacagtaatgt

SEQ ID NO: 45342 - DNA, 25 bp, SARS Virus
acctgtgactacgtacagtaatgtg

SEQ ID NO: 45343 - DNA, 25 bp, SARS Virus
cctgtgactactgacagtaatgtga

SEQ ID NO: 45344 - DNA, 25 bp, SARS Virus
ctgtgactacttgcagtaatgtgaa

SEQ ID NO: 45345 - DNA, 25 bp, SARS Virus
tgtgactacttagagtaatgtgaac

SEQ ID NO: 45346 - DNA, 25 bp, SARS Virus
gtgactacttacggtaatgtgaaca

SEQ ID NO: 45347 - DNA, 25 bp, SARS Virus
tgactacttacagtaatgtgaacaa

SEQ ID NO: 45348 - DNA, 25 bp, SARS Virus
gactacttacaggaatgtgaacaaa

SEQ ID NO: 45349 - DNA, 25 bp, SARS Virus
actacttacagtgatgtgaacaaat

SEQ ID NO: 45350 - DNA, 25 bp, SARS Virus
ctacttacagtagtgtgaacaaatg

SEQ ID NO: 45351 - DNA, 25 bp, SARS Virus
tacttacagtaaggtgaacaaatgt

SEQ ID NO: 45352 - DNA, 25 bp, SARS Virus
acttacagtaatgtgaacaaatgtt

SEQ ID NO: 45353 - DNA, 25 bp, SARS Virus
cttacagtaatgggaacaaatgttt

SEQ ID NO: 45354 - DNA, 25 bp, SARS Virus
ttacagtaatgtgaacaaatgtttc

SEQ ID NO: 45355 - DNA, 25 bp, SARS Virus
tacagtaatgtggacaaatgtttca

SEQ ID NO: 45356 - DNA, 25 bp, SARS Virus
acagtaatgtgagcaaatgtttcag

SEQ ID NO: 45357 - DNA, 25 bp, SARS Virus
cagtaatgtgaagaaatgtttcaga

SEQ ID NO: 45358 - DNA, 25 bp, SARS Virus
agtaatgtgaacgaatgtttcagat

SEQ ID NO: 45359 - DNA, 25 bp, SARS Virus
gtaatgtgaacagatgtttcagatg

SEQ ID NO: 45360 - DNA, 25 bp, SARS Virus
taatgtgaacaagtgtttcagatga

SEQ ID NO: 45361 - DNA, 25 bp, SARS Virus
aatgtgaacaaaggtttcagatgat

SEQ ID NO: 45362 - DNA, 25 bp, SARS Virus
atgtgaacaaatgtttcagatgata

SEQ ID NO: 45363 - DNA, 25 bp, SARS Virus
tgtgaacaaatggttcagatgatac

SEQ ID NO: 45364 - DNA, 25 bp, SARS Virus
gtgaacaaatgtgtcagatgatacc

SEQ ID NO: 45365 - DNA, 25 bp, SARS Virus
tgaacaaatgttgcagatgatacca

SEQ ID NO: 45366 - DNA, 25 bp, SARS Virus
gaacaaatgtttgagatgataccat

SEQ ID NO: 45367 - DNA, 25 bp, SARS Virus
aacaaatgtttcggatgataccatt

SEQ ID NO: 45368 - DNA, 25 bp, SARS Virus
acaaatgtttcagatgataccatta

SEQ ID NO: 45369 - DNA, 25 bp, SARS Virus
caaatgtttcaggtgataccattac

SEQ ID NO: 45370 - DNA, 25 bp, SARS Virus
aaatgtttcagaggataccattacg

SEQ ID NO: 45371 - DNA, 25 bp, SARS Virus
aatgtttcagatgataccattacga

SEQ ID NO: 45372 - DNA, 25 bp, SARS Virus
atgtttcagatggtaccattacgaa

SEQ ID NO: 45373 - DNA, 25 bp, SARS Virus
tgtttcagatgagaccattacgaaa

SEQ ID NO: 45374 - DNA, 25 bp, SARS Virus
gtttcagatgatgccattacgaaat

SEQ ID NO: 45375 - DNA, 25 bp, SARS Virus
tttcagatgatagcattacgaaatc

SEQ ID NO: 45376 - DNA, 25 bp, SARS Virus
ttcagatgatacgattacgaaatct

SEQ ID NO: 45377 - DNA, 25 bp, SARS Virus
tcagatgataccgttacgaaatcta

SEQ ID NO: 45378 - DNA, 25 bp, SARS Virus
cagatgataccagtacgaaatctag

SEQ ID NO: 45379 - DNA, 25 bp, SARS Virus
agatgataccatgacgaaatctagt

SEQ ID NO: 45380 - DNA, 25 bp, SARS Virus
gatgataccattgcgaaatctagtt

SEQ ID NO: 45381 - DNA, 25 bp, SARS Virus
atgataccattaggaaatctagttc

SEQ ID NO: 45382 - DNA, 25 bp, SARS Virus
tgataccattacgaaatctagttcg

SEQ ID NO: 45383 - DNA, 25 bp, SARS Virus
gataccattacggaatctagttcga

SEQ ID NO: 45384 - DNA, 25 bp, SARS Virus
ataccattacgagatctagttcgat

SEQ ID NO: 45385 - DNA, 25 bp, SARS Virus
taccattacgaagtctagttcgata

SEQ ID NO: 45386 - DNA, 25 bp, SARS Virus
accattacgaaagctagttcgataa

SEQ ID NO: 45387 - DNA, 25 bp, SARS Virus
ccattacgaaatgtagttcgataaa

SEQ ID NO: 45388 - DNA, 25 bp, SARS Virus
cattacgaaatcgagttcgataaag

SEQ ID NO: 45389 - DNA, 25 bp, SARS Virus
attacgaaatctggttcgataaagg

SEQ ID NO: 45390 - DNA, 25 bp, SARS Virus
ttacgaaatctagttcgataaaggt

SEQ ID NO: 45391 - DNA, 25 bp, SARS Virus
tacgaaatctaggtcgataaaggta

SEQ ID NO: 45392 - DNA, 25 bp, SARS Virus
acgaaatctagtgcgataaaggtac

SEQ ID NO: 45393 - DNA, 25 bp, SARS Virus
cgaaatctagttggataaaggtaca

SEQ ID NO: 45394 - DNA, 25 bp, SARS Virus
gaaatctagttcgataaaggtacac

SEQ ID NO: 45395 - DNA, 25 bp, SARS Virus
aaatctagttcggtaaaggtacacc

SEQ ID NO: 45396 - DNA, 25 bp, SARS Virus
aatctagttcgagaaaggtacaccc

SEQ ID NO: 45397 - DNA, 25 bp, SARS Virus
atctagttcgatgaaggtacacccg

SEQ ID NO: 45398 - DNA, 25 bp, SARS Virus
tctagttcgatagaggtacacccgg

SEQ ID NO: 45399 - DNA, 25 bp, SARS Virus
ctagttcgataagggtacacccgga

SEQ ID NO: 45400 - DNA, 25 bp, SARS Virus
tagttcgataaaggtacacccggaa

SEQ ID NO: 45401 - DNA, 25 bp, SARS Virus
agttcgataaaggtacacccggaat

SEQ ID NO: 45402 - DNA, 25 bp, SARS Virus
gttcgataaagggacacccggaatc

SEQ ID NO: 45403 - DNA, 25 bp, SARS Virus
ttcgataaaggtgcacccggaatca

SEQ ID NO: 45404 - DNA, 25 bp, SARS Virus
tcgataaaggtagacccggaatcaa

SEQ ID NO: 45405 - DNA, 25 bp, SARS Virus
cgataaaggtacgcccggaatcaat

SEQ ID NO: 45406 - DNA, 25 bp, SARS Virus
gataaaggtacagccggaatcaata

SEQ ID NO: 45407 - DNA, 25 bp, SARS Virus
ataaaggtacacgcggaatcaataa

SEQ ID NO: 45408 - DNA, 25 bp, SARS Virus
taaaggtacaccgggaatcaataaa

SEQ ID NO: 45409 - DNA, 25 bp, SARS Virus
aaaggtacacccggaatcaataaag

SEQ ID NO: 45410 - DNA, 25 bp, SARS Virus
aaggtacacccggaatcaataaaga

SEQ ID NO: 45411 - DNA, 25 bp, SARS Virus
aggtacacccgggatcaataaagac

SEQ ID NO: 45412 - DNA, 25 bp, SARS Virus
ggtacacccggagtcaataaagaca

SEQ ID NO: 45413 - DNA, 25 bp, SARS Virus
gtacacccggaagcaataaagacat

SEQ ID NO: 45414 - DNA, 25 bp, SARS Virus
tacacccggaatgaataaagacatt

SEQ ID NO: 45415 - DNA, 25 bp, SARS Virus
acacccggaatcgataaagacattg

SEQ ID NO: 45416 - DNA, 25 bp, SARS Virus
cacccggaatcagtaaagacattgg

SEQ ID NO: 45417 - DNA, 25 bp, SARS Virus
acccggaatcaagaaagacattgga

SEQ ID NO: 45418 - DNA, 25 bp, SARS Virus
cccggaatcaatgaagacattggag

SEQ ID NO: 45419 - DNA, 25 bp, SARS Virus
ccggaatcaatagagacattggaga

SEQ ID NO: 45420 - DNA, 25 bp, SARS Virus
cggaatcaataaggacattggagat

SEQ ID NO: 45421 - DNA, 25 bp, SARS Virus
ggaatcaataaagacattggagatt

SEQ ID NO: 45422 - DNA, 25 bp, SARS Virus
gaatcaataaaggcattggagattg

SEQ ID NO: 45423 - DNA, 25 bp, SARS Virus
aatcaataaagagattggagattga

SEQ ID NO: 45424 - DNA, 25 bp, SARS Virus
atcaataaagacgttggagattgat

SEQ ID NO: 45425 - DNA, 25 bp, SARS Virus
tcaataaagacagtggagattgata

SEQ ID NO: 45426 - DNA, 25 bp, SARS Virus
caataaagacatgggagattgataa

SEQ ID NO: 45427 - DNA, 25 bp, SARS Virus
aataaagacattggagattgataag

SEQ ID NO: 45428 - DNA, 25 bp, SARS Virus
ataaagacattggagattgataaga

SEQ ID NO: 45429 - DNA, 25 bp, SARS Virus
taaagacattggggattgataagac

SEQ ID NO: 45430 - DNA, 25 bp, SARS Virus
aaagacattggagattgataagacc

SEQ ID NO: 45431 - DNA, 25 bp, SARS Virus
aagacattggaggttgataagacca

SEQ ID NO: 45432 - DNA, 25 bp, SARS Virus
agacattggagagtgataagaccac

SEQ ID NO: 45433 - DNA, 25 bp, SARS Virus
gacattggagatggataagaccaca

SEQ ID NO: 45434 - DNA, 25 bp, SARS Virus
acattggagattgataagaccacag

SEQ ID NO: 45435 - DNA, 25 bp, SARS Virus
cattggagattggtaagaccacagc

SEQ ID NO: 45436 - DNA, 25 bp, SARS Virus
attggagattgagaagaccacagca

SEQ ID NO: 45437 - DNA, 25 bp, SARS Virus
ttggagattgatgagaccacagcaa

SEQ ID NO: 45438 - DNA, 25 bp, SARS Virus
tggagattgataggaccacagcaat

SEQ ID NO: 45439 - DNA, 25 bp, SARS Virus
ggagattgataagaccacagcaatg

SEQ ID NO: 45440 - DNA, 25 bp, SARS Virus
gagattgataaggccacagcaatgc

SEQ ID NO: 45441 - DNA, 25 bp, SARS Virus
agattgataagagcacagcaatgct

SEQ ID NO: 45442 - DNA, 25 bp, SARS Virus
gattgataagacgacagcaatgctg

SEQ ID NO: 45443 - DNA, 25 bp, SARS Virus
attgataagaccgcagcaatgctga

SEQ ID NO: 45444 - DNA, 25 bp, SARS Virus
ttgataagaccagagcaatgctgat

SEQ ID NO: 45445 - DNA, 25 bp, SARS Virus
tgataagaccacggcaatgctgata

SEQ ID NO: 45446 - DNA, 25 bp, SARS Virus
gataagaccacagcaatgctgatag

SEQ ID NO: 45447 - DNA, 25 bp, SARS Virus
ataagaccacaggaatgctgatagt

SEQ ID NO: 45448 - DNA, 25 bp, SARS Virus
taagaccacagcgatgctgatagta

SEQ ID NO: 45449 - DNA, 25 bp, SARS Virus
aagaccacagcagtgctgatagtac

SEQ ID NO: 45450 - DNA, 25 bp, SARS Virus
agaccacagcaaggctgatagtaca

SEQ ID NO: 45451 - DNA, 25 bp, SARS Virus
gaccacagcaatgctgatagtacaa

SEQ ID NO: 45452 - DNA, 25 bp, SARS Virus
accacagcaatggtgatagtacaaa

SEQ ID NO: 45453 - DNA, 25 bp, SARS Virus
ccacagcaatgcggatagtacaaaa

SEQ ID NO: 45454 - DNA, 25 bp, SARS Virus
cacagcaatgctgatagtacaaaaa

SEQ ID NO: 45455 - DNA, 25 bp, SARS Virus
acagcaatgctggtagtacaaaaat

SEQ ID NO: 45456 - DNA, 25 bp, SARS Virus
cagcaatgctgagagtacaaaaatc

SEQ ID NO: 45457 - DNA, 25 bp, SARS Virus
agcaatgctgatggtacaaaaatcg

SEQ ID NO: 45458 - DNA, 25 bp, SARS Virus
gcaatgctgatagtacaaaaatcga

SEQ ID NO: 45459 - DNA, 25 bp, SARS Virus
caatgctgataggacaaaaatcgat

SEQ ID NO: 45460 - DNA, 25 bp, SARS Virus
aatgctgatagtgcaaaaatcgatc

SEQ ID NO: 45461 - DNA, 25 bp, SARS Virus
atgctgatagtagaaaaatcgatct

SEQ ID NO: 45462 - DNA, 25 bp, SARS Virus
tgctgatagtacgaaaatcgatctc

SEQ ID NO: 45463 - DNA, 25 bp, SARS Virus
gctgatagtacagaaatcgatctcg

SEQ ID NO: 45464 - DNA, 25 bp, SARS Virus
ctgatagtacaagaatcgatctcga

SEQ ID NO: 45465 - DNA, 25 bp, SARS Virus
tgatagtacaaagatcgatctcgat

SEQ ID NO: 45466 - DNA, 25 bp, SARS Virus
gatagtacaaaagtcgatctcgata

SEQ ID NO: 45467 - DNA, 25 bp, SARS Virus
atagtacaaaaagcgatctcgatat

SEQ ID NO: 45468 - DNA, 25 bp, SARS Virus
tagtacaaaaatggatctcgatatc

SEQ ID NO: 45469 - DNA, 25 bp, SARS Virus
agtacaaaaatcgatctcgatatca

SEQ ID NO: 45470 - DNA, 25 bp, SARS Virus
gtacaaaaatcggtctcgatatcac

SEQ ID NO: 45471 - DNA, 25 bp, SARS Virus
tacaaaaatcgagctcgatatcaca

SEQ ID NO: 45472 - DNA, 25 bp, SARS Virus
acaaaaatcgatgtcgatatcacaa

SEQ ID NO: 45473 - DNA, 25 bp, SARS Virus
caaaaatcgatcgcgatatcacaaa

SEQ ID NO: 45474 - DNA, 25 bp, SARS Virus
aaaaatcgatctggatatcacaaac

SEQ ID NO: 45475 - DNA, 25 bp, SARS Virus
aaaatcgatctcgatatcacaaaca

SEQ ID NO: 45476 - DNA, 25 bp, SARS Virus
aaatcgatctcggtatcacaaacac

SEQ ID NO: 45477 - DNA, 25 bp, SARS Virus
aatcgatctcgagatcacaaacaca

SEQ ID NO: 45478 - DNA, 25 bp, SARS Virus
atcgatctcgatgtcacaaacacac

SEQ ID NO: 45479 - DNA, 25 bp, SARS Virus
tcgatctcgatagcacaaacacaca

SEQ ID NO: 45480 - DNA, 25 bp, SARS Virus
cgatctcgatatgacaaacacacac

SEQ ID NO: 45481 - DNA, 25 bp, SARS Virus
gatctcgatatcgcaaacacacaca

SEQ ID NO: 45482 - DNA, 25 bp, SARS Virus
atctcgatatcagaaacacacacaa

SEQ ID NO: 45483 - DNA, 25 bp, SARS Virus
tctcgatatcacgaacacacacaac

SEQ ID NO: 45484 - DNA, 25 bp, SARS Virus
ctcgatatcacagacacacacaact

SEQ ID NO: 45485 - DNA, 25 bp, SARS Virus
tcgatatcacaagcacacacaactc

SEQ ID NO: 45486 - DNA, 25 bp, SARS Virus
cgatatcacaaagacacacaactca

SEQ ID NO: 45487 - DNA, 25 bp, SARS Virus
gatatcacaaacgcacacaactcat

SEQ ID NO: 45488 - DNA, 25 bp, SARS Virus
atatcacaaacagacacaactcata

SEQ ID NO: 45489 - DNA, 25 bp, SARS Virus
tatcacaaacacgcacaactcataa

SEQ ID NO: 45490 - DNA, 25 bp, SARS Virus
atcacaaacacagacaactcataat

SEQ ID NO: 45491 - DNA, 25 bp, SARS Virus
tcacaaacacacgcaactcataatg

SEQ ID NO: 45492 - DNA, 25 bp, SARS Virus
cacaaacacacagaactcataatgg

SEQ ID NO: 45493 - DNA, 25 bp, SARS Virus
acaaacacacacgactcataatggg

SEQ ID NO: 45494 - DNA, 25 bp, SARS Virus
caaacacacacagctcataatgggt

SEQ ID NO: 45495 - DNA, 25 bp, SARS Virus
aaacacacacaagtcataatgggta

SEQ ID NO: 45496 - DNA, 25 bp, SARS Virus
aacacacacaacgcataatgggtaa

SEQ ID NO: 45497 - DNA, 25 bp, SARS Virus
acacacacaactgataatgggtaac

SEQ ID NO: 45498 - DNA, 25 bp, SARS Virus
cacacacaactcgtaatgggtaaca

SEQ ID NO: 45499 - DNA, 25 bp, SARS Virus
acacacaactcagaatgggtaacaa

SEQ ID NO: 45500 - DNA, 25 bp, SARS Virus
cacacaactcatgatgggtaacaat

SEQ ID NO: 45501 - DNA, 25 bp, SARS Virus
acacaactcatagtgggtaacaata

SEQ ID NO: 45502 - DNA, 25 bp, SARS Virus
cacaactcataaggggtaacaataa

SEQ ID NO: 45503 - DNA, 25 bp, SARS Virus
acaactcataatgggtaacaataaa

SEQ ID NO: 45504 - DNA, 25 bp, SARS Virus
caactcataatgggtaacaataaat

SEQ ID NO: 45505 - DNA, 25 bp, SARS Virus
aactcataatgggtaacaataaata

SEQ ID NO: 45506 - DNA, 25 bp, SARS Virus
actcataatggggaacaataaataa

SEQ ID NO: 45507 - DNA, 25 bp, SARS Virus
ctcataatgggtgacaataaataat

SEQ ID NO: 45508 - DNA, 25 bp, SARS Virus
tcataatgggtagcaataaataatg

SEQ ID NO: 45509 - DNA, 25 bp, SARS Virus
cataatgggtaagaataaataatga

SEQ ID NO: 45510 - DNA, 25 bp, SARS Virus
ataatgggtaacgataaataatgac

SEQ ID NO: 45511 - DNA, 25 bp, SARS Virus
taatgggtaacagtaaataatgacc

SEQ ID NO: 45512 - DNA, 25 bp, SARS Virus
aatgggtaacaagaaataatgaccg

SEQ ID NO: 45513 - DNA, 25 bp, SARS Virus
aaaagaaacaaatgctcttacgaaa

SEQ ID NO: 45514 - DNA, 25 bp, SARS Virus
aaagaaacaaattctcttacgaaag

SEQ ID NO: 45515 - DNA, 25 bp, SARS Virus
aagaaacaaatgttcttacgaaaga

SEQ ID NO: 45516 - DNA, 25 bp, SARS Virus
agaaacaaatgctcttacgaaagaa

SEQ ID NO: 45517 - DNA, 25 bp, SARS Virus
gaaacaaatgcttttacgaaagaac

SEQ ID NO: 45518 - DNA, 25 bp, SARS Virus
aaacaaatgctcttacgaaagaacg

SEQ ID NO: 45519 - DNA, 25 bp, SARS Virus
aacaaatgctcttacgaaagaacgg

SEQ ID NO: 45520 - DNA, 25 bp, SARS Virus
acaaatgctctttcgaaagaacggt

SEQ ID NO: 45521 - DNA, 25 bp, SARS Virus
caaatgctcttatgaaagaacggta

SEQ ID NO: 45522 - DNA, 25 bp, SARS Virus
aaatgctcttactaaagaacggtaa

SEQ ID NO: 45523 - DNA, 25 bp, SARS Virus
aatgctcttacgtaagaacggtaaa

SEQ ID NO: 45524 - DNA, 25 bp, SARS Virus
atgctcttacgatagaacggtaaat

SEQ ID NO: 45525 - DNA, 25 bp, SARS Virus
tgctcttacgaatgaacggtaaatg

SEQ ID NO: 45526 - DNA, 25 bp, SARS Virus
gctcttacgaaataacggtaaatga

SEQ ID NO: 45527 - DNA, 25 bp, SARS Virus
ctcttacgaaagtacggtaaatgag

SEQ ID NO: 45528 - DNA, 25 bp, SARS Virus
tcttacgaaagatcggtaaatgaga

SEQ ID NO: 45529 - DNA, 25 bp, SARS Virus
cttacgaaagaatggtaaatgagaa

SEQ ID NO: 45530 - DNA, 25 bp, SARS Virus
ttacgaaagaactgtaaatgagaac

SEQ ID NO: 45531 - DNA, 25 bp, SARS Virus
tacgaaagaacgttaaatgagaacc

SEQ ID NO: 45532 - DNA, 25 bp, SARS Virus
acgaaagaacggtaaatgagaacca

SEQ ID NO: 45533 - DNA, 25 bp, SARS Virus
cgaaagaacggttaatgagaaccat

SEQ ID NO: 45534 - DNA, 25 bp, SARS Virus
gaaagaacggtatatgagaaccata

SEQ ID NO: 45535 - DNA, 25 bp, SARS Virus
aaagaacggtaattgagaaccataa

SEQ ID NO: 45536 - DNA, 25 bp, SARS Virus
aagaacggtaaatgagaaccataat

SEQ ID NO: 45537 - DNA, 25 bp, SARS Virus
agaacggtaaattagaaccataata

SEQ ID NO: 45538 - DNA, 25 bp, SARS Virus
gaacggtaaatgtgaaccataatac

SEQ ID NO: 45539 - DNA, 25 bp, SARS Virus
aacggtaaatgataaccataatacc

SEQ ID NO: 45540 - DNA, 25 bp, SARS Virus
acggtaaatgagtaccataataccg

SEQ ID NO: 45541 - DNA, 25 bp, SARS Virus
cggtaaatgagatccataataccgt

SEQ ID NO: 45542 - DNA, 25 bp, SARS Virus
ggtaaatgagaatcataataccgtt

SEQ ID NO: 45543 - DNA, 25 bp, SARS Virus
gtaaatgagaactataataccgtta

SEQ ID NO: 45544 - DNA, 25 bp, SARS Virus
taaatgagaaccttaataccgttaa

SEQ ID NO: 45545 - DNA, 25 bp, SARS Virus
aaatgagaaccataataccgttaac

SEQ ID NO: 45546 - DNA, 25 bp, SARS Virus
aatgagaaccattataccgttaacg

SEQ ID NO: 45547 - DNA, 25 bp, SARS Virus
atgagaaccatattaccgttaacga

SEQ ID NO: 45548 - DNA, 25 bp, SARS Virus
tgagaaccataataccgttaacgac

SEQ ID NO: 45549 - DNA, 25 bp, SARS Virus
gagaaccataattccgttaacgacg

SEQ ID NO: 45550 - DNA, 25 bp, SARS Virus
agaaccataatatcgttaacgacgt

SEQ ID NO: 45551 - DNA, 25 bp, SARS Virus
gaaccataatactgttaacgacgta

SEQ ID NO: 45552 - DNA, 25 bp, SARS Virus
aaccataatacctttaacgacgtac

SEQ ID NO: 45553 - DNA, 25 bp, SARS Virus
accataataccgttaacgacgtaca

SEQ ID NO: 45554 - DNA, 25 bp, SARS Virus
ccataataccgttaacgacgtacac

SEQ ID NO: 45555 - DNA, 25 bp, SARS Virus
cataataccgtttacgacgtacacg

SEQ ID NO: 45556 - DNA, 25 bp, SARS Virus
ataataccgttatcgacgtacacga

SEQ ID NO: 45557 - DNA, 25 bp, SARS Virus
taataccgttaatgacgtacacgat

SEQ ID NO: 45558 - DNA, 25 bp, SARS Virus
aataccgttaactacgtacacgata

SEQ ID NO: 45559 - DNA, 25 bp, SARS Virus
ataccgttaacgtcgtacacgatac

SEQ ID NO: 45560 - DNA, 25 bp, SARS Virus
taccgttaacgatgtacacgatacg

SEQ ID NO: 45561 - DNA, 25 bp, SARS Virus
accgttaacgacttacacgatacga

SEQ ID NO: 45562 - DNA, 25 bp, SARS Virus
ccgttaacgacgtacacgatacgac

SEQ ID NO: 45563 - DNA, 25 bp, SARS Virus
cgttaacgacgttcacgatacgacg

SEQ ID NO: 45564 - DNA, 25 bp, SARS Virus
gttaacgacgtatacgatacgacga

SEQ ID NO: 45565 - DNA, 25 bp, SARS Virus
ttaacgacgtactcgatacgacgaa

SEQ ID NO: 45566 - DNA, 25 bp, SARS Virus
taacgacgtacatgatacgacgaac

SEQ ID NO: 45567 - DNA, 25 bp, SARS Virus
aacgacgtacactatacgacgaaca

SEQ ID NO: 45568 - DNA, 25 bp, SARS Virus
acgacgtacacgttacgacgaacaa

SEQ ID NO: 45569 - DNA, 25 bp, SARS Virus
cgacgtacacgatacgacgaacaat

SEQ ID NO: 45570 - DNA, 25 bp, SARS Virus
gacgtacacgattcgacgaacaatt

SEQ ID NO: 45571 - DNA, 25 bp, SARS Virus
acgtacacgatatgacgaacaattc

SEQ ID NO: 45572 - DNA, 25 bp, SARS Virus
cgtacacgatactacgaacaattcg

SEQ ID NO: 45573 - DNA, 25 bp, SARS Virus
gtacacgatacgtcgaacaattcgt

SEQ ID NO: 45574 - DNA, 25 bp, SARS Virus
tacacgatacgatgaacaattcgta

SEQ ID NO: 45575 - DNA, 25 bp, SARS Virus
acacgatacgactaacaattcgtat

SEQ ID NO: 45576 - DNA, 25 bp, SARS Virus
cacgatacgacgtacaattcgtatt

SEQ ID NO: 45577 - DNA, 25 bp, SARS Virus
acgatacgacgatcaattcgtattc

SEQ ID NO: 45578 - DNA, 25 bp, SARS Virus
cgatacgacgaataattcgtattcg

SEQ ID NO: 45579 - DNA, 25 bp, SARS Virus
gatacgacgaactattcgtattcgt

SEQ ID NO: 45580 - DNA, 25 bp, SARS Virus
atacgacgaacatttcgtattcgtg

SEQ ID NO: 45581 - DNA, 25 bp, SARS Virus
tacgacgaacaattcgtattcgtgc

SEQ ID NO: 45582 - DNA, 25 bp, SARS Virus
acgacgaacaattcgtattcgtgcg

SEQ ID NO: 45583 - DNA, 25 bp, SARS Virus
cgacgaacaatttgtattcgtgcgt

SEQ ID NO: 45584 - DNA, 25 bp, SARS Virus
gacgaacaattcttattcgtgcgta

SEQ ID NO: 45585 - DNA, 25 bp, SARS Virus
acgaacaattcgtattcgtgcgtaa

SEQ ID NO: 45586 - DNA, 25 bp, SARS Virus
cgaacaattcgttttcgtgcgtaag

SEQ ID NO: 45587 - DNA, 25 bp, SARS Virus
gaacaattcgtattcgtgcgtaaga

SEQ ID NO: 45588 - DNA, 25 bp, SARS Virus
aacaattcgtattcgtgcgtaagaa

SEQ ID NO: 45589 - DNA, 25 bp, SARS Virus
acaattcgtatttgtgcgtaagaac

SEQ ID NO: 45590 - DNA, 25 bp, SARS Virus
caattcgtattcttgcgtaagaaca

SEQ ID NO: 45591 - DNA, 25 bp, SARS Virus
aattcgtattcgtgcgtaagaacac

SEQ ID NO: 45592 - DNA, 25 bp, SARS Virus
attcgtattcgttcgtaagaacacg

SEQ ID NO: 45593 - DNA, 25 bp, SARS Virus
ttcgtattcgtgtgtaagaacacga

SEQ ID NO: 45594 - DNA, 25 bp, SARS Virus
tcgtattcgtgcttaagaacacgaa

SEQ ID NO: 45595 - DNA, 25 bp, SARS Virus
cgtattcgtgcgtaagaacacgaac

SEQ ID NO: 45596 - DNA, 25 bp, SARS Virus
gtattcgtgcgttagaacacgaaca

SEQ ID NO: 45597 - DNA, 25 bp, SARS Virus
tattcgtgcgtatgaacacgaacaa

SEQ ID NO: 45598 - DNA, 25 bp, SARS Virus
attcgtgcgtaataacacgaacaaa

SEQ ID NO: 45599 - DNA, 25 bp, SARS Virus
ttcgtgcgtaagtacacgaacaaag

SEQ ID NO: 45600 - DNA, 25 bp, SARS Virus
tcgtgcgtaagatcacgaacaaaga

SEQ ID NO: 45601 - DNA, 25 bp, SARS Virus
cgtgcgtaagaatacgaacaaagac

SEQ ID NO: 45602 - DNA, 25 bp, SARS Virus
gtgcgtaagaactcgaacaaagaca

SEQ ID NO: 45603 - DNA, 25 bp, SARS Virus
tgcgtaagaacatgaacaaagacaa

SEQ ID NO: 45604 - DNA, 25 bp, SARS Virus
gcgtaagaacactaacaaagacaat

SEQ ID NO: 45605 - DNA, 25 bp, SARS Virus
cgtaagaacacgtacaaagacaatg

SEQ ID NO: 45606 - DNA, 25 bp, SARS Virus
gtaagaacacgatcaaagacaatgg

SEQ ID NO: 45607 - DNA, 25 bp, SARS Virus
taagaacacgaataaagacaatgga

SEQ ID NO: 45608 - DNA, 25 bp, SARS Virus
aagaacacgaactaagacaatggaa

SEQ ID NO: 45609 - DNA, 25 bp, SARS Virus
agaacacgaacatagacaatggaag

SEQ ID NO: 45610 - DNA, 25 bp, SARS Virus
gaacacgaacaatgacaatggaaga

SEQ ID NO: 45611 - DNA, 25 bp, SARS Virus
aacacgaacaaatacaatggaagag

SEQ ID NO: 45612 - DNA, 25 bp, SARS Virus
acacgaacaaagtcaatggaagaga

SEQ ID NO: 45613 - DNA, 25 bp, SARS Virus
cacgaacaaagataatggaagagaa

SEQ ID NO: 45614 - DNA, 25 bp, SARS Virus
acgaacaaagactatggaagagaac

SEQ ID NO: 45615 - DNA, 25 bp, SARS Virus
cgaacaaagacattggaagagaacg

SEQ ID NO: 45616 - DNA, 25 bp, SARS Virus
gaacaaagacaatggaagagaacgt

SEQ ID NO: 45617 - DNA, 25 bp, SARS Virus
aacaaagacaattgaagagaacgtt

SEQ ID NO: 45618 - DNA, 25 bp, SARS Virus
acaaagacaatgtaagagaacgttg

SEQ ID NO: 45619 - DNA, 25 bp, SARS Virus
caaagacaatggtagagaacgttgt

SEQ ID NO: 45620 - DNA, 25 bp, SARS Virus
aaagacaatggatgagaacgttgtc

SEQ ID NO: 45621 - DNA, 25 bp, SARS Virus
aagacaatggaatagaacgttgtca

SEQ ID NO: 45622 - DNA, 25 bp, SARS Virus
agacaatggaagtgaacgttgtcaa

SEQ ID NO: 45623 - DNA, 25 bp, SARS Virus
gacaatggaagataacgttgtcaac

SEQ ID NO: 45624 - DNA, 25 bp, SARS Virus
acaatggaagagtacgttgtcaacg

SEQ ID NO: 45625 - DNA, 25 bp, SARS Virus
caatggaagagatcgttgtcaacga

SEQ ID NO: 45626 - DNA, 25 bp, SARS Virus
aatggaagagaatgttgtcaacgaa

SEQ ID NO: 45627 - DNA, 25 bp, SARS Virus
atggaagagaactttgtcaacgaat

SEQ ID NO: 45628 - DNA, 25 bp, SARS Virus
tggaagagaacgttgtcaacgaatg

SEQ ID NO: 45629 - DNA, 25 bp, SARS Virus
ggaagagaacgttgtcaacgaatga

SEQ ID NO: 45630 - DNA, 25 bp, SARS Virus
gaagagaacgttttcaacgaatgaa

SEQ ID NO: 45631 - DNA, 25 bp, SARS Virus
aagagaacgttgtcaacgaatgaaa

SEQ ID NO: 45632 - DNA, 25 bp, SARS Virus
agagaacgttgttaacgaatgaaat

SEQ ID NO: 45633 - DNA, 25 bp, SARS Virus
gagaacgttgtctacgaatgaaatt

SEQ ID NO: 45634 - DNA, 25 bp, SARS Virus
agaacgttgtcatcgaatgaaatta

SEQ ID NO: 45635 - DNA, 25 bp, SARS Virus
gaacgttgtcaatgaatgaaattat

SEQ ID NO: 45636 - DNA, 25 bp, SARS Virus
aacgttgtcaactaatgaaattata

SEQ ID NO: 45637 - DNA, 25 bp, SARS Virus
acgttgtcaacgtatgaaattatac

SEQ ID NO: 45638 - DNA, 25 bp, SARS Virus
cgttgtcaacgattgaaattatacc

SEQ ID NO: 45639 - DNA, 25 bp, SARS Virus
gttgtcaacgaatgaaattatacca

SEQ ID NO: 45640 - DNA, 25 bp, SARS Virus
ttgtcaacgaattaaattataccag

SEQ ID NO: 45641 - DNA, 25 bp, SARS Virus
tgtcaacgaatgtaattataccaga

SEQ ID NO: 45642 - DNA, 25 bp, SARS Virus
gtcaacgaatgatattataccagat

SEQ ID NO: 45643 - DNA, 25 bp, SARS Virus
tcaacgaatgaatttataccagatg

SEQ ID NO: 45644 - DNA, 25 bp, SARS Virus
caacgaatgaaattataccagatgt

SEQ ID NO: 45645 - DNA, 25 bp, SARS Virus
aacgaatgaaattataccagatgta

SEQ ID NO: 45646 - DNA, 25 bp, SARS Virus
acgaatgaaattttaccagatgtac

SEQ ID NO: 45647 - DNA, 25 bp, SARS Virus
cgaatgaaattataccagatgtacg

SEQ ID NO: 45648 - DNA, 25 bp, SARS Virus
gaatgaaattattccagatgtacgg

SEQ ID NO: 45649 - DNA, 25 bp, SARS Virus
aatgaaattatatcagatgtacgga

SEQ ID NO: 45650 - DNA, 25 bp, SARS Virus
atgaaattatactagatgtacggac

SEQ ID NO: 45651 - DNA, 25 bp, SARS Virus
tgaaattatacctgatgtacggacg

SEQ ID NO: 45652 - DNA, 25 bp, SARS Virus
gaaattataccatatgtacggacga

SEQ ID NO: 45653 - DNA, 25 bp, SARS Virus
aaattataccagttgtacggacgat

SEQ ID NO: 45654 - DNA, 25 bp, SARS Virus
aattataccagatgtacggacgatc

SEQ ID NO: 45655 - DNA, 25 bp, SARS Virus
attataccagatttacggacgatcg

SEQ ID NO: 45656 - DNA, 25 bp, SARS Virus
ttataccagatgtacggacgatcga

SEQ ID NO: 45657 - DNA, 25 bp, SARS Virus
tataccagatgttcggacgatcgac

SEQ ID NO: 45658 - DNA, 25 bp, SARS Virus
ataccagatgtatggacgatcgacc

SEQ ID NO: 45659 - DNA, 25 bp, SARS Virus
taccagatgtactgacgatcgaccc

SEQ ID NO: 45660 - DNA, 25 bp, SARS Virus
accagatgtacgtacgatcgaccca

SEQ ID NO: 45661 - DNA, 25 bp, SARS Virus
ccagatgtacggtcgatcgacccac

SEQ ID NO: 45662 - DNA, 25 bp, SARS Virus
cagatgtacggatgatcgacccact

SEQ ID NO: 45663 - DNA, 25 bp, SARS Virus
agatgtacggactatcgacccacta

SEQ ID NO: 45664 - DNA, 25 bp, SARS Virus
gatgtacggacgttcgacccactac

SEQ ID NO: 45665 - DNA, 25 bp, SARS Virus
atgtacggacgatcgacccactacg

SEQ ID NO: 45666 - DNA, 25 bp, SARS Virus
tgtacggacgattgacccactacgc

SEQ ID NO: 45667 - DNA, 25 bp, SARS Virus
gtacggacgatctacccactacgca

SEQ ID NO: 45668 - DNA, 25 bp, SARS Virus
tacggacgatcgtcccactacgcat

SEQ ID NO: 45669 - DNA, 25 bp, SARS Virus
acggacgatcgatccactacgcata

SEQ ID NO: 45670 - DNA, 25 bp, SARS Virus
cggacgatcgactcactacgcatag

SEQ ID NO: 45671 - DNA, 25 bp, SARS Virus
ggacgatcgacctactacgcatagt

SEQ ID NO: 45672 - DNA, 25 bp, SARS Virus
gacgatcgaccctctacgcatagta

SEQ ID NO: 45673 - DNA, 25 bp, SARS Virus
acgatcgacccattacgcatagtac

SEQ ID NO: 45674 - DNA, 25 bp, SARS Virus
cgatcgacccactacgcatagtact

SEQ ID NO: 45675 - DNA, 25 bp, SARS Virus
gatcgacccacttcgcatagtactg

SEQ ID NO: 45676 - DNA, 25 bp, SARS Virus
atcgacccactatgcatagtactgt

SEQ ID NO: 45677 - DNA, 25 bp, SARS Virus
tcgacccactactcatagtactgta

SEQ ID NO: 45678 - DNA, 25 bp, SARS Virus
cgacccactacgtatagtactgtac

SEQ ID NO: 45679 - DNA, 25 bp, SARS Virus
gacccactacgcttagtactgtacc

SEQ ID NO: 45680 - DNA, 25 bp, SARS Virus
acccactacgcatagtactgtaccg

SEQ ID NO: 45681 - DNA, 25 bp, SARS Virus
cccactacgcattgtactgtaccga

SEQ ID NO: 45682 - DNA, 25 bp, SARS Virus
ccactacgcatattactgtaccgaa

SEQ ID NO: 45683 - DNA, 25 bp, SARS Virus
cactacgcatagtactgtaccgaac

SEQ ID NO: 45684 - DNA, 25 bp, SARS Virus
actacgcatagttctgtaccgaact

SEQ ID NO: 45685 - DNA, 25 bp, SARS Virus
ctacgcatagtattgtaccgaactt

SEQ ID NO: 45686 - DNA, 25 bp, SARS Virus
tacgcatagtactgtaccgaactta

SEQ ID NO: 45687 - DNA, 25 bp, SARS Virus
acgcatagtactttaccgaacttaa

SEQ ID NO: 45688 - DNA, 25 bp, SARS Virus
cgcatagtactgtaccgaacttaac

SEQ ID NO: 45689 - DNA, 25 bp, SARS Virus
gcatagtactgttccgaacttaacc

SEQ ID NO: 45690 - DNA, 25 bp, SARS Virus
catagtactgtatcgaacttaaccg

SEQ ID NO: 45691 - DNA, 25 bp, SARS Virus
atagtactgtactgaacttaaccga

SEQ ID NO: 45692 - DNA, 25 bp, SARS Virus
tagtactgtacctaacttaaccgac

SEQ ID NO: 45693 - DNA, 25 bp, SARS Virus
agtactgtaccgtacttaaccgact

SEQ ID NO: 45694 - DNA, 25 bp, SARS Virus
gtactgtaccgatcttaaccgactg

SEQ ID NO: 45695 - DNA, 25 bp, SARS Virus
tactgtaccgaatttaaccgactgt

SEQ ID NO: 45696 - DNA, 25 bp, SARS Virus
actgtaccgaacttaaccgactgtg

SEQ ID NO: 45697 - DNA, 25 bp, SARS Virus
ctgtaccgaacttaaccgactgtga

SEQ ID NO: 45698 - DNA, 25 bp, SARS Virus
tgtaccgaactttaccgactgtgat

SEQ ID NO: 45699 - DNA, 25 bp, SARS Virus
gtaccgaacttatccgactgtgatc

SEQ ID NO: 45700 - DNA, 25 bp, SARS Virus
taccgaacttaatcgactgtgatcg

SEQ ID NO: 45701 - DNA, 25 bp, SARS Virus
accgaacttaactgactgtgatcga

SEQ ID NO: 45702 - DNA, 25 bp, SARS Virus
ccgaacttaacctactgtgatcgaa

SEQ ID NO: 45703 - DNA, 25 bp, SARS Virus
cgaacttaaccgtctgtgatcgaac

SEQ ID NO: 45704 - DNA, 25 bp, SARS Virus
gaacttaaccgattgtgatcgaaca

SEQ ID NO: 45705 - DNA, 25 bp, SARS Virus
aacttaaccgactgtgatcgaacag

SEQ ID NO: 45706 - DNA, 25 bp, SARS Virus
acttaaccgactttgatcgaacaga

SEQ ID NO: 45707 - DNA, 25 bp, SARS Virus
cttaaccgactgtgatcgaacagac

SEQ ID NO: 45708 - DNA, 25 bp, SARS Virus
ttaaccgactgttatcgaacagacc

SEQ ID NO: 45709 - DNA, 25 bp, SARS Virus
taaccgactgtgttcgaacagacca

SEQ ID NO: 45710 - DNA, 25 bp, SARS Virus
aaccgactgtgatcgaacagaccaa

SEQ ID NO: 45711 - DNA, 25 bp, SARS Virus
accgactgtgattgaacagaccaat

SEQ ID NO: 45712 - DNA, 25 bp, SARS Virus
ccgactgtgatctaacagaccaata

SEQ ID NO: 45713 - DNA, 25 bp, SARS Virus
cgactgtgatcgtacagaccaatat

SEQ ID NO: 45714 - DNA, 25 bp, SARS Virus
gactgtgatcgatcagaccaatatc

SEQ ID NO: 45715 - DNA, 25 bp, SARS Virus
actgtgatcgaatagaccaatatcc

SEQ ID NO: 45716 - DNA, 25 bp, SARS Virus
ctgtgatcgaactgaccaatatccg

SEQ ID NO: 45717 - DNA, 25 bp, SARS Virus
tgtgatcgaacataccaatatccga

SEQ ID NO: 45718 - DNA, 25 bp, SARS Virus
gtgatcgaacagtccaatatccgaa

SEQ ID NO: 45719 - DNA, 25 bp, SARS Virus
tgatcgaacagatcaatatccgaat

SEQ ID NO: 45720 - DNA, 25 bp, SARS Virus
gatcgaacagactaatatccgaatt

SEQ ID NO: 45721 - DNA, 25 bp, SARS Virus
atcgaacagacctatatccgaattc

SEQ ID NO: 45722 - DNA, 25 bp, SARS Virus
tcgaacagaccattatccgaattcc

SEQ ID NO: 45723 - DNA, 25 bp, SARS Virus
cgaacagaccaatatccgaattcct

SEQ ID NO: 45724 - DNA, 25 bp, SARS Virus
gaacagaccaatttccgaattccta

SEQ ID NO: 45725 - DNA, 25 bp, SARS Virus
aacagaccaatatccgaattcctaa

SEQ ID NO: 45726 - DNA, 25 bp, SARS Virus
acagaccaatattcgaattcctaac

SEQ ID NO: 45727 - DNA, 25 bp, SARS Virus
cagaccaatatctgaattcctaaca

SEQ ID NO: 45728 - DNA, 25 bp, SARS Virus
agaccaatatcctaattcctaacac

SEQ ID NO: 45729 - DNA, 25 bp, SARS Virus
gaccaatatccgtattcctaacaca

SEQ ID NO: 45730 - DNA, 25 bp, SARS Virus
accaatatccgatttcctaacacaa

SEQ ID NO: 45731 - DNA, 25 bp, SARS Virus
ccaatatccgaattcctaacacaat

SEQ ID NO: 45732 - DNA, 25 bp, SARS Virus
caatatccgaattcctaacacaata

SEQ ID NO: 45733 - DNA, 25 bp, SARS Virus
aatatccgaatttctaacacaatac

SEQ ID NO: 45734 - DNA, 25 bp, SARS Virus
atatccgaattcttaacacaataca

SEQ ID NO: 45735 - DNA, 25 bp, SARS Virus
tatccgaattcctaacacaatacat

SEQ ID NO: 45736 - DNA, 25 bp, SARS Virus
atccgaattccttacacaatacata

SEQ ID NO: 45737 - DNA, 25 bp, SARS Virus
tccgaattcctatcacaatacatac

SEQ ID NO: 45738 - DNA, 25 bp, SARS Virus
ccgaattcctaatacaatacatacg

SEQ ID NO: 45739 - DNA, 25 bp, SARS Virus
cgaattcctaactcaatacatacga

SEQ ID NO: 45740 - DNA, 25 bp, SARS Virus
gaattcctaacataatacatacgaa

SEQ ID NO: 45741 - DNA, 25 bp, SARS Virus
aattcctaacactatacatacgaag

SEQ ID NO: 45742 - DNA, 25 bp, SARS Virus
attcctaacacattacatacgaagt

SEQ ID NO: 45743 - DNA, 25 bp, SARS Virus
ttcctaacacaatacatacgaagtc

SEQ ID NO: 45744 - DNA, 25 bp, SARS Virus
tcctaacacaattcatacgaagtcg

SEQ ID NO: 45745 - DNA, 25 bp, SARS Virus
cctaacacaatatatacgaagtcga

SEQ ID NO: 45746 - DNA, 25 bp, SARS Virus
ctaacacaatacttacgaagtcgaa

SEQ ID NO: 45747 - DNA, 25 bp, SARS Virus
taacacaatacatacgaagtcgaaa

SEQ ID NO: 45748 - DNA, 25 bp, SARS Virus
aacacaatacattcgaagtcgaaat

SEQ ID NO: 45749 - DNA, 25 bp, SARS Virus
acacaatacatatgaagtcgaaatc

SEQ ID NO: 45750 - DNA, 25 bp, SARS Virus
cacaatacatactaagtcgaaatca

SEQ ID NO: 45751 - DNA, 25 bp, SARS Virus
acaatacatacgtagtcgaaatcaa

SEQ ID NO: 45752 - DNA, 25 bp, SARS Virus
caatacatacgatgtcgaaatcaaa

SEQ ID NO: 45753 - DNA, 25 bp, SARS Virus
aatacatacgaattcgaaatcaaaa

SEQ ID NO: 45754 - DNA, 25 bp, SARS Virus
atacatacgaagtcgaaatcaaaac

SEQ ID NO: 45755 - DNA, 25 bp, SARS Virus
tacatacgaagttgaaatcaaaacg

SEQ ID NO: 45756 - DNA, 25 bp, SARS Virus
acatacgaagtctaaatcaaaacga

SEQ ID NO: 45757 - DNA, 25 bp, SARS Virus
catacgaagtcgtaatcaaaacgaa

SEQ ID NO: 45758 - DNA, 25 bp, SARS Virus
atacgaagtcgatatcaaaacgaat

SEQ ID NO: 45759 - DNA, 25 bp, SARS Virus
tacgaagtcgaattcaaaacgaata

SEQ ID NO: 45760 - DNA, 25 bp, SARS Virus
acgaagtcgaaatcaaaacgaataa

SEQ ID NO: 45761 - DNA, 25 bp, SARS Virus
cgaagtcgaaattaaaacgaataag

SEQ ID NO: 45762 - DNA, 25 bp, SARS Virus
gaagtcgaaatctaaacgaataaga

SEQ ID NO: 45763 - DNA, 25 bp, SARS Virus
aagtcgaaatcataacgaataagag

SEQ ID NO: 45764 - DNA, 25 bp, SARS Virus
agtcgaaatcaatacgaataagagt

SEQ ID NO: 45765 - DNA, 25 bp, SARS Virus
gtcgaaatcaaatcgaataagagta

SEQ ID NO: 45766 - DNA, 25 bp, SARS Virus
tcgaaatcaaaatgaataagagtac

SEQ ID NO: 45767 - DNA, 25 bp, SARS Virus
cgaaatcaaaactaataagagtact

SEQ ID NO: 45768 - DNA, 25 bp, SARS Virus
gaaatcaaaacgtataagagtactg

SEQ ID NO: 45769 - DNA, 25 bp, SARS Virus
aaatcaaaacgattaagagtactgt

SEQ ID NO: 45770 - DNA, 25 bp, SARS Virus
aatcaaaacgaataagagtactgtc

SEQ ID NO: 45771 - DNA, 25 bp, SARS Virus
atcaaaacgaattagagtactgtcg

SEQ ID NO: 45772 - DNA, 25 bp, SARS Virus
tcaaaacgaatatgagtactgtcga

SEQ ID NO: 45773 - DNA, 25 bp, SARS Virus
caaaacgaataatagtactgtcgag

SEQ ID NO: 45774 - DNA, 25 bp, SARS Virus
aaaacgaataagtgtactgtcgagc

SEQ ID NO: 45775 - DNA, 25 bp, SARS Virus
aaacgaataagattactgtcgagcg

SEQ ID NO: 45776 - DNA, 25 bp, SARS Virus
aacgaataagagtactgtcgagcgt

SEQ ID NO: 45777 - DNA, 25 bp, SARS Virus
acgaataagagttctgtcgagcgtg

SEQ ID NO: 45778 - DNA, 25 bp, SARS Virus
cgaataagagtattgtcgagcgtga

SEQ ID NO: 45779 - DNA, 25 bp, SARS Virus
gaataagagtactgtcgagcgtgac

SEQ ID NO: 45780 - DNA, 25 bp, SARS Virus
aataagagtactttcgagcgtgaca

SEQ ID NO: 45781 - DNA, 25 bp, SARS Virus
ataagagtactgtcgagcgtgacaa

SEQ ID NO: 45782 - DNA, 25 bp, SARS Virus
taagagtactgttgagcgtgacaaa

SEQ ID NO: 45783 - DNA, 25 bp, SARS Virus
aagagtactgtctagcgtgacaaat

SEQ ID NO: 45784 - DNA, 25 bp, SARS Virus
agagtactgtcgtgcgtgacaaata

SEQ ID NO: 45785 - DNA, 25 bp, SARS Virus
gagtactgtcgatcgtgacaaatac

SEQ ID NO: 45786 - DNA, 25 bp, SARS Virus
agtactgtcgagtgtgacaaatact

SEQ ID NO: 45787 - DNA, 25 bp, SARS Virus
gtactgtcgagcttgacaaatacta

SEQ ID NO: 45788 - DNA, 25 bp, SARS Virus
tactgtcgagcgtgacaaatactac

SEQ ID NO: 45789 - DNA, 25 bp, SARS Virus
actgtcgagcgttacaaatactact

SEQ ID NO: 45790 - DNA, 25 bp, SARS Virus
ctgtcgagcgtgtcaaatactacta

SEQ ID NO: 45791 - DNA, 25 bp, SARS Virus
tgtcgagcgtgataaatactactac

SEQ ID NO: 45792 - DNA, 25 bp, SARS Virus
gtcgagcgtgactaatactactacg

SEQ ID NO: 45793 - DNA, 25 bp, SARS Virus
tcgagcgtgacatatactactacga

SEQ ID NO: 45794 - DNA, 25 bp, SARS Virus
cgagcgtgacaattactactacgac

SEQ ID NO: 45795 - DNA, 25 bp, SARS Virus
gagcgtgacaaatactactacgacg

SEQ ID NO: 45796 - DNA, 25 bp, SARS Virus
agcgtgacaaattctactacgacga

SEQ ID NO: 45797 - DNA, 25 bp, SARS Virus
gcgtgacaaatattactacgacgat

SEQ ID NO: 45798 - DNA, 25 bp, SARS Virus
cgtgacaaatactactacgacgatc

SEQ ID NO: 45799 - DNA, 25 bp, SARS Virus
gtgacaaatacttctacgacgatct

SEQ ID NO: 45800 - DNA, 25 bp, SARS Virus
tgacaaatactattacgacgatctg

SEQ ID NO: 45801 - DNA, 25 bp, SARS Virus
gacaaatactactacgacgatctgc

SEQ ID NO: 45802 - DNA, 25 bp, SARS Virus
acaaatactacttcgacgatctgca

SEQ ID NO: 45803 - DNA, 25 bp, SARS Virus
caaatactactatgacgatctgcac

SEQ ID NO: 45804 - DNA, 25 bp, SARS Virus
aaatactactactacgatctgcaca

SEQ ID NO: 45805 - DNA, 25 bp, SARS Virus
aatactactacgtcgatctgcacaa

SEQ ID NO: 45806 - DNA, 25 bp, SARS Virus
atactactacgatgatctgcacaaa

SEQ ID NO: 45807 - DNA, 25 bp, SARS Virus
tactactacgactatctgcacaaac

SEQ ID NO: 45808 - DNA, 25 bp, SARS Virus
actactacgacgttctgcacaaacc

SEQ ID NO: 45809 - DNA, 25 bp, SARS Virus
ctactacgacgatctgcacaaacct

SEQ ID NO: 45810 - DNA, 25 bp, SARS Virus
tactacgacgatttgcacaaacctg

SEQ ID NO: 45811 - DNA, 25 bp, SARS Virus
actacgacgatctgcacaaacctgt

SEQ ID NO: 45812 - DNA, 25 bp, SARS Virus
ctacgacgatcttcacaaacctgtg

SEQ ID NO: 45813 - DNA, 25 bp, SARS Virus
tacgacgatctgtacaaacctgtga

SEQ ID NO: 45814 - DNA, 25 bp, SARS Virus
acgacgatctgctcaaacctgtgac

SEQ ID NO: 45815 - DNA, 25 bp, SARS Virus
cgacgatctgcataaacctgtgact

SEQ ID NO: 45816 - DNA, 25 bp, SARS Virus
gacgatctgcactaacctgtgacta

SEQ ID NO: 45817 - DNA, 25 bp, SARS Virus
acgatctgcacatacctgtgactac

SEQ ID NO: 45818 - DNA, 25 bp, SARS Virus
cgatctgcacaatcctgtgactact

SEQ ID NO: 45819 - DNA, 25 bp, SARS Virus
gatctgcacaaatctgtgactactt

SEQ ID NO: 45820 - DNA, 25 bp, SARS Virus
atctgcacaaacttgtgactactta

SEQ ID NO: 45821 - DNA, 25 bp, SARS Virus
tctgcacaaacctgtgactacttac

SEQ ID NO: 45822 - DNA, 25 bp, SARS Virus
ctgcacaaacctttgactacttaca

SEQ ID NO: 45823 - DNA, 25 bp, SARS Virus
tgcacaaacctgtgactacttacag

SEQ ID NO: 45824 - DNA, 25 bp, SARS Virus
gcacaaacctgttactacttacagt

SEQ ID NO: 45825 - DNA, 25 bp, SARS Virus
cacaaacctgtgtctacttacagta

SEQ ID NO: 45826 - DNA, 25 bp, SARS Virus
acaaacctgtgattacttacagtaa

SEQ ID NO: 45827 - DNA, 25 bp, SARS Virus
caaacctgtgactacttacagtaat

SEQ ID NO: 45828 - DNA, 25 bp, SARS Virus
aaacctgtgacttcttacagtaatg

SEQ ID NO: 45829 - DNA, 25 bp, SARS Virus
aacctgtgactatttacagtaatgt

SEQ ID NO: 45830 - DNA, 25 bp, SARS Virus
acctgtgactacttacagtaatgtg

SEQ ID NO: 45831 - DNA, 25 bp, SARS Virus
cctgtgactacttacagtaatgtga

SEQ ID NO: 45832 - DNA, 25 bp, SARS Virus
ctgtgactactttcagtaatgtgaa

SEQ ID NO: 45833 - DNA, 25 bp, SARS Virus
tgtgactacttatagtaatgtgaac

SEQ ID NO: 45834 - DNA, 25 bp, SARS Virus
gtgactacttactgtaatgtgaaca

SEQ ID NO: 45835 - DNA, 25 bp, SARS Virus
tgactacttacattaatgtgaacaa

SEQ ID NO: 45836 - DNA, 25 bp, SARS Virus
gactacttacagtaatgtgaacaaa

SEQ ID NO: 45837 - DNA, 25 bp, SARS Virus
actacttacagttatgtgaacaaat

SEQ ID NO: 45838 - DNA, 25 bp, SARS Virus
ctacttacagtattgtgaacaaatg

SEQ ID NO: 45839 - DNA, 25 bp, SARS Virus
tacttacagtaatgtgaacaaatgt

SEQ ID NO: 45840 - DNA, 25 bp, SARS Virus
acttacagtaatttgaacaaatgtt

SEQ ID NO: 45841 - DNA, 25 bp, SARS Virus
cttacagtaatgtgaacaaatgttt

SEQ ID NO: 45842 - DNA, 25 bp, SARS Virus
ttacagtaatgttaacaaatgtttc

SEQ ID NO: 45843 - DNA, 25 bp, SARS Virus
tacagtaatgtgtacaaatgtttca

SEQ ID NO: 45844 - DNA, 25 bp, SARS Virus
acagtaatgtgatcaaatgtttcag

SEQ ID NO: 45845 - DNA, 25 bp, SARS Virus
cagtaatgtgaataaatgtttcaga

SEQ ID NO: 45846 - DNA, 25 bp, SARS Virus
agtaatgtgaactaatgtttcagat

SEQ ID NO: 45847 - DNA, 25 bp, SARS Virus
gtaatgtgaacatatgtttcagatg

SEQ ID NO: 45848 - DNA, 25 bp, SARS Virus
taatgtgaacaattgtttcagatga

SEQ ID NO: 45849 - DNA, 25 bp, SARS Virus
aatgtgaacaaatgtttcagatgat

SEQ ID NO: 45850 - DNA, 25 bp, SARS Virus
atgtgaacaaatttttcagatgata

SEQ ID NO: 45851 - DNA, 25 bp, SARS Virus
tgtgaacaaatgtttcagatgatac

SEQ ID NO: 45852 - DNA, 25 bp, SARS Virus
gtgaacaaatgtttcagatgatacc

SEQ ID NO: 45853 - DNA, 25 bp, SARS Virus
tgaacaaatgtttcagatgatacca

SEQ ID NO: 45854 - DNA, 25 bp, SARS Virus
gaacaaatgttttagatgataccat

SEQ ID NO: 45855 - DNA, 25 bp, SARS Virus
aacaaatgtttctgatgataccatt

SEQ ID NO: 45856 - DNA, 25 bp, SARS Virus
acaaatgtttcatatgataccatta

SEQ ID NO: 45857 - DNA, 25 bp, SARS Virus
caaatgtttcagttgataccattac

SEQ ID NO: 45858 - DNA, 25 bp, SARS Virus
aaatgtttcagatgataccattacg

SEQ ID NO: 45859 - DNA, 25 bp, SARS Virus
aatgtttcagattataccattacga

SEQ ID NO: 45860 - DNA, 25 bp, SARS Virus
atgtttcagatgttaccattacgaa

SEQ ID NO: 45861 - DNA, 25 bp, SARS Virus
tgtttcagatgataccattacgaaa

SEQ ID NO: 45862 - DNA, 25 bp, SARS Virus
gtttcagatgattccattacgaaat

SEQ ID NO: 45863 - DNA, 25 bp, SARS Virus
tttcagatgatatcattacgaaatc

SEQ ID NO: 45864 - DNA, 25 bp, SARS Virus
ttcagatgatactattacgaaatct

SEQ ID NO: 45865 - DNA, 25 bp, SARS Virus
tcagatgatacctttacgaaatcta

SEQ ID NO: 45866 - DNA, 25 bp, SARS Virus
cagatgataccattacgaaatctag

SEQ ID NO: 45867 - DNA, 25 bp, SARS Virus
agatgataccattacgaaatctagt

SEQ ID NO: 45868 - DNA, 25 bp, SARS Virus
gatgataccatttcgaaatctagtt

SEQ ID NO: 45869 - DNA, 25 bp, SARS Virus
atgataccattatgaaatctagttc

SEQ ID NO: 45870 - DNA, 25 bp, SARS Virus
tgataccattactaaatctagttcg

SEQ ID NO: 45871 - DNA, 25 bp, SARS Virus
gataccattacgtaatctagttcga

SEQ ID NO: 45872 - DNA, 25 bp, SARS Virus
ataccattacgatatctagttcgat

SEQ ID NO: 45873 - DNA, 25 bp, SARS Virus
taccattacgaattctagttcgata

SEQ ID NO: 45874 - DNA, 25 bp, SARS Virus
accattacgaaatctagttcgataa

SEQ ID NO: 45875 - DNA, 25 bp, SARS Virus
ccattacgaaatttagttcgataaa

SEQ ID NO: 45876 - DNA, 25 bp, SARS Virus
cattacgaaatctagttcgataaag

SEQ ID NO: 45877 - DNA, 25 bp, SARS Virus
attacgaaatcttgttcgataaagg

SEQ ID NO: 45878 - DNA, 25 bp, SARS Virus
ttacgaaatctatttcgataaaggt

SEQ ID NO: 45879 - DNA, 25 bp, SARS Virus
tacgaaatctagttcgataaaggta

SEQ ID NO: 45880 - DNA, 25 bp, SARS Virus
acgaaatctagttcgataaaggtac

SEQ ID NO: 45881 - DNA, 25 bp, SARS Virus
cgaaatctagtttgataaaggtaca

SEQ ID NO: 45882 - DNA, 25 bp, SARS Virus
gaaatctagttctataaaggtacac

SEQ ID NO: 45883 - DNA, 25 bp, SARS Virus
aaatctagttcgttaaaggtacacc

SEQ ID NO: 45884 - DNA, 25 bp, SARS Virus
aatctagttcgataaaggtacaccc

SEQ ID NO: 45885 - DNA, 25 bp, SARS Virus
atctagttcgattaaggtacacccg

SEQ ID NO: 45886 - DNA, 25 bp, SARS Virus
tctagttcgatataggtacacccgg

SEQ ID NO: 45887 - DNA, 25 bp, SARS Virus
ctagttcgataatggtacacccgga

SEQ ID NO: 45888 - DNA, 25 bp, SARS Virus
tagttcgataaatgtacacccggaa

SEQ ID NO: 45889 - DNA, 25 bp, SARS Virus
agttcgataaagttacacccggaat

SEQ ID NO: 45890 - DNA, 25 bp, SARS Virus
gttcgataaaggtacacccggaatc

SEQ ID NO: 45891 - DNA, 25 bp, SARS Virus
ttcgataaaggttcacccggaatca

SEQ ID NO: 45892 - DNA, 25 bp, SARS Virus
tcgataaaggtatacccggaatcaa

SEQ ID NO: 45893 - DNA, 25 bp, SARS Virus
cgataaaggtactcccggaatcaat

SEQ ID NO: 45894 - DNA, 25 bp, SARS Virus
gataaaggtacatccggaatcaata

SEQ ID NO: 45895 - DNA, 25 bp, SARS Virus
ataaaggtacactcggaatcaataa

SEQ ID NO: 45896 - DNA, 25 bp, SARS Virus
taaaggtacacctggaatcaataaa

SEQ ID NO: 45897 - DNA, 25 bp, SARS Virus
aaaggtacaccctgaatcaataaag

SEQ ID NO: 45898 - DNA, 25 bp, SARS Virus
aaggtacacccgtaatcaataaaga

SEQ ID NO: 45899 - DNA, 25 bp, SARS Virus
aggtacacccggtatcaataaagac

SEQ ID NO: 45900 - DNA, 25 bp, SARS Virus
ggtacacccggattcaataaagaca

SEQ ID NO: 45901 - DNA, 25 bp, SARS Virus
gtacacccggaatcaataaagacat

SEQ ID NO: 45902 - DNA, 25 bp, SARS Virus
tacacccggaattaataaagacatt

SEQ ID NO: 45903 - DNA, 25 bp, SARS Virus
acacccggaatctataaagacattg

SEQ ID NO: 45904 - DNA, 25 bp, SARS Virus
cacccggaatcattaaagacattgg

SEQ ID NO: 45905 - DNA, 25 bp, SARS Virus
acccggaatcaataaagacattgga

SEQ ID NO: 45906 - DNA, 25 bp, SARS Virus
cccggaatcaattaagacattggag

SEQ ID NO: 45907 - DNA, 25 bp, SARS Virus
ccggaatcaatatagacattggaga

SEQ ID NO: 45908 - DNA, 25 bp, SARS Virus
cggaatcaataatgacattggagat

SEQ ID NO: 45909 - DNA, 25 bp, SARS Virus
ggaatcaataaatacattggagatt

SEQ ID NO: 45910 - DNA, 25 bp, SARS Virus
gaatcaataaagtcattggagattg

SEQ ID NO: 45911 - DNA, 25 bp, SARS Virus
aatcaataaagatattggagattga

SEQ ID NO: 45912 - DNA, 25 bp, SARS Virus
atcaataaagactttggagattgat

SEQ ID NO: 45913 - DNA, 25 bp, SARS Virus
tcaataaagacattggagattgata

SEQ ID NO: 45914 - DNA, 25 bp, SARS Virus
caataaagacattggagattgataa

SEQ ID NO: 45915 - DNA, 25 bp, SARS Virus
aataaagacatttgagattgataag

SEQ ID NO: 45916 - DNA, 25 bp, SARS Virus
ataaagacattgtagattgataaga

SEQ ID NO: 45917 - DNA, 25 bp, SARS Virus
taaagacattggtgattgataagac

SEQ ID NO: 45918 - DNA, 25 bp, SARS Virus
aaagacattggatattgataagacc

SEQ ID NO: 45919 - DNA, 25 bp, SARS Virus
aagacattggagtttgataagacca

SEQ ID NO: 45920 - DNA, 25 bp, SARS Virus
agacattggagattgataagaccac

SEQ ID NO: 45921 - DNA, 25 bp, SARS Virus
gacattggagattgataagaccaca

SEQ ID NO: 45922 - DNA, 25 bp, SARS Virus
acattggagatttataagaccacag

SEQ ID NO: 45923 - DNA, 25 bp, SARS Virus
cattggagattgttaagaccacagc

SEQ ID NO: 45924 - DNA, 25 bp, SARS Virus
attggagattgataagaccacagca

SEQ ID NO: 45925 - DNA, 25 bp, SARS Virus
ttggagattgattagaccacagcaa

SEQ ID NO: 45926 - DNA, 25 bp, SARS Virus
tggagattgatatgaccacagcaat

SEQ ID NO: 45927 - DNA, 25 bp, SARS Virus
ggagattgataataccacagcaatg

SEQ ID NO: 45928 - DNA, 25 bp, SARS Virus
gagattgataagtccacagcaatgc

SEQ ID NO: 45929 - DNA, 25 bp, SARS Virus
agattgataagatcacagcaatgct

SEQ ID NO: 45930 - DNA, 25 bp, SARS Virus
gattgataagactacagcaatgctg

SEQ ID NO: 45931 - DNA, 25 bp, SARS Virus
attgataagacctcagcaatgctga

SEQ ID NO: 45932 - DNA, 25 bp, SARS Virus
ttgataagaccatagcaatgctgat

SEQ ID NO: 45933 - DNA, 25 bp, SARS Virus
tgataagaccactgcaatgctgata

SEQ ID NO: 45934 - DNA, 25 bp, SARS Virus
gataagaccacatcaatgctgatag

SEQ ID NO: 45935 - DNA, 25 bp, SARS Virus
ataagaccacagtaatgctgatagt

SEQ ID NO: 45936 - DNA, 25 bp, SARS Virus
taagaccacagctatgctgatagta

SEQ ID NO: 45937 - DNA, 25 bp, SARS Virus
aagaccacagcattgctgatagtac

SEQ ID NO: 45938 - DNA, 25 bp, SARS Virus
agaccacagcaatgctgatagtaca

SEQ ID NO: 45939 - DNA, 25 bp, SARS Virus
gaccacagcaattctgatagtacaa

SEQ ID NO: 45940 - DNA, 25 bp, SARS Virus
accacagcaatgttgatagtacaaa

SEQ ID NO: 45941 - DNA, 25 bp, SARS Virus
ccacagcaatgctgatagtacaaaa

SEQ ID NO: 45942 - DNA, 25 bp, SARS Virus
cacagcaatgcttatagtacaaaaa

SEQ ID NO: 45943 - DNA, 25 bp, SARS Virus
acagcaatgctgttagtacaaaaat

SEQ ID NO: 45944 - DNA, 25 bp, SARS Virus
cagcaatgctgatagtacaaaaatc

SEQ ID NO: 45945 - DNA, 25 bp, SARS Virus
agcaatgctgattgtacaaaaatcg

SEQ ID NO: 45946 - DNA, 25 bp, SARS Virus
gcaatgctgatattacaaaaatcga

SEQ ID NO: 45947 - DNA, 25 bp, SARS Virus
caatgctgatagtacaaaaatcgat

SEQ ID NO: 45948 - DNA, 25 bp, SARS Virus
aatgctgatagttcaaaaatcgatc

SEQ ID NO: 45949 - DNA, 25 bp, SARS Virus
atgctgatagtataaaaatcgatct

SEQ ID NO: 45950 - DNA, 25 bp, SARS Virus
tgctgatagtactaaaatcgatctc

SEQ ID NO: 45951 - DNA, 25 bp, SARS Virus
gctgatagtacataaatcgatctcg

SEQ ID NO: 45952 - DNA, 25 bp, SARS Virus
ctgatagtacaataatcgatctcga

SEQ ID NO: 45953 - DNA, 25 bp, SARS Virus
tgatagtacaaatatcgatctcgat

SEQ ID NO: 45954 - DNA, 25 bp, SARS Virus
gatagtacaaaattcgatctcgata

SEQ ID NO: 45955 - DNA, 25 bp, SARS Virus
atagtacaaaaatcgatctcgatat

SEQ ID NO: 45956 - DNA, 25 bp, SARS Virus
tagtacaaaaattgatctcgatatc

SEQ ID NO: 45957 - DNA, 25 bp, SARS Virus
agtacaaaaatctatctcgatatca

SEQ ID NO: 45958 - DNA, 25 bp, SARS Virus
gtacaaaaatcgttctcgatatcac

SEQ ID NO: 45959 - DNA, 25 bp, SARS Virus
tacaaaaatcgatctcgatatcaca

SEQ ID NO: 45960 - DNA, 25 bp, SARS Virus
acaaaaatcgatttcgatatcacaa

SEQ ID NO: 45961 - DNA, 25 bp, SARS Virus
caaaaatcgatctcgatatcacaaa

SEQ ID NO: 45962 - DNA, 25 bp, SARS Virus
aaaaatcgatcttgatatcacaaac

SEQ ID NO: 45963 - DNA, 25 bp, SARS Virus
aaaatcgatctctatatcacaaaca

SEQ ID NO: 45964 - DNA, 25 bp, SARS Virus
aaatcgatctcgttatcacaaacac

SEQ ID NO: 45965 - DNA, 25 bp, SARS Virus
aatcgatctcgatatcacaaacaca

SEQ ID NO: 45966 - DNA, 25 bp, SARS Virus
atcgatctcgatttcacaaacacac

SEQ ID NO: 45967 - DNA, 25 bp, SARS Virus
tcgatctcgatatcacaaacacaca

SEQ ID NO: 45968 - DNA, 25 bp, SARS Virus
cgatctcgatattacaaacacacac

SEQ ID NO: 45969 - DNA, 25 bp, SARS Virus
gatctcgatatctcaaacacacaca

SEQ ID NO: 45970 - DNA, 25 bp, SARS Virus
atctcgatatcataaacacacacaa

SEQ ID NO: 45971 - DNA, 25 bp, SARS Virus
tctcgatatcactaacacacacaac

SEQ ID NO: 45972 - DNA, 25 bp, SARS Virus
ctcgatatcacatacacacacaact

SEQ ID NO: 45973 - DNA, 25 bp, SARS Virus
tcgatatcacaatcacacacaactc

SEQ ID NO: 45974 - DNA, 25 bp, SARS Virus
cgatatcacaaatacacacaactca

SEQ ID NO: 45975 - DNA, 25 bp, SARS Virus
gatatcacaaactcacacaactcat

SEQ ID NO: 45976 - DNA, 25 bp, SARS Virus
atatcacaaacatacacaactcata

SEQ ID NO: 45977 - DNA, 25 bp, SARS Virus
tatcacaaacactcacaactcataa

SEQ ID NO: 45978 - DNA, 25 bp, SARS Virus
atcacaaacacatacaactcataat

SEQ ID NO: 45979 - DNA, 25 bp, SARS Virus
tcacaaacacactcaactcataatg

SEQ ID NO: 45980 - DNA, 25 bp, SARS Virus
cacaaacacacataactcataatgg

SEQ ID NO: 45981 - DNA, 25 bp, SARS Virus
acaaacacacactactcataatggg

SEQ ID NO: 45982 - DNA, 25 bp, SARS Virus
caaacacacacatctcataatgggt

SEQ ID NO: 45983 - DNA, 25 bp, SARS Virus
aaacacacacaattcataatgggta

SEQ ID NO: 45984 - DNA, 25 bp, SARS Virus
aacacacacaactcataatgggtaa

SEQ ID NO: 45985 - DNA, 25 bp, SARS Virus
acacacacaacttataatgggtaac

SEQ ID NO: 45986 - DNA, 25 bp, SARS Virus
cacacacaactcttaatgggtaaca

SEQ ID NO: 45987 - DNA, 25 bp, SARS Virus
acacacaactcataatgggtaacaa

SEQ ID NO: 45988 - DNA, 25 bp, SARS Virus
cacacaactcattatgggtaacaat

SEQ ID NO: 45989 - DNA, 25 bp, SARS Virus
acacaactcatattgggtaacaata

SEQ ID NO: 45990 - DNA, 25 bp, SARS Virus
cacaactcataatgggtaacaataa

SEQ ID NO: 45991 - DNA, 25 bp, SARS Virus
acaactcataattggtaacaataaa

SEQ ID NO: 45992 - DNA, 25 bp, SARS Virus
caactcataatgtgtaacaataaat

SEQ ID NO: 45993 - DNA, 25 bp, SARS Virus
aactcataatggttaacaataaata

SEQ ID NO: 45994 - DNA, 25 bp, SARS Virus
actcataatgggtaacaataaataa

SEQ ID NO: 45995 - DNA, 25 bp, SARS Virus
ctcataatgggttacaataaataat

SEQ ID NO: 45996 - DNA, 25 bp, SARS Virus
tcataatgggtatcaataaataatg

SEQ ID NO: 45997 - DNA, 25 bp, SARS Virus
cataatgggtaataataaataatga

SEQ ID NO: 45998 - DNA, 25 bp, SARS Virus
ataatgggtaactataaataatgac

SEQ ID NO: 45999 - DNA, 25 bp, SARS Virus
taatgggtaacattaaataatgacc

SEQ ID NO: 46000 - DNA, 25 bp, SARS Virus
aatgggtaacaataaataatgaccg

SEQ ID NO: 46001 - DNA, 25 bp, SARS Virus
atgggtaacaataaataatgaccgt

SEQ ID NO: 46002 - DNA, 25 bp, SARS Virus
tgggtaacaataaataatgaccgtt

SEQ ID NO: 46003 - DNA, 25 bp, SARS Virus
gggtaacaataaataatgaccgttg

SEQ ID NO: 46004 - DNA, 25 bp, SARS Virus
ggtaacaataaaaaatgaccgttgt

SEQ ID NO: 46005 - DNA, 25 bp, SARS Virus
gtaacaataaataatgaccgttgtg

SEQ ID NO: 46006 - DNA, 25 bp, SARS Virus
taacaataaataatgaccgttgtgg

SEQ ID NO: 46007 - DNA, 25 bp, SARS Virus
aacaataaataaagaccgttgtgga

SEQ ID NO: 46008 - DNA, 25 bp, SARS Virus
acaataaataataaccgttgtggaa

SEQ ID NO: 46009 - DNA, 25 bp, SARS Virus
caataaataatgaccgttgtggaat

SEQ ID NO: 46010 - DNA, 25 bp, SARS Virus
aataaataatgaacgttgtggaatg

SEQ ID NO: 46011 - DNA, 25 bp, SARS Virus
ataaataatgacagttgtggaatgt

SEQ ID NO: 46012 - DNA, 25 bp, SARS Virus
taaataatgaccattgtggaatgtc

SEQ ID NO: 46013 - DNA, 25 bp, SARS Virus
aaataatgaccgatgtggaatgtca

SEQ ID NO: 46014 - DNA, 25 bp, SARS Virus
aataatgaccgtagtggaatgtcac

SEQ ID NO: 46015 - DNA, 25 bp, SARS Virus
ataatgaccgttatggaatgtcaca

SEQ ID NO: 46016 - DNA, 25 bp, SARS Virus
taatgaccgttgaggaatgtcacat

SEQ ID NO: 46017 - DNA, 25 bp, SARS Virus
aatgaccgttgtagaatgtcacata

SEQ ID NO: 46018 - DNA, 25 bp, SARS Virus
atgaccgttgtgaaatgtcacatag

SEQ ID NO: 46019 - DNA, 25 bp, SARS Virus
tgaccgttgtggaatgtcacatagt

SEQ ID NO: 46020 - DNA, 25 bp, SARS Virus
gaccgttgtggaatgtcacatagta

SEQ ID NO: 46021 - DNA, 25 bp, SARS Virus
accgttgtggaaagtcacatagtac

SEQ ID NO: 46022 - DNA, 25 bp, SARS Virus
ccgttgtggaatatcacatagtacg

SEQ ID NO: 46023 - DNA, 25 bp, SARS Virus
cgttgtggaatgacacatagtacga

SEQ ID NO: 46024 - DNA, 25 bp, SARS Virus
gttgtggaatgtaacatagtacgaa

SEQ ID NO: 46025 - DNA, 25 bp, SARS Virus
ttgtggaatgtcacatagtacgaac

SEQ ID NO: 46026 - DNA, 25 bp, SARS Virus
tgtggaatgtcaaatagtacgaaca

SEQ ID NO: 46027 - DNA, 25 bp, SARS Virus
gtggaatgtcacatagtacgaacaa

SEQ ID NO: 46028 - DNA, 25 bp, SARS Virus
tggaatgtcacaaagtacgaacaaa

SEQ ID NO: 46029 - DNA, 25 bp, SARS Virus
ggaatgtcacatagtacgaacaaat

SEQ ID NO: 46030 - DNA, 25 bp, SARS Virus
gaatgtcacataatacgaacaaata

SEQ ID NO: 46031 - DNA, 25 bp, SARS Virus
aatgtcacatagaacgaacaaataa

SEQ ID NO: 46032 - DNA, 25 bp, SARS Virus
atgtcacatagtacgaacaaataac

SEQ ID NO: 46033 - DNA, 25 bp, SARS Virus
tgtcacatagtaagaacaaataaca

SEQ ID NO: 46034 - DNA, 25 bp, SARS Virus
gtcacatagtacaaacaaataacaa

SEQ ID NO: 46035 - DNA, 25 bp, SARS Virus
tcacatagtacgaacaaataacaaa

SEQ ID NO: 46036 - DNA, 25 bp, SARS Virus
cacatagtacgaacaaataacaaag

SEQ ID NO: 46037 - DNA, 25 bp, SARS Virus
acatagtacgaaaaaataacaaaga

SEQ ID NO: 46038 - DNA, 25 bp, SARS Virus
catagtacgaacaaataacaaagaa

SEQ ID NO: 46039 - DNA, 25 bp, SARS Virus
atagtacgaacaaataacaaagaat

SEQ ID NO: 46040 - DNA, 25 bp, SARS Virus
tagtacgaacaaataacaaagaatc

SEQ ID NO: 46041 - DNA, 25 bp, SARS Virus
agtacgaacaaaaaacaaagaatcc

SEQ ID NO: 46042 - DNA, 25 bp, SARS Virus
gtacgaacaaataacaaagaatccg

SEQ ID NO: 46043 - DNA, 25 bp, SARS Virus
tacgaacaaataacaaagaatccga

SEQ ID NO: 46044 - DNA, 25 bp, SARS Virus
acgaacaaataaaaaagaatccgat

SEQ ID NO: 46045 - DNA, 25 bp, SARS Virus
cgaacaaataacaaagaatccgata

SEQ ID NO: 46046 - DNA, 25 bp, SARS Virus
gaacaaataacaaagaatccgataa

SEQ ID NO: 46047 - DNA, 25 bp, SARS Virus
aacaaataacaaagaatccgataac

SEQ ID NO: 46048 - DNA, 25 bp, SARS Virus
acaaataacaaaaaatccgataaca

SEQ ID NO: 46049 - DNA, 25 bp, SARS Virus
caaataacaaagaatccgataacaa

SEQ ID NO: 46050 - DNA, 25 bp, SARS Virus
aaataacaaagaatccgataacaac

SEQ ID NO: 46051 - DNA, 25 bp, SARS Virus
aataacaaagaaaccgataacaacg

SEQ ID NO: 46052 - DNA, 25 bp, SARS Virus
ataacaaagaatacgataacaacga

SEQ ID NO: 46053 - DNA, 25 bp, SARS Virus
taacaaagaatcagataacaacgac

SEQ ID NO: 46054 - DNA, 25 bp, SARS Virus
aacaaagaatccaataacaacgacg

SEQ ID NO: 46055 - DNA, 25 bp, SARS Virus
acaaagaatccgataacaacgacga

SEQ ID NO: 46056 - DNA, 25 bp, SARS Virus
caaagaatccgaaaacaacgacgac

SEQ ID NO: 46057 - DNA, 25 bp, SARS Virus
aaagaatccgataacaacgacgacg

SEQ ID NO: 46058 - DNA, 25 bp, SARS Virus
aagaatccgataacaacgacgacga

SEQ ID NO: 46059 - DNA, 25 bp, SARS Virus
agaatccgataaaaacgacgacgat

SEQ ID NO: 46060 - DNA, 25 bp, SARS Virus
gaatccgataacaacgacgacgatg

SEQ ID NO: 46061 - DNA, 25 bp, SARS Virus
aatccgataacaacgacgacgatga

SEQ ID NO: 46062 - DNA, 25 bp, SARS Virus
atccgataacaaagacgacgatgaa

SEQ ID NO: 46063 - DNA, 25 bp, SARS Virus
tccgataacaacaacgacgatgaaa

SEQ ID NO: 46064 - DNA, 25 bp, SARS Virus
ccgataacaacgacgacgatgaaac

SEQ ID NO: 46065 - DNA, 25 bp, SARS Virus
cgataacaacgaagacgatgaaacc

SEQ ID NO: 46066 - DNA, 25 bp, SARS Virus
gataacaacgacaacgatgaaaccg

SEQ ID NO: 46067 - DNA, 25 bp, SARS Virus
ataacaacgacgacgatgaaaccgg

SEQ ID NO: 46068 - DNA, 25 bp, SARS Virus
taacaacgacgaagatgaaaccgga

SEQ ID NO: 46069 - DNA, 25 bp, SARS Virus
aacaacgacgacaatgaaaccggaa

SEQ ID NO: 46070 - DNA, 25 bp, SARS Virus
acaacgacgacgatgaaaccggaaa

SEQ ID NO: 46071 - DNA, 25 bp, SARS Virus
caacgacgacgaagaaaccggaaaa

SEQ ID NO: 46072 - DNA, 25 bp, SARS Virus
aacgacgacgataaaaccggaaaag

SEQ ID NO: 46073 - DNA, 25 bp, SARS Virus
acgacgacgatgaaaccggaaaaga

SEQ ID NO: 46074 - DNA, 25 bp, SARS Virus
cgacgacgatgaaaccggaaaagac

SEQ ID NO: 46075 - DNA, 25 bp, SARS Virus
gacgacgatgaaaccggaaaagaca

SEQ ID NO: 46076 - DNA, 25 bp, SARS Virus
acgacgatgaaaacggaaaagacaa

SEQ ID NO: 46077 - DNA, 25 bp, SARS Virus
cgacgatgaaacaggaaaagacaaa

SEQ ID NO: 46078 - DNA, 25 bp, SARS Virus
gacgatgaaaccagaaaagacaaat

SEQ ID NO: 46079 - DNA, 25 bp, SARS Virus
acgatgaaaccgaaaaagacaaatg

SEQ ID NO: 46080 - DNA, 25 bp, SARS Virus
cgatgaaaccggaaaagacaaatga

SEQ ID NO: 46081 - DNA, 25 bp, SARS Virus
gatgaaaccggaaaagacaaatgag

SEQ ID NO: 46082 - DNA, 25 bp, SARS Virus
atgaaaccggaaaagacaaatgagt

SEQ ID NO: 46083 - DNA, 25 bp, SARS Virus
tgaaaccggaaaagacaaatgagtt

SEQ ID NO: 46084 - DNA, 25 bp, SARS Virus
gaaaccggaaaaaacaaatgagttg

SEQ ID NO: 46085 - DNA, 25 bp, SARS Virus
aaaccggaaaagacaaatgagttgg

SEQ ID NO: 46086 - DNA, 25 bp, SARS Virus
aaccggaaaagaaaaatgagttggc

SEQ ID NO: 46087 - DNA, 25 bp, SARS Virus
accggaaaagacaaatgagttggca

SEQ ID NO: 46088 - DNA, 25 bp, SARS Virus
ccggaaaagacaaatgagttggcaa

SEQ ID NO: 46089 - DNA, 25 bp, SARS Virus
cggaaaagacaaatgagttggcaat

SEQ ID NO: 46090 - DNA, 25 bp, SARS Virus
ggaaaagacaaaagagttggcaatg

SEQ ID NO: 46091 - DNA, 25 bp, SARS Virus
gaaaagacaaataagttggcaatga

SEQ ID NO: 46092 - DNA, 25 bp, SARS Virus
aaaagacaaatgagttggcaatgaa

SEQ ID NO: 46093 - DNA, 25 bp, SARS Virus
aaagacaaatgaattggcaatgaag

SEQ ID NO: 46094 - DNA, 25 bp, SARS Virus
aagacaaatgagatggcaatgaagt

SEQ ID NO: 46095 - DNA, 25 bp, SARS Virus
agacaaatgagtaggcaatgaagtc

SEQ ID NO: 46096 - DNA, 25 bp, SARS Virus
gacaaatgagttagcaatgaagtcc

SEQ ID NO: 46097 - DNA, 25 bp, SARS Virus
acaaatgagttgacaatgaagtccg

SEQ ID NO: 46098 - DNA, 25 bp, SARS Virus
caaatgagttggaaatgaagtccga

SEQ ID NO: 46099 - DNA, 25 bp, SARS Virus
aaatgagttggcaatgaagtccgaa

SEQ ID NO: 46100 - DNA, 25 bp, SARS Virus
aatgagttggcaatgaagtccgaat

SEQ ID NO: 46101 - DNA, 25 bp, SARS Virus
atgagttggcaaagaagtccgaatg

SEQ ID NO: 46102 - DNA, 25 bp, SARS Virus
tgagttggcaataaagtccgaatga

SEQ ID NO: 46103 - DNA, 25 bp, SARS Virus
gagttggcaatgaagtccgaatgag

SEQ ID NO: 46104 - DNA, 25 bp, SARS Virus
agttggcaatgaagtccgaatgaga

SEQ ID NO: 46105 - DNA, 25 bp, SARS Virus
gttggcaatgaaatccgaatgagaa

SEQ ID NO: 46106 - DNA, 25 bp, SARS Virus
ttggcaatgaagaccgaatgagaac

SEQ ID NO: 46107 - DNA, 25 bp, SARS Virus
tggcaatgaagtacgaatgagaacc

SEQ ID NO: 46108 - DNA, 25 bp, SARS Virus
ggcaatgaagtcagaatgagaacca

SEQ ID NO: 46109 - DNA, 25 bp, SARS Virus
gcaatgaagtccaaatgagaaccac

SEQ ID NO: 46110 - DNA, 25 bp, SARS Virus
caatgaagtccgaatgagaaccaca

SEQ ID NO: 46111 - DNA, 25 bp, SARS Virus
aatgaagtccgaatgagaaccacaa

SEQ ID NO: 46112 - DNA, 25 bp, SARS Virus
atgaagtccgaaagagaaccacaaa

SEQ ID NO: 46113 - DNA, 25 bp, SARS Virus
tgaagtccgaataagaaccacaaat

SEQ ID NO: 46114 - DNA, 25 bp, SARS Virus
gaagtccgaatgagaaccacaaata

SEQ ID NO: 46115 - DNA, 25 bp, SARS Virus
aagtccgaatgaaaaccacaaatac

SEQ ID NO: 46116 - DNA, 25 bp, SARS Virus
agtccgaatgagaaccacaaatact

SEQ ID NO: 46117 - DNA, 25 bp, SARS Virus
gtccgaatgagaaccacaaatactg

SEQ ID NO: 46118 - DNA, 25 bp, SARS Virus
tccgaatgagaaacacaaatactga

SEQ ID NO: 46119 - DNA, 25 bp, SARS Virus
ccgaatgagaacaacaaatactgat

SEQ ID NO: 46120 - DNA, 25 bp, SARS Virus
cgaatgagaaccacaaatactgatg

SEQ ID NO: 46121 - DNA, 25 bp, SARS Virus
gaatgagaaccaaaaatactgatga

SEQ ID NO: 46122 - DNA, 25 bp, SARS Virus
aatgagaaccacaaatactgatgaa

SEQ ID NO: 46123 - DNA, 25 bp, SARS Virus
atgagaaccacaaatactgatgaac

SEQ ID NO: 46124 - DNA, 25 bp, SARS Virus
tgagaaccacaaatactgatgaacc

SEQ ID NO: 46125 - DNA, 25 bp, SARS Virus
gagaaccacaaaaactgatgaacca

SEQ ID NO: 46126 - DNA, 25 bp, SARS Virus
agaaccacaaatactgatgaaccag

SEQ ID NO: 46127 - DNA, 25 bp, SARS Virus
gaaccacaaataatgatgaaccaga

SEQ ID NO: 46128 - DNA, 25 bp, SARS Virus
aaccacaaatacagatgaaccagag

SEQ ID NO: 46129 - DNA, 25 bp, SARS Virus
accacaaatactaatgaaccagaga

SEQ ID NO: 46130 - DNA, 25 bp, SARS Virus
ccacaaatactgatgaaccagagat

SEQ ID NO: 46131 - DNA, 25 bp, SARS Virus
cacaaatactgaagaaccagagatg

SEQ ID NO: 46132 - DNA, 25 bp, SARS Virus
acaaatactgataaaccagagatgt

SEQ ID NO: 46133 - DNA, 25 bp, SARS Virus
caaatactgatgaaccagagatgtg

SEQ ID NO: 46134 - DNA, 25 bp, SARS Virus
aaatactgatgaaccagagatgtgt

SEQ ID NO: 46135 - DNA, 25 bp, SARS Virus
aatactgatgaaacagagatgtgtt

SEQ ID NO: 46136 - DNA, 25 bp, SARS Virus
atactgatgaacaagagatgtgttc

SEQ ID NO: 46137 - DNA, 25 bp, SARS Virus
tactgatgaaccagagatgtgttct

SEQ ID NO: 46138 - DNA, 25 bp, SARS Virus
actgatgaaccaaagatgtgttctt

SEQ ID NO: 46139 - DNA, 25 bp, SARS Virus
ctgatgaaccagagatgtgttctta

SEQ ID NO: 46140 - DNA, 25 bp, SARS Virus
tgatgaaccagaaatgtgttcttaa

SEQ ID NO: 46141 - DNA, 25 bp, SARS Virus
gatgaaccagagatgtgttcttaaa

SEQ ID NO: 46142 - DNA, 25 bp, SARS Virus
atgaaccagagaagtgttcttaaat

SEQ ID NO: 46143 - DNA, 25 bp, SARS Virus
tgaaccagagatatgttcttaaatc

SEQ ID NO: 46144 - DNA, 25 bp, SARS Virus
gaaccagagatgagttcttaaatcc

SEQ ID NO: 46145 - DNA, 25 bp, SARS Virus
aaccagagatgtattcttaaatcca

SEQ ID NO: 46146 - DNA, 25 bp, SARS Virus
accagagatgtgatcttaaatccat

SEQ ID NO: 46147 - DNA, 25 bp, SARS Virus
ccagagatgtgtacttaaatccata

SEQ ID NO: 46148 - DNA, 25 bp, SARS Virus
cagagatgtgttattaaatccatat

SEQ ID NO: 46149 - DNA, 25 bp, SARS Virus
agagatgtgttcataaatccatata

SEQ ID NO: 46150 - DNA, 25 bp, SARS Virus
gagatgtgttctaaaatccatatac

SEQ ID NO: 46151 - DNA, 25 bp, SARS Virus
agatgtgttcttaaatccatatact

SEQ ID NO: 46152 - DNA, 25 bp, SARS Virus
gatgtgttcttaaatccatatactt

SEQ ID NO: 46153 - DNA, 25 bp, SARS Virus
atgtgttcttaaatccatatacttg

SEQ ID NO: 46154 - DNA, 25 bp, SARS Virus
tgtgttcttaaaaccatatacttga

SEQ ID NO: 46155 - DNA, 25 bp, SARS Virus
gtgttcttaaatacatatacttgag

SEQ ID NO: 46156 - DNA, 25 bp, SARS Virus
tgttcttaaatcaatatacttgagg

SEQ ID NO: 46157 - DNA, 25 bp, SARS Virus
gttcttaaatccatatacttgaggg

SEQ ID NO: 46158 - DNA, 25 bp, SARS Virus
ttcttaaatccaaatacttgagggt

SEQ ID NO: 46159 - DNA, 25 bp, SARS Virus
tcttaaatccatatacttgagggtc

SEQ ID NO: 46160 - DNA, 25 bp, SARS Virus
cttaaatccataaacttgagggtcc

SEQ ID NO: 46161 - DNA, 25 bp, SARS Virus
ttaaatccatatacttgagggtccc

SEQ ID NO: 46162 - DNA, 25 bp, SARS Virus
taaatccatataattgagggtcccc

SEQ ID NO: 46163 - DNA, 25 bp, SARS Virus
aaatccatatacatgagggtccccg

SEQ ID NO: 46164 - DNA, 25 bp, SARS Virus
aatccatatactagagggtccccga

SEQ ID NO: 46165 - DNA, 25 bp, SARS Virus
atccatatacttaagggtccccgaa

SEQ ID NO: 46166 - DNA, 25 bp, SARS Virus
tccatatacttgagggtccccgaaa

SEQ ID NO: 46167 - DNA, 25 bp, SARS Virus
ccatatacttgaaggtccccgaaaa

SEQ ID NO: 46168 - DNA, 25 bp, SARS Virus
catatacttgagagtccccgaaaac

SEQ ID NO: 46169 - DNA, 25 bp, SARS Virus
atatacttgaggatccccgaaaacg

SEQ ID NO: 46170 - DNA, 25 bp, SARS Virus
tatacttgagggaccccgaaaacgg

SEQ ID NO: 46171 - DNA, 25 bp, SARS Virus
atacttgagggtacccgaaaacgga

SEQ ID NO: 46172 - DNA, 25 bp, SARS Virus
tacttgagggtcaccgaaaacggag

SEQ ID NO: 46173 - DNA, 25 bp, SARS Virus
acttgagggtccacgaaaacggagg

SEQ ID NO: 46174 - DNA, 25 bp, SARS Virus
cttgagggtcccagaaaacggagga

SEQ ID NO: 46175 - DNA, 25 bp, SARS Virus
ttgagggtccccaaaaacggaggat

SEQ ID NO: 46176 - DNA, 25 bp, SARS Virus
tgagggtccccgaaaacggaggatt

SEQ ID NO: 46177 - DNA, 25 bp, SARS Virus
gagggtccccgaaaacggaggattc

SEQ ID NO: 46178 - DNA, 25 bp, SARS Virus
agggtccccgaaaacggaggattct

SEQ ID NO: 46179 - DNA, 25 bp, SARS Virus
gggtccccgaaaacggaggattctc

SEQ ID NO: 46180 - DNA, 25 bp, SARS Virus
ggtccccgaaaaaggaggattctca

SEQ ID NO: 46181 - DNA, 25 bp, SARS Virus
gtccccgaaaacagaggattctcat

SEQ ID NO: 46182 - DNA, 25 bp, SARS Virus
tccccgaaaacgaaggattctcatc

SEQ ID NO: 46183 - DNA, 25 bp, SARS Virus
ccccgaaaacggaggattctcatca

SEQ ID NO: 46184 - DNA, 25 bp, SARS Virus
cccgaaaacggaagattctcatcat

SEQ ID NO: 46185 - DNA, 25 bp, SARS Virus
ccgaaaacggagaattctcatcata

SEQ ID NO: 46186 - DNA, 25 bp, SARS Virus
cgaaaacggaggattctcatcataa

SEQ ID NO: 46187 - DNA, 25 bp, SARS Virus
gaaaacggaggaatctcatcataac

SEQ ID NO: 46188 - DNA, 25 bp, SARS Virus
aaaacggaggatactcatcataact

SEQ ID NO: 46189 - DNA, 25 bp, SARS Virus
aaacggaggattatcatcataacta

SEQ ID NO: 46190 - DNA, 25 bp, SARS Virus
aacggaggattcacatcataactac

SEQ ID NO: 46191 - DNA, 25 bp, SARS Virus
acggaggattctaatcataactacg

SEQ ID NO: 46192 - DNA, 25 bp, SARS Virus
cggaggattctcatcataactacga

SEQ ID NO: 46193 - DNA, 25 bp, SARS Virus
ggaggattctcaacataactacgaa

SEQ ID NO: 46194 - DNA, 25 bp, SARS Virus
gaggattctcataataactacgaaa

SEQ ID NO: 46195 - DNA, 25 bp, SARS Virus
aggattctcatcataactacgaaag

SEQ ID NO: 46196 - DNA, 25 bp, SARS Virus
ggattctcatcaaaactacgaaagt

SEQ ID NO: 46197 - DNA, 25 bp, SARS Virus
gattctcatcataactacgaaagtt

SEQ ID NO: 46198 - DNA, 25 bp, SARS Virus
attctcatcataactacgaaagttc

SEQ ID NO: 46199 - DNA, 25 bp, SARS Virus
ttctcatcataaatacgaaagttcg

SEQ ID NO: 46200 - DNA, 25 bp, SARS Virus
tctcatcataacaacgaaagttcga

SEQ ID NO: 46201 - DNA, 25 bp, SARS Virus
ctcatcataactacgaaagttcgaa

SEQ ID NO: 46202 - DNA, 25 bp, SARS Virus
tcatcataactaagaaagttcgaat

SEQ ID NO: 46203 - DNA, 25 bp, SARS Virus
catcataactacaaaagttcgaatt

SEQ ID NO: 46204 - DNA, 25 bp, SARS Virus
atcataactacgaaagttcgaattg

SEQ ID NO: 46205 - DNA, 25 bp, SARS Virus
tcataactacgaaagttcgaattgt

SEQ ID NO: 46206 - DNA, 25 bp, SARS Virus
cataactacgaaagttcgaattgta

SEQ ID NO: 46207 - DNA, 25 bp, SARS Virus
ataactacgaaaattcgaattgtaa

SEQ ID NO: 46208 - DNA, 25 bp, SARS Virus
taactacgaaagatcgaattgtaat

SEQ ID NO: 46209 - DNA, 25 bp, SARS Virus
aactacgaaagtacgaattgtaatt

SEQ ID NO: 46210 - DNA, 25 bp, SARS Virus
actacgaaagttagaattgtaattc

SEQ ID NO: 46211 - DNA, 25 bp, SARS Virus
ctacgaaagttcaaattgtaattca

SEQ ID NO: 46212 - DNA, 25 bp, SARS Virus
tacgaaagttcgaattgtaattcaa

SEQ ID NO: 46213 - DNA, 25 bp, SARS Virus
acgaaagttcgaattgtaattcaac

SEQ ID NO: 46214 - DNA, 25 bp, SARS Virus
cgaaagttcgaaatgtaattcaaca

SEQ ID NO: 46215 - DNA, 25 bp, SARS Virus
gaaagttcgaatagtaattcaacaa

SEQ ID NO: 46216 - DNA, 25 bp, SARS Virus
aaagttcgaattataattcaacaac

SEQ ID NO: 46217 - DNA, 25 bp, SARS Virus
aagttcgaattgaaattcaacaacc

SEQ ID NO: 46218 - DNA, 25 bp, SARS Virus
agttcgaattgtaattcaacaaccc

SEQ ID NO: 46219 - DNA, 25 bp, SARS Virus
gttcgaattgtaattcaacaaccca

SEQ ID NO: 46220 - DNA, 25 bp, SARS Virus
ttcgaattgtaaatcaacaacccat

SEQ ID NO: 46221 - DNA, 25 bp, SARS Virus
tcgaattgtaatacaacaacccata

SEQ ID NO: 46222 - DNA, 25 bp, SARS Virus
cgaattgtaattaaacaacccataa

SEQ ID NO: 46223 - DNA, 25 bp, SARS Virus
gaattgtaattcaacaacccataac

SEQ ID NO: 46224 - DNA, 25 bp, SARS Virus
aattgtaattcaacaacccataacc

SEQ ID NO: 46225 - DNA, 25 bp, SARS Virus
attgtaattcaaaaacccataacct

SEQ ID NO: 46226 - DNA, 25 bp, SARS Virus
ttgtaattcaacaacccataacctc

SEQ ID NO: 46227 - DNA, 25 bp, SARS Virus
tgtaattcaacaacccataacctcc

SEQ ID NO: 46228 - DNA, 25 bp, SARS Virus
gtaattcaacaaaccataacctcca

SEQ ID NO: 46229 - DNA, 25 bp, SARS Virus
taattcaacaacacataacctccat

SEQ ID NO: 46230 - DNA, 25 bp, SARS Virus
aattcaacaaccaataacctccatt

SEQ ID NO: 46231 - DNA, 25 bp, SARS Virus
attcaacaacccataacctccattt

SEQ ID NO: 46232 - DNA, 25 bp, SARS Virus
ttcaacaacccaaaacctccatttg

SEQ ID NO: 46233 - DNA, 25 bp, SARS Virus
tcaacaacccataacctccatttgg

SEQ ID NO: 46234 - DNA, 25 bp, SARS Virus
caacaacccataacctccatttggt

SEQ ID NO: 46235 - DNA, 25 bp, SARS Virus
aacaacccataaactccatttggta

SEQ ID NO: 46236 - DNA, 25 bp, SARS Virus
acaacccataacatccatttggtac

SEQ ID NO: 46237 - DNA, 25 bp, SARS Virus
caacccataaccaccatttggtaca

SEQ ID NO: 46238 - DNA, 25 bp, SARS Virus
aacccataacctacatttggtacat

SEQ ID NO: 46239 - DNA, 25 bp, SARS Virus
acccataacctcaatttggtacata

SEQ ID NO: 46240 - DNA, 25 bp, SARS Virus
cccataacctccatttggtacatag

SEQ ID NO: 46241 - DNA, 25 bp, SARS Virus
ccataacctccaattggtacatagt

SEQ ID NO: 46242 - DNA, 25 bp, SARS Virus
cataacctccatatggtacatagtt

SEQ ID NO: 46243 - DNA, 25 bp, SARS Virus
ataacctccattaggtacatagttc

SEQ ID NO: 46244 - DNA, 25 bp, SARS Virus
taacctccatttagtacatagttcc

SEQ ID NO: 46245 - DNA, 25 bp, SARS Virus
aacctccatttgatacatagttcca

SEQ ID NO: 46246 - DNA, 25 bp, SARS Virus
acctccatttggaacatagttccaa

SEQ ID NO: 46247 - DNA, 25 bp, SARS Virus
cctccatttggtacatagttccaac

SEQ ID NO: 46248 - DNA, 25 bp, SARS Virus
ctccatttggtaaatagttccaacg

SEQ ID NO: 46249 - DNA, 25 bp, SARS Virus
tccatttggtacatagttccaacga

SEQ ID NO: 46250 - DNA, 25 bp, SARS Virus
ccatttggtacaaagttccaacgat

SEQ ID NO: 46251 - DNA, 25 bp, SARS Virus
catttggtacatagttccaacgatg

SEQ ID NO: 46252 - DNA, 25 bp, SARS Virus
atttggtacataattccaacgatga

SEQ ID NO: 46253 - DNA, 25 bp, SARS Virus
tttggtacatagatccaacgatgac

SEQ ID NO: 46254 - DNA, 25 bp, SARS Virus
ttggtacatagtaccaacgatgaca

SEQ ID NO: 46255 - DNA, 25 bp, SARS Virus
tggtacatagttacaacgatgacat

SEQ ID NO: 46256 - DNA, 25 bp, SARS Virus
ggtacatagttcaaacgatgacatg

SEQ ID NO: 46257 - DNA, 25 bp, SARS Virus
gtacatagttccaacgatgacatgt

SEQ ID NO: 46258 - DNA, 25 bp, SARS Virus
tacatagttccaacgatgacatgtc

SEQ ID NO: 46259 - DNA, 25 bp, SARS Virus
acatagttccaaagatgacatgtca

SEQ ID NO: 46260 - DNA, 25 bp, SARS Virus
catagttccaacaatgacatgtcag

SEQ ID NO: 46261 - DNA, 25 bp, SARS Virus
atagttccaacgatgacatgtcaga

SEQ ID NO: 46262 - DNA, 25 bp, SARS Virus
tagttccaacgaagacatgtcagat

SEQ ID NO: 46263 - DNA, 25 bp, SARS Virus
agttccaacgataacatgtcagatt

SEQ ID NO: 46264 - DNA, 25 bp, SARS Virus
gttccaacgatgacatgtcagattt

SEQ ID NO: 46265 - DNA, 25 bp, SARS Virus
ttccaacgatgaaatgtcagatttt

SEQ ID NO: 46266 - DNA, 25 bp, SARS Virus
tccaacgatgacatgtcagatttta

SEQ ID NO: 46267 - DNA, 25 bp, SARS Virus
ccaacgatgacaagtcagattttac

SEQ ID NO: 46268 - DNA, 25 bp, SARS Virus
caacgatgacatatcagattttaca

SEQ ID NO: 46269 - DNA, 25 bp, SARS Virus
aacgatgacatgacagattttacag

SEQ ID NO: 46270 - DNA, 25 bp, SARS Virus
acgatgacatgtaagattttacaga

SEQ ID NO: 46271 - DNA, 25 bp, SARS Virus
cgatgacatgtcagattttacagac

SEQ ID NO: 46272 - DNA, 25 bp, SARS Virus
gatgacatgtcaaattttacagact

SEQ ID NO: 46273 - DNA, 25 bp, SARS Virus
atgacatgtcagattttacagactg

SEQ ID NO: 46274 - DNA, 25 bp, SARS Virus
tgacatgtcagaatttacagactgc

SEQ ID NO: 46275 - DNA, 25 bp, SARS Virus
gacatgtcagatattacagactgca

SEQ ID NO: 46276 - DNA, 25 bp, SARS Virus
acatgtcagattatacagactgcat

SEQ ID NO: 46277 - DNA, 25 bp, SARS Virus
catgtcagatttaacagactgcatt

SEQ ID NO: 46278 - DNA, 25 bp, SARS Virus
atgtcagattttacagactgcattt

SEQ ID NO: 46279 - DNA, 25 bp, SARS Virus
tgtcagattttaaagactgcatttc

SEQ ID NO: 46280 - DNA, 25 bp, SARS Virus
gtcagattttacagactgcatttca

SEQ ID NO: 46281 - DNA, 25 bp, SARS Virus
tcagattttacaaactgcatttcac

SEQ ID NO: 46282 - DNA, 25 bp, SARS Virus
cagattttacagactgcatttcacg

SEQ ID NO: 46283 - DNA, 25 bp, SARS Virus
agattttacagaatgcatttcacgt

SEQ ID NO: 46284 - DNA, 25 bp, SARS Virus
gattttacagacagcatttcacgtg

SEQ ID NO: 46285 - DNA, 25 bp, SARS Virus
attttacagactacatttcacgtgt

SEQ ID NO: 46286 - DNA, 25 bp, SARS Virus
ttttacagactgaatttcacgtgta

SEQ ID NO: 46287 - DNA, 25 bp, SARS Virus
tttacagactgcatttcacgtgtag

SEQ ID NO: 46288 - DNA, 25 bp, SARS Virus
ttacagactgcaattcacgtgtaga

SEQ ID NO: 46289 - DNA, 25 bp, SARS Virus
tacagactgcatatcacgtgtagac

SEQ ID NO: 46290 - DNA, 25 bp, SARS Virus
acagactgcattacacgtgtagaca

SEQ ID NO: 46291 - DNA, 25 bp, SARS Virus
cagactgcatttaacgtgtagacac

SEQ ID NO: 46292 - DNA, 25 bp, SARS Virus
agactgcatttcacgtgtagacacc

SEQ ID NO: 46293 - DNA, 25 bp, SARS Virus
gactgcatttcaagtgtagacacca

SEQ ID NO: 46294 - DNA, 25 bp, SARS Virus
actgcatttcacatgtagacaccat

SEQ ID NO: 46295 - DNA, 25 bp, SARS Virus
ctgcatttcacgagtagacaccatg

SEQ ID NO: 46296 - DNA, 25 bp, SARS Virus
tgcatttcacgtatagacaccatga

SEQ ID NO: 46297 - DNA, 25 bp, SARS Virus
gcatttcacgtgaagacaccatgac

SEQ ID NO: 46298 - DNA, 25 bp, SARS Virus
catttcacgtgtagacaccatgacg

SEQ ID NO: 46299 - DNA, 25 bp, SARS Virus
atttcacgtgtaaacaccatgacga

SEQ ID NO: 46300 - DNA, 25 bp, SARS Virus
tttcacgtgtagacaccatgacgag

SEQ ID NO: 46301 - DNA, 25 bp, SARS Virus
ttcacgtgtagaaaccatgacgaga

SEQ ID NO: 46302 - DNA, 25 bp, SARS Virus
tcacgtgtagacaccatgacgagag

SEQ ID NO: 46303 - DNA, 25 bp, SARS Virus
cacgtgtagacaacatgacgagagc

SEQ ID NO: 46304 - DNA, 25 bp, SARS Virus
acgtgtagacacaatgacgagagcc

SEQ ID NO: 46305 - DNA, 25 bp, SARS Virus
cgtgtagacaccatgacgagagcca

SEQ ID NO: 46306 - DNA, 25 bp, SARS Virus
gtgtagacaccaagacgagagccaa

SEQ ID NO: 46307 - DNA, 25 bp, SARS Virus
tgtagacaccataacgagagccaag

SEQ ID NO: 46308 - DNA, 25 bp, SARS Virus
gtagacaccatgacgagagccaaga

SEQ ID NO: 46309 - DNA, 25 bp, SARS Virus
tagacaccatgaagagagccaagaa

SEQ ID NO: 46310 - DNA, 25 bp, SARS Virus
agacaccatgacaagagccaagaag

SEQ ID NO: 46311 - DNA, 25 bp, SARS Virus
gacaccatgacgagagccaagaagt

SEQ ID NO: 46312 - DNA, 25 bp, SARS Virus
acaccatgacgaaagccaagaagtt

SEQ ID NO: 46313 - DNA, 25 bp, SARS Virus
caccatgacgagagccaagaagttg

SEQ ID NO: 46314 - DNA, 25 bp, SARS Virus
accatgacgagaaccaagaagttgt

SEQ ID NO: 46315 - DNA, 25 bp, SARS Virus
ccatgacgagagacaagaagttgtt

SEQ ID NO: 46316 - DNA, 25 bp, SARS Virus
catgacgagagcaaagaagttgttg

SEQ ID NO: 46317 - DNA, 25 bp, SARS Virus
atgacgagagccaagaagttgttga

SEQ ID NO: 46318 - DNA, 25 bp, SARS Virus
tgacgagagccaagaagttgttgaa

SEQ ID NO: 46319 - DNA, 25 bp, SARS Virus
gacgagagccaaaaagttgttgaat

SEQ ID NO: 46320 - DNA, 25 bp, SARS Virus
acgagagccaagaagttgttgaatc

SEQ ID NO: 46321 - DNA, 25 bp, SARS Virus
cgagagccaagaagttgttgaatct

SEQ ID NO: 46322 - DNA, 25 bp, SARS Virus
gagagccaagaaattgttgaatctc

SEQ ID NO: 46323 - DNA, 25 bp, SARS Virus
agagccaagaagatgttgaatctca

SEQ ID NO: 46324 - DNA, 25 bp, SARS Virus
gagccaagaagtagttgaatctcat

SEQ ID NO: 46325 - DNA, 25 bp, SARS Virus
agccaagaagttattgaatctcatc

SEQ ID NO: 46326 - DNA, 25 bp, SARS Virus
gccaagaagttgatgaatctcatct

SEQ ID NO: 46327 - DNA, 25 bp, SARS Virus
ccaagaagttgtagaatctcatctc

SEQ ID NO: 46328 - DNA, 25 bp, SARS Virus
caagaagttgttaaatctcatctca

SEQ ID NO: 46329 - DNA, 25 bp, SARS Virus
aagaagttgttgaatctcatctcag

SEQ ID NO: 46330 - DNA, 25 bp, SARS Virus
agaagttgttgaatctcatctcagt

SEQ ID NO: 46331 - DNA, 25 bp, SARS Virus
gaagttgttgaaactcatctcagta

SEQ ID NO: 46332 - DNA, 25 bp, SARS Virus
aagttgttgaatatcatctcagtag

SEQ ID NO: 46333 - DNA, 25 bp, SARS Virus
agttgttgaatcacatctcagtaga

SEQ ID NO: 46334 - DNA, 25 bp, SARS Virus
gttgttgaatctaatctcagtagaa

SEQ ID NO: 46335 - DNA, 25 bp, SARS Virus
ttgttgaatctcatctcagtagaag

SEQ ID NO: 46336 - DNA, 25 bp, SARS Virus
tgttgaatctcaactcagtagaaga

SEQ ID NO: 46337 - DNA, 25 bp, SARS Virus
gttgaatctcatatcagtagaagat

SEQ ID NO: 46338 - DNA, 25 bp, SARS Virus
ttgaatctcatcacagtagaagatt

SEQ ID NO: 46339 - DNA, 25 bp, SARS Virus
tgaatctcatctaagtagaagattt

SEQ ID NO: 46340 - DNA, 25 bp, SARS Virus
gaatctcatctcagtagaagattta

SEQ ID NO: 46341 - DNA, 25 bp, SARS Virus
aatctcatctcaatagaagatttaa

SEQ ID NO: 46342 - DNA, 25 bp, SARS Virus
atctcatctcagaagaagatttaac

SEQ ID NO: 46343 - DNA, 25 bp, SARS Virus
tctcatctcagtagaagatttaaca

SEQ ID NO: 46344 - DNA, 25 bp, SARS Virus
ctcatctcagtaaaagatttaacac

SEQ ID NO: 46345 - DNA, 25 bp, SARS Virus
tcatctcagtagaagatttaacacc

SEQ ID NO: 46346 - DNA, 25 bp, SARS Virus
catctcagtagaagatttaacaccc

SEQ ID NO: 46347 - DNA, 25 bp, SARS Virus
atctcagtagaaaatttaacacccg

SEQ ID NO: 46348 - DNA, 25 bp, SARS Virus
tctcagtagaagatttaacacccgt

SEQ ID NO: 46349 - DNA, 25 bp, SARS Virus
ctcagtagaagaattaacacccgtg

SEQ ID NO: 46350 - DNA, 25 bp, SARS Virus
tcagtagaagatataacacccgtgt

SEQ ID NO: 46351 - DNA, 25 bp, SARS Virus
cagtagaagattaaacacccgtgtt

SEQ ID NO: 46352 - DNA, 25 bp, SARS Virus
agtagaagatttaacacccgtgtta

SEQ ID NO: 46353 - DNA, 25 bp, SARS Virus
gtagaagatttaacacccgtgttac

SEQ ID NO: 46354 - DNA, 25 bp, SARS Virus
tagaagatttaaaacccgtgttaca

SEQ ID NO: 46355 - DNA, 25 bp, SARS Virus
agaagatttaacacccgtgttacac

SEQ ID NO: 46356 - DNA, 25 bp, SARS Virus
gaagatttaacaaccgtgttacaca

SEQ ID NO: 46357 - DNA, 25 bp, SARS Virus
aagatttaacacacgtgttacacat

SEQ ID NO: 46358 - DNA, 25 bp, SARS Virus
agatttaacaccagtgttacacatg

SEQ ID NO: 46359 - DNA, 25 bp, SARS Virus
gatttaacacccatgttacacatgt

SEQ ID NO: 46360 - DNA, 25 bp, SARS Virus
atttaacacccgagttacacatgtt

SEQ ID NO: 46361 - DNA, 25 bp, SARS Virus
tttaacacccgtattacacatgttg

SEQ ID NO: 46362 - DNA, 25 bp, SARS Virus
ttaacacccgtgatacacatgttga

SEQ ID NO: 46363 - DNA, 25 bp, SARS Virus
taacacccgtgtaacacatgttgag

SEQ ID NO: 46364 - DNA, 25 bp, SARS Virus
aacacccgtgttacacatgttgagg

SEQ ID NO: 46365 - DNA, 25 bp, SARS Virus
acacccgtgttaaacatgttgaggt

SEQ ID NO: 46366 - DNA, 25 bp, SARS Virus
cacccgtgttacacatgttgaggtg

SEQ ID NO: 46367 - DNA, 25 bp, SARS Virus
acccgtgttacaaatgttgaggtgt

SEQ ID NO: 46368 - DNA, 25 bp, SARS Virus
cccgtgttacacatgttgaggtgtt

SEQ ID NO: 46369 - DNA, 25 bp, SARS Virus
ccgtgttacacaagttgaggtgtta

SEQ ID NO: 46370 - DNA, 25 bp, SARS Virus
cgtgttacacatattgaggtgttac

SEQ ID NO: 46371 - DNA, 25 bp, SARS Virus
gtgttacacatgatgaggtgttact

SEQ ID NO: 46372 - DNA, 25 bp, SARS Virus
tgttacacatgtagaggtgttacta

SEQ ID NO: 46373 - DNA, 25 bp, SARS Virus
gttacacatgttaaggtgttactat

SEQ ID NO: 46374 - DNA, 25 bp, SARS Virus
ttacacatgttgaggtgttactata

SEQ ID NO: 46375 - DNA, 25 bp, SARS Virus
tacacatgttgaagtgttactataa

SEQ ID NO: 46376 - DNA, 25 bp, SARS Virus
acacatgttgagatgttactataag

SEQ ID NO: 46377 - DNA, 25 bp, SARS Virus
cacatgttgaggagttactataaga

SEQ ID NO: 46378 - DNA, 25 bp, SARS Virus
acatgttgaggtattactataagaa

SEQ ID NO: 46379 - DNA, 25 bp, SARS Virus
catgttgaggtgatactataagaag

SEQ ID NO: 46380 - DNA, 25 bp, SARS Virus
atgttgaggtgtaactataagaaga

SEQ ID NO: 46381 - DNA, 25 bp, SARS Virus
tgttgaggtgttactataagaagaa

SEQ ID NO: 46382 - DNA, 25 bp, SARS Virus
gttgaggtgttaatataagaagaac

SEQ ID NO: 46383 - DNA, 25 bp, SARS Virus
ttgaggtgttacaataagaagaacg

SEQ ID NO: 46384 - DNA, 25 bp, SARS Virus
tgaggtgttactataagaagaacgt

SEQ ID NO: 46385 - DNA, 25 bp, SARS Virus
gaggtgttactaaaagaagaacgtt

SEQ ID NO: 46386 - DNA, 25 bp, SARS Virus
aggtgttactataagaagaacgttt

SEQ ID NO: 46387 - DNA, 25 bp, SARS Virus
ggtgttactataagaagaacgtttt

SEQ ID NO: 46388 - DNA, 25 bp, SARS Virus
gtgttactataaaaagaacgttttc

SEQ ID NO: 46389 - DNA, 25 bp, SARS Virus
tgttactataagaagaacgttttct

SEQ ID NO: 46390 - DNA, 25 bp, SARS Virus
gttactataagaagaacgttttctg

SEQ ID NO: 46391 - DNA, 25 bp, SARS Virus
ttactataagaaaaacgttttctgt

SEQ ID NO: 46392 - DNA, 25 bp, SARS Virus
tactataagaagaacgttttctgtg

SEQ ID NO: 46393 - DNA, 25 bp, SARS Virus
actataagaagaacgttttctgtgt

SEQ ID NO: 46394 - DNA, 25 bp, SARS Virus
ctataagaagaaagttttctgtgtt

SEQ ID NO: 46395 - DNA, 25 bp, SARS Virus
tataagaagaacattttctgtgttg

SEQ ID NO: 46396 - DNA, 25 bp, SARS Virus
ataagaagaacgatttctgtgttga

SEQ ID NO: 46397 - DNA, 25 bp, SARS Virus
taagaagaacgtattctgtgttgac

SEQ ID NO: 46398 - DNA, 25 bp, SARS Virus
aagaagaacgttatctgtgttgact

SEQ ID NO: 46399 - DNA, 25 bp, SARS Virus
agaagaacgtttactgtgttgactt

SEQ ID NO: 46400 - DNA, 25 bp, SARS Virus
gaagaacgttttatgtgttgacttc

SEQ ID NO: 46401 - DNA, 25 bp, SARS Virus
aagaacgttttcagtgttgacttcg

SEQ ID NO: 46402 - DNA, 25 bp, SARS Virus
agaacgttttctatgttgacttcga

SEQ ID NO: 46403 - DNA, 25 bp, SARS Virus
gaacgttttctgagttgacttcgaa

SEQ ID NO: 46404 - DNA, 25 bp, SARS Virus
aacgttttctgtattgacttcgaaa

SEQ ID NO: 46405 - DNA, 25 bp, SARS Virus
acgttttctgtgatgacttcgaaag

SEQ ID NO: 46406 - DNA, 25 bp, SARS Virus
cgttttctgtgtagacttcgaaagc

SEQ ID NO: 46407 - DNA, 25 bp, SARS Virus
gttttctgtgttaacttcgaaagct

SEQ ID NO: 46408 - DNA, 25 bp, SARS Virus
ttttctgtgttgacttcgaaagctc

SEQ ID NO: 46409 - DNA, 25 bp, SARS Virus
tttctgtgttgaattcgaaagctct

SEQ ID NO: 46410 - DNA, 25 bp, SARS Virus
ttctgtgttgacatcgaaagctctt

SEQ ID NO: 46411 - DNA, 25 bp, SARS Virus
tctgtgttgactacgaaagctcttc

SEQ ID NO: 46412 - DNA, 25 bp, SARS Virus
ctgtgttgacttagaaagctcttct

SEQ ID NO: 46413 - DNA, 25 bp, SARS Virus
tgtgttgacttcaaaagctcttcta

SEQ ID NO: 46414 - DNA, 25 bp, SARS Virus
gtgttgacttcgaaagctcttctac

SEQ ID NO: 46415 - DNA, 25 bp, SARS Virus
tgttgacttcgaaagctcttctacc

SEQ ID NO: 46416 - DNA, 25 bp, SARS Virus
gttgacttcgaaagctcttctacca

SEQ ID NO: 46417 - DNA, 25 bp, SARS Virus
ttgacttcgaaaactcttctaccaa

SEQ ID NO: 46418 - DNA, 25 bp, SARS Virus
tgacttcgaaagatcttctaccaaa

SEQ ID NO: 46419 - DNA, 25 bp, SARS Virus
gacttcgaaagcacttctaccaaag

SEQ ID NO: 46420 - DNA, 25 bp, SARS Virus
acttcgaaagctattctaccaaaga

SEQ ID NO: 46421 - DNA, 25 bp, SARS Virus
cttcgaaagctcatctaccaaagag

SEQ ID NO: 46422 - DNA, 25 bp, SARS Virus
ttcgaaagctctactaccaaagaga

SEQ ID NO: 46423 - DNA, 25 bp, SARS Virus
tcgaaagctcttataccaaagagaa

SEQ ID NO: 46424 - DNA, 25 bp, SARS Virus
cgaaagctcttcaaccaaagagaaa

SEQ ID NO: 46425 - DNA, 25 bp, SARS Virus
gaaagctcttctaccaaagagaaaa

SEQ ID NO: 46426 - DNA, 25 bp, SARS Virus
aaagctcttctaacaaagagaaaac

SEQ ID NO: 46427 - DNA, 25 bp, SARS Virus
aagctcttctacaaaagagaaaaca

SEQ ID NO: 46428 - DNA, 25 bp, SARS Virus
agctcttctaccaaagagaaaacag

SEQ ID NO: 46429 - DNA, 25 bp, SARS Virus
gctcttctaccaaagagaaaacaga

SEQ ID NO: 46430 - DNA, 25 bp, SARS Virus
ctcttctaccaaagagaaaacagac

SEQ ID NO: 46431 - DNA, 25 bp, SARS Virus
tcttctaccaaaaagaaaacagaca

SEQ ID NO: 46432 - DNA, 25 bp, SARS Virus
cttctaccaaagagaaaacagacaa

SEQ ID NO: 46433 - DNA, 25 bp, SARS Virus
ttctaccaaagaaaaaacagacaaa

SEQ ID NO: 46434 - DNA, 25 bp, SARS Virus
tctaccaaagagaaaacagacaaaa

SEQ ID NO: 46435 - DNA, 25 bp, SARS Virus
ctaccaaagagaaaacagacaaaac

SEQ ID NO: 46436 - DNA, 25 bp, SARS Virus
taccaaagagaaaacagacaaaacg

SEQ ID NO: 46437 - DNA, 25 bp, SARS Virus
accaaagagaaaacagacaaaacga

SEQ ID NO: 46438 - DNA, 25 bp, SARS Virus
ccaaagagaaaaaagacaaaacgat

SEQ ID NO: 46439 - DNA, 25 bp, SARS Virus
caaagagaaaacagacaaaacgata

SEQ ID NO: 46440 - DNA, 25 bp, SARS Virus
aaagagaaaacaaacaaaacgatag

SEQ ID NO: 46441 - DNA, 25 bp, SARS Virus
aagagaaaacagacaaaacgatagg

SEQ ID NO: 46442 - DNA, 25 bp, SARS Virus
agagaaaacagaaaaaacgataggt

SEQ ID NO: 46443 - DNA, 25 bp, SARS Virus
gagaaaacagacaaaacgataggta

SEQ ID NO: 46444 - DNA, 25 bp, SARS Virus
agaaaacagacaaaacgataggtac

SEQ ID NO: 46445 - DNA, 25 bp, SARS Virus
gaaaacagacaaaacgataggtacg

SEQ ID NO: 46446 - DNA, 25 bp, SARS Virus
aaaacagacaaaacgataggtacgt

SEQ ID NO: 46447 - DNA, 25 bp, SARS Virus
aaacagacaaaaagataggtacgtc

SEQ ID NO: 46448 - DNA, 25 bp, SARS Virus
aacagacaaaacaataggtacgtcc

SEQ ID NO: 46449 - DNA, 25 bp, SARS Virus
acagacaaaacgataggtacgtccc

SEQ ID NO: 46450 - DNA, 25 bp, SARS Virus
cagacaaaacgaaaggtacgtccca

SEQ ID NO: 46451 - DNA, 25 bp, SARS Virus
agacaaaacgataggtacgtcccac

SEQ ID NO: 46452 - DNA, 25 bp, SARS Virus
gacaaaacgataagtacgtcccacg

SEQ ID NO: 46453 - DNA, 25 bp, SARS Virus
acaaaacgatagatacgtcccacga

SEQ ID NO: 46454 - DNA, 25 bp, SARS Virus
caaaacgataggaacgtcccacgac

SEQ ID NO: 46455 - DNA, 25 bp, SARS Virus
aaaacgataggtacgtcccacgaca

SEQ ID NO: 46456 - DNA, 25 bp, SARS Virus
aaacgataggtaagtcccacgacat

SEQ ID NO: 46457 - DNA, 25 bp, SARS Virus
aacgataggtacatcccacgacatc

SEQ ID NO: 46458 - DNA, 25 bp, SARS Virus
acgataggtacgacccacgacatct

SEQ ID NO: 46459 - DNA, 25 bp, SARS Virus
cgataggtacgtaccacgacatctg

SEQ ID NO: 46460 - DNA, 25 bp, SARS Virus
gataggtacgtcacacgacatctgt

SEQ ID NO: 46461 - DNA, 25 bp, SARS Virus
ataggtacgtccaacgacatctgta

SEQ ID NO: 46462 - DNA, 25 bp, SARS Virus
taggtacgtcccacgacatctgtaa

SEQ ID NO: 46463 - DNA, 25 bp, SARS Virus
aggtacgtcccaagacatctgtaat

SEQ ID NO: 46464 - DNA, 25 bp, SARS Virus
ggtacgtcccacaacatctgtaatt

SEQ ID NO: 46465 - DNA, 25 bp, SARS Virus
gtacgtcccacgacatctgtaatta

SEQ ID NO: 46466 - DNA, 25 bp, SARS Virus
tacgtcccacgaaatctgtaattat

SEQ ID NO: 46467 - DNA, 25 bp, SARS Virus
acgtcccacgacatctgtaattatc

SEQ ID NO: 46468 - DNA, 25 bp, SARS Virus
cgtcccacgacaactgtaattatcc

SEQ ID NO: 46469 - DNA, 25 bp, SARS Virus
gtcccacgacatatgtaattatcca

SEQ ID NO: 46470 - DNA, 25 bp, SARS Virus
tcccacgacatcagtaattatccaa

SEQ ID NO: 46471 - DNA, 25 bp, SARS Virus
cccacgacatctataattatccaac

SEQ ID NO: 46472 - DNA, 25 bp, SARS Virus
ccacgacatctgaaattatccaaca

SEQ ID NO: 46473 - DNA, 25 bp, SARS Virus
cacgacatctgtaattatccaacac

SEQ ID NO: 46474 - DNA, 25 bp, SARS Virus
acgacatctgtaattatccaacacg

SEQ ID NO: 46475 - DNA, 25 bp, SARS Virus
cgacatctgtaaatatccaacacgc

SEQ ID NO: 46476 - DNA, 25 bp, SARS Virus
gacatctgtaataatccaacacgct

SEQ ID NO: 46477 - DNA, 25 bp, SARS Virus
acatctgtaattatccaacacgctc

SEQ ID NO: 46478 - DNA, 25 bp, SARS Virus
catctgtaattaaccaacacgctcc

SEQ ID NO: 46479 - DNA, 25 bp, SARS Virus
atctgtaattatacaacacgctcct

SEQ ID NO: 46480 - DNA, 25 bp, SARS Virus
tctgtaattatcaaacacgctcctt

SEQ ID NO: 46481 - DNA, 25 bp, SARS Virus
ctgtaattatccaacacgctccttt

SEQ ID NO: 46482 - DNA, 25 bp, SARS Virus
tgtaattatccaacacgctccttta

SEQ ID NO: 46483 - DNA, 25 bp, SARS Virus
gtaattatccaaaacgctcctttac

SEQ ID NO: 46484 - DNA, 25 bp, SARS Virus
taattatccaacacgctcctttacg

SEQ ID NO: 46485 - DNA, 25 bp, SARS Virus
aattatccaacaagctcctttacga

SEQ ID NO: 46486 - DNA, 25 bp, SARS Virus
attatccaacacactcctttacgag

SEQ ID NO: 46487 - DNA, 25 bp, SARS Virus
ttatccaacacgatcctttacgagc

SEQ ID NO: 46488 - DNA, 25 bp, SARS Virus
tatccaacacgcacctttacgagct

SEQ ID NO: 46489 - DNA, 25 bp, SARS Virus
atgggtaacaatcaataatgaccgt

SEQ ID NO: 46490 - DNA, 25 bp, SARS Virus
tgggtaacaatacataatgaccgtt

SEQ ID NO: 46491 - DNA, 25 bp, SARS Virus
gggtaacaataactaatgaccgttg

SEQ ID NO: 46492 - DNA, 25 bp, SARS Virus
ggtaacaataaacaatgaccgttgt

SEQ ID NO: 46493 - DNA, 25 bp, SARS Virus
gtaacaataaatcatgaccgttgtg

SEQ ID NO: 46494 - DNA, 25 bp, SARS Virus
taacaataaatactgaccgttgtgg

SEQ ID NO: 46495 - DNA, 25 bp, SARS Virus
aacaataaataacgaccgttgtgga

SEQ ID NO: 46496 - DNA, 25 bp, SARS Virus
acaataaataatcaccgttgtggaa

SEQ ID NO: 46497 - DNA, 25 bp, SARS Virus
caataaataatgcccgttgtggaat

SEQ ID NO: 46498 - DNA, 25 bp, SARS Virus
aataaataatgaccgttgtggaatg

SEQ ID NO: 46499 - DNA, 25 bp, SARS Virus
ataaataatgaccgttgtggaatgt

SEQ ID NO: 46500 - DNA, 25 bp, SARS Virus
taaataatgacccttgtggaatgtc

SEQ ID NO: 46501 - DNA, 25 bp, SARS Virus
aaataatgaccgctgtggaatgtca

SEQ ID NO: 46502 - DNA, 25 bp, SARS Virus
aataatgaccgtcgtggaatgtcac

SEQ ID NO: 46503 - DNA, 25 bp, SARS Virus
ataatgaccgttctggaatgtcaca

SEQ ID NO: 46504 - DNA, 25 bp, SARS Virus
taatgaccgttgcggaatgtcacat

SEQ ID NO: 46505 - DNA, 25 bp, SARS Virus
aatgaccgttgtcgaatgtcacata

SEQ ID NO: 46506 - DNA, 25 bp, SARS Virus
atgaccgttgtgcaatgtcacatag

SEQ ID NO: 46507 - DNA, 25 bp, SARS Virus
tgaccgttgtggcatgtcacatagt

SEQ ID NO: 46508 - DNA, 25 bp, SARS Virus
gaccgttgtggactgtcacatagta

SEQ ID NO: 46509 - DNA, 25 bp, SARS Virus
accgttgtggaacgtcacatagtac

SEQ ID NO: 46510 - DNA, 25 bp, SARS Virus
ccgttgtggaatctcacatagtacg

SEQ ID NO: 46511 - DNA, 25 bp, SARS Virus
cgttgtggaatgccacatagtacga

SEQ ID NO: 46512 - DNA, 25 bp, SARS Virus
gttgtggaatgtcacatagtacgaa

SEQ ID NO: 46513 - DNA, 25 bp, SARS Virus
ttgtggaatgtcccatagtacgaac

SEQ ID NO: 46514 - DNA, 25 bp, SARS Virus
tgtggaatgtcacatagtacgaaca

SEQ ID NO: 46515 - DNA, 25 bp, SARS Virus
gtggaatgtcacctagtacgaacaa

SEQ ID NO: 46516 - DNA, 25 bp, SARS Virus
tggaatgtcacacagtacgaacaaa

SEQ ID NO: 46517 - DNA, 25 bp, SARS Virus
ggaatgtcacatcgtacgaacaaat

SEQ ID NO: 46518 - DNA, 25 bp, SARS Virus
gaatgtcacatactacgaacaaata

SEQ ID NO: 46519 - DNA, 25 bp, SARS Virus
aatgtcacatagcacgaacaaataa

SEQ ID NO: 46520 - DNA, 25 bp, SARS Virus
atgtcacatagtccgaacaaataac

SEQ ID NO: 46521 - DNA, 25 bp, SARS Virus
tgtcacatagtacgaacaaataaca

SEQ ID NO: 46522 - DNA, 25 bp, SARS Virus
gtcacatagtaccaacaaataacaa

SEQ ID NO: 46523 - DNA, 25 bp, SARS Virus
tcacatagtacgcacaaataacaaa

SEQ ID NO: 46524 - DNA, 25 bp, SARS Virus
cacatagtacgaccaaataacaaag

SEQ ID NO: 46525 - DNA, 25 bp, SARS Virus
acatagtacgaacaaataacaaaga

SEQ ID NO: 46526 - DNA, 25 bp, SARS Virus
catagtacgaaccaataacaaagaa

SEQ ID NO: 46527 - DNA, 25 bp, SARS Virus
atagtacgaacacataacaaagaat

SEQ ID NO: 46528 - DNA, 25 bp, SARS Virus
tagtacgaacaactaacaaagaatc

SEQ ID NO: 46529 - DNA, 25 bp, SARS Virus
agtacgaacaaacaacaaagaatcc

SEQ ID NO: 46530 - DNA, 25 bp, SARS Virus
gtacgaacaaatcacaaagaatccg

SEQ ID NO: 46531 - DNA, 25 bp, SARS Virus
tacgaacaaataccaaagaatccga

SEQ ID NO: 46532 - DNA, 25 bp, SARS Virus
acgaacaaataacaaagaatccgat

SEQ ID NO: 46533 - DNA, 25 bp, SARS Virus
cgaacaaataaccaagaatccgata

SEQ ID NO: 46534 - DNA, 25 bp, SARS Virus
gaacaaataacacagaatccgataa

SEQ ID NO: 46535 - DNA, 25 bp, SARS Virus
aacaaataacaacgaatccgataac

SEQ ID NO: 46536 - DNA, 25 bp, SARS Virus
acaaataacaaacaatccgataaca

SEQ ID NO: 46537 - DNA, 25 bp, SARS Virus
caaataacaaagcatccgataacaa

SEQ ID NO: 46538 - DNA, 25 bp, SARS Virus
aaataacaaagactccgataacaac

SEQ ID NO: 46539 - DNA, 25 bp, SARS Virus
aataacaaagaacccgataacaacg

SEQ ID NO: 46540 - DNA, 25 bp, SARS Virus
ataacaaagaatccgataacaacga

SEQ ID NO: 46541 - DNA, 25 bp, SARS Virus
taacaaagaatccgataacaacgac

SEQ ID NO: 46542 - DNA, 25 bp, SARS Virus
aacaaagaatcccataacaacgacg

SEQ ID NO: 46543 - DNA, 25 bp, SARS Virus
acaaagaatccgctaacaacgacga

SEQ ID NO: 46544 - DNA, 25 bp, SARS Virus
caaagaatccgacaacaacgacgac

SEQ ID NO: 46545 - DNA, 25 bp, SARS Virus
aaagaatccgatcacaacgacgacg

SEQ ID NO: 46546 - DNA, 25 bp, SARS Virus
aagaatccgataccaacgacgacga

SEQ ID NO: 46547 - DNA, 25 bp, SARS Virus
agaatccgataacaacgacgacgat

SEQ ID NO: 46548 - DNA, 25 bp, SARS Virus
gaatccgataaccacgacgacgatg

SEQ ID NO: 46549 - DNA, 25 bp, SARS Virus
aatccgataacaccgacgacgatga

SEQ ID NO: 46550 - DNA, 25 bp, SARS Virus
atccgataacaacgacgacgatgaa

SEQ ID NO: 46551 - DNA, 25 bp, SARS Virus
tccgataacaaccacgacgatgaaa

SEQ ID NO: 46552 - DNA, 25 bp, SARS Virus
ccgataacaacgccgacgatgaaac

SEQ ID NO: 46553 - DNA, 25 bp, SARS Virus
cgataacaacgacgacgatgaaacc

SEQ ID NO: 46554 - DNA, 25 bp, SARS Virus
gataacaacgaccacgatgaaaccg

SEQ ID NO: 46555 - DNA, 25 bp, SARS Virus
ataacaacgacgccgatgaaaccgg

SEQ ID NO: 46556 - DNA, 25 bp, SARS Virus
taacaacgacgacgatgaaaccgga

SEQ ID NO: 46557 - DNA, 25 bp, SARS Virus
aacaacgacgaccatgaaaccggaa

SEQ ID NO: 46558 - DNA, 25 bp, SARS Virus
acaacgacgacgctgaaaccggaaa

SEQ ID NO: 46559 - DNA, 25 bp, SARS Virus
caacgacgacgacgaaaccggaaaa

SEQ ID NO: 46560 - DNA, 25 bp, SARS Virus
aacgacgacgatcaaaccggaaaag

SEQ ID NO: 46561 - DNA, 25 bp, SARS Virus
acgacgacgatgcaaccggaaaaga

SEQ ID NO: 46562 - DNA, 25 bp, SARS Virus
cgacgacgatgacaccggaaaagac

SEQ ID NO: 46563 - DNA, 25 bp, SARS Virus
gacgacgatgaacccggaaaagaca

SEQ ID NO: 46564 - DNA, 25 bp, SARS Virus
acgacgatgaaaccggaaaagacaa

SEQ ID NO: 46565 - DNA, 25 bp, SARS Virus
cgacgatgaaaccggaaaagacaaa

SEQ ID NO: 46566 - DNA, 25 bp, SARS Virus
gacgatgaaacccgaaaagacaaat

SEQ ID NO: 46567 - DNA, 25 bp, SARS Virus
acgatgaaaccgcaaaagacaaatg

SEQ ID NO: 46568 - DNA, 25 bp, SARS Virus
cgatgaaaccggcaaagacaaatga

SEQ ID NO: 46569 - DNA, 25 bp, SARS Virus
gatgaaaccggacaagacaaatgag

SEQ ID NO: 46570 - DNA, 25 bp, SARS Virus
atgaaaccggaacagacaaatgagt

SEQ ID NO: 46571 - DNA, 25 bp, SARS Virus
tgaaaccggaaacgacaaatgagtt

SEQ ID NO: 46572 - DNA, 25 bp, SARS Virus
gaaaccggaaaacacaaatgagttg

SEQ ID NO: 46573 - DNA, 25 bp, SARS Virus
aaaccggaaaagccaaatgagttgg

SEQ ID NO: 46574 - DNA, 25 bp, SARS Virus
aaccggaaaagacaaatgagttggc

SEQ ID NO: 46575 - DNA, 25 bp, SARS Virus
accggaaaagaccaatgagttggca

SEQ ID NO: 46576 - DNA, 25 bp, SARS Virus
ccggaaaagacacatgagttggcaa

SEQ ID NO: 46577 - DNA, 25 bp, SARS Virus
cggaaaagacaactgagttggcaat

SEQ ID NO: 46578 - DNA, 25 bp, SARS Virus
ggaaaagacaaacgagttggcaatg

SEQ ID NO: 46579 - DNA, 25 bp, SARS Virus
gaaaagacaaatcagttggcaatga

SEQ ID NO: 46580 - DNA, 25 bp, SARS Virus
aaaagacaaatgcgttggcaatgaa

SEQ ID NO: 46581 - DNA, 25 bp, SARS Virus
aaagacaaatgacttggcaatgaag

SEQ ID NO: 46582 - DNA, 25 bp, SARS Virus
aagacaaatgagctggcaatgaagt

SEQ ID NO: 46583 - DNA, 25 bp, SARS Virus
agacaaatgagtcggcaatgaagtc

SEQ ID NO: 46584 - DNA, 25 bp, SARS Virus
gacaaatgagttcgcaatgaagtcc

SEQ ID NO: 46585 - DNA, 25 bp, SARS Virus
acaaatgagttgccaatgaagtccg

SEQ ID NO: 46586 - DNA, 25 bp, SARS Virus
caaatgagttggcaatgaagtccga

SEQ ID NO: 46587 - DNA, 25 bp, SARS Virus
aaatgagttggccatgaagtccgaa

SEQ ID NO: 46588 - DNA, 25 bp, SARS Virus
aatgagttggcactgaagtccgaat

SEQ ID NO: 46589 - DNA, 25 bp, SARS Virus
atgagttggcaacgaagtccgaatg

SEQ ID NO: 46590 - DNA, 25 bp, SARS Virus
tgagttggcaatcaagtccgaatga

SEQ ID NO: 46591 - DNA, 25 bp, SARS Virus
gagttggcaatgcagtccgaatgag

SEQ ID NO: 46592 - DNA, 25 bp, SARS Virus
agttggcaatgacgtccgaatgaga

SEQ ID NO: 46593 - DNA, 25 bp, SARS Virus
gttggcaatgaactccgaatgagaa

SEQ ID NO: 46594 - DNA, 25 bp, SARS Virus
ttggcaatgaagcccgaatgagaac

SEQ ID NO: 46595 - DNA, 25 bp, SARS Virus
tggcaatgaagtccgaatgagaacc

SEQ ID NO: 46596 - DNA, 25 bp, SARS Virus
ggcaatgaagtccgaatgagaacca

SEQ ID NO: 46597 - DNA, 25 bp, SARS Virus
gcaatgaagtcccaatgagaaccac

SEQ ID NO: 46598 - DNA, 25 bp, SARS Virus
caatgaagtccgcatgagaaccaca

SEQ ID NO: 46599 - DNA, 25 bp, SARS Virus
aatgaagtccgactgagaaccacaa

SEQ ID NO: 46600 - DNA, 25 bp, SARS Virus
atgaagtccgaacgagaaccacaaa

SEQ ID NO: 46601 - DNA, 25 bp, SARS Virus
tgaagtccgaatcagaaccacaaat

SEQ ID NO: 46602 - DNA, 25 bp, SARS Virus
gaagtccgaatgcgaaccacaaata

SEQ ID NO: 46603 - DNA, 25 bp, SARS Virus
aagtccgaatgacaaccacaaatac

SEQ ID NO: 46604 - DNA, 25 bp, SARS Virus
agtccgaatgagcaccacaaatact

SEQ ID NO: 46605 - DNA, 25 bp, SARS Virus
gtccgaatgagacccacaaatactg

SEQ ID NO: 46606 - DNA, 25 bp, SARS Virus
tccgaatgagaaccacaaatactga

SEQ ID NO: 46607 - DNA, 25 bp, SARS Virus
ccgaatgagaaccacaaatactgat

SEQ ID NO: 46608 - DNA, 25 bp, SARS Virus
cgaatgagaaccccaaatactgatg

SEQ ID NO: 46609 - DNA, 25 bp, SARS Virus
gaatgagaaccacaaatactgatga

SEQ ID NO: 46610 - DNA, 25 bp, SARS Virus
aatgagaaccaccaatactgatgaa

SEQ ID NO: 46611 - DNA, 25 bp, SARS Virus
atgagaaccacacatactgatgaac

SEQ ID NO: 46612 - DNA, 25 bp, SARS Virus
tgagaaccacaactactgatgaacc

SEQ ID NO: 46613 - DNA, 25 bp, SARS Virus
gagaaccacaaacactgatgaacca

SEQ ID NO: 46614 - DNA, 25 bp, SARS Virus
agaaccacaaatcctgatgaaccag

SEQ ID NO: 46615 - DNA, 25 bp, SARS Virus
gaaccacaaatactgatgaaccaga

SEQ ID NO: 46616 - DNA, 25 bp, SARS Virus
aaccacaaataccgatgaaccagag

SEQ ID NO: 46617 - DNA, 25 bp, SARS Virus
accacaaatactcatgaaccagaga

SEQ ID NO: 46618 - DNA, 25 bp, SARS Virus
ccacaaatactgctgaaccagagat

SEQ ID NO: 46619 - DNA, 25 bp, SARS Virus
cacaaatactgacgaaccagagatg

SEQ ID NO: 46620 - DNA, 25 bp, SARS Virus
acaaatactgatcaaccagagatgt

SEQ ID NO: 46621 - DNA, 25 bp, SARS Virus
caaatactgatgcaccagagatgtg

SEQ ID NO: 46622 - DNA, 25 bp, SARS Virus
aaatactgatgacccagagatgtgt

SEQ ID NO: 46623 - DNA, 25 bp, SARS Virus
aatactgatgaaccagagatgtgtt

SEQ ID NO: 46624 - DNA, 25 bp, SARS Virus
atactgatgaaccagagatgtgttc

SEQ ID NO: 46625 - DNA, 25 bp, SARS Virus
tactgatgaacccgagatgtgttct

SEQ ID NO: 46626 - DNA, 25 bp, SARS Virus
actgatgaaccacagatgtgttctt

SEQ ID NO: 46627 - DNA, 25 bp, SARS Virus
ctgatgaaccagcgatgtgttctta

SEQ ID NO: 46628 - DNA, 25 bp, SARS Virus
tgatgaaccagacatgtgttcttaa

SEQ ID NO: 46629 - DNA, 25 bp, SARS Virus
gatgaaccagagctgtgttcttaaa

SEQ ID NO: 46630 - DNA, 25 bp, SARS Virus
atgaaccagagacgtgttcttaaat

SEQ ID NO: 46631 - DNA, 25 bp, SARS Virus
tgaaccagagatctgttcttaaatc

SEQ ID NO: 46632 - DNA, 25 bp, SARS Virus
gaaccagagatgcgttcttaaatcc

SEQ ID NO: 46633 - DNA, 25 bp, SARS Virus
aaccagagatgtcttcttaaatcca

SEQ ID NO: 46634 - DNA, 25 bp, SARS Virus
accagagatgtgctcttaaatccat

SEQ ID NO: 46635 - DNA, 25 bp, SARS Virus
ccagagatgtgtccttaaatccata

SEQ ID NO: 46636 - DNA, 25 bp, SARS Virus
cagagatgtgttcttaaatccatat

SEQ ID NO: 46637 - DNA, 25 bp, SARS Virus
agagatgtgttcctaaatccatata

SEQ ID NO: 46638 - DNA, 25 bp, SARS Virus
gagatgtgttctcaaatccatatac

SEQ ID NO: 46639 - DNA, 25 bp, SARS Virus
agatgtgttcttcaatccatatact

SEQ ID NO: 46640 - DNA, 25 bp, SARS Virus
gatgtgttcttacatccatatactt

SEQ ID NO: 46641 - DNA, 25 bp, SARS Virus
atgtgttcttaactccatatacttg

SEQ ID NO: 46642 - DNA, 25 bp, SARS Virus
tgtgttcttaaacccatatacttga

SEQ ID NO: 46643 - DNA, 25 bp, SARS Virus
gtgttcttaaatccatatacttgag

SEQ ID NO: 46644 - DNA, 25 bp, SARS Virus
tgttcttaaatccatatacttgagg

SEQ ID NO: 46645 - DNA, 25 bp, SARS Virus
gttcttaaatccctatacttgaggg

SEQ ID NO: 46646 - DNA, 25 bp, SARS Virus
ttcttaaatccacatacttgagggt

SEQ ID NO: 46647 - DNA, 25 bp, SARS Virus
tcttaaatccatctacttgagggtc

SEQ ID NO: 46648 - DNA, 25 bp, SARS Virus
cttaaatccatacacttgagggtcc

SEQ ID NO: 46649 - DNA, 25 bp, SARS Virus
ttaaatccatatccttgagggtccc

SEQ ID NO: 46650 - DNA, 25 bp, SARS Virus
taaatccatatacttgagggtcccc

SEQ ID NO: 46651 - DNA, 25 bp, SARS Virus
aaatccatatacctgagggtccccg

SEQ ID NO: 46652 - DNA, 25 bp, SARS Virus
aatccatatactcgagggtccccga

SEQ ID NO: 46653 - DNA, 25 bp, SARS Virus
atccatatacttcagggtccccgaa

SEQ ID NO: 46654 - DNA, 25 bp, SARS Virus
tccatatacttgcgggtccccgaaa

SEQ ID NO: 46655 - DNA, 25 bp, SARS Virus
ccatatacttgacggtccccgaaaa

SEQ ID NO: 46656 - DNA, 25 bp, SARS Virus
catatacttgagcgtccccgaaaac

SEQ ID NO: 46657 - DNA, 25 bp, SARS Virus
atatacttgaggctccccgaaaacg

SEQ ID NO: 46658 - DNA, 25 bp, SARS Virus
tatacttgagggcccccgaaaacgg

SEQ ID NO: 46659 - DNA, 25 bp, SARS Virus
atacttgagggtccccgaaaacgga

SEQ ID NO: 46660 - DNA, 25 bp, SARS Virus
tacttgagggtccccgaaaacggag

SEQ ID NO: 46661 - DNA, 25 bp, SARS Virus
acttgagggtccccgaaaacggagg

SEQ ID NO: 46662 - DNA, 25 bp, SARS Virus
cttgagggtccccgaaaacggagga

SEQ ID NO: 46663 - DNA, 25 bp, SARS Virus
ttgagggtcccccaaaacggaggat

SEQ ID NO: 46664 - DNA, 25 bp, SARS Virus
tgagggtccccgcaaacggaggatt

SEQ ID NO: 46665 - DNA, 25 bp, SARS Virus
gagggtccccgacaacggaggattc

SEQ ID NO: 46666 - DNA, 25 bp, SARS Virus
agggtccccgaacacggaggattct

SEQ ID NO: 46667 - DNA, 25 bp, SARS Virus
gggtccccgaaaccggaggattctc

SEQ ID NO: 46668 - DNA, 25 bp, SARS Virus
ggtccccgaaaacggaggattctca

SEQ ID NO: 46669 - DNA, 25 bp, SARS Virus
gtccccgaaaaccgaggattctcat

SEQ ID NO: 46670 - DNA, 25 bp, SARS Virus
tccccgaaaacgcaggattctcatc

SEQ ID NO: 46671 - DNA, 25 bp, SARS Virus
ccccgaaaacggcggattctcatca

SEQ ID NO: 46672 - DNA, 25 bp, SARS Virus
cccgaaaacggacgattctcatcat

SEQ ID NO: 46673 - DNA, 25 bp, SARS Virus
ccgaaaacggagcattctcatcata

SEQ ID NO: 46674 - DNA, 25 bp, SARS Virus
cgaaaacggaggcttctcatcataa

SEQ ID NO: 46675 - DNA, 25 bp, SARS Virus
gaaaacggaggactctcatcataac

SEQ ID NO: 46676 - DNA, 25 bp, SARS Virus
aaaacggaggatcctcatcataact

SEQ ID NO: 46677 - DNA, 25 bp, SARS Virus
aaacggaggattctcatcataacta

SEQ ID NO: 46678 - DNA, 25 bp, SARS Virus
aacggaggattcccatcataactac

SEQ ID NO: 46679 - DNA, 25 bp, SARS Virus
acggaggattctcatcataactacg

SEQ ID NO: 46680 - DNA, 25 bp, SARS Virus
cggaggattctcctcataactacga

SEQ ID NO: 46681 - DNA, 25 bp, SARS Virus
ggaggattctcaccataactacgaa

SEQ ID NO: 46682 - DNA, 25 bp, SARS Virus
gaggattctcatcataactacgaaa

SEQ ID NO: 46683 - DNA, 25 bp, SARS Virus
aggattctcatcctaactacgaaag

SEQ ID NO: 46684 - DNA, 25 bp, SARS Virus
ggattctcatcacaactacgaaagt

SEQ ID NO: 46685 - DNA, 25 bp, SARS Virus
gattctcatcatcactacgaaagtt

SEQ ID NO: 46686 - DNA, 25 bp, SARS Virus
attctcatcatacctacgaaagttc

SEQ ID NO: 46687 - DNA, 25 bp, SARS Virus
ttctcatcataactacgaaagttcg

SEQ ID NO: 46688 - DNA, 25 bp, SARS Virus
tctcatcataaccacgaaagttcga

SEQ ID NO: 46689 - DNA, 25 bp, SARS Virus
ctcatcataactccgaaagttcgaa

SEQ ID NO: 46690 - DNA, 25 bp, SARS Virus
tcatcataactacgaaagttcgaat

SEQ ID NO: 46691 - DNA, 25 bp, SARS Virus
catcataactaccaaagttcgaatt

SEQ ID NO: 46692 - DNA, 25 bp, SARS Virus
atcataactacgcaagttcgaattg

SEQ ID NO: 46693 - DNA, 25 bp, SARS Virus
tcataactacgacagttcgaattgt

SEQ ID NO: 46694 - DNA, 25 bp, SARS Virus
cataactacgaacgttcgaattgta

SEQ ID NO: 46695 - DNA, 25 bp, SARS Virus
ataactacgaaacttcgaattgtaa

SEQ ID NO: 46696 - DNA, 25 bp, SARS Virus
taactacgaaagctcgaattgtaat

SEQ ID NO: 46697 - DNA, 25 bp, SARS Virus
aactacgaaagtccgaattgtaatt

SEQ ID NO: 46698 - DNA, 25 bp, SARS Virus
actacgaaagttcgaattgtaattc

SEQ ID NO: 46699 - DNA, 25 bp, SARS Virus
ctacgaaagttccaattgtaattca

SEQ ID NO: 46700 - DNA, 25 bp, SARS Virus
tacgaaagttcgcattgtaattcaa

SEQ ID NO: 46701 - DNA, 25 bp, SARS Virus
acgaaagttcgacttgtaattcaac

SEQ ID NO: 46702 - DNA, 25 bp, SARS Virus
cgaaagttcgaactgtaattcaaca

SEQ ID NO: 46703 - DNA, 25 bp, SARS Virus
gaaagttcgaatcgtaattcaacaa

SEQ ID NO: 46704 - DNA, 25 bp, SARS Virus
aaagttcgaattctaattcaacaac

SEQ ID NO: 46705 - DNA, 25 bp, SARS Virus
aagttcgaattgcaattcaacaacc

SEQ ID NO: 46706 - DNA, 25 bp, SARS Virus
agttcgaattgtcattcaacaaccc

SEQ ID NO: 46707 - DNA, 25 bp, SARS Virus
gttcgaattgtacttcaacaaccca

SEQ ID NO: 46708 - DNA, 25 bp, SARS Virus
ttcgaattgtaactcaacaacccat

SEQ ID NO: 46709 - DNA, 25 bp, SARS Virus
tcgaattgtaatccaacaacccata

SEQ ID NO: 46710 - DNA, 25 bp, SARS Virus
cgaattgtaattcaacaacccataa

SEQ ID NO: 46711 - DNA, 25 bp, SARS Virus
gaattgtaattccacaacccataac

SEQ ID NO: 46712 - DNA, 25 bp, SARS Virus
aattgtaattcaccaacccataacc

SEQ ID NO: 46713 - DNA, 25 bp, SARS Virus
attgtaattcaacaacccataacct

SEQ ID NO: 46714 - DNA, 25 bp, SARS Virus
ttgtaattcaaccacccataacctc

SEQ ID NO: 46715 - DNA, 25 bp, SARS Virus
tgtaattcaacaccccataacctcc

SEQ ID NO: 46716 - DNA, 25 bp, SARS Virus
gtaattcaacaacccataacctcca

SEQ ID NO: 46717 - DNA, 25 bp, SARS Virus
taattcaacaacccataacctccat

SEQ ID NO: 46718 - DNA, 25 bp, SARS Virus
aattcaacaacccataacctccatt

SEQ ID NO: 46719 - DNA, 25 bp, SARS Virus
attcaacaacccctaacctccattt

SEQ ID NO: 46720 - DNA, 25 bp, SARS Virus
ttcaacaacccacaacctccatttg

SEQ ID NO: 46721 - DNA, 25 bp, SARS Virus
tcaacaacccatcacctccatttgg

SEQ ID NO: 46722 - DNA, 25 bp, SARS Virus
caacaacccataccctccatttggt

SEQ ID NO: 46723 - DNA, 25 bp, SARS Virus
aacaacccataacctccatttggta

SEQ ID NO: 46724 - DNA, 25 bp, SARS Virus
acaacccataacctccatttggtac

SEQ ID NO: 46725 - DNA, 25 bp, SARS Virus
caacccataacccccatttggtaca

SEQ ID NO: 46726 - DNA, 25 bp, SARS Virus
aacccataacctccatttggtacat

SEQ ID NO: 46727 - DNA, 25 bp, SARS Virus
acccataacctccatttggtacata

SEQ ID NO: 46728 - DNA, 25 bp, SARS Virus
cccataacctccctttggtacatag

SEQ ID NO: 46729 - DNA, 25 bp, SARS Virus
ccataacctccacttggtacatagt

SEQ ID NO: 46730 - DNA, 25 bp, SARS Virus
cataacctccatctggtacatagtt

SEQ ID NO: 46731 - DNA, 25 bp, SARS Virus
ataacctccattcggtacatagttc

SEQ ID NO: 46732 - DNA, 25 bp, SARS Virus
taacctccatttcgtacatagttcc

SEQ ID NO: 46733 - DNA, 25 bp, SARS Virus
aacctccatttgctacatagttcca

SEQ ID NO: 46734 - DNA, 25 bp, SARS Virus
acctccatttggcacatagttccaa

SEQ ID NO: 46735 - DNA, 25 bp, SARS Virus
cctccatttggtccatagttccaac

SEQ ID NO: 46736 - DNA, 25 bp, SARS Virus
ctccatttggtacatagttccaacg

SEQ ID NO: 46737 - DNA, 25 bp, SARS Virus
tccatttggtacctagttccaacga

SEQ ID NO: 46738 - DNA, 25 bp, SARS Virus
ccatttggtacacagttccaacgat

SEQ ID NO: 46739 - DNA, 25 bp, SARS Virus
catttggtacatcgttccaacgatg

SEQ ID NO: 46740 - DNA, 25 bp, SARS Virus
atttggtacatacttccaacgatga

SEQ ID NO: 46741 - DNA, 25 bp, SARS Virus
tttggtacatagctccaacgatgac

SEQ ID NO: 46742 - DNA, 25 bp, SARS Virus
ttggtacatagtcccaacgatgaca

SEQ ID NO: 46743 - DNA, 25 bp, SARS Virus
tggtacatagttccaacgatgacat

SEQ ID NO: 46744 - DNA, 25 bp, SARS Virus
ggtacatagttccaacgatgacatg

SEQ ID NO: 46745 - DNA, 25 bp, SARS Virus
gtacatagttcccacgatgacatgt

SEQ ID NO: 46746 - DNA, 25 bp, SARS Virus
tacatagttccaccgatgacatgtc

SEQ ID NO: 46747 - DNA, 25 bp, SARS Virus
acatagttccaacgatgacatgtca

SEQ ID NO: 46748 - DNA, 25 bp, SARS Virus
catagttccaaccatgacatgtcag

SEQ ID NO: 46749 - DNA, 25 bp, SARS Virus
atagttccaacgctgacatgtcaga

SEQ ID NO: 46750 - DNA, 25 bp, SARS Virus
tagttccaacgacgacatgtcagat

SEQ ID NO: 46751 - DNA, 25 bp, SARS Virus
agttccaacgatcacatgtcagatt

SEQ ID NO: 46752 - DNA, 25 bp, SARS Virus
gttccaacgatgccatgtcagattt

SEQ ID NO: 46753 - DNA, 25 bp, SARS Virus
ttccaacgatgacatgtcagatttt

SEQ ID NO: 46754 - DNA, 25 bp, SARS Virus
tccaacgatgacctgtcagatttta

SEQ ID NO: 46755 - DNA, 25 bp, SARS Virus
ccaacgatgacacgtcagattttac

SEQ ID NO: 46756 - DNA, 25 bp, SARS Virus
caacgatgacatctcagattttaca

SEQ ID NO: 46757 - DNA, 25 bp, SARS Virus
aacgatgacatgccagattttacag

SEQ ID NO: 46758 - DNA, 25 bp, SARS Virus
acgatgacatgtcagattttacaga

SEQ ID NO: 46759 - DNA, 25 bp, SARS Virus
cgatgacatgtccgattttacagac

SEQ ID NO: 46760 - DNA, 25 bp, SARS Virus
gatgacatgtcacattttacagact

SEQ ID NO: 46761 - DNA, 25 bp, SARS Virus
atgacatgtcagcttttacagactg

SEQ ID NO: 46762 - DNA, 25 bp, SARS Virus
tgacatgtcagactttacagactgc

SEQ ID NO: 46763 - DNA, 25 bp, SARS Virus
gacatgtcagatcttacagactgca

SEQ ID NO: 46764 - DNA, 25 bp, SARS Virus
acatgtcagattctacagactgcat

SEQ ID NO: 46765 - DNA, 25 bp, SARS Virus
catgtcagatttcacagactgcatt

SEQ ID NO: 46766 - DNA, 25 bp, SARS Virus
atgtcagattttccagactgcattt

SEQ ID NO: 46767 - DNA, 25 bp, SARS Virus
tgtcagattttacagactgcatttc

SEQ ID NO: 46768 - DNA, 25 bp, SARS Virus
gtcagattttaccgactgcatttca

SEQ ID NO: 46769 - DNA, 25 bp, SARS Virus
tcagattttacacactgcatttcac

SEQ ID NO: 46770 - DNA, 25 bp, SARS Virus
cagattttacagcctgcatttcacg

SEQ ID NO: 46771 - DNA, 25 bp, SARS Virus
agattttacagactgcatttcacgt

SEQ ID NO: 46772 - DNA, 25 bp, SARS Virus
gattttacagaccgcatttcacgtg

SEQ ID NO: 46773 - DNA, 25 bp, SARS Virus
attttacagactccatttcacgtgt

SEQ ID NO: 46774 - DNA, 25 bp, SARS Virus
ttttacagactgcatttcacgtgta

SEQ ID NO: 46775 - DNA, 25 bp, SARS Virus
tttacagactgcctttcacgtgtag

SEQ ID NO: 46776 - DNA, 25 bp, SARS Virus
ttacagactgcacttcacgtgtaga

SEQ ID NO: 46777 - DNA, 25 bp, SARS Virus
tacagactgcatctcacgtgtagac

SEQ ID NO: 46778 - DNA, 25 bp, SARS Virus
acagactgcattccacgtgtagaca

SEQ ID NO: 46779 - DNA, 25 bp, SARS Virus
cagactgcatttcacgtgtagacac

SEQ ID NO: 46780 - DNA, 25 bp, SARS Virus
agactgcatttcccgtgtagacacc

SEQ ID NO: 46781 - DNA, 25 bp, SARS Virus
gactgcatttcacgtgtagacacca

SEQ ID NO: 46782 - DNA, 25 bp, SARS Virus
actgcatttcacctgtagacaccat

SEQ ID NO: 46783 - DNA, 25 bp, SARS Virus
ctgcatttcacgcgtagacaccatg

SEQ ID NO: 46784 - DNA, 25 bp, SARS Virus
tgcatttcacgtctagacaccatga

SEQ ID NO: 46785 - DNA, 25 bp, SARS Virus
gcatttcacgtgcagacaccatgac

SEQ ID NO: 46786 - DNA, 25 bp, SARS Virus
catttcacgtgtcgacaccatgacg

SEQ ID NO: 46787 - DNA, 25 bp, SARS Virus
atttcacgtgtacacaccatgacga

SEQ ID NO: 46788 - DNA, 25 bp, SARS Virus
tttcacgtgtagccaccatgacgag

SEQ ID NO: 46789 - DNA, 25 bp, SARS Virus
ttcacgtgtagacaccatgacgaga

SEQ ID NO: 46790 - DNA, 25 bp, SARS Virus
tcacgtgtagaccccatgacgagag

SEQ ID NO: 46791 - DNA, 25 bp, SARS Virus
cacgtgtagacaccatgacgagagc

SEQ ID NO: 46792 - DNA, 25 bp, SARS Virus
acgtgtagacaccatgacgagagcc

SEQ ID NO: 46793 - DNA, 25 bp, SARS Virus
cgtgtagacaccctgacgagagcca

SEQ ID NO: 46794 - DNA, 25 bp, SARS Virus
gtgtagacaccacgacgagagccaa

SEQ ID NO: 46795 - DNA, 25 bp, SARS Virus
tgtagacaccatcacgagagccaag

SEQ ID NO: 46796 - DNA, 25 bp, SARS Virus
gtagacaccatgccgagagccaaga

SEQ ID NO: 46797 - DNA, 25 bp, SARS Virus
tagacaccatgacgagagccaagaa

SEQ ID NO: 46798 - DNA, 25 bp, SARS Virus
agacaccatgaccagagccaagaag

SEQ ID NO: 46799 - DNA, 25 bp, SARS Virus
gacaccatgacgcgagccaagaagt

SEQ ID NO: 46800 - DNA, 25 bp, SARS Virus
acaccatgacgacagccaagaagtt

SEQ ID NO: 46801 - DNA, 25 bp, SARS Virus
caccatgacgagcgccaagaagttg

SEQ ID NO: 46802 - DNA, 25 bp, SARS Virus
accatgacgagacccaagaagttgt

SEQ ID NO: 46803 - DNA, 25 bp, SARS Virus
ccatgacgagagccaagaagttgtt

SEQ ID NO: 46804 - DNA, 25 bp, SARS Virus
catgacgagagccaagaagttgttg

SEQ ID NO: 46805 - DNA, 25 bp, SARS Virus
atgacgagagcccagaagttgttga

SEQ ID NO: 46806 - DNA, 25 bp, SARS Virus
tgacgagagccacgaagttgttgaa

SEQ ID NO: 46807 - DNA, 25 bp, SARS Virus
gacgagagccaacaagttgttgaat

SEQ ID NO: 46808 - DNA, 25 bp, SARS Virus
acgagagccaagcagttgttgaatc

SEQ ID NO: 46809 - DNA, 25 bp, SARS Virus
cgagagccaagacgttgttgaatct

SEQ ID NO: 46810 - DNA, 25 bp, SARS Virus
gagagccaagaacttgttgaatctc

SEQ ID NO: 46811 - DNA, 25 bp, SARS Virus
agagccaagaagctgttgaatctca

SEQ ID NO: 46812 - DNA, 25 bp, SARS Virus
gagccaagaagtcgttgaatctcat

SEQ ID NO: 46813 - DNA, 25 bp, SARS Virus
agccaagaagttcttgaatctcatc

SEQ ID NO: 46814 - DNA, 25 bp, SARS Virus
gccaagaagttgctgaatctcatct

SEQ ID NO: 46815 - DNA, 25 bp, SARS Virus
ccaagaagttgtcgaatctcatctc

SEQ ID NO: 46816 - DNA, 25 bp, SARS Virus
caagaagttgttcaatctcatctca

SEQ ID NO: 46817 - DNA, 25 bp, SARS Virus
aagaagttgttgcatctcatctcag

SEQ ID NO: 46818 - DNA, 25 bp, SARS Virus
agaagttgttgactctcatctcagt

SEQ ID NO: 46819 - DNA, 25 bp, SARS Virus
gaagttgttgaacctcatctcagta

SEQ ID NO: 46820 - DNA, 25 bp, SARS Virus
aagttgttgaatctcatctcagtag

SEQ ID NO: 46821 - DNA, 25 bp, SARS Virus
agttgttgaatcccatctcagtaga

SEQ ID NO: 46822 - DNA, 25 bp, SARS Virus
gttgttgaatctcatctcagtagaa

SEQ ID NO: 46823 - DNA, 25 bp, SARS Virus
ttgttgaatctcctctcagtagaag

SEQ ID NO: 46824 - DNA, 25 bp, SARS Virus
tgttgaatctcacctcagtagaaga

SEQ ID NO: 46825 - DNA, 25 bp, SARS Virus
gttgaatctcatctcagtagaagat

SEQ ID NO: 46826 - DNA, 25 bp, SARS Virus
ttgaatctcatcccagtagaagatt

SEQ ID NO: 46827 - DNA, 25 bp, SARS Virus
tgaatctcatctcagtagaagattt

SEQ ID NO: 46828 - DNA, 25 bp, SARS Virus
gaatctcatctccgtagaagattta

SEQ ID NO: 46829 - DNA, 25 bp, SARS Virus
aatctcatctcactagaagatttaa

SEQ ID NO: 46830 - DNA, 25 bp, SARS Virus
atctcatctcagcagaagatttaac

SEQ ID NO: 46831 - DNA, 25 bp, SARS Virus
tctcatctcagtcgaagatttaaca

SEQ ID NO: 46832 - DNA, 25 bp, SARS Virus
ctcatctcagtacaagatttaacac

SEQ ID NO: 46833 - DNA, 25 bp, SARS Virus
tcatctcagtagcagatttaacacc

SEQ ID NO: 46834 - DNA, 25 bp, SARS Virus
catctcagtagacgatttaacaccc

SEQ ID NO: 46835 - DNA, 25 bp, SARS Virus
atctcagtagaacatttaacacccg

SEQ ID NO: 46836 - DNA, 25 bp, SARS Virus
tctcagtagaagctttaacacccgt

SEQ ID NO: 46837 - DNA, 25 bp, SARS Virus
ctcagtagaagacttaacacccgtg

SEQ ID NO: 46838 - DNA, 25 bp, SARS Virus
tcagtagaagatctaacacccgtgt

SEQ ID NO: 46839 - DNA, 25 bp, SARS Virus
cagtagaagattcaacacccgtgtt

SEQ ID NO: 46840 - DNA, 25 bp, SARS Virus
agtagaagatttcacacccgtgtta

SEQ ID NO: 46841 - DNA, 25 bp, SARS Virus
gtagaagatttaccacccgtgttac

SEQ ID NO: 46842 - DNA, 25 bp, SARS Virus
tagaagatttaacacccgtgttaca

SEQ ID NO: 46843 - DNA, 25 bp, SARS Virus
agaagatttaacccccgtgttacac

SEQ ID NO: 46844 - DNA, 25 bp, SARS Virus
gaagatttaacacccgtgttacaca

SEQ ID NO: 46845 - DNA, 25 bp, SARS Virus
aagatttaacacccgtgttacacat

SEQ ID NO: 46846 - DNA, 25 bp, SARS Virus
agatttaacacccgtgttacacatg

SEQ ID NO: 46847 - DNA, 25 bp, SARS Virus
gatttaacacccctgttacacatgt

SEQ ID NO: 46848 - DNA, 25 bp, SARS Virus
atttaacacccgcgttacacatgtt

SEQ ID NO: 46849 - DNA, 25 bp, SARS Virus
tttaacacccgtcttacacatgttg

SEQ ID NO: 46850 - DNA, 25 bp, SARS Virus
ttaacacccgtgctacacatgttga

SEQ ID NO: 46851 - DNA, 25 bp, SARS Virus
taacacccgtgtcacacatgttgag

SEQ ID NO: 46852 - DNA, 25 bp, SARS Virus
aacacccgtgttccacatgttgagg

SEQ ID NO: 46853 - DNA, 25 bp, SARS Virus
acacccgtgttacacatgttgaggt

SEQ ID NO: 46854 - DNA, 25 bp, SARS Virus
cacccgtgttacccatgttgaggtg

SEQ ID NO: 46855 - DNA, 25 bp, SARS Virus
acccgtgttacacatgttgaggtgt

SEQ ID NO: 46856 - DNA, 25 bp, SARS Virus
cccgtgttacacctgttgaggtgtt

SEQ ID NO: 46857 - DNA, 25 bp, SARS Virus
ccgtgttacacacgttgaggtgtta

SEQ ID NO: 46858 - DNA, 25 bp, SARS Virus
cgtgttacacatcttgaggtgttac

SEQ ID NO: 46859 - DNA, 25 bp, SARS Virus
gtgttacacatgctgaggtgttact

SEQ ID NO: 46860 - DNA, 25 bp, SARS Virus
tgttacacatgtcgaggtgttacta

SEQ ID NO: 46861 - DNA, 25 bp, SARS Virus
gttacacatgttcaggtgttactat

SEQ ID NO: 46862 - DNA, 25 bp, SARS Virus
ttacacatgttgcggtgttactata

SEQ ID NO: 46863 - DNA, 25 bp, SARS Virus
tacacatgttgacgtgttactataa

SEQ ID NO: 46864 - DNA, 25 bp, SARS Virus
acacatgttgagctgttactataag

SEQ ID NO: 46865 - DNA, 25 bp, SARS Virus
cacatgttgaggcgttactataaga

SEQ ID NO: 46866 - DNA, 25 bp, SARS Virus
acatgttgaggtcttactataagaa

SEQ ID NO: 46867 - DNA, 25 bp, SARS Virus
catgttgaggtgctactataagaag

SEQ ID NO: 46868 - DNA, 25 bp, SARS Virus
atgttgaggtgtcactataagaaga

SEQ ID NO: 46869 - DNA, 25 bp, SARS Virus
tgttgaggtgttcctataagaagaa

SEQ ID NO: 46870 - DNA, 25 bp, SARS Virus
gttgaggtgttactataagaagaac

SEQ ID NO: 46871 - DNA, 25 bp, SARS Virus
ttgaggtgttaccataagaagaacg

SEQ ID NO: 46872 - DNA, 25 bp, SARS Virus
tgaggtgttactctaagaagaacgt

SEQ ID NO: 46873 - DNA, 25 bp, SARS Virus
gaggtgttactacaagaagaacgtt

SEQ ID NO: 46874 - DNA, 25 bp, SARS Virus
aggtgttactatcagaagaacgttt

SEQ ID NO: 46875 - DNA, 25 bp, SARS Virus
ggtgttactatacgaagaacgtttt

SEQ ID NO: 46876 - DNA, 25 bp, SARS Virus
gtgttactataacaagaacgttttc

SEQ ID NO: 46877 - DNA, 25 bp, SARS Virus
tgttactataagcagaacgttttct

SEQ ID NO: 46878 - DNA, 25 bp, SARS Virus
gttactataagacgaacgttttctg

SEQ ID NO: 46879 - DNA, 25 bp, SARS Virus
ttactataagaacaacgttttctgt

SEQ ID NO: 46880 - DNA, 25 bp, SARS Virus
tactataagaagcacgttttctgtg

SEQ ID NO: 46881 - DNA, 25 bp, SARS Virus
actataagaagaccgttttctgtgt

SEQ ID NO: 46882 - DNA, 25 bp, SARS Virus
ctataagaagaacgttttctgtgtt

SEQ ID NO: 46883 - DNA, 25 bp, SARS Virus
tataagaagaaccttttctgtgttg

SEQ ID NO: 46884 - DNA, 25 bp, SARS Virus
ataagaagaacgctttctgtgttga

SEQ ID NO: 46885 - DNA, 25 bp, SARS Virus
taagaagaacgtcttctgtgttgac

SEQ ID NO: 46886 - DNA, 25 bp, SARS Virus
aagaagaacgttctctgtgttgact

SEQ ID NO: 46887 - DNA, 25 bp, SARS Virus
agaagaacgtttcctgtgttgactt

SEQ ID NO: 46888 - DNA, 25 bp, SARS Virus
gaagaacgttttctgtgttgacttc

SEQ ID NO: 46889 - DNA, 25 bp, SARS Virus
aagaacgttttccgtgttgacttcg

SEQ ID NO: 46890 - DNA, 25 bp, SARS Virus
agaacgttttctctgttgacttcga

SEQ ID NO: 46891 - DNA, 25 bp, SARS Virus
gaacgttttctgcgttgacttcgaa

SEQ ID NO: 46892 - DNA, 25 bp, SARS Virus
aacgttttctgtcttgacttcgaaa

SEQ ID NO: 46893 - DNA, 25 bp, SARS Virus
acgttttctgtgctgacttcgaaag

SEQ ID NO: 46894 - DNA, 25 bp, SARS Virus
cgttttctgtgtcgacttcgaaagc

SEQ ID NO: 46895 - DNA, 25 bp, SARS Virus
gttttctgtgttcacttcgaaagct

SEQ ID NO: 46896 - DNA, 25 bp, SARS Virus
ttttctgtgttgccttcgaaagctc

SEQ ID NO: 46897 - DNA, 25 bp, SARS Virus
tttctgtgttgacttcgaaagctct

SEQ ID NO: 46898 - DNA, 25 bp, SARS Virus
ttctgtgttgacctcgaaagctctt

SEQ ID NO: 46899 - DNA, 25 bp, SARS Virus
tctgtgttgactccgaaagctcttc

SEQ ID NO: 46900 - DNA, 25 bp, SARS Virus
ctgtgttgacttcgaaagctcttct

SEQ ID NO: 46901 - DNA, 25 bp, SARS Virus
tgtgttgacttccaaagctcttcta

SEQ ID NO: 46902 - DNA, 25 bp, SARS Virus
gtgttgacttcgcaagctcttctac

SEQ ID NO: 46903 - DNA, 25 bp, SARS Virus
tgttgacttcgacagctcttctacc

SEQ ID NO: 46904 - DNA, 25 bp, SARS Virus
gttgacttcgaacgctcttctacca

SEQ ID NO: 46905 - DNA, 25 bp, SARS Virus
ttgacttcgaaacctcttctaccaa

SEQ ID NO: 46906 - DNA, 25 bp, SARS Virus
tgacttcgaaagctcttctaccaaa

SEQ ID NO: 46907 - DNA, 25 bp, SARS Virus
gacttcgaaagcccttctaccaaag

SEQ ID NO: 46908 - DNA, 25 bp, SARS Virus
acttcgaaagctcttctaccaaaga

SEQ ID NO: 46909 - DNA, 25 bp, SARS Virus
cttcgaaagctcctctaccaaagag

SEQ ID NO: 46910 - DNA, 25 bp, SARS Virus
ttcgaaagctctcctaccaaagaga

SEQ ID NO: 46911 - DNA, 25 bp, SARS Virus
tcgaaagctcttctaccaaagagaa

SEQ ID NO: 46912 - DNA, 25 bp, SARS Virus
cgaaagctcttccaccaaagagaaa

SEQ ID NO: 46913 - DNA, 25 bp, SARS Virus
gaaagctcttctcccaaagagaaaa

SEQ ID NO: 46914 - DNA, 25 bp, SARS Virus
aaagctcttctaccaaagagaaaac

SEQ ID NO: 46915 - DNA, 25 bp, SARS Virus
aagctcttctaccaaagagaaaaca

SEQ ID NO: 46916 - DNA, 25 bp, SARS Virus
agctcttctacccaagagaaaacag

SEQ ID NO: 46917 - DNA, 25 bp, SARS Virus
gctcttctaccacagagaaaacaga

SEQ ID NO: 46918 - DNA, 25 bp, SARS Virus
ctcttctaccaacgagaaaacagac

SEQ ID NO: 46919 - DNA, 25 bp, SARS Virus
tcttctaccaaacagaaaacagaca

SEQ ID NO: 46920 - DNA, 25 bp, SARS Virus
cttctaccaaagcgaaaacagacaa

SEQ ID NO: 46921 - DNA, 25 bp, SARS Virus
ttctaccaaagacaaaacagacaaa

SEQ ID NO: 46922 - DNA, 25 bp, SARS Virus
tctaccaaagagcaaacagacaaaa

SEQ ID NO: 46923 - DNA, 25 bp, SARS Virus
ctaccaaagagacaacagacaaaac

SEQ ID NO: 46924 - DNA, 25 bp, SARS Virus
taccaaagagaacacagacaaaacg

SEQ ID NO: 46925 - DNA, 25 bp, SARS Virus
accaaagagaaaccagacaaaacga

SEQ ID NO: 46926 - DNA, 25 bp, SARS Virus
ccaaagagaaaacagacaaaacgat

SEQ ID NO: 46927 - DNA, 25 bp, SARS Virus
caaagagaaaaccgacaaaacgata

SEQ ID NO: 46928 - DNA, 25 bp, SARS Virus
aaagagaaaacacacaaaacgatag

SEQ ID NO: 46929 - DNA, 25 bp, SARS Virus
aagagaaaacagccaaaacgatagg

SEQ ID NO: 46930 - DNA, 25 bp, SARS Virus
agagaaaacagacaaaacgataggt

SEQ ID NO: 46931 - DNA, 25 bp, SARS Virus
gagaaaacagaccaaacgataggta

SEQ ID NO: 46932 - DNA, 25 bp, SARS Virus
agaaaacagacacaacgataggtac

SEQ ID NO: 46933 - DNA, 25 bp, SARS Virus
gaaaacagacaacacgataggtacg

SEQ ID NO: 46934 - DNA, 25 bp, SARS Virus
aaaacagacaaaccgataggtacgt

SEQ ID NO: 46935 - DNA, 25 bp, SARS Virus
aaacagacaaaacgataggtacgtc

SEQ ID NO: 46936 - DNA, 25 bp, SARS Virus
aacagacaaaaccataggtacgtcc

SEQ ID NO: 46937 - DNA, 25 bp, SARS Virus
acagacaaaacgctaggtacgtccc

SEQ ID NO: 46938 - DNA, 25 bp, SARS Virus
cagacaaaacgacaggtacgtccca

SEQ ID NO: 46939 - DNA, 25 bp, SARS Virus
agacaaaacgatcggtacgtcccac

SEQ ID NO: 46940 - DNA, 25 bp, SARS Virus
gacaaaacgatacgtacgtcccacg

SEQ ID NO: 46941 - DNA, 25 bp, SARS Virus
acaaaacgatagctacgtcccacga

SEQ ID NO: 46942 - DNA, 25 bp, SARS Virus
caaaacgataggcacgtcccacgac

SEQ ID NO: 46943 - DNA, 25 bp, SARS Virus
aaaacgataggtccgtcccacgaca

SEQ ID NO: 46944 - DNA, 25 bp, SARS Virus
aaacgataggtacgtcccacgacat

SEQ ID NO: 46945 - DNA, 25 bp, SARS Virus
aacgataggtacctcccacgacatc

SEQ ID NO: 46946 - DNA, 25 bp, SARS Virus
acgataggtacgccccacgacatct

SEQ ID NO: 46947 - DNA, 25 bp, SARS Virus
cgataggtacgtcccacgacatctg

SEQ ID NO: 46948 - DNA, 25 bp, SARS Virus
gataggtacgtcccacgacatctgt

SEQ ID NO: 46949 - DNA, 25 bp, SARS Virus
ataggtacgtcccacgacatctgta

SEQ ID NO: 46950 - DNA, 25 bp, SARS Virus
taggtacgtcccccgacatctgtaa

SEQ ID NO: 46951 - DNA, 25 bp, SARS Virus
aggtacgtcccacgacatctgtaat

SEQ ID NO: 46952 - DNA, 25 bp, SARS Virus
ggtacgtcccaccacatctgtaatt

SEQ ID NO: 46953 - DNA, 25 bp, SARS Virus
gtacgtcccacgccatctgtaatta

SEQ ID NO: 46954 - DNA, 25 bp, SARS Virus
tacgtcccacgacatctgtaattat

SEQ ID NO: 46955 - DNA, 25 bp, SARS Virus
acgtcccacgacctctgtaattatc

SEQ ID NO: 46956 - DNA, 25 bp, SARS Virus
cgtcccacgacacctgtaattatcc

SEQ ID NO: 46957 - DNA, 25 bp, SARS Virus
gtcccacgacatctgtaattatcca

SEQ ID NO: 46958 - DNA, 25 bp, SARS Virus
tcccacgacatccgtaattatccaa

SEQ ID NO: 46959 - DNA, 25 bp, SARS Virus
cccacgacatctctaattatccaac

SEQ ID NO: 46960 - DNA, 25 bp, SARS Virus
ccacgacatctgcaattatccaaca

SEQ ID NO: 46961 - DNA, 25 bp, SARS Virus
cacgacatctgtcattatccaacac

SEQ ID NO: 46962 - DNA, 25 bp, SARS Virus
acgacatctgtacttatccaacacg

SEQ ID NO: 46963 - DNA, 25 bp, SARS Virus
cgacatctgtaactatccaacacgc

SEQ ID NO: 46964 - DNA, 25 bp, SARS Virus
gacatctgtaatcatccaacacgct

SEQ ID NO: 46965 - DNA, 25 bp, SARS Virus
acatctgtaattctccaacacgctc

SEQ ID NO: 46966 - DNA, 25 bp, SARS Virus
catctgtaattacccaacacgctcc

SEQ ID NO: 46967 - DNA, 25 bp, SARS Virus
atctgtaattatccaacacgctcct

SEQ ID NO: 46968 - DNA, 25 bp, SARS Virus
tctgtaattatccaacacgctcctt

SEQ ID NO: 46969 - DNA, 25 bp, SARS Virus
ctgtaattatcccacacgctccttt

SEQ ID NO: 46970 - DNA, 25 bp, SARS Virus
tgtaattatccaccacgctccttta

SEQ ID NO: 46971 - DNA, 25 bp, SARS Virus
gtaattatccaacacgctcctttac

SEQ ID NO: 46972 - DNA, 25 bp, SARS Virus
taattatccaacccgctcctttacg

SEQ ID NO: 46973 - DNA, 25 bp, SARS Virus
aattatccaacacgctcctttacga

SEQ ID NO: 46974 - DNA, 25 bp, SARS Virus
attatccaacaccctcctttacgag

SEQ ID NO: 46975 - DNA, 25 bp, SARS Virus
ttatccaacacgctcctttacgagc

SEQ ID NO: 46976 - DNA, 25 bp, SARS Virus
tatccaacacgcccctttacgagct

SEQ ID NO: 46977 - DNA, 25 bp, SARS Virus
atgggtaacaatgaataatgaccgt

SEQ ID NO: 46978 - DNA, 25 bp, SARS Virus
tgggtaacaatagataatgaccgtt

SEQ ID NO: 46979 - DNA, 25 bp, SARS Virus
gggtaacaataagtaatgaccgttg

SEQ ID NO: 46980 - DNA, 25 bp, SARS Virus
ggtaacaataaagaatgaccgttgt

SEQ ID NO: 46981 - DNA, 25 bp, SARS Virus
gtaacaataaatgatgaccgttgtg

SEQ ID NO: 46982 - DNA, 25 bp, SARS Virus
taacaataaatagtgaccgttgtgg

SEQ ID NO: 46983 - DNA, 25 bp, SARS Virus
aacaataaataaggaccgttgtgga

SEQ ID NO: 46984 - DNA, 25 bp, SARS Virus
acaataaataatgaccgttgtggaa

SEQ ID NO: 46985 - DNA, 25 bp, SARS Virus
caataaataatggccgttgtggaat

SEQ ID NO: 46986 - DNA, 25 bp, SARS Virus
aataaataatgagcgttgtggaatg

SEQ ID NO: 46987 - DNA, 25 bp, SARS Virus
ataaataatgacggttgtggaatgt

SEQ ID NO: 46988 - DNA, 25 bp, SARS Virus
taaataatgaccgttgtggaatgtc

SEQ ID NO: 46989 - DNA, 25 bp, SARS Virus
aaataatgaccggtgtggaatgtca

SEQ ID NO: 46990 - DNA, 25 bp, SARS Virus
aataatgaccgtggtggaatgtcac

SEQ ID NO: 46991 - DNA, 25 bp, SARS Virus
ataatgaccgttgtggaatgtcaca

SEQ ID NO: 46992 - DNA, 25 bp, SARS Virus
taatgaccgttggggaatgtcacat

SEQ ID NO: 46993 - DNA, 25 bp, SARS Virus
aatgaccgttgtggaatgtcacata

SEQ ID NO: 46994 - DNA, 25 bp, SARS Virus
atgaccgttgtggaatgtcacatag

SEQ ID NO: 46995 - DNA, 25 bp, SARS Virus
tgaccgttgtgggatgtcacatagt

SEQ ID NO: 46996 - DNA, 25 bp, SARS Virus
gaccgttgtggagtgtcacatagta

SEQ ID NO: 46997 - DNA, 25 bp, SARS Virus
accgttgtggaaggtcacatagtac

SEQ ID NO: 46998 - DNA, 25 bp, SARS Virus
ccgttgtggaatgtcacatagtacg

SEQ ID NO: 46999 - DNA, 25 bp, SARS Virus
cgttgtggaatggcacatagtacga

SEQ ID NO: 47000 - DNA, 25 bp, SARS Virus
gttgtggaatgtgacatagtacgaa

SEQ ID NO: 47001 - DNA, 25 bp, SARS Virus
ttgtggaatgtcgcatagtacgaac

SEQ ID NO: 47002 - DNA, 25 bp, SARS Virus
tgtggaatgtcagatagtacgaaca

SEQ ID NO: 47003 - DNA, 25 bp, SARS Virus
gtggaatgtcacgtagtacgaacaa

SEQ ID NO: 47004 - DNA, 25 bp, SARS Virus
tggaatgtcacagagtacgaacaaa

SEQ ID NO: 47005 - DNA, 25 bp, SARS Virus
ggaatgtcacatggtacgaacaaat

SEQ ID NO: 47006 - DNA, 25 bp, SARS Virus
gaatgtcacatagtacgaacaaata

SEQ ID NO: 47007 - DNA, 25 bp, SARS Virus
aatgtcacataggacgaacaaataa

SEQ ID NO: 47008 - DNA, 25 bp, SARS Virus
atgtcacatagtgcgaacaaataac

SEQ ID NO: 47009 - DNA, 25 bp, SARS Virus
tgtcacatagtaggaacaaataaca

SEQ ID NO: 47010 - DNA, 25 bp, SARS Virus
gtcacatagtacgaacaaataacaa

SEQ ID NO: 47011 - DNA, 25 bp, SARS Virus
tcacatagtacggacaaataacaaa

SEQ ID NO: 47012 - DNA, 25 bp, SARS Virus
cacatagtacgagcaaataacaaag

SEQ ID NO: 47013 - DNA, 25 bp, SARS Virus
acatagtacgaagaaataacaaaga

SEQ ID NO: 47014 - DNA, 25 bp, SARS Virus
catagtacgaacgaataacaaagaa

SEQ ID NO: 47015 - DNA, 25 bp, SARS Virus
atagtacgaacagataacaaagaat

SEQ ID NO: 47016 - DNA, 25 bp, SARS Virus
tagtacgaacaagtaacaaagaatc

SEQ ID NO: 47017 - DNA, 25 bp, SARS Virus
agtacgaacaaagaacaaagaatcc

SEQ ID NO: 47018 - DNA, 25 bp, SARS Virus
gtacgaacaaatgacaaagaatccg

SEQ ID NO: 47019 - DNA, 25 bp, SARS Virus
tacgaacaaatagcaaagaatccga

SEQ ID NO: 47020 - DNA, 25 bp, SARS Virus
acgaacaaataagaaagaatccgat

SEQ ID NO: 47021 - DNA, 25 bp, SARS Virus
cgaacaaataacgaagaatccgata

SEQ ID NO: 47022 - DNA, 25 bp, SARS Virus
gaacaaataacagagaatccgataa

SEQ ID NO: 47023 - DNA, 25 bp, SARS Virus
aacaaataacaaggaatccgataac

SEQ ID NO: 47024 - DNA, 25 bp, SARS Virus
acaaataacaaagaatccgataaca

SEQ ID NO: 47025 - DNA, 25 bp, SARS Virus
caaataacaaaggatccgataacaa

SEQ ID NO: 47026 - DNA, 25 bp, SARS Virus
aaataacaaagagtccgataacaac

SEQ ID NO: 47027 - DNA, 25 bp, SARS Virus
aataacaaagaagccgataacaacg

SEQ ID NO: 47028 - DNA, 25 bp, SARS Virus
ataacaaagaatgcgataacaacga

SEQ ID NO: 47029 - DNA, 25 bp, SARS Virus
taacaaagaatcggataacaacgac

SEQ ID NO: 47030 - DNA, 25 bp, SARS Virus
aacaaagaatccgataacaacgacg

SEQ ID NO: 47031 - DNA, 25 bp, SARS Virus
acaaagaatccggtaacaacgacga

SEQ ID NO: 47032 - DNA, 25 bp, SARS Virus
caaagaatccgagaacaacgacgac

SEQ ID NO: 47033 - DNA, 25 bp, SARS Virus
aaagaatccgatgacaacgacgacg

SEQ ID NO: 47034 - DNA, 25 bp, SARS Virus
aagaatccgatagcaacgacgacga

SEQ ID NO: 47035 - DNA, 25 bp, SARS Virus
agaatccgataagaacgacgacgat

SEQ ID NO: 47036 - DNA, 25 bp, SARS Virus
gaatccgataacgacgacgacgatg

SEQ ID NO: 47037 - DNA, 25 bp, SARS Virus
aatccgataacagcgacgacgatga

SEQ ID NO: 47038 - DNA, 25 bp, SARS Virus
atccgataacaaggacgacgatgaa

SEQ ID NO: 47039 - DNA, 25 bp, SARS Virus
tccgataacaacgacgacgatgaaa

SEQ ID NO: 47040 - DNA, 25 bp, SARS Virus
ccgataacaacggcgacgatgaaac

SEQ ID NO: 47041 - DNA, 25 bp, SARS Virus
cgataacaacgaggacgatgaaacc

SEQ ID NO: 47042 - DNA, 25 bp, SARS Virus
gataacaacgacgacgatgaaaccg

SEQ ID NO: 47043 - DNA, 25 bp, SARS Virus
ataacaacgacggcgatgaaaccgg

SEQ ID NO: 47044 - DNA, 25 bp, SARS Virus
taacaacgacgaggatgaaaccgga

SEQ ID NO: 47045 - DNA, 25 bp, SARS Virus
aacaacgacgacgatgaaaccggaa

SEQ ID NO: 47046 - DNA, 25 bp, SARS Virus
acaacgacgacggtgaaaccggaaa

SEQ ID NO: 47047 - DNA, 25 bp, SARS Virus
caacgacgacgaggaaaccggaaaa

SEQ ID NO: 47048 - DNA, 25 bp, SARS Virus
aacgacgacgatgaaaccggaaaag

SEQ ID NO: 47049 - DNA, 25 bp, SARS Virus
acgacgacgatggaaccggaaaaga

SEQ ID NO: 47050 - DNA, 25 bp, SARS Virus
cgacgacgatgagaccggaaaagac

SEQ ID NO: 47051 - DNA, 25 bp, SARS Virus
gacgacgatgaagccggaaaagaca

SEQ ID NO: 47052 - DNA, 25 bp, SARS Virus
acgacgatgaaagcggaaaagacaa

SEQ ID NO: 47053 - DNA, 25 bp, SARS Virus
cgacgatgaaacgggaaaagacaaa

SEQ ID NO: 47054 - DNA, 25 bp, SARS Virus
gacgatgaaaccggaaaagacaaat

SEQ ID NO: 47055 - DNA, 25 bp, SARS Virus
acgatgaaaccggaaaagacaaatg

SEQ ID NO: 47056 - DNA, 25 bp, SARS Virus
cgatgaaaccgggaaagacaaatga

SEQ ID NO: 47057 - DNA, 25 bp, SARS Virus
gatgaaaccggagaagacaaatgag

SEQ ID NO: 47058 - DNA, 25 bp, SARS Virus
atgaaaccggaagagacaaatgagt

SEQ ID NO: 47059 - DNA, 25 bp, SARS Virus
tgaaaccggaaaggacaaatgagtt

SEQ ID NO: 47060 - DNA, 25 bp, SARS Virus
gaaaccggaaaagacaaatgagttg

SEQ ID NO: 47061 - DNA, 25 bp, SARS Virus
aaaccggaaaaggcaaatgagttgg

SEQ ID NO: 47062 - DNA, 25 bp, SARS Virus
aaccggaaaagagaaatgagttggc

SEQ ID NO: 47063 - DNA, 25 bp, SARS Virus
accggaaaagacgaatgagttggca

SEQ ID NO: 47064 - DNA, 25 bp, SARS Virus
ccggaaaagacagatgagttggcaa

SEQ ID NO: 47065 - DNA, 25 bp, SARS Virus
cggaaaagacaagtgagttggcaat

SEQ ID NO: 47066 - DNA, 25 bp, SARS Virus
ggaaaagacaaaggagttggcaatg

SEQ ID NO: 47067 - DNA, 25 bp, SARS Virus
gaaaagacaaatgagttggcaatga

SEQ ID NO: 47068 - DNA, 25 bp, SARS Virus
aaaagacaaatgggttggcaatgaa

SEQ ID NO: 47069 - DNA, 25 bp, SARS Virus
aaagacaaatgagttggcaatgaag

SEQ ID NO: 47070 - DNA, 25 bp, SARS Virus
aagacaaatgaggtggcaatgaagt

SEQ ID NO: 47071 - DNA, 25 bp, SARS Virus
agacaaatgagtgggcaatgaagtc

SEQ ID NO: 47072 - DNA, 25 bp, SARS Virus
gacaaatgagttggcaatgaagtcc

SEQ ID NO: 47073 - DNA, 25 bp, SARS Virus
acaaatgagttggcaatgaagtccg

SEQ ID NO: 47074 - DNA, 25 bp, SARS Virus
caaatgagttgggaatgaagtccga

SEQ ID NO: 47075 - DNA, 25 bp, SARS Virus
aaatgagttggcgatgaagtccgaa

SEQ ID NO: 47076 - DNA, 25 bp, SARS Virus
aatgagttggcagtgaagtccgaat

SEQ ID NO: 47077 - DNA, 25 bp, SARS Virus
atgagttggcaaggaagtccgaatg

SEQ ID NO: 47078 - DNA, 25 bp, SARS Virus
tgagttggcaatgaagtccgaatga

SEQ ID NO: 47079 - DNA, 25 bp, SARS Virus
gagttggcaatggagtccgaatgag

SEQ ID NO: 47080 - DNA, 25 bp, SARS Virus
agttggcaatgaggtccgaatgaga

SEQ ID NO: 47081 - DNA, 25 bp, SARS Virus
gttggcaatgaagtccgaatgagaa

SEQ ID NO: 47082 - DNA, 25 bp, SARS Virus
ttggcaatgaaggccgaatgagaac

SEQ ID NO: 47083 - DNA, 25 bp, SARS Virus
tggcaatgaagtgcgaatgagaacc

SEQ ID NO: 47084 - DNA, 25 bp, SARS Virus
ggcaatgaagtcggaatgagaacca

SEQ ID NO: 47085 - DNA, 25 bp, SARS Virus
gcaatgaagtccgaatgagaaccac

SEQ ID NO: 47086 - DNA, 25 bp, SARS Virus
caatgaagtccggatgagaaccaca

SEQ ID NO: 47087 - DNA, 25 bp, SARS Virus
aatgaagtccgagtgagaaccacaa

SEQ ID NO: 47088 - DNA, 25 bp, SARS Virus
atgaagtccgaaggagaaccacaaa

SEQ ID NO: 47089 - DNA, 25 bp, SARS Virus
tgaagtccgaatgagaaccacaaat

SEQ ID NO: 47090 - DNA, 25 bp, SARS Virus
gaagtccgaatgggaaccacaaata

SEQ ID NO: 47091 - DNA, 25 bp, SARS Virus
aagtccgaatgagaaccacaaatac

SEQ ID NO: 47092 - DNA, 25 bp, SARS Virus
agtccgaatgaggaccacaaatact

SEQ ID NO: 47093 - DNA, 25 bp, SARS Virus
gtccgaatgagagccacaaatactg

SEQ ID NO: 47094 - DNA, 25 bp, SARS Virus
tccgaatgagaagcacaaatactga

SEQ ID NO: 47095 - DNA, 25 bp, SARS Virus
ccgaatgagaacgacaaatactgat

SEQ ID NO: 47096 - DNA, 25 bp, SARS Virus
cgaatgagaaccgcaaatactgatg

SEQ ID NO: 47097 - DNA, 25 bp, SARS Virus
gaatgagaaccagaaatactgatga

SEQ ID NO: 47098 - DNA, 25 bp, SARS Virus
aatgagaaccacgaatactgatgaa

SEQ ID NO: 47099 - DNA, 25 bp, SARS Virus
atgagaaccacagatactgatgaac

SEQ ID NO: 47100 - DNA, 25 bp, SARS Virus
tgagaaccacaagtactgatgaacc

SEQ ID NO: 47101 - DNA, 25 bp, SARS Virus
gagaaccacaaagactgatgaacca

SEQ ID NO: 47102 - DNA, 25 bp, SARS Virus
agaaccacaaatgctgatgaaccag

SEQ ID NO: 47103 - DNA, 25 bp, SARS Virus
gaaccacaaatagtgatgaaccaga

SEQ ID NO: 47104 - DNA, 25 bp, SARS Virus
aaccacaaatacggatgaaccagag

SEQ ID NO: 47105 - DNA, 25 bp, SARS Virus
accacaaatactgatgaaccagaga

SEQ ID NO: 47106 - DNA, 25 bp, SARS Virus
ccacaaatactggtgaaccagagat

SEQ ID NO: 47107 - DNA, 25 bp, SARS Virus
cacaaatactgaggaaccagagatg

SEQ ID NO: 47108 - DNA, 25 bp, SARS Virus
acaaatactgatgaaccagagatgt

SEQ ID NO: 47109 - DNA, 25 bp, SARS Virus
caaatactgatggaccagagatgtg

SEQ ID NO: 47110 - DNA, 25 bp, SARS Virus
aaatactgatgagccagagatgtgt

SEQ ID NO: 47111 - DNA, 25 bp, SARS Virus
aatactgatgaagcagagatgtgtt

SEQ ID NO: 47112 - DNA, 25 bp, SARS Virus
atactgatgaacgagagatgtgttc

SEQ ID NO: 47113 - DNA, 25 bp, SARS Virus
tactgatgaaccggagatgtgttct

SEQ ID NO: 47114 - DNA, 25 bp, SARS Virus
actgatgaaccagagatgtgttctt

SEQ ID NO: 47115 - DNA, 25 bp, SARS Virus
ctgatgaaccagggatgtgttctta

SEQ ID NO: 47116 - DNA, 25 bp, SARS Virus
tgatgaaccagagatgtgttcttaa

SEQ ID NO: 47117 - DNA, 25 bp, SARS Virus
gatgaaccagaggtgtgttcttaaa

SEQ ID NO: 47118 - DNA, 25 bp, SARS Virus
atgaaccagagaggtgttcttaaat

SEQ ID NO: 47119 - DNA, 25 bp, SARS Virus
tgaaccagagatgtgttcttaaatc

SEQ ID NO: 47120 - DNA, 25 bp, SARS Virus
gaaccagagatgggttcttaaatcc

SEQ ID NO: 47121 - DNA, 25 bp, SARS Virus
aaccagagatgtgttcttaaatcca

SEQ ID NO: 47122 - DNA, 25 bp, SARS Virus
accagagatgtggtcttaaatccat

SEQ ID NO: 47123 - DNA, 25 bp, SARS Virus
ccagagatgtgtgcttaaatccata

SEQ ID NO: 47124 - DNA, 25 bp, SARS Virus
cagagatgtgttgttaaatccatat

SEQ ID NO: 47125 - DNA, 25 bp, SARS Virus
agagatgtgttcgtaaatccatata

SEQ ID NO: 47126 - DNA, 25 bp, SARS Virus
gagatgtgttctgaaatccatatac

SEQ ID NO: 47127 - DNA, 25 bp, SARS Virus
agatgtgttcttgaatccatatact

SEQ ID NO: 47128 - DNA, 25 bp, SARS Virus
gatgtgttcttagatccatatactt

SEQ ID NO: 47129 - DNA, 25 bp, SARS Virus
atgtgttcttaagtccatatacttg

SEQ ID NO: 47130 - DNA, 25 bp, SARS Virus
tgtgttcttaaagccatatacttga

SEQ ID NO: 47131 - DNA, 25 bp, SARS Virus
gtgttcttaaatgcatatacttgag

SEQ ID NO: 47132 - DNA, 25 bp, SARS Virus
tgttcttaaatcgatatacttgagg

SEQ ID NO: 47133 - DNA, 25 bp, SARS Virus
gttcttaaatccgtatacttgaggg

SEQ ID NO: 47134 - DNA, 25 bp, SARS Virus
ttcttaaatccagatacttgagggt

SEQ ID NO: 47135 - DNA, 25 bp, SARS Virus
tcttaaatccatgtacttgagggtc

SEQ ID NO: 47136 - DNA, 25 bp, SARS Virus
cttaaatccatagacttgagggtcc

SEQ ID NO: 47137 - DNA, 25 bp, SARS Virus
ttaaatccatatgcttgagggtccc

SEQ ID NO: 47138 - DNA, 25 bp, SARS Virus
taaatccatatagttgagggtcccc

SEQ ID NO: 47139 - DNA, 25 bp, SARS Virus
aaatccatatacgtgagggtccccg

SEQ ID NO: 47140 - DNA, 25 bp, SARS Virus
aatccatatactggagggtccccga

SEQ ID NO: 47141 - DNA, 25 bp, SARS Virus
atccatatacttgagggtccccgaa

SEQ ID NO: 47142 - DNA, 25 bp, SARS Virus
tccatatacttgggggtccccgaaa

SEQ ID NO: 47143 - DNA, 25 bp, SARS Virus
ccatatacttgagggtccccgaaaa

SEQ ID NO: 47144 - DNA, 25 bp, SARS Virus
catatacttgagggtccccgaaaac

SEQ ID NO: 47145 - DNA, 25 bp, SARS Virus
atatacttgagggtccccgaaaacg

SEQ ID NO: 47146 - DNA, 25 bp, SARS Virus
tatacttgaggggccccgaaaacgg

SEQ ID NO: 47147 - DNA, 25 bp, SARS Virus
atacttgagggtgcccgaaaacgga

SEQ ID NO: 47148 - DNA, 25 bp, SARS Virus
tacttgagggtcgccgaaaacggag

SEQ ID NO: 47149 - DNA, 25 bp, SARS Virus
acttgagggtccgcgaaaacggagg

SEQ ID NO: 47150 - DNA, 25 bp, SARS Virus
cttgagggtcccggaaaacggagga

SEQ ID NO: 47151 - DNA, 25 bp, SARS Virus
ttgagggtccccgaaaacggaggat

SEQ ID NO: 47152 - DNA, 25 bp, SARS Virus
tgagggtccccggaaacggaggatt

SEQ ID NO: 47153 - DNA, 25 bp, SARS Virus
gagggtccccgagaacggaggattc

SEQ ID NO: 47154 - DNA, 25 bp, SARS Virus
agggtccccgaagacggaggattct

SEQ ID NO: 47155 - DNA, 25 bp, SARS Virus
gggtccccgaaagcggaggattctc

SEQ ID NO: 47156 - DNA, 25 bp, SARS Virus
ggtccccgaaaagggaggattctca

SEQ ID NO: 47157 - DNA, 25 bp, SARS Virus
gtccccgaaaacggaggattctcat

SEQ ID NO: 47158 - DNA, 25 bp, SARS Virus
tccccgaaaacggaggattctcatc

SEQ ID NO: 47159 - DNA, 25 bp, SARS Virus
ccccgaaaacgggggattctcatca

SEQ ID NO: 47160 - DNA, 25 bp, SARS Virus
cccgaaaacggaggattctcatcat

SEQ ID NO: 47161 - DNA, 25 bp, SARS Virus
ccgaaaacggaggattctcatcata

SEQ ID NO: 47162 - DNA, 25 bp, SARS Virus
cgaaaacggagggttctcatcataa

SEQ ID NO: 47163 - DNA, 25 bp, SARS Virus
gaaaacggaggagtctcatcataac

SEQ ID NO: 47164 - DNA, 25 bp, SARS Virus
aaaacggaggatgctcatcataact

SEQ ID NO: 47165 - DNA, 25 bp, SARS Virus
aaacggaggattgtcatcataacta

SEQ ID NO: 47166 - DNA, 25 bp, SARS Virus
aacggaggattcgcatcataactac

SEQ ID NO: 47167 - DNA, 25 bp, SARS Virus
acggaggattctgatcataactacg

SEQ ID NO: 47168 - DNA, 25 bp, SARS Virus
cggaggattctcgtcataactacga

SEQ ID NO: 47169 - DNA, 25 bp, SARS Virus
ggaggattctcagcataactacgaa

SEQ ID NO: 47170 - DNA, 25 bp, SARS Virus
gaggattctcatgataactacgaaa

SEQ ID NO: 47171 - DNA, 25 bp, SARS Virus
aggattctcatcgtaactacgaaag

SEQ ID NO: 47172 - DNA, 25 bp, SARS Virus
ggattctcatcagaactacgaaagt

SEQ ID NO: 47173 - DNA, 25 bp, SARS Virus
gattctcatcatgactacgaaagtt

SEQ ID NO: 47174 - DNA, 25 bp, SARS Virus
attctcatcatagctacgaaagttc

SEQ ID NO: 47175 - DNA, 25 bp, SARS Virus
ttctcatcataagtacgaaagttcg

SEQ ID NO: 47176 - DNA, 25 bp, SARS Virus
tctcatcataacgacgaaagttcga

SEQ ID NO: 47177 - DNA, 25 bp, SARS Virus
ctcatcataactgcgaaagttcgaa

SEQ ID NO: 47178 - DNA, 25 bp, SARS Virus
tcatcataactaggaaagttcgaat

SEQ ID NO: 47179 - DNA, 25 bp, SARS Virus
catcataactacgaaagttcgaatt

SEQ ID NO: 47180 - DNA, 25 bp, SARS Virus
atcataactacggaagttcgaattg

SEQ ID NO: 47181 - DNA, 25 bp, SARS Virus
tcataactacgagagttcgaattgt

SEQ ID NO: 47182 - DNA, 25 bp, SARS Virus
cataactacgaaggttcgaattgta

SEQ ID NO: 47183 - DNA, 25 bp, SARS Virus
ataactacgaaagttcgaattgtaa

SEQ ID NO: 47184 - DNA, 25 bp, SARS Virus
taactacgaaaggtcgaattgtaat

SEQ ID NO: 47185 - DNA, 25 bp, SARS Virus
aactacgaaagtgcgaattgtaatt

SEQ ID NO: 47186 - DNA, 25 bp, SARS Virus
actacgaaagttggaattgtaattc

SEQ ID NO: 47187 - DNA, 25 bp, SARS Virus
ctacgaaagttcgaattgtaattca

SEQ ID NO: 47188 - DNA, 25 bp, SARS Virus
tacgaaagttcggattgtaattcaa

SEQ ID NO: 47189 - DNA, 25 bp, SARS Virus
acgaaagttcgagttgtaattcaac

SEQ ID NO: 47190 - DNA, 25 bp, SARS Virus
cgaaagttcgaagtgtaattcaaca

SEQ ID NO: 47191 - DNA, 25 bp, SARS Virus
gaaagttcgaatggtaattcaacaa

SEQ ID NO: 47192 - DNA, 25 bp, SARS Virus
aaagttcgaattgtaattcaacaac

SEQ ID NO: 47193 - DNA, 25 bp, SARS Virus
aagttcgaattggaattcaacaacc

SEQ ID NO: 47194 - DNA, 25 bp, SARS Virus
agttcgaattgtgattcaacaaccc

SEQ ID NO: 47195 - DNA, 25 bp, SARS Virus
gttcgaattgtagttcaacaaccca

SEQ ID NO: 47196 - DNA, 25 bp, SARS Virus
ttcgaattgtaagtcaacaacccat

SEQ ID NO: 47197 - DNA, 25 bp, SARS Virus
tcgaattgtaatgcaacaacccata

SEQ ID NO: 47198 - DNA, 25 bp, SARS Virus
cgaattgtaattgaacaacccataa

SEQ ID NO: 47199 - DNA, 25 bp, SARS Virus
gaattgtaattcgacaacccataac

SEQ ID NO: 47200 - DNA, 25 bp, SARS Virus
aattgtaattcagcaacccataacc

SEQ ID NO: 47201 - DNA, 25 bp, SARS Virus
attgtaattcaagaacccataacct

SEQ ID NO: 47202 - DNA, 25 bp, SARS Virus
ttgtaattcaacgacccataacctc

SEQ ID NO: 47203 - DNA, 25 bp, SARS Virus
tgtaattcaacagcccataacctcc

SEQ ID NO: 47204 - DNA, 25 bp, SARS Virus
gtaattcaacaagccataacctcca

SEQ ID NO: 47205 - DNA, 25 bp, SARS Virus
taattcaacaacgcataacctccat

SEQ ID NO: 47206 - DNA, 25 bp, SARS Virus
aattcaacaaccgataacctccatt

SEQ ID NO: 47207 - DNA, 25 bp, SARS Virus
attcaacaacccgtaacctccattt

SEQ ID NO: 47208 - DNA, 25 bp, SARS Virus
ttcaacaacccagaacctccatttg

SEQ ID NO: 47209 - DNA, 25 bp, SARS Virus
tcaacaacccatgacctccatttgg

SEQ ID NO: 47210 - DNA, 25 bp, SARS Virus
caacaacccatagcctccatttggt

SEQ ID NO: 47211 - DNA, 25 bp, SARS Virus
aacaacccataagctccatttggta

SEQ ID NO: 47212 - DNA, 25 bp, SARS Virus
acaacccataacgtccatttggtac

SEQ ID NO: 47213 - DNA, 25 bp, SARS Virus
caacccataaccgccatttggtaca

SEQ ID NO: 47214 - DNA, 25 bp, SARS Virus
aacccataacctgcatttggtacat

SEQ ID NO: 47215 - DNA, 25 bp, SARS Virus
acccataacctcgatttggtacata

SEQ ID NO: 47216 - DNA, 25 bp, SARS Virus
cccataacctccgtttggtacatag

SEQ ID NO: 47217 - DNA, 25 bp, SARS Virus
ccataacctccagttggtacatagt

SEQ ID NO: 47218 - DNA, 25 bp, SARS Virus
cataacctccatgtggtacatagtt

SEQ ID NO: 47219 - DNA, 25 bp, SARS Virus
ataacctccattgggtacatagttc

SEQ ID NO: 47220 - DNA, 25 bp, SARS Virus
taacctccatttggtacatagttcc

SEQ ID NO: 47221 - DNA, 25 bp, SARS Virus
aacctccatttggtacatagttcca

SEQ ID NO: 47222 - DNA, 25 bp, SARS Virus
acctccatttgggacatagttccaa

SEQ ID NO: 47223 - DNA, 25 bp, SARS Virus
cctccatttggtgcatagttccaac

SEQ ID NO: 47224 - DNA, 25 bp, SARS Virus
ctccatttggtagatagttccaacg

SEQ ID NO: 47225 - DNA, 25 bp, SARS Virus
tccatttggtacgtagttccaacga

SEQ ID NO: 47226 - DNA, 25 bp, SARS Virus
ccatttggtacagagttccaacgat

SEQ ID NO: 47227 - DNA, 25 bp, SARS Virus
catttggtacatggttccaacgatg

SEQ ID NO: 47228 - DNA, 25 bp, SARS Virus
atttggtacatagttccaacgatga

SEQ ID NO: 47229 - DNA, 25 bp, SARS Virus
tttggtacataggtccaacgatgac

SEQ ID NO: 47230 - DNA, 25 bp, SARS Virus
ttggtacatagtgccaacgatgaca

SEQ ID NO: 47231 - DNA, 25 bp, SARS Virus
tggtacatagttgcaacgatgacat

SEQ ID NO: 47232 - DNA, 25 bp, SARS Virus
ggtacatagttcgaacgatgacatg

SEQ ID NO: 47233 - DNA, 25 bp, SARS Virus
gtacatagttccgacgatgacatgt

SEQ ID NO: 47234 - DNA, 25 bp, SARS Virus
tacatagttccagcgatgacatgtc

SEQ ID NO: 47235 - DNA, 25 bp, SARS Virus
acatagttccaaggatgacatgtca

SEQ ID NO: 47236 - DNA, 25 bp, SARS Virus
catagttccaacgatgacatgtcag

SEQ ID NO: 47237 - DNA, 25 bp, SARS Virus
atagttccaacggtgacatgtcaga

SEQ ID NO: 47238 - DNA, 25 bp, SARS Virus
tagttccaacgaggacatgtcagat

SEQ ID NO: 47239 - DNA, 25 bp, SARS Virus
agttccaacgatgacatgtcagatt

SEQ ID NO: 47240 - DNA, 25 bp, SARS Virus
gttccaacgatggcatgtcagattt

SEQ ID NO: 47241 - DNA, 25 bp, SARS Virus
ttccaacgatgagatgtcagatttt

SEQ ID NO: 47242 - DNA, 25 bp, SARS Virus
tccaacgatgacgtgtcagatttta

SEQ ID NO: 47243 - DNA, 25 bp, SARS Virus
ccaacgatgacaggtcagattttac

SEQ ID NO: 47244 - DNA, 25 bp, SARS Virus
caacgatgacatgtcagattttaca

SEQ ID NO: 47245 - DNA, 25 bp, SARS Virus
aacgatgacatggcagattttacag

SEQ ID NO: 47246 - DNA, 25 bp, SARS Virus
acgatgacatgtgagattttacaga

SEQ ID NO: 47247 - DNA, 25 bp, SARS Virus
cgatgacatgtcggattttacagac

SEQ ID NO: 47248 - DNA, 25 bp, SARS Virus
gatgacatgtcagattttacagact

SEQ ID NO: 47249 - DNA, 25 bp, SARS Virus
atgacatgtcaggttttacagactg

SEQ ID NO: 47250 - DNA, 25 bp, SARS Virus
tgacatgtcagagtttacagactgc

SEQ ID NO: 47251 - DNA, 25 bp, SARS Virus
gacatgtcagatgttacagactgca

SEQ ID NO: 47252 - DNA, 25 bp, SARS Virus
acatgtcagattgtacagactgcat

SEQ ID NO: 47253 - DNA, 25 bp, SARS Virus
catgtcagatttgacagactgcatt

SEQ ID NO: 47254 - DNA, 25 bp, SARS Virus
atgtcagattttgcagactgcattt

SEQ ID NO: 47255 - DNA, 25 bp, SARS Virus
tgtcagattttagagactgcatttc

SEQ ID NO: 47256 - DNA, 25 bp, SARS Virus
gtcagattttacggactgcatttca

SEQ ID NO: 47257 - DNA, 25 bp, SARS Virus
tcagattttacagactgcatttcac

SEQ ID NO: 47258 - DNA, 25 bp, SARS Virus
cagattttacaggctgcatttcacg

SEQ ID NO: 47259 - DNA, 25 bp, SARS Virus
agattttacagagtgcatttcacgt

SEQ ID NO: 47260 - DNA, 25 bp, SARS Virus
gattttacagacggcatttcacgtg

SEQ ID NO: 47261 - DNA, 25 bp, SARS Virus
attttacagactgcatttcacgtgt

SEQ ID NO: 47262 - DNA, 25 bp, SARS Virus
ttttacagactggatttcacgtgta

SEQ ID NO: 47263 - DNA, 25 bp, SARS Virus
tttacagactgcgtttcacgtgtag

SEQ ID NO: 47264 - DNA, 25 bp, SARS Virus
ttacagactgcagttcacgtgtaga

SEQ ID NO: 47265 - DNA, 25 bp, SARS Virus
tacagactgcatgtcacgtgtagac

SEQ ID NO: 47266 - DNA, 25 bp, SARS Virus
acagactgcattgcacgtgtagaca

SEQ ID NO: 47267 - DNA, 25 bp, SARS Virus
cagactgcatttgacgtgtagacac

SEQ ID NO: 47268 - DNA, 25 bp, SARS Virus
agactgcatttcgcgtgtagacacc

SEQ ID NO: 47269 - DNA, 25 bp, SARS Virus
gactgcatttcaggtgtagacacca

SEQ ID NO: 47270 - DNA, 25 bp, SARS Virus
actgcatttcacgtgtagacaccat

SEQ ID NO: 47271 - DNA, 25 bp, SARS Virus
ctgcatttcacgggtagacaccatg

SEQ ID NO: 47272 - DNA, 25 bp, SARS Virus
tgcatttcacgtgtagacaccatga

SEQ ID NO: 47273 - DNA, 25 bp, SARS Virus
gcatttcacgtggagacaccatgac

SEQ ID NO: 47274 - DNA, 25 bp, SARS Virus
catttcacgtgtggacaccatgacg

SEQ ID NO: 47275 - DNA, 25 bp, SARS Virus
atttcacgtgtagacaccatgacga

SEQ ID NO: 47276 - DNA, 25 bp, SARS Virus
tttcacgtgtaggcaccatgacgag

SEQ ID NO: 47277 - DNA, 25 bp, SARS Virus
ttcacgtgtagagaccatgacgaga

SEQ ID NO: 47278 - DNA, 25 bp, SARS Virus
tcacgtgtagacgccatgacgagag

SEQ ID NO: 47279 - DNA, 25 bp, SARS Virus
cacgtgtagacagcatgacgagagc

SEQ ID NO: 47280 - DNA, 25 bp, SARS Virus
acgtgtagacacgatgacgagagcc

SEQ ID NO: 47281 - DNA, 25 bp, SARS Virus
cgtgtagacaccgtgacgagagcca

SEQ ID NO: 47282 - DNA, 25 bp, SARS Virus
gtgtagacaccaggacgagagccaa

SEQ ID NO: 47283 - DNA, 25 bp, SARS Virus
tgtagacaccatgacgagagccaag

SEQ ID NO: 47284 - DNA, 25 bp, SARS Virus
gtagacaccatggcgagagccaaga

SEQ ID NO: 47285 - DNA, 25 bp, SARS Virus
tagacaccatgaggagagccaagaa

SEQ ID NO: 47286 - DNA, 25 bp, SARS Virus
agacaccatgacgagagccaagaag

SEQ ID NO: 47287 - DNA, 25 bp, SARS Virus
gacaccatgacgggagccaagaagt

SEQ ID NO: 47288 - DNA, 25 bp, SARS Virus
acaccatgacgagagccaagaagtt

SEQ ID NO: 47289 - DNA, 25 bp, SARS Virus
caccatgacgagggccaagaagttg

SEQ ID NO: 47290 - DNA, 25 bp, SARS Virus
accatgacgagagccaagaagttgt

SEQ ID NO: 47291 - DNA, 25 bp, SARS Virus
ccatgacgagaggcaagaagttgtt

SEQ ID NO: 47292 - DNA, 25 bp, SARS Virus
catgacgagagcgaagaagttgttg

SEQ ID NO: 47293 - DNA, 25 bp, SARS Virus
atgacgagagccgagaagttgttga

SEQ ID NO: 47294 - DNA, 25 bp, SARS Virus
tgacgagagccaggaagttgttgaa

SEQ ID NO: 47295 - DNA, 25 bp, SARS Virus
gacgagagccaagaagttgttgaat

SEQ ID NO: 47296 - DNA, 25 bp, SARS Virus
acgagagccaaggagttgttgaatc

SEQ ID NO: 47297 - DNA, 25 bp, SARS Virus
cgagagccaagaggttgttgaatct

SEQ ID NO: 47298 - DNA, 25 bp, SARS Virus
gagagccaagaagttgttgaatctc

SEQ ID NO: 47299 - DNA, 25 bp, SARS Virus
agagccaagaaggtgttgaatctca

SEQ ID NO: 47300 - DNA, 25 bp, SARS Virus
gagccaagaagtggttgaatctcat

SEQ ID NO: 47301 - DNA, 25 bp, SARS Virus
agccaagaagttgttgaatctcatc

SEQ ID NO: 47302 - DNA, 25 bp, SARS Virus
gccaagaagttggtgaatctcatct

SEQ ID NO: 47303 - DNA, 25 bp, SARS Virus
ccaagaagttgtggaatctcatctc

SEQ ID NO: 47304 - DNA, 25 bp, SARS Virus
caagaagttgttgaatctcatctca

SEQ ID NO: 47305 - DNA, 25 bp, SARS Virus
aagaagttgttggatctcatctcag

SEQ ID NO: 47306 - DNA, 25 bp, SARS Virus
agaagttgttgagtctcatctcagt

SEQ ID NO: 47307 - DNA, 25 bp, SARS Virus
gaagttgttgaagctcatctcagta

SEQ ID NO: 47308 - DNA, 25 bp, SARS Virus
aagttgttgaatgtcatctcagtag

SEQ ID NO: 47309 - DNA, 25 bp, SARS Virus
agttgttgaatcgcatctcagtaga

SEQ ID NO: 47310 - DNA, 25 bp, SARS Virus
gttgttgaatctgatctcagtagaa

SEQ ID NO: 47311 - DNA, 25 bp, SARS Virus
ttgttgaatctcgtctcagtagaag

SEQ ID NO: 47312 - DNA, 25 bp, SARS Virus
tgttgaatctcagctcagtagaaga

SEQ ID NO: 47313 - DNA, 25 bp, SARS Virus
gttgaatctcatgtcagtagaagat

SEQ ID NO: 47314 - DNA, 25 bp, SARS Virus
ttgaatctcatcgcagtagaagatt

SEQ ID NO: 47315 - DNA, 25 bp, SARS Virus
tgaatctcatctgagtagaagattt

SEQ ID NO: 47316 - DNA, 25 bp, SARS Virus
gaatctcatctcggtagaagattta

SEQ ID NO: 47317 - DNA, 25 bp, SARS Virus
aatctcatctcagtagaagatttaa

SEQ ID NO: 47318 - DNA, 25 bp, SARS Virus
atctcatctcaggagaagatttaac

SEQ ID NO: 47319 - DNA, 25 bp, SARS Virus
tctcatctcagtggaagatttaaca

SEQ ID NO: 47320 - DNA, 25 bp, SARS Virus
ctcatctcagtagaagatttaacac

SEQ ID NO: 47321 - DNA, 25 bp, SARS Virus
tcatctcagtaggagatttaacacc

SEQ ID NO: 47322 - DNA, 25 bp, SARS Virus
catctcagtagaggatttaacaccc

SEQ ID NO: 47323 - DNA, 25 bp, SARS Virus
atctcagtagaagatttaacacccg

SEQ ID NO: 47324 - DNA, 25 bp, SARS Virus
tctcagtagaaggtttaacacccgt

SEQ ID NO: 47325 - DNA, 25 bp, SARS Virus
ctcagtagaagagttaacacccgtg

SEQ ID NO: 47326 - DNA, 25 bp, SARS Virus
tcagtagaagatgtaacacccgtgt

SEQ ID NO: 47327 - DNA, 25 bp, SARS Virus
cagtagaagattgaacacccgtgtt

SEQ ID NO: 47328 - DNA, 25 bp, SARS Virus
agtagaagatttgacacccgtgtta

SEQ ID NO: 47329 - DNA, 25 bp, SARS Virus
gtagaagatttagcacccgtgttac

SEQ ID NO: 47330 - DNA, 25 bp, SARS Virus
tagaagatttaagacccgtgttaca

SEQ ID NO: 47331 - DNA, 25 bp, SARS Virus
agaagatttaacgcccgtgttacac

SEQ ID NO: 47332 - DNA, 25 bp, SARS Virus
gaagatttaacagccgtgttacaca

SEQ ID NO: 47333 - DNA, 25 bp, SARS Virus
aagatttaacacgcgtgttacacat

SEQ ID NO: 47334 - DNA, 25 bp, SARS Virus
agatttaacaccggtgttacacatg

SEQ ID NO: 47335 - DNA, 25 bp, SARS Virus
gatttaacacccgtgttacacatgt

SEQ ID NO: 47336 - DNA, 25 bp, SARS Virus
atttaacacccgggttacacatgtt

SEQ ID NO: 47337 - DNA, 25 bp, SARS Virus
tttaacacccgtgttacacatgttg

SEQ ID NO: 47338 - DNA, 25 bp, SARS Virus
ttaacacccgtggtacacatgttga

SEQ ID NO: 47339 - DNA, 25 bp, SARS Virus
taacacccgtgtgacacatgttgag

SEQ ID NO: 47340 - DNA, 25 bp, SARS Virus
aacacccgtgttgcacatgttgagg

SEQ ID NO: 47341 - DNA, 25 bp, SARS Virus
acacccgtgttagacatgttgaggt

SEQ ID NO: 47342 - DNA, 25 bp, SARS Virus
cacccgtgttacgcatgttgaggtg

SEQ ID NO: 47343 - DNA, 25 bp, SARS Virus
acccgtgttacagatgttgaggtgt

SEQ ID NO: 47344 - DNA, 25 bp, SARS Virus
cccgtgttacacgtgttgaggtgtt

SEQ ID NO: 47345 - DNA, 25 bp, SARS Virus
ccgtgttacacaggttgaggtgtta

SEQ ID NO: 47346 - DNA, 25 bp, SARS Virus
cgtgttacacatgttgaggtgttac

SEQ ID NO: 47347 - DNA, 25 bp, SARS Virus
gtgttacacatggtgaggtgttact

SEQ ID NO: 47348 - DNA, 25 bp, SARS Virus
tgttacacatgtggaggtgttacta

SEQ ID NO: 47349 - DNA, 25 bp, SARS Virus
gttacacatgttgaggtgttactat

SEQ ID NO: 47350 - DNA, 25 bp, SARS Virus
ttacacatgttggggtgttactata

SEQ ID NO: 47351 - DNA, 25 bp, SARS Virus
tacacatgttgaggtgttactataa

SEQ ID NO: 47352 - DNA, 25 bp, SARS Virus
acacatgttgaggtgttactataag

SEQ ID NO: 47353 - DNA, 25 bp, SARS Virus
cacatgttgaggggttactataaga

SEQ ID NO: 47354 - DNA, 25 bp, SARS Virus
acatgttgaggtgttactataagaa

SEQ ID NO: 47355 - DNA, 25 bp, SARS Virus
catgttgaggtggtactataagaag

SEQ ID NO: 47356 - DNA, 25 bp, SARS Virus
atgttgaggtgtgactataagaaga

SEQ ID NO: 47357 - DNA, 25 bp, SARS Virus
tgttgaggtgttgctataagaagaa

SEQ ID NO: 47358 - DNA, 25 bp, SARS Virus
gttgaggtgttagtataagaagaac

SEQ ID NO: 47359 - DNA, 25 bp, SARS Virus
ttgaggtgttacgataagaagaacg

SEQ ID NO: 47360 - DNA, 25 bp, SARS Virus
tgaggtgttactgtaagaagaacgt

SEQ ID NO: 47361 - DNA, 25 bp, SARS Virus
gaggtgttactagaagaagaacgtt

SEQ ID NO: 47362 - DNA, 25 bp, SARS Virus
aggtgttactatgagaagaacgttt

SEQ ID NO: 47363 - DNA, 25 bp, SARS Virus
ggtgttactataggaagaacgtttt

SEQ ID NO: 47364 - DNA, 25 bp, SARS Virus
gtgttactataagaagaacgttttc

SEQ ID NO: 47365 - DNA, 25 bp, SARS Virus
tgttactataaggagaacgttttct

SEQ ID NO: 47366 - DNA, 25 bp, SARS Virus
gttactataagaggaacgttttctg

SEQ ID NO: 47367 - DNA, 25 bp, SARS Virus
ttactataagaagaacgttttctgt

SEQ ID NO: 47368 - DNA, 25 bp, SARS Virus
tactataagaaggacgttttctgtg

SEQ ID NO: 47369 - DNA, 25 bp, SARS Virus
actataagaagagcgttttctgtgt

SEQ ID NO: 47370 - DNA, 25 bp, SARS Virus
ctataagaagaaggttttctgtgtt

SEQ ID NO: 47371 - DNA, 25 bp, SARS Virus
tataagaagaacgttttctgtgttg

SEQ ID NO: 47372 - DNA, 25 bp, SARS Virus
ataagaagaacggtttctgtgttga

SEQ ID NO: 47373 - DNA, 25 bp, SARS Virus
taagaagaacgtgttctgtgttgac

SEQ ID NO: 47374 - DNA, 25 bp, SARS Virus
aagaagaacgttgtctgtgttgact

SEQ ID NO: 47375 - DNA, 25 bp, SARS Virus
agaagaacgtttgctgtgttgactt

SEQ ID NO: 47376 - DNA, 25 bp, SARS Virus
gaagaacgttttgtgtgttgacttc

SEQ ID NO: 47377 - DNA, 25 bp, SARS Virus
aagaacgttttcggtgttgacttcg

SEQ ID NO: 47378 - DNA, 25 bp, SARS Virus
agaacgttttctgtgttgacttcga

SEQ ID NO: 47379 - DNA, 25 bp, SARS Virus
gaacgttttctgggttgacttcgaa

SEQ ID NO: 47380 - DNA, 25 bp, SARS Virus
aacgttttctgtgttgacttcgaaa

SEQ ID NO: 47381 - DNA, 25 bp, SARS Virus
acgttttctgtggtgacttcgaaag

SEQ ID NO: 47382 - DNA, 25 bp, SARS Virus
cgttttctgtgtggacttcgaaagc

SEQ ID NO: 47383 - DNA, 25 bp, SARS Virus
gttttctgtgttgacttcgaaagct

SEQ ID NO: 47384 - DNA, 25 bp, SARS Virus
ttttctgtgttggcttcgaaagctc

SEQ ID NO: 47385 - DNA, 25 bp, SARS Virus
tttctgtgttgagttcgaaagctct

SEQ ID NO: 47386 - DNA, 25 bp, SARS Virus
ttctgtgttgacgtcgaaagctctt

SEQ ID NO: 47387 - DNA, 25 bp, SARS Virus
tctgtgttgactgcgaaagctcttc

SEQ ID NO: 47388 - DNA, 25 bp, SARS Virus
ctgtgttgacttggaaagctcttct

SEQ ID NO: 47389 - DNA, 25 bp, SARS Virus
tgtgttgacttcgaaagctcttcta

SEQ ID NO: 47390 - DNA, 25 bp, SARS Virus
gtgttgacttcggaagctcttctac

SEQ ID NO: 47391 - DNA, 25 bp, SARS Virus
tgttgacttcgagagctcttctacc

SEQ ID NO: 47392 - DNA, 25 bp, SARS Virus
gttgacttcgaaggctcttctacca

SEQ ID NO: 47393 - DNA, 25 bp, SARS Virus
ttgacttcgaaagctcttctaccaa

SEQ ID NO: 47394 - DNA, 25 bp, SARS Virus
tgacttcgaaaggtcttctaccaaa

SEQ ID NO: 47395 - DNA, 25 bp, SARS Virus
gacttcgaaagcgcttctaccaaag

SEQ ID NO: 47396 - DNA, 25 bp, SARS Virus
acttcgaaagctgttctaccaaaga

SEQ ID NO: 47397 - DNA, 25 bp, SARS Virus
cttcgaaagctcgtctaccaaagag

SEQ ID NO: 47398 - DNA, 25 bp, SARS Virus
ttcgaaagctctgctaccaaagaga

SEQ ID NO: 47399 - DNA, 25 bp, SARS Virus
tcgaaagctcttgtaccaaagagaa

SEQ ID NO: 47400 - DNA, 25 bp, SARS Virus
cgaaagctcttcgaccaaagagaaa

SEQ ID NO: 47401 - DNA, 25 bp, SARS Virus
gaaagctcttctgccaaagagaaaa

SEQ ID NO: 47402 - DNA, 25 bp, SARS Virus
aaagctcttctagcaaagagaaaac

SEQ ID NO: 47403 - DNA, 25 bp, SARS Virus
aagctcttctacgaaagagaaaaca

SEQ ID NO: 47404 - DNA, 25 bp, SARS Virus
agctcttctaccgaagagaaaacag

SEQ ID NO: 47405 - DNA, 25 bp, SARS Virus
gctcttctaccagagagaaaacaga

SEQ ID NO: 47406 - DNA, 25 bp, SARS Virus
ctcttctaccaaggagaaaacagac

SEQ ID NO: 47407 - DNA, 25 bp, SARS Virus
tcttctaccaaagagaaaacagaca

SEQ ID NO: 47408 - DNA, 25 bp, SARS Virus
cttctaccaaagggaaaacagacaa

SEQ ID NO: 47409 - DNA, 25 bp, SARS Virus
ttctaccaaagagaaaacagacaaa

SEQ ID NO: 47410 - DNA, 25 bp, SARS Virus
tctaccaaagaggaaacagacaaaa

SEQ ID NO: 47411 - DNA, 25 bp, SARS Virus
ctaccaaagagagaacagacaaaac

SEQ ID NO: 47412 - DNA, 25 bp, SARS Virus
taccaaagagaagacagacaaaacg

SEQ ID NO: 47413 - DNA, 25 bp, SARS Virus
accaaagagaaagcagacaaaacga

SEQ ID NO: 47414 - DNA, 25 bp, SARS Virus
ccaaagagaaaagagacaaaacgat

SEQ ID NO: 47415 - DNA, 25 bp, SARS Virus
caaagagaaaacggacaaaacgata

SEQ ID NO: 47416 - DNA, 25 bp, SARS Virus
aaagagaaaacagacaaaacgatag

SEQ ID NO: 47417 - DNA, 25 bp, SARS Virus
aagagaaaacaggcaaaacgatagg

SEQ ID NO: 47418 - DNA, 25 bp, SARS Virus
agagaaaacagagaaaacgataggt

SEQ ID NO: 47419 - DNA, 25 bp, SARS Virus
gagaaaacagacgaaacgataggta

SEQ ID NO: 47420 - DNA, 25 bp, SARS Virus
agaaaacagacagaacgataggtac

SEQ ID NO: 47421 - DNA, 25 bp, SARS Virus
gaaaacagacaagacgataggtacg

SEQ ID NO: 47422 - DNA, 25 bp, SARS Virus
aaaacagacaaagcgataggtacgt

SEQ ID NO: 47423 - DNA, 25 bp, SARS Virus
aaacagacaaaaggataggtacgtc

SEQ ID NO: 47424 - DNA, 25 bp, SARS Virus
aacagacaaaacgataggtacgtcc

SEQ ID NO: 47425 - DNA, 25 bp, SARS Virus
acagacaaaacggtaggtacgtccc

SEQ ID NO: 47426 - DNA, 25 bp, SARS Virus
cagacaaaacgagaggtacgtccca

SEQ ID NO: 47427 - DNA, 25 bp, SARS Virus
agacaaaacgatgggtacgtcccac

SEQ ID NO: 47428 - DNA, 25 bp, SARS Virus
gacaaaacgataggtacgtcccacg

SEQ ID NO: 47429 - DNA, 25 bp, SARS Virus
acaaaacgataggtacgtcccacga

SEQ ID NO: 47430 - DNA, 25 bp, SARS Virus
caaaacgatagggacgtcccacgac

SEQ ID NO: 47431 - DNA, 25 bp, SARS Virus
aaaacgataggtgcgtcccacgaca

SEQ ID NO: 47432 - DNA, 25 bp, SARS Virus
aaacgataggtaggtcccacgacat

SEQ ID NO: 47433 - DNA, 25 bp, SARS Virus
aacgataggtacgtcccacgacatc

SEQ ID NO: 47434 - DNA, 25 bp, SARS Virus
acgataggtacggcccacgacatct

SEQ ID NO: 47435 - DNA, 25 bp, SARS Virus
cgataggtacgtgccacgacatctg

SEQ ID NO: 47436 - DNA, 25 bp, SARS Virus
gataggtacgtcgcacgacatctgt

SEQ ID NO: 47437 - DNA, 25 bp, SARS Virus
ataggtacgtccgacgacatctgta

SEQ ID NO: 47438 - DNA, 25 bp, SARS Virus
taggtacgtcccgcgacatctgtaa

SEQ ID NO: 47439 - DNA, 25 bp, SARS Virus
aggtacgtcccaggacatctgtaat

SEQ ID NO: 47440 - DNA, 25 bp, SARS Virus
ggtacgtcccacgacatctgtaatt

SEQ ID NO: 47441 - DNA, 25 bp, SARS Virus
gtacgtcccacggcatctgtaatta

SEQ ID NO: 47442 - DNA, 25 bp, SARS Virus
tacgtcccacgagatctgtaattat

SEQ ID NO: 47443 - DNA, 25 bp, SARS Virus
acgtcccacgacgtctgtaattatc

SEQ ID NO: 47444 - DNA, 25 bp, SARS Virus
cgtcccacgacagctgtaattatcc

SEQ ID NO: 47445 - DNA, 25 bp, SARS Virus
gtcccacgacatgtgtaattatcca

SEQ ID NO: 47446 - DNA, 25 bp, SARS Virus
tcccacgacatcggtaattatccaa

SEQ ID NO: 47447 - DNA, 25 bp, SARS Virus
cccacgacatctgtaattatccaac

SEQ ID NO: 47448 - DNA, 25 bp, SARS Virus
ccacgacatctggaattatccaaca

SEQ ID NO: 47449 - DNA, 25 bp, SARS Virus
cacgacatctgtgattatccaacac

SEQ ID NO: 47450 - DNA, 25 bp, SARS Virus
acgacatctgtagttatccaacacg

SEQ ID NO: 47451 - DNA, 25 bp, SARS Virus
cgacatctgtaagtatccaacacgc

SEQ ID NO: 47452 - DNA, 25 bp, SARS Virus
gacatctgtaatgatccaacacgct

SEQ ID NO: 47453 - DNA, 25 bp, SARS Virus
acatctgtaattgtccaacacgctc

SEQ ID NO: 47454 - DNA, 25 bp, SARS Virus
catctgtaattagccaacacgctcc

SEQ ID NO: 47455 - DNA, 25 bp, SARS Virus
atctgtaattatgcaacacgctcct

SEQ ID NO: 47456 - DNA, 25 bp, SARS Virus
tctgtaattatcgaacacgctcctt

SEQ ID NO: 47457 - DNA, 25 bp, SARS Virus
ctgtaattatccgacacgctccttt

SEQ ID NO: 47458 - DNA, 25 bp, SARS Virus
tgtaattatccagcacgctccttta

SEQ ID NO: 47459 - DNA, 25 bp, SARS Virus
gtaattatccaagacgctcctttac

SEQ ID NO: 47460 - DNA, 25 bp, SARS Virus
taattatccaacgcgctcctttacg

SEQ ID NO: 47461 - DNA, 25 bp, SARS Virus
aattatccaacaggctcctttacga

SEQ ID NO: 47462 - DNA, 25 bp, SARS Virus
attatccaacacgctcctttacgag

SEQ ID NO: 47463 - DNA, 25 bp, SARS Virus
ttatccaacacggtcctttacgagc

SEQ ID NO: 47464 - DNA, 25 bp, SARS Virus
tatccaacacgcgcctttacgagct

SEQ ID NO: 47465 - DNA, 25 bp, SARS Virus
atgggtaacaattaataatgaccgt

SEQ ID NO: 47466 - DNA, 25 bp, SARS Virus
tgggtaacaatatataatgaccgtt

SEQ ID NO: 47467 - DNA, 25 bp, SARS Virus
gggtaacaataattaatgaccgttg

SEQ ID NO: 47468 - DNA, 25 bp, SARS Virus
ggtaacaataaataatgaccgttgt

SEQ ID NO: 47469 - DNA, 25 bp, SARS Virus
gtaacaataaattatgaccgttgtg

SEQ ID NO: 47470 - DNA, 25 bp, SARS Virus
taacaataaatattgaccgttgtgg

SEQ ID NO: 47471 - DNA, 25 bp, SARS Virus
aacaataaataatgaccgttgtgga

SEQ ID NO: 47472 - DNA, 25 bp, SARS Virus
acaataaataattaccgttgtggaa

SEQ ID NO: 47473 - DNA, 25 bp, SARS Virus
caataaataatgtccgttgtggaat

SEQ ID NO: 47474 - DNA, 25 bp, SARS Virus
aataaataatgatcgttgtggaatg

SEQ ID NO: 47475 - DNA, 25 bp, SARS Virus
ataaataatgactgttgtggaatgt

SEQ ID NO: 47476 - DNA, 25 bp, SARS Virus
taaataatgacctttgtggaatgtc

SEQ ID NO: 47477 - DNA, 25 bp, SARS Virus
aaataatgaccgttgtggaatgtca

SEQ ID NO: 47478 - DNA, 25 bp, SARS Virus
aataatgaccgttgtggaatgtcac

SEQ ID NO: 47479 - DNA, 25 bp, SARS Virus
ataatgaccgttttggaatgtcaca

SEQ ID NO: 47480 - DNA, 25 bp, SARS Virus
taatgaccgttgtggaatgtcacat

SEQ ID NO: 47481 - DNA, 25 bp, SARS Virus
aatgaccgttgttgaatgtcacata

SEQ ID NO: 47482 - DNA, 25 bp, SARS Virus
atgaccgttgtgtaatgtcacatag

SEQ ID NO: 47483 - DNA, 25 bp, SARS Virus
tgaccgttgtggtatgtcacatagt

SEQ ID NO: 47484 - DNA, 25 bp, SARS Virus
gaccgttgtggattgtcacatagta

SEQ ID NO: 47485 - DNA, 25 bp, SARS Virus
accgttgtggaatgtcacatagtac

SEQ ID NO: 47486 - DNA, 25 bp, SARS Virus
ccgttgtggaatttcacatagtacg

SEQ ID NO: 47487 - DNA, 25 bp, SARS Virus
cgttgtggaatgtcacatagtacga

SEQ ID NO: 47488 - DNA, 25 bp, SARS Virus
gttgtggaatgttacatagtacgaa

SEQ ID NO: 47489 - DNA, 25 bp, SARS Virus
ttgtggaatgtctcatagtacgaac

SEQ ID NO: 47490 - DNA, 25 bp, SARS Virus
tgtggaatgtcatatagtacgaaca

SEQ ID NO: 47491 - DNA, 25 bp, SARS Virus
gtggaatgtcacttagtacgaacaa

SEQ ID NO: 47492 - DNA, 25 bp, SARS Virus
tggaatgtcacatagtacgaacaaa

SEQ ID NO: 47493 - DNA, 25 bp, SARS Virus
ggaatgtcacattgtacgaacaaat

SEQ ID NO: 47494 - DNA, 25 bp, SARS Virus
gaatgtcacatattacgaacaaata

SEQ ID NO: 47495 - DNA, 25 bp, SARS Virus
aatgtcacatagtacgaacaaataa

SEQ ID NO: 47496 - DNA, 25 bp, SARS Virus
atgtcacatagttcgaacaaataac

SEQ ID NO: 47497 - DNA, 25 bp, SARS Virus
tgtcacatagtatgaacaaataaca

SEQ ID NO: 47498 - DNA, 25 bp, SARS Virus
gtcacatagtactaacaaataacaa

SEQ ID NO: 47499 - DNA, 25 bp, SARS Virus
tcacatagtacgtacaaataacaaa

SEQ ID NO: 47500 - DNA, 25 bp, SARS Virus
cacatagtacgatcaaataacaaag

SEQ ID NO: 47501 - DNA, 25 bp, SARS Virus
acatagtacgaataaataacaaaga

SEQ ID NO: 47502 - DNA, 25 bp, SARS Virus
catagtacgaactaataacaaagaa

SEQ ID NO: 47503 - DNA, 25 bp, SARS Virus
atagtacgaacatataacaaagaat

SEQ ID NO: 47504 - DNA, 25 bp, SARS Virus
tagtacgaacaattaacaaagaatc

SEQ ID NO: 47505 - DNA, 25 bp, SARS Virus
agtacgaacaaataacaaagaatcc

SEQ ID NO: 47506 - DNA, 25 bp, SARS Virus
gtacgaacaaattacaaagaatccg

SEQ ID NO: 47507 - DNA, 25 bp, SARS Virus
tacgaacaaatatcaaagaatccga

SEQ ID NO: 47508 - DNA, 25 bp, SARS Virus
acgaacaaataataaagaatccgat

SEQ ID NO: 47509 - DNA, 25 bp, SARS Virus
cgaacaaataactaagaatccgata

SEQ ID NO: 47510 - DNA, 25 bp, SARS Virus
gaacaaataacatagaatccgataa

SEQ ID NO: 47511 - DNA, 25 bp, SARS Virus
aacaaataacaatgaatccgataac

SEQ ID NO: 47512 - DNA, 25 bp, SARS Virus
acaaataacaaataatccgataaca

SEQ ID NO: 47513 - DNA, 25 bp, SARS Virus
caaataacaaagtatccgataacaa

SEQ ID NO: 47514 - DNA, 25 bp, SARS Virus
aaataacaaagattccgataacaac

SEQ ID NO: 47515 - DNA, 25 bp, SARS Virus
aataacaaagaatccgataacaacg

SEQ ID NO: 47516 - DNA, 25 bp, SARS Virus
ataacaaagaattcgataacaacga

SEQ ID NO: 47517 - DNA, 25 bp, SARS Virus
taacaaagaatctgataacaacgac

SEQ ID NO: 47518 - DNA, 25 bp, SARS Virus
aacaaagaatcctataacaacgacg

SEQ ID NO: 47519 - DNA, 25 bp, SARS Virus
acaaagaatccgttaacaacgacga

SEQ ID NO: 47520 - DNA, 25 bp, SARS Virus
caaagaatccgataacaacgacgac

SEQ ID NO: 47521 - DNA, 25 bp, SARS Virus
aaagaatccgattacaacgacgacg

SEQ ID NO: 47522 - DNA, 25 bp, SARS Virus
aagaatccgatatcaacgacgacga

SEQ ID NO: 47523 - DNA, 25 bp, SARS Virus
agaatccgataataacgacgacgat

SEQ ID NO: 47524 - DNA, 25 bp, SARS Virus
gaatccgataactacgacgacgatg

SEQ ID NO: 47525 - DNA, 25 bp, SARS Virus
aatccgataacatcgacgacgatga

SEQ ID NO: 47526 - DNA, 25 bp, SARS Virus
atccgataacaatgacgacgatgaa

SEQ ID NO: 47527 - DNA, 25 bp, SARS Virus
tccgataacaactacgacgatgaaa

SEQ ID NO: 47528 - DNA, 25 bp, SARS Virus
ccgataacaacgtcgacgatgaaac

SEQ ID NO: 47529 - DNA, 25 bp, SARS Virus
cgataacaacgatgacgatgaaacc

SEQ ID NO: 47530 - DNA, 25 bp, SARS Virus
gataacaacgactacgatgaaaccg

SEQ ID NO: 47531 - DNA, 25 bp, SARS Virus
ataacaacgacgtcgatgaaaccgg

SEQ ID NO: 47532 - DNA, 25 bp, SARS Virus
taacaacgacgatgatgaaaccgga

SEQ ID NO: 47533 - DNA, 25 bp, SARS Virus
aacaacgacgactatgaaaccggaa

SEQ ID NO: 47534 - DNA, 25 bp, SARS Virus
acaacgacgacgttgaaaccggaaa

SEQ ID NO: 47535 - DNA, 25 bp, SARS Virus
caacgacgacgatgaaaccggaaaa

SEQ ID NO: 47536 - DNA, 25 bp, SARS Virus
aacgacgacgattaaaccggaaaag

SEQ ID NO: 47537 - DNA, 25 bp, SARS Virus
acgacgacgatgtaaccggaaaaga

SEQ ID NO: 47538 - DNA, 25 bp, SARS Virus
cgacgacgatgataccggaaaagac

SEQ ID NO: 47539 - DNA, 25 bp, SARS Virus
gacgacgatgaatccggaaaagaca

SEQ ID NO: 47540 - DNA, 25 bp, SARS Virus
acgacgatgaaatcggaaaagacaa

SEQ ID NO: 47541 - DNA, 25 bp, SARS Virus
cgacgatgaaactggaaaagacaaa

SEQ ID NO: 47542 - DNA, 25 bp, SARS Virus
gacgatgaaacctgaaaagacaaat

SEQ ID NO: 47543 - DNA, 25 bp, SARS Virus
acgatgaaaccgtaaaagacaaatg

SEQ ID NO: 47544 - DNA, 25 bp, SARS Virus
cgatgaaaccggtaaagacaaatga

SEQ ID NO: 47545 - DNA, 25 bp, SARS Virus
gatgaaaccggataagacaaatgag

SEQ ID NO: 47546 - DNA, 25 bp, SARS Virus
atgaaaccggaatagacaaatgagt

SEQ ID NO: 47547 - DNA, 25 bp, SARS Virus
tgaaaccggaaatgacaaatgagtt

SEQ ID NO: 47548 - DNA, 25 bp, SARS Virus
gaaaccggaaaatacaaatgagttg

SEQ ID NO: 47549 - DNA, 25 bp, SARS Virus
aaaccggaaaagtcaaatgagttgg

SEQ ID NO: 47550 - DNA, 25 bp, SARS Virus
aaccggaaaagataaatgagttggc

SEQ ID NO: 47551 - DNA, 25 bp, SARS Virus
accggaaaagactaatgagttggca

SEQ ID NO: 47552 - DNA, 25 bp, SARS Virus
ccggaaaagacatatgagttggcaa

SEQ ID NO: 47553 - DNA, 25 bp, SARS Virus
cggaaaagacaattgagttggcaat

SEQ ID NO: 47554 - DNA, 25 bp, SARS Virus
ggaaaagacaaatgagttggcaatg

SEQ ID NO: 47555 - DNA, 25 bp, SARS Virus
gaaaagacaaattagttggcaatga

SEQ ID NO: 47556 - DNA, 25 bp, SARS Virus
aaaagacaaatgtgttggcaatgaa

SEQ ID NO: 47557 - DNA, 25 bp, SARS Virus
aaagacaaatgatttggcaatgaag

SEQ ID NO: 47558 - DNA, 25 bp, SARS Virus
aagacaaatgagttggcaatgaagt

SEQ ID NO: 47559 - DNA, 25 bp, SARS Virus
agacaaatgagttggcaatgaagtc

SEQ ID NO: 47560 - DNA, 25 bp, SARS Virus
gacaaatgagtttgcaatgaagtcc

SEQ ID NO: 47561 - DNA, 25 bp, SARS Virus
acaaatgagttgtcaatgaagtccg

SEQ ID NO: 47562 - DNA, 25 bp, SARS Virus
caaatgagttggtaatgaagtccga

SEQ ID NO: 47563 - DNA, 25 bp, SARS Virus
aaatgagttggctatgaagtccgaa

SEQ ID NO: 47564 - DNA, 25 bp, SARS Virus
aatgagttggcattgaagtccgaat

SEQ ID NO: 47565 - DNA, 25 bp, SARS Virus
atgagttggcaatgaagtccgaatg

SEQ ID NO: 47566 - DNA, 25 bp, SARS Virus
tgagttggcaattaagtccgaatga

SEQ ID NO: 47567 - DNA, 25 bp, SARS Virus
gagttggcaatgtagtccgaatgag

SEQ ID NO: 47568 - DNA, 25 bp, SARS Virus
agttggcaatgatgtccgaatgaga

SEQ ID NO: 47569 - DNA, 25 bp, SARS Virus
gttggcaatgaattccgaatgagaa

SEQ ID NO: 47570 - DNA, 25 bp, SARS Virus
ttggcaatgaagtccgaatgagaac

SEQ ID NO: 47571 - DNA, 25 bp, SARS Virus
tggcaatgaagttcgaatgagaacc

SEQ ID NO: 47572 - DNA, 25 bp, SARS Virus
ggcaatgaagtctgaatgagaacca

SEQ ID NO: 47573 - DNA, 25 bp, SARS Virus
gcaatgaagtcctaatgagaaccac

SEQ ID NO: 47574 - DNA, 25 bp, SARS Virus
caatgaagtccgtatgagaaccaca

SEQ ID NO: 47575 - DNA, 25 bp, SARS Virus
aatgaagtccgattgagaaccacaa

SEQ ID NO: 47576 - DNA, 25 bp, SARS Virus
atgaagtccgaatgagaaccacaaa

SEQ ID NO: 47577 - DNA, 25 bp, SARS Virus
tgaagtccgaattagaaccacaaat

SEQ ID NO: 47578 - DNA, 25 bp, SARS Virus
gaagtccgaatgtgaaccacaaata

SEQ ID NO: 47579 - DNA, 25 bp, SARS Virus
aagtccgaatgataaccacaaatac

SEQ ID NO: 47580 - DNA, 25 bp, SARS Virus
agtccgaatgagtaccacaaatact

SEQ ID NO: 47581 - DNA, 25 bp, SARS Virus
gtccgaatgagatccacaaatactg

SEQ ID NO: 47582 - DNA, 25 bp, SARS Virus
tccgaatgagaatcacaaatactga

SEQ ID NO: 47583 - DNA, 25 bp, SARS Virus
ccgaatgagaactacaaatactgat

SEQ ID NO: 47584 - DNA, 25 bp, SARS Virus
cgaatgagaacctcaaatactgatg

SEQ ID NO: 47585 - DNA, 25 bp, SARS Virus
gaatgagaaccataaatactgatga

SEQ ID NO: 47586 - DNA, 25 bp, SARS Virus
aatgagaaccactaatactgatgaa

SEQ ID NO: 47587 - DNA, 25 bp, SARS Virus
atgagaaccacatatactgatgaac

SEQ ID NO: 47588 - DNA, 25 bp, SARS Virus
tgagaaccacaattactgatgaacc

SEQ ID NO: 47589 - DNA, 25 bp, SARS Virus
gagaaccacaaatactgatgaacca

SEQ ID NO: 47590 - DNA, 25 bp, SARS Virus
agaaccacaaattctgatgaaccag

SEQ ID NO: 47591 - DNA, 25 bp, SARS Virus
gaaccacaaatattgatgaaccaga

SEQ ID NO: 47592 - DNA, 25 bp, SARS Virus
aaccacaaatactgatgaaccagag

SEQ ID NO: 47593 - DNA, 25 bp, SARS Virus
accacaaatacttatgaaccagaga

SEQ ID NO: 47594 - DNA, 25 bp, SARS Virus
ccacaaatactgttgaaccagagat

SEQ ID NO: 47595 - DNA, 25 bp, SARS Virus
cacaaatactgatgaaccagagatg

SEQ ID NO: 47596 - DNA, 25 bp, SARS Virus
acaaatactgattaaccagagatgt

SEQ ID NO: 47597 - DNA, 25 bp, SARS Virus
caaatactgatgtaccagagatgtg

SEQ ID NO: 47598 - DNA, 25 bp, SARS Virus
aaatactgatgatccagagatgtgt

SEQ ID NO: 47599 - DNA, 25 bp, SARS Virus
aatactgatgaatcagagatgtgtt

SEQ ID NO: 47600 - DNA, 25 bp, SARS Virus
atactgatgaactagagatgtgttc

SEQ ID NO: 47601 - DNA, 25 bp, SARS Virus
tactgatgaacctgagatgtgttct

SEQ ID NO: 47602 - DNA, 25 bp, SARS Virus
actgatgaaccatagatgtgttctt

SEQ ID NO: 47603 - DNA, 25 bp, SARS Virus
ctgatgaaccagtgatgtgttctta

SEQ ID NO: 47604 - DNA, 25 bp, SARS Virus
tgatgaaccagatatgtgttcttaa

SEQ ID NO: 47605 - DNA, 25 bp, SARS Virus
gatgaaccagagttgtgttcttaaa

SEQ ID NO: 47606 - DNA, 25 bp, SARS Virus
atgaaccagagatgtgttcttaaat

SEQ ID NO: 47607 - DNA, 25 bp, SARS Virus
tgaaccagagatttgttcttaaatc

SEQ ID NO: 47608 - DNA, 25 bp, SARS Virus
gaaccagagatgtgttcttaaatcc

SEQ ID NO: 47609 - DNA, 25 bp, SARS Virus
aaccagagatgttttcttaaatcca

SEQ ID NO: 47610 - DNA, 25 bp, SARS Virus
accagagatgtgttcttaaatccat

SEQ ID NO: 47611 - DNA, 25 bp, SARS Virus
ccagagatgtgttcttaaatccata

SEQ ID NO: 47612 - DNA, 25 bp, SARS Virus
cagagatgtgtttttaaatccatat

SEQ ID NO: 47613 - DNA, 25 bp, SARS Virus
agagatgtgttcttaaatccatata

SEQ ID NO: 47614 - DNA, 25 bp, SARS Virus
gagatgtgttcttaaatccatatac

SEQ ID NO: 47615 - DNA, 25 bp, SARS Virus
agatgtgttctttaatccatatact

SEQ ID NO: 47616 - DNA, 25 bp, SARS Virus
gatgtgttcttatatccatatactt

SEQ ID NO: 47617 - DNA, 25 bp, SARS Virus
atgtgttcttaattccatatacttg

SEQ ID NO: 47618 - DNA, 25 bp, SARS Virus
tgtgttcttaaatccatatacttga

SEQ ID NO: 47619 - DNA, 25 bp, SARS Virus
gtgttcttaaattcatatacttgag

SEQ ID NO: 47620 - DNA, 25 bp, SARS Virus
tgttcttaaatctatatacttgagg

SEQ ID NO: 47621 - DNA, 25 bp, SARS Virus
gttcttaaatccttatacttgaggg

SEQ ID NO: 47622 - DNA, 25 bp, SARS Virus
ttcttaaatccatatacttgagggt

SEQ ID NO: 47623 - DNA, 25 bp, SARS Virus
tcttaaatccatttacttgagggtc

SEQ ID NO: 47624 - DNA, 25 bp, SARS Virus
cttaaatccatatacttgagggtcc

SEQ ID NO: 47625 - DNA, 25 bp, SARS Virus
ttaaatccatattcttgagggtccc

SEQ ID NO: 47626 - DNA, 25 bp, SARS Virus
taaatccatatatttgagggtcccc

SEQ ID NO: 47627 - DNA, 25 bp, SARS Virus
aaatccatatacttgagggtccccg

SEQ ID NO: 47628 - DNA, 25 bp, SARS Virus
aatccatatacttgagggtccccga

SEQ ID NO: 47629 - DNA, 25 bp, SARS Virus
atccatatactttagggtccccgaa

SEQ ID NO: 47630 - DNA, 25 bp, SARS Virus
tccatatacttgtgggtccccgaaa

SEQ ID NO: 47631 - DNA, 25 bp, SARS Virus
ccatatacttgatggtccccgaaaa

SEQ ID NO: 47632 - DNA, 25 bp, SARS Virus
catatacttgagtgtccccgaaaac

SEQ ID NO: 47633 - DNA, 25 bp, SARS Virus
atatacttgaggttccccgaaaacg

SEQ ID NO: 47634 - DNA, 25 bp, SARS Virus
tatacttgagggtccccgaaaacgg

SEQ ID NO: 47635 - DNA, 25 bp, SARS Virus
atacttgagggttcccgaaaacgga

SEQ ID NO: 47636 - DNA, 25 bp, SARS Virus
tacttgagggtctccgaaaacggag

SEQ ID NO: 47637 - DNA, 25 bp, SARS Virus
acttgagggtcctcgaaaacggagg

SEQ ID NO: 47638 - DNA, 25 bp, SARS Virus
cttgagggtccctgaaaacggagga

SEQ ID NO: 47639 - DNA, 25 bp, SARS Virus
ttgagggtcccctaaaacggaggat

SEQ ID NO: 47640 - DNA, 25 bp, SARS Virus
tgagggtccccgtaaacggaggatt

SEQ ID NO: 47641 - DNA, 25 bp, SARS Virus
gagggtccccgataacggaggattc

SEQ ID NO: 47642 - DNA, 25 bp, SARS Virus
agggtccccgaatacggaggattct

SEQ ID NO: 47643 - DNA, 25 bp, SARS Virus
gggtccccgaaatcggaggattctc

SEQ ID NO: 47644 - DNA, 25 bp, SARS Virus
ggtccccgaaaatggaggattctca

SEQ ID NO: 47645 - DNA, 25 bp, SARS Virus
gtccccgaaaactgaggattctcat

SEQ ID NO: 47646 - DNA, 25 bp, SARS Virus
tccccgaaaacgtaggattctcatc

SEQ ID NO: 47647 - DNA, 25 bp, SARS Virus
ccccgaaaacggtggattctcatca

SEQ ID NO: 47648 - DNA, 25 bp, SARS Virus
cccgaaaacggatgattctcatcat

SEQ ID NO: 47649 - DNA, 25 bp, SARS Virus
ccgaaaacggagtattctcatcata

SEQ ID NO: 47650 - DNA, 25 bp, SARS Virus
cgaaaacggaggtttctcatcataa

SEQ ID NO: 47651 - DNA, 25 bp, SARS Virus
gaaaacggaggattctcatcataac

SEQ ID NO: 47652 - DNA, 25 bp, SARS Virus
aaaacggaggattctcatcataact

SEQ ID NO: 47653 - DNA, 25 bp, SARS Virus
aaacggaggattttcatcataacta

SEQ ID NO: 47654 - DNA, 25 bp, SARS Virus
aacggaggattctcatcataactac

SEQ ID NO: 47655 - DNA, 25 bp, SARS Virus
acggaggattcttatcataactacg

SEQ ID NO: 47656 - DNA, 25 bp, SARS Virus
cggaggattctcttcataactacga

SEQ ID NO: 47657 - DNA, 25 bp, SARS Virus
ggaggattctcatcataactacgaa

SEQ ID NO: 47658 - DNA, 25 bp, SARS Virus
gaggattctcattataactacgaaa

SEQ ID NO: 47659 - DNA, 25 bp, SARS Virus
aggattctcatcttaactacgaaag

SEQ ID NO: 47660 - DNA, 25 bp, SARS Virus
ggattctcatcataactacgaaagt

SEQ ID NO: 47661 - DNA, 25 bp, SARS Virus
gattctcatcattactacgaaagtt

SEQ ID NO: 47662 - DNA, 25 bp, SARS Virus
attctcatcatatctacgaaagttc

SEQ ID NO: 47663 - DNA, 25 bp, SARS Virus
ttctcatcataattacgaaagttcg

SEQ ID NO: 47664 - DNA, 25 bp, SARS Virus
tctcatcataactacgaaagttcga

SEQ ID NO: 47665 - DNA, 25 bp, SARS Virus
ctcatcataacttcgaaagttcgaa

SEQ ID NO: 47666 - DNA, 25 bp, SARS Virus
tcatcataactatgaaagttcgaat

SEQ ID NO: 47667 - DNA, 25 bp, SARS Virus
catcataactactaaagttcgaatt

SEQ ID NO: 47668 - DNA, 25 bp, SARS Virus
atcataactacgtaagttcgaattg

SEQ ID NO: 47669 - DNA, 25 bp, SARS Virus
tcataactacgatagttcgaattgt

SEQ ID NO: 47670 - DNA, 25 bp, SARS Virus
cataactacgaatgttcgaattgta

SEQ ID NO: 47671 - DNA, 25 bp, SARS Virus
ataactacgaaatttcgaattgtaa

SEQ ID NO: 47672 - DNA, 25 bp, SARS Virus
taactacgaaagttcgaattgtaat

SEQ ID NO: 47673 - DNA, 25 bp, SARS Virus
aactacgaaagttcgaattgtaatt

SEQ ID NO: 47674 - DNA, 25 bp, SARS Virus
actacgaaagtttgaattgtaattc

SEQ ID NO: 47675 - DNA, 25 bp, SARS Virus
ctacgaaagttctaattgtaattca

SEQ ID NO: 47676 - DNA, 25 bp, SARS Virus
tacgaaagttcgtattgtaattcaa

SEQ ID NO: 47677 - DNA, 25 bp, SARS Virus
acgaaagttcgatttgtaattcaac

SEQ ID NO: 47678 - DNA, 25 bp, SARS Virus
cgaaagttcgaattgtaattcaaca

SEQ ID NO: 47679 - DNA, 25 bp, SARS Virus
gaaagttcgaattgtaattcaacaa

SEQ ID NO: 47680 - DNA, 25 bp, SARS Virus
aaagttcgaattttaattcaacaac

SEQ ID NO: 47681 - DNA, 25 bp, SARS Virus
aagttcgaattgtaattcaacaacc

SEQ ID NO: 47682 - DNA, 25 bp, SARS Virus
agttcgaattgttattcaacaaccc

SEQ ID NO: 47683 - DNA, 25 bp, SARS Virus
gttcgaattgtatttcaacaaccca

SEQ ID NO: 47684 - DNA, 25 bp, SARS Virus
ttcgaattgtaattcaacaacccat

SEQ ID NO: 47685 - DNA, 25 bp, SARS Virus
tcgaattgtaattcaacaacccata

SEQ ID NO: 47686 - DNA, 25 bp, SARS Virus
cgaattgtaatttaacaacccataa

SEQ ID NO: 47687 - DNA, 25 bp, SARS Virus
gaattgtaattctacaacccataac

SEQ ID NO: 47688 - DNA, 25 bp, SARS Virus
aattgtaattcatcaacccataacc

SEQ ID NO: 47689 - DNA, 25 bp, SARS Virus
attgtaattcaataacccataacct

SEQ ID NO: 47690 - DNA, 25 bp, SARS Virus
ttgtaattcaactacccataacctc

SEQ ID NO: 47691 - DNA, 25 bp, SARS Virus
tgtaattcaacatcccataacctcc

SEQ ID NO: 47692 - DNA, 25 bp, SARS Virus
gtaattcaacaatccataacctcca

SEQ ID NO: 47693 - DNA, 25 bp, SARS Virus
taattcaacaactcataacctccat

SEQ ID NO: 47694 - DNA, 25 bp, SARS Virus
aattcaacaacctataacctccatt

SEQ ID NO: 47695 - DNA, 25 bp, SARS Virus
attcaacaacccttaacctccattt

SEQ ID NO: 47696 - DNA, 25 bp, SARS Virus
ttcaacaacccataacctccatttg

SEQ ID NO: 47697 - DNA, 25 bp, SARS Virus
tcaacaacccattacctccatttgg

SEQ ID NO: 47698 - DNA, 25 bp, SARS Virus
caacaacccatatcctccatttggt

SEQ ID NO: 47699 - DNA, 25 bp, SARS Virus
aacaacccataatctccatttggta

SEQ ID NO: 47700 - DNA, 25 bp, SARS Virus
acaacccataacttccatttggtac

SEQ ID NO: 47701 - DNA, 25 bp, SARS Virus
caacccataacctccatttggtaca

SEQ ID NO: 47702 - DNA, 25 bp, SARS Virus
aacccataaccttcatttggtacat

SEQ ID NO: 47703 - DNA, 25 bp, SARS Virus
acccataacctctatttggtacata

SEQ ID NO: 47704 - DNA, 25 bp, SARS Virus
cccataacctccttttggtacatag

SEQ ID NO: 47705 - DNA, 25 bp, SARS Virus
ccataacctccatttggtacatagt

SEQ ID NO: 47706 - DNA, 25 bp, SARS Virus
cataacctccatttggtacatagtt

SEQ ID NO: 47707 - DNA, 25 bp, SARS Virus
ataacctccatttggtacatagttc

SEQ ID NO: 47708 - DNA, 25 bp, SARS Virus
taacctccattttgtacatagttcc

SEQ ID NO: 47709 - DNA, 25 bp, SARS Virus
aacctccatttgttacatagttcca

SEQ ID NO: 47710 - DNA, 25 bp, SARS Virus
acctccatttggtacatagttccaa

SEQ ID NO: 47711 - DNA, 25 bp, SARS Virus
cctccatttggttcatagttccaac

SEQ ID NO: 47712 - DNA, 25 bp, SARS Virus
ctccatttggtatatagttccaacg

SEQ ID NO: 47713 - DNA, 25 bp, SARS Virus
tccatttggtacttagttccaacga

SEQ ID NO: 47714 - DNA, 25 bp, SARS Virus
ccatttggtacatagttccaacgat

SEQ ID NO: 47715 - DNA, 25 bp, SARS Virus
catttggtacattgttccaacgatg

SEQ ID NO: 47716 - DNA, 25 bp, SARS Virus
atttggtacatatttccaacgatga

SEQ ID NO: 47717 - DNA, 25 bp, SARS Virus
tttggtacatagttccaacgatgac

SEQ ID NO: 47718 - DNA, 25 bp, SARS Virus
ttggtacatagttccaacgatgaca

SEQ ID NO: 47719 - DNA, 25 bp, SARS Virus
tggtacatagtttcaacgatgacat

SEQ ID NO: 47720 - DNA, 25 bp, SARS Virus
ggtacatagttctaacgatgacatg

SEQ ID NO: 47721 - DNA, 25 bp, SARS Virus
gtacatagttcctacgatgacatgt

SEQ ID NO: 47722 - DNA, 25 bp, SARS Virus
tacatagttccatcgatgacatgtc

SEQ ID NO: 47723 - DNA, 25 bp, SARS Virus
acatagttccaatgatgacatgtca

SEQ ID NO: 47724 - DNA, 25 bp, SARS Virus
catagttccaactatgacatgtcag

SEQ ID NO: 47725 - DNA, 25 bp, SARS Virus
atagttccaacgttgacatgtcaga

SEQ ID NO: 47726 - DNA, 25 bp, SARS Virus
tagttccaacgatgacatgtcagat

SEQ ID NO: 47727 - DNA, 25 bp, SARS Virus
agttccaacgattacatgtcagatt

SEQ ID NO: 47728 - DNA, 25 bp, SARS Virus
gttccaacgatgtcatgtcagattt

SEQ ID NO: 47729 - DNA, 25 bp, SARS Virus
ttccaacgatgatatgtcagatttt

SEQ ID NO: 47730 - DNA, 25 bp, SARS Virus
tccaacgatgacttgtcagatttta

SEQ ID NO: 47731 - DNA, 25 bp, SARS Virus
ccaacgatgacatgtcagattttac

SEQ ID NO: 47732 - DNA, 25 bp, SARS Virus
caacgatgacatttcagattttaca

SEQ ID NO: 47733 - DNA, 25 bp, SARS Virus
aacgatgacatgtcagattttacag

SEQ ID NO: 47734 - DNA, 25 bp, SARS Virus
acgatgacatgttagattttacaga

SEQ ID NO: 47735 - DNA, 25 bp, SARS Virus
cgatgacatgtctgattttacagac

SEQ ID NO: 47736 - DNA, 25 bp, SARS Virus
gatgacatgtcatattttacagact

SEQ ID NO: 47737 - DNA, 25 bp, SARS Virus
atgacatgtcagtttttacagactg

SEQ ID NO: 47738 - DNA, 25 bp, SARS Virus
tgacatgtcagattttacagactgc

SEQ ID NO: 47739 - DNA, 25 bp, SARS Virus
gacatgtcagattttacagactgca

SEQ ID NO: 47740 - DNA, 25 bp, SARS Virus
acatgtcagattttacagactgcat

SEQ ID NO: 47741 - DNA, 25 bp, SARS Virus
catgtcagattttacagactgcatt

SEQ ID NO: 47742 - DNA, 25 bp, SARS Virus
atgtcagatttttcagactgcattt

SEQ ID NO: 47743 - DNA, 25 bp, SARS Virus
tgtcagattttatagactgcatttc

SEQ ID NO: 47744 - DNA, 25 bp, SARS Virus
gtcagattttactgactgcatttca

SEQ ID NO: 47745 - DNA, 25 bp, SARS Virus
tcagattttacatactgcatttcac

SEQ ID NO: 47746 - DNA, 25 bp, SARS Virus
cagattttacagtctgcatttcacg

SEQ ID NO: 47747 - DNA, 25 bp, SARS Virus
agattttacagattgcatttcacgt

SEQ ID NO: 47748 - DNA, 25 bp, SARS Virus
gattttacagactgcatttcacgtg

SEQ ID NO: 47749 - DNA, 25 bp, SARS Virus
attttacagacttcatttcacgtgt

SEQ ID NO: 47750 - DNA, 25 bp, SARS Virus
ttttacagactgtatttcacgtgta

SEQ ID NO: 47751 - DNA, 25 bp, SARS Virus
tttacagactgcttttcacgtgtag

SEQ ID NO: 47752 - DNA, 25 bp, SARS Virus
ttacagactgcatttcacgtgtaga

SEQ ID NO: 47753 - DNA, 25 bp, SARS Virus
tacagactgcatttcacgtgtagac

SEQ ID NO: 47754 - DNA, 25 bp, SARS Virus
acagactgcatttcacgtgtagaca

SEQ ID NO: 47755 - DNA, 25 bp, SARS Virus
cagactgcattttacgtgtagacac

SEQ ID NO: 47756 - DNA, 25 bp, SARS Virus
agactgcatttctcgtgtagacacc

SEQ ID NO: 47757 - DNA, 25 bp, SARS Virus
gactgcatttcatgtgtagacacca

SEQ ID NO: 47758 - DNA, 25 bp, SARS Virus
actgcatttcacttgtagacaccat

SEQ ID NO: 47759 - DNA, 25 bp, SARS Virus
ctgcatttcacgtgtagacaccatg

SEQ ID NO: 47760 - DNA, 25 bp, SARS Virus
tgcatttcacgtttagacaccatga

SEQ ID NO: 47761 - DNA, 25 bp, SARS Virus
gcatttcacgtgtagacaccatgac

SEQ ID NO: 47762 - DNA, 25 bp, SARS Virus
catttcacgtgttgacaccatgacg

SEQ ID NO: 47763 - DNA, 25 bp, SARS Virus
atttcacgtgtatacaccatgacga

SEQ ID NO: 47764 - DNA, 25 bp, SARS Virus
tttcacgtgtagtcaccatgacgag

SEQ ID NO: 47765 - DNA, 25 bp, SARS Virus
ttcacgtgtagataccatgacgaga

SEQ ID NO: 47766 - DNA, 25 bp, SARS Virus
tcacgtgtagactccatgacgagag

SEQ ID NO: 47767 - DNA, 25 bp, SARS Virus
cacgtgtagacatcatgacgagagc

SEQ ID NO: 47768 - DNA, 25 bp, SARS Virus
acgtgtagacactatgacgagagcc

SEQ ID NO: 47769 - DNA, 25 bp, SARS Virus
cgtgtagacaccttgacgagagcca

SEQ ID NO: 47770 - DNA, 25 bp, SARS Virus
gtgtagacaccatgacgagagccaa

SEQ ID NO: 47771 - DNA, 25 bp, SARS Virus
tgtagacaccattacgagagccaag

SEQ ID NO: 47772 - DNA, 25 bp, SARS Virus
gtagacaccatgtcgagagccaaga

SEQ ID NO: 47773 - DNA, 25 bp, SARS Virus
tagacaccatgatgagagccaagaa

SEQ ID NO: 47774 - DNA, 25 bp, SARS Virus
agacaccatgactagagccaagaag

SEQ ID NO: 47775 - DNA, 25 bp, SARS Virus
gacaccatgacgtgagccaagaagt

SEQ ID NO: 47776 - DNA, 25 bp, SARS Virus
acaccatgacgatagccaagaagtt

SEQ ID NO: 47777 - DNA, 25 bp, SARS Virus
caccatgacgagtgccaagaagttg

SEQ ID NO: 47778 - DNA, 25 bp, SARS Virus
accatgacgagatccaagaagttgt

SEQ ID NO: 47779 - DNA, 25 bp, SARS Virus
ccatgacgagagtcaagaagttgtt

SEQ ID NO: 47780 - DNA, 25 bp, SARS Virus
catgacgagagctaagaagttgttg

SEQ ID NO: 47781 - DNA, 25 bp, SARS Virus
atgacgagagcctagaagttgttga

SEQ ID NO: 47782 - DNA, 25 bp, SARS Virus
tgacgagagccatgaagttgttgaa

SEQ ID NO: 47783 - DNA, 25 bp, SARS Virus
gacgagagccaataagttgttgaat

SEQ ID NO: 47784 - DNA, 25 bp, SARS Virus
acgagagccaagtagttgttgaatc

SEQ ID NO: 47785 - DNA, 25 bp, SARS Virus
cgagagccaagatgttgttgaatct

SEQ ID NO: 47786 - DNA, 25 bp, SARS Virus
gagagccaagaatttgttgaatctc

SEQ ID NO: 47787 - DNA, 25 bp, SARS Virus
agagccaagaagttgttgaatctca

SEQ ID NO: 47788 - DNA, 25 bp, SARS Virus
gagccaagaagttgttgaatctcat

SEQ ID NO: 47789 - DNA, 25 bp, SARS Virus
agccaagaagtttttgaatctcatc

SEQ ID NO: 47790 - DNA, 25 bp, SARS Virus
gccaagaagttgttgaatctcatct

SEQ ID NO: 47791 - DNA, 25 bp, SARS Virus
ccaagaagttgttgaatctcatctc

SEQ ID NO: 47792 - DNA, 25 bp, SARS Virus
caagaagttgtttaatctcatctca

SEQ ID NO: 47793 - DNA, 25 bp, SARS Virus
aagaagttgttgtatctcatctcag

SEQ ID NO: 47794 - DNA, 25 bp, SARS Virus
agaagttgttgattctcatctcagt

SEQ ID NO: 47795 - DNA, 25 bp, SARS Virus
gaagttgttgaatctcatctcagta

SEQ ID NO: 47796 - DNA, 25 bp, SARS Virus
aagttgttgaatttcatctcagtag

SEQ ID NO: 47797 - DNA, 25 bp, SARS Virus
agttgttgaatctcatctcagtaga

SEQ ID NO: 47798 - DNA, 25 bp, SARS Virus
gttgttgaatcttatctcagtagaa

SEQ ID NO: 47799 - DNA, 25 bp, SARS Virus
ttgttgaatctcttctcagtagaag

SEQ ID NO: 47800 - DNA, 25 bp, SARS Virus
tgttgaatctcatctcagtagaaga

SEQ ID NO: 47801 - DNA, 25 bp, SARS Virus
gttgaatctcatttcagtagaagat

SEQ ID NO: 47802 - DNA, 25 bp, SARS Virus
ttgaatctcatctcagtagaagatt

SEQ ID NO: 47803 - DNA, 25 bp, SARS Virus
tgaatctcatcttagtagaagattt

SEQ ID NO: 47804 - DNA, 25 bp, SARS Virus
gaatctcatctctgtagaagattta

SEQ ID NO: 47805 - DNA, 25 bp, SARS Virus
aatctcatctcattagaagatttaa

SEQ ID NO: 47806 - DNA, 25 bp, SARS Virus
atctcatctcagtagaagatttaac

SEQ ID NO: 47807 - DNA, 25 bp, SARS Virus
tctcatctcagttgaagatttaaca

SEQ ID NO: 47808 - DNA, 25 bp, SARS Virus
ctcatctcagtataagatttaacac

SEQ ID NO: 47809 - DNA, 25 bp, SARS Virus
tcatctcagtagtagatttaacacc

SEQ ID NO: 47810 - DNA, 25 bp, SARS Virus
catctcagtagatgatttaacaccc

SEQ ID NO: 47811 - DNA, 25 bp, SARS Virus
atctcagtagaatatttaacacccg

SEQ ID NO: 47812 - DNA, 25 bp, SARS Virus
tctcagtagaagttttaacacccgt

SEQ ID NO: 47813 - DNA, 25 bp, SARS Virus
ctcagtagaagatttaacacccgtg

SEQ ID NO: 47814 - DNA, 25 bp, SARS Virus
tcagtagaagatttaacacccgtgt

SEQ ID NO: 47815 - DNA, 25 bp, SARS Virus
cagtagaagatttaacacccgtgtt

SEQ ID NO: 47816 - DNA, 25 bp, SARS Virus
agtagaagattttacacccgtgtta

SEQ ID NO: 47817 - DNA, 25 bp, SARS Virus
gtagaagatttatcacccgtgttac

SEQ ID NO: 47818 - DNA, 25 bp, SARS Virus
tagaagatttaatacccgtgttaca

SEQ ID NO: 47819 - DNA, 25 bp, SARS Virus
agaagatttaactcccgtgttacac

SEQ ID NO: 47820 - DNA, 25 bp, SARS Virus
gaagatttaacatccgtgttacaca

SEQ ID NO: 47821 - DNA, 25 bp, SARS Virus
aagatttaacactcgtgttacacat

SEQ ID NO: 47822 - DNA, 25 bp, SARS Virus
agatttaacacctgtgttacacatg

SEQ ID NO: 47823 - DNA, 25 bp, SARS Virus
gatttaacacccttgttacacatgt

SEQ ID NO: 47824 - DNA, 25 bp, SARS Virus
atttaacacccgtgttacacatgtt

SEQ ID NO: 47825 - DNA, 25 bp, SARS Virus
tttaacacccgttttacacatgttg

SEQ ID NO: 47826 - DNA, 25 bp, SARS Virus
ttaacacccgtgttacacatgttga

SEQ ID NO: 47827 - DNA, 25 bp, SARS Virus
taacacccgtgttacacatgttgag

SEQ ID NO: 47828 - DNA, 25 bp, SARS Virus
aacacccgtgtttcacatgttgagg

SEQ ID NO: 47829 - DNA, 25 bp, SARS Virus
acacccgtgttatacatgttgaggt

SEQ ID NO: 47830 - DNA, 25 bp, SARS Virus
cacccgtgttactcatgttgaggtg

SEQ ID NO: 47831 - DNA, 25 bp, SARS Virus
acccgtgttacatatgttgaggtgt

SEQ ID NO: 47832 - DNA, 25 bp, SARS Virus
cccgtgttacacttgttgaggtgtt

SEQ ID NO: 47833 - DNA, 25 bp, SARS Virus
ccgtgttacacatgttgaggtgtta

SEQ ID NO: 47834 - DNA, 25 bp, SARS Virus
cgtgttacacattttgaggtgttac

SEQ ID NO: 47835 - DNA, 25 bp, SARS Virus
gtgttacacatgttgaggtgttact

SEQ ID NO: 47836 - DNA, 25 bp, SARS Virus
tgttacacatgttgaggtgttacta

SEQ ID NO: 47837 - DNA, 25 bp, SARS Virus
gttacacatgtttaggtgttactat

SEQ ID NO: 47838 - DNA, 25 bp, SARS Virus
ttacacatgttgtggtgttactata

SEQ ID NO: 47839 - DNA, 25 bp, SARS Virus
tacacatgttgatgtgttactataa

SEQ ID NO: 47840 - DNA, 25 bp, SARS Virus
acacatgttgagttgttactataag

SEQ ID NO: 47841 - DNA, 25 bp, SARS Virus
cacatgttgaggtgttactataaga

SEQ ID NO: 47842 - DNA, 25 bp, SARS Virus
acatgttgaggttttactataagaa

SEQ ID NO: 47843 - DNA, 25 bp, SARS Virus
catgttgaggtgttactataagaag

SEQ ID NO: 47844 - DNA, 25 bp, SARS Virus
atgttgaggtgttactataagaaga

SEQ ID NO: 47845 - DNA, 25 bp, SARS Virus
tgttgaggtgtttctataagaagaa

SEQ ID NO: 47846 - DNA, 25 bp, SARS Virus
gttgaggtgttattataagaagaac

SEQ ID NO: 47847 - DNA, 25 bp, SARS Virus
ttgaggtgttactataagaagaacg

SEQ ID NO: 47848 - DNA, 25 bp, SARS Virus
tgaggtgttactttaagaagaacgt

SEQ ID NO: 47849 - DNA, 25 bp, SARS Virus
gaggtgttactataagaagaacgtt

SEQ ID NO: 47850 - DNA, 25 bp, SARS Virus
aggtgttactattagaagaacgttt

SEQ ID NO: 47851 - DNA, 25 bp, SARS Virus
ggtgttactatatgaagaacgtttt

SEQ ID NO: 47852 - DNA, 25 bp, SARS Virus
gtgttactataataagaacgttttc

SEQ ID NO: 47853 - DNA, 25 bp, SARS Virus
tgttactataagtagaacgttttct

SEQ ID NO: 47854 - DNA, 25 bp, SARS Virus
gttactataagatgaacgttttctg

SEQ ID NO: 47855 - DNA, 25 bp, SARS Virus
ttactataagaataacgttttctgt

SEQ ID NO: 47856 - DNA, 25 bp, SARS Virus
tactataagaagtacgttttctgtg

SEQ ID NO: 47857 - DNA, 25 bp, SARS Virus
actataagaagatcgttttctgtgt

SEQ ID NO: 47858 - DNA, 25 bp, SARS Virus
ctataagaagaatgttttctgtgtt

SEQ ID NO: 47859 - DNA, 25 bp, SARS Virus
tataagaagaactttttctgtgttg

SEQ ID NO: 47860 - DNA, 25 bp, SARS Virus
ataagaagaacgttttctgtgttga

SEQ ID NO: 47861 - DNA, 25 bp, SARS Virus
taagaagaacgttttctgtgttgac

SEQ ID NO: 47862 - DNA, 25 bp, SARS Virus
aagaagaacgttttctgtgttgact

SEQ ID NO: 47863 - DNA, 25 bp, SARS Virus
agaagaacgttttctgtgttgactt

SEQ ID NO: 47864 - DNA, 25 bp, SARS Virus
gaagaacgttttttgtgttgacttc

SEQ ID NO: 47865 - DNA, 25 bp, SARS Virus
aagaacgttttctgtgttgacttcg

SEQ ID NO: 47866 - DNA, 25 bp, SARS Virus
agaacgttttctttgttgacttcga

SEQ ID NO: 47867 - DNA, 25 bp, SARS Virus
gaacgttttctgtgttgacttcgaa

SEQ ID NO: 47868 - DNA, 25 bp, SARS Virus
aacgttttctgttttgacttcgaaa

SEQ ID NO: 47869 - DNA, 25 bp, SARS Virus
acgttttctgtgttgacttcgaaag

SEQ ID NO: 47870 - DNA, 25 bp, SARS Virus
cgttttctgtgttgacttcgaaagc

SEQ ID NO: 47871 - DNA, 25 bp, SARS Virus
gttttctgtgtttacttcgaaagct

SEQ ID NO: 47872 - DNA, 25 bp, SARS Virus
ttttctgtgttgtcttcgaaagctc

SEQ ID NO: 47873 - DNA, 25 bp, SARS Virus
tttctgtgttgatttcgaaagctct

SEQ ID NO: 47874 - DNA, 25 bp, SARS Virus
ttctgtgttgacttcgaaagctctt

SEQ ID NO: 47875 - DNA, 25 bp, SARS Virus
tctgtgttgacttcgaaagctcttc

SEQ ID NO: 47876 - DNA, 25 bp, SARS Virus
ctgtgttgactttgaaagctcttct

SEQ ID NO: 47877 - DNA, 25 bp, SARS Virus
tgtgttgacttctaaagctcttcta

SEQ ID NO: 47878 - DNA, 25 bp, SARS Virus
gtgttgacttcgtaagctcttctac

SEQ ID NO: 47879 - DNA, 25 bp, SARS Virus
tgttgacttcgatagctcttctacc

SEQ ID NO: 47880 - DNA, 25 bp, SARS Virus
gttgacttcgaatgctcttctacca

SEQ ID NO: 47881 - DNA, 25 bp, SARS Virus
ttgacttcgaaatctcttctaccaa

SEQ ID NO: 47882 - DNA, 25 bp, SARS Virus
tgacttcgaaagttcttctaccaaa

SEQ ID NO: 47883 - DNA, 25 bp, SARS Virus
gacttcgaaagctcttctaccaaag

SEQ ID NO: 47884 - DNA, 25 bp, SARS Virus
acttcgaaagcttttctaccaaaga

SEQ ID NO: 47885 - DNA, 25 bp, SARS Virus
cttcgaaagctcttctaccaaagag

SEQ ID NO: 47886 - DNA, 25 bp, SARS Virus
ttcgaaagctcttctaccaaagaga

SEQ ID NO: 47887 - DNA, 25 bp, SARS Virus
tcgaaagctcttttaccaaagagaa

SEQ ID NO: 47888 - DNA, 25 bp, SARS Virus
cgaaagctcttctaccaaagagaaa

SEQ ID NO: 47889 - DNA, 25 bp, SARS Virus
gaaagctcttcttccaaagagaaaa

SEQ ID NO: 47890 - DNA, 25 bp, SARS Virus
aaagctcttctatcaaagagaaaac

SEQ ID NO: 47891 - DNA, 25 bp, SARS Virus
aagctcttctactaaagagaaaaca

SEQ ID NO: 47892 - DNA, 25 bp, SARS Virus
agctcttctacctaagagaaaacag

SEQ ID NO: 47893 - DNA, 25 bp, SARS Virus
gctcttctaccatagagaaaacaga

SEQ ID NO: 47894 - DNA, 25 bp, SARS Virus
ctcttctaccaatgagaaaacagac

SEQ ID NO: 47895 - DNA, 25 bp, SARS Virus
tcttctaccaaatagaaaacagaca

SEQ ID NO: 47896 - DNA, 25 bp, SARS Virus
cttctaccaaagtgaaaacagacaa

SEQ ID NO: 47897 - DNA, 25 bp, SARS Virus
ttctaccaaagataaaacagacaaa

SEQ ID NO: 47898 - DNA, 25 bp, SARS Virus
tctaccaaagagtaaacagacaaaa

SEQ ID NO: 47899 - DNA, 25 bp, SARS Virus
ctaccaaagagataacagacaaaac

SEQ ID NO: 47900 - DNA, 25 bp, SARS Virus
taccaaagagaatacagacaaaacg

SEQ ID NO: 47901 - DNA, 25 bp, SARS Virus
accaaagagaaatcagacaaaacga

SEQ ID NO: 47902 - DNA, 25 bp, SARS Virus
ccaaagagaaaatagacaaaacgat

SEQ ID NO: 47903 - DNA, 25 bp, SARS Virus
caaagagaaaactgacaaaacgata

SEQ ID NO: 47904 - DNA, 25 bp, SARS Virus
aaagagaaaacatacaaaacgatag

SEQ ID NO: 47905 - DNA, 25 bp, SARS Virus
aagagaaaacagtcaaaacgatagg

SEQ ID NO: 47906 - DNA, 25 bp, SARS Virus
agagaaaacagataaaacgataggt

SEQ ID NO: 47907 - DNA, 25 bp, SARS Virus
gagaaaacagactaaacgataggta

SEQ ID NO: 47908 - DNA, 25 bp, SARS Virus
agaaaacagacataacgataggtac

SEQ ID NO: 47909 - DNA, 25 bp, SARS Virus
gaaaacagacaatacgataggtacg

SEQ ID NO: 47910 - DNA, 25 bp, SARS Virus
aaaacagacaaatcgataggtacgt

SEQ ID NO: 47911 - DNA, 25 bp, SARS Virus
aaacagacaaaatgataggtacgtc

SEQ ID NO: 47912 - DNA, 25 bp, SARS Virus
aacagacaaaactataggtacgtcc

SEQ ID NO: 47913 - DNA, 25 bp, SARS Virus
acagacaaaacgttaggtacgtccc

SEQ ID NO: 47914 - DNA, 25 bp, SARS Virus
cagacaaaacgataggtacgtccca

SEQ ID NO: 47915 - DNA, 25 bp, SARS Virus
agacaaaacgattggtacgtcccac

SEQ ID NO: 47916 - DNA, 25 bp, SARS Virus
gacaaaacgatatgtacgtcccacg

SEQ ID NO: 47917 - DNA, 25 bp, SARS Virus
acaaaacgatagttacgtcccacga

SEQ ID NO: 47918 - DNA, 25 bp, SARS Virus
caaaacgataggtacgtcccacgac

SEQ ID NO: 47919 - DNA, 25 bp, SARS Virus
aaaacgataggttcgtcccacgaca

SEQ ID NO: 47920 - DNA, 25 bp, SARS Virus
aaacgataggtatgtcccacgacat

SEQ ID NO: 47921 - DNA, 25 bp, SARS Virus
aacgataggtacttcccacgacatc

SEQ ID NO: 47922 - DNA, 25 bp, SARS Virus
acgataggtacgtcccacgacatct

SEQ ID NO: 47923 - DNA, 25 bp, SARS Virus
cgataggtacgttccacgacatctg

SEQ ID NO: 47924 - DNA, 25 bp, SARS Virus
gataggtacgtctcacgacatctgt

SEQ ID NO: 47925 - DNA, 25 bp, SARS Virus
ataggtacgtcctacgacatctgta

SEQ ID NO: 47926 - DNA, 25 bp, SARS Virus
taggtacgtccctcgacatctgtaa

SEQ ID NO: 47927 - DNA, 25 bp, SARS Virus
aggtacgtcccatgacatctgtaat

SEQ ID NO: 47928 - DNA, 25 bp, SARS Virus
ggtacgtcccactacatctgtaatt

SEQ ID NO: 47929 - DNA, 25 bp, SARS Virus
gtacgtcccacgtcatctgtaatta

SEQ ID NO: 47930 - DNA, 25 bp, SARS Virus
tacgtcccacgatatctgtaattat

SEQ ID NO: 47931 - DNA, 25 bp, SARS Virus
acgtcccacgacttctgtaattatc

SEQ ID NO: 47932 - DNA, 25 bp, SARS Virus
cgtcccacgacatctgtaattatcc

SEQ ID NO: 47933 - DNA, 25 bp, SARS Virus
gtcccacgacatttgtaattatcca

SEQ ID NO: 47934 - DNA, 25 bp, SARS Virus
tcccacgacatctgtaattatccaa

SEQ ID NO: 47935 - DNA, 25 bp, SARS Virus
cccacgacatctttaattatccaac

SEQ ID NO: 47936 - DNA, 25 bp, SARS Virus
ccacgacatctgtaattatccaaca

SEQ ID NO: 47937 - DNA, 25 bp, SARS Virus
cacgacatctgttattatccaacac

SEQ ID NO: 47938 - DNA, 25 bp, SARS Virus
acgacatctgtatttatccaacacg

SEQ ID NO: 47939 - DNA, 25 bp, SARS Virus
cgacatctgtaattatccaacacgc

SEQ ID NO: 47940 - DNA, 25 bp, SARS Virus
gacatctgtaattatccaacacgct

SEQ ID NO: 47941 - DNA, 25 bp, SARS Virus
acatctgtaattttccaacacgctc

SEQ ID NO: 47942 - DNA, 25 bp, SARS Virus
catctgtaattatccaacacgctcc

SEQ ID NO: 47943 - DNA, 25 bp, SARS Virus
atctgtaattattcaacacgctcct

SEQ ID NO: 47944 - DNA, 25 bp, SARS Virus
tctgtaattatctaacacgctcctt

SEQ ID NO: 47945 - DNA, 25 bp, SARS Virus
ctgtaattatcctacacgctccttt

SEQ ID NO: 47946 - DNA, 25 bp, SARS Virus
tgtaattatccatcacgctccttta

SEQ ID NO: 47947 - DNA, 25 bp, SARS Virus
gtaattatccaatacgctcctttac

SEQ ID NO: 47948 - DNA, 25 bp, SARS Virus
taattatccaactcgctcctttacg

SEQ ID NO: 47949 - DNA, 25 bp, SARS Virus
aattatccaacatgctcctttacga

SEQ ID NO: 47950 - DNA, 25 bp, SARS Virus
attatccaacactctcctttacgag

SEQ ID NO: 47951 - DNA, 25 bp, SARS Virus
ttatccaacacgttcctttacgagc

SEQ ID NO: 47952 - DNA, 25 bp, SARS Virus
tatccaacacgctcctttacgagct

SEQ ID NO: 47953 - DNA, 25 bp, SARS Virus
atccaacacgctactttacgagcta

SEQ ID NO: 47954 - DNA, 25 bp, SARS Virus
tccaacacgctcatttacgagctat

SEQ ID NO: 47955 - DNA, 25 bp, SARS Virus
ccaacacgctccattacgagctatt

SEQ ID NO: 47956 - DNA, 25 bp, SARS Virus
caacacgctcctatacgagctattg

SEQ ID NO: 47957 - DNA, 25 bp, SARS Virus
aacacgctccttaacgagctattgg

SEQ ID NO: 47958 - DNA, 25 bp, SARS Virus
acacgctcctttacgagctattggc

SEQ ID NO: 47959 - DNA, 25 bp, SARS Virus
cacgctcctttaagagctattggca

SEQ ID NO: 47960 - DNA, 25 bp, SARS Virus
acgctcctttacaagctattggcac

SEQ ID NO: 47961 - DNA, 25 bp, SARS Virus
cgctcctttacgagctattggcacg

SEQ ID NO: 47962 - DNA, 25 bp, SARS Virus
gctcctttacgaactattggcacga

SEQ ID NO: 47963 - DNA, 25 bp, SARS Virus
ctcctttacgagatattggcacgat

SEQ ID NO: 47964 - DNA, 25 bp, SARS Virus
tcctttacgagcaattggcacgatg

SEQ ID NO: 47965 - DNA, 25 bp, SARS Virus
cctttacgagctattggcacgatga

SEQ ID NO: 47966 - DNA, 25 bp, SARS Virus
ctttacgagctaatggcacgatgag

SEQ ID NO: 47967 - DNA, 25 bp, SARS Virus
tttacgagctataggcacgatgaga

SEQ ID NO: 47968 - DNA, 25 bp, SARS Virus
ttacgagctattagcacgatgagaa

SEQ ID NO: 47969 - DNA, 25 bp, SARS Virus
tacgagctattgacacgatgagaag

SEQ ID NO: 47970 - DNA, 25 bp, SARS Virus
acgagctattggaacgatgagaagt

SEQ ID NO: 47971 - DNA, 25 bp, SARS Virus
cgagctattggcacgatgagaagtc

SEQ ID NO: 47972 - DNA, 25 bp, SARS Virus
gagctattggcaagatgagaagtcc

SEQ ID NO: 47973 - DNA, 25 bp, SARS Virus
agctattggcacaatgagaagtccg

SEQ ID NO: 47974 - DNA, 25 bp, SARS Virus
gctattggcacgatgagaagtccga

SEQ ID NO: 47975 - DNA, 25 bp, SARS Virus
ctattggcacgaagagaagtccgat

SEQ ID NO: 47976 - DNA, 25 bp, SARS Virus
tattggcacgataagaagtccgata

SEQ ID NO: 47977 - DNA, 25 bp, SARS Virus
attggcacgatgagaagtccgataa

SEQ ID NO: 47978 - DNA, 25 bp, SARS Virus
ttggcacgatgaaaagtccgataac

SEQ ID NO: 47979 - DNA, 25 bp, SARS Virus
tggcacgatgagaagtccgataacg

SEQ ID NO: 47980 - DNA, 25 bp, SARS Virus
ggcacgatgagaagtccgataacga

SEQ ID NO: 47981 - DNA, 25 bp, SARS Virus
gcacgatgagaaatccgataacgaa

SEQ ID NO: 47982 - DNA, 25 bp, SARS Virus
cacgatgagaagaccgataacgaag

SEQ ID NO: 47983 - DNA, 25 bp, SARS Virus
acgatgagaagtacgataacgaagt

SEQ ID NO: 47984 - DNA, 25 bp, SARS Virus
cgatgagaagtcagataacgaagtc

SEQ ID NO: 47985 - DNA, 25 bp, SARS Virus
gatgagaagtccaataacgaagtct

SEQ ID NO: 47986 - DNA, 25 bp, SARS Virus
atgagaagtccgataacgaagtctt

SEQ ID NO: 47987 - DNA, 25 bp, SARS Virus
tgagaagtccgaaaacgaagtctta

SEQ ID NO: 47988 - DNA, 25 bp, SARS Virus
gagaagtccgataacgaagtcttaa

SEQ ID NO: 47989 - DNA, 25 bp, SARS Virus
agaagtccgataacgaagtcttaaa

SEQ ID NO: 47990 - DNA, 25 bp, SARS Virus
gaagtccgataaagaagtcttaaat

SEQ ID NO: 47991 - DNA, 25 bp, SARS Virus
aagtccgataacaaagtcttaaatc

SEQ ID NO: 47992 - DNA, 25 bp, SARS Virus
agtccgataacgaagtcttaaatca

SEQ ID NO: 47993 - DNA, 25 bp, SARS Virus
gtccgataacgaagtcttaaatcaa

SEQ ID NO: 47994 - DNA, 25 bp, SARS Virus
tccgataacgaaatcttaaatcaag

SEQ ID NO: 47995 - DNA, 25 bp, SARS Virus
ccgataacgaagacttaaatcaaga

SEQ ID NO: 47996 - DNA, 25 bp, SARS Virus
cgataacgaagtattaaatcaagaa

SEQ ID NO: 47997 - DNA, 25 bp, SARS Virus
gataacgaagtcataaatcaagaaa

SEQ ID NO: 47998 - DNA, 25 bp, SARS Virus
ataacgaagtctaaaatcaagaaat

SEQ ID NO: 47999 - DNA, 25 bp, SARS Virus
taacgaagtcttaaatcaagaaatg

SEQ ID NO: 48000 - DNA, 25 bp, SARS Virus
aacgaagtcttaaatcaagaaatgg

SEQ ID NO: 48001 - DNA, 25 bp, SARS Virus
acgaagtcttaaatcaagaaatggt

SEQ ID NO: 48002 - DNA, 25 bp, SARS Virus
cgaagtcttaaaacaagaaatggta

SEQ ID NO: 48003 - DNA, 25 bp, SARS Virus
gaagtcttaaataaagaaatggtag

SEQ ID NO: 48004 - DNA, 25 bp, SARS Virus
aagtcttaaatcaagaaatggtagt

SEQ ID NO: 48005 - DNA, 25 bp, SARS Virus
agtcttaaatcaagaaatggtagta

SEQ ID NO: 48006 - DNA, 25 bp, SARS Virus
gtcttaaatcaaaaaatggtagtat

SEQ ID NO: 48007 - DNA, 25 bp, SARS Virus
tcttaaatcaagaaatggtagtata

SEQ ID NO: 48008 - DNA, 25 bp, SARS Virus
cttaaatcaagaaatggtagtatac

SEQ ID NO: 48009 - DNA, 25 bp, SARS Virus
ttaaatcaagaaatggtagtatacg

SEQ ID NO: 48010 - DNA, 25 bp, SARS Virus
taaatcaagaaaaggtagtatacgg

SEQ ID NO: 48011 - DNA, 25 bp, SARS Virus
aaatcaagaaatagtagtatacggc

SEQ ID NO: 48012 - DNA, 25 bp, SARS Virus
aatcaagaaatgatagtatacggcg

SEQ ID NO: 48013 - DNA, 25 bp, SARS Virus
atcaagaaatggaagtatacggcga

SEQ ID NO: 48014 - DNA, 25 bp, SARS Virus
tcaagaaatggtagtatacggcgaa

SEQ ID NO: 48015 - DNA, 25 bp, SARS Virus
caagaaatggtaatatacggcgaat

SEQ ID NO: 48016 - DNA, 25 bp, SARS Virus
aagaaatggtagaatacggcgaata

SEQ ID NO: 48017 - DNA, 25 bp, SARS Virus
agaaatggtagtatacggcgaatac

SEQ ID NO: 48018 - DNA, 25 bp, SARS Virus
gaaatggtagtaaacggcgaatacg

SEQ ID NO: 48019 - DNA, 25 bp, SARS Virus
aaatggtagtatacggcgaatacgg

SEQ ID NO: 48020 - DNA, 25 bp, SARS Virus
aatggtagtataaggcgaatacggt

SEQ ID NO: 48021 - DNA, 25 bp, SARS Virus
atggtagtatacagcgaatacggtg

SEQ ID NO: 48022 - DNA, 25 bp, SARS Virus
tggtagtatacgacgaatacggtga

SEQ ID NO: 48023 - DNA, 25 bp, SARS Virus
ggtagtatacggagaatacggtgac

SEQ ID NO: 48024 - DNA, 25 bp, SARS Virus
gtagtatacggcaaatacggtgacg

SEQ ID NO: 48025 - DNA, 25 bp, SARS Virus
tagtatacggcgaatacggtgacgg

SEQ ID NO: 48026 - DNA, 25 bp, SARS Virus
agtatacggcgaatacggtgacggg

SEQ ID NO: 48027 - DNA, 25 bp, SARS Virus
gtatacggcgaaaacggtgacgggt

SEQ ID NO: 48028 - DNA, 25 bp, SARS Virus
tatacggcgaatacggtgacgggtc

SEQ ID NO: 48029 - DNA, 25 bp, SARS Virus
atacggcgaataaggtgacgggtcc

SEQ ID NO: 48030 - DNA, 25 bp, SARS Virus
tacggcgaatacagtgacgggtcct

SEQ ID NO: 48031 - DNA, 25 bp, SARS Virus
acggcgaatacgatgacgggtcctc

SEQ ID NO: 48032 - DNA, 25 bp, SARS Virus
cggcgaatacggagacgggtcctcc

SEQ ID NO: 48033 - DNA, 25 bp, SARS Virus
ggcgaatacggtaacgggtcctccg

SEQ ID NO: 48034 - DNA, 25 bp, SARS Virus
gcgaatacggtgacgggtcctccgg

SEQ ID NO: 48035 - DNA, 25 bp, SARS Virus
cgaatacggtgaagggtcctccgga

SEQ ID NO: 48036 - DNA, 25 bp, SARS Virus
gaatacggtgacaggtcctccggat

SEQ ID NO: 48037 - DNA, 25 bp, SARS Virus
aatacggtgacgagtcctccggata

SEQ ID NO: 48038 - DNA, 25 bp, SARS Virus
atacggtgacggatcctccggatac

SEQ ID NO: 48039 - DNA, 25 bp, SARS Virus
tacggtgacgggacctccggatact

SEQ ID NO: 48040 - DNA, 25 bp, SARS Virus
acggtgacgggtactccggatactc

SEQ ID NO: 48041 - DNA, 25 bp, SARS Virus
cggtgacgggtcatccggatactcg

SEQ ID NO: 48042 - DNA, 25 bp, SARS Virus
ggtgacgggtccaccggatactcgt

SEQ ID NO: 48043 - DNA, 25 bp, SARS Virus
gtgacgggtcctacggatactcgtc

SEQ ID NO: 48044 - DNA, 25 bp, SARS Virus
tgacgggtcctcaggatactcgtcc

SEQ ID NO: 48045 - DNA, 25 bp, SARS Virus
gacgggtcctccagatactcgtccg

SEQ ID NO: 48046 - DNA, 25 bp, SARS Virus
acgggtcctccgaatactcgtccga

SEQ ID NO: 48047 - DNA, 25 bp, SARS Virus
cgggtcctccggatactcgtccgac

SEQ ID NO: 48048 - DNA, 25 bp, SARS Virus
gggtcctccggaaactcgtccgaca

SEQ ID NO: 48049 - DNA, 25 bp, SARS Virus
ggtcctccggatactcgtccgacat

SEQ ID NO: 48050 - DNA, 25 bp, SARS Virus
gtcctccggataatcgtccgacatc

SEQ ID NO: 48051 - DNA, 25 bp, SARS Virus
tcctccggatacacgtccgacatcg

SEQ ID NO: 48052 - DNA, 25 bp, SARS Virus
cctccggatactagtccgacatcga

SEQ ID NO: 48053 - DNA, 25 bp, SARS Virus
ctccggatactcatccgacatcgat

SEQ ID NO: 48054 - DNA, 25 bp, SARS Virus
tccggatactcgaccgacatcgatt

SEQ ID NO: 48055 - DNA, 25 bp, SARS Virus
ccggatactcgtacgacatcgatta

SEQ ID NO: 48056 - DNA, 25 bp, SARS Virus
cggatactcgtcagacatcgattac

SEQ ID NO: 48057 - DNA, 25 bp, SARS Virus
ggatactcgtccaacatcgattacc

SEQ ID NO: 48058 - DNA, 25 bp, SARS Virus
gatactcgtccgacatcgattacca

SEQ ID NO: 48059 - DNA, 25 bp, SARS Virus
atactcgtccgaaatcgattaccac

SEQ ID NO: 48060 - DNA, 25 bp, SARS Virus
tactcgtccgacatcgattaccact

SEQ ID NO: 48061 - DNA, 25 bp, SARS Virus
actcgtccgacaacgattaccacta

SEQ ID NO: 48062 - DNA, 25 bp, SARS Virus
ctcgtccgacatagattaccactaa

SEQ ID NO: 48063 - DNA, 25 bp, SARS Virus
tcgtccgacatcaattaccactaag

SEQ ID NO: 48064 - DNA, 25 bp, SARS Virus
cgtccgacatcgattaccactaaga

SEQ ID NO: 48065 - DNA, 25 bp, SARS Virus
gtccgacatcgaataccactaagac

SEQ ID NO: 48066 - DNA, 25 bp, SARS Virus
tccgacatcgataaccactaagact

SEQ ID NO: 48067 - DNA, 25 bp, SARS Virus
ccgacatcgattaccactaagactt

SEQ ID NO: 48068 - DNA, 25 bp, SARS Virus
cgacatcgattaacactaagacttc

SEQ ID NO: 48069 - DNA, 25 bp, SARS Virus
gacatcgattacaactaagacttca

SEQ ID NO: 48070 - DNA, 25 bp, SARS Virus
acatcgattaccactaagacttcag

SEQ ID NO: 48071 - DNA, 25 bp, SARS Virus
catcgattaccaataagacttcagc

SEQ ID NO: 48072 - DNA, 25 bp, SARS Virus
atcgattaccacaaagacttcagca

SEQ ID NO: 48073 - DNA, 25 bp, SARS Virus
tcgattaccactaagacttcagcaa

SEQ ID NO: 48074 - DNA, 25 bp, SARS Virus
cgattaccactaagacttcagcaag

SEQ ID NO: 48075 - DNA, 25 bp, SARS Virus
gattaccactaaaacttcagcaaga

SEQ ID NO: 48076 - DNA, 25 bp, SARS Virus
attaccactaagacttcagcaagag

SEQ ID NO: 48077 - DNA, 25 bp, SARS Virus
ttaccactaagaattcagcaagagt

SEQ ID NO: 48078 - DNA, 25 bp, SARS Virus
taccactaagacatcagcaagagtt

SEQ ID NO: 48079 - DNA, 25 bp, SARS Virus
accactaagactacagcaagagttt

SEQ ID NO: 48080 - DNA, 25 bp, SARS Virus
ccactaagacttaagcaagagtttt

SEQ ID NO: 48081 - DNA, 25 bp, SARS Virus
cactaagacttcagcaagagttttt

SEQ ID NO: 48082 - DNA, 25 bp, SARS Virus
actaagacttcaacaagagtttttc

SEQ ID NO: 48083 - DNA, 25 bp, SARS Virus
ctaagacttcagaaagagtttttca

SEQ ID NO: 48084 - DNA, 25 bp, SARS Virus
taagacttcagcaagagtttttcaa

SEQ ID NO: 48085 - DNA, 25 bp, SARS Virus
aagacttcagcaagagtttttcaat

SEQ ID NO: 48086 - DNA, 25 bp, SARS Virus
agacttcagcaaaagtttttcaatt

SEQ ID NO: 48087 - DNA, 25 bp, SARS Virus
gacttcagcaagagtttttcaattt

SEQ ID NO: 48088 - DNA, 25 bp, SARS Virus
acttcagcaagaatttttcaatttc

SEQ ID NO: 48089 - DNA, 25 bp, SARS Virus
cttcagcaagagattttcaatttct

SEQ ID NO: 48090 - DNA, 25 bp, SARS Virus
ttcagcaagagtatttcaatttctt

SEQ ID NO: 48091 - DNA, 25 bp, SARS Virus
tcagcaagagttattcaatttcttt

SEQ ID NO: 48092 - DNA, 25 bp, SARS Virus
cagcaagagtttatcaatttcttta

SEQ ID NO: 48093 - DNA, 25 bp, SARS Virus
agcaagagttttacaatttctttag

SEQ ID NO: 48094 - DNA, 25 bp, SARS Virus
gcaagagtttttaaatttctttaga

SEQ ID NO: 48095 - DNA, 25 bp, SARS Virus
caagagtttttcaatttctttagaa

SEQ ID NO: 48096 - DNA, 25 bp, SARS Virus
aagagtttttcaatttctttagaaa

SEQ ID NO: 48097 - DNA, 25 bp, SARS Virus
agagtttttcaaattctttagaaac

SEQ ID NO: 48098 - DNA, 25 bp, SARS Virus
gagtttttcaatatctttagaaact

SEQ ID NO: 48099 - DNA, 25 bp, SARS Virus
agtttttcaattactttagaaactt

SEQ ID NO: 48100 - DNA, 25 bp, SARS Virus
gtttttcaatttatttagaaactta

SEQ ID NO: 48101 - DNA, 25 bp, SARS Virus
tttttcaatttcattagaaacttac

SEQ ID NO: 48102 - DNA, 25 bp, SARS Virus
ttttcaatttctatagaaacttaca

SEQ ID NO: 48103 - DNA, 25 bp, SARS Virus
tttcaatttcttaagaaacttacac

SEQ ID NO: 48104 - DNA, 25 bp, SARS Virus
ttcaatttctttagaaacttacacc

SEQ ID NO: 48105 - DNA, 25 bp, SARS Virus
tcaatttctttaaaaacttacaccg

SEQ ID NO: 48106 - DNA, 25 bp, SARS Virus
caatttctttagaaacttacaccga

SEQ ID NO: 48107 - DNA, 25 bp, SARS Virus
aatttctttagaaacttacaccgat

SEQ ID NO: 48108 - DNA, 25 bp, SARS Virus
atttctttagaaacttacaccgatt

SEQ ID NO: 48109 - DNA, 25 bp, SARS Virus
tttctttagaaaattacaccgattt

SEQ ID NO: 48110 - DNA, 25 bp, SARS Virus
ttctttagaaacatacaccgattta

SEQ ID NO: 48111 - DNA, 25 bp, SARS Virus
tctttagaaactaacaccgatttag

SEQ ID NO: 48112 - DNA, 25 bp, SARS Virus
ctttagaaacttacaccgatttaga

SEQ ID NO: 48113 - DNA, 25 bp, SARS Virus
tttagaaacttaaaccgatttagac

SEQ ID NO: 48114 - DNA, 25 bp, SARS Virus
ttagaaacttacaccgatttagact

SEQ ID NO: 48115 - DNA, 25 bp, SARS Virus
tagaaacttacaacgatttagactc

SEQ ID NO: 48116 - DNA, 25 bp, SARS Virus
agaaacttacacagatttagactca

SEQ ID NO: 48117 - DNA, 25 bp, SARS Virus
gaaacttacaccaatttagactcaa

SEQ ID NO: 48118 - DNA, 25 bp, SARS Virus
aaacttacaccgatttagactcaaa

SEQ ID NO: 48119 - DNA, 25 bp, SARS Virus
aacttacaccgaattagactcaaac

SEQ ID NO: 48120 - DNA, 25 bp, SARS Virus
acttacaccgatatagactcaaact

SEQ ID NO: 48121 - DNA, 25 bp, SARS Virus
cttacaccgattaagactcaaactg

SEQ ID NO: 48122 - DNA, 25 bp, SARS Virus
ttacaccgatttagactcaaactgg

SEQ ID NO: 48123 - DNA, 25 bp, SARS Virus
tacaccgatttaaactcaaactggc

SEQ ID NO: 48124 - DNA, 25 bp, SARS Virus
acaccgatttagactcaaactggca

SEQ ID NO: 48125 - DNA, 25 bp, SARS Virus
caccgatttagaatcaaactggcac

SEQ ID NO: 48126 - DNA, 25 bp, SARS Virus
accgatttagacacaaactggcact

SEQ ID NO: 48127 - DNA, 25 bp, SARS Virus
ccgatttagactaaaactggcacta

SEQ ID NO: 48128 - DNA, 25 bp, SARS Virus
cgatttagactcaaactggcactac

SEQ ID NO: 48129 - DNA, 25 bp, SARS Virus
gatttagactcaaactggcactacg

SEQ ID NO: 48130 - DNA, 25 bp, SARS Virus
atttagactcaaactggcactacga

SEQ ID NO: 48131 - DNA, 25 bp, SARS Virus
tttagactcaaaatggcactacgac

SEQ ID NO: 48132 - DNA, 25 bp, SARS Virus
ttagactcaaacaggcactacgacg

SEQ ID NO: 48133 - DNA, 25 bp, SARS Virus
tagactcaaactagcactacgacgg

SEQ ID NO: 48134 - DNA, 25 bp, SARS Virus
agactcaaactgacactacgacggt

SEQ ID NO: 48135 - DNA, 25 bp, SARS Virus
gactcaaactggaactacgacggta

SEQ ID NO: 48136 - DNA, 25 bp, SARS Virus
actcaaactggcactacgacggtac

SEQ ID NO: 48137 - DNA, 25 bp, SARS Virus
ctcaaactggcaatacgacggtacg

SEQ ID NO: 48138 - DNA, 25 bp, SARS Virus
tcaaactggcacaacgacggtacgt

SEQ ID NO: 48139 - DNA, 25 bp, SARS Virus
caaactggcactacgacggtacgtt

SEQ ID NO: 48140 - DNA, 25 bp, SARS Virus
aaactggcactaagacggtacgttg

SEQ ID NO: 48141 - DNA, 25 bp, SARS Virus
aactggcactacaacggtacgttgc

SEQ ID NO: 48142 - DNA, 25 bp, SARS Virus
actggcactacgacggtacgttgcg

SEQ ID NO: 48143 - DNA, 25 bp, SARS Virus
ctggcactacgaaggtacgttgcgt

SEQ ID NO: 48144 - DNA, 25 bp, SARS Virus
tggcactacgacagtacgttgcgtt

SEQ ID NO: 48145 - DNA, 25 bp, SARS Virus
ggcactacgacgatacgttgcgttc

SEQ ID NO: 48146 - DNA, 25 bp, SARS Virus
gcactacgacggaacgttgcgttca

SEQ ID NO: 48147 - DNA, 25 bp, SARS Virus
cactacgacggtacgttgcgttcaa

SEQ ID NO: 48148 - DNA, 25 bp, SARS Virus
actacgacggtaagttgcgttcaac

SEQ ID NO: 48149 - DNA, 25 bp, SARS Virus
ctacgacggtacattgcgttcaacc

SEQ ID NO: 48150 - DNA, 25 bp, SARS Virus
tacgacggtacgatgcgttcaacct

SEQ ID NO: 48151 - DNA, 25 bp, SARS Virus
acgacggtacgtagcgttcaacctt

SEQ ID NO: 48152 - DNA, 25 bp, SARS Virus
cgacggtacgttacgttcaaccttt

SEQ ID NO: 48153 - DNA, 25 bp, SARS Virus
gacggtacgttgagttcaacctttt

SEQ ID NO: 48154 - DNA, 25 bp, SARS Virus
acggtacgttgcattcaaccttttc

SEQ ID NO: 48155 - DNA, 25 bp, SARS Virus
cggtacgttgcgatcaaccttttct

SEQ ID NO: 48156 - DNA, 25 bp, SARS Virus
ggtacgttgcgtacaaccttttcta

SEQ ID NO: 48157 - DNA, 25 bp, SARS Virus
gtacgttgcgttaaaccttttctac

SEQ ID NO: 48158 - DNA, 25 bp, SARS Virus
tacgttgcgttcaaccttttctacc

SEQ ID NO: 48159 - DNA, 25 bp, SARS Virus
acgttgcgttcaaccttttctaccg

SEQ ID NO: 48160 - DNA, 25 bp, SARS Virus
cgttgcgttcaaacttttctaccgt

SEQ ID NO: 48161 - DNA, 25 bp, SARS Virus
gttgcgttcaacattttctaccgtc

SEQ ID NO: 48162 - DNA, 25 bp, SARS Virus
ttgcgttcaaccatttctaccgtct

SEQ ID NO: 48163 - DNA, 25 bp, SARS Virus
tgcgttcaacctattctaccgtcta

SEQ ID NO: 48164 - DNA, 25 bp, SARS Virus
gcgttcaaccttatctaccgtctag

SEQ ID NO: 48165 - DNA, 25 bp, SARS Virus
cgttcaacctttactaccgtctagt

SEQ ID NO: 48166 - DNA, 25 bp, SARS Virus
gttcaaccttttataccgtctagtc

SEQ ID NO: 48167 - DNA, 25 bp, SARS Virus
ttcaaccttttcaaccgtctagtcc

SEQ ID NO: 48168 - DNA, 25 bp, SARS Virus
tcaaccttttctaccgtctagtccg

SEQ ID NO: 48169 - DNA, 25 bp, SARS Virus
caaccttttctaacgtctagtccga

SEQ ID NO: 48170 - DNA, 25 bp, SARS Virus
aaccttttctacagtctagtccgat

SEQ ID NO: 48171 - DNA, 25 bp, SARS Virus
accttttctaccatctagtccgata

SEQ ID NO: 48172 - DNA, 25 bp, SARS Virus
ccttttctaccgactagtccgatac

SEQ ID NO: 48173 - DNA, 25 bp, SARS Virus
cttttctaccgtatagtccgatact

SEQ ID NO: 48174 - DNA, 25 bp, SARS Virus
ttttctaccgtcaagtccgatactg

SEQ ID NO: 48175 - DNA, 25 bp, SARS Virus
tttctaccgtctagtccgatactgg

SEQ ID NO: 48176 - DNA, 25 bp, SARS Virus
ttctaccgtctaatccgatactggg

SEQ ID NO: 48177 - DNA, 25 bp, SARS Virus
tctaccgtctagaccgatactgggt

SEQ ID NO: 48178 - DNA, 25 bp, SARS Virus
ctaccgtctagtacgatactgggtt

SEQ ID NO: 48179 - DNA, 25 bp, SARS Virus
taccgtctagtcagatactgggttt

SEQ ID NO: 48180 - DNA, 25 bp, SARS Virus
accgtctagtccaatactgggttta

SEQ ID NO: 48181 - DNA, 25 bp, SARS Virus
ccgtctagtccgatactgggtttac

SEQ ID NO: 48182 - DNA, 25 bp, SARS Virus
cgtctagtccgaaactgggtttaca

SEQ ID NO: 48183 - DNA, 25 bp, SARS Virus
gtctagtccgatactgggtttacat

SEQ ID NO: 48184 - DNA, 25 bp, SARS Virus
tctagtccgataatgggtttacatg

SEQ ID NO: 48185 - DNA, 25 bp, SARS Virus
ctagtccgatacagggtttacatgt

SEQ ID NO: 48186 - DNA, 25 bp, SARS Virus
tagtccgatactaggtttacatgtt

SEQ ID NO: 48187 - DNA, 25 bp, SARS Virus
agtccgatactgagtttacatgttt

SEQ ID NO: 48188 - DNA, 25 bp, SARS Virus
gtccgatactggatttacatgtttg

SEQ ID NO: 48189 - DNA, 25 bp, SARS Virus
tccgatactgggattacatgtttgt

SEQ ID NO: 48190 - DNA, 25 bp, SARS Virus
ccgatactgggtatacatgtttgtc

SEQ ID NO: 48191 - DNA, 25 bp, SARS Virus
cgatactgggttaacatgtttgtcc

SEQ ID NO: 48192 - DNA, 25 bp, SARS Virus
gatactgggtttacatgtttgtccg

SEQ ID NO: 48193 - DNA, 25 bp, SARS Virus
atactgggtttaaatgtttgtccgt

SEQ ID NO: 48194 - DNA, 25 bp, SARS Virus
tactgggtttacatgtttgtccgtt

SEQ ID NO: 48195 - DNA, 25 bp, SARS Virus
actgggtttacaagtttgtccgttc

SEQ ID NO: 48196 - DNA, 25 bp, SARS Virus
ctgggtttacatatttgtccgttct

SEQ ID NO: 48197 - DNA, 25 bp, SARS Virus
tgggtttacatgattgtccgttcta

SEQ ID NO: 48198 - DNA, 25 bp, SARS Virus
gggtttacatgtatgtccgttctag

SEQ ID NO: 48199 - DNA, 25 bp, SARS Virus
ggtttacatgttagtccgttctaga

SEQ ID NO: 48200 - DNA, 25 bp, SARS Virus
gtttacatgtttatccgttctagac

SEQ ID NO: 48201 - DNA, 25 bp, SARS Virus
tttacatgtttgaccgttctagact

SEQ ID NO: 48202 - DNA, 25 bp, SARS Virus
ttacatgtttgtacgttctagactc

SEQ ID NO: 48203 - DNA, 25 bp, SARS Virus
tacatgtttgtcagttctagactcc

SEQ ID NO: 48204 - DNA, 25 bp, SARS Virus
acatgtttgtccattctagactcct

SEQ ID NO: 48205 - DNA, 25 bp, SARS Virus
catgtttgtccgatctagactcctg

SEQ ID NO: 48206 - DNA, 25 bp, SARS Virus
atgtttgtccgtactagactcctgt

SEQ ID NO: 48207 - DNA, 25 bp, SARS Virus
tgtttgtccgttatagactcctgtt

SEQ ID NO: 48208 - DNA, 25 bp, SARS Virus
gtttgtccgttcaagactcctgttc

SEQ ID NO: 48209 - DNA, 25 bp, SARS Virus
tttgtccgttctagactcctgttct

SEQ ID NO: 48210 - DNA, 25 bp, SARS Virus
ttgtccgttctaaactcctgttctc

SEQ ID NO: 48211 - DNA, 25 bp, SARS Virus
tgtccgttctagactcctgttctcc

SEQ ID NO: 48212 - DNA, 25 bp, SARS Virus
gtccgttctagaatcctgttctccc

SEQ ID NO: 48213 - DNA, 25 bp, SARS Virus
tccgttctagacacctgttctcccg

SEQ ID NO: 48214 - DNA, 25 bp, SARS Virus
ccgttctagactactgttctcccgt

SEQ ID NO: 48215 - DNA, 25 bp, SARS Virus
cgttctagactcatgttctcccgtt

SEQ ID NO: 48216 - DNA, 25 bp, SARS Virus
gttctagactccagttctcccgttt

SEQ ID NO: 48217 - DNA, 25 bp, SARS Virus
ttctagactcctattctcccgtttt

SEQ ID NO: 48218 - DNA, 25 bp, SARS Virus
tctagactcctgatctcccgttttc

SEQ ID NO: 48219 - DNA, 25 bp, SARS Virus
ctagactcctgtactcccgttttca

SEQ ID NO: 48220 - DNA, 25 bp, SARS Virus
tagactcctgttatcccgttttcat

SEQ ID NO: 48221 - DNA, 25 bp, SARS Virus
agactcctgttcacccgttttcatt

SEQ ID NO: 48222 - DNA, 25 bp, SARS Virus
gactcctgttctaccgttttcattg

SEQ ID NO: 48223 - DNA, 25 bp, SARS Virus
actcctgttctcacgttttcattga

SEQ ID NO: 48224 - DNA, 25 bp, SARS Virus
ctcctgttctccagttttcattgat

SEQ ID NO: 48225 - DNA, 25 bp, SARS Virus
tcctgttctcccattttcattgatc

SEQ ID NO: 48226 - DNA, 25 bp, SARS Virus
cctgttctcccgatttcattgatca

SEQ ID NO: 48227 - DNA, 25 bp, SARS Virus
ctgttctcccgtattcattgatcac

SEQ ID NO: 48228 - DNA, 25 bp, SARS Virus
tgttctcccgttatcattgatcacg

SEQ ID NO: 48229 - DNA, 25 bp, SARS Virus
gttctcccgtttacattgatcacga

SEQ ID NO: 48230 - DNA, 25 bp, SARS Virus
ttctcccgttttaattgatcacgat

SEQ ID NO: 48231 - DNA, 25 bp, SARS Virus
tctcccgttttcattgatcacgata

SEQ ID NO: 48232 - DNA, 25 bp, SARS Virus
ctcccgttttcaatgatcacgatac

SEQ ID NO: 48233 - DNA, 25 bp, SARS Virus
tcccgttttcatagatcacgatacg

SEQ ID NO: 48234 - DNA, 25 bp, SARS Virus
cccgttttcattaatcacgatacgt

SEQ ID NO: 48235 - DNA, 25 bp, SARS Virus
ccgttttcattgatcacgatacgtt

SEQ ID NO: 48236 - DNA, 25 bp, SARS Virus
cgttttcattgaacacgatacgttt

SEQ ID NO: 48237 - DNA, 25 bp, SARS Virus
gttttcattgataacgatacgtttg

SEQ ID NO: 48238 - DNA, 25 bp, SARS Virus
ttttcattgatcacgatacgtttgt

SEQ ID NO: 48239 - DNA, 25 bp, SARS Virus
tttcattgatcaagatacgtttgtt

SEQ ID NO: 48240 - DNA, 25 bp, SARS Virus
ttcattgatcacaatacgtttgtta

SEQ ID NO: 48241 - DNA, 25 bp, SARS Virus
tcattgatcacgatacgtttgttac

SEQ ID NO: 48242 - DNA, 25 bp, SARS Virus
cattgatcacgaaacgtttgttacg

SEQ ID NO: 48243 - DNA, 25 bp, SARS Virus
attgatcacgatacgtttgttacga

SEQ ID NO: 48244 - DNA, 25 bp, SARS Virus
ttgatcacgataagtttgttacgag

SEQ ID NO: 48245 - DNA, 25 bp, SARS Virus
tgatcacgatacatttgttacgaga

SEQ ID NO: 48246 - DNA, 25 bp, SARS Virus
gatcacgatacgattgttacgagaa

SEQ ID NO: 48247 - DNA, 25 bp, SARS Virus
atcacgatacgtatgttacgagaag

SEQ ID NO: 48248 - DNA, 25 bp, SARS Virus
tcacgatacgttagttacgagaagt

SEQ ID NO: 48249 - DNA, 25 bp, SARS Virus
cacgatacgtttattacgagaagtg

SEQ ID NO: 48250 - DNA, 25 bp, SARS Virus
acgatacgtttgatacgagaagtga

SEQ ID NO: 48251 - DNA, 25 bp, SARS Virus
cgatacgtttgtaacgagaagtgat

SEQ ID NO: 48252 - DNA, 25 bp, SARS Virus
gatacgtttgttacgagaagtgata

SEQ ID NO: 48253 - DNA, 25 bp, SARS Virus
atacgtttgttaagagaagtgatac

SEQ ID NO: 48254 - DNA, 25 bp, SARS Virus
tacgtttgttacaagaagtgatacg

SEQ ID NO: 48255 - DNA, 25 bp, SARS Virus
acgtttgttacgagaagtgatacga

SEQ ID NO: 48256 - DNA, 25 bp, SARS Virus
cgtttgttacgaaaagtgatacgaa

SEQ ID NO: 48257 - DNA, 25 bp, SARS Virus
gtttgttacgagaagtgatacgaat

SEQ ID NO: 48258 - DNA, 25 bp, SARS Virus
tttgttacgagaagtgatacgaatc

SEQ ID NO: 48259 - DNA, 25 bp, SARS Virus
ttgttacgagaaatgatacgaatcc

SEQ ID NO: 48260 - DNA, 25 bp, SARS Virus
tgttacgagaagagatacgaatcct

SEQ ID NO: 48261 - DNA, 25 bp, SARS Virus
gttacgagaagtaatacgaatcctt

SEQ ID NO: 48262 - DNA, 25 bp, SARS Virus
ttacgagaagtgatacgaatccttc

SEQ ID NO: 48263 - DNA, 25 bp, SARS Virus
tacgagaagtgaaacgaatccttcg

SEQ ID NO: 48264 - DNA, 25 bp, SARS Virus
acgagaagtgatacgaatccttcga

SEQ ID NO: 48265 - DNA, 25 bp, SARS Virus
cgagaagtgataagaatccttcgaa

SEQ ID NO: 48266 - DNA, 25 bp, SARS Virus
gagaagtgatacaaatccttcgaac

SEQ ID NO: 48267 - DNA, 25 bp, SARS Virus
agaagtgatacgaatccttcgaact

SEQ ID NO: 48268 - DNA, 25 bp, SARS Virus
gaagtgatacgaatccttcgaacta

SEQ ID NO: 48269 - DNA, 25 bp, SARS Virus
aagtgatacgaaaccttcgaactat

SEQ ID NO: 48270 - DNA, 25 bp, SARS Virus
agtgatacgaatacttcgaactatt

SEQ ID NO: 48271 - DNA, 25 bp, SARS Virus
gtgatacgaatcattcgaactatta

SEQ ID NO: 48272 - DNA, 25 bp, SARS Virus
tgatacgaatccatcgaactattac

SEQ ID NO: 48273 - DNA, 25 bp, SARS Virus
gatacgaatcctacgaactattact

SEQ ID NO: 48274 - DNA, 25 bp, SARS Virus
atacgaatccttagaactattacta

SEQ ID NO: 48275 - DNA, 25 bp, SARS Virus
tacgaatccttcaaactattactac

SEQ ID NO: 48276 - DNA, 25 bp, SARS Virus
acgaatccttcgaactattactacg

SEQ ID NO: 48277 - DNA, 25 bp, SARS Virus
cgaatccttcgaactattactacgt

SEQ ID NO: 48278 - DNA, 25 bp, SARS Virus
gaatccttcgaaatattactacgtg

SEQ ID NO: 48279 - DNA, 25 bp, SARS Virus
aatccttcgaacaattactacgtga

SEQ ID NO: 48280 - DNA, 25 bp, SARS Virus
atccttcgaactattactacgtgaa

SEQ ID NO: 48281 - DNA, 25 bp, SARS Virus
tccttcgaactaatactacgtgaat

SEQ ID NO: 48282 - DNA, 25 bp, SARS Virus
ccttcgaactataactacgtgaatt

SEQ ID NO: 48283 - DNA, 25 bp, SARS Virus
cttcgaactattactacgtgaattg

SEQ ID NO: 48284 - DNA, 25 bp, SARS Virus
ttcgaactattaatacgtgaattgt

SEQ ID NO: 48285 - DNA, 25 bp, SARS Virus
tcgaactattacaacgtgaattgtt

SEQ ID NO: 48286 - DNA, 25 bp, SARS Virus
cgaactattactacgtgaattgttg

SEQ ID NO: 48287 - DNA, 25 bp, SARS Virus
gaactattactaagtgaattgttgt

SEQ ID NO: 48288 - DNA, 25 bp, SARS Virus
aactattactacatgaattgttgta

SEQ ID NO: 48289 - DNA, 25 bp, SARS Virus
actattactacgagaattgttgtaa

SEQ ID NO: 48290 - DNA, 25 bp, SARS Virus
ctattactacgtaaattgttgtaat

SEQ ID NO: 48291 - DNA, 25 bp, SARS Virus
tattactacgtgaattgttgtaata

SEQ ID NO: 48292 - DNA, 25 bp, SARS Virus
attactacgtgaattgttgtaatag

SEQ ID NO: 48293 - DNA, 25 bp, SARS Virus
ttactacgtgaaatgttgtaatagt

SEQ ID NO: 48294 - DNA, 25 bp, SARS Virus
tactacgtgaatagttgtaatagtt

SEQ ID NO: 48295 - DNA, 25 bp, SARS Virus
actacgtgaattattgtaatagttg

SEQ ID NO: 48296 - DNA, 25 bp, SARS Virus
ctacgtgaattgatgtaatagttgt

SEQ ID NO: 48297 - DNA, 25 bp, SARS Virus
tacgtgaattgtagtaatagttgtt

SEQ ID NO: 48298 - DNA, 25 bp, SARS Virus
acgtgaattgttataatagttgtta

SEQ ID NO: 48299 - DNA, 25 bp, SARS Virus
cgtgaattgttgaaatagttgttac

SEQ ID NO: 48300 - DNA, 25 bp, SARS Virus
gtgaattgttgtaatagttgttacg

SEQ ID NO: 48301 - DNA, 25 bp, SARS Virus
tgaattgttgtaatagttgttacgc

SEQ ID NO: 48302 - DNA, 25 bp, SARS Virus
gaattgttgtaaaagttgttacgcg

SEQ ID NO: 48303 - DNA, 25 bp, SARS Virus
aattgttgtaatagttgttacgcgc

SEQ ID NO: 48304 - DNA, 25 bp, SARS Virus
attgttgtaataattgttacgcgca

SEQ ID NO: 48305 - DNA, 25 bp, SARS Virus
ttgttgtaatagatgttacgcgcac

SEQ ID NO: 48306 - DNA, 25 bp, SARS Virus
tgttgtaatagtagttacgcgcact

SEQ ID NO: 48307 - DNA, 25 bp, SARS Virus
gttgtaatagttattacgcgcacta

SEQ ID NO: 48308 - DNA, 25 bp, SARS Virus
ttgtaatagttgatacgcgcactac

SEQ ID NO: 48309 - DNA, 25 bp, SARS Virus
tgtaatagttgtaacgcgcactacc

SEQ ID NO: 48310 - DNA, 25 bp, SARS Virus
gtaatagttgttacgcgcactacca

SEQ ID NO: 48311 - DNA, 25 bp, SARS Virus
taatagttgttaagcgcactaccaa

SEQ ID NO: 48312 - DNA, 25 bp, SARS Virus
aatagttgttacacgcactaccaac

SEQ ID NO: 48313 - DNA, 25 bp, SARS Virus
atagttgttacgagcactaccaaca

SEQ ID NO: 48314 - DNA, 25 bp, SARS Virus
tagttgttacgcacactaccaacac

SEQ ID NO: 48315 - DNA, 25 bp, SARS Virus
agttgttacgcgaactaccaacaca

SEQ ID NO: 48316 - DNA, 25 bp, SARS Virus
gttgttacgcgcactaccaacacaa

SEQ ID NO: 48317 - DNA, 25 bp, SARS Virus
ttgttacgcgcaataccaacacaag

SEQ ID NO: 48318 - DNA, 25 bp, SARS Virus
tgttacgcgcacaaccaacacaagg

SEQ ID NO: 48319 - DNA, 25 bp, SARS Virus
gttacgcgcactaccaacacaaggt

SEQ ID NO: 48320 - DNA, 25 bp, SARS Virus
ttacgcgcactaacaacacaaggtg

SEQ ID NO: 48321 - DNA, 25 bp, SARS Virus
tacgcgcactacaaacacaaggtga

SEQ ID NO: 48322 - DNA, 25 bp, SARS Virus
acgcgcactaccaacacaaggtgag

SEQ ID NO: 48323 - DNA, 25 bp, SARS Virus
cgcgcactaccaacacaaggtgagt

SEQ ID NO: 48324 - DNA, 25 bp, SARS Virus
gcgcactaccaaaacaaggtgagtt

SEQ ID NO: 48325 - DNA, 25 bp, SARS Virus
cgcactaccaacacaaggtgagttg

SEQ ID NO: 48326 - DNA, 25 bp, SARS Virus
gcactaccaacaaaaggtgagttgt

SEQ ID NO: 48327 - DNA, 25 bp, SARS Virus
cactaccaacacaaggtgagttgta

SEQ ID NO: 48328 - DNA, 25 bp, SARS Virus
actaccaacacaaggtgagttgtag

SEQ ID NO: 48329 - DNA, 25 bp, SARS Virus
ctaccaacacaaagtgagttgtagt

SEQ ID NO: 48330 - DNA, 25 bp, SARS Virus
taccaacacaagatgagttgtagta

SEQ ID NO: 48331 - DNA, 25 bp, SARS Virus
accaacacaaggagagttgtagtat

SEQ ID NO: 48332 - DNA, 25 bp, SARS Virus
ccaacacaaggtaagttgtagtatg

SEQ ID NO: 48333 - DNA, 25 bp, SARS Virus
caacacaaggtgagttgtagtatgg

SEQ ID NO: 48334 - DNA, 25 bp, SARS Virus
aacacaaggtgaattgtagtatggt

SEQ ID NO: 48335 - DNA, 25 bp, SARS Virus
acacaaggtgagatgtagtatggta

SEQ ID NO: 48336 - DNA, 25 bp, SARS Virus
cacaaggtgagtagtagtatggtaa

SEQ ID NO: 48337 - DNA, 25 bp, SARS Virus
acaaggtgagttatagtatggtaac

SEQ ID NO: 48338 - DNA, 25 bp, SARS Virus
caaggtgagttgaagtatggtaact

SEQ ID NO: 48339 - DNA, 25 bp, SARS Virus
aaggtgagttgtagtatggtaactg

SEQ ID NO: 48340 - DNA, 25 bp, SARS Virus
aggtgagttgtaatatggtaactga

SEQ ID NO: 48341 - DNA, 25 bp, SARS Virus
ggtgagttgtagaatggtaactgat

SEQ ID NO: 48342 - DNA, 25 bp, SARS Virus
gtgagttgtagtatggtaactgatg

SEQ ID NO: 48343 - DNA, 25 bp, SARS Virus
tgagttgtagtaaggtaactgatgt

SEQ ID NO: 48344 - DNA, 25 bp, SARS Virus
gagttgtagtatagtaactgatgtc

SEQ ID NO: 48345 - DNA, 25 bp, SARS Virus
agttgtagtatgataactgatgtcg

SEQ ID NO: 48346 - DNA, 25 bp, SARS Virus
gttgtagtatggaaactgatgtcgt

SEQ ID NO: 48347 - DNA, 25 bp, SARS Virus
ttgtagtatggtaactgatgtcgtc

SEQ ID NO: 48348 - DNA, 25 bp, SARS Virus
tgtagtatggtaactgatgtcgtcg

SEQ ID NO: 48349 - DNA, 25 bp, SARS Virus
gtagtatggtaaatgatgtcgtcgg

SEQ ID NO: 48350 - DNA, 25 bp, SARS Virus
tagtatggtaacagatgtcgtcggt

SEQ ID NO: 48351 - DNA, 25 bp, SARS Virus
agtatggtaactaatgtcgtcggtt

SEQ ID NO: 48352 - DNA, 25 bp, SARS Virus
gtatggtaactgatgtcgtcggttt

SEQ ID NO: 48353 - DNA, 25 bp, SARS Virus
tatggtaactgaagtcgtcggtttg

SEQ ID NO: 48354 - DNA, 25 bp, SARS Virus
atggtaactgatatcgtcggtttga

SEQ ID NO: 48355 - DNA, 25 bp, SARS Virus
tggtaactgatgacgtcggtttgag

SEQ ID NO: 48356 - DNA, 25 bp, SARS Virus
ggtaactgatgtagtcggtttgagt

SEQ ID NO: 48357 - DNA, 25 bp, SARS Virus
gtaactgatgtcatcggtttgagta

SEQ ID NO: 48358 - DNA, 25 bp, SARS Virus
taactgatgtcgacggtttgagtac

SEQ ID NO: 48359 - DNA, 25 bp, SARS Virus
aactgatgtcgtaggtttgagtacc

SEQ ID NO: 48360 - DNA, 25 bp, SARS Virus
actgatgtcgtcagtttgagtacca

SEQ ID NO: 48361 - DNA, 25 bp, SARS Virus
ctgatgtcgtcgatttgagtaccaa

SEQ ID NO: 48362 - DNA, 25 bp, SARS Virus
tgatgtcgtcggattgagtaccaac

SEQ ID NO: 48363 - DNA, 25 bp, SARS Virus
gatgtcgtcggtatgagtaccaaca

SEQ ID NO: 48364 - DNA, 25 bp, SARS Virus
atgtcgtcggttagagtaccaacaa

SEQ ID NO: 48365 - DNA, 25 bp, SARS Virus
tgtcgtcggtttaagtaccaacaac

SEQ ID NO: 48366 - DNA, 25 bp, SARS Virus
gtcgtcggtttgagtaccaacaaca

SEQ ID NO: 48367 - DNA, 25 bp, SARS Virus
tcgtcggtttgaataccaacaacag

SEQ ID NO: 48368 - DNA, 25 bp, SARS Virus
cgtcggtttgagaaccaacaacagg

SEQ ID NO: 48369 - DNA, 25 bp, SARS Virus
gtcggtttgagtaccaacaacaggg

SEQ ID NO: 48370 - DNA, 25 bp, SARS Virus
tcggtttgagtaacaacaacaggga

SEQ ID NO: 48371 - DNA, 25 bp, SARS Virus
cggtttgagtacaaacaacagggac

SEQ ID NO: 48372 - DNA, 25 bp, SARS Virus
ggtttgagtaccaacaacagggact

SEQ ID NO: 48373 - DNA, 25 bp, SARS Virus
gtttgagtaccaacaacagggacta

SEQ ID NO: 48374 - DNA, 25 bp, SARS Virus
tttgagtaccaaaaacagggactaa

SEQ ID NO: 48375 - DNA, 25 bp, SARS Virus
ttgagtaccaacaacagggactaat

SEQ ID NO: 48376 - DNA, 25 bp, SARS Virus
tgagtaccaacaacagggactaata

SEQ ID NO: 48377 - DNA, 25 bp, SARS Virus
gagtaccaacaaaagggactaatac

SEQ ID NO: 48378 - DNA, 25 bp, SARS Virus
agtaccaacaacagggactaatacc

SEQ ID NO: 48379 - DNA, 25 bp, SARS Virus
gtaccaacaacaaggactaatacca

SEQ ID NO: 48380 - DNA, 25 bp, SARS Virus
taccaacaacagagactaataccat

SEQ ID NO: 48381 - DNA, 25 bp, SARS Virus
accaacaacaggaactaataccatg

SEQ ID NO: 48382 - DNA, 25 bp, SARS Virus
ccaacaacagggactaataccatgg

SEQ ID NO: 48383 - DNA, 25 bp, SARS Virus
caacaacagggaataataccatgga

SEQ ID NO: 48384 - DNA, 25 bp, SARS Virus
aacaacagggacaaataccatggat

SEQ ID NO: 48385 - DNA, 25 bp, SARS Virus
acaacagggactaataccatggatg

SEQ ID NO: 48386 - DNA, 25 bp, SARS Virus
caacagggactaataccatggatgt

SEQ ID NO: 48387 - DNA, 25 bp, SARS Virus
aacagggactaaaaccatggatgtt

SEQ ID NO: 48388 - DNA, 25 bp, SARS Virus
acagggactaataccatggatgttc

SEQ ID NO: 48389 - DNA, 25 bp, SARS Virus
cagggactaataacatggatgttct

SEQ ID NO: 48390 - DNA, 25 bp, SARS Virus
agggactaatacaatggatgttctt

SEQ ID NO: 48391 - DNA, 25 bp, SARS Virus
gggactaataccatggatgttcttg

SEQ ID NO: 48392 - DNA, 25 bp, SARS Virus
ggactaataccaaggatgttcttgt

SEQ ID NO: 48393 - DNA, 25 bp, SARS Virus
gactaataccatagatgttcttgtg

SEQ ID NO: 48394 - DNA, 25 bp, SARS Virus
actaataccatgaatgttcttgtga

SEQ ID NO: 48395 - DNA, 25 bp, SARS Virus
ctaataccatggatgttcttgtgaa

SEQ ID NO: 48396 - DNA, 25 bp, SARS Virus
taataccatggaagttcttgtgaac

SEQ ID NO: 48397 - DNA, 25 bp, SARS Virus
aataccatggatattcttgtgaaca

SEQ ID NO: 48398 - DNA, 25 bp, SARS Virus
ataccatggatgatcttgtgaacac

SEQ ID NO: 48399 - DNA, 25 bp, SARS Virus
taccatggatgtacttgtgaacact

SEQ ID NO: 48400 - DNA, 25 bp, SARS Virus
accatggatgttattgtgaacacta

SEQ ID NO: 48401 - DNA, 25 bp, SARS Virus
ccatggatgttcatgtgaacactac

SEQ ID NO: 48402 - DNA, 25 bp, SARS Virus
catggatgttctagtgaacactacc

SEQ ID NO: 48403 - DNA, 25 bp, SARS Virus
atggatgttcttatgaacactacca

SEQ ID NO: 48404 - DNA, 25 bp, SARS Virus
tggatgttcttgagaacactaccat

SEQ ID NO: 48405 - DNA, 25 bp, SARS Virus
ggatgttcttgtaaacactaccatt

SEQ ID NO: 48406 - DNA, 25 bp, SARS Virus
gatgttcttgtgaacactaccattg

SEQ ID NO: 48407 - DNA, 25 bp, SARS Virus
atgttcttgtgaacactaccattgt

SEQ ID NO: 48408 - DNA, 25 bp, SARS Virus
tgttcttgtgaaaactaccattgtg

SEQ ID NO: 48409 - DNA, 25 bp, SARS Virus
gttcttgtgaacactaccattgtgg

SEQ ID NO: 48410 - DNA, 25 bp, SARS Virus
ttcttgtgaacaataccattgtgga

SEQ ID NO: 48411 - DNA, 25 bp, SARS Virus
tcttgtgaacacaaccattgtggaa

SEQ ID NO: 48412 - DNA, 25 bp, SARS Virus
cttgtgaacactaccattgtggaaa

SEQ ID NO: 48413 - DNA, 25 bp, SARS Virus
ttgtgaacactaacattgtggaaat

SEQ ID NO: 48414 - DNA, 25 bp, SARS Virus
tgtgaacactacaattgtggaaatg

SEQ ID NO: 48415 - DNA, 25 bp, SARS Virus
gtgaacactaccattgtggaaatgt

SEQ ID NO: 48416 - DNA, 25 bp, SARS Virus
tgaacactaccaatgtggaaatgta

SEQ ID NO: 48417 - DNA, 25 bp, SARS Virus
gaacactaccatagtggaaatgtat

SEQ ID NO: 48418 - DNA, 25 bp, SARS Virus
aacactaccattatggaaatgtata

SEQ ID NO: 48419 - DNA, 25 bp, SARS Virus
acactaccattgaggaaatgtatac

SEQ ID NO: 48420 - DNA, 25 bp, SARS Virus
cactaccattgtagaaatgtatacg

SEQ ID NO: 48421 - DNA, 25 bp, SARS Virus
actaccattgtgaaaatgtatacgt

SEQ ID NO: 48422 - DNA, 25 bp, SARS Virus
ctaccattgtggaaatgtatacgta

SEQ ID NO: 48423 - DNA, 25 bp, SARS Virus
taccattgtggaaatgtatacgtag

SEQ ID NO: 48424 - DNA, 25 bp, SARS Virus
accattgtggaaatgtatacgtaga

SEQ ID NO: 48425 - DNA, 25 bp, SARS Virus
ccattgtggaaaagtatacgtagac

SEQ ID NO: 48426 - DNA, 25 bp, SARS Virus
cattgtggaaatatatacgtagacg

SEQ ID NO: 48427 - DNA, 25 bp, SARS Virus
attgtggaaatgaatacgtagacgt

SEQ ID NO: 48428 - DNA, 25 bp, SARS Virus
ttgtggaaatgtatacgtagacgtg

SEQ ID NO: 48429 - DNA, 25 bp, SARS Virus
tgtggaaatgtaaacgtagacgtga

SEQ ID NO: 48430 - DNA, 25 bp, SARS Virus
gtggaaatgtatacgtagacgtgag

SEQ ID NO: 48431 - DNA, 25 bp, SARS Virus
tggaaatgtataagtagacgtgaga

SEQ ID NO: 48432 - DNA, 25 bp, SARS Virus
ggaaatgtatacatagacgtgagac

SEQ ID NO: 48433 - DNA, 25 bp, SARS Virus
gaaatgtatacgaagacgtgagacc

SEQ ID NO: 48434 - DNA, 25 bp, SARS Virus
aaatgtatacgtagacgtgagaccc

SEQ ID NO: 48435 - DNA, 25 bp, SARS Virus
aatgtatacgtaaacgtgagaccct

SEQ ID NO: 48436 - DNA, 25 bp, SARS Virus
atgtatacgtagacgtgagaccctt

SEQ ID NO: 48437 - DNA, 25 bp, SARS Virus
tgtatacgtagaagtgagacccttt

SEQ ID NO: 48438 - DNA, 25 bp, SARS Virus
gtatacgtagacatgagacccttta

SEQ ID NO: 48439 - DNA, 25 bp, SARS Virus
tatacgtagacgagagaccctttag

SEQ ID NO: 48440 - DNA, 25 bp, SARS Virus
atacgtagacgtaagaccctttagg

SEQ ID NO: 48441 - DNA, 25 bp, SARS Virus
atccaacacgctcctttacgagcta

SEQ ID NO: 48442 - DNA, 25 bp, SARS Virus
tccaacacgctcctttacgagctat

SEQ ID NO: 48443 - DNA, 25 bp, SARS Virus
ccaacacgctcccttacgagctatt

SEQ ID NO: 48444 - DNA, 25 bp, SARS Virus
caacacgctcctctacgagctattg

SEQ ID NO: 48445 - DNA, 25 bp, SARS Virus
aacacgctccttcacgagctattgg

SEQ ID NO: 48446 - DNA, 25 bp, SARS Virus
acacgctcctttccgagctattggc

SEQ ID NO: 48447 - DNA, 25 bp, SARS Virus
cacgctcctttacgagctattggca

SEQ ID NO: 48448 - DNA, 25 bp, SARS Virus
acgctcctttaccagctattggcac

SEQ ID NO: 48449 - DNA, 25 bp, SARS Virus
cgctcctttacgcgctattggcacg

SEQ ID NO: 48450 - DNA, 25 bp, SARS Virus
gctcctttacgacctattggcacga

SEQ ID NO: 48451 - DNA, 25 bp, SARS Virus
ctcctttacgagctattggcacgat

SEQ ID NO: 48452 - DNA, 25 bp, SARS Virus
tcctttacgagccattggcacgatg

SEQ ID NO: 48453 - DNA, 25 bp, SARS Virus
cctttacgagctcttggcacgatga

SEQ ID NO: 48454 - DNA, 25 bp, SARS Virus
ctttacgagctactggcacgatgag

SEQ ID NO: 48455 - DNA, 25 bp, SARS Virus
tttacgagctatcggcacgatgaga

SEQ ID NO: 48456 - DNA, 25 bp, SARS Virus
ttacgagctattcgcacgatgagaa

SEQ ID NO: 48457 - DNA, 25 bp, SARS Virus
tacgagctattgccacgatgagaag

SEQ ID NO: 48458 - DNA, 25 bp, SARS Virus
acgagctattggcacgatgagaagt

SEQ ID NO: 48459 - DNA, 25 bp, SARS Virus
cgagctattggcccgatgagaagtc

SEQ ID NO: 48460 - DNA, 25 bp, SARS Virus
gagctattggcacgatgagaagtcc

SEQ ID NO: 48461 - DNA, 25 bp, SARS Virus
agctattggcaccatgagaagtccg

SEQ ID NO: 48462 - DNA, 25 bp, SARS Virus
gctattggcacgctgagaagtccga

SEQ ID NO: 48463 - DNA, 25 bp, SARS Virus
ctattggcacgacgagaagtccgat

SEQ ID NO: 48464 - DNA, 25 bp, SARS Virus
tattggcacgatcagaagtccgata

SEQ ID NO: 48465 - DNA, 25 bp, SARS Virus
attggcacgatgcgaagtccgataa

SEQ ID NO: 48466 - DNA, 25 bp, SARS Virus
ttggcacgatgacaagtccgataac

SEQ ID NO: 48467 - DNA, 25 bp, SARS Virus
tggcacgatgagcagtccgataacg

SEQ ID NO: 48468 - DNA, 25 bp, SARS Virus
ggcacgatgagacgtccgataacga

SEQ ID NO: 48469 - DNA, 25 bp, SARS Virus
gcacgatgagaactccgataacgaa

SEQ ID NO: 48470 - DNA, 25 bp, SARS Virus
cacgatgagaagcccgataacgaag

SEQ ID NO: 48471 - DNA, 25 bp, SARS Virus
acgatgagaagtccgataacgaagt

SEQ ID NO: 48472 - DNA, 25 bp, SARS Virus
cgatgagaagtccgataacgaagtc

SEQ ID NO: 48473 - DNA, 25 bp, SARS Virus
gatgagaagtcccataacgaagtct

SEQ ID NO: 48474 - DNA, 25 bp, SARS Virus
atgagaagtccgctaacgaagtctt

SEQ ID NO: 48475 - DNA, 25 bp, SARS Virus
tgagaagtccgacaacgaagtctta

SEQ ID NO: 48476 - DNA, 25 bp, SARS Virus
gagaagtccgatcacgaagtcttaa

SEQ ID NO: 48477 - DNA, 25 bp, SARS Virus
agaagtccgataccgaagtcttaaa

SEQ ID NO: 48478 - DNA, 25 bp, SARS Virus
gaagtccgataacgaagtcttaaat

SEQ ID NO: 48479 - DNA, 25 bp, SARS Virus
aagtccgataaccaagtcttaaatc

SEQ ID NO: 48480 - DNA, 25 bp, SARS Virus
agtccgataacgcagtcttaaatca

SEQ ID NO: 48481 - DNA, 25 bp, SARS Virus
gtccgataacgacgtcttaaatcaa

SEQ ID NO: 48482 - DNA, 25 bp, SARS Virus
tccgataacgaactcttaaatcaag

SEQ ID NO: 48483 - DNA, 25 bp, SARS Virus
ccgataacgaagccttaaatcaaga

SEQ ID NO: 48484 - DNA, 25 bp, SARS Virus
cgataacgaagtcttaaatcaagaa

SEQ ID NO: 48485 - DNA, 25 bp, SARS Virus
gataacgaagtcctaaatcaagaaa

SEQ ID NO: 48486 - DNA, 25 bp, SARS Virus
ataacgaagtctcaaatcaagaaat

SEQ ID NO: 48487 - DNA, 25 bp, SARS Virus
taacgaagtcttcaatcaagaaatg

SEQ ID NO: 48488 - DNA, 25 bp, SARS Virus
aacgaagtcttacatcaagaaatgg

SEQ ID NO: 48489 - DNA, 25 bp, SARS Virus
acgaagtcttaactcaagaaatggt

SEQ ID NO: 48490 - DNA, 25 bp, SARS Virus
cgaagtcttaaaccaagaaatggta

SEQ ID NO: 48491 - DNA, 25 bp, SARS Virus
gaagtcttaaatcaagaaatggtag

SEQ ID NO: 48492 - DNA, 25 bp, SARS Virus
aagtcttaaatccagaaatggtagt

SEQ ID NO: 48493 - DNA, 25 bp, SARS Virus
agtcttaaatcacgaaatggtagta

SEQ ID NO: 48494 - DNA, 25 bp, SARS Virus
gtcttaaatcaacaaatggtagtat

SEQ ID NO: 48495 - DNA, 25 bp, SARS Virus
tcttaaatcaagcaatggtagtata

SEQ ID NO: 48496 - DNA, 25 bp, SARS Virus
cttaaatcaagacatggtagtatac

SEQ ID NO: 48497 - DNA, 25 bp, SARS Virus
ttaaatcaagaactggtagtatacg

SEQ ID NO: 48498 - DNA, 25 bp, SARS Virus
taaatcaagaaacggtagtatacgg

SEQ ID NO: 48499 - DNA, 25 bp, SARS Virus
aaatcaagaaatcgtagtatacggc

SEQ ID NO: 48500 - DNA, 25 bp, SARS Virus
aatcaagaaatgctagtatacggcg

SEQ ID NO: 48501 - DNA, 25 bp, SARS Virus
atcaagaaatggcagtatacggcga

SEQ ID NO: 48502 - DNA, 25 bp, SARS Virus
tcaagaaatggtcgtatacggcgaa

SEQ ID NO: 48503 - DNA, 25 bp, SARS Virus
caagaaatggtactatacggcgaat

SEQ ID NO: 48504 - DNA, 25 bp, SARS Virus
aagaaatggtagcatacggcgaata

SEQ ID NO: 48505 - DNA, 25 bp, SARS Virus
agaaatggtagtctacggcgaatac

SEQ ID NO: 48506 - DNA, 25 bp, SARS Virus
gaaatggtagtacacggcgaatacg

SEQ ID NO: 48507 - DNA, 25 bp, SARS Virus
aaatggtagtatccggcgaatacgg

SEQ ID NO: 48508 - DNA, 25 bp, SARS Virus
aatggtagtatacggcgaatacggt

SEQ ID NO: 48509 - DNA, 25 bp, SARS Virus
atggtagtataccgcgaatacggtg

SEQ ID NO: 48510 - DNA, 25 bp, SARS Virus
tggtagtatacgccgaatacggtga

SEQ ID NO: 48511 - DNA, 25 bp, SARS Virus
ggtagtatacggcgaatacggtgac

SEQ ID NO: 48512 - DNA, 25 bp, SARS Virus
gtagtatacggccaatacggtgacg

SEQ ID NO: 48513 - DNA, 25 bp, SARS Virus
tagtatacggcgcatacggtgacgg

SEQ ID NO: 48514 - DNA, 25 bp, SARS Virus
agtatacggcgactacggtgacggg

SEQ ID NO: 48515 - DNA, 25 bp, SARS Virus
gtatacggcgaacacggtgacgggt

SEQ ID NO: 48516 - DNA, 25 bp, SARS Virus
tatacggcgaatccggtgacgggtc

SEQ ID NO: 48517 - DNA, 25 bp, SARS Virus
atacggcgaatacggtgacgggtcc

SEQ ID NO: 48518 - DNA, 25 bp, SARS Virus
tacggcgaataccgtgacgggtcct

SEQ ID NO: 48519 - DNA, 25 bp, SARS Virus
acggcgaatacgctgacgggtcctc

SEQ ID NO: 48520 - DNA, 25 bp, SARS Virus
cggcgaatacggcgacgggtcctcc

SEQ ID NO: 48521 - DNA, 25 bp, SARS Virus
ggcgaatacggtcacgggtcctccg

SEQ ID NO: 48522 - DNA, 25 bp, SARS Virus
gcgaatacggtgccgggtcctccgg

SEQ ID NO: 48523 - DNA, 25 bp, SARS Virus
cgaatacggtgacgggtcctccgga

SEQ ID NO: 48524 - DNA, 25 bp, SARS Virus
gaatacggtgaccggtcctccggat

SEQ ID NO: 48525 - DNA, 25 bp, SARS Virus
aatacggtgacgcgtcctccggata

SEQ ID NO: 48526 - DNA, 25 bp, SARS Virus
atacggtgacggctcctccggatac

SEQ ID NO: 48527 - DNA, 25 bp, SARS Virus
tacggtgacgggccctccggatact

SEQ ID NO: 48528 - DNA, 25 bp, SARS Virus
acggtgacgggtcctccggatactc

SEQ ID NO: 48529 - DNA, 25 bp, SARS Virus
cggtgacgggtcctccggatactcg

SEQ ID NO: 48530 - DNA, 25 bp, SARS Virus
ggtgacgggtcccccggatactcgt

SEQ ID NO: 48531 - DNA, 25 bp, SARS Virus
gtgacgggtcctccggatactcgtc

SEQ ID NO: 48532 - DNA, 25 bp, SARS Virus
tgacgggtcctccggatactcgtcc

SEQ ID NO: 48533 - DNA, 25 bp, SARS Virus
gacgggtcctcccgatactcgtccg

SEQ ID NO: 48534 - DNA, 25 bp, SARS Virus
acgggtcctccgcatactcgtccga

SEQ ID NO: 48535 - DNA, 25 bp, SARS Virus
cgggtcctccggctactcgtccgac

SEQ ID NO: 48536 - DNA, 25 bp, SARS Virus
gggtcctccggacactcgtccgaca

SEQ ID NO: 48537 - DNA, 25 bp, SARS Virus
ggtcctccggatcctcgtccgacat

SEQ ID NO: 48538 - DNA, 25 bp, SARS Virus
gtcctccggatactcgtccgacatc

SEQ ID NO: 48539 - DNA, 25 bp, SARS Virus
tcctccggatacccgtccgacatcg

SEQ ID NO: 48540 - DNA, 25 bp, SARS Virus
cctccggatactcgtccgacatcga

SEQ ID NO: 48541 - DNA, 25 bp, SARS Virus
ctccggatactcctccgacatcgat

SEQ ID NO: 48542 - DNA, 25 bp, SARS Virus
tccggatactcgcccgacatcgatt

SEQ ID NO: 48543 - DNA, 25 bp, SARS Virus
ccggatactcgtccgacatcgatta

SEQ ID NO: 48544 - DNA, 25 bp, SARS Virus
cggatactcgtccgacatcgattac

SEQ ID NO: 48545 - DNA, 25 bp, SARS Virus
ggatactcgtcccacatcgattacc

SEQ ID NO: 48546 - DNA, 25 bp, SARS Virus
gatactcgtccgccatcgattacca

SEQ ID NO: 48547 - DNA, 25 bp, SARS Virus
atactcgtccgacatcgattaccac

SEQ ID NO: 48548 - DNA, 25 bp, SARS Virus
tactcgtccgacctcgattaccact

SEQ ID NO: 48549 - DNA, 25 bp, SARS Virus
actcgtccgacaccgattaccacta

SEQ ID NO: 48550 - DNA, 25 bp, SARS Virus
ctcgtccgacatcgattaccactaa

SEQ ID NO: 48551 - DNA, 25 bp, SARS Virus
tcgtccgacatccattaccactaag

SEQ ID NO: 48552 - DNA, 25 bp, SARS Virus
cgtccgacatcgcttaccactaaga

SEQ ID NO: 48553 - DNA, 25 bp, SARS Virus
gtccgacatcgactaccactaagac

SEQ ID NO: 48554 - DNA, 25 bp, SARS Virus
tccgacatcgatcaccactaagact

SEQ ID NO: 48555 - DNA, 25 bp, SARS Virus
ccgacatcgattcccactaagactt

SEQ ID NO: 48556 - DNA, 25 bp, SARS Virus
cgacatcgattaccactaagacttc

SEQ ID NO: 48557 - DNA, 25 bp, SARS Virus
gacatcgattaccactaagacttca

SEQ ID NO: 48558 - DNA, 25 bp, SARS Virus
acatcgattacccctaagacttcag

SEQ ID NO: 48559 - DNA, 25 bp, SARS Virus
catcgattaccactaagacttcagc

SEQ ID NO: 48560 - DNA, 25 bp, SARS Virus
atcgattaccaccaagacttcagca

SEQ ID NO: 48561 - DNA, 25 bp, SARS Virus
tcgattaccactcagacttcagcaa

SEQ ID NO: 48562 - DNA, 25 bp, SARS Virus
cgattaccactacgacttcagcaag

SEQ ID NO: 48563 - DNA, 25 bp, SARS Virus
gattaccactaacacttcagcaaga

SEQ ID NO: 48564 - DNA, 25 bp, SARS Virus
attaccactaagccttcagcaagag

SEQ ID NO: 48565 - DNA, 25 bp, SARS Virus
ttaccactaagacttcagcaagagt

SEQ ID NO: 48566 - DNA, 25 bp, SARS Virus
taccactaagacctcagcaagagtt

SEQ ID NO: 48567 - DNA, 25 bp, SARS Virus
accactaagactccagcaagagttt

SEQ ID NO: 48568 - DNA, 25 bp, SARS Virus
ccactaagacttcagcaagagtttt

SEQ ID NO: 48569 - DNA, 25 bp, SARS Virus
cactaagacttccgcaagagttttt

SEQ ID NO: 48570 - DNA, 25 bp, SARS Virus
actaagacttcaccaagagtttttc

SEQ ID NO: 48571 - DNA, 25 bp, SARS Virus
ctaagacttcagcaagagtttttca

SEQ ID NO: 48572 - DNA, 25 bp, SARS Virus
taagacttcagccagagtttttcaa

SEQ ID NO: 48573 - DNA, 25 bp, SARS Virus
aagacttcagcacgagtttttcaat

SEQ ID NO: 48574 - DNA, 25 bp, SARS Virus
agacttcagcaacagtttttcaatt

SEQ ID NO: 48575 - DNA, 25 bp, SARS Virus
gacttcagcaagcgtttttcaattt

SEQ ID NO: 48576 - DNA, 25 bp, SARS Virus
acttcagcaagactttttcaatttc

SEQ ID NO: 48577 - DNA, 25 bp, SARS Virus
cttcagcaagagcttttcaatttct

SEQ ID NO: 48578 - DNA, 25 bp, SARS Virus
ttcagcaagagtctttcaatttctt

SEQ ID NO: 48579 - DNA, 25 bp, SARS Virus
tcagcaagagttcttcaatttcttt

SEQ ID NO: 48580 - DNA, 25 bp, SARS Virus
cagcaagagtttctcaatttcttta

SEQ ID NO: 48581 - DNA, 25 bp, SARS Virus
agcaagagttttccaatttctttag

SEQ ID NO: 48582 - DNA, 25 bp, SARS Virus
gcaagagtttttcaatttctttaga

SEQ ID NO: 48583 - DNA, 25 bp, SARS Virus
caagagtttttccatttctttagaa

SEQ ID NO: 48584 - DNA, 25 bp, SARS Virus
aagagtttttcactttctttagaaa

SEQ ID NO: 48585 - DNA, 25 bp, SARS Virus
agagtttttcaacttctttagaaac

SEQ ID NO: 48586 - DNA, 25 bp, SARS Virus
gagtttttcaatctctttagaaact

SEQ ID NO: 48587 - DNA, 25 bp, SARS Virus
agtttttcaattcctttagaaactt

SEQ ID NO: 48588 - DNA, 25 bp, SARS Virus
gtttttcaatttctttagaaactta

SEQ ID NO: 48589 - DNA, 25 bp, SARS Virus
tttttcaatttccttagaaacttac

SEQ ID NO: 48590 - DNA, 25 bp, SARS Virus
ttttcaatttctctagaaacttaca

SEQ ID NO: 48591 - DNA, 25 bp, SARS Virus
tttcaatttcttcagaaacttacac

SEQ ID NO: 48592 - DNA, 25 bp, SARS Virus
ttcaatttctttcgaaacttacacc

SEQ ID NO: 48593 - DNA, 25 bp, SARS Virus
tcaatttctttacaaacttacaccg

SEQ ID NO: 48594 - DNA, 25 bp, SARS Virus
caatttctttagcaacttacaccga

SEQ ID NO: 48595 - DNA, 25 bp, SARS Virus
aatttctttagacacttacaccgat

SEQ ID NO: 48596 - DNA, 25 bp, SARS Virus
atttctttagaaccttacaccgatt

SEQ ID NO: 48597 - DNA, 25 bp, SARS Virus
tttctttagaaacttacaccgattt

SEQ ID NO: 48598 - DNA, 25 bp, SARS Virus
ttctttagaaacctacaccgattta

SEQ ID NO: 48599 - DNA, 25 bp, SARS Virus
tctttagaaactcacaccgatttag

SEQ ID NO: 48600 - DNA, 25 bp, SARS Virus
ctttagaaacttccaccgatttaga

SEQ ID NO: 48601 - DNA, 25 bp, SARS Virus
tttagaaacttacaccgatttagac

SEQ ID NO: 48602 - DNA, 25 bp, SARS Virus
ttagaaacttaccccgatttagact

SEQ ID NO: 48603 - DNA, 25 bp, SARS Virus
tagaaacttacaccgatttagactc

SEQ ID NO: 48604 - DNA, 25 bp, SARS Virus
agaaacttacaccgatttagactca

SEQ ID NO: 48605 - DNA, 25 bp, SARS Virus
gaaacttacacccatttagactcaa

SEQ ID NO: 48606 - DNA, 25 bp, SARS Virus
aaacttacaccgctttagactcaaa

SEQ ID NO: 48607 - DNA, 25 bp, SARS Virus
aacttacaccgacttagactcaaac

SEQ ID NO: 48608 - DNA, 25 bp, SARS Virus
acttacaccgatctagactcaaact

SEQ ID NO: 48609 - DNA, 25 bp, SARS Virus
cttacaccgattcagactcaaactg

SEQ ID NO: 48610 - DNA, 25 bp, SARS Virus
ttacaccgatttcgactcaaactgg

SEQ ID NO: 48611 - DNA, 25 bp, SARS Virus
tacaccgatttacactcaaactggc

SEQ ID NO: 48612 - DNA, 25 bp, SARS Virus
acaccgatttagcctcaaactggca

SEQ ID NO: 48613 - DNA, 25 bp, SARS Virus
caccgatttagactcaaactggcac

SEQ ID NO: 48614 - DNA, 25 bp, SARS Virus
accgatttagacccaaactggcact

SEQ ID NO: 48615 - DNA, 25 bp, SARS Virus
ccgatttagactcaaactggcacta

SEQ ID NO: 48616 - DNA, 25 bp, SARS Virus
cgatttagactccaactggcactac

SEQ ID NO: 48617 - DNA, 25 bp, SARS Virus
gatttagactcacactggcactacg

SEQ ID NO: 48618 - DNA, 25 bp, SARS Virus
atttagactcaacctggcactacga

SEQ ID NO: 48619 - DNA, 25 bp, SARS Virus
tttagactcaaactggcactacgac

SEQ ID NO: 48620 - DNA, 25 bp, SARS Virus
ttagactcaaaccggcactacgacg

SEQ ID NO: 48621 - DNA, 25 bp, SARS Virus
tagactcaaactcgcactacgacgg

SEQ ID NO: 48622 - DNA, 25 bp, SARS Virus
agactcaaactgccactacgacggt

SEQ ID NO: 48623 - DNA, 25 bp, SARS Virus
gactcaaactggcactacgacggta

SEQ ID NO: 48624 - DNA, 25 bp, SARS Virus
actcaaactggccctacgacggtac

SEQ ID NO: 48625 - DNA, 25 bp, SARS Virus
ctcaaactggcactacgacggtacg

SEQ ID NO: 48626 - DNA, 25 bp, SARS Virus
tcaaactggcaccacgacggtacgt

SEQ ID NO: 48627 - DNA, 25 bp, SARS Virus
caaactggcactccgacggtacgtt

SEQ ID NO: 48628 - DNA, 25 bp, SARS Virus
aaactggcactacgacggtacgttg

SEQ ID NO: 48629 - DNA, 25 bp, SARS Virus
aactggcactaccacggtacgttgc

SEQ ID NO: 48630 - DNA, 25 bp, SARS Virus
actggcactacgccggtacgttgcg

SEQ ID NO: 48631 - DNA, 25 bp, SARS Virus
ctggcactacgacggtacgttgcgt

SEQ ID NO: 48632 - DNA, 25 bp, SARS Virus
tggcactacgaccgtacgttgcgtt

SEQ ID NO: 48633 - DNA, 25 bp, SARS Virus
ggcactacgacgctacgttgcgttc

SEQ ID NO: 48634 - DNA, 25 bp, SARS Virus
gcactacgacggcacgttgcgttca

SEQ ID NO: 48635 - DNA, 25 bp, SARS Virus
cactacgacggtccgttgcgttcaa

SEQ ID NO: 48636 - DNA, 25 bp, SARS Virus
actacgacggtacgttgcgttcaac

SEQ ID NO: 48637 - DNA, 25 bp, SARS Virus
ctacgacggtaccttgcgttcaacc

SEQ ID NO: 48638 - DNA, 25 bp, SARS Virus
tacgacggtacgctgcgttcaacct

SEQ ID NO: 48639 - DNA, 25 bp, SARS Virus
acgacggtacgtcgcgttcaacctt

SEQ ID NO: 48640 - DNA, 25 bp, SARS Virus
cgacggtacgttccgttcaaccttt

SEQ ID NO: 48641 - DNA, 25 bp, SARS Virus
gacggtacgttgcgttcaacctttt

SEQ ID NO: 48642 - DNA, 25 bp, SARS Virus
acggtacgttgccttcaaccttttc

SEQ ID NO: 48643 - DNA, 25 bp, SARS Virus
cggtacgttgcgctcaaccttttct

SEQ ID NO: 48644 - DNA, 25 bp, SARS Virus
ggtacgttgcgtccaaccttttcta

SEQ ID NO: 48645 - DNA, 25 bp, SARS Virus
gtacgttgcgttcaaccttttctac

SEQ ID NO: 48646 - DNA, 25 bp, SARS Virus
tacgttgcgttccaccttttctacc

SEQ ID NO: 48647 - DNA, 25 bp, SARS Virus
acgttgcgttcacccttttctaccg

SEQ ID NO: 48648 - DNA, 25 bp, SARS Virus
cgttgcgttcaaccttttctaccgt

SEQ ID NO: 48649 - DNA, 25 bp, SARS Virus
gttgcgttcaaccttttctaccgtc

SEQ ID NO: 48650 - DNA, 25 bp, SARS Virus
ttgcgttcaaccctttctaccgtct

SEQ ID NO: 48651 - DNA, 25 bp, SARS Virus
tgcgttcaacctcttctaccgtcta

SEQ ID NO: 48652 - DNA, 25 bp, SARS Virus
gcgttcaaccttctctaccgtctag

SEQ ID NO: 48653 - DNA, 25 bp, SARS Virus
cgttcaacctttcctaccgtctagt

SEQ ID NO: 48654 - DNA, 25 bp, SARS Virus
gttcaaccttttctaccgtctagtc

SEQ ID NO: 48655 - DNA, 25 bp, SARS Virus
ttcaaccttttccaccgtctagtcc

SEQ ID NO: 48656 - DNA, 25 bp, SARS Virus
tcaaccttttctcccgtctagtccg

SEQ ID NO: 48657 - DNA, 25 bp, SARS Virus
caaccttttctaccgtctagtccga

SEQ ID NO: 48658 - DNA, 25 bp, SARS Virus
aaccttttctaccgtctagtccgat

SEQ ID NO: 48659 - DNA, 25 bp, SARS Virus
accttttctaccctctagtccgata

SEQ ID NO: 48660 - DNA, 25 bp, SARS Virus
ccttttctaccgcctagtccgatac

SEQ ID NO: 48661 - DNA, 25 bp, SARS Virus
cttttctaccgtctagtccgatact

SEQ ID NO: 48662 - DNA, 25 bp, SARS Virus
ttttctaccgtccagtccgatactg

SEQ ID NO: 48663 - DNA, 25 bp, SARS Virus
tttctaccgtctcgtccgatactgg

SEQ ID NO: 48664 - DNA, 25 bp, SARS Virus
ttctaccgtctactccgatactggg

SEQ ID NO: 48665 - DNA, 25 bp, SARS Virus
tctaccgtctagcccgatactgggt

SEQ ID NO: 48666 - DNA, 25 bp, SARS Virus
ctaccgtctagtccgatactgggtt

SEQ ID NO: 48667 - DNA, 25 bp, SARS Virus
taccgtctagtccgatactgggttt

SEQ ID NO: 48668 - DNA, 25 bp, SARS Virus
accgtctagtcccatactgggttta

SEQ ID NO: 48669 - DNA, 25 bp, SARS Virus
ccgtctagtccgctactgggtttac

SEQ ID NO: 48670 - DNA, 25 bp, SARS Virus
cgtctagtccgacactgggtttaca

SEQ ID NO: 48671 - DNA, 25 bp, SARS Virus
gtctagtccgatcctgggtttacat

SEQ ID NO: 48672 - DNA, 25 bp, SARS Virus
tctagtccgatactgggtttacatg

SEQ ID NO: 48673 - DNA, 25 bp, SARS Virus
ctagtccgataccgggtttacatgt

SEQ ID NO: 48674 - DNA, 25 bp, SARS Virus
tagtccgatactcggtttacatgtt

SEQ ID NO: 48675 - DNA, 25 bp, SARS Virus
agtccgatactgcgtttacatgttt

SEQ ID NO: 48676 - DNA, 25 bp, SARS Virus
gtccgatactggctttacatgtttg

SEQ ID NO: 48677 - DNA, 25 bp, SARS Virus
tccgatactgggcttacatgtttgt

SEQ ID NO: 48678 - DNA, 25 bp, SARS Virus
ccgatactgggtctacatgtttgtc

SEQ ID NO: 48679 - DNA, 25 bp, SARS Virus
cgatactgggttcacatgtttgtcc

SEQ ID NO: 48680 - DNA, 25 bp, SARS Virus
gatactgggtttccatgtttgtccg

SEQ ID NO: 48681 - DNA, 25 bp, SARS Virus
atactgggtttacatgtttgtccgt

SEQ ID NO: 48682 - DNA, 25 bp, SARS Virus
tactgggtttacctgtttgtccgtt

SEQ ID NO: 48683 - DNA, 25 bp, SARS Virus
actgggtttacacgtttgtccgttc

SEQ ID NO: 48684 - DNA, 25 bp, SARS Virus
ctgggtttacatctttgtccgttct

SEQ ID NO: 48685 - DNA, 25 bp, SARS Virus
tgggtttacatgcttgtccgttcta

SEQ ID NO: 48686 - DNA, 25 bp, SARS Virus
gggtttacatgtctgtccgttctag

SEQ ID NO: 48687 - DNA, 25 bp, SARS Virus
ggtttacatgttcgtccgttctaga

SEQ ID NO: 48688 - DNA, 25 bp, SARS Virus
gtttacatgtttctccgttctagac

SEQ ID NO: 48689 - DNA, 25 bp, SARS Virus
tttacatgtttgcccgttctagact

SEQ ID NO: 48690 - DNA, 25 bp, SARS Virus
ttacatgtttgtccgttctagactc

SEQ ID NO: 48691 - DNA, 25 bp, SARS Virus
tacatgtttgtccgttctagactcc

SEQ ID NO: 48692 - DNA, 25 bp, SARS Virus
acatgtttgtcccttctagactcct

SEQ ID NO: 48693 - DNA, 25 bp, SARS Virus
catgtttgtccgctctagactcctg

SEQ ID NO: 48694 - DNA, 25 bp, SARS Virus
atgtttgtccgtcctagactcctgt

SEQ ID NO: 48695 - DNA, 25 bp, SARS Virus
tgtttgtccgttctagactcctgtt

SEQ ID NO: 48696 - DNA, 25 bp, SARS Virus
gtttgtccgttccagactcctgttc

SEQ ID NO: 48697 - DNA, 25 bp, SARS Virus
tttgtccgttctcgactcctgttct

SEQ ID NO: 48698 - DNA, 25 bp, SARS Virus
ttgtccgttctacactcctgttctc

SEQ ID NO: 48699 - DNA, 25 bp, SARS Virus
tgtccgttctagcctcctgttctcc

SEQ ID NO: 48700 - DNA, 25 bp, SARS Virus
gtccgttctagactcctgttctccc

SEQ ID NO: 48701 - DNA, 25 bp, SARS Virus
tccgttctagacccctgttctcccg

SEQ ID NO: 48702 - DNA, 25 bp, SARS Virus
ccgttctagactcctgttctcccgt

SEQ ID NO: 48703 - DNA, 25 bp, SARS Virus
cgttctagactcctgttctcccgtt

SEQ ID NO: 48704 - DNA, 25 bp, SARS Virus
gttctagactcccgttctcccgttt

SEQ ID NO: 48705 - DNA, 25 bp, SARS Virus
ttctagactcctcttctcccgtttt

SEQ ID NO: 48706 - DNA, 25 bp, SARS Virus
tctagactcctgctctcccgttttc

SEQ ID NO: 48707 - DNA, 25 bp, SARS Virus
ctagactcctgtcctcccgttttca

SEQ ID NO: 48708 - DNA, 25 bp, SARS Virus
tagactcctgttctcccgttttcat

SEQ ID NO: 48709 - DNA, 25 bp, SARS Virus
agactcctgttcccccgttttcatt

SEQ ID NO: 48710 - DNA, 25 bp, SARS Virus
gactcctgttctcccgttttcattg

SEQ ID NO: 48711 - DNA, 25 bp, SARS Virus
actcctgttctcccgttttcattga

SEQ ID NO: 48712 - DNA, 25 bp, SARS Virus
ctcctgttctcccgttttcattgat

SEQ ID NO: 48713 - DNA, 25 bp, SARS Virus
tcctgttctccccttttcattgatc

SEQ ID NO: 48714 - DNA, 25 bp, SARS Virus
cctgttctcccgctttcattgatca

SEQ ID NO: 48715 - DNA, 25 bp, SARS Virus
ctgttctcccgtcttcattgatcac

SEQ ID NO: 48716 - DNA, 25 bp, SARS Virus
tgttctcccgttctcattgatcacg

SEQ ID NO: 48717 - DNA, 25 bp, SARS Virus
gttctcccgtttccattgatcacga

SEQ ID NO: 48718 - DNA, 25 bp, SARS Virus
ttctcccgttttcattgatcacgat

SEQ ID NO: 48719 - DNA, 25 bp, SARS Virus
tctcccgttttccttgatcacgata

SEQ ID NO: 48720 - DNA, 25 bp, SARS Virus
ctcccgttttcactgatcacgatac

SEQ ID NO: 48721 - DNA, 25 bp, SARS Virus
tcccgttttcatcgatcacgatacg

SEQ ID NO: 48722 - DNA, 25 bp, SARS Virus
cccgttttcattcatcacgatacgt

SEQ ID NO: 48723 - DNA, 25 bp, SARS Virus
ccgttttcattgctcacgatacgtt

SEQ ID NO: 48724 - DNA, 25 bp, SARS Virus
cgttttcattgaccacgatacgttt

SEQ ID NO: 48725 - DNA, 25 bp, SARS Virus
gttttcattgatcacgatacgtttg

SEQ ID NO: 48726 - DNA, 25 bp, SARS Virus
ttttcattgatcccgatacgtttgt

SEQ ID NO: 48727 - DNA, 25 bp, SARS Virus
tttcattgatcacgatacgtttgtt

SEQ ID NO: 48728 - DNA, 25 bp, SARS Virus
ttcattgatcaccatacgtttgtta

SEQ ID NO: 48729 - DNA, 25 bp, SARS Virus
tcattgatcacgctacgtttgttac

SEQ ID NO: 48730 - DNA, 25 bp, SARS Virus
cattgatcacgacacgtttgttacg

SEQ ID NO: 48731 - DNA, 25 bp, SARS Virus
attgatcacgatccgtttgttacga

SEQ ID NO: 48732 - DNA, 25 bp, SARS Virus
ttgatcacgatacgtttgttacgag

SEQ ID NO: 48733 - DNA, 25 bp, SARS Virus
tgatcacgatacctttgttacgaga

SEQ ID NO: 48734 - DNA, 25 bp, SARS Virus
gatcacgatacgcttgttacgagaa

SEQ ID NO: 48735 - DNA, 25 bp, SARS Virus
atcacgatacgtctgttacgagaag

SEQ ID NO: 48736 - DNA, 25 bp, SARS Virus
tcacgatacgttcgttacgagaagt

SEQ ID NO: 48737 - DNA, 25 bp, SARS Virus
cacgatacgtttcttacgagaagtg

SEQ ID NO: 48738 - DNA, 25 bp, SARS Virus
acgatacgtttgctacgagaagtga

SEQ ID NO: 48739 - DNA, 25 bp, SARS Virus
cgatacgtttgtcacgagaagtgat

SEQ ID NO: 48740 - DNA, 25 bp, SARS Virus
gatacgtttgttccgagaagtgata

SEQ ID NO: 48741 - DNA, 25 bp, SARS Virus
atacgtttgttacgagaagtgatac

SEQ ID NO: 48742 - DNA, 25 bp, SARS Virus
tacgtttgttaccagaagtgatacg

SEQ ID NO: 48743 - DNA, 25 bp, SARS Virus
acgtttgttacgcgaagtgatacga

SEQ ID NO: 48744 - DNA, 25 bp, SARS Virus
cgtttgttacgacaagtgatacgaa

SEQ ID NO: 48745 - DNA, 25 bp, SARS Virus
gtttgttacgagcagtgatacgaat

SEQ ID NO: 48746 - DNA, 25 bp, SARS Virus
tttgttacgagacgtgatacgaatc

SEQ ID NO: 48747 - DNA, 25 bp, SARS Virus
ttgttacgagaactgatacgaatcc

SEQ ID NO: 48748 - DNA, 25 bp, SARS Virus
tgttacgagaagcgatacgaatcct

SEQ ID NO: 48749 - DNA, 25 bp, SARS Virus
gttacgagaagtcatacgaatcctt

SEQ ID NO: 48750 - DNA, 25 bp, SARS Virus
ttacgagaagtgctacgaatccttc

SEQ ID NO: 48751 - DNA, 25 bp, SARS Virus
tacgagaagtgacacgaatccttcg

SEQ ID NO: 48752 - DNA, 25 bp, SARS Virus
acgagaagtgatccgaatccttcga

SEQ ID NO: 48753 - DNA, 25 bp, SARS Virus
cgagaagtgatacgaatccttcgaa

SEQ ID NO: 48754 - DNA, 25 bp, SARS Virus
gagaagtgataccaatccttcgaac

SEQ ID NO: 48755 - DNA, 25 bp, SARS Virus
agaagtgatacgcatccttcgaact

SEQ ID NO: 48756 - DNA, 25 bp, SARS Virus
gaagtgatacgactccttcgaacta

SEQ ID NO: 48757 - DNA, 25 bp, SARS Virus
aagtgatacgaacccttcgaactat

SEQ ID NO: 48758 - DNA, 25 bp, SARS Virus
agtgatacgaatccttcgaactatt

SEQ ID NO: 48759 - DNA, 25 bp, SARS Virus
gtgatacgaatccttcgaactatta

SEQ ID NO: 48760 - DNA, 25 bp, SARS Virus
tgatacgaatccctcgaactattac

SEQ ID NO: 48761 - DNA, 25 bp, SARS Virus
gatacgaatcctccgaactattact

SEQ ID NO: 48762 - DNA, 25 bp, SARS Virus
atacgaatccttcgaactattacta

SEQ ID NO: 48763 - DNA, 25 bp, SARS Virus
tacgaatccttccaactattactac

SEQ ID NO: 48764 - DNA, 25 bp, SARS Virus
acgaatccttcgcactattactacg

SEQ ID NO: 48765 - DNA, 25 bp, SARS Virus
cgaatccttcgacctattactacgt

SEQ ID NO: 48766 - DNA, 25 bp, SARS Virus
gaatccttcgaactattactacgtg

SEQ ID NO: 48767 - DNA, 25 bp, SARS Virus
aatccttcgaaccattactacgtga

SEQ ID NO: 48768 - DNA, 25 bp, SARS Virus
atccttcgaactcttactacgtgaa

SEQ ID NO: 48769 - DNA, 25 bp, SARS Virus
tccttcgaactactactacgtgaat

SEQ ID NO: 48770 - DNA, 25 bp, SARS Virus
ccttcgaactatcactacgtgaatt

SEQ ID NO: 48771 - DNA, 25 bp, SARS Virus
cttcgaactattcctacgtgaattg

SEQ ID NO: 48772 - DNA, 25 bp, SARS Virus
ttcgaactattactacgtgaattgt

SEQ ID NO: 48773 - DNA, 25 bp, SARS Virus
tcgaactattaccacgtgaattgtt

SEQ ID NO: 48774 - DNA, 25 bp, SARS Virus
cgaactattactccgtgaattgttg

SEQ ID NO: 48775 - DNA, 25 bp, SARS Virus
gaactattactacgtgaattgttgt

SEQ ID NO: 48776 - DNA, 25 bp, SARS Virus
aactattactacctgaattgttgta

SEQ ID NO: 48777 - DNA, 25 bp, SARS Virus
actattactacgcgaattgttgtaa

SEQ ID NO: 48778 - DNA, 25 bp, SARS Virus
ctattactacgtcaattgttgtaat

SEQ ID NO: 48779 - DNA, 25 bp, SARS Virus
tattactacgtgcattgttgtaata

SEQ ID NO: 48780 - DNA, 25 bp, SARS Virus
attactacgtgacttgttgtaatag

SEQ ID NO: 48781 - DNA, 25 bp, SARS Virus
ttactacgtgaactgttgtaatagt

SEQ ID NO: 48782 - DNA, 25 bp, SARS Virus
tactacgtgaatcgttgtaatagtt

SEQ ID NO: 48783 - DNA, 25 bp, SARS Virus
actacgtgaattcttgtaatagttg

SEQ ID NO: 48784 - DNA, 25 bp, SARS Virus
ctacgtgaattgctgtaatagttgt

SEQ ID NO: 48785 - DNA, 25 bp, SARS Virus
tacgtgaattgtcgtaatagttgtt

SEQ ID NO: 48786 - DNA, 25 bp, SARS Virus
acgtgaattgttctaatagttgtta

SEQ ID NO: 48787 - DNA, 25 bp, SARS Virus
cgtgaattgttgcaatagttgttac

SEQ ID NO: 48788 - DNA, 25 bp, SARS Virus
gtgaattgttgtcatagttgttacg

SEQ ID NO: 48789 - DNA, 25 bp, SARS Virus
tgaattgttgtactagttgttacgc

SEQ ID NO: 48790 - DNA, 25 bp, SARS Virus
gaattgttgtaacagttgttacgcg

SEQ ID NO: 48791 - DNA, 25 bp, SARS Virus
aattgttgtaatcgttgttacgcgc

SEQ ID NO: 48792 - DNA, 25 bp, SARS Virus
attgttgtaatacttgttacgcgca

SEQ ID NO: 48793 - DNA, 25 bp, SARS Virus
ttgttgtaatagctgttacgcgcac

SEQ ID NO: 48794 - DNA, 25 bp, SARS Virus
tgttgtaatagtcgttacgcgcact

SEQ ID NO: 48795 - DNA, 25 bp, SARS Virus
gttgtaatagttcttacgcgcacta

SEQ ID NO: 48796 - DNA, 25 bp, SARS Virus
ttgtaatagttgctacgcgcactac

SEQ ID NO: 48797 - DNA, 25 bp, SARS Virus
tgtaatagttgtcacgcgcactacc

SEQ ID NO: 48798 - DNA, 25 bp, SARS Virus
gtaatagttgttccgcgcactacca

SEQ ID NO: 48799 - DNA, 25 bp, SARS Virus
taatagttgttacgcgcactaccaa

SEQ ID NO: 48800 - DNA, 25 bp, SARS Virus
aatagttgttacccgcactaccaac

SEQ ID NO: 48801 - DNA, 25 bp, SARS Virus
atagttgttacgcgcactaccaaca

SEQ ID NO: 48802 - DNA, 25 bp, SARS Virus
tagttgttacgcccactaccaacac

SEQ ID NO: 48803 - DNA, 25 bp, SARS Virus
agttgttacgcgcactaccaacaca

SEQ ID NO: 48804 - DNA, 25 bp, SARS Virus
gttgttacgcgccctaccaacacaa

SEQ ID NO: 48805 - DNA, 25 bp, SARS Virus
ttgttacgcgcactaccaacacaag

SEQ ID NO: 48806 - DNA, 25 bp, SARS Virus
tgttacgcgcaccaccaacacaagg

SEQ ID NO: 48807 - DNA, 25 bp, SARS Virus
gttacgcgcactcccaacacaaggt

SEQ ID NO: 48808 - DNA, 25 bp, SARS Virus
ttacgcgcactaccaacacaaggtg

SEQ ID NO: 48809 - DNA, 25 bp, SARS Virus
tacgcgcactaccaacacaaggtga

SEQ ID NO: 48810 - DNA, 25 bp, SARS Virus
acgcgcactacccacacaaggtgag

SEQ ID NO: 48811 - DNA, 25 bp, SARS Virus
cgcgcactaccaccacaaggtgagt

SEQ ID NO: 48812 - DNA, 25 bp, SARS Virus
gcgcactaccaacacaaggtgagtt

SEQ ID NO: 48813 - DNA, 25 bp, SARS Virus
cgcactaccaacccaaggtgagttg

SEQ ID NO: 48814 - DNA, 25 bp, SARS Virus
gcactaccaacacaaggtgagttgt

SEQ ID NO: 48815 - DNA, 25 bp, SARS Virus
cactaccaacaccaggtgagttgta

SEQ ID NO: 48816 - DNA, 25 bp, SARS Virus
actaccaacacacggtgagttgtag

SEQ ID NO: 48817 - DNA, 25 bp, SARS Virus
ctaccaacacaacgtgagttgtagt

SEQ ID NO: 48818 - DNA, 25 bp, SARS Virus
taccaacacaagctgagttgtagta

SEQ ID NO: 48819 - DNA, 25 bp, SARS Virus
accaacacaaggcgagttgtagtat

SEQ ID NO: 48820 - DNA, 25 bp, SARS Virus
ccaacacaaggtcagttgtagtatg

SEQ ID NO: 48821 - DNA, 25 bp, SARS Virus
caacacaaggtgcgttgtagtatgg

SEQ ID NO: 48822 - DNA, 25 bp, SARS Virus
aacacaaggtgacttgtagtatggt

SEQ ID NO: 48823 - DNA, 25 bp, SARS Virus
acacaaggtgagctgtagtatggta

SEQ ID NO: 48824 - DNA, 25 bp, SARS Virus
cacaaggtgagtcgtagtatggtaa

SEQ ID NO: 48825 - DNA, 25 bp, SARS Virus
acaaggtgagttctagtatggtaac

SEQ ID NO: 48826 - DNA, 25 bp, SARS Virus
caaggtgagttgcagtatggtaact

SEQ ID NO: 48827 - DNA, 25 bp, SARS Virus
aaggtgagttgtcgtatggtaactg

SEQ ID NO: 48828 - DNA, 25 bp, SARS Virus
aggtgagttgtactatggtaactga

SEQ ID NO: 48829 - DNA, 25 bp, SARS Virus
ggtgagttgtagcatggtaactgat

SEQ ID NO: 48830 - DNA, 25 bp, SARS Virus
gtgagttgtagtctggtaactgatg

SEQ ID NO: 48831 - DNA, 25 bp, SARS Virus
tgagttgtagtacggtaactgatgt

SEQ ID NO: 48832 - DNA, 25 bp, SARS Virus
gagttgtagtatcgtaactgatgtc

SEQ ID NO: 48833 - DNA, 25 bp, SARS Virus
agttgtagtatgctaactgatgtcg

SEQ ID NO: 48834 - DNA, 25 bp, SARS Virus
gttgtagtatggcaactgatgtcgt

SEQ ID NO: 48835 - DNA, 25 bp, SARS Virus
ttgtagtatggtcactgatgtcgtc

SEQ ID NO: 48836 - DNA, 25 bp, SARS Virus
tgtagtatggtacctgatgtcgtcg

SEQ ID NO: 48837 - DNA, 25 bp, SARS Virus
gtagtatggtaactgatgtcgtcgg

SEQ ID NO: 48838 - DNA, 25 bp, SARS Virus
tagtatggtaaccgatgtcgtcggt

SEQ ID NO: 48839 - DNA, 25 bp, SARS Virus
agtatggtaactcatgtcgtcggtt

SEQ ID NO: 48840 - DNA, 25 bp, SARS Virus
gtatggtaactgctgtcgtcggttt

SEQ ID NO: 48841 - DNA, 25 bp, SARS Virus
tatggtaactgacgtcgtcggtttg

SEQ ID NO: 48842 - DNA, 25 bp, SARS Virus
atggtaactgatctcgtcggtttga

SEQ ID NO: 48843 - DNA, 25 bp, SARS Virus
tggtaactgatgccgtcggtttgag

SEQ ID NO: 48844 - DNA, 25 bp, SARS Virus
ggtaactgatgtcgtcggtttgagt

SEQ ID NO: 48845 - DNA, 25 bp, SARS Virus
gtaactgatgtcctcggtttgagta

SEQ ID NO: 48846 - DNA, 25 bp, SARS Virus
taactgatgtcgccggtttgagtac

SEQ ID NO: 48847 - DNA, 25 bp, SARS Virus
aactgatgtcgtcggtttgagtacc

SEQ ID NO: 48848 - DNA, 25 bp, SARS Virus
actgatgtcgtccgtttgagtacca

SEQ ID NO: 48849 - DNA, 25 bp, SARS Virus
ctgatgtcgtcgctttgagtaccaa

SEQ ID NO: 48850 - DNA, 25 bp, SARS Virus
tgatgtcgtcggcttgagtaccaac

SEQ ID NO: 48851 - DNA, 25 bp, SARS Virus
gatgtcgtcggtctgagtaccaaca

SEQ ID NO: 48852 - DNA, 25 bp, SARS Virus
atgtcgtcggttcgagtaccaacaa

SEQ ID NO: 48853 - DNA, 25 bp, SARS Virus
tgtcgtcggtttcagtaccaacaac

SEQ ID NO: 48854 - DNA, 25 bp, SARS Virus
gtcgtcggtttgcgtaccaacaaca

SEQ ID NO: 48855 - DNA, 25 bp, SARS Virus
tcgtcggtttgactaccaacaacag

SEQ ID NO: 48856 - DNA, 25 bp, SARS Virus
cgtcggtttgagcaccaacaacagg

SEQ ID NO: 48857 - DNA, 25 bp, SARS Virus
gtcggtttgagtcccaacaacaggg

SEQ ID NO: 48858 - DNA, 25 bp, SARS Virus
tcggtttgagtaccaacaacaggga

SEQ ID NO: 48859 - DNA, 25 bp, SARS Virus
cggtttgagtaccaacaacagggac

SEQ ID NO: 48860 - DNA, 25 bp, SARS Virus
ggtttgagtacccacaacagggact

SEQ ID NO: 48861 - DNA, 25 bp, SARS Virus
gtttgagtaccaccaacagggacta

SEQ ID NO: 48862 - DNA, 25 bp, SARS Virus
tttgagtaccaacaacagggactaa

SEQ ID NO: 48863 - DNA, 25 bp, SARS Virus
ttgagtaccaaccacagggactaat

SEQ ID NO: 48864 - DNA, 25 bp, SARS Virus
tgagtaccaacaccagggactaata

SEQ ID NO: 48865 - DNA, 25 bp, SARS Virus
gagtaccaacaacagggactaatac

SEQ ID NO: 48866 - DNA, 25 bp, SARS Virus
agtaccaacaaccgggactaatacc

SEQ ID NO: 48867 - DNA, 25 bp, SARS Virus
gtaccaacaacacggactaatacca

SEQ ID NO: 48868 - DNA, 25 bp, SARS Virus
taccaacaacagcgactaataccat

SEQ ID NO: 48869 - DNA, 25 bp, SARS Virus
accaacaacaggcactaataccatg

SEQ ID NO: 48870 - DNA, 25 bp, SARS Virus
ccaacaacagggcctaataccatgg

SEQ ID NO: 48871 - DNA, 25 bp, SARS Virus
caacaacagggactaataccatgga

SEQ ID NO: 48872 - DNA, 25 bp, SARS Virus
aacaacagggaccaataccatggat

SEQ ID NO: 48873 - DNA, 25 bp, SARS Virus
acaacagggactcataccatggatg

SEQ ID NO: 48874 - DNA, 25 bp, SARS Virus
caacagggactactaccatggatgt

SEQ ID NO: 48875 - DNA, 25 bp, SARS Virus
aacagggactaacaccatggatgtt

SEQ ID NO: 48876 - DNA, 25 bp, SARS Virus
acagggactaatcccatggatgttc

SEQ ID NO: 48877 - DNA, 25 bp, SARS Virus
cagggactaataccatggatgttct

SEQ ID NO: 48878 - DNA, 25 bp, SARS Virus
agggactaataccatggatgttctt

SEQ ID NO: 48879 - DNA, 25 bp, SARS Virus
gggactaataccctggatgttcttg

SEQ ID NO: 48880 - DNA, 25 bp, SARS Virus
ggactaataccacggatgttcttgt

SEQ ID NO: 48881 - DNA, 25 bp, SARS Virus
gactaataccatcgatgttcttgtg

SEQ ID NO: 48882 - DNA, 25 bp, SARS Virus
actaataccatgcatgttcttgtga

SEQ ID NO: 48883 - DNA, 25 bp, SARS Virus
ctaataccatggctgttcttgtgaa

SEQ ID NO: 48884 - DNA, 25 bp, SARS Virus
taataccatggacgttcttgtgaac

SEQ ID NO: 48885 - DNA, 25 bp, SARS Virus
aataccatggatcttcttgtgaaca

SEQ ID NO: 48886 - DNA, 25 bp, SARS Virus
ataccatggatgctcttgtgaacac

SEQ ID NO: 48887 - DNA, 25 bp, SARS Virus
taccatggatgtccttgtgaacact

SEQ ID NO: 48888 - DNA, 25 bp, SARS Virus
accatggatgttcttgtgaacacta

SEQ ID NO: 48889 - DNA, 25 bp, SARS Virus
ccatggatgttcctgtgaacactac

SEQ ID NO: 48890 - DNA, 25 bp, SARS Virus
catggatgttctcgtgaacactacc

SEQ ID NO: 48891 - DNA, 25 bp, SARS Virus
atggatgttcttctgaacactacca

SEQ ID NO: 48892 - DNA, 25 bp, SARS Virus
tggatgttcttgcgaacactaccat

SEQ ID NO: 48893 - DNA, 25 bp, SARS Virus
ggatgttcttgtcaacactaccatt

SEQ ID NO: 48894 - DNA, 25 bp, SARS Virus
gatgttcttgtgcacactaccattg

SEQ ID NO: 48895 - DNA, 25 bp, SARS Virus
atgttcttgtgaccactaccattgt

SEQ ID NO: 48896 - DNA, 25 bp, SARS Virus
tgttcttgtgaacactaccattgtg

SEQ ID NO: 48897 - DNA, 25 bp, SARS Virus
gttcttgtgaaccctaccattgtgg

SEQ ID NO: 48898 - DNA, 25 bp, SARS Virus
ttcttgtgaacactaccattgtgga

SEQ ID NO: 48899 - DNA, 25 bp, SARS Virus
tcttgtgaacaccaccattgtggaa

SEQ ID NO: 48900 - DNA, 25 bp, SARS Virus
cttgtgaacactcccattgtggaaa

SEQ ID NO: 48901 - DNA, 25 bp, SARS Virus
ttgtgaacactaccattgtggaaat

SEQ ID NO: 48902 - DNA, 25 bp, SARS Virus
tgtgaacactaccattgtggaaatg

SEQ ID NO: 48903 - DNA, 25 bp, SARS Virus
gtgaacactacccttgtggaaatgt

SEQ ID NO: 48904 - DNA, 25 bp, SARS Virus
tgaacactaccactgtggaaatgta

SEQ ID NO: 48905 - DNA, 25 bp, SARS Virus
gaacactaccatcgtggaaatgtat

SEQ ID NO: 48906 - DNA, 25 bp, SARS Virus
aacactaccattctggaaatgtata

SEQ ID NO: 48907 - DNA, 25 bp, SARS Virus
acactaccattgcggaaatgtatac

SEQ ID NO: 48908 - DNA, 25 bp, SARS Virus
cactaccattgtcgaaatgtatacg

SEQ ID NO: 48909 - DNA, 25 bp, SARS Virus
actaccattgtgcaaatgtatacgt

SEQ ID NO: 48910 - DNA, 25 bp, SARS Virus
ctaccattgtggcaatgtatacgta

SEQ ID NO: 48911 - DNA, 25 bp, SARS Virus
taccattgtggacatgtatacgtag

SEQ ID NO: 48912 - DNA, 25 bp, SARS Virus
accattgtggaactgtatacgtaga

SEQ ID NO: 48913 - DNA, 25 bp, SARS Virus
ccattgtggaaacgtatacgtagac

SEQ ID NO: 48914 - DNA, 25 bp, SARS Virus
cattgtggaaatctatacgtagacg

SEQ ID NO: 48915 - DNA, 25 bp, SARS Virus
attgtggaaatgcatacgtagacgt

SEQ ID NO: 48916 - DNA, 25 bp, SARS Virus
ttgtggaaatgtctacgtagacgtg

SEQ ID NO: 48917 - DNA, 25 bp, SARS Virus
tgtggaaatgtacacgtagacgtga

SEQ ID NO: 48918 - DNA, 25 bp, SARS Virus
gtggaaatgtatccgtagacgtgag

SEQ ID NO: 48919 - DNA, 25 bp, SARS Virus
tggaaatgtatacgtagacgtgaga

SEQ ID NO: 48920 - DNA, 25 bp, SARS Virus
ggaaatgtatacctagacgtgagac

SEQ ID NO: 48921 - DNA, 25 bp, SARS Virus
gaaatgtatacgcagacgtgagacc

SEQ ID NO: 48922 - DNA, 25 bp, SARS Virus
aaatgtatacgtcgacgtgagaccc

SEQ ID NO: 48923 - DNA, 25 bp, SARS Virus
aatgtatacgtacacgtgagaccct

SEQ ID NO: 48924 - DNA, 25 bp, SARS Virus
atgtatacgtagccgtgagaccctt

SEQ ID NO: 48925 - DNA, 25 bp, SARS Virus
tgtatacgtagacgtgagacccttt

SEQ ID NO: 48926 - DNA, 25 bp, SARS Virus
gtatacgtagacctgagacccttta

SEQ ID NO: 48927 - DNA, 25 bp, SARS Virus
tatacgtagacgcgagaccctttag

SEQ ID NO: 48928 - DNA, 25 bp, SARS Virus
atacgtagacgtcagaccctttagg

SEQ ID NO: 48929 - DNA, 25 bp, SARS Virus
atccaacacgctgctttacgagcta

SEQ ID NO: 48930 - DNA, 25 bp, SARS Virus
tccaacacgctcgtttacgagctat

SEQ ID NO: 48931 - DNA, 25 bp, SARS Virus
ccaacacgctccgttacgagctatt

SEQ ID NO: 48932 - DNA, 25 bp, SARS Virus
caacacgctcctgtacgagctattg

SEQ ID NO: 48933 - DNA, 25 bp, SARS Virus
aacacgctccttgacgagctattgg

SEQ ID NO: 48934 - DNA, 25 bp, SARS Virus
acacgctcctttgcgagctattggc

SEQ ID NO: 48935 - DNA, 25 bp, SARS Virus
cacgctcctttaggagctattggca

SEQ ID NO: 48936 - DNA, 25 bp, SARS Virus
acgctcctttacgagctattggcac

SEQ ID NO: 48937 - DNA, 25 bp, SARS Virus
cgctcctttacgggctattggcacg

SEQ ID NO: 48938 - DNA, 25 bp, SARS Virus
gctcctttacgagctattggcacga

SEQ ID NO: 48939 - DNA, 25 bp, SARS Virus
ctcctttacgaggtattggcacgat

SEQ ID NO: 48940 - DNA, 25 bp, SARS Virus
tcctttacgagcgattggcacgatg

SEQ ID NO: 48941 - DNA, 25 bp, SARS Virus
cctttacgagctgttggcacgatga

SEQ ID NO: 48942 - DNA, 25 bp, SARS Virus
ctttacgagctagtggcacgatgag

SEQ ID NO: 48943 - DNA, 25 bp, SARS Virus
tttacgagctatgggcacgatgaga

SEQ ID NO: 48944 - DNA, 25 bp, SARS Virus
ttacgagctattggcacgatgagaa

SEQ ID NO: 48945 - DNA, 25 bp, SARS Virus
tacgagctattggcacgatgagaag

SEQ ID NO: 48946 - DNA, 25 bp, SARS Virus
acgagctattgggacgatgagaagt

SEQ ID NO: 48947 - DNA, 25 bp, SARS Virus
cgagctattggcgcgatgagaagtc

SEQ ID NO: 48948 - DNA, 25 bp, SARS Virus
gagctattggcaggatgagaagtcc

SEQ ID NO: 48949 - DNA, 25 bp, SARS Virus
agctattggcacgatgagaagtccg

SEQ ID NO: 48950 - DNA, 25 bp, SARS Virus
gctattggcacggtgagaagtccga

SEQ ID NO: 48951 - DNA, 25 bp, SARS Virus
ctattggcacgaggagaagtccgat

SEQ ID NO: 48952 - DNA, 25 bp, SARS Virus
tattggcacgatgagaagtccgata

SEQ ID NO: 48953 - DNA, 25 bp, SARS Virus
attggcacgatgggaagtccgataa

SEQ ID NO: 48954 - DNA, 25 bp, SARS Virus
ttggcacgatgagaagtccgataac

SEQ ID NO: 48955 - DNA, 25 bp, SARS Virus
tggcacgatgaggagtccgataacg

SEQ ID NO: 48956 - DNA, 25 bp, SARS Virus
ggcacgatgagaggtccgataacga

SEQ ID NO: 48957 - DNA, 25 bp, SARS Virus
gcacgatgagaagtccgataacgaa

SEQ ID NO: 48958 - DNA, 25 bp, SARS Virus
cacgatgagaaggccgataacgaag

SEQ ID NO: 48959 - DNA, 25 bp, SARS Virus
acgatgagaagtgcgataacgaagt

SEQ ID NO: 48960 - DNA, 25 bp, SARS Virus
cgatgagaagtcggataacgaagtc

SEQ ID NO: 48961 - DNA, 25 bp, SARS Virus
gatgagaagtccgataacgaagtct

SEQ ID NO: 48962 - DNA, 25 bp, SARS Virus
atgagaagtccggtaacgaagtctt

SEQ ID NO: 48963 - DNA, 25 bp, SARS Virus
tgagaagtccgagaacgaagtctta

SEQ ID NO: 48964 - DNA, 25 bp, SARS Virus
gagaagtccgatgacgaagtcttaa

SEQ ID NO: 48965 - DNA, 25 bp, SARS Virus
agaagtccgatagcgaagtcttaaa

SEQ ID NO: 48966 - DNA, 25 bp, SARS Virus
gaagtccgataaggaagtcttaaat

SEQ ID NO: 48967 - DNA, 25 bp, SARS Virus
aagtccgataacgaagtcttaaatc

SEQ ID NO: 48968 - DNA, 25 bp, SARS Virus
agtccgataacggagtcttaaatca

SEQ ID NO: 48969 - DNA, 25 bp, SARS Virus
gtccgataacgaggtcttaaatcaa

SEQ ID NO: 48970 - DNA, 25 bp, SARS Virus
tccgataacgaagtcttaaatcaag

SEQ ID NO: 48971 - DNA, 25 bp, SARS Virus
ccgataacgaaggcttaaatcaaga

SEQ ID NO: 48972 - DNA, 25 bp, SARS Virus
cgataacgaagtgttaaatcaagaa

SEQ ID NO: 48973 - DNA, 25 bp, SARS Virus
gataacgaagtcgtaaatcaagaaa

SEQ ID NO: 48974 - DNA, 25 bp, SARS Virus
ataacgaagtctgaaatcaagaaat

SEQ ID NO: 48975 - DNA, 25 bp, SARS Virus
taacgaagtcttgaatcaagaaatg

SEQ ID NO: 48976 - DNA, 25 bp, SARS Virus
aacgaagtcttagatcaagaaatgg

SEQ ID NO: 48977 - DNA, 25 bp, SARS Virus
acgaagtcttaagtcaagaaatggt

SEQ ID NO: 48978 - DNA, 25 bp, SARS Virus
cgaagtcttaaagcaagaaatggta

SEQ ID NO: 48979 - DNA, 25 bp, SARS Virus
gaagtcttaaatgaagaaatggtag

SEQ ID NO: 48980 - DNA, 25 bp, SARS Virus
aagtcttaaatcgagaaatggtagt

SEQ ID NO: 48981 - DNA, 25 bp, SARS Virus
agtcttaaatcaggaaatggtagta

SEQ ID NO: 48982 - DNA, 25 bp, SARS Virus
gtcttaaatcaagaaatggtagtat

SEQ ID NO: 48983 - DNA, 25 bp, SARS Virus
tcttaaatcaaggaatggtagtata

SEQ ID NO: 48984 - DNA, 25 bp, SARS Virus
cttaaatcaagagatggtagtatac

SEQ ID NO: 48985 - DNA, 25 bp, SARS Virus
ttaaatcaagaagtggtagtatacg

SEQ ID NO: 48986 - DNA, 25 bp, SARS Virus
taaatcaagaaagggtagtatacgg

SEQ ID NO: 48987 - DNA, 25 bp, SARS Virus
aaatcaagaaatggtagtatacggc

SEQ ID NO: 48988 - DNA, 25 bp, SARS Virus
aatcaagaaatggtagtatacggcg

SEQ ID NO: 48989 - DNA, 25 bp, SARS Virus
atcaagaaatgggagtatacggcga

SEQ ID NO: 48990 - DNA, 25 bp, SARS Virus
tcaagaaatggtggtatacggcgaa

SEQ ID NO: 48991 - DNA, 25 bp, SARS Virus
caagaaatggtagtatacggcgaat

SEQ ID NO: 48992 - DNA, 25 bp, SARS Virus
aagaaatggtaggatacggcgaata

SEQ ID NO: 48993 - DNA, 25 bp, SARS Virus
agaaatggtagtgtacggcgaatac

SEQ ID NO: 48994 - DNA, 25 bp, SARS Virus
gaaatggtagtagacggcgaatacg

SEQ ID NO: 48995 - DNA, 25 bp, SARS Virus
aaatggtagtatgcggcgaatacgg

SEQ ID NO: 48996 - DNA, 25 bp, SARS Virus
aatggtagtatagggcgaatacggt

SEQ ID NO: 48997 - DNA, 25 bp, SARS Virus
atggtagtatacggcgaatacggtg

SEQ ID NO: 48998 - DNA, 25 bp, SARS Virus
tggtagtatacggcgaatacggtga

SEQ ID NO: 48999 - DNA, 25 bp, SARS Virus
ggtagtatacggggaatacggtgac

SEQ ID NO: 49000 - DNA, 25 bp, SARS Virus
gtagtatacggcgaatacggtgacg

SEQ ID NO: 49001 - DNA, 25 bp, SARS Virus
tagtatacggcggatacggtgacgg

SEQ ID NO: 49002 - DNA, 25 bp, SARS Virus
agtatacggcgagtacggtgacggg

SEQ ID NO: 49003 - DNA, 25 bp, SARS Virus
gtatacggcgaagacggtgacgggt

SEQ ID NO: 49004 - DNA, 25 bp, SARS Virus
tatacggcgaatgcggtgacgggtc

SEQ ID NO: 49005 - DNA, 25 bp, SARS Virus
atacggcgaatagggtgacgggtcc

SEQ ID NO: 49006 - DNA, 25 bp, SARS Virus
tacggcgaatacggtgacgggtcct

SEQ ID NO: 49007 - DNA, 25 bp, SARS Virus
acggcgaatacggtgacgggtcctc

SEQ ID NO: 49008 - DNA, 25 bp, SARS Virus
cggcgaatacggggacgggtcctcc

SEQ ID NO: 49009 - DNA, 25 bp, SARS Virus
ggcgaatacggtgacgggtcctccg

SEQ ID NO: 49010 - DNA, 25 bp, SARS Virus
gcgaatacggtggcgggtcctccgg

SEQ ID NO: 49011 - DNA, 25 bp, SARS Virus
cgaatacggtgaggggtcctccgga

SEQ ID NO: 49012 - DNA, 25 bp, SARS Virus
gaatacggtgacgggtcctccggat

SEQ ID NO: 49013 - DNA, 25 bp, SARS Virus
aatacggtgacgggtcctccggata

SEQ ID NO: 49014 - DNA, 25 bp, SARS Virus
atacggtgacgggtcctccggatac

SEQ ID NO: 49015 - DNA, 25 bp, SARS Virus
tacggtgacggggcctccggatact

SEQ ID NO: 49016 - DNA, 25 bp, SARS Virus
acggtgacgggtgctccggatactc

SEQ ID NO: 49017 - DNA, 25 bp, SARS Virus
cggtgacgggtcgtccggatactcg

SEQ ID NO: 49018 - DNA, 25 bp, SARS Virus
ggtgacgggtccgccggatactcgt

SEQ ID NO: 49019 - DNA, 25 bp, SARS Virus
gtgacgggtcctgcggatactcgtc

SEQ ID NO: 49020 - DNA, 25 bp, SARS Virus
tgacgggtcctcgggatactcgtcc

SEQ ID NO: 49021 - DNA, 25 bp, SARS Virus
gacgggtcctccggatactcgtccg

SEQ ID NO: 49022 - DNA, 25 bp, SARS Virus
acgggtcctccggatactcgtccga

SEQ ID NO: 49023 - DNA, 25 bp, SARS Virus
cgggtcctccgggtactcgtccgac

SEQ ID NO: 49024 - DNA, 25 bp, SARS Virus
gggtcctccggagactcgtccgaca

SEQ ID NO: 49025 - DNA, 25 bp, SARS Virus
ggtcctccggatgctcgtccgacat

SEQ ID NO: 49026 - DNA, 25 bp, SARS Virus
gtcctccggatagtcgtccgacatc

SEQ ID NO: 49027 - DNA, 25 bp, SARS Virus
tcctccggatacgcgtccgacatcg

SEQ ID NO: 49028 - DNA, 25 bp, SARS Virus
cctccggatactggtccgacatcga

SEQ ID NO: 49029 - DNA, 25 bp, SARS Virus
ctccggatactcgtccgacatcgat

SEQ ID NO: 49030 - DNA, 25 bp, SARS Virus
tccggatactcggccgacatcgatt

SEQ ID NO: 49031 - DNA, 25 bp, SARS Virus
ccggatactcgtgcgacatcgatta

SEQ ID NO: 49032 - DNA, 25 bp, SARS Virus
cggatactcgtcggacatcgattac

SEQ ID NO: 49033 - DNA, 25 bp, SARS Virus
ggatactcgtccgacatcgattacc

SEQ ID NO: 49034 - DNA, 25 bp, SARS Virus
gatactcgtccggcatcgattacca

SEQ ID NO: 49035 - DNA, 25 bp, SARS Virus
atactcgtccgagatcgattaccac

SEQ ID NO: 49036 - DNA, 25 bp, SARS Virus
tactcgtccgacgtcgattaccact

SEQ ID NO: 49037 - DNA, 25 bp, SARS Virus
actcgtccgacagcgattaccacta

SEQ ID NO: 49038 - DNA, 25 bp, SARS Virus
ctcgtccgacatggattaccactaa

SEQ ID NO: 49039 - DNA, 25 bp, SARS Virus
tcgtccgacatcgattaccactaag

SEQ ID NO: 49040 - DNA, 25 bp, SARS Virus
cgtccgacatcggttaccactaaga

SEQ ID NO: 49041 - DNA, 25 bp, SARS Virus
gtccgacatcgagtaccactaagac

SEQ ID NO: 49042 - DNA, 25 bp, SARS Virus
tccgacatcgatgaccactaagact

SEQ ID NO: 49043 - DNA, 25 bp, SARS Virus
ccgacatcgattgccactaagactt

SEQ ID NO: 49044 - DNA, 25 bp, SARS Virus
cgacatcgattagcactaagacttc

SEQ ID NO: 49045 - DNA, 25 bp, SARS Virus
gacatcgattacgactaagacttca

SEQ ID NO: 49046 - DNA, 25 bp, SARS Virus
acatcgattaccgctaagacttcag

SEQ ID NO: 49047 - DNA, 25 bp, SARS Virus
catcgattaccagtaagacttcagc

SEQ ID NO: 49048 - DNA, 25 bp, SARS Virus
atcgattaccacgaagacttcagca

SEQ ID NO: 49049 - DNA, 25 bp, SARS Virus
tcgattaccactgagacttcagcaa

SEQ ID NO: 49050 - DNA, 25 bp, SARS Virus
cgattaccactaggacttcagcaag

SEQ ID NO: 49051 - DNA, 25 bp, SARS Virus
gattaccactaagacttcagcaaga

SEQ ID NO: 49052 - DNA, 25 bp, SARS Virus
attaccactaaggcttcagcaagag

SEQ ID NO: 49053 - DNA, 25 bp, SARS Virus
ttaccactaagagttcagcaagagt

SEQ ID NO: 49054 - DNA, 25 bp, SARS Virus
taccactaagacgtcagcaagagtt

SEQ ID NO: 49055 - DNA, 25 bp, SARS Virus
accactaagactgcagcaagagttt

SEQ ID NO: 49056 - DNA, 25 bp, SARS Virus
ccactaagacttgagcaagagtttt

SEQ ID NO: 49057 - DNA, 25 bp, SARS Virus
cactaagacttcggcaagagttttt

SEQ ID NO: 49058 - DNA, 25 bp, SARS Virus
actaagacttcagcaagagtttttc

SEQ ID NO: 49059 - DNA, 25 bp, SARS Virus
ctaagacttcaggaagagtttttca

SEQ ID NO: 49060 - DNA, 25 bp, SARS Virus
taagacttcagcgagagtttttcaa

SEQ ID NO: 49061 - DNA, 25 bp, SARS Virus
aagacttcagcaggagtttttcaat

SEQ ID NO: 49062 - DNA, 25 bp, SARS Virus
agacttcagcaagagtttttcaatt

SEQ ID NO: 49063 - DNA, 25 bp, SARS Virus
gacttcagcaagggtttttcaattt

SEQ ID NO: 49064 - DNA, 25 bp, SARS Virus
acttcagcaagagtttttcaatttc

SEQ ID NO: 49065 - DNA, 25 bp, SARS Virus
cttcagcaagaggttttcaatttct

SEQ ID NO: 49066 - DNA, 25 bp, SARS Virus
ttcagcaagagtgtttcaatttctt

SEQ ID NO: 49067 - DNA, 25 bp, SARS Virus
tcagcaagagttgttcaatttcttt

SEQ ID NO: 49068 - DNA, 25 bp, SARS Virus
cagcaagagtttgtcaatttcttta

SEQ ID NO: 49069 - DNA, 25 bp, SARS Virus
agcaagagttttgcaatttctttag

SEQ ID NO: 49070 - DNA, 25 bp, SARS Virus
gcaagagtttttgaatttctttaga

SEQ ID NO: 49071 - DNA, 25 bp, SARS Virus
caagagtttttcgatttctttagaa

SEQ ID NO: 49072 - DNA, 25 bp, SARS Virus
aagagtttttcagtttctttagaaa

SEQ ID NO: 49073 - DNA, 25 bp, SARS Virus
agagtttttcaagttctttagaaac

SEQ ID NO: 49074 - DNA, 25 bp, SARS Virus
gagtttttcaatgtctttagaaact

SEQ ID NO: 49075 - DNA, 25 bp, SARS Virus
agtttttcaattgctttagaaactt

SEQ ID NO: 49076 - DNA, 25 bp, SARS Virus
gtttttcaatttgtttagaaactta

SEQ ID NO: 49077 - DNA, 25 bp, SARS Virus
tttttcaatttcgttagaaacttac

SEQ ID NO: 49078 - DNA, 25 bp, SARS Virus
ttttcaatttctgtagaaacttaca

SEQ ID NO: 49079 - DNA, 25 bp, SARS Virus
tttcaatttcttgagaaacttacac

SEQ ID NO: 49080 - DNA, 25 bp, SARS Virus
ttcaatttctttggaaacttacacc

SEQ ID NO: 49081 - DNA, 25 bp, SARS Virus
tcaatttctttagaaacttacaccg

SEQ ID NO: 49082 - DNA, 25 bp, SARS Virus
caatttctttaggaacttacaccga

SEQ ID NO: 49083 - DNA, 25 bp, SARS Virus
aatttctttagagacttacaccgat

SEQ ID NO: 49084 - DNA, 25 bp, SARS Virus
atttctttagaagcttacaccgatt

SEQ ID NO: 49085 - DNA, 25 bp, SARS Virus
tttctttagaaagttacaccgattt

SEQ ID NO: 49086 - DNA, 25 bp, SARS Virus
ttctttagaaacgtacaccgattta

SEQ ID NO: 49087 - DNA, 25 bp, SARS Virus
tctttagaaactgacaccgatttag

SEQ ID NO: 49088 - DNA, 25 bp, SARS Virus
ctttagaaacttgcaccgatttaga

SEQ ID NO: 49089 - DNA, 25 bp, SARS Virus
tttagaaacttagaccgatttagac

SEQ ID NO: 49090 - DNA, 25 bp, SARS Virus
ttagaaacttacgccgatttagact

SEQ ID NO: 49091 - DNA, 25 bp, SARS Virus
tagaaacttacagcgatttagactc

SEQ ID NO: 49092 - DNA, 25 bp, SARS Virus
agaaacttacacggatttagactca

SEQ ID NO: 49093 - DNA, 25 bp, SARS Virus
gaaacttacaccgatttagactcaa

SEQ ID NO: 49094 - DNA, 25 bp, SARS Virus
aaacttacaccggtttagactcaaa

SEQ ID NO: 49095 - DNA, 25 bp, SARS Virus
aacttacaccgagttagactcaaac

SEQ ID NO: 49096 - DNA, 25 bp, SARS Virus
acttacaccgatgtagactcaaact

SEQ ID NO: 49097 - DNA, 25 bp, SARS Virus
cttacaccgattgagactcaaactg

SEQ ID NO: 49098 - DNA, 25 bp, SARS Virus
ttacaccgatttggactcaaactgg

SEQ ID NO: 49099 - DNA, 25 bp, SARS Virus
tacaccgatttagactcaaactggc

SEQ ID NO: 49100 - DNA, 25 bp, SARS Virus
acaccgatttaggctcaaactggca

SEQ ID NO: 49101 - DNA, 25 bp, SARS Virus
caccgatttagagtcaaactggcac

SEQ ID NO: 49102 - DNA, 25 bp, SARS Virus
accgatttagacgcaaactggcact

SEQ ID NO: 49103 - DNA, 25 bp, SARS Virus
ccgatttagactgaaactggcacta

SEQ ID NO: 49104 - DNA, 25 bp, SARS Virus
cgatttagactcgaactggcactac

SEQ ID NO: 49105 - DNA, 25 bp, SARS Virus
gatttagactcagactggcactacg

SEQ ID NO: 49106 - DNA, 25 bp, SARS Virus
atttagactcaagctggcactacga

SEQ ID NO: 49107 - DNA, 25 bp, SARS Virus
tttagactcaaagtggcactacgac

SEQ ID NO: 49108 - DNA, 25 bp, SARS Virus
ttagactcaaacgggcactacgacg

SEQ ID NO: 49109 - DNA, 25 bp, SARS Virus
tagactcaaactggcactacgacgg

SEQ ID NO: 49110 - DNA, 25 bp, SARS Virus
agactcaaactggcactacgacggt

SEQ ID NO: 49111 - DNA, 25 bp, SARS Virus
gactcaaactgggactacgacggta

SEQ ID NO: 49112 - DNA, 25 bp, SARS Virus
actcaaactggcgctacgacggtac

SEQ ID NO: 49113 - DNA, 25 bp, SARS Virus
ctcaaactggcagtacgacggtacg

SEQ ID NO: 49114 - DNA, 25 bp, SARS Virus
tcaaactggcacgacgacggtacgt

SEQ ID NO: 49115 - DNA, 25 bp, SARS Virus
caaactggcactgcgacggtacgtt

SEQ ID NO: 49116 - DNA, 25 bp, SARS Virus
aaactggcactaggacggtacgttg

SEQ ID NO: 49117 - DNA, 25 bp, SARS Virus
aactggcactacgacggtacgttgc

SEQ ID NO: 49118 - DNA, 25 bp, SARS Virus
actggcactacggcggtacgttgcg

SEQ ID NO: 49119 - DNA, 25 bp, SARS Virus
ctggcactacgagggtacgttgcgt

SEQ ID NO: 49120 - DNA, 25 bp, SARS Virus
tggcactacgacggtacgttgcgtt

SEQ ID NO: 49121 - DNA, 25 bp, SARS Virus
ggcactacgacggtacgttgcgttc

SEQ ID NO: 49122 - DNA, 25 bp, SARS Virus
gcactacgacgggacgttgcgttca

SEQ ID NO: 49123 - DNA, 25 bp, SARS Virus
cactacgacggtgcgttgcgttcaa

SEQ ID NO: 49124 - DNA, 25 bp, SARS Virus
actacgacggtaggttgcgttcaac

SEQ ID NO: 49125 - DNA, 25 bp, SARS Virus
ctacgacggtacgttgcgttcaacc

SEQ ID NO: 49126 - DNA, 25 bp, SARS Virus
tacgacggtacggtgcgttcaacct

SEQ ID NO: 49127 - DNA, 25 bp, SARS Virus
acgacggtacgtggcgttcaacctt

SEQ ID NO: 49128 - DNA, 25 bp, SARS Virus
cgacggtacgttgcgttcaaccttt

SEQ ID NO: 49129 - DNA, 25 bp, SARS Virus
gacggtacgttgggttcaacctttt

SEQ ID NO: 49130 - DNA, 25 bp, SARS Virus
acggtacgttgcgttcaaccttttc

SEQ ID NO: 49131 - DNA, 25 bp, SARS Virus
cggtacgttgcggtcaaccttttct

SEQ ID NO: 49132 - DNA, 25 bp, SARS Virus
ggtacgttgcgtgcaaccttttcta

SEQ ID NO: 49133 - DNA, 25 bp, SARS Virus
gtacgttgcgttgaaccttttctac

SEQ ID NO: 49134 - DNA, 25 bp, SARS Virus
tacgttgcgttcgaccttttctacc

SEQ ID NO: 49135 - DNA, 25 bp, SARS Virus
acgttgcgttcagccttttctaccg

SEQ ID NO: 49136 - DNA, 25 bp, SARS Virus
cgttgcgttcaagcttttctaccgt

SEQ ID NO: 49137 - DNA, 25 bp, SARS Virus
gttgcgttcaacgttttctaccgtc

SEQ ID NO: 49138 - DNA, 25 bp, SARS Virus
ttgcgttcaaccgtttctaccgtct

SEQ ID NO: 49139 - DNA, 25 bp, SARS Virus
tgcgttcaacctgttctaccgtcta

SEQ ID NO: 49140 - DNA, 25 bp, SARS Virus
gcgttcaaccttgtctaccgtctag

SEQ ID NO: 49141 - DNA, 25 bp, SARS Virus
cgttcaacctttgctaccgtctagt

SEQ ID NO: 49142 - DNA, 25 bp, SARS Virus
gttcaaccttttgtaccgtctagtc

SEQ ID NO: 49143 - DNA, 25 bp, SARS Virus
ttcaaccttttcgaccgtctagtcc

SEQ ID NO: 49144 - DNA, 25 bp, SARS Virus
tcaaccttttctgccgtctagtccg

SEQ ID NO: 49145 - DNA, 25 bp, SARS Virus
caaccttttctagcgtctagtccga

SEQ ID NO: 49146 - DNA, 25 bp, SARS Virus
aaccttttctacggtctagtccgat

SEQ ID NO: 49147 - DNA, 25 bp, SARS Virus
accttttctaccgtctagtccgata

SEQ ID NO: 49148 - DNA, 25 bp, SARS Virus
ccttttctaccggctagtccgatac

SEQ ID NO: 49149 - DNA, 25 bp, SARS Virus
cttttctaccgtgtagtccgatact

SEQ ID NO: 49150 - DNA, 25 bp, SARS Virus
ttttctaccgtcgagtccgatactg

SEQ ID NO: 49151 - DNA, 25 bp, SARS Virus
tttctaccgtctggtccgatactgg

SEQ ID NO: 49152 - DNA, 25 bp, SARS Virus
ttctaccgtctagtccgatactggg

SEQ ID NO: 49153 - DNA, 25 bp, SARS Virus
tctaccgtctaggccgatactgggt

SEQ ID NO: 49154 - DNA, 25 bp, SARS Virus
ctaccgtctagtgcgatactgggtt

SEQ ID NO: 49155 - DNA, 25 bp, SARS Virus
taccgtctagtcggatactgggttt

SEQ ID NO: 49156 - DNA, 25 bp, SARS Virus
accgtctagtccgatactgggttta

SEQ ID NO: 49157 - DNA, 25 bp, SARS Virus
ccgtctagtccggtactgggtttac

SEQ ID NO: 49158 - DNA, 25 bp, SARS Virus
cgtctagtccgagactgggtttaca

SEQ ID NO: 49159 - DNA, 25 bp, SARS Virus
gtctagtccgatgctgggtttacat

SEQ ID NO: 49160 - DNA, 25 bp, SARS Virus
tctagtccgatagtgggtttacatg

SEQ ID NO: 49161 - DNA, 25 bp, SARS Virus
ctagtccgatacggggtttacatgt

SEQ ID NO: 49162 - DNA, 25 bp, SARS Virus
tagtccgatactgggtttacatgtt

SEQ ID NO: 49163 - DNA, 25 bp, SARS Virus
agtccgatactgggtttacatgttt

SEQ ID NO: 49164 - DNA, 25 bp, SARS Virus
gtccgatactgggtttacatgtttg

SEQ ID NO: 49165 - DNA, 25 bp, SARS Virus
tccgatactggggttacatgtttgt

SEQ ID NO: 49166 - DNA, 25 bp, SARS Virus
ccgatactgggtgtacatgtttgtc

SEQ ID NO: 49167 - DNA, 25 bp, SARS Virus
cgatactgggttgacatgtttgtcc

SEQ ID NO: 49168 - DNA, 25 bp, SARS Virus
gatactgggtttgcatgtttgtccg

SEQ ID NO: 49169 - DNA, 25 bp, SARS Virus
atactgggtttagatgtttgtccgt

SEQ ID NO: 49170 - DNA, 25 bp, SARS Virus
tactgggtttacgtgtttgtccgtt

SEQ ID NO: 49171 - DNA, 25 bp, SARS Virus
actgggtttacaggtttgtccgttc

SEQ ID NO: 49172 - DNA, 25 bp, SARS Virus
ctgggtttacatgtttgtccgttct

SEQ ID NO: 49173 - DNA, 25 bp, SARS Virus
tgggtttacatggttgtccgttcta

SEQ ID NO: 49174 - DNA, 25 bp, SARS Virus
gggtttacatgtgtgtccgttctag

SEQ ID NO: 49175 - DNA, 25 bp, SARS Virus
ggtttacatgttggtccgttctaga

SEQ ID NO: 49176 - DNA, 25 bp, SARS Virus
gtttacatgtttgtccgttctagac

SEQ ID NO: 49177 - DNA, 25 bp, SARS Virus
tttacatgtttggccgttctagact

SEQ ID NO: 49178 - DNA, 25 bp, SARS Virus
ttacatgtttgtgcgttctagactc

SEQ ID NO: 49179 - DNA, 25 bp, SARS Virus
tacatgtttgtcggttctagactcc

SEQ ID NO: 49180 - DNA, 25 bp, SARS Virus
acatgtttgtccgttctagactcct

SEQ ID NO: 49181 - DNA, 25 bp, SARS Virus
catgtttgtccggtctagactcctg

SEQ ID NO: 49182 - DNA, 25 bp, SARS Virus
atgtttgtccgtgctagactcctgt

SEQ ID NO: 49183 - DNA, 25 bp, SARS Virus
tgtttgtccgttgtagactcctgtt

SEQ ID NO: 49184 - DNA, 25 bp, SARS Virus
gtttgtccgttcgagactcctgttc

SEQ ID NO: 49185 - DNA, 25 bp, SARS Virus
tttgtccgttctggactcctgttct

SEQ ID NO: 49186 - DNA, 25 bp, SARS Virus
ttgtccgttctagactcctgttctc

SEQ ID NO: 49187 - DNA, 25 bp, SARS Virus
tgtccgttctaggctcctgttctcc

SEQ ID NO: 49188 - DNA, 25 bp, SARS Virus
gtccgttctagagtcctgttctccc

SEQ ID NO: 49189 - DNA, 25 bp, SARS Virus
tccgttctagacgcctgttctcccg

SEQ ID NO: 49190 - DNA, 25 bp, SARS Virus
ccgttctagactgctgttctcccgt

SEQ ID NO: 49191 - DNA, 25 bp, SARS Virus
cgttctagactcgtgttctcccgtt

SEQ ID NO: 49192 - DNA, 25 bp, SARS Virus
gttctagactccggttctcccgttt

SEQ ID NO: 49193 - DNA, 25 bp, SARS Virus
ttctagactcctgttctcccgtttt

SEQ ID NO: 49194 - DNA, 25 bp, SARS Virus
tctagactcctggtctcccgttttc

SEQ ID NO: 49195 - DNA, 25 bp, SARS Virus
ctagactcctgtgctcccgttttca

SEQ ID NO: 49196 - DNA, 25 bp, SARS Virus
tagactcctgttgtcccgttttcat

SEQ ID NO: 49197 - DNA, 25 bp, SARS Virus
agactcctgttcgcccgttttcatt

SEQ ID NO: 49198 - DNA, 25 bp, SARS Virus
gactcctgttctgccgttttcattg

SEQ ID NO: 49199 - DNA, 25 bp, SARS Virus
actcctgttctcgcgttttcattga

SEQ ID NO: 49200 - DNA, 25 bp, SARS Virus
ctcctgttctccggttttcattgat

SEQ ID NO: 49201 - DNA, 25 bp, SARS Virus
tcctgttctcccgttttcattgatc

SEQ ID NO: 49202 - DNA, 25 bp, SARS Virus
cctgttctcccggtttcattgatca

SEQ ID NO: 49203 - DNA, 25 bp, SARS Virus
ctgttctcccgtgttcattgatcac

SEQ ID NO: 49204 - DNA, 25 bp, SARS Virus
tgttctcccgttgtcattgatcacg

SEQ ID NO: 49205 - DNA, 25 bp, SARS Virus
gttctcccgtttgcattgatcacga

SEQ ID NO: 49206 - DNA, 25 bp, SARS Virus
ttctcccgttttgattgatcacgat

SEQ ID NO: 49207 - DNA, 25 bp, SARS Virus
tctcccgttttcgttgatcacgata

SEQ ID NO: 49208 - DNA, 25 bp, SARS Virus
ctcccgttttcagtgatcacgatac

SEQ ID NO: 49209 - DNA, 25 bp, SARS Virus
tcccgttttcatggatcacgatacg

SEQ ID NO: 49210 - DNA, 25 bp, SARS Virus
cccgttttcattgatcacgatacgt

SEQ ID NO: 49211 - DNA, 25 bp, SARS Virus
ccgttttcattggtcacgatacgtt

SEQ ID NO: 49212 - DNA, 25 bp, SARS Virus
cgttttcattgagcacgatacgttt

SEQ ID NO: 49213 - DNA, 25 bp, SARS Virus
gttttcattgatgacgatacgtttg

SEQ ID NO: 49214 - DNA, 25 bp, SARS Virus
ttttcattgatcgcgatacgtttgt

SEQ ID NO: 49215 - DNA, 25 bp, SARS Virus
tttcattgatcaggatacgtttgtt

SEQ ID NO: 49216 - DNA, 25 bp, SARS Virus
ttcattgatcacgatacgtttgtta

SEQ ID NO: 49217 - DNA, 25 bp, SARS Virus
tcattgatcacggtacgtttgttac

SEQ ID NO: 49218 - DNA, 25 bp, SARS Virus
cattgatcacgagacgtttgttacg

SEQ ID NO: 49219 - DNA, 25 bp, SARS Virus
attgatcacgatgcgtttgttacga

SEQ ID NO: 49220 - DNA, 25 bp, SARS Virus
ttgatcacgataggtttgttacgag

SEQ ID NO: 49221 - DNA, 25 bp, SARS Virus
tgatcacgatacgtttgttacgaga

SEQ ID NO: 49222 - DNA, 25 bp, SARS Virus
gatcacgatacggttgttacgagaa

SEQ ID NO: 49223 - DNA, 25 bp, SARS Virus
atcacgatacgtgtgttacgagaag

SEQ ID NO: 49224 - DNA, 25 bp, SARS Virus
tcacgatacgttggttacgagaagt

SEQ ID NO: 49225 - DNA, 25 bp, SARS Virus
cacgatacgtttgttacgagaagtg

SEQ ID NO: 49226 - DNA, 25 bp, SARS Virus
acgatacgtttggtacgagaagtga

SEQ ID NO: 49227 - DNA, 25 bp, SARS Virus
cgatacgtttgtgacgagaagtgat

SEQ ID NO: 49228 - DNA, 25 bp, SARS Virus
gatacgtttgttgcgagaagtgata

SEQ ID NO: 49229 - DNA, 25 bp, SARS Virus
atacgtttgttaggagaagtgatac

SEQ ID NO: 49230 - DNA, 25 bp, SARS Virus
tacgtttgttacgagaagtgatacg

SEQ ID NO: 49231 - DNA, 25 bp, SARS Virus
acgtttgttacgggaagtgatacga

SEQ ID NO: 49232 - DNA, 25 bp, SARS Virus
cgtttgttacgagaagtgatacgaa

SEQ ID NO: 49233 - DNA, 25 bp, SARS Virus
gtttgttacgaggagtgatacgaat

SEQ ID NO: 49234 - DNA, 25 bp, SARS Virus
tttgttacgagaggtgatacgaatc

SEQ ID NO: 49235 - DNA, 25 bp, SARS Virus
ttgttacgagaagtgatacgaatcc

SEQ ID NO: 49236 - DNA, 25 bp, SARS Virus
tgttacgagaagggatacgaatcct

SEQ ID NO: 49237 - DNA, 25 bp, SARS Virus
gttacgagaagtgatacgaatcctt

SEQ ID NO: 49238 - DNA, 25 bp, SARS Virus
ttacgagaagtggtacgaatccttc

SEQ ID NO: 49239 - DNA, 25 bp, SARS Virus
tacgagaagtgagacgaatccttcg

SEQ ID NO: 49240 - DNA, 25 bp, SARS Virus
acgagaagtgatgcgaatccttcga

SEQ ID NO: 49241 - DNA, 25 bp, SARS Virus
cgagaagtgataggaatccttcgaa

SEQ ID NO: 49242 - DNA, 25 bp, SARS Virus
gagaagtgatacgaatccttcgaac

SEQ ID NO: 49243 - DNA, 25 bp, SARS Virus
agaagtgatacggatccttcgaact

SEQ ID NO: 49244 - DNA, 25 bp, SARS Virus
gaagtgatacgagtccttcgaacta

SEQ ID NO: 49245 - DNA, 25 bp, SARS Virus
aagtgatacgaagccttcgaactat

SEQ ID NO: 49246 - DNA, 25 bp, SARS Virus
agtgatacgaatgcttcgaactatt

SEQ ID NO: 49247 - DNA, 25 bp, SARS Virus
gtgatacgaatcgttcgaactatta

SEQ ID NO: 49248 - DNA, 25 bp, SARS Virus
tgatacgaatccgtcgaactattac

SEQ ID NO: 49249 - DNA, 25 bp, SARS Virus
gatacgaatcctgcgaactattact

SEQ ID NO: 49250 - DNA, 25 bp, SARS Virus
atacgaatccttggaactattacta

SEQ ID NO: 49251 - DNA, 25 bp, SARS Virus
tacgaatccttcgaactattactac

SEQ ID NO: 49252 - DNA, 25 bp, SARS Virus
acgaatccttcggactattactacg

SEQ ID NO: 49253 - DNA, 25 bp, SARS Virus
cgaatccttcgagctattactacgt

SEQ ID NO: 49254 - DNA, 25 bp, SARS Virus
gaatccttcgaagtattactacgtg

SEQ ID NO: 49255 - DNA, 25 bp, SARS Virus
aatccttcgaacgattactacgtga

SEQ ID NO: 49256 - DNA, 25 bp, SARS Virus
atccttcgaactgttactacgtgaa

SEQ ID NO: 49257 - DNA, 25 bp, SARS Virus
tccttcgaactagtactacgtgaat

SEQ ID NO: 49258 - DNA, 25 bp, SARS Virus
ccttcgaactatgactacgtgaatt

SEQ ID NO: 49259 - DNA, 25 bp, SARS Virus
cttcgaactattgctacgtgaattg

SEQ ID NO: 49260 - DNA, 25 bp, SARS Virus
ttcgaactattagtacgtgaattgt

SEQ ID NO: 49261 - DNA, 25 bp, SARS Virus
tcgaactattacgacgtgaattgtt

SEQ ID NO: 49262 - DNA, 25 bp, SARS Virus
cgaactattactgcgtgaattgttg

SEQ ID NO: 49263 - DNA, 25 bp, SARS Virus
gaactattactaggtgaattgttgt

SEQ ID NO: 49264 - DNA, 25 bp, SARS Virus
aactattactacgtgaattgttgta

SEQ ID NO: 49265 - DNA, 25 bp, SARS Virus
actattactacgggaattgttgtaa

SEQ ID NO: 49266 - DNA, 25 bp, SARS Virus
ctattactacgtgaattgttgtaat

SEQ ID NO: 49267 - DNA, 25 bp, SARS Virus
tattactacgtggattgttgtaata

SEQ ID NO: 49268 - DNA, 25 bp, SARS Virus
attactacgtgagttgttgtaatag

SEQ ID NO: 49269 - DNA, 25 bp, SARS Virus
ttactacgtgaagtgttgtaatagt

SEQ ID NO: 49270 - DNA, 25 bp, SARS Virus
tactacgtgaatggttgtaatagtt

SEQ ID NO: 49271 - DNA, 25 bp, SARS Virus
actacgtgaattgttgtaatagttg

SEQ ID NO: 49272 - DNA, 25 bp, SARS Virus
ctacgtgaattggtgtaatagttgt

SEQ ID NO: 49273 - DNA, 25 bp, SARS Virus
tacgtgaattgtggtaatagttgtt

SEQ ID NO: 49274 - DNA, 25 bp, SARS Virus
acgtgaattgttgtaatagttgtta

SEQ ID NO: 49275 - DNA, 25 bp, SARS Virus
cgtgaattgttggaatagttgttac

SEQ ID NO: 49276 - DNA, 25 bp, SARS Virus
gtgaattgttgtgatagttgttacg

SEQ ID NO: 49277 - DNA, 25 bp, SARS Virus
tgaattgttgtagtagttgttacgc

SEQ ID NO: 49278 - DNA, 25 bp, SARS Virus
gaattgttgtaagagttgttacgcg

SEQ ID NO: 49279 - DNA, 25 bp, SARS Virus
aattgttgtaatggttgttacgcgc

SEQ ID NO: 49280 - DNA, 25 bp, SARS Virus
attgttgtaatagttgttacgcgca

SEQ ID NO: 49281 - DNA, 25 bp, SARS Virus
ttgttgtaataggtgttacgcgcac

SEQ ID NO: 49282 - DNA, 25 bp, SARS Virus
tgttgtaatagtggttacgcgcact

SEQ ID NO: 49283 - DNA, 25 bp, SARS Virus
gttgtaatagttgttacgcgcacta

SEQ ID NO: 49284 - DNA, 25 bp, SARS Virus
ttgtaatagttggtacgcgcactac

SEQ ID NO: 49285 - DNA, 25 bp, SARS Virus
tgtaatagttgtgacgcgcactacc

SEQ ID NO: 49286 - DNA, 25 bp, SARS Virus
gtaatagttgttgcgcgcactacca

SEQ ID NO: 49287 - DNA, 25 bp, SARS Virus
taatagttgttaggcgcactaccaa

SEQ ID NO: 49288 - DNA, 25 bp, SARS Virus
aatagttgttacgcgcactaccaac

SEQ ID NO: 49289 - DNA, 25 bp, SARS Virus
atagttgttacgggcactaccaaca

SEQ ID NO: 49290 - DNA, 25 bp, SARS Virus
tagttgttacgcgcactaccaacac

SEQ ID NO: 49291 - DNA, 25 bp, SARS Virus
agttgttacgcggactaccaacaca

SEQ ID NO: 49292 - DNA, 25 bp, SARS Virus
gttgttacgcgcgctaccaacacaa

SEQ ID NO: 49293 - DNA, 25 bp, SARS Virus
ttgttacgcgcagtaccaacacaag

SEQ ID NO: 49294 - DNA, 25 bp, SARS Virus
tgttacgcgcacgaccaacacaagg

SEQ ID NO: 49295 - DNA, 25 bp, SARS Virus
gttacgcgcactgccaacacaaggt

SEQ ID NO: 49296 - DNA, 25 bp, SARS Virus
ttacgcgcactagcaacacaaggtg

SEQ ID NO: 49297 - DNA, 25 bp, SARS Virus
tacgcgcactacgaacacaaggtga

SEQ ID NO: 49298 - DNA, 25 bp, SARS Virus
acgcgcactaccgacacaaggtgag

SEQ ID NO: 49299 - DNA, 25 bp, SARS Virus
cgcgcactaccagcacaaggtgagt

SEQ ID NO: 49300 - DNA, 25 bp, SARS Virus
gcgcactaccaagacaaggtgagtt

SEQ ID NO: 49301 - DNA, 25 bp, SARS Virus
cgcactaccaacgcaaggtgagttg

SEQ ID NO: 49302 - DNA, 25 bp, SARS Virus
gcactaccaacagaaggtgagttgt

SEQ ID NO: 49303 - DNA, 25 bp, SARS Virus
cactaccaacacgaggtgagttgta

SEQ ID NO: 49304 - DNA, 25 bp, SARS Virus
actaccaacacagggtgagttgtag

SEQ ID NO: 49305 - DNA, 25 bp, SARS Virus
ctaccaacacaaggtgagttgtagt

SEQ ID NO: 49306 - DNA, 25 bp, SARS Virus
taccaacacaaggtgagttgtagta

SEQ ID NO: 49307 - DNA, 25 bp, SARS Virus
accaacacaaggggagttgtagtat

SEQ ID NO: 49308 - DNA, 25 bp, SARS Virus
ccaacacaaggtgagttgtagtatg

SEQ ID NO: 49309 - DNA, 25 bp, SARS Virus
caacacaaggtgggttgtagtatgg

SEQ ID NO: 49310 - DNA, 25 bp, SARS Virus
aacacaaggtgagttgtagtatggt

SEQ ID NO: 49311 - DNA, 25 bp, SARS Virus
acacaaggtgaggtgtagtatggta

SEQ ID NO: 49312 - DNA, 25 bp, SARS Virus
cacaaggtgagtggtagtatggtaa

SEQ ID NO: 49313 - DNA, 25 bp, SARS Virus
acaaggtgagttgtagtatggtaac

SEQ ID NO: 49314 - DNA, 25 bp, SARS Virus
caaggtgagttggagtatggtaact

SEQ ID NO: 49315 - DNA, 25 bp, SARS Virus
aaggtgagttgtggtatggtaactg

SEQ ID NO: 49316 - DNA, 25 bp, SARS Virus
aggtgagttgtagtatggtaactga

SEQ ID NO: 49317 - DNA, 25 bp, SARS Virus
ggtgagttgtaggatggtaactgat

SEQ ID NO: 49318 - DNA, 25 bp, SARS Virus
gtgagttgtagtgtggtaactgatg

SEQ ID NO: 49319 - DNA, 25 bp, SARS Virus
tgagttgtagtagggtaactgatgt

SEQ ID NO: 49320 - DNA, 25 bp, SARS Virus
gagttgtagtatggtaactgatgtc

SEQ ID NO: 49321 - DNA, 25 bp, SARS Virus
agttgtagtatggtaactgatgtcg

SEQ ID NO: 49322 - DNA, 25 bp, SARS Virus
gttgtagtatgggaactgatgtcgt

SEQ ID NO: 49323 - DNA, 25 bp, SARS Virus
ttgtagtatggtgactgatgtcgtc

SEQ ID NO: 49324 - DNA, 25 bp, SARS Virus
tgtagtatggtagctgatgtcgtcg

SEQ ID NO: 49325 - DNA, 25 bp, SARS Virus
gtagtatggtaagtgatgtcgtcgg

SEQ ID NO: 49326 - DNA, 25 bp, SARS Virus
tagtatggtaacggatgtcgtcggt

SEQ ID NO: 49327 - DNA, 25 bp, SARS Virus
agtatggtaactgatgtcgtcggtt

SEQ ID NO: 49328 - DNA, 25 bp, SARS Virus
gtatggtaactggtgtcgtcggttt

SEQ ID NO: 49329 - DNA, 25 bp, SARS Virus
tatggtaactgaggtcgtcggtttg

SEQ ID NO: 49330 - DNA, 25 bp, SARS Virus
atggtaactgatgtcgtcggtttga

SEQ ID NO: 49331 - DNA, 25 bp, SARS Virus
tggtaactgatggcgtcggtttgag

SEQ ID NO: 49332 - DNA, 25 bp, SARS Virus
ggtaactgatgtggtcggtttgagt

SEQ ID NO: 49333 - DNA, 25 bp, SARS Virus
gtaactgatgtcgtcggtttgagta

SEQ ID NO: 49334 - DNA, 25 bp, SARS Virus
taactgatgtcggcggtttgagtac

SEQ ID NO: 49335 - DNA, 25 bp, SARS Virus
aactgatgtcgtgggtttgagtacc

SEQ ID NO: 49336 - DNA, 25 bp, SARS Virus
actgatgtcgtcggtttgagtacca

SEQ ID NO: 49337 - DNA, 25 bp, SARS Virus
ctgatgtcgtcggtttgagtaccaa

SEQ ID NO: 49338 - DNA, 25 bp, SARS Virus
tgatgtcgtcgggttgagtaccaac

SEQ ID NO: 49339 - DNA, 25 bp, SARS Virus
gatgtcgtcggtgtgagtaccaaca

SEQ ID NO: 49340 - DNA, 25 bp, SARS Virus
atgtcgtcggttggagtaccaacaa

SEQ ID NO: 49341 - DNA, 25 bp, SARS Virus
tgtcgtcggtttgagtaccaacaac

SEQ ID NO: 49342 - DNA, 25 bp, SARS Virus
gtcgtcggtttgggtaccaacaaca

SEQ ID NO: 49343 - DNA, 25 bp, SARS Virus
tcgtcggtttgagtaccaacaacag

SEQ ID NO: 49344 - DNA, 25 bp, SARS Virus
cgtcggtttgaggaccaacaacagg

SEQ ID NO: 49345 - DNA, 25 bp, SARS Virus
gtcggtttgagtgccaacaacaggg

SEQ ID NO: 49346 - DNA, 25 bp, SARS Virus
tcggtttgagtagcaacaacaggga

SEQ ID NO: 49347 - DNA, 25 bp, SARS Virus
cggtttgagtacgaacaacagggac

SEQ ID NO: 49348 - DNA, 25 bp, SARS Virus
ggtttgagtaccgacaacagggact

SEQ ID NO: 49349 - DNA, 25 bp, SARS Virus
gtttgagtaccagcaacagggacta

SEQ ID NO: 49350 - DNA, 25 bp, SARS Virus
tttgagtaccaagaacagggactaa

SEQ ID NO: 49351 - DNA, 25 bp, SARS Virus
ttgagtaccaacgacagggactaat

SEQ ID NO: 49352 - DNA, 25 bp, SARS Virus
tgagtaccaacagcagggactaata

SEQ ID NO: 49353 - DNA, 25 bp, SARS Virus
gagtaccaacaagagggactaatac

SEQ ID NO: 49354 - DNA, 25 bp, SARS Virus
agtaccaacaacggggactaatacc

SEQ ID NO: 49355 - DNA, 25 bp, SARS Virus
gtaccaacaacagggactaatacca

SEQ ID NO: 49356 - DNA, 25 bp, SARS Virus
taccaacaacagggactaataccat

SEQ ID NO: 49357 - DNA, 25 bp, SARS Virus
accaacaacagggactaataccatg

SEQ ID NO: 49358 - DNA, 25 bp, SARS Virus
ccaacaacaggggctaataccatgg

SEQ ID NO: 49359 - DNA, 25 bp, SARS Virus
caacaacagggagtaataccatgga

SEQ ID NO: 49360 - DNA, 25 bp, SARS Virus
aacaacagggacgaataccatggat

SEQ ID NO: 49361 - DNA, 25 bp, SARS Virus
acaacagggactgataccatggatg

SEQ ID NO: 49362 - DNA, 25 bp, SARS Virus
caacagggactagtaccatggatgt

SEQ ID NO: 49363 - DNA, 25 bp, SARS Virus
aacagggactaagaccatggatgtt

SEQ ID NO: 49364 - DNA, 25 bp, SARS Virus
acagggactaatgccatggatgttc

SEQ ID NO: 49365 - DNA, 25 bp, SARS Virus
cagggactaatagcatggatgttct

SEQ ID NO: 49366 - DNA, 25 bp, SARS Virus
agggactaatacgatggatgttctt

SEQ ID NO: 49367 - DNA, 25 bp, SARS Virus
gggactaataccgtggatgttcttg

SEQ ID NO: 49368 - DNA, 25 bp, SARS Virus
ggactaataccagggatgttcttgt

SEQ ID NO: 49369 - DNA, 25 bp, SARS Virus
gactaataccatggatgttcttgtg

SEQ ID NO: 49370 - DNA, 25 bp, SARS Virus
actaataccatggatgttcttgtga

SEQ ID NO: 49371 - DNA, 25 bp, SARS Virus
ctaataccatgggtgttcttgtgaa

SEQ ID NO: 49372 - DNA, 25 bp, SARS Virus
taataccatggaggttcttgtgaac

SEQ ID NO: 49373 - DNA, 25 bp, SARS Virus
aataccatggatgttcttgtgaaca

SEQ ID NO: 49374 - DNA, 25 bp, SARS Virus
ataccatggatggtcttgtgaacac

SEQ ID NO: 49375 - DNA, 25 bp, SARS Virus
taccatggatgtgcttgtgaacact

SEQ ID NO: 49376 - DNA, 25 bp, SARS Virus
accatggatgttgttgtgaacacta

SEQ ID NO: 49377 - DNA, 25 bp, SARS Virus
ccatggatgttcgtgtgaacactac

SEQ ID NO: 49378 - DNA, 25 bp, SARS Virus
catggatgttctggtgaacactacc

SEQ ID NO: 49379 - DNA, 25 bp, SARS Virus
atggatgttcttgtgaacactacca

SEQ ID NO: 49380 - DNA, 25 bp, SARS Virus
tggatgttcttgggaacactaccat

SEQ ID NO: 49381 - DNA, 25 bp, SARS Virus
ggatgttcttgtgaacactaccatt

SEQ ID NO: 49382 - DNA, 25 bp, SARS Virus
gatgttcttgtggacactaccattg

SEQ ID NO: 49383 - DNA, 25 bp, SARS Virus
atgttcttgtgagcactaccattgt

SEQ ID NO: 49384 - DNA, 25 bp, SARS Virus
tgttcttgtgaagactaccattgtg

SEQ ID NO: 49385 - DNA, 25 bp, SARS Virus
gttcttgtgaacgctaccattgtgg

SEQ ID NO: 49386 - DNA, 25 bp, SARS Virus
ttcttgtgaacagtaccattgtgga

SEQ ID NO: 49387 - DNA, 25 bp, SARS Virus
tcttgtgaacacgaccattgtggaa

SEQ ID NO: 49388 - DNA, 25 bp, SARS Virus
cttgtgaacactgccattgtggaaa

SEQ ID NO: 49389 - DNA, 25 bp, SARS Virus
ttgtgaacactagcattgtggaaat

SEQ ID NO: 49390 - DNA, 25 bp, SARS Virus
tgtgaacactacgattgtggaaatg

SEQ ID NO: 49391 - DNA, 25 bp, SARS Virus
gtgaacactaccgttgtggaaatgt

SEQ ID NO: 49392 - DNA, 25 bp, SARS Virus
tgaacactaccagtgtggaaatgta

SEQ ID NO: 49393 - DNA, 25 bp, SARS Virus
gaacactaccatggtggaaatgtat

SEQ ID NO: 49394 - DNA, 25 bp, SARS Virus
aacactaccattgtggaaatgtata

SEQ ID NO: 49395 - DNA, 25 bp, SARS Virus
acactaccattggggaaatgtatac

SEQ ID NO: 49396 - DNA, 25 bp, SARS Virus
cactaccattgtggaaatgtatacg

SEQ ID NO: 49397 - DNA, 25 bp, SARS Virus
actaccattgtggaaatgtatacgt

SEQ ID NO: 49398 - DNA, 25 bp, SARS Virus
ctaccattgtgggaatgtatacgta

SEQ ID NO: 49399 - DNA, 25 bp, SARS Virus
taccattgtggagatgtatacgtag

SEQ ID NO: 49400 - DNA, 25 bp, SARS Virus
accattgtggaagtgtatacgtaga

SEQ ID NO: 49401 - DNA, 25 bp, SARS Virus
ccattgtggaaaggtatacgtagac

SEQ ID NO: 49402 - DNA, 25 bp, SARS Virus
cattgtggaaatgtatacgtagacg

SEQ ID NO: 49403 - DNA, 25 bp, SARS Virus
attgtggaaatggatacgtagacgt

SEQ ID NO: 49404 - DNA, 25 bp, SARS Virus
ttgtggaaatgtgtacgtagacgtg

SEQ ID NO: 49405 - DNA, 25 bp, SARS Virus
tgtggaaatgtagacgtagacgtga

SEQ ID NO: 49406 - DNA, 25 bp, SARS Virus
gtggaaatgtatgcgtagacgtgag

SEQ ID NO: 49407 - DNA, 25 bp, SARS Virus
tggaaatgtataggtagacgtgaga

SEQ ID NO: 49408 - DNA, 25 bp, SARS Virus
ggaaatgtatacgtagacgtgagac

SEQ ID NO: 49409 - DNA, 25 bp, SARS Virus
gaaatgtatacggagacgtgagacc

SEQ ID NO: 49410 - DNA, 25 bp, SARS Virus
aaatgtatacgtggacgtgagaccc

SEQ ID NO: 49411 - DNA, 25 bp, SARS Virus
aatgtatacgtagacgtgagaccct

SEQ ID NO: 49412 - DNA, 25 bp, SARS Virus
atgtatacgtaggcgtgagaccctt

SEQ ID NO: 49413 - DNA, 25 bp, SARS Virus
tgtatacgtagaggtgagacccttt

SEQ ID NO: 49414 - DNA, 25 bp, SARS Virus
gtatacgtagacgtgagacccttta

SEQ ID NO: 49415 - DNA, 25 bp, SARS Virus
tatacgtagacgggagaccctttag

SEQ ID NO: 49416 - DNA, 25 bp, SARS Virus
atacgtagacgtgagaccctttagg

SEQ ID NO: 49417 - DNA, 25 bp, SARS Virus
atccaacacgcttctttacgagcta

SEQ ID NO: 49418 - DNA, 25 bp, SARS Virus
tccaacacgctcttttacgagctat

SEQ ID NO: 49419 - DNA, 25 bp, SARS Virus
ccaacacgctcctttacgagctatt

SEQ ID NO: 49420 - DNA, 25 bp, SARS Virus
caacacgctcctttacgagctattg

SEQ ID NO: 49421 - DNA, 25 bp, SARS Virus
aacacgctcctttacgagctattgg

SEQ ID NO: 49422 - DNA, 25 bp, SARS Virus
acacgctccttttcgagctattggc

SEQ ID NO: 49423 - DNA, 25 bp, SARS Virus
cacgctcctttatgagctattggca

SEQ ID NO: 49424 - DNA, 25 bp, SARS Virus
acgctcctttactagctattggcac

SEQ ID NO: 49425 - DNA, 25 bp, SARS Virus
cgctcctttacgtgctattggcacg

SEQ ID NO: 49426 - DNA, 25 bp, SARS Virus
gctcctttacgatctattggcacga

SEQ ID NO: 49427 - DNA, 25 bp, SARS Virus
ctcctttacgagttattggcacgat

SEQ ID NO: 49428 - DNA, 25 bp, SARS Virus
tcctttacgagctattggcacgatg

SEQ ID NO: 49429 - DNA, 25 bp, SARS Virus
cctttacgagcttttggcacgatga

SEQ ID NO: 49430 - DNA, 25 bp, SARS Virus
ctttacgagctattggcacgatgag

SEQ ID NO: 49431 - DNA, 25 bp, SARS Virus
tttacgagctattggcacgatgaga

SEQ ID NO: 49432 - DNA, 25 bp, SARS Virus
ttacgagctatttgcacgatgagaa

SEQ ID NO: 49433 - DNA, 25 bp, SARS Virus
tacgagctattgtcacgatgagaag

SEQ ID NO: 49434 - DNA, 25 bp, SARS Virus
acgagctattggtacgatgagaagt

SEQ ID NO: 49435 - DNA, 25 bp, SARS Virus
cgagctattggctcgatgagaagtc

SEQ ID NO: 49436 - DNA, 25 bp, SARS Virus
gagctattggcatgatgagaagtcc

SEQ ID NO: 49437 - DNA, 25 bp, SARS Virus
agctattggcactatgagaagtccg

SEQ ID NO: 49438 - DNA, 25 bp, SARS Virus
gctattggcacgttgagaagtccga

SEQ ID NO: 49439 - DNA, 25 bp, SARS Virus
ctattggcacgatgagaagtccgat

SEQ ID NO: 49440 - DNA, 25 bp, SARS Virus
tattggcacgattagaagtccgata

SEQ ID NO: 49441 - DNA, 25 bp, SARS Virus
attggcacgatgtgaagtccgataa

SEQ ID NO: 49442 - DNA, 25 bp, SARS Virus
ttggcacgatgataagtccgataac

SEQ ID NO: 49443 - DNA, 25 bp, SARS Virus
tggcacgatgagtagtccgataacg

SEQ ID NO: 49444 - DNA, 25 bp, SARS Virus
ggcacgatgagatgtccgataacga

SEQ ID NO: 49445 - DNA, 25 bp, SARS Virus
gcacgatgagaattccgataacgaa

SEQ ID NO: 49446 - DNA, 25 bp, SARS Virus
cacgatgagaagtccgataacgaag

SEQ ID NO: 49447 - DNA, 25 bp, SARS Virus
acgatgagaagttcgataacgaagt

SEQ ID NO: 49448 - DNA, 25 bp, SARS Virus
cgatgagaagtctgataacgaagtc

SEQ ID NO: 49449 - DNA, 25 bp, SARS Virus
gatgagaagtcctataacgaagtct

SEQ ID NO: 49450 - DNA, 25 bp, SARS Virus
atgagaagtccgttaacgaagtctt

SEQ ID NO: 49451 - DNA, 25 bp, SARS Virus
tgagaagtccgataacgaagtctta

SEQ ID NO: 49452 - DNA, 25 bp, SARS Virus
gagaagtccgattacgaagtcttaa

SEQ ID NO: 49453 - DNA, 25 bp, SARS Virus
agaagtccgatatcgaagtcttaaa

SEQ ID NO: 49454 - DNA, 25 bp, SARS Virus
gaagtccgataatgaagtcttaaat

SEQ ID NO: 49455 - DNA, 25 bp, SARS Virus
aagtccgataactaagtcttaaatc

SEQ ID NO: 49456 - DNA, 25 bp, SARS Virus
agtccgataacgtagtcttaaatca

SEQ ID NO: 49457 - DNA, 25 bp, SARS Virus
gtccgataacgatgtcttaaatcaa

SEQ ID NO: 49458 - DNA, 25 bp, SARS Virus
tccgataacgaattcttaaatcaag

SEQ ID NO: 49459 - DNA, 25 bp, SARS Virus
ccgataacgaagtcttaaatcaaga

SEQ ID NO: 49460 - DNA, 25 bp, SARS Virus
cgataacgaagttttaaatcaagaa

SEQ ID NO: 49461 - DNA, 25 bp, SARS Virus
gataacgaagtcttaaatcaagaaa

SEQ ID NO: 49462 - DNA, 25 bp, SARS Virus
ataacgaagtcttaaatcaagaaat

SEQ ID NO: 49463 - DNA, 25 bp, SARS Virus
taacgaagtctttaatcaagaaatg

SEQ ID NO: 49464 - DNA, 25 bp, SARS Virus
aacgaagtcttatatcaagaaatgg

SEQ ID NO: 49465 - DNA, 25 bp, SARS Virus
acgaagtcttaattcaagaaatggt

SEQ ID NO: 49466 - DNA, 25 bp, SARS Virus
cgaagtcttaaatcaagaaatggta

SEQ ID NO: 49467 - DNA, 25 bp, SARS Virus
gaagtcttaaattaagaaatggtag

SEQ ID NO: 49468 - DNA, 25 bp, SARS Virus
aagtcttaaatctagaaatggtagt

SEQ ID NO: 49469 - DNA, 25 bp, SARS Virus
agtcttaaatcatgaaatggtagta

SEQ ID NO: 49470 - DNA, 25 bp, SARS Virus
gtcttaaatcaataaatggtagtat

SEQ ID NO: 49471 - DNA, 25 bp, SARS Virus
tcttaaatcaagtaatggtagtata

SEQ ID NO: 49472 - DNA, 25 bp, SARS Virus
cttaaatcaagatatggtagtatac

SEQ ID NO: 49473 - DNA, 25 bp, SARS Virus
ttaaatcaagaattggtagtatacg

SEQ ID NO: 49474 - DNA, 25 bp, SARS Virus
taaatcaagaaatggtagtatacgg

SEQ ID NO: 49475 - DNA, 25 bp, SARS Virus
aaatcaagaaattgtagtatacggc

SEQ ID NO: 49476 - DNA, 25 bp, SARS Virus
aatcaagaaatgttagtatacggcg

SEQ ID NO: 49477 - DNA, 25 bp, SARS Virus
atcaagaaatggtagtatacggcga

SEQ ID NO: 49478 - DNA, 25 bp, SARS Virus
tcaagaaatggttgtatacggcgaa

SEQ ID NO: 49479 - DNA, 25 bp, SARS Virus
caagaaatggtattatacggcgaat

SEQ ID NO: 49480 - DNA, 25 bp, SARS Virus
aagaaatggtagtatacggcgaata

SEQ ID NO: 49481 - DNA, 25 bp, SARS Virus
agaaatggtagtttacggcgaatac

SEQ ID NO: 49482 - DNA, 25 bp, SARS Virus
gaaatggtagtatacggcgaatacg

SEQ ID NO: 49483 - DNA, 25 bp, SARS Virus
aaatggtagtattcggcgaatacgg

SEQ ID NO: 49484 - DNA, 25 bp, SARS Virus
aatggtagtatatggcgaatacggt

SEQ ID NO: 49485 - DNA, 25 bp, SARS Virus
atggtagtatactgcgaatacggtg

SEQ ID NO: 49486 - DNA, 25 bp, SARS Virus
tggtagtatacgtcgaatacggtga

SEQ ID NO: 49487 - DNA, 25 bp, SARS Virus
ggtagtatacggtgaatacggtgac

SEQ ID NO: 49488 - DNA, 25 bp, SARS Virus
gtagtatacggctaatacggtgacg

SEQ ID NO: 49489 - DNA, 25 bp, SARS Virus
tagtatacggcgtatacggtgacgg

SEQ ID NO: 49490 - DNA, 25 bp, SARS Virus
agtatacggcgattacggtgacggg

SEQ ID NO: 49491 - DNA, 25 bp, SARS Virus
gtatacggcgaatacggtgacgggt

SEQ ID NO: 49492 - DNA, 25 bp, SARS Virus
tatacggcgaattcggtgacgggtc

SEQ ID NO: 49493 - DNA, 25 bp, SARS Virus
atacggcgaatatggtgacgggtcc

SEQ ID NO: 49494 - DNA, 25 bp, SARS Virus
tacggcgaatactgtgacgggtcct

SEQ ID NO: 49495 - DNA, 25 bp, SARS Virus
acggcgaatacgttgacgggtcctc

SEQ ID NO: 49496 - DNA, 25 bp, SARS Virus
cggcgaatacggtgacgggtcctcc

SEQ ID NO: 49497 - DNA, 25 bp, SARS Virus
ggcgaatacggttacgggtcctccg

SEQ ID NO: 49498 - DNA, 25 bp, SARS Virus
gcgaatacggtgtcgggtcctccgg

SEQ ID NO: 49499 - DNA, 25 bp, SARS Virus
cgaatacggtgatgggtcctccgga

SEQ ID NO: 49500 - DNA, 25 bp, SARS Virus
gaatacggtgactggtcctccggat

SEQ ID NO: 49501 - DNA, 25 bp, SARS Virus
aatacggtgacgtgtcctccggata

SEQ ID NO: 49502 - DNA, 25 bp, SARS Virus
atacggtgacggttcctccggatac

SEQ ID NO: 49503 - DNA, 25 bp, SARS Virus
tacggtgacgggtcctccggatact

SEQ ID NO: 49504 - DNA, 25 bp, SARS Virus
acggtgacgggttctccggatactc

SEQ ID NO: 49505 - DNA, 25 bp, SARS Virus
cggtgacgggtcttccggatactcg

SEQ ID NO: 49506 - DNA, 25 bp, SARS Virus
ggtgacgggtcctccggatactcgt

SEQ ID NO: 49507 - DNA, 25 bp, SARS Virus
gtgacgggtccttcggatactcgtc

SEQ ID NO: 49508 - DNA, 25 bp, SARS Virus
tgacgggtcctctggatactcgtcc

SEQ ID NO: 49509 - DNA, 25 bp, SARS Virus
gacgggtcctcctgatactcgtccg

SEQ ID NO: 49510 - DNA, 25 bp, SARS Virus
acgggtcctccgtatactcgtccga

SEQ ID NO: 49511 - DNA, 25 bp, SARS Virus
cgggtcctccggttactcgtccgac

SEQ ID NO: 49512 - DNA, 25 bp, SARS Virus
gggtcctccggatactcgtccgaca

SEQ ID NO: 49513 - DNA, 25 bp, SARS Virus
ggtcctccggattctcgtccgacat

SEQ ID NO: 49514 - DNA, 25 bp, SARS Virus
gtcctccggatattcgtccgacatc

SEQ ID NO: 49515 - DNA, 25 bp, SARS Virus
tcctccggatactcgtccgacatcg

SEQ ID NO: 49516 - DNA, 25 bp, SARS Virus
cctccggatacttgtccgacatcga

SEQ ID NO: 49517 - DNA, 25 bp, SARS Virus
ctccggatactcttccgacatcgat

SEQ ID NO: 49518 - DNA, 25 bp, SARS Virus
tccggatactcgtccgacatcgatt

SEQ ID NO: 49519 - DNA, 25 bp, SARS Virus
ccggatactcgttcgacatcgatta

SEQ ID NO: 49520 - DNA, 25 bp, SARS Virus
cggatactcgtctgacatcgattac

SEQ ID NO: 49521 - DNA, 25 bp, SARS Virus
ggatactcgtcctacatcgattacc

SEQ ID NO: 49522 - DNA, 25 bp, SARS Virus
gatactcgtccgtcatcgattacca

SEQ ID NO: 49523 - DNA, 25 bp, SARS Virus
atactcgtccgatatcgattaccac

SEQ ID NO: 49524 - DNA, 25 bp, SARS Virus
tactcgtccgacttcgattaccact

SEQ ID NO: 49525 - DNA, 25 bp, SARS Virus
actcgtccgacatcgattaccacta

SEQ ID NO: 49526 - DNA, 25 bp, SARS Virus
ctcgtccgacattgattaccactaa

SEQ ID NO: 49527 - DNA, 25 bp, SARS Virus
tcgtccgacatctattaccactaag

SEQ ID NO: 49528 - DNA, 25 bp, SARS Virus
cgtccgacatcgtttaccactaaga

SEQ ID NO: 49529 - DNA, 25 bp, SARS Virus
gtccgacatcgattaccactaagac

SEQ ID NO: 49530 - DNA, 25 bp, SARS Virus
tccgacatcgattaccactaagact

SEQ ID NO: 49531 - DNA, 25 bp, SARS Virus
ccgacatcgatttccactaagactt

SEQ ID NO: 49532 - DNA, 25 bp, SARS Virus
cgacatcgattatcactaagacttc

SEQ ID NO: 49533 - DNA, 25 bp, SARS Virus
gacatcgattactactaagacttca

SEQ ID NO: 49534 - DNA, 25 bp, SARS Virus
acatcgattacctctaagacttcag

SEQ ID NO: 49535 - DNA, 25 bp, SARS Virus
catcgattaccattaagacttcagc

SEQ ID NO: 49536 - DNA, 25 bp, SARS Virus
atcgattaccactaagacttcagca

SEQ ID NO: 49537 - DNA, 25 bp, SARS Virus
tcgattaccacttagacttcagcaa

SEQ ID NO: 49538 - DNA, 25 bp, SARS Virus
cgattaccactatgacttcagcaag

SEQ ID NO: 49539 - DNA, 25 bp, SARS Virus
gattaccactaatacttcagcaaga

SEQ ID NO: 49540 - DNA, 25 bp, SARS Virus
attaccactaagtcttcagcaagag

SEQ ID NO: 49541 - DNA, 25 bp, SARS Virus
ttaccactaagatttcagcaagagt

SEQ ID NO: 49542 - DNA, 25 bp, SARS Virus
taccactaagacttcagcaagagtt

SEQ ID NO: 49543 - DNA, 25 bp, SARS Virus
accactaagacttcagcaagagttt

SEQ ID NO: 49544 - DNA, 25 bp, SARS Virus
ccactaagactttagcaagagtttt

SEQ ID NO: 49545 - DNA, 25 bp, SARS Virus
cactaagacttctgcaagagttttt

SEQ ID NO: 49546 - DNA, 25 bp, SARS Virus
actaagacttcatcaagagtttttc

SEQ ID NO: 49547 - DNA, 25 bp, SARS Virus
ctaagacttcagtaagagtttttca

SEQ ID NO: 49548 - DNA, 25 bp, SARS Virus
taagacttcagctagagtttttcaa

SEQ ID NO: 49549 - DNA, 25 bp, SARS Virus
aagacttcagcatgagtttttcaat

SEQ ID NO: 49550 - DNA, 25 bp, SARS Virus
agacttcagcaatagtttttcaatt

SEQ ID NO: 49551 - DNA, 25 bp, SARS Virus
gacttcagcaagtgtttttcaattt

SEQ ID NO: 49552 - DNA, 25 bp, SARS Virus
acttcagcaagattttttcaatttc

SEQ ID NO: 49553 - DNA, 25 bp, SARS Virus
cttcagcaagagtttttcaatttct

SEQ ID NO: 49554 - DNA, 25 bp, SARS Virus
ttcagcaagagtttttcaatttctt

SEQ ID NO: 49555 - DNA, 25 bp, SARS Virus
tcagcaagagtttttcaatttcttt

SEQ ID NO: 49556 - DNA, 25 bp, SARS Virus
cagcaagagtttttcaatttcttta

SEQ ID NO: 49557 - DNA, 25 bp, SARS Virus
agcaagagtttttcaatttctttag

SEQ ID NO: 49558 - DNA, 25 bp, SARS Virus
gcaagagttttttaatttctttaga

SEQ ID NO: 49559 - DNA, 25 bp, SARS Virus
caagagtttttctatttctttagaa

SEQ ID NO: 49560 - DNA, 25 bp, SARS Virus
aagagtttttcattttctttagaaa

SEQ ID NO: 49561 - DNA, 25 bp, SARS Virus
agagtttttcaatttctttagaaac

SEQ ID NO: 49562 - DNA, 25 bp, SARS Virus
gagtttttcaatttctttagaaact

SEQ ID NO: 49563 - DNA, 25 bp, SARS Virus
agtttttcaatttctttagaaactt

SEQ ID NO: 49564 - DNA, 25 bp, SARS Virus
gtttttcaatttttttagaaactta

SEQ ID NO: 49565 - DNA, 25 bp, SARS Virus
tttttcaatttctttagaaacttac

SEQ ID NO: 49566 - DNA, 25 bp, SARS Virus
ttttcaatttctttagaaacttaca

SEQ ID NO: 49567 - DNA, 25 bp, SARS Virus
tttcaatttctttagaaacttacac

SEQ ID NO: 49568 - DNA, 25 bp, SARS Virus
ttcaatttcttttgaaacttacacc

SEQ ID NO: 49569 - DNA, 25 bp, SARS Virus
tcaatttctttataaacttacaccg

SEQ ID NO: 49570 - DNA, 25 bp, SARS Virus
caatttctttagtaacttacaccga

SEQ ID NO: 49571 - DNA, 25 bp, SARS Virus
aatttctttagatacttacaccgat

SEQ ID NO: 49572 - DNA, 25 bp, SARS Virus
atttctttagaatcttacaccgatt

SEQ ID NO: 49573 - DNA, 25 bp, SARS Virus
tttctttagaaatttacaccgattt

SEQ ID NO: 49574 - DNA, 25 bp, SARS Virus
ttctttagaaacttacaccgattta

SEQ ID NO: 49575 - DNA, 25 bp, SARS Virus
tctttagaaacttacaccgatttag

SEQ ID NO: 49576 - DNA, 25 bp, SARS Virus
ctttagaaactttcaccgatttaga

SEQ ID NO: 49577 - DNA, 25 bp, SARS Virus
tttagaaacttataccgatttagac

SEQ ID NO: 49578 - DNA, 25 bp, SARS Virus
ttagaaacttactccgatttagact

SEQ ID NO: 49579 - DNA, 25 bp, SARS Virus
tagaaacttacatcgatttagactc

SEQ ID NO: 49580 - DNA, 25 bp, SARS Virus
agaaacttacactgatttagactca

SEQ ID NO: 49581 - DNA, 25 bp, SARS Virus
gaaacttacacctatttagactcaa

SEQ ID NO: 49582 - DNA, 25 bp, SARS Virus
aaacttacaccgttttagactcaaa

SEQ ID NO: 49583 - DNA, 25 bp, SARS Virus
aacttacaccgatttagactcaaac

SEQ ID NO: 49584 - DNA, 25 bp, SARS Virus
acttacaccgatttagactcaaact

SEQ ID NO: 49585 - DNA, 25 bp, SARS Virus
cttacaccgatttagactcaaactg

SEQ ID NO: 49586 - DNA, 25 bp, SARS Virus
ttacaccgattttgactcaaactgg

SEQ ID NO: 49587 - DNA, 25 bp, SARS Virus
tacaccgatttatactcaaactggc

SEQ ID NO: 49588 - DNA, 25 bp, SARS Virus
acaccgatttagtctcaaactggca

SEQ ID NO: 49589 - DNA, 25 bp, SARS Virus
caccgatttagattcaaactggcac

SEQ ID NO: 49590 - DNA, 25 bp, SARS Virus
accgatttagactcaaactggcact

SEQ ID NO: 49591 - DNA, 25 bp, SARS Virus
ccgatttagacttaaactggcacta

SEQ ID NO: 49592 - DNA, 25 bp, SARS Virus
cgatttagactctaactggcactac

SEQ ID NO: 49593 - DNA, 25 bp, SARS Virus
gatttagactcatactggcactacg

SEQ ID NO: 49594 - DNA, 25 bp, SARS Virus
atttagactcaatctggcactacga

SEQ ID NO: 49595 - DNA, 25 bp, SARS Virus
tttagactcaaattggcactacgac

SEQ ID NO: 49596 - DNA, 25 bp, SARS Virus
ttagactcaaactggcactacgacg

SEQ ID NO: 49597 - DNA, 25 bp, SARS Virus
tagactcaaacttgcactacgacgg

SEQ ID NO: 49598 - DNA, 25 bp, SARS Virus
agactcaaactgtcactacgacggt

SEQ ID NO: 49599 - DNA, 25 bp, SARS Virus
gactcaaactggtactacgacggta

SEQ ID NO: 49600 - DNA, 25 bp, SARS Virus
actcaaactggctctacgacggtac

SEQ ID NO: 49601 - DNA, 25 bp, SARS Virus
ctcaaactggcattacgacggtacg

SEQ ID NO: 49602 - DNA, 25 bp, SARS Virus
tcaaactggcactacgacggtacgt

SEQ ID NO: 49603 - DNA, 25 bp, SARS Virus
caaactggcacttcgacggtacgtt

SEQ ID NO: 49604 - DNA, 25 bp, SARS Virus
aaactggcactatgacggtacgttg

SEQ ID NO: 49605 - DNA, 25 bp, SARS Virus
aactggcactactacggtacgttgc

SEQ ID NO: 49606 - DNA, 25 bp, SARS Virus
actggcactacgtcggtacgttgcg

SEQ ID NO: 49607 - DNA, 25 bp, SARS Virus
ctggcactacgatggtacgttgcgt

SEQ ID NO: 49608 - DNA, 25 bp, SARS Virus
tggcactacgactgtacgttgcgtt

SEQ ID NO: 49609 - DNA, 25 bp, SARS Virus
ggcactacgacgttacgttgcgttc

SEQ ID NO: 49610 - DNA, 25 bp, SARS Virus
gcactacgacggtacgttgcgttca

SEQ ID NO: 49611 - DNA, 25 bp, SARS Virus
cactacgacggttcgttgcgttcaa

SEQ ID NO: 49612 - DNA, 25 bp, SARS Virus
actacgacggtatgttgcgttcaac

SEQ ID NO: 49613 - DNA, 25 bp, SARS Virus
ctacgacggtactttgcgttcaacc

SEQ ID NO: 49614 - DNA, 25 bp, SARS Virus
tacgacggtacgttgcgttcaacct

SEQ ID NO: 49615 - DNA, 25 bp, SARS Virus
acgacggtacgttgcgttcaacctt

SEQ ID NO: 49616 - DNA, 25 bp, SARS Virus
cgacggtacgtttcgttcaaccttt

SEQ ID NO: 49617 - DNA, 25 bp, SARS Virus
gacggtacgttgtgttcaacctttt

SEQ ID NO: 49618 - DNA, 25 bp, SARS Virus
acggtacgttgctttcaaccttttc

SEQ ID NO: 49619 - DNA, 25 bp, SARS Virus
cggtacgttgcgttcaaccttttct

SEQ ID NO: 49620 - DNA, 25 bp, SARS Virus
ggtacgttgcgttcaaccttttcta

SEQ ID NO: 49621 - DNA, 25 bp, SARS Virus
gtacgttgcgtttaaccttttctac

SEQ ID NO: 49622 - DNA, 25 bp, SARS Virus
tacgttgcgttctaccttttctacc

SEQ ID NO: 49623 - DNA, 25 bp, SARS Virus
acgttgcgttcatccttttctaccg

SEQ ID NO: 49624 - DNA, 25 bp, SARS Virus
cgttgcgttcaatcttttctaccgt

SEQ ID NO: 49625 - DNA, 25 bp, SARS Virus
gttgcgttcaactttttctaccgtc

SEQ ID NO: 49626 - DNA, 25 bp, SARS Virus
ttgcgttcaaccttttctaccgtct

SEQ ID NO: 49627 - DNA, 25 bp, SARS Virus
tgcgttcaaccttttctaccgtcta

SEQ ID NO: 49628 - DNA, 25 bp, SARS Virus
gcgttcaaccttttctaccgtctag

SEQ ID NO: 49629 - DNA, 25 bp, SARS Virus
cgttcaaccttttctaccgtctagt

SEQ ID NO: 49630 - DNA, 25 bp, SARS Virus
gttcaaccttttttaccgtctagtc

SEQ ID NO: 49631 - DNA, 25 bp, SARS Virus
ttcaaccttttctaccgtctagtcc

SEQ ID NO: 49632 - DNA, 25 bp, SARS Virus
tcaaccttttcttccgtctagtccg

SEQ ID NO: 49633 - DNA, 25 bp, SARS Virus
caaccttttctatcgtctagtccga

SEQ ID NO: 49634 - DNA, 25 bp, SARS Virus
aaccttttctactgtctagtccgat

SEQ ID NO: 49635 - DNA, 25 bp, SARS Virus
accttttctaccttctagtccgata

SEQ ID NO: 49636 - DNA, 25 bp, SARS Virus
ccttttctaccgtctagtccgatac

SEQ ID NO: 49637 - DNA, 25 bp, SARS Virus
cttttctaccgtttagtccgatact

SEQ ID NO: 49638 - DNA, 25 bp, SARS Virus
ttttctaccgtctagtccgatactg

SEQ ID NO: 49639 - DNA, 25 bp, SARS Virus
tttctaccgtcttgtccgatactgg

SEQ ID NO: 49640 - DNA, 25 bp, SARS Virus
ttctaccgtctattccgatactggg

SEQ ID NO: 49641 - DNA, 25 bp, SARS Virus
tctaccgtctagtccgatactgggt

SEQ ID NO: 49642 - DNA, 25 bp, SARS Virus
ctaccgtctagttcgatactgggtt

SEQ ID NO: 49643 - DNA, 25 bp, SARS Virus
taccgtctagtctgatactgggttt

SEQ ID NO: 49644 - DNA, 25 bp, SARS Virus
accgtctagtcctatactgggttta

SEQ ID NO: 49645 - DNA, 25 bp, SARS Virus
ccgtctagtccgttactgggtttac

SEQ ID NO: 49646 - DNA, 25 bp, SARS Virus
cgtctagtccgatactgggtttaca

SEQ ID NO: 49647 - DNA, 25 bp, SARS Virus
gtctagtccgattctgggtttacat

SEQ ID NO: 49648 - DNA, 25 bp, SARS Virus
tctagtccgatattgggtttacatg

SEQ ID NO: 49649 - DNA, 25 bp, SARS Virus
ctagtccgatactgggtttacatgt

SEQ ID NO: 49650 - DNA, 25 bp, SARS Virus
tagtccgatacttggtttacatgtt

SEQ ID NO: 49651 - DNA, 25 bp, SARS Virus
agtccgatactgtgtttacatgttt

SEQ ID NO: 49652 - DNA, 25 bp, SARS Virus
gtccgatactggttttacatgtttg

SEQ ID NO: 49653 - DNA, 25 bp, SARS Virus
tccgatactgggtttacatgtttgt

SEQ ID NO: 49654 - DNA, 25 bp, SARS Virus
ccgatactgggtttacatgtttgtc

SEQ ID NO: 49655 - DNA, 25 bp, SARS Virus
cgatactgggtttacatgtttgtcc

SEQ ID NO: 49656 - DNA, 25 bp, SARS Virus
gatactgggttttcatgtttgtccg

SEQ ID NO: 49657 - DNA, 25 bp, SARS Virus
atactgggtttatatgtttgtccgt

SEQ ID NO: 49658 - DNA, 25 bp, SARS Virus
tactgggtttacttgtttgtccgtt

SEQ ID NO: 49659 - DNA, 25 bp, SARS Virus
actgggtttacatgtttgtccgttc

SEQ ID NO: 49660 - DNA, 25 bp, SARS Virus
ctgggtttacatttttgtccgttct

SEQ ID NO: 49661 - DNA, 25 bp, SARS Virus
tgggtttacatgtttgtccgttcta

SEQ ID NO: 49662 - DNA, 25 bp, SARS Virus
gggtttacatgtttgtccgttctag

SEQ ID NO: 49663 - DNA, 25 bp, SARS Virus
ggtttacatgtttgtccgttctaga

SEQ ID NO: 49664 - DNA, 25 bp, SARS Virus
gtttacatgtttttccgttctagac

SEQ ID NO: 49665 - DNA, 25 bp, SARS Virus
tttacatgtttgtccgttctagact

SEQ ID NO: 49666 - DNA, 25 bp, SARS Virus
ttacatgtttgttcgttctagactc

SEQ ID NO: 49667 - DNA, 25 bp, SARS Virus
tacatgtttgtctgttctagactcc

SEQ ID NO: 49668 - DNA, 25 bp, SARS Virus
acatgtttgtcctttctagactcct

SEQ ID NO: 49669 - DNA, 25 bp, SARS Virus
catgtttgtccgttctagactcctg

SEQ ID NO: 49670 - DNA, 25 bp, SARS Virus
atgtttgtccgttctagactcctgt

SEQ ID NO: 49671 - DNA, 25 bp, SARS Virus
tgtttgtccgttttagactcctgtt

SEQ ID NO: 49672 - DNA, 25 bp, SARS Virus
gtttgtccgttctagactcctgttc

SEQ ID NO: 49673 - DNA, 25 bp, SARS Virus
tttgtccgttcttgactcctgttct

SEQ ID NO: 49674 - DNA, 25 bp, SARS Virus
ttgtccgttctatactcctgttctc

SEQ ID NO: 49675 - DNA, 25 bp, SARS Virus
tgtccgttctagtctcctgttctcc

SEQ ID NO: 49676 - DNA, 25 bp, SARS Virus
gtccgttctagattcctgttctccc

SEQ ID NO: 49677 - DNA, 25 bp, SARS Virus
tccgttctagactcctgttctcccg

SEQ ID NO: 49678 - DNA, 25 bp, SARS Virus
ccgttctagacttctgttctcccgt

SEQ ID NO: 49679 - DNA, 25 bp, SARS Virus
cgttctagactcttgttctcccgtt

SEQ ID NO: 49680 - DNA, 25 bp, SARS Virus
gttctagactcctgttctcccgttt

SEQ ID NO: 49681 - DNA, 25 bp, SARS Virus
ttctagactccttttctcccgtttt

SEQ ID NO: 49682 - DNA, 25 bp, SARS Virus
tctagactcctgttctcccgttttc

SEQ ID NO: 49683 - DNA, 25 bp, SARS Virus
ctagactcctgttctcccgttttca

SEQ ID NO: 49684 - DNA, 25 bp, SARS Virus
tagactcctgttttcccgttttcat

SEQ ID NO: 49685 - DNA, 25 bp, SARS Virus
agactcctgttctcccgttttcatt

SEQ ID NO: 49686 - DNA, 25 bp, SARS Virus
gactcctgttcttccgttttcattg

SEQ ID NO: 49687 - DNA, 25 bp, SARS Virus
actcctgttctctcgttttcattga

SEQ ID NO: 49688 - DNA, 25 bp, SARS Virus
ctcctgttctcctgttttcattgat

SEQ ID NO: 49689 - DNA, 25 bp, SARS Virus
tcctgttctccctttttcattgatc

SEQ ID NO: 49690 - DNA, 25 bp, SARS Virus
cctgttctcccgttttcattgatca

SEQ ID NO: 49691 - DNA, 25 bp, SARS Virus
ctgttctcccgttttcattgatcac

SEQ ID NO: 49692 - DNA, 25 bp, SARS Virus
tgttctcccgttttcattgatcacg

SEQ ID NO: 49693 - DNA, 25 bp, SARS Virus
gttctcccgttttcattgatcacga

SEQ ID NO: 49694 - DNA, 25 bp, SARS Virus
ttctcccgtttttattgatcacgat

SEQ ID NO: 49695 - DNA, 25 bp, SARS Virus
tctcccgttttctttgatcacgata

SEQ ID NO: 49696 - DNA, 25 bp, SARS Virus
ctcccgttttcattgatcacgatac

SEQ ID NO: 49697 - DNA, 25 bp, SARS Virus
tcccgttttcattgatcacgatacg

SEQ ID NO: 49698 - DNA, 25 bp, SARS Virus
cccgttttcatttatcacgatacgt

SEQ ID NO: 49699 - DNA, 25 bp, SARS Virus
ccgttttcattgttcacgatacgtt

SEQ ID NO: 49700 - DNA, 25 bp, SARS Virus
cgttttcattgatcacgatacgttt

SEQ ID NO: 49701 - DNA, 25 bp, SARS Virus
gttttcattgattacgatacgtttg

SEQ ID NO: 49702 - DNA, 25 bp, SARS Virus
ttttcattgatctcgatacgtttgt

SEQ ID NO: 49703 - DNA, 25 bp, SARS Virus
tttcattgatcatgatacgtttgtt

SEQ ID NO: 49704 - DNA, 25 bp, SARS Virus
ttcattgatcactatacgtttgtta

SEQ ID NO: 49705 - DNA, 25 bp, SARS Virus
tcattgatcacgttacgtttgttac

SEQ ID NO: 49706 - DNA, 25 bp, SARS Virus
cattgatcacgatacgtttgttacg

SEQ ID NO: 49707 - DNA, 25 bp, SARS Virus
attgatcacgattcgtttgttacga

SEQ ID NO: 49708 - DNA, 25 bp, SARS Virus
ttgatcacgatatgtttgttacgag

SEQ ID NO: 49709 - DNA, 25 bp, SARS Virus
tgatcacgatacttttgttacgaga

SEQ ID NO: 49710 - DNA, 25 bp, SARS Virus
gatcacgatacgtttgttacgagaa

SEQ ID NO: 49711 - DNA, 25 bp, SARS Virus
atcacgatacgtttgttacgagaag

SEQ ID NO: 49712 - DNA, 25 bp, SARS Virus
tcacgatacgtttgttacgagaagt

SEQ ID NO: 49713 - DNA, 25 bp, SARS Virus
cacgatacgttttttacgagaagtg

SEQ ID NO: 49714 - DNA, 25 bp, SARS Virus
acgatacgtttgttacgagaagtga

SEQ ID NO: 49715 - DNA, 25 bp, SARS Virus
cgatacgtttgttacgagaagtgat

SEQ ID NO: 49716 - DNA, 25 bp, SARS Virus
gatacgtttgtttcgagaagtgata

SEQ ID NO: 49717 - DNA, 25 bp, SARS Virus
atacgtttgttatgagaagtgatac

SEQ ID NO: 49718 - DNA, 25 bp, SARS Virus
tacgtttgttactagaagtgatacg

SEQ ID NO: 49719 - DNA, 25 bp, SARS Virus
acgtttgttacgtgaagtgatacga

SEQ ID NO: 49720 - DNA, 25 bp, SARS Virus
cgtttgttacgataagtgatacgaa

SEQ ID NO: 49721 - DNA, 25 bp, SARS Virus
gtttgttacgagtagtgatacgaat

SEQ ID NO: 49722 - DNA, 25 bp, SARS Virus
tttgttacgagatgtgatacgaatc

SEQ ID NO: 49723 - DNA, 25 bp, SARS Virus
ttgttacgagaattgatacgaatcc

SEQ ID NO: 49724 - DNA, 25 bp, SARS Virus
tgttacgagaagtgatacgaatcct

SEQ ID NO: 49725 - DNA, 25 bp, SARS Virus
gttacgagaagttatacgaatcctt

SEQ ID NO: 49726 - DNA, 25 bp, SARS Virus
ttacgagaagtgttacgaatccttc

SEQ ID NO: 49727 - DNA, 25 bp, SARS Virus
tacgagaagtgatacgaatccttcg

SEQ ID NO: 49728 - DNA, 25 bp, SARS Virus
acgagaagtgattcgaatccttcga

SEQ ID NO: 49729 - DNA, 25 bp, SARS Virus
cgagaagtgatatgaatccttcgaa

SEQ ID NO: 49730 - DNA, 25 bp, SARS Virus
gagaagtgatactaatccttcgaac

SEQ ID NO: 49731 - DNA, 25 bp, SARS Virus
agaagtgatacgtatccttcgaact

SEQ ID NO: 49732 - DNA, 25 bp, SARS Virus
gaagtgatacgattccttcgaacta

SEQ ID NO: 49733 - DNA, 25 bp, SARS Virus
aagtgatacgaatccttcgaactat

SEQ ID NO: 49734 - DNA, 25 bp, SARS Virus
agtgatacgaattcttcgaactatt

SEQ ID NO: 49735 - DNA, 25 bp, SARS Virus
gtgatacgaatctttcgaactatta

SEQ ID NO: 49736 - DNA, 25 bp, SARS Virus
tgatacgaatccttcgaactattac

SEQ ID NO: 49737 - DNA, 25 bp, SARS Virus
gatacgaatccttcgaactattact

SEQ ID NO: 49738 - DNA, 25 bp, SARS Virus
atacgaatcctttgaactattacta

SEQ ID NO: 49739 - DNA, 25 bp, SARS Virus
tacgaatccttctaactattactac

SEQ ID NO: 49740 - DNA, 25 bp, SARS Virus
acgaatccttcgtactattactacg

SEQ ID NO: 49741 - DNA, 25 bp, SARS Virus
cgaatccttcgatctattactacgt

SEQ ID NO: 49742 - DNA, 25 bp, SARS Virus
gaatccttcgaattattactacgtg

SEQ ID NO: 49743 - DNA, 25 bp, SARS Virus
aatccttcgaactattactacgtga

SEQ ID NO: 49744 - DNA, 25 bp, SARS Virus
atccttcgaacttttactacgtgaa

SEQ ID NO: 49745 - DNA, 25 bp, SARS Virus
tccttcgaactattactacgtgaat

SEQ ID NO: 49746 - DNA, 25 bp, SARS Virus
ccttcgaactattactacgtgaatt

SEQ ID NO: 49747 - DNA, 25 bp, SARS Virus
cttcgaactatttctacgtgaattg

SEQ ID NO: 49748 - DNA, 25 bp, SARS Virus
ttcgaactattattacgtgaattgt

SEQ ID NO: 49749 - DNA, 25 bp, SARS Virus
tcgaactattactacgtgaattgtt

SEQ ID NO: 49750 - DNA, 25 bp, SARS Virus
cgaactattacttcgtgaattgttg

SEQ ID NO: 49751 - DNA, 25 bp, SARS Virus
gaactattactatgtgaattgttgt

SEQ ID NO: 49752 - DNA, 25 bp, SARS Virus
aactattactacttgaattgttgta

SEQ ID NO: 49753 - DNA, 25 bp, SARS Virus
actattactacgtgaattgttgtaa

SEQ ID NO: 49754 - DNA, 25 bp, SARS Virus
ctattactacgttaattgttgtaat

SEQ ID NO: 49755 - DNA, 25 bp, SARS Virus
tattactacgtgtattgttgtaata

SEQ ID NO: 49756 - DNA, 25 bp, SARS Virus
attactacgtgatttgttgtaatag

SEQ ID NO: 49757 - DNA, 25 bp, SARS Virus
ttactacgtgaattgttgtaatagt

SEQ ID NO: 49758 - DNA, 25 bp, SARS Virus
tactacgtgaattgttgtaatagtt

SEQ ID NO: 49759 - DNA, 25 bp, SARS Virus
actacgtgaatttttgtaatagttg

SEQ ID NO: 49760 - DNA, 25 bp, SARS Virus
ctacgtgaattgttgtaatagttgt

SEQ ID NO: 49761 - DNA, 25 bp, SARS Virus
tacgtgaattgttgtaatagttgtt

SEQ ID NO: 49762 - DNA, 25 bp, SARS Virus
acgtgaattgttttaatagttgtta

SEQ ID NO: 49763 - DNA, 25 bp, SARS Virus
cgtgaattgttgtaatagttgttac

SEQ ID NO: 49764 - DNA, 25 bp, SARS Virus
gtgaattgttgttatagttgttacg

SEQ ID NO: 49765 - DNA, 25 bp, SARS Virus
tgaattgttgtattagttgttacgc

SEQ ID NO: 49766 - DNA, 25 bp, SARS Virus
gaattgttgtaatagttgttacgcg

SEQ ID NO: 49767 - DNA, 25 bp, SARS Virus
aattgttgtaattgttgttacgcgc

SEQ ID NO: 49768 - DNA, 25 bp, SARS Virus
attgttgtaatatttgttacgcgca

SEQ ID NO: 49769 - DNA, 25 bp, SARS Virus
ttgttgtaatagttgttacgcgcac

SEQ ID NO: 49770 - DNA, 25 bp, SARS Virus
tgttgtaatagttgttacgcgcact

SEQ ID NO: 49771 - DNA, 25 bp, SARS Virus
gttgtaatagtttttacgcgcacta

SEQ ID NO: 49772 - DNA, 25 bp, SARS Virus
ttgtaatagttgttacgcgcactac

SEQ ID NO: 49773 - DNA, 25 bp, SARS Virus
tgtaatagttgttacgcgcactacc

SEQ ID NO: 49774 - DNA, 25 bp, SARS Virus
gtaatagttgtttcgcgcactacca

SEQ ID NO: 49775 - DNA, 25 bp, SARS Virus
taatagttgttatgcgcactaccaa

SEQ ID NO: 49776 - DNA, 25 bp, SARS Virus
aatagttgttactcgcactaccaac

SEQ ID NO: 49777 - DNA, 25 bp, SARS Virus
atagttgttacgtgcactaccaaca

SEQ ID NO: 49778 - DNA, 25 bp, SARS Virus
tagttgttacgctcactaccaacac

SEQ ID NO: 49779 - DNA, 25 bp, SARS Virus
agttgttacgcgtactaccaacaca

SEQ ID NO: 49780 - DNA, 25 bp, SARS Virus
gttgttacgcgctctaccaacacaa

SEQ ID NO: 49781 - DNA, 25 bp, SARS Virus
ttgttacgcgcattaccaacacaag

SEQ ID NO: 49782 - DNA, 25 bp, SARS Virus
tgttacgcgcactaccaacacaagg

SEQ ID NO: 49783 - DNA, 25 bp, SARS Virus
gttacgcgcacttccaacacaaggt

SEQ ID NO: 49784 - DNA, 25 bp, SARS Virus
ttacgcgcactatcaacacaaggtg

SEQ ID NO: 49785 - DNA, 25 bp, SARS Virus
tacgcgcactactaacacaaggtga

SEQ ID NO: 49786 - DNA, 25 bp, SARS Virus
acgcgcactacctacacaaggtgag

SEQ ID NO: 49787 - DNA, 25 bp, SARS Virus
cgcgcactaccatcacaaggtgagt

SEQ ID NO: 49788 - DNA, 25 bp, SARS Virus
gcgcactaccaatacaaggtgagtt

SEQ ID NO: 49789 - DNA, 25 bp, SARS Virus
cgcactaccaactcaaggtgagttg

SEQ ID NO: 49790 - DNA, 25 bp, SARS Virus
gcactaccaacataaggtgagttgt

SEQ ID NO: 49791 - DNA, 25 bp, SARS Virus
cactaccaacactaggtgagttgta

SEQ ID NO: 49792 - DNA, 25 bp, SARS Virus
actaccaacacatggtgagttgtag

SEQ ID NO: 49793 - DNA, 25 bp, SARS Virus
ctaccaacacaatgtgagttgtagt

SEQ ID NO: 49794 - DNA, 25 bp, SARS Virus
taccaacacaagttgagttgtagta

SEQ ID NO: 49795 - DNA, 25 bp, SARS Virus
accaacacaaggtgagttgtagtat

SEQ ID NO: 49796 - DNA, 25 bp, SARS Virus
ccaacacaaggttagttgtagtatg

SEQ ID NO: 49797 - DNA, 25 bp, SARS Virus
caacacaaggtgtgttgtagtatgg

SEQ ID NO: 49798 - DNA, 25 bp, SARS Virus
aacacaaggtgatttgtagtatggt

SEQ ID NO: 49799 - DNA, 25 bp, SARS Virus
acacaaggtgagttgtagtatggta

SEQ ID NO: 49800 - DNA, 25 bp, SARS Virus
cacaaggtgagttgtagtatggtaa

SEQ ID NO: 49801 - DNA, 25 bp, SARS Virus
acaaggtgagttttagtatggtaac

SEQ ID NO: 49802 - DNA, 25 bp, SARS Virus
caaggtgagttgtagtatggtaact

SEQ ID NO: 49803 - DNA, 25 bp, SARS Virus
aaggtgagttgttgtatggtaactg

SEQ ID NO: 49804 - DNA, 25 bp, SARS Virus
aggtgagttgtattatggtaactga

SEQ ID NO: 49805 - DNA, 25 bp, SARS Virus
ggtgagttgtagtatggtaactgat

SEQ ID NO: 49806 - DNA, 25 bp, SARS Virus
gtgagttgtagtttggtaactgatg

SEQ ID NO: 49807 - DNA, 25 bp, SARS Virus
tgagttgtagtatggtaactgatgt

SEQ ID NO: 49808 - DNA, 25 bp, SARS Virus
gagttgtagtattgtaactgatgtc

SEQ ID NO: 49809 - DNA, 25 bp, SARS Virus
agttgtagtatgttaactgatgtcg

SEQ ID NO: 49810 - DNA, 25 bp, SARS Virus
gttgtagtatggtaactgatgtcgt

SEQ ID NO: 49811 - DNA, 25 bp, SARS Virus
ttgtagtatggttactgatgtcgtc

SEQ ID NO: 49812 - DNA, 25 bp, SARS Virus
tgtagtatggtatctgatgtcgtcg

SEQ ID NO: 49813 - DNA, 25 bp, SARS Virus
gtagtatggtaattgatgtcgtcgg

SEQ ID NO: 49814 - DNA, 25 bp, SARS Virus
tagtatggtaactgatgtcgtcggt

SEQ ID NO: 49815 - DNA, 25 bp, SARS Virus
agtatggtaacttatgtcgtcggtt

SEQ ID NO: 49816 - DNA, 25 bp, SARS Virus
gtatggtaactgttgtcgtcggttt

SEQ ID NO: 49817 - DNA, 25 bp, SARS Virus
tatggtaactgatgtcgtcggtttg

SEQ ID NO: 49818 - DNA, 25 bp, SARS Virus
atggtaactgatttcgtcggtttga

SEQ ID NO: 49819 - DNA, 25 bp, SARS Virus
tggtaactgatgtcgtcggtttgag

SEQ ID NO: 49820 - DNA, 25 bp, SARS Virus
ggtaactgatgttgtcggtttgagt

SEQ ID NO: 49821 - DNA, 25 bp, SARS Virus
gtaactgatgtcttcggtttgagta

SEQ ID NO: 49822 - DNA, 25 bp, SARS Virus
taactgatgtcgtcggtttgagtac

SEQ ID NO: 49823 - DNA, 25 bp, SARS Virus
aactgatgtcgttggtttgagtacc

SEQ ID NO: 49824 - DNA, 25 bp, SARS Virus
actgatgtcgtctgtttgagtacca

SEQ ID NO: 49825 - DNA, 25 bp, SARS Virus
ctgatgtcgtcgttttgagtaccaa

SEQ ID NO: 49826 - DNA, 25 bp, SARS Virus
tgatgtcgtcggtttgagtaccaac

SEQ ID NO: 49827 - DNA, 25 bp, SARS Virus
gatgtcgtcggtttgagtaccaaca

SEQ ID NO: 49828 - DNA, 25 bp, SARS Virus
atgtcgtcggtttgagtaccaacaa

SEQ ID NO: 49829 - DNA, 25 bp, SARS Virus
tgtcgtcggttttagtaccaacaac

SEQ ID NO: 49830 - DNA, 25 bp, SARS Virus
gtcgtcggtttgtgtaccaacaaca

SEQ ID NO: 49831 - DNA, 25 bp, SARS Virus
tcgtcggtttgattaccaacaacag

SEQ ID NO: 49832 - DNA, 25 bp, SARS Virus
cgtcggtttgagtaccaacaacagg

SEQ ID NO: 49833 - DNA, 25 bp, SARS Virus
gtcggtttgagttccaacaacaggg

SEQ ID NO: 49834 - DNA, 25 bp, SARS Virus
tcggtttgagtatcaacaacaggga

SEQ ID NO: 49835 - DNA, 25 bp, SARS Virus
cggtttgagtactaacaacagggac

SEQ ID NO: 49836 - DNA, 25 bp, SARS Virus
ggtttgagtacctacaacagggact

SEQ ID NO: 49837 - DNA, 25 bp, SARS Virus
gtttgagtaccatcaacagggacta

SEQ ID NO: 49838 - DNA, 25 bp, SARS Virus
tttgagtaccaataacagggactaa

SEQ ID NO: 49839 - DNA, 25 bp, SARS Virus
ttgagtaccaactacagggactaat

SEQ ID NO: 49840 - DNA, 25 bp, SARS Virus
tgagtaccaacatcagggactaata

SEQ ID NO: 49841 - DNA, 25 bp, SARS Virus
gagtaccaacaatagggactaatac

SEQ ID NO: 49842 - DNA, 25 bp, SARS Virus
agtaccaacaactgggactaatacc

SEQ ID NO: 49843 - DNA, 25 bp, SARS Virus
gtaccaacaacatggactaatacca

SEQ ID NO: 49844 - DNA, 25 bp, SARS Virus
taccaacaacagtgactaataccat

SEQ ID NO: 49845 - DNA, 25 bp, SARS Virus
accaacaacaggtactaataccatg

SEQ ID NO: 49846 - DNA, 25 bp, SARS Virus
ccaacaacagggtctaataccatgg

SEQ ID NO: 49847 - DNA, 25 bp, SARS Virus
caacaacagggattaataccatgga

SEQ ID NO: 49848 - DNA, 25 bp, SARS Virus
aacaacagggactaataccatggat

SEQ ID NO: 49849 - DNA, 25 bp, SARS Virus
acaacagggacttataccatggatg

SEQ ID NO: 49850 - DNA, 25 bp, SARS Virus
caacagggactattaccatggatgt

SEQ ID NO: 49851 - DNA, 25 bp, SARS Virus
aacagggactaataccatggatgtt

SEQ ID NO: 49852 - DNA, 25 bp, SARS Virus
acagggactaattccatggatgttc

SEQ ID NO: 49853 - DNA, 25 bp, SARS Virus
cagggactaatatcatggatgttct

SEQ ID NO: 49854 - DNA, 25 bp, SARS Virus
agggactaatactatggatgttctt

SEQ ID NO: 49855 - DNA, 25 bp, SARS Virus
gggactaataccttggatgttcttg

SEQ ID NO: 49856 - DNA, 25 bp, SARS Virus
ggactaataccatggatgttcttgt

SEQ ID NO: 49857 - DNA, 25 bp, SARS Virus
gactaataccattgatgttcttgtg

SEQ ID NO: 49858 - DNA, 25 bp, SARS Virus
actaataccatgtatgttcttgtga

SEQ ID NO: 49859 - DNA, 25 bp, SARS Virus
ctaataccatggttgttcttgtgaa

SEQ ID NO: 49860 - DNA, 25 bp, SARS Virus
taataccatggatgttcttgtgaac

SEQ ID NO: 49861 - DNA, 25 bp, SARS Virus
aataccatggattttcttgtgaaca

SEQ ID NO: 49862 - DNA, 25 bp, SARS Virus
ataccatggatgttcttgtgaacac

SEQ ID NO: 49863 - DNA, 25 bp, SARS Virus
taccatggatgttcttgtgaacact

SEQ ID NO: 49864 - DNA, 25 bp, SARS Virus
accatggatgtttttgtgaacacta

SEQ ID NO: 49865 - DNA, 25 bp, SARS Virus
ccatggatgttcttgtgaacactac

SEQ ID NO: 49866 - DNA, 25 bp, SARS Virus
catggatgttcttgtgaacactacc

SEQ ID NO: 49867 - DNA, 25 bp, SARS Virus
atggatgttcttttgaacactacca

SEQ ID NO: 49868 - DNA, 25 bp, SARS Virus
tggatgttcttgtgaacactaccat

SEQ ID NO: 49869 - DNA, 25 bp, SARS Virus
ggatgttcttgttaacactaccatt

SEQ ID NO: 49870 - DNA, 25 bp, SARS Virus
gatgttcttgtgtacactaccattg

SEQ ID NO: 49871 - DNA, 25 bp, SARS Virus
atgttcttgtgatcactaccattgt

SEQ ID NO: 49872 - DNA, 25 bp, SARS Virus
tgttcttgtgaatactaccattgtg

SEQ ID NO: 49873 - DNA, 25 bp, SARS Virus
gttcttgtgaactctaccattgtgg

SEQ ID NO: 49874 - DNA, 25 bp, SARS Virus
ttcttgtgaacattaccattgtgga

SEQ ID NO: 49875 - DNA, 25 bp, SARS Virus
tcttgtgaacactaccattgtggaa

SEQ ID NO: 49876 - DNA, 25 bp, SARS Virus
cttgtgaacacttccattgtggaaa

SEQ ID NO: 49877 - DNA, 25 bp, SARS Virus
ttgtgaacactatcattgtggaaat

SEQ ID NO: 49878 - DNA, 25 bp, SARS Virus
tgtgaacactactattgtggaaatg

SEQ ID NO: 49879 - DNA, 25 bp, SARS Virus
gtgaacactacctttgtggaaatgt

SEQ ID NO: 49880 - DNA, 25 bp, SARS Virus
tgaacactaccattgtggaaatgta

SEQ ID NO: 49881 - DNA, 25 bp, SARS Virus
gaacactaccattgtggaaatgtat

SEQ ID NO: 49882 - DNA, 25 bp, SARS Virus
aacactaccattttggaaatgtata

SEQ ID NO: 49883 - DNA, 25 bp, SARS Virus
acactaccattgtggaaatgtatac

SEQ ID NO: 49884 - DNA, 25 bp, SARS Virus
cactaccattgttgaaatgtatacg

SEQ ID NO: 49885 - DNA, 25 bp, SARS Virus
actaccattgtgtaaatgtatacgt

SEQ ID NO: 49886 - DNA, 25 bp, SARS Virus
ctaccattgtggtaatgtatacgta

SEQ ID NO: 49887 - DNA, 25 bp, SARS Virus
taccattgtggatatgtatacgtag

SEQ ID NO: 49888 - DNA, 25 bp, SARS Virus
accattgtggaattgtatacgtaga

SEQ ID NO: 49889 - DNA, 25 bp, SARS Virus
ccattgtggaaatgtatacgtagac

SEQ ID NO: 49890 - DNA, 25 bp, SARS Virus
cattgtggaaatttatacgtagacg

SEQ ID NO: 49891 - DNA, 25 bp, SARS Virus
attgtggaaatgtatacgtagacgt

SEQ ID NO: 49892 - DNA, 25 bp, SARS Virus
ttgtggaaatgtttacgtagacgtg

SEQ ID NO: 49893 - DNA, 25 bp, SARS Virus
tgtggaaatgtatacgtagacgtga

SEQ ID NO: 49894 - DNA, 25 bp, SARS Virus
gtggaaatgtattcgtagacgtgag

SEQ ID NO: 49895 - DNA, 25 bp, SARS Virus
tggaaatgtatatgtagacgtgaga

SEQ ID NO: 49896 - DNA, 25 bp, SARS Virus
ggaaatgtatacttagacgtgagac

SEQ ID NO: 49897 - DNA, 25 bp, SARS Virus
gaaatgtatacgtagacgtgagacc

SEQ ID NO: 49898 - DNA, 25 bp, SARS Virus
aaatgtatacgttgacgtgagaccc

SEQ ID NO: 49899 - DNA, 25 bp, SARS Virus
aatgtatacgtatacgtgagaccct

SEQ ID NO: 49900 - DNA, 25 bp, SARS Virus
atgtatacgtagtcgtgagaccctt

SEQ ID NO: 49901 - DNA, 25 bp, SARS Virus
tgtatacgtagatgtgagacccttt

SEQ ID NO: 49902 - DNA, 25 bp, SARS Virus
gtatacgtagacttgagacccttta

SEQ ID NO: 49903 - DNA, 25 bp, SARS Virus
tatacgtagacgtgagaccctttag

SEQ ID NO: 49904 - DNA, 25 bp, SARS Virus
atacgtagacgttagaccctttagg

SEQ ID NO: 49905 - DNA, 25 bp, SARS Virus
tacgtagacgtgagaccctttaggt

SEQ ID NO: 49906 - DNA, 25 bp, SARS Virus
acgtagacgtgaaaccctttaggtc

SEQ ID NO: 49907 - DNA, 25 bp, SARS Virus
cgtagacgtgagaccctttaggtcg

SEQ ID NO: 49908 - DNA, 25 bp, SARS Virus
gtagacgtgagaacctttaggtcgt

SEQ ID NO: 49909 - DNA, 25 bp, SARS Virus
tagacgtgagacactttaggtcgtt

SEQ ID NO: 49910 - DNA, 25 bp, SARS Virus
agacgtgagaccatttaggtcgttc

SEQ ID NO: 49911 - DNA, 25 bp, SARS Virus
gacgtgagacccattaggtcgttca

SEQ ID NO: 49912 - DNA, 25 bp, SARS Virus
acgtgagaccctataggtcgttcaa

SEQ ID NO: 49913 - DNA, 25 bp, SARS Virus
cgtgagacccttaaggtcgttcaac

SEQ ID NO: 49914 - DNA, 25 bp, SARS Virus
gtgagaccctttaggtcgttcaaca

SEQ ID NO: 49915 - DNA, 25 bp, SARS Virus
tgagaccctttaagtcgttcaacaa

SEQ ID NO: 49916 - DNA, 25 bp, SARS Virus
gagaccctttagatcgttcaacaac

SEQ ID NO: 49917 - DNA, 25 bp, SARS Virus
agaccctttaggacgttcaacaact

SEQ ID NO: 49918 - DNA, 25 bp, SARS Virus
gaccctttaggtagttcaacaacta

SEQ ID NO: 49919 - DNA, 25 bp, SARS Virus
accctttaggtcattcaacaactac

SEQ ID NO: 49920 - DNA, 25 bp, SARS Virus
ccctttaggtcgatcaacaactacg

SEQ ID NO: 49921 - DNA, 25 bp, SARS Virus
cctttaggtcgtacaacaactacgc

SEQ ID NO: 49922 - DNA, 25 bp, SARS Virus
ctttaggtcgttaaacaactacgcc

SEQ ID NO: 49923 - DNA, 25 bp, SARS Virus
tttaggtcgttcaacaactacgcct

SEQ ID NO: 49924 - DNA, 25 bp, SARS Virus
ttaggtcgttcaacaactacgccta

SEQ ID NO: 49925 - DNA, 25 bp, SARS Virus
taggtcgttcaaaaactacgcctat

SEQ ID NO: 49926 - DNA, 25 bp, SARS Virus
aggtcgttcaacaactacgcctatc

SEQ ID NO: 49927 - DNA, 25 bp, SARS Virus
ggtcgttcaacaactacgcctatcg

SEQ ID NO: 49928 - DNA, 25 bp, SARS Virus
gtcgttcaacaaatacgcctatcgt

SEQ ID NO: 49929 - DNA, 25 bp, SARS Virus
tcgttcaacaacaacgcctatcgtt

SEQ ID NO: 49930 - DNA, 25 bp, SARS Virus
cgttcaacaactacgcctatcgttc

SEQ ID NO: 49931 - DNA, 25 bp, SARS Virus
gttcaacaactaagcctatcgttct

SEQ ID NO: 49932 - DNA, 25 bp, SARS Virus
ttcaacaactacacctatcgttcta

SEQ ID NO: 49933 - DNA, 25 bp, SARS Virus
tcaacaactacgactatcgttctaa

SEQ ID NO: 49934 - DNA, 25 bp, SARS Virus
caacaactacgcatatcgttctaac

SEQ ID NO: 49935 - DNA, 25 bp, SARS Virus
aacaactacgccaatcgttctaaca

SEQ ID NO: 49936 - DNA, 25 bp, SARS Virus
acaactacgcctatcgttctaacaa

SEQ ID NO: 49937 - DNA, 25 bp, SARS Virus
caactacgcctaacgttctaacaag

SEQ ID NO: 49938 - DNA, 25 bp, SARS Virus
aactacgcctatagttctaacaagt

SEQ ID NO: 49939 - DNA, 25 bp, SARS Virus
actacgcctatcattctaacaagtt

SEQ ID NO: 49940 - DNA, 25 bp, SARS Virus
ctacgcctatcgatctaacaagttg

SEQ ID NO: 49941 - DNA, 25 bp, SARS Virus
tacgcctatcgtactaacaagttga

SEQ ID NO: 49942 - DNA, 25 bp, SARS Virus
acgcctatcgttataacaagttgaa

SEQ ID NO: 49943 - DNA, 25 bp, SARS Virus
cgcctatcgttcaaacaagttgaat

SEQ ID NO: 49944 - DNA, 25 bp, SARS Virus
gcctatcgttctaacaagttgaatc

SEQ ID NO: 49945 - DNA, 25 bp, SARS Virus
cctatcgttctaacaagttgaatca

SEQ ID NO: 49946 - DNA, 25 bp, SARS Virus
ctatcgttctaaaaagttgaatcac

SEQ ID NO: 49947 - DNA, 25 bp, SARS Virus
tatcgttctaacaagttgaatcact

SEQ ID NO: 49948 - DNA, 25 bp, SARS Virus
atcgttctaacaagttgaatcactt

SEQ ID NO: 49949 - DNA, 25 bp, SARS Virus
tcgttctaacaaattgaatcacttt

SEQ ID NO: 49950 - DNA, 25 bp, SARS Virus
cgttctaacaagatgaatcacttta

SEQ ID NO: 49951 - DNA, 25 bp, SARS Virus
gttctaacaagtagaatcactttaa

SEQ ID NO: 49952 - DNA, 25 bp, SARS Virus
ttctaacaagttaaatcactttaat

SEQ ID NO: 49953 - DNA, 25 bp, SARS Virus
tctaacaagttgaatcactttaatt

SEQ ID NO: 49954 - DNA, 25 bp, SARS Virus
ctaacaagttgaatcactttaattg

SEQ ID NO: 49955 - DNA, 25 bp, SARS Virus
taacaagttgaaacactttaattgt

SEQ ID NO: 49956 - DNA, 25 bp, SARS Virus
aacaagttgaataactttaattgta

SEQ ID NO: 49957 - DNA, 25 bp, SARS Virus
acaagttgaatcactttaattgtac

SEQ ID NO: 49958 - DNA, 25 bp, SARS Virus
caagttgaatcaatttaattgtacc

SEQ ID NO: 49959 - DNA, 25 bp, SARS Virus
aagttgaatcacattaattgtacct

SEQ ID NO: 49960 - DNA, 25 bp, SARS Virus
agttgaatcactataattgtacctg

SEQ ID NO: 49961 - DNA, 25 bp, SARS Virus
gttgaatcacttaaattgtacctgt

SEQ ID NO: 49962 - DNA, 25 bp, SARS Virus
ttgaatcactttaattgtacctgtt

SEQ ID NO: 49963 - DNA, 25 bp, SARS Virus
tgaatcactttaattgtacctgtta

SEQ ID NO: 49964 - DNA, 25 bp, SARS Virus
gaatcactttaaatgtacctgttaa

SEQ ID NO: 49965 - DNA, 25 bp, SARS Virus
aatcactttaatagtacctgttaag

SEQ ID NO: 49966 - DNA, 25 bp, SARS Virus
atcactttaattatacctgttaagt

SEQ ID NO: 49967 - DNA, 25 bp, SARS Virus
tcactttaattgaacctgttaagtg

SEQ ID NO: 49968 - DNA, 25 bp, SARS Virus
cactttaattgtacctgttaagtgg

SEQ ID NO: 49969 - DNA, 25 bp, SARS Virus
actttaattgtaactgttaagtggt

SEQ ID NO: 49970 - DNA, 25 bp, SARS Virus
ctttaattgtacatgttaagtggtt

SEQ ID NO: 49971 - DNA, 25 bp, SARS Virus
tttaattgtaccagttaagtggttt

SEQ ID NO: 49972 - DNA, 25 bp, SARS Virus
ttaattgtacctattaagtggttta

SEQ ID NO: 49973 - DNA, 25 bp, SARS Virus
taattgtacctgataagtggtttaa

SEQ ID NO: 49974 - DNA, 25 bp, SARS Virus
aattgtacctgtaaagtggtttaaa

SEQ ID NO: 49975 - DNA, 25 bp, SARS Virus
attgtacctgttaagtggtttaaac

SEQ ID NO: 49976 - DNA, 25 bp, SARS Virus
ttgtacctgttaagtggtttaaacc

SEQ ID NO: 49977 - DNA, 25 bp, SARS Virus
tgtacctgttaaatggtttaaaccg

SEQ ID NO: 49978 - DNA, 25 bp, SARS Virus
gtacctgttaagaggtttaaaccga

SEQ ID NO: 49979 - DNA, 25 bp, SARS Virus
tacctgttaagtagtttaaaccgaa

SEQ ID NO: 49980 - DNA, 25 bp, SARS Virus
acctgttaagtgatttaaaccgaac

SEQ ID NO: 49981 - DNA, 25 bp, SARS Virus
cctgttaagtggattaaaccgaacc

SEQ ID NO: 49982 - DNA, 25 bp, SARS Virus
ctgttaagtggtataaaccgaaccg

SEQ ID NO: 49983 - DNA, 25 bp, SARS Virus
tgttaagtggttaaaaccgaaccgg

SEQ ID NO: 49984 - DNA, 25 bp, SARS Virus
gttaagtggtttaaaccgaaccgga

SEQ ID NO: 49985 - DNA, 25 bp, SARS Virus
ttaagtggtttaaaccgaaccggag

SEQ ID NO: 49986 - DNA, 25 bp, SARS Virus
taagtggtttaaaccgaaccggaga

SEQ ID NO: 49987 - DNA, 25 bp, SARS Virus
aagtggtttaaaacgaaccggagaa

SEQ ID NO: 49988 - DNA, 25 bp, SARS Virus
agtggtttaaacagaaccggagaat

SEQ ID NO: 49989 - DNA, 25 bp, SARS Virus
gtggtttaaaccaaaccggagaata

SEQ ID NO: 49990 - DNA, 25 bp, SARS Virus
tggtttaaaccgaaccggagaataa

SEQ ID NO: 49991 - DNA, 25 bp, SARS Virus
ggtttaaaccgaaccggagaataac

SEQ ID NO: 49992 - DNA, 25 bp, SARS Virus
gtttaaaccgaaacggagaataaca

SEQ ID NO: 49993 - DNA, 25 bp, SARS Virus
tttaaaccgaacaggagaataacaa

SEQ ID NO: 49994 - DNA, 25 bp, SARS Virus
ttaaaccgaaccagagaataacaat

SEQ ID NO: 49995 - DNA, 25 bp, SARS Virus
taaaccgaaccgaagaataacaatg

SEQ ID NO: 49996 - DNA, 25 bp, SARS Virus
aaaccgaaccggagaataacaatgt

SEQ ID NO: 49997 - DNA, 25 bp, SARS Virus
aaccgaaccggaaaataacaatgtc

SEQ ID NO: 49998 - DNA, 25 bp, SARS Virus
accgaaccggagaataacaatgtcg

SEQ ID NO: 49999 - DNA, 25 bp, SARS Virus
ccgaaccggagaataacaatgtcga

SEQ ID NO: 50000 - DNA, 25 bp, SARS Virus
cgaaccggagaaaaacaatgtcgag

SEQ ID NO: 50001 - DNA, 25 bp, SARS Virus
gaaccggagaataacaatgtcgaga

SEQ ID NO: 50002 - DNA, 25 bp, SARS Virus
aaccggagaataacaatgtcgagat

SEQ ID NO: 50003 - DNA, 25 bp, SARS Virus
accggagaataaaaatgtcgagatt

SEQ ID NO: 50004 - DNA, 25 bp, SARS Virus
ccggagaataacaatgtcgagattc

SEQ ID NO: 50005 - DNA, 25 bp, SARS Virus
cggagaataacaatgtcgagattct

SEQ ID NO: 50006 - DNA, 25 bp, SARS Virus
ggagaataacaaagtcgagattctc

SEQ ID NO: 50007 - DNA, 25 bp, SARS Virus
gagaataacaatatcgagattctcg

SEQ ID NO: 50008 - DNA, 25 bp, SARS Virus
agaataacaatgacgagattctcgg

SEQ ID NO: 50009 - DNA, 25 bp, SARS Virus
gaataacaatgtagagattctcggt

SEQ ID NO: 50010 - DNA, 25 bp, SARS Virus
aataacaatgtcaagattctcggtt

SEQ ID NO: 50011 - DNA, 25 bp, SARS Virus
ataacaatgtcgagattctcggttg

SEQ ID NO: 50012 - DNA, 25 bp, SARS Virus
taacaatgtcgaaattctcggttga

SEQ ID NO: 50013 - DNA, 25 bp, SARS Virus
aacaatgtcgagattctcggttgag

SEQ ID NO: 50014 - DNA, 25 bp, SARS Virus
acaatgtcgagaatctcggttgagt

SEQ ID NO: 50015 - DNA, 25 bp, SARS Virus
caatgtcgagatactcggttgagtc

SEQ ID NO: 50016 - DNA, 25 bp, SARS Virus
aatgtcgagattatcggttgagtcg

SEQ ID NO: 50017 - DNA, 25 bp, SARS Virus
atgtcgagattcacggttgagtcga

SEQ ID NO: 50018 - DNA, 25 bp, SARS Virus
tgtcgagattctaggttgagtcgac

SEQ ID NO: 50019 - DNA, 25 bp, SARS Virus
gtcgagattctcagttgagtcgaca

SEQ ID NO: 50020 - DNA, 25 bp, SARS Virus
tcgagattctcgattgagtcgacaa

SEQ ID NO: 50021 - DNA, 25 bp, SARS Virus
cgagattctcggatgagtcgacaat

SEQ ID NO: 50022 - DNA, 25 bp, SARS Virus
gagattctcggtagagtcgacaatt

SEQ ID NO: 50023 - DNA, 25 bp, SARS Virus
agattctcggttaagtcgacaattt

SEQ ID NO: 50024 - DNA, 25 bp, SARS Virus
gattctcggttgagtcgacaatttg

SEQ ID NO: 50025 - DNA, 25 bp, SARS Virus
attctcggttgaatcgacaatttga

SEQ ID NO: 50026 - DNA, 25 bp, SARS Virus
ttctcggttgagacgacaatttgat

SEQ ID NO: 50027 - DNA, 25 bp, SARS Virus
tctcggttgagtagacaatttgatg

SEQ ID NO: 50028 - DNA, 25 bp, SARS Virus
ctcggttgagtcaacaatttgatgt

SEQ ID NO: 50029 - DNA, 25 bp, SARS Virus
tcggttgagtcgacaatttgatgtc

SEQ ID NO: 50030 - DNA, 25 bp, SARS Virus
cggttgagtcgaaaatttgatgtct

SEQ ID NO: 50031 - DNA, 25 bp, SARS Virus
ggttgagtcgacaatttgatgtctt

SEQ ID NO: 50032 - DNA, 25 bp, SARS Virus
gttgagtcgacaatttgatgtctta

SEQ ID NO: 50033 - DNA, 25 bp, SARS Virus
ttgagtcgacaaattgatgtcttat

SEQ ID NO: 50034 - DNA, 25 bp, SARS Virus
tgagtcgacaatatgatgtcttatt

SEQ ID NO: 50035 - DNA, 25 bp, SARS Virus
gagtcgacaattagatgtcttatta

SEQ ID NO: 50036 - DNA, 25 bp, SARS Virus
agtcgacaatttaatgtcttattac

SEQ ID NO: 50037 - DNA, 25 bp, SARS Virus
gtcgacaatttgatgtcttattact

SEQ ID NO: 50038 - DNA, 25 bp, SARS Virus
tcgacaatttgaagtcttattactt

SEQ ID NO: 50039 - DNA, 25 bp, SARS Virus
cgacaatttgatatcttattacttg

SEQ ID NO: 50040 - DNA, 25 bp, SARS Virus
gacaatttgatgacttattacttga

SEQ ID NO: 50041 - DNA, 25 bp, SARS Virus
acaatttgatgtattattacttgac

SEQ ID NO: 50042 - DNA, 25 bp, SARS Virus
caatttgatgtcatattacttgact

SEQ ID NO: 50043 - DNA, 25 bp, SARS Virus
aatttgatgtctaattacttgactc

SEQ ID NO: 50044 - DNA, 25 bp, SARS Virus
atttgatgtcttattacttgactca

SEQ ID NO: 50045 - DNA, 25 bp, SARS Virus
tttgatgtcttaatacttgactcag

SEQ ID NO: 50046 - DNA, 25 bp, SARS Virus
ttgatgtcttataacttgactcagg

SEQ ID NO: 50047 - DNA, 25 bp, SARS Virus
tgatgtcttattacttgactcaggt

SEQ ID NO: 50048 - DNA, 25 bp, SARS Virus
gatgtcttattaattgactcaggtc

SEQ ID NO: 50049 - DNA, 25 bp, SARS Virus
atgtcttattacatgactcaggtca

SEQ ID NO: 50050 - DNA, 25 bp, SARS Virus
tgtcttattactagactcaggtcat

SEQ ID NO: 50051 - DNA, 25 bp, SARS Virus
gtcttattacttaactcaggtcatc

SEQ ID NO: 50052 - DNA, 25 bp, SARS Virus
tcttattacttgactcaggtcatcg

SEQ ID NO: 50053 - DNA, 25 bp, SARS Virus
cttattacttgaatcaggtcatcgt

SEQ ID NO: 50054 - DNA, 25 bp, SARS Virus
ttattacttgacacaggtcatcgtg

SEQ ID NO: 50055 - DNA, 25 bp, SARS Virus
tattacttgactaaggtcatcgtga

SEQ ID NO: 50056 - DNA, 25 bp, SARS Virus
attacttgactcaggtcatcgtgat

SEQ ID NO: 50057 - DNA, 25 bp, SARS Virus
ttacttgactcaagtcatcgtgatg

SEQ ID NO: 50058 - DNA, 25 bp, SARS Virus
tacttgactcagatcatcgtgatgc

SEQ ID NO: 50059 - DNA, 25 bp, SARS Virus
acttgactcaggacatcgtgatgct

SEQ ID NO: 50060 - DNA, 25 bp, SARS Virus
cttgactcaggtaatcgtgatgctg

SEQ ID NO: 50061 - DNA, 25 bp, SARS Virus
ttgactcaggtcatcgtgatgctgt

SEQ ID NO: 50062 - DNA, 25 bp, SARS Virus
tgactcaggtcaacgtgatgctgtc

SEQ ID NO: 50063 - DNA, 25 bp, SARS Virus
gactcaggtcatagtgatgctgtct

SEQ ID NO: 50064 - DNA, 25 bp, SARS Virus
actcaggtcatcatgatgctgtcta

SEQ ID NO: 50065 - DNA, 25 bp, SARS Virus
ctcaggtcatcgagatgctgtctac

SEQ ID NO: 50066 - DNA, 25 bp, SARS Virus
tcaggtcatcgtaatgctgtctaca

SEQ ID NO: 50067 - DNA, 25 bp, SARS Virus
caggtcatcgtgatgctgtctacag

SEQ ID NO: 50068 - DNA, 25 bp, SARS Virus
aggtcatcgtgaagctgtctacagg

SEQ ID NO: 50069 - DNA, 25 bp, SARS Virus
ggtcatcgtgatactgtctacagga

SEQ ID NO: 50070 - DNA, 25 bp, SARS Virus
gtcatcgtgatgatgtctacaggac

SEQ ID NO: 50071 - DNA, 25 bp, SARS Virus
tcatcgtgatgcagtctacaggaca

SEQ ID NO: 50072 - DNA, 25 bp, SARS Virus
catcgtgatgctatctacaggacac

SEQ ID NO: 50073 - DNA, 25 bp, SARS Virus
atcgtgatgctgactacaggacacg

SEQ ID NO: 50074 - DNA, 25 bp, SARS Virus
tcgtgatgctgtatacaggacacgc

SEQ ID NO: 50075 - DNA, 25 bp, SARS Virus
cgtgatgctgtcaacaggacacgcc

SEQ ID NO: 50076 - DNA, 25 bp, SARS Virus
gtgatgctgtctacaggacacgccg

SEQ ID NO: 50077 - DNA, 25 bp, SARS Virus
tgatgctgtctaaaggacacgccga

SEQ ID NO: 50078 - DNA, 25 bp, SARS Virus
gatgctgtctacaggacacgccgac

SEQ ID NO: 50079 - DNA, 25 bp, SARS Virus
atgctgtctacaagacacgccgacc

SEQ ID NO: 50080 - DNA, 25 bp, SARS Virus
tgctgtctacagaacacgccgacca

SEQ ID NO: 50081 - DNA, 25 bp, SARS Virus
gctgtctacaggacacgccgaccat

SEQ ID NO: 50082 - DNA, 25 bp, SARS Virus
ctgtctacaggaaacgccgaccatg

SEQ ID NO: 50083 - DNA, 25 bp, SARS Virus
tgtctacaggacacgccgaccatgg

SEQ ID NO: 50084 - DNA, 25 bp, SARS Virus
gtctacaggacaagccgaccatggt

SEQ ID NO: 50085 - DNA, 25 bp, SARS Virus
tctacaggacacaccgaccatggtg

SEQ ID NO: 50086 - DNA, 25 bp, SARS Virus
ctacaggacacgacgaccatggtgt

SEQ ID NO: 50087 - DNA, 25 bp, SARS Virus
tacaggacacgcagaccatggtgtg

SEQ ID NO: 50088 - DNA, 25 bp, SARS Virus
acaggacacgccaaccatggtgtgt

SEQ ID NO: 50089 - DNA, 25 bp, SARS Virus
caggacacgccgaccatggtgtgtt

SEQ ID NO: 50090 - DNA, 25 bp, SARS Virus
aggacacgccgaacatggtgtgttt

SEQ ID NO: 50091 - DNA, 25 bp, SARS Virus
ggacacgccgacaatggtgtgtttg

SEQ ID NO: 50092 - DNA, 25 bp, SARS Virus
gacacgccgaccatggtgtgtttgt

SEQ ID NO: 50093 - DNA, 25 bp, SARS Virus
acacgccgaccaaggtgtgtttgtc

SEQ ID NO: 50094 - DNA, 25 bp, SARS Virus
cacgccgaccatagtgtgtttgtcg

SEQ ID NO: 50095 - DNA, 25 bp, SARS Virus
acgccgaccatgatgtgtttgtcga

SEQ ID NO: 50096 - DNA, 25 bp, SARS Virus
cgccgaccatggagtgtttgtcgaa

SEQ ID NO: 50097 - DNA, 25 bp, SARS Virus
gccgaccatggtatgtttgtcgaac

SEQ ID NO: 50098 - DNA, 25 bp, SARS Virus
ccgaccatggtgagtttgtcgaaca

SEQ ID NO: 50099 - DNA, 25 bp, SARS Virus
cgaccatggtgtatttgtcgaacat

SEQ ID NO: 50100 - DNA, 25 bp, SARS Virus
gaccatggtgtgattgtcgaacatg

SEQ ID NO: 50101 - DNA, 25 bp, SARS Virus
accatggtgtgtatgtcgaacatga

SEQ ID NO: 50102 - DNA, 25 bp, SARS Virus
ccatggtgtgttagtcgaacatgac

SEQ ID NO: 50103 - DNA, 25 bp, SARS Virus
catggtgtgtttatcgaacatgact

SEQ ID NO: 50104 - DNA, 25 bp, SARS Virus
atggtgtgtttgacgaacatgacta

SEQ ID NO: 50105 - DNA, 25 bp, SARS Virus
tggtgtgtttgtagaacatgactac

SEQ ID NO: 50106 - DNA, 25 bp, SARS Virus
ggtgtgtttgtcaaacatgactact

SEQ ID NO: 50107 - DNA, 25 bp, SARS Virus
gtgtgtttgtcgaacatgactactg

SEQ ID NO: 50108 - DNA, 25 bp, SARS Virus
tgtgtttgtcgaacatgactactgt

SEQ ID NO: 50109 - DNA, 25 bp, SARS Virus
gtgtttgtcgaaaatgactactgtt

SEQ ID NO: 50110 - DNA, 25 bp, SARS Virus
tgtttgtcgaacatgactactgtta

SEQ ID NO: 50111 - DNA, 25 bp, SARS Virus
gtttgtcgaacaagactactgttac

SEQ ID NO: 50112 - DNA, 25 bp, SARS Virus
tttgtcgaacataactactgttacg

SEQ ID NO: 50113 - DNA, 25 bp, SARS Virus
ttgtcgaacatgactactgttacgt

SEQ ID NO: 50114 - DNA, 25 bp, SARS Virus
tgtcgaacatgaatactgttacgtg

SEQ ID NO: 50115 - DNA, 25 bp, SARS Virus
gtcgaacatgacaactgttacgtga

SEQ ID NO: 50116 - DNA, 25 bp, SARS Virus
tcgaacatgactactgttacgtgaa

SEQ ID NO: 50117 - DNA, 25 bp, SARS Virus
cgaacatgactaatgttacgtgaac

SEQ ID NO: 50118 - DNA, 25 bp, SARS Virus
gaacatgactacagttacgtgaacg

SEQ ID NO: 50119 - DNA, 25 bp, SARS Virus
aacatgactactattacgtgaacgg

SEQ ID NO: 50120 - DNA, 25 bp, SARS Virus
acatgactactgatacgtgaacgga

SEQ ID NO: 50121 - DNA, 25 bp, SARS Virus
catgactactgtaacgtgaacggat

SEQ ID NO: 50122 - DNA, 25 bp, SARS Virus
atgactactgttacgtgaacggatg

SEQ ID NO: 50123 - DNA, 25 bp, SARS Virus
tgactactgttaagtgaacggatga

SEQ ID NO: 50124 - DNA, 25 bp, SARS Virus
gactactgttacatgaacggatgat

SEQ ID NO: 50125 - DNA, 25 bp, SARS Virus
actactgttacgagaacggatgata

SEQ ID NO: 50126 - DNA, 25 bp, SARS Virus
ctactgttacgtaaacggatgatat

SEQ ID NO: 50127 - DNA, 25 bp, SARS Virus
tactgttacgtgaacggatgatatt

SEQ ID NO: 50128 - DNA, 25 bp, SARS Virus
actgttacgtgaacggatgatattg

SEQ ID NO: 50129 - DNA, 25 bp, SARS Virus
ctgttacgtgaaaggatgatattgt

SEQ ID NO: 50130 - DNA, 25 bp, SARS Virus
tgttacgtgaacagatgatattgtt

SEQ ID NO: 50131 - DNA, 25 bp, SARS Virus
gttacgtgaacgaatgatattgtta

SEQ ID NO: 50132 - DNA, 25 bp, SARS Virus
ttacgtgaacggatgatattgttaa

SEQ ID NO: 50133 - DNA, 25 bp, SARS Virus
tacgtgaacggaagatattgttaag

SEQ ID NO: 50134 - DNA, 25 bp, SARS Virus
acgtgaacggataatattgttaagc

SEQ ID NO: 50135 - DNA, 25 bp, SARS Virus
cgtgaacggatgatattgttaagct

SEQ ID NO: 50136 - DNA, 25 bp, SARS Virus
gtgaacggatgaaattgttaagctt

SEQ ID NO: 50137 - DNA, 25 bp, SARS Virus
tgaacggatgatattgttaagcttc

SEQ ID NO: 50138 - DNA, 25 bp, SARS Virus
gaacggatgataatgttaagcttcc

SEQ ID NO: 50139 - DNA, 25 bp, SARS Virus
aacggatgatatagttaagcttccc

SEQ ID NO: 50140 - DNA, 25 bp, SARS Virus
acggatgatattattaagcttccct

SEQ ID NO: 50141 - DNA, 25 bp, SARS Virus
cggatgatattgataagcttccctc

SEQ ID NO: 50142 - DNA, 25 bp, SARS Virus
ggatgatattgtaaagcttccctcc

SEQ ID NO: 50143 - DNA, 25 bp, SARS Virus
gatgatattgttaagcttccctcca

SEQ ID NO: 50144 - DNA, 25 bp, SARS Virus
atgatattgttaagcttccctccat

SEQ ID NO: 50145 - DNA, 25 bp, SARS Virus
tgatattgttaaacttccctccatc

SEQ ID NO: 50146 - DNA, 25 bp, SARS Virus
gatattgttaagattccctccatcc

SEQ ID NO: 50147 - DNA, 25 bp, SARS Virus
atattgttaagcatccctccatcca

SEQ ID NO: 50148 - DNA, 25 bp, SARS Virus
tattgttaagctaccctccatccaa

SEQ ID NO: 50149 - DNA, 25 bp, SARS Virus
attgttaagcttacctccatccaaa

SEQ ID NO: 50150 - DNA, 25 bp, SARS Virus
ttgttaagcttcactccatccaaac

SEQ ID NO: 50151 - DNA, 25 bp, SARS Virus
tgttaagcttccatccatccaaaca

SEQ ID NO: 50152 - DNA, 25 bp, SARS Virus
gttaagcttcccaccatccaaacac

SEQ ID NO: 50153 - DNA, 25 bp, SARS Virus
ttaagcttccctacatccaaacacg

SEQ ID NO: 50154 - DNA, 25 bp, SARS Virus
taagcttccctcaatccaaacacga

SEQ ID NO: 50155 - DNA, 25 bp, SARS Virus
aagcttccctccatccaaacacgac

SEQ ID NO: 50156 - DNA, 25 bp, SARS Virus
agcttccctccaaccaaacacgacc

SEQ ID NO: 50157 - DNA, 25 bp, SARS Virus
gcttccctccatacaaacacgaccg

SEQ ID NO: 50158 - DNA, 25 bp, SARS Virus
cttccctccatcaaaacacgaccgt

SEQ ID NO: 50159 - DNA, 25 bp, SARS Virus
ttccctccatccaaacacgaccgta

SEQ ID NO: 50160 - DNA, 25 bp, SARS Virus
tccctccatccaaacacgaccgtaa

SEQ ID NO: 50161 - DNA, 25 bp, SARS Virus
ccctccatccaaacacgaccgtaat

SEQ ID NO: 50162 - DNA, 25 bp, SARS Virus
cctccatccaaaaacgaccgtaatg

SEQ ID NO: 50163 - DNA, 25 bp, SARS Virus
ctccatccaaacacgaccgtaatga

SEQ ID NO: 50164 - DNA, 25 bp, SARS Virus
tccatccaaacaagaccgtaatgat

SEQ ID NO: 50165 - DNA, 25 bp, SARS Virus
ccatccaaacacaaccgtaatgata

SEQ ID NO: 50166 - DNA, 25 bp, SARS Virus
catccaaacacgaccgtaatgatag

SEQ ID NO: 50167 - DNA, 25 bp, SARS Virus
atccaaacacgaacgtaatgatagt

SEQ ID NO: 50168 - DNA, 25 bp, SARS Virus
tccaaacacgacagtaatgatagtc

SEQ ID NO: 50169 - DNA, 25 bp, SARS Virus
ccaaacacgaccataatgatagtct

SEQ ID NO: 50170 - DNA, 25 bp, SARS Virus
caaacacgaccgaaatgatagtctg

SEQ ID NO: 50171 - DNA, 25 bp, SARS Virus
aaacacgaccgtaatgatagtctgg

SEQ ID NO: 50172 - DNA, 25 bp, SARS Virus
aacacgaccgtaatgatagtctggt

SEQ ID NO: 50173 - DNA, 25 bp, SARS Virus
acacgaccgtaaagatagtctggtg

SEQ ID NO: 50174 - DNA, 25 bp, SARS Virus
cacgaccgtaataatagtctggtgg

SEQ ID NO: 50175 - DNA, 25 bp, SARS Virus
acgaccgtaatgatagtctggtggt

SEQ ID NO: 50176 - DNA, 25 bp, SARS Virus
cgaccgtaatgaaagtctggtggtt

SEQ ID NO: 50177 - DNA, 25 bp, SARS Virus
gaccgtaatgatagtctggtggttc

SEQ ID NO: 50178 - DNA, 25 bp, SARS Virus
accgtaatgataatctggtggttct

SEQ ID NO: 50179 - DNA, 25 bp, SARS Virus
ccgtaatgatagactggtggttcta

SEQ ID NO: 50180 - DNA, 25 bp, SARS Virus
cgtaatgatagtatggtggttctag

SEQ ID NO: 50181 - DNA, 25 bp, SARS Virus
gtaatgatagtcaggtggttctaga

SEQ ID NO: 50182 - DNA, 25 bp, SARS Virus
taatgatagtctagtggttctagag

SEQ ID NO: 50183 - DNA, 25 bp, SARS Virus
aatgatagtctgatggttctagagt

SEQ ID NO: 50184 - DNA, 25 bp, SARS Virus
atgatagtctggaggttctagagtt

SEQ ID NO: 50185 - DNA, 25 bp, SARS Virus
tgatagtctggtagttctagagttt

SEQ ID NO: 50186 - DNA, 25 bp, SARS Virus
gatagtctggtgattctagagttta

SEQ ID NO: 50187 - DNA, 25 bp, SARS Virus
atagtctggtggatctagagtttac

SEQ ID NO: 50188 - DNA, 25 bp, SARS Virus
tagtctggtggtactagagtttacc

SEQ ID NO: 50189 - DNA, 25 bp, SARS Virus
agtctggtggttatagagtttaccc

SEQ ID NO: 50190 - DNA, 25 bp, SARS Virus
gtctggtggttcaagagtttacccg

SEQ ID NO: 50191 - DNA, 25 bp, SARS Virus
tctggtggttctagagtttacccga

SEQ ID NO: 50192 - DNA, 25 bp, SARS Virus
ctggtggttctaaagtttacccgat

SEQ ID NO: 50193 - DNA, 25 bp, SARS Virus
tggtggttctagagtttacccgatc

SEQ ID NO: 50194 - DNA, 25 bp, SARS Virus
ggtggttctagaatttacccgatct

SEQ ID NO: 50195 - DNA, 25 bp, SARS Virus
gtggttctagagattacccgatcta

SEQ ID NO: 50196 - DNA, 25 bp, SARS Virus
tggttctagagtatacccgatctaa

SEQ ID NO: 50197 - DNA, 25 bp, SARS Virus
ggttctagagttaacccgatctaag

SEQ ID NO: 50198 - DNA, 25 bp, SARS Virus
gttctagagtttacccgatctaagg

SEQ ID NO: 50199 - DNA, 25 bp, SARS Virus
ttctagagtttaaccgatctaaggg

SEQ ID NO: 50200 - DNA, 25 bp, SARS Virus
tctagagtttacacgatctaaggga

SEQ ID NO: 50201 - DNA, 25 bp, SARS Virus
ctagagtttaccagatctaagggat

SEQ ID NO: 50202 - DNA, 25 bp, SARS Virus
tagagtttacccaatctaagggatt

SEQ ID NO: 50203 - DNA, 25 bp, SARS Virus
agagtttacccgatctaagggattc

SEQ ID NO: 50204 - DNA, 25 bp, SARS Virus
gagtttacccgaactaagggattct

SEQ ID NO: 50205 - DNA, 25 bp, SARS Virus
agtttacccgatataagggattctc

SEQ ID NO: 50206 - DNA, 25 bp, SARS Virus
gtttacccgatcaaagggattctca

SEQ ID NO: 50207 - DNA, 25 bp, SARS Virus
tttacccgatctaagggattctcac

SEQ ID NO: 50208 - DNA, 25 bp, SARS Virus
ttacccgatctaagggattctcact

SEQ ID NO: 50209 - DNA, 25 bp, SARS Virus
tacccgatctaaaggattctcacta

SEQ ID NO: 50210 - DNA, 25 bp, SARS Virus
acccgatctaagagattctcactac

SEQ ID NO: 50211 - DNA, 25 bp, SARS Virus
cccgatctaaggaattctcactacc

SEQ ID NO: 50212 - DNA, 25 bp, SARS Virus
ccgatctaagggattctcactacca

SEQ ID NO: 50213 - DNA, 25 bp, SARS Virus
cgatctaagggaatctcactaccat

SEQ ID NO: 50214 - DNA, 25 bp, SARS Virus
gatctaagggatactcactaccatg

SEQ ID NO: 50215 - DNA, 25 bp, SARS Virus
atctaagggattatcactaccatgt

SEQ ID NO: 50216 - DNA, 25 bp, SARS Virus
tctaagggattcacactaccatgtc

SEQ ID NO: 50217 - DNA, 25 bp, SARS Virus
ctaagggattctaactaccatgtcc

SEQ ID NO: 50218 - DNA, 25 bp, SARS Virus
taagggattctcactaccatgtcca

SEQ ID NO: 50219 - DNA, 25 bp, SARS Virus
aagggattctcaataccatgtccat

SEQ ID NO: 50220 - DNA, 25 bp, SARS Virus
agggattctcacaaccatgtccatg

SEQ ID NO: 50221 - DNA, 25 bp, SARS Virus
gggattctcactaccatgtccatgt

SEQ ID NO: 50222 - DNA, 25 bp, SARS Virus
ggattctcactaacatgtccatgtt

SEQ ID NO: 50223 - DNA, 25 bp, SARS Virus
gattctcactacaatgtccatgtta

SEQ ID NO: 50224 - DNA, 25 bp, SARS Virus
attctcactaccatgtccatgttaa

SEQ ID NO: 50225 - DNA, 25 bp, SARS Virus
ttctcactaccaagtccatgttaaa

SEQ ID NO: 50226 - DNA, 25 bp, SARS Virus
tctcactaccatatccatgttaaat

SEQ ID NO: 50227 - DNA, 25 bp, SARS Virus
ctcactaccatgaccatgttaaatg

SEQ ID NO: 50228 - DNA, 25 bp, SARS Virus
tcactaccatgtacatgttaaatgt

SEQ ID NO: 50229 - DNA, 25 bp, SARS Virus
cactaccatgtcaatgttaaatgtg

SEQ ID NO: 50230 - DNA, 25 bp, SARS Virus
actaccatgtccatgttaaatgtgt

SEQ ID NO: 50231 - DNA, 25 bp, SARS Virus
ctaccatgtccaagttaaatgtgtc

SEQ ID NO: 50232 - DNA, 25 bp, SARS Virus
taccatgtccatattaaatgtgtct

SEQ ID NO: 50233 - DNA, 25 bp, SARS Virus
accatgtccatgataaatgtgtctt

SEQ ID NO: 50234 - DNA, 25 bp, SARS Virus
ccatgtccatgtaaaatgtgtcttg

SEQ ID NO: 50235 - DNA, 25 bp, SARS Virus
catgtccatgttaaatgtgtcttga

SEQ ID NO: 50236 - DNA, 25 bp, SARS Virus
atgtccatgttaaatgtgtcttgac

SEQ ID NO: 50237 - DNA, 25 bp, SARS Virus
tgtccatgttaaatgtgtcttgacc

SEQ ID NO: 50238 - DNA, 25 bp, SARS Virus
gtccatgttaaaagtgtcttgacct

SEQ ID NO: 50239 - DNA, 25 bp, SARS Virus
tccatgttaaatatgtcttgacctt

SEQ ID NO: 50240 - DNA, 25 bp, SARS Virus
ccatgttaaatgagtcttgaccttg

SEQ ID NO: 50241 - DNA, 25 bp, SARS Virus
catgttaaatgtatcttgaccttgg

SEQ ID NO: 50242 - DNA, 25 bp, SARS Virus
atgttaaatgtgacttgaccttggt

SEQ ID NO: 50243 - DNA, 25 bp, SARS Virus
tgttaaatgtgtattgaccttggtg

SEQ ID NO: 50244 - DNA, 25 bp, SARS Virus
gttaaatgtgtcatgaccttggtgg

SEQ ID NO: 50245 - DNA, 25 bp, SARS Virus
ttaaatgtgtctagaccttggtgga

SEQ ID NO: 50246 - DNA, 25 bp, SARS Virus
taaatgtgtcttaaccttggtggaa

SEQ ID NO: 50247 - DNA, 25 bp, SARS Virus
aaatgtgtcttgaccttggtggaac

SEQ ID NO: 50248 - DNA, 25 bp, SARS Virus
aatgtgtcttgaacttggtggaaca

SEQ ID NO: 50249 - DNA, 25 bp, SARS Virus
atgtgtcttgacattggtggaacat

SEQ ID NO: 50250 - DNA, 25 bp, SARS Virus
tgtgtcttgaccatggtggaacatc

SEQ ID NO: 50251 - DNA, 25 bp, SARS Virus
gtgtcttgacctaggtggaacatcc

SEQ ID NO: 50252 - DNA, 25 bp, SARS Virus
tgtcttgaccttagtggaacatcca

SEQ ID NO: 50253 - DNA, 25 bp, SARS Virus
gtcttgaccttgatggaacatccaa

SEQ ID NO: 50254 - DNA, 25 bp, SARS Virus
tcttgaccttggaggaacatccaaa

SEQ ID NO: 50255 - DNA, 25 bp, SARS Virus
cttgaccttggtagaacatccaaac

SEQ ID NO: 50256 - DNA, 25 bp, SARS Virus
ttgaccttggtgaaacatccaaaca

SEQ ID NO: 50257 - DNA, 25 bp, SARS Virus
tgaccttggtggaacatccaaacaa

SEQ ID NO: 50258 - DNA, 25 bp, SARS Virus
gaccttggtggaacatccaaacaat

SEQ ID NO: 50259 - DNA, 25 bp, SARS Virus
accttggtggaaaatccaaacaatg

SEQ ID NO: 50260 - DNA, 25 bp, SARS Virus
ccttggtggaacatccaaacaatgt

SEQ ID NO: 50261 - DNA, 25 bp, SARS Virus
cttggtggaacaaccaaacaatgtc

SEQ ID NO: 50262 - DNA, 25 bp, SARS Virus
ttggtggaacatacaaacaatgtct

SEQ ID NO: 50263 - DNA, 25 bp, SARS Virus
tggtggaacatcaaaacaatgtctg

SEQ ID NO: 50264 - DNA, 25 bp, SARS Virus
ggtggaacatccaaacaatgtctgt

SEQ ID NO: 50265 - DNA, 25 bp, SARS Virus
gtggaacatccaaacaatgtctgtg

SEQ ID NO: 50266 - DNA, 25 bp, SARS Virus
tggaacatccaaacaatgtctgtgt

SEQ ID NO: 50267 - DNA, 25 bp, SARS Virus
ggaacatccaaaaaatgtctgtgtg

SEQ ID NO: 50268 - DNA, 25 bp, SARS Virus
gaacatccaaacaatgtctgtgtgg

SEQ ID NO: 50269 - DNA, 25 bp, SARS Virus
aacatccaaacaatgtctgtgtggt

SEQ ID NO: 50270 - DNA, 25 bp, SARS Virus
acatccaaacaaagtctgtgtggtt

SEQ ID NO: 50271 - DNA, 25 bp, SARS Virus
catccaaacaatatctgtgtggttt

SEQ ID NO: 50272 - DNA, 25 bp, SARS Virus
atccaaacaatgactgtgtggtttt

SEQ ID NO: 50273 - DNA, 25 bp, SARS Virus
tccaaacaatgtatgtgtggttttc

SEQ ID NO: 50274 - DNA, 25 bp, SARS Virus
ccaaacaatgtcagtgtggttttcc

SEQ ID NO: 50275 - DNA, 25 bp, SARS Virus
caaacaatgtctatgtggttttccc

SEQ ID NO: 50276 - DNA, 25 bp, SARS Virus
aaacaatgtctgagtggttttcccg

SEQ ID NO: 50277 - DNA, 25 bp, SARS Virus
aacaatgtctgtatggttttcccgg

SEQ ID NO: 50278 - DNA, 25 bp, SARS Virus
acaatgtctgtgaggttttcccgga

SEQ ID NO: 50279 - DNA, 25 bp, SARS Virus
caatgtctgtgtagttttcccggat

SEQ ID NO: 50280 - DNA, 25 bp, SARS Virus
aatgtctgtgtgattttcccggatt

SEQ ID NO: 50281 - DNA, 25 bp, SARS Virus
atgtctgtgtggatttcccggattt

SEQ ID NO: 50282 - DNA, 25 bp, SARS Virus
tgtctgtgtggtattcccggatttc

SEQ ID NO: 50283 - DNA, 25 bp, SARS Virus
gtctgtgtggttatcccggatttca

SEQ ID NO: 50284 - DNA, 25 bp, SARS Virus
tctgtgtggtttacccggatttcac

SEQ ID NO: 50285 - DNA, 25 bp, SARS Virus
ctgtgtggttttaccggatttcact

SEQ ID NO: 50286 - DNA, 25 bp, SARS Virus
tgtgtggttttcacggatttcactt

SEQ ID NO: 50287 - DNA, 25 bp, SARS Virus
gtgtggttttccaggatttcacttt

SEQ ID NO: 50288 - DNA, 25 bp, SARS Virus
tgtggttttcccagatttcacttta

SEQ ID NO: 50289 - DNA, 25 bp, SARS Virus
gtggttttcccgaatttcactttat

SEQ ID NO: 50290 - DNA, 25 bp, SARS Virus
tggttttcccggatttcactttatg

SEQ ID NO: 50291 - DNA, 25 bp, SARS Virus
ggttttcccggaattcactttatga

SEQ ID NO: 50292 - DNA, 25 bp, SARS Virus
gttttcccggatatcactttatgaa

SEQ ID NO: 50293 - DNA, 25 bp, SARS Virus
ttttcccggattacactttatgaac

SEQ ID NO: 50294 - DNA, 25 bp, SARS Virus
tttcccggatttaactttatgaaca

SEQ ID NO: 50295 - DNA, 25 bp, SARS Virus
ttcccggatttcactttatgaacat

SEQ ID NO: 50296 - DNA, 25 bp, SARS Virus
tcccggatttcaatttatgaacatg

SEQ ID NO: 50297 - DNA, 25 bp, SARS Virus
cccggatttcacattatgaacatga

SEQ ID NO: 50298 - DNA, 25 bp, SARS Virus
ccggatttcactatatgaacatgaa

SEQ ID NO: 50299 - DNA, 25 bp, SARS Virus
cggatttcacttaatgaacatgaag

SEQ ID NO: 50300 - DNA, 25 bp, SARS Virus
ggatttcactttatgaacatgaagt

SEQ ID NO: 50301 - DNA, 25 bp, SARS Virus
gatttcactttaagaacatgaagta

SEQ ID NO: 50302 - DNA, 25 bp, SARS Virus
atttcactttataaacatgaagtag

SEQ ID NO: 50303 - DNA, 25 bp, SARS Virus
tttcactttatgaacatgaagtagt

SEQ ID NO: 50304 - DNA, 25 bp, SARS Virus
ttcactttatgaacatgaagtagtt

SEQ ID NO: 50305 - DNA, 25 bp, SARS Virus
tcactttatgaaaatgaagtagttt

SEQ ID NO: 50306 - DNA, 25 bp, SARS Virus
cactttatgaacatgaagtagtttc

SEQ ID NO: 50307 - DNA, 25 bp, SARS Virus
actttatgaacaagaagtagtttcc

SEQ ID NO: 50308 - DNA, 25 bp, SARS Virus
ctttatgaacataaagtagtttccg

SEQ ID NO: 50309 - DNA, 25 bp, SARS Virus
tttatgaacatgaagtagtttccga

SEQ ID NO: 50310 - DNA, 25 bp, SARS Virus
ttatgaacatgaagtagtttccgaa

SEQ ID NO: 50311 - DNA, 25 bp, SARS Virus
tatgaacatgaaatagtttccgaat

SEQ ID NO: 50312 - DNA, 25 bp, SARS Virus
atgaacatgaagaagtttccgaatt

SEQ ID NO: 50313 - DNA, 25 bp, SARS Virus
tgaacatgaagtagtttccgaattt

SEQ ID NO: 50314 - DNA, 25 bp, SARS Virus
gaacatgaagtaatttccgaatttg

SEQ ID NO: 50315 - DNA, 25 bp, SARS Virus
aacatgaagtagattccgaatttgt

SEQ ID NO: 50316 - DNA, 25 bp, SARS Virus
acatgaagtagtatccgaatttgtt

SEQ ID NO: 50317 - DNA, 25 bp, SARS Virus
catgaagtagttaccgaatttgttg

SEQ ID NO: 50318 - DNA, 25 bp, SARS Virus
atgaagtagtttacgaatttgttgg

SEQ ID NO: 50319 - DNA, 25 bp, SARS Virus
tgaagtagtttcagaatttgttgga

SEQ ID NO: 50320 - DNA, 25 bp, SARS Virus
gaagtagtttccaaatttgttggat

SEQ ID NO: 50321 - DNA, 25 bp, SARS Virus
aagtagtttccgaatttgttggatt

SEQ ID NO: 50322 - DNA, 25 bp, SARS Virus
agtagtttccgaatttgttggattt

SEQ ID NO: 50323 - DNA, 25 bp, SARS Virus
gtagtttccgaaattgttggattta

SEQ ID NO: 50324 - DNA, 25 bp, SARS Virus
tagtttccgaatatgttggatttat

SEQ ID NO: 50325 - DNA, 25 bp, SARS Virus
agtttccgaattagttggatttatc

SEQ ID NO: 50326 - DNA, 25 bp, SARS Virus
gtttccgaatttattggatttatct

SEQ ID NO: 50327 - DNA, 25 bp, SARS Virus
tttccgaatttgatggatttatctc

SEQ ID NO: 50328 - DNA, 25 bp, SARS Virus
ttccgaatttgtaggatttatctcc

SEQ ID NO: 50329 - DNA, 25 bp, SARS Virus
tccgaatttgttagatttatctcca

SEQ ID NO: 50330 - DNA, 25 bp, SARS Virus
ccgaatttgttgaatttatctccat

SEQ ID NO: 50331 - DNA, 25 bp, SARS Virus
cgaatttgttggatttatctccata

SEQ ID NO: 50332 - DNA, 25 bp, SARS Virus
gaatttgttggaattatctccatac

SEQ ID NO: 50333 - DNA, 25 bp, SARS Virus
aatttgttggatatatctccatacc

SEQ ID NO: 50334 - DNA, 25 bp, SARS Virus
atttgttggattaatctccatacca

SEQ ID NO: 50335 - DNA, 25 bp, SARS Virus
tttgttggatttatctccataccac

SEQ ID NO: 50336 - DNA, 25 bp, SARS Virus
ttgttggatttaactccataccacg

SEQ ID NO: 50337 - DNA, 25 bp, SARS Virus
tgttggatttatatccataccacga

SEQ ID NO: 50338 - DNA, 25 bp, SARS Virus
gttggatttatcaccataccacgac

SEQ ID NO: 50339 - DNA, 25 bp, SARS Virus
ttggatttatctacataccacgacc

SEQ ID NO: 50340 - DNA, 25 bp, SARS Virus
tggatttatctcaataccacgaccc

SEQ ID NO: 50341 - DNA, 25 bp, SARS Virus
ggatttatctccataccacgacccg

SEQ ID NO: 50342 - DNA, 25 bp, SARS Virus
gatttatctccaaaccacgacccgt

SEQ ID NO: 50343 - DNA, 25 bp, SARS Virus
atttatctccataccacgacccgtc

SEQ ID NO: 50344 - DNA, 25 bp, SARS Virus
tttatctccataacacgacccgtca

SEQ ID NO: 50345 - DNA, 25 bp, SARS Virus
ttatctccatacaacgacccgtcaa

SEQ ID NO: 50346 - DNA, 25 bp, SARS Virus
tatctccataccacgacccgtcaaa

SEQ ID NO: 50347 - DNA, 25 bp, SARS Virus
atctccataccaagacccgtcaaat

SEQ ID NO: 50348 - DNA, 25 bp, SARS Virus
tctccataccacaacccgtcaaatc

SEQ ID NO: 50349 - DNA, 25 bp, SARS Virus
ctccataccacgacccgtcaaatcg

SEQ ID NO: 50350 - DNA, 25 bp, SARS Virus
tccataccacgaaccgtcaaatcga

SEQ ID NO: 50351 - DNA, 25 bp, SARS Virus
ccataccacgacacgtcaaatcgac

SEQ ID NO: 50352 - DNA, 25 bp, SARS Virus
cataccacgaccagtcaaatcgacg

SEQ ID NO: 50353 - DNA, 25 bp, SARS Virus
ataccacgacccatcaaatcgacga

SEQ ID NO: 50354 - DNA, 25 bp, SARS Virus
taccacgacccgacaaatcgacgat

SEQ ID NO: 50355 - DNA, 25 bp, SARS Virus
accacgacccgtaaaatcgacgatg

SEQ ID NO: 50356 - DNA, 25 bp, SARS Virus
ccacgacccgtcaaatcgacgatgt

SEQ ID NO: 50357 - DNA, 25 bp, SARS Virus
cacgacccgtcaaatcgacgatgtc

SEQ ID NO: 50358 - DNA, 25 bp, SARS Virus
acgacccgtcaaatcgacgatgtca

SEQ ID NO: 50359 - DNA, 25 bp, SARS Virus
cgacccgtcaaaacgacgatgtcat

SEQ ID NO: 50360 - DNA, 25 bp, SARS Virus
gacccgtcaaatagacgatgtcatg

SEQ ID NO: 50361 - DNA, 25 bp, SARS Virus
acccgtcaaatcaacgatgtcatgc

SEQ ID NO: 50362 - DNA, 25 bp, SARS Virus
cccgtcaaatcgacgatgtcatgca

SEQ ID NO: 50363 - DNA, 25 bp, SARS Virus
ccgtcaaatcgaagatgtcatgcag

SEQ ID NO: 50364 - DNA, 25 bp, SARS Virus
cgtcaaatcgacaatgtcatgcaga

SEQ ID NO: 50365 - DNA, 25 bp, SARS Virus
gtcaaatcgacgatgtcatgcagaa

SEQ ID NO: 50366 - DNA, 25 bp, SARS Virus
tcaaatcgacgaagtcatgcagaag

SEQ ID NO: 50367 - DNA, 25 bp, SARS Virus
caaatcgacgatatcatgcagaagt

SEQ ID NO: 50368 - DNA, 25 bp, SARS Virus
aaatcgacgatgacatgcagaagtc

SEQ ID NO: 50369 - DNA, 25 bp, SARS Virus
aatcgacgatgtaatgcagaagtcc

SEQ ID NO: 50370 - DNA, 25 bp, SARS Virus
atcgacgatgtcatgcagaagtccg

SEQ ID NO: 50371 - DNA, 25 bp, SARS Virus
tcgacgatgtcaagcagaagtccga

SEQ ID NO: 50372 - DNA, 25 bp, SARS Virus
cgacgatgtcatacagaagtccgac

SEQ ID NO: 50373 - DNA, 25 bp, SARS Virus
gacgatgtcatgaagaagtccgacc

SEQ ID NO: 50374 - DNA, 25 bp, SARS Virus
acgatgtcatgcagaagtccgacct

SEQ ID NO: 50375 - DNA, 25 bp, SARS Virus
cgatgtcatgcaaaagtccgacctt

SEQ ID NO: 50376 - DNA, 25 bp, SARS Virus
gatgtcatgcagaagtccgaccttt

SEQ ID NO: 50377 - DNA, 25 bp, SARS Virus
atgtcatgcagaagtccgaccttta

SEQ ID NO: 50378 - DNA, 25 bp, SARS Virus
tgtcatgcagaaatccgacctttac

SEQ ID NO: 50379 - DNA, 25 bp, SARS Virus
gtcatgcagaagaccgacctttacg

SEQ ID NO: 50380 - DNA, 25 bp, SARS Virus
tcatgcagaagtacgacctttacga

SEQ ID NO: 50381 - DNA, 25 bp, SARS Virus
catgcagaagtcagacctttacgat

SEQ ID NO: 50382 - DNA, 25 bp, SARS Virus
atgcagaagtccaacctttacgatg

SEQ ID NO: 50383 - DNA, 25 bp, SARS Virus
tgcagaagtccgacctttacgatgt

SEQ ID NO: 50384 - DNA, 25 bp, SARS Virus
gcagaagtccgaactttacgatgtc

SEQ ID NO: 50385 - DNA, 25 bp, SARS Virus
cagaagtccgacatttacgatgtct

SEQ ID NO: 50386 - DNA, 25 bp, SARS Virus
agaagtccgaccattacgatgtctt

SEQ ID NO: 50387 - DNA, 25 bp, SARS Virus
gaagtccgacctatacgatgtcttc

SEQ ID NO: 50388 - DNA, 25 bp, SARS Virus
aagtccgaccttaacgatgtcttca

SEQ ID NO: 50389 - DNA, 25 bp, SARS Virus
agtccgacctttacgatgtcttcat

SEQ ID NO: 50390 - DNA, 25 bp, SARS Virus
gtccgacctttaagatgtcttcatg

SEQ ID NO: 50391 - DNA, 25 bp, SARS Virus
tccgacctttacaatgtcttcatgg

SEQ ID NO: 50392 - DNA, 25 bp, SARS Virus
ccgacctttacgatgtcttcatgga

SEQ ID NO: 50393 - DNA, 25 bp, SARS Virus
tacgtagacgtgcgaccctttaggt

SEQ ID NO: 50394 - DNA, 25 bp, SARS Virus
acgtagacgtgacaccctttaggtc

SEQ ID NO: 50395 - DNA, 25 bp, SARS Virus
cgtagacgtgagcccctttaggtcg

SEQ ID NO: 50396 - DNA, 25 bp, SARS Virus
gtagacgtgagaccctttaggtcgt

SEQ ID NO: 50397 - DNA, 25 bp, SARS Virus
tagacgtgagaccctttaggtcgtt

SEQ ID NO: 50398 - DNA, 25 bp, SARS Virus
agacgtgagaccctttaggtcgttc

SEQ ID NO: 50399 - DNA, 25 bp, SARS Virus
gacgtgagaccccttaggtcgttca

SEQ ID NO: 50400 - DNA, 25 bp, SARS Virus
acgtgagaccctctaggtcgttcaa

SEQ ID NO: 50401 - DNA, 25 bp, SARS Virus
cgtgagacccttcaggtcgttcaac

SEQ ID NO: 50402 - DNA, 25 bp, SARS Virus
gtgagaccctttcggtcgttcaaca

SEQ ID NO: 50403 - DNA, 25 bp, SARS Virus
tgagaccctttacgtcgttcaacaa

SEQ ID NO: 50404 - DNA, 25 bp, SARS Virus
gagaccctttagctcgttcaacaac

SEQ ID NO: 50405 - DNA, 25 bp, SARS Virus
agaccctttaggccgttcaacaact

SEQ ID NO: 50406 - DNA, 25 bp, SARS Virus
gaccctttaggtcgttcaacaacta

SEQ ID NO: 50407 - DNA, 25 bp, SARS Virus
accctttaggtccttcaacaactac

SEQ ID NO: 50408 - DNA, 25 bp, SARS Virus
ccctttaggtcgctcaacaactacg

SEQ ID NO: 50409 - DNA, 25 bp, SARS Virus
cctttaggtcgtccaacaactacgc

SEQ ID NO: 50410 - DNA, 25 bp, SARS Virus
ctttaggtcgttcaacaactacgcc

SEQ ID NO: 50411 - DNA, 25 bp, SARS Virus
tttaggtcgttccacaactacgcct

SEQ ID NO: 50412 - DNA, 25 bp, SARS Virus
ttaggtcgttcaccaactacgccta

SEQ ID NO: 50413 - DNA, 25 bp, SARS Virus
taggtcgttcaacaactacgcctat

SEQ ID NO: 50414 - DNA, 25 bp, SARS Virus
aggtcgttcaaccactacgcctatc

SEQ ID NO: 50415 - DNA, 25 bp, SARS Virus
ggtcgttcaacacctacgcctatcg

SEQ ID NO: 50416 - DNA, 25 bp, SARS Virus
gtcgttcaacaactacgcctatcgt

SEQ ID NO: 50417 - DNA, 25 bp, SARS Virus
tcgttcaacaaccacgcctatcgtt

SEQ ID NO: 50418 - DNA, 25 bp, SARS Virus
cgttcaacaactccgcctatcgttc

SEQ ID NO: 50419 - DNA, 25 bp, SARS Virus
gttcaacaactacgcctatcgttct

SEQ ID NO: 50420 - DNA, 25 bp, SARS Virus
ttcaacaactacccctatcgttcta

SEQ ID NO: 50421 - DNA, 25 bp, SARS Virus
tcaacaactacgcctatcgttctaa

SEQ ID NO: 50422 - DNA, 25 bp, SARS Virus
caacaactacgcctatcgttctaac

SEQ ID NO: 50423 - DNA, 25 bp, SARS Virus
aacaactacgcccatcgttctaaca

SEQ ID NO: 50424 - DNA, 25 bp, SARS Virus
acaactacgcctctcgttctaacaa

SEQ ID NO: 50425 - DNA, 25 bp, SARS Virus
caactacgcctaccgttctaacaag

SEQ ID NO: 50426 - DNA, 25 bp, SARS Virus
aactacgcctatcgttctaacaagt

SEQ ID NO: 50427 - DNA, 25 bp, SARS Virus
actacgcctatccttctaacaagtt

SEQ ID NO: 50428 - DNA, 25 bp, SARS Virus
ctacgcctatcgctctaacaagttg

SEQ ID NO: 50429 - DNA, 25 bp, SARS Virus
tacgcctatcgtcctaacaagttga

SEQ ID NO: 50430 - DNA, 25 bp, SARS Virus
acgcctatcgttctaacaagttgaa

SEQ ID NO: 50431 - DNA, 25 bp, SARS Virus
cgcctatcgttccaacaagttgaat

SEQ ID NO: 50432 - DNA, 25 bp, SARS Virus
gcctatcgttctcacaagttgaatc

SEQ ID NO: 50433 - DNA, 25 bp, SARS Virus
cctatcgttctaccaagttgaatca

SEQ ID NO: 50434 - DNA, 25 bp, SARS Virus
ctatcgttctaacaagttgaatcac

SEQ ID NO: 50435 - DNA, 25 bp, SARS Virus
tatcgttctaaccagttgaatcact

SEQ ID NO: 50436 - DNA, 25 bp, SARS Virus
atcgttctaacacgttgaatcactt

SEQ ID NO: 50437 - DNA, 25 bp, SARS Virus
tcgttctaacaacttgaatcacttt

SEQ ID NO: 50438 - DNA, 25 bp, SARS Virus
cgttctaacaagctgaatcacttta

SEQ ID NO: 50439 - DNA, 25 bp, SARS Virus
gttctaacaagtcgaatcactttaa

SEQ ID NO: 50440 - DNA, 25 bp, SARS Virus
ttctaacaagttcaatcactttaat

SEQ ID NO: 50441 - DNA, 25 bp, SARS Virus
tctaacaagttgcatcactttaatt

SEQ ID NO: 50442 - DNA, 25 bp, SARS Virus
ctaacaagttgactcactttaattg

SEQ ID NO: 50443 - DNA, 25 bp, SARS Virus
taacaagttgaaccactttaattgt

SEQ ID NO: 50444 - DNA, 25 bp, SARS Virus
aacaagttgaatcactttaattgta

SEQ ID NO: 50445 - DNA, 25 bp, SARS Virus
acaagttgaatccctttaattgtac

SEQ ID NO: 50446 - DNA, 25 bp, SARS Virus
caagttgaatcactttaattgtacc

SEQ ID NO: 50447 - DNA, 25 bp, SARS Virus
aagttgaatcaccttaattgtacct

SEQ ID NO: 50448 - DNA, 25 bp, SARS Virus
agttgaatcactctaattgtacctg

SEQ ID NO: 50449 - DNA, 25 bp, SARS Virus
gttgaatcacttcaattgtacctgt

SEQ ID NO: 50450 - DNA, 25 bp, SARS Virus
ttgaatcactttcattgtacctgtt

SEQ ID NO: 50451 - DNA, 25 bp, SARS Virus
tgaatcactttacttgtacctgtta

SEQ ID NO: 50452 - DNA, 25 bp, SARS Virus
gaatcactttaactgtacctgttaa

SEQ ID NO: 50453 - DNA, 25 bp, SARS Virus
aatcactttaatcgtacctgttaag

SEQ ID NO: 50454 - DNA, 25 bp, SARS Virus
atcactttaattctacctgttaagt

SEQ ID NO: 50455 - DNA, 25 bp, SARS Virus
tcactttaattgcacctgttaagtg

SEQ ID NO: 50456 - DNA, 25 bp, SARS Virus
cactttaattgtccctgttaagtgg

SEQ ID NO: 50457 - DNA, 25 bp, SARS Virus
actttaattgtacctgttaagtggt

SEQ ID NO: 50458 - DNA, 25 bp, SARS Virus
ctttaattgtacctgttaagtggtt

SEQ ID NO: 50459 - DNA, 25 bp, SARS Virus
tttaattgtacccgttaagtggttt

SEQ ID NO: 50460 - DNA, 25 bp, SARS Virus
ttaattgtacctcttaagtggttta

SEQ ID NO: 50461 - DNA, 25 bp, SARS Virus
taattgtacctgctaagtggtttaa

SEQ ID NO: 50462 - DNA, 25 bp, SARS Virus
aattgtacctgtcaagtggtttaaa

SEQ ID NO: 50463 - DNA, 25 bp, SARS Virus
attgtacctgttcagtggtttaaac

SEQ ID NO: 50464 - DNA, 25 bp, SARS Virus
ttgtacctgttacgtggtttaaacc

SEQ ID NO: 50465 - DNA, 25 bp, SARS Virus
tgtacctgttaactggtttaaaccg

SEQ ID NO: 50466 - DNA, 25 bp, SARS Virus
gtacctgttaagcggtttaaaccga

SEQ ID NO: 50467 - DNA, 25 bp, SARS Virus
tacctgttaagtcgtttaaaccgaa

SEQ ID NO: 50468 - DNA, 25 bp, SARS Virus
acctgttaagtgctttaaaccgaac

SEQ ID NO: 50469 - DNA, 25 bp, SARS Virus
cctgttaagtggcttaaaccgaacc

SEQ ID NO: 50470 - DNA, 25 bp, SARS Virus
ctgttaagtggtctaaaccgaaccg

SEQ ID NO: 50471 - DNA, 25 bp, SARS Virus
tgttaagtggttcaaaccgaaccgg

SEQ ID NO: 50472 - DNA, 25 bp, SARS Virus
gttaagtggtttcaaccgaaccgga

SEQ ID NO: 50473 - DNA, 25 bp, SARS Virus
ttaagtggtttacaccgaaccggag

SEQ ID NO: 50474 - DNA, 25 bp, SARS Virus
taagtggtttaacccgaaccggaga

SEQ ID NO: 50475 - DNA, 25 bp, SARS Virus
aagtggtttaaaccgaaccggagaa

SEQ ID NO: 50476 - DNA, 25 bp, SARS Virus
agtggtttaaaccgaaccggagaat

SEQ ID NO: 50477 - DNA, 25 bp, SARS Virus
gtggtttaaacccaaccggagaata

SEQ ID NO: 50478 - DNA, 25 bp, SARS Virus
tggtttaaaccgcaccggagaataa

SEQ ID NO: 50479 - DNA, 25 bp, SARS Virus
ggtttaaaccgacccggagaataac

SEQ ID NO: 50480 - DNA, 25 bp, SARS Virus
gtttaaaccgaaccggagaataaca

SEQ ID NO: 50481 - DNA, 25 bp, SARS Virus
tttaaaccgaaccggagaataacaa

SEQ ID NO: 50482 - DNA, 25 bp, SARS Virus
ttaaaccgaacccgagaataacaat

SEQ ID NO: 50483 - DNA, 25 bp, SARS Virus
taaaccgaaccgcagaataacaatg

SEQ ID NO: 50484 - DNA, 25 bp, SARS Virus
aaaccgaaccggcgaataacaatgt

SEQ ID NO: 50485 - DNA, 25 bp, SARS Virus
aaccgaaccggacaataacaatgtc

SEQ ID NO: 50486 - DNA, 25 bp, SARS Virus
accgaaccggagcataacaatgtcg

SEQ ID NO: 50487 - DNA, 25 bp, SARS Virus
ccgaaccggagactaacaatgtcga

SEQ ID NO: 50488 - DNA, 25 bp, SARS Virus
cgaaccggagaacaacaatgtcgag

SEQ ID NO: 50489 - DNA, 25 bp, SARS Virus
gaaccggagaatcacaatgtcgaga

SEQ ID NO: 50490 - DNA, 25 bp, SARS Virus
aaccggagaataccaatgtcgagat

SEQ ID NO: 50491 - DNA, 25 bp, SARS Virus
accggagaataacaatgtcgagatt

SEQ ID NO: 50492 - DNA, 25 bp, SARS Virus
ccggagaataaccatgtcgagattc

SEQ ID NO: 50493 - DNA, 25 bp, SARS Virus
cggagaataacactgtcgagattct

SEQ ID NO: 50494 - DNA, 25 bp, SARS Virus
ggagaataacaacgtcgagattctc

SEQ ID NO: 50495 - DNA, 25 bp, SARS Virus
gagaataacaatctcgagattctcg

SEQ ID NO: 50496 - DNA, 25 bp, SARS Virus
agaataacaatgccgagattctcgg

SEQ ID NO: 50497 - DNA, 25 bp, SARS Virus
gaataacaatgtcgagattctcggt

SEQ ID NO: 50498 - DNA, 25 bp, SARS Virus
aataacaatgtccagattctcggtt

SEQ ID NO: 50499 - DNA, 25 bp, SARS Virus
ataacaatgtcgcgattctcggttg

SEQ ID NO: 50500 - DNA, 25 bp, SARS Virus
taacaatgtcgacattctcggttga

SEQ ID NO: 50501 - DNA, 25 bp, SARS Virus
aacaatgtcgagcttctcggttgag

SEQ ID NO: 50502 - DNA, 25 bp, SARS Virus
acaatgtcgagactctcggttgagt

SEQ ID NO: 50503 - DNA, 25 bp, SARS Virus
caatgtcgagatcctcggttgagtc

SEQ ID NO: 50504 - DNA, 25 bp, SARS Virus
aatgtcgagattctcggttgagtcg

SEQ ID NO: 50505 - DNA, 25 bp, SARS Virus
atgtcgagattcccggttgagtcga

SEQ ID NO: 50506 - DNA, 25 bp, SARS Virus
tgtcgagattctcggttgagtcgac

SEQ ID NO: 50507 - DNA, 25 bp, SARS Virus
gtcgagattctccgttgagtcgaca

SEQ ID NO: 50508 - DNA, 25 bp, SARS Virus
tcgagattctcgcttgagtcgacaa

SEQ ID NO: 50509 - DNA, 25 bp, SARS Virus
cgagattctcggctgagtcgacaat

SEQ ID NO: 50510 - DNA, 25 bp, SARS Virus
gagattctcggtcgagtcgacaatt

SEQ ID NO: 50511 - DNA, 25 bp, SARS Virus
agattctcggttcagtcgacaattt

SEQ ID NO: 50512 - DNA, 25 bp, SARS Virus
gattctcggttgcgtcgacaatttg

SEQ ID NO: 50513 - DNA, 25 bp, SARS Virus
attctcggttgactcgacaatttga

SEQ ID NO: 50514 - DNA, 25 bp, SARS Virus
ttctcggttgagccgacaatttgat

SEQ ID NO: 50515 - DNA, 25 bp, SARS Virus
tctcggttgagtcgacaatttgatg

SEQ ID NO: 50516 - DNA, 25 bp, SARS Virus
ctcggttgagtccacaatttgatgt

SEQ ID NO: 50517 - DNA, 25 bp, SARS Virus
tcggttgagtcgccaatttgatgtc

SEQ ID NO: 50518 - DNA, 25 bp, SARS Virus
cggttgagtcgacaatttgatgtct

SEQ ID NO: 50519 - DNA, 25 bp, SARS Virus
ggttgagtcgaccatttgatgtctt

SEQ ID NO: 50520 - DNA, 25 bp, SARS Virus
gttgagtcgacactttgatgtctta

SEQ ID NO: 50521 - DNA, 25 bp, SARS Virus
ttgagtcgacaacttgatgtcttat

SEQ ID NO: 50522 - DNA, 25 bp, SARS Virus
tgagtcgacaatctgatgtcttatt

SEQ ID NO: 50523 - DNA, 25 bp, SARS Virus
gagtcgacaattcgatgtcttatta

SEQ ID NO: 50524 - DNA, 25 bp, SARS Virus
agtcgacaatttcatgtcttattac

SEQ ID NO: 50525 - DNA, 25 bp, SARS Virus
gtcgacaatttgctgtcttattact

SEQ ID NO: 50526 - DNA, 25 bp, SARS Virus
tcgacaatttgacgtcttattactt

SEQ ID NO: 50527 - DNA, 25 bp, SARS Virus
cgacaatttgatctcttattacttg

SEQ ID NO: 50528 - DNA, 25 bp, SARS Virus
gacaatttgatgccttattacttga

SEQ ID NO: 50529 - DNA, 25 bp, SARS Virus
acaatttgatgtcttattacttgac

SEQ ID NO: 50530 - DNA, 25 bp, SARS Virus
caatttgatgtcctattacttgact

SEQ ID NO: 50531 - DNA, 25 bp, SARS Virus
aatttgatgtctcattacttgactc

SEQ ID NO: 50532 - DNA, 25 bp, SARS Virus
atttgatgtcttcttacttgactca

SEQ ID NO: 50533 - DNA, 25 bp, SARS Virus
tttgatgtcttactacttgactcag

SEQ ID NO: 50534 - DNA, 25 bp, SARS Virus
ttgatgtcttatcacttgactcagg

SEQ ID NO: 50535 - DNA, 25 bp, SARS Virus
tgatgtcttattccttgactcaggt

SEQ ID NO: 50536 - DNA, 25 bp, SARS Virus
gatgtcttattacttgactcaggtc

SEQ ID NO: 50537 - DNA, 25 bp, SARS Virus
atgtcttattacctgactcaggtca

SEQ ID NO: 50538 - DNA, 25 bp, SARS Virus
tgtcttattactcgactcaggtcat

SEQ ID NO: 50539 - DNA, 25 bp, SARS Virus
gtcttattacttcactcaggtcatc

SEQ ID NO: 50540 - DNA, 25 bp, SARS Virus
tcttattacttgcctcaggtcatcg

SEQ ID NO: 50541 - DNA, 25 bp, SARS Virus
cttattacttgactcaggtcatcgt

SEQ ID NO: 50542 - DNA, 25 bp, SARS Virus
ttattacttgacccaggtcatcgtg

SEQ ID NO: 50543 - DNA, 25 bp, SARS Virus
tattacttgactcaggtcatcgtga

SEQ ID NO: 50544 - DNA, 25 bp, SARS Virus
attacttgactccggtcatcgtgat

SEQ ID NO: 50545 - DNA, 25 bp, SARS Virus
ttacttgactcacgtcatcgtgatg

SEQ ID NO: 50546 - DNA, 25 bp, SARS Virus
tacttgactcagctcatcgtgatgc

SEQ ID NO: 50547 - DNA, 25 bp, SARS Virus
acttgactcaggccatcgtgatgct

SEQ ID NO: 50548 - DNA, 25 bp, SARS Virus
cttgactcaggtcatcgtgatgctg

SEQ ID NO: 50549 - DNA, 25 bp, SARS Virus
ttgactcaggtcctcgtgatgctgt

SEQ ID NO: 50550 - DNA, 25 bp, SARS Virus
tgactcaggtcaccgtgatgctgtc

SEQ ID NO: 50551 - DNA, 25 bp, SARS Virus
gactcaggtcatcgtgatgctgtct

SEQ ID NO: 50552 - DNA, 25 bp, SARS Virus
actcaggtcatcctgatgctgtcta

SEQ ID NO: 50553 - DNA, 25 bp, SARS Virus
ctcaggtcatcgcgatgctgtctac

SEQ ID NO: 50554 - DNA, 25 bp, SARS Virus
tcaggtcatcgtcatgctgtctaca

SEQ ID NO: 50555 - DNA, 25 bp, SARS Virus
caggtcatcgtgctgctgtctacag

SEQ ID NO: 50556 - DNA, 25 bp, SARS Virus
aggtcatcgtgacgctgtctacagg

SEQ ID NO: 50557 - DNA, 25 bp, SARS Virus
ggtcatcgtgatcctgtctacagga

SEQ ID NO: 50558 - DNA, 25 bp, SARS Virus
gtcatcgtgatgctgtctacaggac

SEQ ID NO: 50559 - DNA, 25 bp, SARS Virus
tcatcgtgatgccgtctacaggaca

SEQ ID NO: 50560 - DNA, 25 bp, SARS Virus
catcgtgatgctctctacaggacac

SEQ ID NO: 50561 - DNA, 25 bp, SARS Virus
atcgtgatgctgcctacaggacacg

SEQ ID NO: 50562 - DNA, 25 bp, SARS Virus
tcgtgatgctgtctacaggacacgc

SEQ ID NO: 50563 - DNA, 25 bp, SARS Virus
cgtgatgctgtccacaggacacgcc

SEQ ID NO: 50564 - DNA, 25 bp, SARS Virus
gtgatgctgtctccaggacacgccg

SEQ ID NO: 50565 - DNA, 25 bp, SARS Virus
tgatgctgtctacaggacacgccga

SEQ ID NO: 50566 - DNA, 25 bp, SARS Virus
gatgctgtctaccggacacgccgac

SEQ ID NO: 50567 - DNA, 25 bp, SARS Virus
atgctgtctacacgacacgccgacc

SEQ ID NO: 50568 - DNA, 25 bp, SARS Virus
tgctgtctacagcacacgccgacca

SEQ ID NO: 50569 - DNA, 25 bp, SARS Virus
gctgtctacaggccacgccgaccat

SEQ ID NO: 50570 - DNA, 25 bp, SARS Virus
ctgtctacaggacacgccgaccatg

SEQ ID NO: 50571 - DNA, 25 bp, SARS Virus
tgtctacaggacccgccgaccatgg

SEQ ID NO: 50572 - DNA, 25 bp, SARS Virus
gtctacaggacacgccgaccatggt

SEQ ID NO: 50573 - DNA, 25 bp, SARS Virus
tctacaggacaccccgaccatggtg

SEQ ID NO: 50574 - DNA, 25 bp, SARS Virus
ctacaggacacgccgaccatggtgt

SEQ ID NO: 50575 - DNA, 25 bp, SARS Virus
tacaggacacgccgaccatggtgtg

SEQ ID NO: 50576 - DNA, 25 bp, SARS Virus
acaggacacgcccaccatggtgtgt

SEQ ID NO: 50577 - DNA, 25 bp, SARS Virus
caggacacgccgcccatggtgtgtt

SEQ ID NO: 50578 - DNA, 25 bp, SARS Virus
aggacacgccgaccatggtgtgttt

SEQ ID NO: 50579 - DNA, 25 bp, SARS Virus
ggacacgccgaccatggtgtgtttg

SEQ ID NO: 50580 - DNA, 25 bp, SARS Virus
gacacgccgaccctggtgtgtttgt

SEQ ID NO: 50581 - DNA, 25 bp, SARS Virus
acacgccgaccacggtgtgtttgtc

SEQ ID NO: 50582 - DNA, 25 bp, SARS Virus
cacgccgaccatcgtgtgtttgtcg

SEQ ID NO: 50583 - DNA, 25 bp, SARS Virus
acgccgaccatgctgtgtttgtcga

SEQ ID NO: 50584 - DNA, 25 bp, SARS Virus
cgccgaccatggcgtgtttgtcgaa

SEQ ID NO: 50585 - DNA, 25 bp, SARS Virus
gccgaccatggtctgtttgtcgaac

SEQ ID NO: 50586 - DNA, 25 bp, SARS Virus
ccgaccatggtgcgtttgtcgaaca

SEQ ID NO: 50587 - DNA, 25 bp, SARS Virus
cgaccatggtgtctttgtcgaacat

SEQ ID NO: 50588 - DNA, 25 bp, SARS Virus
gaccatggtgtgcttgtcgaacatg

SEQ ID NO: 50589 - DNA, 25 bp, SARS Virus
accatggtgtgtctgtcgaacatga

SEQ ID NO: 50590 - DNA, 25 bp, SARS Virus
ccatggtgtgttcgtcgaacatgac

SEQ ID NO: 50591 - DNA, 25 bp, SARS Virus
catggtgtgtttctcgaacatgact

SEQ ID NO: 50592 - DNA, 25 bp, SARS Virus
atggtgtgtttgccgaacatgacta

SEQ ID NO: 50593 - DNA, 25 bp, SARS Virus
tggtgtgtttgtcgaacatgactac

SEQ ID NO: 50594 - DNA, 25 bp, SARS Virus
ggtgtgtttgtccaacatgactact

SEQ ID NO: 50595 - DNA, 25 bp, SARS Virus
gtgtgtttgtcgcacatgactactg

SEQ ID NO: 50596 - DNA, 25 bp, SARS Virus
tgtgtttgtcgaccatgactactgt

SEQ ID NO: 50597 - DNA, 25 bp, SARS Virus
gtgtttgtcgaacatgactactgtt

SEQ ID NO: 50598 - DNA, 25 bp, SARS Virus
tgtttgtcgaacctgactactgtta

SEQ ID NO: 50599 - DNA, 25 bp, SARS Virus
gtttgtcgaacacgactactgttac

SEQ ID NO: 50600 - DNA, 25 bp, SARS Virus
tttgtcgaacatcactactgttacg

SEQ ID NO: 50601 - DNA, 25 bp, SARS Virus
ttgtcgaacatgcctactgttacgt

SEQ ID NO: 50602 - DNA, 25 bp, SARS Virus
tgtcgaacatgactactgttacgtg

SEQ ID NO: 50603 - DNA, 25 bp, SARS Virus
gtcgaacatgaccactgttacgtga

SEQ ID NO: 50604 - DNA, 25 bp, SARS Virus
tcgaacatgactcctgttacgtgaa

SEQ ID NO: 50605 - DNA, 25 bp, SARS Virus
cgaacatgactactgttacgtgaac

SEQ ID NO: 50606 - DNA, 25 bp, SARS Virus
gaacatgactaccgttacgtgaacg

SEQ ID NO: 50607 - DNA, 25 bp, SARS Virus
aacatgactactcttacgtgaacgg

SEQ ID NO: 50608 - DNA, 25 bp, SARS Virus
acatgactactgctacgtgaacgga

SEQ ID NO: 50609 - DNA, 25 bp, SARS Virus
catgactactgtcacgtgaacggat

SEQ ID NO: 50610 - DNA, 25 bp, SARS Virus
atgactactgttccgtgaacggatg

SEQ ID NO: 50611 - DNA, 25 bp, SARS Virus
tgactactgttacgtgaacggatga

SEQ ID NO: 50612 - DNA, 25 bp, SARS Virus
gactactgttacctgaacggatgat

SEQ ID NO: 50613 - DNA, 25 bp, SARS Virus
actactgttacgcgaacggatgata

SEQ ID NO: 50614 - DNA, 25 bp, SARS Virus
ctactgttacgtcaacggatgatat

SEQ ID NO: 50615 - DNA, 25 bp, SARS Virus
tactgttacgtgcacggatgatatt

SEQ ID NO: 50616 - DNA, 25 bp, SARS Virus
actgttacgtgaccggatgatattg

SEQ ID NO: 50617 - DNA, 25 bp, SARS Virus
ctgttacgtgaacggatgatattgt

SEQ ID NO: 50618 - DNA, 25 bp, SARS Virus
tgttacgtgaaccgatgatattgtt

SEQ ID NO: 50619 - DNA, 25 bp, SARS Virus
gttacgtgaacgcatgatattgtta

SEQ ID NO: 50620 - DNA, 25 bp, SARS Virus
ttacgtgaacggctgatattgttaa

SEQ ID NO: 50621 - DNA, 25 bp, SARS Virus
tacgtgaacggacgatattgttaag

SEQ ID NO: 50622 - DNA, 25 bp, SARS Virus
acgtgaacggatcatattgttaagc

SEQ ID NO: 50623 - DNA, 25 bp, SARS Virus
cgtgaacggatgctattgttaagct

SEQ ID NO: 50624 - DNA, 25 bp, SARS Virus
gtgaacggatgacattgttaagctt

SEQ ID NO: 50625 - DNA, 25 bp, SARS Virus
tgaacggatgatcttgttaagcttc

SEQ ID NO: 50626 - DNA, 25 bp, SARS Virus
gaacggatgatactgttaagcttcc

SEQ ID NO: 50627 - DNA, 25 bp, SARS Virus
aacggatgatatcgttaagcttccc

SEQ ID NO: 50628 - DNA, 25 bp, SARS Virus
acggatgatattcttaagcttccct

SEQ ID NO: 50629 - DNA, 25 bp, SARS Virus
cggatgatattgctaagcttccctc

SEQ ID NO: 50630 - DNA, 25 bp, SARS Virus
ggatgatattgtcaagcttccctcc

SEQ ID NO: 50631 - DNA, 25 bp, SARS Virus
gatgatattgttcagcttccctcca

SEQ ID NO: 50632 - DNA, 25 bp, SARS Virus
atgatattgttacgcttccctccat

SEQ ID NO: 50633 - DNA, 25 bp, SARS Virus
tgatattgttaaccttccctccatc

SEQ ID NO: 50634 - DNA, 25 bp, SARS Virus
gatattgttaagcttccctccatcc

SEQ ID NO: 50635 - DNA, 25 bp, SARS Virus
atattgttaagcctccctccatcca

SEQ ID NO: 50636 - DNA, 25 bp, SARS Virus
tattgttaagctcccctccatccaa

SEQ ID NO: 50637 - DNA, 25 bp, SARS Virus
attgttaagcttccctccatccaaa

SEQ ID NO: 50638 - DNA, 25 bp, SARS Virus
ttgttaagcttccctccatccaaac

SEQ ID NO: 50639 - DNA, 25 bp, SARS Virus
tgttaagcttccctccatccaaaca

SEQ ID NO: 50640 - DNA, 25 bp, SARS Virus
gttaagcttccccccatccaaacac

SEQ ID NO: 50641 - DNA, 25 bp, SARS Virus
ttaagcttccctccatccaaacacg

SEQ ID NO: 50642 - DNA, 25 bp, SARS Virus
taagcttccctccatccaaacacga

SEQ ID NO: 50643 - DNA, 25 bp, SARS Virus
aagcttccctccctccaaacacgac

SEQ ID NO: 50644 - DNA, 25 bp, SARS Virus
agcttccctccacccaaacacgacc

SEQ ID NO: 50645 - DNA, 25 bp, SARS Virus
gcttccctccatccaaacacgaccg

SEQ ID NO: 50646 - DNA, 25 bp, SARS Virus
cttccctccatccaaacacgaccgt

SEQ ID NO: 50647 - DNA, 25 bp, SARS Virus
ttccctccatcccaacacgaccgta

SEQ ID NO: 50648 - DNA, 25 bp, SARS Virus
tccctccatccacacacgaccgtaa

SEQ ID NO: 50649 - DNA, 25 bp, SARS Virus
ccctccatccaaccacgaccgtaat

SEQ ID NO: 50650 - DNA, 25 bp, SARS Virus
cctccatccaaacacgaccgtaatg

SEQ ID NO: 50651 - DNA, 25 bp, SARS Virus
ctccatccaaacccgaccgtaatga

SEQ ID NO: 50652 - DNA, 25 bp, SARS Virus
tccatccaaacacgaccgtaatgat

SEQ ID NO: 50653 - DNA, 25 bp, SARS Virus
ccatccaaacaccaccgtaatgata

SEQ ID NO: 50654 - DNA, 25 bp, SARS Virus
catccaaacacgcccgtaatgatag

SEQ ID NO: 50655 - DNA, 25 bp, SARS Virus
atccaaacacgaccgtaatgatagt

SEQ ID NO: 50656 - DNA, 25 bp, SARS Virus
tccaaacacgaccgtaatgatagtc

SEQ ID NO: 50657 - DNA, 25 bp, SARS Virus
ccaaacacgaccctaatgatagtct

SEQ ID NO: 50658 - DNA, 25 bp, SARS Virus
caaacacgaccgcaatgatagtctg

SEQ ID NO: 50659 - DNA, 25 bp, SARS Virus
aaacacgaccgtcatgatagtctgg

SEQ ID NO: 50660 - DNA, 25 bp, SARS Virus
aacacgaccgtactgatagtctggt

SEQ ID NO: 50661 - DNA, 25 bp, SARS Virus
acacgaccgtaacgatagtctggtg

SEQ ID NO: 50662 - DNA, 25 bp, SARS Virus
cacgaccgtaatcatagtctggtgg

SEQ ID NO: 50663 - DNA, 25 bp, SARS Virus
acgaccgtaatgctagtctggtggt

SEQ ID NO: 50664 - DNA, 25 bp, SARS Virus
cgaccgtaatgacagtctggtggtt

SEQ ID NO: 50665 - DNA, 25 bp, SARS Virus
gaccgtaatgatcgtctggtggttc

SEQ ID NO: 50666 - DNA, 25 bp, SARS Virus
accgtaatgatactctggtggttct

SEQ ID NO: 50667 - DNA, 25 bp, SARS Virus
ccgtaatgatagcctggtggttcta

SEQ ID NO: 50668 - DNA, 25 bp, SARS Virus
cgtaatgatagtctggtggttctag

SEQ ID NO: 50669 - DNA, 25 bp, SARS Virus
gtaatgatagtccggtggttctaga

SEQ ID NO: 50670 - DNA, 25 bp, SARS Virus
taatgatagtctcgtggttctagag

SEQ ID NO: 50671 - DNA, 25 bp, SARS Virus
aatgatagtctgctggttctagagt

SEQ ID NO: 50672 - DNA, 25 bp, SARS Virus
atgatagtctggcggttctagagtt

SEQ ID NO: 50673 - DNA, 25 bp, SARS Virus
tgatagtctggtcgttctagagttt

SEQ ID NO: 50674 - DNA, 25 bp, SARS Virus
gatagtctggtgcttctagagttta

SEQ ID NO: 50675 - DNA, 25 bp, SARS Virus
atagtctggtggctctagagtttac

SEQ ID NO: 50676 - DNA, 25 bp, SARS Virus
tagtctggtggtcctagagtttacc

SEQ ID NO: 50677 - DNA, 25 bp, SARS Virus
agtctggtggttctagagtttaccc

SEQ ID NO: 50678 - DNA, 25 bp, SARS Virus
gtctggtggttccagagtttacccg

SEQ ID NO: 50679 - DNA, 25 bp, SARS Virus
tctggtggttctcgagtttacccga

SEQ ID NO: 50680 - DNA, 25 bp, SARS Virus
ctggtggttctacagtttacccgat

SEQ ID NO: 50681 - DNA, 25 bp, SARS Virus
tggtggttctagcgtttacccgatc

SEQ ID NO: 50682 - DNA, 25 bp, SARS Virus
ggtggttctagactttacccgatct

SEQ ID NO: 50683 - DNA, 25 bp, SARS Virus
gtggttctagagcttacccgatcta

SEQ ID NO: 50684 - DNA, 25 bp, SARS Virus
tggttctagagtctacccgatctaa

SEQ ID NO: 50685 - DNA, 25 bp, SARS Virus
ggttctagagttcacccgatctaag

SEQ ID NO: 50686 - DNA, 25 bp, SARS Virus
gttctagagtttccccgatctaagg

SEQ ID NO: 50687 - DNA, 25 bp, SARS Virus
ttctagagtttacccgatctaaggg

SEQ ID NO: 50688 - DNA, 25 bp, SARS Virus
tctagagtttacccgatctaaggga

SEQ ID NO: 50689 - DNA, 25 bp, SARS Virus
ctagagtttacccgatctaagggat

SEQ ID NO: 50690 - DNA, 25 bp, SARS Virus
tagagtttaccccatctaagggatt

SEQ ID NO: 50691 - DNA, 25 bp, SARS Virus
agagtttacccgctctaagggattc

SEQ ID NO: 50692 - DNA, 25 bp, SARS Virus
gagtttacccgacctaagggattct

SEQ ID NO: 50693 - DNA, 25 bp, SARS Virus
agtttacccgatctaagggattctc

SEQ ID NO: 50694 - DNA, 25 bp, SARS Virus
gtttacccgatccaagggattctca

SEQ ID NO: 50695 - DNA, 25 bp, SARS Virus
tttacccgatctcagggattctcac

SEQ ID NO: 50696 - DNA, 25 bp, SARS Virus
ttacccgatctacgggattctcact

SEQ ID NO: 50697 - DNA, 25 bp, SARS Virus
tacccgatctaacggattctcacta

SEQ ID NO: 50698 - DNA, 25 bp, SARS Virus
acccgatctaagcgattctcactac

SEQ ID NO: 50699 - DNA, 25 bp, SARS Virus
cccgatctaaggcattctcactacc

SEQ ID NO: 50700 - DNA, 25 bp, SARS Virus
ccgatctaagggcttctcactacca

SEQ ID NO: 50701 - DNA, 25 bp, SARS Virus
cgatctaagggactctcactaccat

SEQ ID NO: 50702 - DNA, 25 bp, SARS Virus
gatctaagggatcctcactaccatg

SEQ ID NO: 50703 - DNA, 25 bp, SARS Virus
atctaagggattctcactaccatgt

SEQ ID NO: 50704 - DNA, 25 bp, SARS Virus
tctaagggattcccactaccatgtc

SEQ ID NO: 50705 - DNA, 25 bp, SARS Virus
ctaagggattctcactaccatgtcc

SEQ ID NO: 50706 - DNA, 25 bp, SARS Virus
taagggattctccctaccatgtcca

SEQ ID NO: 50707 - DNA, 25 bp, SARS Virus
aagggattctcactaccatgtccat

SEQ ID NO: 50708 - DNA, 25 bp, SARS Virus
agggattctcaccaccatgtccatg

SEQ ID NO: 50709 - DNA, 25 bp, SARS Virus
gggattctcactcccatgtccatgt

SEQ ID NO: 50710 - DNA, 25 bp, SARS Virus
ggattctcactaccatgtccatgtt

SEQ ID NO: 50711 - DNA, 25 bp, SARS Virus
gattctcactaccatgtccatgtta

SEQ ID NO: 50712 - DNA, 25 bp, SARS Virus
attctcactaccctgtccatgttaa

SEQ ID NO: 50713 - DNA, 25 bp, SARS Virus
ttctcactaccacgtccatgttaaa

SEQ ID NO: 50714 - DNA, 25 bp, SARS Virus
tctcactaccatctccatgttaaat

SEQ ID NO: 50715 - DNA, 25 bp, SARS Virus
ctcactaccatgcccatgttaaatg

SEQ ID NO: 50716 - DNA, 25 bp, SARS Virus
tcactaccatgtccatgttaaatgt

SEQ ID NO: 50717 - DNA, 25 bp, SARS Virus
cactaccatgtccatgttaaatgtg

SEQ ID NO: 50718 - DNA, 25 bp, SARS Virus
actaccatgtccctgttaaatgtgt

SEQ ID NO: 50719 - DNA, 25 bp, SARS Virus
ctaccatgtccacgttaaatgtgtc

SEQ ID NO: 50720 - DNA, 25 bp, SARS Virus
taccatgtccatcttaaatgtgtct

SEQ ID NO: 50721 - DNA, 25 bp, SARS Virus
accatgtccatgctaaatgtgtctt

SEQ ID NO: 50722 - DNA, 25 bp, SARS Virus
ccatgtccatgtcaaatgtgtcttg

SEQ ID NO: 50723 - DNA, 25 bp, SARS Virus
catgtccatgttcaatgtgtcttga

SEQ ID NO: 50724 - DNA, 25 bp, SARS Virus
atgtccatgttacatgtgtcttgac

SEQ ID NO: 50725 - DNA, 25 bp, SARS Virus
tgtccatgttaactgtgtcttgacc

SEQ ID NO: 50726 - DNA, 25 bp, SARS Virus
gtccatgttaaacgtgtcttgacct

SEQ ID NO: 50727 - DNA, 25 bp, SARS Virus
tccatgttaaatctgtcttgacctt

SEQ ID NO: 50728 - DNA, 25 bp, SARS Virus
ccatgttaaatgcgtcttgaccttg

SEQ ID NO: 50729 - DNA, 25 bp, SARS Virus
catgttaaatgtctcttgaccttgg

SEQ ID NO: 50730 - DNA, 25 bp, SARS Virus
atgttaaatgtgccttgaccttggt

SEQ ID NO: 50731 - DNA, 25 bp, SARS Virus
tgttaaatgtgtcttgaccttggtg

SEQ ID NO: 50732 - DNA, 25 bp, SARS Virus
gttaaatgtgtcctgaccttggtgg

SEQ ID NO: 50733 - DNA, 25 bp, SARS Virus
ttaaatgtgtctcgaccttggtgga

SEQ ID NO: 50734 - DNA, 25 bp, SARS Virus
taaatgtgtcttcaccttggtggaa

SEQ ID NO: 50735 - DNA, 25 bp, SARS Virus
aaatgtgtcttgcccttggtggaac

SEQ ID NO: 50736 - DNA, 25 bp, SARS Virus
aatgtgtcttgaccttggtggaaca

SEQ ID NO: 50737 - DNA, 25 bp, SARS Virus
atgtgtcttgaccttggtggaacat

SEQ ID NO: 50738 - DNA, 25 bp, SARS Virus
tgtgtcttgaccctggtggaacatc

SEQ ID NO: 50739 - DNA, 25 bp, SARS Virus
gtgtcttgacctcggtggaacatcc

SEQ ID NO: 50740 - DNA, 25 bp, SARS Virus
tgtcttgaccttcgtggaacatcca

SEQ ID NO: 50741 - DNA, 25 bp, SARS Virus
gtcttgaccttgctggaacatccaa

SEQ ID NO: 50742 - DNA, 25 bp, SARS Virus
tcttgaccttggcggaacatccaaa

SEQ ID NO: 50743 - DNA, 25 bp, SARS Virus
cttgaccttggtcgaacatccaaac

SEQ ID NO: 50744 - DNA, 25 bp, SARS Virus
ttgaccttggtgcaacatccaaaca

SEQ ID NO: 50745 - DNA, 25 bp, SARS Virus
tgaccttggtggcacatccaaacaa

SEQ ID NO: 50746 - DNA, 25 bp, SARS Virus
gaccttggtggaccatccaaacaat

SEQ ID NO: 50747 - DNA, 25 bp, SARS Virus
accttggtggaacatccaaacaatg

SEQ ID NO: 50748 - DNA, 25 bp, SARS Virus
ccttggtggaacctccaaacaatgt

SEQ ID NO: 50749 - DNA, 25 bp, SARS Virus
cttggtggaacacccaaacaatgtc

SEQ ID NO: 50750 - DNA, 25 bp, SARS Virus
ttggtggaacatccaaacaatgtct

SEQ ID NO: 50751 - DNA, 25 bp, SARS Virus
tggtggaacatccaaacaatgtctg

SEQ ID NO: 50752 - DNA, 25 bp, SARS Virus
ggtggaacatcccaacaatgtctgt

SEQ ID NO: 50753 - DNA, 25 bp, SARS Virus
gtggaacatccacacaatgtctgtg

SEQ ID NO: 50754 - DNA, 25 bp, SARS Virus
tggaacatccaaccaatgtctgtgt

SEQ ID NO: 50755 - DNA, 25 bp, SARS Virus
ggaacatccaaacaatgtctgtgtg

SEQ ID NO: 50756 - DNA, 25 bp, SARS Virus
gaacatccaaaccatgtctgtgtgg

SEQ ID NO: 50757 - DNA, 25 bp, SARS Virus
aacatccaaacactgtctgtgtggt

SEQ ID NO: 50758 - DNA, 25 bp, SARS Virus
acatccaaacaacgtctgtgtggtt

SEQ ID NO: 50759 - DNA, 25 bp, SARS Virus
catccaaacaatctctgtgtggttt

SEQ ID NO: 50760 - DNA, 25 bp, SARS Virus
atccaaacaatgcctgtgtggtttt

SEQ ID NO: 50761 - DNA, 25 bp, SARS Virus
tccaaacaatgtctgtgtggttttc

SEQ ID NO: 50762 - DNA, 25 bp, SARS Virus
ccaaacaatgtccgtgtggttttcc

SEQ ID NO: 50763 - DNA, 25 bp, SARS Virus
caaacaatgtctctgtggttttccc

SEQ ID NO: 50764 - DNA, 25 bp, SARS Virus
aaacaatgtctgcgtggttttcccg

SEQ ID NO: 50765 - DNA, 25 bp, SARS Virus
aacaatgtctgtctggttttcccgg

SEQ ID NO: 50766 - DNA, 25 bp, SARS Virus
acaatgtctgtgcggttttcccgga

SEQ ID NO: 50767 - DNA, 25 bp, SARS Virus
caatgtctgtgtcgttttcccggat

SEQ ID NO: 50768 - DNA, 25 bp, SARS Virus
aatgtctgtgtgcttttcccggatt

SEQ ID NO: 50769 - DNA, 25 bp, SARS Virus
atgtctgtgtggctttcccggattt

SEQ ID NO: 50770 - DNA, 25 bp, SARS Virus
tgtctgtgtggtcttcccggatttc

SEQ ID NO: 50771 - DNA, 25 bp, SARS Virus
gtctgtgtggttctcccggatttca

SEQ ID NO: 50772 - DNA, 25 bp, SARS Virus
tctgtgtggtttccccggatttcac

SEQ ID NO: 50773 - DNA, 25 bp, SARS Virus
ctgtgtggttttcccggatttcact

SEQ ID NO: 50774 - DNA, 25 bp, SARS Virus
tgtgtggttttcccggatttcactt

SEQ ID NO: 50775 - DNA, 25 bp, SARS Virus
gtgtggttttcccggatttcacttt

SEQ ID NO: 50776 - DNA, 25 bp, SARS Virus
tgtggttttccccgatttcacttta

SEQ ID NO: 50777 - DNA, 25 bp, SARS Virus
gtggttttcccgcatttcactttat

SEQ ID NO: 50778 - DNA, 25 bp, SARS Virus
tggttttcccggctttcactttatg

SEQ ID NO: 50779 - DNA, 25 bp, SARS Virus
ggttttcccggacttcactttatga

SEQ ID NO: 50780 - DNA, 25 bp, SARS Virus
gttttcccggatctcactttatgaa

SEQ ID NO: 50781 - DNA, 25 bp, SARS Virus
ttttcccggattccactttatgaac

SEQ ID NO: 50782 - DNA, 25 bp, SARS Virus
tttcccggatttcactttatgaaca

SEQ ID NO: 50783 - DNA, 25 bp, SARS Virus
ttcccggatttccctttatgaacat

SEQ ID NO: 50784 - DNA, 25 bp, SARS Virus
tcccggatttcactttatgaacatg

SEQ ID NO: 50785 - DNA, 25 bp, SARS Virus
cccggatttcaccttatgaacatga

SEQ ID NO: 50786 - DNA, 25 bp, SARS Virus
ccggatttcactctatgaacatgaa

SEQ ID NO: 50787 - DNA, 25 bp, SARS Virus
cggatttcacttcatgaacatgaag

SEQ ID NO: 50788 - DNA, 25 bp, SARS Virus
ggatttcactttctgaacatgaagt

SEQ ID NO: 50789 - DNA, 25 bp, SARS Virus
gatttcactttacgaacatgaagta

SEQ ID NO: 50790 - DNA, 25 bp, SARS Virus
atttcactttatcaacatgaagtag

SEQ ID NO: 50791 - DNA, 25 bp, SARS Virus
tttcactttatgcacatgaagtagt

SEQ ID NO: 50792 - DNA, 25 bp, SARS Virus
ttcactttatgaccatgaagtagtt

SEQ ID NO: 50793 - DNA, 25 bp, SARS Virus
tcactttatgaacatgaagtagttt

SEQ ID NO: 50794 - DNA, 25 bp, SARS Virus
cactttatgaacctgaagtagtttc

SEQ ID NO: 50795 - DNA, 25 bp, SARS Virus
actttatgaacacgaagtagtttcc

SEQ ID NO: 50796 - DNA, 25 bp, SARS Virus
ctttatgaacatcaagtagtttccg

SEQ ID NO: 50797 - DNA, 25 bp, SARS Virus
tttatgaacatgcagtagtttccga

SEQ ID NO: 50798 - DNA, 25 bp, SARS Virus
ttatgaacatgacgtagtttccgaa

SEQ ID NO: 50799 - DNA, 25 bp, SARS Virus
tatgaacatgaactagtttccgaat

SEQ ID NO: 50800 - DNA, 25 bp, SARS Virus
atgaacatgaagcagtttccgaatt

SEQ ID NO: 50801 - DNA, 25 bp, SARS Virus
tgaacatgaagtcgtttccgaattt

SEQ ID NO: 50802 - DNA, 25 bp, SARS Virus
gaacatgaagtactttccgaatttg

SEQ ID NO: 50803 - DNA, 25 bp, SARS Virus
aacatgaagtagcttccgaatttgt

SEQ ID NO: 50804 - DNA, 25 bp, SARS Virus
acatgaagtagtctccgaatttgtt

SEQ ID NO: 50805 - DNA, 25 bp, SARS Virus
catgaagtagttcccgaatttgttg

SEQ ID NO: 50806 - DNA, 25 bp, SARS Virus
atgaagtagtttccgaatttgttgg

SEQ ID NO: 50807 - DNA, 25 bp, SARS Virus
tgaagtagtttccgaatttgttgga

SEQ ID NO: 50808 - DNA, 25 bp, SARS Virus
gaagtagtttcccaatttgttggat

SEQ ID NO: 50809 - DNA, 25 bp, SARS Virus
aagtagtttccgcatttgttggatt

SEQ ID NO: 50810 - DNA, 25 bp, SARS Virus
agtagtttccgactttgttggattt

SEQ ID NO: 50811 - DNA, 25 bp, SARS Virus
gtagtttccgaacttgttggattta

SEQ ID NO: 50812 - DNA, 25 bp, SARS Virus
tagtttccgaatctgttggatttat

SEQ ID NO: 50813 - DNA, 25 bp, SARS Virus
agtttccgaattcgttggatttatc

SEQ ID NO: 50814 - DNA, 25 bp, SARS Virus
gtttccgaatttcttggatttatct

SEQ ID NO: 50815 - DNA, 25 bp, SARS Virus
tttccgaatttgctggatttatctc

SEQ ID NO: 50816 - DNA, 25 bp, SARS Virus
ttccgaatttgtcggatttatctcc

SEQ ID NO: 50817 - DNA, 25 bp, SARS Virus
tccgaatttgttcgatttatctcca

SEQ ID NO: 50818 - DNA, 25 bp, SARS Virus
ccgaatttgttgcatttatctccat

SEQ ID NO: 50819 - DNA, 25 bp, SARS Virus
cgaatttgttggctttatctccata

SEQ ID NO: 50820 - DNA, 25 bp, SARS Virus
gaatttgttggacttatctccatac

SEQ ID NO: 50821 - DNA, 25 bp, SARS Virus
aatttgttggatctatctccatacc

SEQ ID NO: 50822 - DNA, 25 bp, SARS Virus
atttgttggattcatctccatacca

SEQ ID NO: 50823 - DNA, 25 bp, SARS Virus
tttgttggatttctctccataccac

SEQ ID NO: 50824 - DNA, 25 bp, SARS Virus
ttgttggatttacctccataccacg

SEQ ID NO: 50825 - DNA, 25 bp, SARS Virus
tgttggatttatctccataccacga

SEQ ID NO: 50826 - DNA, 25 bp, SARS Virus
gttggatttatccccataccacgac

SEQ ID NO: 50827 - DNA, 25 bp, SARS Virus
ttggatttatctccataccacgacc

SEQ ID NO: 50828 - DNA, 25 bp, SARS Virus
tggatttatctccataccacgaccc

SEQ ID NO: 50829 - DNA, 25 bp, SARS Virus
ggatttatctccctaccacgacccg

SEQ ID NO: 50830 - DNA, 25 bp, SARS Virus
gatttatctccacaccacgacccgt

SEQ ID NO: 50831 - DNA, 25 bp, SARS Virus
atttatctccatcccacgacccgtc

SEQ ID NO: 50832 - DNA, 25 bp, SARS Virus
tttatctccataccacgacccgtca

SEQ ID NO: 50833 - DNA, 25 bp, SARS Virus
ttatctccataccacgacccgtcaa

SEQ ID NO: 50834 - DNA, 25 bp, SARS Virus
tatctccataccccgacccgtcaaa

SEQ ID NO: 50835 - DNA, 25 bp, SARS Virus
atctccataccacgacccgtcaaat

SEQ ID NO: 50836 - DNA, 25 bp, SARS Virus
tctccataccaccacccgtcaaatc

SEQ ID NO: 50837 - DNA, 25 bp, SARS Virus
ctccataccacgccccgtcaaatcg

SEQ ID NO: 50838 - DNA, 25 bp, SARS Virus
tccataccacgacccgtcaaatcga

SEQ ID NO: 50839 - DNA, 25 bp, SARS Virus
ccataccacgacccgtcaaatcgac

SEQ ID NO: 50840 - DNA, 25 bp, SARS Virus
cataccacgacccgtcaaatcgacg

SEQ ID NO: 50841 - DNA, 25 bp, SARS Virus
ataccacgacccctcaaatcgacga

SEQ ID NO: 50842 - DNA, 25 bp, SARS Virus
taccacgacccgccaaatcgacgat

SEQ ID NO: 50843 - DNA, 25 bp, SARS Virus
accacgacccgtcaaatcgacgatg

SEQ ID NO: 50844 - DNA, 25 bp, SARS Virus
ccacgacccgtccaatcgacgatgt

SEQ ID NO: 50845 - DNA, 25 bp, SARS Virus
cacgacccgtcacatcgacgatgtc

SEQ ID NO: 50846 - DNA, 25 bp, SARS Virus
acgacccgtcaactcgacgatgtca

SEQ ID NO: 50847 - DNA, 25 bp, SARS Virus
cgacccgtcaaaccgacgatgtcat

SEQ ID NO: 50848 - DNA, 25 bp, SARS Virus
gacccgtcaaatcgacgatgtcatg

SEQ ID NO: 50849 - DNA, 25 bp, SARS Virus
acccgtcaaatccacgatgtcatgc

SEQ ID NO: 50850 - DNA, 25 bp, SARS Virus
cccgtcaaatcgccgatgtcatgca

SEQ ID NO: 50851 - DNA, 25 bp, SARS Virus
ccgtcaaatcgacgatgtcatgcag

SEQ ID NO: 50852 - DNA, 25 bp, SARS Virus
cgtcaaatcgaccatgtcatgcaga

SEQ ID NO: 50853 - DNA, 25 bp, SARS Virus
gtcaaatcgacgctgtcatgcagaa

SEQ ID NO: 50854 - DNA, 25 bp, SARS Virus
tcaaatcgacgacgtcatgcagaag

SEQ ID NO: 50855 - DNA, 25 bp, SARS Virus
caaatcgacgatctcatgcagaagt

SEQ ID NO: 50856 - DNA, 25 bp, SARS Virus
aaatcgacgatgccatgcagaagtc

SEQ ID NO: 50857 - DNA, 25 bp, SARS Virus
aatcgacgatgtcatgcagaagtcc

SEQ ID NO: 50858 - DNA, 25 bp, SARS Virus
atcgacgatgtcctgcagaagtccg

SEQ ID NO: 50859 - DNA, 25 bp, SARS Virus
tcgacgatgtcacgcagaagtccga

SEQ ID NO: 50860 - DNA, 25 bp, SARS Virus
cgacgatgtcatccagaagtccgac

SEQ ID NO: 50861 - DNA, 25 bp, SARS Virus
gacgatgtcatgcagaagtccgacc

SEQ ID NO: 50862 - DNA, 25 bp, SARS Virus
acgatgtcatgccgaagtccgacct

SEQ ID NO: 50863 - DNA, 25 bp, SARS Virus
cgatgtcatgcacaagtccgacctt

SEQ ID NO: 50864 - DNA, 25 bp, SARS Virus
gatgtcatgcagcagtccgaccttt

SEQ ID NO: 50865 - DNA, 25 bp, SARS Virus
atgtcatgcagacgtccgaccttta

SEQ ID NO: 50866 - DNA, 25 bp, SARS Virus
tgtcatgcagaactccgacctttac

SEQ ID NO: 50867 - DNA, 25 bp, SARS Virus
gtcatgcagaagcccgacctttacg

SEQ ID NO: 50868 - DNA, 25 bp, SARS Virus
tcatgcagaagtccgacctttacga

SEQ ID NO: 50869 - DNA, 25 bp, SARS Virus
catgcagaagtccgacctttacgat

SEQ ID NO: 50870 - DNA, 25 bp, SARS Virus
atgcagaagtcccacctttacgatg

SEQ ID NO: 50871 - DNA, 25 bp, SARS Virus
tgcagaagtccgccctttacgatgt

SEQ ID NO: 50872 - DNA, 25 bp, SARS Virus
gcagaagtccgacctttacgatgtc

SEQ ID NO: 50873 - DNA, 25 bp, SARS Virus
cagaagtccgacctttacgatgtct

SEQ ID NO: 50874 - DNA, 25 bp, SARS Virus
agaagtccgacccttacgatgtctt

SEQ ID NO: 50875 - DNA, 25 bp, SARS Virus
gaagtccgacctctacgatgtcttc

SEQ ID NO: 50876 - DNA, 25 bp, SARS Virus
aagtccgaccttcacgatgtcttca

SEQ ID NO: 50877 - DNA, 25 bp, SARS Virus
agtccgacctttccgatgtcttcat

SEQ ID NO: 50878 - DNA, 25 bp, SARS Virus
gtccgacctttacgatgtcttcatg

SEQ ID NO: 50879 - DNA, 25 bp, SARS Virus
tccgacctttaccatgtcttcatgg

SEQ ID NO: 50880 - DNA, 25 bp, SARS Virus
ccgacctttacgctgtcttcatgga

SEQ ID NO: 50881 - DNA, 25 bp, SARS Virus
tacgtagacgtgggaccctttaggt

SEQ ID NO: 50882 - DNA, 25 bp, SARS Virus
acgtagacgtgagaccctttaggtc

SEQ ID NO: 50883 - DNA, 25 bp, SARS Virus
cgtagacgtgaggccctttaggtcg

SEQ ID NO: 50884 - DNA, 25 bp, SARS Virus
gtagacgtgagagcctttaggtcgt

SEQ ID NO: 50885 - DNA, 25 bp, SARS Virus
tagacgtgagacgctttaggtcgtt

SEQ ID NO: 50886 - DNA, 25 bp, SARS Virus
agacgtgagaccgtttaggtcgttc

SEQ ID NO: 50887 - DNA, 25 bp, SARS Virus
gacgtgagacccgttaggtcgttca

SEQ ID NO: 50888 - DNA, 25 bp, SARS Virus
acgtgagaccctgtaggtcgttcaa

SEQ ID NO: 50889 - DNA, 25 bp, SARS Virus
cgtgagacccttgaggtcgttcaac

SEQ ID NO: 50890 - DNA, 25 bp, SARS Virus
gtgagaccctttgggtcgttcaaca

SEQ ID NO: 50891 - DNA, 25 bp, SARS Virus
tgagaccctttaggtcgttcaacaa

SEQ ID NO: 50892 - DNA, 25 bp, SARS Virus
gagaccctttaggtcgttcaacaac

SEQ ID NO: 50893 - DNA, 25 bp, SARS Virus
agaccctttagggcgttcaacaact

SEQ ID NO: 50894 - DNA, 25 bp, SARS Virus
gaccctttaggtggttcaacaacta

SEQ ID NO: 50895 - DNA, 25 bp, SARS Virus
accctttaggtcgttcaacaactac

SEQ ID NO: 50896 - DNA, 25 bp, SARS Virus
ccctttaggtcggtcaacaactacg

SEQ ID NO: 50897 - DNA, 25 bp, SARS Virus
cctttaggtcgtgcaacaactacgc

SEQ ID NO: 50898 - DNA, 25 bp, SARS Virus
ctttaggtcgttgaacaactacgcc

SEQ ID NO: 50899 - DNA, 25 bp, SARS Virus
tttaggtcgttcgacaactacgcct

SEQ ID NO: 50900 - DNA, 25 bp, SARS Virus
ttaggtcgttcagcaactacgccta

SEQ ID NO: 50901 - DNA, 25 bp, SARS Virus
taggtcgttcaagaactacgcctat

SEQ ID NO: 50902 - DNA, 25 bp, SARS Virus
aggtcgttcaacgactacgcctatc

SEQ ID NO: 50903 - DNA, 25 bp, SARS Virus
ggtcgttcaacagctacgcctatcg

SEQ ID NO: 50904 - DNA, 25 bp, SARS Virus
gtcgttcaacaagtacgcctatcgt

SEQ ID NO: 50905 - DNA, 25 bp, SARS Virus
tcgttcaacaacgacgcctatcgtt

SEQ ID NO: 50906 - DNA, 25 bp, SARS Virus
cgttcaacaactgcgcctatcgttc

SEQ ID NO: 50907 - DNA, 25 bp, SARS Virus
gttcaacaactaggcctatcgttct

SEQ ID NO: 50908 - DNA, 25 bp, SARS Virus
ttcaacaactacgcctatcgttcta

SEQ ID NO: 50909 - DNA, 25 bp, SARS Virus
tcaacaactacggctatcgttctaa

SEQ ID NO: 50910 - DNA, 25 bp, SARS Virus
caacaactacgcgtatcgttctaac

SEQ ID NO: 50911 - DNA, 25 bp, SARS Virus
aacaactacgccgatcgttctaaca

SEQ ID NO: 50912 - DNA, 25 bp, SARS Virus
acaactacgcctgtcgttctaacaa

SEQ ID NO: 50913 - DNA, 25 bp, SARS Virus
caactacgcctagcgttctaacaag

SEQ ID NO: 50914 - DNA, 25 bp, SARS Virus
aactacgcctatggttctaacaagt

SEQ ID NO: 50915 - DNA, 25 bp, SARS Virus
actacgcctatcgttctaacaagtt

SEQ ID NO: 50916 - DNA, 25 bp, SARS Virus
ctacgcctatcggtctaacaagttg

SEQ ID NO: 50917 - DNA, 25 bp, SARS Virus
tacgcctatcgtgctaacaagttga

SEQ ID NO: 50918 - DNA, 25 bp, SARS Virus
acgcctatcgttgtaacaagttgaa

SEQ ID NO: 50919 - DNA, 25 bp, SARS Virus
cgcctatcgttcgaacaagttgaat

SEQ ID NO: 50920 - DNA, 25 bp, SARS Virus
gcctatcgttctgacaagttgaatc

SEQ ID NO: 50921 - DNA, 25 bp, SARS Virus
cctatcgttctagcaagttgaatca

SEQ ID NO: 50922 - DNA, 25 bp, SARS Virus
ctatcgttctaagaagttgaatcac

SEQ ID NO: 50923 - DNA, 25 bp, SARS Virus
tatcgttctaacgagttgaatcact

SEQ ID NO: 50924 - DNA, 25 bp, SARS Virus
atcgttctaacaggttgaatcactt

SEQ ID NO: 50925 - DNA, 25 bp, SARS Virus
tcgttctaacaagttgaatcacttt

SEQ ID NO: 50926 - DNA, 25 bp, SARS Virus
cgttctaacaaggtgaatcacttta

SEQ ID NO: 50927 - DNA, 25 bp, SARS Virus
gttctaacaagtggaatcactttaa

SEQ ID NO: 50928 - DNA, 25 bp, SARS Virus
ttctaacaagttgaatcactttaat

SEQ ID NO: 50929 - DNA, 25 bp, SARS Virus
tctaacaagttggatcactttaatt

SEQ ID NO: 50930 - DNA, 25 bp, SARS Virus
ctaacaagttgagtcactttaattg

SEQ ID NO: 50931 - DNA, 25 bp, SARS Virus
taacaagttgaagcactttaattgt

SEQ ID NO: 50932 - DNA, 25 bp, SARS Virus
aacaagttgaatgactttaattgta

SEQ ID NO: 50933 - DNA, 25 bp, SARS Virus
acaagttgaatcgctttaattgtac

SEQ ID NO: 50934 - DNA, 25 bp, SARS Virus
caagttgaatcagtttaattgtacc

SEQ ID NO: 50935 - DNA, 25 bp, SARS Virus
aagttgaatcacgttaattgtacct

SEQ ID NO: 50936 - DNA, 25 bp, SARS Virus
agttgaatcactgtaattgtacctg

SEQ ID NO: 50937 - DNA, 25 bp, SARS Virus
gttgaatcacttgaattgtacctgt

SEQ ID NO: 50938 - DNA, 25 bp, SARS Virus
ttgaatcactttgattgtacctgtt

SEQ ID NO: 50939 - DNA, 25 bp, SARS Virus
tgaatcactttagttgtacctgtta

SEQ ID NO: 50940 - DNA, 25 bp, SARS Virus
gaatcactttaagtgtacctgttaa

SEQ ID NO: 50941 - DNA, 25 bp, SARS Virus
aatcactttaatggtacctgttaag

SEQ ID NO: 50942 - DNA, 25 bp, SARS Virus
atcactttaattgtacctgttaagt

SEQ ID NO: 50943 - DNA, 25 bp, SARS Virus
tcactttaattggacctgttaagtg

SEQ ID NO: 50944 - DNA, 25 bp, SARS Virus
cactttaattgtgcctgttaagtgg

SEQ ID NO: 50945 - DNA, 25 bp, SARS Virus
actttaattgtagctgttaagtggt

SEQ ID NO: 50946 - DNA, 25 bp, SARS Virus
ctttaattgtacgtgttaagtggtt

SEQ ID NO: 50947 - DNA, 25 bp, SARS Virus
tttaattgtaccggttaagtggttt

SEQ ID NO: 50948 - DNA, 25 bp, SARS Virus
ttaattgtacctgttaagtggttta

SEQ ID NO: 50949 - DNA, 25 bp, SARS Virus
taattgtacctggtaagtggtttaa

SEQ ID NO: 50950 - DNA, 25 bp, SARS Virus
aattgtacctgtgaagtggtttaaa

SEQ ID NO: 50951 - DNA, 25 bp, SARS Virus
attgtacctgttgagtggtttaaac

SEQ ID NO: 50952 - DNA, 25 bp, SARS Virus
ttgtacctgttaggtggtttaaacc

SEQ ID NO: 50953 - DNA, 25 bp, SARS Virus
tgtacctgttaagtggtttaaaccg

SEQ ID NO: 50954 - DNA, 25 bp, SARS Virus
gtacctgttaaggggtttaaaccga

SEQ ID NO: 50955 - DNA, 25 bp, SARS Virus
tacctgttaagtggtttaaaccgaa

SEQ ID NO: 50956 - DNA, 25 bp, SARS Virus
acctgttaagtggtttaaaccgaac

SEQ ID NO: 50957 - DNA, 25 bp, SARS Virus
cctgttaagtgggttaaaccgaacc

SEQ ID NO: 50958 - DNA, 25 bp, SARS Virus
ctgttaagtggtgtaaaccgaaccg

SEQ ID NO: 50959 - DNA, 25 bp, SARS Virus
tgttaagtggttgaaaccgaaccgg

SEQ ID NO: 50960 - DNA, 25 bp, SARS Virus
gttaagtggtttgaaccgaaccgga

SEQ ID NO: 50961 - DNA, 25 bp, SARS Virus
ttaagtggtttagaccgaaccggag

SEQ ID NO: 50962 - DNA, 25 bp, SARS Virus
taagtggtttaagccgaaccggaga

SEQ ID NO: 50963 - DNA, 25 bp, SARS Virus
aagtggtttaaagcgaaccggagaa

SEQ ID NO: 50964 - DNA, 25 bp, SARS Virus
agtggtttaaacggaaccggagaat

SEQ ID NO: 50965 - DNA, 25 bp, SARS Virus
gtggtttaaaccgaaccggagaata

SEQ ID NO: 50966 - DNA, 25 bp, SARS Virus
tggtttaaaccggaccggagaataa

SEQ ID NO: 50967 - DNA, 25 bp, SARS Virus
ggtttaaaccgagccggagaataac

SEQ ID NO: 50968 - DNA, 25 bp, SARS Virus
gtttaaaccgaagcggagaataaca

SEQ ID NO: 50969 - DNA, 25 bp, SARS Virus
tttaaaccgaacgggagaataacaa

SEQ ID NO: 50970 - DNA, 25 bp, SARS Virus
ttaaaccgaaccggagaataacaat

SEQ ID NO: 50971 - DNA, 25 bp, SARS Virus
taaaccgaaccggagaataacaatg

SEQ ID NO: 50972 - DNA, 25 bp, SARS Virus
aaaccgaaccggggaataacaatgt

SEQ ID NO: 50973 - DNA, 25 bp, SARS Virus
aaccgaaccggagaataacaatgtc

SEQ ID NO: 50974 - DNA, 25 bp, SARS Virus
accgaaccggaggataacaatgtcg

SEQ ID NO: 50975 - DNA, 25 bp, SARS Virus
ccgaaccggagagtaacaatgtcga

SEQ ID NO: 50976 - DNA, 25 bp, SARS Virus
cgaaccggagaagaacaatgtcgag

SEQ ID NO: 50977 - DNA, 25 bp, SARS Virus
gaaccggagaatgacaatgtcgaga

SEQ ID NO: 50978 - DNA, 25 bp, SARS Virus
aaccggagaatagcaatgtcgagat

SEQ ID NO: 50979 - DNA, 25 bp, SARS Virus
accggagaataagaatgtcgagatt

SEQ ID NO: 50980 - DNA, 25 bp, SARS Virus
ccggagaataacgatgtcgagattc

SEQ ID NO: 50981 - DNA, 25 bp, SARS Virus
cggagaataacagtgtcgagattct

SEQ ID NO: 50982 - DNA, 25 bp, SARS Virus
ggagaataacaaggtcgagattctc

SEQ ID NO: 50983 - DNA, 25 bp, SARS Virus
gagaataacaatgtcgagattctcg

SEQ ID NO: 50984 - DNA, 25 bp, SARS Virus
agaataacaatggcgagattctcgg

SEQ ID NO: 50985 - DNA, 25 bp, SARS Virus
gaataacaatgtggagattctcggt

SEQ ID NO: 50986 - DNA, 25 bp, SARS Virus
aataacaatgtcgagattctcggtt

SEQ ID NO: 50987 - DNA, 25 bp, SARS Virus
ataacaatgtcgggattctcggttg

SEQ ID NO: 50988 - DNA, 25 bp, SARS Virus
taacaatgtcgagattctcggttga

SEQ ID NO: 50989 - DNA, 25 bp, SARS Virus
aacaatgtcgaggttctcggttgag

SEQ ID NO: 50990 - DNA, 25 bp, SARS Virus
acaatgtcgagagtctcggttgagt

SEQ ID NO: 50991 - DNA, 25 bp, SARS Virus
caatgtcgagatgctcggttgagtc

SEQ ID NO: 50992 - DNA, 25 bp, SARS Virus
aatgtcgagattgtcggttgagtcg

SEQ ID NO: 50993 - DNA, 25 bp, SARS Virus
atgtcgagattcgcggttgagtcga

SEQ ID NO: 50994 - DNA, 25 bp, SARS Virus
tgtcgagattctgggttgagtcgac

SEQ ID NO: 50995 - DNA, 25 bp, SARS Virus
gtcgagattctcggttgagtcgaca

SEQ ID NO: 50996 - DNA, 25 bp, SARS Virus
tcgagattctcggttgagtcgacaa

SEQ ID NO: 50997 - DNA, 25 bp, SARS Virus
cgagattctcgggtgagtcgacaat

SEQ ID NO: 50998 - DNA, 25 bp, SARS Virus
gagattctcggtggagtcgacaatt

SEQ ID NO: 50999 - DNA, 25 bp, SARS Virus
agattctcggttgagtcgacaattt

SEQ ID NO: 51000 - DNA, 25 bp, SARS Virus
gattctcggttgggtcgacaatttg

SEQ ID NO: 51001 - DNA, 25 bp, SARS Virus
attctcggttgagtcgacaatttga

SEQ ID NO: 51002 - DNA, 25 bp, SARS Virus
ttctcggttgaggcgacaatttgat

SEQ ID NO: 51003 - DNA, 25 bp, SARS Virus
tctcggttgagtggacaatttgatg

SEQ ID NO: 51004 - DNA, 25 bp, SARS Virus
ctcggttgagtcgacaatttgatgt

SEQ ID NO: 51005 - DNA, 25 bp, SARS Virus
tcggttgagtcggcaatttgatgtc

SEQ ID NO: 51006 - DNA, 25 bp, SARS Virus
cggttgagtcgagaatttgatgtct

SEQ ID NO: 51007 - DNA, 25 bp, SARS Virus
ggttgagtcgacgatttgatgtctt

SEQ ID NO: 51008 - DNA, 25 bp, SARS Virus
gttgagtcgacagtttgatgtctta

SEQ ID NO: 51009 - DNA, 25 bp, SARS Virus
ttgagtcgacaagttgatgtcttat

SEQ ID NO: 51010 - DNA, 25 bp, SARS Virus
tgagtcgacaatgtgatgtcttatt

SEQ ID NO: 51011 - DNA, 25 bp, SARS Virus
gagtcgacaattggatgtcttatta

SEQ ID NO: 51012 - DNA, 25 bp, SARS Virus
agtcgacaatttgatgtcttattac

SEQ ID NO: 51013 - DNA, 25 bp, SARS Virus
gtcgacaatttggtgtcttattact

SEQ ID NO: 51014 - DNA, 25 bp, SARS Virus
tcgacaatttgaggtcttattactt

SEQ ID NO: 51015 - DNA, 25 bp, SARS Virus
cgacaatttgatgtcttattacttg

SEQ ID NO: 51016 - DNA, 25 bp, SARS Virus
gacaatttgatggcttattacttga

SEQ ID NO: 51017 - DNA, 25 bp, SARS Virus
acaatttgatgtgttattacttgac

SEQ ID NO: 51018 - DNA, 25 bp, SARS Virus
caatttgatgtcgtattacttgact

SEQ ID NO: 51019 - DNA, 25 bp, SARS Virus
aatttgatgtctgattacttgactc

SEQ ID NO: 51020 - DNA, 25 bp, SARS Virus
atttgatgtcttgttacttgactca

SEQ ID NO: 51021 - DNA, 25 bp, SARS Virus
tttgatgtcttagtacttgactcag

SEQ ID NO: 51022 - DNA, 25 bp, SARS Virus
ttgatgtcttatgacttgactcagg

SEQ ID NO: 51023 - DNA, 25 bp, SARS Virus
tgatgtcttattgcttgactcaggt

SEQ ID NO: 51024 - DNA, 25 bp, SARS Virus
gatgtcttattagttgactcaggtc

SEQ ID NO: 51025 - DNA, 25 bp, SARS Virus
atgtcttattacgtgactcaggtca

SEQ ID NO: 51026 - DNA, 25 bp, SARS Virus
tgtcttattactggactcaggtcat

SEQ ID NO: 51027 - DNA, 25 bp, SARS Virus
gtcttattacttgactcaggtcatc

SEQ ID NO: 51028 - DNA, 25 bp, SARS Virus
tcttattacttggctcaggtcatcg

SEQ ID NO: 51029 - DNA, 25 bp, SARS Virus
cttattacttgagtcaggtcatcgt

SEQ ID NO: 51030 - DNA, 25 bp, SARS Virus
ttattacttgacgcaggtcatcgtg

SEQ ID NO: 51031 - DNA, 25 bp, SARS Virus
tattacttgactgaggtcatcgtga

SEQ ID NO: 51032 - DNA, 25 bp, SARS Virus
attacttgactcgggtcatcgtgat

SEQ ID NO: 51033 - DNA, 25 bp, SARS Virus
ttacttgactcaggtcatcgtgatg

SEQ ID NO: 51034 - DNA, 25 bp, SARS Virus
tacttgactcaggtcatcgtgatgc

SEQ ID NO: 51035 - DNA, 25 bp, SARS Virus
acttgactcagggcatcgtgatgct

SEQ ID NO: 51036 - DNA, 25 bp, SARS Virus
cttgactcaggtgatcgtgatgctg

SEQ ID NO: 51037 - DNA, 25 bp, SARS Virus
ttgactcaggtcgtcgtgatgctgt

SEQ ID NO: 51038 - DNA, 25 bp, SARS Virus
tgactcaggtcagcgtgatgctgtc

SEQ ID NO: 51039 - DNA, 25 bp, SARS Virus
gactcaggtcatggtgatgctgtct

SEQ ID NO: 51040 - DNA, 25 bp, SARS Virus
actcaggtcatcgtgatgctgtcta

SEQ ID NO: 51041 - DNA, 25 bp, SARS Virus
ctcaggtcatcgggatgctgtctac

SEQ ID NO: 51042 - DNA, 25 bp, SARS Virus
tcaggtcatcgtgatgctgtctaca

SEQ ID NO: 51043 - DNA, 25 bp, SARS Virus
caggtcatcgtggtgctgtctacag

SEQ ID NO: 51044 - DNA, 25 bp, SARS Virus
aggtcatcgtgaggctgtctacagg

SEQ ID NO: 51045 - DNA, 25 bp, SARS Virus
ggtcatcgtgatgctgtctacagga

SEQ ID NO: 51046 - DNA, 25 bp, SARS Virus
gtcatcgtgatggtgtctacaggac

SEQ ID NO: 51047 - DNA, 25 bp, SARS Virus
tcatcgtgatgcggtctacaggaca

SEQ ID NO: 51048 - DNA, 25 bp, SARS Virus
catcgtgatgctgtctacaggacac

SEQ ID NO: 51049 - DNA, 25 bp, SARS Virus
atcgtgatgctggctacaggacacg

SEQ ID NO: 51050 - DNA, 25 bp, SARS Virus
tcgtgatgctgtgtacaggacacgc

SEQ ID NO: 51051 - DNA, 25 bp, SARS Virus
cgtgatgctgtcgacaggacacgcc

SEQ ID NO: 51052 - DNA, 25 bp, SARS Virus
gtgatgctgtctgcaggacacgccg

SEQ ID NO: 51053 - DNA, 25 bp, SARS Virus
tgatgctgtctagaggacacgccga

SEQ ID NO: 51054 - DNA, 25 bp, SARS Virus
gatgctgtctacgggacacgccgac

SEQ ID NO: 51055 - DNA, 25 bp, SARS Virus
atgctgtctacaggacacgccgacc

SEQ ID NO: 51056 - DNA, 25 bp, SARS Virus
tgctgtctacaggacacgccgacca

SEQ ID NO: 51057 - DNA, 25 bp, SARS Virus
gctgtctacagggcacgccgaccat

SEQ ID NO: 51058 - DNA, 25 bp, SARS Virus
ctgtctacaggagacgccgaccatg

SEQ ID NO: 51059 - DNA, 25 bp, SARS Virus
tgtctacaggacgcgccgaccatgg

SEQ ID NO: 51060 - DNA, 25 bp, SARS Virus
gtctacaggacaggccgaccatggt

SEQ ID NO: 51061 - DNA, 25 bp, SARS Virus
tctacaggacacgccgaccatggtg

SEQ ID NO: 51062 - DNA, 25 bp, SARS Virus
ctacaggacacggcgaccatggtgt

SEQ ID NO: 51063 - DNA, 25 bp, SARS Virus
tacaggacacgcggaccatggtgtg

SEQ ID NO: 51064 - DNA, 25 bp, SARS Virus
acaggacacgccgaccatggtgtgt

SEQ ID NO: 51065 - DNA, 25 bp, SARS Virus
caggacacgccggccatggtgtgtt

SEQ ID NO: 51066 - DNA, 25 bp, SARS Virus
aggacacgccgagcatggtgtgttt

SEQ ID NO: 51067 - DNA, 25 bp, SARS Virus
ggacacgccgacgatggtgtgtttg

SEQ ID NO: 51068 - DNA, 25 bp, SARS Virus
gacacgccgaccgtggtgtgtttgt

SEQ ID NO: 51069 - DNA, 25 bp, SARS Virus
acacgccgaccagggtgtgtttgtc

SEQ ID NO: 51070 - DNA, 25 bp, SARS Virus
cacgccgaccatggtgtgtttgtcg

SEQ ID NO: 51071 - DNA, 25 bp, SARS Virus
acgccgaccatggtgtgtttgtcga

SEQ ID NO: 51072 - DNA, 25 bp, SARS Virus
cgccgaccatggggtgtttgtcgaa

SEQ ID NO: 51073 - DNA, 25 bp, SARS Virus
gccgaccatggtgtgtttgtcgaac

SEQ ID NO: 51074 - DNA, 25 bp, SARS Virus
ccgaccatggtgggtttgtcgaaca

SEQ ID NO: 51075 - DNA, 25 bp, SARS Virus
cgaccatggtgtgtttgtcgaacat

SEQ ID NO: 51076 - DNA, 25 bp, SARS Virus
gaccatggtgtggttgtcgaacatg

SEQ ID NO: 51077 - DNA, 25 bp, SARS Virus
accatggtgtgtgtgtcgaacatga

SEQ ID NO: 51078 - DNA, 25 bp, SARS Virus
ccatggtgtgttggtcgaacatgac

SEQ ID NO: 51079 - DNA, 25 bp, SARS Virus
catggtgtgtttgtcgaacatgact

SEQ ID NO: 51080 - DNA, 25 bp, SARS Virus
atggtgtgtttggcgaacatgacta

SEQ ID NO: 51081 - DNA, 25 bp, SARS Virus
tggtgtgtttgtggaacatgactac

SEQ ID NO: 51082 - DNA, 25 bp, SARS Virus
ggtgtgtttgtcgaacatgactact

SEQ ID NO: 51083 - DNA, 25 bp, SARS Virus
gtgtgtttgtcggacatgactactg

SEQ ID NO: 51084 - DNA, 25 bp, SARS Virus
tgtgtttgtcgagcatgactactgt

SEQ ID NO: 51085 - DNA, 25 bp, SARS Virus
gtgtttgtcgaagatgactactgtt

SEQ ID NO: 51086 - DNA, 25 bp, SARS Virus
tgtttgtcgaacgtgactactgtta

SEQ ID NO: 51087 - DNA, 25 bp, SARS Virus
gtttgtcgaacaggactactgttac

SEQ ID NO: 51088 - DNA, 25 bp, SARS Virus
tttgtcgaacatgactactgttacg

SEQ ID NO: 51089 - DNA, 25 bp, SARS Virus
ttgtcgaacatggctactgttacgt

SEQ ID NO: 51090 - DNA, 25 bp, SARS Virus
tgtcgaacatgagtactgttacgtg

SEQ ID NO: 51091 - DNA, 25 bp, SARS Virus
gtcgaacatgacgactgttacgtga

SEQ ID NO: 51092 - DNA, 25 bp, SARS Virus
tcgaacatgactgctgttacgtgaa

SEQ ID NO: 51093 - DNA, 25 bp, SARS Virus
cgaacatgactagtgttacgtgaac

SEQ ID NO: 51094 - DNA, 25 bp, SARS Virus
gaacatgactacggttacgtgaacg

SEQ ID NO: 51095 - DNA, 25 bp, SARS Virus
aacatgactactgttacgtgaacgg

SEQ ID NO: 51096 - DNA, 25 bp, SARS Virus
acatgactactggtacgtgaacgga

SEQ ID NO: 51097 - DNA, 25 bp, SARS Virus
catgactactgtgacgtgaacggat

SEQ ID NO: 51098 - DNA, 25 bp, SARS Virus
atgactactgttgcgtgaacggatg

SEQ ID NO: 51099 - DNA, 25 bp, SARS Virus
tgactactgttaggtgaacggatga

SEQ ID NO: 51100 - DNA, 25 bp, SARS Virus
gactactgttacgtgaacggatgat

SEQ ID NO: 51101 - DNA, 25 bp, SARS Virus
actactgttacgggaacggatgata

SEQ ID NO: 51102 - DNA, 25 bp, SARS Virus
ctactgttacgtgaacggatgatat

SEQ ID NO: 51103 - DNA, 25 bp, SARS Virus
tactgttacgtggacggatgatatt

SEQ ID NO: 51104 - DNA, 25 bp, SARS Virus
actgttacgtgagcggatgatattg

SEQ ID NO: 51105 - DNA, 25 bp, SARS Virus
ctgttacgtgaagggatgatattgt

SEQ ID NO: 51106 - DNA, 25 bp, SARS Virus
tgttacgtgaacggatgatattgtt

SEQ ID NO: 51107 - DNA, 25 bp, SARS Virus
gttacgtgaacggatgatattgtta

SEQ ID NO: 51108 - DNA, 25 bp, SARS Virus
ttacgtgaacgggtgatattgttaa

SEQ ID NO: 51109 - DNA, 25 bp, SARS Virus
tacgtgaacggaggatattgttaag

SEQ ID NO: 51110 - DNA, 25 bp, SARS Virus
acgtgaacggatgatattgttaagc

SEQ ID NO: 51111 - DNA, 25 bp, SARS Virus
cgtgaacggatggtattgttaagct

SEQ ID NO: 51112 - DNA, 25 bp, SARS Virus
gtgaacggatgagattgttaagctt

SEQ ID NO: 51113 - DNA, 25 bp, SARS Virus
tgaacggatgatgttgttaagcttc

SEQ ID NO: 51114 - DNA, 25 bp, SARS Virus
gaacggatgatagtgttaagcttcc

SEQ ID NO: 51115 - DNA, 25 bp, SARS Virus
aacggatgatatggttaagcttccc

SEQ ID NO: 51116 - DNA, 25 bp, SARS Virus
acggatgatattgttaagcttccct

SEQ ID NO: 51117 - DNA, 25 bp, SARS Virus
cggatgatattggtaagcttccctc

SEQ ID NO: 51118 - DNA, 25 bp, SARS Virus
ggatgatattgtgaagcttccctcc

SEQ ID NO: 51119 - DNA, 25 bp, SARS Virus
gatgatattgttgagcttccctcca

SEQ ID NO: 51120 - DNA, 25 bp, SARS Virus
atgatattgttaggcttccctccat

SEQ ID NO: 51121 - DNA, 25 bp, SARS Virus
tgatattgttaagcttccctccatc

SEQ ID NO: 51122 - DNA, 25 bp, SARS Virus
gatattgttaaggttccctccatcc

SEQ ID NO: 51123 - DNA, 25 bp, SARS Virus
atattgttaagcgtccctccatcca

SEQ ID NO: 51124 - DNA, 25 bp, SARS Virus
tattgttaagctgccctccatccaa

SEQ ID NO: 51125 - DNA, 25 bp, SARS Virus
attgttaagcttgcctccatccaaa

SEQ ID NO: 51126 - DNA, 25 bp, SARS Virus
ttgttaagcttcgctccatccaaac

SEQ ID NO: 51127 - DNA, 25 bp, SARS Virus
tgttaagcttccgtccatccaaaca

SEQ ID NO: 51128 - DNA, 25 bp, SARS Virus
gttaagcttcccgccatccaaacac

SEQ ID NO: 51129 - DNA, 25 bp, SARS Virus
ttaagcttccctgcatccaaacacg

SEQ ID NO: 51130 - DNA, 25 bp, SARS Virus
taagcttccctcgatccaaacacga

SEQ ID NO: 51131 - DNA, 25 bp, SARS Virus
aagcttccctccgtccaaacacgac

SEQ ID NO: 51132 - DNA, 25 bp, SARS Virus
agcttccctccagccaaacacgacc

SEQ ID NO: 51133 - DNA, 25 bp, SARS Virus
gcttccctccatgcaaacacgaccg

SEQ ID NO: 51134 - DNA, 25 bp, SARS Virus
cttccctccatcgaaacacgaccgt

SEQ ID NO: 51135 - DNA, 25 bp, SARS Virus
ttccctccatccgaacacgaccgta

SEQ ID NO: 51136 - DNA, 25 bp, SARS Virus
tccctccatccagacacgaccgtaa

SEQ ID NO: 51137 - DNA, 25 bp, SARS Virus
ccctccatccaagcacgaccgtaat

SEQ ID NO: 51138 - DNA, 25 bp, SARS Virus
cctccatccaaagacgaccgtaatg

SEQ ID NO: 51139 - DNA, 25 bp, SARS Virus
ctccatccaaacgcgaccgtaatga

SEQ ID NO: 51140 - DNA, 25 bp, SARS Virus
tccatccaaacaggaccgtaatgat

SEQ ID NO: 51141 - DNA, 25 bp, SARS Virus
ccatccaaacacgaccgtaatgata

SEQ ID NO: 51142 - DNA, 25 bp, SARS Virus
catccaaacacggccgtaatgatag

SEQ ID NO: 51143 - DNA, 25 bp, SARS Virus
atccaaacacgagcgtaatgatagt

SEQ ID NO: 51144 - DNA, 25 bp, SARS Virus
tccaaacacgacggtaatgatagtc

SEQ ID NO: 51145 - DNA, 25 bp, SARS Virus
ccaaacacgaccgtaatgatagtct

SEQ ID NO: 51146 - DNA, 25 bp, SARS Virus
caaacacgaccggaatgatagtctg

SEQ ID NO: 51147 - DNA, 25 bp, SARS Virus
aaacacgaccgtgatgatagtctgg

SEQ ID NO: 51148 - DNA, 25 bp, SARS Virus
aacacgaccgtagtgatagtctggt

SEQ ID NO: 51149 - DNA, 25 bp, SARS Virus
acacgaccgtaaggatagtctggtg

SEQ ID NO: 51150 - DNA, 25 bp, SARS Virus
cacgaccgtaatgatagtctggtgg

SEQ ID NO: 51151 - DNA, 25 bp, SARS Virus
acgaccgtaatggtagtctggtggt

SEQ ID NO: 51152 - DNA, 25 bp, SARS Virus
cgaccgtaatgagagtctggtggtt

SEQ ID NO: 51153 - DNA, 25 bp, SARS Virus
gaccgtaatgatggtctggtggttc

SEQ ID NO: 51154 - DNA, 25 bp, SARS Virus
accgtaatgatagtctggtggttct

SEQ ID NO: 51155 - DNA, 25 bp, SARS Virus
ccgtaatgataggctggtggttcta

SEQ ID NO: 51156 - DNA, 25 bp, SARS Virus
cgtaatgatagtgtggtggttctag

SEQ ID NO: 51157 - DNA, 25 bp, SARS Virus
gtaatgatagtcgggtggttctaga

SEQ ID NO: 51158 - DNA, 25 bp, SARS Virus
taatgatagtctggtggttctagag

SEQ ID NO: 51159 - DNA, 25 bp, SARS Virus
aatgatagtctggtggttctagagt

SEQ ID NO: 51160 - DNA, 25 bp, SARS Virus
atgatagtctgggggttctagagtt

SEQ ID NO: 51161 - DNA, 25 bp, SARS Virus
tgatagtctggtggttctagagttt

SEQ ID NO: 51162 - DNA, 25 bp, SARS Virus
gatagtctggtggttctagagttta

SEQ ID NO: 51163 - DNA, 25 bp, SARS Virus
atagtctggtgggtctagagtttac

SEQ ID NO: 51164 - DNA, 25 bp, SARS Virus
tagtctggtggtgctagagtttacc

SEQ ID NO: 51165 - DNA, 25 bp, SARS Virus
agtctggtggttgtagagtttaccc

SEQ ID NO: 51166 - DNA, 25 bp, SARS Virus
gtctggtggttcgagagtttacccg

SEQ ID NO: 51167 - DNA, 25 bp, SARS Virus
tctggtggttctggagtttacccga

SEQ ID NO: 51168 - DNA, 25 bp, SARS Virus
ctggtggttctagagtttacccgat

SEQ ID NO: 51169 - DNA, 25 bp, SARS Virus
tggtggttctagggtttacccgatc

SEQ ID NO: 51170 - DNA, 25 bp, SARS Virus
ggtggttctagagtttacccgatct

SEQ ID NO: 51171 - DNA, 25 bp, SARS Virus
gtggttctagaggttacccgatcta

SEQ ID NO: 51172 - DNA, 25 bp, SARS Virus
tggttctagagtgtacccgatctaa

SEQ ID NO: 51173 - DNA, 25 bp, SARS Virus
ggttctagagttgacccgatctaag

SEQ ID NO: 51174 - DNA, 25 bp, SARS Virus
gttctagagtttgcccgatctaagg

SEQ ID NO: 51175 - DNA, 25 bp, SARS Virus
ttctagagtttagccgatctaaggg

SEQ ID NO: 51176 - DNA, 25 bp, SARS Virus
tctagagtttacgcgatctaaggga

SEQ ID NO: 51177 - DNA, 25 bp, SARS Virus
ctagagtttaccggatctaagggat

SEQ ID NO: 51178 - DNA, 25 bp, SARS Virus
tagagtttacccgatctaagggatt

SEQ ID NO: 51179 - DNA, 25 bp, SARS Virus
agagtttacccggtctaagggattc

SEQ ID NO: 51180 - DNA, 25 bp, SARS Virus
gagtttacccgagctaagggattct

SEQ ID NO: 51181 - DNA, 25 bp, SARS Virus
agtttacccgatgtaagggattctc

SEQ ID NO: 51182 - DNA, 25 bp, SARS Virus
gtttacccgatcgaagggattctca

SEQ ID NO: 51183 - DNA, 25 bp, SARS Virus
tttacccgatctgagggattctcac

SEQ ID NO: 51184 - DNA, 25 bp, SARS Virus
ttacccgatctaggggattctcact

SEQ ID NO: 51185 - DNA, 25 bp, SARS Virus
tacccgatctaagggattctcacta

SEQ ID NO: 51186 - DNA, 25 bp, SARS Virus
acccgatctaagggattctcactac

SEQ ID NO: 51187 - DNA, 25 bp, SARS Virus
cccgatctaagggattctcactacc

SEQ ID NO: 51188 - DNA, 25 bp, SARS Virus
ccgatctaaggggttctcactacca

SEQ ID NO: 51189 - DNA, 25 bp, SARS Virus
cgatctaagggagtctcactaccat

SEQ ID NO: 51190 - DNA, 25 bp, SARS Virus
gatctaagggatgctcactaccatg

SEQ ID NO: 51191 - DNA, 25 bp, SARS Virus
atctaagggattgtcactaccatgt

SEQ ID NO: 51192 - DNA, 25 bp, SARS Virus
tctaagggattcgcactaccatgtc

SEQ ID NO: 51193 - DNA, 25 bp, SARS Virus
ctaagggattctgactaccatgtcc

SEQ ID NO: 51194 - DNA, 25 bp, SARS Virus
taagggattctcgctaccatgtcca

SEQ ID NO: 51195 - DNA, 25 bp, SARS Virus
aagggattctcagtaccatgtccat

SEQ ID NO: 51196 - DNA, 25 bp, SARS Virus
agggattctcacgaccatgtccatg

SEQ ID NO: 51197 - DNA, 25 bp, SARS Virus
gggattctcactgccatgtccatgt

SEQ ID NO: 51198 - DNA, 25 bp, SARS Virus
ggattctcactagcatgtccatgtt

SEQ ID NO: 51199 - DNA, 25 bp, SARS Virus
gattctcactacgatgtccatgtta

SEQ ID NO: 51200 - DNA, 25 bp, SARS Virus
attctcactaccgtgtccatgttaa

SEQ ID NO: 51201 - DNA, 25 bp, SARS Virus
ttctcactaccaggtccatgttaaa

SEQ ID NO: 51202 - DNA, 25 bp, SARS Virus
tctcactaccatgtccatgttaaat

SEQ ID NO: 51203 - DNA, 25 bp, SARS Virus
ctcactaccatggccatgttaaatg

SEQ ID NO: 51204 - DNA, 25 bp, SARS Virus
tcactaccatgtgcatgttaaatgt

SEQ ID NO: 51205 - DNA, 25 bp, SARS Virus
cactaccatgtcgatgttaaatgtg

SEQ ID NO: 51206 - DNA, 25 bp, SARS Virus
actaccatgtccgtgttaaatgtgt

SEQ ID NO: 51207 - DNA, 25 bp, SARS Virus
ctaccatgtccaggttaaatgtgtc

SEQ ID NO: 51208 - DNA, 25 bp, SARS Virus
taccatgtccatgttaaatgtgtct

SEQ ID NO: 51209 - DNA, 25 bp, SARS Virus
accatgtccatggtaaatgtgtctt

SEQ ID NO: 51210 - DNA, 25 bp, SARS Virus
ccatgtccatgtgaaatgtgtcttg

SEQ ID NO: 51211 - DNA, 25 bp, SARS Virus
catgtccatgttgaatgtgtcttga

SEQ ID NO: 51212 - DNA, 25 bp, SARS Virus
atgtccatgttagatgtgtcttgac

SEQ ID NO: 51213 - DNA, 25 bp, SARS Virus
tgtccatgttaagtgtgtcttgacc

SEQ ID NO: 51214 - DNA, 25 bp, SARS Virus
gtccatgttaaaggtgtcttgacct

SEQ ID NO: 51215 - DNA, 25 bp, SARS Virus
tccatgttaaatgtgtcttgacctt

SEQ ID NO: 51216 - DNA, 25 bp, SARS Virus
ccatgttaaatgggtcttgaccttg

SEQ ID NO: 51217 - DNA, 25 bp, SARS Virus
catgttaaatgtgtcttgaccttgg

SEQ ID NO: 51218 - DNA, 25 bp, SARS Virus
atgttaaatgtggcttgaccttggt

SEQ ID NO: 51219 - DNA, 25 bp, SARS Virus
tgttaaatgtgtgttgaccttggtg

SEQ ID NO: 51220 - DNA, 25 bp, SARS Virus
gttaaatgtgtcgtgaccttggtgg

SEQ ID NO: 51221 - DNA, 25 bp, SARS Virus
ttaaatgtgtctggaccttggtgga

SEQ ID NO: 51222 - DNA, 25 bp, SARS Virus
taaatgtgtcttgaccttggtggaa

SEQ ID NO: 51223 - DNA, 25 bp, SARS Virus
aaatgtgtcttggccttggtggaac

SEQ ID NO: 51224 - DNA, 25 bp, SARS Virus
aatgtgtcttgagcttggtggaaca

SEQ ID NO: 51225 - DNA, 25 bp, SARS Virus
atgtgtcttgacgttggtggaacat

SEQ ID NO: 51226 - DNA, 25 bp, SARS Virus
tgtgtcttgaccgtggtggaacatc

SEQ ID NO: 51227 - DNA, 25 bp, SARS Virus
gtgtcttgacctgggtggaacatcc

SEQ ID NO: 51228 - DNA, 25 bp, SARS Virus
tgtcttgaccttggtggaacatcca

SEQ ID NO: 51229 - DNA, 25 bp, SARS Virus
gtcttgaccttggtggaacatccaa

SEQ ID NO: 51230 - DNA, 25 bp, SARS Virus
tcttgaccttgggggaacatccaaa

SEQ ID NO: 51231 - DNA, 25 bp, SARS Virus
cttgaccttggtggaacatccaaac

SEQ ID NO: 51232 - DNA, 25 bp, SARS Virus
ttgaccttggtggaacatccaaaca

SEQ ID NO: 51233 - DNA, 25 bp, SARS Virus
tgaccttggtgggacatccaaacaa

SEQ ID NO: 51234 - DNA, 25 bp, SARS Virus
gaccttggtggagcatccaaacaat

SEQ ID NO: 51235 - DNA, 25 bp, SARS Virus
accttggtggaagatccaaacaatg

SEQ ID NO: 51236 - DNA, 25 bp, SARS Virus
ccttggtggaacgtccaaacaatgt

SEQ ID NO: 51237 - DNA, 25 bp, SARS Virus
cttggtggaacagccaaacaatgtc

SEQ ID NO: 51238 - DNA, 25 bp, SARS Virus
ttggtggaacatgcaaacaatgtct

SEQ ID NO: 51239 - DNA, 25 bp, SARS Virus
tggtggaacatcgaaacaatgtctg

SEQ ID NO: 51240 - DNA, 25 bp, SARS Virus
ggtggaacatccgaacaatgtctgt

SEQ ID NO: 51241 - DNA, 25 bp, SARS Virus
gtggaacatccagacaatgtctgtg

SEQ ID NO: 51242 - DNA, 25 bp, SARS Virus
tggaacatccaagcaatgtctgtgt

SEQ ID NO: 51243 - DNA, 25 bp, SARS Virus
ggaacatccaaagaatgtctgtgtg

SEQ ID NO: 51244 - DNA, 25 bp, SARS Virus
gaacatccaaacgatgtctgtgtgg

SEQ ID NO: 51245 - DNA, 25 bp, SARS Virus
aacatccaaacagtgtctgtgtggt

SEQ ID NO: 51246 - DNA, 25 bp, SARS Virus
acatccaaacaaggtctgtgtggtt

SEQ ID NO: 51247 - DNA, 25 bp, SARS Virus
catccaaacaatgtctgtgtggttt

SEQ ID NO: 51248 - DNA, 25 bp, SARS Virus
atccaaacaatggctgtgtggtttt

SEQ ID NO: 51249 - DNA, 25 bp, SARS Virus
tccaaacaatgtgtgtgtggttttc

SEQ ID NO: 51250 - DNA, 25 bp, SARS Virus
ccaaacaatgtcggtgtggttttcc

SEQ ID NO: 51251 - DNA, 25 bp, SARS Virus
caaacaatgtctgtgtggttttccc

SEQ ID NO: 51252 - DNA, 25 bp, SARS Virus
aaacaatgtctgggtggttttcccg

SEQ ID NO: 51253 - DNA, 25 bp, SARS Virus
aacaatgtctgtgtggttttcccgg

SEQ ID NO: 51254 - DNA, 25 bp, SARS Virus
acaatgtctgtggggttttcccgga

SEQ ID NO: 51255 - DNA, 25 bp, SARS Virus
caatgtctgtgtggttttcccggat

SEQ ID NO: 51256 - DNA, 25 bp, SARS Virus
aatgtctgtgtggttttcccggatt

SEQ ID NO: 51257 - DNA, 25 bp, SARS Virus
atgtctgtgtgggtttcccggattt

SEQ ID NO: 51258 - DNA, 25 bp, SARS Virus
tgtctgtgtggtgttcccggatttc

SEQ ID NO: 51259 - DNA, 25 bp, SARS Virus
gtctgtgtggttgtcccggatttca

SEQ ID NO: 51260 - DNA, 25 bp, SARS Virus
tctgtgtggtttgcccggatttcac

SEQ ID NO: 51261 - DNA, 25 bp, SARS Virus
ctgtgtggttttgccggatttcact

SEQ ID NO: 51262 - DNA, 25 bp, SARS Virus
tgtgtggttttcgcggatttcactt

SEQ ID NO: 51263 - DNA, 25 bp, SARS Virus
gtgtggttttccgggatttcacttt

SEQ ID NO: 51264 - DNA, 25 bp, SARS Virus
tgtggttttcccggatttcacttta

SEQ ID NO: 51265 - DNA, 25 bp, SARS Virus
gtggttttcccggatttcactttat

SEQ ID NO: 51266 - DNA, 25 bp, SARS Virus
tggttttcccgggtttcactttatg

SEQ ID NO: 51267 - DNA, 25 bp, SARS Virus
ggttttcccggagttcactttatga

SEQ ID NO: 51268 - DNA, 25 bp, SARS Virus
gttttcccggatgtcactttatgaa

SEQ ID NO: 51269 - DNA, 25 bp, SARS Virus
ttttcccggattgcactttatgaac

SEQ ID NO: 51270 - DNA, 25 bp, SARS Virus
tttcccggatttgactttatgaaca

SEQ ID NO: 51271 - DNA, 25 bp, SARS Virus
ttcccggatttcgctttatgaacat

SEQ ID NO: 51272 - DNA, 25 bp, SARS Virus
tcccggatttcagtttatgaacatg

SEQ ID NO: 51273 - DNA, 25 bp, SARS Virus
cccggatttcacgttatgaacatga

SEQ ID NO: 51274 - DNA, 25 bp, SARS Virus
ccggatttcactgtatgaacatgaa

SEQ ID NO: 51275 - DNA, 25 bp, SARS Virus
cggatttcacttgatgaacatgaag

SEQ ID NO: 51276 - DNA, 25 bp, SARS Virus
ggatttcactttgtgaacatgaagt

SEQ ID NO: 51277 - DNA, 25 bp, SARS Virus
gatttcactttaggaacatgaagta

SEQ ID NO: 51278 - DNA, 25 bp, SARS Virus
atttcactttatgaacatgaagtag

SEQ ID NO: 51279 - DNA, 25 bp, SARS Virus
tttcactttatggacatgaagtagt

SEQ ID NO: 51280 - DNA, 25 bp, SARS Virus
ttcactttatgagcatgaagtagtt

SEQ ID NO: 51281 - DNA, 25 bp, SARS Virus
tcactttatgaagatgaagtagttt

SEQ ID NO: 51282 - DNA, 25 bp, SARS Virus
cactttatgaacgtgaagtagtttc

SEQ ID NO: 51283 - DNA, 25 bp, SARS Virus
actttatgaacaggaagtagtttcc

SEQ ID NO: 51284 - DNA, 25 bp, SARS Virus
ctttatgaacatgaagtagtttccg

SEQ ID NO: 51285 - DNA, 25 bp, SARS Virus
tttatgaacatggagtagtttccga

SEQ ID NO: 51286 - DNA, 25 bp, SARS Virus
ttatgaacatgaggtagtttccgaa

SEQ ID NO: 51287 - DNA, 25 bp, SARS Virus
tatgaacatgaagtagtttccgaat

SEQ ID NO: 51288 - DNA, 25 bp, SARS Virus
atgaacatgaaggagtttccgaatt

SEQ ID NO: 51289 - DNA, 25 bp, SARS Virus
tgaacatgaagtggtttccgaattt

SEQ ID NO: 51290 - DNA, 25 bp, SARS Virus
gaacatgaagtagtttccgaatttg

SEQ ID NO: 51291 - DNA, 25 bp, SARS Virus
aacatgaagtaggttccgaatttgt

SEQ ID NO: 51292 - DNA, 25 bp, SARS Virus
acatgaagtagtgtccgaatttgtt

SEQ ID NO: 51293 - DNA, 25 bp, SARS Virus
catgaagtagttgccgaatttgttg

SEQ ID NO: 51294 - DNA, 25 bp, SARS Virus
atgaagtagtttgcgaatttgttgg

SEQ ID NO: 51295 - DNA, 25 bp, SARS Virus
tgaagtagtttcggaatttgttgga

SEQ ID NO: 51296 - DNA, 25 bp, SARS Virus
gaagtagtttccgaatttgttggat

SEQ ID NO: 51297 - DNA, 25 bp, SARS Virus
aagtagtttccggatttgttggatt

SEQ ID NO: 51298 - DNA, 25 bp, SARS Virus
agtagtttccgagtttgttggattt

SEQ ID NO: 51299 - DNA, 25 bp, SARS Virus
gtagtttccgaagttgttggattta

SEQ ID NO: 51300 - DNA, 25 bp, SARS Virus
tagtttccgaatgtgttggatttat

SEQ ID NO: 51301 - DNA, 25 bp, SARS Virus
agtttccgaattggttggatttatc

SEQ ID NO: 51302 - DNA, 25 bp, SARS Virus
gtttccgaatttgttggatttatct

SEQ ID NO: 51303 - DNA, 25 bp, SARS Virus
tttccgaatttggtggatttatctc

SEQ ID NO: 51304 - DNA, 25 bp, SARS Virus
ttccgaatttgtgggatttatctcc

SEQ ID NO: 51305 - DNA, 25 bp, SARS Virus
tccgaatttgttggatttatctcca

SEQ ID NO: 51306 - DNA, 25 bp, SARS Virus
ccgaatttgttggatttatctccat

SEQ ID NO: 51307 - DNA, 25 bp, SARS Virus
cgaatttgttgggtttatctccata

SEQ ID NO: 51308 - DNA, 25 bp, SARS Virus
gaatttgttggagttatctccatac

SEQ ID NO: 51309 - DNA, 25 bp, SARS Virus
aatttgttggatgtatctccatacc

SEQ ID NO: 51310 - DNA, 25 bp, SARS Virus
atttgttggattgatctccatacca

SEQ ID NO: 51311 - DNA, 25 bp, SARS Virus
tttgttggatttgtctccataccac

SEQ ID NO: 51312 - DNA, 25 bp, SARS Virus
ttgttggatttagctccataccacg

SEQ ID NO: 51313 - DNA, 25 bp, SARS Virus
tgttggatttatgtccataccacga

SEQ ID NO: 51314 - DNA, 25 bp, SARS Virus
gttggatttatcgccataccacgac

SEQ ID NO: 51315 - DNA, 25 bp, SARS Virus
ttggatttatctgcataccacgacc

SEQ ID NO: 51316 - DNA, 25 bp, SARS Virus
tggatttatctcgataccacgaccc

SEQ ID NO: 51317 - DNA, 25 bp, SARS Virus
ggatttatctccgtaccacgacccg

SEQ ID NO: 51318 - DNA, 25 bp, SARS Virus
gatttatctccagaccacgacccgt

SEQ ID NO: 51319 - DNA, 25 bp, SARS Virus
atttatctccatgccacgacccgtc

SEQ ID NO: 51320 - DNA, 25 bp, SARS Virus
tttatctccatagcacgacccgtca

SEQ ID NO: 51321 - DNA, 25 bp, SARS Virus
ttatctccatacgacgacccgtcaa

SEQ ID NO: 51322 - DNA, 25 bp, SARS Virus
tatctccataccgcgacccgtcaaa

SEQ ID NO: 51323 - DNA, 25 bp, SARS Virus
atctccataccaggacccgtcaaat

SEQ ID NO: 51324 - DNA, 25 bp, SARS Virus
tctccataccacgacccgtcaaatc

SEQ ID NO: 51325 - DNA, 25 bp, SARS Virus
ctccataccacggcccgtcaaatcg

SEQ ID NO: 51326 - DNA, 25 bp, SARS Virus
tccataccacgagccgtcaaatcga

SEQ ID NO: 51327 - DNA, 25 bp, SARS Virus
ccataccacgacgcgtcaaatcgac

SEQ ID NO: 51328 - DNA, 25 bp, SARS Virus
cataccacgaccggtcaaatcgacg

SEQ ID NO: 51329 - DNA, 25 bp, SARS Virus
ataccacgacccgtcaaatcgacga

SEQ ID NO: 51330 - DNA, 25 bp, SARS Virus
taccacgacccggcaaatcgacgat

SEQ ID NO: 51331 - DNA, 25 bp, SARS Virus
accacgacccgtgaaatcgacgatg

SEQ ID NO: 51332 - DNA, 25 bp, SARS Virus
ccacgacccgtcgaatcgacgatgt

SEQ ID NO: 51333 - DNA, 25 bp, SARS Virus
cacgacccgtcagatcgacgatgtc

SEQ ID NO: 51334 - DNA, 25 bp, SARS Virus
acgacccgtcaagtcgacgatgtca

SEQ ID NO: 51335 - DNA, 25 bp, SARS Virus
cgacccgtcaaagcgacgatgtcat

SEQ ID NO: 51336 - DNA, 25 bp, SARS Virus
gacccgtcaaatggacgatgtcatg

SEQ ID NO: 51337 - DNA, 25 bp, SARS Virus
acccgtcaaatcgacgatgtcatgc

SEQ ID NO: 51338 - DNA, 25 bp, SARS Virus
cccgtcaaatcggcgatgtcatgca

SEQ ID NO: 51339 - DNA, 25 bp, SARS Virus
ccgtcaaatcgaggatgtcatgcag

SEQ ID NO: 51340 - DNA, 25 bp, SARS Virus
cgtcaaatcgacgatgtcatgcaga

SEQ ID NO: 51341 - DNA, 25 bp, SARS Virus
gtcaaatcgacggtgtcatgcagaa

SEQ ID NO: 51342 - DNA, 25 bp, SARS Virus
tcaaatcgacgaggtcatgcagaag

SEQ ID NO: 51343 - DNA, 25 bp, SARS Virus
caaatcgacgatgtcatgcagaagt

SEQ ID NO: 51344 - DNA, 25 bp, SARS Virus
aaatcgacgatggcatgcagaagtc

SEQ ID NO: 51345 - DNA, 25 bp, SARS Virus
aatcgacgatgtgatgcagaagtcc

SEQ ID NO: 51346 - DNA, 25 bp, SARS Virus
atcgacgatgtcgtgcagaagtccg

SEQ ID NO: 51347 - DNA, 25 bp, SARS Virus
tcgacgatgtcaggcagaagtccga

SEQ ID NO: 51348 - DNA, 25 bp, SARS Virus
cgacgatgtcatgcagaagtccgac

SEQ ID NO: 51349 - DNA, 25 bp, SARS Virus
gacgatgtcatggagaagtccgacc

SEQ ID NO: 51350 - DNA, 25 bp, SARS Virus
acgatgtcatgcggaagtccgacct

SEQ ID NO: 51351 - DNA, 25 bp, SARS Virus
cgatgtcatgcagaagtccgacctt

SEQ ID NO: 51352 - DNA, 25 bp, SARS Virus
gatgtcatgcaggagtccgaccttt

SEQ ID NO: 51353 - DNA, 25 bp, SARS Virus
atgtcatgcagaggtccgaccttta

SEQ ID NO: 51354 - DNA, 25 bp, SARS Virus
tgtcatgcagaagtccgacctttac

SEQ ID NO: 51355 - DNA, 25 bp, SARS Virus
gtcatgcagaaggccgacctttacg

SEQ ID NO: 51356 - DNA, 25 bp, SARS Virus
tcatgcagaagtgcgacctttacga

SEQ ID NO: 51357 - DNA, 25 bp, SARS Virus
catgcagaagtcggacctttacgat

SEQ ID NO: 51358 - DNA, 25 bp, SARS Virus
atgcagaagtccgacctttacgatg

SEQ ID NO: 51359 - DNA, 25 bp, SARS Virus
tgcagaagtccggcctttacgatgt

SEQ ID NO: 51360 - DNA, 25 bp, SARS Virus
gcagaagtccgagctttacgatgtc

SEQ ID NO: 51361 - DNA, 25 bp, SARS Virus
cagaagtccgacgtttacgatgtct

SEQ ID NO: 51362 - DNA, 25 bp, SARS Virus
agaagtccgaccgttacgatgtctt

SEQ ID NO: 51363 - DNA, 25 bp, SARS Virus
gaagtccgacctgtacgatgtcttc

SEQ ID NO: 51364 - DNA, 25 bp, SARS Virus
aagtccgaccttgacgatgtcttca

SEQ ID NO: 51365 - DNA, 25 bp, SARS Virus
agtccgacctttgcgatgtcttcat

SEQ ID NO: 51366 - DNA, 25 bp, SARS Virus
gtccgacctttaggatgtcttcatg

SEQ ID NO: 51367 - DNA, 25 bp, SARS Virus
tccgacctttacgatgtcttcatgg

SEQ ID NO: 51368 - DNA, 25 bp, SARS Virus
ccgacctttacggtgtcttcatgga

SEQ ID NO: 51369 - DNA, 25 bp, SARS Virus
tacgtagacgtgtgaccctttaggt

SEQ ID NO: 51370 - DNA, 25 bp, SARS Virus
acgtagacgtgataccctttaggtc

SEQ ID NO: 51371 - DNA, 25 bp, SARS Virus
cgtagacgtgagtccctttaggtcg

SEQ ID NO: 51372 - DNA, 25 bp, SARS Virus
gtagacgtgagatcctttaggtcgt

SEQ ID NO: 51373 - DNA, 25 bp, SARS Virus
tagacgtgagactctttaggtcgtt

SEQ ID NO: 51374 - DNA, 25 bp, SARS Virus
agacgtgagaccttttaggtcgttc

SEQ ID NO: 51375 - DNA, 25 bp, SARS Virus
gacgtgagaccctttaggtcgttca

SEQ ID NO: 51376 - DNA, 25 bp, SARS Virus
acgtgagaccctttaggtcgttcaa

SEQ ID NO: 51377 - DNA, 25 bp, SARS Virus
cgtgagaccctttaggtcgttcaac

SEQ ID NO: 51378 - DNA, 25 bp, SARS Virus
gtgagacccttttggtcgttcaaca

SEQ ID NO: 51379 - DNA, 25 bp, SARS Virus
tgagaccctttatgtcgttcaacaa

SEQ ID NO: 51380 - DNA, 25 bp, SARS Virus
gagaccctttagttcgttcaacaac

SEQ ID NO: 51381 - DNA, 25 bp, SARS Virus
agaccctttaggtcgttcaacaact

SEQ ID NO: 51382 - DNA, 25 bp, SARS Virus
gaccctttaggttgttcaacaacta

SEQ ID NO: 51383 - DNA, 25 bp, SARS Virus
accctttaggtctttcaacaactac

SEQ ID NO: 51384 - DNA, 25 bp, SARS Virus
ccctttaggtcgttcaacaactacg

SEQ ID NO: 51385 - DNA, 25 bp, SARS Virus
cctttaggtcgttcaacaactacgc

SEQ ID NO: 51386 - DNA, 25 bp, SARS Virus
ctttaggtcgtttaacaactacgcc

SEQ ID NO: 51387 - DNA, 25 bp, SARS Virus
tttaggtcgttctacaactacgcct

SEQ ID NO: 51388 - DNA, 25 bp, SARS Virus
ttaggtcgttcatcaactacgccta

SEQ ID NO: 51389 - DNA, 25 bp, SARS Virus
taggtcgttcaataactacgcctat

SEQ ID NO: 51390 - DNA, 25 bp, SARS Virus
aggtcgttcaactactacgcctatc

SEQ ID NO: 51391 - DNA, 25 bp, SARS Virus
ggtcgttcaacatctacgcctatcg

SEQ ID NO: 51392 - DNA, 25 bp, SARS Virus
gtcgttcaacaattacgcctatcgt

SEQ ID NO: 51393 - DNA, 25 bp, SARS Virus
tcgttcaacaactacgcctatcgtt

SEQ ID NO: 51394 - DNA, 25 bp, SARS Virus
cgttcaacaacttcgcctatcgttc

SEQ ID NO: 51395 - DNA, 25 bp, SARS Virus
gttcaacaactatgcctatcgttct

SEQ ID NO: 51396 - DNA, 25 bp, SARS Virus
ttcaacaactactcctatcgttcta

SEQ ID NO: 51397 - DNA, 25 bp, SARS Virus
tcaacaactacgtctatcgttctaa

SEQ ID NO: 51398 - DNA, 25 bp, SARS Virus
caacaactacgcttatcgttctaac

SEQ ID NO: 51399 - DNA, 25 bp, SARS Virus
aacaactacgcctatcgttctaaca

SEQ ID NO: 51400 - DNA, 25 bp, SARS Virus
acaactacgcctttcgttctaacaa

SEQ ID NO: 51401 - DNA, 25 bp, SARS Virus
caactacgcctatcgttctaacaag

SEQ ID NO: 51402 - DNA, 25 bp, SARS Virus
aactacgcctattgttctaacaagt

SEQ ID NO: 51403 - DNA, 25 bp, SARS Virus
actacgcctatctttctaacaagtt

SEQ ID NO: 51404 - DNA, 25 bp, SARS Virus
ctacgcctatcgttctaacaagttg

SEQ ID NO: 51405 - DNA, 25 bp, SARS Virus
tacgcctatcgttctaacaagttga

SEQ ID NO: 51406 - DNA, 25 bp, SARS Virus
acgcctatcgttttaacaagttgaa

SEQ ID NO: 51407 - DNA, 25 bp, SARS Virus
cgcctatcgttctaacaagttgaat

SEQ ID NO: 51408 - DNA, 25 bp, SARS Virus
gcctatcgttcttacaagttgaatc

SEQ ID NO: 51409 - DNA, 25 bp, SARS Virus
cctatcgttctatcaagttgaatca

SEQ ID NO: 51410 - DNA, 25 bp, SARS Virus
ctatcgttctaataagttgaatcac

SEQ ID NO: 51411 - DNA, 25 bp, SARS Virus
tatcgttctaactagttgaatcact

SEQ ID NO: 51412 - DNA, 25 bp, SARS Virus
atcgttctaacatgttgaatcactt

SEQ ID NO: 51413 - DNA, 25 bp, SARS Virus
tcgttctaacaatttgaatcacttt

SEQ ID NO: 51414 - DNA, 25 bp, SARS Virus
cgttctaacaagttgaatcacttta

SEQ ID NO: 51415 - DNA, 25 bp, SARS Virus
gttctaacaagttgaatcactttaa

SEQ ID NO: 51416 - DNA, 25 bp, SARS Virus
ttctaacaagtttaatcactttaat

SEQ ID NO: 51417 - DNA, 25 bp, SARS Virus
tctaacaagttgtatcactttaatt

SEQ ID NO: 51418 - DNA, 25 bp, SARS Virus
ctaacaagttgattcactttaattg

SEQ ID NO: 51419 - DNA, 25 bp, SARS Virus
taacaagttgaatcactttaattgt

SEQ ID NO: 51420 - DNA, 25 bp, SARS Virus
aacaagttgaattactttaattgta

SEQ ID NO: 51421 - DNA, 25 bp, SARS Virus
acaagttgaatctctttaattgtac

SEQ ID NO: 51422 - DNA, 25 bp, SARS Virus
caagttgaatcattttaattgtacc

SEQ ID NO: 51423 - DNA, 25 bp, SARS Virus
aagttgaatcactttaattgtacct

SEQ ID NO: 51424 - DNA, 25 bp, SARS Virus
agttgaatcactttaattgtacctg

SEQ ID NO: 51425 - DNA, 25 bp, SARS Virus
gttgaatcactttaattgtacctgt

SEQ ID NO: 51426 - DNA, 25 bp, SARS Virus
ttgaatcacttttattgtacctgtt

SEQ ID NO: 51427 - DNA, 25 bp, SARS Virus
tgaatcactttatttgtacctgtta

SEQ ID NO: 51428 - DNA, 25 bp, SARS Virus
gaatcactttaattgtacctgttaa

SEQ ID NO: 51429 - DNA, 25 bp, SARS Virus
aatcactttaattgtacctgttaag

SEQ ID NO: 51430 - DNA, 25 bp, SARS Virus
atcactttaattttacctgttaagt

SEQ ID NO: 51431 - DNA, 25 bp, SARS Virus
tcactttaattgtacctgttaagtg

SEQ ID NO: 51432 - DNA, 25 bp, SARS Virus
cactttaattgttcctgttaagtgg

SEQ ID NO: 51433 - DNA, 25 bp, SARS Virus
actttaattgtatctgttaagtggt

SEQ ID NO: 51434 - DNA, 25 bp, SARS Virus
ctttaattgtacttgttaagtggtt

SEQ ID NO: 51435 - DNA, 25 bp, SARS Virus
tttaattgtacctgttaagtggttt

SEQ ID NO: 51436 - DNA, 25 bp, SARS Virus
ttaattgtaccttttaagtggttta

SEQ ID NO: 51437 - DNA, 25 bp, SARS Virus
taattgtacctgttaagtggtttaa

SEQ ID NO: 51438 - DNA, 25 bp, SARS Virus
aattgtacctgttaagtggtttaaa

SEQ ID NO: 51439 - DNA, 25 bp, SARS Virus
attgtacctgtttagtggtttaaac

SEQ ID NO: 51440 - DNA, 25 bp, SARS Virus
ttgtacctgttatgtggtttaaacc

SEQ ID NO: 51441 - DNA, 25 bp, SARS Virus
tgtacctgttaattggtttaaaccg

SEQ ID NO: 51442 - DNA, 25 bp, SARS Virus
gtacctgttaagtggtttaaaccga

SEQ ID NO: 51443 - DNA, 25 bp, SARS Virus
tacctgttaagttgtttaaaccgaa

SEQ ID NO: 51444 - DNA, 25 bp, SARS Virus
acctgttaagtgttttaaaccgaac

SEQ ID NO: 51445 - DNA, 25 bp, SARS Virus
cctgttaagtggtttaaaccgaacc

SEQ ID NO: 51446 - DNA, 25 bp, SARS Virus
ctgttaagtggtttaaaccgaaccg

SEQ ID NO: 51447 - DNA, 25 bp, SARS Virus
tgttaagtggtttaaaccgaaccgg

SEQ ID NO: 51448 - DNA, 25 bp, SARS Virus
gttaagtggttttaaccgaaccgga

SEQ ID NO: 51449 - DNA, 25 bp, SARS Virus
ttaagtggtttataccgaaccggag

SEQ ID NO: 51450 - DNA, 25 bp, SARS Virus
taagtggtttaatccgaaccggaga

SEQ ID NO: 51451 - DNA, 25 bp, SARS Virus
aagtggtttaaatcgaaccggagaa

SEQ ID NO: 51452 - DNA, 25 bp, SARS Virus
agtggtttaaactgaaccggagaat

SEQ ID NO: 51453 - DNA, 25 bp, SARS Virus
gtggtttaaacctaaccggagaata

SEQ ID NO: 51454 - DNA, 25 bp, SARS Virus
tggtttaaaccgtaccggagaataa

SEQ ID NO: 51455 - DNA, 25 bp, SARS Virus
ggtttaaaccgatccggagaataac

SEQ ID NO: 51456 - DNA, 25 bp, SARS Virus
gtttaaaccgaatcggagaataaca

SEQ ID NO: 51457 - DNA, 25 bp, SARS Virus
tttaaaccgaactggagaataacaa

SEQ ID NO: 51458 - DNA, 25 bp, SARS Virus
ttaaaccgaacctgagaataacaat

SEQ ID NO: 51459 - DNA, 25 bp, SARS Virus
taaaccgaaccgtagaataacaatg

SEQ ID NO: 51460 - DNA, 25 bp, SARS Virus
aaaccgaaccggtgaataacaatgt

SEQ ID NO: 51461 - DNA, 25 bp, SARS Virus
aaccgaaccggataataacaatgtc

SEQ ID NO: 51462 - DNA, 25 bp, SARS Virus
accgaaccggagtataacaatgtcg

SEQ ID NO: 51463 - DNA, 25 bp, SARS Virus
ccgaaccggagattaacaatgtcga

SEQ ID NO: 51464 - DNA, 25 bp, SARS Virus
cgaaccggagaataacaatgtcgag

SEQ ID NO: 51465 - DNA, 25 bp, SARS Virus
gaaccggagaattacaatgtcgaga

SEQ ID NO: 51466 - DNA, 25 bp, SARS Virus
aaccggagaatatcaatgtcgagat

SEQ ID NO: 51467 - DNA, 25 bp, SARS Virus
accggagaataataatgtcgagatt

SEQ ID NO: 51468 - DNA, 25 bp, SARS Virus
ccggagaataactatgtcgagattc

SEQ ID NO: 51469 - DNA, 25 bp, SARS Virus
cggagaataacattgtcgagattct

SEQ ID NO: 51470 - DNA, 25 bp, SARS Virus
ggagaataacaatgtcgagattctc

SEQ ID NO: 51471 - DNA, 25 bp, SARS Virus
gagaataacaatttcgagattctcg

SEQ ID NO: 51472 - DNA, 25 bp, SARS Virus
agaataacaatgtcgagattctcgg

SEQ ID NO: 51473 - DNA, 25 bp, SARS Virus
gaataacaatgttgagattctcggt

SEQ ID NO: 51474 - DNA, 25 bp, SARS Virus
aataacaatgtctagattctcggtt

SEQ ID NO: 51475 - DNA, 25 bp, SARS Virus
ataacaatgtcgtgattctcggttg

SEQ ID NO: 51476 - DNA, 25 bp, SARS Virus
taacaatgtcgatattctcggttga

SEQ ID NO: 51477 - DNA, 25 bp, SARS Virus
aacaatgtcgagtttctcggttgag

SEQ ID NO: 51478 - DNA, 25 bp, SARS Virus
acaatgtcgagattctcggttgagt

SEQ ID NO: 51479 - DNA, 25 bp, SARS Virus
caatgtcgagattctcggttgagtc

SEQ ID NO: 51480 - DNA, 25 bp, SARS Virus
aatgtcgagattttcggttgagtcg

SEQ ID NO: 51481 - DNA, 25 bp, SARS Virus
atgtcgagattctcggttgagtcga

SEQ ID NO: 51482 - DNA, 25 bp, SARS Virus
tgtcgagattcttggttgagtcgac

SEQ ID NO: 51483 - DNA, 25 bp, SARS Virus
gtcgagattctctgttgagtcgaca

SEQ ID NO: 51484 - DNA, 25 bp, SARS Virus
tcgagattctcgtttgagtcgacaa

SEQ ID NO: 51485 - DNA, 25 bp, SARS Virus
cgagattctcggttgagtcgacaat

SEQ ID NO: 51486 - DNA, 25 bp, SARS Virus
gagattctcggttgagtcgacaatt

SEQ ID NO: 51487 - DNA, 25 bp, SARS Virus
agattctcggtttagtcgacaattt

SEQ ID NO: 51488 - DNA, 25 bp, SARS Virus
gattctcggttgtgtcgacaatttg

SEQ ID NO: 51489 - DNA, 25 bp, SARS Virus
attctcggttgattcgacaatttga

SEQ ID NO: 51490 - DNA, 25 bp, SARS Virus
ttctcggttgagtcgacaatttgat

SEQ ID NO: 51491 - DNA, 25 bp, SARS Virus
tctcggttgagttgacaatttgatg

SEQ ID NO: 51492 - DNA, 25 bp, SARS Virus
ctcggttgagtctacaatttgatgt

SEQ ID NO: 51493 - DNA, 25 bp, SARS Virus
tcggttgagtcgtcaatttgatgtc

SEQ ID NO: 51494 - DNA, 25 bp, SARS Virus
cggttgagtcgataatttgatgtct

SEQ ID NO: 51495 - DNA, 25 bp, SARS Virus
ggttgagtcgactatttgatgtctt

SEQ ID NO: 51496 - DNA, 25 bp, SARS Virus
gttgagtcgacattttgatgtctta

SEQ ID NO: 51497 - DNA, 25 bp, SARS Virus
ttgagtcgacaatttgatgtcttat

SEQ ID NO: 51498 - DNA, 25 bp, SARS Virus
tgagtcgacaatttgatgtcttatt

SEQ ID NO: 51499 - DNA, 25 bp, SARS Virus
gagtcgacaatttgatgtcttatta

SEQ ID NO: 51500 - DNA, 25 bp, SARS Virus
agtcgacaattttatgtcttattac

SEQ ID NO: 51501 - DNA, 25 bp, SARS Virus
gtcgacaatttgttgtcttattact

SEQ ID NO: 51502 - DNA, 25 bp, SARS Virus
tcgacaatttgatgtcttattactt

SEQ ID NO: 51503 - DNA, 25 bp, SARS Virus
cgacaatttgatttcttattacttg

SEQ ID NO: 51504 - DNA, 25 bp, SARS Virus
gacaatttgatgtcttattacttga

SEQ ID NO: 51505 - DNA, 25 bp, SARS Virus
acaatttgatgttttattacttgac

SEQ ID NO: 51506 - DNA, 25 bp, SARS Virus
caatttgatgtcttattacttgact

SEQ ID NO: 51507 - DNA, 25 bp, SARS Virus
aatttgatgtcttattacttgactc

SEQ ID NO: 51508 - DNA, 25 bp, SARS Virus
atttgatgtctttttacttgactca

SEQ ID NO: 51509 - DNA, 25 bp, SARS Virus
tttgatgtcttattacttgactcag

SEQ ID NO: 51510 - DNA, 25 bp, SARS Virus
ttgatgtcttattacttgactcagg

SEQ ID NO: 51511 - DNA, 25 bp, SARS Virus
tgatgtcttatttcttgactcaggt

SEQ ID NO: 51512 - DNA, 25 bp, SARS Virus
gatgtcttattatttgactcaggtc

SEQ ID NO: 51513 - DNA, 25 bp, SARS Virus
atgtcttattacttgactcaggtca

SEQ ID NO: 51514 - DNA, 25 bp, SARS Virus
tgtcttattacttgactcaggtcat

SEQ ID NO: 51515 - DNA, 25 bp, SARS Virus
gtcttattactttactcaggtcatc

SEQ ID NO: 51516 - DNA, 25 bp, SARS Virus
tcttattacttgtctcaggtcatcg

SEQ ID NO: 51517 - DNA, 25 bp, SARS Virus
cttattacttgattcaggtcatcgt

SEQ ID NO: 51518 - DNA, 25 bp, SARS Virus
ttattacttgactcaggtcatcgtg

SEQ ID NO: 51519 - DNA, 25 bp, SARS Virus
tattacttgacttaggtcatcgtga

SEQ ID NO: 51520 - DNA, 25 bp, SARS Virus
attacttgactctggtcatcgtgat

SEQ ID NO: 51521 - DNA, 25 bp, SARS Virus
ttacttgactcatgtcatcgtgatg

SEQ ID NO: 51522 - DNA, 25 bp, SARS Virus
tacttgactcagttcatcgtgatgc

SEQ ID NO: 51523 - DNA, 25 bp, SARS Virus
acttgactcaggtcatcgtgatgct

SEQ ID NO: 51524 - DNA, 25 bp, SARS Virus
cttgactcaggttatcgtgatgctg

SEQ ID NO: 51525 - DNA, 25 bp, SARS Virus
ttgactcaggtcttcgtgatgctgt

SEQ ID NO: 51526 - DNA, 25 bp, SARS Virus
tgactcaggtcatcgtgatgctgtc

SEQ ID NO: 51527 - DNA, 25 bp, SARS Virus
gactcaggtcattgtgatgctgtct

SEQ ID NO: 51528 - DNA, 25 bp, SARS Virus
actcaggtcatcttgatgctgtcta

SEQ ID NO: 51529 - DNA, 25 bp, SARS Virus
ctcaggtcatcgtgatgctgtctac

SEQ ID NO: 51530 - DNA, 25 bp, SARS Virus
tcaggtcatcgttatgctgtctaca

SEQ ID NO: 51531 - DNA, 25 bp, SARS Virus
caggtcatcgtgttgctgtctacag

SEQ ID NO: 51532 - DNA, 25 bp, SARS Virus
aggtcatcgtgatgctgtctacagg

SEQ ID NO: 51533 - DNA, 25 bp, SARS Virus
ggtcatcgtgattctgtctacagga

SEQ ID NO: 51534 - DNA, 25 bp, SARS Virus
gtcatcgtgatgttgtctacaggac

SEQ ID NO: 51535 - DNA, 25 bp, SARS Virus
tcatcgtgatgctgtctacaggaca

SEQ ID NO: 51536 - DNA, 25 bp, SARS Virus
catcgtgatgctttctacaggacac

SEQ ID NO: 51537 - DNA, 25 bp, SARS Virus
atcgtgatgctgtctacaggacacg

SEQ ID NO: 51538 - DNA, 25 bp, SARS Virus
tcgtgatgctgtttacaggacacgc

SEQ ID NO: 51539 - DNA, 25 bp, SARS Virus
cgtgatgctgtctacaggacacgcc

SEQ ID NO: 51540 - DNA, 25 bp, SARS Virus
gtgatgctgtcttcaggacacgccg

SEQ ID NO: 51541 - DNA, 25 bp, SARS Virus
tgatgctgtctataggacacgccga

SEQ ID NO: 51542 - DNA, 25 bp, SARS Virus
gatgctgtctactggacacgccgac

SEQ ID NO: 51543 - DNA, 25 bp, SARS Virus
atgctgtctacatgacacgccgacc

SEQ ID NO: 51544 - DNA, 25 bp, SARS Virus
tgctgtctacagtacacgccgacca

SEQ ID NO: 51545 - DNA, 25 bp, SARS Virus
gctgtctacaggtcacgccgaccat

SEQ ID NO: 51546 - DNA, 25 bp, SARS Virus
ctgtctacaggatacgccgaccatg

SEQ ID NO: 51547 - DNA, 25 bp, SARS Virus
tgtctacaggactcgccgaccatgg

SEQ ID NO: 51548 - DNA, 25 bp, SARS Virus
gtctacaggacatgccgaccatggt

SEQ ID NO: 51549 - DNA, 25 bp, SARS Virus
tctacaggacactccgaccatggtg

SEQ ID NO: 51550 - DNA, 25 bp, SARS Virus
ctacaggacacgtcgaccatggtgt

SEQ ID NO: 51551 - DNA, 25 bp, SARS Virus
tacaggacacgctgaccatggtgtg

SEQ ID NO: 51552 - DNA, 25 bp, SARS Virus
acaggacacgcctaccatggtgtgt

SEQ ID NO: 51553 - DNA, 25 bp, SARS Virus
caggacacgccgtccatggtgtgtt

SEQ ID NO: 51554 - DNA, 25 bp, SARS Virus
aggacacgccgatcatggtgtgttt

SEQ ID NO: 51555 - DNA, 25 bp, SARS Virus
ggacacgccgactatggtgtgtttg

SEQ ID NO: 51556 - DNA, 25 bp, SARS Virus
gacacgccgaccttggtgtgtttgt

SEQ ID NO: 51557 - DNA, 25 bp, SARS Virus
acacgccgaccatggtgtgtttgtc

SEQ ID NO: 51558 - DNA, 25 bp, SARS Virus
cacgccgaccattgtgtgtttgtcg

SEQ ID NO: 51559 - DNA, 25 bp, SARS Virus
acgccgaccatgttgtgtttgtcga

SEQ ID NO: 51560 - DNA, 25 bp, SARS Virus
cgccgaccatggtgtgtttgtcgaa

SEQ ID NO: 51561 - DNA, 25 bp, SARS Virus
gccgaccatggtttgtttgtcgaac

SEQ ID NO: 51562 - DNA, 25 bp, SARS Virus
ccgaccatggtgtgtttgtcgaaca

SEQ ID NO: 51563 - DNA, 25 bp, SARS Virus
cgaccatggtgtttttgtcgaacat

SEQ ID NO: 51564 - DNA, 25 bp, SARS Virus
gaccatggtgtgtttgtcgaacatg

SEQ ID NO: 51565 - DNA, 25 bp, SARS Virus
accatggtgtgtttgtcgaacatga

SEQ ID NO: 51566 - DNA, 25 bp, SARS Virus
ccatggtgtgtttgtcgaacatgac

SEQ ID NO: 51567 - DNA, 25 bp, SARS Virus
catggtgtgtttttcgaacatgact

SEQ ID NO: 51568 - DNA, 25 bp, SARS Virus
atggtgtgtttgtcgaacatgacta

SEQ ID NO: 51569 - DNA, 25 bp, SARS Virus
tggtgtgtttgttgaacatgactac

SEQ ID NO: 51570 - DNA, 25 bp, SARS Virus
ggtgtgtttgtctaacatgactact

SEQ ID NO: 51571 - DNA, 25 bp, SARS Virus
gtgtgtttgtcgtacatgactactg

SEQ ID NO: 51572 - DNA, 25 bp, SARS Virus
tgtgtttgtcgatcatgactactgt

SEQ ID NO: 51573 - DNA, 25 bp, SARS Virus
gtgtttgtcgaatatgactactgtt

SEQ ID NO: 51574 - DNA, 25 bp, SARS Virus
tgtttgtcgaacttgactactgtta

SEQ ID NO: 51575 - DNA, 25 bp, SARS Virus
gtttgtcgaacatgactactgttac

SEQ ID NO: 51576 - DNA, 25 bp, SARS Virus
tttgtcgaacattactactgttacg

SEQ ID NO: 51577 - DNA, 25 bp, SARS Virus
ttgtcgaacatgtctactgttacgt

SEQ ID NO: 51578 - DNA, 25 bp, SARS Virus
tgtcgaacatgattactgttacgtg

SEQ ID NO: 51579 - DNA, 25 bp, SARS Virus
gtcgaacatgactactgttacgtga

SEQ ID NO: 51580 - DNA, 25 bp, SARS Virus
tcgaacatgacttctgttacgtgaa

SEQ ID NO: 51581 - DNA, 25 bp, SARS Virus
cgaacatgactattgttacgtgaac

SEQ ID NO: 51582 - DNA, 25 bp, SARS Virus
gaacatgactactgttacgtgaacg

SEQ ID NO: 51583 - DNA, 25 bp, SARS Virus
aacatgactacttttacgtgaacgg

SEQ ID NO: 51584 - DNA, 25 bp, SARS Virus
acatgactactgttacgtgaacgga

SEQ ID NO: 51585 - DNA, 25 bp, SARS Virus
catgactactgttacgtgaacggat

SEQ ID NO: 51586 - DNA, 25 bp, SARS Virus
atgactactgtttcgtgaacggatg

SEQ ID NO: 51587 - DNA, 25 bp, SARS Virus
tgactactgttatgtgaacggatga

SEQ ID NO: 51588 - DNA, 25 bp, SARS Virus
gactactgttacttgaacggatgat

SEQ ID NO: 51589 - DNA, 25 bp, SARS Virus
actactgttacgtgaacggatgata

SEQ ID NO: 51590 - DNA, 25 bp, SARS Virus
ctactgttacgttaacggatgatat

SEQ ID NO: 51591 - DNA, 25 bp, SARS Virus
tactgttacgtgtacggatgatatt

SEQ ID NO: 51592 - DNA, 25 bp, SARS Virus
actgttacgtgatcggatgatattg

SEQ ID NO: 51593 - DNA, 25 bp, SARS Virus
ctgttacgtgaatggatgatattgt

SEQ ID NO: 51594 - DNA, 25 bp, SARS Virus
tgttacgtgaactgatgatattgtt

SEQ ID NO: 51595 - DNA, 25 bp, SARS Virus
gttacgtgaacgtatgatattgtta

SEQ ID NO: 51596 - DNA, 25 bp, SARS Virus
ttacgtgaacggttgatattgttaa

SEQ ID NO: 51597 - DNA, 25 bp, SARS Virus
tacgtgaacggatgatattgttaag

SEQ ID NO: 51598 - DNA, 25 bp, SARS Virus
acgtgaacggattatattgttaagc

SEQ ID NO: 51599 - DNA, 25 bp, SARS Virus
cgtgaacggatgttattgttaagct

SEQ ID NO: 51600 - DNA, 25 bp, SARS Virus
gtgaacggatgatattgttaagctt

SEQ ID NO: 51601 - DNA, 25 bp, SARS Virus
tgaacggatgattttgttaagcttc

SEQ ID NO: 51602 - DNA, 25 bp, SARS Virus
gaacggatgatattgttaagcttcc

SEQ ID NO: 51603 - DNA, 25 bp, SARS Virus
aacggatgatattgttaagcttccc

SEQ ID NO: 51604 - DNA, 25 bp, SARS Virus
acggatgatatttttaagcttccct

SEQ ID NO: 51605 - DNA, 25 bp, SARS Virus
cggatgatattgttaagcttccctc

SEQ ID NO: 51606 - DNA, 25 bp, SARS Virus
ggatgatattgttaagcttccctcc

SEQ ID NO: 51607 - DNA, 25 bp, SARS Virus
gatgatattgtttagcttccctcca

SEQ ID NO: 51608 - DNA, 25 bp, SARS Virus
atgatattgttatgcttccctccat

SEQ ID NO: 51609 - DNA, 25 bp, SARS Virus
tgatattgttaatcttccctccatc

SEQ ID NO: 51610 - DNA, 25 bp, SARS Virus
gatattgttaagtttccctccatcc

SEQ ID NO: 51611 - DNA, 25 bp, SARS Virus
atattgttaagcttccctccatcca

SEQ ID NO: 51612 - DNA, 25 bp, SARS Virus
tattgttaagcttccctccatccaa

SEQ ID NO: 51613 - DNA, 25 bp, SARS Virus
attgttaagctttcctccatccaaa

SEQ ID NO: 51614 - DNA, 25 bp, SARS Virus
ttgttaagcttctctccatccaaac

SEQ ID NO: 51615 - DNA, 25 bp, SARS Virus
tgttaagcttccttccatccaaaca

SEQ ID NO: 51616 - DNA, 25 bp, SARS Virus
gttaagcttccctccatccaaacac

SEQ ID NO: 51617 - DNA, 25 bp, SARS Virus
ttaagcttcccttcatccaaacacg

SEQ ID NO: 51618 - DNA, 25 bp, SARS Virus
taagcttccctctatccaaacacga

SEQ ID NO: 51619 - DNA, 25 bp, SARS Virus
aagcttccctccttccaaacacgac

SEQ ID NO: 51620 - DNA, 25 bp, SARS Virus
agcttccctccatccaaacacgacc

SEQ ID NO: 51621 - DNA, 25 bp, SARS Virus
gcttccctccattcaaacacgaccg

SEQ ID NO: 51622 - DNA, 25 bp, SARS Virus
cttccctccatctaaacacgaccgt

SEQ ID NO: 51623 - DNA, 25 bp, SARS Virus
ttccctccatcctaacacgaccgta

SEQ ID NO: 51624 - DNA, 25 bp, SARS Virus
tccctccatccatacacgaccgtaa

SEQ ID NO: 51625 - DNA, 25 bp, SARS Virus
ccctccatccaatcacgaccgtaat

SEQ ID NO: 51626 - DNA, 25 bp, SARS Virus
cctccatccaaatacgaccgtaatg

SEQ ID NO: 51627 - DNA, 25 bp, SARS Virus
ctccatccaaactcgaccgtaatga

SEQ ID NO: 51628 - DNA, 25 bp, SARS Virus
tccatccaaacatgaccgtaatgat

SEQ ID NO: 51629 - DNA, 25 bp, SARS Virus
ccatccaaacactaccgtaatgata

SEQ ID NO: 51630 - DNA, 25 bp, SARS Virus
catccaaacacgtccgtaatgatag

SEQ ID NO: 51631 - DNA, 25 bp, SARS Virus
atccaaacacgatcgtaatgatagt

SEQ ID NO: 51632 - DNA, 25 bp, SARS Virus
tccaaacacgactgtaatgatagtc

SEQ ID NO: 51633 - DNA, 25 bp, SARS Virus
ccaaacacgaccttaatgatagtct

SEQ ID NO: 51634 - DNA, 25 bp, SARS Virus
caaacacgaccgtaatgatagtctg

SEQ ID NO: 51635 - DNA, 25 bp, SARS Virus
aaacacgaccgttatgatagtctgg

SEQ ID NO: 51636 - DNA, 25 bp, SARS Virus
aacacgaccgtattgatagtctggt

SEQ ID NO: 51637 - DNA, 25 bp, SARS Virus
acacgaccgtaatgatagtctggtg

SEQ ID NO: 51638 - DNA, 25 bp, SARS Virus
cacgaccgtaattatagtctggtgg

SEQ ID NO: 51639 - DNA, 25 bp, SARS Virus
acgaccgtaatgttagtctggtggt

SEQ ID NO: 51640 - DNA, 25 bp, SARS Virus
cgaccgtaatgatagtctggtggtt

SEQ ID NO: 51641 - DNA, 25 bp, SARS Virus
gaccgtaatgattgtctggtggttc

SEQ ID NO: 51642 - DNA, 25 bp, SARS Virus
accgtaatgatattctggtggttct

SEQ ID NO: 51643 - DNA, 25 bp, SARS Virus
ccgtaatgatagtctggtggttcta

SEQ ID NO: 51644 - DNA, 25 bp, SARS Virus
cgtaatgatagtttggtggttctag

SEQ ID NO: 51645 - DNA, 25 bp, SARS Virus
gtaatgatagtctggtggttctaga

SEQ ID NO: 51646 - DNA, 25 bp, SARS Virus
taatgatagtcttgtggttctagag

SEQ ID NO: 51647 - DNA, 25 bp, SARS Virus
aatgatagtctgttggttctagagt

SEQ ID NO: 51648 - DNA, 25 bp, SARS Virus
atgatagtctggtggttctagagtt

SEQ ID NO: 51649 - DNA, 25 bp, SARS Virus
tgatagtctggttgttctagagttt

SEQ ID NO: 51650 - DNA, 25 bp, SARS Virus
gatagtctggtgtttctagagttta

SEQ ID NO: 51651 - DNA, 25 bp, SARS Virus
atagtctggtggttctagagtttac

SEQ ID NO: 51652 - DNA, 25 bp, SARS Virus
tagtctggtggttctagagtttacc

SEQ ID NO: 51653 - DNA, 25 bp, SARS Virus
agtctggtggttttagagtttaccc

SEQ ID NO: 51654 - DNA, 25 bp, SARS Virus
gtctggtggttctagagtttacccg

SEQ ID NO: 51655 - DNA, 25 bp, SARS Virus
tctggtggttcttgagtttacccga

SEQ ID NO: 51656 - DNA, 25 bp, SARS Virus
ctggtggttctatagtttacccgat

SEQ ID NO: 51657 - DNA, 25 bp, SARS Virus
tggtggttctagtgtttacccgatc

SEQ ID NO: 51658 - DNA, 25 bp, SARS Virus
ggtggttctagattttacccgatct

SEQ ID NO: 51659 - DNA, 25 bp, SARS Virus
gtggttctagagtttacccgatcta

SEQ ID NO: 51660 - DNA, 25 bp, SARS Virus
tggttctagagtttacccgatctaa

SEQ ID NO: 51661 - DNA, 25 bp, SARS Virus
ggttctagagtttacccgatctaag

SEQ ID NO: 51662 - DNA, 25 bp, SARS Virus
gttctagagttttcccgatctaagg

SEQ ID NO: 51663 - DNA, 25 bp, SARS Virus
ttctagagtttatccgatctaaggg

SEQ ID NO: 51664 - DNA, 25 bp, SARS Virus
tctagagtttactcgatctaaggga

SEQ ID NO: 51665 - DNA, 25 bp, SARS Virus
ctagagtttacctgatctaagggat

SEQ ID NO: 51666 - DNA, 25 bp, SARS Virus
tagagtttaccctatctaagggatt

SEQ ID NO: 51667 - DNA, 25 bp, SARS Virus
agagtttacccgttctaagggattc

SEQ ID NO: 51668 - DNA, 25 bp, SARS Virus
gagtttacccgatctaagggattct

SEQ ID NO: 51669 - DNA, 25 bp, SARS Virus
agtttacccgatttaagggattctc

SEQ ID NO: 51670 - DNA, 25 bp, SARS Virus
gtttacccgatctaagggattctca

SEQ ID NO: 51671 - DNA, 25 bp, SARS Virus
tttacccgatcttagggattctcac

SEQ ID NO: 51672 - DNA, 25 bp, SARS Virus
ttacccgatctatgggattctcact

SEQ ID NO: 51673 - DNA, 25 bp, SARS Virus
tacccgatctaatggattctcacta

SEQ ID NO: 51674 - DNA, 25 bp, SARS Virus
acccgatctaagtgattctcactac

SEQ ID NO: 51675 - DNA, 25 bp, SARS Virus
cccgatctaaggtattctcactacc

SEQ ID NO: 51676 - DNA, 25 bp, SARS Virus
ccgatctaagggtttctcactacca

SEQ ID NO: 51677 - DNA, 25 bp, SARS Virus
cgatctaagggattctcactaccat

SEQ ID NO: 51678 - DNA, 25 bp, SARS Virus
gatctaagggattctcactaccatg

SEQ ID NO: 51679 - DNA, 25 bp, SARS Virus
atctaagggattttcactaccatgt

SEQ ID NO: 51680 - DNA, 25 bp, SARS Virus
tctaagggattctcactaccatgtc

SEQ ID NO: 51681 - DNA, 25 bp, SARS Virus
ctaagggattcttactaccatgtcc

SEQ ID NO: 51682 - DNA, 25 bp, SARS Virus
taagggattctctctaccatgtcca

SEQ ID NO: 51683 - DNA, 25 bp, SARS Virus
aagggattctcattaccatgtccat

SEQ ID NO: 51684 - DNA, 25 bp, SARS Virus
agggattctcactaccatgtccatg

SEQ ID NO: 51685 - DNA, 25 bp, SARS Virus
gggattctcacttccatgtccatgt

SEQ ID NO: 51686 - DNA, 25 bp, SARS Virus
ggattctcactatcatgtccatgtt

SEQ ID NO: 51687 - DNA, 25 bp, SARS Virus
gattctcactactatgtccatgtta

SEQ ID NO: 51688 - DNA, 25 bp, SARS Virus
attctcactaccttgtccatgttaa

SEQ ID NO: 51689 - DNA, 25 bp, SARS Virus
ttctcactaccatgtccatgttaaa

SEQ ID NO: 51690 - DNA, 25 bp, SARS Virus
tctcactaccatttccatgttaaat

SEQ ID NO: 51691 - DNA, 25 bp, SARS Virus
ctcactaccatgtccatgttaaatg

SEQ ID NO: 51692 - DNA, 25 bp, SARS Virus
tcactaccatgttcatgttaaatgt

SEQ ID NO: 51693 - DNA, 25 bp, SARS Virus
cactaccatgtctatgttaaatgtg

SEQ ID NO: 51694 - DNA, 25 bp, SARS Virus
actaccatgtccttgttaaatgtgt

SEQ ID NO: 51695 - DNA, 25 bp, SARS Virus
ctaccatgtccatgttaaatgtgtc

SEQ ID NO: 51696 - DNA, 25 bp, SARS Virus
taccatgtccattttaaatgtgtct

SEQ ID NO: 51697 - DNA, 25 bp, SARS Virus
accatgtccatgttaaatgtgtctt

SEQ ID NO: 51698 - DNA, 25 bp, SARS Virus
ccatgtccatgttaaatgtgtcttg

SEQ ID NO: 51699 - DNA, 25 bp, SARS Virus
catgtccatgtttaatgtgtcttga

SEQ ID NO: 51700 - DNA, 25 bp, SARS Virus
atgtccatgttatatgtgtcttgac

SEQ ID NO: 51701 - DNA, 25 bp, SARS Virus
tgtccatgttaattgtgtcttgacc

SEQ ID NO: 51702 - DNA, 25 bp, SARS Virus
gtccatgttaaatgtgtcttgacct

SEQ ID NO: 51703 - DNA, 25 bp, SARS Virus
tccatgttaaatttgtcttgacctt

SEQ ID NO: 51704 - DNA, 25 bp, SARS Virus
ccatgttaaatgtgtcttgaccttg

SEQ ID NO: 51705 - DNA, 25 bp, SARS Virus
catgttaaatgtttcttgaccttgg

SEQ ID NO: 51706 - DNA, 25 bp, SARS Virus
atgttaaatgtgtcttgaccttggt

SEQ ID NO: 51707 - DNA, 25 bp, SARS Virus
tgttaaatgtgttttgaccttggtg

SEQ ID NO: 51708 - DNA, 25 bp, SARS Virus
gttaaatgtgtcttgaccttggtgg

SEQ ID NO: 51709 - DNA, 25 bp, SARS Virus
ttaaatgtgtcttgaccttggtgga

SEQ ID NO: 51710 - DNA, 25 bp, SARS Virus
taaatgtgtctttaccttggtggaa

SEQ ID NO: 51711 - DNA, 25 bp, SARS Virus
aaatgtgtcttgtccttggtggaac

SEQ ID NO: 51712 - DNA, 25 bp, SARS Virus
aatgtgtcttgatcttggtggaaca

SEQ ID NO: 51713 - DNA, 25 bp, SARS Virus
atgtgtcttgactttggtggaacat

SEQ ID NO: 51714 - DNA, 25 bp, SARS Virus
tgtgtcttgaccttggtggaacatc

SEQ ID NO: 51715 - DNA, 25 bp, SARS Virus
gtgtcttgaccttggtggaacatcc

SEQ ID NO: 51716 - DNA, 25 bp, SARS Virus
tgtcttgacctttgtggaacatcca

SEQ ID NO: 51717 - DNA, 25 bp, SARS Virus
gtcttgaccttgttggaacatccaa

SEQ ID NO: 51718 - DNA, 25 bp, SARS Virus
tcttgaccttggtggaacatccaaa

SEQ ID NO: 51719 - DNA, 25 bp, SARS Virus
cttgaccttggttgaacatccaaac

SEQ ID NO: 51720 - DNA, 25 bp, SARS Virus
ttgaccttggtgtaacatccaaaca

SEQ ID NO: 51721 - DNA, 25 bp, SARS Virus
tgaccttggtggtacatccaaacaa

SEQ ID NO: 51722 - DNA, 25 bp, SARS Virus
gaccttggtggatcatccaaacaat

SEQ ID NO: 51723 - DNA, 25 bp, SARS Virus
accttggtggaatatccaaacaatg

SEQ ID NO: 51724 - DNA, 25 bp, SARS Virus
ccttggtggaacttccaaacaatgt

SEQ ID NO: 51725 - DNA, 25 bp, SARS Virus
cttggtggaacatccaaacaatgtc

SEQ ID NO: 51726 - DNA, 25 bp, SARS Virus
ttggtggaacattcaaacaatgtct

SEQ ID NO: 51727 - DNA, 25 bp, SARS Virus
tggtggaacatctaaacaatgtctg

SEQ ID NO: 51728 - DNA, 25 bp, SARS Virus
ggtggaacatcctaacaatgtctgt

SEQ ID NO: 51729 - DNA, 25 bp, SARS Virus
gtggaacatccatacaatgtctgtg

SEQ ID NO: 51730 - DNA, 25 bp, SARS Virus
tggaacatccaatcaatgtctgtgt

SEQ ID NO: 51731 - DNA, 25 bp, SARS Virus
ggaacatccaaataatgtctgtgtg

SEQ ID NO: 51732 - DNA, 25 bp, SARS Virus
gaacatccaaactatgtctgtgtgg

SEQ ID NO: 51733 - DNA, 25 bp, SARS Virus
aacatccaaacattgtctgtgtggt

SEQ ID NO: 51734 - DNA, 25 bp, SARS Virus
acatccaaacaatgtctgtgtggtt

SEQ ID NO: 51735 - DNA, 25 bp, SARS Virus
catccaaacaatttctgtgtggttt

SEQ ID NO: 51736 - DNA, 25 bp, SARS Virus
atccaaacaatgtctgtgtggtttt

SEQ ID NO: 51737 - DNA, 25 bp, SARS Virus
tccaaacaatgtttgtgtggttttc

SEQ ID NO: 51738 - DNA, 25 bp, SARS Virus
ccaaacaatgtctgtgtggttttcc

SEQ ID NO: 51739 - DNA, 25 bp, SARS Virus
caaacaatgtctttgtggttttccc

SEQ ID NO: 51740 - DNA, 25 bp, SARS Virus
aaacaatgtctgtgtggttttcccg

SEQ ID NO: 51741 - DNA, 25 bp, SARS Virus
aacaatgtctgtttggttttcccgg

SEQ ID NO: 51742 - DNA, 25 bp, SARS Virus
acaatgtctgtgtggttttcccgga

SEQ ID NO: 51743 - DNA, 25 bp, SARS Virus
caatgtctgtgttgttttcccggat

SEQ ID NO: 51744 - DNA, 25 bp, SARS Virus
aatgtctgtgtgtttttcccggatt

SEQ ID NO: 51745 - DNA, 25 bp, SARS Virus
atgtctgtgtggttttcccggattt

SEQ ID NO: 51746 - DNA, 25 bp, SARS Virus
tgtctgtgtggttttcccggatttc

SEQ ID NO: 51747 - DNA, 25 bp, SARS Virus
gtctgtgtggttttcccggatttca

SEQ ID NO: 51748 - DNA, 25 bp, SARS Virus
tctgtgtggttttcccggatttcac

SEQ ID NO: 51749 - DNA, 25 bp, SARS Virus
ctgtgtggtttttccggatttcact

SEQ ID NO: 51750 - DNA, 25 bp, SARS Virus
tgtgtggttttctcggatttcactt

SEQ ID NO: 51751 - DNA, 25 bp, SARS Virus
gtgtggttttcctggatttcacttt

SEQ ID NO: 51752 - DNA, 25 bp, SARS Virus
tgtggttttccctgatttcacttta

SEQ ID NO: 51753 - DNA, 25 bp, SARS Virus
gtggttttcccgtatttcactttat

SEQ ID NO: 51754 - DNA, 25 bp, SARS Virus
tggttttcccggttttcactttatg

SEQ ID NO: 51755 - DNA, 25 bp, SARS Virus
ggttttcccggatttcactttatga

SEQ ID NO: 51756 - DNA, 25 bp, SARS Virus
gttttcccggatttcactttatgaa

SEQ ID NO: 51757 - DNA, 25 bp, SARS Virus
ttttcccggatttcactttatgaac

SEQ ID NO: 51758 - DNA, 25 bp, SARS Virus
tttcccggattttactttatgaaca

SEQ ID NO: 51759 - DNA, 25 bp, SARS Virus
ttcccggatttctctttatgaacat

SEQ ID NO: 51760 - DNA, 25 bp, SARS Virus
tcccggatttcattttatgaacatg

SEQ ID NO: 51761 - DNA, 25 bp, SARS Virus
cccggatttcactttatgaacatga

SEQ ID NO: 51762 - DNA, 25 bp, SARS Virus
ccggatttcactttatgaacatgaa

SEQ ID NO: 51763 - DNA, 25 bp, SARS Virus
cggatttcactttatgaacatgaag

SEQ ID NO: 51764 - DNA, 25 bp, SARS Virus
ggatttcactttttgaacatgaagt

SEQ ID NO: 51765 - DNA, 25 bp, SARS Virus
gatttcactttatgaacatgaagta

SEQ ID NO: 51766 - DNA, 25 bp, SARS Virus
atttcactttattaacatgaagtag

SEQ ID NO: 51767 - DNA, 25 bp, SARS Virus
tttcactttatgtacatgaagtagt

SEQ ID NO: 51768 - DNA, 25 bp, SARS Virus
ttcactttatgatcatgaagtagtt

SEQ ID NO: 51769 - DNA, 25 bp, SARS Virus
tcactttatgaatatgaagtagttt

SEQ ID NO: 51770 - DNA, 25 bp, SARS Virus
cactttatgaacttgaagtagtttc

SEQ ID NO: 51771 - DNA, 25 bp, SARS Virus
actttatgaacatgaagtagtttcc

SEQ ID NO: 51772 - DNA, 25 bp, SARS Virus
ctttatgaacattaagtagtttccg

SEQ ID NO: 51773 - DNA, 25 bp, SARS Virus
tttatgaacatgtagtagtttccga

SEQ ID NO: 51774 - DNA, 25 bp, SARS Virus
ttatgaacatgatgtagtttccgaa

SEQ ID NO: 51775 - DNA, 25 bp, SARS Virus
tatgaacatgaattagtttccgaat

SEQ ID NO: 51776 - DNA, 25 bp, SARS Virus
atgaacatgaagtagtttccgaatt

SEQ ID NO: 51777 - DNA, 25 bp, SARS Virus
tgaacatgaagttgtttccgaattt

SEQ ID NO: 51778 - DNA, 25 bp, SARS Virus
gaacatgaagtattttccgaatttg

SEQ ID NO: 51779 - DNA, 25 bp, SARS Virus
aacatgaagtagtttccgaatttgt

SEQ ID NO: 51780 - DNA, 25 bp, SARS Virus
acatgaagtagtttccgaatttgtt

SEQ ID NO: 51781 - DNA, 25 bp, SARS Virus
catgaagtagtttccgaatttgttg

SEQ ID NO: 51782 - DNA, 25 bp, SARS Virus
atgaagtagttttcgaatttgttgg

SEQ ID NO: 51783 - DNA, 25 bp, SARS Virus
tgaagtagtttctgaatttgttgga

SEQ ID NO: 51784 - DNA, 25 bp, SARS Virus
gaagtagtttcctaatttgttggat

SEQ ID NO: 51785 - DNA, 25 bp, SARS Virus
aagtagtttccgtatttgttggatt

SEQ ID NO: 51786 - DNA, 25 bp, SARS Virus
agtagtttccgattttgttggattt

SEQ ID NO: 51787 - DNA, 25 bp, SARS Virus
gtagtttccgaatttgttggattta

SEQ ID NO: 51788 - DNA, 25 bp, SARS Virus
tagtttccgaatttgttggatttat

SEQ ID NO: 51789 - DNA, 25 bp, SARS Virus
agtttccgaatttgttggatttatc

SEQ ID NO: 51790 - DNA, 25 bp, SARS Virus
gtttccgaattttttggatttatct

SEQ ID NO: 51791 - DNA, 25 bp, SARS Virus
tttccgaatttgttggatttatctc

SEQ ID NO: 51792 - DNA, 25 bp, SARS Virus
ttccgaatttgttggatttatctcc

SEQ ID NO: 51793 - DNA, 25 bp, SARS Virus
tccgaatttgtttgatttatctcca

SEQ ID NO: 51794 - DNA, 25 bp, SARS Virus
ccgaatttgttgtatttatctccat

SEQ ID NO: 51795 - DNA, 25 bp, SARS Virus
cgaatttgttggttttatctccata

SEQ ID NO: 51796 - DNA, 25 bp, SARS Virus
gaatttgttggatttatctccatac

SEQ ID NO: 51797 - DNA, 25 bp, SARS Virus
aatttgttggatttatctccatacc

SEQ ID NO: 51798 - DNA, 25 bp, SARS Virus
atttgttggatttatctccatacca

SEQ ID NO: 51799 - DNA, 25 bp, SARS Virus
tttgttggatttttctccataccac

SEQ ID NO: 51800 - DNA, 25 bp, SARS Virus
ttgttggatttatctccataccacg

SEQ ID NO: 51801 - DNA, 25 bp, SARS Virus
tgttggatttatttccataccacga

SEQ ID NO: 51802 - DNA, 25 bp, SARS Virus
gttggatttatctccataccacgac

SEQ ID NO: 51803 - DNA, 25 bp, SARS Virus
ttggatttatcttcataccacgacc

SEQ ID NO: 51804 - DNA, 25 bp, SARS Virus
tggatttatctctataccacgaccc

SEQ ID NO: 51805 - DNA, 25 bp, SARS Virus
ggatttatctccttaccacgacccg

SEQ ID NO: 51806 - DNA, 25 bp, SARS Virus
gatttatctccataccacgacccgt

SEQ ID NO: 51807 - DNA, 25 bp, SARS Virus
atttatctccattccacgacccgtc

SEQ ID NO: 51808 - DNA, 25 bp, SARS Virus
tttatctccatatcacgacccgtca

SEQ ID NO: 51809 - DNA, 25 bp, SARS Virus
ttatctccatactacgacccgtcaa

SEQ ID NO: 51810 - DNA, 25 bp, SARS Virus
tatctccatacctcgacccgtcaaa

SEQ ID NO: 51811 - DNA, 25 bp, SARS Virus
atctccataccatgacccgtcaaat

SEQ ID NO: 51812 - DNA, 25 bp, SARS Virus
tctccataccactacccgtcaaatc

SEQ ID NO: 51813 - DNA, 25 bp, SARS Virus
ctccataccacgtcccgtcaaatcg

SEQ ID NO: 51814 - DNA, 25 bp, SARS Virus
tccataccacgatccgtcaaatcga

SEQ ID NO: 51815 - DNA, 25 bp, SARS Virus
ccataccacgactcgtcaaatcgac

SEQ ID NO: 51816 - DNA, 25 bp, SARS Virus
cataccacgacctgtcaaatcgacg

SEQ ID NO: 51817 - DNA, 25 bp, SARS Virus
ataccacgacccttcaaatcgacga

SEQ ID NO: 51818 - DNA, 25 bp, SARS Virus
taccacgacccgtcaaatcgacgat

SEQ ID NO: 51819 - DNA, 25 bp, SARS Virus
accacgacccgttaaatcgacgatg

SEQ ID NO: 51820 - DNA, 25 bp, SARS Virus
ccacgacccgtctaatcgacgatgt

SEQ ID NO: 51821 - DNA, 25 bp, SARS Virus
cacgacccgtcatatcgacgatgtc

SEQ ID NO: 51822 - DNA, 25 bp, SARS Virus
acgacccgtcaattcgacgatgtca

SEQ ID NO: 51823 - DNA, 25 bp, SARS Virus
cgacccgtcaaatcgacgatgtcat

SEQ ID NO: 51824 - DNA, 25 bp, SARS Virus
gacccgtcaaattgacgatgtcatg

SEQ ID NO: 51825 - DNA, 25 bp, SARS Virus
acccgtcaaatctacgatgtcatgc

SEQ ID NO: 51826 - DNA, 25 bp, SARS Virus
cccgtcaaatcgtcgatgtcatgca

SEQ ID NO: 51827 - DNA, 25 bp, SARS Virus
ccgtcaaatcgatgatgtcatgcag

SEQ ID NO: 51828 - DNA, 25 bp, SARS Virus
cgtcaaatcgactatgtcatgcaga

SEQ ID NO: 51829 - DNA, 25 bp, SARS Virus
gtcaaatcgacgttgtcatgcagaa

SEQ ID NO: 51830 - DNA, 25 bp, SARS Virus
tcaaatcgacgatgtcatgcagaag

SEQ ID NO: 51831 - DNA, 25 bp, SARS Virus
caaatcgacgatttcatgcagaagt

SEQ ID NO: 51832 - DNA, 25 bp, SARS Virus
aaatcgacgatgtcatgcagaagtc

SEQ ID NO: 51833 - DNA, 25 bp, SARS Virus
aatcgacgatgttatgcagaagtcc

SEQ ID NO: 51834 - DNA, 25 bp, SARS Virus
atcgacgatgtcttgcagaagtccg

SEQ ID NO: 51835 - DNA, 25 bp, SARS Virus
tcgacgatgtcatgcagaagtccga

SEQ ID NO: 51836 - DNA, 25 bp, SARS Virus
cgacgatgtcattcagaagtccgac

SEQ ID NO: 51837 - DNA, 25 bp, SARS Virus
gacgatgtcatgtagaagtccgacc

SEQ ID NO: 51838 - DNA, 25 bp, SARS Virus
acgatgtcatgctgaagtccgacct

SEQ ID NO: 51839 - DNA, 25 bp, SARS Virus
cgatgtcatgcataagtccgacctt

SEQ ID NO: 51840 - DNA, 25 bp, SARS Virus
gatgtcatgcagtagtccgaccttt

SEQ ID NO: 51841 - DNA, 25 bp, SARS Virus
atgtcatgcagatgtccgaccttta

SEQ ID NO: 51842 - DNA, 25 bp, SARS Virus
tgtcatgcagaattccgacctttac

SEQ ID NO: 51843 - DNA, 25 bp, SARS Virus
gtcatgcagaagtccgacctttacg

SEQ ID NO: 51844 - DNA, 25 bp, SARS Virus
tcatgcagaagttcgacctttacga

SEQ ID NO: 51845 - DNA, 25 bp, SARS Virus
catgcagaagtctgacctttacgat

SEQ ID NO: 51846 - DNA, 25 bp, SARS Virus
atgcagaagtcctacctttacgatg

SEQ ID NO: 51847 - DNA, 25 bp, SARS Virus
tgcagaagtccgtcctttacgatgt

SEQ ID NO: 51848 - DNA, 25 bp, SARS Virus
gcagaagtccgatctttacgatgtc

SEQ ID NO: 51849 - DNA, 25 bp, SARS Virus
cagaagtccgacttttacgatgtct

SEQ ID NO: 51850 - DNA, 25 bp, SARS Virus
agaagtccgacctttacgatgtctt

SEQ ID NO: 51851 - DNA, 25 bp, SARS Virus
gaagtccgacctttacgatgtcttc

SEQ ID NO: 51852 - DNA, 25 bp, SARS Virus
aagtccgacctttacgatgtcttca

SEQ ID NO: 51853 - DNA, 25 bp, SARS Virus
agtccgaccttttcgatgtcttcat

SEQ ID NO: 51854 - DNA, 25 bp, SARS Virus
gtccgacctttatgatgtcttcatg

SEQ ID NO: 51855 - DNA, 25 bp, SARS Virus
tccgacctttactatgtcttcatgg

SEQ ID NO: 51856 - DNA, 25 bp, SARS Virus
ccgacctttacgttgtcttcatgga

SEQ ID NO: 51857 - DNA, 25 bp, SARS Virus
cgacctttacgaagtcttcatggac

SEQ ID NO: 51858 - DNA, 25 bp, SARS Virus
gacctttacgatatcttcatggacg

SEQ ID NO: 51859 - DNA, 25 bp, SARS Virus
acctttacgatgacttcatggacgg

SEQ ID NO: 51860 - DNA, 25 bp, SARS Virus
cctttacgatgtattcatggacggt

SEQ ID NO: 51861 - DNA, 25 bp, SARS Virus
ctttacgatgtcatcatggacggtt

SEQ ID NO: 51862 - DNA, 25 bp, SARS Virus
tttacgatgtctacatggacggtta

SEQ ID NO: 51863 - DNA, 25 bp, SARS Virus
ttacgatgtcttaatggacggttaa

SEQ ID NO: 51864 - DNA, 25 bp, SARS Virus
tacgatgtcttcatggacggttaag

SEQ ID NO: 51865 - DNA, 25 bp, SARS Virus
acgatgtcttcaaggacggttaagt

SEQ ID NO: 51866 - DNA, 25 bp, SARS Virus
cgatgtcttcatagacggttaagtt

SEQ ID NO: 51867 - DNA, 25 bp, SARS Virus
gatgtcttcatgaacggttaagttg

SEQ ID NO: 51868 - DNA, 25 bp, SARS Virus
atgtcttcatggacggttaagttga

SEQ ID NO: 51869 - DNA, 25 bp, SARS Virus
tgtcttcatggaaggttaagttgac

SEQ ID NO: 51870 - DNA, 25 bp, SARS Virus
gtcttcatggacagttaagttgaca

SEQ ID NO: 51871 - DNA, 25 bp, SARS Virus
tcttcatggacgattaagttgacac

SEQ ID NO: 51872 - DNA, 25 bp, SARS Virus
cttcatggacggataagttgacacg

SEQ ID NO: 51873 - DNA, 25 bp, SARS Virus
ttcatggacggtaaagttgacacga

SEQ ID NO: 51874 - DNA, 25 bp, SARS Virus
tcatggacggttaagttgacacgaa

SEQ ID NO: 51875 - DNA, 25 bp, SARS Virus
catggacggttaagttgacacgaaa

SEQ ID NO: 51876 - DNA, 25 bp, SARS Virus
atggacggttaaattgacacgaaag

SEQ ID NO: 51877 - DNA, 25 bp, SARS Virus
tggacggttaagatgacacgaaagg

SEQ ID NO: 51878 - DNA, 25 bp, SARS Virus
ggacggttaagtagacacgaaagga

SEQ ID NO: 51879 - DNA, 25 bp, SARS Virus
gacggttaagttaacacgaaaggaa

SEQ ID NO: 51880 - DNA, 25 bp, SARS Virus
acggttaagttgacacgaaaggaag

SEQ ID NO: 51881 - DNA, 25 bp, SARS Virus
cggttaagttgaaacgaaaggaaga

SEQ ID NO: 51882 - DNA, 25 bp, SARS Virus
ggttaagttgacacgaaaggaagac

SEQ ID NO: 51883 - DNA, 25 bp, SARS Virus
gttaagttgacaagaaaggaagaca

SEQ ID NO: 51884 - DNA, 25 bp, SARS Virus
ttaagttgacacaaaaggaagacac

SEQ ID NO: 51885 - DNA, 25 bp, SARS Virus
taagttgacacgaaaggaagacacg

SEQ ID NO: 51886 - DNA, 25 bp, SARS Virus
aagttgacacgaaaggaagacacga

SEQ ID NO: 51887 - DNA, 25 bp, SARS Virus
agttgacacgaaaggaagacacgaa

SEQ ID NO: 51888 - DNA, 25 bp, SARS Virus
gttgacacgaaaagaagacacgaaa

SEQ ID NO: 51889 - DNA, 25 bp, SARS Virus
ttgacacgaaagaaagacacgaaaa

SEQ ID NO: 51890 - DNA, 25 bp, SARS Virus
tgacacgaaaggaagacacgaaaac

SEQ ID NO: 51891 - DNA, 25 bp, SARS Virus
gacacgaaaggaagacacgaaaacg

SEQ ID NO: 51892 - DNA, 25 bp, SARS Virus
acacgaaaggaaaacacgaaaacgt

SEQ ID NO: 51893 - DNA, 25 bp, SARS Virus
cacgaaaggaagacacgaaaacgtc

SEQ ID NO: 51894 - DNA, 25 bp, SARS Virus
acgaaaggaagaaacgaaaacgtca

SEQ ID NO: 51895 - DNA, 25 bp, SARS Virus
cgaaaggaagacacgaaaacgtcat

SEQ ID NO: 51896 - DNA, 25 bp, SARS Virus
gaaaggaagacaagaaaacgtcatc

SEQ ID NO: 51897 - DNA, 25 bp, SARS Virus
aaaggaagacacaaaaacgtcatct

SEQ ID NO: 51898 - DNA, 25 bp, SARS Virus
aaggaagacacgaaaacgtcatctg

SEQ ID NO: 51899 - DNA, 25 bp, SARS Virus
aggaagacacgaaaacgtcatctgg

SEQ ID NO: 51900 - DNA, 25 bp, SARS Virus
ggaagacacgaaaacgtcatctggg

SEQ ID NO: 51901 - DNA, 25 bp, SARS Virus
gaagacacgaaaacgtcatctggga

SEQ ID NO: 51902 - DNA, 25 bp, SARS Virus
aagacacgaaaaagtcatctgggac

SEQ ID NO: 51903 - DNA, 25 bp, SARS Virus
agacacgaaaacatcatctgggacg

SEQ ID NO: 51904 - DNA, 25 bp, SARS Virus
gacacgaaaacgacatctgggacga

SEQ ID NO: 51905 - DNA, 25 bp, SARS Virus
acacgaaaacgtaatctgggacgat

SEQ ID NO: 51906 - DNA, 25 bp, SARS Virus
cacgaaaacgtcatctgggacgatt

SEQ ID NO: 51907 - DNA, 25 bp, SARS Virus
acgaaaacgtcaactgggacgattt

SEQ ID NO: 51908 - DNA, 25 bp, SARS Virus
cgaaaacgtcatatgggacgatttc

SEQ ID NO: 51909 - DNA, 25 bp, SARS Virus
gaaaacgtcatcagggacgatttcg

SEQ ID NO: 51910 - DNA, 25 bp, SARS Virus
aaaacgtcatctaggacgatttcgt

SEQ ID NO: 51911 - DNA, 25 bp, SARS Virus
aaacgtcatctgagacgatttcgta

SEQ ID NO: 51912 - DNA, 25 bp, SARS Virus
aacgtcatctggaacgatttcgtat

SEQ ID NO: 51913 - DNA, 25 bp, SARS Virus
acgtcatctgggacgatttcgtata

SEQ ID NO: 51914 - DNA, 25 bp, SARS Virus
cgtcatctgggaagatttcgtatat

SEQ ID NO: 51915 - DNA, 25 bp, SARS Virus
gtcatctgggacaatttcgtatatt

SEQ ID NO: 51916 - DNA, 25 bp, SARS Virus
tcatctgggacgatttcgtatattc

SEQ ID NO: 51917 - DNA, 25 bp, SARS Virus
catctgggacgaattcgtatattcc

SEQ ID NO: 51918 - DNA, 25 bp, SARS Virus
atctgggacgatatcgtatattcct

SEQ ID NO: 51919 - DNA, 25 bp, SARS Virus
tctgggacgattacgtatattccta

SEQ ID NO: 51920 - DNA, 25 bp, SARS Virus
ctgggacgatttagtatattcctaa

SEQ ID NO: 51921 - DNA, 25 bp, SARS Virus
tgggacgatttcatatattcctaat

SEQ ID NO: 51922 - DNA, 25 bp, SARS Virus
gggacgatttcgaatattcctaatg

SEQ ID NO: 51923 - DNA, 25 bp, SARS Virus
ggacgatttcgtatattcctaatgg

SEQ ID NO: 51924 - DNA, 25 bp, SARS Virus
gacgatttcgtaaattcctaatgga

SEQ ID NO: 51925 - DNA, 25 bp, SARS Virus
acgatttcgtatattcctaatggat

SEQ ID NO: 51926 - DNA, 25 bp, SARS Virus
cgatttcgtataatcctaatggatc

SEQ ID NO: 51927 - DNA, 25 bp, SARS Virus
gatttcgtatatacctaatggatcg

SEQ ID NO: 51928 - DNA, 25 bp, SARS Virus
atttcgtatattactaatggatcgt

SEQ ID NO: 51929 - DNA, 25 bp, SARS Virus
tttcgtatattcataatggatcgtt

SEQ ID NO: 51930 - DNA, 25 bp, SARS Virus
ttcgtatattccaaatggatcgttc

SEQ ID NO: 51931 - DNA, 25 bp, SARS Virus
tcgtatattcctaatggatcgttca

SEQ ID NO: 51932 - DNA, 25 bp, SARS Virus
cgtatattcctaatggatcgttcac

SEQ ID NO: 51933 - DNA, 25 bp, SARS Virus
gtatattcctaaaggatcgttcacc

SEQ ID NO: 51934 - DNA, 25 bp, SARS Virus
tatattcctaatagatcgttcacct

SEQ ID NO: 51935 - DNA, 25 bp, SARS Virus
atattcctaatgaatcgttcacctc

SEQ ID NO: 51936 - DNA, 25 bp, SARS Virus
tattcctaatggatcgttcacctcc

SEQ ID NO: 51937 - DNA, 25 bp, SARS Virus
attcctaatggaacgttcacctcct

SEQ ID NO: 51938 - DNA, 25 bp, SARS Virus
ttcctaatggatagttcacctcctg

SEQ ID NO: 51939 - DNA, 25 bp, SARS Virus
tcctaatggatcattcacctcctgt

SEQ ID NO: 51940 - DNA, 25 bp, SARS Virus
cctaatggatcgatcacctcctgtt

SEQ ID NO: 51941 - DNA, 25 bp, SARS Virus
ctaatggatcgtacacctcctgttg

SEQ ID NO: 51942 - DNA, 25 bp, SARS Virus
taatggatcgttaacctcctgttgg

SEQ ID NO: 51943 - DNA, 25 bp, SARS Virus
aatggatcgttcacctcctgttggt

SEQ ID NO: 51944 - DNA, 25 bp, SARS Virus
atggatcgttcaactcctgttggtt

SEQ ID NO: 51945 - DNA, 25 bp, SARS Virus
tggatcgttcacatcctgttggtta

SEQ ID NO: 51946 - DNA, 25 bp, SARS Virus
ggatcgttcaccacctgttggttag

SEQ ID NO: 51947 - DNA, 25 bp, SARS Virus
gatcgttcacctactgttggttagt

SEQ ID NO: 51948 - DNA, 25 bp, SARS Virus
atcgttcacctcatgttggttagtg

SEQ ID NO: 51949 - DNA, 25 bp, SARS Virus
tcgttcacctccagttggttagtgg

SEQ ID NO: 51950 - DNA, 25 bp, SARS Virus
cgttcacctcctattggttagtggt

SEQ ID NO: 51951 - DNA, 25 bp, SARS Virus
gttcacctcctgatggttagtggtt

SEQ ID NO: 51952 - DNA, 25 bp, SARS Virus
ttcacctcctgtaggttagtggttg

SEQ ID NO: 51953 - DNA, 25 bp, SARS Virus
tcacctcctgttagttagtggttga

SEQ ID NO: 51954 - DNA, 25 bp, SARS Virus
cacctcctgttgattagtggttgac

SEQ ID NO: 51955 - DNA, 25 bp, SARS Virus
acctcctgttggatagtggttgaca

SEQ ID NO: 51956 - DNA, 25 bp, SARS Virus
cctcctgttggtaagtggttgacac

SEQ ID NO: 51957 - DNA, 25 bp, SARS Virus
ctcctgttggttagtggttgacaca

SEQ ID NO: 51958 - DNA, 25 bp, SARS Virus
tcctgttggttaatggttgacacac

SEQ ID NO: 51959 - DNA, 25 bp, SARS Virus
cctgttggttagaggttgacacact

SEQ ID NO: 51960 - DNA, 25 bp, SARS Virus
ctgttggttagtagttgacacactt

SEQ ID NO: 51961 - DNA, 25 bp, SARS Virus
tgttggttagtgattgacacacttc

SEQ ID NO: 51962 - DNA, 25 bp, SARS Virus
gttggttagtggatgacacacttct

SEQ ID NO: 51963 - DNA, 25 bp, SARS Virus
ttggttagtggtagacacacttcta

SEQ ID NO: 51964 - DNA, 25 bp, SARS Virus
tggttagtggttaacacacttctac

SEQ ID NO: 51965 - DNA, 25 bp, SARS Virus
ggttagtggttgacacacttctaca

SEQ ID NO: 51966 - DNA, 25 bp, SARS Virus
gttagtggttgaaacacttctacaa

SEQ ID NO: 51967 - DNA, 25 bp, SARS Virus
ttagtggttgacacacttctacaac

SEQ ID NO: 51968 - DNA, 25 bp, SARS Virus
tagtggttgacaaacttctacaaca

SEQ ID NO: 51969 - DNA, 25 bp, SARS Virus
agtggttgacacacttctacaacac

SEQ ID NO: 51970 - DNA, 25 bp, SARS Virus
gtggttgacacaattctacaacaca

SEQ ID NO: 51971 - DNA, 25 bp, SARS Virus
tggttgacacacatctacaacacat

SEQ ID NO: 51972 - DNA, 25 bp, SARS Virus
ggttgacacactactacaacacatg

SEQ ID NO: 51973 - DNA, 25 bp, SARS Virus
gttgacacacttatacaacacatgt

SEQ ID NO: 51974 - DNA, 25 bp, SARS Virus
ttgacacacttcaacaacacatgtg

SEQ ID NO: 51975 - DNA, 25 bp, SARS Virus
tgacacacttctacaacacatgtgt

SEQ ID NO: 51976 - DNA, 25 bp, SARS Virus
gacacacttctaaaacacatgtgtg

SEQ ID NO: 51977 - DNA, 25 bp, SARS Virus
acacacttctacaacacatgtgtgt

SEQ ID NO: 51978 - DNA, 25 bp, SARS Virus
cacacttctacaacacatgtgtgtg

SEQ ID NO: 51979 - DNA, 25 bp, SARS Virus
acacttctacaaaacatgtgtgtga

SEQ ID NO: 51980 - DNA, 25 bp, SARS Virus
cacttctacaacacatgtgtgtgac

SEQ ID NO: 51981 - DNA, 25 bp, SARS Virus
acttctacaacaaatgtgtgtgacc

SEQ ID NO: 51982 - DNA, 25 bp, SARS Virus
cttctacaacacatgtgtgtgacca

SEQ ID NO: 51983 - DNA, 25 bp, SARS Virus
ttctacaacacaagtgtgtgaccat

SEQ ID NO: 51984 - DNA, 25 bp, SARS Virus
tctacaacacatatgtgtgaccatg

SEQ ID NO: 51985 - DNA, 25 bp, SARS Virus
ctacaacacatgagtgtgaccatgt

SEQ ID NO: 51986 - DNA, 25 bp, SARS Virus
tacaacacatgtatgtgaccatgtc

SEQ ID NO: 51987 - DNA, 25 bp, SARS Virus
acaacacatgtgagtgaccatgtcc

SEQ ID NO: 51988 - DNA, 25 bp, SARS Virus
caacacatgtgtatgaccatgtcct

SEQ ID NO: 51989 - DNA, 25 bp, SARS Virus
aacacatgtgtgagaccatgtcctg

SEQ ID NO: 51990 - DNA, 25 bp, SARS Virus
acacatgtgtgtaaccatgtcctgt

SEQ ID NO: 51991 - DNA, 25 bp, SARS Virus
cacatgtgtgtgaccatgtcctgtc

SEQ ID NO: 51992 - DNA, 25 bp, SARS Virus
acatgtgtgtgaacatgtcctgtcc

SEQ ID NO: 51993 - DNA, 25 bp, SARS Virus
catgtgtgtgacaatgtcctgtccg

SEQ ID NO: 51994 - DNA, 25 bp, SARS Virus
atgtgtgtgaccatgtcctgtccgt

SEQ ID NO: 51995 - DNA, 25 bp, SARS Virus
tgtgtgtgaccaagtcctgtccgtt

SEQ ID NO: 51996 - DNA, 25 bp, SARS Virus
gtgtgtgaccatatcctgtccgtta

SEQ ID NO: 51997 - DNA, 25 bp, SARS Virus
tgtgtgaccatgacctgtccgttaa

SEQ ID NO: 51998 - DNA, 25 bp, SARS Virus
gtgtgaccatgtactgtccgttaat

SEQ ID NO: 51999 - DNA, 25 bp, SARS Virus
tgtgaccatgtcatgtccgttaatg

SEQ ID NO: 52000 - DNA, 25 bp, SARS Virus
gtgaccatgtccagtccgttaatga

SEQ ID NO: 52001 - DNA, 25 bp, SARS Virus
tgaccatgtcctatccgttaatgac

SEQ ID NO: 52002 - DNA, 25 bp, SARS Virus
gaccatgtcctgaccgttaatgaca

SEQ ID NO: 52003 - DNA, 25 bp, SARS Virus
accatgtcctgtacgttaatgacat

SEQ ID NO: 52004 - DNA, 25 bp, SARS Virus
ccatgtcctgtcagttaatgacatt

SEQ ID NO: 52005 - DNA, 25 bp, SARS Virus
catgtcctgtccattaatgacattg

SEQ ID NO: 52006 - DNA, 25 bp, SARS Virus
atgtcctgtccgataatgacattgt

SEQ ID NO: 52007 - DNA, 25 bp, SARS Virus
tgtcctgtccgtaaatgacattgtg

SEQ ID NO: 52008 - DNA, 25 bp, SARS Virus
gtcctgtccgttaatgacattgtgg

SEQ ID NO: 52009 - DNA, 25 bp, SARS Virus
tcctgtccgttaatgacattgtggt

SEQ ID NO: 52010 - DNA, 25 bp, SARS Virus
cctgtccgttaaagacattgtggtc

SEQ ID NO: 52011 - DNA, 25 bp, SARS Virus
ctgtccgttaataacattgtggtct

SEQ ID NO: 52012 - DNA, 25 bp, SARS Virus
tgtccgttaatgacattgtggtctt

SEQ ID NO: 52013 - DNA, 25 bp, SARS Virus
gtccgttaatgaaattgtggtcttc

SEQ ID NO: 52014 - DNA, 25 bp, SARS Virus
tccgttaatgacattgtggtcttcg

SEQ ID NO: 52015 - DNA, 25 bp, SARS Virus
ccgttaatgacaatgtggtcttcga

SEQ ID NO: 52016 - DNA, 25 bp, SARS Virus
cgttaatgacatagtggtcttcgat

SEQ ID NO: 52017 - DNA, 25 bp, SARS Virus
gttaatgacattatggtcttcgatt

SEQ ID NO: 52018 - DNA, 25 bp, SARS Virus
ttaatgacattgaggtcttcgattg

SEQ ID NO: 52019 - DNA, 25 bp, SARS Virus
taatgacattgtagtcttcgattgt

SEQ ID NO: 52020 - DNA, 25 bp, SARS Virus
aatgacattgtgatcttcgattgta

SEQ ID NO: 52021 - DNA, 25 bp, SARS Virus
atgacattgtggacttcgattgtac

SEQ ID NO: 52022 - DNA, 25 bp, SARS Virus
tgacattgtggtattcgattgtacc

SEQ ID NO: 52023 - DNA, 25 bp, SARS Virus
gacattgtggtcatcgattgtacct

SEQ ID NO: 52024 - DNA, 25 bp, SARS Virus
acattgtggtctacgattgtacctg

SEQ ID NO: 52025 - DNA, 25 bp, SARS Virus
cattgtggtcttagattgtacctgg

SEQ ID NO: 52026 - DNA, 25 bp, SARS Virus
attgtggtcttcaattgtacctggt

SEQ ID NO: 52027 - DNA, 25 bp, SARS Virus
ttgtggtcttcgattgtacctggtt

SEQ ID NO: 52028 - DNA, 25 bp, SARS Virus
tgtggtcttcgaatgtacctggttc

SEQ ID NO: 52029 - DNA, 25 bp, SARS Virus
gtggtcttcgatagtacctggttct

SEQ ID NO: 52030 - DNA, 25 bp, SARS Virus
tggtcttcgattatacctggttctc

SEQ ID NO: 52031 - DNA, 25 bp, SARS Virus
ggtcttcgattgaacctggttctca

SEQ ID NO: 52032 - DNA, 25 bp, SARS Virus
gtcttcgattgtacctggttctcag

SEQ ID NO: 52033 - DNA, 25 bp, SARS Virus
tcttcgattgtaactggttctcagg

SEQ ID NO: 52034 - DNA, 25 bp, SARS Virus
cttcgattgtacatggttctcagga

SEQ ID NO: 52035 - DNA, 25 bp, SARS Virus
ttcgattgtaccaggttctcaggaa

SEQ ID NO: 52036 - DNA, 25 bp, SARS Virus
tcgattgtacctagttctcaggaaa

SEQ ID NO: 52037 - DNA, 25 bp, SARS Virus
cgattgtacctgattctcaggaaac

SEQ ID NO: 52038 - DNA, 25 bp, SARS Virus
gattgtacctggatctcaggaaacc

SEQ ID NO: 52039 - DNA, 25 bp, SARS Virus
attgtacctggtactcaggaaacca

SEQ ID NO: 52040 - DNA, 25 bp, SARS Virus
ttgtacctggttatcaggaaaccac

SEQ ID NO: 52041 - DNA, 25 bp, SARS Virus
tgtacctggttcacaggaaaccacc

SEQ ID NO: 52042 - DNA, 25 bp, SARS Virus
gtacctggttctaaggaaaccacca

SEQ ID NO: 52043 - DNA, 25 bp, SARS Virus
tacctggttctcaggaaaccaccac

SEQ ID NO: 52044 - DNA, 25 bp, SARS Virus
acctggttctcaagaaaccaccacg

SEQ ID NO: 52045 - DNA, 25 bp, SARS Virus
cctggttctcagaaaaccaccacga

SEQ ID NO: 52046 - DNA, 25 bp, SARS Virus
ctggttctcaggaaaccaccacgaa

SEQ ID NO: 52047 - DNA, 25 bp, SARS Virus
tggttctcaggaaaccaccacgaag

SEQ ID NO: 52048 - DNA, 25 bp, SARS Virus
ggttctcaggaaaccaccacgaagt

SEQ ID NO: 52049 - DNA, 25 bp, SARS Virus
gttctcaggaaaacaccacgaagta

SEQ ID NO: 52050 - DNA, 25 bp, SARS Virus
ttctcaggaaacaaccacgaagtac

SEQ ID NO: 52051 - DNA, 25 bp, SARS Virus
tctcaggaaaccaccacgaagtaca

SEQ ID NO: 52052 - DNA, 25 bp, SARS Virus
ctcaggaaaccaacacgaagtacaa

SEQ ID NO: 52053 - DNA, 25 bp, SARS Virus
tcaggaaaccacaacgaagtacaac

SEQ ID NO: 52054 - DNA, 25 bp, SARS Virus
caggaaaccaccacgaagtacaaca

SEQ ID NO: 52055 - DNA, 25 bp, SARS Virus
aggaaaccaccaagaagtacaacag

SEQ ID NO: 52056 - DNA, 25 bp, SARS Virus
ggaaaccaccacaaagtacaacaga

SEQ ID NO: 52057 - DNA, 25 bp, SARS Virus
gaaaccaccacgaagtacaacagac

SEQ ID NO: 52058 - DNA, 25 bp, SARS Virus
aaaccaccacgaagtacaacagaca

SEQ ID NO: 52059 - DNA, 25 bp, SARS Virus
aaccaccacgaaatacaacagacat

SEQ ID NO: 52060 - DNA, 25 bp, SARS Virus
accaccacgaagaacaacagacata

SEQ ID NO: 52061 - DNA, 25 bp, SARS Virus
ccaccacgaagtacaacagacataa

SEQ ID NO: 52062 - DNA, 25 bp, SARS Virus
caccacgaagtaaaacagacataac

SEQ ID NO: 52063 - DNA, 25 bp, SARS Virus
accacgaagtacaacagacataaca

SEQ ID NO: 52064 - DNA, 25 bp, SARS Virus
ccacgaagtacaacagacataacat

SEQ ID NO: 52065 - DNA, 25 bp, SARS Virus
cacgaagtacaaaagacataacatc

SEQ ID NO: 52066 - DNA, 25 bp, SARS Virus
acgaagtacaacagacataacatct

SEQ ID NO: 52067 - DNA, 25 bp, SARS Virus
cgaagtacaacaaacataacatcta

SEQ ID NO: 52068 - DNA, 25 bp, SARS Virus
gaagtacaacagacataacatctac

SEQ ID NO: 52069 - DNA, 25 bp, SARS Virus
aagtacaacagaaataacatctacg

SEQ ID NO: 52070 - DNA, 25 bp, SARS Virus
agtacaacagacataacatctacgg

SEQ ID NO: 52071 - DNA, 25 bp, SARS Virus
gtacaacagacaaaacatctacggt

SEQ ID NO: 52072 - DNA, 25 bp, SARS Virus
tacaacagacataacatctacggtg

SEQ ID NO: 52073 - DNA, 25 bp, SARS Virus
acaacagacataacatctacggtgt

SEQ ID NO: 52074 - DNA, 25 bp, SARS Virus
caacagacataaaatctacggtgta

SEQ ID NO: 52075 - DNA, 25 bp, SARS Virus
aacagacataacatctacggtgtaa

SEQ ID NO: 52076 - DNA, 25 bp, SARS Virus
acagacataacaactacggtgtaac

SEQ ID NO: 52077 - DNA, 25 bp, SARS Virus
cagacataacatatacggtgtaact

SEQ ID NO: 52078 - DNA, 25 bp, SARS Virus
agacataacatcaacggtgtaactg

SEQ ID NO: 52079 - DNA, 25 bp, SARS Virus
gacataacatctacggtgtaactgg

SEQ ID NO: 52080 - DNA, 25 bp, SARS Virus
acataacatctaaggtgtaactggt

SEQ ID NO: 52081 - DNA, 25 bp, SARS Virus
cataacatctacagtgtaactggta

SEQ ID NO: 52082 - DNA, 25 bp, SARS Virus
ataacatctacgatgtaactggtag

SEQ ID NO: 52083 - DNA, 25 bp, SARS Virus
taacatctacggagtaactggtagg

SEQ ID NO: 52084 - DNA, 25 bp, SARS Virus
aacatctacggtataactggtaggt

SEQ ID NO: 52085 - DNA, 25 bp, SARS Virus
acatctacggtgaaactggtaggtt

SEQ ID NO: 52086 - DNA, 25 bp, SARS Virus
catctacggtgtaactggtaggttt

SEQ ID NO: 52087 - DNA, 25 bp, SARS Virus
atctacggtgtaactggtaggttta

SEQ ID NO: 52088 - DNA, 25 bp, SARS Virus
tctacggtgtaaatggtaggtttag

SEQ ID NO: 52089 - DNA, 25 bp, SARS Virus
ctacggtgtaacaggtaggtttagg

SEQ ID NO: 52090 - DNA, 25 bp, SARS Virus
tacggtgtaactagtaggtttagga

SEQ ID NO: 52091 - DNA, 25 bp, SARS Virus
acggtgtaactgataggtttaggat

SEQ ID NO: 52092 - DNA, 25 bp, SARS Virus
cggtgtaactggaaggtttaggatt

SEQ ID NO: 52093 - DNA, 25 bp, SARS Virus
ggtgtaactggtaggtttaggattt

SEQ ID NO: 52094 - DNA, 25 bp, SARS Virus
gtgtaactggtaagtttaggatttc

SEQ ID NO: 52095 - DNA, 25 bp, SARS Virus
tgtaactggtagatttaggatttcc

SEQ ID NO: 52096 - DNA, 25 bp, SARS Virus
gtaactggtaggattaggatttcct

SEQ ID NO: 52097 - DNA, 25 bp, SARS Virus
taactggtaggtataggatttccta

SEQ ID NO: 52098 - DNA, 25 bp, SARS Virus
aactggtaggttaaggatttcctaa

SEQ ID NO: 52099 - DNA, 25 bp, SARS Virus
actggtaggtttaggatttcctaag

SEQ ID NO: 52100 - DNA, 25 bp, SARS Virus
ctggtaggtttaagatttcctaaga

SEQ ID NO: 52101 - DNA, 25 bp, SARS Virus
tggtaggtttagaatttcctaagac

SEQ ID NO: 52102 - DNA, 25 bp, SARS Virus
ggtaggtttaggatttcctaagaca

SEQ ID NO: 52103 - DNA, 25 bp, SARS Virus
gtaggtttaggaattcctaagacac

SEQ ID NO: 52104 - DNA, 25 bp, SARS Virus
taggtttaggatatcctaagacact

SEQ ID NO: 52105 - DNA, 25 bp, SARS Virus
aggtttaggattacctaagacactg

SEQ ID NO: 52106 - DNA, 25 bp, SARS Virus
ggtttaggatttactaagacactga

SEQ ID NO: 52107 - DNA, 25 bp, SARS Virus
gtttaggatttcataagacactgaa

SEQ ID NO: 52108 - DNA, 25 bp, SARS Virus
tttaggatttccaaagacactgaac

SEQ ID NO: 52109 - DNA, 25 bp, SARS Virus
ttaggatttcctaagacactgaact

SEQ ID NO: 52110 - DNA, 25 bp, SARS Virus
taggatttcctaagacactgaactt

SEQ ID NO: 52111 - DNA, 25 bp, SARS Virus
aggatttcctaaaacactgaacttt

SEQ ID NO: 52112 - DNA, 25 bp, SARS Virus
ggatttcctaagacactgaactttc

SEQ ID NO: 52113 - DNA, 25 bp, SARS Virus
gatttcctaagaaactgaactttcc

SEQ ID NO: 52114 - DNA, 25 bp, SARS Virus
atttcctaagacactgaactttcca

SEQ ID NO: 52115 - DNA, 25 bp, SARS Virus
tttcctaagacaatgaactttccat

SEQ ID NO: 52116 - DNA, 25 bp, SARS Virus
ttcctaagacacagaactttccatt

SEQ ID NO: 52117 - DNA, 25 bp, SARS Virus
tcctaagacactaaactttccattc

SEQ ID NO: 52118 - DNA, 25 bp, SARS Virus
cctaagacactgaactttccattca

SEQ ID NO: 52119 - DNA, 25 bp, SARS Virus
ctaagacactgaactttccattcat

SEQ ID NO: 52120 - DNA, 25 bp, SARS Virus
taagacactgaaatttccattcatg

SEQ ID NO: 52121 - DNA, 25 bp, SARS Virus
aagacactgaacattccattcatgc

SEQ ID NO: 52122 - DNA, 25 bp, SARS Virus
agacactgaactatccattcatgca

SEQ ID NO: 52123 - DNA, 25 bp, SARS Virus
gacactgaacttaccattcatgcag

SEQ ID NO: 52124 - DNA, 25 bp, SARS Virus
acactgaactttacattcatgcagg

SEQ ID NO: 52125 - DNA, 25 bp, SARS Virus
cactgaactttcaattcatgcaggt

SEQ ID NO: 52126 - DNA, 25 bp, SARS Virus
actgaactttccattcatgcaggtt

SEQ ID NO: 52127 - DNA, 25 bp, SARS Virus
ctgaactttccaatcatgcaggttt

SEQ ID NO: 52128 - DNA, 25 bp, SARS Virus
tgaactttccatacatgcaggttta

SEQ ID NO: 52129 - DNA, 25 bp, SARS Virus
gaactttccattaatgcaggtttat

SEQ ID NO: 52130 - DNA, 25 bp, SARS Virus
aactttccattcatgcaggtttatg

SEQ ID NO: 52131 - DNA, 25 bp, SARS Virus
actttccattcaagcaggtttatgg

SEQ ID NO: 52132 - DNA, 25 bp, SARS Virus
ctttccattcatacaggtttatgga

SEQ ID NO: 52133 - DNA, 25 bp, SARS Virus
tttccattcatgaaggtttatggat

SEQ ID NO: 52134 - DNA, 25 bp, SARS Virus
ttccattcatgcaggtttatggatg

SEQ ID NO: 52135 - DNA, 25 bp, SARS Virus
tccattcatgcaagtttatggatgg

SEQ ID NO: 52136 - DNA, 25 bp, SARS Virus
ccattcatgcagatttatggatggt

SEQ ID NO: 52137 - DNA, 25 bp, SARS Virus
cattcatgcaggattatggatggtg

SEQ ID NO: 52138 - DNA, 25 bp, SARS Virus
attcatgcaggtatatggatggtga

SEQ ID NO: 52139 - DNA, 25 bp, SARS Virus
ttcatgcaggttaatggatggtgaa

SEQ ID NO: 52140 - DNA, 25 bp, SARS Virus
tcatgcaggtttatggatggtgaac

SEQ ID NO: 52141 - DNA, 25 bp, SARS Virus
catgcaggtttaaggatggtgaaca

SEQ ID NO: 52142 - DNA, 25 bp, SARS Virus
atgcaggtttatagatggtgaacac

SEQ ID NO: 52143 - DNA, 25 bp, SARS Virus
tgcaggtttatgaatggtgaacacg

SEQ ID NO: 52144 - DNA, 25 bp, SARS Virus
gcaggtttatggatggtgaacacga

SEQ ID NO: 52145 - DNA, 25 bp, SARS Virus
caggtttatggaaggtgaacacgat

SEQ ID NO: 52146 - DNA, 25 bp, SARS Virus
aggtttatggatagtgaacacgatt

SEQ ID NO: 52147 - DNA, 25 bp, SARS Virus
ggtttatggatgatgaacacgatta

SEQ ID NO: 52148 - DNA, 25 bp, SARS Virus
gtttatggatggagaacacgattac

SEQ ID NO: 52149 - DNA, 25 bp, SARS Virus
tttatggatggtaaacacgattact

SEQ ID NO: 52150 - DNA, 25 bp, SARS Virus
ttatggatggtgaacacgattactg

SEQ ID NO: 52151 - DNA, 25 bp, SARS Virus
tatggatggtgaacacgattactgg

SEQ ID NO: 52152 - DNA, 25 bp, SARS Virus
atggatggtgaaaacgattactggg

SEQ ID NO: 52153 - DNA, 25 bp, SARS Virus
tggatggtgaacacgattactgggt

SEQ ID NO: 52154 - DNA, 25 bp, SARS Virus
ggatggtgaacaagattactgggtc

SEQ ID NO: 52155 - DNA, 25 bp, SARS Virus
gatggtgaacacaattactgggtca

SEQ ID NO: 52156 - DNA, 25 bp, SARS Virus
atggtgaacacgattactgggtcac

SEQ ID NO: 52157 - DNA, 25 bp, SARS Virus
tggtgaacacgaatactgggtcacc

SEQ ID NO: 52158 - DNA, 25 bp, SARS Virus
ggtgaacacgataactgggtcaccc

SEQ ID NO: 52159 - DNA, 25 bp, SARS Virus
gtgaacacgattactgggtcaccca

SEQ ID NO: 52160 - DNA, 25 bp, SARS Virus
tgaacacgattaatgggtcacccaa

SEQ ID NO: 52161 - DNA, 25 bp, SARS Virus
gaacacgattacagggtcacccaaa

SEQ ID NO: 52162 - DNA, 25 bp, SARS Virus
aacacgattactaggtcacccaaaa

SEQ ID NO: 52163 - DNA, 25 bp, SARS Virus
acacgattactgagtcacccaaaat

SEQ ID NO: 52164 - DNA, 25 bp, SARS Virus
cacgattactggatcacccaaaatg

SEQ ID NO: 52165 - DNA, 25 bp, SARS Virus
acgattactgggacacccaaaatgt

SEQ ID NO: 52166 - DNA, 25 bp, SARS Virus
cgattactgggtaacccaaaatgtg

SEQ ID NO: 52167 - DNA, 25 bp, SARS Virus
gattactgggtcacccaaaatgtga

SEQ ID NO: 52168 - DNA, 25 bp, SARS Virus
attactgggtcaaccaaaatgtgaa

SEQ ID NO: 52169 - DNA, 25 bp, SARS Virus
ttactgggtcacacaaaatgtgaat

SEQ ID NO: 52170 - DNA, 25 bp, SARS Virus
tactgggtcaccaaaaatgtgaatc

SEQ ID NO: 52171 - DNA, 25 bp, SARS Virus
actgggtcacccaaaatgtgaatct

SEQ ID NO: 52172 - DNA, 25 bp, SARS Virus
ctgggtcacccaaaatgtgaatctt

SEQ ID NO: 52173 - DNA, 25 bp, SARS Virus
tgggtcacccaaaatgtgaatcttt

SEQ ID NO: 52174 - DNA, 25 bp, SARS Virus
gggtcacccaaaatgtgaatctttg

SEQ ID NO: 52175 - DNA, 25 bp, SARS Virus
ggtcacccaaaaagtgaatctttgt

SEQ ID NO: 52176 - DNA, 25 bp, SARS Virus
gtcacccaaaatatgaatctttgtg

SEQ ID NO: 52177 - DNA, 25 bp, SARS Virus
tcacccaaaatgagaatctttgtgt

SEQ ID NO: 52178 - DNA, 25 bp, SARS Virus
cacccaaaatgtaaatctttgtgtc

SEQ ID NO: 52179 - DNA, 25 bp, SARS Virus
acccaaaatgtgaatctttgtgtca

SEQ ID NO: 52180 - DNA, 25 bp, SARS Virus
cccaaaatgtgaatctttgtgtcag

SEQ ID NO: 52181 - DNA, 25 bp, SARS Virus
ccaaaatgtgaaactttgtgtcaga

SEQ ID NO: 52182 - DNA, 25 bp, SARS Virus
caaaatgtgaatatttgtgtcagac

SEQ ID NO: 52183 - DNA, 25 bp, SARS Virus
aaaatgtgaatcattgtgtcagaca

SEQ ID NO: 52184 - DNA, 25 bp, SARS Virus
aaatgtgaatctatgtgtcagacat

SEQ ID NO: 52185 - DNA, 25 bp, SARS Virus
aatgtgaatcttagtgtcagacatg

SEQ ID NO: 52186 - DNA, 25 bp, SARS Virus
atgtgaatctttatgtcagacatgg

SEQ ID NO: 52187 - DNA, 25 bp, SARS Virus
tgtgaatctttgagtcagacatggc

SEQ ID NO: 52188 - DNA, 25 bp, SARS Virus
gtgaatctttgtatcagacatggca

SEQ ID NO: 52189 - DNA, 25 bp, SARS Virus
tgaatctttgtgacagacatggcag

SEQ ID NO: 52190 - DNA, 25 bp, SARS Virus
gaatctttgtgtaagacatggcaga

SEQ ID NO: 52191 - DNA, 25 bp, SARS Virus
aatctttgtgtcagacatggcagac

SEQ ID NO: 52192 - DNA, 25 bp, SARS Virus
atctttgtgtcaaacatggcagacg

SEQ ID NO: 52193 - DNA, 25 bp, SARS Virus
tctttgtgtcagacatggcagacgc

SEQ ID NO: 52194 - DNA, 25 bp, SARS Virus
ctttgtgtcagaaatggcagacgcc

SEQ ID NO: 52195 - DNA, 25 bp, SARS Virus
tttgtgtcagacatggcagacgcct

SEQ ID NO: 52196 - DNA, 25 bp, SARS Virus
ttgtgtcagacaaggcagacgcctt

SEQ ID NO: 52197 - DNA, 25 bp, SARS Virus
tgtgtcagacatagcagacgcctta

SEQ ID NO: 52198 - DNA, 25 bp, SARS Virus
gtgtcagacatgacagacgccttac

SEQ ID NO: 52199 - DNA, 25 bp, SARS Virus
tgtcagacatggaagacgccttaca

SEQ ID NO: 52200 - DNA, 25 bp, SARS Virus
gtcagacatggcagacgccttacac

SEQ ID NO: 52201 - DNA, 25 bp, SARS Virus
tcagacatggcaaacgccttacacc

SEQ ID NO: 52202 - DNA, 25 bp, SARS Virus
cagacatggcagacgccttacacct

SEQ ID NO: 52203 - DNA, 25 bp, SARS Virus
agacatggcagaagccttacacctt

SEQ ID NO: 52204 - DNA, 25 bp, SARS Virus
gacatggcagacaccttacaccttt

SEQ ID NO: 52205 - DNA, 25 bp, SARS Virus
acatggcagacgacttacacctttc

SEQ ID NO: 52206 - DNA, 25 bp, SARS Virus
catggcagacgcattacacctttcc

SEQ ID NO: 52207 - DNA, 25 bp, SARS Virus
atggcagacgccatacacctttcca

SEQ ID NO: 52208 - DNA, 25 bp, SARS Virus
tggcagacgcctaacacctttccaa

SEQ ID NO: 52209 - DNA, 25 bp, SARS Virus
ggcagacgccttacacctttccaat

SEQ ID NO: 52210 - DNA, 25 bp, SARS Virus
gcagacgccttaaacctttccaata

SEQ ID NO: 52211 - DNA, 25 bp, SARS Virus
cagacgccttacacctttccaatac

SEQ ID NO: 52212 - DNA, 25 bp, SARS Virus
agacgccttacaactttccaatacc

SEQ ID NO: 52213 - DNA, 25 bp, SARS Virus
gacgccttacacatttccaataccg

SEQ ID NO: 52214 - DNA, 25 bp, SARS Virus
acgccttacaccattccaataccga

SEQ ID NO: 52215 - DNA, 25 bp, SARS Virus
cgccttacacctatccaataccgac

SEQ ID NO: 52216 - DNA, 25 bp, SARS Virus
gccttacaccttaccaataccgaca

SEQ ID NO: 52217 - DNA, 25 bp, SARS Virus
ccttacacctttacaataccgacat

SEQ ID NO: 52218 - DNA, 25 bp, SARS Virus
cttacacctttcaaataccgacatc

SEQ ID NO: 52219 - DNA, 25 bp, SARS Virus
ttacacctttccaataccgacatca

SEQ ID NO: 52220 - DNA, 25 bp, SARS Virus
tacacctttccaataccgacatcaa

SEQ ID NO: 52221 - DNA, 25 bp, SARS Virus
acacctttccaaaaccgacatcaac

SEQ ID NO: 52222 - DNA, 25 bp, SARS Virus
cacctttccaataccgacatcaaca

SEQ ID NO: 52223 - DNA, 25 bp, SARS Virus
acctttccaataacgacatcaacac

SEQ ID NO: 52224 - DNA, 25 bp, SARS Virus
cctttccaatacagacatcaacact

SEQ ID NO: 52225 - DNA, 25 bp, SARS Virus
ctttccaataccaacatcaacactg

SEQ ID NO: 52226 - DNA, 25 bp, SARS Virus
tttccaataccgacatcaacactgg

SEQ ID NO: 52227 - DNA, 25 bp, SARS Virus
ttccaataccgaaatcaacactggt

SEQ ID NO: 52228 - DNA, 25 bp, SARS Virus
tccaataccgacatcaacactggtt

SEQ ID NO: 52229 - DNA, 25 bp, SARS Virus
ccaataccgacaacaacactggttg

SEQ ID NO: 52230 - DNA, 25 bp, SARS Virus
caataccgacataaacactggttga

SEQ ID NO: 52231 - DNA, 25 bp, SARS Virus
aataccgacatcaacactggttgag

SEQ ID NO: 52232 - DNA, 25 bp, SARS Virus
ataccgacatcaacactggttgagg

SEQ ID NO: 52233 - DNA, 25 bp, SARS Virus
taccgacatcaaaactggttgaggc

SEQ ID NO: 52234 - DNA, 25 bp, SARS Virus
accgacatcaacactggttgaggcg

SEQ ID NO: 52235 - DNA, 25 bp, SARS Virus
ccgacatcaacaatggttgaggcgc

SEQ ID NO: 52236 - DNA, 25 bp, SARS Virus
cgacatcaacacaggttgaggcgct

SEQ ID NO: 52237 - DNA, 25 bp, SARS Virus
gacatcaacactagttgaggcgctt

SEQ ID NO: 52238 - DNA, 25 bp, SARS Virus
acatcaacactgattgaggcgcttg

SEQ ID NO: 52239 - DNA, 25 bp, SARS Virus
catcaacactggatgaggcgcttgg

SEQ ID NO: 52240 - DNA, 25 bp, SARS Virus
atcaacactggtagaggcgcttggg

SEQ ID NO: 52241 - DNA, 25 bp, SARS Virus
tcaacactggttaaggcgcttggga

SEQ ID NO: 52242 - DNA, 25 bp, SARS Virus
caacactggttgaggcgcttgggaa

SEQ ID NO: 52243 - DNA, 25 bp, SARS Virus
aacactggttgaagcgcttgggaac

SEQ ID NO: 52244 - DNA, 25 bp, SARS Virus
acactggttgagacgcttgggaact

SEQ ID NO: 52245 - DNA, 25 bp, SARS Virus
cactggttgaggagcttgggaacta

SEQ ID NO: 52246 - DNA, 25 bp, SARS Virus
actggttgaggcacttgggaactac

SEQ ID NO: 52247 - DNA, 25 bp, SARS Virus
ctggttgaggcgattgggaactacg

SEQ ID NO: 52248 - DNA, 25 bp, SARS Virus
tggttgaggcgcatgggaactacgt

SEQ ID NO: 52249 - DNA, 25 bp, SARS Virus
ggttgaggcgctagggaactacgtc

SEQ ID NO: 52250 - DNA, 25 bp, SARS Virus
gttgaggcgcttaggaactacgtca

SEQ ID NO: 52251 - DNA, 25 bp, SARS Virus
ttgaggcgcttgagaactacgtcag

SEQ ID NO: 52252 - DNA, 25 bp, SARS Virus
tgaggcgcttggaaactacgtcaga

SEQ ID NO: 52253 - DNA, 25 bp, SARS Virus
gaggcgcttgggaactacgtcagac

SEQ ID NO: 52254 - DNA, 25 bp, SARS Virus
aggcgcttgggaactacgtcagacg

SEQ ID NO: 52255 - DNA, 25 bp, SARS Virus
ggcgcttgggaaatacgtcagacgc

SEQ ID NO: 52256 - DNA, 25 bp, SARS Virus
gcgcttgggaacaacgtcagacgcc

SEQ ID NO: 52257 - DNA, 25 bp, SARS Virus
cgcttgggaactacgtcagacgcct

SEQ ID NO: 52258 - DNA, 25 bp, SARS Virus
gcttgggaactaagtcagacgccta

SEQ ID NO: 52259 - DNA, 25 bp, SARS Virus
cttgggaactacatcagacgcctac

SEQ ID NO: 52260 - DNA, 25 bp, SARS Virus
ttgggaactacgacagacgcctacg

SEQ ID NO: 52261 - DNA, 25 bp, SARS Virus
tgggaactacgtaagacgcctacgt

SEQ ID NO: 52262 - DNA, 25 bp, SARS Virus
gggaactacgtcagacgcctacgta

SEQ ID NO: 52263 - DNA, 25 bp, SARS Virus
ggaactacgtcaaacgcctacgtag

SEQ ID NO: 52264 - DNA, 25 bp, SARS Virus
gaactacgtcagacgcctacgtagt

SEQ ID NO: 52265 - DNA, 25 bp, SARS Virus
aactacgtcagaagcctacgtagtt

SEQ ID NO: 52266 - DNA, 25 bp, SARS Virus
actacgtcagacacctacgtagttg

SEQ ID NO: 52267 - DNA, 25 bp, SARS Virus
ctacgtcagacgactacgtagttgc

SEQ ID NO: 52268 - DNA, 25 bp, SARS Virus
tacgtcagacgcatacgtagttgca

SEQ ID NO: 52269 - DNA, 25 bp, SARS Virus
acgtcagacgccaacgtagttgcaa

SEQ ID NO: 52270 - DNA, 25 bp, SARS Virus
cgtcagacgcctacgtagttgcaaa

SEQ ID NO: 52271 - DNA, 25 bp, SARS Virus
gtcagacgcctaagtagttgcaaaa

SEQ ID NO: 52272 - DNA, 25 bp, SARS Virus
tcagacgcctacatagttgcaaaaa

SEQ ID NO: 52273 - DNA, 25 bp, SARS Virus
cagacgcctacgaagttgcaaaaat

SEQ ID NO: 52274 - DNA, 25 bp, SARS Virus
agacgcctacgtagttgcaaaaatt

SEQ ID NO: 52275 - DNA, 25 bp, SARS Virus
gacgcctacgtaattgcaaaaattt

SEQ ID NO: 52276 - DNA, 25 bp, SARS Virus
acgcctacgtagatgcaaaaatttg

SEQ ID NO: 52277 - DNA, 25 bp, SARS Virus
cgcctacgtagtagcaaaaatttgc

SEQ ID NO: 52278 - DNA, 25 bp, SARS Virus
gcctacgtagttacaaaaatttgcc

SEQ ID NO: 52279 - DNA, 25 bp, SARS Virus
cctacgtagttgaaaaaatttgccc

SEQ ID NO: 52280 - DNA, 25 bp, SARS Virus
ctacgtagttgcaaaaatttgccca

SEQ ID NO: 52281 - DNA, 25 bp, SARS Virus
tacgtagttgcaaaaatttgcccaa

SEQ ID NO: 52282 - DNA, 25 bp, SARS Virus
acgtagttgcaaaaatttgcccaaa

SEQ ID NO: 52283 - DNA, 25 bp, SARS Virus
cgtagttgcaaaaatttgcccaaac

SEQ ID NO: 52284 - DNA, 25 bp, SARS Virus
gtagttgcaaaaatttgcccaaacg

SEQ ID NO: 52285 - DNA, 25 bp, SARS Virus
tagttgcaaaaaattgcccaaacgc

SEQ ID NO: 52286 - DNA, 25 bp, SARS Virus
agttgcaaaaatatgcccaaacgcc

SEQ ID NO: 52287 - DNA, 25 bp, SARS Virus
gttgcaaaaattagcccaaacgcca

SEQ ID NO: 52288 - DNA, 25 bp, SARS Virus
ttgcaaaaatttacccaaacgccac

SEQ ID NO: 52289 - DNA, 25 bp, SARS Virus
tgcaaaaatttgaccaaacgccaca

SEQ ID NO: 52290 - DNA, 25 bp, SARS Virus
gcaaaaatttgcacaaacgccacat

SEQ ID NO: 52291 - DNA, 25 bp, SARS Virus
caaaaatttgccaaaacgccacatt

SEQ ID NO: 52292 - DNA, 25 bp, SARS Virus
aaaaatttgcccaaacgccacattc

SEQ ID NO: 52293 - DNA, 25 bp, SARS Virus
aaaatttgcccaaacgccacattca

SEQ ID NO: 52294 - DNA, 25 bp, SARS Virus
aaatttgcccaaacgccacattcac

SEQ ID NO: 52295 - DNA, 25 bp, SARS Virus
aatttgcccaaaagccacattcacg

SEQ ID NO: 52296 - DNA, 25 bp, SARS Virus
atttgcccaaacaccacattcacgt

SEQ ID NO: 52297 - DNA, 25 bp, SARS Virus
tttgcccaaacgacacattcacgtc

SEQ ID NO: 52298 - DNA, 25 bp, SARS Virus
ttgcccaaacgcaacattcacgtcg

SEQ ID NO: 52299 - DNA, 25 bp, SARS Virus
tgcccaaacgccacattcacgtcgg

SEQ ID NO: 52300 - DNA, 25 bp, SARS Virus
gcccaaacgccaaattcacgtcggg

SEQ ID NO: 52301 - DNA, 25 bp, SARS Virus
cccaaacgccacattcacgtcgggc

SEQ ID NO: 52302 - DNA, 25 bp, SARS Virus
ccaaacgccacaatcacgtcgggca

SEQ ID NO: 52303 - DNA, 25 bp, SARS Virus
caaacgccacatacacgtcgggcag

SEQ ID NO: 52304 - DNA, 25 bp, SARS Virus
aaacgccacattaacgtcgggcaga

SEQ ID NO: 52305 - DNA, 25 bp, SARS Virus
aacgccacattcacgtcgggcagaa

SEQ ID NO: 52306 - DNA, 25 bp, SARS Virus
acgccacattcaagtcgggcagaat

SEQ ID NO: 52307 - DNA, 25 bp, SARS Virus
cgccacattcacatcgggcagaatg

SEQ ID NO: 52308 - DNA, 25 bp, SARS Virus
gccacattcacgacgggcagaatgt

SEQ ID NO: 52309 - DNA, 25 bp, SARS Virus
ccacattcacgtagggcagaatgtg

SEQ ID NO: 52310 - DNA, 25 bp, SARS Virus
cacattcacgtcaggcagaatgtgg

SEQ ID NO: 52311 - DNA, 25 bp, SARS Virus
acattcacgtcgagcagaatgtggc

SEQ ID NO: 52312 - DNA, 25 bp, SARS Virus
cattcacgtcggacagaatgtggca

SEQ ID NO: 52313 - DNA, 25 bp, SARS Virus
attcacgtcgggaagaatgtggcac

SEQ ID NO: 52314 - DNA, 25 bp, SARS Virus
ttcacgtcgggcagaatgtggcacg

SEQ ID NO: 52315 - DNA, 25 bp, SARS Virus
tcacgtcgggcaaaatgtggcacgc

SEQ ID NO: 52316 - DNA, 25 bp, SARS Virus
cacgtcgggcagaatgtggcacgcc

SEQ ID NO: 52317 - DNA, 25 bp, SARS Virus
acgtcgggcagaatgtggcacgccg

SEQ ID NO: 52318 - DNA, 25 bp, SARS Virus
cgtcgggcagaaagtggcacgccgt

SEQ ID NO: 52319 - DNA, 25 bp, SARS Virus
gtcgggcagaatatggcacgccgtg

SEQ ID NO: 52320 - DNA, 25 bp, SARS Virus
tcgggcagaatgaggcacgccgtgt

SEQ ID NO: 52321 - DNA, 25 bp, SARS Virus
cgggcagaatgtagcacgccgtgtc

SEQ ID NO: 52322 - DNA, 25 bp, SARS Virus
gggcagaatgtgacacgccgtgtcc

SEQ ID NO: 52323 - DNA, 25 bp, SARS Virus
ggcagaatgtggaacgccgtgtccg

SEQ ID NO: 52324 - DNA, 25 bp, SARS Virus
gcagaatgtggcacgccgtgtccgt

SEQ ID NO: 52325 - DNA, 25 bp, SARS Virus
cagaatgtggcaagccgtgtccgtg

SEQ ID NO: 52326 - DNA, 25 bp, SARS Virus
agaatgtggcacaccgtgtccgtga

SEQ ID NO: 52327 - DNA, 25 bp, SARS Virus
gaatgtggcacgacgtgtccgtgat

SEQ ID NO: 52328 - DNA, 25 bp, SARS Virus
aatgtggcacgcagtgtccgtgatc

SEQ ID NO: 52329 - DNA, 25 bp, SARS Virus
atgtggcacgccatgtccgtgatca

SEQ ID NO: 52330 - DNA, 25 bp, SARS Virus
tgtggcacgccgagtccgtgatcat

SEQ ID NO: 52331 - DNA, 25 bp, SARS Virus
gtggcacgccgtatccgtgatcatg

SEQ ID NO: 52332 - DNA, 25 bp, SARS Virus
tggcacgccgtgaccgtgatcatga

SEQ ID NO: 52333 - DNA, 25 bp, SARS Virus
ggcacgccgtgtacgtgatcatgac

SEQ ID NO: 52334 - DNA, 25 bp, SARS Virus
gcacgccgtgtcagtgatcatgact

SEQ ID NO: 52335 - DNA, 25 bp, SARS Virus
cacgccgtgtccatgatcatgacta

SEQ ID NO: 52336 - DNA, 25 bp, SARS Virus
acgccgtgtccgagatcatgactac

SEQ ID NO: 52337 - DNA, 25 bp, SARS Virus
cgccgtgtccgtaatcatgactaca

SEQ ID NO: 52338 - DNA, 25 bp, SARS Virus
gccgtgtccgtgatcatgactacag

SEQ ID NO: 52339 - DNA, 25 bp, SARS Virus
ccgtgtccgtgaacatgactacagc

SEQ ID NO: 52340 - DNA, 25 bp, SARS Virus
cgtgtccgtgataatgactacagca

SEQ ID NO: 52341 - DNA, 25 bp, SARS Virus
gtgtccgtgatcatgactacagcag

SEQ ID NO: 52342 - DNA, 25 bp, SARS Virus
tgtccgtgatcaagactacagcaga

SEQ ID NO: 52343 - DNA, 25 bp, SARS Virus
gtccgtgatcataactacagcagat

SEQ ID NO: 52344 - DNA, 25 bp, SARS Virus
tccgtgatcatgactacagcagatg

SEQ ID NO: 52345 - DNA, 25 bp, SARS Virus
cgacctttacgacgtcttcatggac

SEQ ID NO: 52346 - DNA, 25 bp, SARS Virus
gacctttacgatctcttcatggacg

SEQ ID NO: 52347 - DNA, 25 bp, SARS Virus
acctttacgatgccttcatggacgg

SEQ ID NO: 52348 - DNA, 25 bp, SARS Virus
cctttacgatgtcttcatggacggt

SEQ ID NO: 52349 - DNA, 25 bp, SARS Virus
ctttacgatgtcctcatggacggtt

SEQ ID NO: 52350 - DNA, 25 bp, SARS Virus
tttacgatgtctccatggacggtta

SEQ ID NO: 52351 - DNA, 25 bp, SARS Virus
ttacgatgtcttcatggacggttaa

SEQ ID NO: 52352 - DNA, 25 bp, SARS Virus
tacgatgtcttcctggacggttaag

SEQ ID NO: 52353 - DNA, 25 bp, SARS Virus
acgatgtcttcacggacggttaagt

SEQ ID NO: 52354 - DNA, 25 bp, SARS Virus
cgatgtcttcatcgacggttaagtt

SEQ ID NO: 52355 - DNA, 25 bp, SARS Virus
gatgtcttcatgcacggttaagttg

SEQ ID NO: 52356 - DNA, 25 bp, SARS Virus
atgtcttcatggccggttaagttga

SEQ ID NO: 52357 - DNA, 25 bp, SARS Virus
tgtcttcatggacggttaagttgac

SEQ ID NO: 52358 - DNA, 25 bp, SARS Virus
gtcttcatggaccgttaagttgaca

SEQ ID NO: 52359 - DNA, 25 bp, SARS Virus
tcttcatggacgcttaagttgacac

SEQ ID NO: 52360 - DNA, 25 bp, SARS Virus
cttcatggacggctaagttgacacg

SEQ ID NO: 52361 - DNA, 25 bp, SARS Virus
ttcatggacggtcaagttgacacga

SEQ ID NO: 52362 - DNA, 25 bp, SARS Virus
tcatggacggttcagttgacacgaa

SEQ ID NO: 52363 - DNA, 25 bp, SARS Virus
catggacggttacgttgacacgaaa

SEQ ID NO: 52364 - DNA, 25 bp, SARS Virus
atggacggttaacttgacacgaaag

SEQ ID NO: 52365 - DNA, 25 bp, SARS Virus
tggacggttaagctgacacgaaagg

SEQ ID NO: 52366 - DNA, 25 bp, SARS Virus
ggacggttaagtcgacacgaaagga

SEQ ID NO: 52367 - DNA, 25 bp, SARS Virus
gacggttaagttcacacgaaaggaa

SEQ ID NO: 52368 - DNA, 25 bp, SARS Virus
acggttaagttgccacgaaaggaag

SEQ ID NO: 52369 - DNA, 25 bp, SARS Virus
cggttaagttgacacgaaaggaaga

SEQ ID NO: 52370 - DNA, 25 bp, SARS Virus
ggttaagttgacccgaaaggaagac

SEQ ID NO: 52371 - DNA, 25 bp, SARS Virus
gttaagttgacacgaaaggaagaca

SEQ ID NO: 52372 - DNA, 25 bp, SARS Virus
ttaagttgacaccaaaggaagacac

SEQ ID NO: 52373 - DNA, 25 bp, SARS Virus
taagttgacacgcaaggaagacacg

SEQ ID NO: 52374 - DNA, 25 bp, SARS Virus
aagttgacacgacaggaagacacga

SEQ ID NO: 52375 - DNA, 25 bp, SARS Virus
agttgacacgaacggaagacacgaa

SEQ ID NO: 52376 - DNA, 25 bp, SARS Virus
gttgacacgaaacgaagacacgaaa

SEQ ID NO: 52377 - DNA, 25 bp, SARS Virus
ttgacacgaaagcaagacacgaaaa

SEQ ID NO: 52378 - DNA, 25 bp, SARS Virus
tgacacgaaaggcagacacgaaaac

SEQ ID NO: 52379 - DNA, 25 bp, SARS Virus
gacacgaaaggacgacacgaaaacg

SEQ ID NO: 52380 - DNA, 25 bp, SARS Virus
acacgaaaggaacacacgaaaacgt

SEQ ID NO: 52381 - DNA, 25 bp, SARS Virus
cacgaaaggaagccacgaaaacgtc

SEQ ID NO: 52382 - DNA, 25 bp, SARS Virus
acgaaaggaagacacgaaaacgtca

SEQ ID NO: 52383 - DNA, 25 bp, SARS Virus
cgaaaggaagacccgaaaacgtcat

SEQ ID NO: 52384 - DNA, 25 bp, SARS Virus
gaaaggaagacacgaaaacgtcatc

SEQ ID NO: 52385 - DNA, 25 bp, SARS Virus
aaaggaagacaccaaaacgtcatct

SEQ ID NO: 52386 - DNA, 25 bp, SARS Virus
aaggaagacacgcaaacgtcatctg

SEQ ID NO: 52387 - DNA, 25 bp, SARS Virus
aggaagacacgacaacgtcatctgg

SEQ ID NO: 52388 - DNA, 25 bp, SARS Virus
ggaagacacgaacacgtcatctggg

SEQ ID NO: 52389 - DNA, 25 bp, SARS Virus
gaagacacgaaaccgtcatctggga

SEQ ID NO: 52390 - DNA, 25 bp, SARS Virus
aagacacgaaaacgtcatctgggac

SEQ ID NO: 52391 - DNA, 25 bp, SARS Virus
agacacgaaaacctcatctgggacg

SEQ ID NO: 52392 - DNA, 25 bp, SARS Virus
gacacgaaaacgccatctgggacga

SEQ ID NO: 52393 - DNA, 25 bp, SARS Virus
acacgaaaacgtcatctgggacgat

SEQ ID NO: 52394 - DNA, 25 bp, SARS Virus
cacgaaaacgtcctctgggacgatt

SEQ ID NO: 52395 - DNA, 25 bp, SARS Virus
acgaaaacgtcacctgggacgattt

SEQ ID NO: 52396 - DNA, 25 bp, SARS Virus
cgaaaacgtcatctgggacgatttc

SEQ ID NO: 52397 - DNA, 25 bp, SARS Virus
gaaaacgtcatccgggacgatttcg

SEQ ID NO: 52398 - DNA, 25 bp, SARS Virus
aaaacgtcatctcggacgatttcgt

SEQ ID NO: 52399 - DNA, 25 bp, SARS Virus
aaacgtcatctgcgacgatttcgta

SEQ ID NO: 52400 - DNA, 25 bp, SARS Virus
aacgtcatctggcacgatttcgtat

SEQ ID NO: 52401 - DNA, 25 bp, SARS Virus
acgtcatctgggccgatttcgtata

SEQ ID NO: 52402 - DNA, 25 bp, SARS Virus
cgtcatctgggacgatttcgtatat

SEQ ID NO: 52403 - DNA, 25 bp, SARS Virus
gtcatctgggaccatttcgtatatt

SEQ ID NO: 52404 - DNA, 25 bp, SARS Virus
tcatctgggacgctttcgtatattc

SEQ ID NO: 52405 - DNA, 25 bp, SARS Virus
catctgggacgacttcgtatattcc

SEQ ID NO: 52406 - DNA, 25 bp, SARS Virus
atctgggacgatctcgtatattcct

SEQ ID NO: 52407 - DNA, 25 bp, SARS Virus
tctgggacgattccgtatattccta

SEQ ID NO: 52408 - DNA, 25 bp, SARS Virus
ctgggacgatttcgtatattcctaa

SEQ ID NO: 52409 - DNA, 25 bp, SARS Virus
tgggacgatttcctatattcctaat

SEQ ID NO: 52410 - DNA, 25 bp, SARS Virus
gggacgatttcgcatattcctaatg

SEQ ID NO: 52411 - DNA, 25 bp, SARS Virus
ggacgatttcgtctattcctaatgg

SEQ ID NO: 52412 - DNA, 25 bp, SARS Virus
gacgatttcgtacattcctaatgga

SEQ ID NO: 52413 - DNA, 25 bp, SARS Virus
acgatttcgtatcttcctaatggat

SEQ ID NO: 52414 - DNA, 25 bp, SARS Virus
cgatttcgtatactcctaatggatc

SEQ ID NO: 52415 - DNA, 25 bp, SARS Virus
gatttcgtatatccctaatggatcg

SEQ ID NO: 52416 - DNA, 25 bp, SARS Virus
atttcgtatattcctaatggatcgt

SEQ ID NO: 52417 - DNA, 25 bp, SARS Virus
tttcgtatattcctaatggatcgtt

SEQ ID NO: 52418 - DNA, 25 bp, SARS Virus
ttcgtatattcccaatggatcgttc

SEQ ID NO: 52419 - DNA, 25 bp, SARS Virus
tcgtatattcctcatggatcgttca

SEQ ID NO: 52420 - DNA, 25 bp, SARS Virus
cgtatattcctactggatcgttcac

SEQ ID NO: 52421 - DNA, 25 bp, SARS Virus
gtatattcctaacggatcgttcacc

SEQ ID NO: 52422 - DNA, 25 bp, SARS Virus
tatattcctaatcgatcgttcacct

SEQ ID NO: 52423 - DNA, 25 bp, SARS Virus
atattcctaatgcatcgttcacctc

SEQ ID NO: 52424 - DNA, 25 bp, SARS Virus
tattcctaatggctcgttcacctcc

SEQ ID NO: 52425 - DNA, 25 bp, SARS Virus
attcctaatggaccgttcacctcct

SEQ ID NO: 52426 - DNA, 25 bp, SARS Virus
ttcctaatggatcgttcacctcctg

SEQ ID NO: 52427 - DNA, 25 bp, SARS Virus
tcctaatggatccttcacctcctgt

SEQ ID NO: 52428 - DNA, 25 bp, SARS Virus
cctaatggatcgctcacctcctgtt

SEQ ID NO: 52429 - DNA, 25 bp, SARS Virus
ctaatggatcgtccacctcctgttg

SEQ ID NO: 52430 - DNA, 25 bp, SARS Virus
taatggatcgttcacctcctgttgg

SEQ ID NO: 52431 - DNA, 25 bp, SARS Virus
aatggatcgttcccctcctgttggt

SEQ ID NO: 52432 - DNA, 25 bp, SARS Virus
atggatcgttcacctcctgttggtt

SEQ ID NO: 52433 - DNA, 25 bp, SARS Virus
tggatcgttcacctcctgttggtta

SEQ ID NO: 52434 - DNA, 25 bp, SARS Virus
ggatcgttcaccccctgttggttag

SEQ ID NO: 52435 - DNA, 25 bp, SARS Virus
gatcgttcacctcctgttggttagt

SEQ ID NO: 52436 - DNA, 25 bp, SARS Virus
atcgttcacctcctgttggttagtg

SEQ ID NO: 52437 - DNA, 25 bp, SARS Virus
tcgttcacctcccgttggttagtgg

SEQ ID NO: 52438 - DNA, 25 bp, SARS Virus
cgttcacctcctcttggttagtggt

SEQ ID NO: 52439 - DNA, 25 bp, SARS Virus
gttcacctcctgctggttagtggtt

SEQ ID NO: 52440 - DNA, 25 bp, SARS Virus
ttcacctcctgtcggttagtggttg

SEQ ID NO: 52441 - DNA, 25 bp, SARS Virus
tcacctcctgttcgttagtggttga

SEQ ID NO: 52442 - DNA, 25 bp, SARS Virus
cacctcctgttgcttagtggttgac

SEQ ID NO: 52443 - DNA, 25 bp, SARS Virus
acctcctgttggctagtggttgaca

SEQ ID NO: 52444 - DNA, 25 bp, SARS Virus
cctcctgttggtcagtggttgacac

SEQ ID NO: 52445 - DNA, 25 bp, SARS Virus
ctcctgttggttcgtggttgacaca

SEQ ID NO: 52446 - DNA, 25 bp, SARS Virus
tcctgttggttactggttgacacac

SEQ ID NO: 52447 - DNA, 25 bp, SARS Virus
cctgttggttagcggttgacacact

SEQ ID NO: 52448 - DNA, 25 bp, SARS Virus
ctgttggttagtcgttgacacactt

SEQ ID NO: 52449 - DNA, 25 bp, SARS Virus
tgttggttagtgcttgacacacttc

SEQ ID NO: 52450 - DNA, 25 bp, SARS Virus
gttggttagtggctgacacacttct

SEQ ID NO: 52451 - DNA, 25 bp, SARS Virus
ttggttagtggtcgacacacttcta

SEQ ID NO: 52452 - DNA, 25 bp, SARS Virus
tggttagtggttcacacacttctac

SEQ ID NO: 52453 - DNA, 25 bp, SARS Virus
ggttagtggttgccacacttctaca

SEQ ID NO: 52454 - DNA, 25 bp, SARS Virus
gttagtggttgacacacttctacaa

SEQ ID NO: 52455 - DNA, 25 bp, SARS Virus
ttagtggttgacccacttctacaac

SEQ ID NO: 52456 - DNA, 25 bp, SARS Virus
tagtggttgacacacttctacaaca

SEQ ID NO: 52457 - DNA, 25 bp, SARS Virus
agtggttgacacccttctacaacac

SEQ ID NO: 52458 - DNA, 25 bp, SARS Virus
gtggttgacacacttctacaacaca

SEQ ID NO: 52459 - DNA, 25 bp, SARS Virus
tggttgacacacctctacaacacat

SEQ ID NO: 52460 - DNA, 25 bp, SARS Virus
ggttgacacactcctacaacacatg

SEQ ID NO: 52461 - DNA, 25 bp, SARS Virus
gttgacacacttctacaacacatgt

SEQ ID NO: 52462 - DNA, 25 bp, SARS Virus
ttgacacacttccacaacacatgtg

SEQ ID NO: 52463 - DNA, 25 bp, SARS Virus
tgacacacttctccaacacatgtgt

SEQ ID NO: 52464 - DNA, 25 bp, SARS Virus
gacacacttctacaacacatgtgtg

SEQ ID NO: 52465 - DNA, 25 bp, SARS Virus
acacacttctaccacacatgtgtgt

SEQ ID NO: 52466 - DNA, 25 bp, SARS Virus
cacacttctacaccacatgtgtgtg

SEQ ID NO: 52467 - DNA, 25 bp, SARS Virus
acacttctacaacacatgtgtgtga

SEQ ID NO: 52468 - DNA, 25 bp, SARS Virus
cacttctacaacccatgtgtgtgac

SEQ ID NO: 52469 - DNA, 25 bp, SARS Virus
acttctacaacacatgtgtgtgacc

SEQ ID NO: 52470 - DNA, 25 bp, SARS Virus
cttctacaacacctgtgtgtgacca

SEQ ID NO: 52471 - DNA, 25 bp, SARS Virus
ttctacaacacacgtgtgtgaccat

SEQ ID NO: 52472 - DNA, 25 bp, SARS Virus
tctacaacacatctgtgtgaccatg

SEQ ID NO: 52473 - DNA, 25 bp, SARS Virus
ctacaacacatgcgtgtgaccatgt

SEQ ID NO: 52474 - DNA, 25 bp, SARS Virus
tacaacacatgtctgtgaccatgtc

SEQ ID NO: 52475 - DNA, 25 bp, SARS Virus
acaacacatgtgcgtgaccatgtcc

SEQ ID NO: 52476 - DNA, 25 bp, SARS Virus
caacacatgtgtctgaccatgtcct

SEQ ID NO: 52477 - DNA, 25 bp, SARS Virus
aacacatgtgtgcgaccatgtcctg

SEQ ID NO: 52478 - DNA, 25 bp, SARS Virus
acacatgtgtgtcaccatgtcctgt

SEQ ID NO: 52479 - DNA, 25 bp, SARS Virus
cacatgtgtgtgcccatgtcctgtc

SEQ ID NO: 52480 - DNA, 25 bp, SARS Virus
acatgtgtgtgaccatgtcctgtcc

SEQ ID NO: 52481 - DNA, 25 bp, SARS Virus
catgtgtgtgaccatgtcctgtccg

SEQ ID NO: 52482 - DNA, 25 bp, SARS Virus
atgtgtgtgaccctgtcctgtccgt

SEQ ID NO: 52483 - DNA, 25 bp, SARS Virus
tgtgtgtgaccacgtcctgtccgtt

SEQ ID NO: 52484 - DNA, 25 bp, SARS Virus
gtgtgtgaccatctcctgtccgtta

SEQ ID NO: 52485 - DNA, 25 bp, SARS Virus
tgtgtgaccatgccctgtccgttaa

SEQ ID NO: 52486 - DNA, 25 bp, SARS Virus
gtgtgaccatgtcctgtccgttaat

SEQ ID NO: 52487 - DNA, 25 bp, SARS Virus
tgtgaccatgtcctgtccgttaatg

SEQ ID NO: 52488 - DNA, 25 bp, SARS Virus
gtgaccatgtcccgtccgttaatga

SEQ ID NO: 52489 - DNA, 25 bp, SARS Virus
tgaccatgtcctctccgttaatgac

SEQ ID NO: 52490 - DNA, 25 bp, SARS Virus
gaccatgtcctgcccgttaatgaca

SEQ ID NO: 52491 - DNA, 25 bp, SARS Virus
accatgtcctgtccgttaatgacat

SEQ ID NO: 52492 - DNA, 25 bp, SARS Virus
ccatgtcctgtccgttaatgacatt

SEQ ID NO: 52493 - DNA, 25 bp, SARS Virus
catgtcctgtcccttaatgacattg

SEQ ID NO: 52494 - DNA, 25 bp, SARS Virus
atgtcctgtccgctaatgacattgt

SEQ ID NO: 52495 - DNA, 25 bp, SARS Virus
tgtcctgtccgtcaatgacattgtg

SEQ ID NO: 52496 - DNA, 25 bp, SARS Virus
gtcctgtccgttcatgacattgtgg

SEQ ID NO: 52497 - DNA, 25 bp, SARS Virus
tcctgtccgttactgacattgtggt

SEQ ID NO: 52498 - DNA, 25 bp, SARS Virus
cctgtccgttaacgacattgtggtc

SEQ ID NO: 52499 - DNA, 25 bp, SARS Virus
ctgtccgttaatcacattgtggtct

SEQ ID NO: 52500 - DNA, 25 bp, SARS Virus
tgtccgttaatgccattgtggtctt

SEQ ID NO: 52501 - DNA, 25 bp, SARS Virus
gtccgttaatgacattgtggtcttc

SEQ ID NO: 52502 - DNA, 25 bp, SARS Virus
tccgttaatgaccttgtggtcttcg

SEQ ID NO: 52503 - DNA, 25 bp, SARS Virus
ccgttaatgacactgtggtcttcga

SEQ ID NO: 52504 - DNA, 25 bp, SARS Virus
cgttaatgacatcgtggtcttcgat

SEQ ID NO: 52505 - DNA, 25 bp, SARS Virus
gttaatgacattctggtcttcgatt

SEQ ID NO: 52506 - DNA, 25 bp, SARS Virus
ttaatgacattgcggtcttcgattg

SEQ ID NO: 52507 - DNA, 25 bp, SARS Virus
taatgacattgtcgtcttcgattgt

SEQ ID NO: 52508 - DNA, 25 bp, SARS Virus
aatgacattgtgctcttcgattgta

SEQ ID NO: 52509 - DNA, 25 bp, SARS Virus
atgacattgtggccttcgattgtac

SEQ ID NO: 52510 - DNA, 25 bp, SARS Virus
tgacattgtggtcttcgattgtacc

SEQ ID NO: 52511 - DNA, 25 bp, SARS Virus
gacattgtggtcctcgattgtacct

SEQ ID NO: 52512 - DNA, 25 bp, SARS Virus
acattgtggtctccgattgtacctg

SEQ ID NO: 52513 - DNA, 25 bp, SARS Virus
cattgtggtcttcgattgtacctgg

SEQ ID NO: 52514 - DNA, 25 bp, SARS Virus
attgtggtcttccattgtacctggt

SEQ ID NO: 52515 - DNA, 25 bp, SARS Virus
ttgtggtcttcgcttgtacctggtt

SEQ ID NO: 52516 - DNA, 25 bp, SARS Virus
tgtggtcttcgactgtacctggttc

SEQ ID NO: 52517 - DNA, 25 bp, SARS Virus
gtggtcttcgatcgtacctggttct

SEQ ID NO: 52518 - DNA, 25 bp, SARS Virus
tggtcttcgattctacctggttctc

SEQ ID NO: 52519 - DNA, 25 bp, SARS Virus
ggtcttcgattgcacctggttctca

SEQ ID NO: 52520 - DNA, 25 bp, SARS Virus
gtcttcgattgtccctggttctcag

SEQ ID NO: 52521 - DNA, 25 bp, SARS Virus
tcttcgattgtacctggttctcagg

SEQ ID NO: 52522 - DNA, 25 bp, SARS Virus
cttcgattgtacctggttctcagga

SEQ ID NO: 52523 - DNA, 25 bp, SARS Virus
ttcgattgtacccggttctcaggaa

SEQ ID NO: 52524 - DNA, 25 bp, SARS Virus
tcgattgtacctcgttctcaggaaa

SEQ ID NO: 52525 - DNA, 25 bp, SARS Virus
cgattgtacctgcttctcaggaaac

SEQ ID NO: 52526 - DNA, 25 bp, SARS Virus
gattgtacctggctctcaggaaacc

SEQ ID NO: 52527 - DNA, 25 bp, SARS Virus
attgtacctggtcctcaggaaacca

SEQ ID NO: 52528 - DNA, 25 bp, SARS Virus
ttgtacctggttctcaggaaaccac

SEQ ID NO: 52529 - DNA, 25 bp, SARS Virus
tgtacctggttcccaggaaaccacc

SEQ ID NO: 52530 - DNA, 25 bp, SARS Virus
gtacctggttctcaggaaaccacca

SEQ ID NO: 52531 - DNA, 25 bp, SARS Virus
tacctggttctccggaaaccaccac

SEQ ID NO: 52532 - DNA, 25 bp, SARS Virus
acctggttctcacgaaaccaccacg

SEQ ID NO: 52533 - DNA, 25 bp, SARS Virus
cctggttctcagcaaaccaccacga

SEQ ID NO: 52534 - DNA, 25 bp, SARS Virus
ctggttctcaggcaaccaccacgaa

SEQ ID NO: 52535 - DNA, 25 bp, SARS Virus
tggttctcaggacaccaccacgaag

SEQ ID NO: 52536 - DNA, 25 bp, SARS Virus
ggttctcaggaacccaccacgaagt

SEQ ID NO: 52537 - DNA, 25 bp, SARS Virus
gttctcaggaaaccaccacgaagta

SEQ ID NO: 52538 - DNA, 25 bp, SARS Virus
ttctcaggaaaccaccacgaagtac

SEQ ID NO: 52539 - DNA, 25 bp, SARS Virus
tctcaggaaacccccacgaagtaca

SEQ ID NO: 52540 - DNA, 25 bp, SARS Virus
ctcaggaaaccaccacgaagtacaa

SEQ ID NO: 52541 - DNA, 25 bp, SARS Virus
tcaggaaaccaccacgaagtacaac

SEQ ID NO: 52542 - DNA, 25 bp, SARS Virus
caggaaaccaccccgaagtacaaca

SEQ ID NO: 52543 - DNA, 25 bp, SARS Virus
aggaaaccaccacgaagtacaacag

SEQ ID NO: 52544 - DNA, 25 bp, SARS Virus
ggaaaccaccaccaagtacaacaga

SEQ ID NO: 52545 - DNA, 25 bp, SARS Virus
gaaaccaccacgcagtacaacagac

SEQ ID NO: 52546 - DNA, 25 bp, SARS Virus
aaaccaccacgacgtacaacagaca

SEQ ID NO: 52547 - DNA, 25 bp, SARS Virus
aaccaccacgaactacaacagacat

SEQ ID NO: 52548 - DNA, 25 bp, SARS Virus
accaccacgaagcacaacagacata

SEQ ID NO: 52549 - DNA, 25 bp, SARS Virus
ccaccacgaagtccaacagacataa

SEQ ID NO: 52550 - DNA, 25 bp, SARS Virus
caccacgaagtacaacagacataac

SEQ ID NO: 52551 - DNA, 25 bp, SARS Virus
accacgaagtaccacagacataaca

SEQ ID NO: 52552 - DNA, 25 bp, SARS Virus
ccacgaagtacaccagacataacat

SEQ ID NO: 52553 - DNA, 25 bp, SARS Virus
cacgaagtacaacagacataacatc

SEQ ID NO: 52554 - DNA, 25 bp, SARS Virus
acgaagtacaaccgacataacatct

SEQ ID NO: 52555 - DNA, 25 bp, SARS Virus
cgaagtacaacacacataacatcta

SEQ ID NO: 52556 - DNA, 25 bp, SARS Virus
gaagtacaacagccataacatctac

SEQ ID NO: 52557 - DNA, 25 bp, SARS Virus
aagtacaacagacataacatctacg

SEQ ID NO: 52558 - DNA, 25 bp, SARS Virus
agtacaacagacctaacatctacgg

SEQ ID NO: 52559 - DNA, 25 bp, SARS Virus
gtacaacagacacaacatctacggt

SEQ ID NO: 52560 - DNA, 25 bp, SARS Virus
tacaacagacatcacatctacggtg

SEQ ID NO: 52561 - DNA, 25 bp, SARS Virus
acaacagacataccatctacggtgt

SEQ ID NO: 52562 - DNA, 25 bp, SARS Virus
caacagacataacatctacggtgta

SEQ ID NO: 52563 - DNA, 25 bp, SARS Virus
aacagacataacctctacggtgtaa

SEQ ID NO: 52564 - DNA, 25 bp, SARS Virus
acagacataacacctacggtgtaac

SEQ ID NO: 52565 - DNA, 25 bp, SARS Virus
cagacataacatctacggtgtaact

SEQ ID NO: 52566 - DNA, 25 bp, SARS Virus
agacataacatccacggtgtaactg

SEQ ID NO: 52567 - DNA, 25 bp, SARS Virus
gacataacatctccggtgtaactgg

SEQ ID NO: 52568 - DNA, 25 bp, SARS Virus
acataacatctacggtgtaactggt

SEQ ID NO: 52569 - DNA, 25 bp, SARS Virus
cataacatctaccgtgtaactggta

SEQ ID NO: 52570 - DNA, 25 bp, SARS Virus
ataacatctacgctgtaactggtag

SEQ ID NO: 52571 - DNA, 25 bp, SARS Virus
taacatctacggcgtaactggtagg

SEQ ID NO: 52572 - DNA, 25 bp, SARS Virus
aacatctacggtctaactggtaggt

SEQ ID NO: 52573 - DNA, 25 bp, SARS Virus
acatctacggtgcaactggtaggtt

SEQ ID NO: 52574 - DNA, 25 bp, SARS Virus
catctacggtgtcactggtaggttt

SEQ ID NO: 52575 - DNA, 25 bp, SARS Virus
atctacggtgtacctggtaggttta

SEQ ID NO: 52576 - DNA, 25 bp, SARS Virus
tctacggtgtaactggtaggtttag

SEQ ID NO: 52577 - DNA, 25 bp, SARS Virus
ctacggtgtaaccggtaggtttagg

SEQ ID NO: 52578 - DNA, 25 bp, SARS Virus
tacggtgtaactcgtaggtttagga

SEQ ID NO: 52579 - DNA, 25 bp, SARS Virus
acggtgtaactgctaggtttaggat

SEQ ID NO: 52580 - DNA, 25 bp, SARS Virus
cggtgtaactggcaggtttaggatt

SEQ ID NO: 52581 - DNA, 25 bp, SARS Virus
ggtgtaactggtcggtttaggattt

SEQ ID NO: 52582 - DNA, 25 bp, SARS Virus
gtgtaactggtacgtttaggatttc

SEQ ID NO: 52583 - DNA, 25 bp, SARS Virus
tgtaactggtagctttaggatttcc

SEQ ID NO: 52584 - DNA, 25 bp, SARS Virus
gtaactggtaggcttaggatttcct

SEQ ID NO: 52585 - DNA, 25 bp, SARS Virus
taactggtaggtctaggatttccta

SEQ ID NO: 52586 - DNA, 25 bp, SARS Virus
aactggtaggttcaggatttcctaa

SEQ ID NO: 52587 - DNA, 25 bp, SARS Virus
actggtaggtttcggatttcctaag

SEQ ID NO: 52588 - DNA, 25 bp, SARS Virus
ctggtaggtttacgatttcctaaga

SEQ ID NO: 52589 - DNA, 25 bp, SARS Virus
tggtaggtttagcatttcctaagac

SEQ ID NO: 52590 - DNA, 25 bp, SARS Virus
ggtaggtttaggctttcctaagaca

SEQ ID NO: 52591 - DNA, 25 bp, SARS Virus
gtaggtttaggacttcctaagacac

SEQ ID NO: 52592 - DNA, 25 bp, SARS Virus
taggtttaggatctcctaagacact

SEQ ID NO: 52593 - DNA, 25 bp, SARS Virus
aggtttaggattccctaagacactg

SEQ ID NO: 52594 - DNA, 25 bp, SARS Virus
ggtttaggatttcctaagacactga

SEQ ID NO: 52595 - DNA, 25 bp, SARS Virus
gtttaggatttcctaagacactgaa

SEQ ID NO: 52596 - DNA, 25 bp, SARS Virus
tttaggatttcccaagacactgaac

SEQ ID NO: 52597 - DNA, 25 bp, SARS Virus
ttaggatttcctcagacactgaact

SEQ ID NO: 52598 - DNA, 25 bp, SARS Virus
taggatttcctacgacactgaactt

SEQ ID NO: 52599 - DNA, 25 bp, SARS Virus
aggatttcctaacacactgaacttt

SEQ ID NO: 52600 - DNA, 25 bp, SARS Virus
ggatttcctaagccactgaactttc

SEQ ID NO: 52601 - DNA, 25 bp, SARS Virus
gatttcctaagacactgaactttcc

SEQ ID NO: 52602 - DNA, 25 bp, SARS Virus
atttcctaagaccctgaactttcca

SEQ ID NO: 52603 - DNA, 25 bp, SARS Virus
tttcctaagacactgaactttccat

SEQ ID NO: 52604 - DNA, 25 bp, SARS Virus
ttcctaagacaccgaactttccatt

SEQ ID NO: 52605 - DNA, 25 bp, SARS Virus
tcctaagacactcaactttccattc

SEQ ID NO: 52606 - DNA, 25 bp, SARS Virus
cctaagacactgcactttccattca

SEQ ID NO: 52607 - DNA, 25 bp, SARS Virus
ctaagacactgacctttccattcat

SEQ ID NO: 52608 - DNA, 25 bp, SARS Virus
taagacactgaactttccattcatg

SEQ ID NO: 52609 - DNA, 25 bp, SARS Virus
aagacactgaaccttccattcatgc

SEQ ID NO: 52610 - DNA, 25 bp, SARS Virus
agacactgaactctccattcatgca

SEQ ID NO: 52611 - DNA, 25 bp, SARS Virus
gacactgaacttcccattcatgcag

SEQ ID NO: 52612 - DNA, 25 bp, SARS Virus
acactgaactttccattcatgcagg

SEQ ID NO: 52613 - DNA, 25 bp, SARS Virus
cactgaactttccattcatgcaggt

SEQ ID NO: 52614 - DNA, 25 bp, SARS Virus
actgaactttcccttcatgcaggtt

SEQ ID NO: 52615 - DNA, 25 bp, SARS Virus
ctgaactttccactcatgcaggttt

SEQ ID NO: 52616 - DNA, 25 bp, SARS Virus
tgaactttccatccatgcaggttta

SEQ ID NO: 52617 - DNA, 25 bp, SARS Virus
gaactttccattcatgcaggtttat

SEQ ID NO: 52618 - DNA, 25 bp, SARS Virus
aactttccattcctgcaggtttatg

SEQ ID NO: 52619 - DNA, 25 bp, SARS Virus
actttccattcacgcaggtttatgg

SEQ ID NO: 52620 - DNA, 25 bp, SARS Virus
ctttccattcatccaggtttatgga

SEQ ID NO: 52621 - DNA, 25 bp, SARS Virus
tttccattcatgcaggtttatggat

SEQ ID NO: 52622 - DNA, 25 bp, SARS Virus
ttccattcatgccggtttatggatg

SEQ ID NO: 52623 - DNA, 25 bp, SARS Virus
tccattcatgcacgtttatggatgg

SEQ ID NO: 52624 - DNA, 25 bp, SARS Virus
ccattcatgcagctttatggatggt

SEQ ID NO: 52625 - DNA, 25 bp, SARS Virus
cattcatgcaggcttatggatggtg

SEQ ID NO: 52626 - DNA, 25 bp, SARS Virus
attcatgcaggtctatggatggtga

SEQ ID NO: 52627 - DNA, 25 bp, SARS Virus
ttcatgcaggttcatggatggtgaa

SEQ ID NO: 52628 - DNA, 25 bp, SARS Virus
tcatgcaggtttctggatggtgaac

SEQ ID NO: 52629 - DNA, 25 bp, SARS Virus
catgcaggtttacggatggtgaaca

SEQ ID NO: 52630 - DNA, 25 bp, SARS Virus
atgcaggtttatcgatggtgaacac

SEQ ID NO: 52631 - DNA, 25 bp, SARS Virus
tgcaggtttatgcatggtgaacacg

SEQ ID NO: 52632 - DNA, 25 bp, SARS Virus
gcaggtttatggctggtgaacacga

SEQ ID NO: 52633 - DNA, 25 bp, SARS Virus
caggtttatggacggtgaacacgat

SEQ ID NO: 52634 - DNA, 25 bp, SARS Virus
aggtttatggatcgtgaacacgatt

SEQ ID NO: 52635 - DNA, 25 bp, SARS Virus
ggtttatggatgctgaacacgatta

SEQ ID NO: 52636 - DNA, 25 bp, SARS Virus
gtttatggatggcgaacacgattac

SEQ ID NO: 52637 - DNA, 25 bp, SARS Virus
tttatggatggtcaacacgattact

SEQ ID NO: 52638 - DNA, 25 bp, SARS Virus
ttatggatggtgcacacgattactg

SEQ ID NO: 52639 - DNA, 25 bp, SARS Virus
tatggatggtgaccacgattactgg

SEQ ID NO: 52640 - DNA, 25 bp, SARS Virus
atggatggtgaacacgattactggg

SEQ ID NO: 52641 - DNA, 25 bp, SARS Virus
tggatggtgaacccgattactgggt

SEQ ID NO: 52642 - DNA, 25 bp, SARS Virus
ggatggtgaacacgattactgggtc

SEQ ID NO: 52643 - DNA, 25 bp, SARS Virus
gatggtgaacaccattactgggtca

SEQ ID NO: 52644 - DNA, 25 bp, SARS Virus
atggtgaacacgcttactgggtcac

SEQ ID NO: 52645 - DNA, 25 bp, SARS Virus
tggtgaacacgactactgggtcacc

SEQ ID NO: 52646 - DNA, 25 bp, SARS Virus
ggtgaacacgatcactgggtcaccc

SEQ ID NO: 52647 - DNA, 25 bp, SARS Virus
gtgaacacgattcctgggtcaccca

SEQ ID NO: 52648 - DNA, 25 bp, SARS Virus
tgaacacgattactgggtcacccaa

SEQ ID NO: 52649 - DNA, 25 bp, SARS Virus
gaacacgattaccgggtcacccaaa

SEQ ID NO: 52650 - DNA, 25 bp, SARS Virus
aacacgattactcggtcacccaaaa

SEQ ID NO: 52651 - DNA, 25 bp, SARS Virus
acacgattactgcgtcacccaaaat

SEQ ID NO: 52652 - DNA, 25 bp, SARS Virus
cacgattactggctcacccaaaatg

SEQ ID NO: 52653 - DNA, 25 bp, SARS Virus
acgattactgggccacccaaaatgt

SEQ ID NO: 52654 - DNA, 25 bp, SARS Virus
cgattactgggtcacccaaaatgtg

SEQ ID NO: 52655 - DNA, 25 bp, SARS Virus
gattactgggtcccccaaaatgtga

SEQ ID NO: 52656 - DNA, 25 bp, SARS Virus
attactgggtcacccaaaatgtgaa

SEQ ID NO: 52657 - DNA, 25 bp, SARS Virus
ttactgggtcacccaaaatgtgaat

SEQ ID NO: 52658 - DNA, 25 bp, SARS Virus
tactgggtcacccaaaatgtgaatc

SEQ ID NO: 52659 - DNA, 25 bp, SARS Virus
actgggtcaccccaaatgtgaatct

SEQ ID NO: 52660 - DNA, 25 bp, SARS Virus
ctgggtcacccacaatgtgaatctt

SEQ ID NO: 52661 - DNA, 25 bp, SARS Virus
tgggtcacccaacatgtgaatcttt

SEQ ID NO: 52662 - DNA, 25 bp, SARS Virus
gggtcacccaaactgtgaatctttg

SEQ ID NO: 52663 - DNA, 25 bp, SARS Virus
ggtcacccaaaacgtgaatctttgt

SEQ ID NO: 52664 - DNA, 25 bp, SARS Virus
gtcacccaaaatctgaatctttgtg

SEQ ID NO: 52665 - DNA, 25 bp, SARS Virus
tcacccaaaatgcgaatctttgtgt

SEQ ID NO: 52666 - DNA, 25 bp, SARS Virus
cacccaaaatgtcaatctttgtgtc

SEQ ID NO: 52667 - DNA, 25 bp, SARS Virus
acccaaaatgtgcatctttgtgtca

SEQ ID NO: 52668 - DNA, 25 bp, SARS Virus
cccaaaatgtgactctttgtgtcag

SEQ ID NO: 52669 - DNA, 25 bp, SARS Virus
ccaaaatgtgaacctttgtgtcaga

SEQ ID NO: 52670 - DNA, 25 bp, SARS Virus
caaaatgtgaatctttgtgtcagac

SEQ ID NO: 52671 - DNA, 25 bp, SARS Virus
aaaatgtgaatccttgtgtcagaca

SEQ ID NO: 52672 - DNA, 25 bp, SARS Virus
aaatgtgaatctctgtgtcagacat

SEQ ID NO: 52673 - DNA, 25 bp, SARS Virus
aatgtgaatcttcgtgtcagacatg

SEQ ID NO: 52674 - DNA, 25 bp, SARS Virus
atgtgaatctttctgtcagacatgg

SEQ ID NO: 52675 - DNA, 25 bp, SARS Virus
tgtgaatctttgcgtcagacatggc

SEQ ID NO: 52676 - DNA, 25 bp, SARS Virus
gtgaatctttgtctcagacatggca

SEQ ID NO: 52677 - DNA, 25 bp, SARS Virus
tgaatctttgtgccagacatggcag

SEQ ID NO: 52678 - DNA, 25 bp, SARS Virus
gaatctttgtgtcagacatggcaga

SEQ ID NO: 52679 - DNA, 25 bp, SARS Virus
aatctttgtgtccgacatggcagac

SEQ ID NO: 52680 - DNA, 25 bp, SARS Virus
atctttgtgtcacacatggcagacg

SEQ ID NO: 52681 - DNA, 25 bp, SARS Virus
tctttgtgtcagccatggcagacgc

SEQ ID NO: 52682 - DNA, 25 bp, SARS Virus
ctttgtgtcagacatggcagacgcc

SEQ ID NO: 52683 - DNA, 25 bp, SARS Virus
tttgtgtcagacctggcagacgcct

SEQ ID NO: 52684 - DNA, 25 bp, SARS Virus
ttgtgtcagacacggcagacgcctt

SEQ ID NO: 52685 - DNA, 25 bp, SARS Virus
tgtgtcagacatcgcagacgcctta

SEQ ID NO: 52686 - DNA, 25 bp, SARS Virus
gtgtcagacatgccagacgccttac

SEQ ID NO: 52687 - DNA, 25 bp, SARS Virus
tgtcagacatggcagacgccttaca

SEQ ID NO: 52688 - DNA, 25 bp, SARS Virus
gtcagacatggccgacgccttacac

SEQ ID NO: 52689 - DNA, 25 bp, SARS Virus
tcagacatggcacacgccttacacc

SEQ ID NO: 52690 - DNA, 25 bp, SARS Virus
cagacatggcagccgccttacacct

SEQ ID NO: 52691 - DNA, 25 bp, SARS Virus
agacatggcagacgccttacacctt

SEQ ID NO: 52692 - DNA, 25 bp, SARS Virus
gacatggcagaccccttacaccttt

SEQ ID NO: 52693 - DNA, 25 bp, SARS Virus
acatggcagacgccttacacctttc

SEQ ID NO: 52694 - DNA, 25 bp, SARS Virus
catggcagacgccttacacctttcc

SEQ ID NO: 52695 - DNA, 25 bp, SARS Virus
atggcagacgccctacacctttcca

SEQ ID NO: 52696 - DNA, 25 bp, SARS Virus
tggcagacgcctcacacctttccaa

SEQ ID NO: 52697 - DNA, 25 bp, SARS Virus
ggcagacgccttccacctttccaat

SEQ ID NO: 52698 - DNA, 25 bp, SARS Virus
gcagacgccttacacctttccaata

SEQ ID NO: 52699 - DNA, 25 bp, SARS Virus
cagacgccttacccctttccaatac

SEQ ID NO: 52700 - DNA, 25 bp, SARS Virus
agacgccttacacctttccaatacc

SEQ ID NO: 52701 - DNA, 25 bp, SARS Virus
gacgccttacacctttccaataccg

SEQ ID NO: 52702 - DNA, 25 bp, SARS Virus
acgccttacacccttccaataccga

SEQ ID NO: 52703 - DNA, 25 bp, SARS Virus
cgccttacacctctccaataccgac

SEQ ID NO: 52704 - DNA, 25 bp, SARS Virus
gccttacaccttcccaataccgaca

SEQ ID NO: 52705 - DNA, 25 bp, SARS Virus
ccttacacctttccaataccgacat

SEQ ID NO: 52706 - DNA, 25 bp, SARS Virus
cttacacctttccaataccgacatc

SEQ ID NO: 52707 - DNA, 25 bp, SARS Virus
ttacacctttcccataccgacatca

SEQ ID NO: 52708 - DNA, 25 bp, SARS Virus
tacacctttccactaccgacatcaa

SEQ ID NO: 52709 - DNA, 25 bp, SARS Virus
acacctttccaacaccgacatcaac

SEQ ID NO: 52710 - DNA, 25 bp, SARS Virus
cacctttccaatcccgacatcaaca

SEQ ID NO: 52711 - DNA, 25 bp, SARS Virus
acctttccaataccgacatcaacac

SEQ ID NO: 52712 - DNA, 25 bp, SARS Virus
cctttccaataccgacatcaacact

SEQ ID NO: 52713 - DNA, 25 bp, SARS Virus
ctttccaatacccacatcaacactg

SEQ ID NO: 52714 - DNA, 25 bp, SARS Virus
tttccaataccgccatcaacactgg

SEQ ID NO: 52715 - DNA, 25 bp, SARS Virus
ttccaataccgacatcaacactggt

SEQ ID NO: 52716 - DNA, 25 bp, SARS Virus
tccaataccgacctcaacactggtt

SEQ ID NO: 52717 - DNA, 25 bp, SARS Virus
ccaataccgacaccaacactggttg

SEQ ID NO: 52718 - DNA, 25 bp, SARS Virus
caataccgacatcaacactggttga

SEQ ID NO: 52719 - DNA, 25 bp, SARS Virus
aataccgacatccacactggttgag

SEQ ID NO: 52720 - DNA, 25 bp, SARS Virus
ataccgacatcaccactggttgagg

SEQ ID NO: 52721 - DNA, 25 bp, SARS Virus
taccgacatcaacactggttgaggc

SEQ ID NO: 52722 - DNA, 25 bp, SARS Virus
accgacatcaaccctggttgaggcg

SEQ ID NO: 52723 - DNA, 25 bp, SARS Virus
ccgacatcaacactggttgaggcgc

SEQ ID NO: 52724 - DNA, 25 bp, SARS Virus
cgacatcaacaccggttgaggcgct

SEQ ID NO: 52725 - DNA, 25 bp, SARS Virus
gacatcaacactcgttgaggcgctt

SEQ ID NO: 52726 - DNA, 25 bp, SARS Virus
acatcaacactgcttgaggcgcttg

SEQ ID NO: 52727 - DNA, 25 bp, SARS Virus
catcaacactggctgaggcgcttgg

SEQ ID NO: 52728 - DNA, 25 bp, SARS Virus
atcaacactggtcgaggcgcttggg

SEQ ID NO: 52729 - DNA, 25 bp, SARS Virus
tcaacactggttcaggcgcttggga

SEQ ID NO: 52730 - DNA, 25 bp, SARS Virus
caacactggttgcggcgcttgggaa

SEQ ID NO: 52731 - DNA, 25 bp, SARS Virus
aacactggttgacgcgcttgggaac

SEQ ID NO: 52732 - DNA, 25 bp, SARS Virus
acactggttgagccgcttgggaact

SEQ ID NO: 52733 - DNA, 25 bp, SARS Virus
cactggttgaggcgcttgggaacta

SEQ ID NO: 52734 - DNA, 25 bp, SARS Virus
actggttgaggcccttgggaactac

SEQ ID NO: 52735 - DNA, 25 bp, SARS Virus
ctggttgaggcgcttgggaactacg

SEQ ID NO: 52736 - DNA, 25 bp, SARS Virus
tggttgaggcgcctgggaactacgt

SEQ ID NO: 52737 - DNA, 25 bp, SARS Virus
ggttgaggcgctcgggaactacgtc

SEQ ID NO: 52738 - DNA, 25 bp, SARS Virus
gttgaggcgcttcggaactacgtca

SEQ ID NO: 52739 - DNA, 25 bp, SARS Virus
ttgaggcgcttgcgaactacgtcag

SEQ ID NO: 52740 - DNA, 25 bp, SARS Virus
tgaggcgcttggcaactacgtcaga

SEQ ID NO: 52741 - DNA, 25 bp, SARS Virus
gaggcgcttgggcactacgtcagac

SEQ ID NO: 52742 - DNA, 25 bp, SARS Virus
aggcgcttgggacctacgtcagacg

SEQ ID NO: 52743 - DNA, 25 bp, SARS Virus
ggcgcttgggaactacgtcagacgc

SEQ ID NO: 52744 - DNA, 25 bp, SARS Virus
gcgcttgggaaccacgtcagacgcc

SEQ ID NO: 52745 - DNA, 25 bp, SARS Virus
cgcttgggaactccgtcagacgcct

SEQ ID NO: 52746 - DNA, 25 bp, SARS Virus
gcttgggaactacgtcagacgccta

SEQ ID NO: 52747 - DNA, 25 bp, SARS Virus
cttgggaactacctcagacgcctac

SEQ ID NO: 52748 - DNA, 25 bp, SARS Virus
ttgggaactacgccagacgcctacg

SEQ ID NO: 52749 - DNA, 25 bp, SARS Virus
tgggaactacgtcagacgcctacgt

SEQ ID NO: 52750 - DNA, 25 bp, SARS Virus
gggaactacgtccgacgcctacgta

SEQ ID NO: 52751 - DNA, 25 bp, SARS Virus
ggaactacgtcacacgcctacgtag

SEQ ID NO: 52752 - DNA, 25 bp, SARS Virus
gaactacgtcagccgcctacgtagt

SEQ ID NO: 52753 - DNA, 25 bp, SARS Virus
aactacgtcagacgcctacgtagtt

SEQ ID NO: 52754 - DNA, 25 bp, SARS Virus
actacgtcagacccctacgtagttg

SEQ ID NO: 52755 - DNA, 25 bp, SARS Virus
ctacgtcagacgcctacgtagttgc

SEQ ID NO: 52756 - DNA, 25 bp, SARS Virus
tacgtcagacgcctacgtagttgca

SEQ ID NO: 52757 - DNA, 25 bp, SARS Virus
acgtcagacgcccacgtagttgcaa

SEQ ID NO: 52758 - DNA, 25 bp, SARS Virus
cgtcagacgcctccgtagttgcaaa

SEQ ID NO: 52759 - DNA, 25 bp, SARS Virus
gtcagacgcctacgtagttgcaaaa

SEQ ID NO: 52760 - DNA, 25 bp, SARS Virus
tcagacgcctacctagttgcaaaaa

SEQ ID NO: 52761 - DNA, 25 bp, SARS Virus
cagacgcctacgcagttgcaaaaat

SEQ ID NO: 52762 - DNA, 25 bp, SARS Virus
agacgcctacgtcgttgcaaaaatt

SEQ ID NO: 52763 - DNA, 25 bp, SARS Virus
gacgcctacgtacttgcaaaaattt

SEQ ID NO: 52764 - DNA, 25 bp, SARS Virus
acgcctacgtagctgcaaaaatttg

SEQ ID NO: 52765 - DNA, 25 bp, SARS Virus
cgcctacgtagtcgcaaaaatttgc

SEQ ID NO: 52766 - DNA, 25 bp, SARS Virus
gcctacgtagttccaaaaatttgcc

SEQ ID NO: 52767 - DNA, 25 bp, SARS Virus
cctacgtagttgcaaaaatttgccc

SEQ ID NO: 52768 - DNA, 25 bp, SARS Virus
ctacgtagttgccaaaatttgccca

SEQ ID NO: 52769 - DNA, 25 bp, SARS Virus
tacgtagttgcacaaatttgcccaa

SEQ ID NO: 52770 - DNA, 25 bp, SARS Virus
acgtagttgcaacaatttgcccaaa

SEQ ID NO: 52771 - DNA, 25 bp, SARS Virus
cgtagttgcaaacatttgcccaaac

SEQ ID NO: 52772 - DNA, 25 bp, SARS Virus
gtagttgcaaaactttgcccaaacg

SEQ ID NO: 52773 - DNA, 25 bp, SARS Virus
tagttgcaaaaacttgcccaaacgc

SEQ ID NO: 52774 - DNA, 25 bp, SARS Virus
agttgcaaaaatctgcccaaacgcc

SEQ ID NO: 52775 - DNA, 25 bp, SARS Virus
gttgcaaaaattcgcccaaacgcca

SEQ ID NO: 52776 - DNA, 25 bp, SARS Virus
ttgcaaaaatttccccaaacgccac

SEQ ID NO: 52777 - DNA, 25 bp, SARS Virus
tgcaaaaatttgcccaaacgccaca

SEQ ID NO: 52778 - DNA, 25 bp, SARS Virus
gcaaaaatttgcccaaacgccacat

SEQ ID NO: 52779 - DNA, 25 bp, SARS Virus
caaaaatttgcccaaacgccacatt

SEQ ID NO: 52780 - DNA, 25 bp, SARS Virus
aaaaatttgccccaacgccacattc

SEQ ID NO: 52781 - DNA, 25 bp, SARS Virus
aaaatttgcccacacgccacattca

SEQ ID NO: 52782 - DNA, 25 bp, SARS Virus
aaatttgcccaaccgccacattcac

SEQ ID NO: 52783 - DNA, 25 bp, SARS Virus
aatttgcccaaacgccacattcacg

SEQ ID NO: 52784 - DNA, 25 bp, SARS Virus
atttgcccaaaccccacattcacgt

SEQ ID NO: 52785 - DNA, 25 bp, SARS Virus
tttgcccaaacgccacattcacgtc

SEQ ID NO: 52786 - DNA, 25 bp, SARS Virus
ttgcccaaacgccacattcacgtcg

SEQ ID NO: 52787 - DNA, 25 bp, SARS Virus
tgcccaaacgccccattcacgtcgg

SEQ ID NO: 52788 - DNA, 25 bp, SARS Virus
gcccaaacgccacattcacgtcggg

SEQ ID NO: 52789 - DNA, 25 bp, SARS Virus
cccaaacgccaccttcacgtcgggc

SEQ ID NO: 52790 - DNA, 25 bp, SARS Virus
ccaaacgccacactcacgtcgggca

SEQ ID NO: 52791 - DNA, 25 bp, SARS Virus
caaacgccacatccacgtcgggcag

SEQ ID NO: 52792 - DNA, 25 bp, SARS Virus
aaacgccacattcacgtcgggcaga

SEQ ID NO: 52793 - DNA, 25 bp, SARS Virus
aacgccacattcccgtcgggcagaa

SEQ ID NO: 52794 - DNA, 25 bp, SARS Virus
acgccacattcacgtcgggcagaat

SEQ ID NO: 52795 - DNA, 25 bp, SARS Virus
cgccacattcacctcgggcagaatg

SEQ ID NO: 52796 - DNA, 25 bp, SARS Virus
gccacattcacgccgggcagaatgt

SEQ ID NO: 52797 - DNA, 25 bp, SARS Virus
ccacattcacgtcgggcagaatgtg

SEQ ID NO: 52798 - DNA, 25 bp, SARS Virus
cacattcacgtccggcagaatgtgg

SEQ ID NO: 52799 - DNA, 25 bp, SARS Virus
acattcacgtcgcgcagaatgtggc

SEQ ID NO: 52800 - DNA, 25 bp, SARS Virus
cattcacgtcggccagaatgtggca

SEQ ID NO: 52801 - DNA, 25 bp, SARS Virus
attcacgtcgggcagaatgtggcac

SEQ ID NO: 52802 - DNA, 25 bp, SARS Virus
ttcacgtcgggccgaatgtggcacg

SEQ ID NO: 52803 - DNA, 25 bp, SARS Virus
tcacgtcgggcacaatgtggcacgc

SEQ ID NO: 52804 - DNA, 25 bp, SARS Virus
cacgtcgggcagcatgtggcacgcc

SEQ ID NO: 52805 - DNA, 25 bp, SARS Virus
acgtcgggcagactgtggcacgccg

SEQ ID NO: 52806 - DNA, 25 bp, SARS Virus
cgtcgggcagaacgtggcacgccgt

SEQ ID NO: 52807 - DNA, 25 bp, SARS Virus
gtcgggcagaatctggcacgccgtg

SEQ ID NO: 52808 - DNA, 25 bp, SARS Virus
tcgggcagaatgcggcacgccgtgt

SEQ ID NO: 52809 - DNA, 25 bp, SARS Virus
cgggcagaatgtcgcacgccgtgtc

SEQ ID NO: 52810 - DNA, 25 bp, SARS Virus
gggcagaatgtgccacgccgtgtcc

SEQ ID NO: 52811 - DNA, 25 bp, SARS Virus
ggcagaatgtggcacgccgtgtccg

SEQ ID NO: 52812 - DNA, 25 bp, SARS Virus
gcagaatgtggcccgccgtgtccgt

SEQ ID NO: 52813 - DNA, 25 bp, SARS Virus
cagaatgtggcacgccgtgtccgtg

SEQ ID NO: 52814 - DNA, 25 bp, SARS Virus
agaatgtggcaccccgtgtccgtga

SEQ ID NO: 52815 - DNA, 25 bp, SARS Virus
gaatgtggcacgccgtgtccgtgat

SEQ ID NO: 52816 - DNA, 25 bp, SARS Virus
aatgtggcacgccgtgtccgtgatc

SEQ ID NO: 52817 - DNA, 25 bp, SARS Virus
atgtggcacgccctgtccgtgatca

SEQ ID NO: 52818 - DNA, 25 bp, SARS Virus
tgtggcacgccgcgtccgtgatcat

SEQ ID NO: 52819 - DNA, 25 bp, SARS Virus
gtggcacgccgtctccgtgatcatg

SEQ ID NO: 52820 - DNA, 25 bp, SARS Virus
tggcacgccgtgcccgtgatcatga

SEQ ID NO: 52821 - DNA, 25 bp, SARS Virus
ggcacgccgtgtccgtgatcatgac

SEQ ID NO: 52822 - DNA, 25 bp, SARS Virus
gcacgccgtgtccgtgatcatgact

SEQ ID NO: 52823 - DNA, 25 bp, SARS Virus
cacgccgtgtccctgatcatgacta

SEQ ID NO: 52824 - DNA, 25 bp, SARS Virus
acgccgtgtccgcgatcatgactac

SEQ ID NO: 52825 - DNA, 25 bp, SARS Virus
cgccgtgtccgtcatcatgactaca

SEQ ID NO: 52826 - DNA, 25 bp, SARS Virus
gccgtgtccgtgctcatgactacag

SEQ ID NO: 52827 - DNA, 25 bp, SARS Virus
ccgtgtccgtgaccatgactacagc

SEQ ID NO: 52828 - DNA, 25 bp, SARS Virus
cgtgtccgtgatcatgactacagca

SEQ ID NO: 52829 - DNA, 25 bp, SARS Virus
gtgtccgtgatcctgactacagcag

SEQ ID NO: 52830 - DNA, 25 bp, SARS Virus
tgtccgtgatcacgactacagcaga

SEQ ID NO: 52831 - DNA, 25 bp, SARS Virus
gtccgtgatcatcactacagcagat

SEQ ID NO: 52832 - DNA, 25 bp, SARS Virus
tccgtgatcatgcctacagcagatg

SEQ ID NO: 52833 - DNA, 25 bp, SARS Virus
cgacctttacgaggtcttcatggac

SEQ ID NO: 52834 - DNA, 25 bp, SARS Virus
gacctttacgatgtcttcatggacg

SEQ ID NO: 52835 - DNA, 25 bp, SARS Virus
acctttacgatggcttcatggacgg

SEQ ID NO: 52836 - DNA, 25 bp, SARS Virus
cctttacgatgtgttcatggacggt

SEQ ID NO: 52837 - DNA, 25 bp, SARS Virus
ctttacgatgtcgtcatggacggtt

SEQ ID NO: 52838 - DNA, 25 bp, SARS Virus
tttacgatgtctgcatggacggtta

SEQ ID NO: 52839 - DNA, 25 bp, SARS Virus
ttacgatgtcttgatggacggttaa

SEQ ID NO: 52840 - DNA, 25 bp, SARS Virus
tacgatgtcttcgtggacggttaag

SEQ ID NO: 52841 - DNA, 25 bp, SARS Virus
acgatgtcttcagggacggttaagt

SEQ ID NO: 52842 - DNA, 25 bp, SARS Virus
cgatgtcttcatggacggttaagtt

SEQ ID NO: 52843 - DNA, 25 bp, SARS Virus
gatgtcttcatggacggttaagttg

SEQ ID NO: 52844 - DNA, 25 bp, SARS Virus
atgtcttcatgggcggttaagttga

SEQ ID NO: 52845 - DNA, 25 bp, SARS Virus
tgtcttcatggagggttaagttgac

SEQ ID NO: 52846 - DNA, 25 bp, SARS Virus
gtcttcatggacggttaagttgaca

SEQ ID NO: 52847 - DNA, 25 bp, SARS Virus
tcttcatggacggttaagttgacac

SEQ ID NO: 52848 - DNA, 25 bp, SARS Virus
cttcatggacgggtaagttgacacg

SEQ ID NO: 52849 - DNA, 25 bp, SARS Virus
ttcatggacggtgaagttgacacga

SEQ ID NO: 52850 - DNA, 25 bp, SARS Virus
tcatggacggttgagttgacacgaa

SEQ ID NO: 52851 - DNA, 25 bp, SARS Virus
catggacggttaggttgacacgaaa

SEQ ID NO: 52852 - DNA, 25 bp, SARS Virus
atggacggttaagttgacacgaaag

SEQ ID NO: 52853 - DNA, 25 bp, SARS Virus
tggacggttaaggtgacacgaaagg

SEQ ID NO: 52854 - DNA, 25 bp, SARS Virus
ggacggttaagtggacacgaaagga

SEQ ID NO: 52855 - DNA, 25 bp, SARS Virus
gacggttaagttgacacgaaaggaa

SEQ ID NO: 52856 - DNA, 25 bp, SARS Virus
acggttaagttggcacgaaaggaag

SEQ ID NO: 52857 - DNA, 25 bp, SARS Virus
cggttaagttgagacgaaaggaaga

SEQ ID NO: 52858 - DNA, 25 bp, SARS Virus
ggttaagttgacgcgaaaggaagac

SEQ ID NO: 52859 - DNA, 25 bp, SARS Virus
gttaagttgacaggaaaggaagaca

SEQ ID NO: 52860 - DNA, 25 bp, SARS Virus
ttaagttgacacgaaaggaagacac

SEQ ID NO: 52861 - DNA, 25 bp, SARS Virus
taagttgacacggaaggaagacacg

SEQ ID NO: 52862 - DNA, 25 bp, SARS Virus
aagttgacacgagaggaagacacga

SEQ ID NO: 52863 - DNA, 25 bp, SARS Virus
agttgacacgaagggaagacacgaa

SEQ ID NO: 52864 - DNA, 25 bp, SARS Virus
gttgacacgaaaggaagacacgaaa

SEQ ID NO: 52865 - DNA, 25 bp, SARS Virus
ttgacacgaaaggaagacacgaaaa

SEQ ID NO: 52866 - DNA, 25 bp, SARS Virus
tgacacgaaagggagacacgaaaac

SEQ ID NO: 52867 - DNA, 25 bp, SARS Virus
gacacgaaaggaggacacgaaaacg

SEQ ID NO: 52868 - DNA, 25 bp, SARS Virus
acacgaaaggaagacacgaaaacgt

SEQ ID NO: 52869 - DNA, 25 bp, SARS Virus
cacgaaaggaaggcacgaaaacgtc

SEQ ID NO: 52870 - DNA, 25 bp, SARS Virus
acgaaaggaagagacgaaaacgtca

SEQ ID NO: 52871 - DNA, 25 bp, SARS Virus
cgaaaggaagacgcgaaaacgtcat

SEQ ID NO: 52872 - DNA, 25 bp, SARS Virus
gaaaggaagacaggaaaacgtcatc

SEQ ID NO: 52873 - DNA, 25 bp, SARS Virus
aaaggaagacacgaaaacgtcatct

SEQ ID NO: 52874 - DNA, 25 bp, SARS Virus
aaggaagacacggaaacgtcatctg

SEQ ID NO: 52875 - DNA, 25 bp, SARS Virus
aggaagacacgagaacgtcatctgg

SEQ ID NO: 52876 - DNA, 25 bp, SARS Virus
ggaagacacgaagacgtcatctggg

SEQ ID NO: 52877 - DNA, 25 bp, SARS Virus
gaagacacgaaagcgtcatctggga

SEQ ID NO: 52878 - DNA, 25 bp, SARS Virus
aagacacgaaaaggtcatctgggac

SEQ ID NO: 52879 - DNA, 25 bp, SARS Virus
agacacgaaaacgtcatctgggacg

SEQ ID NO: 52880 - DNA, 25 bp, SARS Virus
gacacgaaaacggcatctgggacga

SEQ ID NO: 52881 - DNA, 25 bp, SARS Virus
acacgaaaacgtgatctgggacgat

SEQ ID NO: 52882 - DNA, 25 bp, SARS Virus
cacgaaaacgtcgtctgggacgatt

SEQ ID NO: 52883 - DNA, 25 bp, SARS Virus
acgaaaacgtcagctgggacgattt

SEQ ID NO: 52884 - DNA, 25 bp, SARS Virus
cgaaaacgtcatgtgggacgatttc

SEQ ID NO: 52885 - DNA, 25 bp, SARS Virus
gaaaacgtcatcggggacgatttcg

SEQ ID NO: 52886 - DNA, 25 bp, SARS Virus
aaaacgtcatctgggacgatttcgt

SEQ ID NO: 52887 - DNA, 25 bp, SARS Virus
aaacgtcatctgggacgatttcgta

SEQ ID NO: 52888 - DNA, 25 bp, SARS Virus
aacgtcatctgggacgatttcgtat

SEQ ID NO: 52889 - DNA, 25 bp, SARS Virus
acgtcatctggggcgatttcgtata

SEQ ID NO: 52890 - DNA, 25 bp, SARS Virus
cgtcatctgggaggatttcgtatat

SEQ ID NO: 52891 - DNA, 25 bp, SARS Virus
gtcatctgggacgatttcgtatatt

SEQ ID NO: 52892 - DNA, 25 bp, SARS Virus
tcatctgggacggtttcgtatattc

SEQ ID NO: 52893 - DNA, 25 bp, SARS Virus
catctgggacgagttcgtatattcc

SEQ ID NO: 52894 - DNA, 25 bp, SARS Virus
atctgggacgatgtcgtatattcct

SEQ ID NO: 52895 - DNA, 25 bp, SARS Virus
tctgggacgattgcgtatattccta

SEQ ID NO: 52896 - DNA, 25 bp, SARS Virus
ctgggacgatttggtatattcctaa

SEQ ID NO: 52897 - DNA, 25 bp, SARS Virus
tgggacgatttcgtatattcctaat

SEQ ID NO: 52898 - DNA, 25 bp, SARS Virus
gggacgatttcggatattcctaatg

SEQ ID NO: 52899 - DNA, 25 bp, SARS Virus
ggacgatttcgtgtattcctaatgg

SEQ ID NO: 52900 - DNA, 25 bp, SARS Virus
gacgatttcgtagattcctaatgga

SEQ ID NO: 52901 - DNA, 25 bp, SARS Virus
acgatttcgtatgttcctaatggat

SEQ ID NO: 52902 - DNA, 25 bp, SARS Virus
cgatttcgtatagtcctaatggatc

SEQ ID NO: 52903 - DNA, 25 bp, SARS Virus
gatttcgtatatgcctaatggatcg

SEQ ID NO: 52904 - DNA, 25 bp, SARS Virus
atttcgtatattgctaatggatcgt

SEQ ID NO: 52905 - DNA, 25 bp, SARS Virus
tttcgtatattcgtaatggatcgtt

SEQ ID NO: 52906 - DNA, 25 bp, SARS Virus
ttcgtatattccgaatggatcgttc

SEQ ID NO: 52907 - DNA, 25 bp, SARS Virus
tcgtatattcctgatggatcgttca

SEQ ID NO: 52908 - DNA, 25 bp, SARS Virus
cgtatattcctagtggatcgttcac

SEQ ID NO: 52909 - DNA, 25 bp, SARS Virus
gtatattcctaagggatcgttcacc

SEQ ID NO: 52910 - DNA, 25 bp, SARS Virus
tatattcctaatggatcgttcacct

SEQ ID NO: 52911 - DNA, 25 bp, SARS Virus
atattcctaatggatcgttcacctc

SEQ ID NO: 52912 - DNA, 25 bp, SARS Virus
tattcctaatgggtcgttcacctcc

SEQ ID NO: 52913 - DNA, 25 bp, SARS Virus
attcctaatggagcgttcacctcct

SEQ ID NO: 52914 - DNA, 25 bp, SARS Virus
ttcctaatggatggttcacctcctg

SEQ ID NO: 52915 - DNA, 25 bp, SARS Virus
tcctaatggatcgttcacctcctgt

SEQ ID NO: 52916 - DNA, 25 bp, SARS Virus
cctaatggatcggtcacctcctgtt

SEQ ID NO: 52917 - DNA, 25 bp, SARS Virus
ctaatggatcgtgcacctcctgttg

SEQ ID NO: 52918 - DNA, 25 bp, SARS Virus
taatggatcgttgacctcctgttgg

SEQ ID NO: 52919 - DNA, 25 bp, SARS Virus
aatggatcgttcgcctcctgttggt

SEQ ID NO: 52920 - DNA, 25 bp, SARS Virus
atggatcgttcagctcctgttggtt

SEQ ID NO: 52921 - DNA, 25 bp, SARS Virus
tggatcgttcacgtcctgttggtta

SEQ ID NO: 52922 - DNA, 25 bp, SARS Virus
ggatcgttcaccgcctgttggttag

SEQ ID NO: 52923 - DNA, 25 bp, SARS Virus
gatcgttcacctgctgttggttagt

SEQ ID NO: 52924 - DNA, 25 bp, SARS Virus
atcgttcacctcgtgttggttagtg

SEQ ID NO: 52925 - DNA, 25 bp, SARS Virus
tcgttcacctccggttggttagtgg

SEQ ID NO: 52926 - DNA, 25 bp, SARS Virus
cgttcacctcctgttggttagtggt

SEQ ID NO: 52927 - DNA, 25 bp, SARS Virus
gttcacctcctggtggttagtggtt

SEQ ID NO: 52928 - DNA, 25 bp, SARS Virus
ttcacctcctgtgggttagtggttg

SEQ ID NO: 52929 - DNA, 25 bp, SARS Virus
tcacctcctgttggttagtggttga

SEQ ID NO: 52930 - DNA, 25 bp, SARS Virus
cacctcctgttggttagtggttgac

SEQ ID NO: 52931 - DNA, 25 bp, SARS Virus
acctcctgttgggtagtggttgaca

SEQ ID NO: 52932 - DNA, 25 bp, SARS Virus
cctcctgttggtgagtggttgacac

SEQ ID NO: 52933 - DNA, 25 bp, SARS Virus
ctcctgttggttggtggttgacaca

SEQ ID NO: 52934 - DNA, 25 bp, SARS Virus
tcctgttggttagtggttgacacac

SEQ ID NO: 52935 - DNA, 25 bp, SARS Virus
cctgttggttaggggttgacacact

SEQ ID NO: 52936 - DNA, 25 bp, SARS Virus
ctgttggttagtggttgacacactt

SEQ ID NO: 52937 - DNA, 25 bp, SARS Virus
tgttggttagtggttgacacacttc

SEQ ID NO: 52938 - DNA, 25 bp, SARS Virus
gttggttagtgggtgacacacttct

SEQ ID NO: 52939 - DNA, 25 bp, SARS Virus
ttggttagtggtggacacacttcta

SEQ ID NO: 52940 - DNA, 25 bp, SARS Virus
tggttagtggttgacacacttctac

SEQ ID NO: 52941 - DNA, 25 bp, SARS Virus
ggttagtggttggcacacttctaca

SEQ ID NO: 52942 - DNA, 25 bp, SARS Virus
gttagtggttgagacacttctacaa

SEQ ID NO: 52943 - DNA, 25 bp, SARS Virus
ttagtggttgacgcacttctacaac

SEQ ID NO: 52944 - DNA, 25 bp, SARS Virus
tagtggttgacagacttctacaaca

SEQ ID NO: 52945 - DNA, 25 bp, SARS Virus
agtggttgacacgcttctacaacac

SEQ ID NO: 52946 - DNA, 25 bp, SARS Virus
gtggttgacacagttctacaacaca

SEQ ID NO: 52947 - DNA, 25 bp, SARS Virus
tggttgacacacgtctacaacacat

SEQ ID NO: 52948 - DNA, 25 bp, SARS Virus
ggttgacacactgctacaacacatg

SEQ ID NO: 52949 - DNA, 25 bp, SARS Virus
gttgacacacttgtacaacacatgt

SEQ ID NO: 52950 - DNA, 25 bp, SARS Virus
ttgacacacttcgacaacacatgtg

SEQ ID NO: 52951 - DNA, 25 bp, SARS Virus
tgacacacttctgcaacacatgtgt

SEQ ID NO: 52952 - DNA, 25 bp, SARS Virus
gacacacttctagaacacatgtgtg

SEQ ID NO: 52953 - DNA, 25 bp, SARS Virus
acacacttctacgacacatgtgtgt

SEQ ID NO: 52954 - DNA, 25 bp, SARS Virus
cacacttctacagcacatgtgtgtg

SEQ ID NO: 52955 - DNA, 25 bp, SARS Virus
acacttctacaagacatgtgtgtga

SEQ ID NO: 52956 - DNA, 25 bp, SARS Virus
cacttctacaacgcatgtgtgtgac

SEQ ID NO: 52957 - DNA, 25 bp, SARS Virus
acttctacaacagatgtgtgtgacc

SEQ ID NO: 52958 - DNA, 25 bp, SARS Virus
cttctacaacacgtgtgtgtgacca

SEQ ID NO: 52959 - DNA, 25 bp, SARS Virus
ttctacaacacaggtgtgtgaccat

SEQ ID NO: 52960 - DNA, 25 bp, SARS Virus
tctacaacacatgtgtgtgaccatg

SEQ ID NO: 52961 - DNA, 25 bp, SARS Virus
ctacaacacatgggtgtgaccatgt

SEQ ID NO: 52962 - DNA, 25 bp, SARS Virus
tacaacacatgtgtgtgaccatgtc

SEQ ID NO: 52963 - DNA, 25 bp, SARS Virus
acaacacatgtgggtgaccatgtcc

SEQ ID NO: 52964 - DNA, 25 bp, SARS Virus
caacacatgtgtgtgaccatgtcct

SEQ ID NO: 52965 - DNA, 25 bp, SARS Virus
aacacatgtgtgggaccatgtcctg

SEQ ID NO: 52966 - DNA, 25 bp, SARS Virus
acacatgtgtgtgaccatgtcctgt

SEQ ID NO: 52967 - DNA, 25 bp, SARS Virus
cacatgtgtgtggccatgtcctgtc

SEQ ID NO: 52968 - DNA, 25 bp, SARS Virus
acatgtgtgtgagcatgtcctgtcc

SEQ ID NO: 52969 - DNA, 25 bp, SARS Virus
catgtgtgtgacgatgtcctgtccg

SEQ ID NO: 52970 - DNA, 25 bp, SARS Virus
atgtgtgtgaccgtgtcctgtccgt

SEQ ID NO: 52971 - DNA, 25 bp, SARS Virus
tgtgtgtgaccaggtcctgtccgtt

SEQ ID NO: 52972 - DNA, 25 bp, SARS Virus
gtgtgtgaccatgtcctgtccgtta

SEQ ID NO: 52973 - DNA, 25 bp, SARS Virus
tgtgtgaccatggcctgtccgttaa

SEQ ID NO: 52974 - DNA, 25 bp, SARS Virus
gtgtgaccatgtgctgtccgttaat

SEQ ID NO: 52975 - DNA, 25 bp, SARS Virus
tgtgaccatgtcgtgtccgttaatg

SEQ ID NO: 52976 - DNA, 25 bp, SARS Virus
gtgaccatgtccggtccgttaatga

SEQ ID NO: 52977 - DNA, 25 bp, SARS Virus
tgaccatgtcctgtccgttaatgac

SEQ ID NO: 52978 - DNA, 25 bp, SARS Virus
gaccatgtcctggccgttaatgaca

SEQ ID NO: 52979 - DNA, 25 bp, SARS Virus
accatgtcctgtgcgttaatgacat

SEQ ID NO: 52980 - DNA, 25 bp, SARS Virus
ccatgtcctgtcggttaatgacatt

SEQ ID NO: 52981 - DNA, 25 bp, SARS Virus
catgtcctgtccgttaatgacattg

SEQ ID NO: 52982 - DNA, 25 bp, SARS Virus
atgtcctgtccggtaatgacattgt

SEQ ID NO: 52983 - DNA, 25 bp, SARS Virus
tgtcctgtccgtgaatgacattgtg

SEQ ID NO: 52984 - DNA, 25 bp, SARS Virus
gtcctgtccgttgatgacattgtgg

SEQ ID NO: 52985 - DNA, 25 bp, SARS Virus
tcctgtccgttagtgacattgtggt

SEQ ID NO: 52986 - DNA, 25 bp, SARS Virus
cctgtccgttaaggacattgtggtc

SEQ ID NO: 52987 - DNA, 25 bp, SARS Virus
ctgtccgttaatgacattgtggtct

SEQ ID NO: 52988 - DNA, 25 bp, SARS Virus
tgtccgttaatggcattgtggtctt

SEQ ID NO: 52989 - DNA, 25 bp, SARS Virus
gtccgttaatgagattgtggtcttc

SEQ ID NO: 52990 - DNA, 25 bp, SARS Virus
tccgttaatgacgttgtggtcttcg

SEQ ID NO: 52991 - DNA, 25 bp, SARS Virus
ccgttaatgacagtgtggtcttcga

SEQ ID NO: 52992 - DNA, 25 bp, SARS Virus
cgttaatgacatggtggtcttcgat

SEQ ID NO: 52993 - DNA, 25 bp, SARS Virus
gttaatgacattgtggtcttcgatt

SEQ ID NO: 52994 - DNA, 25 bp, SARS Virus
ttaatgacattggggtcttcgattg

SEQ ID NO: 52995 - DNA, 25 bp, SARS Virus
taatgacattgtggtcttcgattgt

SEQ ID NO: 52996 - DNA, 25 bp, SARS Virus
aatgacattgtggtcttcgattgta

SEQ ID NO: 52997 - DNA, 25 bp, SARS Virus
atgacattgtgggcttcgattgtac

SEQ ID NO: 52998 - DNA, 25 bp, SARS Virus
tgacattgtggtgttcgattgtacc

SEQ ID NO: 52999 - DNA, 25 bp, SARS Virus
gacattgtggtcgtcgattgtacct

SEQ ID NO: 53000 - DNA, 25 bp, SARS Virus
acattgtggtctgcgattgtacctg

SEQ ID NO: 53001 - DNA, 25 bp, SARS Virus
cattgtggtcttggattgtacctgg

SEQ ID NO: 53002 - DNA, 25 bp, SARS Virus
attgtggtcttcgattgtacctggt

SEQ ID NO: 53003 - DNA, 25 bp, SARS Virus
ttgtggtcttcggttgtacctggtt

SEQ ID NO: 53004 - DNA, 25 bp, SARS Virus
tgtggtcttcgagtgtacctggttc

SEQ ID NO: 53005 - DNA, 25 bp, SARS Virus
gtggtcttcgatggtacctggttct

SEQ ID NO: 53006 - DNA, 25 bp, SARS Virus
tggtcttcgattgtacctggttctc

SEQ ID NO: 53007 - DNA, 25 bp, SARS Virus
ggtcttcgattggacctggttctca

SEQ ID NO: 53008 - DNA, 25 bp, SARS Virus
gtcttcgattgtgcctggttctcag

SEQ ID NO: 53009 - DNA, 25 bp, SARS Virus
tcttcgattgtagctggttctcagg

SEQ ID NO: 53010 - DNA, 25 bp, SARS Virus
cttcgattgtacgtggttctcagga

SEQ ID NO: 53011 - DNA, 25 bp, SARS Virus
ttcgattgtaccgggttctcaggaa

SEQ ID NO: 53012 - DNA, 25 bp, SARS Virus
tcgattgtacctggttctcaggaaa

SEQ ID NO: 53013 - DNA, 25 bp, SARS Virus
cgattgtacctggttctcaggaaac

SEQ ID NO: 53014 - DNA, 25 bp, SARS Virus
gattgtacctgggtctcaggaaacc

SEQ ID NO: 53015 - DNA, 25 bp, SARS Virus
attgtacctggtgctcaggaaacca

SEQ ID NO: 53016 - DNA, 25 bp, SARS Virus
ttgtacctggttgtcaggaaaccac

SEQ ID NO: 53017 - DNA, 25 bp, SARS Virus
tgtacctggttcgcaggaaaccacc

SEQ ID NO: 53018 - DNA, 25 bp, SARS Virus
gtacctggttctgaggaaaccacca

SEQ ID NO: 53019 - DNA, 25 bp, SARS Virus
tacctggttctcgggaaaccaccac

SEQ ID NO: 53020 - DNA, 25 bp, SARS Virus
acctggttctcaggaaaccaccacg

SEQ ID NO: 53021 - DNA, 25 bp, SARS Virus
cctggttctcaggaaaccaccacga

SEQ ID NO: 53022 - DNA, 25 bp, SARS Virus
ctggttctcagggaaccaccacgaa

SEQ ID NO: 53023 - DNA, 25 bp, SARS Virus
tggttctcaggagaccaccacgaag

SEQ ID NO: 53024 - DNA, 25 bp, SARS Virus
ggttctcaggaagccaccacgaagt

SEQ ID NO: 53025 - DNA, 25 bp, SARS Virus
gttctcaggaaagcaccacgaagta

SEQ ID NO: 53026 - DNA, 25 bp, SARS Virus
ttctcaggaaacgaccacgaagtac

SEQ ID NO: 53027 - DNA, 25 bp, SARS Virus
tctcaggaaaccgccacgaagtaca

SEQ ID NO: 53028 - DNA, 25 bp, SARS Virus
ctcaggaaaccagcacgaagtacaa

SEQ ID NO: 53029 - DNA, 25 bp, SARS Virus
tcaggaaaccacgacgaagtacaac

SEQ ID NO: 53030 - DNA, 25 bp, SARS Virus
caggaaaccaccgcgaagtacaaca

SEQ ID NO: 53031 - DNA, 25 bp, SARS Virus
aggaaaccaccaggaagtacaacag

SEQ ID NO: 53032 - DNA, 25 bp, SARS Virus
ggaaaccaccacgaagtacaacaga

SEQ ID NO: 53033 - DNA, 25 bp, SARS Virus
gaaaccaccacggagtacaacagac

SEQ ID NO: 53034 - DNA, 25 bp, SARS Virus
aaaccaccacgaggtacaacagaca

SEQ ID NO: 53035 - DNA, 25 bp, SARS Virus
aaccaccacgaagtacaacagacat

SEQ ID NO: 53036 - DNA, 25 bp, SARS Virus
accaccacgaaggacaacagacata

SEQ ID NO: 53037 - DNA, 25 bp, SARS Virus
ccaccacgaagtgcaacagacataa

SEQ ID NO: 53038 - DNA, 25 bp, SARS Virus
caccacgaagtagaacagacataac

SEQ ID NO: 53039 - DNA, 25 bp, SARS Virus
accacgaagtacgacagacataaca

SEQ ID NO: 53040 - DNA, 25 bp, SARS Virus
ccacgaagtacagcagacataacat

SEQ ID NO: 53041 - DNA, 25 bp, SARS Virus
cacgaagtacaagagacataacatc

SEQ ID NO: 53042 - DNA, 25 bp, SARS Virus
acgaagtacaacggacataacatct

SEQ ID NO: 53043 - DNA, 25 bp, SARS Virus
cgaagtacaacagacataacatcta

SEQ ID NO: 53044 - DNA, 25 bp, SARS Virus
gaagtacaacaggcataacatctac

SEQ ID NO: 53045 - DNA, 25 bp, SARS Virus
aagtacaacagagataacatctacg

SEQ ID NO: 53046 - DNA, 25 bp, SARS Virus
agtacaacagacgtaacatctacgg

SEQ ID NO: 53047 - DNA, 25 bp, SARS Virus
gtacaacagacagaacatctacggt

SEQ ID NO: 53048 - DNA, 25 bp, SARS Virus
tacaacagacatgacatctacggtg

SEQ ID NO: 53049 - DNA, 25 bp, SARS Virus
acaacagacatagcatctacggtgt

SEQ ID NO: 53050 - DNA, 25 bp, SARS Virus
caacagacataagatctacggtgta

SEQ ID NO: 53051 - DNA, 25 bp, SARS Virus
aacagacataacgtctacggtgtaa

SEQ ID NO: 53052 - DNA, 25 bp, SARS Virus
acagacataacagctacggtgtaac

SEQ ID NO: 53053 - DNA, 25 bp, SARS Virus
cagacataacatgtacggtgtaact

SEQ ID NO: 53054 - DNA, 25 bp, SARS Virus
agacataacatcgacggtgtaactg

SEQ ID NO: 53055 - DNA, 25 bp, SARS Virus
gacataacatctgcggtgtaactgg

SEQ ID NO: 53056 - DNA, 25 bp, SARS Virus
acataacatctagggtgtaactggt

SEQ ID NO: 53057 - DNA, 25 bp, SARS Virus
cataacatctacggtgtaactggta

SEQ ID NO: 53058 - DNA, 25 bp, SARS Virus
ataacatctacggtgtaactggtag

SEQ ID NO: 53059 - DNA, 25 bp, SARS Virus
taacatctacggggtaactggtagg

SEQ ID NO: 53060 - DNA, 25 bp, SARS Virus
aacatctacggtgtaactggtaggt

SEQ ID NO: 53061 - DNA, 25 bp, SARS Virus
acatctacggtggaactggtaggtt

SEQ ID NO: 53062 - DNA, 25 bp, SARS Virus
catctacggtgtgactggtaggttt

SEQ ID NO: 53063 - DNA, 25 bp, SARS Virus
atctacggtgtagctggtaggttta

SEQ ID NO: 53064 - DNA, 25 bp, SARS Virus
tctacggtgtaagtggtaggtttag

SEQ ID NO: 53065 - DNA, 25 bp, SARS Virus
ctacggtgtaacgggtaggtttagg

SEQ ID NO: 53066 - DNA, 25 bp, SARS Virus
tacggtgtaactggtaggtttagga

SEQ ID NO: 53067 - DNA, 25 bp, SARS Virus
acggtgtaactggtaggtttaggat

SEQ ID NO: 53068 - DNA, 25 bp, SARS Virus
cggtgtaactgggaggtttaggatt

SEQ ID NO: 53069 - DNA, 25 bp, SARS Virus
ggtgtaactggtgggtttaggattt

SEQ ID NO: 53070 - DNA, 25 bp, SARS Virus
gtgtaactggtaggtttaggatttc

SEQ ID NO: 53071 - DNA, 25 bp, SARS Virus
tgtaactggtaggtttaggatttcc

SEQ ID NO: 53072 - DNA, 25 bp, SARS Virus
gtaactggtagggttaggatttcct

SEQ ID NO: 53073 - DNA, 25 bp, SARS Virus
taactggtaggtgtaggatttccta

SEQ ID NO: 53074 - DNA, 25 bp, SARS Virus
aactggtaggttgaggatttcctaa

SEQ ID NO: 53075 - DNA, 25 bp, SARS Virus
actggtaggtttgggatttcctaag

SEQ ID NO: 53076 - DNA, 25 bp, SARS Virus
ctggtaggtttaggatttcctaaga

SEQ ID NO: 53077 - DNA, 25 bp, SARS Virus
tggtaggtttaggatttcctaagac

SEQ ID NO: 53078 - DNA, 25 bp, SARS Virus
ggtaggtttagggtttcctaagaca

SEQ ID NO: 53079 - DNA, 25 bp, SARS Virus
gtaggtttaggagttcctaagacac

SEQ ID NO: 53080 - DNA, 25 bp, SARS Virus
taggtttaggatgtcctaagacact

SEQ ID NO: 53081 - DNA, 25 bp, SARS Virus
aggtttaggattgcctaagacactg

SEQ ID NO: 53082 - DNA, 25 bp, SARS Virus
ggtttaggatttgctaagacactga

SEQ ID NO: 53083 - DNA, 25 bp, SARS Virus
gtttaggatttcgtaagacactgaa

SEQ ID NO: 53084 - DNA, 25 bp, SARS Virus
tttaggatttccgaagacactgaac

SEQ ID NO: 53085 - DNA, 25 bp, SARS Virus
ttaggatttcctgagacactgaact

SEQ ID NO: 53086 - DNA, 25 bp, SARS Virus
taggatttcctaggacactgaactt

SEQ ID NO: 53087 - DNA, 25 bp, SARS Virus
aggatttcctaagacactgaacttt

SEQ ID NO: 53088 - DNA, 25 bp, SARS Virus
ggatttcctaaggcactgaactttc

SEQ ID NO: 53089 - DNA, 25 bp, SARS Virus
gatttcctaagagactgaactttcc

SEQ ID NO: 53090 - DNA, 25 bp, SARS Virus
atttcctaagacgctgaactttcca

SEQ ID NO: 53091 - DNA, 25 bp, SARS Virus
tttcctaagacagtgaactttccat

SEQ ID NO: 53092 - DNA, 25 bp, SARS Virus
ttcctaagacacggaactttccatt

SEQ ID NO: 53093 - DNA, 25 bp, SARS Virus
tcctaagacactgaactttccattc

SEQ ID NO: 53094 - DNA, 25 bp, SARS Virus
cctaagacactggactttccattca

SEQ ID NO: 53095 - DNA, 25 bp, SARS Virus
ctaagacactgagctttccattcat

SEQ ID NO: 53096 - DNA, 25 bp, SARS Virus
taagacactgaagtttccattcatg

SEQ ID NO: 53097 - DNA, 25 bp, SARS Virus
aagacactgaacgttccattcatgc

SEQ ID NO: 53098 - DNA, 25 bp, SARS Virus
agacactgaactgtccattcatgca

SEQ ID NO: 53099 - DNA, 25 bp, SARS Virus
gacactgaacttgccattcatgcag

SEQ ID NO: 53100 - DNA, 25 bp, SARS Virus
acactgaactttgcattcatgcagg

SEQ ID NO: 53101 - DNA, 25 bp, SARS Virus
cactgaactttcgattcatgcaggt

SEQ ID NO: 53102 - DNA, 25 bp, SARS Virus
actgaactttccgttcatgcaggtt

SEQ ID NO: 53103 - DNA, 25 bp, SARS Virus
ctgaactttccagtcatgcaggttt

SEQ ID NO: 53104 - DNA, 25 bp, SARS Virus
tgaactttccatgcatgcaggttta

SEQ ID NO: 53105 - DNA, 25 bp, SARS Virus
gaactttccattgatgcaggtttat

SEQ ID NO: 53106 - DNA, 25 bp, SARS Virus
aactttccattcgtgcaggtttatg

SEQ ID NO: 53107 - DNA, 25 bp, SARS Virus
actttccattcaggcaggtttatgg

SEQ ID NO: 53108 - DNA, 25 bp, SARS Virus
ctttccattcatgcaggtttatgga

SEQ ID NO: 53109 - DNA, 25 bp, SARS Virus
tttccattcatggaggtttatggat

SEQ ID NO: 53110 - DNA, 25 bp, SARS Virus
ttccattcatgcgggtttatggatg

SEQ ID NO: 53111 - DNA, 25 bp, SARS Virus
tccattcatgcaggtttatggatgg

SEQ ID NO: 53112 - DNA, 25 bp, SARS Virus
ccattcatgcaggtttatggatggt

SEQ ID NO: 53113 - DNA, 25 bp, SARS Virus
cattcatgcagggttatggatggtg

SEQ ID NO: 53114 - DNA, 25 bp, SARS Virus
attcatgcaggtgtatggatggtga

SEQ ID NO: 53115 - DNA, 25 bp, SARS Virus
ttcatgcaggttgatggatggtgaa

SEQ ID NO: 53116 - DNA, 25 bp, SARS Virus
tcatgcaggtttgtggatggtgaac

SEQ ID NO: 53117 - DNA, 25 bp, SARS Virus
catgcaggtttagggatggtgaaca

SEQ ID NO: 53118 - DNA, 25 bp, SARS Virus
atgcaggtttatggatggtgaacac

SEQ ID NO: 53119 - DNA, 25 bp, SARS Virus
tgcaggtttatggatggtgaacacg

SEQ ID NO: 53120 - DNA, 25 bp, SARS Virus
gcaggtttatgggtggtgaacacga

SEQ ID NO: 53121 - DNA, 25 bp, SARS Virus
caggtttatggagggtgaacacgat

SEQ ID NO: 53122 - DNA, 25 bp, SARS Virus
aggtttatggatggtgaacacgatt

SEQ ID NO: 53123 - DNA, 25 bp, SARS Virus
ggtttatggatggtgaacacgatta

SEQ ID NO: 53124 - DNA, 25 bp, SARS Virus
gtttatggatggggaacacgattac

SEQ ID NO: 53125 - DNA, 25 bp, SARS Virus
tttatggatggtgaacacgattact

SEQ ID NO: 53126 - DNA, 25 bp, SARS Virus
ttatggatggtggacacgattactg

SEQ ID NO: 53127 - DNA, 25 bp, SARS Virus
tatggatggtgagcacgattactgg

SEQ ID NO: 53128 - DNA, 25 bp, SARS Virus
atggatggtgaagacgattactggg

SEQ ID NO: 53129 - DNA, 25 bp, SARS Virus
tggatggtgaacgcgattactgggt

SEQ ID NO: 53130 - DNA, 25 bp, SARS Virus
ggatggtgaacaggattactgggtc

SEQ ID NO: 53131 - DNA, 25 bp, SARS Virus
gatggtgaacacgattactgggtca

SEQ ID NO: 53132 - DNA, 25 bp, SARS Virus
atggtgaacacggttactgggtcac

SEQ ID NO: 53133 - DNA, 25 bp, SARS Virus
tggtgaacacgagtactgggtcacc

SEQ ID NO: 53134 - DNA, 25 bp, SARS Virus
ggtgaacacgatgactgggtcaccc

SEQ ID NO: 53135 - DNA, 25 bp, SARS Virus
gtgaacacgattgctgggtcaccca

SEQ ID NO: 53136 - DNA, 25 bp, SARS Virus
tgaacacgattagtgggtcacccaa

SEQ ID NO: 53137 - DNA, 25 bp, SARS Virus
gaacacgattacggggtcacccaaa

SEQ ID NO: 53138 - DNA, 25 bp, SARS Virus
aacacgattactgggtcacccaaaa

SEQ ID NO: 53139 - DNA, 25 bp, SARS Virus
acacgattactgggtcacccaaaat

SEQ ID NO: 53140 - DNA, 25 bp, SARS Virus
cacgattactgggtcacccaaaatg

SEQ ID NO: 53141 - DNA, 25 bp, SARS Virus
acgattactggggcacccaaaatgt

SEQ ID NO: 53142 - DNA, 25 bp, SARS Virus
cgattactgggtgacccaaaatgtg

SEQ ID NO: 53143 - DNA, 25 bp, SARS Virus
gattactgggtcgcccaaaatgtga

SEQ ID NO: 53144 - DNA, 25 bp, SARS Virus
attactgggtcagccaaaatgtgaa

SEQ ID NO: 53145 - DNA, 25 bp, SARS Virus
ttactgggtcacgcaaaatgtgaat

SEQ ID NO: 53146 - DNA, 25 bp, SARS Virus
tactgggtcaccgaaaatgtgaatc

SEQ ID NO: 53147 - DNA, 25 bp, SARS Virus
actgggtcacccgaaatgtgaatct

SEQ ID NO: 53148 - DNA, 25 bp, SARS Virus
ctgggtcacccagaatgtgaatctt

SEQ ID NO: 53149 - DNA, 25 bp, SARS Virus
tgggtcacccaagatgtgaatcttt

SEQ ID NO: 53150 - DNA, 25 bp, SARS Virus
gggtcacccaaagtgtgaatctttg

SEQ ID NO: 53151 - DNA, 25 bp, SARS Virus
ggtcacccaaaaggtgaatctttgt

SEQ ID NO: 53152 - DNA, 25 bp, SARS Virus
gtcacccaaaatgtgaatctttgtg

SEQ ID NO: 53153 - DNA, 25 bp, SARS Virus
tcacccaaaatgggaatctttgtgt

SEQ ID NO: 53154 - DNA, 25 bp, SARS Virus
cacccaaaatgtgaatctttgtgtc

SEQ ID NO: 53155 - DNA, 25 bp, SARS Virus
acccaaaatgtggatctttgtgtca

SEQ ID NO: 53156 - DNA, 25 bp, SARS Virus
cccaaaatgtgagtctttgtgtcag

SEQ ID NO: 53157 - DNA, 25 bp, SARS Virus
ccaaaatgtgaagctttgtgtcaga

SEQ ID NO: 53158 - DNA, 25 bp, SARS Virus
caaaatgtgaatgtttgtgtcagac

SEQ ID NO: 53159 - DNA, 25 bp, SARS Virus
aaaatgtgaatcgttgtgtcagaca

SEQ ID NO: 53160 - DNA, 25 bp, SARS Virus
aaatgtgaatctgtgtgtcagacat

SEQ ID NO: 53161 - DNA, 25 bp, SARS Virus
aatgtgaatcttggtgtcagacatg

SEQ ID NO: 53162 - DNA, 25 bp, SARS Virus
atgtgaatctttgtgtcagacatgg

SEQ ID NO: 53163 - DNA, 25 bp, SARS Virus
tgtgaatctttgggtcagacatggc

SEQ ID NO: 53164 - DNA, 25 bp, SARS Virus
gtgaatctttgtgtcagacatggca

SEQ ID NO: 53165 - DNA, 25 bp, SARS Virus
tgaatctttgtggcagacatggcag

SEQ ID NO: 53166 - DNA, 25 bp, SARS Virus
gaatctttgtgtgagacatggcaga

SEQ ID NO: 53167 - DNA, 25 bp, SARS Virus
aatctttgtgtcggacatggcagac

SEQ ID NO: 53168 - DNA, 25 bp, SARS Virus
atctttgtgtcagacatggcagacg

SEQ ID NO: 53169 - DNA, 25 bp, SARS Virus
tctttgtgtcaggcatggcagacgc

SEQ ID NO: 53170 - DNA, 25 bp, SARS Virus
ctttgtgtcagagatggcagacgcc

SEQ ID NO: 53171 - DNA, 25 bp, SARS Virus
tttgtgtcagacgtggcagacgcct

SEQ ID NO: 53172 - DNA, 25 bp, SARS Virus
ttgtgtcagacagggcagacgcctt

SEQ ID NO: 53173 - DNA, 25 bp, SARS Virus
tgtgtcagacatggcagacgcctta

SEQ ID NO: 53174 - DNA, 25 bp, SARS Virus
gtgtcagacatggcagacgccttac

SEQ ID NO: 53175 - DNA, 25 bp, SARS Virus
tgtcagacatgggagacgccttaca

SEQ ID NO: 53176 - DNA, 25 bp, SARS Virus
gtcagacatggcggacgccttacac

SEQ ID NO: 53177 - DNA, 25 bp, SARS Virus
tcagacatggcagacgccttacacc

SEQ ID NO: 53178 - DNA, 25 bp, SARS Virus
cagacatggcaggcgccttacacct

SEQ ID NO: 53179 - DNA, 25 bp, SARS Virus
agacatggcagaggccttacacctt

SEQ ID NO: 53180 - DNA, 25 bp, SARS Virus
gacatggcagacgccttacaccttt

SEQ ID NO: 53181 - DNA, 25 bp, SARS Virus
acatggcagacggcttacacctttc

SEQ ID NO: 53182 - DNA, 25 bp, SARS Virus
catggcagacgcgttacacctttcc

SEQ ID NO: 53183 - DNA, 25 bp, SARS Virus
atggcagacgccgtacacctttcca

SEQ ID NO: 53184 - DNA, 25 bp, SARS Virus
tggcagacgcctgacacctttccaa

SEQ ID NO: 53185 - DNA, 25 bp, SARS Virus
ggcagacgccttgcacctttccaat

SEQ ID NO: 53186 - DNA, 25 bp, SARS Virus
gcagacgccttagacctttccaata

SEQ ID NO: 53187 - DNA, 25 bp, SARS Virus
cagacgccttacgcctttccaatac

SEQ ID NO: 53188 - DNA, 25 bp, SARS Virus
agacgccttacagctttccaatacc

SEQ ID NO: 53189 - DNA, 25 bp, SARS Virus
gacgccttacacgtttccaataccg

SEQ ID NO: 53190 - DNA, 25 bp, SARS Virus
acgccttacaccgttccaataccga

SEQ ID NO: 53191 - DNA, 25 bp, SARS Virus
cgccttacacctgtccaataccgac

SEQ ID NO: 53192 - DNA, 25 bp, SARS Virus
gccttacaccttgccaataccgaca

SEQ ID NO: 53193 - DNA, 25 bp, SARS Virus
ccttacacctttgcaataccgacat

SEQ ID NO: 53194 - DNA, 25 bp, SARS Virus
cttacacctttcgaataccgacatc

SEQ ID NO: 53195 - DNA, 25 bp, SARS Virus
ttacacctttccgataccgacatca

SEQ ID NO: 53196 - DNA, 25 bp, SARS Virus
tacacctttccagtaccgacatcaa

SEQ ID NO: 53197 - DNA, 25 bp, SARS Virus
acacctttccaagaccgacatcaac

SEQ ID NO: 53198 - DNA, 25 bp, SARS Virus
cacctttccaatgccgacatcaaca

SEQ ID NO: 53199 - DNA, 25 bp, SARS Virus
acctttccaatagcgacatcaacac

SEQ ID NO: 53200 - DNA, 25 bp, SARS Virus
cctttccaatacggacatcaacact

SEQ ID NO: 53201 - DNA, 25 bp, SARS Virus
ctttccaataccgacatcaacactg

SEQ ID NO: 53202 - DNA, 25 bp, SARS Virus
tttccaataccggcatcaacactgg

SEQ ID NO: 53203 - DNA, 25 bp, SARS Virus
ttccaataccgagatcaacactggt

SEQ ID NO: 53204 - DNA, 25 bp, SARS Virus
tccaataccgacgtcaacactggtt

SEQ ID NO: 53205 - DNA, 25 bp, SARS Virus
ccaataccgacagcaacactggttg

SEQ ID NO: 53206 - DNA, 25 bp, SARS Virus
caataccgacatgaacactggttga

SEQ ID NO: 53207 - DNA, 25 bp, SARS Virus
aataccgacatcgacactggttgag

SEQ ID NO: 53208 - DNA, 25 bp, SARS Virus
ataccgacatcagcactggttgagg

SEQ ID NO: 53209 - DNA, 25 bp, SARS Virus
taccgacatcaagactggttgaggc

SEQ ID NO: 53210 - DNA, 25 bp, SARS Virus
accgacatcaacgctggttgaggcg

SEQ ID NO: 53211 - DNA, 25 bp, SARS Virus
ccgacatcaacagtggttgaggcgc

SEQ ID NO: 53212 - DNA, 25 bp, SARS Virus
cgacatcaacacgggttgaggcgct

SEQ ID NO: 53213 - DNA, 25 bp, SARS Virus
gacatcaacactggttgaggcgctt

SEQ ID NO: 53214 - DNA, 25 bp, SARS Virus
acatcaacactggttgaggcgcttg

SEQ ID NO: 53215 - DNA, 25 bp, SARS Virus
catcaacactgggtgaggcgcttgg

SEQ ID NO: 53216 - DNA, 25 bp, SARS Virus
atcaacactggtggaggcgcttggg

SEQ ID NO: 53217 - DNA, 25 bp, SARS Virus
tcaacactggttgaggcgcttggga

SEQ ID NO: 53218 - DNA, 25 bp, SARS Virus
caacactggttggggcgcttgggaa

SEQ ID NO: 53219 - DNA, 25 bp, SARS Virus
aacactggttgaggcgcttgggaac

SEQ ID NO: 53220 - DNA, 25 bp, SARS Virus
acactggttgaggcgcttgggaact

SEQ ID NO: 53221 - DNA, 25 bp, SARS Virus
cactggttgaggggcttgggaacta

SEQ ID NO: 53222 - DNA, 25 bp, SARS Virus
actggttgaggcgcttgggaactac

SEQ ID NO: 53223 - DNA, 25 bp, SARS Virus
ctggttgaggcggttgggaactacg

SEQ ID NO: 53224 - DNA, 25 bp, SARS Virus
tggttgaggcgcgtgggaactacgt

SEQ ID NO: 53225 - DNA, 25 bp, SARS Virus
ggttgaggcgctggggaactacgtc

SEQ ID NO: 53226 - DNA, 25 bp, SARS Virus
gttgaggcgcttgggaactacgtca

SEQ ID NO: 53227 - DNA, 25 bp, SARS Virus
ttgaggcgcttgggaactacgtcag

SEQ ID NO: 53228 - DNA, 25 bp, SARS Virus
tgaggcgcttgggaactacgtcaga

SEQ ID NO: 53229 - DNA, 25 bp, SARS Virus
gaggcgcttggggactacgtcagac

SEQ ID NO: 53230 - DNA, 25 bp, SARS Virus
aggcgcttgggagctacgtcagacg

SEQ ID NO: 53231 - DNA, 25 bp, SARS Virus
ggcgcttgggaagtacgtcagacgc

SEQ ID NO: 53232 - DNA, 25 bp, SARS Virus
gcgcttgggaacgacgtcagacgcc

SEQ ID NO: 53233 - DNA, 25 bp, SARS Virus
cgcttgggaactgcgtcagacgcct

SEQ ID NO: 53234 - DNA, 25 bp, SARS Virus
gcttgggaactaggtcagacgccta

SEQ ID NO: 53235 - DNA, 25 bp, SARS Virus
cttgggaactacgtcagacgcctac

SEQ ID NO: 53236 - DNA, 25 bp, SARS Virus
ttgggaactacggcagacgcctacg

SEQ ID NO: 53237 - DNA, 25 bp, SARS Virus
tgggaactacgtgagacgcctacgt

SEQ ID NO: 53238 - DNA, 25 bp, SARS Virus
gggaactacgtcggacgcctacgta

SEQ ID NO: 53239 - DNA, 25 bp, SARS Virus
ggaactacgtcagacgcctacgtag

SEQ ID NO: 53240 - DNA, 25 bp, SARS Virus
gaactacgtcaggcgcctacgtagt

SEQ ID NO: 53241 - DNA, 25 bp, SARS Virus
aactacgtcagaggcctacgtagtt

SEQ ID NO: 53242 - DNA, 25 bp, SARS Virus
actacgtcagacgcctacgtagttg

SEQ ID NO: 53243 - DNA, 25 bp, SARS Virus
ctacgtcagacggctacgtagttgc

SEQ ID NO: 53244 - DNA, 25 bp, SARS Virus
tacgtcagacgcgtacgtagttgca

SEQ ID NO: 53245 - DNA, 25 bp, SARS Virus
acgtcagacgccgacgtagttgcaa

SEQ ID NO: 53246 - DNA, 25 bp, SARS Virus
cgtcagacgcctgcgtagttgcaaa

SEQ ID NO: 53247 - DNA, 25 bp, SARS Virus
gtcagacgcctaggtagttgcaaaa

SEQ ID NO: 53248 - DNA, 25 bp, SARS Virus
tcagacgcctacgtagttgcaaaaa

SEQ ID NO: 53249 - DNA, 25 bp, SARS Virus
cagacgcctacggagttgcaaaaat

SEQ ID NO: 53250 - DNA, 25 bp, SARS Virus
agacgcctacgtggttgcaaaaatt

SEQ ID NO: 53251 - DNA, 25 bp, SARS Virus
gacgcctacgtagttgcaaaaattt

SEQ ID NO: 53252 - DNA, 25 bp, SARS Virus
acgcctacgtaggtgcaaaaatttg

SEQ ID NO: 53253 - DNA, 25 bp, SARS Virus
cgcctacgtagtggcaaaaatttgc

SEQ ID NO: 53254 - DNA, 25 bp, SARS Virus
gcctacgtagttgcaaaaatttgcc

SEQ ID NO: 53255 - DNA, 25 bp, SARS Virus
cctacgtagttggaaaaatttgccc

SEQ ID NO: 53256 - DNA, 25 bp, SARS Virus
ctacgtagttgcgaaaatttgccca

SEQ ID NO: 53257 - DNA, 25 bp, SARS Virus
tacgtagttgcagaaatttgcccaa

SEQ ID NO: 53258 - DNA, 25 bp, SARS Virus
acgtagttgcaagaatttgcccaaa

SEQ ID NO: 53259 - DNA, 25 bp, SARS Virus
cgtagttgcaaagatttgcccaaac

SEQ ID NO: 53260 - DNA, 25 bp, SARS Virus
gtagttgcaaaagtttgcccaaacg

SEQ ID NO: 53261 - DNA, 25 bp, SARS Virus
tagttgcaaaaagttgcccaaacgc

SEQ ID NO: 53262 - DNA, 25 bp, SARS Virus
agttgcaaaaatgtgcccaaacgcc

SEQ ID NO: 53263 - DNA, 25 bp, SARS Virus
gttgcaaaaattggcccaaacgcca

SEQ ID NO: 53264 - DNA, 25 bp, SARS Virus
ttgcaaaaatttgcccaaacgccac

SEQ ID NO: 53265 - DNA, 25 bp, SARS Virus
tgcaaaaatttggccaaacgccaca

SEQ ID NO: 53266 - DNA, 25 bp, SARS Virus
gcaaaaatttgcgcaaacgccacat

SEQ ID NO: 53267 - DNA, 25 bp, SARS Virus
caaaaatttgccgaaacgccacatt

SEQ ID NO: 53268 - DNA, 25 bp, SARS Virus
aaaaatttgcccgaacgccacattc

SEQ ID NO: 53269 - DNA, 25 bp, SARS Virus
aaaatttgcccagacgccacattca

SEQ ID NO: 53270 - DNA, 25 bp, SARS Virus
aaatttgcccaagcgccacattcac

SEQ ID NO: 53271 - DNA, 25 bp, SARS Virus
aatttgcccaaaggccacattcacg

SEQ ID NO: 53272 - DNA, 25 bp, SARS Virus
atttgcccaaacgccacattcacgt

SEQ ID NO: 53273 - DNA, 25 bp, SARS Virus
tttgcccaaacggcacattcacgtc

SEQ ID NO: 53274 - DNA, 25 bp, SARS Virus
ttgcccaaacgcgacattcacgtcg

SEQ ID NO: 53275 - DNA, 25 bp, SARS Virus
tgcccaaacgccgcattcacgtcgg

SEQ ID NO: 53276 - DNA, 25 bp, SARS Virus
gcccaaacgccagattcacgtcggg

SEQ ID NO: 53277 - DNA, 25 bp, SARS Virus
cccaaacgccacgttcacgtcgggc

SEQ ID NO: 53278 - DNA, 25 bp, SARS Virus
ccaaacgccacagtcacgtcgggca

SEQ ID NO: 53279 - DNA, 25 bp, SARS Virus
caaacgccacatgcacgtcgggcag

SEQ ID NO: 53280 - DNA, 25 bp, SARS Virus
aaacgccacattgacgtcgggcaga

SEQ ID NO: 53281 - DNA, 25 bp, SARS Virus
aacgccacattcgcgtcgggcagaa

SEQ ID NO: 53282 - DNA, 25 bp, SARS Virus
acgccacattcaggtcgggcagaat

SEQ ID NO: 53283 - DNA, 25 bp, SARS Virus
cgccacattcacgtcgggcagaatg

SEQ ID NO: 53284 - DNA, 25 bp, SARS Virus
gccacattcacggcgggcagaatgt

SEQ ID NO: 53285 - DNA, 25 bp, SARS Virus
ccacattcacgtggggcagaatgtg

SEQ ID NO: 53286 - DNA, 25 bp, SARS Virus
cacattcacgtcgggcagaatgtgg

SEQ ID NO: 53287 - DNA, 25 bp, SARS Virus
acattcacgtcgggcagaatgtggc

SEQ ID NO: 53288 - DNA, 25 bp, SARS Virus
cattcacgtcgggcagaatgtggca

SEQ ID NO: 53289 - DNA, 25 bp, SARS Virus
attcacgtcggggagaatgtggcac

SEQ ID NO: 53290 - DNA, 25 bp, SARS Virus
ttcacgtcgggcggaatgtggcacg

SEQ ID NO: 53291 - DNA, 25 bp, SARS Virus
tcacgtcgggcagaatgtggcacgc

SEQ ID NO: 53292 - DNA, 25 bp, SARS Virus
cacgtcgggcaggatgtggcacgcc

SEQ ID NO: 53293 - DNA, 25 bp, SARS Virus
acgtcgggcagagtgtggcacgccg

SEQ ID NO: 53294 - DNA, 25 bp, SARS Virus
cgtcgggcagaaggtggcacgccgt

SEQ ID NO: 53295 - DNA, 25 bp, SARS Virus
gtcgggcagaatgtggcacgccgtg

SEQ ID NO: 53296 - DNA, 25 bp, SARS Virus
tcgggcagaatggggcacgccgtgt

SEQ ID NO: 53297 - DNA, 25 bp, SARS Virus
cgggcagaatgtggcacgccgtgtc

SEQ ID NO: 53298 - DNA, 25 bp, SARS Virus
gggcagaatgtggcacgccgtgtcc

SEQ ID NO: 53299 - DNA, 25 bp, SARS Virus
ggcagaatgtgggacgccgtgtccg

SEQ ID NO: 53300 - DNA, 25 bp, SARS Virus
gcagaatgtggcgcgccgtgtccgt

SEQ ID NO: 53301 - DNA, 25 bp, SARS Virus
cagaatgtggcaggccgtgtccgtg

SEQ ID NO: 53302 - DNA, 25 bp, SARS Virus
agaatgtggcacgccgtgtccgtga

SEQ ID NO: 53303 - DNA, 25 bp, SARS Virus
gaatgtggcacggcgtgtccgtgat

SEQ ID NO: 53304 - DNA, 25 bp, SARS Virus
aatgtggcacgcggtgtccgtgatc

SEQ ID NO: 53305 - DNA, 25 bp, SARS Virus
atgtggcacgccgtgtccgtgatca

SEQ ID NO: 53306 - DNA, 25 bp, SARS Virus
tgtggcacgccgggtccgtgatcat

SEQ ID NO: 53307 - DNA, 25 bp, SARS Virus
gtggcacgccgtgtccgtgatcatg

SEQ ID NO: 53308 - DNA, 25 bp, SARS Virus
tggcacgccgtggccgtgatcatga

SEQ ID NO: 53309 - DNA, 25 bp, SARS Virus
ggcacgccgtgtgcgtgatcatgac

SEQ ID NO: 53310 - DNA, 25 bp, SARS Virus
gcacgccgtgtcggtgatcatgact

SEQ ID NO: 53311 - DNA, 25 bp, SARS Virus
cacgccgtgtccgtgatcatgacta

SEQ ID NO: 53312 - DNA, 25 bp, SARS Virus
acgccgtgtccgggatcatgactac

SEQ ID NO: 53313 - DNA, 25 bp, SARS Virus
cgccgtgtccgtgatcatgactaca

SEQ ID NO: 53314 - DNA, 25 bp, SARS Virus
gccgtgtccgtggtcatgactacag

SEQ ID NO: 53315 - DNA, 25 bp, SARS Virus
ccgtgtccgtgagcatgactacagc

SEQ ID NO: 53316 - DNA, 25 bp, SARS Virus
cgtgtccgtgatgatgactacagca

SEQ ID NO: 53317 - DNA, 25 bp, SARS Virus
gtgtccgtgatcgtgactacagcag

SEQ ID NO: 53318 - DNA, 25 bp, SARS Virus
tgtccgtgatcaggactacagcaga

SEQ ID NO: 53319 - DNA, 25 bp, SARS Virus
gtccgtgatcatgactacagcagat

SEQ ID NO: 53320 - DNA, 25 bp, SARS Virus
tccgtgatcatggctacagcagatg

SEQ ID NO: 53321 - DNA, 25 bp, SARS Virus
cgacctttacgatgtcttcatggac

SEQ ID NO: 53322 - DNA, 25 bp, SARS Virus
gacctttacgatttcttcatggacg

SEQ ID NO: 53323 - DNA, 25 bp, SARS Virus
acctttacgatgtcttcatggacgg

SEQ ID NO: 53324 - DNA, 25 bp, SARS Virus
cctttacgatgttttcatggacggt

SEQ ID NO: 53325 - DNA, 25 bp, SARS Virus
ctttacgatgtcttcatggacggtt

SEQ ID NO: 53326 - DNA, 25 bp, SARS Virus
tttacgatgtcttcatggacggtta

SEQ ID NO: 53327 - DNA, 25 bp, SARS Virus
ttacgatgtctttatggacggttaa

SEQ ID NO: 53328 - DNA, 25 bp, SARS Virus
tacgatgtcttcttggacggttaag

SEQ ID NO: 53329 - DNA, 25 bp, SARS Virus
acgatgtcttcatggacggttaagt

SEQ ID NO: 53330 - DNA, 25 bp, SARS Virus
cgatgtcttcattgacggttaagtt

SEQ ID NO: 53331 - DNA, 25 bp, SARS Virus
gatgtcttcatgtacggttaagttg

SEQ ID NO: 53332 - DNA, 25 bp, SARS Virus
atgtcttcatggtcggttaagttga

SEQ ID NO: 53333 - DNA, 25 bp, SARS Virus
tgtcttcatggatggttaagttgac

SEQ ID NO: 53334 - DNA, 25 bp, SARS Virus
gtcttcatggactgttaagttgaca

SEQ ID NO: 53335 - DNA, 25 bp, SARS Virus
tcttcatggacgtttaagttgacac

SEQ ID NO: 53336 - DNA, 25 bp, SARS Virus
cttcatggacggttaagttgacacg

SEQ ID NO: 53337 - DNA, 25 bp, SARS Virus
ttcatggacggttaagttgacacga

SEQ ID NO: 53338 - DNA, 25 bp, SARS Virus
tcatggacggtttagttgacacgaa

SEQ ID NO: 53339 - DNA, 25 bp, SARS Virus
catggacggttatgttgacacgaaa

SEQ ID NO: 53340 - DNA, 25 bp, SARS Virus
atggacggttaatttgacacgaaag

SEQ ID NO: 53341 - DNA, 25 bp, SARS Virus
tggacggttaagttgacacgaaagg

SEQ ID NO: 53342 - DNA, 25 bp, SARS Virus
ggacggttaagttgacacgaaagga

SEQ ID NO: 53343 - DNA, 25 bp, SARS Virus
gacggttaagtttacacgaaaggaa

SEQ ID NO: 53344 - DNA, 25 bp, SARS Virus
acggttaagttgtcacgaaaggaag

SEQ ID NO: 53345 - DNA, 25 bp, SARS Virus
cggttaagttgatacgaaaggaaga

SEQ ID NO: 53346 - DNA, 25 bp, SARS Virus
ggttaagttgactcgaaaggaagac

SEQ ID NO: 53347 - DNA, 25 bp, SARS Virus
gttaagttgacatgaaaggaagaca

SEQ ID NO: 53348 - DNA, 25 bp, SARS Virus
ttaagttgacactaaaggaagacac

SEQ ID NO: 53349 - DNA, 25 bp, SARS Virus
taagttgacacgtaaggaagacacg

SEQ ID NO: 53350 - DNA, 25 bp, SARS Virus
aagttgacacgataggaagacacga

SEQ ID NO: 53351 - DNA, 25 bp, SARS Virus
agttgacacgaatggaagacacgaa

SEQ ID NO: 53352 - DNA, 25 bp, SARS Virus
gttgacacgaaatgaagacacgaaa

SEQ ID NO: 53353 - DNA, 25 bp, SARS Virus
ttgacacgaaagtaagacacgaaaa

SEQ ID NO: 53354 - DNA, 25 bp, SARS Virus
tgacacgaaaggtagacacgaaaac

SEQ ID NO: 53355 - DNA, 25 bp, SARS Virus
gacacgaaaggatgacacgaaaacg

SEQ ID NO: 53356 - DNA, 25 bp, SARS Virus
acacgaaaggaatacacgaaaacgt

SEQ ID NO: 53357 - DNA, 25 bp, SARS Virus
cacgaaaggaagtcacgaaaacgtc

SEQ ID NO: 53358 - DNA, 25 bp, SARS Virus
acgaaaggaagatacgaaaacgtca

SEQ ID NO: 53359 - DNA, 25 bp, SARS Virus
cgaaaggaagactcgaaaacgtcat

SEQ ID NO: 53360 - DNA, 25 bp, SARS Virus
gaaaggaagacatgaaaacgtcatc

SEQ ID NO: 53361 - DNA, 25 bp, SARS Virus
aaaggaagacactaaaacgtcatct

SEQ ID NO: 53362 - DNA, 25 bp, SARS Virus
aaggaagacacgtaaacgtcatctg

SEQ ID NO: 53363 - DNA, 25 bp, SARS Virus
aggaagacacgataacgtcatctgg

SEQ ID NO: 53364 - DNA, 25 bp, SARS Virus
ggaagacacgaatacgtcatctggg

SEQ ID NO: 53365 - DNA, 25 bp, SARS Virus
gaagacacgaaatcgtcatctggga

SEQ ID NO: 53366 - DNA, 25 bp, SARS Virus
aagacacgaaaatgtcatctgggac

SEQ ID NO: 53367 - DNA, 25 bp, SARS Virus
agacacgaaaacttcatctgggacg

SEQ ID NO: 53368 - DNA, 25 bp, SARS Virus
gacacgaaaacgtcatctgggacga

SEQ ID NO: 53369 - DNA, 25 bp, SARS Virus
acacgaaaacgttatctgggacgat

SEQ ID NO: 53370 - DNA, 25 bp, SARS Virus
cacgaaaacgtcttctgggacgatt

SEQ ID NO: 53371 - DNA, 25 bp, SARS Virus
acgaaaacgtcatctgggacgattt

SEQ ID NO: 53372 - DNA, 25 bp, SARS Virus
cgaaaacgtcatttgggacgatttc

SEQ ID NO: 53373 - DNA, 25 bp, SARS Virus
gaaaacgtcatctgggacgatttcg

SEQ ID NO: 53374 - DNA, 25 bp, SARS Virus
aaaacgtcatcttggacgatttcgt

SEQ ID NO: 53375 - DNA, 25 bp, SARS Virus
aaacgtcatctgtgacgatttcgta

SEQ ID NO: 53376 - DNA, 25 bp, SARS Virus
aacgtcatctggtacgatttcgtat

SEQ ID NO: 53377 - DNA, 25 bp, SARS Virus
acgtcatctgggtcgatttcgtata

SEQ ID NO: 53378 - DNA, 25 bp, SARS Virus
cgtcatctgggatgatttcgtatat

SEQ ID NO: 53379 - DNA, 25 bp, SARS Virus
gtcatctgggactatttcgtatatt

SEQ ID NO: 53380 - DNA, 25 bp, SARS Virus
tcatctgggacgttttcgtatattc

SEQ ID NO: 53381 - DNA, 25 bp, SARS Virus
catctgggacgatttcgtatattcc

SEQ ID NO: 53382 - DNA, 25 bp, SARS Virus
atctgggacgatttcgtatattcct

SEQ ID NO: 53383 - DNA, 25 bp, SARS Virus
tctgggacgatttcgtatattccta

SEQ ID NO: 53384 - DNA, 25 bp, SARS Virus
ctgggacgattttgtatattcctaa

SEQ ID NO: 53385 - DNA, 25 bp, SARS Virus
tgggacgatttcttatattcctaat

SEQ ID NO: 53386 - DNA, 25 bp, SARS Virus
gggacgatttcgtatattcctaatg

SEQ ID NO: 53387 - DNA, 25 bp, SARS Virus
ggacgatttcgtttattcctaatgg

SEQ ID NO: 53388 - DNA, 25 bp, SARS Virus
gacgatttcgtatattcctaatgga

SEQ ID NO: 53389 - DNA, 25 bp, SARS Virus
acgatttcgtattttcctaatggat

SEQ ID NO: 53390 - DNA, 25 bp, SARS Virus
cgatttcgtatattcctaatggatc

SEQ ID NO: 53391 - DNA, 25 bp, SARS Virus
gatttcgtatattcctaatggatcg

SEQ ID NO: 53392 - DNA, 25 bp, SARS Virus
atttcgtatatttctaatggatcgt

SEQ ID NO: 53393 - DNA, 25 bp, SARS Virus
tttcgtatattcttaatggatcgtt

SEQ ID NO: 53394 - DNA, 25 bp, SARS Virus
ttcgtatattcctaatggatcgttc

SEQ ID NO: 53395 - DNA, 25 bp, SARS Virus
tcgtatattccttatggatcgttca

SEQ ID NO: 53396 - DNA, 25 bp, SARS Virus
cgtatattcctattggatcgttcac

SEQ ID NO: 53397 - DNA, 25 bp, SARS Virus
gtatattcctaatggatcgttcacc

SEQ ID NO: 53398 - DNA, 25 bp, SARS Virus
tatattcctaattgatcgttcacct

SEQ ID NO: 53399 - DNA, 25 bp, SARS Virus
atattcctaatgtatcgttcacctc

SEQ ID NO: 53400 - DNA, 25 bp, SARS Virus
tattcctaatggttcgttcacctcc

SEQ ID NO: 53401 - DNA, 25 bp, SARS Virus
attcctaatggatcgttcacctcct

SEQ ID NO: 53402 - DNA, 25 bp, SARS Virus
ttcctaatggattgttcacctcctg

SEQ ID NO: 53403 - DNA, 25 bp, SARS Virus
tcctaatggatctttcacctcctgt

SEQ ID NO: 53404 - DNA, 25 bp, SARS Virus
cctaatggatcgttcacctcctgtt

SEQ ID NO: 53405 - DNA, 25 bp, SARS Virus
ctaatggatcgttcacctcctgttg

SEQ ID NO: 53406 - DNA, 25 bp, SARS Virus
taatggatcgtttacctcctgttgg

SEQ ID NO: 53407 - DNA, 25 bp, SARS Virus
aatggatcgttctcctcctgttggt

SEQ ID NO: 53408 - DNA, 25 bp, SARS Virus
atggatcgttcatctcctgttggtt

SEQ ID NO: 53409 - DNA, 25 bp, SARS Virus
tggatcgttcacttcctgttggtta

SEQ ID NO: 53410 - DNA, 25 bp, SARS Virus
ggatcgttcacctcctgttggttag

SEQ ID NO: 53411 - DNA, 25 bp, SARS Virus
gatcgttcaccttctgttggttagt

SEQ ID NO: 53412 - DNA, 25 bp, SARS Virus
atcgttcacctcttgttggttagtg

SEQ ID NO: 53413 - DNA, 25 bp, SARS Virus
tcgttcacctcctgttggttagtgg

SEQ ID NO: 53414 - DNA, 25 bp, SARS Virus
cgttcacctccttttggttagtggt

SEQ ID NO: 53415 - DNA, 25 bp, SARS Virus
gttcacctcctgttggttagtggtt

SEQ ID NO: 53416 - DNA, 25 bp, SARS Virus
ttcacctcctgttggttagtggttg

SEQ ID NO: 53417 - DNA, 25 bp, SARS Virus
tcacctcctgtttgttagtggttga

SEQ ID NO: 53418 - DNA, 25 bp, SARS Virus
cacctcctgttgtttagtggttgac

SEQ ID NO: 53419 - DNA, 25 bp, SARS Virus
acctcctgttggttagtggttgaca

SEQ ID NO: 53420 - DNA, 25 bp, SARS Virus
cctcctgttggttagtggttgacac

SEQ ID NO: 53421 - DNA, 25 bp, SARS Virus
ctcctgttggtttgtggttgacaca

SEQ ID NO: 53422 - DNA, 25 bp, SARS Virus
tcctgttggttattggttgacacac

SEQ ID NO: 53423 - DNA, 25 bp, SARS Virus
cctgttggttagtggttgacacact

SEQ ID NO: 53424 - DNA, 25 bp, SARS Virus
ctgttggttagttgttgacacactt

SEQ ID NO: 53425 - DNA, 25 bp, SARS Virus
tgttggttagtgtttgacacacttc

SEQ ID NO: 53426 - DNA, 25 bp, SARS Virus
gttggttagtggttgacacacttct

SEQ ID NO: 53427 - DNA, 25 bp, SARS Virus
ttggttagtggttgacacacttcta

SEQ ID NO: 53428 - DNA, 25 bp, SARS Virus
tggttagtggtttacacacttctac

SEQ ID NO: 53429 - DNA, 25 bp, SARS Virus
ggttagtggttgtcacacttctaca

SEQ ID NO: 53430 - DNA, 25 bp, SARS Virus
gttagtggttgatacacttctacaa

SEQ ID NO: 53431 - DNA, 25 bp, SARS Virus
ttagtggttgactcacttctacaac

SEQ ID NO: 53432 - DNA, 25 bp, SARS Virus
tagtggttgacatacttctacaaca

SEQ ID NO: 53433 - DNA, 25 bp, SARS Virus
agtggttgacactcttctacaacac

SEQ ID NO: 53434 - DNA, 25 bp, SARS Virus
gtggttgacacatttctacaacaca

SEQ ID NO: 53435 - DNA, 25 bp, SARS Virus
tggttgacacacttctacaacacat

SEQ ID NO: 53436 - DNA, 25 bp, SARS Virus
ggttgacacacttctacaacacatg

SEQ ID NO: 53437 - DNA, 25 bp, SARS Virus
gttgacacacttttacaacacatgt

SEQ ID NO: 53438 - DNA, 25 bp, SARS Virus
ttgacacacttctacaacacatgtg

SEQ ID NO: 53439 - DNA, 25 bp, SARS Virus
tgacacacttcttcaacacatgtgt

SEQ ID NO: 53440 - DNA, 25 bp, SARS Virus
gacacacttctataacacatgtgtg

SEQ ID NO: 53441 - DNA, 25 bp, SARS Virus
acacacttctactacacatgtgtgt

SEQ ID NO: 53442 - DNA, 25 bp, SARS Virus
cacacttctacatcacatgtgtgtg

SEQ ID NO: 53443 - DNA, 25 bp, SARS Virus
acacttctacaatacatgtgtgtga

SEQ ID NO: 53444 - DNA, 25 bp, SARS Virus
cacttctacaactcatgtgtgtgac

SEQ ID NO: 53445 - DNA, 25 bp, SARS Virus
acttctacaacatatgtgtgtgacc

SEQ ID NO: 53446 - DNA, 25 bp, SARS Virus
cttctacaacacttgtgtgtgacca

SEQ ID NO: 53447 - DNA, 25 bp, SARS Virus
ttctacaacacatgtgtgtgaccat

SEQ ID NO: 53448 - DNA, 25 bp, SARS Virus
tctacaacacatttgtgtgaccatg

SEQ ID NO: 53449 - DNA, 25 bp, SARS Virus
ctacaacacatgtgtgtgaccatgt

SEQ ID NO: 53450 - DNA, 25 bp, SARS Virus
tacaacacatgtttgtgaccatgtc

SEQ ID NO: 53451 - DNA, 25 bp, SARS Virus
acaacacatgtgtgtgaccatgtcc

SEQ ID NO: 53452 - DNA, 25 bp, SARS Virus
caacacatgtgtttgaccatgtcct

SEQ ID NO: 53453 - DNA, 25 bp, SARS Virus
aacacatgtgtgtgaccatgtcctg

SEQ ID NO: 53454 - DNA, 25 bp, SARS Virus
acacatgtgtgttaccatgtcctgt

SEQ ID NO: 53455 - DNA, 25 bp, SARS Virus
cacatgtgtgtgtccatgtcctgtc

SEQ ID NO: 53456 - DNA, 25 bp, SARS Virus
acatgtgtgtgatcatgtcctgtcc

SEQ ID NO: 53457 - DNA, 25 bp, SARS Virus
catgtgtgtgactatgtcctgtccg

SEQ ID NO: 53458 - DNA, 25 bp, SARS Virus
atgtgtgtgaccttgtcctgtccgt

SEQ ID NO: 53459 - DNA, 25 bp, SARS Virus
tgtgtgtgaccatgtcctgtccgtt

SEQ ID NO: 53460 - DNA, 25 bp, SARS Virus
gtgtgtgaccatttcctgtccgtta

SEQ ID NO: 53461 - DNA, 25 bp, SARS Virus
tgtgtgaccatgtcctgtccgttaa

SEQ ID NO: 53462 - DNA, 25 bp, SARS Virus
gtgtgaccatgttctgtccgttaat

SEQ ID NO: 53463 - DNA, 25 bp, SARS Virus
tgtgaccatgtcttgtccgttaatg

SEQ ID NO: 53464 - DNA, 25 bp, SARS Virus
gtgaccatgtcctgtccgttaatga

SEQ ID NO: 53465 - DNA, 25 bp, SARS Virus
tgaccatgtcctttccgttaatgac

SEQ ID NO: 53466 - DNA, 25 bp, SARS Virus
gaccatgtcctgtccgttaatgaca

SEQ ID NO: 53467 - DNA, 25 bp, SARS Virus
accatgtcctgttcgttaatgacat

SEQ ID NO: 53468 - DNA, 25 bp, SARS Virus
ccatgtcctgtctgttaatgacatt

SEQ ID NO: 53469 - DNA, 25 bp, SARS Virus
catgtcctgtcctttaatgacattg

SEQ ID NO: 53470 - DNA, 25 bp, SARS Virus
atgtcctgtccgttaatgacattgt

SEQ ID NO: 53471 - DNA, 25 bp, SARS Virus
tgtcctgtccgttaatgacattgtg

SEQ ID NO: 53472 - DNA, 25 bp, SARS Virus
gtcctgtccgtttatgacattgtgg

SEQ ID NO: 53473 - DNA, 25 bp, SARS Virus
tcctgtccgttattgacattgtggt

SEQ ID NO: 53474 - DNA, 25 bp, SARS Virus
cctgtccgttaatgacattgtggtc

SEQ ID NO: 53475 - DNA, 25 bp, SARS Virus
ctgtccgttaattacattgtggtct

SEQ ID NO: 53476 - DNA, 25 bp, SARS Virus
tgtccgttaatgtcattgtggtctt

SEQ ID NO: 53477 - DNA, 25 bp, SARS Virus
gtccgttaatgatattgtggtcttc

SEQ ID NO: 53478 - DNA, 25 bp, SARS Virus
tccgttaatgactttgtggtcttcg

SEQ ID NO: 53479 - DNA, 25 bp, SARS Virus
ccgttaatgacattgtggtcttcga

SEQ ID NO: 53480 - DNA, 25 bp, SARS Virus
cgttaatgacattgtggtcttcgat

SEQ ID NO: 53481 - DNA, 25 bp, SARS Virus
gttaatgacattttggtcttcgatt

SEQ ID NO: 53482 - DNA, 25 bp, SARS Virus
ttaatgacattgtggtcttcgattg

SEQ ID NO: 53483 - DNA, 25 bp, SARS Virus
taatgacattgttgtcttcgattgt

SEQ ID NO: 53484 - DNA, 25 bp, SARS Virus
aatgacattgtgttcttcgattgta

SEQ ID NO: 53485 - DNA, 25 bp, SARS Virus
atgacattgtggtcttcgattgtac

SEQ ID NO: 53486 - DNA, 25 bp, SARS Virus
tgacattgtggttttcgattgtacc

SEQ ID NO: 53487 - DNA, 25 bp, SARS Virus
gacattgtggtcttcgattgtacct

SEQ ID NO: 53488 - DNA, 25 bp, SARS Virus
acattgtggtcttcgattgtacctg

SEQ ID NO: 53489 - DNA, 25 bp, SARS Virus
cattgtggtctttgattgtacctgg

SEQ ID NO: 53490 - DNA, 25 bp, SARS Virus
attgtggtcttctattgtacctggt

SEQ ID NO: 53491 - DNA, 25 bp, SARS Virus
ttgtggtcttcgtttgtacctggtt

SEQ ID NO: 53492 - DNA, 25 bp, SARS Virus
tgtggtcttcgattgtacctggttc

SEQ ID NO: 53493 - DNA, 25 bp, SARS Virus
gtggtcttcgattgtacctggttct

SEQ ID NO: 53494 - DNA, 25 bp, SARS Virus
tggtcttcgattttacctggttctc

SEQ ID NO: 53495 - DNA, 25 bp, SARS Virus
ggtcttcgattgtacctggttctca

SEQ ID NO: 53496 - DNA, 25 bp, SARS Virus
gtcttcgattgttcctggttctcag

SEQ ID NO: 53497 - DNA, 25 bp, SARS Virus
tcttcgattgtatctggttctcagg

SEQ ID NO: 53498 - DNA, 25 bp, SARS Virus
cttcgattgtacttggttctcagga

SEQ ID NO: 53499 - DNA, 25 bp, SARS Virus
ttcgattgtacctggttctcaggaa

SEQ ID NO: 53500 - DNA, 25 bp, SARS Virus
tcgattgtaccttgttctcaggaaa

SEQ ID NO: 53501 - DNA, 25 bp, SARS Virus
cgattgtacctgtttctcaggaaac

SEQ ID NO: 53502 - DNA, 25 bp, SARS Virus
gattgtacctggttctcaggaaacc

SEQ ID NO: 53503 - DNA, 25 bp, SARS Virus
attgtacctggttctcaggaaacca

SEQ ID NO: 53504 - DNA, 25 bp, SARS Virus
ttgtacctggttttcaggaaaccac

SEQ ID NO: 53505 - DNA, 25 bp, SARS Virus
tgtacctggttctcaggaaaccacc

SEQ ID NO: 53506 - DNA, 25 bp, SARS Virus
gtacctggttcttaggaaaccacca

SEQ ID NO: 53507 - DNA, 25 bp, SARS Virus
tacctggttctctggaaaccaccac

SEQ ID NO: 53508 - DNA, 25 bp, SARS Virus
acctggttctcatgaaaccaccacg

SEQ ID NO: 53509 - DNA, 25 bp, SARS Virus
cctggttctcagtaaaccaccacga

SEQ ID NO: 53510 - DNA, 25 bp, SARS Virus
ctggttctcaggtaaccaccacgaa

SEQ ID NO: 53511 - DNA, 25 bp, SARS Virus
tggttctcaggataccaccacgaag

SEQ ID NO: 53512 - DNA, 25 bp, SARS Virus
ggttctcaggaatccaccacgaagt

SEQ ID NO: 53513 - DNA, 25 bp, SARS Virus
gttctcaggaaatcaccacgaagta

SEQ ID NO: 53514 - DNA, 25 bp, SARS Virus
ttctcaggaaactaccacgaagtac

SEQ ID NO: 53515 - DNA, 25 bp, SARS Virus
tctcaggaaacctccacgaagtaca

SEQ ID NO: 53516 - DNA, 25 bp, SARS Virus
ctcaggaaaccatcacgaagtacaa

SEQ ID NO: 53517 - DNA, 25 bp, SARS Virus
tcaggaaaccactacgaagtacaac

SEQ ID NO: 53518 - DNA, 25 bp, SARS Virus
caggaaaccacctcgaagtacaaca

SEQ ID NO: 53519 - DNA, 25 bp, SARS Virus
aggaaaccaccatgaagtacaacag

SEQ ID NO: 53520 - DNA, 25 bp, SARS Virus
ggaaaccaccactaagtacaacaga

SEQ ID NO: 53521 - DNA, 25 bp, SARS Virus
gaaaccaccacgtagtacaacagac

SEQ ID NO: 53522 - DNA, 25 bp, SARS Virus
aaaccaccacgatgtacaacagaca

SEQ ID NO: 53523 - DNA, 25 bp, SARS Virus
aaccaccacgaattacaacagacat

SEQ ID NO: 53524 - DNA, 25 bp, SARS Virus
accaccacgaagtacaacagacata

SEQ ID NO: 53525 - DNA, 25 bp, SARS Virus
ccaccacgaagttcaacagacataa

SEQ ID NO: 53526 - DNA, 25 bp, SARS Virus
caccacgaagtataacagacataac

SEQ ID NO: 53527 - DNA, 25 bp, SARS Virus
accacgaagtactacagacataaca

SEQ ID NO: 53528 - DNA, 25 bp, SARS Virus
ccacgaagtacatcagacataacat

SEQ ID NO: 53529 - DNA, 25 bp, SARS Virus
cacgaagtacaatagacataacatc

SEQ ID NO: 53530 - DNA, 25 bp, SARS Virus
acgaagtacaactgacataacatct

SEQ ID NO: 53531 - DNA, 25 bp, SARS Virus
cgaagtacaacatacataacatcta

SEQ ID NO: 53532 - DNA, 25 bp, SARS Virus
gaagtacaacagtcataacatctac

SEQ ID NO: 53533 - DNA, 25 bp, SARS Virus
aagtacaacagatataacatctacg

SEQ ID NO: 53534 - DNA, 25 bp, SARS Virus
agtacaacagacttaacatctacgg

SEQ ID NO: 53535 - DNA, 25 bp, SARS Virus
gtacaacagacataacatctacggt

SEQ ID NO: 53536 - DNA, 25 bp, SARS Virus
tacaacagacattacatctacggtg

SEQ ID NO: 53537 - DNA, 25 bp, SARS Virus
acaacagacatatcatctacggtgt

SEQ ID NO: 53538 - DNA, 25 bp, SARS Virus
caacagacataatatctacggtgta

SEQ ID NO: 53539 - DNA, 25 bp, SARS Virus
aacagacataacttctacggtgtaa

SEQ ID NO: 53540 - DNA, 25 bp, SARS Virus
acagacataacatctacggtgtaac

SEQ ID NO: 53541 - DNA, 25 bp, SARS Virus
cagacataacatttacggtgtaact

SEQ ID NO: 53542 - DNA, 25 bp, SARS Virus
agacataacatctacggtgtaactg

SEQ ID NO: 53543 - DNA, 25 bp, SARS Virus
gacataacatcttcggtgtaactgg

SEQ ID NO: 53544 - DNA, 25 bp, SARS Virus
acataacatctatggtgtaactggt

SEQ ID NO: 53545 - DNA, 25 bp, SARS Virus
cataacatctactgtgtaactggta

SEQ ID NO: 53546 - DNA, 25 bp, SARS Virus
ataacatctacgttgtaactggtag

SEQ ID NO: 53547 - DNA, 25 bp, SARS Virus
taacatctacggtgtaactggtagg

SEQ ID NO: 53548 - DNA, 25 bp, SARS Virus
aacatctacggtttaactggtaggt

SEQ ID NO: 53549 - DNA, 25 bp, SARS Virus
acatctacggtgtaactggtaggtt

SEQ ID NO: 53550 - DNA, 25 bp, SARS Virus
catctacggtgttactggtaggttt

SEQ ID NO: 53551 - DNA, 25 bp, SARS Virus
atctacggtgtatctggtaggttta

SEQ ID NO: 53552 - DNA, 25 bp, SARS Virus
tctacggtgtaattggtaggtttag

SEQ ID NO: 53553 - DNA, 25 bp, SARS Virus
ctacggtgtaactggtaggtttagg

SEQ ID NO: 53554 - DNA, 25 bp, SARS Virus
tacggtgtaacttgtaggtttagga

SEQ ID NO: 53555 - DNA, 25 bp, SARS Virus
acggtgtaactgttaggtttaggat

SEQ ID NO: 53556 - DNA, 25 bp, SARS Virus
cggtgtaactggtaggtttaggatt

SEQ ID NO: 53557 - DNA, 25 bp, SARS Virus
ggtgtaactggttggtttaggattt

SEQ ID NO: 53558 - DNA, 25 bp, SARS Virus
gtgtaactggtatgtttaggatttc

SEQ ID NO: 53559 - DNA, 25 bp, SARS Virus
tgtaactggtagttttaggatttcc

SEQ ID NO: 53560 - DNA, 25 bp, SARS Virus
gtaactggtaggtttaggatttcct

SEQ ID NO: 53561 - DNA, 25 bp, SARS Virus
taactggtaggtttaggatttccta

SEQ ID NO: 53562 - DNA, 25 bp, SARS Virus
aactggtaggtttaggatttcctaa

SEQ ID NO: 53563 - DNA, 25 bp, SARS Virus
actggtaggttttggatttcctaag

SEQ ID NO: 53564 - DNA, 25 bp, SARS Virus
ctggtaggtttatgatttcctaaga

SEQ ID NO: 53565 - DNA, 25 bp, SARS Virus
tggtaggtttagtatttcctaagac

SEQ ID NO: 53566 - DNA, 25 bp, SARS Virus
ggtaggtttaggttttcctaagaca

SEQ ID NO: 53567 - DNA, 25 bp, SARS Virus
gtaggtttaggatttcctaagacac

SEQ ID NO: 53568 - DNA, 25 bp, SARS Virus
taggtttaggatttcctaagacact

SEQ ID NO: 53569 - DNA, 25 bp, SARS Virus
aggtttaggatttcctaagacactg

SEQ ID NO: 53570 - DNA, 25 bp, SARS Virus
ggtttaggattttctaagacactga

SEQ ID NO: 53571 - DNA, 25 bp, SARS Virus
gtttaggatttcttaagacactgaa

SEQ ID NO: 53572 - DNA, 25 bp, SARS Virus
tttaggatttcctaagacactgaac

SEQ ID NO: 53573 - DNA, 25 bp, SARS Virus
ttaggatttccttagacactgaact

SEQ ID NO: 53574 - DNA, 25 bp, SARS Virus
taggatttcctatgacactgaactt

SEQ ID NO: 53575 - DNA, 25 bp, SARS Virus
aggatttcctaatacactgaacttt

SEQ ID NO: 53576 - DNA, 25 bp, SARS Virus
ggatttcctaagtcactgaactttc

SEQ ID NO: 53577 - DNA, 25 bp, SARS Virus
gatttcctaagatactgaactttcc

SEQ ID NO: 53578 - DNA, 25 bp, SARS Virus
atttcctaagactctgaactttcca

SEQ ID NO: 53579 - DNA, 25 bp, SARS Virus
tttcctaagacattgaactttccat

SEQ ID NO: 53580 - DNA, 25 bp, SARS Virus
ttcctaagacactgaactttccatt

SEQ ID NO: 53581 - DNA, 25 bp, SARS Virus
tcctaagacacttaactttccattc

SEQ ID NO: 53582 - DNA, 25 bp, SARS Virus
cctaagacactgtactttccattca

SEQ ID NO: 53583 - DNA, 25 bp, SARS Virus
ctaagacactgatctttccattcat

SEQ ID NO: 53584 - DNA, 25 bp, SARS Virus
taagacactgaattttccattcatg

SEQ ID NO: 53585 - DNA, 25 bp, SARS Virus
aagacactgaactttccattcatgc

SEQ ID NO: 53586 - DNA, 25 bp, SARS Virus
agacactgaactttccattcatgca

SEQ ID NO: 53587 - DNA, 25 bp, SARS Virus
gacactgaactttccattcatgcag

SEQ ID NO: 53588 - DNA, 25 bp, SARS Virus
acactgaacttttcattcatgcagg

SEQ ID NO: 53589 - DNA, 25 bp, SARS Virus
cactgaactttctattcatgcaggt

SEQ ID NO: 53590 - DNA, 25 bp, SARS Virus
actgaactttcctttcatgcaggtt

SEQ ID NO: 53591 - DNA, 25 bp, SARS Virus
ctgaactttccattcatgcaggttt

SEQ ID NO: 53592 - DNA, 25 bp, SARS Virus
tgaactttccattcatgcaggttta

SEQ ID NO: 53593 - DNA, 25 bp, SARS Virus
gaactttccatttatgcaggtttat

SEQ ID NO: 53594 - DNA, 25 bp, SARS Virus
aactttccattcttgcaggtttatg

SEQ ID NO: 53595 - DNA, 25 bp, SARS Virus
actttccattcatgcaggtttatgg

SEQ ID NO: 53596 - DNA, 25 bp, SARS Virus
ctttccattcattcaggtttatgga

SEQ ID NO: 53597 - DNA, 25 bp, SARS Virus
tttccattcatgtaggtttatggat

SEQ ID NO: 53598 - DNA, 25 bp, SARS Virus
ttccattcatgctggtttatggatg

SEQ ID NO: 53599 - DNA, 25 bp, SARS Virus
tccattcatgcatgtttatggatgg

SEQ ID NO: 53600 - DNA, 25 bp, SARS Virus
ccattcatgcagttttatggatggt

SEQ ID NO: 53601 - DNA, 25 bp, SARS Virus
cattcatgcaggtttatggatggtg

SEQ ID NO: 53602 - DNA, 25 bp, SARS Virus
attcatgcaggtttatggatggtga

SEQ ID NO: 53603 - DNA, 25 bp, SARS Virus
ttcatgcaggtttatggatggtgaa

SEQ ID NO: 53604 - DNA, 25 bp, SARS Virus
tcatgcaggtttttggatggtgaac

SEQ ID NO: 53605 - DNA, 25 bp, SARS Virus
catgcaggtttatggatggtgaaca

SEQ ID NO: 53606 - DNA, 25 bp, SARS Virus
atgcaggtttattgatggtgaacac

SEQ ID NO: 53607 - DNA, 25 bp, SARS Virus
tgcaggtttatgtatggtgaacacg

SEQ ID NO: 53608 - DNA, 25 bp, SARS Virus
gcaggtttatggttggtgaacacga

SEQ ID NO: 53609 - DNA, 25 bp, SARS Virus
caggtttatggatggtgaacacgat

SEQ ID NO: 53610 - DNA, 25 bp, SARS Virus
aggtttatggattgtgaacacgatt

SEQ ID NO: 53611 - DNA, 25 bp, SARS Virus
ggtttatggatgttgaacacgatta

SEQ ID NO: 53612 - DNA, 25 bp, SARS Virus
gtttatggatggtgaacacgattac

SEQ ID NO: 53613 - DNA, 25 bp, SARS Virus
tttatggatggttaacacgattact

SEQ ID NO: 53614 - DNA, 25 bp, SARS Virus
ttatggatggtgtacacgattactg

SEQ ID NO: 53615 - DNA, 25 bp, SARS Virus
tatggatggtgatcacgattactgg

SEQ ID NO: 53616 - DNA, 25 bp, SARS Virus
atggatggtgaatacgattactggg

SEQ ID NO: 53617 - DNA, 25 bp, SARS Virus
tggatggtgaactcgattactgggt

SEQ ID NO: 53618 - DNA, 25 bp, SARS Virus
ggatggtgaacatgattactgggtc

SEQ ID NO: 53619 - DNA, 25 bp, SARS Virus
gatggtgaacactattactgggtca

SEQ ID NO: 53620 - DNA, 25 bp, SARS Virus
atggtgaacacgtttactgggtcac

SEQ ID NO: 53621 - DNA, 25 bp, SARS Virus
tggtgaacacgattactgggtcacc

SEQ ID NO: 53622 - DNA, 25 bp, SARS Virus
ggtgaacacgattactgggtcaccc

SEQ ID NO: 53623 - DNA, 25 bp, SARS Virus
gtgaacacgatttctgggtcaccca

SEQ ID NO: 53624 - DNA, 25 bp, SARS Virus
tgaacacgattattgggtcacccaa

SEQ ID NO: 53625 - DNA, 25 bp, SARS Virus
gaacacgattactgggtcacccaaa

SEQ ID NO: 53626 - DNA, 25 bp, SARS Virus
aacacgattacttggtcacccaaaa

SEQ ID NO: 53627 - DNA, 25 bp, SARS Virus
acacgattactgtgtcacccaaaat

SEQ ID NO: 53628 - DNA, 25 bp, SARS Virus
cacgattactggttcacccaaaatg

SEQ ID NO: 53629 - DNA, 25 bp, SARS Virus
acgattactgggtcacccaaaatgt

SEQ ID NO: 53630 - DNA, 25 bp, SARS Virus
cgattactgggttacccaaaatgtg

SEQ ID NO: 53631 - DNA, 25 bp, SARS Virus
gattactgggtctcccaaaatgtga

SEQ ID NO: 53632 - DNA, 25 bp, SARS Virus
attactgggtcatccaaaatgtgaa

SEQ ID NO: 53633 - DNA, 25 bp, SARS Virus
ttactgggtcactcaaaatgtgaat

SEQ ID NO: 53634 - DNA, 25 bp, SARS Virus
tactgggtcacctaaaatgtgaatc

SEQ ID NO: 53635 - DNA, 25 bp, SARS Virus
actgggtcaccctaaatgtgaatct

SEQ ID NO: 53636 - DNA, 25 bp, SARS Virus
ctgggtcacccataatgtgaatctt

SEQ ID NO: 53637 - DNA, 25 bp, SARS Virus
tgggtcacccaatatgtgaatcttt

SEQ ID NO: 53638 - DNA, 25 bp, SARS Virus
gggtcacccaaattgtgaatctttg

SEQ ID NO: 53639 - DNA, 25 bp, SARS Virus
ggtcacccaaaatgtgaatctttgt

SEQ ID NO: 53640 - DNA, 25 bp, SARS Virus
gtcacccaaaatttgaatctttgtg

SEQ ID NO: 53641 - DNA, 25 bp, SARS Virus
tcacccaaaatgtgaatctttgtgt

SEQ ID NO: 53642 - DNA, 25 bp, SARS Virus
cacccaaaatgttaatctttgtgtc

SEQ ID NO: 53643 - DNA, 25 bp, SARS Virus
acccaaaatgtgtatctttgtgtca

SEQ ID NO: 53644 - DNA, 25 bp, SARS Virus
cccaaaatgtgattctttgtgtcag

SEQ ID NO: 53645 - DNA, 25 bp, SARS Virus
ccaaaatgtgaatctttgtgtcaga

SEQ ID NO: 53646 - DNA, 25 bp, SARS Virus
caaaatgtgaatttttgtgtcagac

SEQ ID NO: 53647 - DNA, 25 bp, SARS Virus
aaaatgtgaatctttgtgtcagaca

SEQ ID NO: 53648 - DNA, 25 bp, SARS Virus
aaatgtgaatctttgtgtcagacat

SEQ ID NO: 53649 - DNA, 25 bp, SARS Virus
aatgtgaatctttgtgtcagacatg

SEQ ID NO: 53650 - DNA, 25 bp, SARS Virus
atgtgaatctttttgtcagacatgg

SEQ ID NO: 53651 - DNA, 25 bp, SARS Virus
tgtgaatctttgtgtcagacatggc

SEQ ID NO: 53652 - DNA, 25 bp, SARS Virus
gtgaatctttgtttcagacatggca

SEQ ID NO: 53653 - DNA, 25 bp, SARS Virus
tgaatctttgtgtcagacatggcag

SEQ ID NO: 53654 - DNA, 25 bp, SARS Virus
gaatctttgtgttagacatggcaga

SEQ ID NO: 53655 - DNA, 25 bp, SARS Virus
aatctttgtgtctgacatggcagac

SEQ ID NO: 53656 - DNA, 25 bp, SARS Virus
atctttgtgtcatacatggcagacg

SEQ ID NO: 53657 - DNA, 25 bp, SARS Virus
tctttgtgtcagtcatggcagacgc

SEQ ID NO: 53658 - DNA, 25 bp, SARS Virus
ctttgtgtcagatatggcagacgcc

SEQ ID NO: 53659 - DNA, 25 bp, SARS Virus
tttgtgtcagacttggcagacgcct

SEQ ID NO: 53660 - DNA, 25 bp, SARS Virus
ttgtgtcagacatggcagacgcctt

SEQ ID NO: 53661 - DNA, 25 bp, SARS Virus
tgtgtcagacattgcagacgcctta

SEQ ID NO: 53662 - DNA, 25 bp, SARS Virus
gtgtcagacatgtcagacgccttac

SEQ ID NO: 53663 - DNA, 25 bp, SARS Virus
tgtcagacatggtagacgccttaca

SEQ ID NO: 53664 - DNA, 25 bp, SARS Virus
gtcagacatggctgacgccttacac

SEQ ID NO: 53665 - DNA, 25 bp, SARS Virus
tcagacatggcatacgccttacacc

SEQ ID NO: 53666 - DNA, 25 bp, SARS Virus
cagacatggcagtcgccttacacct

SEQ ID NO: 53667 - DNA, 25 bp, SARS Virus
agacatggcagatgccttacacctt

SEQ ID NO: 53668 - DNA, 25 bp, SARS Virus
gacatggcagactccttacaccttt

SEQ ID NO: 53669 - DNA, 25 bp, SARS Virus
acatggcagacgtcttacacctttc

SEQ ID NO: 53670 - DNA, 25 bp, SARS Virus
catggcagacgctttacacctttcc

SEQ ID NO: 53671 - DNA, 25 bp, SARS Virus
atggcagacgccttacacctttcca

SEQ ID NO: 53672 - DNA, 25 bp, SARS Virus
tggcagacgccttacacctttccaa

SEQ ID NO: 53673 - DNA, 25 bp, SARS Virus
ggcagacgcctttcacctttccaat

SEQ ID NO: 53674 - DNA, 25 bp, SARS Virus
gcagacgccttatacctttccaata

SEQ ID NO: 53675 - DNA, 25 bp, SARS Virus
cagacgccttactcctttccaatac

SEQ ID NO: 53676 - DNA, 25 bp, SARS Virus
agacgccttacatctttccaatacc

SEQ ID NO: 53677 - DNA, 25 bp, SARS Virus
gacgccttacacttttccaataccg

SEQ ID NO: 53678 - DNA, 25 bp, SARS Virus
acgccttacacctttccaataccga

SEQ ID NO: 53679 - DNA, 25 bp, SARS Virus
cgccttacacctttccaataccgac

SEQ ID NO: 53680 - DNA, 25 bp, SARS Virus
gccttacacctttccaataccgaca

SEQ ID NO: 53681 - DNA, 25 bp, SARS Virus
ccttacaccttttcaataccgacat

SEQ ID NO: 53682 - DNA, 25 bp, SARS Virus
cttacacctttctaataccgacatc

SEQ ID NO: 53683 - DNA, 25 bp, SARS Virus
ttacacctttcctataccgacatca

SEQ ID NO: 53684 - DNA, 25 bp, SARS Virus
tacacctttccattaccgacatcaa

SEQ ID NO: 53685 - DNA, 25 bp, SARS Virus
acacctttccaataccgacatcaac

SEQ ID NO: 53686 - DNA, 25 bp, SARS Virus
cacctttccaattccgacatcaaca

SEQ ID NO: 53687 - DNA, 25 bp, SARS Virus
acctttccaatatcgacatcaacac

SEQ ID NO: 53688 - DNA, 25 bp, SARS Virus
cctttccaatactgacatcaacact

SEQ ID NO: 53689 - DNA, 25 bp, SARS Virus
ctttccaatacctacatcaacactg

SEQ ID NO: 53690 - DNA, 25 bp, SARS Virus
tttccaataccgtcatcaacactgg

SEQ ID NO: 53691 - DNA, 25 bp, SARS Virus
ttccaataccgatatcaacactggt

SEQ ID NO: 53692 - DNA, 25 bp, SARS Virus
tccaataccgacttcaacactggtt

SEQ ID NO: 53693 - DNA, 25 bp, SARS Virus
ccaataccgacatcaacactggttg

SEQ ID NO: 53694 - DNA, 25 bp, SARS Virus
caataccgacattaacactggttga

SEQ ID NO: 53695 - DNA, 25 bp, SARS Virus
aataccgacatctacactggttgag

SEQ ID NO: 53696 - DNA, 25 bp, SARS Virus
ataccgacatcatcactggttgagg

SEQ ID NO: 53697 - DNA, 25 bp, SARS Virus
taccgacatcaatactggttgaggc

SEQ ID NO: 53698 - DNA, 25 bp, SARS Virus
accgacatcaactctggttgaggcg

SEQ ID NO: 53699 - DNA, 25 bp, SARS Virus
ccgacatcaacattggttgaggcgc

SEQ ID NO: 53700 - DNA, 25 bp, SARS Virus
cgacatcaacactggttgaggcgct

SEQ ID NO: 53701 - DNA, 25 bp, SARS Virus
gacatcaacacttgttgaggcgctt

SEQ ID NO: 53702 - DNA, 25 bp, SARS Virus
acatcaacactgtttgaggcgcttg

SEQ ID NO: 53703 - DNA, 25 bp, SARS Virus
catcaacactggttgaggcgcttgg

SEQ ID NO: 53704 - DNA, 25 bp, SARS Virus
atcaacactggttgaggcgcttggg

SEQ ID NO: 53705 - DNA, 25 bp, SARS Virus
tcaacactggtttaggcgcttggga

SEQ ID NO: 53706 - DNA, 25 bp, SARS Virus
caacactggttgtggcgcttgggaa

SEQ ID NO: 53707 - DNA, 25 bp, SARS Virus
aacactggttgatgcgcttgggaac

SEQ ID NO: 53708 - DNA, 25 bp, SARS Virus
acactggttgagtcgcttgggaact

SEQ ID NO: 53709 - DNA, 25 bp, SARS Virus
cactggttgaggtgcttgggaacta

SEQ ID NO: 53710 - DNA, 25 bp, SARS Virus
actggttgaggctcttgggaactac

SEQ ID NO: 53711 - DNA, 25 bp, SARS Virus
ctggttgaggcgtttgggaactacg

SEQ ID NO: 53712 - DNA, 25 bp, SARS Virus
tggttgaggcgcttgggaactacgt

SEQ ID NO: 53713 - DNA, 25 bp, SARS Virus
ggttgaggcgcttgggaactacgtc

SEQ ID NO: 53714 - DNA, 25 bp, SARS Virus
gttgaggcgctttggaactacgtca

SEQ ID NO: 53715 - DNA, 25 bp, SARS Virus
ttgaggcgcttgtgaactacgtcag

SEQ ID NO: 53716 - DNA, 25 bp, SARS Virus
tgaggcgcttggtaactacgtcaga

SEQ ID NO: 53717 - DNA, 25 bp, SARS Virus
gaggcgcttgggtactacgtcagac

SEQ ID NO: 53718 - DNA, 25 bp, SARS Virus
aggcgcttgggatctacgtcagacg

SEQ ID NO: 53719 - DNA, 25 bp, SARS Virus
ggcgcttgggaattacgtcagacgc

SEQ ID NO: 53720 - DNA, 25 bp, SARS Virus
gcgcttgggaactacgtcagacgcc

SEQ ID NO: 53721 - DNA, 25 bp, SARS Virus
cgcttgggaacttcgtcagacgcct

SEQ ID NO: 53722 - DNA, 25 bp, SARS Virus
gcttgggaactatgtcagacgccta

SEQ ID NO: 53723 - DNA, 25 bp, SARS Virus
cttgggaactacttcagacgcctac

SEQ ID NO: 53724 - DNA, 25 bp, SARS Virus
ttgggaactacgtcagacgcctacg

SEQ ID NO: 53725 - DNA, 25 bp, SARS Virus
tgggaactacgttagacgcctacgt

SEQ ID NO: 53726 - DNA, 25 bp, SARS Virus
gggaactacgtctgacgcctacgta

SEQ ID NO: 53727 - DNA, 25 bp, SARS Virus
ggaactacgtcatacgcctacgtag

SEQ ID NO: 53728 - DNA, 25 bp, SARS Virus
gaactacgtcagtcgcctacgtagt

SEQ ID NO: 53729 - DNA, 25 bp, SARS Virus
aactacgtcagatgcctacgtagtt

SEQ ID NO: 53730 - DNA, 25 bp, SARS Virus
actacgtcagactcctacgtagttg

SEQ ID NO: 53731 - DNA, 25 bp, SARS Virus
ctacgtcagacgtctacgtagttgc

SEQ ID NO: 53732 - DNA, 25 bp, SARS Virus
tacgtcagacgcttacgtagttgca

SEQ ID NO: 53733 - DNA, 25 bp, SARS Virus
acgtcagacgcctacgtagttgcaa

SEQ ID NO: 53734 - DNA, 25 bp, SARS Virus
cgtcagacgccttcgtagttgcaaa

SEQ ID NO: 53735 - DNA, 25 bp, SARS Virus
gtcagacgcctatgtagttgcaaaa

SEQ ID NO: 53736 - DNA, 25 bp, SARS Virus
tcagacgcctacttagttgcaaaaa

SEQ ID NO: 53737 - DNA, 25 bp, SARS Virus
cagacgcctacgtagttgcaaaaat

SEQ ID NO: 53738 - DNA, 25 bp, SARS Virus
agacgcctacgttgttgcaaaaatt

SEQ ID NO: 53739 - DNA, 25 bp, SARS Virus
gacgcctacgtatttgcaaaaattt

SEQ ID NO: 53740 - DNA, 25 bp, SARS Virus
acgcctacgtagttgcaaaaatttg

SEQ ID NO: 53741 - DNA, 25 bp, SARS Virus
cgcctacgtagttgcaaaaatttgc

SEQ ID NO: 53742 - DNA, 25 bp, SARS Virus
gcctacgtagtttcaaaaatttgcc

SEQ ID NO: 53743 - DNA, 25 bp, SARS Virus
cctacgtagttgtaaaaatttgccc

SEQ ID NO: 53744 - DNA, 25 bp, SARS Virus
ctacgtagttgctaaaatttgccca

SEQ ID NO: 53745 - DNA, 25 bp, SARS Virus
tacgtagttgcataaatttgcccaa

SEQ ID NO: 53746 - DNA, 25 bp, SARS Virus
acgtagttgcaataatttgcccaaa

SEQ ID NO: 53747 - DNA, 25 bp, SARS Virus
cgtagttgcaaatatttgcccaaac

SEQ ID NO: 53748 - DNA, 25 bp, SARS Virus
gtagttgcaaaattttgcccaaacg

SEQ ID NO: 53749 - DNA, 25 bp, SARS Virus
tagttgcaaaaatttgcccaaacgc

SEQ ID NO: 53750 - DNA, 25 bp, SARS Virus
agttgcaaaaatttgcccaaacgcc

SEQ ID NO: 53751 - DNA, 25 bp, SARS Virus
gttgcaaaaatttgcccaaacgcca

SEQ ID NO: 53752 - DNA, 25 bp, SARS Virus
ttgcaaaaattttcccaaacgccac

SEQ ID NO: 53753 - DNA, 25 bp, SARS Virus
tgcaaaaatttgtccaaacgccaca

SEQ ID NO: 53754 - DNA, 25 bp, SARS Virus
gcaaaaatttgctcaaacgccacat

SEQ ID NO: 53755 - DNA, 25 bp, SARS Virus
caaaaatttgcctaaacgccacatt

SEQ ID NO: 53756 - DNA, 25 bp, SARS Virus
aaaaatttgccctaacgccacattc

SEQ ID NO: 53757 - DNA, 25 bp, SARS Virus
aaaatttgcccatacgccacattca

SEQ ID NO: 53758 - DNA, 25 bp, SARS Virus
aaatttgcccaatcgccacattcac

SEQ ID NO: 53759 - DNA, 25 bp, SARS Virus
aatttgcccaaatgccacattcacg

SEQ ID NO: 53760 - DNA, 25 bp, SARS Virus
atttgcccaaactccacattcacgt

SEQ ID NO: 53761 - DNA, 25 bp, SARS Virus
tttgcccaaacgtcacattcacgtc

SEQ ID NO: 53762 - DNA, 25 bp, SARS Virus
ttgcccaaacgctacattcacgtcg

SEQ ID NO: 53763 - DNA, 25 bp, SARS Virus
tgcccaaacgcctcattcacgtcgg

SEQ ID NO: 53764 - DNA, 25 bp, SARS Virus
gcccaaacgccatattcacgtcggg

SEQ ID NO: 53765 - DNA, 25 bp, SARS Virus
cccaaacgccactttcacgtcgggc

SEQ ID NO: 53766 - DNA, 25 bp, SARS Virus
ccaaacgccacattcacgtcgggca

SEQ ID NO: 53767 - DNA, 25 bp, SARS Virus
caaacgccacattcacgtcgggcag

SEQ ID NO: 53768 - DNA, 25 bp, SARS Virus
aaacgccacatttacgtcgggcaga

SEQ ID NO: 53769 - DNA, 25 bp, SARS Virus
aacgccacattctcgtcgggcagaa

SEQ ID NO: 53770 - DNA, 25 bp, SARS Virus
acgccacattcatgtcgggcagaat

SEQ ID NO: 53771 - DNA, 25 bp, SARS Virus
cgccacattcacttcgggcagaatg

SEQ ID NO: 53772 - DNA, 25 bp, SARS Virus
gccacattcacgtcgggcagaatgt

SEQ ID NO: 53773 - DNA, 25 bp, SARS Virus
ccacattcacgttgggcagaatgtg

SEQ ID NO: 53774 - DNA, 25 bp, SARS Virus
cacattcacgtctggcagaatgtgg

SEQ ID NO: 53775 - DNA, 25 bp, SARS Virus
acattcacgtcgtgcagaatgtggc

SEQ ID NO: 53776 - DNA, 25 bp, SARS Virus
cattcacgtcggtcagaatgtggca

SEQ ID NO: 53777 - DNA, 25 bp, SARS Virus
attcacgtcgggtagaatgtggcac

SEQ ID NO: 53778 - DNA, 25 bp, SARS Virus
ttcacgtcgggctgaatgtggcacg

SEQ ID NO: 53779 - DNA, 25 bp, SARS Virus
tcacgtcgggcataatgtggcacgc

SEQ ID NO: 53780 - DNA, 25 bp, SARS Virus
cacgtcgggcagtatgtggcacgcc

SEQ ID NO: 53781 - DNA, 25 bp, SARS Virus
acgtcgggcagattgtggcacgccg

SEQ ID NO: 53782 - DNA, 25 bp, SARS Virus
cgtcgggcagaatgtggcacgccgt

SEQ ID NO: 53783 - DNA, 25 bp, SARS Virus
gtcgggcagaatttggcacgccgtg

SEQ ID NO: 53784 - DNA, 25 bp, SARS Virus
tcgggcagaatgtggcacgccgtgt

SEQ ID NO: 53785 - DNA, 25 bp, SARS Virus
cgggcagaatgttgcacgccgtgtc

SEQ ID NO: 53786 - DNA, 25 bp, SARS Virus
gggcagaatgtgtcacgccgtgtcc

SEQ ID NO: 53787 - DNA, 25 bp, SARS Virus
ggcagaatgtggtacgccgtgtccg

SEQ ID NO: 53788 - DNA, 25 bp, SARS Virus
gcagaatgtggctcgccgtgtccgt

SEQ ID NO: 53789 - DNA, 25 bp, SARS Virus
cagaatgtggcatgccgtgtccgtg

SEQ ID NO: 53790 - DNA, 25 bp, SARS Virus
agaatgtggcactccgtgtccgtga

SEQ ID NO: 53791 - DNA, 25 bp, SARS Virus
gaatgtggcacgtcgtgtccgtgat

SEQ ID NO: 53792 - DNA, 25 bp, SARS Virus
aatgtggcacgctgtgtccgtgatc

SEQ ID NO: 53793 - DNA, 25 bp, SARS Virus
atgtggcacgccttgtccgtgatca

SEQ ID NO: 53794 - DNA, 25 bp, SARS Virus
tgtggcacgccgtgtccgtgatcat

SEQ ID NO: 53795 - DNA, 25 bp, SARS Virus
gtggcacgccgtttccgtgatcatg

SEQ ID NO: 53796 - DNA, 25 bp, SARS Virus
tggcacgccgtgtccgtgatcatga

SEQ ID NO: 53797 - DNA, 25 bp, SARS Virus
ggcacgccgtgttcgtgatcatgac

SEQ ID NO: 53798 - DNA, 25 bp, SARS Virus
gcacgccgtgtctgtgatcatgact

SEQ ID NO: 53799 - DNA, 25 bp, SARS Virus
cacgccgtgtccttgatcatgacta

SEQ ID NO: 53800 - DNA, 25 bp, SARS Virus
acgccgtgtccgtgatcatgactac

SEQ ID NO: 53801 - DNA, 25 bp, SARS Virus
cgccgtgtccgttatcatgactaca

SEQ ID NO: 53802 - DNA, 25 bp, SARS Virus
gccgtgtccgtgttcatgactacag

SEQ ID NO: 53803 - DNA, 25 bp, SARS Virus
ccgtgtccgtgatcatgactacagc

SEQ ID NO: 53804 - DNA, 25 bp, SARS Virus
cgtgtccgtgattatgactacagca

SEQ ID NO: 53805 - DNA, 25 bp, SARS Virus
gtgtccgtgatcttgactacagcag

SEQ ID NO: 53806 - DNA, 25 bp, SARS Virus
tgtccgtgatcatgactacagcaga

SEQ ID NO: 53807 - DNA, 25 bp, SARS Virus
gtccgtgatcattactacagcagat

SEQ ID NO: 53808 - DNA, 25 bp, SARS Virus
tccgtgatcatgtctacagcagatg

SEQ ID NO: 53809 - DNA, 25 bp, SARS Virus
ccgtgatcatgaatacagcagatgt

SEQ ID NO: 53810 - DNA, 25 bp, SARS Virus
cgtgatcatgacaacagcagatgtc

SEQ ID NO: 53811 - DNA, 25 bp, SARS Virus
gtgatcatgactacagcagatgtcc

SEQ ID NO: 53812 - DNA, 25 bp, SARS Virus
tgatcatgactaaagcagatgtccc

SEQ ID NO: 53813 - DNA, 25 bp, SARS Virus
gatcatgactacagcagatgtcccg

SEQ ID NO: 53814 - DNA, 25 bp, SARS Virus
atcatgactacaacagatgtcccga

SEQ ID NO: 53815 - DNA, 25 bp, SARS Virus
tcatgactacagaagatgtcccgaa

SEQ ID NO: 53816 - DNA, 25 bp, SARS Virus
catgactacagcagatgtcccgaaa

SEQ ID NO: 53817 - DNA, 25 bp, SARS Virus
atgactacagcaaatgtcccgaaaa

SEQ ID NO: 53818 - DNA, 25 bp, SARS Virus
tgactacagcagatgtcccgaaaac

SEQ ID NO: 53819 - DNA, 25 bp, SARS Virus
gactacagcagaagtcccgaaaact

SEQ ID NO: 53820 - DNA, 25 bp, SARS Virus
actacagcagatatcccgaaaacta

SEQ ID NO: 53821 - DNA, 25 bp, SARS Virus
ctacagcagatgacccgaaaactat

SEQ ID NO: 53822 - DNA, 25 bp, SARS Virus
tacagcagatgtaccgaaaactata

SEQ ID NO: 53823 - DNA, 25 bp, SARS Virus
acagcagatgtcacgaaaactataa

SEQ ID NO: 53824 - DNA, 25 bp, SARS Virus
cagcagatgtccagaaaactataaa

SEQ ID NO: 53825 - DNA, 25 bp, SARS Virus
agcagatgtcccaaaaactataaat

SEQ ID NO: 53826 - DNA, 25 bp, SARS Virus
gcagatgtcccgaaaactataaatg

SEQ ID NO: 53827 - DNA, 25 bp, SARS Virus
cagatgtcccgaaaactataaatgt

SEQ ID NO: 53828 - DNA, 25 bp, SARS Virus
agatgtcccgaaaactataaatgtt

SEQ ID NO: 53829 - DNA, 25 bp, SARS Virus
gatgtcccgaaaactataaatgttg

SEQ ID NO: 53830 - DNA, 25 bp, SARS Virus
atgtcccgaaaaatataaatgttgc

SEQ ID NO: 53831 - DNA, 25 bp, SARS Virus
tgtcccgaaaacaataaatgttgct

SEQ ID NO: 53832 - DNA, 25 bp, SARS Virus
gtcccgaaaactataaatgttgctt

SEQ ID NO: 53833 - DNA, 25 bp, SARS Virus
tcccgaaaactaaaaatgttgcttt

SEQ ID NO: 53834 - DNA, 25 bp, SARS Virus
cccgaaaactataaatgttgctttt

SEQ ID NO: 53835 - DNA, 25 bp, SARS Virus
ccgaaaactataaatgttgcttttt

SEQ ID NO: 53836 - DNA, 25 bp, SARS Virus
cgaaaactataaatgttgctttttc

SEQ ID NO: 53837 - DNA, 25 bp, SARS Virus
gaaaactataaaagttgctttttca

SEQ ID NO: 53838 - DNA, 25 bp, SARS Virus
aaaactataaatattgctttttcaa

SEQ ID NO: 53839 - DNA, 25 bp, SARS Virus
aaactataaatgatgctttttcaac

SEQ ID NO: 53840 - DNA, 25 bp, SARS Virus
aactataaatgtagctttttcaacg

SEQ ID NO: 53841 - DNA, 25 bp, SARS Virus
actataaatgttactttttcaacga

SEQ ID NO: 53842 - DNA, 25 bp, SARS Virus
ctataaatgttgatttttcaacgac

SEQ ID NO: 53843 - DNA, 25 bp, SARS Virus
tataaatgttgcattttcaacgacc

SEQ ID NO: 53844 - DNA, 25 bp, SARS Virus
ataaatgttgctatttcaacgacca

SEQ ID NO: 53845 - DNA, 25 bp, SARS Virus
taaatgttgcttattcaacgaccaa

SEQ ID NO: 53846 - DNA, 25 bp, SARS Virus
aaatgttgctttatcaacgaccaaa

SEQ ID NO: 53847 - DNA, 25 bp, SARS Virus
aatgttgcttttacaacgaccaaaa

SEQ ID NO: 53848 - DNA, 25 bp, SARS Virus
atgttgctttttaaacgaccaaaac

SEQ ID NO: 53849 - DNA, 25 bp, SARS Virus
tgttgctttttcaacgaccaaaacg

SEQ ID NO: 53850 - DNA, 25 bp, SARS Virus
gttgctttttcaacgaccaaaacgt

SEQ ID NO: 53851 - DNA, 25 bp, SARS Virus
ttgctttttcaaagaccaaaacgtt

SEQ ID NO: 53852 - DNA, 25 bp, SARS Virus
tgctttttcaacaaccaaaacgttt

SEQ ID NO: 53853 - DNA, 25 bp, SARS Virus
gctttttcaacgaccaaaacgtttc

SEQ ID NO: 53854 - DNA, 25 bp, SARS Virus
ctttttcaacgaacaaaacgtttca

SEQ ID NO: 53855 - DNA, 25 bp, SARS Virus
tttttcaacgacaaaaacgtttcaa

SEQ ID NO: 53856 - DNA, 25 bp, SARS Virus
ttttcaacgaccaaaacgtttcaag

SEQ ID NO: 53857 - DNA, 25 bp, SARS Virus
tttcaacgaccaaaacgtttcaagg

SEQ ID NO: 53858 - DNA, 25 bp, SARS Virus
ttcaacgaccaaaacgtttcaagga

SEQ ID NO: 53859 - DNA, 25 bp, SARS Virus
tcaacgaccaaaacgtttcaaggat

SEQ ID NO: 53860 - DNA, 25 bp, SARS Virus
caacgaccaaaaagtttcaaggatt

SEQ ID NO: 53861 - DNA, 25 bp, SARS Virus
aacgaccaaaacatttcaaggattt

SEQ ID NO: 53862 - DNA, 25 bp, SARS Virus
acgaccaaaacgattcaaggatttt

SEQ ID NO: 53863 - DNA, 25 bp, SARS Virus
cgaccaaaacgtatcaaggattttt

SEQ ID NO: 53864 - DNA, 25 bp, SARS Virus
gaccaaaacgttacaaggatttttg

SEQ ID NO: 53865 - DNA, 25 bp, SARS Virus
accaaaacgtttaaaggatttttga

SEQ ID NO: 53866 - DNA, 25 bp, SARS Virus
ccaaaacgtttcaaggatttttgat

SEQ ID NO: 53867 - DNA, 25 bp, SARS Virus
caaaacgtttcaaggatttttgatt

SEQ ID NO: 53868 - DNA, 25 bp, SARS Virus
aaaacgtttcaaagatttttgatta

SEQ ID NO: 53869 - DNA, 25 bp, SARS Virus
aaacgtttcaagaatttttgattaa

SEQ ID NO: 53870 - DNA, 25 bp, SARS Virus
aacgtttcaaggatttttgattaac

SEQ ID NO: 53871 - DNA, 25 bp, SARS Virus
acgtttcaaggaattttgattaacg

SEQ ID NO: 53872 - DNA, 25 bp, SARS Virus
cgtttcaaggatatttgattaacga

SEQ ID NO: 53873 - DNA, 25 bp, SARS Virus
gtttcaaggattattgattaacgac

SEQ ID NO: 53874 - DNA, 25 bp, SARS Virus
tttcaaggatttatgattaacgaca

SEQ ID NO: 53875 - DNA, 25 bp, SARS Virus
ttcaaggattttagattaacgacag

SEQ ID NO: 53876 - DNA, 25 bp, SARS Virus
tcaaggatttttaattaacgacagc

SEQ ID NO: 53877 - DNA, 25 bp, SARS Virus
caaggatttttgattaacgacagcg

SEQ ID NO: 53878 - DNA, 25 bp, SARS Virus
aaggatttttgaataacgacagcga

SEQ ID NO: 53879 - DNA, 25 bp, SARS Virus
aggatttttgataaacgacagcgaa

SEQ ID NO: 53880 - DNA, 25 bp, SARS Virus
ggatttttgattaacgacagcgaag

SEQ ID NO: 53881 - DNA, 25 bp, SARS Virus
gatttttgattaacgacagcgaagg

SEQ ID NO: 53882 - DNA, 25 bp, SARS Virus
atttttgattaaagacagcgaaggt

SEQ ID NO: 53883 - DNA, 25 bp, SARS Virus
tttttgattaacaacagcgaaggtc

SEQ ID NO: 53884 - DNA, 25 bp, SARS Virus
ttttgattaacgacagcgaaggtcc

SEQ ID NO: 53885 - DNA, 25 bp, SARS Virus
tttgattaacgaaagcgaaggtcct

SEQ ID NO: 53886 - DNA, 25 bp, SARS Virus
ttgattaacgacagcgaaggtcctc

SEQ ID NO: 53887 - DNA, 25 bp, SARS Virus
tgattaacgacaacgaaggtcctct

SEQ ID NO: 53888 - DNA, 25 bp, SARS Virus
gattaacgacagagaaggtcctctt

SEQ ID NO: 53889 - DNA, 25 bp, SARS Virus
attaacgacagcaaaggtcctcttc

SEQ ID NO: 53890 - DNA, 25 bp, SARS Virus
ttaacgacagcgaaggtcctcttcc

SEQ ID NO: 53891 - DNA, 25 bp, SARS Virus
taacgacagcgaaggtcctcttcct

SEQ ID NO: 53892 - DNA, 25 bp, SARS Virus
aacgacagcgaaagtcctcttccta

SEQ ID NO: 53893 - DNA, 25 bp, SARS Virus
acgacagcgaagatcctcttcctac

SEQ ID NO: 53894 - DNA, 25 bp, SARS Virus
cgacagcgaaggacctcttcctact

SEQ ID NO: 53895 - DNA, 25 bp, SARS Virus
gacagcgaaggtactcttcctactc

SEQ ID NO: 53896 - DNA, 25 bp, SARS Virus
acagcgaaggtcatcttcctactcc

SEQ ID NO: 53897 - DNA, 25 bp, SARS Virus
cagcgaaggtccacttcctactcct

SEQ ID NO: 53898 - DNA, 25 bp, SARS Virus
agcgaaggtcctattcctactcctt

SEQ ID NO: 53899 - DNA, 25 bp, SARS Virus
gcgaaggtcctcatcctactccttc

SEQ ID NO: 53900 - DNA, 25 bp, SARS Virus
cgaaggtcctctacctactccttcc

SEQ ID NO: 53901 - DNA, 25 bp, SARS Virus
gaaggtcctcttactactccttccg

SEQ ID NO: 53902 - DNA, 25 bp, SARS Virus
aaggtcctcttcatactccttccgt

SEQ ID NO: 53903 - DNA, 25 bp, SARS Virus
aggtcctcttccaactccttccgtt

SEQ ID NO: 53904 - DNA, 25 bp, SARS Virus
ggtcctcttcctactccttccgtta

SEQ ID NO: 53905 - DNA, 25 bp, SARS Virus
gtcctcttcctaatccttccgttaa

SEQ ID NO: 53906 - DNA, 25 bp, SARS Virus
tcctcttcctacaccttccgttaaa

SEQ ID NO: 53907 - DNA, 25 bp, SARS Virus
cctcttcctactacttccgttaaat

SEQ ID NO: 53908 - DNA, 25 bp, SARS Virus
ctcttcctactcattccgttaaata

SEQ ID NO: 53909 - DNA, 25 bp, SARS Virus
tcttcctactccatccgttaaataa

SEQ ID NO: 53910 - DNA, 25 bp, SARS Virus
cttcctactcctaccgttaaataat

SEQ ID NO: 53911 - DNA, 25 bp, SARS Virus
ttcctactccttacgttaaataatc

SEQ ID NO: 53912 - DNA, 25 bp, SARS Virus
tcctactccttcagttaaataatct

SEQ ID NO: 53913 - DNA, 25 bp, SARS Virus
cctactccttccattaaataatctg

SEQ ID NO: 53914 - DNA, 25 bp, SARS Virus
ctactccttccgataaataatctga

SEQ ID NO: 53915 - DNA, 25 bp, SARS Virus
tactccttccgtaaaataatctgag

SEQ ID NO: 53916 - DNA, 25 bp, SARS Virus
actccttccgttaaataatctgaga

SEQ ID NO: 53917 - DNA, 25 bp, SARS Virus
ctccttccgttaaataatctgagaa

SEQ ID NO: 53918 - DNA, 25 bp, SARS Virus
tccttccgttaaataatctgagaat

SEQ ID NO: 53919 - DNA, 25 bp, SARS Virus
ccttccgttaaaaaatctgagaatg

SEQ ID NO: 53920 - DNA, 25 bp, SARS Virus
cttccgttaaataatctgagaatga

SEQ ID NO: 53921 - DNA, 25 bp, SARS Virus
ttccgttaaataatctgagaatgaa

SEQ ID NO: 53922 - DNA, 25 bp, SARS Virus
tccgttaaataaactgagaatgaaa

SEQ ID NO: 53923 - DNA, 25 bp, SARS Virus
ccgttaaataatatgagaatgaaac

SEQ ID NO: 53924 - DNA, 25 bp, SARS Virus
cgttaaataatcagagaatgaaaca

SEQ ID NO: 53925 - DNA, 25 bp, SARS Virus
gttaaataatctaagaatgaaacat

SEQ ID NO: 53926 - DNA, 25 bp, SARS Virus
ttaaataatctgagaatgaaacatc

SEQ ID NO: 53927 - DNA, 25 bp, SARS Virus
taaataatctgaaaatgaaacatca

SEQ ID NO: 53928 - DNA, 25 bp, SARS Virus
aaataatctgagaatgaaacatcaa

SEQ ID NO: 53929 - DNA, 25 bp, SARS Virus
aataatctgagaatgaaacatcaat

SEQ ID NO: 53930 - DNA, 25 bp, SARS Virus
ataatctgagaaagaaacatcaatt

SEQ ID NO: 53931 - DNA, 25 bp, SARS Virus
taatctgagaataaaacatcaattc

SEQ ID NO: 53932 - DNA, 25 bp, SARS Virus
aatctgagaatgaaacatcaattct

SEQ ID NO: 53933 - DNA, 25 bp, SARS Virus
atctgagaatgaaacatcaattctc

SEQ ID NO: 53934 - DNA, 25 bp, SARS Virus
tctgagaatgaaacatcaattctcc

SEQ ID NO: 53935 - DNA, 25 bp, SARS Virus
ctgagaatgaaaaatcaattctccg

SEQ ID NO: 53936 - DNA, 25 bp, SARS Virus
tgagaatgaaacatcaattctccgt

SEQ ID NO: 53937 - DNA, 25 bp, SARS Virus
gagaatgaaacaacaattctccgta

SEQ ID NO: 53938 - DNA, 25 bp, SARS Virus
agaatgaaacataaattctccgtat

SEQ ID NO: 53939 - DNA, 25 bp, SARS Virus
gaatgaaacatcaattctccgtatg

SEQ ID NO: 53940 - DNA, 25 bp, SARS Virus
aatgaaacatcaattctccgtatga

SEQ ID NO: 53941 - DNA, 25 bp, SARS Virus
atgaaacatcaaatctccgtatgat

SEQ ID NO: 53942 - DNA, 25 bp, SARS Virus
tgaaacatcaatactccgtatgata

SEQ ID NO: 53943 - DNA, 25 bp, SARS Virus
gaaacatcaattatccgtatgatac

SEQ ID NO: 53944 - DNA, 25 bp, SARS Virus
aaacatcaattcaccgtatgataca

SEQ ID NO: 53945 - DNA, 25 bp, SARS Virus
aacatcaattctacgtatgatacag

SEQ ID NO: 53946 - DNA, 25 bp, SARS Virus
acatcaattctcagtatgatacaga

SEQ ID NO: 53947 - DNA, 25 bp, SARS Virus
catcaattctccatatgatacagat

SEQ ID NO: 53948 - DNA, 25 bp, SARS Virus
atcaattctccgaatgatacagatt

SEQ ID NO: 53949 - DNA, 25 bp, SARS Virus
tcaattctccgtatgatacagattg

SEQ ID NO: 53950 - DNA, 25 bp, SARS Virus
caattctccgtaagatacagattga

SEQ ID NO: 53951 - DNA, 25 bp, SARS Virus
aattctccgtataatacagattgat

SEQ ID NO: 53952 - DNA, 25 bp, SARS Virus
attctccgtatgatacagattgatg

SEQ ID NO: 53953 - DNA, 25 bp, SARS Virus
ttctccgtatgaaacagattgatgg

SEQ ID NO: 53954 - DNA, 25 bp, SARS Virus
tctccgtatgatacagattgatggt

SEQ ID NO: 53955 - DNA, 25 bp, SARS Virus
ctccgtatgataaagattgatggtt

SEQ ID NO: 53956 - DNA, 25 bp, SARS Virus
tccgtatgatacagattgatggttg

SEQ ID NO: 53957 - DNA, 25 bp, SARS Virus
ccgtatgatacaaattgatggttgt

SEQ ID NO: 53958 - DNA, 25 bp, SARS Virus
cgtatgatacagattgatggttgta

SEQ ID NO: 53959 - DNA, 25 bp, SARS Virus
gtatgatacagaatgatggttgtac

SEQ ID NO: 53960 - DNA, 25 bp, SARS Virus
tatgatacagatagatggttgtact

SEQ ID NO: 53961 - DNA, 25 bp, SARS Virus
atgatacagattaatggttgtactt

SEQ ID NO: 53962 - DNA, 25 bp, SARS Virus
tgatacagattgatggttgtacttc

SEQ ID NO: 53963 - DNA, 25 bp, SARS Virus
gatacagattgaaggttgtacttct

SEQ ID NO: 53964 - DNA, 25 bp, SARS Virus
atacagattgatagttgtacttctc

SEQ ID NO: 53965 - DNA, 25 bp, SARS Virus
tacagattgatgattgtacttctct

SEQ ID NO: 53966 - DNA, 25 bp, SARS Virus
acagattgatggatgtacttctctg

SEQ ID NO: 53967 - DNA, 25 bp, SARS Virus
cagattgatggtagtacttctctga

SEQ ID NO: 53968 - DNA, 25 bp, SARS Virus
agattgatggttatacttctctgat

SEQ ID NO: 53969 - DNA, 25 bp, SARS Virus
gattgatggttgaacttctctgata

SEQ ID NO: 53970 - DNA, 25 bp, SARS Virus
attgatggttgtacttctctgataa

SEQ ID NO: 53971 - DNA, 25 bp, SARS Virus
ttgatggttgtaattctctgataaa

SEQ ID NO: 53972 - DNA, 25 bp, SARS Virus
tgatggttgtacatctctgataaat

SEQ ID NO: 53973 - DNA, 25 bp, SARS Virus
gatggttgtactactctgataaata

SEQ ID NO: 53974 - DNA, 25 bp, SARS Virus
atggttgtacttatctgataaatat

SEQ ID NO: 53975 - DNA, 25 bp, SARS Virus
tggttgtacttcactgataaatatt

SEQ ID NO: 53976 - DNA, 25 bp, SARS Virus
ggttgtacttctatgataaatattg

SEQ ID NO: 53977 - DNA, 25 bp, SARS Virus
gttgtacttctcagataaatattga

SEQ ID NO: 53978 - DNA, 25 bp, SARS Virus
ttgtacttctctaataaatattgaa

SEQ ID NO: 53979 - DNA, 25 bp, SARS Virus
tgtacttctctgataaatattgaac

SEQ ID NO: 53980 - DNA, 25 bp, SARS Virus
gtacttctctgaaaaatattgaacc

SEQ ID NO: 53981 - DNA, 25 bp, SARS Virus
tacttctctgataaatattgaacca

SEQ ID NO: 53982 - DNA, 25 bp, SARS Virus
acttctctgataaatattgaaccaa

SEQ ID NO: 53983 - DNA, 25 bp, SARS Virus
cttctctgataaatattgaaccaat

SEQ ID NO: 53984 - DNA, 25 bp, SARS Virus
ttctctgataaaaattgaaccaatt

SEQ ID NO: 53985 - DNA, 25 bp, SARS Virus
tctctgataaatattgaaccaattt

SEQ ID NO: 53986 - DNA, 25 bp, SARS Virus
ctctgataaataatgaaccaatttc

SEQ ID NO: 53987 - DNA, 25 bp, SARS Virus
tctgataaatatagaaccaatttct

SEQ ID NO: 53988 - DNA, 25 bp, SARS Virus
ctgataaatattaaaccaatttcta

SEQ ID NO: 53989 - DNA, 25 bp, SARS Virus
tgataaatattgaaccaatttctaa

SEQ ID NO: 53990 - DNA, 25 bp, SARS Virus
gataaatattgaaccaatttctaac

SEQ ID NO: 53991 - DNA, 25 bp, SARS Virus
ataaatattgaaacaatttctaaca

SEQ ID NO: 53992 - DNA, 25 bp, SARS Virus
taaatattgaacaaatttctaacag

SEQ ID NO: 53993 - DNA, 25 bp, SARS Virus
aaatattgaaccaatttctaacagg

SEQ ID NO: 53994 - DNA, 25 bp, SARS Virus
aatattgaaccaatttctaacaggt

SEQ ID NO: 53995 - DNA, 25 bp, SARS Virus
atattgaaccaaattctaacaggtc

SEQ ID NO: 53996 - DNA, 25 bp, SARS Virus
tattgaaccaatatctaacaggtcg

SEQ ID NO: 53997 - DNA, 25 bp, SARS Virus
attgaaccaattactaacaggtcgc

SEQ ID NO: 53998 - DNA, 25 bp, SARS Virus
ttgaaccaatttataacaggtcgcc

SEQ ID NO: 53999 - DNA, 25 bp, SARS Virus
tgaaccaatttcaaacaggtcgcca

SEQ ID NO: 54000 - DNA, 25 bp, SARS Virus
gaaccaatttctaacaggtcgccaa

SEQ ID NO: 54001 - DNA, 25 bp, SARS Virus
aaccaatttctaacaggtcgccaac

SEQ ID NO: 54002 - DNA, 25 bp, SARS Virus
accaatttctaaaaggtcgccaacg

SEQ ID NO: 54003 - DNA, 25 bp, SARS Virus
ccaatttctaacaggtcgccaacga

SEQ ID NO: 54004 - DNA, 25 bp, SARS Virus
caatttctaacaagtcgccaacgac

SEQ ID NO: 54005 - DNA, 25 bp, SARS Virus
aatttctaacagatcgccaacgaca

SEQ ID NO: 54006 - DNA, 25 bp, SARS Virus
atttctaacaggacgccaacgacag

SEQ ID NO: 54007 - DNA, 25 bp, SARS Virus
tttctaacaggtagccaacgacagg

SEQ ID NO: 54008 - DNA, 25 bp, SARS Virus
ttctaacaggtcaccaacgacaggt

SEQ ID NO: 54009 - DNA, 25 bp, SARS Virus
tctaacaggtcgacaacgacaggta

SEQ ID NO: 54010 - DNA, 25 bp, SARS Virus
ctaacaggtcgcaaacgacaggtac

SEQ ID NO: 54011 - DNA, 25 bp, SARS Virus
taacaggtcgccaacgacaggtact

SEQ ID NO: 54012 - DNA, 25 bp, SARS Virus
aacaggtcgccaacgacaggtactg

SEQ ID NO: 54013 - DNA, 25 bp, SARS Virus
acaggtcgccaaagacaggtactga

SEQ ID NO: 54014 - DNA, 25 bp, SARS Virus
caggtcgccaacaacaggtactgaa

SEQ ID NO: 54015 - DNA, 25 bp, SARS Virus
aggtcgccaacgacaggtactgaaa

SEQ ID NO: 54016 - DNA, 25 bp, SARS Virus
ggtcgccaacgaaaggtactgaaaa

SEQ ID NO: 54017 - DNA, 25 bp, SARS Virus
gtcgccaacgacaggtactgaaaaa

SEQ ID NO: 54018 - DNA, 25 bp, SARS Virus
tcgccaacgacaagtactgaaaaag

SEQ ID NO: 54019 - DNA, 25 bp, SARS Virus
cgccaacgacagatactgaaaaagt

SEQ ID NO: 54020 - DNA, 25 bp, SARS Virus
gccaacgacaggaactgaaaaagtt

SEQ ID NO: 54021 - DNA, 25 bp, SARS Virus
ccaacgacaggtactgaaaaagttc

SEQ ID NO: 54022 - DNA, 25 bp, SARS Virus
caacgacaggtaatgaaaaagttca

SEQ ID NO: 54023 - DNA, 25 bp, SARS Virus
aacgacaggtacagaaaaagttcaa

SEQ ID NO: 54024 - DNA, 25 bp, SARS Virus
acgacaggtactaaaaaagttcaaa

SEQ ID NO: 54025 - DNA, 25 bp, SARS Virus
cgacaggtactgaaaaagttcaaat

SEQ ID NO: 54026 - DNA, 25 bp, SARS Virus
gacaggtactgaaaaagttcaaatc

SEQ ID NO: 54027 - DNA, 25 bp, SARS Virus
acaggtactgaaaaagttcaaatct

SEQ ID NO: 54028 - DNA, 25 bp, SARS Virus
caggtactgaaaaagttcaaatctc

SEQ ID NO: 54029 - DNA, 25 bp, SARS Virus
aggtactgaaaaagttcaaatctca

SEQ ID NO: 54030 - DNA, 25 bp, SARS Virus
ggtactgaaaaaattcaaatctcat

SEQ ID NO: 54031 - DNA, 25 bp, SARS Virus
gtactgaaaaagatcaaatctcatc

SEQ ID NO: 54032 - DNA, 25 bp, SARS Virus
tactgaaaaagtacaaatctcatct

SEQ ID NO: 54033 - DNA, 25 bp, SARS Virus
actgaaaaagttaaaatctcatcta

SEQ ID NO: 54034 - DNA, 25 bp, SARS Virus
ctgaaaaagttcaaatctcatctac

SEQ ID NO: 54035 - DNA, 25 bp, SARS Virus
tgaaaaagttcaaatctcatctacc

SEQ ID NO: 54036 - DNA, 25 bp, SARS Virus
gaaaaagttcaaatctcatctacca

SEQ ID NO: 54037 - DNA, 25 bp, SARS Virus
aaaaagttcaaaactcatctaccac

SEQ ID NO: 54038 - DNA, 25 bp, SARS Virus
aaaagttcaaatatcatctaccact

SEQ ID NO: 54039 - DNA, 25 bp, SARS Virus
aaagttcaaatcacatctaccactg

SEQ ID NO: 54040 - DNA, 25 bp, SARS Virus
aagttcaaatctaatctaccactgt

SEQ ID NO: 54041 - DNA, 25 bp, SARS Virus
agttcaaatctcatctaccactgta

SEQ ID NO: 54042 - DNA, 25 bp, SARS Virus
gttcaaatctcaactaccactgtac

SEQ ID NO: 54043 - DNA, 25 bp, SARS Virus
ttcaaatctcatataccactgtacc

SEQ ID NO: 54044 - DNA, 25 bp, SARS Virus
tcaaatctcatcaaccactgtacca

SEQ ID NO: 54045 - DNA, 25 bp, SARS Virus
caaatctcatctaccactgtaccat

SEQ ID NO: 54046 - DNA, 25 bp, SARS Virus
aaatctcatctaacactgtaccatg

SEQ ID NO: 54047 - DNA, 25 bp, SARS Virus
aatctcatctacaactgtaccatgg

SEQ ID NO: 54048 - DNA, 25 bp, SARS Virus
atctcatctaccactgtaccatggt

SEQ ID NO: 54049 - DNA, 25 bp, SARS Virus
tctcatctaccaatgtaccatggtg

SEQ ID NO: 54050 - DNA, 25 bp, SARS Virus
ctcatctaccacagtaccatggtgt

SEQ ID NO: 54051 - DNA, 25 bp, SARS Virus
tcatctaccactataccatggtgta

SEQ ID NO: 54052 - DNA, 25 bp, SARS Virus
catctaccactgaaccatggtgtat

SEQ ID NO: 54053 - DNA, 25 bp, SARS Virus
atctaccactgtaccatggtgtata

SEQ ID NO: 54054 - DNA, 25 bp, SARS Virus
tctaccactgtaacatggtgtatat

SEQ ID NO: 54055 - DNA, 25 bp, SARS Virus
ctaccactgtacaatggtgtatata

SEQ ID NO: 54056 - DNA, 25 bp, SARS Virus
taccactgtaccatggtgtatatag

SEQ ID NO: 54057 - DNA, 25 bp, SARS Virus
accactgtaccaaggtgtatatagt

SEQ ID NO: 54058 - DNA, 25 bp, SARS Virus
ccactgtaccatagtgtatatagtg

SEQ ID NO: 54059 - DNA, 25 bp, SARS Virus
cactgtaccatgatgtatatagtgc

SEQ ID NO: 54060 - DNA, 25 bp, SARS Virus
actgtaccatggagtatatagtgca

SEQ ID NO: 54061 - DNA, 25 bp, SARS Virus
ctgtaccatggtatatatagtgcag

SEQ ID NO: 54062 - DNA, 25 bp, SARS Virus
tgtaccatggtgaatatagtgcagt

SEQ ID NO: 54063 - DNA, 25 bp, SARS Virus
gtaccatggtgtatatagtgcagtc

SEQ ID NO: 54064 - DNA, 25 bp, SARS Virus
taccatggtgtaaatagtgcagtcg

SEQ ID NO: 54065 - DNA, 25 bp, SARS Virus
accatggtgtatatagtgcagtcgc

SEQ ID NO: 54066 - DNA, 25 bp, SARS Virus
ccatggtgtataaagtgcagtcgca

SEQ ID NO: 54067 - DNA, 25 bp, SARS Virus
catggtgtatatagtgcagtcgcag

SEQ ID NO: 54068 - DNA, 25 bp, SARS Virus
atggtgtatataatgcagtcgcaga

SEQ ID NO: 54069 - DNA, 25 bp, SARS Virus
tggtgtatatagagcagtcgcagat

SEQ ID NO: 54070 - DNA, 25 bp, SARS Virus
ggtgtatatagtacagtcgcagatt

SEQ ID NO: 54071 - DNA, 25 bp, SARS Virus
gtgtatatagtgaagtcgcagattg

SEQ ID NO: 54072 - DNA, 25 bp, SARS Virus
tgtatatagtgcagtcgcagattga

SEQ ID NO: 54073 - DNA, 25 bp, SARS Virus
gtatatagtgcaatcgcagattgat

SEQ ID NO: 54074 - DNA, 25 bp, SARS Virus
tatatagtgcagacgcagattgatt

SEQ ID NO: 54075 - DNA, 25 bp, SARS Virus
atatagtgcagtagcagattgattt

SEQ ID NO: 54076 - DNA, 25 bp, SARS Virus
tatagtgcagtcacagattgattta

SEQ ID NO: 54077 - DNA, 25 bp, SARS Virus
atagtgcagtcgaagattgatttat

SEQ ID NO: 54078 - DNA, 25 bp, SARS Virus
tagtgcagtcgcagattgatttatg

SEQ ID NO: 54079 - DNA, 25 bp, SARS Virus
agtgcagtcgcaaattgatttatgt

SEQ ID NO: 54080 - DNA, 25 bp, SARS Virus
gtgcagtcgcagattgatttatgtg

SEQ ID NO: 54081 - DNA, 25 bp, SARS Virus
tgcagtcgcagaatgatttatgtgt

SEQ ID NO: 54082 - DNA, 25 bp, SARS Virus
gcagtcgcagatagatttatgtgtt

SEQ ID NO: 54083 - DNA, 25 bp, SARS Virus
cagtcgcagattaatttatgtgtta

SEQ ID NO: 54084 - DNA, 25 bp, SARS Virus
agtcgcagattgatttatgtgttac

SEQ ID NO: 54085 - DNA, 25 bp, SARS Virus
gtcgcagattgaattatgtgttacc

SEQ ID NO: 54086 - DNA, 25 bp, SARS Virus
tcgcagattgatatatgtgttaccg

SEQ ID NO: 54087 - DNA, 25 bp, SARS Virus
cgcagattgattaatgtgttaccga

SEQ ID NO: 54088 - DNA, 25 bp, SARS Virus
gcagattgatttatgtgttaccgac

SEQ ID NO: 54089 - DNA, 25 bp, SARS Virus
cagattgatttaagtgttaccgact

SEQ ID NO: 54090 - DNA, 25 bp, SARS Virus
agattgatttatatgttaccgacta

SEQ ID NO: 54091 - DNA, 25 bp, SARS Virus
gattgatttatgagttaccgactaa

SEQ ID NO: 54092 - DNA, 25 bp, SARS Virus
attgatttatgtattaccgactaaa

SEQ ID NO: 54093 - DNA, 25 bp, SARS Virus
ttgatttatgtgataccgactaaat

SEQ ID NO: 54094 - DNA, 25 bp, SARS Virus
tgatttatgtgtaaccgactaaatc

SEQ ID NO: 54095 - DNA, 25 bp, SARS Virus
gatttatgtgttaccgactaaatca

SEQ ID NO: 54096 - DNA, 25 bp, SARS Virus
atttatgtgttaacgactaaatcag

SEQ ID NO: 54097 - DNA, 25 bp, SARS Virus
tttatgtgttacagactaaatcaga

SEQ ID NO: 54098 - DNA, 25 bp, SARS Virus
ttatgtgttaccaactaaatcagat

SEQ ID NO: 54099 - DNA, 25 bp, SARS Virus
tatgtgttaccgactaaatcagata

SEQ ID NO: 54100 - DNA, 25 bp, SARS Virus
atgtgttaccgaataaatcagatac

SEQ ID NO: 54101 - DNA, 25 bp, SARS Virus
tgtgttaccgacaaaatcagatacg

SEQ ID NO: 54102 - DNA, 25 bp, SARS Virus
gtgttaccgactaaatcagatacga

SEQ ID NO: 54103 - DNA, 25 bp, SARS Virus
tgttaccgactaaatcagatacgag

SEQ ID NO: 54104 - DNA, 25 bp, SARS Virus
gttaccgactaaatcagatacgaga

SEQ ID NO: 54105 - DNA, 25 bp, SARS Virus
ttaccgactaaaacagatacgagat

SEQ ID NO: 54106 - DNA, 25 bp, SARS Virus
taccgactaaataagatacgagatg

SEQ ID NO: 54107 - DNA, 25 bp, SARS Virus
accgactaaatcagatacgagatgc

SEQ ID NO: 54108 - DNA, 25 bp, SARS Virus
ccgactaaatcaaatacgagatgca

SEQ ID NO: 54109 - DNA, 25 bp, SARS Virus
cgactaaatcagatacgagatgcag

SEQ ID NO: 54110 - DNA, 25 bp, SARS Virus
gactaaatcagaaacgagatgcagt

SEQ ID NO: 54111 - DNA, 25 bp, SARS Virus
actaaatcagatacgagatgcagta

SEQ ID NO: 54112 - DNA, 25 bp, SARS Virus
ctaaatcagataagagatgcagtaa

SEQ ID NO: 54113 - DNA, 25 bp, SARS Virus
taaatcagatacaagatgcagtaaa

SEQ ID NO: 54114 - DNA, 25 bp, SARS Virus
aaatcagatacgagatgcagtaaaa

SEQ ID NO: 54115 - DNA, 25 bp, SARS Virus
aatcagatacgaaatgcagtaaaac

SEQ ID NO: 54116 - DNA, 25 bp, SARS Virus
atcagatacgagatgcagtaaaact

SEQ ID NO: 54117 - DNA, 25 bp, SARS Virus
tcagatacgagaagcagtaaaacta

SEQ ID NO: 54118 - DNA, 25 bp, SARS Virus
cagatacgagatacagtaaaactac

SEQ ID NO: 54119 - DNA, 25 bp, SARS Virus
agatacgagatgaagtaaaactact

SEQ ID NO: 54120 - DNA, 25 bp, SARS Virus
gatacgagatgcagtaaaactactc

SEQ ID NO: 54121 - DNA, 25 bp, SARS Virus
atacgagatgcaataaaactactcc

SEQ ID NO: 54122 - DNA, 25 bp, SARS Virus
tacgagatgcagaaaaactactccc

SEQ ID NO: 54123 - DNA, 25 bp, SARS Virus
acgagatgcagtaaaactactccca

SEQ ID NO: 54124 - DNA, 25 bp, SARS Virus
cgagatgcagtaaaactactcccat

SEQ ID NO: 54125 - DNA, 25 bp, SARS Virus
gagatgcagtaaaactactcccatt

SEQ ID NO: 54126 - DNA, 25 bp, SARS Virus
agatgcagtaaaactactcccatta

SEQ ID NO: 54127 - DNA, 25 bp, SARS Virus
gatgcagtaaaaatactcccattaa

SEQ ID NO: 54128 - DNA, 25 bp, SARS Virus
atgcagtaaaacaactcccattaac

SEQ ID NO: 54129 - DNA, 25 bp, SARS Virus
tgcagtaaaactactcccattaaca

SEQ ID NO: 54130 - DNA, 25 bp, SARS Virus
gcagtaaaactaatcccattaacac

SEQ ID NO: 54131 - DNA, 25 bp, SARS Virus
cagtaaaactacacccattaacact

SEQ ID NO: 54132 - DNA, 25 bp, SARS Virus
agtaaaactactaccattaacacta

SEQ ID NO: 54133 - DNA, 25 bp, SARS Virus
gtaaaactactcacattaacactat

SEQ ID NO: 54134 - DNA, 25 bp, SARS Virus
taaaactactccaattaacactatg

SEQ ID NO: 54135 - DNA, 25 bp, SARS Virus
aaaactactcccattaacactatgt

SEQ ID NO: 54136 - DNA, 25 bp, SARS Virus
aaactactcccaataacactatgta

SEQ ID NO: 54137 - DNA, 25 bp, SARS Virus
aactactcccataaacactatgtaa

SEQ ID NO: 54138 - DNA, 25 bp, SARS Virus
actactcccattaacactatgtaat

SEQ ID NO: 54139 - DNA, 25 bp, SARS Virus
ctactcccattaacactatgtaatt

SEQ ID NO: 54140 - DNA, 25 bp, SARS Virus
tactcccattaaaactatgtaattt

SEQ ID NO: 54141 - DNA, 25 bp, SARS Virus
actcccattaacactatgtaatttt

SEQ ID NO: 54142 - DNA, 25 bp, SARS Virus
ctcccattaacaatatgtaattttc

SEQ ID NO: 54143 - DNA, 25 bp, SARS Virus
tcccattaacacaatgtaattttct

SEQ ID NO: 54144 - DNA, 25 bp, SARS Virus
cccattaacactatgtaattttctt

SEQ ID NO: 54145 - DNA, 25 bp, SARS Virus
ccattaacactaagtaattttcttt

SEQ ID NO: 54146 - DNA, 25 bp, SARS Virus
cattaacactatataattttcttta

SEQ ID NO: 54147 - DNA, 25 bp, SARS Virus
attaacactatgaaattttctttat

SEQ ID NO: 54148 - DNA, 25 bp, SARS Virus
ttaacactatgtaattttctttatg

SEQ ID NO: 54149 - DNA, 25 bp, SARS Virus
taacactatgtaattttctttatga

SEQ ID NO: 54150 - DNA, 25 bp, SARS Virus
aacactatgtaaatttctttatgag

SEQ ID NO: 54151 - DNA, 25 bp, SARS Virus
acactatgtaatattctttatgagc

SEQ ID NO: 54152 - DNA, 25 bp, SARS Virus
cactatgtaattatctttatgagca

SEQ ID NO: 54153 - DNA, 25 bp, SARS Virus
actatgtaatttactttatgagcag

SEQ ID NO: 54154 - DNA, 25 bp, SARS Virus
ctatgtaattttatttatgagcagt

SEQ ID NO: 54155 - DNA, 25 bp, SARS Virus
tatgtaattttcattatgagcagtg

SEQ ID NO: 54156 - DNA, 25 bp, SARS Virus
atgtaattttctatatgagcagtgt

SEQ ID NO: 54157 - DNA, 25 bp, SARS Virus
tgtaattttcttaatgagcagtgta

SEQ ID NO: 54158 - DNA, 25 bp, SARS Virus
gtaattttctttatgagcagtgtat

SEQ ID NO: 54159 - DNA, 25 bp, SARS Virus
taattttctttaagagcagtgtatg

SEQ ID NO: 54160 - DNA, 25 bp, SARS Virus
aattttctttataagcagtgtatgt

SEQ ID NO: 54161 - DNA, 25 bp, SARS Virus
attttctttatgagcagtgtatgtt

SEQ ID NO: 54162 - DNA, 25 bp, SARS Virus
ttttctttatgaacagtgtatgtta

SEQ ID NO: 54163 - DNA, 25 bp, SARS Virus
tttctttatgagaagtgtatgttaa

SEQ ID NO: 54164 - DNA, 25 bp, SARS Virus
ttctttatgagcagtgtatgttaac

SEQ ID NO: 54165 - DNA, 25 bp, SARS Virus
tctttatgagcaatgtatgttaacg

SEQ ID NO: 54166 - DNA, 25 bp, SARS Virus
ctttatgagcagagtatgttaacga

SEQ ID NO: 54167 - DNA, 25 bp, SARS Virus
tttatgagcagtatatgttaacgac

SEQ ID NO: 54168 - DNA, 25 bp, SARS Virus
ttatgagcagtgaatgttaacgaca

SEQ ID NO: 54169 - DNA, 25 bp, SARS Virus
tatgagcagtgtatgttaacgacac

SEQ ID NO: 54170 - DNA, 25 bp, SARS Virus
atgagcagtgtaagttaacgacact

SEQ ID NO: 54171 - DNA, 25 bp, SARS Virus
tgagcagtgtatattaacgacacta

SEQ ID NO: 54172 - DNA, 25 bp, SARS Virus
gagcagtgtatgataacgacactac

SEQ ID NO: 54173 - DNA, 25 bp, SARS Virus
agcagtgtatgtaaacgacactact

SEQ ID NO: 54174 - DNA, 25 bp, SARS Virus
gcagtgtatgttaacgacactacta

SEQ ID NO: 54175 - DNA, 25 bp, SARS Virus
cagtgtatgttaacgacactactac

SEQ ID NO: 54176 - DNA, 25 bp, SARS Virus
agtgtatgttaaagacactactact

SEQ ID NO: 54177 - DNA, 25 bp, SARS Virus
gtgtatgttaacaacactactacta

SEQ ID NO: 54178 - DNA, 25 bp, SARS Virus
tgtatgttaacgacactactactaa

SEQ ID NO: 54179 - DNA, 25 bp, SARS Virus
gtatgttaacgaaactactactaat

SEQ ID NO: 54180 - DNA, 25 bp, SARS Virus
tatgttaacgacactactactaata

SEQ ID NO: 54181 - DNA, 25 bp, SARS Virus
atgttaacgacaatactactaataa

SEQ ID NO: 54182 - DNA, 25 bp, SARS Virus
tgttaacgacacaactactaataaa

SEQ ID NO: 54183 - DNA, 25 bp, SARS Virus
gttaacgacactactactaataaag

SEQ ID NO: 54184 - DNA, 25 bp, SARS Virus
ttaacgacactaatactaataaagt

SEQ ID NO: 54185 - DNA, 25 bp, SARS Virus
taacgacactacaactaataaagtt

SEQ ID NO: 54186 - DNA, 25 bp, SARS Virus
aacgacactactactaataaagtta

SEQ ID NO: 54187 - DNA, 25 bp, SARS Virus
acgacactactaataataaagttat

SEQ ID NO: 54188 - DNA, 25 bp, SARS Virus
cgacactactacaaataaagttatt

SEQ ID NO: 54189 - DNA, 25 bp, SARS Virus
gacactactactaataaagttattc

SEQ ID NO: 54190 - DNA, 25 bp, SARS Virus
acactactactaataaagttattct

SEQ ID NO: 54191 - DNA, 25 bp, SARS Virus
cactactactaaaaaagttattctt

SEQ ID NO: 54192 - DNA, 25 bp, SARS Virus
actactactaataaagttattcttc

SEQ ID NO: 54193 - DNA, 25 bp, SARS Virus
ctactactaataaagttattcttcc

SEQ ID NO: 54194 - DNA, 25 bp, SARS Virus
tactactaataaagttattcttcct

SEQ ID NO: 54195 - DNA, 25 bp, SARS Virus
actactaataaaattattcttccta

SEQ ID NO: 54196 - DNA, 25 bp, SARS Virus
ctactaataaagatattcttcctaa

SEQ ID NO: 54197 - DNA, 25 bp, SARS Virus
tactaataaagtaattcttcctaac

SEQ ID NO: 54198 - DNA, 25 bp, SARS Virus
actaataaagttattcttcctaacc

SEQ ID NO: 54199 - DNA, 25 bp, SARS Virus
ctaataaagttaatcttcctaacca

SEQ ID NO: 54200 - DNA, 25 bp, SARS Virus
taataaagttatacttcctaaccat

SEQ ID NO: 54201 - DNA, 25 bp, SARS Virus
aataaagttattattcctaaccata

SEQ ID NO: 54202 - DNA, 25 bp, SARS Virus
ataaagttattcatcctaaccatac

SEQ ID NO: 54203 - DNA, 25 bp, SARS Virus
taaagttattctacctaaccatact

SEQ ID NO: 54204 - DNA, 25 bp, SARS Virus
aaagttattcttactaaccatactg

SEQ ID NO: 54205 - DNA, 25 bp, SARS Virus
aagttattcttcataaccatactga

SEQ ID NO: 54206 - DNA, 25 bp, SARS Virus
agttattcttccaaaccatactgaa

SEQ ID NO: 54207 - DNA, 25 bp, SARS Virus
gttattcttcctaaccatactgaag

SEQ ID NO: 54208 - DNA, 25 bp, SARS Virus
ttattcttcctaaccatactgaagc

SEQ ID NO: 54209 - DNA, 25 bp, SARS Virus
tattcttcctaaacatactgaagca

SEQ ID NO: 54210 - DNA, 25 bp, SARS Virus
attcttcctaacaatactgaagcat

SEQ ID NO: 54211 - DNA, 25 bp, SARS Virus
ttcttcctaaccatactgaagcatc

SEQ ID NO: 54212 - DNA, 25 bp, SARS Virus
tcttcctaaccaaactgaagcatct

SEQ ID NO: 54213 - DNA, 25 bp, SARS Virus
cttcctaaccatactgaagcatctc

SEQ ID NO: 54214 - DNA, 25 bp, SARS Virus
ttcctaaccataatgaagcatctct

SEQ ID NO: 54215 - DNA, 25 bp, SARS Virus
tcctaaccatacagaagcatctctt

SEQ ID NO: 54216 - DNA, 25 bp, SARS Virus
cctaaccatactaaagcatctctta

SEQ ID NO: 54217 - DNA, 25 bp, SARS Virus
ctaaccatactgaagcatctcttag

SEQ ID NO: 54218 - DNA, 25 bp, SARS Virus
taaccatactgaagcatctcttagg

SEQ ID NO: 54219 - DNA, 25 bp, SARS Virus
aaccatactgaaacatctcttagga

SEQ ID NO: 54220 - DNA, 25 bp, SARS Virus
accatactgaagaatctcttaggac

SEQ ID NO: 54221 - DNA, 25 bp, SARS Virus
ccatactgaagcatctcttaggact

SEQ ID NO: 54222 - DNA, 25 bp, SARS Virus
catactgaagcaactcttaggactg

SEQ ID NO: 54223 - DNA, 25 bp, SARS Virus
atactgaagcatatcttaggactgt

SEQ ID NO: 54224 - DNA, 25 bp, SARS Virus
tactgaagcatcacttaggactgta

SEQ ID NO: 54225 - DNA, 25 bp, SARS Virus
actgaagcatctattaggactgtag

SEQ ID NO: 54226 - DNA, 25 bp, SARS Virus
ctgaagcatctcataggactgtaga

SEQ ID NO: 54227 - DNA, 25 bp, SARS Virus
tgaagcatctctaaggactgtagaa

SEQ ID NO: 54228 - DNA, 25 bp, SARS Virus
gaagcatctcttaggactgtagaat

SEQ ID NO: 54229 - DNA, 25 bp, SARS Virus
aagcatctcttaagactgtagaatg

SEQ ID NO: 54230 - DNA, 25 bp, SARS Virus
agcatctcttagaactgtagaatgc

SEQ ID NO: 54231 - DNA, 25 bp, SARS Virus
gcatctcttaggactgtagaatgcg

SEQ ID NO: 54232 - DNA, 25 bp, SARS Virus
catctcttaggaatgtagaatgcgc

SEQ ID NO: 54233 - DNA, 25 bp, SARS Virus
atctcttaggacagtagaatgcgca

SEQ ID NO: 54234 - DNA, 25 bp, SARS Virus
tctcttaggactatagaatgcgcat

SEQ ID NO: 54235 - DNA, 25 bp, SARS Virus
ctcttaggactgaagaatgcgcata

SEQ ID NO: 54236 - DNA, 25 bp, SARS Virus
tcttaggactgtagaatgcgcatat

SEQ ID NO: 54237 - DNA, 25 bp, SARS Virus
cttaggactgtaaaatgcgcatata

SEQ ID NO: 54238 - DNA, 25 bp, SARS Virus
ttaggactgtagaatgcgcatatac

SEQ ID NO: 54239 - DNA, 25 bp, SARS Virus
taggactgtagaatgcgcatatacg

SEQ ID NO: 54240 - DNA, 25 bp, SARS Virus
aggactgtagaaagcgcatatacga

SEQ ID NO: 54241 - DNA, 25 bp, SARS Virus
ggactgtagaatacgcatatacgat

SEQ ID NO: 54242 - DNA, 25 bp, SARS Virus
gactgtagaatgagcatatacgatt

SEQ ID NO: 54243 - DNA, 25 bp, SARS Virus
actgtagaatgcacatatacgattg

SEQ ID NO: 54244 - DNA, 25 bp, SARS Virus
ctgtagaatgcgaatatacgattga

SEQ ID NO: 54245 - DNA, 25 bp, SARS Virus
tgtagaatgcgcatatacgattgaa

SEQ ID NO: 54246 - DNA, 25 bp, SARS Virus
gtagaatgcgcaaatacgattgaat

SEQ ID NO: 54247 - DNA, 25 bp, SARS Virus
tagaatgcgcatatacgattgaatc

SEQ ID NO: 54248 - DNA, 25 bp, SARS Virus
agaatgcgcataaacgattgaatcc

SEQ ID NO: 54249 - DNA, 25 bp, SARS Virus
gaatgcgcatatacgattgaatcca

SEQ ID NO: 54250 - DNA, 25 bp, SARS Virus
aatgcgcatataagattgaatccac

SEQ ID NO: 54251 - DNA, 25 bp, SARS Virus
atgcgcatatacaattgaatccact

SEQ ID NO: 54252 - DNA, 25 bp, SARS Virus
tgcgcatatacgattgaatccactc

SEQ ID NO: 54253 - DNA, 25 bp, SARS Virus
gcgcatatacgaatgaatccactcg

SEQ ID NO: 54254 - DNA, 25 bp, SARS Virus
cgcatatacgatagaatccactcgc

SEQ ID NO: 54255 - DNA, 25 bp, SARS Virus
gcatatacgattaaatccactcgca

SEQ ID NO: 54256 - DNA, 25 bp, SARS Virus
catatacgattgaatccactcgcac

SEQ ID NO: 54257 - DNA, 25 bp, SARS Virus
atatacgattgaatccactcgcaca

SEQ ID NO: 54258 - DNA, 25 bp, SARS Virus
tatacgattgaaaccactcgcacat

SEQ ID NO: 54259 - DNA, 25 bp, SARS Virus
atacgattgaatacactcgcacatg

SEQ ID NO: 54260 - DNA, 25 bp, SARS Virus
tacgattgaatcaactcgcacatgc

SEQ ID NO: 54261 - DNA, 25 bp, SARS Virus
acgattgaatccactcgcacatgcg

SEQ ID NO: 54262 - DNA, 25 bp, SARS Virus
cgattgaatccaatcgcacatgcgg

SEQ ID NO: 54263 - DNA, 25 bp, SARS Virus
gattgaatccacacgcacatgcggt

SEQ ID NO: 54264 - DNA, 25 bp, SARS Virus
attgaatccactagcacatgcggtt

SEQ ID NO: 54265 - DNA, 25 bp, SARS Virus
ttgaatccactcacacatgcggtta

SEQ ID NO: 54266 - DNA, 25 bp, SARS Virus
tgaatccactcgaacatgcggttag

SEQ ID NO: 54267 - DNA, 25 bp, SARS Virus
gaatccactcgcacatgcggttagt

SEQ ID NO: 54268 - DNA, 25 bp, SARS Virus
aatccactcgcaaatgcggttagta

SEQ ID NO: 54269 - DNA, 25 bp, SARS Virus
atccactcgcacatgcggttagtaa

SEQ ID NO: 54270 - DNA, 25 bp, SARS Virus
tccactcgcacaagcggttagtaat

SEQ ID NO: 54271 - DNA, 25 bp, SARS Virus
ccactcgcacatacggttagtaata

SEQ ID NO: 54272 - DNA, 25 bp, SARS Virus
cactcgcacatgaggttagtaataa

SEQ ID NO: 54273 - DNA, 25 bp, SARS Virus
actcgcacatgcagttagtaataat

SEQ ID NO: 54274 - DNA, 25 bp, SARS Virus
ctcgcacatgcgattagtaataatt

SEQ ID NO: 54275 - DNA, 25 bp, SARS Virus
tcgcacatgcggatagtaataattt

SEQ ID NO: 54276 - DNA, 25 bp, SARS Virus
cgcacatgcggtaagtaataatttc

SEQ ID NO: 54277 - DNA, 25 bp, SARS Virus
gcacatgcggttagtaataatttct

SEQ ID NO: 54278 - DNA, 25 bp, SARS Virus
cacatgcggttaataataatttctg

SEQ ID NO: 54279 - DNA, 25 bp, SARS Virus
acatgcggttagaaataatttctga

SEQ ID NO: 54280 - DNA, 25 bp, SARS Virus
catgcggttagtaataatttctgac

SEQ ID NO: 54281 - DNA, 25 bp, SARS Virus
atgcggttagtaataatttctgaca

SEQ ID NO: 54282 - DNA, 25 bp, SARS Virus
tgcggttagtaaaaatttctgacat

SEQ ID NO: 54283 - DNA, 25 bp, SARS Virus
gcggttagtaataatttctgacatg

SEQ ID NO: 54284 - DNA, 25 bp, SARS Virus
cggttagtaataatttctgacatgt

SEQ ID NO: 54285 - DNA, 25 bp, SARS Virus
ggttagtaataaattctgacatgtt

SEQ ID NO: 54286 - DNA, 25 bp, SARS Virus
gttagtaataatatctgacatgtta

SEQ ID NO: 54287 - DNA, 25 bp, SARS Virus
ttagtaataattactgacatgttaa

SEQ ID NO: 54288 - DNA, 25 bp, SARS Virus
tagtaataatttatgacatgttaag

SEQ ID NO: 54289 - DNA, 25 bp, SARS Virus
agtaataatttcagacatgttaaga

SEQ ID NO: 54290 - DNA, 25 bp, SARS Virus
gtaataatttctaacatgttaagac

SEQ ID NO: 54291 - DNA, 25 bp, SARS Virus
taataatttctgacatgttaagacg

SEQ ID NO: 54292 - DNA, 25 bp, SARS Virus
aataatttctgaaatgttaagacgc

SEQ ID NO: 54293 - DNA, 25 bp, SARS Virus
ataatttctgacatgttaagacgct

SEQ ID NO: 54294 - DNA, 25 bp, SARS Virus
taatttctgacaagttaagacgcta

SEQ ID NO: 54295 - DNA, 25 bp, SARS Virus
aatttctgacatattaagacgctac

SEQ ID NO: 54296 - DNA, 25 bp, SARS Virus
atttctgacatgataagacgctacg

SEQ ID NO: 54297 - DNA, 25 bp, SARS Virus
ccgtgatcatgactacagcagatgt

SEQ ID NO: 54298 - DNA, 25 bp, SARS Virus
cgtgatcatgaccacagcagatgtc

SEQ ID NO: 54299 - DNA, 25 bp, SARS Virus
gtgatcatgactccagcagatgtcc

SEQ ID NO: 54300 - DNA, 25 bp, SARS Virus
tgatcatgactacagcagatgtccc

SEQ ID NO: 54301 - DNA, 25 bp, SARS Virus
gatcatgactaccgcagatgtcccg

SEQ ID NO: 54302 - DNA, 25 bp, SARS Virus
atcatgactacaccagatgtcccga

SEQ ID NO: 54303 - DNA, 25 bp, SARS Virus
tcatgactacagcagatgtcccgaa

SEQ ID NO: 54304 - DNA, 25 bp, SARS Virus
catgactacagccgatgtcccgaaa

SEQ ID NO: 54305 - DNA, 25 bp, SARS Virus
atgactacagcacatgtcccgaaaa

SEQ ID NO: 54306 - DNA, 25 bp, SARS Virus
tgactacagcagctgtcccgaaaac

SEQ ID NO: 54307 - DNA, 25 bp, SARS Virus
gactacagcagacgtcccgaaaact

SEQ ID NO: 54308 - DNA, 25 bp, SARS Virus
actacagcagatctcccgaaaacta

SEQ ID NO: 54309 - DNA, 25 bp, SARS Virus
ctacagcagatgccccgaaaactat

SEQ ID NO: 54310 - DNA, 25 bp, SARS Virus
tacagcagatgtcccgaaaactata

SEQ ID NO: 54311 - DNA, 25 bp, SARS Virus
acagcagatgtcccgaaaactataa

SEQ ID NO: 54312 - DNA, 25 bp, SARS Virus
cagcagatgtcccgaaaactataaa

SEQ ID NO: 54313 - DNA, 25 bp, SARS Virus
agcagatgtccccaaaactataaat

SEQ ID NO: 54314 - DNA, 25 bp, SARS Virus
gcagatgtcccgcaaactataaatg

SEQ ID NO: 54315 - DNA, 25 bp, SARS Virus
cagatgtcccgacaactataaatgt

SEQ ID NO: 54316 - DNA, 25 bp, SARS Virus
agatgtcccgaacactataaatgtt

SEQ ID NO: 54317 - DNA, 25 bp, SARS Virus
gatgtcccgaaacctataaatgttg

SEQ ID NO: 54318 - DNA, 25 bp, SARS Virus
atgtcccgaaaactataaatgttgc

SEQ ID NO: 54319 - DNA, 25 bp, SARS Virus
tgtcccgaaaaccataaatgttgct

SEQ ID NO: 54320 - DNA, 25 bp, SARS Virus
gtcccgaaaactctaaatgttgctt

SEQ ID NO: 54321 - DNA, 25 bp, SARS Virus
tcccgaaaactacaaatgttgcttt

SEQ ID NO: 54322 - DNA, 25 bp, SARS Virus
cccgaaaactatcaatgttgctttt

SEQ ID NO: 54323 - DNA, 25 bp, SARS Virus
ccgaaaactatacatgttgcttttt

SEQ ID NO: 54324 - DNA, 25 bp, SARS Virus
cgaaaactataactgttgctttttc

SEQ ID NO: 54325 - DNA, 25 bp, SARS Virus
gaaaactataaacgttgctttttca

SEQ ID NO: 54326 - DNA, 25 bp, SARS Virus
aaaactataaatcttgctttttcaa

SEQ ID NO: 54327 - DNA, 25 bp, SARS Virus
aaactataaatgctgctttttcaac

SEQ ID NO: 54328 - DNA, 25 bp, SARS Virus
aactataaatgtcgctttttcaacg

SEQ ID NO: 54329 - DNA, 25 bp, SARS Virus
actataaatgttcctttttcaacga

SEQ ID NO: 54330 - DNA, 25 bp, SARS Virus
ctataaatgttgctttttcaacgac

SEQ ID NO: 54331 - DNA, 25 bp, SARS Virus
tataaatgttgccttttcaacgacc

SEQ ID NO: 54332 - DNA, 25 bp, SARS Virus
ataaatgttgctctttcaacgacca

SEQ ID NO: 54333 - DNA, 25 bp, SARS Virus
taaatgttgcttcttcaacgaccaa

SEQ ID NO: 54334 - DNA, 25 bp, SARS Virus
aaatgttgctttctcaacgaccaaa

SEQ ID NO: 54335 - DNA, 25 bp, SARS Virus
aatgttgcttttccaacgaccaaaa

SEQ ID NO: 54336 - DNA, 25 bp, SARS Virus
atgttgctttttcaacgaccaaaac

SEQ ID NO: 54337 - DNA, 25 bp, SARS Virus
tgttgctttttccacgaccaaaacg

SEQ ID NO: 54338 - DNA, 25 bp, SARS Virus
gttgctttttcaccgaccaaaacgt

SEQ ID NO: 54339 - DNA, 25 bp, SARS Virus
ttgctttttcaacgaccaaaacgtt

SEQ ID NO: 54340 - DNA, 25 bp, SARS Virus
tgctttttcaaccaccaaaacgttt

SEQ ID NO: 54341 - DNA, 25 bp, SARS Virus
gctttttcaacgcccaaaacgtttc

SEQ ID NO: 54342 - DNA, 25 bp, SARS Virus
ctttttcaacgaccaaaacgtttca

SEQ ID NO: 54343 - DNA, 25 bp, SARS Virus
tttttcaacgaccaaaacgtttcaa

SEQ ID NO: 54344 - DNA, 25 bp, SARS Virus
ttttcaacgacccaaacgtttcaag

SEQ ID NO: 54345 - DNA, 25 bp, SARS Virus
tttcaacgaccacaacgtttcaagg

SEQ ID NO: 54346 - DNA, 25 bp, SARS Virus
ttcaacgaccaacacgtttcaagga

SEQ ID NO: 54347 - DNA, 25 bp, SARS Virus
tcaacgaccaaaccgtttcaaggat

SEQ ID NO: 54348 - DNA, 25 bp, SARS Virus
caacgaccaaaacgtttcaaggatt

SEQ ID NO: 54349 - DNA, 25 bp, SARS Virus
aacgaccaaaacctttcaaggattt

SEQ ID NO: 54350 - DNA, 25 bp, SARS Virus
acgaccaaaacgcttcaaggatttt

SEQ ID NO: 54351 - DNA, 25 bp, SARS Virus
cgaccaaaacgtctcaaggattttt

SEQ ID NO: 54352 - DNA, 25 bp, SARS Virus
gaccaaaacgttccaaggatttttg

SEQ ID NO: 54353 - DNA, 25 bp, SARS Virus
accaaaacgtttcaaggatttttga

SEQ ID NO: 54354 - DNA, 25 bp, SARS Virus
ccaaaacgtttccaggatttttgat

SEQ ID NO: 54355 - DNA, 25 bp, SARS Virus
caaaacgtttcacggatttttgatt

SEQ ID NO: 54356 - DNA, 25 bp, SARS Virus
aaaacgtttcaacgatttttgatta

SEQ ID NO: 54357 - DNA, 25 bp, SARS Virus
aaacgtttcaagcatttttgattaa

SEQ ID NO: 54358 - DNA, 25 bp, SARS Virus
aacgtttcaaggctttttgattaac

SEQ ID NO: 54359 - DNA, 25 bp, SARS Virus
acgtttcaaggacttttgattaacg

SEQ ID NO: 54360 - DNA, 25 bp, SARS Virus
cgtttcaaggatctttgattaacga

SEQ ID NO: 54361 - DNA, 25 bp, SARS Virus
gtttcaaggattcttgattaacgac

SEQ ID NO: 54362 - DNA, 25 bp, SARS Virus
tttcaaggatttctgattaacgaca

SEQ ID NO: 54363 - DNA, 25 bp, SARS Virus
ttcaaggattttcgattaacgacag

SEQ ID NO: 54364 - DNA, 25 bp, SARS Virus
tcaaggatttttcattaacgacagc

SEQ ID NO: 54365 - DNA, 25 bp, SARS Virus
caaggatttttgcttaacgacagcg

SEQ ID NO: 54366 - DNA, 25 bp, SARS Virus
aaggatttttgactaacgacagcga

SEQ ID NO: 54367 - DNA, 25 bp, SARS Virus
aggatttttgatcaacgacagcgaa

SEQ ID NO: 54368 - DNA, 25 bp, SARS Virus
ggatttttgattcacgacagcgaag

SEQ ID NO: 54369 - DNA, 25 bp, SARS Virus
gatttttgattaccgacagcgaagg

SEQ ID NO: 54370 - DNA, 25 bp, SARS Virus
atttttgattaacgacagcgaaggt

SEQ ID NO: 54371 - DNA, 25 bp, SARS Virus
tttttgattaaccacagcgaaggtc

SEQ ID NO: 54372 - DNA, 25 bp, SARS Virus
ttttgattaacgccagcgaaggtcc

SEQ ID NO: 54373 - DNA, 25 bp, SARS Virus
tttgattaacgacagcgaaggtcct

SEQ ID NO: 54374 - DNA, 25 bp, SARS Virus
ttgattaacgaccgcgaaggtcctc

SEQ ID NO: 54375 - DNA, 25 bp, SARS Virus
tgattaacgacaccgaaggtcctct

SEQ ID NO: 54376 - DNA, 25 bp, SARS Virus
gattaacgacagcgaaggtcctctt

SEQ ID NO: 54377 - DNA, 25 bp, SARS Virus
attaacgacagccaaggtcctcttc

SEQ ID NO: 54378 - DNA, 25 bp, SARS Virus
ttaacgacagcgcaggtcctcttcc

SEQ ID NO: 54379 - DNA, 25 bp, SARS Virus
taacgacagcgacggtcctcttcct

SEQ ID NO: 54380 - DNA, 25 bp, SARS Virus
aacgacagcgaacgtcctcttccta

SEQ ID NO: 54381 - DNA, 25 bp, SARS Virus
acgacagcgaagctcctcttcctac

SEQ ID NO: 54382 - DNA, 25 bp, SARS Virus
cgacagcgaaggccctcttcctact

SEQ ID NO: 54383 - DNA, 25 bp, SARS Virus
gacagcgaaggtcctcttcctactc

SEQ ID NO: 54384 - DNA, 25 bp, SARS Virus
acagcgaaggtcctcttcctactcc

SEQ ID NO: 54385 - DNA, 25 bp, SARS Virus
cagcgaaggtccccttcctactcct

SEQ ID NO: 54386 - DNA, 25 bp, SARS Virus
agcgaaggtcctcttcctactcctt

SEQ ID NO: 54387 - DNA, 25 bp, SARS Virus
gcgaaggtcctcctcctactccttc

SEQ ID NO: 54388 - DNA, 25 bp, SARS Virus
cgaaggtcctctccctactccttcc

SEQ ID NO: 54389 - DNA, 25 bp, SARS Virus
gaaggtcctcttcctactccttccg

SEQ ID NO: 54390 - DNA, 25 bp, SARS Virus
aaggtcctcttcctactccttccgt

SEQ ID NO: 54391 - DNA, 25 bp, SARS Virus
aggtcctcttcccactccttccgtt

SEQ ID NO: 54392 - DNA, 25 bp, SARS Virus
ggtcctcttcctcctccttccgtta

SEQ ID NO: 54393 - DNA, 25 bp, SARS Virus
gtcctcttcctactccttccgttaa

SEQ ID NO: 54394 - DNA, 25 bp, SARS Virus
tcctcttcctaccccttccgttaaa

SEQ ID NO: 54395 - DNA, 25 bp, SARS Virus
cctcttcctactccttccgttaaat

SEQ ID NO: 54396 - DNA, 25 bp, SARS Virus
ctcttcctactccttccgttaaata

SEQ ID NO: 54397 - DNA, 25 bp, SARS Virus
tcttcctactccctccgttaaataa

SEQ ID NO: 54398 - DNA, 25 bp, SARS Virus
cttcctactcctcccgttaaataat

SEQ ID NO: 54399 - DNA, 25 bp, SARS Virus
ttcctactccttccgttaaataatc

SEQ ID NO: 54400 - DNA, 25 bp, SARS Virus
tcctactccttccgttaaataatct

SEQ ID NO: 54401 - DNA, 25 bp, SARS Virus
cctactccttcccttaaataatctg

SEQ ID NO: 54402 - DNA, 25 bp, SARS Virus
ctactccttccgctaaataatctga

SEQ ID NO: 54403 - DNA, 25 bp, SARS Virus
tactccttccgtcaaataatctgag

SEQ ID NO: 54404 - DNA, 25 bp, SARS Virus
actccttccgttcaataatctgaga

SEQ ID NO: 54405 - DNA, 25 bp, SARS Virus
ctccttccgttacataatctgagaa

SEQ ID NO: 54406 - DNA, 25 bp, SARS Virus
tccttccgttaactaatctgagaat

SEQ ID NO: 54407 - DNA, 25 bp, SARS Virus
ccttccgttaaacaatctgagaatg

SEQ ID NO: 54408 - DNA, 25 bp, SARS Virus
cttccgttaaatcatctgagaatga

SEQ ID NO: 54409 - DNA, 25 bp, SARS Virus
ttccgttaaatactctgagaatgaa

SEQ ID NO: 54410 - DNA, 25 bp, SARS Virus
tccgttaaataacctgagaatgaaa

SEQ ID NO: 54411 - DNA, 25 bp, SARS Virus
ccgttaaataatctgagaatgaaac

SEQ ID NO: 54412 - DNA, 25 bp, SARS Virus
cgttaaataatccgagaatgaaaca

SEQ ID NO: 54413 - DNA, 25 bp, SARS Virus
gttaaataatctcagaatgaaacat

SEQ ID NO: 54414 - DNA, 25 bp, SARS Virus
ttaaataatctgcgaatgaaacatc

SEQ ID NO: 54415 - DNA, 25 bp, SARS Virus
taaataatctgacaatgaaacatca

SEQ ID NO: 54416 - DNA, 25 bp, SARS Virus
aaataatctgagcatgaaacatcaa

SEQ ID NO: 54417 - DNA, 25 bp, SARS Virus
aataatctgagactgaaacatcaat

SEQ ID NO: 54418 - DNA, 25 bp, SARS Virus
ataatctgagaacgaaacatcaatt

SEQ ID NO: 54419 - DNA, 25 bp, SARS Virus
taatctgagaatcaaacatcaattc

SEQ ID NO: 54420 - DNA, 25 bp, SARS Virus
aatctgagaatgcaacatcaattct

SEQ ID NO: 54421 - DNA, 25 bp, SARS Virus
atctgagaatgacacatcaattctc

SEQ ID NO: 54422 - DNA, 25 bp, SARS Virus
tctgagaatgaaccatcaattctcc

SEQ ID NO: 54423 - DNA, 25 bp, SARS Virus
ctgagaatgaaacatcaattctccg

SEQ ID NO: 54424 - DNA, 25 bp, SARS Virus
tgagaatgaaacctcaattctccgt

SEQ ID NO: 54425 - DNA, 25 bp, SARS Virus
gagaatgaaacaccaattctccgta

SEQ ID NO: 54426 - DNA, 25 bp, SARS Virus
agaatgaaacatcaattctccgtat

SEQ ID NO: 54427 - DNA, 25 bp, SARS Virus
gaatgaaacatccattctccgtatg

SEQ ID NO: 54428 - DNA, 25 bp, SARS Virus
aatgaaacatcacttctccgtatga

SEQ ID NO: 54429 - DNA, 25 bp, SARS Virus
atgaaacatcaactctccgtatgat

SEQ ID NO: 54430 - DNA, 25 bp, SARS Virus
tgaaacatcaatcctccgtatgata

SEQ ID NO: 54431 - DNA, 25 bp, SARS Virus
gaaacatcaattctccgtatgatac

SEQ ID NO: 54432 - DNA, 25 bp, SARS Virus
aaacatcaattccccgtatgataca

SEQ ID NO: 54433 - DNA, 25 bp, SARS Virus
aacatcaattctccgtatgatacag

SEQ ID NO: 54434 - DNA, 25 bp, SARS Virus
acatcaattctccgtatgatacaga

SEQ ID NO: 54435 - DNA, 25 bp, SARS Virus
catcaattctccctatgatacagat

SEQ ID NO: 54436 - DNA, 25 bp, SARS Virus
atcaattctccgcatgatacagatt

SEQ ID NO: 54437 - DNA, 25 bp, SARS Virus
tcaattctccgtctgatacagattg

SEQ ID NO: 54438 - DNA, 25 bp, SARS Virus
caattctccgtacgatacagattga

SEQ ID NO: 54439 - DNA, 25 bp, SARS Virus
aattctccgtatcatacagattgat

SEQ ID NO: 54440 - DNA, 25 bp, SARS Virus
attctccgtatgctacagattgatg

SEQ ID NO: 54441 - DNA, 25 bp, SARS Virus
ttctccgtatgacacagattgatgg

SEQ ID NO: 54442 - DNA, 25 bp, SARS Virus
tctccgtatgatccagattgatggt

SEQ ID NO: 54443 - DNA, 25 bp, SARS Virus
ctccgtatgatacagattgatggtt

SEQ ID NO: 54444 - DNA, 25 bp, SARS Virus
tccgtatgataccgattgatggttg

SEQ ID NO: 54445 - DNA, 25 bp, SARS Virus
ccgtatgatacacattgatggttgt

SEQ ID NO: 54446 - DNA, 25 bp, SARS Virus
cgtatgatacagcttgatggttgta

SEQ ID NO: 54447 - DNA, 25 bp, SARS Virus
gtatgatacagactgatggttgtac

SEQ ID NO: 54448 - DNA, 25 bp, SARS Virus
tatgatacagatcgatggttgtact

SEQ ID NO: 54449 - DNA, 25 bp, SARS Virus
atgatacagattcatggttgtactt

SEQ ID NO: 54450 - DNA, 25 bp, SARS Virus
tgatacagattgctggttgtacttc

SEQ ID NO: 54451 - DNA, 25 bp, SARS Virus
gatacagattgacggttgtacttct

SEQ ID NO: 54452 - DNA, 25 bp, SARS Virus
atacagattgatcgttgtacttctc

SEQ ID NO: 54453 - DNA, 25 bp, SARS Virus
tacagattgatgcttgtacttctct

SEQ ID NO: 54454 - DNA, 25 bp, SARS Virus
acagattgatggctgtacttctctg

SEQ ID NO: 54455 - DNA, 25 bp, SARS Virus
cagattgatggtcgtacttctctga

SEQ ID NO: 54456 - DNA, 25 bp, SARS Virus
agattgatggttctacttctctgat

SEQ ID NO: 54457 - DNA, 25 bp, SARS Virus
gattgatggttgcacttctctgata

SEQ ID NO: 54458 - DNA, 25 bp, SARS Virus
attgatggttgtccttctctgataa

SEQ ID NO: 54459 - DNA, 25 bp, SARS Virus
ttgatggttgtacttctctgataaa

SEQ ID NO: 54460 - DNA, 25 bp, SARS Virus
tgatggttgtacctctctgataaat

SEQ ID NO: 54461 - DNA, 25 bp, SARS Virus
gatggttgtactcctctgataaata

SEQ ID NO: 54462 - DNA, 25 bp, SARS Virus
atggttgtacttctctgataaatat

SEQ ID NO: 54463 - DNA, 25 bp, SARS Virus
tggttgtacttccctgataaatatt

SEQ ID NO: 54464 - DNA, 25 bp, SARS Virus
ggttgtacttctctgataaatattg

SEQ ID NO: 54465 - DNA, 25 bp, SARS Virus
gttgtacttctccgataaatattga

SEQ ID NO: 54466 - DNA, 25 bp, SARS Virus
ttgtacttctctcataaatattgaa

SEQ ID NO: 54467 - DNA, 25 bp, SARS Virus
tgtacttctctgctaaatattgaac

SEQ ID NO: 54468 - DNA, 25 bp, SARS Virus
gtacttctctgacaaatattgaacc

SEQ ID NO: 54469 - DNA, 25 bp, SARS Virus
tacttctctgatcaatattgaacca

SEQ ID NO: 54470 - DNA, 25 bp, SARS Virus
acttctctgatacatattgaaccaa

SEQ ID NO: 54471 - DNA, 25 bp, SARS Virus
cttctctgataactattgaaccaat

SEQ ID NO: 54472 - DNA, 25 bp, SARS Virus
ttctctgataaacattgaaccaatt

SEQ ID NO: 54473 - DNA, 25 bp, SARS Virus
tctctgataaatcttgaaccaattt

SEQ ID NO: 54474 - DNA, 25 bp, SARS Virus
ctctgataaatactgaaccaatttc

SEQ ID NO: 54475 - DNA, 25 bp, SARS Virus
tctgataaatatcgaaccaatttct

SEQ ID NO: 54476 - DNA, 25 bp, SARS Virus
ctgataaatattcaaccaatttcta

SEQ ID NO: 54477 - DNA, 25 bp, SARS Virus
tgataaatattgcaccaatttctaa

SEQ ID NO: 54478 - DNA, 25 bp, SARS Virus
gataaatattgacccaatttctaac

SEQ ID NO: 54479 - DNA, 25 bp, SARS Virus
ataaatattgaaccaatttctaaca

SEQ ID NO: 54480 - DNA, 25 bp, SARS Virus
taaatattgaaccaatttctaacag

SEQ ID NO: 54481 - DNA, 25 bp, SARS Virus
aaatattgaacccatttctaacagg

SEQ ID NO: 54482 - DNA, 25 bp, SARS Virus
aatattgaaccactttctaacaggt

SEQ ID NO: 54483 - DNA, 25 bp, SARS Virus
atattgaaccaacttctaacaggtc

SEQ ID NO: 54484 - DNA, 25 bp, SARS Virus
tattgaaccaatctctaacaggtcg

SEQ ID NO: 54485 - DNA, 25 bp, SARS Virus
attgaaccaattcctaacaggtcgc

SEQ ID NO: 54486 - DNA, 25 bp, SARS Virus
ttgaaccaatttctaacaggtcgcc

SEQ ID NO: 54487 - DNA, 25 bp, SARS Virus
tgaaccaatttccaacaggtcgcca

SEQ ID NO: 54488 - DNA, 25 bp, SARS Virus
gaaccaatttctcacaggtcgccaa

SEQ ID NO: 54489 - DNA, 25 bp, SARS Virus
aaccaatttctaccaggtcgccaac

SEQ ID NO: 54490 - DNA, 25 bp, SARS Virus
accaatttctaacaggtcgccaacg

SEQ ID NO: 54491 - DNA, 25 bp, SARS Virus
ccaatttctaaccggtcgccaacga

SEQ ID NO: 54492 - DNA, 25 bp, SARS Virus
caatttctaacacgtcgccaacgac

SEQ ID NO: 54493 - DNA, 25 bp, SARS Virus
aatttctaacagctcgccaacgaca

SEQ ID NO: 54494 - DNA, 25 bp, SARS Virus
atttctaacaggccgccaacgacag

SEQ ID NO: 54495 - DNA, 25 bp, SARS Virus
tttctaacaggtcgccaacgacagg

SEQ ID NO: 54496 - DNA, 25 bp, SARS Virus
ttctaacaggtccccaacgacaggt

SEQ ID NO: 54497 - DNA, 25 bp, SARS Virus
tctaacaggtcgccaacgacaggta

SEQ ID NO: 54498 - DNA, 25 bp, SARS Virus
ctaacaggtcgccaacgacaggtac

SEQ ID NO: 54499 - DNA, 25 bp, SARS Virus
taacaggtcgcccacgacaggtact

SEQ ID NO: 54500 - DNA, 25 bp, SARS Virus
aacaggtcgccaccgacaggtactg

SEQ ID NO: 54501 - DNA, 25 bp, SARS Virus
acaggtcgccaacgacaggtactga

SEQ ID NO: 54502 - DNA, 25 bp, SARS Virus
caggtcgccaaccacaggtactgaa

SEQ ID NO: 54503 - DNA, 25 bp, SARS Virus
aggtcgccaacgccaggtactgaaa

SEQ ID NO: 54504 - DNA, 25 bp, SARS Virus
ggtcgccaacgacaggtactgaaaa

SEQ ID NO: 54505 - DNA, 25 bp, SARS Virus
gtcgccaacgaccggtactgaaaaa

SEQ ID NO: 54506 - DNA, 25 bp, SARS Virus
tcgccaacgacacgtactgaaaaag

SEQ ID NO: 54507 - DNA, 25 bp, SARS Virus
cgccaacgacagctactgaaaaagt

SEQ ID NO: 54508 - DNA, 25 bp, SARS Virus
gccaacgacaggcactgaaaaagtt

SEQ ID NO: 54509 - DNA, 25 bp, SARS Virus
ccaacgacaggtcctgaaaaagttc

SEQ ID NO: 54510 - DNA, 25 bp, SARS Virus
caacgacaggtactgaaaaagttca

SEQ ID NO: 54511 - DNA, 25 bp, SARS Virus
aacgacaggtaccgaaaaagttcaa

SEQ ID NO: 54512 - DNA, 25 bp, SARS Virus
acgacaggtactcaaaaagttcaaa

SEQ ID NO: 54513 - DNA, 25 bp, SARS Virus
cgacaggtactgcaaaagttcaaat

SEQ ID NO: 54514 - DNA, 25 bp, SARS Virus
gacaggtactgacaaagttcaaatc

SEQ ID NO: 54515 - DNA, 25 bp, SARS Virus
acaggtactgaacaagttcaaatct

SEQ ID NO: 54516 - DNA, 25 bp, SARS Virus
caggtactgaaacagttcaaatctc

SEQ ID NO: 54517 - DNA, 25 bp, SARS Virus
aggtactgaaaacgttcaaatctca

SEQ ID NO: 54518 - DNA, 25 bp, SARS Virus
ggtactgaaaaacttcaaatctcat

SEQ ID NO: 54519 - DNA, 25 bp, SARS Virus
gtactgaaaaagctcaaatctcatc

SEQ ID NO: 54520 - DNA, 25 bp, SARS Virus
tactgaaaaagtccaaatctcatct

SEQ ID NO: 54521 - DNA, 25 bp, SARS Virus
actgaaaaagttcaaatctcatcta

SEQ ID NO: 54522 - DNA, 25 bp, SARS Virus
ctgaaaaagttccaatctcatctac

SEQ ID NO: 54523 - DNA, 25 bp, SARS Virus
tgaaaaagttcacatctcatctacc

SEQ ID NO: 54524 - DNA, 25 bp, SARS Virus
gaaaaagttcaactctcatctacca

SEQ ID NO: 54525 - DNA, 25 bp, SARS Virus
aaaaagttcaaacctcatctaccac

SEQ ID NO: 54526 - DNA, 25 bp, SARS Virus
aaaagttcaaatctcatctaccact

SEQ ID NO: 54527 - DNA, 25 bp, SARS Virus
aaagttcaaatcccatctaccactg

SEQ ID NO: 54528 - DNA, 25 bp, SARS Virus
aagttcaaatctcatctaccactgt

SEQ ID NO: 54529 - DNA, 25 bp, SARS Virus
agttcaaatctcctctaccactgta

SEQ ID NO: 54530 - DNA, 25 bp, SARS Virus
gttcaaatctcacctaccactgtac

SEQ ID NO: 54531 - DNA, 25 bp, SARS Virus
ttcaaatctcatctaccactgtacc

SEQ ID NO: 54532 - DNA, 25 bp, SARS Virus
tcaaatctcatccaccactgtacca

SEQ ID NO: 54533 - DNA, 25 bp, SARS Virus
caaatctcatctcccactgtaccat

SEQ ID NO: 54534 - DNA, 25 bp, SARS Virus
aaatctcatctaccactgtaccatg

SEQ ID NO: 54535 - DNA, 25 bp, SARS Virus
aatctcatctaccactgtaccatgg

SEQ ID NO: 54536 - DNA, 25 bp, SARS Virus
atctcatctacccctgtaccatggt

SEQ ID NO: 54537 - DNA, 25 bp, SARS Virus
tctcatctaccactgtaccatggtg

SEQ ID NO: 54538 - DNA, 25 bp, SARS Virus
ctcatctaccaccgtaccatggtgt

SEQ ID NO: 54539 - DNA, 25 bp, SARS Virus
tcatctaccactctaccatggtgta

SEQ ID NO: 54540 - DNA, 25 bp, SARS Virus
catctaccactgcaccatggtgtat

SEQ ID NO: 54541 - DNA, 25 bp, SARS Virus
atctaccactgtcccatggtgtata

SEQ ID NO: 54542 - DNA, 25 bp, SARS Virus
tctaccactgtaccatggtgtatat

SEQ ID NO: 54543 - DNA, 25 bp, SARS Virus
ctaccactgtaccatggtgtatata

SEQ ID NO: 54544 - DNA, 25 bp, SARS Virus
taccactgtaccctggtgtatatag

SEQ ID NO: 54545 - DNA, 25 bp, SARS Virus
accactgtaccacggtgtatatagt

SEQ ID NO: 54546 - DNA, 25 bp, SARS Virus
ccactgtaccatcgtgtatatagtg

SEQ ID NO: 54547 - DNA, 25 bp, SARS Virus
cactgtaccatgctgtatatagtgc

SEQ ID NO: 54548 - DNA, 25 bp, SARS Virus
actgtaccatggcgtatatagtgca

SEQ ID NO: 54549 - DNA, 25 bp, SARS Virus
ctgtaccatggtctatatagtgcag

SEQ ID NO: 54550 - DNA, 25 bp, SARS Virus
tgtaccatggtgcatatagtgcagt

SEQ ID NO: 54551 - DNA, 25 bp, SARS Virus
gtaccatggtgtctatagtgcagtc

SEQ ID NO: 54552 - DNA, 25 bp, SARS Virus
taccatggtgtacatagtgcagtcg

SEQ ID NO: 54553 - DNA, 25 bp, SARS Virus
accatggtgtatctagtgcagtcgc

SEQ ID NO: 54554 - DNA, 25 bp, SARS Virus
ccatggtgtatacagtgcagtcgca

SEQ ID NO: 54555 - DNA, 25 bp, SARS Virus
catggtgtatatcgtgcagtcgcag

SEQ ID NO: 54556 - DNA, 25 bp, SARS Virus
atggtgtatatactgcagtcgcaga

SEQ ID NO: 54557 - DNA, 25 bp, SARS Virus
tggtgtatatagcgcagtcgcagat

SEQ ID NO: 54558 - DNA, 25 bp, SARS Virus
ggtgtatatagtccagtcgcagatt

SEQ ID NO: 54559 - DNA, 25 bp, SARS Virus
gtgtatatagtgcagtcgcagattg

SEQ ID NO: 54560 - DNA, 25 bp, SARS Virus
tgtatatagtgccgtcgcagattga

SEQ ID NO: 54561 - DNA, 25 bp, SARS Virus
gtatatagtgcactcgcagattgat

SEQ ID NO: 54562 - DNA, 25 bp, SARS Virus
tatatagtgcagccgcagattgatt

SEQ ID NO: 54563 - DNA, 25 bp, SARS Virus
atatagtgcagtcgcagattgattt

SEQ ID NO: 54564 - DNA, 25 bp, SARS Virus
tatagtgcagtcccagattgattta

SEQ ID NO: 54565 - DNA, 25 bp, SARS Virus
atagtgcagtcgcagattgatttat

SEQ ID NO: 54566 - DNA, 25 bp, SARS Virus
tagtgcagtcgccgattgatttatg

SEQ ID NO: 54567 - DNA, 25 bp, SARS Virus
agtgcagtcgcacattgatttatgt

SEQ ID NO: 54568 - DNA, 25 bp, SARS Virus
gtgcagtcgcagcttgatttatgtg

SEQ ID NO: 54569 - DNA, 25 bp, SARS Virus
tgcagtcgcagactgatttatgtgt

SEQ ID NO: 54570 - DNA, 25 bp, SARS Virus
gcagtcgcagatcgatttatgtgtt

SEQ ID NO: 54571 - DNA, 25 bp, SARS Virus
cagtcgcagattcatttatgtgtta

SEQ ID NO: 54572 - DNA, 25 bp, SARS Virus
agtcgcagattgctttatgtgttac

SEQ ID NO: 54573 - DNA, 25 bp, SARS Virus
gtcgcagattgacttatgtgttacc

SEQ ID NO: 54574 - DNA, 25 bp, SARS Virus
tcgcagattgatctatgtgttaccg

SEQ ID NO: 54575 - DNA, 25 bp, SARS Virus
cgcagattgattcatgtgttaccga

SEQ ID NO: 54576 - DNA, 25 bp, SARS Virus
gcagattgatttctgtgttaccgac

SEQ ID NO: 54577 - DNA, 25 bp, SARS Virus
cagattgatttacgtgttaccgact

SEQ ID NO: 54578 - DNA, 25 bp, SARS Virus
agattgatttatctgttaccgacta

SEQ ID NO: 54579 - DNA, 25 bp, SARS Virus
gattgatttatgcgttaccgactaa

SEQ ID NO: 54580 - DNA, 25 bp, SARS Virus
attgatttatgtcttaccgactaaa

SEQ ID NO: 54581 - DNA, 25 bp, SARS Virus
ttgatttatgtgctaccgactaaat

SEQ ID NO: 54582 - DNA, 25 bp, SARS Virus
tgatttatgtgtcaccgactaaatc

SEQ ID NO: 54583 - DNA, 25 bp, SARS Virus
gatttatgtgttcccgactaaatca

SEQ ID NO: 54584 - DNA, 25 bp, SARS Virus
atttatgtgttaccgactaaatcag

SEQ ID NO: 54585 - DNA, 25 bp, SARS Virus
tttatgtgttaccgactaaatcaga

SEQ ID NO: 54586 - DNA, 25 bp, SARS Virus
ttatgtgttacccactaaatcagat

SEQ ID NO: 54587 - DNA, 25 bp, SARS Virus
tatgtgttaccgcctaaatcagata

SEQ ID NO: 54588 - DNA, 25 bp, SARS Virus
atgtgttaccgactaaatcagatac

SEQ ID NO: 54589 - DNA, 25 bp, SARS Virus
tgtgttaccgaccaaatcagatacg

SEQ ID NO: 54590 - DNA, 25 bp, SARS Virus
gtgttaccgactcaatcagatacga

SEQ ID NO: 54591 - DNA, 25 bp, SARS Virus
tgttaccgactacatcagatacgag

SEQ ID NO: 54592 - DNA, 25 bp, SARS Virus
gttaccgactaactcagatacgaga

SEQ ID NO: 54593 - DNA, 25 bp, SARS Virus
ttaccgactaaaccagatacgagat

SEQ ID NO: 54594 - DNA, 25 bp, SARS Virus
taccgactaaatcagatacgagatg

SEQ ID NO: 54595 - DNA, 25 bp, SARS Virus
accgactaaatccgatacgagatgc

SEQ ID NO: 54596 - DNA, 25 bp, SARS Virus
ccgactaaatcacatacgagatgca

SEQ ID NO: 54597 - DNA, 25 bp, SARS Virus
cgactaaatcagctacgagatgcag

SEQ ID NO: 54598 - DNA, 25 bp, SARS Virus
gactaaatcagacacgagatgcagt

SEQ ID NO: 54599 - DNA, 25 bp, SARS Virus
actaaatcagatccgagatgcagta

SEQ ID NO: 54600 - DNA, 25 bp, SARS Virus
ctaaatcagatacgagatgcagtaa

SEQ ID NO: 54601 - DNA, 25 bp, SARS Virus
taaatcagataccagatgcagtaaa

SEQ ID NO: 54602 - DNA, 25 bp, SARS Virus
aaatcagatacgcgatgcagtaaaa

SEQ ID NO: 54603 - DNA, 25 bp, SARS Virus
aatcagatacgacatgcagtaaaac

SEQ ID NO: 54604 - DNA, 25 bp, SARS Virus
atcagatacgagctgcagtaaaact

SEQ ID NO: 54605 - DNA, 25 bp, SARS Virus
tcagatacgagacgcagtaaaacta

SEQ ID NO: 54606 - DNA, 25 bp, SARS Virus
cagatacgagatccagtaaaactac

SEQ ID NO: 54607 - DNA, 25 bp, SARS Virus
agatacgagatgcagtaaaactact

SEQ ID NO: 54608 - DNA, 25 bp, SARS Virus
gatacgagatgccgtaaaactactc

SEQ ID NO: 54609 - DNA, 25 bp, SARS Virus
atacgagatgcactaaaactactcc

SEQ ID NO: 54610 - DNA, 25 bp, SARS Virus
tacgagatgcagcaaaactactccc

SEQ ID NO: 54611 - DNA, 25 bp, SARS Virus
acgagatgcagtcaaactactccca

SEQ ID NO: 54612 - DNA, 25 bp, SARS Virus
cgagatgcagtacaactactcccat

SEQ ID NO: 54613 - DNA, 25 bp, SARS Virus
gagatgcagtaacactactcccatt

SEQ ID NO: 54614 - DNA, 25 bp, SARS Virus
agatgcagtaaacctactcccatta

SEQ ID NO: 54615 - DNA, 25 bp, SARS Virus
gatgcagtaaaactactcccattaa

SEQ ID NO: 54616 - DNA, 25 bp, SARS Virus
atgcagtaaaaccactcccattaac

SEQ ID NO: 54617 - DNA, 25 bp, SARS Virus
tgcagtaaaactcctcccattaaca

SEQ ID NO: 54618 - DNA, 25 bp, SARS Virus
gcagtaaaactactcccattaacac

SEQ ID NO: 54619 - DNA, 25 bp, SARS Virus
cagtaaaactacccccattaacact

SEQ ID NO: 54620 - DNA, 25 bp, SARS Virus
agtaaaactactcccattaacacta

SEQ ID NO: 54621 - DNA, 25 bp, SARS Virus
gtaaaactactcccattaacactat

SEQ ID NO: 54622 - DNA, 25 bp, SARS Virus
taaaactactcccattaacactatg

SEQ ID NO: 54623 - DNA, 25 bp, SARS Virus
aaaactactccccttaacactatgt

SEQ ID NO: 54624 - DNA, 25 bp, SARS Virus
aaactactcccactaacactatgta

SEQ ID NO: 54625 - DNA, 25 bp, SARS Virus
aactactcccatcaacactatgtaa

SEQ ID NO: 54626 - DNA, 25 bp, SARS Virus
actactcccattcacactatgtaat

SEQ ID NO: 54627 - DNA, 25 bp, SARS Virus
ctactcccattaccactatgtaatt

SEQ ID NO: 54628 - DNA, 25 bp, SARS Virus
tactcccattaacactatgtaattt

SEQ ID NO: 54629 - DNA, 25 bp, SARS Virus
actcccattaaccctatgtaatttt

SEQ ID NO: 54630 - DNA, 25 bp, SARS Virus
ctcccattaacactatgtaattttc

SEQ ID NO: 54631 - DNA, 25 bp, SARS Virus
tcccattaacaccatgtaattttct

SEQ ID NO: 54632 - DNA, 25 bp, SARS Virus
cccattaacactctgtaattttctt

SEQ ID NO: 54633 - DNA, 25 bp, SARS Virus
ccattaacactacgtaattttcttt

SEQ ID NO: 54634 - DNA, 25 bp, SARS Virus
cattaacactatctaattttcttta

SEQ ID NO: 54635 - DNA, 25 bp, SARS Virus
attaacactatgcaattttctttat

SEQ ID NO: 54636 - DNA, 25 bp, SARS Virus
ttaacactatgtcattttctttatg

SEQ ID NO: 54637 - DNA, 25 bp, SARS Virus
taacactatgtacttttctttatga

SEQ ID NO: 54638 - DNA, 25 bp, SARS Virus
aacactatgtaactttctttatgag

SEQ ID NO: 54639 - DNA, 25 bp, SARS Virus
acactatgtaatcttctttatgagc

SEQ ID NO: 54640 - DNA, 25 bp, SARS Virus
cactatgtaattctctttatgagca

SEQ ID NO: 54641 - DNA, 25 bp, SARS Virus
actatgtaatttcctttatgagcag

SEQ ID NO: 54642 - DNA, 25 bp, SARS Virus
ctatgtaattttctttatgagcagt

SEQ ID NO: 54643 - DNA, 25 bp, SARS Virus
tatgtaattttccttatgagcagtg

SEQ ID NO: 54644 - DNA, 25 bp, SARS Virus
atgtaattttctctatgagcagtgt

SEQ ID NO: 54645 - DNA, 25 bp, SARS Virus
tgtaattttcttcatgagcagtgta

SEQ ID NO: 54646 - DNA, 25 bp, SARS Virus
gtaattttctttctgagcagtgtat

SEQ ID NO: 54647 - DNA, 25 bp, SARS Virus
taattttctttacgagcagtgtatg

SEQ ID NO: 54648 - DNA, 25 bp, SARS Virus
aattttctttatcagcagtgtatgt

SEQ ID NO: 54649 - DNA, 25 bp, SARS Virus
attttctttatgcgcagtgtatgtt

SEQ ID NO: 54650 - DNA, 25 bp, SARS Virus
ttttctttatgaccagtgtatgtta

SEQ ID NO: 54651 - DNA, 25 bp, SARS Virus
tttctttatgagcagtgtatgttaa

SEQ ID NO: 54652 - DNA, 25 bp, SARS Virus
ttctttatgagccgtgtatgttaac

SEQ ID NO: 54653 - DNA, 25 bp, SARS Virus
tctttatgagcactgtatgttaacg

SEQ ID NO: 54654 - DNA, 25 bp, SARS Virus
ctttatgagcagcgtatgttaacga

SEQ ID NO: 54655 - DNA, 25 bp, SARS Virus
tttatgagcagtctatgttaacgac

SEQ ID NO: 54656 - DNA, 25 bp, SARS Virus
ttatgagcagtgcatgttaacgaca

SEQ ID NO: 54657 - DNA, 25 bp, SARS Virus
tatgagcagtgtctgttaacgacac

SEQ ID NO: 54658 - DNA, 25 bp, SARS Virus
atgagcagtgtacgttaacgacact

SEQ ID NO: 54659 - DNA, 25 bp, SARS Virus
tgagcagtgtatcttaacgacacta

SEQ ID NO: 54660 - DNA, 25 bp, SARS Virus
gagcagtgtatgctaacgacactac

SEQ ID NO: 54661 - DNA, 25 bp, SARS Virus
agcagtgtatgtcaacgacactact

SEQ ID NO: 54662 - DNA, 25 bp, SARS Virus
gcagtgtatgttcacgacactacta

SEQ ID NO: 54663 - DNA, 25 bp, SARS Virus
cagtgtatgttaccgacactactac

SEQ ID NO: 54664 - DNA, 25 bp, SARS Virus
agtgtatgttaacgacactactact

SEQ ID NO: 54665 - DNA, 25 bp, SARS Virus
gtgtatgttaaccacactactacta

SEQ ID NO: 54666 - DNA, 25 bp, SARS Virus
tgtatgttaacgccactactactaa

SEQ ID NO: 54667 - DNA, 25 bp, SARS Virus
gtatgttaacgacactactactaat

SEQ ID NO: 54668 - DNA, 25 bp, SARS Virus
tatgttaacgaccctactactaata

SEQ ID NO: 54669 - DNA, 25 bp, SARS Virus
atgttaacgacactactactaataa

SEQ ID NO: 54670 - DNA, 25 bp, SARS Virus
tgttaacgacaccactactaataaa

SEQ ID NO: 54671 - DNA, 25 bp, SARS Virus
gttaacgacactcctactaataaag

SEQ ID NO: 54672 - DNA, 25 bp, SARS Virus
ttaacgacactactactaataaagt

SEQ ID NO: 54673 - DNA, 25 bp, SARS Virus
taacgacactaccactaataaagtt

SEQ ID NO: 54674 - DNA, 25 bp, SARS Virus
aacgacactactcctaataaagtta

SEQ ID NO: 54675 - DNA, 25 bp, SARS Virus
acgacactactactaataaagttat

SEQ ID NO: 54676 - DNA, 25 bp, SARS Virus
cgacactactaccaataaagttatt

SEQ ID NO: 54677 - DNA, 25 bp, SARS Virus
gacactactactcataaagttattc

SEQ ID NO: 54678 - DNA, 25 bp, SARS Virus
acactactactactaaagttattct

SEQ ID NO: 54679 - DNA, 25 bp, SARS Virus
cactactactaacaaagttattctt

SEQ ID NO: 54680 - DNA, 25 bp, SARS Virus
actactactaatcaagttattcttc

SEQ ID NO: 54681 - DNA, 25 bp, SARS Virus
ctactactaatacagttattcttcc

SEQ ID NO: 54682 - DNA, 25 bp, SARS Virus
tactactaataacgttattcttcct

SEQ ID NO: 54683 - DNA, 25 bp, SARS Virus
actactaataaacttattcttccta

SEQ ID NO: 54684 - DNA, 25 bp, SARS Virus
ctactaataaagctattcttcctaa

SEQ ID NO: 54685 - DNA, 25 bp, SARS Virus
tactaataaagtcattcttcctaac

SEQ ID NO: 54686 - DNA, 25 bp, SARS Virus
actaataaagttcttcttcctaacc

SEQ ID NO: 54687 - DNA, 25 bp, SARS Virus
ctaataaagttactcttcctaacca

SEQ ID NO: 54688 - DNA, 25 bp, SARS Virus
taataaagttatccttcctaaccat

SEQ ID NO: 54689 - DNA, 25 bp, SARS Virus
aataaagttattcttcctaaccata

SEQ ID NO: 54690 - DNA, 25 bp, SARS Virus
ataaagttattcctcctaaccatac

SEQ ID NO: 54691 - DNA, 25 bp, SARS Virus
taaagttattctccctaaccatact

SEQ ID NO: 54692 - DNA, 25 bp, SARS Virus
aaagttattcttcctaaccatactg

SEQ ID NO: 54693 - DNA, 25 bp, SARS Virus
aagttattcttcctaaccatactga

SEQ ID NO: 54694 - DNA, 25 bp, SARS Virus
agttattcttcccaaccatactgaa

SEQ ID NO: 54695 - DNA, 25 bp, SARS Virus
gttattcttcctcaccatactgaag

SEQ ID NO: 54696 - DNA, 25 bp, SARS Virus
ttattcttcctacccatactgaagc

SEQ ID NO: 54697 - DNA, 25 bp, SARS Virus
tattcttcctaaccatactgaagca

SEQ ID NO: 54698 - DNA, 25 bp, SARS Virus
attcttcctaaccatactgaagcat

SEQ ID NO: 54699 - DNA, 25 bp, SARS Virus
ttcttcctaaccctactgaagcatc

SEQ ID NO: 54700 - DNA, 25 bp, SARS Virus
tcttcctaaccacactgaagcatct

SEQ ID NO: 54701 - DNA, 25 bp, SARS Virus
cttcctaaccatcctgaagcatctc

SEQ ID NO: 54702 - DNA, 25 bp, SARS Virus
ttcctaaccatactgaagcatctct

SEQ ID NO: 54703 - DNA, 25 bp, SARS Virus
tcctaaccataccgaagcatctctt

SEQ ID NO: 54704 - DNA, 25 bp, SARS Virus
cctaaccatactcaagcatctctta

SEQ ID NO: 54705 - DNA, 25 bp, SARS Virus
ctaaccatactgcagcatctcttag

SEQ ID NO: 54706 - DNA, 25 bp, SARS Virus
taaccatactgacgcatctcttagg

SEQ ID NO: 54707 - DNA, 25 bp, SARS Virus
aaccatactgaaccatctcttagga

SEQ ID NO: 54708 - DNA, 25 bp, SARS Virus
accatactgaagcatctcttaggac

SEQ ID NO: 54709 - DNA, 25 bp, SARS Virus
ccatactgaagcctctcttaggact

SEQ ID NO: 54710 - DNA, 25 bp, SARS Virus
catactgaagcacctcttaggactg

SEQ ID NO: 54711 - DNA, 25 bp, SARS Virus
atactgaagcatctcttaggactgt

SEQ ID NO: 54712 - DNA, 25 bp, SARS Virus
tactgaagcatcccttaggactgta

SEQ ID NO: 54713 - DNA, 25 bp, SARS Virus
actgaagcatctcttaggactgtag

SEQ ID NO: 54714 - DNA, 25 bp, SARS Virus
ctgaagcatctcctaggactgtaga

SEQ ID NO: 54715 - DNA, 25 bp, SARS Virus
tgaagcatctctcaggactgtagaa

SEQ ID NO: 54716 - DNA, 25 bp, SARS Virus
gaagcatctcttcggactgtagaat

SEQ ID NO: 54717 - DNA, 25 bp, SARS Virus
aagcatctcttacgactgtagaatg

SEQ ID NO: 54718 - DNA, 25 bp, SARS Virus
agcatctcttagcactgtagaatgc

SEQ ID NO: 54719 - DNA, 25 bp, SARS Virus
gcatctcttaggcctgtagaatgcg

SEQ ID NO: 54720 - DNA, 25 bp, SARS Virus
catctcttaggactgtagaatgcgc

SEQ ID NO: 54721 - DNA, 25 bp, SARS Virus
atctcttaggaccgtagaatgcgca

SEQ ID NO: 54722 - DNA, 25 bp, SARS Virus
tctcttaggactctagaatgcgcat

SEQ ID NO: 54723 - DNA, 25 bp, SARS Virus
ctcttaggactgcagaatgcgcata

SEQ ID NO: 54724 - DNA, 25 bp, SARS Virus
tcttaggactgtcgaatgcgcatat

SEQ ID NO: 54725 - DNA, 25 bp, SARS Virus
cttaggactgtacaatgcgcatata

SEQ ID NO: 54726 - DNA, 25 bp, SARS Virus
ttaggactgtagcatgcgcatatac

SEQ ID NO: 54727 - DNA, 25 bp, SARS Virus
taggactgtagactgcgcatatacg

SEQ ID NO: 54728 - DNA, 25 bp, SARS Virus
aggactgtagaacgcgcatatacga

SEQ ID NO: 54729 - DNA, 25 bp, SARS Virus
ggactgtagaatccgcatatacgat

SEQ ID NO: 54730 - DNA, 25 bp, SARS Virus
gactgtagaatgcgcatatacgatt

SEQ ID NO: 54731 - DNA, 25 bp, SARS Virus
actgtagaatgcccatatacgattg

SEQ ID NO: 54732 - DNA, 25 bp, SARS Virus
ctgtagaatgcgcatatacgattga

SEQ ID NO: 54733 - DNA, 25 bp, SARS Virus
tgtagaatgcgcctatacgattgaa

SEQ ID NO: 54734 - DNA, 25 bp, SARS Virus
gtagaatgcgcacatacgattgaat

SEQ ID NO: 54735 - DNA, 25 bp, SARS Virus
tagaatgcgcatctacgattgaatc

SEQ ID NO: 54736 - DNA, 25 bp, SARS Virus
agaatgcgcatacacgattgaatcc

SEQ ID NO: 54737 - DNA, 25 bp, SARS Virus
gaatgcgcatatccgattgaatcca

SEQ ID NO: 54738 - DNA, 25 bp, SARS Virus
aatgcgcatatacgattgaatccac

SEQ ID NO: 54739 - DNA, 25 bp, SARS Virus
atgcgcatataccattgaatccact

SEQ ID NO: 54740 - DNA, 25 bp, SARS Virus
tgcgcatatacgcttgaatccactc

SEQ ID NO: 54741 - DNA, 25 bp, SARS Virus
gcgcatatacgactgaatccactcg

SEQ ID NO: 54742 - DNA, 25 bp, SARS Virus
cgcatatacgatcgaatccactcgc

SEQ ID NO: 54743 - DNA, 25 bp, SARS Virus
gcatatacgattcaatccactcgca

SEQ ID NO: 54744 - DNA, 25 bp, SARS Virus
catatacgattgcatccactcgcac

SEQ ID NO: 54745 - DNA, 25 bp, SARS Virus
atatacgattgactccactcgcaca

SEQ ID NO: 54746 - DNA, 25 bp, SARS Virus
tatacgattgaacccactcgcacat

SEQ ID NO: 54747 - DNA, 25 bp, SARS Virus
atacgattgaatccactcgcacatg

SEQ ID NO: 54748 - DNA, 25 bp, SARS Virus
tacgattgaatccactcgcacatgc

SEQ ID NO: 54749 - DNA, 25 bp, SARS Virus
acgattgaatcccctcgcacatgcg

SEQ ID NO: 54750 - DNA, 25 bp, SARS Virus
cgattgaatccactcgcacatgcgg

SEQ ID NO: 54751 - DNA, 25 bp, SARS Virus
gattgaatccacccgcacatgcggt

SEQ ID NO: 54752 - DNA, 25 bp, SARS Virus
attgaatccactcgcacatgcggtt

SEQ ID NO: 54753 - DNA, 25 bp, SARS Virus
ttgaatccactcccacatgcggtta

SEQ ID NO: 54754 - DNA, 25 bp, SARS Virus
tgaatccactcgcacatgcggttag

SEQ ID NO: 54755 - DNA, 25 bp, SARS Virus
gaatccactcgcccatgcggttagt

SEQ ID NO: 54756 - DNA, 25 bp, SARS Virus
aatccactcgcacatgcggttagta

SEQ ID NO: 54757 - DNA, 25 bp, SARS Virus
atccactcgcacctgcggttagtaa

SEQ ID NO: 54758 - DNA, 25 bp, SARS Virus
tccactcgcacacgcggttagtaat

SEQ ID NO: 54759 - DNA, 25 bp, SARS Virus
ccactcgcacatccggttagtaata

SEQ ID NO: 54760 - DNA, 25 bp, SARS Virus
cactcgcacatgcggttagtaataa

SEQ ID NO: 54761 - DNA, 25 bp, SARS Virus
actcgcacatgccgttagtaataat

SEQ ID NO: 54762 - DNA, 25 bp, SARS Virus
ctcgcacatgcgcttagtaataatt

SEQ ID NO: 54763 - DNA, 25 bp, SARS Virus
tcgcacatgcggctagtaataattt

SEQ ID NO: 54764 - DNA, 25 bp, SARS Virus
cgcacatgcggtcagtaataatttc

SEQ ID NO: 54765 - DNA, 25 bp, SARS Virus
gcacatgcggttcgtaataatttct

SEQ ID NO: 54766 - DNA, 25 bp, SARS Virus
cacatgcggttactaataatttctg

SEQ ID NO: 54767 - DNA, 25 bp, SARS Virus
acatgcggttagcaataatttctga

SEQ ID NO: 54768 - DNA, 25 bp, SARS Virus
catgcggttagtcataatttctgac

SEQ ID NO: 54769 - DNA, 25 bp, SARS Virus
atgcggttagtactaatttctgaca

SEQ ID NO: 54770 - DNA, 25 bp, SARS Virus
tgcggttagtaacaatttctgacat

SEQ ID NO: 54771 - DNA, 25 bp, SARS Virus
gcggttagtaatcatttctgacatg

SEQ ID NO: 54772 - DNA, 25 bp, SARS Virus
cggttagtaatactttctgacatgt

SEQ ID NO: 54773 - DNA, 25 bp, SARS Virus
ggttagtaataacttctgacatgtt

SEQ ID NO: 54774 - DNA, 25 bp, SARS Virus
gttagtaataatctctgacatgtta

SEQ ID NO: 54775 - DNA, 25 bp, SARS Virus
ttagtaataattcctgacatgttaa

SEQ ID NO: 54776 - DNA, 25 bp, SARS Virus
tagtaataatttctgacatgttaag

SEQ ID NO: 54777 - DNA, 25 bp, SARS Virus
agtaataatttccgacatgttaaga

SEQ ID NO: 54778 - DNA, 25 bp, SARS Virus
gtaataatttctcacatgttaagac

SEQ ID NO: 54779 - DNA, 25 bp, SARS Virus
taataatttctgccatgttaagacg

SEQ ID NO: 54780 - DNA, 25 bp, SARS Virus
aataatttctgacatgttaagacgc

SEQ ID NO: 54781 - DNA, 25 bp, SARS Virus
ataatttctgacctgttaagacgct

SEQ ID NO: 54782 - DNA, 25 bp, SARS Virus
taatttctgacacgttaagacgcta

SEQ ID NO: 54783 - DNA, 25 bp, SARS Virus
aatttctgacatcttaagacgctac

SEQ ID NO: 54784 - DNA, 25 bp, SARS Virus
atttctgacatgctaagacgctacg

SEQ ID NO: 54785 - DNA, 25 bp, SARS Virus
ccgtgatcatgagtacagcagatgt

SEQ ID NO: 54786 - DNA, 25 bp, SARS Virus
cgtgatcatgacgacagcagatgtc

SEQ ID NO: 54787 - DNA, 25 bp, SARS Virus
gtgatcatgactgcagcagatgtcc

SEQ ID NO: 54788 - DNA, 25 bp, SARS Virus
tgatcatgactagagcagatgtccc

SEQ ID NO: 54789 - DNA, 25 bp, SARS Virus
gatcatgactacggcagatgtcccg

SEQ ID NO: 54790 - DNA, 25 bp, SARS Virus
atcatgactacagcagatgtcccga

SEQ ID NO: 54791 - DNA, 25 bp, SARS Virus
tcatgactacaggagatgtcccgaa

SEQ ID NO: 54792 - DNA, 25 bp, SARS Virus
catgactacagcggatgtcccgaaa

SEQ ID NO: 54793 - DNA, 25 bp, SARS Virus
atgactacagcagatgtcccgaaaa

SEQ ID NO: 54794 - DNA, 25 bp, SARS Virus
tgactacagcaggtgtcccgaaaac

SEQ ID NO: 54795 - DNA, 25 bp, SARS Virus
gactacagcagaggtcccgaaaact

SEQ ID NO: 54796 - DNA, 25 bp, SARS Virus
actacagcagatgtcccgaaaacta

SEQ ID NO: 54797 - DNA, 25 bp, SARS Virus
ctacagcagatggcccgaaaactat

SEQ ID NO: 54798 - DNA, 25 bp, SARS Virus
tacagcagatgtgccgaaaactata

SEQ ID NO: 54799 - DNA, 25 bp, SARS Virus
acagcagatgtcgcgaaaactataa

SEQ ID NO: 54800 - DNA, 25 bp, SARS Virus
cagcagatgtccggaaaactataaa

SEQ ID NO: 54801 - DNA, 25 bp, SARS Virus
agcagatgtcccgaaaactataaat

SEQ ID NO: 54802 - DNA, 25 bp, SARS Virus
gcagatgtcccggaaactataaatg

SEQ ID NO: 54803 - DNA, 25 bp, SARS Virus
cagatgtcccgagaactataaatgt

SEQ ID NO: 54804 - DNA, 25 bp, SARS Virus
agatgtcccgaagactataaatgtt

SEQ ID NO: 54805 - DNA, 25 bp, SARS Virus
gatgtcccgaaagctataaatgttg

SEQ ID NO: 54806 - DNA, 25 bp, SARS Virus
atgtcccgaaaagtataaatgttgc

SEQ ID NO: 54807 - DNA, 25 bp, SARS Virus
tgtcccgaaaacgataaatgttgct

SEQ ID NO: 54808 - DNA, 25 bp, SARS Virus
gtcccgaaaactgtaaatgttgctt

SEQ ID NO: 54809 - DNA, 25 bp, SARS Virus
tcccgaaaactagaaatgttgcttt

SEQ ID NO: 54810 - DNA, 25 bp, SARS Virus
cccgaaaactatgaatgttgctttt

SEQ ID NO: 54811 - DNA, 25 bp, SARS Virus
ccgaaaactatagatgttgcttttt

SEQ ID NO: 54812 - DNA, 25 bp, SARS Virus
cgaaaactataagtgttgctttttc

SEQ ID NO: 54813 - DNA, 25 bp, SARS Virus
gaaaactataaaggttgctttttca

SEQ ID NO: 54814 - DNA, 25 bp, SARS Virus
aaaactataaatgttgctttttcaa

SEQ ID NO: 54815 - DNA, 25 bp, SARS Virus
aaactataaatggtgctttttcaac

SEQ ID NO: 54816 - DNA, 25 bp, SARS Virus
aactataaatgtggctttttcaacg

SEQ ID NO: 54817 - DNA, 25 bp, SARS Virus
actataaatgttgctttttcaacga

SEQ ID NO: 54818 - DNA, 25 bp, SARS Virus
ctataaatgttggtttttcaacgac

SEQ ID NO: 54819 - DNA, 25 bp, SARS Virus
tataaatgttgcgttttcaacgacc

SEQ ID NO: 54820 - DNA, 25 bp, SARS Virus
ataaatgttgctgtttcaacgacca

SEQ ID NO: 54821 - DNA, 25 bp, SARS Virus
taaatgttgcttgttcaacgaccaa

SEQ ID NO: 54822 - DNA, 25 bp, SARS Virus
aaatgttgctttgtcaacgaccaaa

SEQ ID NO: 54823 - DNA, 25 bp, SARS Virus
aatgttgcttttgcaacgaccaaaa

SEQ ID NO: 54824 - DNA, 25 bp, SARS Virus
atgttgctttttgaacgaccaaaac

SEQ ID NO: 54825 - DNA, 25 bp, SARS Virus
tgttgctttttcgacgaccaaaacg

SEQ ID NO: 54826 - DNA, 25 bp, SARS Virus
gttgctttttcagcgaccaaaacgt

SEQ ID NO: 54827 - DNA, 25 bp, SARS Virus
ttgctttttcaaggaccaaaacgtt

SEQ ID NO: 54828 - DNA, 25 bp, SARS Virus
tgctttttcaacgaccaaaacgttt

SEQ ID NO: 54829 - DNA, 25 bp, SARS Virus
gctttttcaacggccaaaacgtttc

SEQ ID NO: 54830 - DNA, 25 bp, SARS Virus
ctttttcaacgagcaaaacgtttca

SEQ ID NO: 54831 - DNA, 25 bp, SARS Virus
tttttcaacgacgaaaacgtttcaa

SEQ ID NO: 54832 - DNA, 25 bp, SARS Virus
ttttcaacgaccgaaacgtttcaag

SEQ ID NO: 54833 - DNA, 25 bp, SARS Virus
tttcaacgaccagaacgtttcaagg

SEQ ID NO: 54834 - DNA, 25 bp, SARS Virus
ttcaacgaccaagacgtttcaagga

SEQ ID NO: 54835 - DNA, 25 bp, SARS Virus
tcaacgaccaaagcgtttcaaggat

SEQ ID NO: 54836 - DNA, 25 bp, SARS Virus
caacgaccaaaaggtttcaaggatt

SEQ ID NO: 54837 - DNA, 25 bp, SARS Virus
aacgaccaaaacgtttcaaggattt

SEQ ID NO: 54838 - DNA, 25 bp, SARS Virus
acgaccaaaacggttcaaggatttt

SEQ ID NO: 54839 - DNA, 25 bp, SARS Virus
cgaccaaaacgtgtcaaggattttt

SEQ ID NO: 54840 - DNA, 25 bp, SARS Virus
gaccaaaacgttgcaaggatttttg

SEQ ID NO: 54841 - DNA, 25 bp, SARS Virus
accaaaacgtttgaaggatttttga

SEQ ID NO: 54842 - DNA, 25 bp, SARS Virus
ccaaaacgtttcgaggatttttgat

SEQ ID NO: 54843 - DNA, 25 bp, SARS Virus
caaaacgtttcagggatttttgatt

SEQ ID NO: 54844 - DNA, 25 bp, SARS Virus
aaaacgtttcaaggatttttgatta

SEQ ID NO: 54845 - DNA, 25 bp, SARS Virus
aaacgtttcaaggatttttgattaa

SEQ ID NO: 54846 - DNA, 25 bp, SARS Virus
aacgtttcaagggtttttgattaac

SEQ ID NO: 54847 - DNA, 25 bp, SARS Virus
acgtttcaaggagttttgattaacg

SEQ ID NO: 54848 - DNA, 25 bp, SARS Virus
cgtttcaaggatgtttgattaacga

SEQ ID NO: 54849 - DNA, 25 bp, SARS Virus
gtttcaaggattgttgattaacgac

SEQ ID NO: 54850 - DNA, 25 bp, SARS Virus
tttcaaggatttgtgattaacgaca

SEQ ID NO: 54851 - DNA, 25 bp, SARS Virus
ttcaaggattttggattaacgacag

SEQ ID NO: 54852 - DNA, 25 bp, SARS Virus
tcaaggatttttgattaacgacagc

SEQ ID NO: 54853 - DNA, 25 bp, SARS Virus
caaggatttttggttaacgacagcg

SEQ ID NO: 54854 - DNA, 25 bp, SARS Virus
aaggatttttgagtaacgacagcga

SEQ ID NO: 54855 - DNA, 25 bp, SARS Virus
aggatttttgatgaacgacagcgaa

SEQ ID NO: 54856 - DNA, 25 bp, SARS Virus
ggatttttgattgacgacagcgaag

SEQ ID NO: 54857 - DNA, 25 bp, SARS Virus
gatttttgattagcgacagcgaagg

SEQ ID NO: 54858 - DNA, 25 bp, SARS Virus
atttttgattaaggacagcgaaggt

SEQ ID NO: 54859 - DNA, 25 bp, SARS Virus
tttttgattaacgacagcgaaggtc

SEQ ID NO: 54860 - DNA, 25 bp, SARS Virus
ttttgattaacggcagcgaaggtcc

SEQ ID NO: 54861 - DNA, 25 bp, SARS Virus
tttgattaacgagagcgaaggtcct

SEQ ID NO: 54862 - DNA, 25 bp, SARS Virus
ttgattaacgacggcgaaggtcctc

SEQ ID NO: 54863 - DNA, 25 bp, SARS Virus
tgattaacgacagcgaaggtcctct

SEQ ID NO: 54864 - DNA, 25 bp, SARS Virus
gattaacgacagggaaggtcctctt

SEQ ID NO: 54865 - DNA, 25 bp, SARS Virus
attaacgacagcgaaggtcctcttc

SEQ ID NO: 54866 - DNA, 25 bp, SARS Virus
ttaacgacagcggaggtcctcttcc

SEQ ID NO: 54867 - DNA, 25 bp, SARS Virus
taacgacagcgagggtcctcttcct

SEQ ID NO: 54868 - DNA, 25 bp, SARS Virus
aacgacagcgaaggtcctcttccta

SEQ ID NO: 54869 - DNA, 25 bp, SARS Virus
acgacagcgaaggtcctcttcctac

SEQ ID NO: 54870 - DNA, 25 bp, SARS Virus
cgacagcgaagggcctcttcctact

SEQ ID NO: 54871 - DNA, 25 bp, SARS Virus
gacagcgaaggtgctcttcctactc

SEQ ID NO: 54872 - DNA, 25 bp, SARS Virus
acagcgaaggtcgtcttcctactcc

SEQ ID NO: 54873 - DNA, 25 bp, SARS Virus
cagcgaaggtccgcttcctactcct

SEQ ID NO: 54874 - DNA, 25 bp, SARS Virus
agcgaaggtcctgttcctactcctt

SEQ ID NO: 54875 - DNA, 25 bp, SARS Virus
gcgaaggtcctcgtcctactccttc

SEQ ID NO: 54876 - DNA, 25 bp, SARS Virus
cgaaggtcctctgcctactccttcc

SEQ ID NO: 54877 - DNA, 25 bp, SARS Virus
gaaggtcctcttgctactccttccg

SEQ ID NO: 54878 - DNA, 25 bp, SARS Virus
aaggtcctcttcgtactccttccgt

SEQ ID NO: 54879 - DNA, 25 bp, SARS Virus
aggtcctcttccgactccttccgtt

SEQ ID NO: 54880 - DNA, 25 bp, SARS Virus
ggtcctcttcctgctccttccgtta

SEQ ID NO: 54881 - DNA, 25 bp, SARS Virus
gtcctcttcctagtccttccgttaa

SEQ ID NO: 54882 - DNA, 25 bp, SARS Virus
tcctcttcctacgccttccgttaaa

SEQ ID NO: 54883 - DNA, 25 bp, SARS Virus
cctcttcctactgcttccgttaaat

SEQ ID NO: 54884 - DNA, 25 bp, SARS Virus
ctcttcctactcgttccgttaaata

SEQ ID NO: 54885 - DNA, 25 bp, SARS Virus
tcttcctactccgtccgttaaataa

SEQ ID NO: 54886 - DNA, 25 bp, SARS Virus
cttcctactcctgccgttaaataat

SEQ ID NO: 54887 - DNA, 25 bp, SARS Virus
ttcctactccttgcgttaaataatc

SEQ ID NO: 54888 - DNA, 25 bp, SARS Virus
tcctactccttcggttaaataatct

SEQ ID NO: 54889 - DNA, 25 bp, SARS Virus
cctactccttccgttaaataatctg

SEQ ID NO: 54890 - DNA, 25 bp, SARS Virus
ctactccttccggtaaataatctga

SEQ ID NO: 54891 - DNA, 25 bp, SARS Virus
tactccttccgtgaaataatctgag

SEQ ID NO: 54892 - DNA, 25 bp, SARS Virus
actccttccgttgaataatctgaga

SEQ ID NO: 54893 - DNA, 25 bp, SARS Virus
ctccttccgttagataatctgagaa

SEQ ID NO: 54894 - DNA, 25 bp, SARS Virus
tccttccgttaagtaatctgagaat

SEQ ID NO: 54895 - DNA, 25 bp, SARS Virus
ccttccgttaaagaatctgagaatg

SEQ ID NO: 54896 - DNA, 25 bp, SARS Virus
cttccgttaaatgatctgagaatga

SEQ ID NO: 54897 - DNA, 25 bp, SARS Virus
ttccgttaaatagtctgagaatgaa

SEQ ID NO: 54898 - DNA, 25 bp, SARS Virus
tccgttaaataagctgagaatgaaa

SEQ ID NO: 54899 - DNA, 25 bp, SARS Virus
ccgttaaataatgtgagaatgaaac

SEQ ID NO: 54900 - DNA, 25 bp, SARS Virus
cgttaaataatcggagaatgaaaca

SEQ ID NO: 54901 - DNA, 25 bp, SARS Virus
gttaaataatctgagaatgaaacat

SEQ ID NO: 54902 - DNA, 25 bp, SARS Virus
ttaaataatctgggaatgaaacatc

SEQ ID NO: 54903 - DNA, 25 bp, SARS Virus
taaataatctgagaatgaaacatca

SEQ ID NO: 54904 - DNA, 25 bp, SARS Virus
aaataatctgaggatgaaacatcaa

SEQ ID NO: 54905 - DNA, 25 bp, SARS Virus
aataatctgagagtgaaacatcaat

SEQ ID NO: 54906 - DNA, 25 bp, SARS Virus
ataatctgagaaggaaacatcaatt

SEQ ID NO: 54907 - DNA, 25 bp, SARS Virus
taatctgagaatgaaacatcaattc

SEQ ID NO: 54908 - DNA, 25 bp, SARS Virus
aatctgagaatggaacatcaattct

SEQ ID NO: 54909 - DNA, 25 bp, SARS Virus
atctgagaatgagacatcaattctc

SEQ ID NO: 54910 - DNA, 25 bp, SARS Virus
tctgagaatgaagcatcaattctcc

SEQ ID NO: 54911 - DNA, 25 bp, SARS Virus
ctgagaatgaaagatcaattctccg

SEQ ID NO: 54912 - DNA, 25 bp, SARS Virus
tgagaatgaaacgtcaattctccgt

SEQ ID NO: 54913 - DNA, 25 bp, SARS Virus
gagaatgaaacagcaattctccgta

SEQ ID NO: 54914 - DNA, 25 bp, SARS Virus
agaatgaaacatgaattctccgtat

SEQ ID NO: 54915 - DNA, 25 bp, SARS Virus
gaatgaaacatcgattctccgtatg

SEQ ID NO: 54916 - DNA, 25 bp, SARS Virus
aatgaaacatcagttctccgtatga

SEQ ID NO: 54917 - DNA, 25 bp, SARS Virus
atgaaacatcaagtctccgtatgat

SEQ ID NO: 54918 - DNA, 25 bp, SARS Virus
tgaaacatcaatgctccgtatgata

SEQ ID NO: 54919 - DNA, 25 bp, SARS Virus
gaaacatcaattgtccgtatgatac

SEQ ID NO: 54920 - DNA, 25 bp, SARS Virus
aaacatcaattcgccgtatgataca

SEQ ID NO: 54921 - DNA, 25 bp, SARS Virus
aacatcaattctgcgtatgatacag

SEQ ID NO: 54922 - DNA, 25 bp, SARS Virus
acatcaattctcggtatgatacaga

SEQ ID NO: 54923 - DNA, 25 bp, SARS Virus
catcaattctccgtatgatacagat

SEQ ID NO: 54924 - DNA, 25 bp, SARS Virus
atcaattctccggatgatacagatt

SEQ ID NO: 54925 - DNA, 25 bp, SARS Virus
tcaattctccgtgtgatacagattg

SEQ ID NO: 54926 - DNA, 25 bp, SARS Virus
caattctccgtaggatacagattga

SEQ ID NO: 54927 - DNA, 25 bp, SARS Virus
aattctccgtatgatacagattgat

SEQ ID NO: 54928 - DNA, 25 bp, SARS Virus
attctccgtatggtacagattgatg

SEQ ID NO: 54929 - DNA, 25 bp, SARS Virus
ttctccgtatgagacagattgatgg

SEQ ID NO: 54930 - DNA, 25 bp, SARS Virus
tctccgtatgatgcagattgatggt

SEQ ID NO: 54931 - DNA, 25 bp, SARS Virus
ctccgtatgatagagattgatggtt

SEQ ID NO: 54932 - DNA, 25 bp, SARS Virus
tccgtatgatacggattgatggttg

SEQ ID NO: 54933 - DNA, 25 bp, SARS Virus
ccgtatgatacagattgatggttgt

SEQ ID NO: 54934 - DNA, 25 bp, SARS Virus
cgtatgatacaggttgatggttgta

SEQ ID NO: 54935 - DNA, 25 bp, SARS Virus
gtatgatacagagtgatggttgtac

SEQ ID NO: 54936 - DNA, 25 bp, SARS Virus
tatgatacagatggatggttgtact

SEQ ID NO: 54937 - DNA, 25 bp, SARS Virus
atgatacagattgatggttgtactt

SEQ ID NO: 54938 - DNA, 25 bp, SARS Virus
tgatacagattggtggttgtacttc

SEQ ID NO: 54939 - DNA, 25 bp, SARS Virus
gatacagattgagggttgtacttct

SEQ ID NO: 54940 - DNA, 25 bp, SARS Virus
atacagattgatggttgtacttctc

SEQ ID NO: 54941 - DNA, 25 bp, SARS Virus
tacagattgatggttgtacttctct

SEQ ID NO: 54942 - DNA, 25 bp, SARS Virus
acagattgatgggtgtacttctctg

SEQ ID NO: 54943 - DNA, 25 bp, SARS Virus
cagattgatggtggtacttctctga

SEQ ID NO: 54944 - DNA, 25 bp, SARS Virus
agattgatggttgtacttctctgat

SEQ ID NO: 54945 - DNA, 25 bp, SARS Virus
gattgatggttggacttctctgata

SEQ ID NO: 54946 - DNA, 25 bp, SARS Virus
attgatggttgtgcttctctgataa

SEQ ID NO: 54947 - DNA, 25 bp, SARS Virus
ttgatggttgtagttctctgataaa

SEQ ID NO: 54948 - DNA, 25 bp, SARS Virus
tgatggttgtacgtctctgataaat

SEQ ID NO: 54949 - DNA, 25 bp, SARS Virus
gatggttgtactgctctgataaata

SEQ ID NO: 54950 - DNA, 25 bp, SARS Virus
atggttgtacttgtctgataaatat

SEQ ID NO: 54951 - DNA, 25 bp, SARS Virus
tggttgtacttcgctgataaatatt

SEQ ID NO: 54952 - DNA, 25 bp, SARS Virus
ggttgtacttctgtgataaatattg

SEQ ID NO: 54953 - DNA, 25 bp, SARS Virus
gttgtacttctcggataaatattga

SEQ ID NO: 54954 - DNA, 25 bp, SARS Virus
ttgtacttctctgataaatattgaa

SEQ ID NO: 54955 - DNA, 25 bp, SARS Virus
tgtacttctctggtaaatattgaac

SEQ ID NO: 54956 - DNA, 25 bp, SARS Virus
gtacttctctgagaaatattgaacc

SEQ ID NO: 54957 - DNA, 25 bp, SARS Virus
tacttctctgatgaatattgaacca

SEQ ID NO: 54958 - DNA, 25 bp, SARS Virus
acttctctgatagatattgaaccaa

SEQ ID NO: 54959 - DNA, 25 bp, SARS Virus
cttctctgataagtattgaaccaat

SEQ ID NO: 54960 - DNA, 25 bp, SARS Virus
ttctctgataaagattgaaccaatt

SEQ ID NO: 54961 - DNA, 25 bp, SARS Virus
tctctgataaatgttgaaccaattt

SEQ ID NO: 54962 - DNA, 25 bp, SARS Virus
ctctgataaatagtgaaccaatttc

SEQ ID NO: 54963 - DNA, 25 bp, SARS Virus
tctgataaatatggaaccaatttct

SEQ ID NO: 54964 - DNA, 25 bp, SARS Virus
ctgataaatattgaaccaatttcta

SEQ ID NO: 54965 - DNA, 25 bp, SARS Virus
tgataaatattggaccaatttctaa

SEQ ID NO: 54966 - DNA, 25 bp, SARS Virus
gataaatattgagccaatttctaac

SEQ ID NO: 54967 - DNA, 25 bp, SARS Virus
ataaatattgaagcaatttctaaca

SEQ ID NO: 54968 - DNA, 25 bp, SARS Virus
taaatattgaacgaatttctaacag

SEQ ID NO: 54969 - DNA, 25 bp, SARS Virus
aaatattgaaccgatttctaacagg

SEQ ID NO: 54970 - DNA, 25 bp, SARS Virus
aatattgaaccagtttctaacaggt

SEQ ID NO: 54971 - DNA, 25 bp, SARS Virus
atattgaaccaagttctaacaggtc

SEQ ID NO: 54972 - DNA, 25 bp, SARS Virus
tattgaaccaatgtctaacaggtcg

SEQ ID NO: 54973 - DNA, 25 bp, SARS Virus
attgaaccaattgctaacaggtcgc

SEQ ID NO: 54974 - DNA, 25 bp, SARS Virus
ttgaaccaatttgtaacaggtcgcc

SEQ ID NO: 54975 - DNA, 25 bp, SARS Virus
tgaaccaatttcgaacaggtcgcca

SEQ ID NO: 54976 - DNA, 25 bp, SARS Virus
gaaccaatttctgacaggtcgccaa

SEQ ID NO: 54977 - DNA, 25 bp, SARS Virus
aaccaatttctagcaggtcgccaac

SEQ ID NO: 54978 - DNA, 25 bp, SARS Virus
accaatttctaagaggtcgccaacg

SEQ ID NO: 54979 - DNA, 25 bp, SARS Virus
ccaatttctaacgggtcgccaacga

SEQ ID NO: 54980 - DNA, 25 bp, SARS Virus
caatttctaacaggtcgccaacgac

SEQ ID NO: 54981 - DNA, 25 bp, SARS Virus
aatttctaacaggtcgccaacgaca

SEQ ID NO: 54982 - DNA, 25 bp, SARS Virus
atttctaacagggcgccaacgacag

SEQ ID NO: 54983 - DNA, 25 bp, SARS Virus
tttctaacaggtggccaacgacagg

SEQ ID NO: 54984 - DNA, 25 bp, SARS Virus
ttctaacaggtcgccaacgacaggt

SEQ ID NO: 54985 - DNA, 25 bp, SARS Virus
tctaacaggtcggcaacgacaggta

SEQ ID NO: 54986 - DNA, 25 bp, SARS Virus
ctaacaggtcgcgaacgacaggtac

SEQ ID NO: 54987 - DNA, 25 bp, SARS Virus
taacaggtcgccgacgacaggtact

SEQ ID NO: 54988 - DNA, 25 bp, SARS Virus
aacaggtcgccagcgacaggtactg

SEQ ID NO: 54989 - DNA, 25 bp, SARS Virus
acaggtcgccaaggacaggtactga

SEQ ID NO: 54990 - DNA, 25 bp, SARS Virus
caggtcgccaacgacaggtactgaa

SEQ ID NO: 54991 - DNA, 25 bp, SARS Virus
aggtcgccaacggcaggtactgaaa

SEQ ID NO: 54992 - DNA, 25 bp, SARS Virus
ggtcgccaacgagaggtactgaaaa

SEQ ID NO: 54993 - DNA, 25 bp, SARS Virus
gtcgccaacgacgggtactgaaaaa

SEQ ID NO: 54994 - DNA, 25 bp, SARS Virus
tcgccaacgacaggtactgaaaaag

SEQ ID NO: 54995 - DNA, 25 bp, SARS Virus
cgccaacgacaggtactgaaaaagt

SEQ ID NO: 54996 - DNA, 25 bp, SARS Virus
gccaacgacagggactgaaaaagtt

SEQ ID NO: 54997 - DNA, 25 bp, SARS Virus
ccaacgacaggtgctgaaaaagttc

SEQ ID NO: 54998 - DNA, 25 bp, SARS Virus
caacgacaggtagtgaaaaagttca

SEQ ID NO: 54999 - DNA, 25 bp, SARS Virus
aacgacaggtacggaaaaagttcaa

SEQ ID NO: 55000 - DNA, 25 bp, SARS Virus
acgacaggtactgaaaaagttcaaa

SEQ ID NO: 55001 - DNA, 25 bp, SARS Virus
cgacaggtactggaaaagttcaaat

SEQ ID NO: 55002 - DNA, 25 bp, SARS Virus
gacaggtactgagaaagttcaaatc

SEQ ID NO: 55003 - DNA, 25 bp, SARS Virus
acaggtactgaagaagttcaaatct

SEQ ID NO: 55004 - DNA, 25 bp, SARS Virus
caggtactgaaagagttcaaatctc

SEQ ID NO: 55005 - DNA, 25 bp, SARS Virus
aggtactgaaaaggttcaaatctca

SEQ ID NO: 55006 - DNA, 25 bp, SARS Virus
ggtactgaaaaagttcaaatctcat

SEQ ID NO: 55007 - DNA, 25 bp, SARS Virus
gtactgaaaaaggtcaaatctcatc

SEQ ID NO: 55008 - DNA, 25 bp, SARS Virus
tactgaaaaagtgcaaatctcatct

SEQ ID NO: 55009 - DNA, 25 bp, SARS Virus
actgaaaaagttgaaatctcatcta

SEQ ID NO: 55010 - DNA, 25 bp, SARS Virus
ctgaaaaagttcgaatctcatctac

SEQ ID NO: 55011 - DNA, 25 bp, SARS Virus
tgaaaaagttcagatctcatctacc

SEQ ID NO: 55012 - DNA, 25 bp, SARS Virus
gaaaaagttcaagtctcatctacca

SEQ ID NO: 55013 - DNA, 25 bp, SARS Virus
aaaaagttcaaagctcatctaccac

SEQ ID NO: 55014 - DNA, 25 bp, SARS Virus
aaaagttcaaatgtcatctaccact

SEQ ID NO: 55015 - DNA, 25 bp, SARS Virus
aaagttcaaatcgcatctaccactg

SEQ ID NO: 55016 - DNA, 25 bp, SARS Virus
aagttcaaatctgatctaccactgt

SEQ ID NO: 55017 - DNA, 25 bp, SARS Virus
agttcaaatctcgtctaccactgta

SEQ ID NO: 55018 - DNA, 25 bp, SARS Virus
gttcaaatctcagctaccactgtac

SEQ ID NO: 55019 - DNA, 25 bp, SARS Virus
ttcaaatctcatgtaccactgtacc

SEQ ID NO: 55020 - DNA, 25 bp, SARS Virus
tcaaatctcatcgaccactgtacca

SEQ ID NO: 55021 - DNA, 25 bp, SARS Virus
caaatctcatctgccactgtaccat

SEQ ID NO: 55022 - DNA, 25 bp, SARS Virus
aaatctcatctagcactgtaccatg

SEQ ID NO: 55023 - DNA, 25 bp, SARS Virus
aatctcatctacgactgtaccatgg

SEQ ID NO: 55024 - DNA, 25 bp, SARS Virus
atctcatctaccgctgtaccatggt

SEQ ID NO: 55025 - DNA, 25 bp, SARS Virus
tctcatctaccagtgtaccatggtg

SEQ ID NO: 55026 - DNA, 25 bp, SARS Virus
ctcatctaccacggtaccatggtgt

SEQ ID NO: 55027 - DNA, 25 bp, SARS Virus
tcatctaccactgtaccatggtgta

SEQ ID NO: 55028 - DNA, 25 bp, SARS Virus
catctaccactggaccatggtgtat

SEQ ID NO: 55029 - DNA, 25 bp, SARS Virus
atctaccactgtgccatggtgtata

SEQ ID NO: 55030 - DNA, 25 bp, SARS Virus
tctaccactgtagcatggtgtatat

SEQ ID NO: 55031 - DNA, 25 bp, SARS Virus
ctaccactgtacgatggtgtatata

SEQ ID NO: 55032 - DNA, 25 bp, SARS Virus
taccactgtaccgtggtgtatatag

SEQ ID NO: 55033 - DNA, 25 bp, SARS Virus
accactgtaccagggtgtatatagt

SEQ ID NO: 55034 - DNA, 25 bp, SARS Virus
ccactgtaccatggtgtatatagtg

SEQ ID NO: 55035 - DNA, 25 bp, SARS Virus
cactgtaccatggtgtatatagtgc

SEQ ID NO: 55036 - DNA, 25 bp, SARS Virus
actgtaccatggggtatatagtgca

SEQ ID NO: 55037 - DNA, 25 bp, SARS Virus
ctgtaccatggtgtatatagtgcag

SEQ ID NO: 55038 - DNA, 25 bp, SARS Virus
tgtaccatggtggatatagtgcagt

SEQ ID NO: 55039 - DNA, 25 bp, SARS Virus
gtaccatggtgtgtatagtgcagtc

SEQ ID NO: 55040 - DNA, 25 bp, SARS Virus
taccatggtgtagatagtgcagtcg

SEQ ID NO: 55041 - DNA, 25 bp, SARS Virus
accatggtgtatgtagtgcagtcgc

SEQ ID NO: 55042 - DNA, 25 bp, SARS Virus
ccatggtgtatagagtgcagtcgca

SEQ ID NO: 55043 - DNA, 25 bp, SARS Virus
catggtgtatatggtgcagtcgcag

SEQ ID NO: 55044 - DNA, 25 bp, SARS Virus
atggtgtatatagtgcagtcgcaga

SEQ ID NO: 55045 - DNA, 25 bp, SARS Virus
tggtgtatatagggcagtcgcagat

SEQ ID NO: 55046 - DNA, 25 bp, SARS Virus
ggtgtatatagtgcagtcgcagatt

SEQ ID NO: 55047 - DNA, 25 bp, SARS Virus
gtgtatatagtggagtcgcagattg

SEQ ID NO: 55048 - DNA, 25 bp, SARS Virus
tgtatatagtgcggtcgcagattga

SEQ ID NO: 55049 - DNA, 25 bp, SARS Virus
gtatatagtgcagtcgcagattgat

SEQ ID NO: 55050 - DNA, 25 bp, SARS Virus
tatatagtgcaggcgcagattgatt

SEQ ID NO: 55051 - DNA, 25 bp, SARS Virus
atatagtgcagtggcagattgattt

SEQ ID NO: 55052 - DNA, 25 bp, SARS Virus
tatagtgcagtcgcagattgattta

SEQ ID NO: 55053 - DNA, 25 bp, SARS Virus
atagtgcagtcggagattgatttat

SEQ ID NO: 55054 - DNA, 25 bp, SARS Virus
tagtgcagtcgcggattgatttatg

SEQ ID NO: 55055 - DNA, 25 bp, SARS Virus
agtgcagtcgcagattgatttatgt

SEQ ID NO: 55056 - DNA, 25 bp, SARS Virus
gtgcagtcgcaggttgatttatgtg

SEQ ID NO: 55057 - DNA, 25 bp, SARS Virus
tgcagtcgcagagtgatttatgtgt

SEQ ID NO: 55058 - DNA, 25 bp, SARS Virus
gcagtcgcagatggatttatgtgtt

SEQ ID NO: 55059 - DNA, 25 bp, SARS Virus
cagtcgcagattgatttatgtgtta

SEQ ID NO: 55060 - DNA, 25 bp, SARS Virus
agtcgcagattggtttatgtgttac

SEQ ID NO: 55061 - DNA, 25 bp, SARS Virus
gtcgcagattgagttatgtgttacc

SEQ ID NO: 55062 - DNA, 25 bp, SARS Virus
tcgcagattgatgtatgtgttaccg

SEQ ID NO: 55063 - DNA, 25 bp, SARS Virus
cgcagattgattgatgtgttaccga

SEQ ID NO: 55064 - DNA, 25 bp, SARS Virus
gcagattgatttgtgtgttaccgac

SEQ ID NO: 55065 - DNA, 25 bp, SARS Virus
cagattgatttaggtgttaccgact

SEQ ID NO: 55066 - DNA, 25 bp, SARS Virus
agattgatttatgtgttaccgacta

SEQ ID NO: 55067 - DNA, 25 bp, SARS Virus
gattgatttatgggttaccgactaa

SEQ ID NO: 55068 - DNA, 25 bp, SARS Virus
attgatttatgtgttaccgactaaa

SEQ ID NO: 55069 - DNA, 25 bp, SARS Virus
ttgatttatgtggtaccgactaaat

SEQ ID NO: 55070 - DNA, 25 bp, SARS Virus
tgatttatgtgtgaccgactaaatc

SEQ ID NO: 55071 - DNA, 25 bp, SARS Virus
gatttatgtgttgccgactaaatca

SEQ ID NO: 55072 - DNA, 25 bp, SARS Virus
atttatgtgttagcgactaaatcag

SEQ ID NO: 55073 - DNA, 25 bp, SARS Virus
tttatgtgttacggactaaatcaga

SEQ ID NO: 55074 - DNA, 25 bp, SARS Virus
ttatgtgttaccgactaaatcagat

SEQ ID NO: 55075 - DNA, 25 bp, SARS Virus
tatgtgttaccggctaaatcagata

SEQ ID NO: 55076 - DNA, 25 bp, SARS Virus
atgtgttaccgagtaaatcagatac

SEQ ID NO: 55077 - DNA, 25 bp, SARS Virus
tgtgttaccgacgaaatcagatacg

SEQ ID NO: 55078 - DNA, 25 bp, SARS Virus
gtgttaccgactgaatcagatacga

SEQ ID NO: 55079 - DNA, 25 bp, SARS Virus
tgttaccgactagatcagatacgag

SEQ ID NO: 55080 - DNA, 25 bp, SARS Virus
gttaccgactaagtcagatacgaga

SEQ ID NO: 55081 - DNA, 25 bp, SARS Virus
ttaccgactaaagcagatacgagat

SEQ ID NO: 55082 - DNA, 25 bp, SARS Virus
taccgactaaatgagatacgagatg

SEQ ID NO: 55083 - DNA, 25 bp, SARS Virus
accgactaaatcggatacgagatgc

SEQ ID NO: 55084 - DNA, 25 bp, SARS Virus
ccgactaaatcagatacgagatgca

SEQ ID NO: 55085 - DNA, 25 bp, SARS Virus
cgactaaatcaggtacgagatgcag

SEQ ID NO: 55086 - DNA, 25 bp, SARS Virus
gactaaatcagagacgagatgcagt

SEQ ID NO: 55087 - DNA, 25 bp, SARS Virus
actaaatcagatgcgagatgcagta

SEQ ID NO: 55088 - DNA, 25 bp, SARS Virus
ctaaatcagataggagatgcagtaa

SEQ ID NO: 55089 - DNA, 25 bp, SARS Virus
taaatcagatacgagatgcagtaaa

SEQ ID NO: 55090 - DNA, 25 bp, SARS Virus
aaatcagatacgggatgcagtaaaa

SEQ ID NO: 55091 - DNA, 25 bp, SARS Virus
aatcagatacgagatgcagtaaaac

SEQ ID NO: 55092 - DNA, 25 bp, SARS Virus
atcagatacgaggtgcagtaaaact

SEQ ID NO: 55093 - DNA, 25 bp, SARS Virus
tcagatacgagaggcagtaaaacta

SEQ ID NO: 55094 - DNA, 25 bp, SARS Virus
cagatacgagatgcagtaaaactac

SEQ ID NO: 55095 - DNA, 25 bp, SARS Virus
agatacgagatggagtaaaactact

SEQ ID NO: 55096 - DNA, 25 bp, SARS Virus
gatacgagatgcggtaaaactactc

SEQ ID NO: 55097 - DNA, 25 bp, SARS Virus
atacgagatgcagtaaaactactcc

SEQ ID NO: 55098 - DNA, 25 bp, SARS Virus
tacgagatgcaggaaaactactccc

SEQ ID NO: 55099 - DNA, 25 bp, SARS Virus
acgagatgcagtgaaactactccca

SEQ ID NO: 55100 - DNA, 25 bp, SARS Virus
cgagatgcagtagaactactcccat

SEQ ID NO: 55101 - DNA, 25 bp, SARS Virus
gagatgcagtaagactactcccatt

SEQ ID NO: 55102 - DNA, 25 bp, SARS Virus
agatgcagtaaagctactcccatta

SEQ ID NO: 55103 - DNA, 25 bp, SARS Virus
gatgcagtaaaagtactcccattaa

SEQ ID NO: 55104 - DNA, 25 bp, SARS Virus
atgcagtaaaacgactcccattaac

SEQ ID NO: 55105 - DNA, 25 bp, SARS Virus
tgcagtaaaactgctcccattaaca

SEQ ID NO: 55106 - DNA, 25 bp, SARS Virus
gcagtaaaactagtcccattaacac

SEQ ID NO: 55107 - DNA, 25 bp, SARS Virus
cagtaaaactacgcccattaacact

SEQ ID NO: 55108 - DNA, 25 bp, SARS Virus
agtaaaactactgccattaacacta

SEQ ID NO: 55109 - DNA, 25 bp, SARS Virus
gtaaaactactcgcattaacactat

SEQ ID NO: 55110 - DNA, 25 bp, SARS Virus
taaaactactccgattaacactatg

SEQ ID NO: 55111 - DNA, 25 bp, SARS Virus
aaaactactcccgttaacactatgt

SEQ ID NO: 55112 - DNA, 25 bp, SARS Virus
aaactactcccagtaacactatgta

SEQ ID NO: 55113 - DNA, 25 bp, SARS Virus
aactactcccatgaacactatgtaa

SEQ ID NO: 55114 - DNA, 25 bp, SARS Virus
actactcccattgacactatgtaat

SEQ ID NO: 55115 - DNA, 25 bp, SARS Virus
ctactcccattagcactatgtaatt

SEQ ID NO: 55116 - DNA, 25 bp, SARS Virus
tactcccattaagactatgtaattt

SEQ ID NO: 55117 - DNA, 25 bp, SARS Virus
actcccattaacgctatgtaatttt

SEQ ID NO: 55118 - DNA, 25 bp, SARS Virus
ctcccattaacagtatgtaattttc

SEQ ID NO: 55119 - DNA, 25 bp, SARS Virus
tcccattaacacgatgtaattttct

SEQ ID NO: 55120 - DNA, 25 bp, SARS Virus
cccattaacactgtgtaattttctt

SEQ ID NO: 55121 - DNA, 25 bp, SARS Virus
ccattaacactaggtaattttcttt

SEQ ID NO: 55122 - DNA, 25 bp, SARS Virus
cattaacactatgtaattttcttta

SEQ ID NO: 55123 - DNA, 25 bp, SARS Virus
attaacactatggaattttctttat

SEQ ID NO: 55124 - DNA, 25 bp, SARS Virus
ttaacactatgtgattttctttatg

SEQ ID NO: 55125 - DNA, 25 bp, SARS Virus
taacactatgtagttttctttatga

SEQ ID NO: 55126 - DNA, 25 bp, SARS Virus
aacactatgtaagtttctttatgag

SEQ ID NO: 55127 - DNA, 25 bp, SARS Virus
acactatgtaatgttctttatgagc

SEQ ID NO: 55128 - DNA, 25 bp, SARS Virus
cactatgtaattgtctttatgagca

SEQ ID NO: 55129 - DNA, 25 bp, SARS Virus
actatgtaatttgctttatgagcag

SEQ ID NO: 55130 - DNA, 25 bp, SARS Virus
ctatgtaattttgtttatgagcagt

SEQ ID NO: 55131 - DNA, 25 bp, SARS Virus
tatgtaattttcgttatgagcagtg

SEQ ID NO: 55132 - DNA, 25 bp, SARS Virus
atgtaattttctgtatgagcagtgt

SEQ ID NO: 55133 - DNA, 25 bp, SARS Virus
tgtaattttcttgatgagcagtgta

SEQ ID NO: 55134 - DNA, 25 bp, SARS Virus
gtaattttctttgtgagcagtgtat

SEQ ID NO: 55135 - DNA, 25 bp, SARS Virus
taattttctttaggagcagtgtatg

SEQ ID NO: 55136 - DNA, 25 bp, SARS Virus
aattttctttatgagcagtgtatgt

SEQ ID NO: 55137 - DNA, 25 bp, SARS Virus
attttctttatgggcagtgtatgtt

SEQ ID NO: 55138 - DNA, 25 bp, SARS Virus
ttttctttatgagcagtgtatgtta

SEQ ID NO: 55139 - DNA, 25 bp, SARS Virus
tttctttatgaggagtgtatgttaa

SEQ ID NO: 55140 - DNA, 25 bp, SARS Virus
ttctttatgagcggtgtatgttaac

SEQ ID NO: 55141 - DNA, 25 bp, SARS Virus
tctttatgagcagtgtatgttaacg

SEQ ID NO: 55142 - DNA, 25 bp, SARS Virus
ctttatgagcagggtatgttaacga

SEQ ID NO: 55143 - DNA, 25 bp, SARS Virus
tttatgagcagtgtatgttaacgac

SEQ ID NO: 55144 - DNA, 25 bp, SARS Virus
ttatgagcagtggatgttaacgaca

SEQ ID NO: 55145 - DNA, 25 bp, SARS Virus
tatgagcagtgtgtgttaacgacac

SEQ ID NO: 55146 - DNA, 25 bp, SARS Virus
atgagcagtgtaggttaacgacact

SEQ ID NO: 55147 - DNA, 25 bp, SARS Virus
tgagcagtgtatgttaacgacacta

SEQ ID NO: 55148 - DNA, 25 bp, SARS Virus
gagcagtgtatggtaacgacactac

SEQ ID NO: 55149 - DNA, 25 bp, SARS Virus
agcagtgtatgtgaacgacactact

SEQ ID NO: 55150 - DNA, 25 bp, SARS Virus
gcagtgtatgttgacgacactacta

SEQ ID NO: 55151 - DNA, 25 bp, SARS Virus
cagtgtatgttagcgacactactac

SEQ ID NO: 55152 - DNA, 25 bp, SARS Virus
agtgtatgttaaggacactactact

SEQ ID NO: 55153 - DNA, 25 bp, SARS Virus
gtgtatgttaacgacactactacta

SEQ ID NO: 55154 - DNA, 25 bp, SARS Virus
tgtatgttaacggcactactactaa

SEQ ID NO: 55155 - DNA, 25 bp, SARS Virus
gtatgttaacgagactactactaat

SEQ ID NO: 55156 - DNA, 25 bp, SARS Virus
tatgttaacgacgctactactaata

SEQ ID NO: 55157 - DNA, 25 bp, SARS Virus
atgttaacgacagtactactaataa

SEQ ID NO: 55158 - DNA, 25 bp, SARS Virus
tgttaacgacacgactactaataaa

SEQ ID NO: 55159 - DNA, 25 bp, SARS Virus
gttaacgacactgctactaataaag

SEQ ID NO: 55160 - DNA, 25 bp, SARS Virus
ttaacgacactagtactaataaagt

SEQ ID NO: 55161 - DNA, 25 bp, SARS Virus
taacgacactacgactaataaagtt

SEQ ID NO: 55162 - DNA, 25 bp, SARS Virus
aacgacactactgctaataaagtta

SEQ ID NO: 55163 - DNA, 25 bp, SARS Virus
acgacactactagtaataaagttat

SEQ ID NO: 55164 - DNA, 25 bp, SARS Virus
cgacactactacgaataaagttatt

SEQ ID NO: 55165 - DNA, 25 bp, SARS Virus
gacactactactgataaagttattc

SEQ ID NO: 55166 - DNA, 25 bp, SARS Virus
acactactactagtaaagttattct

SEQ ID NO: 55167 - DNA, 25 bp, SARS Virus
cactactactaagaaagttattctt

SEQ ID NO: 55168 - DNA, 25 bp, SARS Virus
actactactaatgaagttattcttc

SEQ ID NO: 55169 - DNA, 25 bp, SARS Virus
ctactactaatagagttattcttcc

SEQ ID NO: 55170 - DNA, 25 bp, SARS Virus
tactactaataaggttattcttcct

SEQ ID NO: 55171 - DNA, 25 bp, SARS Virus
actactaataaagttattcttccta

SEQ ID NO: 55172 - DNA, 25 bp, SARS Virus
ctactaataaaggtattcttcctaa

SEQ ID NO: 55173 - DNA, 25 bp, SARS Virus
tactaataaagtgattcttcctaac

SEQ ID NO: 55174 - DNA, 25 bp, SARS Virus
actaataaagttgttcttcctaacc

SEQ ID NO: 55175 - DNA, 25 bp, SARS Virus
ctaataaagttagtcttcctaacca

SEQ ID NO: 55176 - DNA, 25 bp, SARS Virus
taataaagttatgcttcctaaccat

SEQ ID NO: 55177 - DNA, 25 bp, SARS Virus
aataaagttattgttcctaaccata

SEQ ID NO: 55178 - DNA, 25 bp, SARS Virus
ataaagttattcgtcctaaccatac

SEQ ID NO: 55179 - DNA, 25 bp, SARS Virus
taaagttattctgcctaaccatact

SEQ ID NO: 55180 - DNA, 25 bp, SARS Virus
aaagttattcttgctaaccatactg

SEQ ID NO: 55181 - DNA, 25 bp, SARS Virus
aagttattcttcgtaaccatactga

SEQ ID NO: 55182 - DNA, 25 bp, SARS Virus
agttattcttccgaaccatactgaa

SEQ ID NO: 55183 - DNA, 25 bp, SARS Virus
gttattcttcctgaccatactgaag

SEQ ID NO: 55184 - DNA, 25 bp, SARS Virus
ttattcttcctagccatactgaagc

SEQ ID NO: 55185 - DNA, 25 bp, SARS Virus
tattcttcctaagcatactgaagca

SEQ ID NO: 55186 - DNA, 25 bp, SARS Virus
attcttcctaacgatactgaagcat

SEQ ID NO: 55187 - DNA, 25 bp, SARS Virus
ttcttcctaaccgtactgaagcatc

SEQ ID NO: 55188 - DNA, 25 bp, SARS Virus
tcttcctaaccagactgaagcatct

SEQ ID NO: 55189 - DNA, 25 bp, SARS Virus
cttcctaaccatgctgaagcatctc

SEQ ID NO: 55190 - DNA, 25 bp, SARS Virus
ttcctaaccatagtgaagcatctct

SEQ ID NO: 55191 - DNA, 25 bp, SARS Virus
tcctaaccatacggaagcatctctt

SEQ ID NO: 55192 - DNA, 25 bp, SARS Virus
cctaaccatactgaagcatctctta

SEQ ID NO: 55193 - DNA, 25 bp, SARS Virus
ctaaccatactggagcatctcttag

SEQ ID NO: 55194 - DNA, 25 bp, SARS Virus
taaccatactgaggcatctcttagg

SEQ ID NO: 55195 - DNA, 25 bp, SARS Virus
aaccatactgaagcatctcttagga

SEQ ID NO: 55196 - DNA, 25 bp, SARS Virus
accatactgaaggatctcttaggac

SEQ ID NO: 55197 - DNA, 25 bp, SARS Virus
ccatactgaagcgtctcttaggact

SEQ ID NO: 55198 - DNA, 25 bp, SARS Virus
catactgaagcagctcttaggactg

SEQ ID NO: 55199 - DNA, 25 bp, SARS Virus
atactgaagcatgtcttaggactgt

SEQ ID NO: 55200 - DNA, 25 bp, SARS Virus
tactgaagcatcgcttaggactgta

SEQ ID NO: 55201 - DNA, 25 bp, SARS Virus
actgaagcatctgttaggactgtag

SEQ ID NO: 55202 - DNA, 25 bp, SARS Virus
ctgaagcatctcgtaggactgtaga

SEQ ID NO: 55203 - DNA, 25 bp, SARS Virus
tgaagcatctctgaggactgtagaa

SEQ ID NO: 55204 - DNA, 25 bp, SARS Virus
gaagcatctcttgggactgtagaat

SEQ ID NO: 55205 - DNA, 25 bp, SARS Virus
aagcatctcttaggactgtagaatg

SEQ ID NO: 55206 - DNA, 25 bp, SARS Virus
agcatctcttaggactgtagaatgc

SEQ ID NO: 55207 - DNA, 25 bp, SARS Virus
gcatctcttagggctgtagaatgcg

SEQ ID NO: 55208 - DNA, 25 bp, SARS Virus
catctcttaggagtgtagaatgcgc

SEQ ID NO: 55209 - DNA, 25 bp, SARS Virus
atctcttaggacggtagaatgcgca

SEQ ID NO: 55210 - DNA, 25 bp, SARS Virus
tctcttaggactgtagaatgcgcat

SEQ ID NO: 55211 - DNA, 25 bp, SARS Virus
ctcttaggactggagaatgcgcata

SEQ ID NO: 55212 - DNA, 25 bp, SARS Virus
tcttaggactgtggaatgcgcatat

SEQ ID NO: 55213 - DNA, 25 bp, SARS Virus
cttaggactgtagaatgcgcatata

SEQ ID NO: 55214 - DNA, 25 bp, SARS Virus
ttaggactgtaggatgcgcatatac

SEQ ID NO: 55215 - DNA, 25 bp, SARS Virus
taggactgtagagtgcgcatatacg

SEQ ID NO: 55216 - DNA, 25 bp, SARS Virus
aggactgtagaaggcgcatatacga

SEQ ID NO: 55217 - DNA, 25 bp, SARS Virus
ggactgtagaatgcgcatatacgat

SEQ ID NO: 55218 - DNA, 25 bp, SARS Virus
gactgtagaatgggcatatacgatt

SEQ ID NO: 55219 - DNA, 25 bp, SARS Virus
actgtagaatgcgcatatacgattg

SEQ ID NO: 55220 - DNA, 25 bp, SARS Virus
ctgtagaatgcggatatacgattga

SEQ ID NO: 55221 - DNA, 25 bp, SARS Virus
tgtagaatgcgcgtatacgattgaa

SEQ ID NO: 55222 - DNA, 25 bp, SARS Virus
gtagaatgcgcagatacgattgaat

SEQ ID NO: 55223 - DNA, 25 bp, SARS Virus
tagaatgcgcatgtacgattgaatc

SEQ ID NO: 55224 - DNA, 25 bp, SARS Virus
agaatgcgcatagacgattgaatcc

SEQ ID NO: 55225 - DNA, 25 bp, SARS Virus
gaatgcgcatatgcgattgaatcca

SEQ ID NO: 55226 - DNA, 25 bp, SARS Virus
aatgcgcatataggattgaatccac

SEQ ID NO: 55227 - DNA, 25 bp, SARS Virus
atgcgcatatacgattgaatccact

SEQ ID NO: 55228 - DNA, 25 bp, SARS Virus
tgcgcatatacggttgaatccactc

SEQ ID NO: 55229 - DNA, 25 bp, SARS Virus
gcgcatatacgagtgaatccactcg

SEQ ID NO: 55230 - DNA, 25 bp, SARS Virus
cgcatatacgatggaatccactcgc

SEQ ID NO: 55231 - DNA, 25 bp, SARS Virus
gcatatacgattgaatccactcgca

SEQ ID NO: 55232 - DNA, 25 bp, SARS Virus
catatacgattggatccactcgcac

SEQ ID NO: 55233 - DNA, 25 bp, SARS Virus
atatacgattgagtccactcgcaca

SEQ ID NO: 55234 - DNA, 25 bp, SARS Virus
tatacgattgaagccactcgcacat

SEQ ID NO: 55235 - DNA, 25 bp, SARS Virus
atacgattgaatgcactcgcacatg

SEQ ID NO: 55236 - DNA, 25 bp, SARS Virus
tacgattgaatcgactcgcacatgc

SEQ ID NO: 55237 - DNA, 25 bp, SARS Virus
acgattgaatccgctcgcacatgcg

SEQ ID NO: 55238 - DNA, 25 bp, SARS Virus
cgattgaatccagtcgcacatgcgg

SEQ ID NO: 55239 - DNA, 25 bp, SARS Virus
gattgaatccacgcgcacatgcggt

SEQ ID NO: 55240 - DNA, 25 bp, SARS Virus
attgaatccactggcacatgcggtt

SEQ ID NO: 55241 - DNA, 25 bp, SARS Virus
ttgaatccactcgcacatgcggtta

SEQ ID NO: 55242 - DNA, 25 bp, SARS Virus
tgaatccactcggacatgcggttag

SEQ ID NO: 55243 - DNA, 25 bp, SARS Virus
gaatccactcgcgcatgcggttagt

SEQ ID NO: 55244 - DNA, 25 bp, SARS Virus
aatccactcgcagatgcggttagta

SEQ ID NO: 55245 - DNA, 25 bp, SARS Virus
atccactcgcacgtgcggttagtaa

SEQ ID NO: 55246 - DNA, 25 bp, SARS Virus
tccactcgcacaggcggttagtaat

SEQ ID NO: 55247 - DNA, 25 bp, SARS Virus
ccactcgcacatgcggttagtaata

SEQ ID NO: 55248 - DNA, 25 bp, SARS Virus
cactcgcacatggggttagtaataa

SEQ ID NO: 55249 - DNA, 25 bp, SARS Virus
actcgcacatgcggttagtaataat

SEQ ID NO: 55250 - DNA, 25 bp, SARS Virus
ctcgcacatgcggttagtaataatt

SEQ ID NO: 55251 - DNA, 25 bp, SARS Virus
tcgcacatgcgggtagtaataattt

SEQ ID NO: 55252 - DNA, 25 bp, SARS Virus
cgcacatgcggtgagtaataatttc

SEQ ID NO: 55253 - DNA, 25 bp, SARS Virus
gcacatgcggttggtaataatttct

SEQ ID NO: 55254 - DNA, 25 bp, SARS Virus
cacatgcggttagtaataatttctg

SEQ ID NO: 55255 - DNA, 25 bp, SARS Virus
acatgcggttaggaataatttctga

SEQ ID NO: 55256 - DNA, 25 bp, SARS Virus
catgcggttagtgataatttctgac

SEQ ID NO: 55257 - DNA, 25 bp, SARS Virus
atgcggttagtagtaatttctgaca

SEQ ID NO: 55258 - DNA, 25 bp, SARS Virus
tgcggttagtaagaatttctgacat

SEQ ID NO: 55259 - DNA, 25 bp, SARS Virus
gcggttagtaatgatttctgacatg

SEQ ID NO: 55260 - DNA, 25 bp, SARS Virus
cggttagtaatagtttctgacatgt

SEQ ID NO: 55261 - DNA, 25 bp, SARS Virus
ggttagtaataagttctgacatgtt

SEQ ID NO: 55262 - DNA, 25 bp, SARS Virus
gttagtaataatgtctgacatgtta

SEQ ID NO: 55263 - DNA, 25 bp, SARS Virus
ttagtaataattgctgacatgttaa

SEQ ID NO: 55264 - DNA, 25 bp, SARS Virus
tagtaataatttgtgacatgttaag

SEQ ID NO: 55265 - DNA, 25 bp, SARS Virus
agtaataatttcggacatgttaaga

SEQ ID NO: 55266 - DNA, 25 bp, SARS Virus
gtaataatttctgacatgttaagac

SEQ ID NO: 55267 - DNA, 25 bp, SARS Virus
taataatttctggcatgttaagacg

SEQ ID NO: 55268 - DNA, 25 bp, SARS Virus
aataatttctgagatgttaagacgc

SEQ ID NO: 55269 - DNA, 25 bp, SARS Virus
ataatttctgacgtgttaagacgct

SEQ ID NO: 55270 - DNA, 25 bp, SARS Virus
taatttctgacaggttaagacgcta

SEQ ID NO: 55271 - DNA, 25 bp, SARS Virus
aatttctgacatgttaagacgctac

SEQ ID NO: 55272 - DNA, 25 bp, SARS Virus
atttctgacatggtaagacgctacg

SEQ ID NO: 55273 - DNA, 25 bp, SARS Virus
ccgtgatcatgattacagcagatgt

SEQ ID NO: 55274 - DNA, 25 bp, SARS Virus
cgtgatcatgactacagcagatgtc

SEQ ID NO: 55275 - DNA, 25 bp, SARS Virus
gtgatcatgacttcagcagatgtcc

SEQ ID NO: 55276 - DNA, 25 bp, SARS Virus
tgatcatgactatagcagatgtccc

SEQ ID NO: 55277 - DNA, 25 bp, SARS Virus
gatcatgactactgcagatgtcccg

SEQ ID NO: 55278 - DNA, 25 bp, SARS Virus
atcatgactacatcagatgtcccga

SEQ ID NO: 55279 - DNA, 25 bp, SARS Virus
tcatgactacagtagatgtcccgaa

SEQ ID NO: 55280 - DNA, 25 bp, SARS Virus
catgactacagctgatgtcccgaaa

SEQ ID NO: 55281 - DNA, 25 bp, SARS Virus
atgactacagcatatgtcccgaaaa

SEQ ID NO: 55282 - DNA, 25 bp, SARS Virus
tgactacagcagttgtcccgaaaac

SEQ ID NO: 55283 - DNA, 25 bp, SARS Virus
gactacagcagatgtcccgaaaact

SEQ ID NO: 55284 - DNA, 25 bp, SARS Virus
actacagcagatttcccgaaaacta

SEQ ID NO: 55285 - DNA, 25 bp, SARS Virus
ctacagcagatgtcccgaaaactat

SEQ ID NO: 55286 - DNA, 25 bp, SARS Virus
tacagcagatgttccgaaaactata

SEQ ID NO: 55287 - DNA, 25 bp, SARS Virus
acagcagatgtctcgaaaactataa

SEQ ID NO: 55288 - DNA, 25 bp, SARS Virus
cagcagatgtcctgaaaactataaa

SEQ ID NO: 55289 - DNA, 25 bp, SARS Virus
agcagatgtccctaaaactataaat

SEQ ID NO: 55290 - DNA, 25 bp, SARS Virus
gcagatgtcccgtaaactataaatg

SEQ ID NO: 55291 - DNA, 25 bp, SARS Virus
cagatgtcccgataactataaatgt

SEQ ID NO: 55292 - DNA, 25 bp, SARS Virus
agatgtcccgaatactataaatgtt

SEQ ID NO: 55293 - DNA, 25 bp, SARS Virus
gatgtcccgaaatctataaatgttg

SEQ ID NO: 55294 - DNA, 25 bp, SARS Virus
atgtcccgaaaattataaatgttgc

SEQ ID NO: 55295 - DNA, 25 bp, SARS Virus
tgtcccgaaaactataaatgttgct

SEQ ID NO: 55296 - DNA, 25 bp, SARS Virus
gtcccgaaaactttaaatgttgctt

SEQ ID NO: 55297 - DNA, 25 bp, SARS Virus
tcccgaaaactataaatgttgcttt

SEQ ID NO: 55298 - DNA, 25 bp, SARS Virus
cccgaaaactattaatgttgctttt

SEQ ID NO: 55299 - DNA, 25 bp, SARS Virus
ccgaaaactatatatgttgcttttt

SEQ ID NO: 55300 - DNA, 25 bp, SARS Virus
cgaaaactataattgttgctttttc

SEQ ID NO: 55301 - DNA, 25 bp, SARS Virus
gaaaactataaatgttgctttttca

SEQ ID NO: 55302 - DNA, 25 bp, SARS Virus
aaaactataaattttgctttttcaa

SEQ ID NO: 55303 - DNA, 25 bp, SARS Virus
aaactataaatgttgctttttcaac

SEQ ID NO: 55304 - DNA, 25 bp, SARS Virus
aactataaatgttgctttttcaacg

SEQ ID NO: 55305 - DNA, 25 bp, SARS Virus
actataaatgtttctttttcaacga

SEQ ID NO: 55306 - DNA, 25 bp, SARS Virus
ctataaatgttgttttttcaacgac

SEQ ID NO: 55307 - DNA, 25 bp, SARS Virus
tataaatgttgctttttcaacgacc

SEQ ID NO: 55308 - DNA, 25 bp, SARS Virus
ataaatgttgctttttcaacgacca

SEQ ID NO: 55309 - DNA, 25 bp, SARS Virus
taaatgttgctttttcaacgaccaa

SEQ ID NO: 55310 - DNA, 25 bp, SARS Virus
aaatgttgctttttcaacgaccaaa

SEQ ID NO: 55311 - DNA, 25 bp, SARS Virus
aatgttgctttttcaacgaccaaaa

SEQ ID NO: 55312 - DNA, 25 bp, SARS Virus
atgttgcttttttaacgaccaaaac

SEQ ID NO: 55313 - DNA, 25 bp, SARS Virus
tgttgctttttctacgaccaaaacg

SEQ ID NO: 55314 - DNA, 25 bp, SARS Virus
gttgctttttcatcgaccaaaacgt

SEQ ID NO: 55315 - DNA, 25 bp, SARS Virus
ttgctttttcaatgaccaaaacgtt

SEQ ID NO: 55316 - DNA, 25 bp, SARS Virus
tgctttttcaactaccaaaacgttt

SEQ ID NO: 55317 - DNA, 25 bp, SARS Virus
gctttttcaacgtccaaaacgtttc

SEQ ID NO: 55318 - DNA, 25 bp, SARS Virus
ctttttcaacgatcaaaacgtttca

SEQ ID NO: 55319 - DNA, 25 bp, SARS Virus
tttttcaacgactaaaacgtttcaa

SEQ ID NO: 55320 - DNA, 25 bp, SARS Virus
ttttcaacgacctaaacgtttcaag

SEQ ID NO: 55321 - DNA, 25 bp, SARS Virus
tttcaacgaccataacgtttcaagg

SEQ ID NO: 55322 - DNA, 25 bp, SARS Virus
ttcaacgaccaatacgtttcaagga

SEQ ID NO: 55323 - DNA, 25 bp, SARS Virus
tcaacgaccaaatcgtttcaaggat

SEQ ID NO: 55324 - DNA, 25 bp, SARS Virus
caacgaccaaaatgtttcaaggatt

SEQ ID NO: 55325 - DNA, 25 bp, SARS Virus
aacgaccaaaacttttcaaggattt

SEQ ID NO: 55326 - DNA, 25 bp, SARS Virus
acgaccaaaacgtttcaaggatttt

SEQ ID NO: 55327 - DNA, 25 bp, SARS Virus
cgaccaaaacgtttcaaggattttt

SEQ ID NO: 55328 - DNA, 25 bp, SARS Virus
gaccaaaacgtttcaaggatttttg

SEQ ID NO: 55329 - DNA, 25 bp, SARS Virus
accaaaacgttttaaggatttttga

SEQ ID NO: 55330 - DNA, 25 bp, SARS Virus
ccaaaacgtttctaggatttttgat

SEQ ID NO: 55331 - DNA, 25 bp, SARS Virus
caaaacgtttcatggatttttgatt

SEQ ID NO: 55332 - DNA, 25 bp, SARS Virus
aaaacgtttcaatgatttttgatta

SEQ ID NO: 55333 - DNA, 25 bp, SARS Virus
aaacgtttcaagtatttttgattaa

SEQ ID NO: 55334 - DNA, 25 bp, SARS Virus
aacgtttcaaggttttttgattaac

SEQ ID NO: 55335 - DNA, 25 bp, SARS Virus
acgtttcaaggatttttgattaacg

SEQ ID NO: 55336 - DNA, 25 bp, SARS Virus
cgtttcaaggatttttgattaacga

SEQ ID NO: 55337 - DNA, 25 bp, SARS Virus
gtttcaaggatttttgattaacgac

SEQ ID NO: 55338 - DNA, 25 bp, SARS Virus
tttcaaggatttttgattaacgaca

SEQ ID NO: 55339 - DNA, 25 bp, SARS Virus
ttcaaggatttttgattaacgacag

SEQ ID NO: 55340 - DNA, 25 bp, SARS Virus
tcaaggattttttattaacgacagc

SEQ ID NO: 55341 - DNA, 25 bp, SARS Virus
caaggatttttgtttaacgacagcg

SEQ ID NO: 55342 - DNA, 25 bp, SARS Virus
aaggatttttgattaacgacagcga

SEQ ID NO: 55343 - DNA, 25 bp, SARS Virus
aggatttttgattaacgacagcgaa

SEQ ID NO: 55344 - DNA, 25 bp, SARS Virus
ggatttttgatttacgacagcgaag

SEQ ID NO: 55345 - DNA, 25 bp, SARS Virus
gatttttgattatcgacagcgaagg

SEQ ID NO: 55346 - DNA, 25 bp, SARS Virus
atttttgattaatgacagcgaaggt

SEQ ID NO: 55347 - DNA, 25 bp, SARS Virus
tttttgattaactacagcgaaggtc

SEQ ID NO: 55348 - DNA, 25 bp, SARS Virus
ttttgattaacgtcagcgaaggtcc

SEQ ID NO: 55349 - DNA, 25 bp, SARS Virus
tttgattaacgatagcgaaggtcct

SEQ ID NO: 55350 - DNA, 25 bp, SARS Virus
ttgattaacgactgcgaaggtcctc

SEQ ID NO: 55351 - DNA, 25 bp, SARS Virus
tgattaacgacatcgaaggtcctct

SEQ ID NO: 55352 - DNA, 25 bp, SARS Virus
gattaacgacagtgaaggtcctctt

SEQ ID NO: 55353 - DNA, 25 bp, SARS Virus
attaacgacagctaaggtcctcttc

SEQ ID NO: 55354 - DNA, 25 bp, SARS Virus
ttaacgacagcgtaggtcctcttcc

SEQ ID NO: 55355 - DNA, 25 bp, SARS Virus
taacgacagcgatggtcctcttcct

SEQ ID NO: 55356 - DNA, 25 bp, SARS Virus
aacgacagcgaatgtcctcttccta

SEQ ID NO: 55357 - DNA, 25 bp, SARS Virus
acgacagcgaagttcctcttcctac

SEQ ID NO: 55358 - DNA, 25 bp, SARS Virus
cgacagcgaaggtcctcttcctact

SEQ ID NO: 55359 - DNA, 25 bp, SARS Virus
gacagcgaaggttctcttcctactc

SEQ ID NO: 55360 - DNA, 25 bp, SARS Virus
acagcgaaggtcttcttcctactcc

SEQ ID NO: 55361 - DNA, 25 bp, SARS Virus
cagcgaaggtcctcttcctactcct

SEQ ID NO: 55362 - DNA, 25 bp, SARS Virus
agcgaaggtccttttcctactcctt

SEQ ID NO: 55363 - DNA, 25 bp, SARS Virus
gcgaaggtcctcttcctactccttc

SEQ ID NO: 55364 - DNA, 25 bp, SARS Virus
cgaaggtcctcttcctactccttcc

SEQ ID NO: 55365 - DNA, 25 bp, SARS Virus
gaaggtcctctttctactccttccg

SEQ ID NO: 55366 - DNA, 25 bp, SARS Virus
aaggtcctcttcttactccttccgt

SEQ ID NO: 55367 - DNA, 25 bp, SARS Virus
aggtcctcttcctactccttccgtt

SEQ ID NO: 55368 - DNA, 25 bp, SARS Virus
ggtcctcttccttctccttccgtta

SEQ ID NO: 55369 - DNA, 25 bp, SARS Virus
gtcctcttcctattccttccgttaa

SEQ ID NO: 55370 - DNA, 25 bp, SARS Virus
tcctcttcctactccttccgttaaa

SEQ ID NO: 55371 - DNA, 25 bp, SARS Virus
cctcttcctacttcttccgttaaat

SEQ ID NO: 55372 - DNA, 25 bp, SARS Virus
ctcttcctactctttccgttaaata

SEQ ID NO: 55373 - DNA, 25 bp, SARS Virus
tcttcctactccttccgttaaataa

SEQ ID NO: 55374 - DNA, 25 bp, SARS Virus
cttcctactccttccgttaaataat

SEQ ID NO: 55375 - DNA, 25 bp, SARS Virus
ttcctactcctttcgttaaataatc

SEQ ID NO: 55376 - DNA, 25 bp, SARS Virus
tcctactccttctgttaaataatct

SEQ ID NO: 55377 - DNA, 25 bp, SARS Virus
cctactccttcctttaaataatctg

SEQ ID NO: 55378 - DNA, 25 bp, SARS Virus
ctactccttccgttaaataatctga

SEQ ID NO: 55379 - DNA, 25 bp, SARS Virus
tactccttccgttaaataatctgag

SEQ ID NO: 55380 - DNA, 25 bp, SARS Virus
actccttccgtttaataatctgaga

SEQ ID NO: 55381 - DNA, 25 bp, SARS Virus
ctccttccgttatataatctgagaa

SEQ ID NO: 55382 - DNA, 25 bp, SARS Virus
tccttccgttaattaatctgagaat

SEQ ID NO: 55383 - DNA, 25 bp, SARS Virus
ccttccgttaaataatctgagaatg

SEQ ID NO: 55384 - DNA, 25 bp, SARS Virus
cttccgttaaattatctgagaatga

SEQ ID NO: 55385 - DNA, 25 bp, SARS Virus
ttccgttaaatattctgagaatgaa

SEQ ID NO: 55386 - DNA, 25 bp, SARS Virus
tccgttaaataatctgagaatgaaa

SEQ ID NO: 55387 - DNA, 25 bp, SARS Virus
ccgttaaataatttgagaatgaaac

SEQ ID NO: 55388 - DNA, 25 bp, SARS Virus
cgttaaataatctgagaatgaaaca

SEQ ID NO: 55389 - DNA, 25 bp, SARS Virus
gttaaataatcttagaatgaaacat

SEQ ID NO: 55390 - DNA, 25 bp, SARS Virus
ttaaataatctgtgaatgaaacatc

SEQ ID NO: 55391 - DNA, 25 bp, SARS Virus
taaataatctgataatgaaacatca

SEQ ID NO: 55392 - DNA, 25 bp, SARS Virus
aaataatctgagtatgaaacatcaa

SEQ ID NO: 55393 - DNA, 25 bp, SARS Virus
aataatctgagattgaaacatcaat

SEQ ID NO: 55394 - DNA, 25 bp, SARS Virus
ataatctgagaatgaaacatcaatt

SEQ ID NO: 55395 - DNA, 25 bp, SARS Virus
taatctgagaattaaacatcaattc

SEQ ID NO: 55396 - DNA, 25 bp, SARS Virus
aatctgagaatgtaacatcaattct

SEQ ID NO: 55397 - DNA, 25 bp, SARS Virus
atctgagaatgatacatcaattctc

SEQ ID NO: 55398 - DNA, 25 bp, SARS Virus
tctgagaatgaatcatcaattctcc

SEQ ID NO: 55399 - DNA, 25 bp, SARS Virus
ctgagaatgaaatatcaattctccg

SEQ ID NO: 55400 - DNA, 25 bp, SARS Virus
tgagaatgaaacttcaattctccgt

SEQ ID NO: 55401 - DNA, 25 bp, SARS Virus
gagaatgaaacatcaattctccgta

SEQ ID NO: 55402 - DNA, 25 bp, SARS Virus
agaatgaaacattaattctccgtat

SEQ ID NO: 55403 - DNA, 25 bp, SARS Virus
gaatgaaacatctattctccgtatg

SEQ ID NO: 55404 - DNA, 25 bp, SARS Virus
aatgaaacatcatttctccgtatga

SEQ ID NO: 55405 - DNA, 25 bp, SARS Virus
atgaaacatcaattctccgtatgat

SEQ ID NO: 55406 - DNA, 25 bp, SARS Virus
tgaaacatcaattctccgtatgata

SEQ ID NO: 55407 - DNA, 25 bp, SARS Virus
gaaacatcaattttccgtatgatac

SEQ ID NO: 55408 - DNA, 25 bp, SARS Virus
aaacatcaattctccgtatgataca

SEQ ID NO: 55409 - DNA, 25 bp, SARS Virus
aacatcaattcttcgtatgatacag

SEQ ID NO: 55410 - DNA, 25 bp, SARS Virus
acatcaattctctgtatgatacaga

SEQ ID NO: 55411 - DNA, 25 bp, SARS Virus
catcaattctccttatgatacagat

SEQ ID NO: 55412 - DNA, 25 bp, SARS Virus
atcaattctccgtatgatacagatt

SEQ ID NO: 55413 - DNA, 25 bp, SARS Virus
tcaattctccgtttgatacagattg

SEQ ID NO: 55414 - DNA, 25 bp, SARS Virus
caattctccgtatgatacagattga

SEQ ID NO: 55415 - DNA, 25 bp, SARS Virus
aattctccgtattatacagattgat

SEQ ID NO: 55416 - DNA, 25 bp, SARS Virus
attctccgtatgttacagattgatg

SEQ ID NO: 55417 - DNA, 25 bp, SARS Virus
ttctccgtatgatacagattgatgg

SEQ ID NO: 55418 - DNA, 25 bp, SARS Virus
tctccgtatgattcagattgatggt

SEQ ID NO: 55419 - DNA, 25 bp, SARS Virus
ctccgtatgatatagattgatggtt

SEQ ID NO: 55420 - DNA, 25 bp, SARS Virus
tccgtatgatactgattgatggttg

SEQ ID NO: 55421 - DNA, 25 bp, SARS Virus
ccgtatgatacatattgatggttgt

SEQ ID NO: 55422 - DNA, 25 bp, SARS Virus
cgtatgatacagtttgatggttgta

SEQ ID NO: 55423 - DNA, 25 bp, SARS Virus
gtatgatacagattgatggttgtac

SEQ ID NO: 55424 - DNA, 25 bp, SARS Virus
tatgatacagattgatggttgtact

SEQ ID NO: 55425 - DNA, 25 bp, SARS Virus
atgatacagatttatggttgtactt

SEQ ID NO: 55426 - DNA, 25 bp, SARS Virus
tgatacagattgttggttgtacttc

SEQ ID NO: 55427 - DNA, 25 bp, SARS Virus
gatacagattgatggttgtacttct

SEQ ID NO: 55428 - DNA, 25 bp, SARS Virus
atacagattgattgttgtacttctc

SEQ ID NO: 55429 - DNA, 25 bp, SARS Virus
tacagattgatgtttgtacttctct

SEQ ID NO: 55430 - DNA, 25 bp, SARS Virus
acagattgatggttgtacttctctg

SEQ ID NO: 55431 - DNA, 25 bp, SARS Virus
cagattgatggttgtacttctctga

SEQ ID NO: 55432 - DNA, 25 bp, SARS Virus
agattgatggttttacttctctgat

SEQ ID NO: 55433 - DNA, 25 bp, SARS Virus
gattgatggttgtacttctctgata

SEQ ID NO: 55434 - DNA, 25 bp, SARS Virus
attgatggttgttcttctctgataa

SEQ ID NO: 55435 - DNA, 25 bp, SARS Virus
ttgatggttgtatttctctgataaa

SEQ ID NO: 55436 - DNA, 25 bp, SARS Virus
tgatggttgtacttctctgataaat

SEQ ID NO: 55437 - DNA, 25 bp, SARS Virus
gatggttgtacttctctgataaata

SEQ ID NO: 55438 - DNA, 25 bp, SARS Virus
atggttgtacttttctgataaatat

SEQ ID NO: 55439 - DNA, 25 bp, SARS Virus
tggttgtacttctctgataaatatt

SEQ ID NO: 55440 - DNA, 25 bp, SARS Virus
ggttgtacttctttgataaatattg

SEQ ID NO: 55441 - DNA, 25 bp, SARS Virus
gttgtacttctctgataaatattga

SEQ ID NO: 55442 - DNA, 25 bp, SARS Virus
ttgtacttctcttataaatattgaa

SEQ ID NO: 55443 - DNA, 25 bp, SARS Virus
tgtacttctctgttaaatattgaac

SEQ ID NO: 55444 - DNA, 25 bp, SARS Virus
gtacttctctgataaatattgaacc

SEQ ID NO: 55445 - DNA, 25 bp, SARS Virus
tacttctctgattaatattgaacca

SEQ ID NO: 55446 - DNA, 25 bp, SARS Virus
acttctctgatatatattgaaccaa

SEQ ID NO: 55447 - DNA, 25 bp, SARS Virus
cttctctgataattattgaaccaat

SEQ ID NO: 55448 - DNA, 25 bp, SARS Virus
ttctctgataaatattgaaccaatt

SEQ ID NO: 55449 - DNA, 25 bp, SARS Virus
tctctgataaattttgaaccaattt

SEQ ID NO: 55450 - DNA, 25 bp, SARS Virus
ctctgataaatattgaaccaatttc

SEQ ID NO: 55451 - DNA, 25 bp, SARS Virus
tctgataaatattgaaccaatttct

SEQ ID NO: 55452 - DNA, 25 bp, SARS Virus
ctgataaatatttaaccaatttcta

SEQ ID NO: 55453 - DNA, 25 bp, SARS Virus
tgataaatattgtaccaatttctaa

SEQ ID NO: 55454 - DNA, 25 bp, SARS Virus
gataaatattgatccaatttctaac

SEQ ID NO: 55455 - DNA, 25 bp, SARS Virus
ataaatattgaatcaatttctaaca

SEQ ID NO: 55456 - DNA, 25 bp, SARS Virus
taaatattgaactaatttctaacag

SEQ ID NO: 55457 - DNA, 25 bp, SARS Virus
aaatattgaacctatttctaacagg

SEQ ID NO: 55458 - DNA, 25 bp, SARS Virus
aatattgaaccattttctaacaggt

SEQ ID NO: 55459 - DNA, 25 bp, SARS Virus
atattgaaccaatttctaacaggtc

SEQ ID NO: 55460 - DNA, 25 bp, SARS Virus
tattgaaccaatttctaacaggtcg

SEQ ID NO: 55461 - DNA, 25 bp, SARS Virus
attgaaccaatttctaacaggtcgc

SEQ ID NO: 55462 - DNA, 25 bp, SARS Virus
ttgaaccaatttttaacaggtcgcc

SEQ ID NO: 55463 - DNA, 25 bp, SARS Virus
tgaaccaatttctaacaggtcgcca

SEQ ID NO: 55464 - DNA, 25 bp, SARS Virus
gaaccaatttcttacaggtcgccaa

SEQ ID NO: 55465 - DNA, 25 bp, SARS Virus
aaccaatttctatcaggtcgccaac

SEQ ID NO: 55466 - DNA, 25 bp, SARS Virus
accaatttctaataggtcgccaacg

SEQ ID NO: 55467 - DNA, 25 bp, SARS Virus
ccaatttctaactggtcgccaacga

SEQ ID NO: 55468 - DNA, 25 bp, SARS Virus
caatttctaacatgtcgccaacgac

SEQ ID NO: 55469 - DNA, 25 bp, SARS Virus
aatttctaacagttcgccaacgaca

SEQ ID NO: 55470 - DNA, 25 bp, SARS Virus
atttctaacaggtcgccaacgacag

SEQ ID NO: 55471 - DNA, 25 bp, SARS Virus
tttctaacaggttgccaacgacagg

SEQ ID NO: 55472 - DNA, 25 bp, SARS Virus
ttctaacaggtctccaacgacaggt

SEQ ID NO: 55473 - DNA, 25 bp, SARS Virus
tctaacaggtcgtcaacgacaggta

SEQ ID NO: 55474 - DNA, 25 bp, SARS Virus
ctaacaggtcgctaacgacaggtac

SEQ ID NO: 55475 - DNA, 25 bp, SARS Virus
taacaggtcgcctacgacaggtact

SEQ ID NO: 55476 - DNA, 25 bp, SARS Virus
aacaggtcgccatcgacaggtactg

SEQ ID NO: 55477 - DNA, 25 bp, SARS Virus
acaggtcgccaatgacaggtactga

SEQ ID NO: 55478 - DNA, 25 bp, SARS Virus
caggtcgccaactacaggtactgaa

SEQ ID NO: 55479 - DNA, 25 bp, SARS Virus
aggtcgccaacgtcaggtactgaaa

SEQ ID NO: 55480 - DNA, 25 bp, SARS Virus
ggtcgccaacgataggtactgaaaa

SEQ ID NO: 55481 - DNA, 25 bp, SARS Virus
gtcgccaacgactggtactgaaaaa

SEQ ID NO: 55482 - DNA, 25 bp, SARS Virus
tcgccaacgacatgtactgaaaaag

SEQ ID NO: 55483 - DNA, 25 bp, SARS Virus
cgccaacgacagttactgaaaaagt

SEQ ID NO: 55484 - DNA, 25 bp, SARS Virus
gccaacgacaggtactgaaaaagtt

SEQ ID NO: 55485 - DNA, 25 bp, SARS Virus
ccaacgacaggttctgaaaaagttc

SEQ ID NO: 55486 - DNA, 25 bp, SARS Virus
caacgacaggtattgaaaaagttca

SEQ ID NO: 55487 - DNA, 25 bp, SARS Virus
aacgacaggtactgaaaaagttcaa

SEQ ID NO: 55488 - DNA, 25 bp, SARS Virus
acgacaggtacttaaaaagttcaaa

SEQ ID NO: 55489 - DNA, 25 bp, SARS Virus
cgacaggtactgtaaaagttcaaat

SEQ ID NO: 55490 - DNA, 25 bp, SARS Virus
gacaggtactgataaagttcaaatc

SEQ ID NO: 55491 - DNA, 25 bp, SARS Virus
acaggtactgaataagttcaaatct

SEQ ID NO: 55492 - DNA, 25 bp, SARS Virus
caggtactgaaatagttcaaatctc

SEQ ID NO: 55493 - DNA, 25 bp, SARS Virus
aggtactgaaaatgttcaaatctca

SEQ ID NO: 55494 - DNA, 25 bp, SARS Virus
ggtactgaaaaatttcaaatctcat

SEQ ID NO: 55495 - DNA, 25 bp, SARS Virus
gtactgaaaaagttcaaatctcatc

SEQ ID NO: 55496 - DNA, 25 bp, SARS Virus
tactgaaaaagttcaaatctcatct

SEQ ID NO: 55497 - DNA, 25 bp, SARS Virus
actgaaaaagtttaaatctcatcta

SEQ ID NO: 55498 - DNA, 25 bp, SARS Virus
ctgaaaaagttctaatctcatctac

SEQ ID NO: 55499 - DNA, 25 bp, SARS Virus
tgaaaaagttcatatctcatctacc

SEQ ID NO: 55500 - DNA, 25 bp, SARS Virus
gaaaaagttcaattctcatctacca

SEQ ID NO: 55501 - DNA, 25 bp, SARS Virus
aaaaagttcaaatctcatctaccac

SEQ ID NO: 55502 - DNA, 25 bp, SARS Virus
aaaagttcaaatttcatctaccact

SEQ ID NO: 55503 - DNA, 25 bp, SARS Virus
aaagttcaaatctcatctaccactg

SEQ ID NO: 55504 - DNA, 25 bp, SARS Virus
aagttcaaatcttatctaccactgt

SEQ ID NO: 55505 - DNA, 25 bp, SARS Virus
agttcaaatctcttctaccactgta

SEQ ID NO: 55506 - DNA, 25 bp, SARS Virus
gttcaaatctcatctaccactgtac

SEQ ID NO: 55507 - DNA, 25 bp, SARS Virus
ttcaaatctcatttaccactgtacc

SEQ ID NO: 55508 - DNA, 25 bp, SARS Virus
tcaaatctcatctaccactgtacca

SEQ ID NO: 55509 - DNA, 25 bp, SARS Virus
caaatctcatcttccactgtaccat

SEQ ID NO: 55510 - DNA, 25 bp, SARS Virus
aaatctcatctatcactgtaccatg

SEQ ID NO: 55511 - DNA, 25 bp, SARS Virus
aatctcatctactactgtaccatgg

SEQ ID NO: 55512 - DNA, 25 bp, SARS Virus
atctcatctacctctgtaccatggt

SEQ ID NO: 55513 - DNA, 25 bp, SARS Virus
tctcatctaccattgtaccatggtg

SEQ ID NO: 55514 - DNA, 25 bp, SARS Virus
ctcatctaccactgtaccatggtgt

SEQ ID NO: 55515 - DNA, 25 bp, SARS Virus
tcatctaccactttaccatggtgta

SEQ ID NO: 55516 - DNA, 25 bp, SARS Virus
catctaccactgtaccatggtgtat

SEQ ID NO: 55517 - DNA, 25 bp, SARS Virus
atctaccactgttccatggtgtata

SEQ ID NO: 55518 - DNA, 25 bp, SARS Virus
tctaccactgtatcatggtgtatat

SEQ ID NO: 55519 - DNA, 25 bp, SARS Virus
ctaccactgtactatggtgtatata

SEQ ID NO: 55520 - DNA, 25 bp, SARS Virus
taccactgtaccttggtgtatatag

SEQ ID NO: 55521 - DNA, 25 bp, SARS Virus
accactgtaccatggtgtatatagt

SEQ ID NO: 55522 - DNA, 25 bp, SARS Virus
ccactgtaccattgtgtatatagtg

SEQ ID NO: 55523 - DNA, 25 bp, SARS Virus
cactgtaccatgttgtatatagtgc

SEQ ID NO: 55524 - DNA, 25 bp, SARS Virus
actgtaccatggtgtatatagtgca

SEQ ID NO: 55525 - DNA, 25 bp, SARS Virus
ctgtaccatggtttatatagtgcag

SEQ ID NO: 55526 - DNA, 25 bp, SARS Virus
tgtaccatggtgtatatagtgcagt

SEQ ID NO: 55527 - DNA, 25 bp, SARS Virus
gtaccatggtgtttatagtgcagtc

SEQ ID NO: 55528 - DNA, 25 bp, SARS Virus
taccatggtgtatatagtgcagtcg

SEQ ID NO: 55529 - DNA, 25 bp, SARS Virus
accatggtgtatttagtgcagtcgc

SEQ ID NO: 55530 - DNA, 25 bp, SARS Virus
ccatggtgtatatagtgcagtcgca

SEQ ID NO: 55531 - DNA, 25 bp, SARS Virus
catggtgtatattgtgcagtcgcag

SEQ ID NO: 55532 - DNA, 25 bp, SARS Virus
atggtgtatatattgcagtcgcaga

SEQ ID NO: 55533 - DNA, 25 bp, SARS Virus
tggtgtatatagtgcagtcgcagat

SEQ ID NO: 55534 - DNA, 25 bp, SARS Virus
ggtgtatatagttcagtcgcagatt

SEQ ID NO: 55535 - DNA, 25 bp, SARS Virus
gtgtatatagtgtagtcgcagattg

SEQ ID NO: 55536 - DNA, 25 bp, SARS Virus
tgtatatagtgctgtcgcagattga

SEQ ID NO: 55537 - DNA, 25 bp, SARS Virus
gtatatagtgcattcgcagattgat

SEQ ID NO: 55538 - DNA, 25 bp, SARS Virus
tatatagtgcagtcgcagattgatt

SEQ ID NO: 55539 - DNA, 25 bp, SARS Virus
atatagtgcagttgcagattgattt

SEQ ID NO: 55540 - DNA, 25 bp, SARS Virus
tatagtgcagtctcagattgattta

SEQ ID NO: 55541 - DNA, 25 bp, SARS Virus
atagtgcagtcgtagattgatttat

SEQ ID NO: 55542 - DNA, 25 bp, SARS Virus
tagtgcagtcgctgattgatttatg

SEQ ID NO: 55543 - DNA, 25 bp, SARS Virus
agtgcagtcgcatattgatttatgt

SEQ ID NO: 55544 - DNA, 25 bp, SARS Virus
gtgcagtcgcagtttgatttatgtg

SEQ ID NO: 55545 - DNA, 25 bp, SARS Virus
tgcagtcgcagattgatttatgtgt

SEQ ID NO: 55546 - DNA, 25 bp, SARS Virus
gcagtcgcagattgatttatgtgtt

SEQ ID NO: 55547 - DNA, 25 bp, SARS Virus
cagtcgcagatttatttatgtgtta

SEQ ID NO: 55548 - DNA, 25 bp, SARS Virus
agtcgcagattgttttatgtgttac

SEQ ID NO: 55549 - DNA, 25 bp, SARS Virus
gtcgcagattgatttatgtgttacc

SEQ ID NO: 55550 - DNA, 25 bp, SARS Virus
tcgcagattgatttatgtgttaccg

SEQ ID NO: 55551 - DNA, 25 bp, SARS Virus
cgcagattgatttatgtgttaccga

SEQ ID NO: 55552 - DNA, 25 bp, SARS Virus
gcagattgatttttgtgttaccgac

SEQ ID NO: 55553 - DNA, 25 bp, SARS Virus
cagattgatttatgtgttaccgact

SEQ ID NO: 55554 - DNA, 25 bp, SARS Virus
agattgatttatttgttaccgacta

SEQ ID NO: 55555 - DNA, 25 bp, SARS Virus
gattgatttatgtgttaccgactaa

SEQ ID NO: 55556 - DNA, 25 bp, SARS Virus
attgatttatgttttaccgactaaa

SEQ ID NO: 55557 - DNA, 25 bp, SARS Virus
ttgatttatgtgttaccgactaaat

SEQ ID NO: 55558 - DNA, 25 bp, SARS Virus
tgatttatgtgttaccgactaaatc

SEQ ID NO: 55559 - DNA, 25 bp, SARS Virus
gatttatgtgtttccgactaaatca

SEQ ID NO: 55560 - DNA, 25 bp, SARS Virus
atttatgtgttatcgactaaatcag

SEQ ID NO: 55561 - DNA, 25 bp, SARS Virus
tttatgtgttactgactaaatcaga

SEQ ID NO: 55562 - DNA, 25 bp, SARS Virus
ttatgtgttacctactaaatcagat

SEQ ID NO: 55563 - DNA, 25 bp, SARS Virus
tatgtgttaccgtctaaatcagata

SEQ ID NO: 55564 - DNA, 25 bp, SARS Virus
atgtgttaccgattaaatcagatac

SEQ ID NO: 55565 - DNA, 25 bp, SARS Virus
tgtgttaccgactaaatcagatacg

SEQ ID NO: 55566 - DNA, 25 bp, SARS Virus
gtgttaccgacttaatcagatacga

SEQ ID NO: 55567 - DNA, 25 bp, SARS Virus
tgttaccgactatatcagatacgag

SEQ ID NO: 55568 - DNA, 25 bp, SARS Virus
gttaccgactaattcagatacgaga

SEQ ID NO: 55569 - DNA, 25 bp, SARS Virus
ttaccgactaaatcagatacgagat

SEQ ID NO: 55570 - DNA, 25 bp, SARS Virus
taccgactaaattagatacgagatg

SEQ ID NO: 55571 - DNA, 25 bp, SARS Virus
accgactaaatctgatacgagatgc

SEQ ID NO: 55572 - DNA, 25 bp, SARS Virus
ccgactaaatcatatacgagatgca

SEQ ID NO: 55573 - DNA, 25 bp, SARS Virus
cgactaaatcagttacgagatgcag

SEQ ID NO: 55574 - DNA, 25 bp, SARS Virus
gactaaatcagatacgagatgcagt

SEQ ID NO: 55575 - DNA, 25 bp, SARS Virus
actaaatcagattcgagatgcagta

SEQ ID NO: 55576 - DNA, 25 bp, SARS Virus
ctaaatcagatatgagatgcagtaa

SEQ ID NO: 55577 - DNA, 25 bp, SARS Virus
taaatcagatactagatgcagtaaa

SEQ ID NO: 55578 - DNA, 25 bp, SARS Virus
aaatcagatacgtgatgcagtaaaa

SEQ ID NO: 55579 - DNA, 25 bp, SARS Virus
aatcagatacgatatgcagtaaaac

SEQ ID NO: 55580 - DNA, 25 bp, SARS Virus
atcagatacgagttgcagtaaaact

SEQ ID NO: 55581 - DNA, 25 bp, SARS Virus
tcagatacgagatgcagtaaaacta

SEQ ID NO: 55582 - DNA, 25 bp, SARS Virus
cagatacgagattcagtaaaactac

SEQ ID NO: 55583 - DNA, 25 bp, SARS Virus
agatacgagatgtagtaaaactact

SEQ ID NO: 55584 - DNA, 25 bp, SARS Virus
gatacgagatgctgtaaaactactc

SEQ ID NO: 55585 - DNA, 25 bp, SARS Virus
atacgagatgcattaaaactactcc

SEQ ID NO: 55586 - DNA, 25 bp, SARS Virus
tacgagatgcagtaaaactactccc

SEQ ID NO: 55587 - DNA, 25 bp, SARS Virus
acgagatgcagttaaactactccca

SEQ ID NO: 55588 - DNA, 25 bp, SARS Virus
cgagatgcagtataactactcccat

SEQ ID NO: 55589 - DNA, 25 bp, SARS Virus
gagatgcagtaatactactcccatt

SEQ ID NO: 55590 - DNA, 25 bp, SARS Virus
agatgcagtaaatctactcccatta

SEQ ID NO: 55591 - DNA, 25 bp, SARS Virus
gatgcagtaaaattactcccattaa

SEQ ID NO: 55592 - DNA, 25 bp, SARS Virus
atgcagtaaaactactcccattaac

SEQ ID NO: 55593 - DNA, 25 bp, SARS Virus
tgcagtaaaacttctcccattaaca

SEQ ID NO: 55594 - DNA, 25 bp, SARS Virus
gcagtaaaactattcccattaacac

SEQ ID NO: 55595 - DNA, 25 bp, SARS Virus
cagtaaaactactcccattaacact

SEQ ID NO: 55596 - DNA, 25 bp, SARS Virus
agtaaaactacttccattaacacta

SEQ ID NO: 55597 - DNA, 25 bp, SARS Virus
gtaaaactactctcattaacactat

SEQ ID NO: 55598 - DNA, 25 bp, SARS Virus
taaaactactcctattaacactatg

SEQ ID NO: 55599 - DNA, 25 bp, SARS Virus
aaaactactccctttaacactatgt

SEQ ID NO: 55600 - DNA, 25 bp, SARS Virus
aaactactcccattaacactatgta

SEQ ID NO: 55601 - DNA, 25 bp, SARS Virus
aactactcccattaacactatgtaa

SEQ ID NO: 55602 - DNA, 25 bp, SARS Virus
actactcccatttacactatgtaat

SEQ ID NO: 55603 - DNA, 25 bp, SARS Virus
ctactcccattatcactatgtaatt

SEQ ID NO: 55604 - DNA, 25 bp, SARS Virus
tactcccattaatactatgtaattt

SEQ ID NO: 55605 - DNA, 25 bp, SARS Virus
actcccattaactctatgtaatttt

SEQ ID NO: 55606 - DNA, 25 bp, SARS Virus
ctcccattaacattatgtaattttc

SEQ ID NO: 55607 - DNA, 25 bp, SARS Virus
tcccattaacactatgtaattttct

SEQ ID NO: 55608 - DNA, 25 bp, SARS Virus
cccattaacactttgtaattttctt

SEQ ID NO: 55609 - DNA, 25 bp, SARS Virus
ccattaacactatgtaattttcttt

SEQ ID NO: 55610 - DNA, 25 bp, SARS Virus
cattaacactatttaattttcttta

SEQ ID NO: 55611 - DNA, 25 bp, SARS Virus
attaacactatgtaattttctttat

SEQ ID NO: 55612 - DNA, 25 bp, SARS Virus
ttaacactatgttattttctttatg

SEQ ID NO: 55613 - DNA, 25 bp, SARS Virus
taacactatgtatttttctttatga

SEQ ID NO: 55614 - DNA, 25 bp, SARS Virus
aacactatgtaattttctttatgag

SEQ ID NO: 55615 - DNA, 25 bp, SARS Virus
acactatgtaattttctttatgagc

SEQ ID NO: 55616 - DNA, 25 bp, SARS Virus
cactatgtaattttctttatgagca

SEQ ID NO: 55617 - DNA, 25 bp, SARS Virus
actatgtaattttctttatgagcag

SEQ ID NO: 55618 - DNA, 25 bp, SARS Virus
ctatgtaattttttttatgagcagt

SEQ ID NO: 55619 - DNA, 25 bp, SARS Virus
tatgtaattttctttatgagcagtg

SEQ ID NO: 55620 - DNA, 25 bp, SARS Virus
atgtaattttctttatgagcagtgt

SEQ ID NO: 55621 - DNA, 25 bp, SARS Virus
tgtaattttctttatgagcagtgta

SEQ ID NO: 55622 - DNA, 25 bp, SARS Virus
gtaattttctttttgagcagtgtat

SEQ ID NO: 55623 - DNA, 25 bp, SARS Virus
taattttctttatgagcagtgtatg

SEQ ID NO: 55624 - DNA, 25 bp, SARS Virus
aattttctttattagcagtgtatgt

SEQ ID NO: 55625 - DNA, 25 bp, SARS Virus
attttctttatgtgcagtgtatgtt

SEQ ID NO: 55626 - DNA, 25 bp, SARS Virus
ttttctttatgatcagtgtatgtta

SEQ ID NO: 55627 - DNA, 25 bp, SARS Virus
tttctttatgagtagtgtatgttaa

SEQ ID NO: 55628 - DNA, 25 bp, SARS Virus
ttctttatgagctgtgtatgttaac

SEQ ID NO: 55629 - DNA, 25 bp, SARS Virus
tctttatgagcattgtatgttaacg

SEQ ID NO: 55630 - DNA, 25 bp, SARS Virus
ctttatgagcagtgtatgttaacga

SEQ ID NO: 55631 - DNA, 25 bp, SARS Virus
tttatgagcagtttatgttaacgac

SEQ ID NO: 55632 - DNA, 25 bp, SARS Virus
ttatgagcagtgtatgttaacgaca

SEQ ID NO: 55633 - DNA, 25 bp, SARS Virus
tatgagcagtgtttgttaacgacac

SEQ ID NO: 55634 - DNA, 25 bp, SARS Virus
atgagcagtgtatgttaacgacact

SEQ ID NO: 55635 - DNA, 25 bp, SARS Virus
tgagcagtgtattttaacgacacta

SEQ ID NO: 55636 - DNA, 25 bp, SARS Virus
gagcagtgtatgttaacgacactac

SEQ ID NO: 55637 - DNA, 25 bp, SARS Virus
agcagtgtatgttaacgacactact

SEQ ID NO: 55638 - DNA, 25 bp, SARS Virus
gcagtgtatgtttacgacactacta

SEQ ID NO: 55639 - DNA, 25 bp, SARS Virus
cagtgtatgttatcgacactactac

SEQ ID NO: 55640 - DNA, 25 bp, SARS Virus
agtgtatgttaatgacactactact

SEQ ID NO: 55641 - DNA, 25 bp, SARS Virus
gtgtatgttaactacactactacta

SEQ ID NO: 55642 - DNA, 25 bp, SARS Virus
tgtatgttaacgtcactactactaa

SEQ ID NO: 55643 - DNA, 25 bp, SARS Virus
gtatgttaacgatactactactaat

SEQ ID NO: 55644 - DNA, 25 bp, SARS Virus
tatgttaacgactctactactaata

SEQ ID NO: 55645 - DNA, 25 bp, SARS Virus
atgttaacgacattactactaataa

SEQ ID NO: 55646 - DNA, 25 bp, SARS Virus
tgttaacgacactactactaataaa

SEQ ID NO: 55647 - DNA, 25 bp, SARS Virus
gttaacgacacttctactaataaag

SEQ ID NO: 55648 - DNA, 25 bp, SARS Virus
ttaacgacactattactaataaagt

SEQ ID NO: 55649 - DNA, 25 bp, SARS Virus
taacgacactactactaataaagtt

SEQ ID NO: 55650 - DNA, 25 bp, SARS Virus
aacgacactacttctaataaagtta

SEQ ID NO: 55651 - DNA, 25 bp, SARS Virus
acgacactactattaataaagttat

SEQ ID NO: 55652 - DNA, 25 bp, SARS Virus
cgacactactactaataaagttatt

SEQ ID NO: 55653 - DNA, 25 bp, SARS Virus
gacactactacttataaagttattc

SEQ ID NO: 55654 - DNA, 25 bp, SARS Virus
acactactactattaaagttattct

SEQ ID NO: 55655 - DNA, 25 bp, SARS Virus
cactactactaataaagttattctt

SEQ ID NO: 55656 - DNA, 25 bp, SARS Virus
actactactaattaagttattcttc

SEQ ID NO: 55657 - DNA, 25 bp, SARS Virus
ctactactaatatagttattcttcc

SEQ ID NO: 55658 - DNA, 25 bp, SARS Virus
tactactaataatgttattcttcct

SEQ ID NO: 55659 - DNA, 25 bp, SARS Virus
actactaataaatttattcttccta

SEQ ID NO: 55660 - DNA, 25 bp, SARS Virus
ctactaataaagttattcttcctaa

SEQ ID NO: 55661 - DNA, 25 bp, SARS Virus
tactaataaagttattcttcctaac

SEQ ID NO: 55662 - DNA, 25 bp, SARS Virus
actaataaagtttttcttcctaacc

SEQ ID NO: 55663 - DNA, 25 bp, SARS Virus
ctaataaagttattcttcctaacca

SEQ ID NO: 55664 - DNA, 25 bp, SARS Virus
taataaagttattcttcctaaccat

SEQ ID NO: 55665 - DNA, 25 bp, SARS Virus
aataaagttatttttcctaaccata

SEQ ID NO: 55666 - DNA, 25 bp, SARS Virus
ataaagttattcttcctaaccatac

SEQ ID NO: 55667 - DNA, 25 bp, SARS Virus
taaagttattcttcctaaccatact

SEQ ID NO: 55668 - DNA, 25 bp, SARS Virus
aaagttattctttctaaccatactg

SEQ ID NO: 55669 - DNA, 25 bp, SARS Virus
aagttattcttcttaaccatactga

SEQ ID NO: 55670 - DNA, 25 bp, SARS Virus
agttattcttcctaaccatactgaa

SEQ ID NO: 55671 - DNA, 25 bp, SARS Virus
gttattcttccttaccatactgaag

SEQ ID NO: 55672 - DNA, 25 bp, SARS Virus
ttattcttcctatccatactgaagc

SEQ ID NO: 55673 - DNA, 25 bp, SARS Virus
tattcttcctaatcatactgaagca

SEQ ID NO: 55674 - DNA, 25 bp, SARS Virus
attcttcctaactatactgaagcat

SEQ ID NO: 55675 - DNA, 25 bp, SARS Virus
ttcttcctaaccttactgaagcatc

SEQ ID NO: 55676 - DNA, 25 bp, SARS Virus
tcttcctaaccatactgaagcatct

SEQ ID NO: 55677 - DNA, 25 bp, SARS Virus
cttcctaaccattctgaagcatctc

SEQ ID NO: 55678 - DNA, 25 bp, SARS Virus
ttcctaaccatattgaagcatctct

SEQ ID NO: 55679 - DNA, 25 bp, SARS Virus
tcctaaccatactgaagcatctctt

SEQ ID NO: 55680 - DNA, 25 bp, SARS Virus
cctaaccatacttaagcatctctta

SEQ ID NO: 55681 - DNA, 25 bp, SARS Virus
ctaaccatactgtagcatctcttag

SEQ ID NO: 55682 - DNA, 25 bp, SARS Virus
taaccatactgatgcatctcttagg

SEQ ID NO: 55683 - DNA, 25 bp, SARS Virus
aaccatactgaatcatctcttagga

SEQ ID NO: 55684 - DNA, 25 bp, SARS Virus
accatactgaagtatctcttaggac

SEQ ID NO: 55685 - DNA, 25 bp, SARS Virus
ccatactgaagcttctcttaggact

SEQ ID NO: 55686 - DNA, 25 bp, SARS Virus
catactgaagcatctcttaggactg

SEQ ID NO: 55687 - DNA, 25 bp, SARS Virus
atactgaagcatttcttaggactgt

SEQ ID NO: 55688 - DNA, 25 bp, SARS Virus
tactgaagcatctcttaggactgta

SEQ ID NO: 55689 - DNA, 25 bp, SARS Virus
actgaagcatcttttaggactgtag

SEQ ID NO: 55690 - DNA, 25 bp, SARS Virus
ctgaagcatctcttaggactgtaga

SEQ ID NO: 55691 - DNA, 25 bp, SARS Virus
tgaagcatctcttaggactgtagaa

SEQ ID NO: 55692 - DNA, 25 bp, SARS Virus
gaagcatctctttggactgtagaat

SEQ ID NO: 55693 - DNA, 25 bp, SARS Virus
aagcatctcttatgactgtagaatg

SEQ ID NO: 55694 - DNA, 25 bp, SARS Virus
agcatctcttagtactgtagaatgc

SEQ ID NO: 55695 - DNA, 25 bp, SARS Virus
gcatctcttaggtctgtagaatgcg

SEQ ID NO: 55696 - DNA, 25 bp, SARS Virus
catctcttaggattgtagaatgcgc

SEQ ID NO: 55697 - DNA, 25 bp, SARS Virus
atctcttaggactgtagaatgcgca

SEQ ID NO: 55698 - DNA, 25 bp, SARS Virus
tctcttaggactttagaatgcgcat

SEQ ID NO: 55699 - DNA, 25 bp, SARS Virus
ctcttaggactgtagaatgcgcata

SEQ ID NO: 55700 - DNA, 25 bp, SARS Virus
tcttaggactgttgaatgcgcatat

SEQ ID NO: 55701 - DNA, 25 bp, SARS Virus
cttaggactgtataatgcgcatata

SEQ ID NO: 55702 - DNA, 25 bp, SARS Virus
ttaggactgtagtatgcgcatatac

SEQ ID NO: 55703 - DNA, 25 bp, SARS Virus
taggactgtagattgcgcatatacg

SEQ ID NO: 55704 - DNA, 25 bp, SARS Virus
aggactgtagaatgcgcatatacga

SEQ ID NO: 55705 - DNA, 25 bp, SARS Virus
ggactgtagaattcgcatatacgat

SEQ ID NO: 55706 - DNA, 25 bp, SARS Virus
gactgtagaatgtgcatatacgatt

SEQ ID NO: 55707 - DNA, 25 bp, SARS Virus
actgtagaatgctcatatacgattg

SEQ ID NO: 55708 - DNA, 25 bp, SARS Virus
ctgtagaatgcgtatatacgattga

SEQ ID NO: 55709 - DNA, 25 bp, SARS Virus
tgtagaatgcgcttatacgattgaa

SEQ ID NO: 55710 - DNA, 25 bp, SARS Virus
gtagaatgcgcatatacgattgaat

SEQ ID NO: 55711 - DNA, 25 bp, SARS Virus
tagaatgcgcatttacgattgaatc

SEQ ID NO: 55712 - DNA, 25 bp, SARS Virus
agaatgcgcatatacgattgaatcc

SEQ ID NO: 55713 - DNA, 25 bp, SARS Virus
gaatgcgcatattcgattgaatcca

SEQ ID NO: 55714 - DNA, 25 bp, SARS Virus
aatgcgcatatatgattgaatccac

SEQ ID NO: 55715 - DNA, 25 bp, SARS Virus
atgcgcatatactattgaatccact

SEQ ID NO: 55716 - DNA, 25 bp, SARS Virus
tgcgcatatacgtttgaatccactc

SEQ ID NO: 55717 - DNA, 25 bp, SARS Virus
gcgcatatacgattgaatccactcg

SEQ ID NO: 55718 - DNA, 25 bp, SARS Virus
cgcatatacgattgaatccactcgc

SEQ ID NO: 55719 - DNA, 25 bp, SARS Virus
gcatatacgatttaatccactcgca

SEQ ID NO: 55720 - DNA, 25 bp, SARS Virus
catatacgattgtatccactcgcac

SEQ ID NO: 55721 - DNA, 25 bp, SARS Virus
atatacgattgattccactcgcaca

SEQ ID NO: 55722 - DNA, 25 bp, SARS Virus
tatacgattgaatccactcgcacat

SEQ ID NO: 55723 - DNA, 25 bp, SARS Virus
atacgattgaattcactcgcacatg

SEQ ID NO: 55724 - DNA, 25 bp, SARS Virus
tacgattgaatctactcgcacatgc

SEQ ID NO: 55725 - DNA, 25 bp, SARS Virus
acgattgaatcctctcgcacatgcg

SEQ ID NO: 55726 - DNA, 25 bp, SARS Virus
cgattgaatccattcgcacatgcgg

SEQ ID NO: 55727 - DNA, 25 bp, SARS Virus
gattgaatccactcgcacatgcggt

SEQ ID NO: 55728 - DNA, 25 bp, SARS Virus
attgaatccacttgcacatgcggtt

SEQ ID NO: 55729 - DNA, 25 bp, SARS Virus
ttgaatccactctcacatgcggtta

SEQ ID NO: 55730 - DNA, 25 bp, SARS Virus
tgaatccactcgtacatgcggttag

SEQ ID NO: 55731 - DNA, 25 bp, SARS Virus
gaatccactcgctcatgcggttagt

SEQ ID NO: 55732 - DNA, 25 bp, SARS Virus
aatccactcgcatatgcggttagta

SEQ ID NO: 55733 - DNA, 25 bp, SARS Virus
atccactcgcacttgcggttagtaa

SEQ ID NO: 55734 - DNA, 25 bp, SARS Virus
tccactcgcacatgcggttagtaat

SEQ ID NO: 55735 - DNA, 25 bp, SARS Virus
ccactcgcacattcggttagtaata

SEQ ID NO: 55736 - DNA, 25 bp, SARS Virus
cactcgcacatgtggttagtaataa

SEQ ID NO: 55737 - DNA, 25 bp, SARS Virus
actcgcacatgctgttagtaataat

SEQ ID NO: 55738 - DNA, 25 bp, SARS Virus
ctcgcacatgcgtttagtaataatt

SEQ ID NO: 55739 - DNA, 25 bp, SARS Virus
tcgcacatgcggttagtaataattt

SEQ ID NO: 55740 - DNA, 25 bp, SARS Virus
cgcacatgcggttagtaataatttc

SEQ ID NO: 55741 - DNA, 25 bp, SARS Virus
gcacatgcggtttgtaataatttct

SEQ ID NO: 55742 - DNA, 25 bp, SARS Virus
cacatgcggttattaataatttctg

SEQ ID NO: 55743 - DNA, 25 bp, SARS Virus
acatgcggttagtaataatttctga

SEQ ID NO: 55744 - DNA, 25 bp, SARS Virus
catgcggttagttataatttctgac

SEQ ID NO: 55745 - DNA, 25 bp, SARS Virus
atgcggttagtattaatttctgaca

SEQ ID NO: 55746 - DNA, 25 bp, SARS Virus
tgcggttagtaataatttctgacat

SEQ ID NO: 55747 - DNA, 25 bp, SARS Virus
gcggttagtaattatttctgacatg

SEQ ID NO: 55748 - DNA, 25 bp, SARS Virus
cggttagtaatattttctgacatgt

SEQ ID NO: 55749 - DNA, 25 bp, SARS Virus
ggttagtaataatttctgacatgtt

SEQ ID NO: 55750 - DNA, 25 bp, SARS Virus
gttagtaataatttctgacatgtta

SEQ ID NO: 55751 - DNA, 25 bp, SARS Virus
ttagtaataatttctgacatgttaa

SEQ ID NO: 55752 - DNA, 25 bp, SARS Virus
tagtaataatttttgacatgttaag

SEQ ID NO: 55753 - DNA, 25 bp, SARS Virus
agtaataatttctgacatgttaaga

SEQ ID NO: 55754 - DNA, 25 bp, SARS Virus
gtaataatttcttacatgttaagac

SEQ ID NO: 55755 - DNA, 25 bp, SARS Virus
taataatttctgtcatgttaagacg

SEQ ID NO: 55756 - DNA, 25 bp, SARS Virus
aataatttctgatatgttaagacgc

SEQ ID NO: 55757 - DNA, 25 bp, SARS Virus
ataatttctgacttgttaagacgct

SEQ ID NO: 55758 - DNA, 25 bp, SARS Virus
taatttctgacatgttaagacgcta

SEQ ID NO: 55759 - DNA, 25 bp, SARS Virus
aatttctgacattttaagacgctac

SEQ ID NO: 55760 - DNA, 25 bp, SARS Virus
atttctgacatgttaagacgctacg

SEQ ID NO: 55761 - DNA, 25 bp, SARS Virus
tttctgacatgtaaagacgctacga

SEQ ID NO: 55762 - DNA, 25 bp, SARS Virus
ttctgacatgttaagacgctacgat

SEQ ID NO: 55763 - DNA, 25 bp, SARS Virus
tctgacatgttaagacgctacgata

SEQ ID NO: 55764 - DNA, 25 bp, SARS Virus
ctgacatgttaaaacgctacgatac

SEQ ID NO: 55765 - DNA, 25 bp, SARS Virus
tgacatgttaagacgctacgatacg

SEQ ID NO: 55766 - DNA, 25 bp, SARS Virus
gacatgttaagaagctacgatacgc

SEQ ID NO: 55767 - DNA, 25 bp, SARS Virus
acatgttaagacactacgatacgca

SEQ ID NO: 55768 - DNA, 25 bp, SARS Virus
catgttaagacgatacgatacgcac

SEQ ID NO: 55769 - DNA, 25 bp, SARS Virus
atgttaagacgcaacgatacgcact

SEQ ID NO: 55770 - DNA, 25 bp, SARS Virus
tgttaagacgctacgatacgcacta

SEQ ID NO: 55771 - DNA, 25 bp, SARS Virus
gttaagacgctaagatacgcactac

SEQ ID NO: 55772 - DNA, 25 bp, SARS Virus
ttaagacgctacaatacgcactacg

SEQ ID NO: 55773 - DNA, 25 bp, SARS Virus
taagacgctacgatacgcactacgt

SEQ ID NO: 55774 - DNA, 25 bp, SARS Virus
aagacgctacgaaacgcactacgtc

SEQ ID NO: 55775 - DNA, 25 bp, SARS Virus
agacgctacgatacgcactacgtcc

SEQ ID NO: 55776 - DNA, 25 bp, SARS Virus
gacgctacgataagcactacgtccg

SEQ ID NO: 55777 - DNA, 25 bp, SARS Virus
acgctacgatacacactacgtccgt

SEQ ID NO: 55778 - DNA, 25 bp, SARS Virus
cgctacgatacgaactacgtccgta

SEQ ID NO: 55779 - DNA, 25 bp, SARS Virus
gctacgatacgcactacgtccgtaa

SEQ ID NO: 55780 - DNA, 25 bp, SARS Virus
ctacgatacgcaatacgtccgtaac

SEQ ID NO: 55781 - DNA, 25 bp, SARS Virus
tacgatacgcacaacgtccgtaaca

SEQ ID NO: 55782 - DNA, 25 bp, SARS Virus
acgatacgcactacgtccgtaacat

SEQ ID NO: 55783 - DNA, 25 bp, SARS Virus
cgatacgcactaagtccgtaacatc

SEQ ID NO: 55784 - DNA, 25 bp, SARS Virus
gatacgcactacatccgtaacatcc

SEQ ID NO: 55785 - DNA, 25 bp, SARS Virus
atacgcactacgaccgtaacatccg

SEQ ID NO: 55786 - DNA, 25 bp, SARS Virus
tacgcactacgtacgtaacatccgc

SEQ ID NO: 55787 - DNA, 25 bp, SARS Virus
acgcactacgtcagtaacatccgca

SEQ ID NO: 55788 - DNA, 25 bp, SARS Virus
cgcactacgtccataacatccgcat

SEQ ID NO: 55789 - DNA, 25 bp, SARS Virus
gcactacgtccgaaacatccgcatg

SEQ ID NO: 55790 - DNA, 25 bp, SARS Virus
cactacgtccgtaacatccgcatga

SEQ ID NO: 55791 - DNA, 25 bp, SARS Virus
actacgtccgtaacatccgcatgac

SEQ ID NO: 55792 - DNA, 25 bp, SARS Virus
ctacgtccgtaaaatccgcatgact

SEQ ID NO: 55793 - DNA, 25 bp, SARS Virus
tacgtccgtaacatccgcatgactg

SEQ ID NO: 55794 - DNA, 25 bp, SARS Virus
acgtccgtaacaaccgcatgactgt

SEQ ID NO: 55795 - DNA, 25 bp, SARS Virus
cgtccgtaacatacgcatgactgta

SEQ ID NO: 55796 - DNA, 25 bp, SARS Virus
gtccgtaacatcagcatgactgtaa

SEQ ID NO: 55797 - DNA, 25 bp, SARS Virus
tccgtaacatccacatgactgtaat

SEQ ID NO: 55798 - DNA, 25 bp, SARS Virus
ccgtaacatccgaatgactgtaatc

SEQ ID NO: 55799 - DNA, 25 bp, SARS Virus
cgtaacatccgcatgactgtaatct

SEQ ID NO: 55800 - DNA, 25 bp, SARS Virus
gtaacatccgcaagactgtaatcta

SEQ ID NO: 55801 - DNA, 25 bp, SARS Virus
taacatccgcataactgtaatctat

SEQ ID NO: 55802 - DNA, 25 bp, SARS Virus
aacatccgcatgactgtaatctatt

SEQ ID NO: 55803 - DNA, 25 bp, SARS Virus
acatccgcatgaatgtaatctatta

SEQ ID NO: 55804 - DNA, 25 bp, SARS Virus
catccgcatgacagtaatctattag

SEQ ID NO: 55805 - DNA, 25 bp, SARS Virus
atccgcatgactataatctattagt

SEQ ID NO: 55806 - DNA, 25 bp, SARS Virus
tccgcatgactgaaatctattagtc

SEQ ID NO: 55807 - DNA, 25 bp, SARS Virus
ccgcatgactgtaatctattagtcc

SEQ ID NO: 55808 - DNA, 25 bp, SARS Virus
cgcatgactgtaatctattagtcct

SEQ ID NO: 55809 - DNA, 25 bp, SARS Virus
gcatgactgtaaactattagtccta

SEQ ID NO: 55810 - DNA, 25 bp, SARS Virus
catgactgtaatatattagtcctag

SEQ ID NO: 55811 - DNA, 25 bp, SARS Virus
atgactgtaatcaattagtcctaga

SEQ ID NO: 55812 - DNA, 25 bp, SARS Virus
tgactgtaatctattagtcctagaa

SEQ ID NO: 55813 - DNA, 25 bp, SARS Virus
gactgtaatctaatagtcctagaat

SEQ ID NO: 55814 - DNA, 25 bp, SARS Virus
actgtaatctataagtcctagaatt

SEQ ID NO: 55815 - DNA, 25 bp, SARS Virus
ctgtaatctattagtcctagaatta

SEQ ID NO: 55816 - DNA, 25 bp, SARS Virus
tgtaatctattaatcctagaattac

SEQ ID NO: 55817 - DNA, 25 bp, SARS Virus
gtaatctattagacctagaattacc

SEQ ID NO: 55818 - DNA, 25 bp, SARS Virus
taatctattagtactagaattaccc

SEQ ID NO: 55819 - DNA, 25 bp, SARS Virus
aatctattagtcatagaattaccct

SEQ ID NO: 55820 - DNA, 25 bp, SARS Virus
atctattagtccaagaattaccctt

SEQ ID NO: 55821 - DNA, 25 bp, SARS Virus
tctattagtcctagaattacccttg

SEQ ID NO: 55822 - DNA, 25 bp, SARS Virus
ctattagtcctaaaattacccttga

SEQ ID NO: 55823 - DNA, 25 bp, SARS Virus
tattagtcctagaattacccttgac

SEQ ID NO: 55824 - DNA, 25 bp, SARS Virus
attagtcctagaattacccttgacc

SEQ ID NO: 55825 - DNA, 25 bp, SARS Virus
ttagtcctagaaatacccttgacca

SEQ ID NO: 55826 - DNA, 25 bp, SARS Virus
tagtcctagaataacccttgaccat

SEQ ID NO: 55827 - DNA, 25 bp, SARS Virus
agtcctagaattacccttgaccatg

SEQ ID NO: 55828 - DNA, 25 bp, SARS Virus
gtcctagaattaaccttgaccatgc

SEQ ID NO: 55829 - DNA, 25 bp, SARS Virus
tcctagaattacacttgaccatgct

SEQ ID NO: 55830 - DNA, 25 bp, SARS Virus
cctagaattaccattgaccatgcta

SEQ ID NO: 55831 - DNA, 25 bp, SARS Virus
ctagaattacccatgaccatgctaa

SEQ ID NO: 55832 - DNA, 25 bp, SARS Virus
tagaattaccctagaccatgctaaa

SEQ ID NO: 55833 - DNA, 25 bp, SARS Virus
agaattacccttaaccatgctaaag

SEQ ID NO: 55834 - DNA, 25 bp, SARS Virus
gaattacccttgaccatgctaaagc

SEQ ID NO: 55835 - DNA, 25 bp, SARS Virus
aattacccttgaacatgctaaagcc

SEQ ID NO: 55836 - DNA, 25 bp, SARS Virus
attacccttgacaatgctaaagcca

SEQ ID NO: 55837 - DNA, 25 bp, SARS Virus
ttacccttgaccatgctaaagccac

SEQ ID NO: 55838 - DNA, 25 bp, SARS Virus
tacccttgaccaagctaaagccact

SEQ ID NO: 55839 - DNA, 25 bp, SARS Virus
acccttgaccatactaaagccacta

SEQ ID NO: 55840 - DNA, 25 bp, SARS Virus
cccttgaccatgataaagccactaa

SEQ ID NO: 55841 - DNA, 25 bp, SARS Virus
ccttgaccatgcaaaagccactaaa

SEQ ID NO: 55842 - DNA, 25 bp, SARS Virus
cttgaccatgctaaagccactaaag

SEQ ID NO: 55843 - DNA, 25 bp, SARS Virus
ttgaccatgctaaagccactaaagc

SEQ ID NO: 55844 - DNA, 25 bp, SARS Virus
tgaccatgctaaagccactaaagca

SEQ ID NO: 55845 - DNA, 25 bp, SARS Virus
gaccatgctaaaaccactaaagcat

SEQ ID NO: 55846 - DNA, 25 bp, SARS Virus
accatgctaaagacactaaagcatg

SEQ ID NO: 55847 - DNA, 25 bp, SARS Virus
ccatgctaaagcaactaaagcatgt

SEQ ID NO: 55848 - DNA, 25 bp, SARS Virus
catgctaaagccactaaagcatgtt

SEQ ID NO: 55849 - DNA, 25 bp, SARS Virus
atgctaaagccaataaagcatgttc

SEQ ID NO: 55850 - DNA, 25 bp, SARS Virus
tgctaaagccacaaaagcatgttca

SEQ ID NO: 55851 - DNA, 25 bp, SARS Virus
gctaaagccactaaagcatgttcat

SEQ ID NO: 55852 - DNA, 25 bp, SARS Virus
ctaaagccactaaagcatgttcatc

SEQ ID NO: 55853 - DNA, 25 bp, SARS Virus
taaagccactaaagcatgttcatcg

SEQ ID NO: 55854 - DNA, 25 bp, SARS Virus
aaagccactaaaacatgttcatcgt

SEQ ID NO: 55855 - DNA, 25 bp, SARS Virus
aagccactaaagaatgttcatcgtg

SEQ ID NO: 55856 - DNA, 25 bp, SARS Virus
agccactaaagcatgttcatcgtgg

SEQ ID NO: 55857 - DNA, 25 bp, SARS Virus
gccactaaagcaagttcatcgtggt

SEQ ID NO: 55858 - DNA, 25 bp, SARS Virus
ccactaaagcatattcatcgtggtc

SEQ ID NO: 55859 - DNA, 25 bp, SARS Virus
cactaaagcatgatcatcgtggtcc

SEQ ID NO: 55860 - DNA, 25 bp, SARS Virus
actaaagcatgtacatcgtggtccg

SEQ ID NO: 55861 - DNA, 25 bp, SARS Virus
ctaaagcatgttaatcgtggtccga

SEQ ID NO: 55862 - DNA, 25 bp, SARS Virus
taaagcatgttcatcgtggtccgac

SEQ ID NO: 55863 - DNA, 25 bp, SARS Virus
aaagcatgttcaacgtggtccgacg

SEQ ID NO: 55864 - DNA, 25 bp, SARS Virus
aagcatgttcatagtggtccgacgc

SEQ ID NO: 55865 - DNA, 25 bp, SARS Virus
agcatgttcatcatggtccgacgcc

SEQ ID NO: 55866 - DNA, 25 bp, SARS Virus
gcatgttcatcgaggtccgacgcct

SEQ ID NO: 55867 - DNA, 25 bp, SARS Virus
catgttcatcgtagtccgacgcctc

SEQ ID NO: 55868 - DNA, 25 bp, SARS Virus
atgttcatcgtgatccgacgcctca

SEQ ID NO: 55869 - DNA, 25 bp, SARS Virus
tgttcatcgtggaccgacgcctcaa

SEQ ID NO: 55870 - DNA, 25 bp, SARS Virus
gttcatcgtggtacgacgcctcaag

SEQ ID NO: 55871 - DNA, 25 bp, SARS Virus
ttcatcgtggtcagacgcctcaagg

SEQ ID NO: 55872 - DNA, 25 bp, SARS Virus
tcatcgtggtccaacgcctcaagga

SEQ ID NO: 55873 - DNA, 25 bp, SARS Virus
catcgtggtccgacgcctcaaggat

SEQ ID NO: 55874 - DNA, 25 bp, SARS Virus
atcgtggtccgaagcctcaaggata

SEQ ID NO: 55875 - DNA, 25 bp, SARS Virus
tcgtggtccgacacctcaaggataa

SEQ ID NO: 55876 - DNA, 25 bp, SARS Virus
cgtggtccgacgactcaaggataac

SEQ ID NO: 55877 - DNA, 25 bp, SARS Virus
gtggtccgacgcatcaaggataaca

SEQ ID NO: 55878 - DNA, 25 bp, SARS Virus
tggtccgacgccacaaggataacac

SEQ ID NO: 55879 - DNA, 25 bp, SARS Virus
ggtccgacgcctaaaggataacacc

SEQ ID NO: 55880 - DNA, 25 bp, SARS Virus
gtccgacgcctcaaggataacacct

SEQ ID NO: 55881 - DNA, 25 bp, SARS Virus
tccgacgcctcaaggataacaccta

SEQ ID NO: 55882 - DNA, 25 bp, SARS Virus
ccgacgcctcaaagataacacctaa

SEQ ID NO: 55883 - DNA, 25 bp, SARS Virus
cgacgcctcaagaataacacctaag

SEQ ID NO: 55884 - DNA, 25 bp, SARS Virus
gacgcctcaaggataacacctaagt

SEQ ID NO: 55885 - DNA, 25 bp, SARS Virus
acgcctcaaggaaaacacctaagta

SEQ ID NO: 55886 - DNA, 25 bp, SARS Virus
cgcctcaaggataacacctaagtat

SEQ ID NO: 55887 - DNA, 25 bp, SARS Virus
gcctcaaggataacacctaagtata

SEQ ID NO: 55888 - DNA, 25 bp, SARS Virus
cctcaaggataaaacctaagtataa

SEQ ID NO: 55889 - DNA, 25 bp, SARS Virus
ctcaaggataacacctaagtataat

SEQ ID NO: 55890 - DNA, 25 bp, SARS Virus
tcaaggataacaactaagtataatg

SEQ ID NO: 55891 - DNA, 25 bp, SARS Virus
caaggataacacataagtataatga

SEQ ID NO: 55892 - DNA, 25 bp, SARS Virus
aaggataacaccaaagtataatgag

SEQ ID NO: 55893 - DNA, 25 bp, SARS Virus
aggataacacctaagtataatgagt

SEQ ID NO: 55894 - DNA, 25 bp, SARS Virus
ggataacacctaagtataatgagta

SEQ ID NO: 55895 - DNA, 25 bp, SARS Virus
gataacacctaaatataatgagtaa

SEQ ID NO: 55896 - DNA, 25 bp, SARS Virus
ataacacctaagaataatgagtaac

SEQ ID NO: 55897 - DNA, 25 bp, SARS Virus
taacacctaagtataatgagtaacg

SEQ ID NO: 55898 - DNA, 25 bp, SARS Virus
aacacctaagtaaaatgagtaacga

SEQ ID NO: 55899 - DNA, 25 bp, SARS Virus
acacctaagtataatgagtaacgac

SEQ ID NO: 55900 - DNA, 25 bp, SARS Virus
cacctaagtataatgagtaacgact

SEQ ID NO: 55901 - DNA, 25 bp, SARS Virus
acctaagtataaagagtaacgacta

SEQ ID NO: 55902 - DNA, 25 bp, SARS Virus
cctaagtataataagtaacgactac

SEQ ID NO: 55903 - DNA, 25 bp, SARS Virus
ctaagtataatgagtaacgactacg

SEQ ID NO: 55904 - DNA, 25 bp, SARS Virus
taagtataatgaataacgactacgg

SEQ ID NO: 55905 - DNA, 25 bp, SARS Virus
aagtataatgagaaacgactacggg

SEQ ID NO: 55906 - DNA, 25 bp, SARS Virus
agtataatgagtaacgactacgggt

SEQ ID NO: 55907 - DNA, 25 bp, SARS Virus
gtataatgagtaacgactacgggta

SEQ ID NO: 55908 - DNA, 25 bp, SARS Virus
tataatgagtaaagactacgggtag

SEQ ID NO: 55909 - DNA, 25 bp, SARS Virus
ataatgagtaacaactacgggtagg

SEQ ID NO: 55910 - DNA, 25 bp, SARS Virus
taatgagtaacgactacgggtagga

SEQ ID NO: 55911 - DNA, 25 bp, SARS Virus
aatgagtaacgaatacgggtaggag

SEQ ID NO: 55912 - DNA, 25 bp, SARS Virus
atgagtaacgacaacgggtaggagt

SEQ ID NO: 55913 - DNA, 25 bp, SARS Virus
tgagtaacgactacgggtaggagtg

SEQ ID NO: 55914 - DNA, 25 bp, SARS Virus
gagtaacgactaagggtaggagtga

SEQ ID NO: 55915 - DNA, 25 bp, SARS Virus
agtaacgactacaggtaggagtgaa

SEQ ID NO: 55916 - DNA, 25 bp, SARS Virus
gtaacgactacgagtaggagtgaaa

SEQ ID NO: 55917 - DNA, 25 bp, SARS Virus
taacgactacggataggagtgaaac

SEQ ID NO: 55918 - DNA, 25 bp, SARS Virus
aacgactacgggaaggagtgaaact

SEQ ID NO: 55919 - DNA, 25 bp, SARS Virus
acgactacgggtaggagtgaaactg

SEQ ID NO: 55920 - DNA, 25 bp, SARS Virus
cgactacgggtaagagtgaaactga

SEQ ID NO: 55921 - DNA, 25 bp, SARS Virus
gactacgggtagaagtgaaactgat

SEQ ID NO: 55922 - DNA, 25 bp, SARS Virus
actacgggtaggagtgaaactgatc

SEQ ID NO: 55923 - DNA, 25 bp, SARS Virus
ctacgggtaggaatgaaactgatcc

SEQ ID NO: 55924 - DNA, 25 bp, SARS Virus
tacgggtaggagagaaactgatccc

SEQ ID NO: 55925 - DNA, 25 bp, SARS Virus
acgggtaggagtaaaactgatcccg

SEQ ID NO: 55926 - DNA, 25 bp, SARS Virus
cgggtaggagtgaaactgatcccgt

SEQ ID NO: 55927 - DNA, 25 bp, SARS Virus
gggtaggagtgaaactgatcccgta

SEQ ID NO: 55928 - DNA, 25 bp, SARS Virus
ggtaggagtgaaactgatcccgtaa

SEQ ID NO: 55929 - DNA, 25 bp, SARS Virus
gtaggagtgaaaatgatcccgtaac

SEQ ID NO: 55930 - DNA, 25 bp, SARS Virus
taggagtgaaacagatcccgtaacc

SEQ ID NO: 55931 - DNA, 25 bp, SARS Virus
aggagtgaaactaatcccgtaaccg

SEQ ID NO: 55932 - DNA, 25 bp, SARS Virus
ggagtgaaactgatcccgtaaccga

SEQ ID NO: 55933 - DNA, 25 bp, SARS Virus
gagtgaaactgaacccgtaaccgac

SEQ ID NO: 55934 - DNA, 25 bp, SARS Virus
agtgaaactgataccgtaaccgacg

SEQ ID NO: 55935 - DNA, 25 bp, SARS Virus
gtgaaactgatcacgtaaccgacga

SEQ ID NO: 55936 - DNA, 25 bp, SARS Virus
tgaaactgatccagtaaccgacgac

SEQ ID NO: 55937 - DNA, 25 bp, SARS Virus
gaaactgatcccataaccgacgact

SEQ ID NO: 55938 - DNA, 25 bp, SARS Virus
aaactgatcccgaaaccgacgactc

SEQ ID NO: 55939 - DNA, 25 bp, SARS Virus
aactgatcccgtaaccgacgactca

SEQ ID NO: 55940 - DNA, 25 bp, SARS Virus
actgatcccgtaaccgacgactcag

SEQ ID NO: 55941 - DNA, 25 bp, SARS Virus
ctgatcccgtaaacgacgactcagg

SEQ ID NO: 55942 - DNA, 25 bp, SARS Virus
tgatcccgtaacagacgactcaggg

SEQ ID NO: 55943 - DNA, 25 bp, SARS Virus
gatcccgtaaccaacgactcagggt

SEQ ID NO: 55944 - DNA, 25 bp, SARS Virus
atcccgtaaccgacgactcagggta

SEQ ID NO: 55945 - DNA, 25 bp, SARS Virus
tcccgtaaccgaagactcagggtat

SEQ ID NO: 55946 - DNA, 25 bp, SARS Virus
cccgtaaccgacaactcagggtata

SEQ ID NO: 55947 - DNA, 25 bp, SARS Virus
ccgtaaccgacgactcagggtatac

SEQ ID NO: 55948 - DNA, 25 bp, SARS Virus
cgtaaccgacgaatcagggtatacc

SEQ ID NO: 55949 - DNA, 25 bp, SARS Virus
gtaaccgacgacacagggtatacct

SEQ ID NO: 55950 - DNA, 25 bp, SARS Virus
taaccgacgactaagggtataccta

SEQ ID NO: 55951 - DNA, 25 bp, SARS Virus
aaccgacgactcagggtatacctac

SEQ ID NO: 55952 - DNA, 25 bp, SARS Virus
accgacgactcaaggtatacctacg

SEQ ID NO: 55953 - DNA, 25 bp, SARS Virus
ccgacgactcagagtatacctacga

SEQ ID NO: 55954 - DNA, 25 bp, SARS Virus
cgacgactcaggatatacctacgac

SEQ ID NO: 55955 - DNA, 25 bp, SARS Virus
gacgactcagggaatacctacgact

SEQ ID NO: 55956 - DNA, 25 bp, SARS Virus
acgactcagggtatacctacgacta

SEQ ID NO: 55957 - DNA, 25 bp, SARS Virus
cgactcagggtaaacctacgactag

SEQ ID NO: 55958 - DNA, 25 bp, SARS Virus
gactcagggtatacctacgactaga

SEQ ID NO: 55959 - DNA, 25 bp, SARS Virus
actcagggtataactacgactagag

SEQ ID NO: 55960 - DNA, 25 bp, SARS Virus
ctcagggtatacatacgactagagc

SEQ ID NO: 55961 - DNA, 25 bp, SARS Virus
tcagggtataccaacgactagagcg

SEQ ID NO: 55962 - DNA, 25 bp, SARS Virus
cagggtatacctacgactagagcgt

SEQ ID NO: 55963 - DNA, 25 bp, SARS Virus
agggtatacctaagactagagcgtt

SEQ ID NO: 55964 - DNA, 25 bp, SARS Virus
gggtatacctacaactagagcgttt

SEQ ID NO: 55965 - DNA, 25 bp, SARS Virus
ggtatacctacgactagagcgtttt

SEQ ID NO: 55966 - DNA, 25 bp, SARS Virus
gtatacctacgaatagagcgttttg

SEQ ID NO: 55967 - DNA, 25 bp, SARS Virus
tatacctacgacaagagcgttttgg

SEQ ID NO: 55968 - DNA, 25 bp, SARS Virus
atacctacgactagagcgttttggt

SEQ ID NO: 55969 - DNA, 25 bp, SARS Virus
tacctacgactaaagcgttttggtg

SEQ ID NO: 55970 - DNA, 25 bp, SARS Virus
acctacgactagagcgttttggtga

SEQ ID NO: 55971 - DNA, 25 bp, SARS Virus
cctacgactagaacgttttggtgaa

SEQ ID NO: 55972 - DNA, 25 bp, SARS Virus
ctacgactagagagttttggtgaat

SEQ ID NO: 55973 - DNA, 25 bp, SARS Virus
tacgactagagcattttggtgaata

SEQ ID NO: 55974 - DNA, 25 bp, SARS Virus
acgactagagcgatttggtgaataa

SEQ ID NO: 55975 - DNA, 25 bp, SARS Virus
cgactagagcgtattggtgaataat

SEQ ID NO: 55976 - DNA, 25 bp, SARS Virus
gactagagcgttatggtgaataatt

SEQ ID NO: 55977 - DNA, 25 bp, SARS Virus
actagagcgtttaggtgaataattc

SEQ ID NO: 55978 - DNA, 25 bp, SARS Virus
ctagagcgttttagtgaataattca

SEQ ID NO: 55979 - DNA, 25 bp, SARS Virus
tagagcgttttgatgaataattcac

SEQ ID NO: 55980 - DNA, 25 bp, SARS Virus
agagcgttttggagaataattcacc

SEQ ID NO: 55981 - DNA, 25 bp, SARS Virus
gagcgttttggtaaataattcaccc

SEQ ID NO: 55982 - DNA, 25 bp, SARS Virus
agcgttttggtgaataattcaccct

SEQ ID NO: 55983 - DNA, 25 bp, SARS Virus
gcgttttggtgaataattcacccta

SEQ ID NO: 55984 - DNA, 25 bp, SARS Virus
cgttttggtgaaaaattcaccctaa

SEQ ID NO: 55985 - DNA, 25 bp, SARS Virus
gttttggtgaataattcaccctaaa

SEQ ID NO: 55986 - DNA, 25 bp, SARS Virus
ttttggtgaataattcaccctaaac

SEQ ID NO: 55987 - DNA, 25 bp, SARS Virus
tttggtgaataaatcaccctaaacg

SEQ ID NO: 55988 - DNA, 25 bp, SARS Virus
ttggtgaataatacaccctaaacga

SEQ ID NO: 55989 - DNA, 25 bp, SARS Virus
tggtgaataattaaccctaaacgac

SEQ ID NO: 55990 - DNA, 25 bp, SARS Virus
ggtgaataattcaccctaaacgact

SEQ ID NO: 55991 - DNA, 25 bp, SARS Virus
gtgaataattcaacctaaacgactt

SEQ ID NO: 55992 - DNA, 25 bp, SARS Virus
tgaataattcacactaaacgacttt

SEQ ID NO: 55993 - DNA, 25 bp, SARS Virus
gaataattcaccataaacgacttta

SEQ ID NO: 55994 - DNA, 25 bp, SARS Virus
aataattcacccaaaacgactttat

SEQ ID NO: 55995 - DNA, 25 bp, SARS Virus
ataattcaccctaaacgactttata

SEQ ID NO: 55996 - DNA, 25 bp, SARS Virus
taattcaccctaaacgactttatac

SEQ ID NO: 55997 - DNA, 25 bp, SARS Virus
aattcaccctaaacgactttatact

SEQ ID NO: 55998 - DNA, 25 bp, SARS Virus
attcaccctaaaagactttatacta

SEQ ID NO: 55999 - DNA, 25 bp, SARS Virus
ttcaccctaaacaactttatactaa

SEQ ID NO: 56000 - DNA, 25 bp, SARS Virus
tcaccctaaacgactttatactaaa

SEQ ID NO: 56001 - DNA, 25 bp, SARS Virus
caccctaaacgaatttatactaaaa

SEQ ID NO: 56002 - DNA, 25 bp, SARS Virus
accctaaacgacattatactaaaat

SEQ ID NO: 56003 - DNA, 25 bp, SARS Virus
ccctaaacgactatatactaaaatg

SEQ ID NO: 56004 - DNA, 25 bp, SARS Virus
cctaaacgacttaatactaaaatgc

SEQ ID NO: 56005 - DNA, 25 bp, SARS Virus
ctaaacgactttatactaaaatgcc

SEQ ID NO: 56006 - DNA, 25 bp, SARS Virus
taaacgactttaaactaaaatgcct

SEQ ID NO: 56007 - DNA, 25 bp, SARS Virus
aaacgactttatactaaaatgcctt

SEQ ID NO: 56008 - DNA, 25 bp, SARS Virus
aacgactttataataaaatgccttc

SEQ ID NO: 56009 - DNA, 25 bp, SARS Virus
acgactttatacaaaaatgccttct

SEQ ID NO: 56010 - DNA, 25 bp, SARS Virus
cgactttatactaaaatgccttctc

SEQ ID NO: 56011 - DNA, 25 bp, SARS Virus
gactttatactaaaatgccttctct

SEQ ID NO: 56012 - DNA, 25 bp, SARS Virus
actttatactaaaatgccttctctc

SEQ ID NO: 56013 - DNA, 25 bp, SARS Virus
ctttatactaaaatgccttctctct

SEQ ID NO: 56014 - DNA, 25 bp, SARS Virus
tttatactaaaaagccttctctctg

SEQ ID NO: 56015 - DNA, 25 bp, SARS Virus
ttatactaaaataccttctctctga

SEQ ID NO: 56016 - DNA, 25 bp, SARS Virus
tatactaaaatgacttctctctgaa

SEQ ID NO: 56017 - DNA, 25 bp, SARS Virus
atactaaaatgcattctctctgaaa

SEQ ID NO: 56018 - DNA, 25 bp, SARS Virus
tactaaaatgccatctctctgaaac

SEQ ID NO: 56019 - DNA, 25 bp, SARS Virus
actaaaatgcctactctctgaaaca

SEQ ID NO: 56020 - DNA, 25 bp, SARS Virus
ctaaaatgccttatctctgaaacag

SEQ ID NO: 56021 - DNA, 25 bp, SARS Virus
taaaatgccttcactctgaaacaga

SEQ ID NO: 56022 - DNA, 25 bp, SARS Virus
aaaatgccttctatctgaaacagag

SEQ ID NO: 56023 - DNA, 25 bp, SARS Virus
aaatgccttctcactgaaacagaga

SEQ ID NO: 56024 - DNA, 25 bp, SARS Virus
aatgccttctctatgaaacagagaa

SEQ ID NO: 56025 - DNA, 25 bp, SARS Virus
atgccttctctcagaaacagagaag

SEQ ID NO: 56026 - DNA, 25 bp, SARS Virus
tgccttctctctaaaacagagaagc

SEQ ID NO: 56027 - DNA, 25 bp, SARS Virus
gccttctctctgaaacagagaagct

SEQ ID NO: 56028 - DNA, 25 bp, SARS Virus
ccttctctctgaaacagagaagctg

SEQ ID NO: 56029 - DNA, 25 bp, SARS Virus
cttctctctgaaacagagaagctgg

SEQ ID NO: 56030 - DNA, 25 bp, SARS Virus
ttctctctgaaaaagagaagctggc

SEQ ID NO: 56031 - DNA, 25 bp, SARS Virus
tctctctgaaacagagaagctggca

SEQ ID NO: 56032 - DNA, 25 bp, SARS Virus
ctctctgaaacaaagaagctggcaa

SEQ ID NO: 56033 - DNA, 25 bp, SARS Virus
tctctgaaacagagaagctggcaat

SEQ ID NO: 56034 - DNA, 25 bp, SARS Virus
ctctgaaacagaaaagctggcaata

SEQ ID NO: 56035 - DNA, 25 bp, SARS Virus
tctgaaacagagaagctggcaataa

SEQ ID NO: 56036 - DNA, 25 bp, SARS Virus
ctgaaacagagaagctggcaataaa

SEQ ID NO: 56037 - DNA, 25 bp, SARS Virus
tgaaacagagaaactggcaataaaa

SEQ ID NO: 56038 - DNA, 25 bp, SARS Virus
gaaacagagaagatggcaataaaat

SEQ ID NO: 56039 - DNA, 25 bp, SARS Virus
aaacagagaagcaggcaataaaatt

SEQ ID NO: 56040 - DNA, 25 bp, SARS Virus
aacagagaagctagcaataaaattt

SEQ ID NO: 56041 - DNA, 25 bp, SARS Virus
acagagaagctgacaataaaattta

SEQ ID NO: 56042 - DNA, 25 bp, SARS Virus
cagagaagctggaaataaaatttat

SEQ ID NO: 56043 - DNA, 25 bp, SARS Virus
agagaagctggcaataaaatttata

SEQ ID NO: 56044 - DNA, 25 bp, SARS Virus
gagaagctggcaataaaatttataa

SEQ ID NO: 56045 - DNA, 25 bp, SARS Virus
agaagctggcaaaaaaatttataac

SEQ ID NO: 56046 - DNA, 25 bp, SARS Virus
gaagctggcaataaaatttataacc

SEQ ID NO: 56047 - DNA, 25 bp, SARS Virus
aagctggcaataaaatttataaccc

SEQ ID NO: 56048 - DNA, 25 bp, SARS Virus
agctggcaataaaatttataaccct

SEQ ID NO: 56049 - DNA, 25 bp, SARS Virus
gctggcaataaaatttataaccctg

SEQ ID NO: 56050 - DNA, 25 bp, SARS Virus
ctggcaataaaaattataaccctgg

SEQ ID NO: 56051 - DNA, 25 bp, SARS Virus
tggcaataaaatatataaccctggt

SEQ ID NO: 56052 - DNA, 25 bp, SARS Virus
ggcaataaaattaataaccctggtc

SEQ ID NO: 56053 - DNA, 25 bp, SARS Virus
gcaataaaatttataaccctggtct

SEQ ID NO: 56054 - DNA, 25 bp, SARS Virus
caataaaatttaaaaccctggtctg

SEQ ID NO: 56055 - DNA, 25 bp, SARS Virus
aataaaatttataaccctggtctgt

SEQ ID NO: 56056 - DNA, 25 bp, SARS Virus
ataaaatttataaccctggtctgta

SEQ ID NO: 56057 - DNA, 25 bp, SARS Virus
taaaatttataaacctggtctgtat

SEQ ID NO: 56058 - DNA, 25 bp, SARS Virus
aaaatttataacactggtctgtatg

SEQ ID NO: 56059 - DNA, 25 bp, SARS Virus
aaatttataaccatggtctgtatgg

SEQ ID NO: 56060 - DNA, 25 bp, SARS Virus
aatttataacccaggtctgtatggt

SEQ ID NO: 56061 - DNA, 25 bp, SARS Virus
atttataaccctagtctgtatggta

SEQ ID NO: 56062 - DNA, 25 bp, SARS Virus
tttataaccctgatctgtatggtag

SEQ ID NO: 56063 - DNA, 25 bp, SARS Virus
ttataaccctggactgtatggtagg

SEQ ID NO: 56064 - DNA, 25 bp, SARS Virus
tataaccctggtatgtatggtaggg

SEQ ID NO: 56065 - DNA, 25 bp, SARS Virus
ataaccctggtcagtatggtagggt

SEQ ID NO: 56066 - DNA, 25 bp, SARS Virus
taaccctggtctatatggtagggtt

SEQ ID NO: 56067 - DNA, 25 bp, SARS Virus
aaccctggtctgaatggtagggtta

SEQ ID NO: 56068 - DNA, 25 bp, SARS Virus
accctggtctgtatggtagggttaa

SEQ ID NO: 56069 - DNA, 25 bp, SARS Virus
ccctggtctgtaaggtagggttaac

SEQ ID NO: 56070 - DNA, 25 bp, SARS Virus
cctggtctgtatagtagggttaaca

SEQ ID NO: 56071 - DNA, 25 bp, SARS Virus
ctggtctgtatgatagggttaacat

SEQ ID NO: 56072 - DNA, 25 bp, SARS Virus
tggtctgtatggaagggttaacata

SEQ ID NO: 56073 - DNA, 25 bp, SARS Virus
ggtctgtatggtagggttaacataa

SEQ ID NO: 56074 - DNA, 25 bp, SARS Virus
gtctgtatggtaaggttaacataat

SEQ ID NO: 56075 - DNA, 25 bp, SARS Virus
tctgtatggtagagttaacataatt

SEQ ID NO: 56076 - DNA, 25 bp, SARS Virus
ctgtatggtaggattaacataattg

SEQ ID NO: 56077 - DNA, 25 bp, SARS Virus
tgtatggtagggataacataattga

SEQ ID NO: 56078 - DNA, 25 bp, SARS Virus
gtatggtagggtaaacataattgac

SEQ ID NO: 56079 - DNA, 25 bp, SARS Virus
tatggtagggttaacataattgaca

SEQ ID NO: 56080 - DNA, 25 bp, SARS Virus
atggtagggttaacataattgacaa

SEQ ID NO: 56081 - DNA, 25 bp, SARS Virus
tggtagggttaaaataattgacaaa

SEQ ID NO: 56082 - DNA, 25 bp, SARS Virus
ggtagggttaacataattgacaaac

SEQ ID NO: 56083 - DNA, 25 bp, SARS Virus
gtagggttaacaaaattgacaaacc

SEQ ID NO: 56084 - DNA, 25 bp, SARS Virus
tagggttaacataattgacaaacct

SEQ ID NO: 56085 - DNA, 25 bp, SARS Virus
agggttaacataattgacaaaccta

SEQ ID NO: 56086 - DNA, 25 bp, SARS Virus
gggttaacataaatgacaaacctac

SEQ ID NO: 56087 - DNA, 25 bp, SARS Virus
ggttaacataatagacaaacctact

SEQ ID NO: 56088 - DNA, 25 bp, SARS Virus
gttaacataattaacaaacctacta

SEQ ID NO: 56089 - DNA, 25 bp, SARS Virus
ttaacataattgacaaacctactat

SEQ ID NO: 56090 - DNA, 25 bp, SARS Virus
taacataattgaaaaacctactatc

SEQ ID NO: 56091 - DNA, 25 bp, SARS Virus
aacataattgacaaacctactatcc

SEQ ID NO: 56092 - DNA, 25 bp, SARS Virus
acataattgacaaacctactatcca

SEQ ID NO: 56093 - DNA, 25 bp, SARS Virus
cataattgacaaacctactatccac

SEQ ID NO: 56094 - DNA, 25 bp, SARS Virus
ataattgacaaaactactatccaca

SEQ ID NO: 56095 - DNA, 25 bp, SARS Virus
taattgacaaacatactatccacat

SEQ ID NO: 56096 - DNA, 25 bp, SARS Virus
aattgacaaaccaactatccacata

SEQ ID NO: 56097 - DNA, 25 bp, SARS Virus
attgacaaacctactatccacatag

SEQ ID NO: 56098 - DNA, 25 bp, SARS Virus
ttgacaaacctaatatccacatagg

SEQ ID NO: 56099 - DNA, 25 bp, SARS Virus
tgacaaacctacaatccacatagga

SEQ ID NO: 56100 - DNA, 25 bp, SARS Virus
gacaaacctactatccacataggaa

SEQ ID NO: 56101 - DNA, 25 bp, SARS Virus
acaaacctactaaccacataggaag

SEQ ID NO: 56102 - DNA, 25 bp, SARS Virus
caaacctactatacacataggaagt

SEQ ID NO: 56103 - DNA, 25 bp, SARS Virus
aaacctactatcaacataggaagta

SEQ ID NO: 56104 - DNA, 25 bp, SARS Virus
aacctactatccacataggaagtaa

SEQ ID NO: 56105 - DNA, 25 bp, SARS Virus
acctactatccaaataggaagtaac

SEQ ID NO: 56106 - DNA, 25 bp, SARS Virus
cctactatccacataggaagtaaca

SEQ ID NO: 56107 - DNA, 25 bp, SARS Virus
ctactatccacaaaggaagtaacac

SEQ ID NO: 56108 - DNA, 25 bp, SARS Virus
tactatccacataggaagtaacacg

SEQ ID NO: 56109 - DNA, 25 bp, SARS Virus
actatccacataagaagtaacacgt

SEQ ID NO: 56110 - DNA, 25 bp, SARS Virus
ctatccacatagaaagtaacacgtt

SEQ ID NO: 56111 - DNA, 25 bp, SARS Virus
tatccacataggaagtaacacgttt

SEQ ID NO: 56112 - DNA, 25 bp, SARS Virus
atccacataggaagtaacacgtttg

SEQ ID NO: 56113 - DNA, 25 bp, SARS Virus
tccacataggaaataacacgtttga

SEQ ID NO: 56114 - DNA, 25 bp, SARS Virus
ccacataggaagaaacacgtttgaa

SEQ ID NO: 56115 - DNA, 25 bp, SARS Virus
cacataggaagtaacacgtttgaaa

SEQ ID NO: 56116 - DNA, 25 bp, SARS Virus
acataggaagtaacacgtttgaaat

SEQ ID NO: 56117 - DNA, 25 bp, SARS Virus
cataggaagtaaaacgtttgaaatt

SEQ ID NO: 56118 - DNA, 25 bp, SARS Virus
ataggaagtaacacgtttgaaatta

SEQ ID NO: 56119 - DNA, 25 bp, SARS Virus
taggaagtaacaagtttgaaattac

SEQ ID NO: 56120 - DNA, 25 bp, SARS Virus
aggaagtaacacatttgaaattaca

SEQ ID NO: 56121 - DNA, 25 bp, SARS Virus
ggaagtaacacgattgaaattacac

SEQ ID NO: 56122 - DNA, 25 bp, SARS Virus
gaagtaacacgtatgaaattacaca

SEQ ID NO: 56123 - DNA, 25 bp, SARS Virus
aagtaacacgttagaaattacacaa

SEQ ID NO: 56124 - DNA, 25 bp, SARS Virus
agtaacacgtttaaaattacacaat

SEQ ID NO: 56125 - DNA, 25 bp, SARS Virus
gtaacacgtttgaaattacacaata

SEQ ID NO: 56126 - DNA, 25 bp, SARS Virus
taacacgtttgaaattacacaataa

SEQ ID NO: 56127 - DNA, 25 bp, SARS Virus
aacacgtttgaaattacacaataaa

SEQ ID NO: 56128 - DNA, 25 bp, SARS Virus
acacgtttgaaaatacacaataaaa

SEQ ID NO: 56129 - DNA, 25 bp, SARS Virus
cacgtttgaaataacacaataaaag

SEQ ID NO: 56130 - DNA, 25 bp, SARS Virus
acgtttgaaattacacaataaaaga

SEQ ID NO: 56131 - DNA, 25 bp, SARS Virus
cgtttgaaattaaacaataaaagat

SEQ ID NO: 56132 - DNA, 25 bp, SARS Virus
gtttgaaattacacaataaaagatg

SEQ ID NO: 56133 - DNA, 25 bp, SARS Virus
tttgaaattacaaaataaaagatga

SEQ ID NO: 56134 - DNA, 25 bp, SARS Virus
ttgaaattacacaataaaagatgac

SEQ ID NO: 56135 - DNA, 25 bp, SARS Virus
tgaaattacacaataaaagatgaca

SEQ ID NO: 56136 - DNA, 25 bp, SARS Virus
gaaattacacaaaaaaagatgacac

SEQ ID NO: 56137 - DNA, 25 bp, SARS Virus
aaattacacaataaaagatgacaca

SEQ ID NO: 56138 - DNA, 25 bp, SARS Virus
aattacacaataaaagatgacacaa

SEQ ID NO: 56139 - DNA, 25 bp, SARS Virus
attacacaataaaagatgacacaaa

SEQ ID NO: 56140 - DNA, 25 bp, SARS Virus
ttacacaataaaagatgacacaaag

SEQ ID NO: 56141 - DNA, 25 bp, SARS Virus
tacacaataaaaaatgacacaaagg

SEQ ID NO: 56142 - DNA, 25 bp, SARS Virus
acacaataaaagatgacacaaaggt

SEQ ID NO: 56143 - DNA, 25 bp, SARS Virus
cacaataaaagaagacacaaaggtg

SEQ ID NO: 56144 - DNA, 25 bp, SARS Virus
acaataaaagataacacaaaggtgg

SEQ ID NO: 56145 - DNA, 25 bp, SARS Virus
caataaaagatgacacaaaggtgga

SEQ ID NO: 56146 - DNA, 25 bp, SARS Virus
aataaaagatgaaacaaaggtggat

SEQ ID NO: 56147 - DNA, 25 bp, SARS Virus
ataaaagatgacacaaaggtggatg

SEQ ID NO: 56148 - DNA, 25 bp, SARS Virus
taaaagatgacaaaaaggtggatgt

SEQ ID NO: 56149 - DNA, 25 bp, SARS Virus
aaaagatgacacaaaggtggatgtt

SEQ ID NO: 56150 - DNA, 25 bp, SARS Virus
aaagatgacacaaaggtggatgttc

SEQ ID NO: 56151 - DNA, 25 bp, SARS Virus
aagatgacacaaaggtggatgttca

SEQ ID NO: 56152 - DNA, 25 bp, SARS Virus
agatgacacaaaagtggatgttcaa

SEQ ID NO: 56153 - DNA, 25 bp, SARS Virus
gatgacacaaagatggatgttcaaa

SEQ ID NO: 56154 - DNA, 25 bp, SARS Virus
atgacacaaaggaggatgttcaaaa

SEQ ID NO: 56155 - DNA, 25 bp, SARS Virus
tgacacaaaggtagatgttcaaaac

SEQ ID NO: 56156 - DNA, 25 bp, SARS Virus
gacacaaaggtgaatgttcaaaacc

SEQ ID NO: 56157 - DNA, 25 bp, SARS Virus
acacaaaggtggatgttcaaaacct

SEQ ID NO: 56158 - DNA, 25 bp, SARS Virus
cacaaaggtggaagttcaaaacctg

SEQ ID NO: 56159 - DNA, 25 bp, SARS Virus
acaaaggtggatattcaaaacctgg

SEQ ID NO: 56160 - DNA, 25 bp, SARS Virus
caaaggtggatgatcaaaacctggt

SEQ ID NO: 56161 - DNA, 25 bp, SARS Virus
aaaggtggatgtacaaaacctggtg

SEQ ID NO: 56162 - DNA, 25 bp, SARS Virus
aaggtggatgttaaaaacctggtga

SEQ ID NO: 56163 - DNA, 25 bp, SARS Virus
aggtggatgttcaaaacctggtgat

SEQ ID NO: 56164 - DNA, 25 bp, SARS Virus
ggtggatgttcaaaacctggtgatc

SEQ ID NO: 56165 - DNA, 25 bp, SARS Virus
gtggatgttcaaaacctggtgatca

SEQ ID NO: 56166 - DNA, 25 bp, SARS Virus
tggatgttcaaaacctggtgatcat

SEQ ID NO: 56167 - DNA, 25 bp, SARS Virus
ggatgttcaaaaactggtgatcatt

SEQ ID NO: 56168 - DNA, 25 bp, SARS Virus
gatgttcaaaacatggtgatcattc

SEQ ID NO: 56169 - DNA, 25 bp, SARS Virus
atgttcaaaaccaggtgatcattct

SEQ ID NO: 56170 - DNA, 25 bp, SARS Virus
tgttcaaaacctagtgatcattctt

SEQ ID NO: 56171 - DNA, 25 bp, SARS Virus
gttcaaaacctgatgatcattcttt

SEQ ID NO: 56172 - DNA, 25 bp, SARS Virus
ttcaaaacctggagatcattctttt

SEQ ID NO: 56173 - DNA, 25 bp, SARS Virus
tcaaaacctggtaatcattcttttt

SEQ ID NO: 56174 - DNA, 25 bp, SARS Virus
caaaacctggtgatcattcttttta

SEQ ID NO: 56175 - DNA, 25 bp, SARS Virus
aaaacctggtgaacattctttttat

SEQ ID NO: 56176 - DNA, 25 bp, SARS Virus
aaacctggtgataattctttttata

SEQ ID NO: 56177 - DNA, 25 bp, SARS Virus
aacctggtgatcattctttttataa

SEQ ID NO: 56178 - DNA, 25 bp, SARS Virus
acctggtgatcaatctttttataaa

SEQ ID NO: 56179 - DNA, 25 bp, SARS Virus
cctggtgatcatactttttataaac

SEQ ID NO: 56180 - DNA, 25 bp, SARS Virus
ctggtgatcattatttttataaaca

SEQ ID NO: 56181 - DNA, 25 bp, SARS Virus
tggtgatcattcattttataaacat

SEQ ID NO: 56182 - DNA, 25 bp, SARS Virus
ggtgatcattctatttataaacatc

SEQ ID NO: 56183 - DNA, 25 bp, SARS Virus
gtgatcattcttattataaacatct

SEQ ID NO: 56184 - DNA, 25 bp, SARS Virus
tgatcattctttatataaacatcta

SEQ ID NO: 56185 - DNA, 25 bp, SARS Virus
gatcattcttttaataaacatctac

SEQ ID NO: 56186 - DNA, 25 bp, SARS Virus
atcattctttttataaacatctacc

SEQ ID NO: 56187 - DNA, 25 bp, SARS Virus
tcattctttttaaaaacatctacca

SEQ ID NO: 56188 - DNA, 25 bp, SARS Virus
cattctttttataaacatctaccac

SEQ ID NO: 56189 - DNA, 25 bp, SARS Virus
attctttttataaacatctaccaca

SEQ ID NO: 56190 - DNA, 25 bp, SARS Virus
ttctttttataaacatctaccacaa

SEQ ID NO: 56191 - DNA, 25 bp, SARS Virus
tctttttataaaaatctaccacaag

SEQ ID NO: 56192 - DNA, 25 bp, SARS Virus
ctttttataaacatctaccacaagg

SEQ ID NO: 56193 - DNA, 25 bp, SARS Virus
tttttataaacaactaccacaagga

SEQ ID NO: 56194 - DNA, 25 bp, SARS Virus
ttttataaacatataccacaaggaa

SEQ ID NO: 56195 - DNA, 25 bp, SARS Virus
tttataaacatcaaccacaaggaaa

SEQ ID NO: 56196 - DNA, 25 bp, SARS Virus
ttataaacatctaccacaaggaaaa

SEQ ID NO: 56197 - DNA, 25 bp, SARS Virus
tataaacatctaacacaaggaaaac

SEQ ID NO: 56198 - DNA, 25 bp, SARS Virus
ataaacatctacaacaaggaaaaca

SEQ ID NO: 56199 - DNA, 25 bp, SARS Virus
taaacatctaccacaaggaaaacaa

SEQ ID NO: 56200 - DNA, 25 bp, SARS Virus
aaacatctaccaaaaggaaaacaac

SEQ ID NO: 56201 - DNA, 25 bp, SARS Virus
aacatctaccacaaggaaaacaaca

SEQ ID NO: 56202 - DNA, 25 bp, SARS Virus
acatctaccacaaggaaaacaacaa

SEQ ID NO: 56203 - DNA, 25 bp, SARS Virus
catctaccacaaagaaaacaacaaa

SEQ ID NO: 56204 - DNA, 25 bp, SARS Virus
atctaccacaagaaaaacaacaaag

SEQ ID NO: 56205 - DNA, 25 bp, SARS Virus
tctaccacaaggaaaacaacaaagt

SEQ ID NO: 56206 - DNA, 25 bp, SARS Virus
ctaccacaaggaaaacaacaaagtt

SEQ ID NO: 56207 - DNA, 25 bp, SARS Virus
taccacaaggaaaacaacaaagttg

SEQ ID NO: 56208 - DNA, 25 bp, SARS Virus
accacaaggaaaacaacaaagttga

SEQ ID NO: 56209 - DNA, 25 bp, SARS Virus
ccacaaggaaaaaaacaaagttgac

SEQ ID NO: 56210 - DNA, 25 bp, SARS Virus
cacaaggaaaacaacaaagttgacc

SEQ ID NO: 56211 - DNA, 25 bp, SARS Virus
acaaggaaaacaacaaagttgacct

SEQ ID NO: 56212 - DNA, 25 bp, SARS Virus
caaggaaaacaaaaaagttgaccta

SEQ ID NO: 56213 - DNA, 25 bp, SARS Virus
aaggaaaacaacaaagttgacctat

SEQ ID NO: 56214 - DNA, 25 bp, SARS Virus
aggaaaacaacaaagttgacctatg

SEQ ID NO: 56215 - DNA, 25 bp, SARS Virus
ggaaaacaacaaagttgacctatgg

SEQ ID NO: 56216 - DNA, 25 bp, SARS Virus
gaaaacaacaaaattgacctatggt

SEQ ID NO: 56217 - DNA, 25 bp, SARS Virus
aaaacaacaaagatgacctatggta

SEQ ID NO: 56218 - DNA, 25 bp, SARS Virus
aaacaacaaagtagacctatggtaa

SEQ ID NO: 56219 - DNA, 25 bp, SARS Virus
aacaacaaagttaacctatggtaaa

SEQ ID NO: 56220 - DNA, 25 bp, SARS Virus
acaacaaagttgacctatggtaaaa

SEQ ID NO: 56221 - DNA, 25 bp, SARS Virus
caacaaagttgaactatggtaaaag

SEQ ID NO: 56222 - DNA, 25 bp, SARS Virus
aacaaagttgacatatggtaaaagc

SEQ ID NO: 56223 - DNA, 25 bp, SARS Virus
acaaagttgaccaatggtaaaagca

SEQ ID NO: 56224 - DNA, 25 bp, SARS Virus
caaagttgacctatggtaaaagcac

SEQ ID NO: 56225 - DNA, 25 bp, SARS Virus
aaagttgacctaaggtaaaagcact

SEQ ID NO: 56226 - DNA, 25 bp, SARS Virus
aagttgacctatagtaaaagcactc

SEQ ID NO: 56227 - DNA, 25 bp, SARS Virus
agttgacctatgataaaagcactca

SEQ ID NO: 56228 - DNA, 25 bp, SARS Virus
gttgacctatggaaaaagcactcaa

SEQ ID NO: 56229 - DNA, 25 bp, SARS Virus
ttgacctatggtaaaagcactcaat

SEQ ID NO: 56230 - DNA, 25 bp, SARS Virus
tgacctatggtaaaagcactcaatc

SEQ ID NO: 56231 - DNA, 25 bp, SARS Virus
gacctatggtaaaagcactcaatcc

SEQ ID NO: 56232 - DNA, 25 bp, SARS Virus
acctatggtaaaagcactcaatcct

SEQ ID NO: 56233 - DNA, 25 bp, SARS Virus
cctatggtaaaaacactcaatcctc

SEQ ID NO: 56234 - DNA, 25 bp, SARS Virus
ctatggtaaaagaactcaatcctca

SEQ ID NO: 56235 - DNA, 25 bp, SARS Virus
tatggtaaaagcactcaatcctcag

SEQ ID NO: 56236 - DNA, 25 bp, SARS Virus
atggtaaaagcaatcaatcctcagc

SEQ ID NO: 56237 - DNA, 25 bp, SARS Virus
tggtaaaagcacacaatcctcagca

SEQ ID NO: 56238 - DNA, 25 bp, SARS Virus
ggtaaaagcactaaatcctcagcat

SEQ ID NO: 56239 - DNA, 25 bp, SARS Virus
gtaaaagcactcaatcctcagcatg

SEQ ID NO: 56240 - DNA, 25 bp, SARS Virus
taaaagcactcaatcctcagcatgt

SEQ ID NO: 56241 - DNA, 25 bp, SARS Virus
aaaagcactcaaacctcagcatgta

SEQ ID NO: 56242 - DNA, 25 bp, SARS Virus
aaagcactcaatactcagcatgtat

SEQ ID NO: 56243 - DNA, 25 bp, SARS Virus
aagcactcaatcatcagcatgtatt

SEQ ID NO: 56244 - DNA, 25 bp, SARS Virus
agcactcaatccacagcatgtatta

SEQ ID NO: 56245 - DNA, 25 bp, SARS Virus
gcactcaatcctaagcatgtattag

SEQ ID NO: 56246 - DNA, 25 bp, SARS Virus
cactcaatcctcagcatgtattagt

SEQ ID NO: 56247 - DNA, 25 bp, SARS Virus
actcaatcctcaacatgtattagtc

SEQ ID NO: 56248 - DNA, 25 bp, SARS Virus
ctcaatcctcagaatgtattagtcc

SEQ ID NO: 56249 - DNA, 25 bp, SARS Virus
tttctgacatgtcaagacgctacga

SEQ ID NO: 56250 - DNA, 25 bp, SARS Virus
ttctgacatgttcagacgctacgat

SEQ ID NO: 56251 - DNA, 25 bp, SARS Virus
tctgacatgttacgacgctacgata

SEQ ID NO: 56252 - DNA, 25 bp, SARS Virus
ctgacatgttaacacgctacgatac

SEQ ID NO: 56253 - DNA, 25 bp, SARS Virus
tgacatgttaagccgctacgatacg

SEQ ID NO: 56254 - DNA, 25 bp, SARS Virus
gacatgttaagacgctacgatacgc

SEQ ID NO: 56255 - DNA, 25 bp, SARS Virus
acatgttaagaccctacgatacgca

SEQ ID NO: 56256 - DNA, 25 bp, SARS Virus
catgttaagacgctacgatacgcac

SEQ ID NO: 56257 - DNA, 25 bp, SARS Virus
atgttaagacgccacgatacgcact

SEQ ID NO: 56258 - DNA, 25 bp, SARS Virus
tgttaagacgctccgatacgcacta

SEQ ID NO: 56259 - DNA, 25 bp, SARS Virus
gttaagacgctacgatacgcactac

SEQ ID NO: 56260 - DNA, 25 bp, SARS Virus
ttaagacgctaccatacgcactacg

SEQ ID NO: 56261 - DNA, 25 bp, SARS Virus
taagacgctacgctacgcactacgt

SEQ ID NO: 56262 - DNA, 25 bp, SARS Virus
aagacgctacgacacgcactacgtc

SEQ ID NO: 56263 - DNA, 25 bp, SARS Virus
agacgctacgatccgcactacgtcc

SEQ ID NO: 56264 - DNA, 25 bp, SARS Virus
gacgctacgatacgcactacgtccg

SEQ ID NO: 56265 - DNA, 25 bp, SARS Virus
acgctacgatacccactacgtccgt

SEQ ID NO: 56266 - DNA, 25 bp, SARS Virus
cgctacgatacgcactacgtccgta

SEQ ID NO: 56267 - DNA, 25 bp, SARS Virus
gctacgatacgccctacgtccgtaa

SEQ ID NO: 56268 - DNA, 25 bp, SARS Virus
ctacgatacgcactacgtccgtaac

SEQ ID NO: 56269 - DNA, 25 bp, SARS Virus
tacgatacgcaccacgtccgtaaca

SEQ ID NO: 56270 - DNA, 25 bp, SARS Virus
acgatacgcactccgtccgtaacat

SEQ ID NO: 56271 - DNA, 25 bp, SARS Virus
cgatacgcactacgtccgtaacatc

SEQ ID NO: 56272 - DNA, 25 bp, SARS Virus
gatacgcactacctccgtaacatcc

SEQ ID NO: 56273 - DNA, 25 bp, SARS Virus
atacgcactacgcccgtaacatccg

SEQ ID NO: 56274 - DNA, 25 bp, SARS Virus
tacgcactacgtccgtaacatccgc

SEQ ID NO: 56275 - DNA, 25 bp, SARS Virus
acgcactacgtccgtaacatccgca

SEQ ID NO: 56276 - DNA, 25 bp, SARS Virus
cgcactacgtccctaacatccgcat

SEQ ID NO: 56277 - DNA, 25 bp, SARS Virus
gcactacgtccgcaacatccgcatg

SEQ ID NO: 56278 - DNA, 25 bp, SARS Virus
cactacgtccgtcacatccgcatga

SEQ ID NO: 56279 - DNA, 25 bp, SARS Virus
actacgtccgtaccatccgcatgac

SEQ ID NO: 56280 - DNA, 25 bp, SARS Virus
ctacgtccgtaacatccgcatgact

SEQ ID NO: 56281 - DNA, 25 bp, SARS Virus
tacgtccgtaacctccgcatgactg

SEQ ID NO: 56282 - DNA, 25 bp, SARS Virus
acgtccgtaacacccgcatgactgt

SEQ ID NO: 56283 - DNA, 25 bp, SARS Virus
cgtccgtaacatccgcatgactgta

SEQ ID NO: 56284 - DNA, 25 bp, SARS Virus
gtccgtaacatccgcatgactgtaa

SEQ ID NO: 56285 - DNA, 25 bp, SARS Virus
tccgtaacatccccatgactgtaat

SEQ ID NO: 56286 - DNA, 25 bp, SARS Virus
ccgtaacatccgcatgactgtaatc

SEQ ID NO: 56287 - DNA, 25 bp, SARS Virus
cgtaacatccgcctgactgtaatct

SEQ ID NO: 56288 - DNA, 25 bp, SARS Virus
gtaacatccgcacgactgtaatcta

SEQ ID NO: 56289 - DNA, 25 bp, SARS Virus
taacatccgcatcactgtaatctat

SEQ ID NO: 56290 - DNA, 25 bp, SARS Virus
aacatccgcatgcctgtaatctatt

SEQ ID NO: 56291 - DNA, 25 bp, SARS Virus
acatccgcatgactgtaatctatta

SEQ ID NO: 56292 - DNA, 25 bp, SARS Virus
catccgcatgaccgtaatctattag

SEQ ID NO: 56293 - DNA, 25 bp, SARS Virus
atccgcatgactctaatctattagt

SEQ ID NO: 56294 - DNA, 25 bp, SARS Virus
tccgcatgactgcaatctattagtc

SEQ ID NO: 56295 - DNA, 25 bp, SARS Virus
ccgcatgactgtcatctattagtcc

SEQ ID NO: 56296 - DNA, 25 bp, SARS Virus
cgcatgactgtactctattagtcct

SEQ ID NO: 56297 - DNA, 25 bp, SARS Virus
gcatgactgtaacctattagtccta

SEQ ID NO: 56298 - DNA, 25 bp, SARS Virus
catgactgtaatctattagtcctag

SEQ ID NO: 56299 - DNA, 25 bp, SARS Virus
atgactgtaatccattagtcctaga

SEQ ID NO: 56300 - DNA, 25 bp, SARS Virus
tgactgtaatctcttagtcctagaa

SEQ ID NO: 56301 - DNA, 25 bp, SARS Virus
gactgtaatctactagtcctagaat

SEQ ID NO: 56302 - DNA, 25 bp, SARS Virus
actgtaatctatcagtcctagaatt

SEQ ID NO: 56303 - DNA, 25 bp, SARS Virus
ctgtaatctattcgtcctagaatta

SEQ ID NO: 56304 - DNA, 25 bp, SARS Virus
tgtaatctattactcctagaattac

SEQ ID NO: 56305 - DNA, 25 bp, SARS Virus
gtaatctattagccctagaattacc

SEQ ID NO: 56306 - DNA, 25 bp, SARS Virus
taatctattagtcctagaattaccc

SEQ ID NO: 56307 - DNA, 25 bp, SARS Virus
aatctattagtcctagaattaccct

SEQ ID NO: 56308 - DNA, 25 bp, SARS Virus
atctattagtcccagaattaccctt

SEQ ID NO: 56309 - DNA, 25 bp, SARS Virus
tctattagtcctcgaattacccttg

SEQ ID NO: 56310 - DNA, 25 bp, SARS Virus
ctattagtcctacaattacccttga

SEQ ID NO: 56311 - DNA, 25 bp, SARS Virus
tattagtcctagcattacccttgac

SEQ ID NO: 56312 - DNA, 25 bp, SARS Virus
attagtcctagacttacccttgacc

SEQ ID NO: 56313 - DNA, 25 bp, SARS Virus
ttagtcctagaactacccttgacca

SEQ ID NO: 56314 - DNA, 25 bp, SARS Virus
tagtcctagaatcacccttgaccat

SEQ ID NO: 56315 - DNA, 25 bp, SARS Virus
agtcctagaattccccttgaccatg

SEQ ID NO: 56316 - DNA, 25 bp, SARS Virus
gtcctagaattacccttgaccatgc

SEQ ID NO: 56317 - DNA, 25 bp, SARS Virus
tcctagaattacccttgaccatgct

SEQ ID NO: 56318 - DNA, 25 bp, SARS Virus
cctagaattacccttgaccatgcta

SEQ ID NO: 56319 - DNA, 25 bp, SARS Virus
ctagaattacccctgaccatgctaa

SEQ ID NO: 56320 - DNA, 25 bp, SARS Virus
tagaattaccctcgaccatgctaaa

SEQ ID NO: 56321 - DNA, 25 bp, SARS Virus
agaattacccttcaccatgctaaag

SEQ ID NO: 56322 - DNA, 25 bp, SARS Virus
gaattacccttgcccatgctaaagc

SEQ ID NO: 56323 - DNA, 25 bp, SARS Virus
aattacccttgaccatgctaaagcc

SEQ ID NO: 56324 - DNA, 25 bp, SARS Virus
attacccttgaccatgctaaagcca

SEQ ID NO: 56325 - DNA, 25 bp, SARS Virus
ttacccttgaccctgctaaagccac

SEQ ID NO: 56326 - DNA, 25 bp, SARS Virus
tacccttgaccacgctaaagccact

SEQ ID NO: 56327 - DNA, 25 bp, SARS Virus
acccttgaccatcctaaagccacta

SEQ ID NO: 56328 - DNA, 25 bp, SARS Virus
cccttgaccatgctaaagccactaa

SEQ ID NO: 56329 - DNA, 25 bp, SARS Virus
ccttgaccatgccaaagccactaaa

SEQ ID NO: 56330 - DNA, 25 bp, SARS Virus
cttgaccatgctcaagccactaaag

SEQ ID NO: 56331 - DNA, 25 bp, SARS Virus
ttgaccatgctacagccactaaagc

SEQ ID NO: 56332 - DNA, 25 bp, SARS Virus
tgaccatgctaacgccactaaagca

SEQ ID NO: 56333 - DNA, 25 bp, SARS Virus
gaccatgctaaacccactaaagcat

SEQ ID NO: 56334 - DNA, 25 bp, SARS Virus
accatgctaaagccactaaagcatg

SEQ ID NO: 56335 - DNA, 25 bp, SARS Virus
ccatgctaaagccactaaagcatgt

SEQ ID NO: 56336 - DNA, 25 bp, SARS Virus
catgctaaagcccctaaagcatgtt

SEQ ID NO: 56337 - DNA, 25 bp, SARS Virus
atgctaaagccactaaagcatgttc

SEQ ID NO: 56338 - DNA, 25 bp, SARS Virus
tgctaaagccaccaaagcatgttca

SEQ ID NO: 56339 - DNA, 25 bp, SARS Virus
gctaaagccactcaagcatgttcat

SEQ ID NO: 56340 - DNA, 25 bp, SARS Virus
ctaaagccactacagcatgttcatc

SEQ ID NO: 56341 - DNA, 25 bp, SARS Virus
taaagccactaacgcatgttcatcg

SEQ ID NO: 56342 - DNA, 25 bp, SARS Virus
aaagccactaaaccatgttcatcgt

SEQ ID NO: 56343 - DNA, 25 bp, SARS Virus
aagccactaaagcatgttcatcgtg

SEQ ID NO: 56344 - DNA, 25 bp, SARS Virus
agccactaaagcctgttcatcgtgg

SEQ ID NO: 56345 - DNA, 25 bp, SARS Virus
gccactaaagcacgttcatcgtggt

SEQ ID NO: 56346 - DNA, 25 bp, SARS Virus
ccactaaagcatcttcatcgtggtc

SEQ ID NO: 56347 - DNA, 25 bp, SARS Virus
cactaaagcatgctcatcgtggtcc

SEQ ID NO: 56348 - DNA, 25 bp, SARS Virus
actaaagcatgtccatcgtggtccg

SEQ ID NO: 56349 - DNA, 25 bp, SARS Virus
ctaaagcatgttcatcgtggtccga

SEQ ID NO: 56350 - DNA, 25 bp, SARS Virus
taaagcatgttcctcgtggtccgac

SEQ ID NO: 56351 - DNA, 25 bp, SARS Virus
aaagcatgttcaccgtggtccgacg

SEQ ID NO: 56352 - DNA, 25 bp, SARS Virus
aagcatgttcatcgtggtccgacgc

SEQ ID NO: 56353 - DNA, 25 bp, SARS Virus
agcatgttcatcctggtccgacgcc

SEQ ID NO: 56354 - DNA, 25 bp, SARS Virus
gcatgttcatcgcggtccgacgcct

SEQ ID NO: 56355 - DNA, 25 bp, SARS Virus
catgttcatcgtcgtccgacgcctc

SEQ ID NO: 56356 - DNA, 25 bp, SARS Virus
atgttcatcgtgctccgacgcctca

SEQ ID NO: 56357 - DNA, 25 bp, SARS Virus
tgttcatcgtggcccgacgcctcaa

SEQ ID NO: 56358 - DNA, 25 bp, SARS Virus
gttcatcgtggtccgacgcctcaag

SEQ ID NO: 56359 - DNA, 25 bp, SARS Virus
ttcatcgtggtccgacgcctcaagg

SEQ ID NO: 56360 - DNA, 25 bp, SARS Virus
tcatcgtggtcccacgcctcaagga

SEQ ID NO: 56361 - DNA, 25 bp, SARS Virus
catcgtggtccgccgcctcaaggat

SEQ ID NO: 56362 - DNA, 25 bp, SARS Virus
atcgtggtccgacgcctcaaggata

SEQ ID NO: 56363 - DNA, 25 bp, SARS Virus
tcgtggtccgacccctcaaggataa

SEQ ID NO: 56364 - DNA, 25 bp, SARS Virus
cgtggtccgacgcctcaaggataac

SEQ ID NO: 56365 - DNA, 25 bp, SARS Virus
gtggtccgacgcctcaaggataaca

SEQ ID NO: 56366 - DNA, 25 bp, SARS Virus
tggtccgacgccccaaggataacac

SEQ ID NO: 56367 - DNA, 25 bp, SARS Virus
ggtccgacgcctcaaggataacacc

SEQ ID NO: 56368 - DNA, 25 bp, SARS Virus
gtccgacgcctccaggataacacct

SEQ ID NO: 56369 - DNA, 25 bp, SARS Virus
tccgacgcctcacggataacaccta

SEQ ID NO: 56370 - DNA, 25 bp, SARS Virus
ccgacgcctcaacgataacacctaa

SEQ ID NO: 56371 - DNA, 25 bp, SARS Virus
cgacgcctcaagcataacacctaag

SEQ ID NO: 56372 - DNA, 25 bp, SARS Virus
gacgcctcaaggctaacacctaagt

SEQ ID NO: 56373 - DNA, 25 bp, SARS Virus
acgcctcaaggacaacacctaagta

SEQ ID NO: 56374 - DNA, 25 bp, SARS Virus
cgcctcaaggatcacacctaagtat

SEQ ID NO: 56375 - DNA, 25 bp, SARS Virus
gcctcaaggataccacctaagtata

SEQ ID NO: 56376 - DNA, 25 bp, SARS Virus
cctcaaggataacacctaagtataa

SEQ ID NO: 56377 - DNA, 25 bp, SARS Virus
ctcaaggataacccctaagtataat

SEQ ID NO: 56378 - DNA, 25 bp, SARS Virus
tcaaggataacacctaagtataatg

SEQ ID NO: 56379 - DNA, 25 bp, SARS Virus
caaggataacacctaagtataatga

SEQ ID NO: 56380 - DNA, 25 bp, SARS Virus
aaggataacacccaagtataatgag

SEQ ID NO: 56381 - DNA, 25 bp, SARS Virus
aggataacacctcagtataatgagt

SEQ ID NO: 56382 - DNA, 25 bp, SARS Virus
ggataacacctacgtataatgagta

SEQ ID NO: 56383 - DNA, 25 bp, SARS Virus
gataacacctaactataatgagtaa

SEQ ID NO: 56384 - DNA, 25 bp, SARS Virus
ataacacctaagcataatgagtaac

SEQ ID NO: 56385 - DNA, 25 bp, SARS Virus
taacacctaagtctaatgagtaacg

SEQ ID NO: 56386 - DNA, 25 bp, SARS Virus
aacacctaagtacaatgagtaacga

SEQ ID NO: 56387 - DNA, 25 bp, SARS Virus
acacctaagtatcatgagtaacgac

SEQ ID NO: 56388 - DNA, 25 bp, SARS Virus
cacctaagtatactgagtaacgact

SEQ ID NO: 56389 - DNA, 25 bp, SARS Virus
acctaagtataacgagtaacgacta

SEQ ID NO: 56390 - DNA, 25 bp, SARS Virus
cctaagtataatcagtaacgactac

SEQ ID NO: 56391 - DNA, 25 bp, SARS Virus
ctaagtataatgcgtaacgactacg

SEQ ID NO: 56392 - DNA, 25 bp, SARS Virus
taagtataatgactaacgactacgg

SEQ ID NO: 56393 - DNA, 25 bp, SARS Virus
aagtataatgagcaacgactacggg

SEQ ID NO: 56394 - DNA, 25 bp, SARS Virus
agtataatgagtcacgactacgggt

SEQ ID NO: 56395 - DNA, 25 bp, SARS Virus
gtataatgagtaccgactacgggta

SEQ ID NO: 56396 - DNA, 25 bp, SARS Virus
tataatgagtaacgactacgggtag

SEQ ID NO: 56397 - DNA, 25 bp, SARS Virus
ataatgagtaaccactacgggtagg

SEQ ID NO: 56398 - DNA, 25 bp, SARS Virus
taatgagtaacgcctacgggtagga

SEQ ID NO: 56399 - DNA, 25 bp, SARS Virus
aatgagtaacgactacgggtaggag

SEQ ID NO: 56400 - DNA, 25 bp, SARS Virus
atgagtaacgaccacgggtaggagt

SEQ ID NO: 56401 - DNA, 25 bp, SARS Virus
tgagtaacgactccgggtaggagtg

SEQ ID NO: 56402 - DNA, 25 bp, SARS Virus
gagtaacgactacgggtaggagtga

SEQ ID NO: 56403 - DNA, 25 bp, SARS Virus
agtaacgactaccggtaggagtgaa

SEQ ID NO: 56404 - DNA, 25 bp, SARS Virus
gtaacgactacgcgtaggagtgaaa

SEQ ID NO: 56405 - DNA, 25 bp, SARS Virus
taacgactacggctaggagtgaaac

SEQ ID NO: 56406 - DNA, 25 bp, SARS Virus
aacgactacgggcaggagtgaaact

SEQ ID NO: 56407 - DNA, 25 bp, SARS Virus
acgactacgggtcggagtgaaactg

SEQ ID NO: 56408 - DNA, 25 bp, SARS Virus
cgactacgggtacgagtgaaactga

SEQ ID NO: 56409 - DNA, 25 bp, SARS Virus
gactacgggtagcagtgaaactgat

SEQ ID NO: 56410 - DNA, 25 bp, SARS Virus
actacgggtaggcgtgaaactgatc

SEQ ID NO: 56411 - DNA, 25 bp, SARS Virus
ctacgggtaggactgaaactgatcc

SEQ ID NO: 56412 - DNA, 25 bp, SARS Virus
tacgggtaggagcgaaactgatccc

SEQ ID NO: 56413 - DNA, 25 bp, SARS Virus
acgggtaggagtcaaactgatcccg

SEQ ID NO: 56414 - DNA, 25 bp, SARS Virus
cgggtaggagtgcaactgatcccgt

SEQ ID NO: 56415 - DNA, 25 bp, SARS Virus
gggtaggagtgacactgatcccgta

SEQ ID NO: 56416 - DNA, 25 bp, SARS Virus
ggtaggagtgaacctgatcccgtaa

SEQ ID NO: 56417 - DNA, 25 bp, SARS Virus
gtaggagtgaaactgatcccgtaac

SEQ ID NO: 56418 - DNA, 25 bp, SARS Virus
taggagtgaaaccgatcccgtaacc

SEQ ID NO: 56419 - DNA, 25 bp, SARS Virus
aggagtgaaactcatcccgtaaccg

SEQ ID NO: 56420 - DNA, 25 bp, SARS Virus
ggagtgaaactgctcccgtaaccga

SEQ ID NO: 56421 - DNA, 25 bp, SARS Virus
gagtgaaactgaccccgtaaccgac

SEQ ID NO: 56422 - DNA, 25 bp, SARS Virus
agtgaaactgatcccgtaaccgacg

SEQ ID NO: 56423 - DNA, 25 bp, SARS Virus
gtgaaactgatcccgtaaccgacga

SEQ ID NO: 56424 - DNA, 25 bp, SARS Virus
tgaaactgatcccgtaaccgacgac

SEQ ID NO: 56425 - DNA, 25 bp, SARS Virus
gaaactgatcccctaaccgacgact

SEQ ID NO: 56426 - DNA, 25 bp, SARS Virus
aaactgatcccgcaaccgacgactc

SEQ ID NO: 56427 - DNA, 25 bp, SARS Virus
aactgatcccgtcaccgacgactca

SEQ ID NO: 56428 - DNA, 25 bp, SARS Virus
actgatcccgtacccgacgactcag

SEQ ID NO: 56429 - DNA, 25 bp, SARS Virus
ctgatcccgtaaccgacgactcagg

SEQ ID NO: 56430 - DNA, 25 bp, SARS Virus
tgatcccgtaaccgacgactcaggg

SEQ ID NO: 56431 - DNA, 25 bp, SARS Virus
gatcccgtaacccacgactcagggt

SEQ ID NO: 56432 - DNA, 25 bp, SARS Virus
atcccgtaaccgccgactcagggta

SEQ ID NO: 56433 - DNA, 25 bp, SARS Virus
tcccgtaaccgacgactcagggtat

SEQ ID NO: 56434 - DNA, 25 bp, SARS Virus
cccgtaaccgaccactcagggtata

SEQ ID NO: 56435 - DNA, 25 bp, SARS Virus
ccgtaaccgacgcctcagggtatac

SEQ ID NO: 56436 - DNA, 25 bp, SARS Virus
cgtaaccgacgactcagggtatacc

SEQ ID NO: 56437 - DNA, 25 bp, SARS Virus
gtaaccgacgacccagggtatacct

SEQ ID NO: 56438 - DNA, 25 bp, SARS Virus
taaccgacgactcagggtataccta

SEQ ID NO: 56439 - DNA, 25 bp, SARS Virus
aaccgacgactccgggtatacctac

SEQ ID NO: 56440 - DNA, 25 bp, SARS Virus
accgacgactcacggtatacctacg

SEQ ID NO: 56441 - DNA, 25 bp, SARS Virus
ccgacgactcagcgtatacctacga

SEQ ID NO: 56442 - DNA, 25 bp, SARS Virus
cgacgactcaggctatacctacgac

SEQ ID NO: 56443 - DNA, 25 bp, SARS Virus
gacgactcagggcatacctacgact

SEQ ID NO: 56444 - DNA, 25 bp, SARS Virus
acgactcagggtctacctacgacta

SEQ ID NO: 56445 - DNA, 25 bp, SARS Virus
cgactcagggtacacctacgactag

SEQ ID NO: 56446 - DNA, 25 bp, SARS Virus
gactcagggtatccctacgactaga

SEQ ID NO: 56447 - DNA, 25 bp, SARS Virus
actcagggtatacctacgactagag

SEQ ID NO: 56448 - DNA, 25 bp, SARS Virus
ctcagggtatacctacgactagagc

SEQ ID NO: 56449 - DNA, 25 bp, SARS Virus
tcagggtatacccacgactagagcg

SEQ ID NO: 56450 - DNA, 25 bp, SARS Virus
cagggtatacctccgactagagcgt

SEQ ID NO: 56451 - DNA, 25 bp, SARS Virus
agggtatacctacgactagagcgtt

SEQ ID NO: 56452 - DNA, 25 bp, SARS Virus
gggtatacctaccactagagcgttt

SEQ ID NO: 56453 - DNA, 25 bp, SARS Virus
ggtatacctacgcctagagcgtttt

SEQ ID NO: 56454 - DNA, 25 bp, SARS Virus
gtatacctacgactagagcgttttg

SEQ ID NO: 56455 - DNA, 25 bp, SARS Virus
tatacctacgaccagagcgttttgg

SEQ ID NO: 56456 - DNA, 25 bp, SARS Virus
atacctacgactcgagcgttttggt

SEQ ID NO: 56457 - DNA, 25 bp, SARS Virus
tacctacgactacagcgttttggtg

SEQ ID NO: 56458 - DNA, 25 bp, SARS Virus
acctacgactagcgcgttttggtga

SEQ ID NO: 56459 - DNA, 25 bp, SARS Virus
cctacgactagaccgttttggtgaa

SEQ ID NO: 56460 - DNA, 25 bp, SARS Virus
ctacgactagagcgttttggtgaat

SEQ ID NO: 56461 - DNA, 25 bp, SARS Virus
tacgactagagccttttggtgaata

SEQ ID NO: 56462 - DNA, 25 bp, SARS Virus
acgactagagcgctttggtgaataa

SEQ ID NO: 56463 - DNA, 25 bp, SARS Virus
cgactagagcgtcttggtgaataat

SEQ ID NO: 56464 - DNA, 25 bp, SARS Virus
gactagagcgttctggtgaataatt

SEQ ID NO: 56465 - DNA, 25 bp, SARS Virus
actagagcgtttcggtgaataattc

SEQ ID NO: 56466 - DNA, 25 bp, SARS Virus
ctagagcgttttcgtgaataattca

SEQ ID NO: 56467 - DNA, 25 bp, SARS Virus
tagagcgttttgctgaataattcac

SEQ ID NO: 56468 - DNA, 25 bp, SARS Virus
agagcgttttggcgaataattcacc

SEQ ID NO: 56469 - DNA, 25 bp, SARS Virus
gagcgttttggtcaataattcaccc

SEQ ID NO: 56470 - DNA, 25 bp, SARS Virus
agcgttttggtgcataattcaccct

SEQ ID NO: 56471 - DNA, 25 bp, SARS Virus
gcgttttggtgactaattcacccta

SEQ ID NO: 56472 - DNA, 25 bp, SARS Virus
cgttttggtgaacaattcaccctaa

SEQ ID NO: 56473 - DNA, 25 bp, SARS Virus
gttttggtgaatcattcaccctaaa

SEQ ID NO: 56474 - DNA, 25 bp, SARS Virus
ttttggtgaatacttcaccctaaac

SEQ ID NO: 56475 - DNA, 25 bp, SARS Virus
tttggtgaataactcaccctaaacg

SEQ ID NO: 56476 - DNA, 25 bp, SARS Virus
ttggtgaataatccaccctaaacga

SEQ ID NO: 56477 - DNA, 25 bp, SARS Virus
tggtgaataattcaccctaaacgac

SEQ ID NO: 56478 - DNA, 25 bp, SARS Virus
ggtgaataattccccctaaacgact

SEQ ID NO: 56479 - DNA, 25 bp, SARS Virus
gtgaataattcaccctaaacgactt

SEQ ID NO: 56480 - DNA, 25 bp, SARS Virus
tgaataattcaccctaaacgacttt

SEQ ID NO: 56481 - DNA, 25 bp, SARS Virus
gaataattcaccctaaacgacttta

SEQ ID NO: 56482 - DNA, 25 bp, SARS Virus
aataattcaccccaaacgactttat

SEQ ID NO: 56483 - DNA, 25 bp, SARS Virus
ataattcaccctcaacgactttata

SEQ ID NO: 56484 - DNA, 25 bp, SARS Virus
taattcaccctacacgactttatac

SEQ ID NO: 56485 - DNA, 25 bp, SARS Virus
aattcaccctaaccgactttatact

SEQ ID NO: 56486 - DNA, 25 bp, SARS Virus
attcaccctaaacgactttatacta

SEQ ID NO: 56487 - DNA, 25 bp, SARS Virus
ttcaccctaaaccactttatactaa

SEQ ID NO: 56488 - DNA, 25 bp, SARS Virus
tcaccctaaacgcctttatactaaa

SEQ ID NO: 56489 - DNA, 25 bp, SARS Virus
caccctaaacgactttatactaaaa

SEQ ID NO: 56490 - DNA, 25 bp, SARS Virus
accctaaacgaccttatactaaaat

SEQ ID NO: 56491 - DNA, 25 bp, SARS Virus
ccctaaacgactctatactaaaatg

SEQ ID NO: 56492 - DNA, 25 bp, SARS Virus
cctaaacgacttcatactaaaatgc

SEQ ID NO: 56493 - DNA, 25 bp, SARS Virus
ctaaacgactttctactaaaatgcc

SEQ ID NO: 56494 - DNA, 25 bp, SARS Virus
taaacgactttacactaaaatgcct

SEQ ID NO: 56495 - DNA, 25 bp, SARS Virus
aaacgactttatcctaaaatgcctt

SEQ ID NO: 56496 - DNA, 25 bp, SARS Virus
aacgactttatactaaaatgccttc

SEQ ID NO: 56497 - DNA, 25 bp, SARS Virus
acgactttataccaaaatgccttct

SEQ ID NO: 56498 - DNA, 25 bp, SARS Virus
cgactttatactcaaatgccttctc

SEQ ID NO: 56499 - DNA, 25 bp, SARS Virus
gactttatactacaatgccttctct

SEQ ID NO: 56500 - DNA, 25 bp, SARS Virus
actttatactaacatgccttctctc

SEQ ID NO: 56501 - DNA, 25 bp, SARS Virus
ctttatactaaactgccttctctct

SEQ ID NO: 56502 - DNA, 25 bp, SARS Virus
tttatactaaaacgccttctctctg

SEQ ID NO: 56503 - DNA, 25 bp, SARS Virus
ttatactaaaatcccttctctctga

SEQ ID NO: 56504 - DNA, 25 bp, SARS Virus
tatactaaaatgccttctctctgaa

SEQ ID NO: 56505 - DNA, 25 bp, SARS Virus
atactaaaatgccttctctctgaaa

SEQ ID NO: 56506 - DNA, 25 bp, SARS Virus
tactaaaatgccctctctctgaaac

SEQ ID NO: 56507 - DNA, 25 bp, SARS Virus
actaaaatgcctcctctctgaaaca

SEQ ID NO: 56508 - DNA, 25 bp, SARS Virus
ctaaaatgccttctctctgaaacag

SEQ ID NO: 56509 - DNA, 25 bp, SARS Virus
taaaatgccttccctctgaaacaga

SEQ ID NO: 56510 - DNA, 25 bp, SARS Virus
aaaatgccttctctctgaaacagag

SEQ ID NO: 56511 - DNA, 25 bp, SARS Virus
aaatgccttctccctgaaacagaga

SEQ ID NO: 56512 - DNA, 25 bp, SARS Virus
aatgccttctctctgaaacagagaa

SEQ ID NO: 56513 - DNA, 25 bp, SARS Virus
atgccttctctccgaaacagagaag

SEQ ID NO: 56514 - DNA, 25 bp, SARS Virus
tgccttctctctcaaacagagaagc

SEQ ID NO: 56515 - DNA, 25 bp, SARS Virus
gccttctctctgcaacagagaagct

SEQ ID NO: 56516 - DNA, 25 bp, SARS Virus
ccttctctctgacacagagaagctg

SEQ ID NO: 56517 - DNA, 25 bp, SARS Virus
cttctctctgaaccagagaagctgg

SEQ ID NO: 56518 - DNA, 25 bp, SARS Virus
ttctctctgaaacagagaagctggc

SEQ ID NO: 56519 - DNA, 25 bp, SARS Virus
tctctctgaaaccgagaagctggca

SEQ ID NO: 56520 - DNA, 25 bp, SARS Virus
ctctctgaaacacagaagctggcaa

SEQ ID NO: 56521 - DNA, 25 bp, SARS Virus
tctctgaaacagcgaagctggcaat

SEQ ID NO: 56522 - DNA, 25 bp, SARS Virus
ctctgaaacagacaagctggcaata

SEQ ID NO: 56523 - DNA, 25 bp, SARS Virus
tctgaaacagagcagctggcaataa

SEQ ID NO: 56524 - DNA, 25 bp, SARS Virus
ctgaaacagagacgctggcaataaa

SEQ ID NO: 56525 - DNA, 25 bp, SARS Virus
tgaaacagagaacctggcaataaaa

SEQ ID NO: 56526 - DNA, 25 bp, SARS Virus
gaaacagagaagctggcaataaaat

SEQ ID NO: 56527 - DNA, 25 bp, SARS Virus
aaacagagaagccggcaataaaatt

SEQ ID NO: 56528 - DNA, 25 bp, SARS Virus
aacagagaagctcgcaataaaattt

SEQ ID NO: 56529 - DNA, 25 bp, SARS Virus
acagagaagctgccaataaaattta

SEQ ID NO: 56530 - DNA, 25 bp, SARS Virus
cagagaagctggcaataaaatttat

SEQ ID NO: 56531 - DNA, 25 bp, SARS Virus
agagaagctggccataaaatttata

SEQ ID NO: 56532 - DNA, 25 bp, SARS Virus
gagaagctggcactaaaatttataa

SEQ ID NO: 56533 - DNA, 25 bp, SARS Virus
agaagctggcaacaaaatttataac

SEQ ID NO: 56534 - DNA, 25 bp, SARS Virus
gaagctggcaatcaaatttataacc

SEQ ID NO: 56535 - DNA, 25 bp, SARS Virus
aagctggcaatacaatttataaccc

SEQ ID NO: 56536 - DNA, 25 bp, SARS Virus
agctggcaataacatttataaccct

SEQ ID NO: 56537 - DNA, 25 bp, SARS Virus
gctggcaataaactttataaccctg

SEQ ID NO: 56538 - DNA, 25 bp, SARS Virus
ctggcaataaaacttataaccctgg

SEQ ID NO: 56539 - DNA, 25 bp, SARS Virus
tggcaataaaatctataaccctggt

SEQ ID NO: 56540 - DNA, 25 bp, SARS Virus
ggcaataaaattcataaccctggtc

SEQ ID NO: 56541 - DNA, 25 bp, SARS Virus
gcaataaaatttctaaccctggtct

SEQ ID NO: 56542 - DNA, 25 bp, SARS Virus
caataaaatttacaaccctggtctg

SEQ ID NO: 56543 - DNA, 25 bp, SARS Virus
aataaaatttatcaccctggtctgt

SEQ ID NO: 56544 - DNA, 25 bp, SARS Virus
ataaaatttatacccctggtctgta

SEQ ID NO: 56545 - DNA, 25 bp, SARS Virus
taaaatttataaccctggtctgtat

SEQ ID NO: 56546 - DNA, 25 bp, SARS Virus
aaaatttataaccctggtctgtatg

SEQ ID NO: 56547 - DNA, 25 bp, SARS Virus
aaatttataaccctggtctgtatgg

SEQ ID NO: 56548 - DNA, 25 bp, SARS Virus
aatttataaccccggtctgtatggt

SEQ ID NO: 56549 - DNA, 25 bp, SARS Virus
atttataaccctcgtctgtatggta

SEQ ID NO: 56550 - DNA, 25 bp, SARS Virus
tttataaccctgctctgtatggtag

SEQ ID NO: 56551 - DNA, 25 bp, SARS Virus
ttataaccctggcctgtatggtagg

SEQ ID NO: 56552 - DNA, 25 bp, SARS Virus
tataaccctggtctgtatggtaggg

SEQ ID NO: 56553 - DNA, 25 bp, SARS Virus
ataaccctggtccgtatggtagggt

SEQ ID NO: 56554 - DNA, 25 bp, SARS Virus
taaccctggtctctatggtagggtt

SEQ ID NO: 56555 - DNA, 25 bp, SARS Virus
aaccctggtctgcatggtagggtta

SEQ ID NO: 56556 - DNA, 25 bp, SARS Virus
accctggtctgtctggtagggttaa

SEQ ID NO: 56557 - DNA, 25 bp, SARS Virus
ccctggtctgtacggtagggttaac

SEQ ID NO: 56558 - DNA, 25 bp, SARS Virus
cctggtctgtatcgtagggttaaca

SEQ ID NO: 56559 - DNA, 25 bp, SARS Virus
ctggtctgtatgctagggttaacat

SEQ ID NO: 56560 - DNA, 25 bp, SARS Virus
tggtctgtatggcagggttaacata

SEQ ID NO: 56561 - DNA, 25 bp, SARS Virus
ggtctgtatggtcgggttaacataa

SEQ ID NO: 56562 - DNA, 25 bp, SARS Virus
gtctgtatggtacggttaacataat

SEQ ID NO: 56563 - DNA, 25 bp, SARS Virus
tctgtatggtagcgttaacataatt

SEQ ID NO: 56564 - DNA, 25 bp, SARS Virus
ctgtatggtaggcttaacataattg

SEQ ID NO: 56565 - DNA, 25 bp, SARS Virus
tgtatggtagggctaacataattga

SEQ ID NO: 56566 - DNA, 25 bp, SARS Virus
gtatggtagggtcaacataattgac

SEQ ID NO: 56567 - DNA, 25 bp, SARS Virus
tatggtagggttcacataattgaca

SEQ ID NO: 56568 - DNA, 25 bp, SARS Virus
atggtagggttaccataattgacaa

SEQ ID NO: 56569 - DNA, 25 bp, SARS Virus
tggtagggttaacataattgacaaa

SEQ ID NO: 56570 - DNA, 25 bp, SARS Virus
ggtagggttaacctaattgacaaac

SEQ ID NO: 56571 - DNA, 25 bp, SARS Virus
gtagggttaacacaattgacaaacc

SEQ ID NO: 56572 - DNA, 25 bp, SARS Virus
tagggttaacatcattgacaaacct

SEQ ID NO: 56573 - DNA, 25 bp, SARS Virus
agggttaacatacttgacaaaccta

SEQ ID NO: 56574 - DNA, 25 bp, SARS Virus
gggttaacataactgacaaacctac

SEQ ID NO: 56575 - DNA, 25 bp, SARS Virus
ggttaacataatcgacaaacctact

SEQ ID NO: 56576 - DNA, 25 bp, SARS Virus
gttaacataattcacaaacctacta

SEQ ID NO: 56577 - DNA, 25 bp, SARS Virus
ttaacataattgccaaacctactat

SEQ ID NO: 56578 - DNA, 25 bp, SARS Virus
taacataattgacaaacctactatc

SEQ ID NO: 56579 - DNA, 25 bp, SARS Virus
aacataattgaccaacctactatcc

SEQ ID NO: 56580 - DNA, 25 bp, SARS Virus
acataattgacacacctactatcca

SEQ ID NO: 56581 - DNA, 25 bp, SARS Virus
cataattgacaaccctactatccac

SEQ ID NO: 56582 - DNA, 25 bp, SARS Virus
ataattgacaaacctactatccaca

SEQ ID NO: 56583 - DNA, 25 bp, SARS Virus
taattgacaaacctactatccacat

SEQ ID NO: 56584 - DNA, 25 bp, SARS Virus
aattgacaaacccactatccacata

SEQ ID NO: 56585 - DNA, 25 bp, SARS Virus
attgacaaacctcctatccacatag

SEQ ID NO: 56586 - DNA, 25 bp, SARS Virus
ttgacaaacctactatccacatagg

SEQ ID NO: 56587 - DNA, 25 bp, SARS Virus
tgacaaacctaccatccacatagga

SEQ ID NO: 56588 - DNA, 25 bp, SARS Virus
gacaaacctactctccacataggaa

SEQ ID NO: 56589 - DNA, 25 bp, SARS Virus
acaaacctactacccacataggaag

SEQ ID NO: 56590 - DNA, 25 bp, SARS Virus
caaacctactatccacataggaagt

SEQ ID NO: 56591 - DNA, 25 bp, SARS Virus
aaacctactatccacataggaagta

SEQ ID NO: 56592 - DNA, 25 bp, SARS Virus
aacctactatccccataggaagtaa

SEQ ID NO: 56593 - DNA, 25 bp, SARS Virus
acctactatccacataggaagtaac

SEQ ID NO: 56594 - DNA, 25 bp, SARS Virus
cctactatccacctaggaagtaaca

SEQ ID NO: 56595 - DNA, 25 bp, SARS Virus
ctactatccacacaggaagtaacac

SEQ ID NO: 56596 - DNA, 25 bp, SARS Virus
tactatccacatcggaagtaacacg

SEQ ID NO: 56597 - DNA, 25 bp, SARS Virus
actatccacatacgaagtaacacgt

SEQ ID NO: 56598 - DNA, 25 bp, SARS Virus
ctatccacatagcaagtaacacgtt

SEQ ID NO: 56599 - DNA, 25 bp, SARS Virus
tatccacataggcagtaacacgttt

SEQ ID NO: 56600 - DNA, 25 bp, SARS Virus
atccacataggacgtaacacgtttg

SEQ ID NO: 56601 - DNA, 25 bp, SARS Virus
tccacataggaactaacacgtttga

SEQ ID NO: 56602 - DNA, 25 bp, SARS Virus
ccacataggaagcaacacgtttgaa

SEQ ID NO: 56603 - DNA, 25 bp, SARS Virus
cacataggaagtcacacgtttgaaa

SEQ ID NO: 56604 - DNA, 25 bp, SARS Virus
acataggaagtaccacgtttgaaat

SEQ ID NO: 56605 - DNA, 25 bp, SARS Virus
cataggaagtaacacgtttgaaatt

SEQ ID NO: 56606 - DNA, 25 bp, SARS Virus
ataggaagtaacccgtttgaaatta

SEQ ID NO: 56607 - DNA, 25 bp, SARS Virus
taggaagtaacacgtttgaaattac

SEQ ID NO: 56608 - DNA, 25 bp, SARS Virus
aggaagtaacacctttgaaattaca

SEQ ID NO: 56609 - DNA, 25 bp, SARS Virus
ggaagtaacacgcttgaaattacac

SEQ ID NO: 56610 - DNA, 25 bp, SARS Virus
gaagtaacacgtctgaaattacaca

SEQ ID NO: 56611 - DNA, 25 bp, SARS Virus
aagtaacacgttcgaaattacacaa

SEQ ID NO: 56612 - DNA, 25 bp, SARS Virus
agtaacacgtttcaaattacacaat

SEQ ID NO: 56613 - DNA, 25 bp, SARS Virus
gtaacacgtttgcaattacacaata

SEQ ID NO: 56614 - DNA, 25 bp, SARS Virus
taacacgtttgacattacacaataa

SEQ ID NO: 56615 - DNA, 25 bp, SARS Virus
aacacgtttgaacttacacaataaa

SEQ ID NO: 56616 - DNA, 25 bp, SARS Virus
acacgtttgaaactacacaataaaa

SEQ ID NO: 56617 - DNA, 25 bp, SARS Virus
cacgtttgaaatcacacaataaaag

SEQ ID NO: 56618 - DNA, 25 bp, SARS Virus
acgtttgaaattccacaataaaaga

SEQ ID NO: 56619 - DNA, 25 bp, SARS Virus
cgtttgaaattacacaataaaagat

SEQ ID NO: 56620 - DNA, 25 bp, SARS Virus
gtttgaaattacccaataaaagatg

SEQ ID NO: 56621 - DNA, 25 bp, SARS Virus
tttgaaattacacaataaaagatga

SEQ ID NO: 56622 - DNA, 25 bp, SARS Virus
ttgaaattacaccataaaagatgac

SEQ ID NO: 56623 - DNA, 25 bp, SARS Virus
tgaaattacacactaaaagatgaca

SEQ ID NO: 56624 - DNA, 25 bp, SARS Virus
gaaattacacaacaaaagatgacac

SEQ ID NO: 56625 - DNA, 25 bp, SARS Virus
aaattacacaatcaaagatgacaca

SEQ ID NO: 56626 - DNA, 25 bp, SARS Virus
aattacacaatacaagatgacacaa

SEQ ID NO: 56627 - DNA, 25 bp, SARS Virus
attacacaataacagatgacacaaa

SEQ ID NO: 56628 - DNA, 25 bp, SARS Virus
ttacacaataaacgatgacacaaag

SEQ ID NO: 56629 - DNA, 25 bp, SARS Virus
tacacaataaaacatgacacaaagg

SEQ ID NO: 56630 - DNA, 25 bp, SARS Virus
acacaataaaagctgacacaaaggt

SEQ ID NO: 56631 - DNA, 25 bp, SARS Virus
cacaataaaagacgacacaaaggtg

SEQ ID NO: 56632 - DNA, 25 bp, SARS Virus
acaataaaagatcacacaaaggtgg

SEQ ID NO: 56633 - DNA, 25 bp, SARS Virus
caataaaagatgccacaaaggtgga

SEQ ID NO: 56634 - DNA, 25 bp, SARS Virus
aataaaagatgacacaaaggtggat

SEQ ID NO: 56635 - DNA, 25 bp, SARS Virus
ataaaagatgacccaaaggtggatg

SEQ ID NO: 56636 - DNA, 25 bp, SARS Virus
taaaagatgacacaaaggtggatgt

SEQ ID NO: 56637 - DNA, 25 bp, SARS Virus
aaaagatgacaccaaggtggatgtt

SEQ ID NO: 56638 - DNA, 25 bp, SARS Virus
aaagatgacacacaggtggatgttc

SEQ ID NO: 56639 - DNA, 25 bp, SARS Virus
aagatgacacaacggtggatgttca

SEQ ID NO: 56640 - DNA, 25 bp, SARS Virus
agatgacacaaacgtggatgttcaa

SEQ ID NO: 56641 - DNA, 25 bp, SARS Virus
gatgacacaaagctggatgttcaaa

SEQ ID NO: 56642 - DNA, 25 bp, SARS Virus
atgacacaaaggcggatgttcaaaa

SEQ ID NO: 56643 - DNA, 25 bp, SARS Virus
tgacacaaaggtcgatgttcaaaac

SEQ ID NO: 56644 - DNA, 25 bp, SARS Virus
gacacaaaggtgcatgttcaaaacc

SEQ ID NO: 56645 - DNA, 25 bp, SARS Virus
acacaaaggtggctgttcaaaacct

SEQ ID NO: 56646 - DNA, 25 bp, SARS Virus
cacaaaggtggacgttcaaaacctg

SEQ ID NO: 56647 - DNA, 25 bp, SARS Virus
acaaaggtggatcttcaaaacctgg

SEQ ID NO: 56648 - DNA, 25 bp, SARS Virus
caaaggtggatgctcaaaacctggt

SEQ ID NO: 56649 - DNA, 25 bp, SARS Virus
aaaggtggatgtccaaaacctggtg

SEQ ID NO: 56650 - DNA, 25 bp, SARS Virus
aaggtggatgttcaaaacctggtga

SEQ ID NO: 56651 - DNA, 25 bp, SARS Virus
aggtggatgttccaaacctggtgat

SEQ ID NO: 56652 - DNA, 25 bp, SARS Virus
ggtggatgttcacaacctggtgatc

SEQ ID NO: 56653 - DNA, 25 bp, SARS Virus
gtggatgttcaacacctggtgatca

SEQ ID NO: 56654 - DNA, 25 bp, SARS Virus
tggatgttcaaaccctggtgatcat

SEQ ID NO: 56655 - DNA, 25 bp, SARS Virus
ggatgttcaaaacctggtgatcatt

SEQ ID NO: 56656 - DNA, 25 bp, SARS Virus
gatgttcaaaacctggtgatcattc

SEQ ID NO: 56657 - DNA, 25 bp, SARS Virus
atgttcaaaacccggtgatcattct

SEQ ID NO: 56658 - DNA, 25 bp, SARS Virus
tgttcaaaacctcgtgatcattctt

SEQ ID NO: 56659 - DNA, 25 bp, SARS Virus
gttcaaaacctgctgatcattcttt

SEQ ID NO: 56660 - DNA, 25 bp, SARS Virus
ttcaaaacctggcgatcattctttt

SEQ ID NO: 56661 - DNA, 25 bp, SARS Virus
tcaaaacctggtcatcattcttttt

SEQ ID NO: 56662 - DNA, 25 bp, SARS Virus
caaaacctggtgctcattcttttta

SEQ ID NO: 56663 - DNA, 25 bp, SARS Virus
aaaacctggtgaccattctttttat

SEQ ID NO: 56664 - DNA, 25 bp, SARS Virus
aaacctggtgatcattctttttata

SEQ ID NO: 56665 - DNA, 25 bp, SARS Virus
aacctggtgatccttctttttataa

SEQ ID NO: 56666 - DNA, 25 bp, SARS Virus
acctggtgatcactctttttataaa

SEQ ID NO: 56667 - DNA, 25 bp, SARS Virus
cctggtgatcatcctttttataaac

SEQ ID NO: 56668 - DNA, 25 bp, SARS Virus
ctggtgatcattctttttataaaca

SEQ ID NO: 56669 - DNA, 25 bp, SARS Virus
tggtgatcattccttttataaacat

SEQ ID NO: 56670 - DNA, 25 bp, SARS Virus
ggtgatcattctctttataaacatc

SEQ ID NO: 56671 - DNA, 25 bp, SARS Virus
gtgatcattcttcttataaacatct

SEQ ID NO: 56672 - DNA, 25 bp, SARS Virus
tgatcattctttctataaacatcta

SEQ ID NO: 56673 - DNA, 25 bp, SARS Virus
gatcattcttttcataaacatctac

SEQ ID NO: 56674 - DNA, 25 bp, SARS Virus
atcattctttttctaaacatctacc

SEQ ID NO: 56675 - DNA, 25 bp, SARS Virus
tcattctttttacaaacatctacca

SEQ ID NO: 56676 - DNA, 25 bp, SARS Virus
cattctttttatcaacatctaccac

SEQ ID NO: 56677 - DNA, 25 bp, SARS Virus
attctttttatacacatctaccaca

SEQ ID NO: 56678 - DNA, 25 bp, SARS Virus
ttctttttataaccatctaccacaa

SEQ ID NO: 56679 - DNA, 25 bp, SARS Virus
tctttttataaacatctaccacaag

SEQ ID NO: 56680 - DNA, 25 bp, SARS Virus
ctttttataaacctctaccacaagg

SEQ ID NO: 56681 - DNA, 25 bp, SARS Virus
tttttataaacacctaccacaagga

SEQ ID NO: 56682 - DNA, 25 bp, SARS Virus
ttttataaacatctaccacaaggaa

SEQ ID NO: 56683 - DNA, 25 bp, SARS Virus
tttataaacatccaccacaaggaaa

SEQ ID NO: 56684 - DNA, 25 bp, SARS Virus
ttataaacatctcccacaaggaaaa

SEQ ID NO: 56685 - DNA, 25 bp, SARS Virus
tataaacatctaccacaaggaaaac

SEQ ID NO: 56686 - DNA, 25 bp, SARS Virus
ataaacatctaccacaaggaaaaca

SEQ ID NO: 56687 - DNA, 25 bp, SARS Virus
taaacatctaccccaaggaaaacaa

SEQ ID NO: 56688 - DNA, 25 bp, SARS Virus
aaacatctaccacaaggaaaacaac

SEQ ID NO: 56689 - DNA, 25 bp, SARS Virus
aacatctaccaccaggaaaacaaca

SEQ ID NO: 56690 - DNA, 25 bp, SARS Virus
acatctaccacacggaaaacaacaa

SEQ ID NO: 56691 - DNA, 25 bp, SARS Virus
catctaccacaacgaaaacaacaaa

SEQ ID NO: 56692 - DNA, 25 bp, SARS Virus
atctaccacaagcaaaacaacaaag

SEQ ID NO: 56693 - DNA, 25 bp, SARS Virus
tctaccacaaggcaaacaacaaagt

SEQ ID NO: 56694 - DNA, 25 bp, SARS Virus
ctaccacaaggacaacaacaaagtt

SEQ ID NO: 56695 - DNA, 25 bp, SARS Virus
taccacaaggaacacaacaaagttg

SEQ ID NO: 56696 - DNA, 25 bp, SARS Virus
accacaaggaaaccaacaaagttga

SEQ ID NO: 56697 - DNA, 25 bp, SARS Virus
ccacaaggaaaacaacaaagttgac

SEQ ID NO: 56698 - DNA, 25 bp, SARS Virus
cacaaggaaaaccacaaagttgacc

SEQ ID NO: 56699 - DNA, 25 bp, SARS Virus
acaaggaaaacaccaaagttgacct

SEQ ID NO: 56700 - DNA, 25 bp, SARS Virus
caaggaaaacaacaaagttgaccta

SEQ ID NO: 56701 - DNA, 25 bp, SARS Virus
aaggaaaacaaccaagttgacctat

SEQ ID NO: 56702 - DNA, 25 bp, SARS Virus
aggaaaacaacacagttgacctatg

SEQ ID NO: 56703 - DNA, 25 bp, SARS Virus
ggaaaacaacaacgttgacctatgg

SEQ ID NO: 56704 - DNA, 25 bp, SARS Virus
gaaaacaacaaacttgacctatggt

SEQ ID NO: 56705 - DNA, 25 bp, SARS Virus
aaaacaacaaagctgacctatggta

SEQ ID NO: 56706 - DNA, 25 bp, SARS Virus
aaacaacaaagtcgacctatggtaa

SEQ ID NO: 56707 - DNA, 25 bp, SARS Virus
aacaacaaagttcacctatggtaaa

SEQ ID NO: 56708 - DNA, 25 bp, SARS Virus
acaacaaagttgccctatggtaaaa

SEQ ID NO: 56709 - DNA, 25 bp, SARS Virus
caacaaagttgacctatggtaaaag

SEQ ID NO: 56710 - DNA, 25 bp, SARS Virus
aacaaagttgacctatggtaaaagc

SEQ ID NO: 56711 - DNA, 25 bp, SARS Virus
acaaagttgacccatggtaaaagca

SEQ ID NO: 56712 - DNA, 25 bp, SARS Virus
caaagttgacctctggtaaaagcac

SEQ ID NO: 56713 - DNA, 25 bp, SARS Virus
aaagttgacctacggtaaaagcact

SEQ ID NO: 56714 - DNA, 25 bp, SARS Virus
aagttgacctatcgtaaaagcactc

SEQ ID NO: 56715 - DNA, 25 bp, SARS Virus
agttgacctatgctaaaagcactca

SEQ ID NO: 56716 - DNA, 25 bp, SARS Virus
gttgacctatggcaaaagcactcaa

SEQ ID NO: 56717 - DNA, 25 bp, SARS Virus
ttgacctatggtcaaagcactcaat

SEQ ID NO: 56718 - DNA, 25 bp, SARS Virus
tgacctatggtacaagcactcaatc

SEQ ID NO: 56719 - DNA, 25 bp, SARS Virus
gacctatggtaacagcactcaatcc

SEQ ID NO: 56720 - DNA, 25 bp, SARS Virus
acctatggtaaacgcactcaatcct

SEQ ID NO: 56721 - DNA, 25 bp, SARS Virus
cctatggtaaaaccactcaatcctc

SEQ ID NO: 56722 - DNA, 25 bp, SARS Virus
ctatggtaaaagcactcaatcctca

SEQ ID NO: 56723 - DNA, 25 bp, SARS Virus
tatggtaaaagccctcaatcctcag

SEQ ID NO: 56724 - DNA, 25 bp, SARS Virus
atggtaaaagcactcaatcctcagc

SEQ ID NO: 56725 - DNA, 25 bp, SARS Virus
tggtaaaagcacccaatcctcagca

SEQ ID NO: 56726 - DNA, 25 bp, SARS Virus
ggtaaaagcactcaatcctcagcat

SEQ ID NO: 56727 - DNA, 25 bp, SARS Virus
gtaaaagcactccatcctcagcatg

SEQ ID NO: 56728 - DNA, 25 bp, SARS Virus
taaaagcactcactcctcagcatgt

SEQ ID NO: 56729 - DNA, 25 bp, SARS Virus
aaaagcactcaaccctcagcatgta

SEQ ID NO: 56730 - DNA, 25 bp, SARS Virus
aaagcactcaatcctcagcatgtat

SEQ ID NO: 56731 - DNA, 25 bp, SARS Virus
aagcactcaatcctcagcatgtatt

SEQ ID NO: 56732 - DNA, 25 bp, SARS Virus
agcactcaatccccagcatgtatta

SEQ ID NO: 56733 - DNA, 25 bp, SARS Virus
gcactcaatcctcagcatgtattag

SEQ ID NO: 56734 - DNA, 25 bp, SARS Virus
cactcaatcctccgcatgtattagt

SEQ ID NO: 56735 - DNA, 25 bp, SARS Virus
actcaatcctcaccatgtattagtc

SEQ ID NO: 56736 - DNA, 25 bp, SARS Virus
ctcaatcctcagcatgtattagtcc

SEQ ID NO: 56737 - DNA, 25 bp, SARS Virus
tttctgacatgtgaagacgctacga

SEQ ID NO: 56738 - DNA, 25 bp, SARS Virus
ttctgacatgttgagacgctacgat

SEQ ID NO: 56739 - DNA, 25 bp, SARS Virus
tctgacatgttaggacgctacgata

SEQ ID NO: 56740 - DNA, 25 bp, SARS Virus
ctgacatgttaagacgctacgatac

SEQ ID NO: 56741 - DNA, 25 bp, SARS Virus
tgacatgttaaggcgctacgatacg

SEQ ID NO: 56742 - DNA, 25 bp, SARS Virus
gacatgttaagaggctacgatacgc

SEQ ID NO: 56743 - DNA, 25 bp, SARS Virus
acatgttaagacgctacgatacgca

SEQ ID NO: 56744 - DNA, 25 bp, SARS Virus
catgttaagacggtacgatacgcac

SEQ ID NO: 56745 - DNA, 25 bp, SARS Virus
atgttaagacgcgacgatacgcact

SEQ ID NO: 56746 - DNA, 25 bp, SARS Virus
tgttaagacgctgcgatacgcacta

SEQ ID NO: 56747 - DNA, 25 bp, SARS Virus
gttaagacgctaggatacgcactac

SEQ ID NO: 56748 - DNA, 25 bp, SARS Virus
ttaagacgctacgatacgcactacg

SEQ ID NO: 56749 - DNA, 25 bp, SARS Virus
taagacgctacggtacgcactacgt

SEQ ID NO: 56750 - DNA, 25 bp, SARS Virus
aagacgctacgagacgcactacgtc

SEQ ID NO: 56751 - DNA, 25 bp, SARS Virus
agacgctacgatgcgcactacgtcc

SEQ ID NO: 56752 - DNA, 25 bp, SARS Virus
gacgctacgataggcactacgtccg

SEQ ID NO: 56753 - DNA, 25 bp, SARS Virus
acgctacgatacgcactacgtccgt

SEQ ID NO: 56754 - DNA, 25 bp, SARS Virus
cgctacgatacggactacgtccgta

SEQ ID NO: 56755 - DNA, 25 bp, SARS Virus
gctacgatacgcgctacgtccgtaa

SEQ ID NO: 56756 - DNA, 25 bp, SARS Virus
ctacgatacgcagtacgtccgtaac

SEQ ID NO: 56757 - DNA, 25 bp, SARS Virus
tacgatacgcacgacgtccgtaaca

SEQ ID NO: 56758 - DNA, 25 bp, SARS Virus
acgatacgcactgcgtccgtaacat

SEQ ID NO: 56759 - DNA, 25 bp, SARS Virus
cgatacgcactaggtccgtaacatc

SEQ ID NO: 56760 - DNA, 25 bp, SARS Virus
gatacgcactacgtccgtaacatcc

SEQ ID NO: 56761 - DNA, 25 bp, SARS Virus
atacgcactacggccgtaacatccg

SEQ ID NO: 56762 - DNA, 25 bp, SARS Virus
tacgcactacgtgcgtaacatccgc

SEQ ID NO: 56763 - DNA, 25 bp, SARS Virus
acgcactacgtcggtaacatccgca

SEQ ID NO: 56764 - DNA, 25 bp, SARS Virus
cgcactacgtccgtaacatccgcat

SEQ ID NO: 56765 - DNA, 25 bp, SARS Virus
gcactacgtccggaacatccgcatg

SEQ ID NO: 56766 - DNA, 25 bp, SARS Virus
cactacgtccgtgacatccgcatga

SEQ ID NO: 56767 - DNA, 25 bp, SARS Virus
actacgtccgtagcatccgcatgac

SEQ ID NO: 56768 - DNA, 25 bp, SARS Virus
ctacgtccgtaagatccgcatgact

SEQ ID NO: 56769 - DNA, 25 bp, SARS Virus
tacgtccgtaacgtccgcatgactg

SEQ ID NO: 56770 - DNA, 25 bp, SARS Virus
acgtccgtaacagccgcatgactgt

SEQ ID NO: 56771 - DNA, 25 bp, SARS Virus
cgtccgtaacatgcgcatgactgta

SEQ ID NO: 56772 - DNA, 25 bp, SARS Virus
gtccgtaacatcggcatgactgtaa

SEQ ID NO: 56773 - DNA, 25 bp, SARS Virus
tccgtaacatccgcatgactgtaat

SEQ ID NO: 56774 - DNA, 25 bp, SARS Virus
ccgtaacatccggatgactgtaatc

SEQ ID NO: 56775 - DNA, 25 bp, SARS Virus
cgtaacatccgcgtgactgtaatct

SEQ ID NO: 56776 - DNA, 25 bp, SARS Virus
gtaacatccgcaggactgtaatcta

SEQ ID NO: 56777 - DNA, 25 bp, SARS Virus
taacatccgcatgactgtaatctat

SEQ ID NO: 56778 - DNA, 25 bp, SARS Virus
aacatccgcatggctgtaatctatt

SEQ ID NO: 56779 - DNA, 25 bp, SARS Virus
acatccgcatgagtgtaatctatta

SEQ ID NO: 56780 - DNA, 25 bp, SARS Virus
catccgcatgacggtaatctattag

SEQ ID NO: 56781 - DNA, 25 bp, SARS Virus
atccgcatgactgtaatctattagt

SEQ ID NO: 56782 - DNA, 25 bp, SARS Virus
tccgcatgactggaatctattagtc

SEQ ID NO: 56783 - DNA, 25 bp, SARS Virus
ccgcatgactgtgatctattagtcc

SEQ ID NO: 56784 - DNA, 25 bp, SARS Virus
cgcatgactgtagtctattagtcct

SEQ ID NO: 56785 - DNA, 25 bp, SARS Virus
gcatgactgtaagctattagtccta

SEQ ID NO: 56786 - DNA, 25 bp, SARS Virus
catgactgtaatgtattagtcctag

SEQ ID NO: 56787 - DNA, 25 bp, SARS Virus
atgactgtaatcgattagtcctaga

SEQ ID NO: 56788 - DNA, 25 bp, SARS Virus
tgactgtaatctgttagtcctagaa

SEQ ID NO: 56789 - DNA, 25 bp, SARS Virus
gactgtaatctagtagtcctagaat

SEQ ID NO: 56790 - DNA, 25 bp, SARS Virus
actgtaatctatgagtcctagaatt

SEQ ID NO: 56791 - DNA, 25 bp, SARS Virus
ctgtaatctattggtcctagaatta

SEQ ID NO: 56792 - DNA, 25 bp, SARS Virus
tgtaatctattagtcctagaattac

SEQ ID NO: 56793 - DNA, 25 bp, SARS Virus
gtaatctattaggcctagaattacc

SEQ ID NO: 56794 - DNA, 25 bp, SARS Virus
taatctattagtgctagaattaccc

SEQ ID NO: 56795 - DNA, 25 bp, SARS Virus
aatctattagtcgtagaattaccct

SEQ ID NO: 56796 - DNA, 25 bp, SARS Virus
atctattagtccgagaattaccctt

SEQ ID NO: 56797 - DNA, 25 bp, SARS Virus
tctattagtcctggaattacccttg

SEQ ID NO: 56798 - DNA, 25 bp, SARS Virus
ctattagtcctagaattacccttga

SEQ ID NO: 56799 - DNA, 25 bp, SARS Virus
tattagtcctaggattacccttgac

SEQ ID NO: 56800 - DNA, 25 bp, SARS Virus
attagtcctagagttacccttgacc

SEQ ID NO: 56801 - DNA, 25 bp, SARS Virus
ttagtcctagaagtacccttgacca

SEQ ID NO: 56802 - DNA, 25 bp, SARS Virus
tagtcctagaatgacccttgaccat

SEQ ID NO: 56803 - DNA, 25 bp, SARS Virus
agtcctagaattgcccttgaccatg

SEQ ID NO: 56804 - DNA, 25 bp, SARS Virus
gtcctagaattagccttgaccatgc

SEQ ID NO: 56805 - DNA, 25 bp, SARS Virus
tcctagaattacgcttgaccatgct

SEQ ID NO: 56806 - DNA, 25 bp, SARS Virus
cctagaattaccgttgaccatgcta

SEQ ID NO: 56807 - DNA, 25 bp, SARS Virus
ctagaattacccgtgaccatgctaa

SEQ ID NO: 56808 - DNA, 25 bp, SARS Virus
tagaattaccctggaccatgctaaa

SEQ ID NO: 56809 - DNA, 25 bp, SARS Virus
agaattacccttgaccatgctaaag

SEQ ID NO: 56810 - DNA, 25 bp, SARS Virus
gaattacccttggccatgctaaagc

SEQ ID NO: 56811 - DNA, 25 bp, SARS Virus
aattacccttgagcatgctaaagcc

SEQ ID NO: 56812 - DNA, 25 bp, SARS Virus
attacccttgacgatgctaaagcca

SEQ ID NO: 56813 - DNA, 25 bp, SARS Virus
ttacccttgaccgtgctaaagccac

SEQ ID NO: 56814 - DNA, 25 bp, SARS Virus
tacccttgaccaggctaaagccact

SEQ ID NO: 56815 - DNA, 25 bp, SARS Virus
acccttgaccatgctaaagccacta

SEQ ID NO: 56816 - DNA, 25 bp, SARS Virus
cccttgaccatggtaaagccactaa

SEQ ID NO: 56817 - DNA, 25 bp, SARS Virus
ccttgaccatgcgaaagccactaaa

SEQ ID NO: 56818 - DNA, 25 bp, SARS Virus
cttgaccatgctgaagccactaaag

SEQ ID NO: 56819 - DNA, 25 bp, SARS Virus
ttgaccatgctagagccactaaagc

SEQ ID NO: 56820 - DNA, 25 bp, SARS Virus
tgaccatgctaaggccactaaagca

SEQ ID NO: 56821 - DNA, 25 bp, SARS Virus
gaccatgctaaagccactaaagcat

SEQ ID NO: 56822 - DNA, 25 bp, SARS Virus
accatgctaaaggcactaaagcatg

SEQ ID NO: 56823 - DNA, 25 bp, SARS Virus
ccatgctaaagcgactaaagcatgt

SEQ ID NO: 56824 - DNA, 25 bp, SARS Virus
catgctaaagccgctaaagcatgtt

SEQ ID NO: 56825 - DNA, 25 bp, SARS Virus
atgctaaagccagtaaagcatgttc

SEQ ID NO: 56826 - DNA, 25 bp, SARS Virus
tgctaaagccacgaaagcatgttca

SEQ ID NO: 56827 - DNA, 25 bp, SARS Virus
gctaaagccactgaagcatgttcat

SEQ ID NO: 56828 - DNA, 25 bp, SARS Virus
ctaaagccactagagcatgttcatc

SEQ ID NO: 56829 - DNA, 25 bp, SARS Virus
taaagccactaaggcatgttcatcg

SEQ ID NO: 56830 - DNA, 25 bp, SARS Virus
aaagccactaaagcatgttcatcgt

SEQ ID NO: 56831 - DNA, 25 bp, SARS Virus
aagccactaaaggatgttcatcgtg

SEQ ID NO: 56832 - DNA, 25 bp, SARS Virus
agccactaaagcgtgttcatcgtgg

SEQ ID NO: 56833 - DNA, 25 bp, SARS Virus
gccactaaagcaggttcatcgtggt

SEQ ID NO: 56834 - DNA, 25 bp, SARS Virus
ccactaaagcatgttcatcgtggtc

SEQ ID NO: 56835 - DNA, 25 bp, SARS Virus
cactaaagcatggtcatcgtggtcc

SEQ ID NO: 56836 - DNA, 25 bp, SARS Virus
actaaagcatgtgcatcgtggtccg

SEQ ID NO: 56837 - DNA, 25 bp, SARS Virus
ctaaagcatgttgatcgtggtccga

SEQ ID NO: 56838 - DNA, 25 bp, SARS Virus
taaagcatgttcgtcgtggtccgac

SEQ ID NO: 56839 - DNA, 25 bp, SARS Virus
aaagcatgttcagcgtggtccgacg

SEQ ID NO: 56840 - DNA, 25 bp, SARS Virus
aagcatgttcatggtggtccgacgc

SEQ ID NO: 56841 - DNA, 25 bp, SARS Virus
agcatgttcatcgtggtccgacgcc

SEQ ID NO: 56842 - DNA, 25 bp, SARS Virus
gcatgttcatcggggtccgacgcct

SEQ ID NO: 56843 - DNA, 25 bp, SARS Virus
catgttcatcgtggtccgacgcctc

SEQ ID NO: 56844 - DNA, 25 bp, SARS Virus
atgttcatcgtggtccgacgcctca

SEQ ID NO: 56845 - DNA, 25 bp, SARS Virus
tgttcatcgtgggccgacgcctcaa

SEQ ID NO: 56846 - DNA, 25 bp, SARS Virus
gttcatcgtggtgcgacgcctcaag

SEQ ID NO: 56847 - DNA, 25 bp, SARS Virus
ttcatcgtggtcggacgcctcaagg

SEQ ID NO: 56848 - DNA, 25 bp, SARS Virus
tcatcgtggtccgacgcctcaagga

SEQ ID NO: 56849 - DNA, 25 bp, SARS Virus
catcgtggtccggcgcctcaaggat

SEQ ID NO: 56850 - DNA, 25 bp, SARS Virus
atcgtggtccgaggcctcaaggata

SEQ ID NO: 56851 - DNA, 25 bp, SARS Virus
tcgtggtccgacgcctcaaggataa

SEQ ID NO: 56852 - DNA, 25 bp, SARS Virus
cgtggtccgacggctcaaggataac

SEQ ID NO: 56853 - DNA, 25 bp, SARS Virus
gtggtccgacgcgtcaaggataaca

SEQ ID NO: 56854 - DNA, 25 bp, SARS Virus
tggtccgacgccgcaaggataacac

SEQ ID NO: 56855 - DNA, 25 bp, SARS Virus
ggtccgacgcctgaaggataacacc

SEQ ID NO: 56856 - DNA, 25 bp, SARS Virus
gtccgacgcctcgaggataacacct

SEQ ID NO: 56857 - DNA, 25 bp, SARS Virus
tccgacgcctcagggataacaccta

SEQ ID NO: 56858 - DNA, 25 bp, SARS Virus
ccgacgcctcaaggataacacctaa

SEQ ID NO: 56859 - DNA, 25 bp, SARS Virus
cgacgcctcaaggataacacctaag

SEQ ID NO: 56860 - DNA, 25 bp, SARS Virus
gacgcctcaagggtaacacctaagt

SEQ ID NO: 56861 - DNA, 25 bp, SARS Virus
acgcctcaaggagaacacctaagta

SEQ ID NO: 56862 - DNA, 25 bp, SARS Virus
cgcctcaaggatgacacctaagtat

SEQ ID NO: 56863 - DNA, 25 bp, SARS Virus
gcctcaaggatagcacctaagtata

SEQ ID NO: 56864 - DNA, 25 bp, SARS Virus
cctcaaggataagacctaagtataa

SEQ ID NO: 56865 - DNA, 25 bp, SARS Virus
ctcaaggataacgcctaagtataat

SEQ ID NO: 56866 - DNA, 25 bp, SARS Virus
tcaaggataacagctaagtataatg

SEQ ID NO: 56867 - DNA, 25 bp, SARS Virus
caaggataacacgtaagtataatga

SEQ ID NO: 56868 - DNA, 25 bp, SARS Virus
aaggataacaccgaagtataatgag

SEQ ID NO: 56869 - DNA, 25 bp, SARS Virus
aggataacacctgagtataatgagt

SEQ ID NO: 56870 - DNA, 25 bp, SARS Virus
ggataacacctaggtataatgagta

SEQ ID NO: 56871 - DNA, 25 bp, SARS Virus
gataacacctaagtataatgagtaa

SEQ ID NO: 56872 - DNA, 25 bp, SARS Virus
ataacacctaaggataatgagtaac

SEQ ID NO: 56873 - DNA, 25 bp, SARS Virus
taacacctaagtgtaatgagtaacg

SEQ ID NO: 56874 - DNA, 25 bp, SARS Virus
aacacctaagtagaatgagtaacga

SEQ ID NO: 56875 - DNA, 25 bp, SARS Virus
acacctaagtatgatgagtaacgac

SEQ ID NO: 56876 - DNA, 25 bp, SARS Virus
cacctaagtatagtgagtaacgact

SEQ ID NO: 56877 - DNA, 25 bp, SARS Virus
acctaagtataaggagtaacgacta

SEQ ID NO: 56878 - DNA, 25 bp, SARS Virus
cctaagtataatgagtaacgactac

SEQ ID NO: 56879 - DNA, 25 bp, SARS Virus
ctaagtataatgggtaacgactacg

SEQ ID NO: 56880 - DNA, 25 bp, SARS Virus
taagtataatgagtaacgactacgg

SEQ ID NO: 56881 - DNA, 25 bp, SARS Virus
aagtataatgaggaacgactacggg

SEQ ID NO: 56882 - DNA, 25 bp, SARS Virus
agtataatgagtgacgactacgggt

SEQ ID NO: 56883 - DNA, 25 bp, SARS Virus
gtataatgagtagcgactacgggta

SEQ ID NO: 56884 - DNA, 25 bp, SARS Virus
tataatgagtaaggactacgggtag

SEQ ID NO: 56885 - DNA, 25 bp, SARS Virus
ataatgagtaacgactacgggtagg

SEQ ID NO: 56886 - DNA, 25 bp, SARS Virus
taatgagtaacggctacgggtagga

SEQ ID NO: 56887 - DNA, 25 bp, SARS Virus
aatgagtaacgagtacgggtaggag

SEQ ID NO: 56888 - DNA, 25 bp, SARS Virus
atgagtaacgacgacgggtaggagt

SEQ ID NO: 56889 - DNA, 25 bp, SARS Virus
tgagtaacgactgcgggtaggagtg

SEQ ID NO: 56890 - DNA, 25 bp, SARS Virus
gagtaacgactaggggtaggagtga

SEQ ID NO: 56891 - DNA, 25 bp, SARS Virus
agtaacgactacgggtaggagtgaa

SEQ ID NO: 56892 - DNA, 25 bp, SARS Virus
gtaacgactacgggtaggagtgaaa

SEQ ID NO: 56893 - DNA, 25 bp, SARS Virus
taacgactacgggtaggagtgaaac

SEQ ID NO: 56894 - DNA, 25 bp, SARS Virus
aacgactacggggaggagtgaaact

SEQ ID NO: 56895 - DNA, 25 bp, SARS Virus
acgactacgggtgggagtgaaactg

SEQ ID NO: 56896 - DNA, 25 bp, SARS Virus
cgactacgggtaggagtgaaactga

SEQ ID NO: 56897 - DNA, 25 bp, SARS Virus
gactacgggtaggagtgaaactgat

SEQ ID NO: 56898 - DNA, 25 bp, SARS Virus
actacgggtaggggtgaaactgatc

SEQ ID NO: 56899 - DNA, 25 bp, SARS Virus
ctacgggtaggagtgaaactgatcc

SEQ ID NO: 56900 - DNA, 25 bp, SARS Virus
tacgggtaggagggaaactgatccc

SEQ ID NO: 56901 - DNA, 25 bp, SARS Virus
acgggtaggagtgaaactgatcccg

SEQ ID NO: 56902 - DNA, 25 bp, SARS Virus
cgggtaggagtggaactgatcccgt

SEQ ID NO: 56903 - DNA, 25 bp, SARS Virus
gggtaggagtgagactgatcccgta

SEQ ID NO: 56904 - DNA, 25 bp, SARS Virus
ggtaggagtgaagctgatcccgtaa

SEQ ID NO: 56905 - DNA, 25 bp, SARS Virus
gtaggagtgaaagtgatcccgtaac

SEQ ID NO: 56906 - DNA, 25 bp, SARS Virus
taggagtgaaacggatcccgtaacc

SEQ ID NO: 56907 - DNA, 25 bp, SARS Virus
aggagtgaaactgatcccgtaaccg

SEQ ID NO: 56908 - DNA, 25 bp, SARS Virus
ggagtgaaactggtcccgtaaccga

SEQ ID NO: 56909 - DNA, 25 bp, SARS Virus
gagtgaaactgagcccgtaaccgac

SEQ ID NO: 56910 - DNA, 25 bp, SARS Virus
agtgaaactgatgccgtaaccgacg

SEQ ID NO: 56911 - DNA, 25 bp, SARS Virus
gtgaaactgatcgcgtaaccgacga

SEQ ID NO: 56912 - DNA, 25 bp, SARS Virus
tgaaactgatccggtaaccgacgac

SEQ ID NO: 56913 - DNA, 25 bp, SARS Virus
gaaactgatcccgtaaccgacgact

SEQ ID NO: 56914 - DNA, 25 bp, SARS Virus
aaactgatcccggaaccgacgactc

SEQ ID NO: 56915 - DNA, 25 bp, SARS Virus
aactgatcccgtgaccgacgactca

SEQ ID NO: 56916 - DNA, 25 bp, SARS Virus
actgatcccgtagccgacgactcag

SEQ ID NO: 56917 - DNA, 25 bp, SARS Virus
ctgatcccgtaagcgacgactcagg

SEQ ID NO: 56918 - DNA, 25 bp, SARS Virus
tgatcccgtaacggacgactcaggg

SEQ ID NO: 56919 - DNA, 25 bp, SARS Virus
gatcccgtaaccgacgactcagggt

SEQ ID NO: 56920 - DNA, 25 bp, SARS Virus
atcccgtaaccggcgactcagggta

SEQ ID NO: 56921 - DNA, 25 bp, SARS Virus
tcccgtaaccgaggactcagggtat

SEQ ID NO: 56922 - DNA, 25 bp, SARS Virus
cccgtaaccgacgactcagggtata

SEQ ID NO: 56923 - DNA, 25 bp, SARS Virus
ccgtaaccgacggctcagggtatac

SEQ ID NO: 56924 - DNA, 25 bp, SARS Virus
cgtaaccgacgagtcagggtatacc

SEQ ID NO: 56925 - DNA, 25 bp, SARS Virus
gtaaccgacgacgcagggtatacct

SEQ ID NO: 56926 - DNA, 25 bp, SARS Virus
taaccgacgactgagggtataccta

SEQ ID NO: 56927 - DNA, 25 bp, SARS Virus
aaccgacgactcggggtatacctac

SEQ ID NO: 56928 - DNA, 25 bp, SARS Virus
accgacgactcagggtatacctacg

SEQ ID NO: 56929 - DNA, 25 bp, SARS Virus
ccgacgactcagggtatacctacga

SEQ ID NO: 56930 - DNA, 25 bp, SARS Virus
cgacgactcagggtatacctacgac

SEQ ID NO: 56931 - DNA, 25 bp, SARS Virus
gacgactcaggggatacctacgact

SEQ ID NO: 56932 - DNA, 25 bp, SARS Virus
acgactcagggtgtacctacgacta

SEQ ID NO: 56933 - DNA, 25 bp, SARS Virus
cgactcagggtagacctacgactag

SEQ ID NO: 56934 - DNA, 25 bp, SARS Virus
gactcagggtatgcctacgactaga

SEQ ID NO: 56935 - DNA, 25 bp, SARS Virus
actcagggtatagctacgactagag

SEQ ID NO: 56936 - DNA, 25 bp, SARS Virus
ctcagggtatacgtacgactagagc

SEQ ID NO: 56937 - DNA, 25 bp, SARS Virus
tcagggtataccgacgactagagcg

SEQ ID NO: 56938 - DNA, 25 bp, SARS Virus
cagggtatacctgcgactagagcgt

SEQ ID NO: 56939 - DNA, 25 bp, SARS Virus
agggtatacctaggactagagcgtt

SEQ ID NO: 56940 - DNA, 25 bp, SARS Virus
gggtatacctacgactagagcgttt

SEQ ID NO: 56941 - DNA, 25 bp, SARS Virus
ggtatacctacggctagagcgtttt

SEQ ID NO: 56942 - DNA, 25 bp, SARS Virus
gtatacctacgagtagagcgttttg

SEQ ID NO: 56943 - DNA, 25 bp, SARS Virus
tatacctacgacgagagcgttttgg

SEQ ID NO: 56944 - DNA, 25 bp, SARS Virus
atacctacgactggagcgttttggt

SEQ ID NO: 56945 - DNA, 25 bp, SARS Virus
tacctacgactagagcgttttggtg

SEQ ID NO: 56946 - DNA, 25 bp, SARS Virus
acctacgactagggcgttttggtga

SEQ ID NO: 56947 - DNA, 25 bp, SARS Virus
cctacgactagagcgttttggtgaa

SEQ ID NO: 56948 - DNA, 25 bp, SARS Virus
ctacgactagagggttttggtgaat

SEQ ID NO: 56949 - DNA, 25 bp, SARS Virus
tacgactagagcgttttggtgaata

SEQ ID NO: 56950 - DNA, 25 bp, SARS Virus
acgactagagcggtttggtgaataa

SEQ ID NO: 56951 - DNA, 25 bp, SARS Virus
cgactagagcgtgttggtgaataat

SEQ ID NO: 56952 - DNA, 25 bp, SARS Virus
gactagagcgttgtggtgaataatt

SEQ ID NO: 56953 - DNA, 25 bp, SARS Virus
actagagcgtttgggtgaataattc

SEQ ID NO: 56954 - DNA, 25 bp, SARS Virus
ctagagcgttttggtgaataattca

SEQ ID NO: 56955 - DNA, 25 bp, SARS Virus
tagagcgttttggtgaataattcac

SEQ ID NO: 56956 - DNA, 25 bp, SARS Virus
agagcgttttggggaataattcacc

SEQ ID NO: 56957 - DNA, 25 bp, SARS Virus
gagcgttttggtgaataattcaccc

SEQ ID NO: 56958 - DNA, 25 bp, SARS Virus
agcgttttggtggataattcaccct

SEQ ID NO: 56959 - DNA, 25 bp, SARS Virus
gcgttttggtgagtaattcacccta

SEQ ID NO: 56960 - DNA, 25 bp, SARS Virus
cgttttggtgaagaattcaccctaa

SEQ ID NO: 56961 - DNA, 25 bp, SARS Virus
gttttggtgaatgattcaccctaaa

SEQ ID NO: 56962 - DNA, 25 bp, SARS Virus
ttttggtgaatagttcaccctaaac

SEQ ID NO: 56963 - DNA, 25 bp, SARS Virus
tttggtgaataagtcaccctaaacg

SEQ ID NO: 56964 - DNA, 25 bp, SARS Virus
ttggtgaataatgcaccctaaacga

SEQ ID NO: 56965 - DNA, 25 bp, SARS Virus
tggtgaataattgaccctaaacgac

SEQ ID NO: 56966 - DNA, 25 bp, SARS Virus
ggtgaataattcgccctaaacgact

SEQ ID NO: 56967 - DNA, 25 bp, SARS Virus
gtgaataattcagcctaaacgactt

SEQ ID NO: 56968 - DNA, 25 bp, SARS Virus
tgaataattcacgctaaacgacttt

SEQ ID NO: 56969 - DNA, 25 bp, SARS Virus
gaataattcaccgtaaacgacttta

SEQ ID NO: 56970 - DNA, 25 bp, SARS Virus
aataattcacccgaaacgactttat

SEQ ID NO: 56971 - DNA, 25 bp, SARS Virus
ataattcaccctgaacgactttata

SEQ ID NO: 56972 - DNA, 25 bp, SARS Virus
taattcaccctagacgactttatac

SEQ ID NO: 56973 - DNA, 25 bp, SARS Virus
aattcaccctaagcgactttatact

SEQ ID NO: 56974 - DNA, 25 bp, SARS Virus
attcaccctaaaggactttatacta

SEQ ID NO: 56975 - DNA, 25 bp, SARS Virus
ttcaccctaaacgactttatactaa

SEQ ID NO: 56976 - DNA, 25 bp, SARS Virus
tcaccctaaacggctttatactaaa

SEQ ID NO: 56977 - DNA, 25 bp, SARS Virus
caccctaaacgagtttatactaaaa

SEQ ID NO: 56978 - DNA, 25 bp, SARS Virus
accctaaacgacgttatactaaaat

SEQ ID NO: 56979 - DNA, 25 bp, SARS Virus
ccctaaacgactgtatactaaaatg

SEQ ID NO: 56980 - DNA, 25 bp, SARS Virus
cctaaacgacttgatactaaaatgc

SEQ ID NO: 56981 - DNA, 25 bp, SARS Virus
ctaaacgactttgtactaaaatgcc

SEQ ID NO: 56982 - DNA, 25 bp, SARS Virus
taaacgactttagactaaaatgcct

SEQ ID NO: 56983 - DNA, 25 bp, SARS Virus
aaacgactttatgctaaaatgcctt

SEQ ID NO: 56984 - DNA, 25 bp, SARS Virus
aacgactttatagtaaaatgccttc

SEQ ID NO: 56985 - DNA, 25 bp, SARS Virus
acgactttatacgaaaatgccttct

SEQ ID NO: 56986 - DNA, 25 bp, SARS Virus
cgactttatactgaaatgccttctc

SEQ ID NO: 56987 - DNA, 25 bp, SARS Virus
gactttatactagaatgccttctct

SEQ ID NO: 56988 - DNA, 25 bp, SARS Virus
actttatactaagatgccttctctc

SEQ ID NO: 56989 - DNA, 25 bp, SARS Virus
ctttatactaaagtgccttctctct

SEQ ID NO: 56990 - DNA, 25 bp, SARS Virus
tttatactaaaaggccttctctctg

SEQ ID NO: 56991 - DNA, 25 bp, SARS Virus
ttatactaaaatgccttctctctga

SEQ ID NO: 56992 - DNA, 25 bp, SARS Virus
tatactaaaatggcttctctctgaa

SEQ ID NO: 56993 - DNA, 25 bp, SARS Virus
atactaaaatgcgttctctctgaaa

SEQ ID NO: 56994 - DNA, 25 bp, SARS Virus
tactaaaatgccgtctctctgaaac

SEQ ID NO: 56995 - DNA, 25 bp, SARS Virus
actaaaatgcctgctctctgaaaca

SEQ ID NO: 56996 - DNA, 25 bp, SARS Virus
ctaaaatgccttgtctctgaaacag

SEQ ID NO: 56997 - DNA, 25 bp, SARS Virus
taaaatgccttcgctctgaaacaga

SEQ ID NO: 56998 - DNA, 25 bp, SARS Virus
aaaatgccttctgtctgaaacagag

SEQ ID NO: 56999 - DNA, 25 bp, SARS Virus
aaatgccttctcgctgaaacagaga

SEQ ID NO: 57000 - DNA, 25 bp, SARS Virus
aatgccttctctgtgaaacagagaa

SEQ ID NO: 57001 - DNA, 25 bp, SARS Virus
atgccttctctcggaaacagagaag

SEQ ID NO: 57002 - DNA, 25 bp, SARS Virus
tgccttctctctgaaacagagaagc

SEQ ID NO: 57003 - DNA, 25 bp, SARS Virus
gccttctctctggaacagagaagct

SEQ ID NO: 57004 - DNA, 25 bp, SARS Virus
ccttctctctgagacagagaagctg

SEQ ID NO: 57005 - DNA, 25 bp, SARS Virus
cttctctctgaagcagagaagctgg

SEQ ID NO: 57006 - DNA, 25 bp, SARS Virus
ttctctctgaaagagagaagctggc

SEQ ID NO: 57007 - DNA, 25 bp, SARS Virus
tctctctgaaacggagaagctggca

SEQ ID NO: 57008 - DNA, 25 bp, SARS Virus
ctctctgaaacagagaagctggcaa

SEQ ID NO: 57009 - DNA, 25 bp, SARS Virus
tctctgaaacagggaagctggcaat

SEQ ID NO: 57010 - DNA, 25 bp, SARS Virus
ctctgaaacagagaagctggcaata

SEQ ID NO: 57011 - DNA, 25 bp, SARS Virus
tctgaaacagaggagctggcaataa

SEQ ID NO: 57012 - DNA, 25 bp, SARS Virus
ctgaaacagagaggctggcaataaa

SEQ ID NO: 57013 - DNA, 25 bp, SARS Virus
tgaaacagagaagctggcaataaaa

SEQ ID NO: 57014 - DNA, 25 bp, SARS Virus
gaaacagagaaggtggcaataaaat

SEQ ID NO: 57015 - DNA, 25 bp, SARS Virus
aaacagagaagcgggcaataaaatt

SEQ ID NO: 57016 - DNA, 25 bp, SARS Virus
aacagagaagctggcaataaaattt

SEQ ID NO: 57017 - DNA, 25 bp, SARS Virus
acagagaagctggcaataaaattta

SEQ ID NO: 57018 - DNA, 25 bp, SARS Virus
cagagaagctgggaataaaatttat

SEQ ID NO: 57019 - DNA, 25 bp, SARS Virus
agagaagctggcgataaaatttata

SEQ ID NO: 57020 - DNA, 25 bp, SARS Virus
gagaagctggcagtaaaatttataa

SEQ ID NO: 57021 - DNA, 25 bp, SARS Virus
agaagctggcaagaaaatttataac

SEQ ID NO: 57022 - DNA, 25 bp, SARS Virus
gaagctggcaatgaaatttataacc

SEQ ID NO: 57023 - DNA, 25 bp, SARS Virus
aagctggcaatagaatttataaccc

SEQ ID NO: 57024 - DNA, 25 bp, SARS Virus
agctggcaataagatttataaccct

SEQ ID NO: 57025 - DNA, 25 bp, SARS Virus
gctggcaataaagtttataaccctg

SEQ ID NO: 57026 - DNA, 25 bp, SARS Virus
ctggcaataaaagttataaccctgg

SEQ ID NO: 57027 - DNA, 25 bp, SARS Virus
tggcaataaaatgtataaccctggt

SEQ ID NO: 57028 - DNA, 25 bp, SARS Virus
ggcaataaaattgataaccctggtc

SEQ ID NO: 57029 - DNA, 25 bp, SARS Virus
gcaataaaatttgtaaccctggtct

SEQ ID NO: 57030 - DNA, 25 bp, SARS Virus
caataaaatttagaaccctggtctg

SEQ ID NO: 57031 - DNA, 25 bp, SARS Virus
aataaaatttatgaccctggtctgt

SEQ ID NO: 57032 - DNA, 25 bp, SARS Virus
ataaaatttatagccctggtctgta

SEQ ID NO: 57033 - DNA, 25 bp, SARS Virus
taaaatttataagcctggtctgtat

SEQ ID NO: 57034 - DNA, 25 bp, SARS Virus
aaaatttataacgctggtctgtatg

SEQ ID NO: 57035 - DNA, 25 bp, SARS Virus
aaatttataaccgtggtctgtatgg

SEQ ID NO: 57036 - DNA, 25 bp, SARS Virus
aatttataacccgggtctgtatggt

SEQ ID NO: 57037 - DNA, 25 bp, SARS Virus
atttataaccctggtctgtatggta

SEQ ID NO: 57038 - DNA, 25 bp, SARS Virus
tttataaccctggtctgtatggtag

SEQ ID NO: 57039 - DNA, 25 bp, SARS Virus
ttataaccctgggctgtatggtagg

SEQ ID NO: 57040 - DNA, 25 bp, SARS Virus
tataaccctggtgtgtatggtaggg

SEQ ID NO: 57041 - DNA, 25 bp, SARS Virus
ataaccctggtcggtatggtagggt

SEQ ID NO: 57042 - DNA, 25 bp, SARS Virus
taaccctggtctgtatggtagggtt

SEQ ID NO: 57043 - DNA, 25 bp, SARS Virus
aaccctggtctggatggtagggtta

SEQ ID NO: 57044 - DNA, 25 bp, SARS Virus
accctggtctgtgtggtagggttaa

SEQ ID NO: 57045 - DNA, 25 bp, SARS Virus
ccctggtctgtagggtagggttaac

SEQ ID NO: 57046 - DNA, 25 bp, SARS Virus
cctggtctgtatggtagggttaaca

SEQ ID NO: 57047 - DNA, 25 bp, SARS Virus
ctggtctgtatggtagggttaacat

SEQ ID NO: 57048 - DNA, 25 bp, SARS Virus
tggtctgtatgggagggttaacata

SEQ ID NO: 57049 - DNA, 25 bp, SARS Virus
ggtctgtatggtggggttaacataa

SEQ ID NO: 57050 - DNA, 25 bp, SARS Virus
gtctgtatggtagggttaacataat

SEQ ID NO: 57051 - DNA, 25 bp, SARS Virus
tctgtatggtagggttaacataatt

SEQ ID NO: 57052 - DNA, 25 bp, SARS Virus
ctgtatggtagggttaacataattg

SEQ ID NO: 57053 - DNA, 25 bp, SARS Virus
tgtatggtaggggtaacataattga

SEQ ID NO: 57054 - DNA, 25 bp, SARS Virus
gtatggtagggtgaacataattgac

SEQ ID NO: 57055 - DNA, 25 bp, SARS Virus
tatggtagggttgacataattgaca

SEQ ID NO: 57056 - DNA, 25 bp, SARS Virus
atggtagggttagcataattgacaa

SEQ ID NO: 57057 - DNA, 25 bp, SARS Virus
tggtagggttaagataattgacaaa

SEQ ID NO: 57058 - DNA, 25 bp, SARS Virus
ggtagggttaacgtaattgacaaac

SEQ ID NO: 57059 - DNA, 25 bp, SARS Virus
gtagggttaacagaattgacaaacc

SEQ ID NO: 57060 - DNA, 25 bp, SARS Virus
tagggttaacatgattgacaaacct

SEQ ID NO: 57061 - DNA, 25 bp, SARS Virus
agggttaacatagttgacaaaccta

SEQ ID NO: 57062 - DNA, 25 bp, SARS Virus
gggttaacataagtgacaaacctac

SEQ ID NO: 57063 - DNA, 25 bp, SARS Virus
ggttaacataatggacaaacctact

SEQ ID NO: 57064 - DNA, 25 bp, SARS Virus
gttaacataattgacaaacctacta

SEQ ID NO: 57065 - DNA, 25 bp, SARS Virus
ttaacataattggcaaacctactat

SEQ ID NO: 57066 - DNA, 25 bp, SARS Virus
taacataattgagaaacctactatc

SEQ ID NO: 57067 - DNA, 25 bp, SARS Virus
aacataattgacgaacctactatcc

SEQ ID NO: 57068 - DNA, 25 bp, SARS Virus
acataattgacagacctactatcca

SEQ ID NO: 57069 - DNA, 25 bp, SARS Virus
cataattgacaagcctactatccac

SEQ ID NO: 57070 - DNA, 25 bp, SARS Virus
ataattgacaaagctactatccaca

SEQ ID NO: 57071 - DNA, 25 bp, SARS Virus
taattgacaaacgtactatccacat

SEQ ID NO: 57072 - DNA, 25 bp, SARS Virus
aattgacaaaccgactatccacata

SEQ ID NO: 57073 - DNA, 25 bp, SARS Virus
attgacaaacctgctatccacatag

SEQ ID NO: 57074 - DNA, 25 bp, SARS Virus
ttgacaaacctagtatccacatagg

SEQ ID NO: 57075 - DNA, 25 bp, SARS Virus
tgacaaacctacgatccacatagga

SEQ ID NO: 57076 - DNA, 25 bp, SARS Virus
gacaaacctactgtccacataggaa

SEQ ID NO: 57077 - DNA, 25 bp, SARS Virus
acaaacctactagccacataggaag

SEQ ID NO: 57078 - DNA, 25 bp, SARS Virus
caaacctactatgcacataggaagt

SEQ ID NO: 57079 - DNA, 25 bp, SARS Virus
aaacctactatcgacataggaagta

SEQ ID NO: 57080 - DNA, 25 bp, SARS Virus
aacctactatccgcataggaagtaa

SEQ ID NO: 57081 - DNA, 25 bp, SARS Virus
acctactatccagataggaagtaac

SEQ ID NO: 57082 - DNA, 25 bp, SARS Virus
cctactatccacgtaggaagtaaca

SEQ ID NO: 57083 - DNA, 25 bp, SARS Virus
ctactatccacagaggaagtaacac

SEQ ID NO: 57084 - DNA, 25 bp, SARS Virus
tactatccacatgggaagtaacacg

SEQ ID NO: 57085 - DNA, 25 bp, SARS Virus
actatccacataggaagtaacacgt

SEQ ID NO: 57086 - DNA, 25 bp, SARS Virus
ctatccacataggaagtaacacgtt

SEQ ID NO: 57087 - DNA, 25 bp, SARS Virus
tatccacatagggagtaacacgttt

SEQ ID NO: 57088 - DNA, 25 bp, SARS Virus
atccacataggaggtaacacgtttg

SEQ ID NO: 57089 - DNA, 25 bp, SARS Virus
tccacataggaagtaacacgtttga

SEQ ID NO: 57090 - DNA, 25 bp, SARS Virus
ccacataggaaggaacacgtttgaa

SEQ ID NO: 57091 - DNA, 25 bp, SARS Virus
cacataggaagtgacacgtttgaaa

SEQ ID NO: 57092 - DNA, 25 bp, SARS Virus
acataggaagtagcacgtttgaaat

SEQ ID NO: 57093 - DNA, 25 bp, SARS Virus
cataggaagtaagacgtttgaaatt

SEQ ID NO: 57094 - DNA, 25 bp, SARS Virus
ataggaagtaacgcgtttgaaatta

SEQ ID NO: 57095 - DNA, 25 bp, SARS Virus
taggaagtaacaggtttgaaattac

SEQ ID NO: 57096 - DNA, 25 bp, SARS Virus
aggaagtaacacgtttgaaattaca

SEQ ID NO: 57097 - DNA, 25 bp, SARS Virus
ggaagtaacacggttgaaattacac

SEQ ID NO: 57098 - DNA, 25 bp, SARS Virus
gaagtaacacgtgtgaaattacaca

SEQ ID NO: 57099 - DNA, 25 bp, SARS Virus
aagtaacacgttggaaattacacaa

SEQ ID NO: 57100 - DNA, 25 bp, SARS Virus
agtaacacgtttgaaattacacaat

SEQ ID NO: 57101 - DNA, 25 bp, SARS Virus
gtaacacgtttggaattacacaata

SEQ ID NO: 57102 - DNA, 25 bp, SARS Virus
taacacgtttgagattacacaataa

SEQ ID NO: 57103 - DNA, 25 bp, SARS Virus
aacacgtttgaagttacacaataaa

SEQ ID NO: 57104 - DNA, 25 bp, SARS Virus
acacgtttgaaagtacacaataaaa

SEQ ID NO: 57105 - DNA, 25 bp, SARS Virus
cacgtttgaaatgacacaataaaag

SEQ ID NO: 57106 - DNA, 25 bp, SARS Virus
acgtttgaaattgcacaataaaaga

SEQ ID NO: 57107 - DNA, 25 bp, SARS Virus
cgtttgaaattagacaataaaagat

SEQ ID NO: 57108 - DNA, 25 bp, SARS Virus
gtttgaaattacgcaataaaagatg

SEQ ID NO: 57109 - DNA, 25 bp, SARS Virus
tttgaaattacagaataaaagatga

SEQ ID NO: 57110 - DNA, 25 bp, SARS Virus
ttgaaattacacgataaaagatgac

SEQ ID NO: 57111 - DNA, 25 bp, SARS Virus
tgaaattacacagtaaaagatgaca

SEQ ID NO: 57112 - DNA, 25 bp, SARS Virus
gaaattacacaagaaaagatgacac

SEQ ID NO: 57113 - DNA, 25 bp, SARS Virus
aaattacacaatgaaagatgacaca

SEQ ID NO: 57114 - DNA, 25 bp, SARS Virus
aattacacaatagaagatgacacaa

SEQ ID NO: 57115 - DNA, 25 bp, SARS Virus
attacacaataagagatgacacaaa

SEQ ID NO: 57116 - DNA, 25 bp, SARS Virus
ttacacaataaaggatgacacaaag

SEQ ID NO: 57117 - DNA, 25 bp, SARS Virus
tacacaataaaagatgacacaaagg

SEQ ID NO: 57118 - DNA, 25 bp, SARS Virus
acacaataaaaggtgacacaaaggt

SEQ ID NO: 57119 - DNA, 25 bp, SARS Virus
cacaataaaagaggacacaaaggtg

SEQ ID NO: 57120 - DNA, 25 bp, SARS Virus
acaataaaagatgacacaaaggtgg

SEQ ID NO: 57121 - DNA, 25 bp, SARS Virus
caataaaagatggcacaaaggtgga

SEQ ID NO: 57122 - DNA, 25 bp, SARS Virus
aataaaagatgagacaaaggtggat

SEQ ID NO: 57123 - DNA, 25 bp, SARS Virus
ataaaagatgacgcaaaggtggatg

SEQ ID NO: 57124 - DNA, 25 bp, SARS Virus
taaaagatgacagaaaggtggatgt

SEQ ID NO: 57125 - DNA, 25 bp, SARS Virus
aaaagatgacacgaaggtggatgtt

SEQ ID NO: 57126 - DNA, 25 bp, SARS Virus
aaagatgacacagaggtggatgttc

SEQ ID NO: 57127 - DNA, 25 bp, SARS Virus
aagatgacacaagggtggatgttca

SEQ ID NO: 57128 - DNA, 25 bp, SARS Virus
agatgacacaaaggtggatgttcaa

SEQ ID NO: 57129 - DNA, 25 bp, SARS Virus
gatgacacaaaggtggatgttcaaa

SEQ ID NO: 57130 - DNA, 25 bp, SARS Virus
atgacacaaagggggatgttcaaaa

SEQ ID NO: 57131 - DNA, 25 bp, SARS Virus
tgacacaaaggtggatgttcaaaac

SEQ ID NO: 57132 - DNA, 25 bp, SARS Virus
gacacaaaggtggatgttcaaaacc

SEQ ID NO: 57133 - DNA, 25 bp, SARS Virus
acacaaaggtgggtgttcaaaacct

SEQ ID NO: 57134 - DNA, 25 bp, SARS Virus
cacaaaggtggaggttcaaaacctg

SEQ ID NO: 57135 - DNA, 25 bp, SARS Virus
acaaaggtggatgttcaaaacctgg

SEQ ID NO: 57136 - DNA, 25 bp, SARS Virus
caaaggtggatggtcaaaacctggt

SEQ ID NO: 57137 - DNA, 25 bp, SARS Virus
aaaggtggatgtgcaaaacctggtg

SEQ ID NO: 57138 - DNA, 25 bp, SARS Virus
aaggtggatgttgaaaacctggtga

SEQ ID NO: 57139 - DNA, 25 bp, SARS Virus
aggtggatgttcgaaacctggtgat

SEQ ID NO: 57140 - DNA, 25 bp, SARS Virus
ggtggatgttcagaacctggtgatc

SEQ ID NO: 57141 - DNA, 25 bp, SARS Virus
gtggatgttcaagacctggtgatca

SEQ ID NO: 57142 - DNA, 25 bp, SARS Virus
tggatgttcaaagcctggtgatcat

SEQ ID NO: 57143 - DNA, 25 bp, SARS Virus
ggatgttcaaaagctggtgatcatt

SEQ ID NO: 57144 - DNA, 25 bp, SARS Virus
gatgttcaaaacgtggtgatcattc

SEQ ID NO: 57145 - DNA, 25 bp, SARS Virus
atgttcaaaaccgggtgatcattct

SEQ ID NO: 57146 - DNA, 25 bp, SARS Virus
tgttcaaaacctggtgatcattctt

SEQ ID NO: 57147 - DNA, 25 bp, SARS Virus
gttcaaaacctggtgatcattcttt

SEQ ID NO: 57148 - DNA, 25 bp, SARS Virus
ttcaaaacctggggatcattctttt

SEQ ID NO: 57149 - DNA, 25 bp, SARS Virus
tcaaaacctggtgatcattcttttt

SEQ ID NO: 57150 - DNA, 25 bp, SARS Virus
caaaacctggtggtcattcttttta

SEQ ID NO: 57151 - DNA, 25 bp, SARS Virus
aaaacctggtgagcattctttttat

SEQ ID NO: 57152 - DNA, 25 bp, SARS Virus
aaacctggtgatgattctttttata

SEQ ID NO: 57153 - DNA, 25 bp, SARS Virus
aacctggtgatcgttctttttataa

SEQ ID NO: 57154 - DNA, 25 bp, SARS Virus
acctggtgatcagtctttttataaa

SEQ ID NO: 57155 - DNA, 25 bp, SARS Virus
cctggtgatcatgctttttataaac

SEQ ID NO: 57156 - DNA, 25 bp, SARS Virus
ctggtgatcattgtttttataaaca

SEQ ID NO: 57157 - DNA, 25 bp, SARS Virus
tggtgatcattcgttttataaacat

SEQ ID NO: 57158 - DNA, 25 bp, SARS Virus
ggtgatcattctgtttataaacatc

SEQ ID NO: 57159 - DNA, 25 bp, SARS Virus
gtgatcattcttgttataaacatct

SEQ ID NO: 57160 - DNA, 25 bp, SARS Virus
tgatcattctttgtataaacatcta

SEQ ID NO: 57161 - DNA, 25 bp, SARS Virus
gatcattcttttgataaacatctac

SEQ ID NO: 57162 - DNA, 25 bp, SARS Virus
atcattctttttgtaaacatctacc

SEQ ID NO: 57163 - DNA, 25 bp, SARS Virus
tcattctttttagaaacatctacca

SEQ ID NO: 57164 - DNA, 25 bp, SARS Virus
cattctttttatgaacatctaccac

SEQ ID NO: 57165 - DNA, 25 bp, SARS Virus
attctttttatagacatctaccaca

SEQ ID NO: 57166 - DNA, 25 bp, SARS Virus
ttctttttataagcatctaccacaa

SEQ ID NO: 57167 - DNA, 25 bp, SARS Virus
tctttttataaagatctaccacaag

SEQ ID NO: 57168 - DNA, 25 bp, SARS Virus
ctttttataaacgtctaccacaagg

SEQ ID NO: 57169 - DNA, 25 bp, SARS Virus
tttttataaacagctaccacaagga

SEQ ID NO: 57170 - DNA, 25 bp, SARS Virus
ttttataaacatgtaccacaaggaa

SEQ ID NO: 57171 - DNA, 25 bp, SARS Virus
tttataaacatcgaccacaaggaaa

SEQ ID NO: 57172 - DNA, 25 bp, SARS Virus
ttataaacatctgccacaaggaaaa

SEQ ID NO: 57173 - DNA, 25 bp, SARS Virus
tataaacatctagcacaaggaaaac

SEQ ID NO: 57174 - DNA, 25 bp, SARS Virus
ataaacatctacgacaaggaaaaca

SEQ ID NO: 57175 - DNA, 25 bp, SARS Virus
taaacatctaccgcaaggaaaacaa

SEQ ID NO: 57176 - DNA, 25 bp, SARS Virus
aaacatctaccagaaggaaaacaac

SEQ ID NO: 57177 - DNA, 25 bp, SARS Virus
aacatctaccacgaggaaaacaaca

SEQ ID NO: 57178 - DNA, 25 bp, SARS Virus
acatctaccacagggaaaacaacaa

SEQ ID NO: 57179 - DNA, 25 bp, SARS Virus
catctaccacaaggaaaacaacaaa

SEQ ID NO: 57180 - DNA, 25 bp, SARS Virus
atctaccacaaggaaaacaacaaag

SEQ ID NO: 57181 - DNA, 25 bp, SARS Virus
tctaccacaagggaaacaacaaagt

SEQ ID NO: 57182 - DNA, 25 bp, SARS Virus
ctaccacaaggagaacaacaaagtt

SEQ ID NO: 57183 - DNA, 25 bp, SARS Virus
taccacaaggaagacaacaaagttg

SEQ ID NO: 57184 - DNA, 25 bp, SARS Virus
accacaaggaaagcaacaaagttga

SEQ ID NO: 57185 - DNA, 25 bp, SARS Virus
ccacaaggaaaagaacaaagttgac

SEQ ID NO: 57186 - DNA, 25 bp, SARS Virus
cacaaggaaaacgacaaagttgacc

SEQ ID NO: 57187 - DNA, 25 bp, SARS Virus
acaaggaaaacagcaaagttgacct

SEQ ID NO: 57188 - DNA, 25 bp, SARS Virus
caaggaaaacaagaaagttgaccta

SEQ ID NO: 57189 - DNA, 25 bp, SARS Virus
aaggaaaacaacgaagttgacctat

SEQ ID NO: 57190 - DNA, 25 bp, SARS Virus
aggaaaacaacagagttgacctatg

SEQ ID NO: 57191 - DNA, 25 bp, SARS Virus
ggaaaacaacaaggttgacctatgg

SEQ ID NO: 57192 - DNA, 25 bp, SARS Virus
gaaaacaacaaagttgacctatggt

SEQ ID NO: 57193 - DNA, 25 bp, SARS Virus
aaaacaacaaaggtgacctatggta

SEQ ID NO: 57194 - DNA, 25 bp, SARS Virus
aaacaacaaagtggacctatggtaa

SEQ ID NO: 57195 - DNA, 25 bp, SARS Virus
aacaacaaagttgacctatggtaaa

SEQ ID NO: 57196 - DNA, 25 bp, SARS Virus
acaacaaagttggcctatggtaaaa

SEQ ID NO: 57197 - DNA, 25 bp, SARS Virus
caacaaagttgagctatggtaaaag

SEQ ID NO: 57198 - DNA, 25 bp, SARS Virus
aacaaagttgacgtatggtaaaagc

SEQ ID NO: 57199 - DNA, 25 bp, SARS Virus
acaaagttgaccgatggtaaaagca

SEQ ID NO: 57200 - DNA, 25 bp, SARS Virus
caaagttgacctgtggtaaaagcac

SEQ ID NO: 57201 - DNA, 25 bp, SARS Virus
aaagttgacctagggtaaaagcact

SEQ ID NO: 57202 - DNA, 25 bp, SARS Virus
aagttgacctatggtaaaagcactc

SEQ ID NO: 57203 - DNA, 25 bp, SARS Virus
agttgacctatggtaaaagcactca

SEQ ID NO: 57204 - DNA, 25 bp, SARS Virus
gttgacctatgggaaaagcactcaa

SEQ ID NO: 57205 - DNA, 25 bp, SARS Virus
ttgacctatggtgaaagcactcaat

SEQ ID NO: 57206 - DNA, 25 bp, SARS Virus
tgacctatggtagaagcactcaatc

SEQ ID NO: 57207 - DNA, 25 bp, SARS Virus
gacctatggtaagagcactcaatcc

SEQ ID NO: 57208 - DNA, 25 bp, SARS Virus
acctatggtaaaggcactcaatcct

SEQ ID NO: 57209 - DNA, 25 bp, SARS Virus
cctatggtaaaagcactcaatcctc

SEQ ID NO: 57210 - DNA, 25 bp, SARS Virus
ctatggtaaaaggactcaatcctca

SEQ ID NO: 57211 - DNA, 25 bp, SARS Virus
tatggtaaaagcgctcaatcctcag

SEQ ID NO: 57212 - DNA, 25 bp, SARS Virus
atggtaaaagcagtcaatcctcagc

SEQ ID NO: 57213 - DNA, 25 bp, SARS Virus
tggtaaaagcacgcaatcctcagca

SEQ ID NO: 57214 - DNA, 25 bp, SARS Virus
ggtaaaagcactgaatcctcagcat

SEQ ID NO: 57215 - DNA, 25 bp, SARS Virus
gtaaaagcactcgatcctcagcatg

SEQ ID NO: 57216 - DNA, 25 bp, SARS Virus
taaaagcactcagtcctcagcatgt

SEQ ID NO: 57217 - DNA, 25 bp, SARS Virus
aaaagcactcaagcctcagcatgta

SEQ ID NO: 57218 - DNA, 25 bp, SARS Virus
aaagcactcaatgctcagcatgtat

SEQ ID NO: 57219 - DNA, 25 bp, SARS Virus
aagcactcaatcgtcagcatgtatt

SEQ ID NO: 57220 - DNA, 25 bp, SARS Virus
agcactcaatccgcagcatgtatta

SEQ ID NO: 57221 - DNA, 25 bp, SARS Virus
gcactcaatcctgagcatgtattag

SEQ ID NO: 57222 - DNA, 25 bp, SARS Virus
cactcaatcctcggcatgtattagt

SEQ ID NO: 57223 - DNA, 25 bp, SARS Virus
actcaatcctcagcatgtattagtc

SEQ ID NO: 57224 - DNA, 25 bp, SARS Virus
ctcaatcctcaggatgtattagtcc

SEQ ID NO: 57225 - DNA, 25 bp, SARS Virus
tttctgacatgttaagacgctacga

SEQ ID NO: 57226 - DNA, 25 bp, SARS Virus
ttctgacatgtttagacgctacgat

SEQ ID NO: 57227 - DNA, 25 bp, SARS Virus
tctgacatgttatgacgctacgata

SEQ ID NO: 57228 - DNA, 25 bp, SARS Virus
ctgacatgttaatacgctacgatac

SEQ ID NO: 57229 - DNA, 25 bp, SARS Virus
tgacatgttaagtcgctacgatacg

SEQ ID NO: 57230 - DNA, 25 bp, SARS Virus
gacatgttaagatgctacgatacgc

SEQ ID NO: 57231 - DNA, 25 bp, SARS Virus
acatgttaagactctacgatacgca

SEQ ID NO: 57232 - DNA, 25 bp, SARS Virus
catgttaagacgttacgatacgcac

SEQ ID NO: 57233 - DNA, 25 bp, SARS Virus
atgttaagacgctacgatacgcact

SEQ ID NO: 57234 - DNA, 25 bp, SARS Virus
tgttaagacgcttcgatacgcacta

SEQ ID NO: 57235 - DNA, 25 bp, SARS Virus
gttaagacgctatgatacgcactac

SEQ ID NO: 57236 - DNA, 25 bp, SARS Virus
ttaagacgctactatacgcactacg

SEQ ID NO: 57237 - DNA, 25 bp, SARS Virus
taagacgctacgttacgcactacgt

SEQ ID NO: 57238 - DNA, 25 bp, SARS Virus
aagacgctacgatacgcactacgtc

SEQ ID NO: 57239 - DNA, 25 bp, SARS Virus
agacgctacgattcgcactacgtcc

SEQ ID NO: 57240 - DNA, 25 bp, SARS Virus
gacgctacgatatgcactacgtccg

SEQ ID NO: 57241 - DNA, 25 bp, SARS Virus
acgctacgatactcactacgtccgt

SEQ ID NO: 57242 - DNA, 25 bp, SARS Virus
cgctacgatacgtactacgtccgta

SEQ ID NO: 57243 - DNA, 25 bp, SARS Virus
gctacgatacgctctacgtccgtaa

SEQ ID NO: 57244 - DNA, 25 bp, SARS Virus
ctacgatacgcattacgtccgtaac

SEQ ID NO: 57245 - DNA, 25 bp, SARS Virus
tacgatacgcactacgtccgtaaca

SEQ ID NO: 57246 - DNA, 25 bp, SARS Virus
acgatacgcacttcgtccgtaacat

SEQ ID NO: 57247 - DNA, 25 bp, SARS Virus
cgatacgcactatgtccgtaacatc

SEQ ID NO: 57248 - DNA, 25 bp, SARS Virus
gatacgcactacttccgtaacatcc

SEQ ID NO: 57249 - DNA, 25 bp, SARS Virus
atacgcactacgtccgtaacatccg

SEQ ID NO: 57250 - DNA, 25 bp, SARS Virus
tacgcactacgttcgtaacatccgc

SEQ ID NO: 57251 - DNA, 25 bp, SARS Virus
acgcactacgtctgtaacatccgca

SEQ ID NO: 57252 - DNA, 25 bp, SARS Virus
cgcactacgtccttaacatccgcat

SEQ ID NO: 57253 - DNA, 25 bp, SARS Virus
gcactacgtccgtaacatccgcatg

SEQ ID NO: 57254 - DNA, 25 bp, SARS Virus
cactacgtccgttacatccgcatga

SEQ ID NO: 57255 - DNA, 25 bp, SARS Virus
actacgtccgtatcatccgcatgac

SEQ ID NO: 57256 - DNA, 25 bp, SARS Virus
ctacgtccgtaatatccgcatgact

SEQ ID NO: 57257 - DNA, 25 bp, SARS Virus
tacgtccgtaacttccgcatgactg

SEQ ID NO: 57258 - DNA, 25 bp, SARS Virus
acgtccgtaacatccgcatgactgt

SEQ ID NO: 57259 - DNA, 25 bp, SARS Virus
cgtccgtaacattcgcatgactgta

SEQ ID NO: 57260 - DNA, 25 bp, SARS Virus
gtccgtaacatctgcatgactgtaa

SEQ ID NO: 57261 - DNA, 25 bp, SARS Virus
tccgtaacatcctcatgactgtaat

SEQ ID NO: 57262 - DNA, 25 bp, SARS Virus
ccgtaacatccgtatgactgtaatc

SEQ ID NO: 57263 - DNA, 25 bp, SARS Virus
cgtaacatccgcttgactgtaatct

SEQ ID NO: 57264 - DNA, 25 bp, SARS Virus
gtaacatccgcatgactgtaatcta

SEQ ID NO: 57265 - DNA, 25 bp, SARS Virus
taacatccgcattactgtaatctat

SEQ ID NO: 57266 - DNA, 25 bp, SARS Virus
aacatccgcatgtctgtaatctatt

SEQ ID NO: 57267 - DNA, 25 bp, SARS Virus
acatccgcatgattgtaatctatta

SEQ ID NO: 57268 - DNA, 25 bp, SARS Virus
catccgcatgactgtaatctattag

SEQ ID NO: 57269 - DNA, 25 bp, SARS Virus
atccgcatgactttaatctattagt

SEQ ID NO: 57270 - DNA, 25 bp, SARS Virus
tccgcatgactgtaatctattagtc

SEQ ID NO: 57271 - DNA, 25 bp, SARS Virus
ccgcatgactgttatctattagtcc

SEQ ID NO: 57272 - DNA, 25 bp, SARS Virus
cgcatgactgtattctattagtcct

SEQ ID NO: 57273 - DNA, 25 bp, SARS Virus
gcatgactgtaatctattagtccta

SEQ ID NO: 57274 - DNA, 25 bp, SARS Virus
catgactgtaatttattagtcctag

SEQ ID NO: 57275 - DNA, 25 bp, SARS Virus
atgactgtaatctattagtcctaga

SEQ ID NO: 57276 - DNA, 25 bp, SARS Virus
tgactgtaatcttttagtcctagaa

SEQ ID NO: 57277 - DNA, 25 bp, SARS Virus
gactgtaatctattagtcctagaat

SEQ ID NO: 57278 - DNA, 25 bp, SARS Virus
actgtaatctattagtcctagaatt

SEQ ID NO: 57279 - DNA, 25 bp, SARS Virus
ctgtaatctatttgtcctagaatta

SEQ ID NO: 57280 - DNA, 25 bp, SARS Virus
tgtaatctattattcctagaattac

SEQ ID NO: 57281 - DNA, 25 bp, SARS Virus
gtaatctattagtcctagaattacc

SEQ ID NO: 57282 - DNA, 25 bp, SARS Virus
taatctattagttctagaattaccc

SEQ ID NO: 57283 - DNA, 25 bp, SARS Virus
aatctattagtcttagaattaccct

SEQ ID NO: 57284 - DNA, 25 bp, SARS Virus
atctattagtcctagaattaccctt

SEQ ID NO: 57285 - DNA, 25 bp, SARS Virus
tctattagtccttgaattacccttg

SEQ ID NO: 57286 - DNA, 25 bp, SARS Virus
ctattagtcctataattacccttga

SEQ ID NO: 57287 - DNA, 25 bp, SARS Virus
tattagtcctagtattacccttgac

SEQ ID NO: 57288 - DNA, 25 bp, SARS Virus
attagtcctagatttacccttgacc

SEQ ID NO: 57289 - DNA, 25 bp, SARS Virus
ttagtcctagaattacccttgacca

SEQ ID NO: 57290 - DNA, 25 bp, SARS Virus
tagtcctagaattacccttgaccat

SEQ ID NO: 57291 - DNA, 25 bp, SARS Virus
agtcctagaatttcccttgaccatg

SEQ ID NO: 57292 - DNA, 25 bp, SARS Virus
gtcctagaattatccttgaccatgc

SEQ ID NO: 57293 - DNA, 25 bp, SARS Virus
tcctagaattactcttgaccatgct

SEQ ID NO: 57294 - DNA, 25 bp, SARS Virus
cctagaattacctttgaccatgcta

SEQ ID NO: 57295 - DNA, 25 bp, SARS Virus
ctagaattacccttgaccatgctaa

SEQ ID NO: 57296 - DNA, 25 bp, SARS Virus
tagaattacccttgaccatgctaaa

SEQ ID NO: 57297 - DNA, 25 bp, SARS Virus
agaattaccctttaccatgctaaag

SEQ ID NO: 57298 - DNA, 25 bp, SARS Virus
gaattacccttgtccatgctaaagc

SEQ ID NO: 57299 - DNA, 25 bp, SARS Virus
aattacccttgatcatgctaaagcc

SEQ ID NO: 57300 - DNA, 25 bp, SARS Virus
attacccttgactatgctaaagcca

SEQ ID NO: 57301 - DNA, 25 bp, SARS Virus
ttacccttgaccttgctaaagccac

SEQ ID NO: 57302 - DNA, 25 bp, SARS Virus
tacccttgaccatgctaaagccact

SEQ ID NO: 57303 - DNA, 25 bp, SARS Virus
acccttgaccattctaaagccacta

SEQ ID NO: 57304 - DNA, 25 bp, SARS Virus
cccttgaccatgttaaagccactaa

SEQ ID NO: 57305 - DNA, 25 bp, SARS Virus
ccttgaccatgctaaagccactaaa

SEQ ID NO: 57306 - DNA, 25 bp, SARS Virus
cttgaccatgcttaagccactaaag

SEQ ID NO: 57307 - DNA, 25 bp, SARS Virus
ttgaccatgctatagccactaaagc

SEQ ID NO: 57308 - DNA, 25 bp, SARS Virus
tgaccatgctaatgccactaaagca

SEQ ID NO: 57309 - DNA, 25 bp, SARS Virus
gaccatgctaaatccactaaagcat

SEQ ID NO: 57310 - DNA, 25 bp, SARS Virus
accatgctaaagtcactaaagcatg

SEQ ID NO: 57311 - DNA, 25 bp, SARS Virus
ccatgctaaagctactaaagcatgt

SEQ ID NO: 57312 - DNA, 25 bp, SARS Virus
catgctaaagcctctaaagcatgtt

SEQ ID NO: 57313 - DNA, 25 bp, SARS Virus
atgctaaagccattaaagcatgttc

SEQ ID NO: 57314 - DNA, 25 bp, SARS Virus
tgctaaagccactaaagcatgttca

SEQ ID NO: 57315 - DNA, 25 bp, SARS Virus
gctaaagccacttaagcatgttcat

SEQ ID NO: 57316 - DNA, 25 bp, SARS Virus
ctaaagccactatagcatgttcatc

SEQ ID NO: 57317 - DNA, 25 bp, SARS Virus
taaagccactaatgcatgttcatcg

SEQ ID NO: 57318 - DNA, 25 bp, SARS Virus
aaagccactaaatcatgttcatcgt

SEQ ID NO: 57319 - DNA, 25 bp, SARS Virus
aagccactaaagtatgttcatcgtg

SEQ ID NO: 57320 - DNA, 25 bp, SARS Virus
agccactaaagcttgttcatcgtgg

SEQ ID NO: 57321 - DNA, 25 bp, SARS Virus
gccactaaagcatgttcatcgtggt

SEQ ID NO: 57322 - DNA, 25 bp, SARS Virus
ccactaaagcattttcatcgtggtc

SEQ ID NO: 57323 - DNA, 25 bp, SARS Virus
cactaaagcatgttcatcgtggtcc

SEQ ID NO: 57324 - DNA, 25 bp, SARS Virus
actaaagcatgttcatcgtggtccg

SEQ ID NO: 57325 - DNA, 25 bp, SARS Virus
ctaaagcatgtttatcgtggtccga

SEQ ID NO: 57326 - DNA, 25 bp, SARS Virus
taaagcatgttcttcgtggtccgac

SEQ ID NO: 57327 - DNA, 25 bp, SARS Virus
aaagcatgttcatcgtggtccgacg

SEQ ID NO: 57328 - DNA, 25 bp, SARS Virus
aagcatgttcattgtggtccgacgc

SEQ ID NO: 57329 - DNA, 25 bp, SARS Virus
agcatgttcatcttggtccgacgcc

SEQ ID NO: 57330 - DNA, 25 bp, SARS Virus
gcatgttcatcgtggtccgacgcct

SEQ ID NO: 57331 - DNA, 25 bp, SARS Virus
catgttcatcgttgtccgacgcctc

SEQ ID NO: 57332 - DNA, 25 bp, SARS Virus
atgttcatcgtgttccgacgcctca

SEQ ID NO: 57333 - DNA, 25 bp, SARS Virus
tgttcatcgtggtccgacgcctcaa

SEQ ID NO: 57334 - DNA, 25 bp, SARS Virus
gttcatcgtggttcgacgcctcaag

SEQ ID NO: 57335 - DNA, 25 bp, SARS Virus
ttcatcgtggtctgacgcctcaagg

SEQ ID NO: 57336 - DNA, 25 bp, SARS Virus
tcatcgtggtcctacgcctcaagga

SEQ ID NO: 57337 - DNA, 25 bp, SARS Virus
catcgtggtccgtcgcctcaaggat

SEQ ID NO: 57338 - DNA, 25 bp, SARS Virus
atcgtggtccgatgcctcaaggata

SEQ ID NO: 57339 - DNA, 25 bp, SARS Virus
tcgtggtccgactcctcaaggataa

SEQ ID NO: 57340 - DNA, 25 bp, SARS Virus
cgtggtccgacgtctcaaggataac

SEQ ID NO: 57341 - DNA, 25 bp, SARS Virus
gtggtccgacgcttcaaggataaca

SEQ ID NO: 57342 - DNA, 25 bp, SARS Virus
tggtccgacgcctcaaggataacac

SEQ ID NO: 57343 - DNA, 25 bp, SARS Virus
ggtccgacgccttaaggataacacc

SEQ ID NO: 57344 - DNA, 25 bp, SARS Virus
gtccgacgcctctaggataacacct

SEQ ID NO: 57345 - DNA, 25 bp, SARS Virus
tccgacgcctcatggataacaccta

SEQ ID NO: 57346 - DNA, 25 bp, SARS Virus
ccgacgcctcaatgataacacctaa

SEQ ID NO: 57347 - DNA, 25 bp, SARS Virus
cgacgcctcaagtataacacctaag

SEQ ID NO: 57348 - DNA, 25 bp, SARS Virus
gacgcctcaaggttaacacctaagt

SEQ ID NO: 57349 - DNA, 25 bp, SARS Virus
acgcctcaaggataacacctaagta

SEQ ID NO: 57350 - DNA, 25 bp, SARS Virus
cgcctcaaggattacacctaagtat

SEQ ID NO: 57351 - DNA, 25 bp, SARS Virus
gcctcaaggatatcacctaagtata

SEQ ID NO: 57352 - DNA, 25 bp, SARS Virus
cctcaaggataatacctaagtataa

SEQ ID NO: 57353 - DNA, 25 bp, SARS Virus
ctcaaggataactcctaagtataat

SEQ ID NO: 57354 - DNA, 25 bp, SARS Virus
tcaaggataacatctaagtataatg

SEQ ID NO: 57355 - DNA, 25 bp, SARS Virus
caaggataacacttaagtataatga

SEQ ID NO: 57356 - DNA, 25 bp, SARS Virus
aaggataacacctaagtataatgag

SEQ ID NO: 57357 - DNA, 25 bp, SARS Virus
aggataacaccttagtataatgagt

SEQ ID NO: 57358 - DNA, 25 bp, SARS Virus
ggataacacctatgtataatgagta

SEQ ID NO: 57359 - DNA, 25 bp, SARS Virus
gataacacctaattataatgagtaa

SEQ ID NO: 57360 - DNA, 25 bp, SARS Virus
ataacacctaagtataatgagtaac

SEQ ID NO: 57361 - DNA, 25 bp, SARS Virus
taacacctaagtttaatgagtaacg

SEQ ID NO: 57362 - DNA, 25 bp, SARS Virus
aacacctaagtataatgagtaacga

SEQ ID NO: 57363 - DNA, 25 bp, SARS Virus
acacctaagtattatgagtaacgac

SEQ ID NO: 57364 - DNA, 25 bp, SARS Virus
cacctaagtatattgagtaacgact

SEQ ID NO: 57365 - DNA, 25 bp, SARS Virus
acctaagtataatgagtaacgacta

SEQ ID NO: 57366 - DNA, 25 bp, SARS Virus
cctaagtataattagtaacgactac

SEQ ID NO: 57367 - DNA, 25 bp, SARS Virus
ctaagtataatgtgtaacgactacg

SEQ ID NO: 57368 - DNA, 25 bp, SARS Virus
taagtataatgattaacgactacgg

SEQ ID NO: 57369 - DNA, 25 bp, SARS Virus
aagtataatgagtaacgactacggg

SEQ ID NO: 57370 - DNA, 25 bp, SARS Virus
agtataatgagttacgactacgggt

SEQ ID NO: 57371 - DNA, 25 bp, SARS Virus
gtataatgagtatcgactacgggta

SEQ ID NO: 57372 - DNA, 25 bp, SARS Virus
tataatgagtaatgactacgggtag

SEQ ID NO: 57373 - DNA, 25 bp, SARS Virus
ataatgagtaactactacgggtagg

SEQ ID NO: 57374 - DNA, 25 bp, SARS Virus
taatgagtaacgtctacgggtagga

SEQ ID NO: 57375 - DNA, 25 bp, SARS Virus
aatgagtaacgattacgggtaggag

SEQ ID NO: 57376 - DNA, 25 bp, SARS Virus
atgagtaacgactacgggtaggagt

SEQ ID NO: 57377 - DNA, 25 bp, SARS Virus
tgagtaacgacttcgggtaggagtg

SEQ ID NO: 57378 - DNA, 25 bp, SARS Virus
gagtaacgactatgggtaggagtga

SEQ ID NO: 57379 - DNA, 25 bp, SARS Virus
agtaacgactactggtaggagtgaa

SEQ ID NO: 57380 - DNA, 25 bp, SARS Virus
gtaacgactacgtgtaggagtgaaa

SEQ ID NO: 57381 - DNA, 25 bp, SARS Virus
taacgactacggttaggagtgaaac

SEQ ID NO: 57382 - DNA, 25 bp, SARS Virus
aacgactacgggtaggagtgaaact

SEQ ID NO: 57383 - DNA, 25 bp, SARS Virus
acgactacgggttggagtgaaactg

SEQ ID NO: 57384 - DNA, 25 bp, SARS Virus
cgactacgggtatgagtgaaactga

SEQ ID NO: 57385 - DNA, 25 bp, SARS Virus
gactacgggtagtagtgaaactgat

SEQ ID NO: 57386 - DNA, 25 bp, SARS Virus
actacgggtaggtgtgaaactgatc

SEQ ID NO: 57387 - DNA, 25 bp, SARS Virus
ctacgggtaggattgaaactgatcc

SEQ ID NO: 57388 - DNA, 25 bp, SARS Virus
tacgggtaggagtgaaactgatccc

SEQ ID NO: 57389 - DNA, 25 bp, SARS Virus
acgggtaggagttaaactgatcccg

SEQ ID NO: 57390 - DNA, 25 bp, SARS Virus
cgggtaggagtgtaactgatcccgt

SEQ ID NO: 57391 - DNA, 25 bp, SARS Virus
gggtaggagtgatactgatcccgta

SEQ ID NO: 57392 - DNA, 25 bp, SARS Virus
ggtaggagtgaatctgatcccgtaa

SEQ ID NO: 57393 - DNA, 25 bp, SARS Virus
gtaggagtgaaattgatcccgtaac

SEQ ID NO: 57394 - DNA, 25 bp, SARS Virus
taggagtgaaactgatcccgtaacc

SEQ ID NO: 57395 - DNA, 25 bp, SARS Virus
aggagtgaaacttatcccgtaaccg

SEQ ID NO: 57396 - DNA, 25 bp, SARS Virus
ggagtgaaactgttcccgtaaccga

SEQ ID NO: 57397 - DNA, 25 bp, SARS Virus
gagtgaaactgatcccgtaaccgac

SEQ ID NO: 57398 - DNA, 25 bp, SARS Virus
agtgaaactgattccgtaaccgacg

SEQ ID NO: 57399 - DNA, 25 bp, SARS Virus
gtgaaactgatctcgtaaccgacga

SEQ ID NO: 57400 - DNA, 25 bp, SARS Virus
tgaaactgatcctgtaaccgacgac

SEQ ID NO: 57401 - DNA, 25 bp, SARS Virus
gaaactgatcccttaaccgacgact

SEQ ID NO: 57402 - DNA, 25 bp, SARS Virus
aaactgatcccgtaaccgacgactc

SEQ ID NO: 57403 - DNA, 25 bp, SARS Virus
aactgatcccgttaccgacgactca

SEQ ID NO: 57404 - DNA, 25 bp, SARS Virus
actgatcccgtatccgacgactcag

SEQ ID NO: 57405 - DNA, 25 bp, SARS Virus
ctgatcccgtaatcgacgactcagg

SEQ ID NO: 57406 - DNA, 25 bp, SARS Virus
tgatcccgtaactgacgactcaggg

SEQ ID NO: 57407 - DNA, 25 bp, SARS Virus
gatcccgtaacctacgactcagggt

SEQ ID NO: 57408 - DNA, 25 bp, SARS Virus
atcccgtaaccgtcgactcagggta

SEQ ID NO: 57409 - DNA, 25 bp, SARS Virus
tcccgtaaccgatgactcagggtat

SEQ ID NO: 57410 - DNA, 25 bp, SARS Virus
cccgtaaccgactactcagggtata

SEQ ID NO: 57411 - DNA, 25 bp, SARS Virus
ccgtaaccgacgtctcagggtatac

SEQ ID NO: 57412 - DNA, 25 bp, SARS Virus
cgtaaccgacgattcagggtatacc

SEQ ID NO: 57413 - DNA, 25 bp, SARS Virus
gtaaccgacgactcagggtatacct

SEQ ID NO: 57414 - DNA, 25 bp, SARS Virus
taaccgacgacttagggtataccta

SEQ ID NO: 57415 - DNA, 25 bp, SARS Virus
aaccgacgactctgggtatacctac

SEQ ID NO: 57416 - DNA, 25 bp, SARS Virus
accgacgactcatggtatacctacg

SEQ ID NO: 57417 - DNA, 25 bp, SARS Virus
ccgacgactcagtgtatacctacga

SEQ ID NO: 57418 - DNA, 25 bp, SARS Virus
cgacgactcaggttatacctacgac

SEQ ID NO: 57419 - DNA, 25 bp, SARS Virus
gacgactcagggtatacctacgact

SEQ ID NO: 57420 - DNA, 25 bp, SARS Virus
acgactcagggtttacctacgacta

SEQ ID NO: 57421 - DNA, 25 bp, SARS Virus
cgactcagggtatacctacgactag

SEQ ID NO: 57422 - DNA, 25 bp, SARS Virus
gactcagggtattcctacgactaga

SEQ ID NO: 57423 - DNA, 25 bp, SARS Virus
actcagggtatatctacgactagag

SEQ ID NO: 57424 - DNA, 25 bp, SARS Virus
ctcagggtatacttacgactagagc

SEQ ID NO: 57425 - DNA, 25 bp, SARS Virus
tcagggtatacctacgactagagcg

SEQ ID NO: 57426 - DNA, 25 bp, SARS Virus
cagggtataccttcgactagagcgt

SEQ ID NO: 57427 - DNA, 25 bp, SARS Virus
agggtatacctatgactagagcgtt

SEQ ID NO: 57428 - DNA, 25 bp, SARS Virus
gggtatacctactactagagcgttt

SEQ ID NO: 57429 - DNA, 25 bp, SARS Virus
ggtatacctacgtctagagcgtttt

SEQ ID NO: 57430 - DNA, 25 bp, SARS Virus
gtatacctacgattagagcgttttg

SEQ ID NO: 57431 - DNA, 25 bp, SARS Virus
tatacctacgactagagcgttttgg

SEQ ID NO: 57432 - DNA, 25 bp, SARS Virus
atacctacgacttgagcgttttggt

SEQ ID NO: 57433 - DNA, 25 bp, SARS Virus
tacctacgactatagcgttttggtg

SEQ ID NO: 57434 - DNA, 25 bp, SARS Virus
acctacgactagtgcgttttggtga

SEQ ID NO: 57435 - DNA, 25 bp, SARS Virus
cctacgactagatcgttttggtgaa

SEQ ID NO: 57436 - DNA, 25 bp, SARS Virus
ctacgactagagtgttttggtgaat

SEQ ID NO: 57437 - DNA, 25 bp, SARS Virus
tacgactagagctttttggtgaata

SEQ ID NO: 57438 - DNA, 25 bp, SARS Virus
acgactagagcgttttggtgaataa

SEQ ID NO: 57439 - DNA, 25 bp, SARS Virus
cgactagagcgttttggtgaataat

SEQ ID NO: 57440 - DNA, 25 bp, SARS Virus
gactagagcgttttggtgaataatt

SEQ ID NO: 57441 - DNA, 25 bp, SARS Virus
actagagcgttttggtgaataattc

SEQ ID NO: 57442 - DNA, 25 bp, SARS Virus
ctagagcgtttttgtgaataattca

SEQ ID NO: 57443 - DNA, 25 bp, SARS Virus
tagagcgttttgttgaataattcac

SEQ ID NO: 57444 - DNA, 25 bp, SARS Virus
agagcgttttggtgaataattcacc

SEQ ID NO: 57445 - DNA, 25 bp, SARS Virus
gagcgttttggttaataattcaccc

SEQ ID NO: 57446 - DNA, 25 bp, SARS Virus
agcgttttggtgtataattcaccct

SEQ ID NO: 57447 - DNA, 25 bp, SARS Virus
gcgttttggtgattaattcacccta

SEQ ID NO: 57448 - DNA, 25 bp, SARS Virus
cgttttggtgaataattcaccctaa

SEQ ID NO: 57449 - DNA, 25 bp, SARS Virus
gttttggtgaattattcaccctaaa

SEQ ID NO: 57450 - DNA, 25 bp, SARS Virus
ttttggtgaatatttcaccctaaac

SEQ ID NO: 57451 - DNA, 25 bp, SARS Virus
tttggtgaataattcaccctaaacg

SEQ ID NO: 57452 - DNA, 25 bp, SARS Virus
ttggtgaataattcaccctaaacga

SEQ ID NO: 57453 - DNA, 25 bp, SARS Virus
tggtgaataatttaccctaaacgac

SEQ ID NO: 57454 - DNA, 25 bp, SARS Virus
ggtgaataattctccctaaacgact

SEQ ID NO: 57455 - DNA, 25 bp, SARS Virus
gtgaataattcatcctaaacgactt

SEQ ID NO: 57456 - DNA, 25 bp, SARS Virus
tgaataattcactctaaacgacttt

SEQ ID NO: 57457 - DNA, 25 bp, SARS Virus
gaataattcaccttaaacgacttta

SEQ ID NO: 57458 - DNA, 25 bp, SARS Virus
aataattcaccctaaacgactttat

SEQ ID NO: 57459 - DNA, 25 bp, SARS Virus
ataattcacccttaacgactttata

SEQ ID NO: 57460 - DNA, 25 bp, SARS Virus
taattcaccctatacgactttatac

SEQ ID NO: 57461 - DNA, 25 bp, SARS Virus
aattcaccctaatcgactttatact

SEQ ID NO: 57462 - DNA, 25 bp, SARS Virus
attcaccctaaatgactttatacta

SEQ ID NO: 57463 - DNA, 25 bp, SARS Virus
ttcaccctaaactactttatactaa

SEQ ID NO: 57464 - DNA, 25 bp, SARS Virus
tcaccctaaacgtctttatactaaa

SEQ ID NO: 57465 - DNA, 25 bp, SARS Virus
caccctaaacgattttatactaaaa

SEQ ID NO: 57466 - DNA, 25 bp, SARS Virus
accctaaacgactttatactaaaat

SEQ ID NO: 57467 - DNA, 25 bp, SARS Virus
ccctaaacgactttatactaaaatg

SEQ ID NO: 57468 - DNA, 25 bp, SARS Virus
cctaaacgactttatactaaaatgc

SEQ ID NO: 57469 - DNA, 25 bp, SARS Virus
ctaaacgactttttactaaaatgcc

SEQ ID NO: 57470 - DNA, 25 bp, SARS Virus
taaacgactttatactaaaatgcct

SEQ ID NO: 57471 - DNA, 25 bp, SARS Virus
aaacgactttattctaaaatgcctt

SEQ ID NO: 57472 - DNA, 25 bp, SARS Virus
aacgactttatattaaaatgccttc

SEQ ID NO: 57473 - DNA, 25 bp, SARS Virus
acgactttatactaaaatgccttct

SEQ ID NO: 57474 - DNA, 25 bp, SARS Virus
cgactttatacttaaatgccttctc

SEQ ID NO: 57475 - DNA, 25 bp, SARS Virus
gactttatactataatgccttctct

SEQ ID NO: 57476 - DNA, 25 bp, SARS Virus
actttatactaatatgccttctctc

SEQ ID NO: 57477 - DNA, 25 bp, SARS Virus
ctttatactaaattgccttctctct

SEQ ID NO: 57478 - DNA, 25 bp, SARS Virus
tttatactaaaatgccttctctctg

SEQ ID NO: 57479 - DNA, 25 bp, SARS Virus
ttatactaaaattccttctctctga

SEQ ID NO: 57480 - DNA, 25 bp, SARS Virus
tatactaaaatgtcttctctctgaa

SEQ ID NO: 57481 - DNA, 25 bp, SARS Virus
atactaaaatgctttctctctgaaa

SEQ ID NO: 57482 - DNA, 25 bp, SARS Virus
tactaaaatgccttctctctgaaac

SEQ ID NO: 57483 - DNA, 25 bp, SARS Virus
actaaaatgccttctctctgaaaca

SEQ ID NO: 57484 - DNA, 25 bp, SARS Virus
ctaaaatgccttttctctgaaacag

SEQ ID NO: 57485 - DNA, 25 bp, SARS Virus
taaaatgccttctctctgaaacaga

SEQ ID NO: 57486 - DNA, 25 bp, SARS Virus
aaaatgccttctttctgaaacagag

SEQ ID NO: 57487 - DNA, 25 bp, SARS Virus
aaatgccttctctctgaaacagaga

SEQ ID NO: 57488 - DNA, 25 bp, SARS Virus
aatgccttctctttgaaacagagaa

SEQ ID NO: 57489 - DNA, 25 bp, SARS Virus
atgccttctctctgaaacagagaag

SEQ ID NO: 57490 - DNA, 25 bp, SARS Virus
tgccttctctcttaaacagagaagc

SEQ ID NO: 57491 - DNA, 25 bp, SARS Virus
gccttctctctgtaacagagaagct

SEQ ID NO: 57492 - DNA, 25 bp, SARS Virus
ccttctctctgatacagagaagctg

SEQ ID NO: 57493 - DNA, 25 bp, SARS Virus
cttctctctgaatcagagaagctgg

SEQ ID NO: 57494 - DNA, 25 bp, SARS Virus
ttctctctgaaatagagaagctggc

SEQ ID NO: 57495 - DNA, 25 bp, SARS Virus
tctctctgaaactgagaagctggca

SEQ ID NO: 57496 - DNA, 25 bp, SARS Virus
ctctctgaaacatagaagctggcaa

SEQ ID NO: 57497 - DNA, 25 bp, SARS Virus
tctctgaaacagtgaagctggcaat

SEQ ID NO: 57498 - DNA, 25 bp, SARS Virus
ctctgaaacagataagctggcaata

SEQ ID NO: 57499 - DNA, 25 bp, SARS Virus
tctgaaacagagtagctggcaataa

SEQ ID NO: 57500 - DNA, 25 bp, SARS Virus
ctgaaacagagatgctggcaataaa

SEQ ID NO: 57501 - DNA, 25 bp, SARS Virus
tgaaacagagaatctggcaataaaa

SEQ ID NO: 57502 - DNA, 25 bp, SARS Virus
gaaacagagaagttggcaataaaat

SEQ ID NO: 57503 - DNA, 25 bp, SARS Virus
aaacagagaagctggcaataaaatt

SEQ ID NO: 57504 - DNA, 25 bp, SARS Virus
aacagagaagcttgcaataaaattt

SEQ ID NO: 57505 - DNA, 25 bp, SARS Virus
acagagaagctgtcaataaaattta

SEQ ID NO: 57506 - DNA, 25 bp, SARS Virus
cagagaagctggtaataaaatttat

SEQ ID NO: 57507 - DNA, 25 bp, SARS Virus
agagaagctggctataaaatttata

SEQ ID NO: 57508 - DNA, 25 bp, SARS Virus
gagaagctggcattaaaatttataa

SEQ ID NO: 57509 - DNA, 25 bp, SARS Virus
agaagctggcaataaaatttataac

SEQ ID NO: 57510 - DNA, 25 bp, SARS Virus
gaagctggcaattaaatttataacc

SEQ ID NO: 57511 - DNA, 25 bp, SARS Virus
aagctggcaatataatttataaccc

SEQ ID NO: 57512 - DNA, 25 bp, SARS Virus
agctggcaataatatttataaccct

SEQ ID NO: 57513 - DNA, 25 bp, SARS Virus
gctggcaataaattttataaccctg

SEQ ID NO: 57514 - DNA, 25 bp, SARS Virus
ctggcaataaaatttataaccctgg

SEQ ID NO: 57515 - DNA, 25 bp, SARS Virus
tggcaataaaatttataaccctggt

SEQ ID NO: 57516 - DNA, 25 bp, SARS Virus
ggcaataaaatttataaccctggtc

SEQ ID NO: 57517 - DNA, 25 bp, SARS Virus
gcaataaaatttttaaccctggtct

SEQ ID NO: 57518 - DNA, 25 bp, SARS Virus
caataaaatttataaccctggtctg

SEQ ID NO: 57519 - DNA, 25 bp, SARS Virus
aataaaatttattaccctggtctgt

SEQ ID NO: 57520 - DNA, 25 bp, SARS Virus
ataaaatttatatccctggtctgta

SEQ ID NO: 57521 - DNA, 25 bp, SARS Virus
taaaatttataatcctggtctgtat

SEQ ID NO: 57522 - DNA, 25 bp, SARS Virus
aaaatttataactctggtctgtatg

SEQ ID NO: 57523 - DNA, 25 bp, SARS Virus
aaatttataaccttggtctgtatgg

SEQ ID NO: 57524 - DNA, 25 bp, SARS Virus
aatttataaccctggtctgtatggt

SEQ ID NO: 57525 - DNA, 25 bp, SARS Virus
atttataacccttgtctgtatggta

SEQ ID NO: 57526 - DNA, 25 bp, SARS Virus
tttataaccctgttctgtatggtag

SEQ ID NO: 57527 - DNA, 25 bp, SARS Virus
ttataaccctggtctgtatggtagg

SEQ ID NO: 57528 - DNA, 25 bp, SARS Virus
tataaccctggtttgtatggtaggg

SEQ ID NO: 57529 - DNA, 25 bp, SARS Virus
ataaccctggtctgtatggtagggt

SEQ ID NO: 57530 - DNA, 25 bp, SARS Virus
taaccctggtctttatggtagggtt

SEQ ID NO: 57531 - DNA, 25 bp, SARS Virus
aaccctggtctgtatggtagggtta

SEQ ID NO: 57532 - DNA, 25 bp, SARS Virus
accctggtctgtttggtagggttaa

SEQ ID NO: 57533 - DNA, 25 bp, SARS Virus
ccctggtctgtatggtagggttaac

SEQ ID NO: 57534 - DNA, 25 bp, SARS Virus
cctggtctgtattgtagggttaaca

SEQ ID NO: 57535 - DNA, 25 bp, SARS Virus
ctggtctgtatgttagggttaacat

SEQ ID NO: 57536 - DNA, 25 bp, SARS Virus
tggtctgtatggtagggttaacata

SEQ ID NO: 57537 - DNA, 25 bp, SARS Virus
ggtctgtatggttgggttaacataa

SEQ ID NO: 57538 - DNA, 25 bp, SARS Virus
gtctgtatggtatggttaacataat

SEQ ID NO: 57539 - DNA, 25 bp, SARS Virus
tctgtatggtagtgttaacataatt

SEQ ID NO: 57540 - DNA, 25 bp, SARS Virus
ctgtatggtaggtttaacataattg

SEQ ID NO: 57541 - DNA, 25 bp, SARS Virus
tgtatggtagggttaacataattga

SEQ ID NO: 57542 - DNA, 25 bp, SARS Virus
gtatggtagggttaacataattgac

SEQ ID NO: 57543 - DNA, 25 bp, SARS Virus
tatggtagggtttacataattgaca

SEQ ID NO: 57544 - DNA, 25 bp, SARS Virus
atggtagggttatcataattgacaa

SEQ ID NO: 57545 - DNA, 25 bp, SARS Virus
tggtagggttaatataattgacaaa

SEQ ID NO: 57546 - DNA, 25 bp, SARS Virus
ggtagggttaacttaattgacaaac

SEQ ID NO: 57547 - DNA, 25 bp, SARS Virus
gtagggttaacataattgacaaacc

SEQ ID NO: 57548 - DNA, 25 bp, SARS Virus
tagggttaacattattgacaaacct

SEQ ID NO: 57549 - DNA, 25 bp, SARS Virus
agggttaacatatttgacaaaccta

SEQ ID NO: 57550 - DNA, 25 bp, SARS Virus
gggttaacataattgacaaacctac

SEQ ID NO: 57551 - DNA, 25 bp, SARS Virus
ggttaacataattgacaaacctact

SEQ ID NO: 57552 - DNA, 25 bp, SARS Virus
gttaacataatttacaaacctacta

SEQ ID NO: 57553 - DNA, 25 bp, SARS Virus
ttaacataattgtcaaacctactat

SEQ ID NO: 57554 - DNA, 25 bp, SARS Virus
taacataattgataaacctactatc

SEQ ID NO: 57555 - DNA, 25 bp, SARS Virus
aacataattgactaacctactatcc

SEQ ID NO: 57556 - DNA, 25 bp, SARS Virus
acataattgacatacctactatcca

SEQ ID NO: 57557 - DNA, 25 bp, SARS Virus
cataattgacaatcctactatccac

SEQ ID NO: 57558 - DNA, 25 bp, SARS Virus
ataattgacaaatctactatccaca

SEQ ID NO: 57559 - DNA, 25 bp, SARS Virus
taattgacaaacttactatccacat

SEQ ID NO: 57560 - DNA, 25 bp, SARS Virus
aattgacaaacctactatccacata

SEQ ID NO: 57561 - DNA, 25 bp, SARS Virus
attgacaaaccttctatccacatag

SEQ ID NO: 57562 - DNA, 25 bp, SARS Virus
ttgacaaacctattatccacatagg

SEQ ID NO: 57563 - DNA, 25 bp, SARS Virus
tgacaaacctactatccacatagga

SEQ ID NO: 57564 - DNA, 25 bp, SARS Virus
gacaaacctactttccacataggaa

SEQ ID NO: 57565 - DNA, 25 bp, SARS Virus
acaaacctactatccacataggaag

SEQ ID NO: 57566 - DNA, 25 bp, SARS Virus
caaacctactattcacataggaagt

SEQ ID NO: 57567 - DNA, 25 bp, SARS Virus
aaacctactatctacataggaagta

SEQ ID NO: 57568 - DNA, 25 bp, SARS Virus
aacctactatcctcataggaagtaa

SEQ ID NO: 57569 - DNA, 25 bp, SARS Virus
acctactatccatataggaagtaac

SEQ ID NO: 57570 - DNA, 25 bp, SARS Virus
cctactatccacttaggaagtaaca

SEQ ID NO: 57571 - DNA, 25 bp, SARS Virus
ctactatccacataggaagtaacac

SEQ ID NO: 57572 - DNA, 25 bp, SARS Virus
tactatccacattggaagtaacacg

SEQ ID NO: 57573 - DNA, 25 bp, SARS Virus
actatccacatatgaagtaacacgt

SEQ ID NO: 57574 - DNA, 25 bp, SARS Virus
ctatccacatagtaagtaacacgtt

SEQ ID NO: 57575 - DNA, 25 bp, SARS Virus
tatccacataggtagtaacacgttt

SEQ ID NO: 57576 - DNA, 25 bp, SARS Virus
atccacataggatgtaacacgtttg

SEQ ID NO: 57577 - DNA, 25 bp, SARS Virus
tccacataggaattaacacgtttga

SEQ ID NO: 57578 - DNA, 25 bp, SARS Virus
ccacataggaagtaacacgtttgaa

SEQ ID NO: 57579 - DNA, 25 bp, SARS Virus
cacataggaagttacacgtttgaaa

SEQ ID NO: 57580 - DNA, 25 bp, SARS Virus
acataggaagtatcacgtttgaaat

SEQ ID NO: 57581 - DNA, 25 bp, SARS Virus
cataggaagtaatacgtttgaaatt

SEQ ID NO: 57582 - DNA, 25 bp, SARS Virus
ataggaagtaactcgtttgaaatta

SEQ ID NO: 57583 - DNA, 25 bp, SARS Virus
taggaagtaacatgtttgaaattac

SEQ ID NO: 57584 - DNA, 25 bp, SARS Virus
aggaagtaacacttttgaaattaca

SEQ ID NO: 57585 - DNA, 25 bp, SARS Virus
ggaagtaacacgtttgaaattacac

SEQ ID NO: 57586 - DNA, 25 bp, SARS Virus
gaagtaacacgtttgaaattacaca

SEQ ID NO: 57587 - DNA, 25 bp, SARS Virus
aagtaacacgtttgaaattacacaa

SEQ ID NO: 57588 - DNA, 25 bp, SARS Virus
agtaacacgttttaaattacacaat

SEQ ID NO: 57589 - DNA, 25 bp, SARS Virus
gtaacacgtttgtaattacacaata

SEQ ID NO: 57590 - DNA, 25 bp, SARS Virus
taacacgtttgatattacacaataa

SEQ ID NO: 57591 - DNA, 25 bp, SARS Virus
aacacgtttgaatttacacaataaa

SEQ ID NO: 57592 - DNA, 25 bp, SARS Virus
acacgtttgaaattacacaataaaa

SEQ ID NO: 57593 - DNA, 25 bp, SARS Virus
cacgtttgaaattacacaataaaag

SEQ ID NO: 57594 - DNA, 25 bp, SARS Virus
acgtttgaaatttcacaataaaaga

SEQ ID NO: 57595 - DNA, 25 bp, SARS Virus
cgtttgaaattatacaataaaagat

SEQ ID NO: 57596 - DNA, 25 bp, SARS Virus
gtttgaaattactcaataaaagatg

SEQ ID NO: 57597 - DNA, 25 bp, SARS Virus
tttgaaattacataataaaagatga

SEQ ID NO: 57598 - DNA, 25 bp, SARS Virus
ttgaaattacactataaaagatgac

SEQ ID NO: 57599 - DNA, 25 bp, SARS Virus
tgaaattacacattaaaagatgaca

SEQ ID NO: 57600 - DNA, 25 bp, SARS Virus
gaaattacacaataaaagatgacac

SEQ ID NO: 57601 - DNA, 25 bp, SARS Virus
aaattacacaattaaagatgacaca

SEQ ID NO: 57602 - DNA, 25 bp, SARS Virus
aattacacaatataagatgacacaa

SEQ ID NO: 57603 - DNA, 25 bp, SARS Virus
attacacaataatagatgacacaaa

SEQ ID NO: 57604 - DNA, 25 bp, SARS Virus
ttacacaataaatgatgacacaaag

SEQ ID NO: 57605 - DNA, 25 bp, SARS Virus
tacacaataaaatatgacacaaagg

SEQ ID NO: 57606 - DNA, 25 bp, SARS Virus
acacaataaaagttgacacaaaggt

SEQ ID NO: 57607 - DNA, 25 bp, SARS Virus
cacaataaaagatgacacaaaggtg

SEQ ID NO: 57608 - DNA, 25 bp, SARS Virus
acaataaaagattacacaaaggtgg

SEQ ID NO: 57609 - DNA, 25 bp, SARS Virus
caataaaagatgtcacaaaggtgga

SEQ ID NO: 57610 - DNA, 25 bp, SARS Virus
aataaaagatgatacaaaggtggat

SEQ ID NO: 57611 - DNA, 25 bp, SARS Virus
ataaaagatgactcaaaggtggatg

SEQ ID NO: 57612 - DNA, 25 bp, SARS Virus
taaaagatgacataaaggtggatgt

SEQ ID NO: 57613 - DNA, 25 bp, SARS Virus
aaaagatgacactaaggtggatgtt

SEQ ID NO: 57614 - DNA, 25 bp, SARS Virus
aaagatgacacataggtggatgttc

SEQ ID NO: 57615 - DNA, 25 bp, SARS Virus
aagatgacacaatggtggatgttca

SEQ ID NO: 57616 - DNA, 25 bp, SARS Virus
agatgacacaaatgtggatgttcaa

SEQ ID NO: 57617 - DNA, 25 bp, SARS Virus
gatgacacaaagttggatgttcaaa

SEQ ID NO: 57618 - DNA, 25 bp, SARS Virus
atgacacaaaggtggatgttcaaaa

SEQ ID NO: 57619 - DNA, 25 bp, SARS Virus
tgacacaaaggttgatgttcaaaac

SEQ ID NO: 57620 - DNA, 25 bp, SARS Virus
gacacaaaggtgtatgttcaaaacc

SEQ ID NO: 57621 - DNA, 25 bp, SARS Virus
acacaaaggtggttgttcaaaacct

SEQ ID NO: 57622 - DNA, 25 bp, SARS Virus
cacaaaggtggatgttcaaaacctg

SEQ ID NO: 57623 - DNA, 25 bp, SARS Virus
acaaaggtggattttcaaaacctgg

SEQ ID NO: 57624 - DNA, 25 bp, SARS Virus
caaaggtggatgttcaaaacctggt

SEQ ID NO: 57625 - DNA, 25 bp, SARS Virus
aaaggtggatgttcaaaacctggtg

SEQ ID NO: 57626 - DNA, 25 bp, SARS Virus
aaggtggatgtttaaaacctggtga

SEQ ID NO: 57627 - DNA, 25 bp, SARS Virus
aggtggatgttctaaacctggtgat

SEQ ID NO: 57628 - DNA, 25 bp, SARS Virus
ggtggatgttcataacctggtgatc

SEQ ID NO: 57629 - DNA, 25 bp, SARS Virus
gtggatgttcaatacctggtgatca

SEQ ID NO: 57630 - DNA, 25 bp, SARS Virus
tggatgttcaaatcctggtgatcat

SEQ ID NO: 57631 - DNA, 25 bp, SARS Virus
ggatgttcaaaatctggtgatcatt

SEQ ID NO: 57632 - DNA, 25 bp, SARS Virus
gatgttcaaaacttggtgatcattc

SEQ ID NO: 57633 - DNA, 25 bp, SARS Virus
atgttcaaaacctggtgatcattct

SEQ ID NO: 57634 - DNA, 25 bp, SARS Virus
tgttcaaaaccttgtgatcattctt

SEQ ID NO: 57635 - DNA, 25 bp, SARS Virus
gttcaaaacctgttgatcattcttt

SEQ ID NO: 57636 - DNA, 25 bp, SARS Virus
ttcaaaacctggtgatcattctttt

SEQ ID NO: 57637 - DNA, 25 bp, SARS Virus
tcaaaacctggttatcattcttttt

SEQ ID NO: 57638 - DNA, 25 bp, SARS Virus
caaaacctggtgttcattcttttta

SEQ ID NO: 57639 - DNA, 25 bp, SARS Virus
aaaacctggtgatcattctttttat

SEQ ID NO: 57640 - DNA, 25 bp, SARS Virus
aaacctggtgattattctttttata

SEQ ID NO: 57641 - DNA, 25 bp, SARS Virus
aacctggtgatctttctttttataa

SEQ ID NO: 57642 - DNA, 25 bp, SARS Virus
acctggtgatcattctttttataaa

SEQ ID NO: 57643 - DNA, 25 bp, SARS Virus
cctggtgatcattctttttataaac

SEQ ID NO: 57644 - DNA, 25 bp, SARS Virus
ctggtgatcattttttttataaaca

SEQ ID NO: 57645 - DNA, 25 bp, SARS Virus
tggtgatcattctttttataaacat

SEQ ID NO: 57646 - DNA, 25 bp, SARS Virus
ggtgatcattctttttataaacatc

SEQ ID NO: 57647 - DNA, 25 bp, SARS Virus
gtgatcattctttttataaacatct

SEQ ID NO: 57648 - DNA, 25 bp, SARS Virus
tgatcattctttttataaacatcta

SEQ ID NO: 57649 - DNA, 25 bp, SARS Virus
gatcattctttttataaacatctac

SEQ ID NO: 57650 - DNA, 25 bp, SARS Virus
atcattctttttttaaacatctacc

SEQ ID NO: 57651 - DNA, 25 bp, SARS Virus
tcattctttttataaacatctacca

SEQ ID NO: 57652 - DNA, 25 bp, SARS Virus
cattctttttattaacatctaccac

SEQ ID NO: 57653 - DNA, 25 bp, SARS Virus
attctttttatatacatctaccaca

SEQ ID NO: 57654 - DNA, 25 bp, SARS Virus
ttctttttataatcatctaccacaa

SEQ ID NO: 57655 - DNA, 25 bp, SARS Virus
tctttttataaatatctaccacaag

SEQ ID NO: 57656 - DNA, 25 bp, SARS Virus
ctttttataaacttctaccacaagg

SEQ ID NO: 57657 - DNA, 25 bp, SARS Virus
tttttataaacatctaccacaagga

SEQ ID NO: 57658 - DNA, 25 bp, SARS Virus
ttttataaacatttaccacaaggaa

SEQ ID NO: 57659 - DNA, 25 bp, SARS Virus
tttataaacatctaccacaaggaaa

SEQ ID NO: 57660 - DNA, 25 bp, SARS Virus
ttataaacatcttccacaaggaaaa

SEQ ID NO: 57661 - DNA, 25 bp, SARS Virus
tataaacatctatcacaaggaaaac

SEQ ID NO: 57662 - DNA, 25 bp, SARS Virus
ataaacatctactacaaggaaaaca

SEQ ID NO: 57663 - DNA, 25 bp, SARS Virus
taaacatctacctcaaggaaaacaa

SEQ ID NO: 57664 - DNA, 25 bp, SARS Virus
aaacatctaccataaggaaaacaac

SEQ ID NO: 57665 - DNA, 25 bp, SARS Virus
aacatctaccactaggaaaacaaca

SEQ ID NO: 57666 - DNA, 25 bp, SARS Virus
acatctaccacatggaaaacaacaa

SEQ ID NO: 57667 - DNA, 25 bp, SARS Virus
catctaccacaatgaaaacaacaaa

SEQ ID NO: 57668 - DNA, 25 bp, SARS Virus
atctaccacaagtaaaacaacaaag

SEQ ID NO: 57669 - DNA, 25 bp, SARS Virus
tctaccacaaggtaaacaacaaagt

SEQ ID NO: 57670 - DNA, 25 bp, SARS Virus
ctaccacaaggataacaacaaagtt

SEQ ID NO: 57671 - DNA, 25 bp, SARS Virus
taccacaaggaatacaacaaagttg

SEQ ID NO: 57672 - DNA, 25 bp, SARS Virus
accacaaggaaatcaacaaagttga

SEQ ID NO: 57673 - DNA, 25 bp, SARS Virus
ccacaaggaaaataacaaagttgac

SEQ ID NO: 57674 - DNA, 25 bp, SARS Virus
cacaaggaaaactacaaagttgacc

SEQ ID NO: 57675 - DNA, 25 bp, SARS Virus
acaaggaaaacatcaaagttgacct

SEQ ID NO: 57676 - DNA, 25 bp, SARS Virus
caaggaaaacaataaagttgaccta

SEQ ID NO: 57677 - DNA, 25 bp, SARS Virus
aaggaaaacaactaagttgacctat

SEQ ID NO: 57678 - DNA, 25 bp, SARS Virus
aggaaaacaacatagttgacctatg

SEQ ID NO: 57679 - DNA, 25 bp, SARS Virus
ggaaaacaacaatgttgacctatgg

SEQ ID NO: 57680 - DNA, 25 bp, SARS Virus
gaaaacaacaaatttgacctatggt

SEQ ID NO: 57681 - DNA, 25 bp, SARS Virus
aaaacaacaaagttgacctatggta

SEQ ID NO: 57682 - DNA, 25 bp, SARS Virus
aaacaacaaagttgacctatggtaa

SEQ ID NO: 57683 - DNA, 25 bp, SARS Virus
aacaacaaagtttacctatggtaaa

SEQ ID NO: 57684 - DNA, 25 bp, SARS Virus
acaacaaagttgtcctatggtaaaa

SEQ ID NO: 57685 - DNA, 25 bp, SARS Virus
caacaaagttgatctatggtaaaag

SEQ ID NO: 57686 - DNA, 25 bp, SARS Virus
aacaaagttgacttatggtaaaagc

SEQ ID NO: 57687 - DNA, 25 bp, SARS Virus
acaaagttgacctatggtaaaagca

SEQ ID NO: 57688 - DNA, 25 bp, SARS Virus
caaagttgacctttggtaaaagcac

SEQ ID NO: 57689 - DNA, 25 bp, SARS Virus
aaagttgacctatggtaaaagcact

SEQ ID NO: 57690 - DNA, 25 bp, SARS Virus
aagttgacctattgtaaaagcactc

SEQ ID NO: 57691 - DNA, 25 bp, SARS Virus
agttgacctatgttaaaagcactca

SEQ ID NO: 57692 - DNA, 25 bp, SARS Virus
gttgacctatggtaaaagcactcaa

SEQ ID NO: 57693 - DNA, 25 bp, SARS Virus
ttgacctatggttaaagcactcaat

SEQ ID NO: 57694 - DNA, 25 bp, SARS Virus
tgacctatggtataagcactcaatc

SEQ ID NO: 57695 - DNA, 25 bp, SARS Virus
gacctatggtaatagcactcaatcc

SEQ ID NO: 57696 - DNA, 25 bp, SARS Virus
acctatggtaaatgcactcaatcct

SEQ ID NO: 57697 - DNA, 25 bp, SARS Virus
cctatggtaaaatcactcaatcctc

SEQ ID NO: 57698 - DNA, 25 bp, SARS Virus
ctatggtaaaagtactcaatcctca

SEQ ID NO: 57699 - DNA, 25 bp, SARS Virus
tatggtaaaagctctcaatcctcag

SEQ ID NO: 57700 - DNA, 25 bp, SARS Virus
atggtaaaagcattcaatcctcagc

SEQ ID NO: 57701 - DNA, 25 bp, SARS Virus
tggtaaaagcactcaatcctcagca

SEQ ID NO: 57702 - DNA, 25 bp, SARS Virus
ggtaaaagcacttaatcctcagcat

SEQ ID NO: 57703 - DNA, 25 bp, SARS Virus
gtaaaagcactctatcctcagcatg

SEQ ID NO: 57704 - DNA, 25 bp, SARS Virus
taaaagcactcattcctcagcatgt

SEQ ID NO: 57705 - DNA, 25 bp, SARS Virus
aaaagcactcaatcctcagcatgta

SEQ ID NO: 57706 - DNA, 25 bp, SARS Virus
aaagcactcaattctcagcatgtat

SEQ ID NO: 57707 - DNA, 25 bp, SARS Virus
aagcactcaatcttcagcatgtatt

SEQ ID NO: 57708 - DNA, 25 bp, SARS Virus
agcactcaatcctcagcatgtatta

SEQ ID NO: 57709 - DNA, 25 bp, SARS Virus
gcactcaatccttagcatgtattag

SEQ ID NO: 57710 - DNA, 25 bp, SARS Virus
cactcaatcctctgcatgtattagt

SEQ ID NO: 57711 - DNA, 25 bp, SARS Virus
actcaatcctcatcatgtattagtc

SEQ ID NO: 57712 - DNA, 25 bp, SARS Virus
ctcaatcctcagtatgtattagtcc

SEQ ID NO: 57713 - DNA, 25 bp, SARS Virus
tcaatcctcagcatgtattagtcct

SEQ ID NO: 57714 - DNA, 25 bp, SARS Virus
caatcctcagcaagtattagtccta

SEQ ID NO: 57715 - DNA, 25 bp, SARS Virus
aatcctcagcatatattagtcctac

SEQ ID NO: 57716 - DNA, 25 bp, SARS Virus
atcctcagcatgaattagtcctaca

SEQ ID NO: 57717 - DNA, 25 bp, SARS Virus
tcctcagcatgtattagtcctacat

SEQ ID NO: 57718 - DNA, 25 bp, SARS Virus
cctcagcatgtaatagtcctacatt

SEQ ID NO: 57719 - DNA, 25 bp, SARS Virus
ctcagcatgtataagtcctacattt

SEQ ID NO: 57720 - DNA, 25 bp, SARS Virus
tcagcatgtattagtcctacatttg

SEQ ID NO: 57721 - DNA, 25 bp, SARS Virus
cagcatgtattaatcctacatttga

SEQ ID NO: 57722 - DNA, 25 bp, SARS Virus
agcatgtattagacctacatttgaa

SEQ ID NO: 57723 - DNA, 25 bp, SARS Virus
gcatgtattagtactacatttgaat

SEQ ID NO: 57724 - DNA, 25 bp, SARS Virus
catgtattagtcatacatttgaatg

SEQ ID NO: 57725 - DNA, 25 bp, SARS Virus
atgtattagtccaacatttgaatgt

SEQ ID NO: 57726 - DNA, 25 bp, SARS Virus
tgtattagtcctacatttgaatgta

SEQ ID NO: 57727 - DNA, 25 bp, SARS Virus
gtattagtcctaaatttgaatgtat

SEQ ID NO: 57728 - DNA, 25 bp, SARS Virus
tattagtcctacatttgaatgtatc

SEQ ID NO: 57729 - DNA, 25 bp, SARS Virus
attagtcctacaattgaatgtatcg

SEQ ID NO: 57730 - DNA, 25 bp, SARS Virus
ttagtcctacatatgaatgtatcga

SEQ ID NO: 57731 - DNA, 25 bp, SARS Virus
tagtcctacattagaatgtatcgag

SEQ ID NO: 57732 - DNA, 25 bp, SARS Virus
agtcctacatttaaatgtatcgagc

SEQ ID NO: 57733 - DNA, 25 bp, SARS Virus
gtcctacatttgaatgtatcgagcg

SEQ ID NO: 57734 - DNA, 25 bp, SARS Virus
tcctacatttgaatgtatcgagcgc

SEQ ID NO: 57735 - DNA, 25 bp, SARS Virus
cctacatttgaaagtatcgagcgca

SEQ ID NO: 57736 - DNA, 25 bp, SARS Virus
ctacatttgaatatatcgagcgcag

SEQ ID NO: 57737 - DNA, 25 bp, SARS Virus
tacatttgaatgaatcgagcgcaga

SEQ ID NO: 57738 - DNA, 25 bp, SARS Virus
acatttgaatgtatcgagcgcagag

SEQ ID NO: 57739 - DNA, 25 bp, SARS Virus
catttgaatgtaacgagcgcagagt

SEQ ID NO: 57740 - DNA, 25 bp, SARS Virus
atttgaatgtatagagcgcagagtc

SEQ ID NO: 57741 - DNA, 25 bp, SARS Virus
tttgaatgtatcaagcgcagagtca

SEQ ID NO: 57742 - DNA, 25 bp, SARS Virus
ttgaatgtatcgagcgcagagtcaa

SEQ ID NO: 57743 - DNA, 25 bp, SARS Virus
tgaatgtatcgaacgcagagtcaaa

SEQ ID NO: 57744 - DNA, 25 bp, SARS Virus
gaatgtatcgagagcagagtcaaag

SEQ ID NO: 57745 - DNA, 25 bp, SARS Virus
aatgtatcgagcacagagtcaaagt

SEQ ID NO: 57746 - DNA, 25 bp, SARS Virus
atgtatcgagcgaagagtcaaagtt

SEQ ID NO: 57747 - DNA, 25 bp, SARS Virus
tgtatcgagcgcagagtcaaagttc

SEQ ID NO: 57748 - DNA, 25 bp, SARS Virus
gtatcgagcgcaaagtcaaagttcc

SEQ ID NO: 57749 - DNA, 25 bp, SARS Virus
tatcgagcgcagagtcaaagttcct

SEQ ID NO: 57750 - DNA, 25 bp, SARS Virus
atcgagcgcagaatcaaagttcctt

SEQ ID NO: 57751 - DNA, 25 bp, SARS Virus
tcgagcgcagagacaaagttccttg

SEQ ID NO: 57752 - DNA, 25 bp, SARS Virus
cgagcgcagagtaaaagttccttga

SEQ ID NO: 57753 - DNA, 25 bp, SARS Virus
gagcgcagagtcaaagttccttgaa

SEQ ID NO: 57754 - DNA, 25 bp, SARS Virus
agcgcagagtcaaagttccttgaaa

SEQ ID NO: 57755 - DNA, 25 bp, SARS Virus
gcgcagagtcaaagttccttgaaaa

SEQ ID NO: 57756 - DNA, 25 bp, SARS Virus
cgcagagtcaaaattccttgaaaat

SEQ ID NO: 57757 - DNA, 25 bp, SARS Virus
gcagagtcaaagatccttgaaaatc

SEQ ID NO: 57758 - DNA, 25 bp, SARS Virus
cagagtcaaagtaccttgaaaatca

SEQ ID NO: 57759 - DNA, 25 bp, SARS Virus
agagtcaaagttacttgaaaatcac

SEQ ID NO: 57760 - DNA, 25 bp, SARS Virus
gagtcaaagttcattgaaaatcaca

SEQ ID NO: 57761 - DNA, 25 bp, SARS Virus
agtcaaagttccatgaaaatcacat

SEQ ID NO: 57762 - DNA, 25 bp, SARS Virus
gtcaaagttcctagaaaatcacata

SEQ ID NO: 57763 - DNA, 25 bp, SARS Virus
tcaaagttccttaaaaatcacatac

SEQ ID NO: 57764 - DNA, 25 bp, SARS Virus
caaagttccttgaaaatcacatacg

SEQ ID NO: 57765 - DNA, 25 bp, SARS Virus
aaagttccttgaaaatcacatacga

SEQ ID NO: 57766 - DNA, 25 bp, SARS Virus
aagttccttgaaaatcacatacgac

SEQ ID NO: 57767 - DNA, 25 bp, SARS Virus
agttccttgaaaatcacatacgacg

SEQ ID NO: 57768 - DNA, 25 bp, SARS Virus
gttccttgaaaaacacatacgacga

SEQ ID NO: 57769 - DNA, 25 bp, SARS Virus
ttccttgaaaataacatacgacgac

SEQ ID NO: 57770 - DNA, 25 bp, SARS Virus
tccttgaaaatcacatacgacgact

SEQ ID NO: 57771 - DNA, 25 bp, SARS Virus
ccttgaaaatcaaatacgacgacta

SEQ ID NO: 57772 - DNA, 25 bp, SARS Virus
cttgaaaatcacatacgacgactag

SEQ ID NO: 57773 - DNA, 25 bp, SARS Virus
ttgaaaatcacaaacgacgactagg

SEQ ID NO: 57774 - DNA, 25 bp, SARS Virus
tgaaaatcacatacgacgactaggt

SEQ ID NO: 57775 - DNA, 25 bp, SARS Virus
gaaaatcacataagacgactaggtc

SEQ ID NO: 57776 - DNA, 25 bp, SARS Virus
aaaatcacatacaacgactaggtcg

SEQ ID NO: 57777 - DNA, 25 bp, SARS Virus
aaatcacatacgacgactaggtcga

SEQ ID NO: 57778 - DNA, 25 bp, SARS Virus
aatcacatacgaagactaggtcgat

SEQ ID NO: 57779 - DNA, 25 bp, SARS Virus
atcacatacgacaactaggtcgata

SEQ ID NO: 57780 - DNA, 25 bp, SARS Virus
tcacatacgacgactaggtcgatac

SEQ ID NO: 57781 - DNA, 25 bp, SARS Virus
cacatacgacgaataggtcgatacg

SEQ ID NO: 57782 - DNA, 25 bp, SARS Virus
acatacgacgacaaggtcgatacgt

SEQ ID NO: 57783 - DNA, 25 bp, SARS Virus
catacgacgactaggtcgatacgta

SEQ ID NO: 57784 - DNA, 25 bp, SARS Virus
atacgacgactaagtcgatacgtac

SEQ ID NO: 57785 - DNA, 25 bp, SARS Virus
tacgacgactagatcgatacgtacg

SEQ ID NO: 57786 - DNA, 25 bp, SARS Virus
acgacgactaggacgatacgtacgt

SEQ ID NO: 57787 - DNA, 25 bp, SARS Virus
cgacgactaggtagatacgtacgtc

SEQ ID NO: 57788 - DNA, 25 bp, SARS Virus
gacgactaggtcaatacgtacgtcg

SEQ ID NO: 57789 - DNA, 25 bp, SARS Virus
acgactaggtcgatacgtacgtcga

SEQ ID NO: 57790 - DNA, 25 bp, SARS Virus
cgactaggtcgaaacgtacgtcgaa

SEQ ID NO: 57791 - DNA, 25 bp, SARS Virus
gactaggtcgatacgtacgtcgaag

SEQ ID NO: 57792 - DNA, 25 bp, SARS Virus
actaggtcgataagtacgtcgaaga

SEQ ID NO: 57793 - DNA, 25 bp, SARS Virus
ctaggtcgatacatacgtcgaagac

SEQ ID NO: 57794 - DNA, 25 bp, SARS Virus
taggtcgatacgaacgtcgaagacc

SEQ ID NO: 57795 - DNA, 25 bp, SARS Virus
aggtcgatacgtacgtcgaagaccg

SEQ ID NO: 57796 - DNA, 25 bp, SARS Virus
ggtcgatacgtaagtcgaagaccgt

SEQ ID NO: 57797 - DNA, 25 bp, SARS Virus
gtcgatacgtacatcgaagaccgtt

SEQ ID NO: 57798 - DNA, 25 bp, SARS Virus
tcgatacgtacgacgaagaccgtta

SEQ ID NO: 57799 - DNA, 25 bp, SARS Virus
cgatacgtacgtagaagaccgttaa

SEQ ID NO: 57800 - DNA, 25 bp, SARS Virus
gatacgtacgtcaaagaccgttaaa

SEQ ID NO: 57801 - DNA, 25 bp, SARS Virus
atacgtacgtcgaagaccgttaaat

SEQ ID NO: 57802 - DNA, 25 bp, SARS Virus
tacgtacgtcgaagaccgttaaata

SEQ ID NO: 57803 - DNA, 25 bp, SARS Virus
acgtacgtcgaaaaccgttaaataa

SEQ ID NO: 57804 - DNA, 25 bp, SARS Virus
cgtacgtcgaagaccgttaaataac

SEQ ID NO: 57805 - DNA, 25 bp, SARS Virus
gtacgtcgaagaacgttaaataacg

SEQ ID NO: 57806 - DNA, 25 bp, SARS Virus
tacgtcgaagacagttaaataacga

SEQ ID NO: 57807 - DNA, 25 bp, SARS Virus
acgtcgaagaccattaaataacgat

SEQ ID NO: 57808 - DNA, 25 bp, SARS Virus
cgtcgaagaccgataaataacgatc

SEQ ID NO: 57809 - DNA, 25 bp, SARS Virus
gtcgaagaccgtaaaataacgatct

SEQ ID NO: 57810 - DNA, 25 bp, SARS Virus
tcgaagaccgttaaataacgatcta

SEQ ID NO: 57811 - DNA, 25 bp, SARS Virus
cgaagaccgttaaataacgatctat

SEQ ID NO: 57812 - DNA, 25 bp, SARS Virus
gaagaccgttaaataacgatctatt

SEQ ID NO: 57813 - DNA, 25 bp, SARS Virus
aagaccgttaaaaaacgatctattt

SEQ ID NO: 57814 - DNA, 25 bp, SARS Virus
agaccgttaaataacgatctatttg

SEQ ID NO: 57815 - DNA, 25 bp, SARS Virus
gaccgttaaataacgatctatttgc

SEQ ID NO: 57816 - DNA, 25 bp, SARS Virus
accgttaaataaagatctatttgcg

SEQ ID NO: 57817 - DNA, 25 bp, SARS Virus
ccgttaaataacaatctatttgcgt

SEQ ID NO: 57818 - DNA, 25 bp, SARS Virus
cgttaaataacgatctatttgcgtg

SEQ ID NO: 57819 - DNA, 25 bp, SARS Virus
gttaaataacgaactatttgcgtga

SEQ ID NO: 57820 - DNA, 25 bp, SARS Virus
ttaaataacgatatatttgcgtgat

SEQ ID NO: 57821 - DNA, 25 bp, SARS Virus
taaataacgatcaatttgcgtgatg

SEQ ID NO: 57822 - DNA, 25 bp, SARS Virus
aaataacgatctatttgcgtgatgt

SEQ ID NO: 57823 - DNA, 25 bp, SARS Virus
aataacgatctaattgcgtgatgta

SEQ ID NO: 57824 - DNA, 25 bp, SARS Virus
ataacgatctatatgcgtgatgtac

SEQ ID NO: 57825 - DNA, 25 bp, SARS Virus
taacgatctattagcgtgatgtacg

SEQ ID NO: 57826 - DNA, 25 bp, SARS Virus
aacgatctatttacgtgatgtacga

SEQ ID NO: 57827 - DNA, 25 bp, SARS Virus
acgatctatttgagtgatgtacgaa

SEQ ID NO: 57828 - DNA, 25 bp, SARS Virus
cgatctatttgcatgatgtacgaaa

SEQ ID NO: 57829 - DNA, 25 bp, SARS Virus
gatctatttgcgagatgtacgaaaa

SEQ ID NO: 57830 - DNA, 25 bp, SARS Virus
atctatttgcgtaatgtacgaaaag

SEQ ID NO: 57831 - DNA, 25 bp, SARS Virus
tctatttgcgtgatgtacgaaaagt

SEQ ID NO: 57832 - DNA, 25 bp, SARS Virus
ctatttgcgtgaagtacgaaaagtc

SEQ ID NO: 57833 - DNA, 25 bp, SARS Virus
tatttgcgtgatatacgaaaagtca

SEQ ID NO: 57834 - DNA, 25 bp, SARS Virus
atttgcgtgatgaacgaaaagtcat

SEQ ID NO: 57835 - DNA, 25 bp, SARS Virus
tttgcgtgatgtacgaaaagtcatc

SEQ ID NO: 57836 - DNA, 25 bp, SARS Virus
ttgcgtgatgtaagaaaagtcatcg

SEQ ID NO: 57837 - DNA, 25 bp, SARS Virus
tgcgtgatgtacaaaaagtcatcga

SEQ ID NO: 57838 - DNA, 25 bp, SARS Virus
gcgtgatgtacgaaaagtcatcgac

SEQ ID NO: 57839 - DNA, 25 bp, SARS Virus
cgtgatgtacgaaaagtcatcgacg

SEQ ID NO: 57840 - DNA, 25 bp, SARS Virus
gtgatgtacgaaaagtcatcgacgt

SEQ ID NO: 57841 - DNA, 25 bp, SARS Virus
tgatgtacgaaaagtcatcgacgtg

SEQ ID NO: 57842 - DNA, 25 bp, SARS Virus
gatgtacgaaaaatcatcgacgtga

SEQ ID NO: 57843 - DNA, 25 bp, SARS Virus
atgtacgaaaagacatcgacgtgat

SEQ ID NO: 57844 - DNA, 25 bp, SARS Virus
tgtacgaaaagtaatcgacgtgatt

SEQ ID NO: 57845 - DNA, 25 bp, SARS Virus
gtacgaaaagtcatcgacgtgattg

SEQ ID NO: 57846 - DNA, 25 bp, SARS Virus
tacgaaaagtcaacgacgtgattgt

SEQ ID NO: 57847 - DNA, 25 bp, SARS Virus
acgaaaagtcatagacgtgattgtt

SEQ ID NO: 57848 - DNA, 25 bp, SARS Virus
cgaaaagtcatcaacgtgattgttt

SEQ ID NO: 57849 - DNA, 25 bp, SARS Virus
gaaaagtcatcgacgtgattgtttg

SEQ ID NO: 57850 - DNA, 25 bp, SARS Virus
aaaagtcatcgaagtgattgtttgt

SEQ ID NO: 57851 - DNA, 25 bp, SARS Virus
aaagtcatcgacatgattgtttgtt

SEQ ID NO: 57852 - DNA, 25 bp, SARS Virus
aagtcatcgacgagattgtttgtta

SEQ ID NO: 57853 - DNA, 25 bp, SARS Virus
agtcatcgacgtaattgtttgttac

SEQ ID NO: 57854 - DNA, 25 bp, SARS Virus
gtcatcgacgtgattgtttgttaca

SEQ ID NO: 57855 - DNA, 25 bp, SARS Virus
tcatcgacgtgaatgtttgttacaa

SEQ ID NO: 57856 - DNA, 25 bp, SARS Virus
catcgacgtgatagtttgttacaac

SEQ ID NO: 57857 - DNA, 25 bp, SARS Virus
atcgacgtgattatttgttacaacg

SEQ ID NO: 57858 - DNA, 25 bp, SARS Virus
tcgacgtgattgattgttacaacga

SEQ ID NO: 57859 - DNA, 25 bp, SARS Virus
cgacgtgattgtatgttacaacgaa

SEQ ID NO: 57860 - DNA, 25 bp, SARS Virus
gacgtgattgttagttacaacgaaa

SEQ ID NO: 57861 - DNA, 25 bp, SARS Virus
acgtgattgtttattacaacgaaaa

SEQ ID NO: 57862 - DNA, 25 bp, SARS Virus
cgtgattgtttgatacaacgaaaag

SEQ ID NO: 57863 - DNA, 25 bp, SARS Virus
gtgattgtttgtaacaacgaaaagt

SEQ ID NO: 57864 - DNA, 25 bp, SARS Virus
tgattgtttgttacaacgaaaagtt

SEQ ID NO: 57865 - DNA, 25 bp, SARS Virus
gattgtttgttaaaacgaaaagttt

SEQ ID NO: 57866 - DNA, 25 bp, SARS Virus
attgtttgttacaacgaaaagtttg

SEQ ID NO: 57867 - DNA, 25 bp, SARS Virus
ttgtttgttacaacgaaaagtttga

SEQ ID NO: 57868 - DNA, 25 bp, SARS Virus
tgtttgttacaaagaaaagtttgac

SEQ ID NO: 57869 - DNA, 25 bp, SARS Virus
gtttgttacaacaaaaagtttgaca

SEQ ID NO: 57870 - DNA, 25 bp, SARS Virus
tttgttacaacgaaaagtttgacag

SEQ ID NO: 57871 - DNA, 25 bp, SARS Virus
ttgttacaacgaaaagtttgacagt

SEQ ID NO: 57872 - DNA, 25 bp, SARS Virus
tgttacaacgaaaagtttgacagtt

SEQ ID NO: 57873 - DNA, 25 bp, SARS Virus
gttacaacgaaaagtttgacagttt

SEQ ID NO: 57874 - DNA, 25 bp, SARS Virus
ttacaacgaaaaatttgacagtttg

SEQ ID NO: 57875 - DNA, 25 bp, SARS Virus
tacaacgaaaagattgacagtttgg

SEQ ID NO: 57876 - DNA, 25 bp, SARS Virus
acaacgaaaagtatgacagtttggg

SEQ ID NO: 57877 - DNA, 25 bp, SARS Virus
caacgaaaagttagacagtttgggc

SEQ ID NO: 57878 - DNA, 25 bp, SARS Virus
aacgaaaagtttaacagtttgggcc

SEQ ID NO: 57879 - DNA, 25 bp, SARS Virus
acgaaaagtttgacagtttgggcca

SEQ ID NO: 57880 - DNA, 25 bp, SARS Virus
cgaaaagtttgaaagtttgggccat

SEQ ID NO: 57881 - DNA, 25 bp, SARS Virus
gaaaagtttgacagtttgggccatt

SEQ ID NO: 57882 - DNA, 25 bp, SARS Virus
aaaagtttgacaatttgggccatta

SEQ ID NO: 57883 - DNA, 25 bp, SARS Virus
aaagtttgacagattgggccattaa

SEQ ID NO: 57884 - DNA, 25 bp, SARS Virus
aagtttgacagtatgggccattaaa

SEQ ID NO: 57885 - DNA, 25 bp, SARS Virus
agtttgacagttagggccattaaaa

SEQ ID NO: 57886 - DNA, 25 bp, SARS Virus
gtttgacagtttaggccattaaaat

SEQ ID NO: 57887 - DNA, 25 bp, SARS Virus
tttgacagtttgagccattaaaatt

SEQ ID NO: 57888 - DNA, 25 bp, SARS Virus
ttgacagtttggaccattaaaatta

SEQ ID NO: 57889 - DNA, 25 bp, SARS Virus
tgacagtttgggacattaaaattat

SEQ ID NO: 57890 - DNA, 25 bp, SARS Virus
gacagtttgggcaattaaaattatt

SEQ ID NO: 57891 - DNA, 25 bp, SARS Virus
acagtttgggccattaaaattattt

SEQ ID NO: 57892 - DNA, 25 bp, SARS Virus
cagtttgggccaataaaattatttc

SEQ ID NO: 57893 - DNA, 25 bp, SARS Virus
agtttgggccataaaaattatttct

SEQ ID NO: 57894 - DNA, 25 bp, SARS Virus
gtttgggccattaaaattatttctg

SEQ ID NO: 57895 - DNA, 25 bp, SARS Virus
tttgggccattaaaattatttctga

SEQ ID NO: 57896 - DNA, 25 bp, SARS Virus
ttgggccattaaaattatttctgaa

SEQ ID NO: 57897 - DNA, 25 bp, SARS Virus
tgggccattaaaattatttctgaaa

SEQ ID NO: 57898 - DNA, 25 bp, SARS Virus
gggccattaaaaatatttctgaaaa

SEQ ID NO: 57899 - DNA, 25 bp, SARS Virus
ggccattaaaataatttctgaaaat

SEQ ID NO: 57900 - DNA, 25 bp, SARS Virus
gccattaaaattatttctgaaaata

SEQ ID NO: 57901 - DNA, 25 bp, SARS Virus
ccattaaaattaattctgaaaatac

SEQ ID NO: 57902 - DNA, 25 bp, SARS Virus
cattaaaattatatctgaaaatact

SEQ ID NO: 57903 - DNA, 25 bp, SARS Virus
attaaaattattactgaaaatactg

SEQ ID NO: 57904 - DNA, 25 bp, SARS Virus
ttaaaattatttatgaaaatactga

SEQ ID NO: 57905 - DNA, 25 bp, SARS Virus
taaaattatttcagaaaatactgaa

SEQ ID NO: 57906 - DNA, 25 bp, SARS Virus
aaaattatttctaaaaatactgaaa

SEQ ID NO: 57907 - DNA, 25 bp, SARS Virus
aaattatttctgaaaatactgaaac

SEQ ID NO: 57908 - DNA, 25 bp, SARS Virus
aattatttctgaaaatactgaaacg

SEQ ID NO: 57909 - DNA, 25 bp, SARS Virus
attatttctgaaaatactgaaacga

SEQ ID NO: 57910 - DNA, 25 bp, SARS Virus
ttatttctgaaaatactgaaacgac

SEQ ID NO: 57911 - DNA, 25 bp, SARS Virus
tatttctgaaaaaactgaaacgaca

SEQ ID NO: 57912 - DNA, 25 bp, SARS Virus
atttctgaaaatactgaaacgacac

SEQ ID NO: 57913 - DNA, 25 bp, SARS Virus
tttctgaaaataatgaaacgacaca

SEQ ID NO: 57914 - DNA, 25 bp, SARS Virus
ttctgaaaatacagaaacgacacag

SEQ ID NO: 57915 - DNA, 25 bp, SARS Virus
tctgaaaatactaaaacgacacaga

SEQ ID NO: 57916 - DNA, 25 bp, SARS Virus
ctgaaaatactgaaacgacacagat

SEQ ID NO: 57917 - DNA, 25 bp, SARS Virus
tgaaaatactgaaacgacacagatt

SEQ ID NO: 57918 - DNA, 25 bp, SARS Virus
gaaaatactgaaacgacacagattt

SEQ ID NO: 57919 - DNA, 25 bp, SARS Virus
aaaatactgaaaagacacagatttc

SEQ ID NO: 57920 - DNA, 25 bp, SARS Virus
aaatactgaaacaacacagatttcc

SEQ ID NO: 57921 - DNA, 25 bp, SARS Virus
aatactgaaacgacacagatttcca

SEQ ID NO: 57922 - DNA, 25 bp, SARS Virus
atactgaaacgaaacagatttccaa

SEQ ID NO: 57923 - DNA, 25 bp, SARS Virus
tactgaaacgacacagatttccaaa

SEQ ID NO: 57924 - DNA, 25 bp, SARS Virus
actgaaacgacaaagatttccaaag

SEQ ID NO: 57925 - DNA, 25 bp, SARS Virus
ctgaaacgacacagatttccaaaga

SEQ ID NO: 57926 - DNA, 25 bp, SARS Virus
tgaaacgacacaaatttccaaagaa

SEQ ID NO: 57927 - DNA, 25 bp, SARS Virus
gaaacgacacagatttccaaagaaa

SEQ ID NO: 57928 - DNA, 25 bp, SARS Virus
aaacgacacagaattccaaagaaat

SEQ ID NO: 57929 - DNA, 25 bp, SARS Virus
aacgacacagatatccaaagaaatt

SEQ ID NO: 57930 - DNA, 25 bp, SARS Virus
acgacacagattaccaaagaaattc

SEQ ID NO: 57931 - DNA, 25 bp, SARS Virus
cgacacagatttacaaagaaattcc

SEQ ID NO: 57932 - DNA, 25 bp, SARS Virus
gacacagatttcaaaagaaattcct

SEQ ID NO: 57933 - DNA, 25 bp, SARS Virus
acacagatttccaaagaaattcctt

SEQ ID NO: 57934 - DNA, 25 bp, SARS Virus
cacagatttccaaagaaattccttc

SEQ ID NO: 57935 - DNA, 25 bp, SARS Virus
acagatttccaaagaaattccttcc

SEQ ID NO: 57936 - DNA, 25 bp, SARS Virus
cagatttccaaaaaaattccttcct

SEQ ID NO: 57937 - DNA, 25 bp, SARS Virus
agatttccaaagaaattccttcctt

SEQ ID NO: 57938 - DNA, 25 bp, SARS Virus
gatttccaaagaaattccttccttc

SEQ ID NO: 57939 - DNA, 25 bp, SARS Virus
atttccaaagaaattccttccttca

SEQ ID NO: 57940 - DNA, 25 bp, SARS Virus
tttccaaagaaaatccttccttcaa

SEQ ID NO: 57941 - DNA, 25 bp, SARS Virus
ttccaaagaaataccttccttcaag

SEQ ID NO: 57942 - DNA, 25 bp, SARS Virus
tccaaagaaattacttccttcaaga

SEQ ID NO: 57943 - DNA, 25 bp, SARS Virus
ccaaagaaattcattccttcaagac

SEQ ID NO: 57944 - DNA, 25 bp, SARS Virus
caaagaaattccatccttcaagaca

SEQ ID NO: 57945 - DNA, 25 bp, SARS Virus
aaagaaattcctaccttcaagacaa

SEQ ID NO: 57946 - DNA, 25 bp, SARS Virus
aagaaattccttacttcaagacaac

SEQ ID NO: 57947 - DNA, 25 bp, SARS Virus
agaaattccttcattcaagacaact

SEQ ID NO: 57948 - DNA, 25 bp, SARS Virus
gaaattccttccatcaagacaactt

SEQ ID NO: 57949 - DNA, 25 bp, SARS Virus
aaattccttcctacaagacaacttg

SEQ ID NO: 57950 - DNA, 25 bp, SARS Virus
aattccttccttaaagacaacttga

SEQ ID NO: 57951 - DNA, 25 bp, SARS Virus
attccttccttcaagacaacttgat

SEQ ID NO: 57952 - DNA, 25 bp, SARS Virus
ttccttccttcaagacaacttgatt

SEQ ID NO: 57953 - DNA, 25 bp, SARS Virus
tccttccttcaaaacaacttgattt

SEQ ID NO: 57954 - DNA, 25 bp, SARS Virus
ccttccttcaagacaacttgatttt

SEQ ID NO: 57955 - DNA, 25 bp, SARS Virus
cttccttcaagaaaacttgattttg

SEQ ID NO: 57956 - DNA, 25 bp, SARS Virus
ttccttcaagacaacttgattttgt

SEQ ID NO: 57957 - DNA, 25 bp, SARS Virus
tccttcaagacaacttgattttgtg

SEQ ID NO: 57958 - DNA, 25 bp, SARS Virus
ccttcaagacaaattgattttgtga

SEQ ID NO: 57959 - DNA, 25 bp, SARS Virus
cttcaagacaacatgattttgtgaa

SEQ ID NO: 57960 - DNA, 25 bp, SARS Virus
ttcaagacaactagattttgtgaag

SEQ ID NO: 57961 - DNA, 25 bp, SARS Virus
tcaagacaacttaattttgtgaaga

SEQ ID NO: 57962 - DNA, 25 bp, SARS Virus
caagacaacttgattttgtgaagaa

SEQ ID NO: 57963 - DNA, 25 bp, SARS Virus
aagacaacttgaatttgtgaagaag

SEQ ID NO: 57964 - DNA, 25 bp, SARS Virus
agacaacttgatattgtgaagaaga

SEQ ID NO: 57965 - DNA, 25 bp, SARS Virus
gacaacttgattatgtgaagaagaa

SEQ ID NO: 57966 - DNA, 25 bp, SARS Virus
acaacttgatttagtgaagaagaaa

SEQ ID NO: 57967 - DNA, 25 bp, SARS Virus
caacttgattttatgaagaagaaac

SEQ ID NO: 57968 - DNA, 25 bp, SARS Virus
aacttgattttgagaagaagaaacg

SEQ ID NO: 57969 - DNA, 25 bp, SARS Virus
acttgattttgtaaagaagaaacga

SEQ ID NO: 57970 - DNA, 25 bp, SARS Virus
cttgattttgtgaagaagaaacgag

SEQ ID NO: 57971 - DNA, 25 bp, SARS Virus
ttgattttgtgaagaagaaacgagt

SEQ ID NO: 57972 - DNA, 25 bp, SARS Virus
tgattttgtgaaaaagaaacgagtc

SEQ ID NO: 57973 - DNA, 25 bp, SARS Virus
gattttgtgaagaagaaacgagtcc

SEQ ID NO: 57974 - DNA, 25 bp, SARS Virus
attttgtgaagaagaaacgagtcct

SEQ ID NO: 57975 - DNA, 25 bp, SARS Virus
ttttgtgaagaaaaaacgagtccta

SEQ ID NO: 57976 - DNA, 25 bp, SARS Virus
tttgtgaagaagaaacgagtcctac

SEQ ID NO: 57977 - DNA, 25 bp, SARS Virus
ttgtgaagaagaaacgagtcctacc

SEQ ID NO: 57978 - DNA, 25 bp, SARS Virus
tgtgaagaagaaacgagtcctaccg

SEQ ID NO: 57979 - DNA, 25 bp, SARS Virus
gtgaagaagaaaagagtcctaccgt

SEQ ID NO: 57980 - DNA, 25 bp, SARS Virus
tgaagaagaaacaagtcctaccgtt

SEQ ID NO: 57981 - DNA, 25 bp, SARS Virus
gaagaagaaacgagtcctaccgttg

SEQ ID NO: 57982 - DNA, 25 bp, SARS Virus
aagaagaaacgaatcctaccgttgc

SEQ ID NO: 57983 - DNA, 25 bp, SARS Virus
agaagaaacgagacctaccgttgcg

SEQ ID NO: 57984 - DNA, 25 bp, SARS Virus
gaagaaacgagtactaccgttgcga

SEQ ID NO: 57985 - DNA, 25 bp, SARS Virus
aagaaacgagtcataccgttgcgac

SEQ ID NO: 57986 - DNA, 25 bp, SARS Virus
agaaacgagtccaaccgttgcgacg

SEQ ID NO: 57987 - DNA, 25 bp, SARS Virus
gaaacgagtcctaccgttgcgacga

SEQ ID NO: 57988 - DNA, 25 bp, SARS Virus
aaacgagtcctaacgttgcgacgat

SEQ ID NO: 57989 - DNA, 25 bp, SARS Virus
aacgagtcctacagttgcgacgata

SEQ ID NO: 57990 - DNA, 25 bp, SARS Virus
acgagtcctaccattgcgacgatag

SEQ ID NO: 57991 - DNA, 25 bp, SARS Virus
cgagtcctaccgatgcgacgatagt

SEQ ID NO: 57992 - DNA, 25 bp, SARS Virus
gagtcctaccgtagcgacgatagtc

SEQ ID NO: 57993 - DNA, 25 bp, SARS Virus
agtcctaccgttacgacgatagtca

SEQ ID NO: 57994 - DNA, 25 bp, SARS Virus
gtcctaccgttgagacgatagtcac

SEQ ID NO: 57995 - DNA, 25 bp, SARS Virus
tcctaccgttgcaacgatagtcact

SEQ ID NO: 57996 - DNA, 25 bp, SARS Virus
cctaccgttgcgacgatagtcacta

SEQ ID NO: 57997 - DNA, 25 bp, SARS Virus
ctaccgttgcgaagatagtcactaa

SEQ ID NO: 57998 - DNA, 25 bp, SARS Virus
taccgttgcgacaatagtcactaat

SEQ ID NO: 57999 - DNA, 25 bp, SARS Virus
accgttgcgacgatagtcactaata

SEQ ID NO: 58000 - DNA, 25 bp, SARS Virus
ccgttgcgacgaaagtcactaatac

SEQ ID NO: 58001 - DNA, 25 bp, SARS Virus
cgttgcgacgatagtcactaatact

SEQ ID NO: 58002 - DNA, 25 bp, SARS Virus
gttgcgacgataatcactaatactg

SEQ ID NO: 58003 - DNA, 25 bp, SARS Virus
ttgcgacgatagacactaatactga

SEQ ID NO: 58004 - DNA, 25 bp, SARS Virus
tgcgacgatagtaactaatactgat

SEQ ID NO: 58005 - DNA, 25 bp, SARS Virus
gcgacgatagtcactaatactgata

SEQ ID NO: 58006 - DNA, 25 bp, SARS Virus
cgacgatagtcaataatactgataa

SEQ ID NO: 58007 - DNA, 25 bp, SARS Virus
gacgatagtcacaaatactgataat

SEQ ID NO: 58008 - DNA, 25 bp, SARS Virus
acgatagtcactaatactgataata

SEQ ID NO: 58009 - DNA, 25 bp, SARS Virus
cgatagtcactaatactgataatag

SEQ ID NO: 58010 - DNA, 25 bp, SARS Virus
gatagtcactaaaactgataatagc

SEQ ID NO: 58011 - DNA, 25 bp, SARS Virus
atagtcactaatactgataatagca

SEQ ID NO: 58012 - DNA, 25 bp, SARS Virus
tagtcactaataatgataatagcaa

SEQ ID NO: 58013 - DNA, 25 bp, SARS Virus
agtcactaatacagataatagcaat

SEQ ID NO: 58014 - DNA, 25 bp, SARS Virus
gtcactaatactaataatagcaata

SEQ ID NO: 58015 - DNA, 25 bp, SARS Virus
tcactaatactgataatagcaatat

SEQ ID NO: 58016 - DNA, 25 bp, SARS Virus
cactaatactgaaaatagcaatatt

SEQ ID NO: 58017 - DNA, 25 bp, SARS Virus
actaatactgataatagcaatatta

SEQ ID NO: 58018 - DNA, 25 bp, SARS Virus
ctaatactgataatagcaatattag

SEQ ID NO: 58019 - DNA, 25 bp, SARS Virus
taatactgataaaagcaatattaga

SEQ ID NO: 58020 - DNA, 25 bp, SARS Virus
aatactgataatagcaatattagac

SEQ ID NO: 58021 - DNA, 25 bp, SARS Virus
atactgataataacaatattagacg

SEQ ID NO: 58022 - DNA, 25 bp, SARS Virus
tactgataatagaaatattagacgg

SEQ ID NO: 58023 - DNA, 25 bp, SARS Virus
actgataatagcaatattagacggt

SEQ ID NO: 58024 - DNA, 25 bp, SARS Virus
ctgataatagcaatattagacggtt

SEQ ID NO: 58025 - DNA, 25 bp, SARS Virus
tgataatagcaaaattagacggttg

SEQ ID NO: 58026 - DNA, 25 bp, SARS Virus
gataatagcaatattagacggttgt

SEQ ID NO: 58027 - DNA, 25 bp, SARS Virus
ataatagcaataatagacggttgtt

SEQ ID NO: 58028 - DNA, 25 bp, SARS Virus
taatagcaatataagacggttgtta

SEQ ID NO: 58029 - DNA, 25 bp, SARS Virus
aatagcaatattagacggttgttac

SEQ ID NO: 58030 - DNA, 25 bp, SARS Virus
atagcaatattaaacggttgttaca

SEQ ID NO: 58031 - DNA, 25 bp, SARS Virus
tagcaatattagacggttgttacac

SEQ ID NO: 58032 - DNA, 25 bp, SARS Virus
agcaatattagaaggttgttacaca

SEQ ID NO: 58033 - DNA, 25 bp, SARS Virus
gcaatattagacagttgttacacac

SEQ ID NO: 58034 - DNA, 25 bp, SARS Virus
caatattagacgattgttacacact

SEQ ID NO: 58035 - DNA, 25 bp, SARS Virus
aatattagacggatgttacacacta

SEQ ID NO: 58036 - DNA, 25 bp, SARS Virus
atattagacggtagttacacactat

SEQ ID NO: 58037 - DNA, 25 bp, SARS Virus
tattagacggttattacacactata

SEQ ID NO: 58038 - DNA, 25 bp, SARS Virus
attagacggttgatacacactatag

SEQ ID NO: 58039 - DNA, 25 bp, SARS Virus
ttagacggttgtaacacactatagt

SEQ ID NO: 58040 - DNA, 25 bp, SARS Virus
tagacggttgttacacactatagtc

SEQ ID NO: 58041 - DNA, 25 bp, SARS Virus
agacggttgttaaacactatagtct

SEQ ID NO: 58042 - DNA, 25 bp, SARS Virus
gacggttgttacacactatagtctg

SEQ ID NO: 58043 - DNA, 25 bp, SARS Virus
acggttgttacaaactatagtctgt

SEQ ID NO: 58044 - DNA, 25 bp, SARS Virus
cggttgttacacactatagtctgtt

SEQ ID NO: 58045 - DNA, 25 bp, SARS Virus
ggttgttacacaatatagtctgttg

SEQ ID NO: 58046 - DNA, 25 bp, SARS Virus
gttgttacacacaatagtctgttga

SEQ ID NO: 58047 - DNA, 25 bp, SARS Virus
ttgttacacactatagtctgttgag

SEQ ID NO: 58048 - DNA, 25 bp, SARS Virus
tgttacacactaaagtctgttgagg

SEQ ID NO: 58049 - DNA, 25 bp, SARS Virus
gttacacactatagtctgttgagga

SEQ ID NO: 58050 - DNA, 25 bp, SARS Virus
ttacacactataatctgttgaggat

SEQ ID NO: 58051 - DNA, 25 bp, SARS Virus
tacacactatagactgttgaggata

SEQ ID NO: 58052 - DNA, 25 bp, SARS Virus
acacactatagtatgttgaggataa

SEQ ID NO: 58053 - DNA, 25 bp, SARS Virus
cacactatagtcagttgaggataag

SEQ ID NO: 58054 - DNA, 25 bp, SARS Virus
acactatagtctattgaggataagc

SEQ ID NO: 58055 - DNA, 25 bp, SARS Virus
cactatagtctgatgaggataagca

SEQ ID NO: 58056 - DNA, 25 bp, SARS Virus
actatagtctgtagaggataagcat

SEQ ID NO: 58057 - DNA, 25 bp, SARS Virus
ctatagtctgttaaggataagcatc

SEQ ID NO: 58058 - DNA, 25 bp, SARS Virus
tatagtctgttgaggataagcatca

SEQ ID NO: 58059 - DNA, 25 bp, SARS Virus
atagtctgttgaagataagcatcaa

SEQ ID NO: 58060 - DNA, 25 bp, SARS Virus
tagtctgttgagaataagcatcaac

SEQ ID NO: 58061 - DNA, 25 bp, SARS Virus
agtctgttgaggataagcatcaact

SEQ ID NO: 58062 - DNA, 25 bp, SARS Virus
gtctgttgaggaaaagcatcaactt

SEQ ID NO: 58063 - DNA, 25 bp, SARS Virus
tctgttgaggataagcatcaacttc

SEQ ID NO: 58064 - DNA, 25 bp, SARS Virus
ctgttgaggataagcatcaacttca

SEQ ID NO: 58065 - DNA, 25 bp, SARS Virus
tgttgaggataaacatcaacttcaa

SEQ ID NO: 58066 - DNA, 25 bp, SARS Virus
gttgaggataagaatcaacttcaac

SEQ ID NO: 58067 - DNA, 25 bp, SARS Virus
ttgaggataagcatcaacttcaaca

SEQ ID NO: 58068 - DNA, 25 bp, SARS Virus
tgaggataagcaacaacttcaacaa

SEQ ID NO: 58069 - DNA, 25 bp, SARS Virus
gaggataagcataaacttcaacaac

SEQ ID NO: 58070 - DNA, 25 bp, SARS Virus
aggataagcatcaacttcaacaact

SEQ ID NO: 58071 - DNA, 25 bp, SARS Virus
ggataagcatcaacttcaacaacta

SEQ ID NO: 58072 - DNA, 25 bp, SARS Virus
gataagcatcaaattcaacaactat

SEQ ID NO: 58073 - DNA, 25 bp, SARS Virus
ataagcatcaacatcaacaactatt

SEQ ID NO: 58074 - DNA, 25 bp, SARS Virus
taagcatcaactacaacaactattt

SEQ ID NO: 58075 - DNA, 25 bp, SARS Virus
aagcatcaacttaaacaactattta

SEQ ID NO: 58076 - DNA, 25 bp, SARS Virus
agcatcaacttcaacaactatttat

SEQ ID NO: 58077 - DNA, 25 bp, SARS Virus
gcatcaacttcaacaactatttatg

SEQ ID NO: 58078 - DNA, 25 bp, SARS Virus
catcaacttcaaaaactatttatga

SEQ ID NO: 58079 - DNA, 25 bp, SARS Virus
atcaacttcaacaactatttatgaa

SEQ ID NO: 58080 - DNA, 25 bp, SARS Virus
tcaacttcaacaactatttatgaaa

SEQ ID NO: 58081 - DNA, 25 bp, SARS Virus
caacttcaacaaatatttatgaaac

SEQ ID NO: 58082 - DNA, 25 bp, SARS Virus
aacttcaacaacaatttatgaaact

SEQ ID NO: 58083 - DNA, 25 bp, SARS Virus
acttcaacaactatttatgaaacta

SEQ ID NO: 58084 - DNA, 25 bp, SARS Virus
cttcaacaactaattatgaaactaa

SEQ ID NO: 58085 - DNA, 25 bp, SARS Virus
ttcaacaactatatatgaaactaac

SEQ ID NO: 58086 - DNA, 25 bp, SARS Virus
tcaacaactattaatgaaactaaca

SEQ ID NO: 58087 - DNA, 25 bp, SARS Virus
caacaactatttatgaaactaacaa

SEQ ID NO: 58088 - DNA, 25 bp, SARS Virus
aacaactatttaagaaactaacaat

SEQ ID NO: 58089 - DNA, 25 bp, SARS Virus
acaactatttataaaactaacaatg

SEQ ID NO: 58090 - DNA, 25 bp, SARS Virus
caactatttatgaaactaacaatgc

SEQ ID NO: 58091 - DNA, 25 bp, SARS Virus
aactatttatgaaactaacaatgct

SEQ ID NO: 58092 - DNA, 25 bp, SARS Virus
actatttatgaaactaacaatgcta

SEQ ID NO: 58093 - DNA, 25 bp, SARS Virus
ctatttatgaaaataacaatgctac

SEQ ID NO: 58094 - DNA, 25 bp, SARS Virus
tatttatgaaacaaacaatgctacc

SEQ ID NO: 58095 - DNA, 25 bp, SARS Virus
atttatgaaactaacaatgctacca

SEQ ID NO: 58096 - DNA, 25 bp, SARS Virus
tttatgaaactaacaatgctaccac

SEQ ID NO: 58097 - DNA, 25 bp, SARS Virus
ttatgaaactaaaaatgctaccacc

SEQ ID NO: 58098 - DNA, 25 bp, SARS Virus
tatgaaactaacaatgctaccaccg

SEQ ID NO: 58099 - DNA, 25 bp, SARS Virus
atgaaactaacaatgctaccaccga

SEQ ID NO: 58100 - DNA, 25 bp, SARS Virus
tgaaactaacaaagctaccaccgac

SEQ ID NO: 58101 - DNA, 25 bp, SARS Virus
gaaactaacaatactaccaccgaca

SEQ ID NO: 58102 - DNA, 25 bp, SARS Virus
aaactaacaatgataccaccgacat

SEQ ID NO: 58103 - DNA, 25 bp, SARS Virus
aactaacaatgcaaccaccgacata

SEQ ID NO: 58104 - DNA, 25 bp, SARS Virus
actaacaatgctaccaccgacataa

SEQ ID NO: 58105 - DNA, 25 bp, SARS Virus
ctaacaatgctaacaccgacataat

SEQ ID NO: 58106 - DNA, 25 bp, SARS Virus
taacaatgctacaaccgacataatt

SEQ ID NO: 58107 - DNA, 25 bp, SARS Virus
aacaatgctaccaccgacataatta

SEQ ID NO: 58108 - DNA, 25 bp, SARS Virus
acaatgctaccaacgacataattac

SEQ ID NO: 58109 - DNA, 25 bp, SARS Virus
caatgctaccacagacataattacg

SEQ ID NO: 58110 - DNA, 25 bp, SARS Virus
aatgctaccaccaacataattacgg

SEQ ID NO: 58111 - DNA, 25 bp, SARS Virus
atgctaccaccgacataattacggt

SEQ ID NO: 58112 - DNA, 25 bp, SARS Virus
tgctaccaccgaaataattacggtt

SEQ ID NO: 58113 - DNA, 25 bp, SARS Virus
gctaccaccgacataattacggttg

SEQ ID NO: 58114 - DNA, 25 bp, SARS Virus
ctaccaccgacaaaattacggttgg

SEQ ID NO: 58115 - DNA, 25 bp, SARS Virus
taccaccgacataattacggttggt

SEQ ID NO: 58116 - DNA, 25 bp, SARS Virus
accaccgacataattacggttggtt

SEQ ID NO: 58117 - DNA, 25 bp, SARS Virus
ccaccgacataaatacggttggttc

SEQ ID NO: 58118 - DNA, 25 bp, SARS Virus
caccgacataataacggttggttca

SEQ ID NO: 58119 - DNA, 25 bp, SARS Virus
accgacataattacggttggttcat

SEQ ID NO: 58120 - DNA, 25 bp, SARS Virus
ccgacataattaaggttggttcatt

SEQ ID NO: 58121 - DNA, 25 bp, SARS Virus
cgacataattacagttggttcatta

SEQ ID NO: 58122 - DNA, 25 bp, SARS Virus
gacataattacgattggttcattag

SEQ ID NO: 58123 - DNA, 25 bp, SARS Virus
acataattacggatggttcattagc

SEQ ID NO: 58124 - DNA, 25 bp, SARS Virus
cataattacggtaggttcattagca

SEQ ID NO: 58125 - DNA, 25 bp, SARS Virus
ataattacggttagttcattagcaa

SEQ ID NO: 58126 - DNA, 25 bp, SARS Virus
taattacggttgattcattagcaat

SEQ ID NO: 58127 - DNA, 25 bp, SARS Virus
aattacggttggatcattagcaatt

SEQ ID NO: 58128 - DNA, 25 bp, SARS Virus
attacggttggtacattagcaattg

SEQ ID NO: 58129 - DNA, 25 bp, SARS Virus
ttacggttggttaattagcaattgt

SEQ ID NO: 58130 - DNA, 25 bp, SARS Virus
tacggttggttcattagcaattgtt

SEQ ID NO: 58131 - DNA, 25 bp, SARS Virus
acggttggttcaatagcaattgtta

SEQ ID NO: 58132 - DNA, 25 bp, SARS Virus
cggttggttcataagcaattgttag

SEQ ID NO: 58133 - DNA, 25 bp, SARS Virus
ggttggttcattagcaattgttaga

SEQ ID NO: 58134 - DNA, 25 bp, SARS Virus
gttggttcattaacaattgttagac

SEQ ID NO: 58135 - DNA, 25 bp, SARS Virus
ttggttcattagaaattgttagacc

SEQ ID NO: 58136 - DNA, 25 bp, SARS Virus
tggttcattagcaattgttagacct

SEQ ID NO: 58137 - DNA, 25 bp, SARS Virus
ggttcattagcaattgttagaccta

SEQ ID NO: 58138 - DNA, 25 bp, SARS Virus
gttcattagcaaatgttagacctat

SEQ ID NO: 58139 - DNA, 25 bp, SARS Virus
ttcattagcaatagttagacctatt

SEQ ID NO: 58140 - DNA, 25 bp, SARS Virus
tcattagcaattattagacctattt

SEQ ID NO: 58141 - DNA, 25 bp, SARS Virus
cattagcaattgatagacctattta

SEQ ID NO: 58142 - DNA, 25 bp, SARS Virus
attagcaattgtaagacctatttag

SEQ ID NO: 58143 - DNA, 25 bp, SARS Virus
ttagcaattgttagacctatttagt

SEQ ID NO: 58144 - DNA, 25 bp, SARS Virus
tagcaattgttaaacctatttagtc

SEQ ID NO: 58145 - DNA, 25 bp, SARS Virus
agcaattgttagacctatttagtcg

SEQ ID NO: 58146 - DNA, 25 bp, SARS Virus
gcaattgttagaactatttagtcga

SEQ ID NO: 58147 - DNA, 25 bp, SARS Virus
caattgttagacatatttagtcgac

SEQ ID NO: 58148 - DNA, 25 bp, SARS Virus
aattgttagaccaatttagtcgacc

SEQ ID NO: 58149 - DNA, 25 bp, SARS Virus
attgttagacctatttagtcgacca

SEQ ID NO: 58150 - DNA, 25 bp, SARS Virus
ttgttagacctaattagtcgaccaa

SEQ ID NO: 58151 - DNA, 25 bp, SARS Virus
tgttagacctatatagtcgaccaaa

SEQ ID NO: 58152 - DNA, 25 bp, SARS Virus
gttagacctattaagtcgaccaaag

SEQ ID NO: 58153 - DNA, 25 bp, SARS Virus
ttagacctatttagtcgaccaaagg

SEQ ID NO: 58154 - DNA, 25 bp, SARS Virus
tagacctatttaatcgaccaaaggg

SEQ ID NO: 58155 - DNA, 25 bp, SARS Virus
agacctatttagacgaccaaagggt

SEQ ID NO: 58156 - DNA, 25 bp, SARS Virus
gacctatttagtagaccaaagggta

SEQ ID NO: 58157 - DNA, 25 bp, SARS Virus
acctatttagtcaaccaaagggtaa

SEQ ID NO: 58158 - DNA, 25 bp, SARS Virus
cctatttagtcgaccaaagggtaaa

SEQ ID NO: 58159 - DNA, 25 bp, SARS Virus
ctatttagtcgaacaaagggtaaat

SEQ ID NO: 58160 - DNA, 25 bp, SARS Virus
tatttagtcgacaaaagggtaaatt

SEQ ID NO: 58161 - DNA, 25 bp, SARS Virus
atttagtcgaccaaagggtaaatta

SEQ ID NO: 58162 - DNA, 25 bp, SARS Virus
tttagtcgaccaaagggtaaattat

SEQ ID NO: 58163 - DNA, 25 bp, SARS Virus
ttagtcgaccaaagggtaaattatt

SEQ ID NO: 58164 - DNA, 25 bp, SARS Virus
tagtcgaccaaaaggtaaattattt

SEQ ID NO: 58165 - DNA, 25 bp, SARS Virus
agtcgaccaaagagtaaattattta

SEQ ID NO: 58166 - DNA, 25 bp, SARS Virus
gtcgaccaaaggataaattatttac

SEQ ID NO: 58167 - DNA, 25 bp, SARS Virus
tcgaccaaagggaaaattatttacc

SEQ ID NO: 58168 - DNA, 25 bp, SARS Virus
cgaccaaagggtaaattatttaccc

SEQ ID NO: 58169 - DNA, 25 bp, SARS Virus
gaccaaagggtaaattatttacccc

SEQ ID NO: 58170 - DNA, 25 bp, SARS Virus
accaaagggtaaattatttacccca

SEQ ID NO: 58171 - DNA, 25 bp, SARS Virus
ccaaagggtaaaatatttaccccat

SEQ ID NO: 58172 - DNA, 25 bp, SARS Virus
caaagggtaaataatttaccccatt

SEQ ID NO: 58173 - DNA, 25 bp, SARS Virus
aaagggtaaattatttaccccattc

SEQ ID NO: 58174 - DNA, 25 bp, SARS Virus
aagggtaaattaattaccccattcc

SEQ ID NO: 58175 - DNA, 25 bp, SARS Virus
agggtaaattatataccccattccg

SEQ ID NO: 58176 - DNA, 25 bp, SARS Virus
gggtaaattattaaccccattccga

SEQ ID NO: 58177 - DNA, 25 bp, SARS Virus
ggtaaattatttaccccattccgat

SEQ ID NO: 58178 - DNA, 25 bp, SARS Virus
gtaaattatttaacccattccgatc

SEQ ID NO: 58179 - DNA, 25 bp, SARS Virus
taaattatttacaccattccgatct

SEQ ID NO: 58180 - DNA, 25 bp, SARS Virus
aaattatttaccacattccgatctg

SEQ ID NO: 58181 - DNA, 25 bp, SARS Virus
aattatttacccaattccgatctga

SEQ ID NO: 58182 - DNA, 25 bp, SARS Virus
attatttaccccattccgatctgaa

SEQ ID NO: 58183 - DNA, 25 bp, SARS Virus
ttatttaccccaatccgatctgaaa

SEQ ID NO: 58184 - DNA, 25 bp, SARS Virus
tatttaccccataccgatctgaaat

SEQ ID NO: 58185 - DNA, 25 bp, SARS Virus
atttaccccattacgatctgaaata

SEQ ID NO: 58186 - DNA, 25 bp, SARS Virus
tttaccccattcagatctgaaataa

SEQ ID NO: 58187 - DNA, 25 bp, SARS Virus
ttaccccattccaatctgaaataat

SEQ ID NO: 58188 - DNA, 25 bp, SARS Virus
taccccattccgatctgaaataata

SEQ ID NO: 58189 - DNA, 25 bp, SARS Virus
accccattccgaactgaaataatac

SEQ ID NO: 58190 - DNA, 25 bp, SARS Virus
ccccattccgatatgaaataatact

SEQ ID NO: 58191 - DNA, 25 bp, SARS Virus
cccattccgatcagaaataatactg

SEQ ID NO: 58192 - DNA, 25 bp, SARS Virus
ccattccgatctaaaataatactga

SEQ ID NO: 58193 - DNA, 25 bp, SARS Virus
cattccgatctgaaataatactgag

SEQ ID NO: 58194 - DNA, 25 bp, SARS Virus
attccgatctgaaataatactgagt

SEQ ID NO: 58195 - DNA, 25 bp, SARS Virus
ttccgatctgaaataatactgagtt

SEQ ID NO: 58196 - DNA, 25 bp, SARS Virus
tccgatctgaaaaaatactgagtta

SEQ ID NO: 58197 - DNA, 25 bp, SARS Virus
ccgatctgaaataatactgagttac

SEQ ID NO: 58198 - DNA, 25 bp, SARS Virus
cgatctgaaataatactgagttact

SEQ ID NO: 58199 - DNA, 25 bp, SARS Virus
gatctgaaataaaactgagttactc

SEQ ID NO: 58200 - DNA, 25 bp, SARS Virus
atctgaaataatactgagttactca

SEQ ID NO: 58201 - DNA, 25 bp, SARS Virus
tcaatcctcagcctgtattagtcct

SEQ ID NO: 58202 - DNA, 25 bp, SARS Virus
caatcctcagcacgtattagtccta

SEQ ID NO: 58203 - DNA, 25 bp, SARS Virus
aatcctcagcatctattagtcctac

SEQ ID NO: 58204 - DNA, 25 bp, SARS Virus
atcctcagcatgcattagtcctaca

SEQ ID NO: 58205 - DNA, 25 bp, SARS Virus
tcctcagcatgtcttagtcctacat

SEQ ID NO: 58206 - DNA, 25 bp, SARS Virus
cctcagcatgtactagtcctacatt

SEQ ID NO: 58207 - DNA, 25 bp, SARS Virus
ctcagcatgtatcagtcctacattt

SEQ ID NO: 58208 - DNA, 25 bp, SARS Virus
tcagcatgtattcgtcctacatttg

SEQ ID NO: 58209 - DNA, 25 bp, SARS Virus
cagcatgtattactcctacatttga

SEQ ID NO: 58210 - DNA, 25 bp, SARS Virus
agcatgtattagccctacatttgaa

SEQ ID NO: 58211 - DNA, 25 bp, SARS Virus
gcatgtattagtcctacatttgaat

SEQ ID NO: 58212 - DNA, 25 bp, SARS Virus
catgtattagtcctacatttgaatg

SEQ ID NO: 58213 - DNA, 25 bp, SARS Virus
atgtattagtcccacatttgaatgt

SEQ ID NO: 58214 - DNA, 25 bp, SARS Virus
tgtattagtcctccatttgaatgta

SEQ ID NO: 58215 - DNA, 25 bp, SARS Virus
gtattagtcctacatttgaatgtat

SEQ ID NO: 58216 - DNA, 25 bp, SARS Virus
tattagtcctacctttgaatgtatc

SEQ ID NO: 58217 - DNA, 25 bp, SARS Virus
attagtcctacacttgaatgtatcg

SEQ ID NO: 58218 - DNA, 25 bp, SARS Virus
ttagtcctacatctgaatgtatcga

SEQ ID NO: 58219 - DNA, 25 bp, SARS Virus
tagtcctacattcgaatgtatcgag

SEQ ID NO: 58220 - DNA, 25 bp, SARS Virus
agtcctacatttcaatgtatcgagc

SEQ ID NO: 58221 - DNA, 25 bp, SARS Virus
gtcctacatttgcatgtatcgagcg

SEQ ID NO: 58222 - DNA, 25 bp, SARS Virus
tcctacatttgactgtatcgagcgc

SEQ ID NO: 58223 - DNA, 25 bp, SARS Virus
cctacatttgaacgtatcgagcgca

SEQ ID NO: 58224 - DNA, 25 bp, SARS Virus
ctacatttgaatctatcgagcgcag

SEQ ID NO: 58225 - DNA, 25 bp, SARS Virus
tacatttgaatgcatcgagcgcaga

SEQ ID NO: 58226 - DNA, 25 bp, SARS Virus
acatttgaatgtctcgagcgcagag

SEQ ID NO: 58227 - DNA, 25 bp, SARS Virus
catttgaatgtaccgagcgcagagt

SEQ ID NO: 58228 - DNA, 25 bp, SARS Virus
atttgaatgtatcgagcgcagagtc

SEQ ID NO: 58229 - DNA, 25 bp, SARS Virus
tttgaatgtatccagcgcagagtca

SEQ ID NO: 58230 - DNA, 25 bp, SARS Virus
ttgaatgtatcgcgcgcagagtcaa

SEQ ID NO: 58231 - DNA, 25 bp, SARS Virus
tgaatgtatcgaccgcagagtcaaa

SEQ ID NO: 58232 - DNA, 25 bp, SARS Virus
gaatgtatcgagcgcagagtcaaag

SEQ ID NO: 58233 - DNA, 25 bp, SARS Virus
aatgtatcgagcccagagtcaaagt

SEQ ID NO: 58234 - DNA, 25 bp, SARS Virus
atgtatcgagcgcagagtcaaagtt

SEQ ID NO: 58235 - DNA, 25 bp, SARS Virus
tgtatcgagcgccgagtcaaagttc

SEQ ID NO: 58236 - DNA, 25 bp, SARS Virus
gtatcgagcgcacagtcaaagttcc

SEQ ID NO: 58237 - DNA, 25 bp, SARS Virus
tatcgagcgcagcgtcaaagttcct

SEQ ID NO: 58238 - DNA, 25 bp, SARS Virus
atcgagcgcagactcaaagttcctt

SEQ ID NO: 58239 - DNA, 25 bp, SARS Virus
tcgagcgcagagccaaagttccttg

SEQ ID NO: 58240 - DNA, 25 bp, SARS Virus
cgagcgcagagtcaaagttccttga

SEQ ID NO: 58241 - DNA, 25 bp, SARS Virus
gagcgcagagtccaagttccttgaa

SEQ ID NO: 58242 - DNA, 25 bp, SARS Virus
agcgcagagtcacagttccttgaaa

SEQ ID NO: 58243 - DNA, 25 bp, SARS Virus
gcgcagagtcaacgttccttgaaaa

SEQ ID NO: 58244 - DNA, 25 bp, SARS Virus
cgcagagtcaaacttccttgaaaat

SEQ ID NO: 58245 - DNA, 25 bp, SARS Virus
gcagagtcaaagctccttgaaaatc

SEQ ID NO: 58246 - DNA, 25 bp, SARS Virus
cagagtcaaagtcccttgaaaatca

SEQ ID NO: 58247 - DNA, 25 bp, SARS Virus
agagtcaaagttccttgaaaatcac

SEQ ID NO: 58248 - DNA, 25 bp, SARS Virus
gagtcaaagttccttgaaaatcaca

SEQ ID NO: 58249 - DNA, 25 bp, SARS Virus
agtcaaagttccctgaaaatcacat

SEQ ID NO: 58250 - DNA, 25 bp, SARS Virus
gtcaaagttcctcgaaaatcacata

SEQ ID NO: 58251 - DNA, 25 bp, SARS Virus
tcaaagttccttcaaaatcacatac

SEQ ID NO: 58252 - DNA, 25 bp, SARS Virus
caaagttccttgcaaatcacatacg

SEQ ID NO: 58253 - DNA, 25 bp, SARS Virus
aaagttccttgacaatcacatacga

SEQ ID NO: 58254 - DNA, 25 bp, SARS Virus
aagttccttgaacatcacatacgac

SEQ ID NO: 58255 - DNA, 25 bp, SARS Virus
agttccttgaaactcacatacgacg

SEQ ID NO: 58256 - DNA, 25 bp, SARS Virus
gttccttgaaaaccacatacgacga

SEQ ID NO: 58257 - DNA, 25 bp, SARS Virus
ttccttgaaaatcacatacgacgac

SEQ ID NO: 58258 - DNA, 25 bp, SARS Virus
tccttgaaaatcccatacgacgact

SEQ ID NO: 58259 - DNA, 25 bp, SARS Virus
ccttgaaaatcacatacgacgacta

SEQ ID NO: 58260 - DNA, 25 bp, SARS Virus
cttgaaaatcacctacgacgactag

SEQ ID NO: 58261 - DNA, 25 bp, SARS Virus
ttgaaaatcacacacgacgactagg

SEQ ID NO: 58262 - DNA, 25 bp, SARS Virus
tgaaaatcacatccgacgactaggt

SEQ ID NO: 58263 - DNA, 25 bp, SARS Virus
gaaaatcacatacgacgactaggtc

SEQ ID NO: 58264 - DNA, 25 bp, SARS Virus
aaaatcacataccacgactaggtcg

SEQ ID NO: 58265 - DNA, 25 bp, SARS Virus
aaatcacatacgccgactaggtcga

SEQ ID NO: 58266 - DNA, 25 bp, SARS Virus
aatcacatacgacgactaggtcgat

SEQ ID NO: 58267 - DNA, 25 bp, SARS Virus
atcacatacgaccactaggtcgata

SEQ ID NO: 58268 - DNA, 25 bp, SARS Virus
tcacatacgacgcctaggtcgatac

SEQ ID NO: 58269 - DNA, 25 bp, SARS Virus
cacatacgacgactaggtcgatacg

SEQ ID NO: 58270 - DNA, 25 bp, SARS Virus
acatacgacgaccaggtcgatacgt

SEQ ID NO: 58271 - DNA, 25 bp, SARS Virus
catacgacgactcggtcgatacgta

SEQ ID NO: 58272 - DNA, 25 bp, SARS Virus
atacgacgactacgtcgatacgtac

SEQ ID NO: 58273 - DNA, 25 bp, SARS Virus
tacgacgactagctcgatacgtacg

SEQ ID NO: 58274 - DNA, 25 bp, SARS Virus
acgacgactaggccgatacgtacgt

SEQ ID NO: 58275 - DNA, 25 bp, SARS Virus
cgacgactaggtcgatacgtacgtc

SEQ ID NO: 58276 - DNA, 25 bp, SARS Virus
gacgactaggtccatacgtacgtcg

SEQ ID NO: 58277 - DNA, 25 bp, SARS Virus
acgactaggtcgctacgtacgtcga

SEQ ID NO: 58278 - DNA, 25 bp, SARS Virus
cgactaggtcgacacgtacgtcgaa

SEQ ID NO: 58279 - DNA, 25 bp, SARS Virus
gactaggtcgatccgtacgtcgaag

SEQ ID NO: 58280 - DNA, 25 bp, SARS Virus
actaggtcgatacgtacgtcgaaga

SEQ ID NO: 58281 - DNA, 25 bp, SARS Virus
ctaggtcgatacctacgtcgaagac

SEQ ID NO: 58282 - DNA, 25 bp, SARS Virus
taggtcgatacgcacgtcgaagacc

SEQ ID NO: 58283 - DNA, 25 bp, SARS Virus
aggtcgatacgtccgtcgaagaccg

SEQ ID NO: 58284 - DNA, 25 bp, SARS Virus
ggtcgatacgtacgtcgaagaccgt

SEQ ID NO: 58285 - DNA, 25 bp, SARS Virus
gtcgatacgtacctcgaagaccgtt

SEQ ID NO: 58286 - DNA, 25 bp, SARS Virus
tcgatacgtacgccgaagaccgtta

SEQ ID NO: 58287 - DNA, 25 bp, SARS Virus
cgatacgtacgtcgaagaccgttaa

SEQ ID NO: 58288 - DNA, 25 bp, SARS Virus
gatacgtacgtccaagaccgttaaa

SEQ ID NO: 58289 - DNA, 25 bp, SARS Virus
atacgtacgtcgcagaccgttaaat

SEQ ID NO: 58290 - DNA, 25 bp, SARS Virus
tacgtacgtcgacgaccgttaaata

SEQ ID NO: 58291 - DNA, 25 bp, SARS Virus
acgtacgtcgaacaccgttaaataa

SEQ ID NO: 58292 - DNA, 25 bp, SARS Virus
cgtacgtcgaagcccgttaaataac

SEQ ID NO: 58293 - DNA, 25 bp, SARS Virus
gtacgtcgaagaccgttaaataacg

SEQ ID NO: 58294 - DNA, 25 bp, SARS Virus
tacgtcgaagaccgttaaataacga

SEQ ID NO: 58295 - DNA, 25 bp, SARS Virus
acgtcgaagacccttaaataacgat

SEQ ID NO: 58296 - DNA, 25 bp, SARS Virus
cgtcgaagaccgctaaataacgatc

SEQ ID NO: 58297 - DNA, 25 bp, SARS Virus
gtcgaagaccgtcaaataacgatct

SEQ ID NO: 58298 - DNA, 25 bp, SARS Virus
tcgaagaccgttcaataacgatcta

SEQ ID NO: 58299 - DNA, 25 bp, SARS Virus
cgaagaccgttacataacgatctat

SEQ ID NO: 58300 - DNA, 25 bp, SARS Virus
gaagaccgttaactaacgatctatt

SEQ ID NO: 58301 - DNA, 25 bp, SARS Virus
aagaccgttaaacaacgatctattt

SEQ ID NO: 58302 - DNA, 25 bp, SARS Virus
agaccgttaaatcacgatctatttg

SEQ ID NO: 58303 - DNA, 25 bp, SARS Virus
gaccgttaaataccgatctatttgc

SEQ ID NO: 58304 - DNA, 25 bp, SARS Virus
accgttaaataacgatctatttgcg

SEQ ID NO: 58305 - DNA, 25 bp, SARS Virus
ccgttaaataaccatctatttgcgt

SEQ ID NO: 58306 - DNA, 25 bp, SARS Virus
cgttaaataacgctctatttgcgtg

SEQ ID NO: 58307 - DNA, 25 bp, SARS Virus
gttaaataacgacctatttgcgtga

SEQ ID NO: 58308 - DNA, 25 bp, SARS Virus
ttaaataacgatctatttgcgtgat

SEQ ID NO: 58309 - DNA, 25 bp, SARS Virus
taaataacgatccatttgcgtgatg

SEQ ID NO: 58310 - DNA, 25 bp, SARS Virus
aaataacgatctctttgcgtgatgt

SEQ ID NO: 58311 - DNA, 25 bp, SARS Virus
aataacgatctacttgcgtgatgta

SEQ ID NO: 58312 - DNA, 25 bp, SARS Virus
ataacgatctatctgcgtgatgtac

SEQ ID NO: 58313 - DNA, 25 bp, SARS Virus
taacgatctattcgcgtgatgtacg

SEQ ID NO: 58314 - DNA, 25 bp, SARS Virus
aacgatctatttccgtgatgtacga

SEQ ID NO: 58315 - DNA, 25 bp, SARS Virus
acgatctatttgcgtgatgtacgaa

SEQ ID NO: 58316 - DNA, 25 bp, SARS Virus
cgatctatttgcctgatgtacgaaa

SEQ ID NO: 58317 - DNA, 25 bp, SARS Virus
gatctatttgcgcgatgtacgaaaa

SEQ ID NO: 58318 - DNA, 25 bp, SARS Virus
atctatttgcgtcatgtacgaaaag

SEQ ID NO: 58319 - DNA, 25 bp, SARS Virus
tctatttgcgtgctgtacgaaaagt

SEQ ID NO: 58320 - DNA, 25 bp, SARS Virus
ctatttgcgtgacgtacgaaaagtc

SEQ ID NO: 58321 - DNA, 25 bp, SARS Virus
tatttgcgtgatctacgaaaagtca

SEQ ID NO: 58322 - DNA, 25 bp, SARS Virus
atttgcgtgatgcacgaaaagtcat

SEQ ID NO: 58323 - DNA, 25 bp, SARS Virus
tttgcgtgatgtccgaaaagtcatc

SEQ ID NO: 58324 - DNA, 25 bp, SARS Virus
ttgcgtgatgtacgaaaagtcatcg

SEQ ID NO: 58325 - DNA, 25 bp, SARS Virus
tgcgtgatgtaccaaaagtcatcga

SEQ ID NO: 58326 - DNA, 25 bp, SARS Virus
gcgtgatgtacgcaaagtcatcgac

SEQ ID NO: 58327 - DNA, 25 bp, SARS Virus
cgtgatgtacgacaagtcatcgacg

SEQ ID NO: 58328 - DNA, 25 bp, SARS Virus
gtgatgtacgaacagtcatcgacgt

SEQ ID NO: 58329 - DNA, 25 bp, SARS Virus
tgatgtacgaaacgtcatcgacgtg

SEQ ID NO: 58330 - DNA, 25 bp, SARS Virus
gatgtacgaaaactcatcgacgtga

SEQ ID NO: 58331 - DNA, 25 bp, SARS Virus
atgtacgaaaagccatcgacgtgat

SEQ ID NO: 58332 - DNA, 25 bp, SARS Virus
tgtacgaaaagtcatcgacgtgatt

SEQ ID NO: 58333 - DNA, 25 bp, SARS Virus
gtacgaaaagtcctcgacgtgattg

SEQ ID NO: 58334 - DNA, 25 bp, SARS Virus
tacgaaaagtcaccgacgtgattgt

SEQ ID NO: 58335 - DNA, 25 bp, SARS Virus
acgaaaagtcatcgacgtgattgtt

SEQ ID NO: 58336 - DNA, 25 bp, SARS Virus
cgaaaagtcatccacgtgattgttt

SEQ ID NO: 58337 - DNA, 25 bp, SARS Virus
gaaaagtcatcgccgtgattgtttg

SEQ ID NO: 58338 - DNA, 25 bp, SARS Virus
aaaagtcatcgacgtgattgtttgt

SEQ ID NO: 58339 - DNA, 25 bp, SARS Virus
aaagtcatcgacctgattgtttgtt

SEQ ID NO: 58340 - DNA, 25 bp, SARS Virus
aagtcatcgacgcgattgtttgtta

SEQ ID NO: 58341 - DNA, 25 bp, SARS Virus
agtcatcgacgtcattgtttgttac

SEQ ID NO: 58342 - DNA, 25 bp, SARS Virus
gtcatcgacgtgcttgtttgttaca

SEQ ID NO: 58343 - DNA, 25 bp, SARS Virus
tcatcgacgtgactgtttgttacaa

SEQ ID NO: 58344 - DNA, 25 bp, SARS Virus
catcgacgtgatcgtttgttacaac

SEQ ID NO: 58345 - DNA, 25 bp, SARS Virus
atcgacgtgattctttgttacaacg

SEQ ID NO: 58346 - DNA, 25 bp, SARS Virus
tcgacgtgattgcttgttacaacga

SEQ ID NO: 58347 - DNA, 25 bp, SARS Virus
cgacgtgattgtctgttacaacgaa

SEQ ID NO: 58348 - DNA, 25 bp, SARS Virus
gacgtgattgttcgttacaacgaaa

SEQ ID NO: 58349 - DNA, 25 bp, SARS Virus
acgtgattgtttcttacaacgaaaa

SEQ ID NO: 58350 - DNA, 25 bp, SARS Virus
cgtgattgtttgctacaacgaaaag

SEQ ID NO: 58351 - DNA, 25 bp, SARS Virus
gtgattgtttgtcacaacgaaaagt

SEQ ID NO: 58352 - DNA, 25 bp, SARS Virus
tgattgtttgttccaacgaaaagtt

SEQ ID NO: 58353 - DNA, 25 bp, SARS Virus
gattgtttgttacaacgaaaagttt

SEQ ID NO: 58354 - DNA, 25 bp, SARS Virus
attgtttgttaccacgaaaagtttg

SEQ ID NO: 58355 - DNA, 25 bp, SARS Virus
ttgtttgttacaccgaaaagtttga

SEQ ID NO: 58356 - DNA, 25 bp, SARS Virus
tgtttgttacaacgaaaagtttgac

SEQ ID NO: 58357 - DNA, 25 bp, SARS Virus
gtttgttacaaccaaaagtttgaca

SEQ ID NO: 58358 - DNA, 25 bp, SARS Virus
tttgttacaacgcaaagtttgacag

SEQ ID NO: 58359 - DNA, 25 bp, SARS Virus
ttgttacaacgacaagtttgacagt

SEQ ID NO: 58360 - DNA, 25 bp, SARS Virus
tgttacaacgaacagtttgacagtt

SEQ ID NO: 58361 - DNA, 25 bp, SARS Virus
gttacaacgaaacgtttgacagttt

SEQ ID NO: 58362 - DNA, 25 bp, SARS Virus
ttacaacgaaaactttgacagtttg

SEQ ID NO: 58363 - DNA, 25 bp, SARS Virus
tacaacgaaaagcttgacagtttgg

SEQ ID NO: 58364 - DNA, 25 bp, SARS Virus
acaacgaaaagtctgacagtttggg

SEQ ID NO: 58365 - DNA, 25 bp, SARS Virus
caacgaaaagttcgacagtttgggc

SEQ ID NO: 58366 - DNA, 25 bp, SARS Virus
aacgaaaagtttcacagtttgggcc

SEQ ID NO: 58367 - DNA, 25 bp, SARS Virus
acgaaaagtttgccagtttgggcca

SEQ ID NO: 58368 - DNA, 25 bp, SARS Virus
cgaaaagtttgacagtttgggccat

SEQ ID NO: 58369 - DNA, 25 bp, SARS Virus
gaaaagtttgaccgtttgggccatt

SEQ ID NO: 58370 - DNA, 25 bp, SARS Virus
aaaagtttgacactttgggccatta

SEQ ID NO: 58371 - DNA, 25 bp, SARS Virus
aaagtttgacagcttgggccattaa

SEQ ID NO: 58372 - DNA, 25 bp, SARS Virus
aagtttgacagtctgggccattaaa

SEQ ID NO: 58373 - DNA, 25 bp, SARS Virus
agtttgacagttcgggccattaaaa

SEQ ID NO: 58374 - DNA, 25 bp, SARS Virus
gtttgacagtttcggccattaaaat

SEQ ID NO: 58375 - DNA, 25 bp, SARS Virus
tttgacagtttgcgccattaaaatt

SEQ ID NO: 58376 - DNA, 25 bp, SARS Virus
ttgacagtttggcccattaaaatta

SEQ ID NO: 58377 - DNA, 25 bp, SARS Virus
tgacagtttgggccattaaaattat

SEQ ID NO: 58378 - DNA, 25 bp, SARS Virus
gacagtttgggccattaaaattatt

SEQ ID NO: 58379 - DNA, 25 bp, SARS Virus
acagtttgggcccttaaaattattt

SEQ ID NO: 58380 - DNA, 25 bp, SARS Virus
cagtttgggccactaaaattatttc

SEQ ID NO: 58381 - DNA, 25 bp, SARS Virus
agtttgggccatcaaaattatttct

SEQ ID NO: 58382 - DNA, 25 bp, SARS Virus
gtttgggccattcaaattatttctg

SEQ ID NO: 58383 - DNA, 25 bp, SARS Virus
tttgggccattacaattatttctga

SEQ ID NO: 58384 - DNA, 25 bp, SARS Virus
ttgggccattaacattatttctgaa

SEQ ID NO: 58385 - DNA, 25 bp, SARS Virus
tgggccattaaacttatttctgaaa

SEQ ID NO: 58386 - DNA, 25 bp, SARS Virus
gggccattaaaactatttctgaaaa

SEQ ID NO: 58387 - DNA, 25 bp, SARS Virus
ggccattaaaatcatttctgaaaat

SEQ ID NO: 58388 - DNA, 25 bp, SARS Virus
gccattaaaattctttctgaaaata

SEQ ID NO: 58389 - DNA, 25 bp, SARS Virus
ccattaaaattacttctgaaaatac

SEQ ID NO: 58390 - DNA, 25 bp, SARS Virus
cattaaaattatctctgaaaatact

SEQ ID NO: 58391 - DNA, 25 bp, SARS Virus
attaaaattattcctgaaaatactg

SEQ ID NO: 58392 - DNA, 25 bp, SARS Virus
ttaaaattatttctgaaaatactga

SEQ ID NO: 58393 - DNA, 25 bp, SARS Virus
taaaattatttccgaaaatactgaa

SEQ ID NO: 58394 - DNA, 25 bp, SARS Virus
aaaattatttctcaaaatactgaaa

SEQ ID NO: 58395 - DNA, 25 bp, SARS Virus
aaattatttctgcaaatactgaaac

SEQ ID NO: 58396 - DNA, 25 bp, SARS Virus
aattatttctgacaatactgaaacg

SEQ ID NO: 58397 - DNA, 25 bp, SARS Virus
attatttctgaacatactgaaacga

SEQ ID NO: 58398 - DNA, 25 bp, SARS Virus
ttatttctgaaactactgaaacgac

SEQ ID NO: 58399 - DNA, 25 bp, SARS Virus
tatttctgaaaacactgaaacgaca

SEQ ID NO: 58400 - DNA, 25 bp, SARS Virus
atttctgaaaatcctgaaacgacac

SEQ ID NO: 58401 - DNA, 25 bp, SARS Virus
tttctgaaaatactgaaacgacaca

SEQ ID NO: 58402 - DNA, 25 bp, SARS Virus
ttctgaaaataccgaaacgacacag

SEQ ID NO: 58403 - DNA, 25 bp, SARS Virus
tctgaaaatactcaaacgacacaga

SEQ ID NO: 58404 - DNA, 25 bp, SARS Virus
ctgaaaatactgcaacgacacagat

SEQ ID NO: 58405 - DNA, 25 bp, SARS Virus
tgaaaatactgacacgacacagatt

SEQ ID NO: 58406 - DNA, 25 bp, SARS Virus
gaaaatactgaaccgacacagattt

SEQ ID NO: 58407 - DNA, 25 bp, SARS Virus
aaaatactgaaacgacacagatttc

SEQ ID NO: 58408 - DNA, 25 bp, SARS Virus
aaatactgaaaccacacagatttcc

SEQ ID NO: 58409 - DNA, 25 bp, SARS Virus
aatactgaaacgccacagatttcca

SEQ ID NO: 58410 - DNA, 25 bp, SARS Virus
atactgaaacgacacagatttccaa

SEQ ID NO: 58411 - DNA, 25 bp, SARS Virus
tactgaaacgacccagatttccaaa

SEQ ID NO: 58412 - DNA, 25 bp, SARS Virus
actgaaacgacacagatttccaaag

SEQ ID NO: 58413 - DNA, 25 bp, SARS Virus
ctgaaacgacaccgatttccaaaga

SEQ ID NO: 58414 - DNA, 25 bp, SARS Virus
tgaaacgacacacatttccaaagaa

SEQ ID NO: 58415 - DNA, 25 bp, SARS Virus
gaaacgacacagctttccaaagaaa

SEQ ID NO: 58416 - DNA, 25 bp, SARS Virus
aaacgacacagacttccaaagaaat

SEQ ID NO: 58417 - DNA, 25 bp, SARS Virus
aacgacacagatctccaaagaaatt

SEQ ID NO: 58418 - DNA, 25 bp, SARS Virus
acgacacagattcccaaagaaattc

SEQ ID NO: 58419 - DNA, 25 bp, SARS Virus
cgacacagatttccaaagaaattcc

SEQ ID NO: 58420 - DNA, 25 bp, SARS Virus
gacacagatttccaaagaaattcct

SEQ ID NO: 58421 - DNA, 25 bp, SARS Virus
acacagatttcccaagaaattcctt

SEQ ID NO: 58422 - DNA, 25 bp, SARS Virus
cacagatttccacagaaattccttc

SEQ ID NO: 58423 - DNA, 25 bp, SARS Virus
acagatttccaacgaaattccttcc

SEQ ID NO: 58424 - DNA, 25 bp, SARS Virus
cagatttccaaacaaattccttcct

SEQ ID NO: 58425 - DNA, 25 bp, SARS Virus
agatttccaaagcaattccttcctt

SEQ ID NO: 58426 - DNA, 25 bp, SARS Virus
gatttccaaagacattccttccttc

SEQ ID NO: 58427 - DNA, 25 bp, SARS Virus
atttccaaagaacttccttccttca

SEQ ID NO: 58428 - DNA, 25 bp, SARS Virus
tttccaaagaaactccttccttcaa

SEQ ID NO: 58429 - DNA, 25 bp, SARS Virus
ttccaaagaaatcccttccttcaag

SEQ ID NO: 58430 - DNA, 25 bp, SARS Virus
tccaaagaaattccttccttcaaga

SEQ ID NO: 58431 - DNA, 25 bp, SARS Virus
ccaaagaaattccttccttcaagac

SEQ ID NO: 58432 - DNA, 25 bp, SARS Virus
caaagaaattccctccttcaagaca

SEQ ID NO: 58433 - DNA, 25 bp, SARS Virus
aaagaaattcctcccttcaagacaa

SEQ ID NO: 58434 - DNA, 25 bp, SARS Virus
aagaaattccttccttcaagacaac

SEQ ID NO: 58435 - DNA, 25 bp, SARS Virus
agaaattccttccttcaagacaact

SEQ ID NO: 58436 - DNA, 25 bp, SARS Virus
gaaattccttccctcaagacaactt

SEQ ID NO: 58437 - DNA, 25 bp, SARS Virus
aaattccttcctccaagacaacttg

SEQ ID NO: 58438 - DNA, 25 bp, SARS Virus
aattccttccttcaagacaacttga

SEQ ID NO: 58439 - DNA, 25 bp, SARS Virus
attccttccttccagacaacttgat

SEQ ID NO: 58440 - DNA, 25 bp, SARS Virus
ttccttccttcacgacaacttgatt

SEQ ID NO: 58441 - DNA, 25 bp, SARS Virus
tccttccttcaacacaacttgattt

SEQ ID NO: 58442 - DNA, 25 bp, SARS Virus
ccttccttcaagccaacttgatttt

SEQ ID NO: 58443 - DNA, 25 bp, SARS Virus
cttccttcaagacaacttgattttg

SEQ ID NO: 58444 - DNA, 25 bp, SARS Virus
ttccttcaagaccacttgattttgt

SEQ ID NO: 58445 - DNA, 25 bp, SARS Virus
tccttcaagacaccttgattttgtg

SEQ ID NO: 58446 - DNA, 25 bp, SARS Virus
ccttcaagacaacttgattttgtga

SEQ ID NO: 58447 - DNA, 25 bp, SARS Virus
cttcaagacaacctgattttgtgaa

SEQ ID NO: 58448 - DNA, 25 bp, SARS Virus
ttcaagacaactcgattttgtgaag

SEQ ID NO: 58449 - DNA, 25 bp, SARS Virus
tcaagacaacttcattttgtgaaga

SEQ ID NO: 58450 - DNA, 25 bp, SARS Virus
caagacaacttgcttttgtgaagaa

SEQ ID NO: 58451 - DNA, 25 bp, SARS Virus
aagacaacttgactttgtgaagaag

SEQ ID NO: 58452 - DNA, 25 bp, SARS Virus
agacaacttgatcttgtgaagaaga

SEQ ID NO: 58453 - DNA, 25 bp, SARS Virus
gacaacttgattctgtgaagaagaa

SEQ ID NO: 58454 - DNA, 25 bp, SARS Virus
acaacttgatttcgtgaagaagaaa

SEQ ID NO: 58455 - DNA, 25 bp, SARS Virus
caacttgattttctgaagaagaaac

SEQ ID NO: 58456 - DNA, 25 bp, SARS Virus
aacttgattttgcgaagaagaaacg

SEQ ID NO: 58457 - DNA, 25 bp, SARS Virus
acttgattttgtcaagaagaaacga

SEQ ID NO: 58458 - DNA, 25 bp, SARS Virus
cttgattttgtgcagaagaaacgag

SEQ ID NO: 58459 - DNA, 25 bp, SARS Virus
ttgattttgtgacgaagaaacgagt

SEQ ID NO: 58460 - DNA, 25 bp, SARS Virus
tgattttgtgaacaagaaacgagtc

SEQ ID NO: 58461 - DNA, 25 bp, SARS Virus
gattttgtgaagcagaaacgagtcc

SEQ ID NO: 58462 - DNA, 25 bp, SARS Virus
attttgtgaagacgaaacgagtcct

SEQ ID NO: 58463 - DNA, 25 bp, SARS Virus
ttttgtgaagaacaaacgagtccta

SEQ ID NO: 58464 - DNA, 25 bp, SARS Virus
tttgtgaagaagcaacgagtcctac

SEQ ID NO: 58465 - DNA, 25 bp, SARS Virus
ttgtgaagaagacacgagtcctacc

SEQ ID NO: 58466 - DNA, 25 bp, SARS Virus
tgtgaagaagaaccgagtcctaccg

SEQ ID NO: 58467 - DNA, 25 bp, SARS Virus
gtgaagaagaaacgagtcctaccgt

SEQ ID NO: 58468 - DNA, 25 bp, SARS Virus
tgaagaagaaaccagtcctaccgtt

SEQ ID NO: 58469 - DNA, 25 bp, SARS Virus
gaagaagaaacgcgtcctaccgttg

SEQ ID NO: 58470 - DNA, 25 bp, SARS Virus
aagaagaaacgactcctaccgttgc

SEQ ID NO: 58471 - DNA, 25 bp, SARS Virus
agaagaaacgagccctaccgttgcg

SEQ ID NO: 58472 - DNA, 25 bp, SARS Virus
gaagaaacgagtcctaccgttgcga

SEQ ID NO: 58473 - DNA, 25 bp, SARS Virus
aagaaacgagtcctaccgttgcgac

SEQ ID NO: 58474 - DNA, 25 bp, SARS Virus
agaaacgagtcccaccgttgcgacg

SEQ ID NO: 58475 - DNA, 25 bp, SARS Virus
gaaacgagtcctcccgttgcgacga

SEQ ID NO: 58476 - DNA, 25 bp, SARS Virus
aaacgagtcctaccgttgcgacgat

SEQ ID NO: 58477 - DNA, 25 bp, SARS Virus
aacgagtcctaccgttgcgacgata

SEQ ID NO: 58478 - DNA, 25 bp, SARS Virus
acgagtcctacccttgcgacgatag

SEQ ID NO: 58479 - DNA, 25 bp, SARS Virus
cgagtcctaccgctgcgacgatagt

SEQ ID NO: 58480 - DNA, 25 bp, SARS Virus
gagtcctaccgtcgcgacgatagtc

SEQ ID NO: 58481 - DNA, 25 bp, SARS Virus
agtcctaccgttccgacgatagtca

SEQ ID NO: 58482 - DNA, 25 bp, SARS Virus
gtcctaccgttgcgacgatagtcac

SEQ ID NO: 58483 - DNA, 25 bp, SARS Virus
tcctaccgttgccacgatagtcact

SEQ ID NO: 58484 - DNA, 25 bp, SARS Virus
cctaccgttgcgccgatagtcacta

SEQ ID NO: 58485 - DNA, 25 bp, SARS Virus
ctaccgttgcgacgatagtcactaa

SEQ ID NO: 58486 - DNA, 25 bp, SARS Virus
taccgttgcgaccatagtcactaat

SEQ ID NO: 58487 - DNA, 25 bp, SARS Virus
accgttgcgacgctagtcactaata

SEQ ID NO: 58488 - DNA, 25 bp, SARS Virus
ccgttgcgacgacagtcactaatac

SEQ ID NO: 58489 - DNA, 25 bp, SARS Virus
cgttgcgacgatcgtcactaatact

SEQ ID NO: 58490 - DNA, 25 bp, SARS Virus
gttgcgacgatactcactaatactg

SEQ ID NO: 58491 - DNA, 25 bp, SARS Virus
ttgcgacgatagccactaatactga

SEQ ID NO: 58492 - DNA, 25 bp, SARS Virus
tgcgacgatagtcactaatactgat

SEQ ID NO: 58493 - DNA, 25 bp, SARS Virus
gcgacgatagtccctaatactgata

SEQ ID NO: 58494 - DNA, 25 bp, SARS Virus
cgacgatagtcactaatactgataa

SEQ ID NO: 58495 - DNA, 25 bp, SARS Virus
gacgatagtcaccaatactgataat

SEQ ID NO: 58496 - DNA, 25 bp, SARS Virus
acgatagtcactcatactgataata

SEQ ID NO: 58497 - DNA, 25 bp, SARS Virus
cgatagtcactactactgataatag

SEQ ID NO: 58498 - DNA, 25 bp, SARS Virus
gatagtcactaacactgataatagc

SEQ ID NO: 58499 - DNA, 25 bp, SARS Virus
atagtcactaatcctgataatagca

SEQ ID NO: 58500 - DNA, 25 bp, SARS Virus
tagtcactaatactgataatagcaa

SEQ ID NO: 58501 - DNA, 25 bp, SARS Virus
agtcactaataccgataatagcaat

SEQ ID NO: 58502 - DNA, 25 bp, SARS Virus
gtcactaatactcataatagcaata

SEQ ID NO: 58503 - DNA, 25 bp, SARS Virus
tcactaatactgctaatagcaatat

SEQ ID NO: 58504 - DNA, 25 bp, SARS Virus
cactaatactgacaatagcaatatt

SEQ ID NO: 58505 - DNA, 25 bp, SARS Virus
actaatactgatcatagcaatatta

SEQ ID NO: 58506 - DNA, 25 bp, SARS Virus
ctaatactgatactagcaatattag

SEQ ID NO: 58507 - DNA, 25 bp, SARS Virus
taatactgataacagcaatattaga

SEQ ID NO: 58508 - DNA, 25 bp, SARS Virus
aatactgataatcgcaatattagac

SEQ ID NO: 58509 - DNA, 25 bp, SARS Virus
atactgataataccaatattagacg

SEQ ID NO: 58510 - DNA, 25 bp, SARS Virus
tactgataatagcaatattagacgg

SEQ ID NO: 58511 - DNA, 25 bp, SARS Virus
actgataatagccatattagacggt

SEQ ID NO: 58512 - DNA, 25 bp, SARS Virus
ctgataatagcactattagacggtt

SEQ ID NO: 58513 - DNA, 25 bp, SARS Virus
tgataatagcaacattagacggttg

SEQ ID NO: 58514 - DNA, 25 bp, SARS Virus
gataatagcaatcttagacggttgt

SEQ ID NO: 58515 - DNA, 25 bp, SARS Virus
ataatagcaatactagacggttgtt

SEQ ID NO: 58516 - DNA, 25 bp, SARS Virus
taatagcaatatcagacggttgtta

SEQ ID NO: 58517 - DNA, 25 bp, SARS Virus
aatagcaatattcgacggttgttac

SEQ ID NO: 58518 - DNA, 25 bp, SARS Virus
atagcaatattacacggttgttaca

SEQ ID NO: 58519 - DNA, 25 bp, SARS Virus
tagcaatattagccggttgttacac

SEQ ID NO: 58520 - DNA, 25 bp, SARS Virus
agcaatattagacggttgttacaca

SEQ ID NO: 58521 - DNA, 25 bp, SARS Virus
gcaatattagaccgttgttacacac

SEQ ID NO: 58522 - DNA, 25 bp, SARS Virus
caatattagacgcttgttacacact

SEQ ID NO: 58523 - DNA, 25 bp, SARS Virus
aatattagacggctgttacacacta

SEQ ID NO: 58524 - DNA, 25 bp, SARS Virus
atattagacggtcgttacacactat

SEQ ID NO: 58525 - DNA, 25 bp, SARS Virus
tattagacggttcttacacactata

SEQ ID NO: 58526 - DNA, 25 bp, SARS Virus
attagacggttgctacacactatag

SEQ ID NO: 58527 - DNA, 25 bp, SARS Virus
ttagacggttgtcacacactatagt

SEQ ID NO: 58528 - DNA, 25 bp, SARS Virus
tagacggttgttccacactatagtc

SEQ ID NO: 58529 - DNA, 25 bp, SARS Virus
agacggttgttacacactatagtct

SEQ ID NO: 58530 - DNA, 25 bp, SARS Virus
gacggttgttacccactatagtctg

SEQ ID NO: 58531 - DNA, 25 bp, SARS Virus
acggttgttacacactatagtctgt

SEQ ID NO: 58532 - DNA, 25 bp, SARS Virus
cggttgttacaccctatagtctgtt

SEQ ID NO: 58533 - DNA, 25 bp, SARS Virus
ggttgttacacactatagtctgttg

SEQ ID NO: 58534 - DNA, 25 bp, SARS Virus
gttgttacacaccatagtctgttga

SEQ ID NO: 58535 - DNA, 25 bp, SARS Virus
ttgttacacactctagtctgttgag

SEQ ID NO: 58536 - DNA, 25 bp, SARS Virus
tgttacacactacagtctgttgagg

SEQ ID NO: 58537 - DNA, 25 bp, SARS Virus
gttacacactatcgtctgttgagga

SEQ ID NO: 58538 - DNA, 25 bp, SARS Virus
ttacacactatactctgttgaggat

SEQ ID NO: 58539 - DNA, 25 bp, SARS Virus
tacacactatagcctgttgaggata

SEQ ID NO: 58540 - DNA, 25 bp, SARS Virus
acacactatagtctgttgaggataa

SEQ ID NO: 58541 - DNA, 25 bp, SARS Virus
cacactatagtccgttgaggataag

SEQ ID NO: 58542 - DNA, 25 bp, SARS Virus
acactatagtctcttgaggataagc

SEQ ID NO: 58543 - DNA, 25 bp, SARS Virus
cactatagtctgctgaggataagca

SEQ ID NO: 58544 - DNA, 25 bp, SARS Virus
actatagtctgtcgaggataagcat

SEQ ID NO: 58545 - DNA, 25 bp, SARS Virus
ctatagtctgttcaggataagcatc

SEQ ID NO: 58546 - DNA, 25 bp, SARS Virus
tatagtctgttgcggataagcatca

SEQ ID NO: 58547 - DNA, 25 bp, SARS Virus
atagtctgttgacgataagcatcaa

SEQ ID NO: 58548 - DNA, 25 bp, SARS Virus
tagtctgttgagcataagcatcaac

SEQ ID NO: 58549 - DNA, 25 bp, SARS Virus
agtctgttgaggctaagcatcaact

SEQ ID NO: 58550 - DNA, 25 bp, SARS Virus
gtctgttgaggacaagcatcaactt

SEQ ID NO: 58551 - DNA, 25 bp, SARS Virus
tctgttgaggatcagcatcaacttc

SEQ ID NO: 58552 - DNA, 25 bp, SARS Virus
ctgttgaggatacgcatcaacttca

SEQ ID NO: 58553 - DNA, 25 bp, SARS Virus
tgttgaggataaccatcaacttcaa

SEQ ID NO: 58554 - DNA, 25 bp, SARS Virus
gttgaggataagcatcaacttcaac

SEQ ID NO: 58555 - DNA, 25 bp, SARS Virus
ttgaggataagcctcaacttcaaca

SEQ ID NO: 58556 - DNA, 25 bp, SARS Virus
tgaggataagcaccaacttcaacaa

SEQ ID NO: 58557 - DNA, 25 bp, SARS Virus
gaggataagcatcaacttcaacaac

SEQ ID NO: 58558 - DNA, 25 bp, SARS Virus
aggataagcatccacttcaacaact

SEQ ID NO: 58559 - DNA, 25 bp, SARS Virus
ggataagcatcaccttcaacaacta

SEQ ID NO: 58560 - DNA, 25 bp, SARS Virus
gataagcatcaacttcaacaactat

SEQ ID NO: 58561 - DNA, 25 bp, SARS Virus
ataagcatcaacctcaacaactatt

SEQ ID NO: 58562 - DNA, 25 bp, SARS Virus
taagcatcaactccaacaactattt

SEQ ID NO: 58563 - DNA, 25 bp, SARS Virus
aagcatcaacttcaacaactattta

SEQ ID NO: 58564 - DNA, 25 bp, SARS Virus
agcatcaacttccacaactatttat

SEQ ID NO: 58565 - DNA, 25 bp, SARS Virus
gcatcaacttcaccaactatttatg

SEQ ID NO: 58566 - DNA, 25 bp, SARS Virus
catcaacttcaacaactatttatga

SEQ ID NO: 58567 - DNA, 25 bp, SARS Virus
atcaacttcaaccactatttatgaa

SEQ ID NO: 58568 - DNA, 25 bp, SARS Virus
tcaacttcaacacctatttatgaaa

SEQ ID NO: 58569 - DNA, 25 bp, SARS Virus
caacttcaacaactatttatgaaac

SEQ ID NO: 58570 - DNA, 25 bp, SARS Virus
aacttcaacaaccatttatgaaact

SEQ ID NO: 58571 - DNA, 25 bp, SARS Virus
acttcaacaactctttatgaaacta

SEQ ID NO: 58572 - DNA, 25 bp, SARS Virus
cttcaacaactacttatgaaactaa

SEQ ID NO: 58573 - DNA, 25 bp, SARS Virus
ttcaacaactatctatgaaactaac

SEQ ID NO: 58574 - DNA, 25 bp, SARS Virus
tcaacaactattcatgaaactaaca

SEQ ID NO: 58575 - DNA, 25 bp, SARS Virus
caacaactatttctgaaactaacaa

SEQ ID NO: 58576 - DNA, 25 bp, SARS Virus
aacaactatttacgaaactaacaat

SEQ ID NO: 58577 - DNA, 25 bp, SARS Virus
acaactatttatcaaactaacaatg

SEQ ID NO: 58578 - DNA, 25 bp, SARS Virus
caactatttatgcaactaacaatgc

SEQ ID NO: 58579 - DNA, 25 bp, SARS Virus
aactatttatgacactaacaatgct

SEQ ID NO: 58580 - DNA, 25 bp, SARS Virus
actatttatgaacctaacaatgcta

SEQ ID NO: 58581 - DNA, 25 bp, SARS Virus
ctatttatgaaactaacaatgctac

SEQ ID NO: 58582 - DNA, 25 bp, SARS Virus
tatttatgaaaccaacaatgctacc

SEQ ID NO: 58583 - DNA, 25 bp, SARS Virus
atttatgaaactcacaatgctacca

SEQ ID NO: 58584 - DNA, 25 bp, SARS Virus
tttatgaaactaccaatgctaccac

SEQ ID NO: 58585 - DNA, 25 bp, SARS Virus
ttatgaaactaacaatgctaccacc

SEQ ID NO: 58586 - DNA, 25 bp, SARS Virus
tatgaaactaaccatgctaccaccg

SEQ ID NO: 58587 - DNA, 25 bp, SARS Virus
atgaaactaacactgctaccaccga

SEQ ID NO: 58588 - DNA, 25 bp, SARS Virus
tgaaactaacaacgctaccaccgac

SEQ ID NO: 58589 - DNA, 25 bp, SARS Virus
gaaactaacaatcctaccaccgaca

SEQ ID NO: 58590 - DNA, 25 bp, SARS Virus
aaactaacaatgctaccaccgacat

SEQ ID NO: 58591 - DNA, 25 bp, SARS Virus
aactaacaatgccaccaccgacata

SEQ ID NO: 58592 - DNA, 25 bp, SARS Virus
actaacaatgctcccaccgacataa

SEQ ID NO: 58593 - DNA, 25 bp, SARS Virus
ctaacaatgctaccaccgacataat

SEQ ID NO: 58594 - DNA, 25 bp, SARS Virus
taacaatgctaccaccgacataatt

SEQ ID NO: 58595 - DNA, 25 bp, SARS Virus
aacaatgctacccccgacataatta

SEQ ID NO: 58596 - DNA, 25 bp, SARS Virus
acaatgctaccaccgacataattac

SEQ ID NO: 58597 - DNA, 25 bp, SARS Virus
caatgctaccaccgacataattacg

SEQ ID NO: 58598 - DNA, 25 bp, SARS Virus
aatgctaccacccacataattacgg

SEQ ID NO: 58599 - DNA, 25 bp, SARS Virus
atgctaccaccgccataattacggt

SEQ ID NO: 58600 - DNA, 25 bp, SARS Virus
tgctaccaccgacataattacggtt

SEQ ID NO: 58601 - DNA, 25 bp, SARS Virus
gctaccaccgacctaattacggttg

SEQ ID NO: 58602 - DNA, 25 bp, SARS Virus
ctaccaccgacacaattacggttgg

SEQ ID NO: 58603 - DNA, 25 bp, SARS Virus
taccaccgacatcattacggttggt

SEQ ID NO: 58604 - DNA, 25 bp, SARS Virus
accaccgacatacttacggttggtt

SEQ ID NO: 58605 - DNA, 25 bp, SARS Virus
ccaccgacataactacggttggttc

SEQ ID NO: 58606 - DNA, 25 bp, SARS Virus
caccgacataatcacggttggttca

SEQ ID NO: 58607 - DNA, 25 bp, SARS Virus
accgacataattccggttggttcat

SEQ ID NO: 58608 - DNA, 25 bp, SARS Virus
ccgacataattacggttggttcatt

SEQ ID NO: 58609 - DNA, 25 bp, SARS Virus
cgacataattaccgttggttcatta

SEQ ID NO: 58610 - DNA, 25 bp, SARS Virus
gacataattacgcttggttcattag

SEQ ID NO: 58611 - DNA, 25 bp, SARS Virus
acataattacggctggttcattagc

SEQ ID NO: 58612 - DNA, 25 bp, SARS Virus
cataattacggtcggttcattagca

SEQ ID NO: 58613 - DNA, 25 bp, SARS Virus
ataattacggttcgttcattagcaa

SEQ ID NO: 58614 - DNA, 25 bp, SARS Virus
taattacggttgcttcattagcaat

SEQ ID NO: 58615 - DNA, 25 bp, SARS Virus
aattacggttggctcattagcaatt

SEQ ID NO: 58616 - DNA, 25 bp, SARS Virus
attacggttggtccattagcaattg

SEQ ID NO: 58617 - DNA, 25 bp, SARS Virus
ttacggttggttcattagcaattgt

SEQ ID NO: 58618 - DNA, 25 bp, SARS Virus
tacggttggttccttagcaattgtt

SEQ ID NO: 58619 - DNA, 25 bp, SARS Virus
acggttggttcactagcaattgtta

SEQ ID NO: 58620 - DNA, 25 bp, SARS Virus
cggttggttcatcagcaattgttag

SEQ ID NO: 58621 - DNA, 25 bp, SARS Virus
ggttggttcattcgcaattgttaga

SEQ ID NO: 58622 - DNA, 25 bp, SARS Virus
gttggttcattaccaattgttagac

SEQ ID NO: 58623 - DNA, 25 bp, SARS Virus
ttggttcattagcaattgttagacc

SEQ ID NO: 58624 - DNA, 25 bp, SARS Virus
tggttcattagccattgttagacct

SEQ ID NO: 58625 - DNA, 25 bp, SARS Virus
ggttcattagcacttgttagaccta

SEQ ID NO: 58626 - DNA, 25 bp, SARS Virus
gttcattagcaactgttagacctat

SEQ ID NO: 58627 - DNA, 25 bp, SARS Virus
ttcattagcaatcgttagacctatt

SEQ ID NO: 58628 - DNA, 25 bp, SARS Virus
tcattagcaattcttagacctattt

SEQ ID NO: 58629 - DNA, 25 bp, SARS Virus
cattagcaattgctagacctattta

SEQ ID NO: 58630 - DNA, 25 bp, SARS Virus
attagcaattgtcagacctatttag

SEQ ID NO: 58631 - DNA, 25 bp, SARS Virus
ttagcaattgttcgacctatttagt

SEQ ID NO: 58632 - DNA, 25 bp, SARS Virus
tagcaattgttacacctatttagtc

SEQ ID NO: 58633 - DNA, 25 bp, SARS Virus
agcaattgttagccctatttagtcg

SEQ ID NO: 58634 - DNA, 25 bp, SARS Virus
gcaattgttagacctatttagtcga

SEQ ID NO: 58635 - DNA, 25 bp, SARS Virus
caattgttagacctatttagtcgac

SEQ ID NO: 58636 - DNA, 25 bp, SARS Virus
aattgttagacccatttagtcgacc

SEQ ID NO: 58637 - DNA, 25 bp, SARS Virus
attgttagacctctttagtcgacca

SEQ ID NO: 58638 - DNA, 25 bp, SARS Virus
ttgttagacctacttagtcgaccaa

SEQ ID NO: 58639 - DNA, 25 bp, SARS Virus
tgttagacctatctagtcgaccaaa

SEQ ID NO: 58640 - DNA, 25 bp, SARS Virus
gttagacctattcagtcgaccaaag

SEQ ID NO: 58641 - DNA, 25 bp, SARS Virus
ttagacctatttcgtcgaccaaagg

SEQ ID NO: 58642 - DNA, 25 bp, SARS Virus
tagacctatttactcgaccaaaggg

SEQ ID NO: 58643 - DNA, 25 bp, SARS Virus
agacctatttagccgaccaaagggt

SEQ ID NO: 58644 - DNA, 25 bp, SARS Virus
gacctatttagtcgaccaaagggta

SEQ ID NO: 58645 - DNA, 25 bp, SARS Virus
acctatttagtccaccaaagggtaa

SEQ ID NO: 58646 - DNA, 25 bp, SARS Virus
cctatttagtcgcccaaagggtaaa

SEQ ID NO: 58647 - DNA, 25 bp, SARS Virus
ctatttagtcgaccaaagggtaaat

SEQ ID NO: 58648 - DNA, 25 bp, SARS Virus
tatttagtcgaccaaagggtaaatt

SEQ ID NO: 58649 - DNA, 25 bp, SARS Virus
atttagtcgacccaagggtaaatta

SEQ ID NO: 58650 - DNA, 25 bp, SARS Virus
tttagtcgaccacagggtaaattat

SEQ ID NO: 58651 - DNA, 25 bp, SARS Virus
ttagtcgaccaacgggtaaattatt

SEQ ID NO: 58652 - DNA, 25 bp, SARS Virus
tagtcgaccaaacggtaaattattt

SEQ ID NO: 58653 - DNA, 25 bp, SARS Virus
agtcgaccaaagcgtaaattattta

SEQ ID NO: 58654 - DNA, 25 bp, SARS Virus
gtcgaccaaaggctaaattatttac

SEQ ID NO: 58655 - DNA, 25 bp, SARS Virus
tcgaccaaagggcaaattatttacc

SEQ ID NO: 58656 - DNA, 25 bp, SARS Virus
cgaccaaagggtcaattatttaccc

SEQ ID NO: 58657 - DNA, 25 bp, SARS Virus
gaccaaagggtacattatttacccc

SEQ ID NO: 58658 - DNA, 25 bp, SARS Virus
accaaagggtaacttatttacccca

SEQ ID NO: 58659 - DNA, 25 bp, SARS Virus
ccaaagggtaaactatttaccccat

SEQ ID NO: 58660 - DNA, 25 bp, SARS Virus
caaagggtaaatcatttaccccatt

SEQ ID NO: 58661 - DNA, 25 bp, SARS Virus
aaagggtaaattctttaccccattc

SEQ ID NO: 58662 - DNA, 25 bp, SARS Virus
aagggtaaattacttaccccattcc

SEQ ID NO: 58663 - DNA, 25 bp, SARS Virus
agggtaaattatctaccccattccg

SEQ ID NO: 58664 - DNA, 25 bp, SARS Virus
gggtaaattattcaccccattccga

SEQ ID NO: 58665 - DNA, 25 bp, SARS Virus
ggtaaattatttcccccattccgat

SEQ ID NO: 58666 - DNA, 25 bp, SARS Virus
gtaaattatttaccccattccgatc

SEQ ID NO: 58667 - DNA, 25 bp, SARS Virus
taaattatttaccccattccgatct

SEQ ID NO: 58668 - DNA, 25 bp, SARS Virus
aaattatttaccccattccgatctg

SEQ ID NO: 58669 - DNA, 25 bp, SARS Virus
aattatttaccccattccgatctga

SEQ ID NO: 58670 - DNA, 25 bp, SARS Virus
attatttacccccttccgatctgaa

SEQ ID NO: 58671 - DNA, 25 bp, SARS Virus
ttatttaccccactccgatctgaaa

SEQ ID NO: 58672 - DNA, 25 bp, SARS Virus
tatttaccccatcccgatctgaaat

SEQ ID NO: 58673 - DNA, 25 bp, SARS Virus
atttaccccattccgatctgaaata

SEQ ID NO: 58674 - DNA, 25 bp, SARS Virus
tttaccccattccgatctgaaataa

SEQ ID NO: 58675 - DNA, 25 bp, SARS Virus
ttaccccattcccatctgaaataat

SEQ ID NO: 58676 - DNA, 25 bp, SARS Virus
taccccattccgctctgaaataata

SEQ ID NO: 58677 - DNA, 25 bp, SARS Virus
accccattccgacctgaaataatac

SEQ ID NO: 58678 - DNA, 25 bp, SARS Virus
ccccattccgatctgaaataatact

SEQ ID NO: 58679 - DNA, 25 bp, SARS Virus
cccattccgatccgaaataatactg

SEQ ID NO: 58680 - DNA, 25 bp, SARS Virus
ccattccgatctcaaataatactga

SEQ ID NO: 58681 - DNA, 25 bp, SARS Virus
cattccgatctgcaataatactgag

SEQ ID NO: 58682 - DNA, 25 bp, SARS Virus
attccgatctgacataatactgagt

SEQ ID NO: 58683 - DNA, 25 bp, SARS Virus
ttccgatctgaactaatactgagtt

SEQ ID NO: 58684 - DNA, 25 bp, SARS Virus
tccgatctgaaacaatactgagtta

SEQ ID NO: 58685 - DNA, 25 bp, SARS Virus
ccgatctgaaatcatactgagttac

SEQ ID NO: 58686 - DNA, 25 bp, SARS Virus
cgatctgaaatactactgagttact

SEQ ID NO: 58687 - DNA, 25 bp, SARS Virus
gatctgaaataacactgagttactc

SEQ ID NO: 58688 - DNA, 25 bp, SARS Virus
atctgaaataatcctgagttactca

SEQ ID NO: 58689 - DNA, 25 bp, SARS Virus
tcaatcctcagcgtgtattagtcct

SEQ ID NO: 58690 - DNA, 25 bp, SARS Virus
caatcctcagcaggtattagtccta

SEQ ID NO: 58691 - DNA, 25 bp, SARS Virus
aatcctcagcatgtattagtcctac

SEQ ID NO: 58692 - DNA, 25 bp, SARS Virus
atcctcagcatggattagtcctaca

SEQ ID NO: 58693 - DNA, 25 bp, SARS Virus
tcctcagcatgtgttagtcctacat

SEQ ID NO: 58694 - DNA, 25 bp, SARS Virus
cctcagcatgtagtagtcctacatt

SEQ ID NO: 58695 - DNA, 25 bp, SARS Virus
ctcagcatgtatgagtcctacattt

SEQ ID NO: 58696 - DNA, 25 bp, SARS Virus
tcagcatgtattggtcctacatttg

SEQ ID NO: 58697 - DNA, 25 bp, SARS Virus
cagcatgtattagtcctacatttga

SEQ ID NO: 58698 - DNA, 25 bp, SARS Virus
agcatgtattaggcctacatttgaa

SEQ ID NO: 58699 - DNA, 25 bp, SARS Virus
gcatgtattagtgctacatttgaat

SEQ ID NO: 58700 - DNA, 25 bp, SARS Virus
catgtattagtcgtacatttgaatg

SEQ ID NO: 58701 - DNA, 25 bp, SARS Virus
atgtattagtccgacatttgaatgt

SEQ ID NO: 58702 - DNA, 25 bp, SARS Virus
tgtattagtcctgcatttgaatgta

SEQ ID NO: 58703 - DNA, 25 bp, SARS Virus
gtattagtcctagatttgaatgtat

SEQ ID NO: 58704 - DNA, 25 bp, SARS Virus
tattagtcctacgtttgaatgtatc

SEQ ID NO: 58705 - DNA, 25 bp, SARS Virus
attagtcctacagttgaatgtatcg

SEQ ID NO: 58706 - DNA, 25 bp, SARS Virus
ttagtcctacatgtgaatgtatcga

SEQ ID NO: 58707 - DNA, 25 bp, SARS Virus
tagtcctacattggaatgtatcgag

SEQ ID NO: 58708 - DNA, 25 bp, SARS Virus
agtcctacatttgaatgtatcgagc

SEQ ID NO: 58709 - DNA, 25 bp, SARS Virus
gtcctacatttggatgtatcgagcg

SEQ ID NO: 58710 - DNA, 25 bp, SARS Virus
tcctacatttgagtgtatcgagcgc

SEQ ID NO: 58711 - DNA, 25 bp, SARS Virus
cctacatttgaaggtatcgagcgca

SEQ ID NO: 58712 - DNA, 25 bp, SARS Virus
ctacatttgaatgtatcgagcgcag

SEQ ID NO: 58713 - DNA, 25 bp, SARS Virus
tacatttgaatggatcgagcgcaga

SEQ ID NO: 58714 - DNA, 25 bp, SARS Virus
acatttgaatgtgtcgagcgcagag

SEQ ID NO: 58715 - DNA, 25 bp, SARS Virus
catttgaatgtagcgagcgcagagt

SEQ ID NO: 58716 - DNA, 25 bp, SARS Virus
atttgaatgtatggagcgcagagtc

SEQ ID NO: 58717 - DNA, 25 bp, SARS Virus
tttgaatgtatcgagcgcagagtca

SEQ ID NO: 58718 - DNA, 25 bp, SARS Virus
ttgaatgtatcgggcgcagagtcaa

SEQ ID NO: 58719 - DNA, 25 bp, SARS Virus
tgaatgtatcgagcgcagagtcaaa

SEQ ID NO: 58720 - DNA, 25 bp, SARS Virus
gaatgtatcgagggcagagtcaaag

SEQ ID NO: 58721 - DNA, 25 bp, SARS Virus
aatgtatcgagcgcagagtcaaagt

SEQ ID NO: 58722 - DNA, 25 bp, SARS Virus
atgtatcgagcggagagtcaaagtt

SEQ ID NO: 58723 - DNA, 25 bp, SARS Virus
tgtatcgagcgcggagtcaaagttc

SEQ ID NO: 58724 - DNA, 25 bp, SARS Virus
gtatcgagcgcagagtcaaagttcc

SEQ ID NO: 58725 - DNA, 25 bp, SARS Virus
tatcgagcgcagggtcaaagttcct

SEQ ID NO: 58726 - DNA, 25 bp, SARS Virus
atcgagcgcagagtcaaagttcctt

SEQ ID NO: 58727 - DNA, 25 bp, SARS Virus
tcgagcgcagaggcaaagttccttg

SEQ ID NO: 58728 - DNA, 25 bp, SARS Virus
cgagcgcagagtgaaagttccttga

SEQ ID NO: 58729 - DNA, 25 bp, SARS Virus
gagcgcagagtcgaagttccttgaa

SEQ ID NO: 58730 - DNA, 25 bp, SARS Virus
agcgcagagtcagagttccttgaaa

SEQ ID NO: 58731 - DNA, 25 bp, SARS Virus
gcgcagagtcaaggttccttgaaaa

SEQ ID NO: 58732 - DNA, 25 bp, SARS Virus
cgcagagtcaaagttccttgaaaat

SEQ ID NO: 58733 - DNA, 25 bp, SARS Virus
gcagagtcaaaggtccttgaaaatc

SEQ ID NO: 58734 - DNA, 25 bp, SARS Virus
cagagtcaaagtgccttgaaaatca

SEQ ID NO: 58735 - DNA, 25 bp, SARS Virus
agagtcaaagttgcttgaaaatcac

SEQ ID NO: 58736 - DNA, 25 bp, SARS Virus
gagtcaaagttcgttgaaaatcaca

SEQ ID NO: 58737 - DNA, 25 bp, SARS Virus
agtcaaagttccgtgaaaatcacat

SEQ ID NO: 58738 - DNA, 25 bp, SARS Virus
gtcaaagttcctggaaaatcacata

SEQ ID NO: 58739 - DNA, 25 bp, SARS Virus
tcaaagttccttgaaaatcacatac

SEQ ID NO: 58740 - DNA, 25 bp, SARS Virus
caaagttccttggaaatcacatacg

SEQ ID NO: 58741 - DNA, 25 bp, SARS Virus
aaagttccttgagaatcacatacga

SEQ ID NO: 58742 - DNA, 25 bp, SARS Virus
aagttccttgaagatcacatacgac

SEQ ID NO: 58743 - DNA, 25 bp, SARS Virus
agttccttgaaagtcacatacgacg

SEQ ID NO: 58744 - DNA, 25 bp, SARS Virus
gttccttgaaaagcacatacgacga

SEQ ID NO: 58745 - DNA, 25 bp, SARS Virus
ttccttgaaaatgacatacgacgac

SEQ ID NO: 58746 - DNA, 25 bp, SARS Virus
tccttgaaaatcgcatacgacgact

SEQ ID NO: 58747 - DNA, 25 bp, SARS Virus
ccttgaaaatcagatacgacgacta

SEQ ID NO: 58748 - DNA, 25 bp, SARS Virus
cttgaaaatcacgtacgacgactag

SEQ ID NO: 58749 - DNA, 25 bp, SARS Virus
ttgaaaatcacagacgacgactagg

SEQ ID NO: 58750 - DNA, 25 bp, SARS Virus
tgaaaatcacatgcgacgactaggt

SEQ ID NO: 58751 - DNA, 25 bp, SARS Virus
gaaaatcacataggacgactaggtc

SEQ ID NO: 58752 - DNA, 25 bp, SARS Virus
aaaatcacatacgacgactaggtcg

SEQ ID NO: 58753 - DNA, 25 bp, SARS Virus
aaatcacatacggcgactaggtcga

SEQ ID NO: 58754 - DNA, 25 bp, SARS Virus
aatcacatacgaggactaggtcgat

SEQ ID NO: 58755 - DNA, 25 bp, SARS Virus
atcacatacgacgactaggtcgata

SEQ ID NO: 58756 - DNA, 25 bp, SARS Virus
tcacatacgacggctaggtcgatac

SEQ ID NO: 58757 - DNA, 25 bp, SARS Virus
cacatacgacgagtaggtcgatacg

SEQ ID NO: 58758 - DNA, 25 bp, SARS Virus
acatacgacgacgaggtcgatacgt

SEQ ID NO: 58759 - DNA, 25 bp, SARS Virus
catacgacgactgggtcgatacgta

SEQ ID NO: 58760 - DNA, 25 bp, SARS Virus
atacgacgactaggtcgatacgtac

SEQ ID NO: 58761 - DNA, 25 bp, SARS Virus
tacgacgactaggtcgatacgtacg

SEQ ID NO: 58762 - DNA, 25 bp, SARS Virus
acgacgactagggcgatacgtacgt

SEQ ID NO: 58763 - DNA, 25 bp, SARS Virus
cgacgactaggtggatacgtacgtc

SEQ ID NO: 58764 - DNA, 25 bp, SARS Virus
gacgactaggtcgatacgtacgtcg

SEQ ID NO: 58765 - DNA, 25 bp, SARS Virus
acgactaggtcggtacgtacgtcga

SEQ ID NO: 58766 - DNA, 25 bp, SARS Virus
cgactaggtcgagacgtacgtcgaa

SEQ ID NO: 58767 - DNA, 25 bp, SARS Virus
gactaggtcgatgcgtacgtcgaag

SEQ ID NO: 58768 - DNA, 25 bp, SARS Virus
actaggtcgataggtacgtcgaaga

SEQ ID NO: 58769 - DNA, 25 bp, SARS Virus
ctaggtcgatacgtacgtcgaagac

SEQ ID NO: 58770 - DNA, 25 bp, SARS Virus
taggtcgatacggacgtcgaagacc

SEQ ID NO: 58771 - DNA, 25 bp, SARS Virus
aggtcgatacgtgcgtcgaagaccg

SEQ ID NO: 58772 - DNA, 25 bp, SARS Virus
ggtcgatacgtaggtcgaagaccgt

SEQ ID NO: 58773 - DNA, 25 bp, SARS Virus
gtcgatacgtacgtcgaagaccgtt

SEQ ID NO: 58774 - DNA, 25 bp, SARS Virus
tcgatacgtacggcgaagaccgtta

SEQ ID NO: 58775 - DNA, 25 bp, SARS Virus
cgatacgtacgtggaagaccgttaa

SEQ ID NO: 58776 - DNA, 25 bp, SARS Virus
gatacgtacgtcgaagaccgttaaa

SEQ ID NO: 58777 - DNA, 25 bp, SARS Virus
atacgtacgtcggagaccgttaaat

SEQ ID NO: 58778 - DNA, 25 bp, SARS Virus
tacgtacgtcgaggaccgttaaata

SEQ ID NO: 58779 - DNA, 25 bp, SARS Virus
acgtacgtcgaagaccgttaaataa

SEQ ID NO: 58780 - DNA, 25 bp, SARS Virus
cgtacgtcgaaggccgttaaataac

SEQ ID NO: 58781 - DNA, 25 bp, SARS Virus
gtacgtcgaagagcgttaaataacg

SEQ ID NO: 58782 - DNA, 25 bp, SARS Virus
tacgtcgaagacggttaaataacga

SEQ ID NO: 58783 - DNA, 25 bp, SARS Virus
acgtcgaagaccgttaaataacgat

SEQ ID NO: 58784 - DNA, 25 bp, SARS Virus
cgtcgaagaccggtaaataacgatc

SEQ ID NO: 58785 - DNA, 25 bp, SARS Virus
gtcgaagaccgtgaaataacgatct

SEQ ID NO: 58786 - DNA, 25 bp, SARS Virus
tcgaagaccgttgaataacgatcta

SEQ ID NO: 58787 - DNA, 25 bp, SARS Virus
cgaagaccgttagataacgatctat

SEQ ID NO: 58788 - DNA, 25 bp, SARS Virus
gaagaccgttaagtaacgatctatt

SEQ ID NO: 58789 - DNA, 25 bp, SARS Virus
aagaccgttaaagaacgatctattt

SEQ ID NO: 58790 - DNA, 25 bp, SARS Virus
agaccgttaaatgacgatctatttg

SEQ ID NO: 58791 - DNA, 25 bp, SARS Virus
gaccgttaaatagcgatctatttgc

SEQ ID NO: 58792 - DNA, 25 bp, SARS Virus
accgttaaataaggatctatttgcg

SEQ ID NO: 58793 - DNA, 25 bp, SARS Virus
ccgttaaataacgatctatttgcgt

SEQ ID NO: 58794 - DNA, 25 bp, SARS Virus
cgttaaataacggtctatttgcgtg

SEQ ID NO: 58795 - DNA, 25 bp, SARS Virus
gttaaataacgagctatttgcgtga

SEQ ID NO: 58796 - DNA, 25 bp, SARS Virus
ttaaataacgatgtatttgcgtgat

SEQ ID NO: 58797 - DNA, 25 bp, SARS Virus
taaataacgatcgatttgcgtgatg

SEQ ID NO: 58798 - DNA, 25 bp, SARS Virus
aaataacgatctgtttgcgtgatgt

SEQ ID NO: 58799 - DNA, 25 bp, SARS Virus
aataacgatctagttgcgtgatgta

SEQ ID NO: 58800 - DNA, 25 bp, SARS Virus
ataacgatctatgtgcgtgatgtac

SEQ ID NO: 58801 - DNA, 25 bp, SARS Virus
taacgatctattggcgtgatgtacg

SEQ ID NO: 58802 - DNA, 25 bp, SARS Virus
aacgatctatttgcgtgatgtacga

SEQ ID NO: 58803 - DNA, 25 bp, SARS Virus
acgatctatttgggtgatgtacgaa

SEQ ID NO: 58804 - DNA, 25 bp, SARS Virus
cgatctatttgcgtgatgtacgaaa

SEQ ID NO: 58805 - DNA, 25 bp, SARS Virus
gatctatttgcgggatgtacgaaaa

SEQ ID NO: 58806 - DNA, 25 bp, SARS Virus
atctatttgcgtgatgtacgaaaag

SEQ ID NO: 58807 - DNA, 25 bp, SARS Virus
tctatttgcgtggtgtacgaaaagt

SEQ ID NO: 58808 - DNA, 25 bp, SARS Virus
ctatttgcgtgaggtacgaaaagtc

SEQ ID NO: 58809 - DNA, 25 bp, SARS Virus
tatttgcgtgatgtacgaaaagtca

SEQ ID NO: 58810 - DNA, 25 bp, SARS Virus
atttgcgtgatggacgaaaagtcat

SEQ ID NO: 58811 - DNA, 25 bp, SARS Virus
tttgcgtgatgtgcgaaaagtcatc

SEQ ID NO: 58812 - DNA, 25 bp, SARS Virus
ttgcgtgatgtaggaaaagtcatcg

SEQ ID NO: 58813 - DNA, 25 bp, SARS Virus
tgcgtgatgtacgaaaagtcatcga

SEQ ID NO: 58814 - DNA, 25 bp, SARS Virus
gcgtgatgtacggaaagtcatcgac

SEQ ID NO: 58815 - DNA, 25 bp, SARS Virus
cgtgatgtacgagaagtcatcgacg

SEQ ID NO: 58816 - DNA, 25 bp, SARS Virus
gtgatgtacgaagagtcatcgacgt

SEQ ID NO: 58817 - DNA, 25 bp, SARS Virus
tgatgtacgaaaggtcatcgacgtg

SEQ ID NO: 58818 - DNA, 25 bp, SARS Virus
gatgtacgaaaagtcatcgacgtga

SEQ ID NO: 58819 - DNA, 25 bp, SARS Virus
atgtacgaaaaggcatcgacgtgat

SEQ ID NO: 58820 - DNA, 25 bp, SARS Virus
tgtacgaaaagtgatcgacgtgatt

SEQ ID NO: 58821 - DNA, 25 bp, SARS Virus
gtacgaaaagtcgtcgacgtgattg

SEQ ID NO: 58822 - DNA, 25 bp, SARS Virus
tacgaaaagtcagcgacgtgattgt

SEQ ID NO: 58823 - DNA, 25 bp, SARS Virus
acgaaaagtcatggacgtgattgtt

SEQ ID NO: 58824 - DNA, 25 bp, SARS Virus
cgaaaagtcatcgacgtgattgttt

SEQ ID NO: 58825 - DNA, 25 bp, SARS Virus
gaaaagtcatcggcgtgattgtttg

SEQ ID NO: 58826 - DNA, 25 bp, SARS Virus
aaaagtcatcgaggtgattgtttgt

SEQ ID NO: 58827 - DNA, 25 bp, SARS Virus
aaagtcatcgacgtgattgtttgtt

SEQ ID NO: 58828 - DNA, 25 bp, SARS Virus
aagtcatcgacgggattgtttgtta

SEQ ID NO: 58829 - DNA, 25 bp, SARS Virus
agtcatcgacgtgattgtttgttac

SEQ ID NO: 58830 - DNA, 25 bp, SARS Virus
gtcatcgacgtggttgtttgttaca

SEQ ID NO: 58831 - DNA, 25 bp, SARS Virus
tcatcgacgtgagtgtttgttacaa

SEQ ID NO: 58832 - DNA, 25 bp, SARS Virus
catcgacgtgatggtttgttacaac

SEQ ID NO: 58833 - DNA, 25 bp, SARS Virus
atcgacgtgattgtttgttacaacg

SEQ ID NO: 58834 - DNA, 25 bp, SARS Virus
tcgacgtgattggttgttacaacga

SEQ ID NO: 58835 - DNA, 25 bp, SARS Virus
cgacgtgattgtgtgttacaacgaa

SEQ ID NO: 58836 - DNA, 25 bp, SARS Virus
gacgtgattgttggttacaacgaaa

SEQ ID NO: 58837 - DNA, 25 bp, SARS Virus
acgtgattgtttgttacaacgaaaa

SEQ ID NO: 58838 - DNA, 25 bp, SARS Virus
cgtgattgtttggtacaacgaaaag

SEQ ID NO: 58839 - DNA, 25 bp, SARS Virus
gtgattgtttgtgacaacgaaaagt

SEQ ID NO: 58840 - DNA, 25 bp, SARS Virus
tgattgtttgttgcaacgaaaagtt

SEQ ID NO: 58841 - DNA, 25 bp, SARS Virus
gattgtttgttagaacgaaaagttt

SEQ ID NO: 58842 - DNA, 25 bp, SARS Virus
attgtttgttacgacgaaaagtttg

SEQ ID NO: 58843 - DNA, 25 bp, SARS Virus
ttgtttgttacagcgaaaagtttga

SEQ ID NO: 58844 - DNA, 25 bp, SARS Virus
tgtttgttacaaggaaaagtttgac

SEQ ID NO: 58845 - DNA, 25 bp, SARS Virus
gtttgttacaacgaaaagtttgaca

SEQ ID NO: 58846 - DNA, 25 bp, SARS Virus
tttgttacaacggaaagtttgacag

SEQ ID NO: 58847 - DNA, 25 bp, SARS Virus
ttgttacaacgagaagtttgacagt

SEQ ID NO: 58848 - DNA, 25 bp, SARS Virus
tgttacaacgaagagtttgacagtt

SEQ ID NO: 58849 - DNA, 25 bp, SARS Virus
gttacaacgaaaggtttgacagttt

SEQ ID NO: 58850 - DNA, 25 bp, SARS Virus
ttacaacgaaaagtttgacagtttg

SEQ ID NO: 58851 - DNA, 25 bp, SARS Virus
tacaacgaaaaggttgacagtttgg

SEQ ID NO: 58852 - DNA, 25 bp, SARS Virus
acaacgaaaagtgtgacagtttggg

SEQ ID NO: 58853 - DNA, 25 bp, SARS Virus
caacgaaaagttggacagtttgggc

SEQ ID NO: 58854 - DNA, 25 bp, SARS Virus
aacgaaaagtttgacagtttgggcc

SEQ ID NO: 58855 - DNA, 25 bp, SARS Virus
acgaaaagtttggcagtttgggcca

SEQ ID NO: 58856 - DNA, 25 bp, SARS Virus
cgaaaagtttgagagtttgggccat

SEQ ID NO: 58857 - DNA, 25 bp, SARS Virus
gaaaagtttgacggtttgggccatt

SEQ ID NO: 58858 - DNA, 25 bp, SARS Virus
aaaagtttgacagtttgggccatta

SEQ ID NO: 58859 - DNA, 25 bp, SARS Virus
aaagtttgacaggttgggccattaa

SEQ ID NO: 58860 - DNA, 25 bp, SARS Virus
aagtttgacagtgtgggccattaaa

SEQ ID NO: 58861 - DNA, 25 bp, SARS Virus
agtttgacagttggggccattaaaa

SEQ ID NO: 58862 - DNA, 25 bp, SARS Virus
gtttgacagtttgggccattaaaat

SEQ ID NO: 58863 - DNA, 25 bp, SARS Virus
tttgacagtttgggccattaaaatt

SEQ ID NO: 58864 - DNA, 25 bp, SARS Virus
ttgacagtttgggccattaaaatta

SEQ ID NO: 58865 - DNA, 25 bp, SARS Virus
tgacagtttggggcattaaaattat

SEQ ID NO: 58866 - DNA, 25 bp, SARS Virus
gacagtttgggcgattaaaattatt

SEQ ID NO: 58867 - DNA, 25 bp, SARS Virus
acagtttgggccgttaaaattattt

SEQ ID NO: 58868 - DNA, 25 bp, SARS Virus
cagtttgggccagtaaaattatttc

SEQ ID NO: 58869 - DNA, 25 bp, SARS Virus
agtttgggccatgaaaattatttct

SEQ ID NO: 58870 - DNA, 25 bp, SARS Virus
gtttgggccattgaaattatttctg

SEQ ID NO: 58871 - DNA, 25 bp, SARS Virus
tttgggccattagaattatttctga

SEQ ID NO: 58872 - DNA, 25 bp, SARS Virus
ttgggccattaagattatttctgaa

SEQ ID NO: 58873 - DNA, 25 bp, SARS Virus
tgggccattaaagttatttctgaaa

SEQ ID NO: 58874 - DNA, 25 bp, SARS Virus
gggccattaaaagtatttctgaaaa

SEQ ID NO: 58875 - DNA, 25 bp, SARS Virus
ggccattaaaatgatttctgaaaat

SEQ ID NO: 58876 - DNA, 25 bp, SARS Virus
gccattaaaattgtttctgaaaata

SEQ ID NO: 58877 - DNA, 25 bp, SARS Virus
ccattaaaattagttctgaaaatac

SEQ ID NO: 58878 - DNA, 25 bp, SARS Virus
cattaaaattatgtctgaaaatact

SEQ ID NO: 58879 - DNA, 25 bp, SARS Virus
attaaaattattgctgaaaatactg

SEQ ID NO: 58880 - DNA, 25 bp, SARS Virus
ttaaaattatttgtgaaaatactga

SEQ ID NO: 58881 - DNA, 25 bp, SARS Virus
taaaattatttcggaaaatactgaa

SEQ ID NO: 58882 - DNA, 25 bp, SARS Virus
aaaattatttctgaaaatactgaaa

SEQ ID NO: 58883 - DNA, 25 bp, SARS Virus
aaattatttctggaaatactgaaac

SEQ ID NO: 58884 - DNA, 25 bp, SARS Virus
aattatttctgagaatactgaaacg

SEQ ID NO: 58885 - DNA, 25 bp, SARS Virus
attatttctgaagatactgaaacga

SEQ ID NO: 58886 - DNA, 25 bp, SARS Virus
ttatttctgaaagtactgaaacgac

SEQ ID NO: 58887 - DNA, 25 bp, SARS Virus
tatttctgaaaagactgaaacgaca

SEQ ID NO: 58888 - DNA, 25 bp, SARS Virus
atttctgaaaatgctgaaacgacac

SEQ ID NO: 58889 - DNA, 25 bp, SARS Virus
tttctgaaaatagtgaaacgacaca

SEQ ID NO: 58890 - DNA, 25 bp, SARS Virus
ttctgaaaatacggaaacgacacag

SEQ ID NO: 58891 - DNA, 25 bp, SARS Virus
tctgaaaatactgaaacgacacaga

SEQ ID NO: 58892 - DNA, 25 bp, SARS Virus
ctgaaaatactggaacgacacagat

SEQ ID NO: 58893 - DNA, 25 bp, SARS Virus
tgaaaatactgagacgacacagatt

SEQ ID NO: 58894 - DNA, 25 bp, SARS Virus
gaaaatactgaagcgacacagattt

SEQ ID NO: 58895 - DNA, 25 bp, SARS Virus
aaaatactgaaaggacacagatttc

SEQ ID NO: 58896 - DNA, 25 bp, SARS Virus
aaatactgaaacgacacagatttcc

SEQ ID NO: 58897 - DNA, 25 bp, SARS Virus
aatactgaaacggcacagatttcca

SEQ ID NO: 58898 - DNA, 25 bp, SARS Virus
atactgaaacgagacagatttccaa

SEQ ID NO: 58899 - DNA, 25 bp, SARS Virus
tactgaaacgacgcagatttccaaa

SEQ ID NO: 58900 - DNA, 25 bp, SARS Virus
actgaaacgacagagatttccaaag

SEQ ID NO: 58901 - DNA, 25 bp, SARS Virus
ctgaaacgacacggatttccaaaga

SEQ ID NO: 58902 - DNA, 25 bp, SARS Virus
tgaaacgacacagatttccaaagaa

SEQ ID NO: 58903 - DNA, 25 bp, SARS Virus
gaaacgacacaggtttccaaagaaa

SEQ ID NO: 58904 - DNA, 25 bp, SARS Virus
aaacgacacagagttccaaagaaat

SEQ ID NO: 58905 - DNA, 25 bp, SARS Virus
aacgacacagatgtccaaagaaatt

SEQ ID NO: 58906 - DNA, 25 bp, SARS Virus
acgacacagattgccaaagaaattc

SEQ ID NO: 58907 - DNA, 25 bp, SARS Virus
cgacacagatttgcaaagaaattcc

SEQ ID NO: 58908 - DNA, 25 bp, SARS Virus
gacacagatttcgaaagaaattcct

SEQ ID NO: 58909 - DNA, 25 bp, SARS Virus
acacagatttccgaagaaattcctt

SEQ ID NO: 58910 - DNA, 25 bp, SARS Virus
cacagatttccagagaaattccttc

SEQ ID NO: 58911 - DNA, 25 bp, SARS Virus
acagatttccaaggaaattccttcc

SEQ ID NO: 58912 - DNA, 25 bp, SARS Virus
cagatttccaaagaaattccttcct

SEQ ID NO: 58913 - DNA, 25 bp, SARS Virus
agatttccaaaggaattccttcctt

SEQ ID NO: 58914 - DNA, 25 bp, SARS Virus
gatttccaaagagattccttccttc

SEQ ID NO: 58915 - DNA, 25 bp, SARS Virus
atttccaaagaagttccttccttca

SEQ ID NO: 58916 - DNA, 25 bp, SARS Virus
tttccaaagaaagtccttccttcaa

SEQ ID NO: 58917 - DNA, 25 bp, SARS Virus
ttccaaagaaatgccttccttcaag

SEQ ID NO: 58918 - DNA, 25 bp, SARS Virus
tccaaagaaattgcttccttcaaga

SEQ ID NO: 58919 - DNA, 25 bp, SARS Virus
ccaaagaaattcgttccttcaagac

SEQ ID NO: 58920 - DNA, 25 bp, SARS Virus
caaagaaattccgtccttcaagaca

SEQ ID NO: 58921 - DNA, 25 bp, SARS Virus
aaagaaattcctgccttcaagacaa

SEQ ID NO: 58922 - DNA, 25 bp, SARS Virus
aagaaattccttgcttcaagacaac

SEQ ID NO: 58923 - DNA, 25 bp, SARS Virus
agaaattccttcgttcaagacaact

SEQ ID NO: 58924 - DNA, 25 bp, SARS Virus
gaaattccttccgtcaagacaactt

SEQ ID NO: 58925 - DNA, 25 bp, SARS Virus
aaattccttcctgcaagacaacttg

SEQ ID NO: 58926 - DNA, 25 bp, SARS Virus
aattccttccttgaagacaacttga

SEQ ID NO: 58927 - DNA, 25 bp, SARS Virus
attccttccttcgagacaacttgat

SEQ ID NO: 58928 - DNA, 25 bp, SARS Virus
ttccttccttcaggacaacttgatt

SEQ ID NO: 58929 - DNA, 25 bp, SARS Virus
tccttccttcaagacaacttgattt

SEQ ID NO: 58930 - DNA, 25 bp, SARS Virus
ccttccttcaaggcaacttgatttt

SEQ ID NO: 58931 - DNA, 25 bp, SARS Virus
cttccttcaagagaacttgattttg

SEQ ID NO: 58932 - DNA, 25 bp, SARS Virus
ttccttcaagacgacttgattttgt

SEQ ID NO: 58933 - DNA, 25 bp, SARS Virus
tccttcaagacagcttgattttgtg

SEQ ID NO: 58934 - DNA, 25 bp, SARS Virus
ccttcaagacaagttgattttgtga

SEQ ID NO: 58935 - DNA, 25 bp, SARS Virus
cttcaagacaacgtgattttgtgaa

SEQ ID NO: 58936 - DNA, 25 bp, SARS Virus
ttcaagacaactggattttgtgaag

SEQ ID NO: 58937 - DNA, 25 bp, SARS Virus
tcaagacaacttgattttgtgaaga

SEQ ID NO: 58938 - DNA, 25 bp, SARS Virus
caagacaacttggttttgtgaagaa

SEQ ID NO: 58939 - DNA, 25 bp, SARS Virus
aagacaacttgagtttgtgaagaag

SEQ ID NO: 58940 - DNA, 25 bp, SARS Virus
agacaacttgatgttgtgaagaaga

SEQ ID NO: 58941 - DNA, 25 bp, SARS Virus
gacaacttgattgtgtgaagaagaa

SEQ ID NO: 58942 - DNA, 25 bp, SARS Virus
acaacttgatttggtgaagaagaaa

SEQ ID NO: 58943 - DNA, 25 bp, SARS Virus
caacttgattttgtgaagaagaaac

SEQ ID NO: 58944 - DNA, 25 bp, SARS Virus
aacttgattttgggaagaagaaacg

SEQ ID NO: 58945 - DNA, 25 bp, SARS Virus
acttgattttgtgaagaagaaacga

SEQ ID NO: 58946 - DNA, 25 bp, SARS Virus
cttgattttgtggagaagaaacgag

SEQ ID NO: 58947 - DNA, 25 bp, SARS Virus
ttgattttgtgaggaagaaacgagt

SEQ ID NO: 58948 - DNA, 25 bp, SARS Virus
tgattttgtgaagaagaaacgagtc

SEQ ID NO: 58949 - DNA, 25 bp, SARS Virus
gattttgtgaaggagaaacgagtcc

SEQ ID NO: 58950 - DNA, 25 bp, SARS Virus
attttgtgaagaggaaacgagtcct

SEQ ID NO: 58951 - DNA, 25 bp, SARS Virus
ttttgtgaagaagaaacgagtccta

SEQ ID NO: 58952 - DNA, 25 bp, SARS Virus
tttgtgaagaaggaacgagtcctac

SEQ ID NO: 58953 - DNA, 25 bp, SARS Virus
ttgtgaagaagagacgagtcctacc

SEQ ID NO: 58954 - DNA, 25 bp, SARS Virus
tgtgaagaagaagcgagtcctaccg

SEQ ID NO: 58955 - DNA, 25 bp, SARS Virus
gtgaagaagaaaggagtcctaccgt

SEQ ID NO: 58956 - DNA, 25 bp, SARS Virus
tgaagaagaaacgagtcctaccgtt

SEQ ID NO: 58957 - DNA, 25 bp, SARS Virus
gaagaagaaacgggtcctaccgttg

SEQ ID NO: 58958 - DNA, 25 bp, SARS Virus
aagaagaaacgagtcctaccgttgc

SEQ ID NO: 58959 - DNA, 25 bp, SARS Virus
agaagaaacgaggcctaccgttgcg

SEQ ID NO: 58960 - DNA, 25 bp, SARS Virus
gaagaaacgagtgctaccgttgcga

SEQ ID NO: 58961 - DNA, 25 bp, SARS Virus
aagaaacgagtcgtaccgttgcgac

SEQ ID NO: 58962 - DNA, 25 bp, SARS Virus
agaaacgagtccgaccgttgcgacg

SEQ ID NO: 58963 - DNA, 25 bp, SARS Virus
gaaacgagtcctgccgttgcgacga

SEQ ID NO: 58964 - DNA, 25 bp, SARS Virus
aaacgagtcctagcgttgcgacgat

SEQ ID NO: 58965 - DNA, 25 bp, SARS Virus
aacgagtcctacggttgcgacgata

SEQ ID NO: 58966 - DNA, 25 bp, SARS Virus
acgagtcctaccgttgcgacgatag

SEQ ID NO: 58967 - DNA, 25 bp, SARS Virus
cgagtcctaccggtgcgacgatagt

SEQ ID NO: 58968 - DNA, 25 bp, SARS Virus
gagtcctaccgtggcgacgatagtc

SEQ ID NO: 58969 - DNA, 25 bp, SARS Virus
agtcctaccgttgcgacgatagtca

SEQ ID NO: 58970 - DNA, 25 bp, SARS Virus
gtcctaccgttgggacgatagtcac

SEQ ID NO: 58971 - DNA, 25 bp, SARS Virus
tcctaccgttgcgacgatagtcact

SEQ ID NO: 58972 - DNA, 25 bp, SARS Virus
cctaccgttgcggcgatagtcacta

SEQ ID NO: 58973 - DNA, 25 bp, SARS Virus
ctaccgttgcgaggatagtcactaa

SEQ ID NO: 58974 - DNA, 25 bp, SARS Virus
taccgttgcgacgatagtcactaat

SEQ ID NO: 58975 - DNA, 25 bp, SARS Virus
accgttgcgacggtagtcactaata

SEQ ID NO: 58976 - DNA, 25 bp, SARS Virus
ccgttgcgacgagagtcactaatac

SEQ ID NO: 58977 - DNA, 25 bp, SARS Virus
cgttgcgacgatggtcactaatact

SEQ ID NO: 58978 - DNA, 25 bp, SARS Virus
gttgcgacgatagtcactaatactg

SEQ ID NO: 58979 - DNA, 25 bp, SARS Virus
ttgcgacgataggcactaatactga

SEQ ID NO: 58980 - DNA, 25 bp, SARS Virus
tgcgacgatagtgactaatactgat

SEQ ID NO: 58981 - DNA, 25 bp, SARS Virus
gcgacgatagtcgctaatactgata

SEQ ID NO: 58982 - DNA, 25 bp, SARS Virus
cgacgatagtcagtaatactgataa

SEQ ID NO: 58983 - DNA, 25 bp, SARS Virus
gacgatagtcacgaatactgataat

SEQ ID NO: 58984 - DNA, 25 bp, SARS Virus
acgatagtcactgatactgataata

SEQ ID NO: 58985 - DNA, 25 bp, SARS Virus
cgatagtcactagtactgataatag

SEQ ID NO: 58986 - DNA, 25 bp, SARS Virus
gatagtcactaagactgataatagc

SEQ ID NO: 58987 - DNA, 25 bp, SARS Virus
atagtcactaatgctgataatagca

SEQ ID NO: 58988 - DNA, 25 bp, SARS Virus
tagtcactaatagtgataatagcaa

SEQ ID NO: 58989 - DNA, 25 bp, SARS Virus
agtcactaatacggataatagcaat

SEQ ID NO: 58990 - DNA, 25 bp, SARS Virus
gtcactaatactgataatagcaata

SEQ ID NO: 58991 - DNA, 25 bp, SARS Virus
tcactaatactggtaatagcaatat

SEQ ID NO: 58992 - DNA, 25 bp, SARS Virus
cactaatactgagaatagcaatatt

SEQ ID NO: 58993 - DNA, 25 bp, SARS Virus
actaatactgatgatagcaatatta

SEQ ID NO: 58994 - DNA, 25 bp, SARS Virus
ctaatactgatagtagcaatattag

SEQ ID NO: 58995 - DNA, 25 bp, SARS Virus
taatactgataagagcaatattaga

SEQ ID NO: 58996 - DNA, 25 bp, SARS Virus
aatactgataatggcaatattagac

SEQ ID NO: 58997 - DNA, 25 bp, SARS Virus
atactgataatagcaatattagacg

SEQ ID NO: 58998 - DNA, 25 bp, SARS Virus
tactgataataggaatattagacgg

SEQ ID NO: 58999 - DNA, 25 bp, SARS Virus
actgataatagcgatattagacggt

SEQ ID NO: 59000 - DNA, 25 bp, SARS Virus
ctgataatagcagtattagacggtt

SEQ ID NO: 59001 - DNA, 25 bp, SARS Virus
tgataatagcaagattagacggttg

SEQ ID NO: 59002 - DNA, 25 bp, SARS Virus
gataatagcaatgttagacggttgt

SEQ ID NO: 59003 - DNA, 25 bp, SARS Virus
ataatagcaatagtagacggttgtt

SEQ ID NO: 59004 - DNA, 25 bp, SARS Virus
taatagcaatatgagacggttgtta

SEQ ID NO: 59005 - DNA, 25 bp, SARS Virus
aatagcaatattggacggttgttac

SEQ ID NO: 59006 - DNA, 25 bp, SARS Virus
atagcaatattagacggttgttaca

SEQ ID NO: 59007 - DNA, 25 bp, SARS Virus
tagcaatattaggcggttgttacac

SEQ ID NO: 59008 - DNA, 25 bp, SARS Virus
agcaatattagagggttgttacaca

SEQ ID NO: 59009 - DNA, 25 bp, SARS Virus
gcaatattagacggttgttacacac

SEQ ID NO: 59010 - DNA, 25 bp, SARS Virus
caatattagacggttgttacacact

SEQ ID NO: 59011 - DNA, 25 bp, SARS Virus
aatattagacgggtgttacacacta

SEQ ID NO: 59012 - DNA, 25 bp, SARS Virus
atattagacggtggttacacactat

SEQ ID NO: 59013 - DNA, 25 bp, SARS Virus
tattagacggttgttacacactata

SEQ ID NO: 59014 - DNA, 25 bp, SARS Virus
attagacggttggtacacactatag

SEQ ID NO: 59015 - DNA, 25 bp, SARS Virus
ttagacggttgtgacacactatagt

SEQ ID NO: 59016 - DNA, 25 bp, SARS Virus
tagacggttgttgcacactatagtc

SEQ ID NO: 59017 - DNA, 25 bp, SARS Virus
agacggttgttagacactatagtct

SEQ ID NO: 59018 - DNA, 25 bp, SARS Virus
gacggttgttacgcactatagtctg

SEQ ID NO: 59019 - DNA, 25 bp, SARS Virus
acggttgttacagactatagtctgt

SEQ ID NO: 59020 - DNA, 25 bp, SARS Virus
cggttgttacacgctatagtctgtt

SEQ ID NO: 59021 - DNA, 25 bp, SARS Virus
ggttgttacacagtatagtctgttg

SEQ ID NO: 59022 - DNA, 25 bp, SARS Virus
gttgttacacacgatagtctgttga

SEQ ID NO: 59023 - DNA, 25 bp, SARS Virus
ttgttacacactgtagtctgttgag

SEQ ID NO: 59024 - DNA, 25 bp, SARS Virus
tgttacacactagagtctgttgagg

SEQ ID NO: 59025 - DNA, 25 bp, SARS Virus
gttacacactatggtctgttgagga

SEQ ID NO: 59026 - DNA, 25 bp, SARS Virus
ttacacactatagtctgttgaggat

SEQ ID NO: 59027 - DNA, 25 bp, SARS Virus
tacacactataggctgttgaggata

SEQ ID NO: 59028 - DNA, 25 bp, SARS Virus
acacactatagtgtgttgaggataa

SEQ ID NO: 59029 - DNA, 25 bp, SARS Virus
cacactatagtcggttgaggataag

SEQ ID NO: 59030 - DNA, 25 bp, SARS Virus
acactatagtctgttgaggataagc

SEQ ID NO: 59031 - DNA, 25 bp, SARS Virus
cactatagtctggtgaggataagca

SEQ ID NO: 59032 - DNA, 25 bp, SARS Virus
actatagtctgtggaggataagcat

SEQ ID NO: 59033 - DNA, 25 bp, SARS Virus
ctatagtctgttgaggataagcatc

SEQ ID NO: 59034 - DNA, 25 bp, SARS Virus
tatagtctgttggggataagcatca

SEQ ID NO: 59035 - DNA, 25 bp, SARS Virus
atagtctgttgaggataagcatcaa

SEQ ID NO: 59036 - DNA, 25 bp, SARS Virus
tagtctgttgaggataagcatcaac

SEQ ID NO: 59037 - DNA, 25 bp, SARS Virus
agtctgttgagggtaagcatcaact

SEQ ID NO: 59038 - DNA, 25 bp, SARS Virus
gtctgttgaggagaagcatcaactt

SEQ ID NO: 59039 - DNA, 25 bp, SARS Virus
tctgttgaggatgagcatcaacttc

SEQ ID NO: 59040 - DNA, 25 bp, SARS Virus
ctgttgaggataggcatcaacttca

SEQ ID NO: 59041 - DNA, 25 bp, SARS Virus
tgttgaggataagcatcaacttcaa

SEQ ID NO: 59042 - DNA, 25 bp, SARS Virus
gttgaggataaggatcaacttcaac

SEQ ID NO: 59043 - DNA, 25 bp, SARS Virus
ttgaggataagcgtcaacttcaaca

SEQ ID NO: 59044 - DNA, 25 bp, SARS Virus
tgaggataagcagcaacttcaacaa

SEQ ID NO: 59045 - DNA, 25 bp, SARS Virus
gaggataagcatgaacttcaacaac

SEQ ID NO: 59046 - DNA, 25 bp, SARS Virus
aggataagcatcgacttcaacaact

SEQ ID NO: 59047 - DNA, 25 bp, SARS Virus
ggataagcatcagcttcaacaacta

SEQ ID NO: 59048 - DNA, 25 bp, SARS Virus
gataagcatcaagttcaacaactat

SEQ ID NO: 59049 - DNA, 25 bp, SARS Virus
ataagcatcaacgtcaacaactatt

SEQ ID NO: 59050 - DNA, 25 bp, SARS Virus
taagcatcaactgcaacaactattt

SEQ ID NO: 59051 - DNA, 25 bp, SARS Virus
aagcatcaacttgaacaactattta

SEQ ID NO: 59052 - DNA, 25 bp, SARS Virus
agcatcaacttcgacaactatttat

SEQ ID NO: 59053 - DNA, 25 bp, SARS Virus
gcatcaacttcagcaactatttatg

SEQ ID NO: 59054 - DNA, 25 bp, SARS Virus
catcaacttcaagaactatttatga

SEQ ID NO: 59055 - DNA, 25 bp, SARS Virus
atcaacttcaacgactatttatgaa

SEQ ID NO: 59056 - DNA, 25 bp, SARS Virus
tcaacttcaacagctatttatgaaa

SEQ ID NO: 59057 - DNA, 25 bp, SARS Virus
caacttcaacaagtatttatgaaac

SEQ ID NO: 59058 - DNA, 25 bp, SARS Virus
aacttcaacaacgatttatgaaact

SEQ ID NO: 59059 - DNA, 25 bp, SARS Virus
acttcaacaactgtttatgaaacta

SEQ ID NO: 59060 - DNA, 25 bp, SARS Virus
cttcaacaactagttatgaaactaa

SEQ ID NO: 59061 - DNA, 25 bp, SARS Virus
ttcaacaactatgtatgaaactaac

SEQ ID NO: 59062 - DNA, 25 bp, SARS Virus
tcaacaactattgatgaaactaaca

SEQ ID NO: 59063 - DNA, 25 bp, SARS Virus
caacaactatttgtgaaactaacaa

SEQ ID NO: 59064 - DNA, 25 bp, SARS Virus
aacaactatttaggaaactaacaat

SEQ ID NO: 59065 - DNA, 25 bp, SARS Virus
acaactatttatgaaactaacaatg

SEQ ID NO: 59066 - DNA, 25 bp, SARS Virus
caactatttatggaactaacaatgc

SEQ ID NO: 59067 - DNA, 25 bp, SARS Virus
aactatttatgagactaacaatgct

SEQ ID NO: 59068 - DNA, 25 bp, SARS Virus
actatttatgaagctaacaatgcta

SEQ ID NO: 59069 - DNA, 25 bp, SARS Virus
ctatttatgaaagtaacaatgctac

SEQ ID NO: 59070 - DNA, 25 bp, SARS Virus
tatttatgaaacgaacaatgctacc

SEQ ID NO: 59071 - DNA, 25 bp, SARS Virus
atttatgaaactgacaatgctacca

SEQ ID NO: 59072 - DNA, 25 bp, SARS Virus
tttatgaaactagcaatgctaccac

SEQ ID NO: 59073 - DNA, 25 bp, SARS Virus
ttatgaaactaagaatgctaccacc

SEQ ID NO: 59074 - DNA, 25 bp, SARS Virus
tatgaaactaacgatgctaccaccg

SEQ ID NO: 59075 - DNA, 25 bp, SARS Virus
atgaaactaacagtgctaccaccga

SEQ ID NO: 59076 - DNA, 25 bp, SARS Virus
tgaaactaacaaggctaccaccgac

SEQ ID NO: 59077 - DNA, 25 bp, SARS Virus
gaaactaacaatgctaccaccgaca

SEQ ID NO: 59078 - DNA, 25 bp, SARS Virus
aaactaacaatggtaccaccgacat

SEQ ID NO: 59079 - DNA, 25 bp, SARS Virus
aactaacaatgcgaccaccgacata

SEQ ID NO: 59080 - DNA, 25 bp, SARS Virus
actaacaatgctgccaccgacataa

SEQ ID NO: 59081 - DNA, 25 bp, SARS Virus
ctaacaatgctagcaccgacataat

SEQ ID NO: 59082 - DNA, 25 bp, SARS Virus
taacaatgctacgaccgacataatt

SEQ ID NO: 59083 - DNA, 25 bp, SARS Virus
aacaatgctaccgccgacataatta

SEQ ID NO: 59084 - DNA, 25 bp, SARS Virus
acaatgctaccagcgacataattac

SEQ ID NO: 59085 - DNA, 25 bp, SARS Virus
caatgctaccacggacataattacg

SEQ ID NO: 59086 - DNA, 25 bp, SARS Virus
aatgctaccaccgacataattacgg

SEQ ID NO: 59087 - DNA, 25 bp, SARS Virus
atgctaccaccggcataattacggt

SEQ ID NO: 59088 - DNA, 25 bp, SARS Virus
tgctaccaccgagataattacggtt

SEQ ID NO: 59089 - DNA, 25 bp, SARS Virus
gctaccaccgacgtaattacggttg

SEQ ID NO: 59090 - DNA, 25 bp, SARS Virus
ctaccaccgacagaattacggttgg

SEQ ID NO: 59091 - DNA, 25 bp, SARS Virus
taccaccgacatgattacggttggt

SEQ ID NO: 59092 - DNA, 25 bp, SARS Virus
accaccgacatagttacggttggtt

SEQ ID NO: 59093 - DNA, 25 bp, SARS Virus
ccaccgacataagtacggttggttc

SEQ ID NO: 59094 - DNA, 25 bp, SARS Virus
caccgacataatgacggttggttca

SEQ ID NO: 59095 - DNA, 25 bp, SARS Virus
accgacataattgcggttggttcat

SEQ ID NO: 59096 - DNA, 25 bp, SARS Virus
ccgacataattagggttggttcatt

SEQ ID NO: 59097 - DNA, 25 bp, SARS Virus
cgacataattacggttggttcatta

SEQ ID NO: 59098 - DNA, 25 bp, SARS Virus
gacataattacggttggttcattag

SEQ ID NO: 59099 - DNA, 25 bp, SARS Virus
acataattacgggtggttcattagc

SEQ ID NO: 59100 - DNA, 25 bp, SARS Virus
cataattacggtgggttcattagca

SEQ ID NO: 59101 - DNA, 25 bp, SARS Virus
ataattacggttggttcattagcaa

SEQ ID NO: 59102 - DNA, 25 bp, SARS Virus
taattacggttggttcattagcaat

SEQ ID NO: 59103 - DNA, 25 bp, SARS Virus
aattacggttgggtcattagcaatt

SEQ ID NO: 59104 - DNA, 25 bp, SARS Virus
attacggttggtgcattagcaattg

SEQ ID NO: 59105 - DNA, 25 bp, SARS Virus
ttacggttggttgattagcaattgt

SEQ ID NO: 59106 - DNA, 25 bp, SARS Virus
tacggttggttcgttagcaattgtt

SEQ ID NO: 59107 - DNA, 25 bp, SARS Virus
acggttggttcagtagcaattgtta

SEQ ID NO: 59108 - DNA, 25 bp, SARS Virus
cggttggttcatgagcaattgttag

SEQ ID NO: 59109 - DNA, 25 bp, SARS Virus
ggttggttcattggcaattgttaga

SEQ ID NO: 59110 - DNA, 25 bp, SARS Virus
gttggttcattagcaattgttagac

SEQ ID NO: 59111 - DNA, 25 bp, SARS Virus
ttggttcattaggaattgttagacc

SEQ ID NO: 59112 - DNA, 25 bp, SARS Virus
tggttcattagcgattgttagacct

SEQ ID NO: 59113 - DNA, 25 bp, SARS Virus
ggttcattagcagttgttagaccta

SEQ ID NO: 59114 - DNA, 25 bp, SARS Virus
gttcattagcaagtgttagacctat

SEQ ID NO: 59115 - DNA, 25 bp, SARS Virus
ttcattagcaatggttagacctatt

SEQ ID NO: 59116 - DNA, 25 bp, SARS Virus
tcattagcaattgttagacctattt

SEQ ID NO: 59117 - DNA, 25 bp, SARS Virus
cattagcaattggtagacctattta

SEQ ID NO: 59118 - DNA, 25 bp, SARS Virus
attagcaattgtgagacctatttag

SEQ ID NO: 59119 - DNA, 25 bp, SARS Virus
ttagcaattgttggacctatttagt

SEQ ID NO: 59120 - DNA, 25 bp, SARS Virus
tagcaattgttagacctatttagtc

SEQ ID NO: 59121 - DNA, 25 bp, SARS Virus
agcaattgttaggcctatttagtcg

SEQ ID NO: 59122 - DNA, 25 bp, SARS Virus
gcaattgttagagctatttagtcga

SEQ ID NO: 59123 - DNA, 25 bp, SARS Virus
caattgttagacgtatttagtcgac

SEQ ID NO: 59124 - DNA, 25 bp, SARS Virus
aattgttagaccgatttagtcgacc

SEQ ID NO: 59125 - DNA, 25 bp, SARS Virus
attgttagacctgtttagtcgacca

SEQ ID NO: 59126 - DNA, 25 bp, SARS Virus
ttgttagacctagttagtcgaccaa

SEQ ID NO: 59127 - DNA, 25 bp, SARS Virus
tgttagacctatgtagtcgaccaaa

SEQ ID NO: 59128 - DNA, 25 bp, SARS Virus
gttagacctattgagtcgaccaaag

SEQ ID NO: 59129 - DNA, 25 bp, SARS Virus
ttagacctatttggtcgaccaaagg

SEQ ID NO: 59130 - DNA, 25 bp, SARS Virus
tagacctatttagtcgaccaaaggg

SEQ ID NO: 59131 - DNA, 25 bp, SARS Virus
agacctatttaggcgaccaaagggt

SEQ ID NO: 59132 - DNA, 25 bp, SARS Virus
gacctatttagtggaccaaagggta

SEQ ID NO: 59133 - DNA, 25 bp, SARS Virus
acctatttagtcgaccaaagggtaa

SEQ ID NO: 59134 - DNA, 25 bp, SARS Virus
cctatttagtcggccaaagggtaaa

SEQ ID NO: 59135 - DNA, 25 bp, SARS Virus
ctatttagtcgagcaaagggtaaat

SEQ ID NO: 59136 - DNA, 25 bp, SARS Virus
tatttagtcgacgaaagggtaaatt

SEQ ID NO: 59137 - DNA, 25 bp, SARS Virus
atttagtcgaccgaagggtaaatta

SEQ ID NO: 59138 - DNA, 25 bp, SARS Virus
tttagtcgaccagagggtaaattat

SEQ ID NO: 59139 - DNA, 25 bp, SARS Virus
ttagtcgaccaaggggtaaattatt

SEQ ID NO: 59140 - DNA, 25 bp, SARS Virus
tagtcgaccaaagggtaaattattt

SEQ ID NO: 59141 - DNA, 25 bp, SARS Virus
agtcgaccaaagggtaaattattta

SEQ ID NO: 59142 - DNA, 25 bp, SARS Virus
gtcgaccaaagggtaaattatttac

SEQ ID NO: 59143 - DNA, 25 bp, SARS Virus
tcgaccaaaggggaaattatttacc

SEQ ID NO: 59144 - DNA, 25 bp, SARS Virus
cgaccaaagggtgaattatttaccc

SEQ ID NO: 59145 - DNA, 25 bp, SARS Virus
gaccaaagggtagattatttacccc

SEQ ID NO: 59146 - DNA, 25 bp, SARS Virus
accaaagggtaagttatttacccca

SEQ ID NO: 59147 - DNA, 25 bp, SARS Virus
ccaaagggtaaagtatttaccccat

SEQ ID NO: 59148 - DNA, 25 bp, SARS Virus
caaagggtaaatgatttaccccatt

SEQ ID NO: 59149 - DNA, 25 bp, SARS Virus
aaagggtaaattgtttaccccattc

SEQ ID NO: 59150 - DNA, 25 bp, SARS Virus
aagggtaaattagttaccccattcc

SEQ ID NO: 59151 - DNA, 25 bp, SARS Virus
agggtaaattatgtaccccattccg

SEQ ID NO: 59152 - DNA, 25 bp, SARS Virus
gggtaaattattgaccccattccga

SEQ ID NO: 59153 - DNA, 25 bp, SARS Virus
ggtaaattatttgccccattccgat

SEQ ID NO: 59154 - DNA, 25 bp, SARS Virus
gtaaattatttagcccattccgatc

SEQ ID NO: 59155 - DNA, 25 bp, SARS Virus
taaattatttacgccattccgatct

SEQ ID NO: 59156 - DNA, 25 bp, SARS Virus
aaattatttaccgcattccgatctg

SEQ ID NO: 59157 - DNA, 25 bp, SARS Virus
aattatttacccgattccgatctga

SEQ ID NO: 59158 - DNA, 25 bp, SARS Virus
attatttaccccgttccgatctgaa

SEQ ID NO: 59159 - DNA, 25 bp, SARS Virus
ttatttaccccagtccgatctgaaa

SEQ ID NO: 59160 - DNA, 25 bp, SARS Virus
tatttaccccatgccgatctgaaat

SEQ ID NO: 59161 - DNA, 25 bp, SARS Virus
atttaccccattgcgatctgaaata

SEQ ID NO: 59162 - DNA, 25 bp, SARS Virus
tttaccccattcggatctgaaataa

SEQ ID NO: 59163 - DNA, 25 bp, SARS Virus
ttaccccattccgatctgaaataat

SEQ ID NO: 59164 - DNA, 25 bp, SARS Virus
taccccattccggtctgaaataata

SEQ ID NO: 59165 - DNA, 25 bp, SARS Virus
accccattccgagctgaaataatac

SEQ ID NO: 59166 - DNA, 25 bp, SARS Virus
ccccattccgatgtgaaataatact

SEQ ID NO: 59167 - DNA, 25 bp, SARS Virus
cccattccgatcggaaataatactg

SEQ ID NO: 59168 - DNA, 25 bp, SARS Virus
ccattccgatctgaaataatactga

SEQ ID NO: 59169 - DNA, 25 bp, SARS Virus
cattccgatctggaataatactgag

SEQ ID NO: 59170 - DNA, 25 bp, SARS Virus
attccgatctgagataatactgagt

SEQ ID NO: 59171 - DNA, 25 bp, SARS Virus
ttccgatctgaagtaatactgagtt

SEQ ID NO: 59172 - DNA, 25 bp, SARS Virus
tccgatctgaaagaatactgagtta

SEQ ID NO: 59173 - DNA, 25 bp, SARS Virus
ccgatctgaaatgatactgagttac

SEQ ID NO: 59174 - DNA, 25 bp, SARS Virus
cgatctgaaatagtactgagttact

SEQ ID NO: 59175 - DNA, 25 bp, SARS Virus
gatctgaaataagactgagttactc

SEQ ID NO: 59176 - DNA, 25 bp, SARS Virus
atctgaaataatgctgagttactca

SEQ ID NO: 59177 - DNA, 25 bp, SARS Virus
tcaatcctcagcttgtattagtcct

SEQ ID NO: 59178 - DNA, 25 bp, SARS Virus
caatcctcagcatgtattagtccta

SEQ ID NO: 59179 - DNA, 25 bp, SARS Virus
aatcctcagcatttattagtcctac

SEQ ID NO: 59180 - DNA, 25 bp, SARS Virus
atcctcagcatgtattagtcctaca

SEQ ID NO: 59181 - DNA, 25 bp, SARS Virus
tcctcagcatgttttagtcctacat

SEQ ID NO: 59182 - DNA, 25 bp, SARS Virus
cctcagcatgtattagtcctacatt

SEQ ID NO: 59183 - DNA, 25 bp, SARS Virus
ctcagcatgtattagtcctacattt

SEQ ID NO: 59184 - DNA, 25 bp, SARS Virus
tcagcatgtatttgtcctacatttg

SEQ ID NO: 59185 - DNA, 25 bp, SARS Virus
cagcatgtattattcctacatttga

SEQ ID NO: 59186 - DNA, 25 bp, SARS Virus
agcatgtattagtcctacatttgaa

SEQ ID NO: 59187 - DNA, 25 bp, SARS Virus
gcatgtattagttctacatttgaat

SEQ ID NO: 59188 - DNA, 25 bp, SARS Virus
catgtattagtcttacatttgaatg

SEQ ID NO: 59189 - DNA, 25 bp, SARS Virus
atgtattagtcctacatttgaatgt

SEQ ID NO: 59190 - DNA, 25 bp, SARS Virus
tgtattagtccttcatttgaatgta

SEQ ID NO: 59191 - DNA, 25 bp, SARS Virus
gtattagtcctatatttgaatgtat

SEQ ID NO: 59192 - DNA, 25 bp, SARS Virus
tattagtcctacttttgaatgtatc

SEQ ID NO: 59193 - DNA, 25 bp, SARS Virus
attagtcctacatttgaatgtatcg

SEQ ID NO: 59194 - DNA, 25 bp, SARS Virus
ttagtcctacatttgaatgtatcga

SEQ ID NO: 59195 - DNA, 25 bp, SARS Virus
tagtcctacatttgaatgtatcgag

SEQ ID NO: 59196 - DNA, 25 bp, SARS Virus
agtcctacattttaatgtatcgagc

SEQ ID NO: 59197 - DNA, 25 bp, SARS Virus
gtcctacatttgtatgtatcgagcg

SEQ ID NO: 59198 - DNA, 25 bp, SARS Virus
tcctacatttgattgtatcgagcgc

SEQ ID NO: 59199 - DNA, 25 bp, SARS Virus
cctacatttgaatgtatcgagcgca

SEQ ID NO: 59200 - DNA, 25 bp, SARS Virus
ctacatttgaatttatcgagcgcag

SEQ ID NO: 59201 - DNA, 25 bp, SARS Virus
tacatttgaatgtatcgagcgcaga

SEQ ID NO: 59202 - DNA, 25 bp, SARS Virus
acatttgaatgtttcgagcgcagag

SEQ ID NO: 59203 - DNA, 25 bp, SARS Virus
catttgaatgtatcgagcgcagagt

SEQ ID NO: 59204 - DNA, 25 bp, SARS Virus
atttgaatgtattgagcgcagagtc

SEQ ID NO: 59205 - DNA, 25 bp, SARS Virus
tttgaatgtatctagcgcagagtca

SEQ ID NO: 59206 - DNA, 25 bp, SARS Virus
ttgaatgtatcgtgcgcagagtcaa

SEQ ID NO: 59207 - DNA, 25 bp, SARS Virus
tgaatgtatcgatcgcagagtcaaa

SEQ ID NO: 59208 - DNA, 25 bp, SARS Virus
gaatgtatcgagtgcagagtcaaag

SEQ ID NO: 59209 - DNA, 25 bp, SARS Virus
aatgtatcgagctcagagtcaaagt

SEQ ID NO: 59210 - DNA, 25 bp, SARS Virus
atgtatcgagcgtagagtcaaagtt

SEQ ID NO: 59211 - DNA, 25 bp, SARS Virus
tgtatcgagcgctgagtcaaagttc

SEQ ID NO: 59212 - DNA, 25 bp, SARS Virus
gtatcgagcgcatagtcaaagttcc

SEQ ID NO: 59213 - DNA, 25 bp, SARS Virus
tatcgagcgcagtgtcaaagttcct

SEQ ID NO: 59214 - DNA, 25 bp, SARS Virus
atcgagcgcagattcaaagttcctt

SEQ ID NO: 59215 - DNA, 25 bp, SARS Virus
tcgagcgcagagtcaaagttccttg

SEQ ID NO: 59216 - DNA, 25 bp, SARS Virus
cgagcgcagagttaaagttccttga

SEQ ID NO: 59217 - DNA, 25 bp, SARS Virus
gagcgcagagtctaagttccttgaa

SEQ ID NO: 59218 - DNA, 25 bp, SARS Virus
agcgcagagtcatagttccttgaaa

SEQ ID NO: 59219 - DNA, 25 bp, SARS Virus
gcgcagagtcaatgttccttgaaaa

SEQ ID NO: 59220 - DNA, 25 bp, SARS Virus
cgcagagtcaaatttccttgaaaat

SEQ ID NO: 59221 - DNA, 25 bp, SARS Virus
gcagagtcaaagttccttgaaaatc

SEQ ID NO: 59222 - DNA, 25 bp, SARS Virus
cagagtcaaagttccttgaaaatca

SEQ ID NO: 59223 - DNA, 25 bp, SARS Virus
agagtcaaagtttcttgaaaatcac

SEQ ID NO: 59224 - DNA, 25 bp, SARS Virus
gagtcaaagttctttgaaaatcaca

SEQ ID NO: 59225 - DNA, 25 bp, SARS Virus
agtcaaagttccttgaaaatcacat

SEQ ID NO: 59226 - DNA, 25 bp, SARS Virus
gtcaaagttccttgaaaatcacata

SEQ ID NO: 59227 - DNA, 25 bp, SARS Virus
tcaaagttcctttaaaatcacatac

SEQ ID NO: 59228 - DNA, 25 bp, SARS Virus
caaagttccttgtaaatcacatacg

SEQ ID NO: 59229 - DNA, 25 bp, SARS Virus
aaagttccttgataatcacatacga

SEQ ID NO: 59230 - DNA, 25 bp, SARS Virus
aagttccttgaatatcacatacgac

SEQ ID NO: 59231 - DNA, 25 bp, SARS Virus
agttccttgaaattcacatacgacg

SEQ ID NO: 59232 - DNA, 25 bp, SARS Virus
gttccttgaaaatcacatacgacga

SEQ ID NO: 59233 - DNA, 25 bp, SARS Virus
ttccttgaaaattacatacgacgac

SEQ ID NO: 59234 - DNA, 25 bp, SARS Virus
tccttgaaaatctcatacgacgact

SEQ ID NO: 59235 - DNA, 25 bp, SARS Virus
ccttgaaaatcatatacgacgacta

SEQ ID NO: 59236 - DNA, 25 bp, SARS Virus
cttgaaaatcacttacgacgactag

SEQ ID NO: 59237 - DNA, 25 bp, SARS Virus
ttgaaaatcacatacgacgactagg

SEQ ID NO: 59238 - DNA, 25 bp, SARS Virus
tgaaaatcacattcgacgactaggt

SEQ ID NO: 59239 - DNA, 25 bp, SARS Virus
gaaaatcacatatgacgactaggtc

SEQ ID NO: 59240 - DNA, 25 bp, SARS Virus
aaaatcacatactacgactaggtcg

SEQ ID NO: 59241 - DNA, 25 bp, SARS Virus
aaatcacatacgtcgactaggtcga

SEQ ID NO: 59242 - DNA, 25 bp, SARS Virus
aatcacatacgatgactaggtcgat

SEQ ID NO: 59243 - DNA, 25 bp, SARS Virus
atcacatacgactactaggtcgata

SEQ ID NO: 59244 - DNA, 25 bp, SARS Virus
tcacatacgacgtctaggtcgatac

SEQ ID NO: 59245 - DNA, 25 bp, SARS Virus
cacatacgacgattaggtcgatacg

SEQ ID NO: 59246 - DNA, 25 bp, SARS Virus
acatacgacgactaggtcgatacgt

SEQ ID NO: 59247 - DNA, 25 bp, SARS Virus
catacgacgacttggtcgatacgta

SEQ ID NO: 59248 - DNA, 25 bp, SARS Virus
atacgacgactatgtcgatacgtac

SEQ ID NO: 59249 - DNA, 25 bp, SARS Virus
tacgacgactagttcgatacgtacg

SEQ ID NO: 59250 - DNA, 25 bp, SARS Virus
acgacgactaggtcgatacgtacgt

SEQ ID NO: 59251 - DNA, 25 bp, SARS Virus
cgacgactaggttgatacgtacgtc

SEQ ID NO: 59252 - DNA, 25 bp, SARS Virus
gacgactaggtctatacgtacgtcg

SEQ ID NO: 59253 - DNA, 25 bp, SARS Virus
acgactaggtcgttacgtacgtcga

SEQ ID NO: 59254 - DNA, 25 bp, SARS Virus
cgactaggtcgatacgtacgtcgaa

SEQ ID NO: 59255 - DNA, 25 bp, SARS Virus
gactaggtcgattcgtacgtcgaag

SEQ ID NO: 59256 - DNA, 25 bp, SARS Virus
actaggtcgatatgtacgtcgaaga

SEQ ID NO: 59257 - DNA, 25 bp, SARS Virus
ctaggtcgatacttacgtcgaagac

SEQ ID NO: 59258 - DNA, 25 bp, SARS Virus
taggtcgatacgtacgtcgaagacc

SEQ ID NO: 59259 - DNA, 25 bp, SARS Virus
aggtcgatacgttcgtcgaagaccg

SEQ ID NO: 59260 - DNA, 25 bp, SARS Virus
ggtcgatacgtatgtcgaagaccgt

SEQ ID NO: 59261 - DNA, 25 bp, SARS Virus
gtcgatacgtacttcgaagaccgtt

SEQ ID NO: 59262 - DNA, 25 bp, SARS Virus
tcgatacgtacgtcgaagaccgtta

SEQ ID NO: 59263 - DNA, 25 bp, SARS Virus
cgatacgtacgttgaagaccgttaa

SEQ ID NO: 59264 - DNA, 25 bp, SARS Virus
gatacgtacgtctaagaccgttaaa

SEQ ID NO: 59265 - DNA, 25 bp, SARS Virus
atacgtacgtcgtagaccgttaaat

SEQ ID NO: 59266 - DNA, 25 bp, SARS Virus
tacgtacgtcgatgaccgttaaata

SEQ ID NO: 59267 - DNA, 25 bp, SARS Virus
acgtacgtcgaataccgttaaataa

SEQ ID NO: 59268 - DNA, 25 bp, SARS Virus
cgtacgtcgaagtccgttaaataac

SEQ ID NO: 59269 - DNA, 25 bp, SARS Virus
gtacgtcgaagatcgttaaataacg

SEQ ID NO: 59270 - DNA, 25 bp, SARS Virus
tacgtcgaagactgttaaataacga

SEQ ID NO: 59271 - DNA, 25 bp, SARS Virus
acgtcgaagacctttaaataacgat

SEQ ID NO: 59272 - DNA, 25 bp, SARS Virus
cgtcgaagaccgttaaataacgatc

SEQ ID NO: 59273 - DNA, 25 bp, SARS Virus
gtcgaagaccgttaaataacgatct

SEQ ID NO: 59274 - DNA, 25 bp, SARS Virus
tcgaagaccgtttaataacgatcta

SEQ ID NO: 59275 - DNA, 25 bp, SARS Virus
cgaagaccgttatataacgatctat

SEQ ID NO: 59276 - DNA, 25 bp, SARS Virus
gaagaccgttaattaacgatctatt

SEQ ID NO: 59277 - DNA, 25 bp, SARS Virus
aagaccgttaaataacgatctattt

SEQ ID NO: 59278 - DNA, 25 bp, SARS Virus
agaccgttaaattacgatctatttg

SEQ ID NO: 59279 - DNA, 25 bp, SARS Virus
gaccgttaaatatcgatctatttgc

SEQ ID NO: 59280 - DNA, 25 bp, SARS Virus
accgttaaataatgatctatttgcg

SEQ ID NO: 59281 - DNA, 25 bp, SARS Virus
ccgttaaataactatctatttgcgt

SEQ ID NO: 59282 - DNA, 25 bp, SARS Virus
cgttaaataacgttctatttgcgtg

SEQ ID NO: 59283 - DNA, 25 bp, SARS Virus
gttaaataacgatctatttgcgtga

SEQ ID NO: 59284 - DNA, 25 bp, SARS Virus
ttaaataacgatttatttgcgtgat

SEQ ID NO: 59285 - DNA, 25 bp, SARS Virus
taaataacgatctatttgcgtgatg

SEQ ID NO: 59286 - DNA, 25 bp, SARS Virus
aaataacgatctttttgcgtgatgt

SEQ ID NO: 59287 - DNA, 25 bp, SARS Virus
aataacgatctatttgcgtgatgta

SEQ ID NO: 59288 - DNA, 25 bp, SARS Virus
ataacgatctatttgcgtgatgtac

SEQ ID NO: 59289 - DNA, 25 bp, SARS Virus
taacgatctatttgcgtgatgtacg

SEQ ID NO: 59290 - DNA, 25 bp, SARS Virus
aacgatctattttcgtgatgtacga

SEQ ID NO: 59291 - DNA, 25 bp, SARS Virus
acgatctatttgtgtgatgtacgaa

SEQ ID NO: 59292 - DNA, 25 bp, SARS Virus
cgatctatttgcttgatgtacgaaa

SEQ ID NO: 59293 - DNA, 25 bp, SARS Virus
gatctatttgcgtgatgtacgaaaa

SEQ ID NO: 59294 - DNA, 25 bp, SARS Virus
atctatttgcgttatgtacgaaaag

SEQ ID NO: 59295 - DNA, 25 bp, SARS Virus
tctatttgcgtgttgtacgaaaagt

SEQ ID NO: 59296 - DNA, 25 bp, SARS Virus
ctatttgcgtgatgtacgaaaagtc

SEQ ID NO: 59297 - DNA, 25 bp, SARS Virus
tatttgcgtgatttacgaaaagtca

SEQ ID NO: 59298 - DNA, 25 bp, SARS Virus
atttgcgtgatgtacgaaaagtcat

SEQ ID NO: 59299 - DNA, 25 bp, SARS Virus
tttgcgtgatgttcgaaaagtcatc

SEQ ID NO: 59300 - DNA, 25 bp, SARS Virus
ttgcgtgatgtatgaaaagtcatcg

SEQ ID NO: 59301 - DNA, 25 bp, SARS Virus
tgcgtgatgtactaaaagtcatcga

SEQ ID NO: 59302 - DNA, 25 bp, SARS Virus
gcgtgatgtacgtaaagtcatcgac

SEQ ID NO: 59303 - DNA, 25 bp, SARS Virus
cgtgatgtacgataagtcatcgacg

SEQ ID NO: 59304 - DNA, 25 bp, SARS Virus
gtgatgtacgaatagtcatcgacgt

SEQ ID NO: 59305 - DNA, 25 bp, SARS Virus
tgatgtacgaaatgtcatcgacgtg

SEQ ID NO: 59306 - DNA, 25 bp, SARS Virus
gatgtacgaaaattcatcgacgtga

SEQ ID NO: 59307 - DNA, 25 bp, SARS Virus
atgtacgaaaagtcatcgacgtgat

SEQ ID NO: 59308 - DNA, 25 bp, SARS Virus
tgtacgaaaagttatcgacgtgatt

SEQ ID NO: 59309 - DNA, 25 bp, SARS Virus
gtacgaaaagtcttcgacgtgattg

SEQ ID NO: 59310 - DNA, 25 bp, SARS Virus
tacgaaaagtcatcgacgtgattgt

SEQ ID NO: 59311 - DNA, 25 bp, SARS Virus
acgaaaagtcattgacgtgattgtt

SEQ ID NO: 59312 - DNA, 25 bp, SARS Virus
cgaaaagtcatctacgtgattgttt

SEQ ID NO: 59313 - DNA, 25 bp, SARS Virus
gaaaagtcatcgtcgtgattgtttg

SEQ ID NO: 59314 - DNA, 25 bp, SARS Virus
aaaagtcatcgatgtgattgtttgt

SEQ ID NO: 59315 - DNA, 25 bp, SARS Virus
aaagtcatcgacttgattgtttgtt

SEQ ID NO: 59316 - DNA, 25 bp, SARS Virus
aagtcatcgacgtgattgtttgtta

SEQ ID NO: 59317 - DNA, 25 bp, SARS Virus
agtcatcgacgttattgtttgttac

SEQ ID NO: 59318 - DNA, 25 bp, SARS Virus
gtcatcgacgtgtttgtttgttaca

SEQ ID NO: 59319 - DNA, 25 bp, SARS Virus
tcatcgacgtgattgtttgttacaa

SEQ ID NO: 59320 - DNA, 25 bp, SARS Virus
catcgacgtgattgtttgttacaac

SEQ ID NO: 59321 - DNA, 25 bp, SARS Virus
atcgacgtgattttttgttacaacg

SEQ ID NO: 59322 - DNA, 25 bp, SARS Virus
tcgacgtgattgtttgttacaacga

SEQ ID NO: 59323 - DNA, 25 bp, SARS Virus
cgacgtgattgtttgttacaacgaa

SEQ ID NO: 59324 - DNA, 25 bp, SARS Virus
gacgtgattgtttgttacaacgaaa

SEQ ID NO: 59325 - DNA, 25 bp, SARS Virus
acgtgattgttttttacaacgaaaa

SEQ ID NO: 59326 - DNA, 25 bp, SARS Virus
cgtgattgtttgttacaacgaaaag

SEQ ID NO: 59327 - DNA, 25 bp, SARS Virus
gtgattgtttgttacaacgaaaagt

SEQ ID NO: 59328 - DNA, 25 bp, SARS Virus
tgattgtttgtttcaacgaaaagtt

SEQ ID NO: 59329 - DNA, 25 bp, SARS Virus
gattgtttgttataacgaaaagttt

SEQ ID NO: 59330 - DNA, 25 bp, SARS Virus
attgtttgttactacgaaaagtttg

SEQ ID NO: 59331 - DNA, 25 bp, SARS Virus
ttgtttgttacatcgaaaagtttga

SEQ ID NO: 59332 - DNA, 25 bp, SARS Virus
tgtttgttacaatgaaaagtttgac

SEQ ID NO: 59333 - DNA, 25 bp, SARS Virus
gtttgttacaactaaaagtttgaca

SEQ ID NO: 59334 - DNA, 25 bp, SARS Virus
tttgttacaacgtaaagtttgacag

SEQ ID NO: 59335 - DNA, 25 bp, SARS Virus
ttgttacaacgataagtttgacagt

SEQ ID NO: 59336 - DNA, 25 bp, SARS Virus
tgttacaacgaatagtttgacagtt

SEQ ID NO: 59337 - DNA, 25 bp, SARS Virus
gttacaacgaaatgtttgacagttt

SEQ ID NO: 59338 - DNA, 25 bp, SARS Virus
ttacaacgaaaattttgacagtttg

SEQ ID NO: 59339 - DNA, 25 bp, SARS Virus
tacaacgaaaagtttgacagtttgg

SEQ ID NO: 59340 - DNA, 25 bp, SARS Virus
acaacgaaaagtttgacagtttggg

SEQ ID NO: 59341 - DNA, 25 bp, SARS Virus
caacgaaaagtttgacagtttgggc

SEQ ID NO: 59342 - DNA, 25 bp, SARS Virus
aacgaaaagttttacagtttgggcc

SEQ ID NO: 59343 - DNA, 25 bp, SARS Virus
acgaaaagtttgtcagtttgggcca

SEQ ID NO: 59344 - DNA, 25 bp, SARS Virus
cgaaaagtttgatagtttgggccat

SEQ ID NO: 59345 - DNA, 25 bp, SARS Virus
gaaaagtttgactgtttgggccatt

SEQ ID NO: 59346 - DNA, 25 bp, SARS Virus
aaaagtttgacattttgggccatta

SEQ ID NO: 59347 - DNA, 25 bp, SARS Virus
aaagtttgacagtttgggccattaa

SEQ ID NO: 59348 - DNA, 25 bp, SARS Virus
aagtttgacagtttgggccattaaa

SEQ ID NO: 59349 - DNA, 25 bp, SARS Virus
agtttgacagtttgggccattaaaa

SEQ ID NO: 59350 - DNA, 25 bp, SARS Virus
gtttgacagttttggccattaaaat

SEQ ID NO: 59351 - DNA, 25 bp, SARS Virus
tttgacagtttgtgccattaaaatt

SEQ ID NO: 59352 - DNA, 25 bp, SARS Virus
ttgacagtttggtccattaaaatta

SEQ ID NO: 59353 - DNA, 25 bp, SARS Virus
tgacagtttgggtcattaaaattat

SEQ ID NO: 59354 - DNA, 25 bp, SARS Virus
gacagtttgggctattaaaattatt

SEQ ID NO: 59355 - DNA, 25 bp, SARS Virus
acagtttgggcctttaaaattattt

SEQ ID NO: 59356 - DNA, 25 bp, SARS Virus
cagtttgggccattaaaattatttc

SEQ ID NO: 59357 - DNA, 25 bp, SARS Virus
agtttgggccattaaaattatttct

SEQ ID NO: 59358 - DNA, 25 bp, SARS Virus
gtttgggccatttaaattatttctg

SEQ ID NO: 59359 - DNA, 25 bp, SARS Virus
tttgggccattataattatttctga

SEQ ID NO: 59360 - DNA, 25 bp, SARS Virus
ttgggccattaatattatttctgaa

SEQ ID NO: 59361 - DNA, 25 bp, SARS Virus
tgggccattaaatttatttctgaaa

SEQ ID NO: 59362 - DNA, 25 bp, SARS Virus
gggccattaaaattatttctgaaaa

SEQ ID NO: 59363 - DNA, 25 bp, SARS Virus
ggccattaaaattatttctgaaaat

SEQ ID NO: 59364 - DNA, 25 bp, SARS Virus
gccattaaaattttttctgaaaata

SEQ ID NO: 59365 - DNA, 25 bp, SARS Virus
ccattaaaattatttctgaaaatac

SEQ ID NO: 59366 - DNA, 25 bp, SARS Virus
cattaaaattatttctgaaaatact

SEQ ID NO: 59367 - DNA, 25 bp, SARS Virus
attaaaattatttctgaaaatactg

SEQ ID NO: 59368 - DNA, 25 bp, SARS Virus
ttaaaattatttttgaaaatactga

SEQ ID NO: 59369 - DNA, 25 bp, SARS Virus
taaaattatttctgaaaatactgaa

SEQ ID NO: 59370 - DNA, 25 bp, SARS Virus
aaaattatttcttaaaatactgaaa

SEQ ID NO: 59371 - DNA, 25 bp, SARS Virus
aaattatttctgtaaatactgaaac

SEQ ID NO: 59372 - DNA, 25 bp, SARS Virus
aattatttctgataatactgaaacg

SEQ ID NO: 59373 - DNA, 25 bp, SARS Virus
attatttctgaatatactgaaacga

SEQ ID NO: 59374 - DNA, 25 bp, SARS Virus
ttatttctgaaattactgaaacgac

SEQ ID NO: 59375 - DNA, 25 bp, SARS Virus
tatttctgaaaatactgaaacgaca

SEQ ID NO: 59376 - DNA, 25 bp, SARS Virus
atttctgaaaattctgaaacgacac

SEQ ID NO: 59377 - DNA, 25 bp, SARS Virus
tttctgaaaatattgaaacgacaca

SEQ ID NO: 59378 - DNA, 25 bp, SARS Virus
ttctgaaaatactgaaacgacacag

SEQ ID NO: 59379 - DNA, 25 bp, SARS Virus
tctgaaaatacttaaacgacacaga

SEQ ID NO: 59380 - DNA, 25 bp, SARS Virus
ctgaaaatactgtaacgacacagat

SEQ ID NO: 59381 - DNA, 25 bp, SARS Virus
tgaaaatactgatacgacacagatt

SEQ ID NO: 59382 - DNA, 25 bp, SARS Virus
gaaaatactgaatcgacacagattt

SEQ ID NO: 59383 - DNA, 25 bp, SARS Virus
aaaatactgaaatgacacagatttc

SEQ ID NO: 59384 - DNA, 25 bp, SARS Virus
aaatactgaaactacacagatttcc

SEQ ID NO: 59385 - DNA, 25 bp, SARS Virus
aatactgaaacgtcacagatttcca

SEQ ID NO: 59386 - DNA, 25 bp, SARS Virus
atactgaaacgatacagatttccaa

SEQ ID NO: 59387 - DNA, 25 bp, SARS Virus
tactgaaacgactcagatttccaaa

SEQ ID NO: 59388 - DNA, 25 bp, SARS Virus
actgaaacgacatagatttccaaag

SEQ ID NO: 59389 - DNA, 25 bp, SARS Virus
ctgaaacgacactgatttccaaaga

SEQ ID NO: 59390 - DNA, 25 bp, SARS Virus
tgaaacgacacatatttccaaagaa

SEQ ID NO: 59391 - DNA, 25 bp, SARS Virus
gaaacgacacagttttccaaagaaa

SEQ ID NO: 59392 - DNA, 25 bp, SARS Virus
aaacgacacagatttccaaagaaat

SEQ ID NO: 59393 - DNA, 25 bp, SARS Virus
aacgacacagatttccaaagaaatt

SEQ ID NO: 59394 - DNA, 25 bp, SARS Virus
acgacacagatttccaaagaaattc

SEQ ID NO: 59395 - DNA, 25 bp, SARS Virus
cgacacagattttcaaagaaattcc

SEQ ID NO: 59396 - DNA, 25 bp, SARS Virus
gacacagatttctaaagaaattcct

SEQ ID NO: 59397 - DNA, 25 bp, SARS Virus
acacagatttcctaagaaattcctt

SEQ ID NO: 59398 - DNA, 25 bp, SARS Virus
cacagatttccatagaaattccttc

SEQ ID NO: 59399 - DNA, 25 bp, SARS Virus
acagatttccaatgaaattccttcc

SEQ ID NO: 59400 - DNA, 25 bp, SARS Virus
cagatttccaaataaattccttcct

SEQ ID NO: 59401 - DNA, 25 bp, SARS Virus
agatttccaaagtaattccttcctt

SEQ ID NO: 59402 - DNA, 25 bp, SARS Virus
gatttccaaagatattccttccttc

SEQ ID NO: 59403 - DNA, 25 bp, SARS Virus
atttccaaagaatttccttccttca

SEQ ID NO: 59404 - DNA, 25 bp, SARS Virus
tttccaaagaaattccttccttcaa

SEQ ID NO: 59405 - DNA, 25 bp, SARS Virus
ttccaaagaaattccttccttcaag

SEQ ID NO: 59406 - DNA, 25 bp, SARS Virus
tccaaagaaatttcttccttcaaga

SEQ ID NO: 59407 - DNA, 25 bp, SARS Virus
ccaaagaaattctttccttcaagac

SEQ ID NO: 59408 - DNA, 25 bp, SARS Virus
caaagaaattccttccttcaagaca

SEQ ID NO: 59409 - DNA, 25 bp, SARS Virus
aaagaaattccttccttcaagacaa

SEQ ID NO: 59410 - DNA, 25 bp, SARS Virus
aagaaattcctttcttcaagacaac

SEQ ID NO: 59411 - DNA, 25 bp, SARS Virus
agaaattccttctttcaagacaact

SEQ ID NO: 59412 - DNA, 25 bp, SARS Virus
gaaattccttccttcaagacaactt

SEQ ID NO: 59413 - DNA, 25 bp, SARS Virus
aaattccttccttcaagacaacttg

SEQ ID NO: 59414 - DNA, 25 bp, SARS Virus
aattccttcctttaagacaacttga

SEQ ID NO: 59415 - DNA, 25 bp, SARS Virus
attccttccttctagacaacttgat

SEQ ID NO: 59416 - DNA, 25 bp, SARS Virus
ttccttccttcatgacaacttgatt

SEQ ID NO: 59417 - DNA, 25 bp, SARS Virus
tccttccttcaatacaacttgattt

SEQ ID NO: 59418 - DNA, 25 bp, SARS Virus
ccttccttcaagtcaacttgatttt

SEQ ID NO: 59419 - DNA, 25 bp, SARS Virus
cttccttcaagataacttgattttg

SEQ ID NO: 59420 - DNA, 25 bp, SARS Virus
ttccttcaagactacttgattttgt

SEQ ID NO: 59421 - DNA, 25 bp, SARS Virus
tccttcaagacatcttgattttgtg

SEQ ID NO: 59422 - DNA, 25 bp, SARS Virus
ccttcaagacaatttgattttgtga

SEQ ID NO: 59423 - DNA, 25 bp, SARS Virus
cttcaagacaacttgattttgtgaa

SEQ ID NO: 59424 - DNA, 25 bp, SARS Virus
ttcaagacaacttgattttgtgaag

SEQ ID NO: 59425 - DNA, 25 bp, SARS Virus
tcaagacaactttattttgtgaaga

SEQ ID NO: 59426 - DNA, 25 bp, SARS Virus
caagacaacttgtttttgtgaagaa

SEQ ID NO: 59427 - DNA, 25 bp, SARS Virus
aagacaacttgattttgtgaagaag

SEQ ID NO: 59428 - DNA, 25 bp, SARS Virus
agacaacttgattttgtgaagaaga

SEQ ID NO: 59429 - DNA, 25 bp, SARS Virus
gacaacttgattttgtgaagaagaa

SEQ ID NO: 59430 - DNA, 25 bp, SARS Virus
acaacttgattttgtgaagaagaaa

SEQ ID NO: 59431 - DNA, 25 bp, SARS Virus
caacttgattttttgaagaagaaac

SEQ ID NO: 59432 - DNA, 25 bp, SARS Virus
aacttgattttgtgaagaagaaacg

SEQ ID NO: 59433 - DNA, 25 bp, SARS Virus
acttgattttgttaagaagaaacga

SEQ ID NO: 59434 - DNA, 25 bp, SARS Virus
cttgattttgtgtagaagaaacgag

SEQ ID NO: 59435 - DNA, 25 bp, SARS Virus
ttgattttgtgatgaagaaacgagt

SEQ ID NO: 59436 - DNA, 25 bp, SARS Virus
tgattttgtgaataagaaacgagtc

SEQ ID NO: 59437 - DNA, 25 bp, SARS Virus
gattttgtgaagtagaaacgagtcc

SEQ ID NO: 59438 - DNA, 25 bp, SARS Virus
attttgtgaagatgaaacgagtcct

SEQ ID NO: 59439 - DNA, 25 bp, SARS Virus
ttttgtgaagaataaacgagtccta

SEQ ID NO: 59440 - DNA, 25 bp, SARS Virus
tttgtgaagaagtaacgagtcctac

SEQ ID NO: 59441 - DNA, 25 bp, SARS Virus
ttgtgaagaagatacgagtcctacc

SEQ ID NO: 59442 - DNA, 25 bp, SARS Virus
tgtgaagaagaatcgagtcctaccg

SEQ ID NO: 59443 - DNA, 25 bp, SARS Virus
gtgaagaagaaatgagtcctaccgt

SEQ ID NO: 59444 - DNA, 25 bp, SARS Virus
tgaagaagaaactagtcctaccgtt

SEQ ID NO: 59445 - DNA, 25 bp, SARS Virus
gaagaagaaacgtgtcctaccgttg

SEQ ID NO: 59446 - DNA, 25 bp, SARS Virus
aagaagaaacgattcctaccgttgc

SEQ ID NO: 59447 - DNA, 25 bp, SARS Virus
agaagaaacgagtcctaccgttgcg

SEQ ID NO: 59448 - DNA, 25 bp, SARS Virus
gaagaaacgagttctaccgttgcga

SEQ ID NO: 59449 - DNA, 25 bp, SARS Virus
aagaaacgagtcttaccgttgcgac

SEQ ID NO: 59450 - DNA, 25 bp, SARS Virus
agaaacgagtcctaccgttgcgacg

SEQ ID NO: 59451 - DNA, 25 bp, SARS Virus
gaaacgagtccttccgttgcgacga

SEQ ID NO: 59452 - DNA, 25 bp, SARS Virus
aaacgagtcctatcgttgcgacgat

SEQ ID NO: 59453 - DNA, 25 bp, SARS Virus
aacgagtcctactgttgcgacgata

SEQ ID NO: 59454 - DNA, 25 bp, SARS Virus
acgagtcctacctttgcgacgatag

SEQ ID NO: 59455 - DNA, 25 bp, SARS Virus
cgagtcctaccgttgcgacgatagt

SEQ ID NO: 59456 - DNA, 25 bp, SARS Virus
gagtcctaccgttgcgacgatagtc

SEQ ID NO: 59457 - DNA, 25 bp, SARS Virus
agtcctaccgtttcgacgatagtca

SEQ ID NO: 59458 - DNA, 25 bp, SARS Virus
gtcctaccgttgtgacgatagtcac

SEQ ID NO: 59459 - DNA, 25 bp, SARS Virus
tcctaccgttgctacgatagtcact

SEQ ID NO: 59460 - DNA, 25 bp, SARS Virus
cctaccgttgcgtcgatagtcacta

SEQ ID NO: 59461 - DNA, 25 bp, SARS Virus
ctaccgttgcgatgatagtcactaa

SEQ ID NO: 59462 - DNA, 25 bp, SARS Virus
taccgttgcgactatagtcactaat

SEQ ID NO: 59463 - DNA, 25 bp, SARS Virus
accgttgcgacgttagtcactaata

SEQ ID NO: 59464 - DNA, 25 bp, SARS Virus
ccgttgcgacgatagtcactaatac

SEQ ID NO: 59465 - DNA, 25 bp, SARS Virus
cgttgcgacgattgtcactaatact

SEQ ID NO: 59466 - DNA, 25 bp, SARS Virus
gttgcgacgatattcactaatactg

SEQ ID NO: 59467 - DNA, 25 bp, SARS Virus
ttgcgacgatagtcactaatactga

SEQ ID NO: 59468 - DNA, 25 bp, SARS Virus
tgcgacgatagttactaatactgat

SEQ ID NO: 59469 - DNA, 25 bp, SARS Virus
gcgacgatagtctctaatactgata

SEQ ID NO: 59470 - DNA, 25 bp, SARS Virus
cgacgatagtcattaatactgataa

SEQ ID NO: 59471 - DNA, 25 bp, SARS Virus
gacgatagtcactaatactgataat

SEQ ID NO: 59472 - DNA, 25 bp, SARS Virus
acgatagtcacttatactgataata

SEQ ID NO: 59473 - DNA, 25 bp, SARS Virus
cgatagtcactattactgataatag

SEQ ID NO: 59474 - DNA, 25 bp, SARS Virus
gatagtcactaatactgataatagc

SEQ ID NO: 59475 - DNA, 25 bp, SARS Virus
atagtcactaattctgataatagca

SEQ ID NO: 59476 - DNA, 25 bp, SARS Virus
tagtcactaatattgataatagcaa

SEQ ID NO: 59477 - DNA, 25 bp, SARS Virus
agtcactaatactgataatagcaat

SEQ ID NO: 59478 - DNA, 25 bp, SARS Virus
gtcactaatacttataatagcaata

SEQ ID NO: 59479 - DNA, 25 bp, SARS Virus
tcactaatactgttaatagcaatat

SEQ ID NO: 59480 - DNA, 25 bp, SARS Virus
cactaatactgataatagcaatatt

SEQ ID NO: 59481 - DNA, 25 bp, SARS Virus
actaatactgattatagcaatatta

SEQ ID NO: 59482 - DNA, 25 bp, SARS Virus
ctaatactgatattagcaatattag

SEQ ID NO: 59483 - DNA, 25 bp, SARS Virus
taatactgataatagcaatattaga

SEQ ID NO: 59484 - DNA, 25 bp, SARS Virus
aatactgataattgcaatattagac

SEQ ID NO: 59485 - DNA, 25 bp, SARS Virus
atactgataatatcaatattagacg

SEQ ID NO: 59486 - DNA, 25 bp, SARS Virus
tactgataatagtaatattagacgg

SEQ ID NO: 59487 - DNA, 25 bp, SARS Virus
actgataatagctatattagacggt

SEQ ID NO: 59488 - DNA, 25 bp, SARS Virus
ctgataatagcattattagacggtt

SEQ ID NO: 59489 - DNA, 25 bp, SARS Virus
tgataatagcaatattagacggttg

SEQ ID NO: 59490 - DNA, 25 bp, SARS Virus
gataatagcaattttagacggttgt

SEQ ID NO: 59491 - DNA, 25 bp, SARS Virus
ataatagcaatattagacggttgtt

SEQ ID NO: 59492 - DNA, 25 bp, SARS Virus
taatagcaatattagacggttgtta

SEQ ID NO: 59493 - DNA, 25 bp, SARS Virus
aatagcaatatttgacggttgttac

SEQ ID NO: 59494 - DNA, 25 bp, SARS Virus
atagcaatattatacggttgttaca

SEQ ID NO: 59495 - DNA, 25 bp, SARS Virus
tagcaatattagtcggttgttacac

SEQ ID NO: 59496 - DNA, 25 bp, SARS Virus
agcaatattagatggttgttacaca

SEQ ID NO: 59497 - DNA, 25 bp, SARS Virus
gcaatattagactgttgttacacac

SEQ ID NO: 59498 - DNA, 25 bp, SARS Virus
caatattagacgtttgttacacact

SEQ ID NO: 59499 - DNA, 25 bp, SARS Virus
aatattagacggttgttacacacta

SEQ ID NO: 59500 - DNA, 25 bp, SARS Virus
atattagacggttgttacacactat

SEQ ID NO: 59501 - DNA, 25 bp, SARS Virus
tattagacggtttttacacactata

SEQ ID NO: 59502 - DNA, 25 bp, SARS Virus
attagacggttgttacacactatag

SEQ ID NO: 59503 - DNA, 25 bp, SARS Virus
ttagacggttgttacacactatagt

SEQ ID NO: 59504 - DNA, 25 bp, SARS Virus
tagacggttgtttcacactatagtc

SEQ ID NO: 59505 - DNA, 25 bp, SARS Virus
agacggttgttatacactatagtct

SEQ ID NO: 59506 - DNA, 25 bp, SARS Virus
gacggttgttactcactatagtctg

SEQ ID NO: 59507 - DNA, 25 bp, SARS Virus
acggttgttacatactatagtctgt

SEQ ID NO: 59508 - DNA, 25 bp, SARS Virus
cggttgttacactctatagtctgtt

SEQ ID NO: 59509 - DNA, 25 bp, SARS Virus
ggttgttacacattatagtctgttg

SEQ ID NO: 59510 - DNA, 25 bp, SARS Virus
gttgttacacactatagtctgttga

SEQ ID NO: 59511 - DNA, 25 bp, SARS Virus
ttgttacacactttagtctgttgag

SEQ ID NO: 59512 - DNA, 25 bp, SARS Virus
tgttacacactatagtctgttgagg

SEQ ID NO: 59513 - DNA, 25 bp, SARS Virus
gttacacactattgtctgttgagga

SEQ ID NO: 59514 - DNA, 25 bp, SARS Virus
ttacacactatattctgttgaggat

SEQ ID NO: 59515 - DNA, 25 bp, SARS Virus
tacacactatagtctgttgaggata

SEQ ID NO: 59516 - DNA, 25 bp, SARS Virus
acacactatagtttgttgaggataa

SEQ ID NO: 59517 - DNA, 25 bp, SARS Virus
cacactatagtctgttgaggataag

SEQ ID NO: 59518 - DNA, 25 bp, SARS Virus
acactatagtcttttgaggataagc

SEQ ID NO: 59519 - DNA, 25 bp, SARS Virus
cactatagtctgttgaggataagca

SEQ ID NO: 59520 - DNA, 25 bp, SARS Virus
actatagtctgttgaggataagcat

SEQ ID NO: 59521 - DNA, 25 bp, SARS Virus
ctatagtctgtttaggataagcatc

SEQ ID NO: 59522 - DNA, 25 bp, SARS Virus
tatagtctgttgtggataagcatca

SEQ ID NO: 59523 - DNA, 25 bp, SARS Virus
atagtctgttgatgataagcatcaa

SEQ ID NO: 59524 - DNA, 25 bp, SARS Virus
tagtctgttgagtataagcatcaac

SEQ ID NO: 59525 - DNA, 25 bp, SARS Virus
agtctgttgaggttaagcatcaact

SEQ ID NO: 59526 - DNA, 25 bp, SARS Virus
gtctgttgaggataagcatcaactt

SEQ ID NO: 59527 - DNA, 25 bp, SARS Virus
tctgttgaggattagcatcaacttc

SEQ ID NO: 59528 - DNA, 25 bp, SARS Virus
ctgttgaggatatgcatcaacttca

SEQ ID NO: 59529 - DNA, 25 bp, SARS Virus
tgttgaggataatcatcaacttcaa

SEQ ID NO: 59530 - DNA, 25 bp, SARS Virus
gttgaggataagtatcaacttcaac

SEQ ID NO: 59531 - DNA, 25 bp, SARS Virus
ttgaggataagcttcaacttcaaca

SEQ ID NO: 59532 - DNA, 25 bp, SARS Virus
tgaggataagcatcaacttcaacaa

SEQ ID NO: 59533 - DNA, 25 bp, SARS Virus
gaggataagcattaacttcaacaac

SEQ ID NO: 59534 - DNA, 25 bp, SARS Virus
aggataagcatctacttcaacaact

SEQ ID NO: 59535 - DNA, 25 bp, SARS Virus
ggataagcatcatcttcaacaacta

SEQ ID NO: 59536 - DNA, 25 bp, SARS Virus
gataagcatcaatttcaacaactat

SEQ ID NO: 59537 - DNA, 25 bp, SARS Virus
ataagcatcaacttcaacaactatt

SEQ ID NO: 59538 - DNA, 25 bp, SARS Virus
taagcatcaacttcaacaactattt

SEQ ID NO: 59539 - DNA, 25 bp, SARS Virus
aagcatcaactttaacaactattta

SEQ ID NO: 59540 - DNA, 25 bp, SARS Virus
agcatcaacttctacaactatttat

SEQ ID NO: 59541 - DNA, 25 bp, SARS Virus
gcatcaacttcatcaactatttatg

SEQ ID NO: 59542 - DNA, 25 bp, SARS Virus
catcaacttcaataactatttatga

SEQ ID NO: 59543 - DNA, 25 bp, SARS Virus
atcaacttcaactactatttatgaa

SEQ ID NO: 59544 - DNA, 25 bp, SARS Virus
tcaacttcaacatctatttatgaaa

SEQ ID NO: 59545 - DNA, 25 bp, SARS Virus
caacttcaacaattatttatgaaac

SEQ ID NO: 59546 - DNA, 25 bp, SARS Virus
aacttcaacaactatttatgaaact

SEQ ID NO: 59547 - DNA, 25 bp, SARS Virus
acttcaacaactttttatgaaacta

SEQ ID NO: 59548 - DNA, 25 bp, SARS Virus
cttcaacaactatttatgaaactaa

SEQ ID NO: 59549 - DNA, 25 bp, SARS Virus
ttcaacaactatttatgaaactaac

SEQ ID NO: 59550 - DNA, 25 bp, SARS Virus
tcaacaactatttatgaaactaaca

SEQ ID NO: 59551 - DNA, 25 bp, SARS Virus
caacaactatttttgaaactaacaa

SEQ ID NO: 59552 - DNA, 25 bp, SARS Virus
aacaactatttatgaaactaacaat

SEQ ID NO: 59553 - DNA, 25 bp, SARS Virus
acaactatttattaaactaacaatg

SEQ ID NO: 59554 - DNA, 25 bp, SARS Virus
caactatttatgtaactaacaatgc

SEQ ID NO: 59555 - DNA, 25 bp, SARS Virus
aactatttatgatactaacaatgct

SEQ ID NO: 59556 - DNA, 25 bp, SARS Virus
actatttatgaatctaacaatgcta

SEQ ID NO: 59557 - DNA, 25 bp, SARS Virus
ctatttatgaaattaacaatgctac

SEQ ID NO: 59558 - DNA, 25 bp, SARS Virus
tatttatgaaactaacaatgctacc

SEQ ID NO: 59559 - DNA, 25 bp, SARS Virus
atttatgaaacttacaatgctacca

SEQ ID NO: 59560 - DNA, 25 bp, SARS Virus
tttatgaaactatcaatgctaccac

SEQ ID NO: 59561 - DNA, 25 bp, SARS Virus
ttatgaaactaataatgctaccacc

SEQ ID NO: 59562 - DNA, 25 bp, SARS Virus
tatgaaactaactatgctaccaccg

SEQ ID NO: 59563 - DNA, 25 bp, SARS Virus
atgaaactaacattgctaccaccga

SEQ ID NO: 59564 - DNA, 25 bp, SARS Virus
tgaaactaacaatgctaccaccgac

SEQ ID NO: 59565 - DNA, 25 bp, SARS Virus
gaaactaacaattctaccaccgaca

SEQ ID NO: 59566 - DNA, 25 bp, SARS Virus
aaactaacaatgttaccaccgacat

SEQ ID NO: 59567 - DNA, 25 bp, SARS Virus
aactaacaatgctaccaccgacata

SEQ ID NO: 59568 - DNA, 25 bp, SARS Virus
actaacaatgcttccaccgacataa

SEQ ID NO: 59569 - DNA, 25 bp, SARS Virus
ctaacaatgctatcaccgacataat

SEQ ID NO: 59570 - DNA, 25 bp, SARS Virus
taacaatgctactaccgacataatt

SEQ ID NO: 59571 - DNA, 25 bp, SARS Virus
aacaatgctacctccgacataatta

SEQ ID NO: 59572 - DNA, 25 bp, SARS Virus
acaatgctaccatcgacataattac

SEQ ID NO: 59573 - DNA, 25 bp, SARS Virus
caatgctaccactgacataattacg

SEQ ID NO: 59574 - DNA, 25 bp, SARS Virus
aatgctaccacctacataattacgg

SEQ ID NO: 59575 - DNA, 25 bp, SARS Virus
atgctaccaccgtcataattacggt

SEQ ID NO: 59576 - DNA, 25 bp, SARS Virus
tgctaccaccgatataattacggtt

SEQ ID NO: 59577 - DNA, 25 bp, SARS Virus
gctaccaccgacttaattacggttg

SEQ ID NO: 59578 - DNA, 25 bp, SARS Virus
ctaccaccgacataattacggttgg

SEQ ID NO: 59579 - DNA, 25 bp, SARS Virus
taccaccgacattattacggttggt

SEQ ID NO: 59580 - DNA, 25 bp, SARS Virus
accaccgacatatttacggttggtt

SEQ ID NO: 59581 - DNA, 25 bp, SARS Virus
ccaccgacataattacggttggttc

SEQ ID NO: 59582 - DNA, 25 bp, SARS Virus
caccgacataattacggttggttca

SEQ ID NO: 59583 - DNA, 25 bp, SARS Virus
accgacataatttcggttggttcat

SEQ ID NO: 59584 - DNA, 25 bp, SARS Virus
ccgacataattatggttggttcatt

SEQ ID NO: 59585 - DNA, 25 bp, SARS Virus
cgacataattactgttggttcatta

SEQ ID NO: 59586 - DNA, 25 bp, SARS Virus
gacataattacgtttggttcattag

SEQ ID NO: 59587 - DNA, 25 bp, SARS Virus
acataattacggttggttcattagc

SEQ ID NO: 59588 - DNA, 25 bp, SARS Virus
cataattacggttggttcattagca

SEQ ID NO: 59589 - DNA, 25 bp, SARS Virus
ataattacggtttgttcattagcaa

SEQ ID NO: 59590 - DNA, 25 bp, SARS Virus
taattacggttgtttcattagcaat

SEQ ID NO: 59591 - DNA, 25 bp, SARS Virus
aattacggttggttcattagcaatt

SEQ ID NO: 59592 - DNA, 25 bp, SARS Virus
attacggttggttcattagcaattg

SEQ ID NO: 59593 - DNA, 25 bp, SARS Virus
ttacggttggtttattagcaattgt

SEQ ID NO: 59594 - DNA, 25 bp, SARS Virus
tacggttggttctttagcaattgtt

SEQ ID NO: 59595 - DNA, 25 bp, SARS Virus
acggttggttcattagcaattgtta

SEQ ID NO: 59596 - DNA, 25 bp, SARS Virus
cggttggttcattagcaattgttag

SEQ ID NO: 59597 - DNA, 25 bp, SARS Virus
ggttggttcatttgcaattgttaga

SEQ ID NO: 59598 - DNA, 25 bp, SARS Virus
gttggttcattatcaattgttagac

SEQ ID NO: 59599 - DNA, 25 bp, SARS Virus
ttggttcattagtaattgttagacc

SEQ ID NO: 59600 - DNA, 25 bp, SARS Virus
tggttcattagctattgttagacct

SEQ ID NO: 59601 - DNA, 25 bp, SARS Virus
ggttcattagcatttgttagaccta

SEQ ID NO: 59602 - DNA, 25 bp, SARS Virus
gttcattagcaattgttagacctat

SEQ ID NO: 59603 - DNA, 25 bp, SARS Virus
ttcattagcaattgttagacctatt

SEQ ID NO: 59604 - DNA, 25 bp, SARS Virus
tcattagcaatttttagacctattt

SEQ ID NO: 59605 - DNA, 25 bp, SARS Virus
cattagcaattgttagacctattta

SEQ ID NO: 59606 - DNA, 25 bp, SARS Virus
attagcaattgttagacctatttag

SEQ ID NO: 59607 - DNA, 25 bp, SARS Virus
ttagcaattgtttgacctatttagt

SEQ ID NO: 59608 - DNA, 25 bp, SARS Virus
tagcaattgttatacctatttagtc

SEQ ID NO: 59609 - DNA, 25 bp, SARS Virus
agcaattgttagtcctatttagtcg

SEQ ID NO: 59610 - DNA, 25 bp, SARS Virus
gcaattgttagatctatttagtcga

SEQ ID NO: 59611 - DNA, 25 bp, SARS Virus
caattgttagacttatttagtcgac

SEQ ID NO: 59612 - DNA, 25 bp, SARS Virus
aattgttagacctatttagtcgacc

SEQ ID NO: 59613 - DNA, 25 bp, SARS Virus
attgttagacctttttagtcgacca

SEQ ID NO: 59614 - DNA, 25 bp, SARS Virus
ttgttagacctatttagtcgaccaa

SEQ ID NO: 59615 - DNA, 25 bp, SARS Virus
tgttagacctatttagtcgaccaaa

SEQ ID NO: 59616 - DNA, 25 bp, SARS Virus
gttagacctatttagtcgaccaaag

SEQ ID NO: 59617 - DNA, 25 bp, SARS Virus
ttagacctattttgtcgaccaaagg

SEQ ID NO: 59618 - DNA, 25 bp, SARS Virus
tagacctatttattcgaccaaaggg

SEQ ID NO: 59619 - DNA, 25 bp, SARS Virus
agacctatttagtcgaccaaagggt

SEQ ID NO: 59620 - DNA, 25 bp, SARS Virus
gacctatttagttgaccaaagggta

SEQ ID NO: 59621 - DNA, 25 bp, SARS Virus
acctatttagtctaccaaagggtaa

SEQ ID NO: 59622 - DNA, 25 bp, SARS Virus
cctatttagtcgtccaaagggtaaa

SEQ ID NO: 59623 - DNA, 25 bp, SARS Virus
ctatttagtcgatcaaagggtaaat

SEQ ID NO: 59624 - DNA, 25 bp, SARS Virus
tatttagtcgactaaagggtaaatt

SEQ ID NO: 59625 - DNA, 25 bp, SARS Virus
atttagtcgacctaagggtaaatta

SEQ ID NO: 59626 - DNA, 25 bp, SARS Virus
tttagtcgaccatagggtaaattat

SEQ ID NO: 59627 - DNA, 25 bp, SARS Virus
ttagtcgaccaatgggtaaattatt

SEQ ID NO: 59628 - DNA, 25 bp, SARS Virus
tagtcgaccaaatggtaaattattt

SEQ ID NO: 59629 - DNA, 25 bp, SARS Virus
agtcgaccaaagtgtaaattattta

SEQ ID NO: 59630 - DNA, 25 bp, SARS Virus
gtcgaccaaaggttaaattatttac

SEQ ID NO: 59631 - DNA, 25 bp, SARS Virus
tcgaccaaagggtaaattatttacc

SEQ ID NO: 59632 - DNA, 25 bp, SARS Virus
cgaccaaagggttaattatttaccc

SEQ ID NO: 59633 - DNA, 25 bp, SARS Virus
gaccaaagggtatattatttacccc

SEQ ID NO: 59634 - DNA, 25 bp, SARS Virus
accaaagggtaatttatttacccca

SEQ ID NO: 59635 - DNA, 25 bp, SARS Virus
ccaaagggtaaattatttaccccat

SEQ ID NO: 59636 - DNA, 25 bp, SARS Virus
caaagggtaaattatttaccccatt

SEQ ID NO: 59637 - DNA, 25 bp, SARS Virus
aaagggtaaattttttaccccattc

SEQ ID NO: 59638 - DNA, 25 bp, SARS Virus
aagggtaaattatttaccccattcc

SEQ ID NO: 59639 - DNA, 25 bp, SARS Virus
agggtaaattatttaccccattccg

SEQ ID NO: 59640 - DNA, 25 bp, SARS Virus
gggtaaattatttaccccattccga

SEQ ID NO: 59641 - DNA, 25 bp, SARS Virus
ggtaaattattttccccattccgat

SEQ ID NO: 59642 - DNA, 25 bp, SARS Virus
gtaaattatttatcccattccgatc

SEQ ID NO: 59643 - DNA, 25 bp, SARS Virus
taaattatttactccattccgatct

SEQ ID NO: 59644 - DNA, 25 bp, SARS Virus
aaattatttacctcattccgatctg

SEQ ID NO: 59645 - DNA, 25 bp, SARS Virus
aattatttaccctattccgatctga

SEQ ID NO: 59646 - DNA, 25 bp, SARS Virus
attatttacccctttccgatctgaa

SEQ ID NO: 59647 - DNA, 25 bp, SARS Virus
ttatttaccccattccgatctgaaa

SEQ ID NO: 59648 - DNA, 25 bp, SARS Virus
tatttaccccattccgatctgaaat

SEQ ID NO: 59649 - DNA, 25 bp, SARS Virus
atttaccccatttcgatctgaaata

SEQ ID NO: 59650 - DNA, 25 bp, SARS Virus
tttaccccattctgatctgaaataa

SEQ ID NO: 59651 - DNA, 25 bp, SARS Virus
ttaccccattcctatctgaaataat

SEQ ID NO: 59652 - DNA, 25 bp, SARS Virus
taccccattccgttctgaaataata

SEQ ID NO: 59653 - DNA, 25 bp, SARS Virus
accccattccgatctgaaataatac

SEQ ID NO: 59654 - DNA, 25 bp, SARS Virus
ccccattccgatttgaaataatact

SEQ ID NO: 59655 - DNA, 25 bp, SARS Virus
cccattccgatctgaaataatactg

SEQ ID NO: 59656 - DNA, 25 bp, SARS Virus
ccattccgatcttaaataatactga

SEQ ID NO: 59657 - DNA, 25 bp, SARS Virus
cattccgatctgtaataatactgag

SEQ ID NO: 59658 - DNA, 25 bp, SARS Virus
attccgatctgatataatactgagt

SEQ ID NO: 59659 - DNA, 25 bp, SARS Virus
ttccgatctgaattaatactgagtt

SEQ ID NO: 59660 - DNA, 25 bp, SARS Virus
tccgatctgaaataatactgagtta

SEQ ID NO: 59661 - DNA, 25 bp, SARS Virus
ccgatctgaaattatactgagttac

SEQ ID NO: 59662 - DNA, 25 bp, SARS Virus
cgatctgaaatattactgagttact

SEQ ID NO: 59663 - DNA, 25 bp, SARS Virus
gatctgaaataatactgagttactc

SEQ ID NO: 59664 - DNA, 25 bp, SARS Virus
atctgaaataattctgagttactca

SEQ ID NO: 59665 - DNA, 25 bp, SARS Virus
tctgaaataataatgagttactcaa

SEQ ID NO: 59666 - DNA, 25 bp, SARS Virus
ctgaaataatacagagttactcaat

SEQ ID NO: 59667 - DNA, 25 bp, SARS Virus
tgaaataatactaagttactcaata

SEQ ID NO: 59668 - DNA, 25 bp, SARS Virus
gaaataatactgagttactcaatac

SEQ ID NO: 59669 - DNA, 25 bp, SARS Virus
aaataatactgaattactcaatact

SEQ ID NO: 59670 - DNA, 25 bp, SARS Virus
aataatactgagatactcaatactc

SEQ ID NO: 59671 - DNA, 25 bp, SARS Virus
ataatactgagtaactcaatactcc

SEQ ID NO: 59672 - DNA, 25 bp, SARS Virus
taatactgagttactcaatactcct

SEQ ID NO: 59673 - DNA, 25 bp, SARS Virus
aatactgagttaatcaatactccta

SEQ ID NO: 59674 - DNA, 25 bp, SARS Virus
atactgagttacacaatactcctag

SEQ ID NO: 59675 - DNA, 25 bp, SARS Virus
tactgagttactaaatactcctagt

SEQ ID NO: 59676 - DNA, 25 bp, SARS Virus
actgagttactcaatactcctagtt

SEQ ID NO: 59677 - DNA, 25 bp, SARS Virus
ctgagttactcaatactcctagttc

SEQ ID NO: 59678 - DNA, 25 bp, SARS Virus
tgagttactcaaaactcctagttct

SEQ ID NO: 59679 - DNA, 25 bp, SARS Virus
gagttactcaatactcctagttcta

SEQ ID NO: 59680 - DNA, 25 bp, SARS Virus
agttactcaataatcctagttctac

SEQ ID NO: 59681 - DNA, 25 bp, SARS Virus
gttactcaatacacctagttctacg

SEQ ID NO: 59682 - DNA, 25 bp, SARS Virus
ttactcaatactactagttctacgt

SEQ ID NO: 59683 - DNA, 25 bp, SARS Virus
tactcaatactcatagttctacgtg

SEQ ID NO: 59684 - DNA, 25 bp, SARS Virus
actcaatactccaagttctacgtga

SEQ ID NO: 59685 - DNA, 25 bp, SARS Virus
ctcaatactcctagttctacgtgaa

SEQ ID NO: 59686 - DNA, 25 bp, SARS Virus
tcaatactcctaattctacgtgaaa

SEQ ID NO: 59687 - DNA, 25 bp, SARS Virus
caatactcctagatctacgtgaaaa

SEQ ID NO: 59688 - DNA, 25 bp, SARS Virus
aatactcctagtactacgtgaaaag

SEQ ID NO: 59689 - DNA, 25 bp, SARS Virus
atactcctagttatacgtgaaaagc

SEQ ID NO: 59690 - DNA, 25 bp, SARS Virus
tactcctagttcaacgtgaaaagcg

SEQ ID NO: 59691 - DNA, 25 bp, SARS Virus
actcctagttctacgtgaaaagcgc

SEQ ID NO: 59692 - DNA, 25 bp, SARS Virus
ctcctagttctaagtgaaaagcgca

SEQ ID NO: 59693 - DNA, 25 bp, SARS Virus
tcctagttctacatgaaaagcgcat

SEQ ID NO: 59694 - DNA, 25 bp, SARS Virus
cctagttctacgagaaaagcgcata

SEQ ID NO: 59695 - DNA, 25 bp, SARS Virus
ctagttctacgtaaaaagcgcatat

SEQ ID NO: 59696 - DNA, 25 bp, SARS Virus
tagttctacgtgaaaagcgcatatg

SEQ ID NO: 59697 - DNA, 25 bp, SARS Virus
agttctacgtgaaaagcgcatatga

SEQ ID NO: 59698 - DNA, 25 bp, SARS Virus
gttctacgtgaaaagcgcatatgat

SEQ ID NO: 59699 - DNA, 25 bp, SARS Virus
ttctacgtgaaaagcgcatatgatt

SEQ ID NO: 59700 - DNA, 25 bp, SARS Virus
tctacgtgaaaaacgcatatgattc

SEQ ID NO: 59701 - DNA, 25 bp, SARS Virus
ctacgtgaaaagagcatatgattcg

SEQ ID NO: 59702 - DNA, 25 bp, SARS Virus
tacgtgaaaagcacatatgattcgc

SEQ ID NO: 59703 - DNA, 25 bp, SARS Virus
acgtgaaaagcgaatatgattcgca

SEQ ID NO: 59704 - DNA, 25 bp, SARS Virus
cgtgaaaagcgcatatgattcgcat

SEQ ID NO: 59705 - DNA, 25 bp, SARS Virus
gtgaaaagcgcaaatgattcgcatt

SEQ ID NO: 59706 - DNA, 25 bp, SARS Virus
tgaaaagcgcatatgattcgcatta

SEQ ID NO: 59707 - DNA, 25 bp, SARS Virus
gaaaagcgcataagattcgcattac

SEQ ID NO: 59708 - DNA, 25 bp, SARS Virus
aaaagcgcatataattcgcattaca

SEQ ID NO: 59709 - DNA, 25 bp, SARS Virus
aaagcgcatatgattcgcattacag

SEQ ID NO: 59710 - DNA, 25 bp, SARS Virus
aagcgcatatgaatcgcattacagt

SEQ ID NO: 59711 - DNA, 25 bp, SARS Virus
agcgcatatgatacgcattacagta

SEQ ID NO: 59712 - DNA, 25 bp, SARS Virus
gcgcatatgattagcattacagtag

SEQ ID NO: 59713 - DNA, 25 bp, SARS Virus
cgcatatgattcacattacagtagg

SEQ ID NO: 59714 - DNA, 25 bp, SARS Virus
gcatatgattcgaattacagtaggg

SEQ ID NO: 59715 - DNA, 25 bp, SARS Virus
catatgattcgcattacagtaggga

SEQ ID NO: 59716 - DNA, 25 bp, SARS Virus
atatgattcgcaatacagtagggat

SEQ ID NO: 59717 - DNA, 25 bp, SARS Virus
tatgattcgcataacagtagggatg

SEQ ID NO: 59718 - DNA, 25 bp, SARS Virus
atgattcgcattacagtagggatga

SEQ ID NO: 59719 - DNA, 25 bp, SARS Virus
tgattcgcattaaagtagggatgat

SEQ ID NO: 59720 - DNA, 25 bp, SARS Virus
gattcgcattacagtagggatgata

SEQ ID NO: 59721 - DNA, 25 bp, SARS Virus
attcgcattacaatagggatgatat

SEQ ID NO: 59722 - DNA, 25 bp, SARS Virus
ttcgcattacagaagggatgatatt

SEQ ID NO: 59723 - DNA, 25 bp, SARS Virus
tcgcattacagtagggatgatattg

SEQ ID NO: 59724 - DNA, 25 bp, SARS Virus
cgcattacagtaaggatgatattga

SEQ ID NO: 59725 - DNA, 25 bp, SARS Virus
gcattacagtagagatgatattgag

SEQ ID NO: 59726 - DNA, 25 bp, SARS Virus
cattacagtaggaatgatattgagt

SEQ ID NO: 59727 - DNA, 25 bp, SARS Virus
attacagtagggatgatattgagtt

SEQ ID NO: 59728 - DNA, 25 bp, SARS Virus
ttacagtagggaagatattgagttt

SEQ ID NO: 59729 - DNA, 25 bp, SARS Virus
tacagtagggataatattgagttta

SEQ ID NO: 59730 - DNA, 25 bp, SARS Virus
acagtagggatgatattgagtttac

SEQ ID NO: 59731 - DNA, 25 bp, SARS Virus
cagtagggatgaaattgagtttact

SEQ ID NO: 59732 - DNA, 25 bp, SARS Virus
agtagggatgatattgagtttactt

SEQ ID NO: 59733 - DNA, 25 bp, SARS Virus
gtagggatgataatgagtttactta

SEQ ID NO: 59734 - DNA, 25 bp, SARS Virus
tagggatgatatagagtttacttag

SEQ ID NO: 59735 - DNA, 25 bp, SARS Virus
agggatgatattaagtttacttaga

SEQ ID NO: 59736 - DNA, 25 bp, SARS Virus
gggatgatattgagtttacttagaa

SEQ ID NO: 59737 - DNA, 25 bp, SARS Virus
ggatgatattgaatttacttagaat

SEQ ID NO: 59738 - DNA, 25 bp, SARS Virus
gatgatattgagattacttagaatt

SEQ ID NO: 59739 - DNA, 25 bp, SARS Virus
atgatattgagtatacttagaattc

SEQ ID NO: 59740 - DNA, 25 bp, SARS Virus
tgatattgagttaacttagaattca

SEQ ID NO: 59741 - DNA, 25 bp, SARS Virus
gatattgagtttacttagaattcat

SEQ ID NO: 59742 - DNA, 25 bp, SARS Virus
atattgagtttaattagaattcata

SEQ ID NO: 59743 - DNA, 25 bp, SARS Virus
tattgagtttacatagaattcatac

SEQ ID NO: 59744 - DNA, 25 bp, SARS Virus
attgagtttactaagaattcatacg

SEQ ID NO: 59745 - DNA, 25 bp, SARS Virus
ttgagtttacttagaattcatacgg

SEQ ID NO: 59746 - DNA, 25 bp, SARS Virus
tgagtttacttaaaattcatacggt

SEQ ID NO: 59747 - DNA, 25 bp, SARS Virus
gagtttacttagaattcatacggta

SEQ ID NO: 59748 - DNA, 25 bp, SARS Virus
agtttacttagaattcatacggtaa

SEQ ID NO: 59749 - DNA, 25 bp, SARS Virus
gtttacttagaaatcatacggtaat

SEQ ID NO: 59750 - DNA, 25 bp, SARS Virus
tttacttagaatacatacggtaatc

SEQ ID NO: 59751 - DNA, 25 bp, SARS Virus
ttacttagaattaatacggtaatca

SEQ ID NO: 59752 - DNA, 25 bp, SARS Virus
tacttagaattcatacggtaatcac

SEQ ID NO: 59753 - DNA, 25 bp, SARS Virus
acttagaattcaaacggtaatcacg

SEQ ID NO: 59754 - DNA, 25 bp, SARS Virus
cttagaattcatacggtaatcacgt

SEQ ID NO: 59755 - DNA, 25 bp, SARS Virus
ttagaattcataaggtaatcacgtt

SEQ ID NO: 59756 - DNA, 25 bp, SARS Virus
tagaattcatacagtaatcacgttt

SEQ ID NO: 59757 - DNA, 25 bp, SARS Virus
agaattcatacgataatcacgtttc

SEQ ID NO: 59758 - DNA, 25 bp, SARS Virus
gaattcatacggaaatcacgtttct

SEQ ID NO: 59759 - DNA, 25 bp, SARS Virus
aattcatacggtaatcacgtttctt

SEQ ID NO: 59760 - DNA, 25 bp, SARS Virus
attcatacggtaatcacgtttctta

SEQ ID NO: 59761 - DNA, 25 bp, SARS Virus
ttcatacggtaaacacgtttcttat

SEQ ID NO: 59762 - DNA, 25 bp, SARS Virus
tcatacggtaataacgtttcttatc

SEQ ID NO: 59763 - DNA, 25 bp, SARS Virus
catacggtaatcacgtttcttatct

SEQ ID NO: 59764 - DNA, 25 bp, SARS Virus
atacggtaatcaagtttcttatctc

SEQ ID NO: 59765 - DNA, 25 bp, SARS Virus
tacggtaatcacatttcttatctcg

SEQ ID NO: 59766 - DNA, 25 bp, SARS Virus
acggtaatcacgattcttatctcga

SEQ ID NO: 59767 - DNA, 25 bp, SARS Virus
cggtaatcacgtatcttatctcgag

SEQ ID NO: 59768 - DNA, 25 bp, SARS Virus
ggtaatcacgttacttatctcgagc

SEQ ID NO: 59769 - DNA, 25 bp, SARS Virus
gtaatcacgtttattatctcgagcg

SEQ ID NO: 59770 - DNA, 25 bp, SARS Virus
taatcacgtttcatatctcgagcgt

SEQ ID NO: 59771 - DNA, 25 bp, SARS Virus
aatcacgtttctaatctcgagcgtg

SEQ ID NO: 59772 - DNA, 25 bp, SARS Virus
atcacgtttcttatctcgagcgtgg

SEQ ID NO: 59773 - DNA, 25 bp, SARS Virus
tcacgtttcttaactcgagcgtggc

SEQ ID NO: 59774 - DNA, 25 bp, SARS Virus
cacgtttcttatatcgagcgtggca

SEQ ID NO: 59775 - DNA, 25 bp, SARS Virus
acgtttcttatcacgagcgtggcat

SEQ ID NO: 59776 - DNA, 25 bp, SARS Virus
cgtttcttatctagagcgtggcatc

SEQ ID NO: 59777 - DNA, 25 bp, SARS Virus
gtttcttatctcaagcgtggcatcg

SEQ ID NO: 59778 - DNA, 25 bp, SARS Virus
tttcttatctcgagcgtggcatcga

SEQ ID NO: 59779 - DNA, 25 bp, SARS Virus
ttcttatctcgaacgtggcatcgac

SEQ ID NO: 59780 - DNA, 25 bp, SARS Virus
tcttatctcgagagtggcatcgacc

SEQ ID NO: 59781 - DNA, 25 bp, SARS Virus
cttatctcgagcatggcatcgacca

SEQ ID NO: 59782 - DNA, 25 bp, SARS Virus
ttatctcgagcgaggcatcgaccac

SEQ ID NO: 59783 - DNA, 25 bp, SARS Virus
tatctcgagcgtagcatcgaccaca

SEQ ID NO: 59784 - DNA, 25 bp, SARS Virus
atctcgagcgtgacatcgaccacag

SEQ ID NO: 59785 - DNA, 25 bp, SARS Virus
tctcgagcgtggaatcgaccacaga

SEQ ID NO: 59786 - DNA, 25 bp, SARS Virus
ctcgagcgtggcatcgaccacagag

SEQ ID NO: 59787 - DNA, 25 bp, SARS Virus
tcgagcgtggcaacgaccacagaga

SEQ ID NO: 59788 - DNA, 25 bp, SARS Virus
cgagcgtggcatagaccacagagat

SEQ ID NO: 59789 - DNA, 25 bp, SARS Virus
gagcgtggcatcaaccacagagata

SEQ ID NO: 59790 - DNA, 25 bp, SARS Virus
agcgtggcatcgaccacagagatag

SEQ ID NO: 59791 - DNA, 25 bp, SARS Virus
gcgtggcatcgaacacagagataga

SEQ ID NO: 59792 - DNA, 25 bp, SARS Virus
cgtggcatcgacaacagagatagac

SEQ ID NO: 59793 - DNA, 25 bp, SARS Virus
gtggcatcgaccacagagatagaca

SEQ ID NO: 59794 - DNA, 25 bp, SARS Virus
tggcatcgaccaaagagatagacat

SEQ ID NO: 59795 - DNA, 25 bp, SARS Virus
ggcatcgaccacagagatagacatc

SEQ ID NO: 59796 - DNA, 25 bp, SARS Virus
gcatcgaccacaaagatagacatca

SEQ ID NO: 59797 - DNA, 25 bp, SARS Virus
catcgaccacagagatagacatcat

SEQ ID NO: 59798 - DNA, 25 bp, SARS Virus
atcgaccacagaaatagacatcatg

SEQ ID NO: 59799 - DNA, 25 bp, SARS Virus
tcgaccacagagatagacatcatga

SEQ ID NO: 59800 - DNA, 25 bp, SARS Virus
cgaccacagagaaagacatcatgat

SEQ ID NO: 59801 - DNA, 25 bp, SARS Virus
gaccacagagatagacatcatgata

SEQ ID NO: 59802 - DNA, 25 bp, SARS Virus
accacagagataaacatcatgatac

SEQ ID NO: 59803 - DNA, 25 bp, SARS Virus
ccacagagatagacatcatgatact

SEQ ID NO: 59804 - DNA, 25 bp, SARS Virus
cacagagatagaaatcatgatactg

SEQ ID NO: 59805 - DNA, 25 bp, SARS Virus
acagagatagacatcatgatactgt

SEQ ID NO: 59806 - DNA, 25 bp, SARS Virus
cagagatagacaacatgatactgtt

SEQ ID NO: 59807 - DNA, 25 bp, SARS Virus
agagatagacataatgatactgttt

SEQ ID NO: 59808 - DNA, 25 bp, SARS Virus
gagatagacatcatgatactgttta

SEQ ID NO: 59809 - DNA, 25 bp, SARS Virus
agatagacatcaagatactgtttat

SEQ ID NO: 59810 - DNA, 25 bp, SARS Virus
gatagacatcataatactgtttatc

SEQ ID NO: 59811 - DNA, 25 bp, SARS Virus
atagacatcatgatactgtttatct

SEQ ID NO: 59812 - DNA, 25 bp, SARS Virus
tagacatcatgaaactgtttatctg

SEQ ID NO: 59813 - DNA, 25 bp, SARS Virus
agacatcatgatactgtttatctgt

SEQ ID NO: 59814 - DNA, 25 bp, SARS Virus
gacatcatgataatgtttatctgtc

SEQ ID NO: 59815 - DNA, 25 bp, SARS Virus
acatcatgatacagtttatctgtca

SEQ ID NO: 59816 - DNA, 25 bp, SARS Virus
catcatgatactatttatctgtcaa

SEQ ID NO: 59817 - DNA, 25 bp, SARS Virus
atcatgatactgattatctgtcaaa

SEQ ID NO: 59818 - DNA, 25 bp, SARS Virus
tcatgatactgtatatctgtcaaag

SEQ ID NO: 59819 - DNA, 25 bp, SARS Virus
catgatactgttaatctgtcaaagt

SEQ ID NO: 59820 - DNA, 25 bp, SARS Virus
atgatactgtttatctgtcaaagta

SEQ ID NO: 59821 - DNA, 25 bp, SARS Virus
tgatactgtttaactgtcaaagtag

SEQ ID NO: 59822 - DNA, 25 bp, SARS Virus
gatactgtttatatgtcaaagtagt

SEQ ID NO: 59823 - DNA, 25 bp, SARS Virus
atactgtttatcagtcaaagtagtc

SEQ ID NO: 59824 - DNA, 25 bp, SARS Virus
tactgtttatctatcaaagtagtct

SEQ ID NO: 59825 - DNA, 25 bp, SARS Virus
actgtttatctgacaaagtagtctt

SEQ ID NO: 59826 - DNA, 25 bp, SARS Virus
ctgtttatctgtaaaagtagtcttt

SEQ ID NO: 59827 - DNA, 25 bp, SARS Virus
tgtttatctgtcaaagtagtcttta

SEQ ID NO: 59828 - DNA, 25 bp, SARS Virus
gtttatctgtcaaagtagtctttaa

SEQ ID NO: 59829 - DNA, 25 bp, SARS Virus
tttatctgtcaaagtagtctttaat

SEQ ID NO: 59830 - DNA, 25 bp, SARS Virus
ttatctgtcaaaatagtctttaata

SEQ ID NO: 59831 - DNA, 25 bp, SARS Virus
tatctgtcaaagaagtctttaataa

SEQ ID NO: 59832 - DNA, 25 bp, SARS Virus
atctgtcaaagtagtctttaataac

SEQ ID NO: 59833 - DNA, 25 bp, SARS Virus
tctgtcaaagtaatctttaataact

SEQ ID NO: 59834 - DNA, 25 bp, SARS Virus
ctgtcaaagtagactttaataactt

SEQ ID NO: 59835 - DNA, 25 bp, SARS Virus
tgtcaaagtagtatttaataacttc

SEQ ID NO: 59836 - DNA, 25 bp, SARS Virus
gtcaaagtagtcattaataacttca

SEQ ID NO: 59837 - DNA, 25 bp, SARS Virus
tcaaagtagtctataataacttcag

SEQ ID NO: 59838 - DNA, 25 bp, SARS Virus
caaagtagtcttaaataacttcagt

SEQ ID NO: 59839 - DNA, 25 bp, SARS Virus
aaagtagtctttaataacttcagtt

SEQ ID NO: 59840 - DNA, 25 bp, SARS Virus
aagtagtctttaataacttcagtta

SEQ ID NO: 59841 - DNA, 25 bp, SARS Virus
agtagtctttaaaaacttcagttat

SEQ ID NO: 59842 - DNA, 25 bp, SARS Virus
gtagtctttaataacttcagttatc

SEQ ID NO: 59843 - DNA, 25 bp, SARS Virus
tagtctttaataacttcagttatcg

SEQ ID NO: 59844 - DNA, 25 bp, SARS Virus
agtctttaataaattcagttatcgg

SEQ ID NO: 59845 - DNA, 25 bp, SARS Virus
gtctttaataacatcagttatcggc

SEQ ID NO: 59846 - DNA, 25 bp, SARS Virus
tctttaataactacagttatcggcg

SEQ ID NO: 59847 - DNA, 25 bp, SARS Virus
ctttaataacttaagttatcggcgg

SEQ ID NO: 59848 - DNA, 25 bp, SARS Virus
tttaataacttcagttatcggcggt

SEQ ID NO: 59849 - DNA, 25 bp, SARS Virus
ttaataacttcaattatcggcggtg

SEQ ID NO: 59850 - DNA, 25 bp, SARS Virus
taataacttcagatatcggcggtga

SEQ ID NO: 59851 - DNA, 25 bp, SARS Virus
aataacttcagtaatcggcggtgat

SEQ ID NO: 59852 - DNA, 25 bp, SARS Virus
ataacttcagttatcggcggtgatc

SEQ ID NO: 59853 - DNA, 25 bp, SARS Virus
taacttcagttaacggcggtgatct

SEQ ID NO: 59854 - DNA, 25 bp, SARS Virus
aacttcagttataggcggtgatctc

SEQ ID NO: 59855 - DNA, 25 bp, SARS Virus
acttcagttatcagcggtgatctcc

SEQ ID NO: 59856 - DNA, 25 bp, SARS Virus
cttcagttatcgacggtgatctcct

SEQ ID NO: 59857 - DNA, 25 bp, SARS Virus
ttcagttatcggaggtgatctcctc

SEQ ID NO: 59858 - DNA, 25 bp, SARS Virus
tcagttatcggcagtgatctcctcg

SEQ ID NO: 59859 - DNA, 25 bp, SARS Virus
cagttatcggcgatgatctcctcga

SEQ ID NO: 59860 - DNA, 25 bp, SARS Virus
agttatcggcggagatctcctcgat

SEQ ID NO: 59861 - DNA, 25 bp, SARS Virus
gttatcggcggtaatctcctcgatg

SEQ ID NO: 59862 - DNA, 25 bp, SARS Virus
ttatcggcggtgatctcctcgatga

SEQ ID NO: 59863 - DNA, 25 bp, SARS Virus
tatcggcggtgaactcctcgatgac

SEQ ID NO: 59864 - DNA, 25 bp, SARS Virus
atcggcggtgatatcctcgatgaca

SEQ ID NO: 59865 - DNA, 25 bp, SARS Virus
tcggcggtgatcacctcgatgacac

SEQ ID NO: 59866 - DNA, 25 bp, SARS Virus
cggcggtgatctactcgatgacacc

SEQ ID NO: 59867 - DNA, 25 bp, SARS Virus
ggcggtgatctcatcgatgacacca

SEQ ID NO: 59868 - DNA, 25 bp, SARS Virus
gcggtgatctccacgatgacaccat

SEQ ID NO: 59869 - DNA, 25 bp, SARS Virus
cggtgatctcctagatgacaccatt

SEQ ID NO: 59870 - DNA, 25 bp, SARS Virus
ggtgatctcctcaatgacaccatta

SEQ ID NO: 59871 - DNA, 25 bp, SARS Virus
gtgatctcctcgatgacaccattaa

SEQ ID NO: 59872 - DNA, 25 bp, SARS Virus
tgatctcctcgaagacaccattaac

SEQ ID NO: 59873 - DNA, 25 bp, SARS Virus
gatctcctcgataacaccattaacc

SEQ ID NO: 59874 - DNA, 25 bp, SARS Virus
atctcctcgatgacaccattaacct

SEQ ID NO: 59875 - DNA, 25 bp, SARS Virus
tctcctcgatgaaaccattaacctt

SEQ ID NO: 59876 - DNA, 25 bp, SARS Virus
ctcctcgatgacaccattaaccttg

SEQ ID NO: 59877 - DNA, 25 bp, SARS Virus
tcctcgatgacaacattaaccttgt

SEQ ID NO: 59878 - DNA, 25 bp, SARS Virus
cctcgatgacacaattaaccttgtt

SEQ ID NO: 59879 - DNA, 25 bp, SARS Virus
ctcgatgacaccattaaccttgttc

SEQ ID NO: 59880 - DNA, 25 bp, SARS Virus
tcgatgacaccaataaccttgttcg

SEQ ID NO: 59881 - DNA, 25 bp, SARS Virus
cgatgacaccataaaccttgttcgt

SEQ ID NO: 59882 - DNA, 25 bp, SARS Virus
gatgacaccattaaccttgttcgtt

SEQ ID NO: 59883 - DNA, 25 bp, SARS Virus
atgacaccattaaccttgttcgttc

SEQ ID NO: 59884 - DNA, 25 bp, SARS Virus
tgacaccattaaacttgttcgttca

SEQ ID NO: 59885 - DNA, 25 bp, SARS Virus
gacaccattaacattgttcgttcaa

SEQ ID NO: 59886 - DNA, 25 bp, SARS Virus
acaccattaaccatgttcgttcaaa

SEQ ID NO: 59887 - DNA, 25 bp, SARS Virus
caccattaacctagttcgttcaaaa

SEQ ID NO: 59888 - DNA, 25 bp, SARS Virus
accattaaccttattcgttcaaaat

SEQ ID NO: 59889 - DNA, 25 bp, SARS Virus
ccattaaccttgatcgttcaaaatg

SEQ ID NO: 59890 - DNA, 25 bp, SARS Virus
cattaaccttgtacgttcaaaatgc

SEQ ID NO: 59891 - DNA, 25 bp, SARS Virus
attaaccttgttagttcaaaatgcc

SEQ ID NO: 59892 - DNA, 25 bp, SARS Virus
ttaaccttgttcattcaaaatgcca

SEQ ID NO: 59893 - DNA, 25 bp, SARS Virus
taaccttgttcgatcaaaatgccac

SEQ ID NO: 59894 - DNA, 25 bp, SARS Virus
aaccttgttcgtacaaaatgccacc

SEQ ID NO: 59895 - DNA, 25 bp, SARS Virus
accttgttcgttaaaaatgccaccg

SEQ ID NO: 59896 - DNA, 25 bp, SARS Virus
ccttgttcgttcaaaatgccaccga

SEQ ID NO: 59897 - DNA, 25 bp, SARS Virus
cttgttcgttcaaaatgccaccgac

SEQ ID NO: 59898 - DNA, 25 bp, SARS Virus
ttgttcgttcaaaatgccaccgacc

SEQ ID NO: 59899 - DNA, 25 bp, SARS Virus
tgttcgttcaaaatgccaccgaccg

SEQ ID NO: 59900 - DNA, 25 bp, SARS Virus
gttcgttcaaaaagccaccgaccgt

SEQ ID NO: 59901 - DNA, 25 bp, SARS Virus
ttcgttcaaaataccaccgaccgta

SEQ ID NO: 59902 - DNA, 25 bp, SARS Virus
tcgttcaaaatgacaccgaccgtat

SEQ ID NO: 59903 - DNA, 25 bp, SARS Virus
cgttcaaaatgcaaccgaccgtatt

SEQ ID NO: 59904 - DNA, 25 bp, SARS Virus
gttcaaaatgccaccgaccgtatta

SEQ ID NO: 59905 - DNA, 25 bp, SARS Virus
ttcaaaatgccaacgaccgtattat

SEQ ID NO: 59906 - DNA, 25 bp, SARS Virus
tcaaaatgccacagaccgtattata

SEQ ID NO: 59907 - DNA, 25 bp, SARS Virus
caaaatgccaccaaccgtattatac

SEQ ID NO: 59908 - DNA, 25 bp, SARS Virus
aaaatgccaccgaccgtattataca

SEQ ID NO: 59909 - DNA, 25 bp, SARS Virus
aaatgccaccgaacgtattatacaa

SEQ ID NO: 59910 - DNA, 25 bp, SARS Virus
aatgccaccgacagtattatacaat

SEQ ID NO: 59911 - DNA, 25 bp, SARS Virus
atgccaccgaccatattatacaatt

SEQ ID NO: 59912 - DNA, 25 bp, SARS Virus
tgccaccgaccgaattatacaattt

SEQ ID NO: 59913 - DNA, 25 bp, SARS Virus
gccaccgaccgtattatacaatttt

SEQ ID NO: 59914 - DNA, 25 bp, SARS Virus
ccaccgaccgtaatatacaattttt

SEQ ID NO: 59915 - DNA, 25 bp, SARS Virus
caccgaccgtataatacaatttttg

SEQ ID NO: 59916 - DNA, 25 bp, SARS Virus
accgaccgtattatacaatttttga

SEQ ID NO: 59917 - DNA, 25 bp, SARS Virus
ccgaccgtattaaacaatttttgac

SEQ ID NO: 59918 - DNA, 25 bp, SARS Virus
cgaccgtattatacaatttttgaca

SEQ ID NO: 59919 - DNA, 25 bp, SARS Virus
gaccgtattataaaatttttgacaa

SEQ ID NO: 59920 - DNA, 25 bp, SARS Virus
accgtattatacaatttttgacaaa

SEQ ID NO: 59921 - DNA, 25 bp, SARS Virus
ccgtattatacaatttttgacaaat

SEQ ID NO: 59922 - DNA, 25 bp, SARS Virus
cgtattatacaaattttgacaaatg

SEQ ID NO: 59923 - DNA, 25 bp, SARS Virus
gtattatacaatatttgacaaatgt

SEQ ID NO: 59924 - DNA, 25 bp, SARS Virus
tattatacaattattgacaaatgtc

SEQ ID NO: 59925 - DNA, 25 bp, SARS Virus
attatacaatttatgacaaatgtca

SEQ ID NO: 59926 - DNA, 25 bp, SARS Virus
ttatacaattttagacaaatgtcac

SEQ ID NO: 59927 - DNA, 25 bp, SARS Virus
tatacaatttttaacaaatgtcact

SEQ ID NO: 59928 - DNA, 25 bp, SARS Virus
atacaatttttgacaaatgtcacta

SEQ ID NO: 59929 - DNA, 25 bp, SARS Virus
tacaatttttgaaaaatgtcactac

SEQ ID NO: 59930 - DNA, 25 bp, SARS Virus
acaatttttgacaaatgtcactaca

SEQ ID NO: 59931 - DNA, 25 bp, SARS Virus
caatttttgacaaatgtcactacat

SEQ ID NO: 59932 - DNA, 25 bp, SARS Virus
aatttttgacaaatgtcactacatc

SEQ ID NO: 59933 - DNA, 25 bp, SARS Virus
atttttgacaaaagtcactacatct

SEQ ID NO: 59934 - DNA, 25 bp, SARS Virus
tttttgacaaatatcactacatctt

SEQ ID NO: 59935 - DNA, 25 bp, SARS Virus
ttttgacaaatgacactacatcttt

SEQ ID NO: 59936 - DNA, 25 bp, SARS Virus
tttgacaaatgtaactacatctttg

SEQ ID NO: 59937 - DNA, 25 bp, SARS Virus
ttgacaaatgtcactacatctttga

SEQ ID NO: 59938 - DNA, 25 bp, SARS Virus
tgacaaatgtcaatacatctttgag

SEQ ID NO: 59939 - DNA, 25 bp, SARS Virus
gacaaatgtcacaacatctttgagg

SEQ ID NO: 59940 - DNA, 25 bp, SARS Virus
acaaatgtcactacatctttgaggt

SEQ ID NO: 59941 - DNA, 25 bp, SARS Virus
caaatgtcactaaatctttgaggtg

SEQ ID NO: 59942 - DNA, 25 bp, SARS Virus
aaatgtcactacatctttgaggtgt

SEQ ID NO: 59943 - DNA, 25 bp, SARS Virus
aatgtcactacaactttgaggtgtg

SEQ ID NO: 59944 - DNA, 25 bp, SARS Virus
atgtcactacatatttgaggtgtgg

SEQ ID NO: 59945 - DNA, 25 bp, SARS Virus
tgtcactacatcattgaggtgtgga

SEQ ID NO: 59946 - DNA, 25 bp, SARS Virus
gtcactacatctatgaggtgtggaa

SEQ ID NO: 59947 - DNA, 25 bp, SARS Virus
tcactacatcttagaggtgtggaat

SEQ ID NO: 59948 - DNA, 25 bp, SARS Virus
cactacatctttaaggtgtggaata

SEQ ID NO: 59949 - DNA, 25 bp, SARS Virus
actacatctttgaggtgtggaatac

SEQ ID NO: 59950 - DNA, 25 bp, SARS Virus
ctacatctttgaagtgtggaatacc

SEQ ID NO: 59951 - DNA, 25 bp, SARS Virus
tacatctttgagatgtggaataccc

SEQ ID NO: 59952 - DNA, 25 bp, SARS Virus
acatctttgaggagtggaataccca

SEQ ID NO: 59953 - DNA, 25 bp, SARS Virus
catctttgaggtatggaatacccaa

SEQ ID NO: 59954 - DNA, 25 bp, SARS Virus
atctttgaggtgaggaatacccaac

SEQ ID NO: 59955 - DNA, 25 bp, SARS Virus
tctttgaggtgtagaatacccaacc

SEQ ID NO: 59956 - DNA, 25 bp, SARS Virus
ctttgaggtgtgaaatacccaaccc

SEQ ID NO: 59957 - DNA, 25 bp, SARS Virus
tttgaggtgtggaatacccaaccct

SEQ ID NO: 59958 - DNA, 25 bp, SARS Virus
ttgaggtgtggaatacccaacccta

SEQ ID NO: 59959 - DNA, 25 bp, SARS Virus
tgaggtgtggaaaacccaaccctaa

SEQ ID NO: 59960 - DNA, 25 bp, SARS Virus
gaggtgtggaatacccaaccctaat

SEQ ID NO: 59961 - DNA, 25 bp, SARS Virus
aggtgtggaataaccaaccctaata

SEQ ID NO: 59962 - DNA, 25 bp, SARS Virus
ggtgtggaatacacaaccctaatag

SEQ ID NO: 59963 - DNA, 25 bp, SARS Virus
gtgtggaataccaaaccctaatagg

SEQ ID NO: 59964 - DNA, 25 bp, SARS Virus
tgtggaatacccaaccctaataggt

SEQ ID NO: 59965 - DNA, 25 bp, SARS Virus
gtggaatacccaaccctaataggtt

SEQ ID NO: 59966 - DNA, 25 bp, SARS Virus
tggaatacccaaacctaataggttt

SEQ ID NO: 59967 - DNA, 25 bp, SARS Virus
ggaatacccaacactaataggtttt

SEQ ID NO: 59968 - DNA, 25 bp, SARS Virus
gaatacccaaccataataggtttta

SEQ ID NO: 59969 - DNA, 25 bp, SARS Virus
aatacccaacccaaataggttttac

SEQ ID NO: 59970 - DNA, 25 bp, SARS Virus
atacccaaccctaataggttttaca

SEQ ID NO: 59971 - DNA, 25 bp, SARS Virus
tacccaaccctaataggttttacac

SEQ ID NO: 59972 - DNA, 25 bp, SARS Virus
acccaaccctaaaaggttttacact

SEQ ID NO: 59973 - DNA, 25 bp, SARS Virus
cccaaccctaataggttttacactg

SEQ ID NO: 59974 - DNA, 25 bp, SARS Virus
ccaaccctaataagttttacactgt

SEQ ID NO: 59975 - DNA, 25 bp, SARS Virus
caaccctaatagattttacactgtc

SEQ ID NO: 59976 - DNA, 25 bp, SARS Virus
aaccctaataggatttacactgtct

SEQ ID NO: 59977 - DNA, 25 bp, SARS Virus
accctaataggtattacactgtctc

SEQ ID NO: 59978 - DNA, 25 bp, SARS Virus
ccctaataggttatacactgtctcg

SEQ ID NO: 59979 - DNA, 25 bp, SARS Virus
cctaataggtttaacactgtctcgg

SEQ ID NO: 59980 - DNA, 25 bp, SARS Virus
ctaataggttttacactgtctcggt

SEQ ID NO: 59981 - DNA, 25 bp, SARS Virus
taataggttttaaactgtctcggta

SEQ ID NO: 59982 - DNA, 25 bp, SARS Virus
aataggttttacactgtctcggtac

SEQ ID NO: 59983 - DNA, 25 bp, SARS Virus
ataggttttacaatgtctcggtacg

SEQ ID NO: 59984 - DNA, 25 bp, SARS Virus
taggttttacacagtctcggtacgg

SEQ ID NO: 59985 - DNA, 25 bp, SARS Virus
aggttttacactatctcggtacgga

SEQ ID NO: 59986 - DNA, 25 bp, SARS Virus
ggttttacactgactcggtacggat

SEQ ID NO: 59987 - DNA, 25 bp, SARS Virus
gttttacactgtatcggtacggatt

SEQ ID NO: 59988 - DNA, 25 bp, SARS Virus
ttttacactgtcacggtacggattg

SEQ ID NO: 59989 - DNA, 25 bp, SARS Virus
tttacactgtctaggtacggattgt

SEQ ID NO: 59990 - DNA, 25 bp, SARS Virus
ttacactgtctcagtacggattgta

SEQ ID NO: 59991 - DNA, 25 bp, SARS Virus
tacactgtctcgatacggattgtac

SEQ ID NO: 59992 - DNA, 25 bp, SARS Virus
acactgtctcggaacggattgtacg

SEQ ID NO: 59993 - DNA, 25 bp, SARS Virus
cactgtctcggtacggattgtacga

SEQ ID NO: 59994 - DNA, 25 bp, SARS Virus
actgtctcggtaaggattgtacgaa

SEQ ID NO: 59995 - DNA, 25 bp, SARS Virus
ctgtctcggtacagattgtacgaat

SEQ ID NO: 59996 - DNA, 25 bp, SARS Virus
tgtctcggtacgaattgtacgaatc

SEQ ID NO: 59997 - DNA, 25 bp, SARS Virus
gtctcggtacggattgtacgaatcc

SEQ ID NO: 59998 - DNA, 25 bp, SARS Virus
tctcggtacggaatgtacgaatcct

SEQ ID NO: 59999 - DNA, 25 bp, SARS Virus
ctcggtacggatagtacgaatccta

SEQ ID NO: 60000 - DNA, 25 bp, SARS Virus
tcggtacggattatacgaatcctat

SEQ ID NO: 60001 - DNA, 25 bp, SARS Virus
cggtacggattgaacgaatcctatt

SEQ ID NO: 60002 - DNA, 25 bp, SARS Virus
ggtacggattgtacgaatcctatta

SEQ ID NO: 60003 - DNA, 25 bp, SARS Virus
gtacggattgtaagaatcctattac

SEQ ID NO: 60004 - DNA, 25 bp, SARS Virus
tacggattgtacaaatcctattacc

SEQ ID NO: 60005 - DNA, 25 bp, SARS Virus
acggattgtacgaatcctattaccg

SEQ ID NO: 60006 - DNA, 25 bp, SARS Virus
cggattgtacgaatcctattaccgg

SEQ ID NO: 60007 - DNA, 25 bp, SARS Virus
ggattgtacgaaacctattaccgga

SEQ ID NO: 60008 - DNA, 25 bp, SARS Virus
gattgtacgaatactattaccggag

SEQ ID NO: 60009 - DNA, 25 bp, SARS Virus
attgtacgaatcatattaccggaga

SEQ ID NO: 60010 - DNA, 25 bp, SARS Virus
ttgtacgaatccaattaccggagag

SEQ ID NO: 60011 - DNA, 25 bp, SARS Virus
tgtacgaatcctattaccggagaga

SEQ ID NO: 60012 - DNA, 25 bp, SARS Virus
gtacgaatcctaataccggagagaa

SEQ ID NO: 60013 - DNA, 25 bp, SARS Virus
tacgaatcctataaccggagagaac

SEQ ID NO: 60014 - DNA, 25 bp, SARS Virus
acgaatcctattaccggagagaaca

SEQ ID NO: 60015 - DNA, 25 bp, SARS Virus
cgaatcctattaacggagagaacaa

SEQ ID NO: 60016 - DNA, 25 bp, SARS Virus
gaatcctattacaggagagaacaag

SEQ ID NO: 60017 - DNA, 25 bp, SARS Virus
aatcctattaccagagagaacaaga

SEQ ID NO: 60018 - DNA, 25 bp, SARS Virus
atcctattaccgaagagaacaagaa

SEQ ID NO: 60019 - DNA, 25 bp, SARS Virus
tcctattaccggagagaacaagaac

SEQ ID NO: 60020 - DNA, 25 bp, SARS Virus
cctattaccggaaagaacaagaacg

SEQ ID NO: 60021 - DNA, 25 bp, SARS Virus
ctattaccggagagaacaagaacga

SEQ ID NO: 60022 - DNA, 25 bp, SARS Virus
tattaccggagaaaacaagaacgag

SEQ ID NO: 60023 - DNA, 25 bp, SARS Virus
attaccggagagaacaagaacgagc

SEQ ID NO: 60024 - DNA, 25 bp, SARS Virus
ttaccggagagaacaagaacgagcg

SEQ ID NO: 60025 - DNA, 25 bp, SARS Virus
taccggagagaaaaagaacgagcgt

SEQ ID NO: 60026 - DNA, 25 bp, SARS Virus
accggagagaacaagaacgagcgtt

SEQ ID NO: 60027 - DNA, 25 bp, SARS Virus
ccggagagaacaagaacgagcgttt

SEQ ID NO: 60028 - DNA, 25 bp, SARS Virus
cggagagaacaaaaacgagcgtttg

SEQ ID NO: 60029 - DNA, 25 bp, SARS Virus
ggagagaacaagaacgagcgtttgt

SEQ ID NO: 60030 - DNA, 25 bp, SARS Virus
gagagaacaagaacgagcgtttgta

SEQ ID NO: 60031 - DNA, 25 bp, SARS Virus
agagaacaagaaagagcgtttgtat

SEQ ID NO: 60032 - DNA, 25 bp, SARS Virus
gagaacaagaacaagcgtttgtatt

SEQ ID NO: 60033 - DNA, 25 bp, SARS Virus
agaacaagaacgagcgtttgtattg

SEQ ID NO: 60034 - DNA, 25 bp, SARS Virus
gaacaagaacgaacgtttgtattgt

SEQ ID NO: 60035 - DNA, 25 bp, SARS Virus
aacaagaacgagagtttgtattgtg

SEQ ID NO: 60036 - DNA, 25 bp, SARS Virus
acaagaacgagcatttgtattgtga

SEQ ID NO: 60037 - DNA, 25 bp, SARS Virus
caagaacgagcgattgtattgtgaa

SEQ ID NO: 60038 - DNA, 25 bp, SARS Virus
aagaacgagcgtatgtattgtgaac

SEQ ID NO: 60039 - DNA, 25 bp, SARS Virus
agaacgagcgttagtattgtgaacg

SEQ ID NO: 60040 - DNA, 25 bp, SARS Virus
gaacgagcgtttatattgtgaacga

SEQ ID NO: 60041 - DNA, 25 bp, SARS Virus
aacgagcgtttgaattgtgaacgac

SEQ ID NO: 60042 - DNA, 25 bp, SARS Virus
acgagcgtttgtattgtgaacgaca

SEQ ID NO: 60043 - DNA, 25 bp, SARS Virus
cgagcgtttgtaatgtgaacgacat

SEQ ID NO: 60044 - DNA, 25 bp, SARS Virus
gagcgtttgtatagtgaacgacatt

SEQ ID NO: 60045 - DNA, 25 bp, SARS Virus
agcgtttgtattatgaacgacattg

SEQ ID NO: 60046 - DNA, 25 bp, SARS Virus
gcgtttgtattgagaacgacattga

SEQ ID NO: 60047 - DNA, 25 bp, SARS Virus
cgtttgtattgtaaacgacattgaa

SEQ ID NO: 60048 - DNA, 25 bp, SARS Virus
gtttgtattgtgaacgacattgaat

SEQ ID NO: 60049 - DNA, 25 bp, SARS Virus
tttgtattgtgaacgacattgaata

SEQ ID NO: 60050 - DNA, 25 bp, SARS Virus
ttgtattgtgaaagacattgaatag

SEQ ID NO: 60051 - DNA, 25 bp, SARS Virus
tgtattgtgaacaacattgaatagt

SEQ ID NO: 60052 - DNA, 25 bp, SARS Virus
gtattgtgaacgacattgaatagtg

SEQ ID NO: 60053 - DNA, 25 bp, SARS Virus
tattgtgaacgaaattgaatagtgt

SEQ ID NO: 60054 - DNA, 25 bp, SARS Virus
attgtgaacgacattgaatagtgtg

SEQ ID NO: 60055 - DNA, 25 bp, SARS Virus
ttgtgaacgacaatgaatagtgtgg

SEQ ID NO: 60056 - DNA, 25 bp, SARS Virus
tgtgaacgacatagaatagtgtggc

SEQ ID NO: 60057 - DNA, 25 bp, SARS Virus
gtgaacgacattaaatagtgtggca

SEQ ID NO: 60058 - DNA, 25 bp, SARS Virus
tgaacgacattgaatagtgtggcaa

SEQ ID NO: 60059 - DNA, 25 bp, SARS Virus
gaacgacattgaatagtgtggcaaa

SEQ ID NO: 60060 - DNA, 25 bp, SARS Virus
aacgacattgaaaagtgtggcaaag

SEQ ID NO: 60061 - DNA, 25 bp, SARS Virus
acgacattgaatagtgtggcaaaga

SEQ ID NO: 60062 - DNA, 25 bp, SARS Virus
cgacattgaataatgtggcaaagat

SEQ ID NO: 60063 - DNA, 25 bp, SARS Virus
gacattgaatagagtggcaaagatg

SEQ ID NO: 60064 - DNA, 25 bp, SARS Virus
acattgaatagtatggcaaagatgt

SEQ ID NO: 60065 - DNA, 25 bp, SARS Virus
cattgaatagtgaggcaaagatgtc

SEQ ID NO: 60066 - DNA, 25 bp, SARS Virus
attgaatagtgtagcaaagatgtcc

SEQ ID NO: 60067 - DNA, 25 bp, SARS Virus
ttgaatagtgtgacaaagatgtcca

SEQ ID NO: 60068 - DNA, 25 bp, SARS Virus
tgaatagtgtggaaaagatgtccaa

SEQ ID NO: 60069 - DNA, 25 bp, SARS Virus
gaatagtgtggcaaagatgtccaat

SEQ ID NO: 60070 - DNA, 25 bp, SARS Virus
aatagtgtggcaaagatgtccaatc

SEQ ID NO: 60071 - DNA, 25 bp, SARS Virus
atagtgtggcaaagatgtccaatcg

SEQ ID NO: 60072 - DNA, 25 bp, SARS Virus
tagtgtggcaaaaatgtccaatcga

SEQ ID NO: 60073 - DNA, 25 bp, SARS Virus
agtgtggcaaagatgtccaatcgat

SEQ ID NO: 60074 - DNA, 25 bp, SARS Virus
gtgtggcaaagaagtccaatcgatt

SEQ ID NO: 60075 - DNA, 25 bp, SARS Virus
tgtggcaaagatatccaatcgattg

SEQ ID NO: 60076 - DNA, 25 bp, SARS Virus
gtggcaaagatgaccaatcgattgc

SEQ ID NO: 60077 - DNA, 25 bp, SARS Virus
tggcaaagatgtacaatcgattgct

SEQ ID NO: 60078 - DNA, 25 bp, SARS Virus
ggcaaagatgtcaaatcgattgctc

SEQ ID NO: 60079 - DNA, 25 bp, SARS Virus
gcaaagatgtccaatcgattgctca

SEQ ID NO: 60080 - DNA, 25 bp, SARS Virus
caaagatgtccaatcgattgctcac

SEQ ID NO: 60081 - DNA, 25 bp, SARS Virus
aaagatgtccaaacgattgctcaca

SEQ ID NO: 60082 - DNA, 25 bp, SARS Virus
aagatgtccaatagattgctcacac

SEQ ID NO: 60083 - DNA, 25 bp, SARS Virus
agatgtccaatcaattgctcacacg

SEQ ID NO: 60084 - DNA, 25 bp, SARS Virus
gatgtccaatcgattgctcacacgc

SEQ ID NO: 60085 - DNA, 25 bp, SARS Virus
atgtccaatcgaatgctcacacgcg

SEQ ID NO: 60086 - DNA, 25 bp, SARS Virus
tgtccaatcgatagctcacacgcgt

SEQ ID NO: 60087 - DNA, 25 bp, SARS Virus
gtccaatcgattactcacacgcgtt

SEQ ID NO: 60088 - DNA, 25 bp, SARS Virus
tccaatcgattgatcacacgcgttc

SEQ ID NO: 60089 - DNA, 25 bp, SARS Virus
ccaatcgattgcacacacgcgttca

SEQ ID NO: 60090 - DNA, 25 bp, SARS Virus
caatcgattgctaacacgcgttcat

SEQ ID NO: 60091 - DNA, 25 bp, SARS Virus
aatcgattgctcacacgcgttcata

SEQ ID NO: 60092 - DNA, 25 bp, SARS Virus
atcgattgctcaaacgcgttcataa

SEQ ID NO: 60093 - DNA, 25 bp, SARS Virus
tcgattgctcacacgcgttcataat

SEQ ID NO: 60094 - DNA, 25 bp, SARS Virus
cgattgctcacaagcgttcataatt

SEQ ID NO: 60095 - DNA, 25 bp, SARS Virus
gattgctcacacacgttcataattc

SEQ ID NO: 60096 - DNA, 25 bp, SARS Virus
attgctcacacgagttcataattca

SEQ ID NO: 60097 - DNA, 25 bp, SARS Virus
ttgctcacacgcattcataattcac

SEQ ID NO: 60098 - DNA, 25 bp, SARS Virus
tgctcacacgcgatcataattcact

SEQ ID NO: 60099 - DNA, 25 bp, SARS Virus
gctcacacgcgtacataattcactc

SEQ ID NO: 60100 - DNA, 25 bp, SARS Virus
ctcacacgcgttaataattcactct

SEQ ID NO: 60101 - DNA, 25 bp, SARS Virus
tcacacgcgttcataattcactcta

SEQ ID NO: 60102 - DNA, 25 bp, SARS Virus
cacacgcgttcaaaattcactctac

SEQ ID NO: 60103 - DNA, 25 bp, SARS Virus
acacgcgttcataattcactctacc

SEQ ID NO: 60104 - DNA, 25 bp, SARS Virus
cacgcgttcataattcactctacca

SEQ ID NO: 60105 - DNA, 25 bp, SARS Virus
acgcgttcataaatcactctaccag

SEQ ID NO: 60106 - DNA, 25 bp, SARS Virus
cgcgttcataatacactctaccagt

SEQ ID NO: 60107 - DNA, 25 bp, SARS Virus
gcgttcataattaactctaccagta

SEQ ID NO: 60108 - DNA, 25 bp, SARS Virus
cgttcataattcactctaccagtac

SEQ ID NO: 60109 - DNA, 25 bp, SARS Virus
gttcataattcaatctaccagtaca

SEQ ID NO: 60110 - DNA, 25 bp, SARS Virus
ttcataattcacactaccagtacac

SEQ ID NO: 60111 - DNA, 25 bp, SARS Virus
tcataattcactataccagtacaca

SEQ ID NO: 60112 - DNA, 25 bp, SARS Virus
cataattcactcaaccagtacacac

SEQ ID NO: 60113 - DNA, 25 bp, SARS Virus
ataattcactctaccagtacacacc

SEQ ID NO: 60114 - DNA, 25 bp, SARS Virus
taattcactctaacagtacacaccg

SEQ ID NO: 60115 - DNA, 25 bp, SARS Virus
aattcactctacaagtacacaccgc

SEQ ID NO: 60116 - DNA, 25 bp, SARS Virus
attcactctaccagtacacaccgcc

SEQ ID NO: 60117 - DNA, 25 bp, SARS Virus
ttcactctaccaatacacaccgccg

SEQ ID NO: 60118 - DNA, 25 bp, SARS Virus
tcactctaccagaacacaccgccga

SEQ ID NO: 60119 - DNA, 25 bp, SARS Virus
cactctaccagtacacaccgccgag

SEQ ID NO: 60120 - DNA, 25 bp, SARS Virus
actctaccagtaaacaccgccgagt

SEQ ID NO: 60121 - DNA, 25 bp, SARS Virus
ctctaccagtacacaccgccgagtg

SEQ ID NO: 60122 - DNA, 25 bp, SARS Virus
tctaccagtacaaaccgccgagtga

SEQ ID NO: 60123 - DNA, 25 bp, SARS Virus
ctaccagtacacaccgccgagtgat

SEQ ID NO: 60124 - DNA, 25 bp, SARS Virus
taccagtacacaacgccgagtgata

SEQ ID NO: 60125 - DNA, 25 bp, SARS Virus
accagtacacacagccgagtgatat

SEQ ID NO: 60126 - DNA, 25 bp, SARS Virus
ccagtacacaccaccgagtgatata

SEQ ID NO: 60127 - DNA, 25 bp, SARS Virus
cagtacacaccgacgagtgatatac

SEQ ID NO: 60128 - DNA, 25 bp, SARS Virus
agtacacaccgcagagtgatataca

SEQ ID NO: 60129 - DNA, 25 bp, SARS Virus
gtacacaccgccaagtgatatacaa

SEQ ID NO: 60130 - DNA, 25 bp, SARS Virus
tacacaccgccgagtgatatacaat

SEQ ID NO: 60131 - DNA, 25 bp, SARS Virus
acacaccgccgaatgatatacaatt

SEQ ID NO: 60132 - DNA, 25 bp, SARS Virus
cacaccgccgagagatatacaattt

SEQ ID NO: 60133 - DNA, 25 bp, SARS Virus
acaccgccgagtaatatacaatttg

SEQ ID NO: 60134 - DNA, 25 bp, SARS Virus
caccgccgagtgatatacaatttgg

SEQ ID NO: 60135 - DNA, 25 bp, SARS Virus
accgccgagtgaaatacaatttggt

SEQ ID NO: 60136 - DNA, 25 bp, SARS Virus
ccgccgagtgatatacaatttggtc

SEQ ID NO: 60137 - DNA, 25 bp, SARS Virus
cgccgagtgataaacaatttggtcc

SEQ ID NO: 60138 - DNA, 25 bp, SARS Virus
gccgagtgatatacaatttggtcca

SEQ ID NO: 60139 - DNA, 25 bp, SARS Virus
ccgagtgatataaaatttggtccac

SEQ ID NO: 60140 - DNA, 25 bp, SARS Virus
cgagtgatatacaatttggtccacc

SEQ ID NO: 60141 - DNA, 25 bp, SARS Virus
gagtgatatacaatttggtccacct

SEQ ID NO: 60142 - DNA, 25 bp, SARS Virus
agtgatatacaaattggtccacctt

SEQ ID NO: 60143 - DNA, 25 bp, SARS Virus
gtgatatacaatatggtccaccttg

SEQ ID NO: 60144 - DNA, 25 bp, SARS Virus
tgatatacaattaggtccaccttgt

SEQ ID NO: 60145 - DNA, 25 bp, SARS Virus
gatatacaatttagtccaccttgta

SEQ ID NO: 60146 - DNA, 25 bp, SARS Virus
atatacaatttgatccaccttgtag

SEQ ID NO: 60147 - DNA, 25 bp, SARS Virus
tatacaatttggaccaccttgtagt

SEQ ID NO: 60148 - DNA, 25 bp, SARS Virus
atacaatttggtacaccttgtagta

SEQ ID NO: 60149 - DNA, 25 bp, SARS Virus
tacaatttggtcaaccttgtagtag

SEQ ID NO: 60150 - DNA, 25 bp, SARS Virus
acaatttggtccaccttgtagtagg

SEQ ID NO: 60151 - DNA, 25 bp, SARS Virus
caatttggtccaacttgtagtaggc

SEQ ID NO: 60152 - DNA, 25 bp, SARS Virus
aatttggtccacattgtagtaggcc

SEQ ID NO: 60153 - DNA, 25 bp, SARS Virus
tctgaaataatactgagttactcaa

SEQ ID NO: 60154 - DNA, 25 bp, SARS Virus
ctgaaataataccgagttactcaat

SEQ ID NO: 60155 - DNA, 25 bp, SARS Virus
tgaaataatactcagttactcaata

SEQ ID NO: 60156 - DNA, 25 bp, SARS Virus
gaaataatactgcgttactcaatac

SEQ ID NO: 60157 - DNA, 25 bp, SARS Virus
aaataatactgacttactcaatact

SEQ ID NO: 60158 - DNA, 25 bp, SARS Virus
aataatactgagctactcaatactc

SEQ ID NO: 60159 - DNA, 25 bp, SARS Virus
ataatactgagtcactcaatactcc

SEQ ID NO: 60160 - DNA, 25 bp, SARS Virus
taatactgagttcctcaatactcct

SEQ ID NO: 60161 - DNA, 25 bp, SARS Virus
aatactgagttactcaatactccta

SEQ ID NO: 60162 - DNA, 25 bp, SARS Virus
atactgagttacccaatactcctag

SEQ ID NO: 60163 - DNA, 25 bp, SARS Virus
tactgagttactcaatactcctagt

SEQ ID NO: 60164 - DNA, 25 bp, SARS Virus
actgagttactccatactcctagtt

SEQ ID NO: 60165 - DNA, 25 bp, SARS Virus
ctgagttactcactactcctagttc

SEQ ID NO: 60166 - DNA, 25 bp, SARS Virus
tgagttactcaacactcctagttct

SEQ ID NO: 60167 - DNA, 25 bp, SARS Virus
gagttactcaatcctcctagttcta

SEQ ID NO: 60168 - DNA, 25 bp, SARS Virus
agttactcaatactcctagttctac

SEQ ID NO: 60169 - DNA, 25 bp, SARS Virus
gttactcaatacccctagttctacg

SEQ ID NO: 60170 - DNA, 25 bp, SARS Virus
ttactcaatactcctagttctacgt

SEQ ID NO: 60171 - DNA, 25 bp, SARS Virus
tactcaatactcctagttctacgtg

SEQ ID NO: 60172 - DNA, 25 bp, SARS Virus
actcaatactcccagttctacgtga

SEQ ID NO: 60173 - DNA, 25 bp, SARS Virus
ctcaatactcctcgttctacgtgaa

SEQ ID NO: 60174 - DNA, 25 bp, SARS Virus
tcaatactcctacttctacgtgaaa

SEQ ID NO: 60175 - DNA, 25 bp, SARS Virus
caatactcctagctctacgtgaaaa

SEQ ID NO: 60176 - DNA, 25 bp, SARS Virus
aatactcctagtcctacgtgaaaag

SEQ ID NO: 60177 - DNA, 25 bp, SARS Virus
atactcctagttctacgtgaaaagc

SEQ ID NO: 60178 - DNA, 25 bp, SARS Virus
tactcctagttccacgtgaaaagcg

SEQ ID NO: 60179 - DNA, 25 bp, SARS Virus
actcctagttctccgtgaaaagcgc

SEQ ID NO: 60180 - DNA, 25 bp, SARS Virus
ctcctagttctacgtgaaaagcgca

SEQ ID NO: 60181 - DNA, 25 bp, SARS Virus
tcctagttctacctgaaaagcgcat

SEQ ID NO: 60182 - DNA, 25 bp, SARS Virus
cctagttctacgcgaaaagcgcata

SEQ ID NO: 60183 - DNA, 25 bp, SARS Virus
ctagttctacgtcaaaagcgcatat

SEQ ID NO: 60184 - DNA, 25 bp, SARS Virus
tagttctacgtgcaaagcgcatatg

SEQ ID NO: 60185 - DNA, 25 bp, SARS Virus
agttctacgtgacaagcgcatatga

SEQ ID NO: 60186 - DNA, 25 bp, SARS Virus
gttctacgtgaacagcgcatatgat

SEQ ID NO: 60187 - DNA, 25 bp, SARS Virus
ttctacgtgaaacgcgcatatgatt

SEQ ID NO: 60188 - DNA, 25 bp, SARS Virus
tctacgtgaaaaccgcatatgattc

SEQ ID NO: 60189 - DNA, 25 bp, SARS Virus
ctacgtgaaaagcgcatatgattcg

SEQ ID NO: 60190 - DNA, 25 bp, SARS Virus
tacgtgaaaagcccatatgattcgc

SEQ ID NO: 60191 - DNA, 25 bp, SARS Virus
acgtgaaaagcgcatatgattcgca

SEQ ID NO: 60192 - DNA, 25 bp, SARS Virus
cgtgaaaagcgcctatgattcgcat

SEQ ID NO: 60193 - DNA, 25 bp, SARS Virus
gtgaaaagcgcacatgattcgcatt

SEQ ID NO: 60194 - DNA, 25 bp, SARS Virus
tgaaaagcgcatctgattcgcatta

SEQ ID NO: 60195 - DNA, 25 bp, SARS Virus
gaaaagcgcatacgattcgcattac

SEQ ID NO: 60196 - DNA, 25 bp, SARS Virus
aaaagcgcatatcattcgcattaca

SEQ ID NO: 60197 - DNA, 25 bp, SARS Virus
aaagcgcatatgcttcgcattacag

SEQ ID NO: 60198 - DNA, 25 bp, SARS Virus
aagcgcatatgactcgcattacagt

SEQ ID NO: 60199 - DNA, 25 bp, SARS Virus
agcgcatatgatccgcattacagta

SEQ ID NO: 60200 - DNA, 25 bp, SARS Virus
gcgcatatgattcgcattacagtag

SEQ ID NO: 60201 - DNA, 25 bp, SARS Virus
cgcatatgattcccattacagtagg

SEQ ID NO: 60202 - DNA, 25 bp, SARS Virus
gcatatgattcgcattacagtaggg

SEQ ID NO: 60203 - DNA, 25 bp, SARS Virus
catatgattcgccttacagtaggga

SEQ ID NO: 60204 - DNA, 25 bp, SARS Virus
atatgattcgcactacagtagggat

SEQ ID NO: 60205 - DNA, 25 bp, SARS Virus
tatgattcgcatcacagtagggatg

SEQ ID NO: 60206 - DNA, 25 bp, SARS Virus
atgattcgcattccagtagggatga

SEQ ID NO: 60207 - DNA, 25 bp, SARS Virus
tgattcgcattacagtagggatgat

SEQ ID NO: 60208 - DNA, 25 bp, SARS Virus
gattcgcattaccgtagggatgata

SEQ ID NO: 60209 - DNA, 25 bp, SARS Virus
attcgcattacactagggatgatat

SEQ ID NO: 60210 - DNA, 25 bp, SARS Virus
ttcgcattacagcagggatgatatt

SEQ ID NO: 60211 - DNA, 25 bp, SARS Virus
tcgcattacagtcgggatgatattg

SEQ ID NO: 60212 - DNA, 25 bp, SARS Virus
cgcattacagtacggatgatattga

SEQ ID NO: 60213 - DNA, 25 bp, SARS Virus
gcattacagtagcgatgatattgag

SEQ ID NO: 60214 - DNA, 25 bp, SARS Virus
cattacagtaggcatgatattgagt

SEQ ID NO: 60215 - DNA, 25 bp, SARS Virus
attacagtagggctgatattgagtt

SEQ ID NO: 60216 - DNA, 25 bp, SARS Virus
ttacagtagggacgatattgagttt

SEQ ID NO: 60217 - DNA, 25 bp, SARS Virus
tacagtagggatcatattgagttta

SEQ ID NO: 60218 - DNA, 25 bp, SARS Virus
acagtagggatgctattgagtttac

SEQ ID NO: 60219 - DNA, 25 bp, SARS Virus
cagtagggatgacattgagtttact

SEQ ID NO: 60220 - DNA, 25 bp, SARS Virus
agtagggatgatcttgagtttactt

SEQ ID NO: 60221 - DNA, 25 bp, SARS Virus
gtagggatgatactgagtttactta

SEQ ID NO: 60222 - DNA, 25 bp, SARS Virus
tagggatgatatcgagtttacttag

SEQ ID NO: 60223 - DNA, 25 bp, SARS Virus
agggatgatattcagtttacttaga

SEQ ID NO: 60224 - DNA, 25 bp, SARS Virus
gggatgatattgcgtttacttagaa

SEQ ID NO: 60225 - DNA, 25 bp, SARS Virus
ggatgatattgactttacttagaat

SEQ ID NO: 60226 - DNA, 25 bp, SARS Virus
gatgatattgagcttacttagaatt

SEQ ID NO: 60227 - DNA, 25 bp, SARS Virus
atgatattgagtctacttagaattc

SEQ ID NO: 60228 - DNA, 25 bp, SARS Virus
tgatattgagttcacttagaattca

SEQ ID NO: 60229 - DNA, 25 bp, SARS Virus
gatattgagtttccttagaattcat

SEQ ID NO: 60230 - DNA, 25 bp, SARS Virus
atattgagtttacttagaattcata

SEQ ID NO: 60231 - DNA, 25 bp, SARS Virus
tattgagtttacctagaattcatac

SEQ ID NO: 60232 - DNA, 25 bp, SARS Virus
attgagtttactcagaattcatacg

SEQ ID NO: 60233 - DNA, 25 bp, SARS Virus
ttgagtttacttcgaattcatacgg

SEQ ID NO: 60234 - DNA, 25 bp, SARS Virus
tgagtttacttacaattcatacggt

SEQ ID NO: 60235 - DNA, 25 bp, SARS Virus
gagtttacttagcattcatacggta

SEQ ID NO: 60236 - DNA, 25 bp, SARS Virus
agtttacttagacttcatacggtaa

SEQ ID NO: 60237 - DNA, 25 bp, SARS Virus
gtttacttagaactcatacggtaat

SEQ ID NO: 60238 - DNA, 25 bp, SARS Virus
tttacttagaatccatacggtaatc

SEQ ID NO: 60239 - DNA, 25 bp, SARS Virus
ttacttagaattcatacggtaatca

SEQ ID NO: 60240 - DNA, 25 bp, SARS Virus
tacttagaattcctacggtaatcac

SEQ ID NO: 60241 - DNA, 25 bp, SARS Virus
acttagaattcacacggtaatcacg

SEQ ID NO: 60242 - DNA, 25 bp, SARS Virus
cttagaattcatccggtaatcacgt

SEQ ID NO: 60243 - DNA, 25 bp, SARS Virus
ttagaattcatacggtaatcacgtt

SEQ ID NO: 60244 - DNA, 25 bp, SARS Virus
tagaattcataccgtaatcacgttt

SEQ ID NO: 60245 - DNA, 25 bp, SARS Virus
agaattcatacgctaatcacgtttc

SEQ ID NO: 60246 - DNA, 25 bp, SARS Virus
gaattcatacggcaatcacgtttct

SEQ ID NO: 60247 - DNA, 25 bp, SARS Virus
aattcatacggtcatcacgtttctt

SEQ ID NO: 60248 - DNA, 25 bp, SARS Virus
attcatacggtactcacgtttctta

SEQ ID NO: 60249 - DNA, 25 bp, SARS Virus
ttcatacggtaaccacgtttcttat

SEQ ID NO: 60250 - DNA, 25 bp, SARS Virus
tcatacggtaatcacgtttcttatc

SEQ ID NO: 60251 - DNA, 25 bp, SARS Virus
catacggtaatcccgtttcttatct

SEQ ID NO: 60252 - DNA, 25 bp, SARS Virus
atacggtaatcacgtttcttatctc

SEQ ID NO: 60253 - DNA, 25 bp, SARS Virus
tacggtaatcacctttcttatctcg

SEQ ID NO: 60254 - DNA, 25 bp, SARS Virus
acggtaatcacgcttcttatctcga

SEQ ID NO: 60255 - DNA, 25 bp, SARS Virus
cggtaatcacgtctcttatctcgag

SEQ ID NO: 60256 - DNA, 25 bp, SARS Virus
ggtaatcacgttccttatctcgagc

SEQ ID NO: 60257 - DNA, 25 bp, SARS Virus
gtaatcacgtttcttatctcgagcg

SEQ ID NO: 60258 - DNA, 25 bp, SARS Virus
taatcacgtttcctatctcgagcgt

SEQ ID NO: 60259 - DNA, 25 bp, SARS Virus
aatcacgtttctcatctcgagcgtg

SEQ ID NO: 60260 - DNA, 25 bp, SARS Virus
atcacgtttcttctctcgagcgtgg

SEQ ID NO: 60261 - DNA, 25 bp, SARS Virus
tcacgtttcttacctcgagcgtggc

SEQ ID NO: 60262 - DNA, 25 bp, SARS Virus
cacgtttcttatctcgagcgtggca

SEQ ID NO: 60263 - DNA, 25 bp, SARS Virus
acgtttcttatcccgagcgtggcat

SEQ ID NO: 60264 - DNA, 25 bp, SARS Virus
cgtttcttatctcgagcgtggcatc

SEQ ID NO: 60265 - DNA, 25 bp, SARS Virus
gtttcttatctccagcgtggcatcg

SEQ ID NO: 60266 - DNA, 25 bp, SARS Virus
tttcttatctcgcgcgtggcatcga

SEQ ID NO: 60267 - DNA, 25 bp, SARS Virus
ttcttatctcgaccgtggcatcgac

SEQ ID NO: 60268 - DNA, 25 bp, SARS Virus
tcttatctcgagcgtggcatcgacc

SEQ ID NO: 60269 - DNA, 25 bp, SARS Virus
cttatctcgagcctggcatcgacca

SEQ ID NO: 60270 - DNA, 25 bp, SARS Virus
ttatctcgagcgcggcatcgaccac

SEQ ID NO: 60271 - DNA, 25 bp, SARS Virus
tatctcgagcgtcgcatcgaccaca

SEQ ID NO: 60272 - DNA, 25 bp, SARS Virus
atctcgagcgtgccatcgaccacag

SEQ ID NO: 60273 - DNA, 25 bp, SARS Virus
tctcgagcgtggcatcgaccacaga

SEQ ID NO: 60274 - DNA, 25 bp, SARS Virus
ctcgagcgtggcctcgaccacagag

SEQ ID NO: 60275 - DNA, 25 bp, SARS Virus
tcgagcgtggcaccgaccacagaga

SEQ ID NO: 60276 - DNA, 25 bp, SARS Virus
cgagcgtggcatcgaccacagagat

SEQ ID NO: 60277 - DNA, 25 bp, SARS Virus
gagcgtggcatccaccacagagata

SEQ ID NO: 60278 - DNA, 25 bp, SARS Virus
agcgtggcatcgcccacagagatag

SEQ ID NO: 60279 - DNA, 25 bp, SARS Virus
gcgtggcatcgaccacagagataga

SEQ ID NO: 60280 - DNA, 25 bp, SARS Virus
cgtggcatcgaccacagagatagac

SEQ ID NO: 60281 - DNA, 25 bp, SARS Virus
gtggcatcgaccccagagatagaca

SEQ ID NO: 60282 - DNA, 25 bp, SARS Virus
tggcatcgaccacagagatagacat

SEQ ID NO: 60283 - DNA, 25 bp, SARS Virus
ggcatcgaccaccgagatagacatc

SEQ ID NO: 60284 - DNA, 25 bp, SARS Virus
gcatcgaccacacagatagacatca

SEQ ID NO: 60285 - DNA, 25 bp, SARS Virus
catcgaccacagcgatagacatcat

SEQ ID NO: 60286 - DNA, 25 bp, SARS Virus
atcgaccacagacatagacatcatg

SEQ ID NO: 60287 - DNA, 25 bp, SARS Virus
tcgaccacagagctagacatcatga

SEQ ID NO: 60288 - DNA, 25 bp, SARS Virus
cgaccacagagacagacatcatgat

SEQ ID NO: 60289 - DNA, 25 bp, SARS Virus
gaccacagagatcgacatcatgata

SEQ ID NO: 60290 - DNA, 25 bp, SARS Virus
accacagagatacacatcatgatac

SEQ ID NO: 60291 - DNA, 25 bp, SARS Virus
ccacagagatagccatcatgatact

SEQ ID NO: 60292 - DNA, 25 bp, SARS Virus
cacagagatagacatcatgatactg

SEQ ID NO: 60293 - DNA, 25 bp, SARS Virus
acagagatagacctcatgatactgt

SEQ ID NO: 60294 - DNA, 25 bp, SARS Virus
cagagatagacaccatgatactgtt

SEQ ID NO: 60295 - DNA, 25 bp, SARS Virus
agagatagacatcatgatactgttt

SEQ ID NO: 60296 - DNA, 25 bp, SARS Virus
gagatagacatcctgatactgttta

SEQ ID NO: 60297 - DNA, 25 bp, SARS Virus
agatagacatcacgatactgtttat

SEQ ID NO: 60298 - DNA, 25 bp, SARS Virus
gatagacatcatcatactgtttatc

SEQ ID NO: 60299 - DNA, 25 bp, SARS Virus
atagacatcatgctactgtttatct

SEQ ID NO: 60300 - DNA, 25 bp, SARS Virus
tagacatcatgacactgtttatctg

SEQ ID NO: 60301 - DNA, 25 bp, SARS Virus
agacatcatgatcctgtttatctgt

SEQ ID NO: 60302 - DNA, 25 bp, SARS Virus
gacatcatgatactgtttatctgtc

SEQ ID NO: 60303 - DNA, 25 bp, SARS Virus
acatcatgataccgtttatctgtca

SEQ ID NO: 60304 - DNA, 25 bp, SARS Virus
catcatgatactctttatctgtcaa

SEQ ID NO: 60305 - DNA, 25 bp, SARS Virus
atcatgatactgcttatctgtcaaa

SEQ ID NO: 60306 - DNA, 25 bp, SARS Virus
tcatgatactgtctatctgtcaaag

SEQ ID NO: 60307 - DNA, 25 bp, SARS Virus
catgatactgttcatctgtcaaagt

SEQ ID NO: 60308 - DNA, 25 bp, SARS Virus
atgatactgtttctctgtcaaagta

SEQ ID NO: 60309 - DNA, 25 bp, SARS Virus
tgatactgtttacctgtcaaagtag

SEQ ID NO: 60310 - DNA, 25 bp, SARS Virus
gatactgtttatctgtcaaagtagt

SEQ ID NO: 60311 - DNA, 25 bp, SARS Virus
atactgtttatccgtcaaagtagtc

SEQ ID NO: 60312 - DNA, 25 bp, SARS Virus
tactgtttatctctcaaagtagtct

SEQ ID NO: 60313 - DNA, 25 bp, SARS Virus
actgtttatctgccaaagtagtctt

SEQ ID NO: 60314 - DNA, 25 bp, SARS Virus
ctgtttatctgtcaaagtagtcttt

SEQ ID NO: 60315 - DNA, 25 bp, SARS Virus
tgtttatctgtccaagtagtcttta

SEQ ID NO: 60316 - DNA, 25 bp, SARS Virus
gtttatctgtcacagtagtctttaa

SEQ ID NO: 60317 - DNA, 25 bp, SARS Virus
tttatctgtcaacgtagtctttaat

SEQ ID NO: 60318 - DNA, 25 bp, SARS Virus
ttatctgtcaaactagtctttaata

SEQ ID NO: 60319 - DNA, 25 bp, SARS Virus
tatctgtcaaagcagtctttaataa

SEQ ID NO: 60320 - DNA, 25 bp, SARS Virus
atctgtcaaagtcgtctttaataac

SEQ ID NO: 60321 - DNA, 25 bp, SARS Virus
tctgtcaaagtactctttaataact

SEQ ID NO: 60322 - DNA, 25 bp, SARS Virus
ctgtcaaagtagcctttaataactt

SEQ ID NO: 60323 - DNA, 25 bp, SARS Virus
tgtcaaagtagtctttaataacttc

SEQ ID NO: 60324 - DNA, 25 bp, SARS Virus
gtcaaagtagtccttaataacttca

SEQ ID NO: 60325 - DNA, 25 bp, SARS Virus
tcaaagtagtctctaataacttcag

SEQ ID NO: 60326 - DNA, 25 bp, SARS Virus
caaagtagtcttcaataacttcagt

SEQ ID NO: 60327 - DNA, 25 bp, SARS Virus
aaagtagtctttcataacttcagtt

SEQ ID NO: 60328 - DNA, 25 bp, SARS Virus
aagtagtctttactaacttcagtta

SEQ ID NO: 60329 - DNA, 25 bp, SARS Virus
agtagtctttaacaacttcagttat

SEQ ID NO: 60330 - DNA, 25 bp, SARS Virus
gtagtctttaatcacttcagttatc

SEQ ID NO: 60331 - DNA, 25 bp, SARS Virus
tagtctttaataccttcagttatcg

SEQ ID NO: 60332 - DNA, 25 bp, SARS Virus
agtctttaataacttcagttatcgg

SEQ ID NO: 60333 - DNA, 25 bp, SARS Virus
gtctttaataacctcagttatcggc

SEQ ID NO: 60334 - DNA, 25 bp, SARS Virus
tctttaataactccagttatcggcg

SEQ ID NO: 60335 - DNA, 25 bp, SARS Virus
ctttaataacttcagttatcggcgg

SEQ ID NO: 60336 - DNA, 25 bp, SARS Virus
tttaataacttccgttatcggcggt

SEQ ID NO: 60337 - DNA, 25 bp, SARS Virus
ttaataacttcacttatcggcggtg

SEQ ID NO: 60338 - DNA, 25 bp, SARS Virus
taataacttcagctatcggcggtga

SEQ ID NO: 60339 - DNA, 25 bp, SARS Virus
aataacttcagtcatcggcggtgat

SEQ ID NO: 60340 - DNA, 25 bp, SARS Virus
ataacttcagttctcggcggtgatc

SEQ ID NO: 60341 - DNA, 25 bp, SARS Virus
taacttcagttaccggcggtgatct

SEQ ID NO: 60342 - DNA, 25 bp, SARS Virus
aacttcagttatcggcggtgatctc

SEQ ID NO: 60343 - DNA, 25 bp, SARS Virus
acttcagttatccgcggtgatctcc

SEQ ID NO: 60344 - DNA, 25 bp, SARS Virus
cttcagttatcgccggtgatctcct

SEQ ID NO: 60345 - DNA, 25 bp, SARS Virus
ttcagttatcggcggtgatctcctc

SEQ ID NO: 60346 - DNA, 25 bp, SARS Virus
tcagttatcggccgtgatctcctcg

SEQ ID NO: 60347 - DNA, 25 bp, SARS Virus
cagttatcggcgctgatctcctcga

SEQ ID NO: 60348 - DNA, 25 bp, SARS Virus
agttatcggcggcgatctcctcgat

SEQ ID NO: 60349 - DNA, 25 bp, SARS Virus
gttatcggcggtcatctcctcgatg

SEQ ID NO: 60350 - DNA, 25 bp, SARS Virus
ttatcggcggtgctctcctcgatga

SEQ ID NO: 60351 - DNA, 25 bp, SARS Virus
tatcggcggtgacctcctcgatgac

SEQ ID NO: 60352 - DNA, 25 bp, SARS Virus
atcggcggtgatctcctcgatgaca

SEQ ID NO: 60353 - DNA, 25 bp, SARS Virus
tcggcggtgatcccctcgatgacac

SEQ ID NO: 60354 - DNA, 25 bp, SARS Virus
cggcggtgatctcctcgatgacacc

SEQ ID NO: 60355 - DNA, 25 bp, SARS Virus
ggcggtgatctcctcgatgacacca

SEQ ID NO: 60356 - DNA, 25 bp, SARS Virus
gcggtgatctccccgatgacaccat

SEQ ID NO: 60357 - DNA, 25 bp, SARS Virus
cggtgatctcctcgatgacaccatt

SEQ ID NO: 60358 - DNA, 25 bp, SARS Virus
ggtgatctcctccatgacaccatta

SEQ ID NO: 60359 - DNA, 25 bp, SARS Virus
gtgatctcctcgctgacaccattaa

SEQ ID NO: 60360 - DNA, 25 bp, SARS Virus
tgatctcctcgacgacaccattaac

SEQ ID NO: 60361 - DNA, 25 bp, SARS Virus
gatctcctcgatcacaccattaacc

SEQ ID NO: 60362 - DNA, 25 bp, SARS Virus
atctcctcgatgccaccattaacct

SEQ ID NO: 60363 - DNA, 25 bp, SARS Virus
tctcctcgatgacaccattaacctt

SEQ ID NO: 60364 - DNA, 25 bp, SARS Virus
ctcctcgatgaccccattaaccttg

SEQ ID NO: 60365 - DNA, 25 bp, SARS Virus
tcctcgatgacaccattaaccttgt

SEQ ID NO: 60366 - DNA, 25 bp, SARS Virus
cctcgatgacaccattaaccttgtt

SEQ ID NO: 60367 - DNA, 25 bp, SARS Virus
ctcgatgacacccttaaccttgttc

SEQ ID NO: 60368 - DNA, 25 bp, SARS Virus
tcgatgacaccactaaccttgttcg

SEQ ID NO: 60369 - DNA, 25 bp, SARS Virus
cgatgacaccatcaaccttgttcgt

SEQ ID NO: 60370 - DNA, 25 bp, SARS Virus
gatgacaccattcaccttgttcgtt

SEQ ID NO: 60371 - DNA, 25 bp, SARS Virus
atgacaccattacccttgttcgttc

SEQ ID NO: 60372 - DNA, 25 bp, SARS Virus
tgacaccattaaccttgttcgttca

SEQ ID NO: 60373 - DNA, 25 bp, SARS Virus
gacaccattaaccttgttcgttcaa

SEQ ID NO: 60374 - DNA, 25 bp, SARS Virus
acaccattaaccctgttcgttcaaa

SEQ ID NO: 60375 - DNA, 25 bp, SARS Virus
caccattaacctcgttcgttcaaaa

SEQ ID NO: 60376 - DNA, 25 bp, SARS Virus
accattaaccttcttcgttcaaaat

SEQ ID NO: 60377 - DNA, 25 bp, SARS Virus
ccattaaccttgctcgttcaaaatg

SEQ ID NO: 60378 - DNA, 25 bp, SARS Virus
cattaaccttgtccgttcaaaatgc

SEQ ID NO: 60379 - DNA, 25 bp, SARS Virus
attaaccttgttcgttcaaaatgcc

SEQ ID NO: 60380 - DNA, 25 bp, SARS Virus
ttaaccttgttccttcaaaatgcca

SEQ ID NO: 60381 - DNA, 25 bp, SARS Virus
taaccttgttcgctcaaaatgccac

SEQ ID NO: 60382 - DNA, 25 bp, SARS Virus
aaccttgttcgtccaaaatgccacc

SEQ ID NO: 60383 - DNA, 25 bp, SARS Virus
accttgttcgttcaaaatgccaccg

SEQ ID NO: 60384 - DNA, 25 bp, SARS Virus
ccttgttcgttccaaatgccaccga

SEQ ID NO: 60385 - DNA, 25 bp, SARS Virus
cttgttcgttcacaatgccaccgac

SEQ ID NO: 60386 - DNA, 25 bp, SARS Virus
ttgttcgttcaacatgccaccgacc

SEQ ID NO: 60387 - DNA, 25 bp, SARS Virus
tgttcgttcaaactgccaccgaccg

SEQ ID NO: 60388 - DNA, 25 bp, SARS Virus
gttcgttcaaaacgccaccgaccgt

SEQ ID NO: 60389 - DNA, 25 bp, SARS Virus
ttcgttcaaaatcccaccgaccgta

SEQ ID NO: 60390 - DNA, 25 bp, SARS Virus
tcgttcaaaatgccaccgaccgtat

SEQ ID NO: 60391 - DNA, 25 bp, SARS Virus
cgttcaaaatgccaccgaccgtatt

SEQ ID NO: 60392 - DNA, 25 bp, SARS Virus
gttcaaaatgcccccgaccgtatta

SEQ ID NO: 60393 - DNA, 25 bp, SARS Virus
ttcaaaatgccaccgaccgtattat

SEQ ID NO: 60394 - DNA, 25 bp, SARS Virus
tcaaaatgccaccgaccgtattata

SEQ ID NO: 60395 - DNA, 25 bp, SARS Virus
caaaatgccacccaccgtattatac

SEQ ID NO: 60396 - DNA, 25 bp, SARS Virus
aaaatgccaccgcccgtattataca

SEQ ID NO: 60397 - DNA, 25 bp, SARS Virus
aaatgccaccgaccgtattatacaa

SEQ ID NO: 60398 - DNA, 25 bp, SARS Virus
aatgccaccgaccgtattatacaat

SEQ ID NO: 60399 - DNA, 25 bp, SARS Virus
atgccaccgaccctattatacaatt

SEQ ID NO: 60400 - DNA, 25 bp, SARS Virus
tgccaccgaccgcattatacaattt

SEQ ID NO: 60401 - DNA, 25 bp, SARS Virus
gccaccgaccgtcttatacaatttt

SEQ ID NO: 60402 - DNA, 25 bp, SARS Virus
ccaccgaccgtactatacaattttt

SEQ ID NO: 60403 - DNA, 25 bp, SARS Virus
caccgaccgtatcatacaatttttg

SEQ ID NO: 60404 - DNA, 25 bp, SARS Virus
accgaccgtattctacaatttttga

SEQ ID NO: 60405 - DNA, 25 bp, SARS Virus
ccgaccgtattacacaatttttgac

SEQ ID NO: 60406 - DNA, 25 bp, SARS Virus
cgaccgtattatccaatttttgaca

SEQ ID NO: 60407 - DNA, 25 bp, SARS Virus
gaccgtattatacaatttttgacaa

SEQ ID NO: 60408 - DNA, 25 bp, SARS Virus
accgtattataccatttttgacaaa

SEQ ID NO: 60409 - DNA, 25 bp, SARS Virus
ccgtattatacactttttgacaaat

SEQ ID NO: 60410 - DNA, 25 bp, SARS Virus
cgtattatacaacttttgacaaatg

SEQ ID NO: 60411 - DNA, 25 bp, SARS Virus
gtattatacaatctttgacaaatgt

SEQ ID NO: 60412 - DNA, 25 bp, SARS Virus
tattatacaattcttgacaaatgtc

SEQ ID NO: 60413 - DNA, 25 bp, SARS Virus
attatacaatttctgacaaatgtca

SEQ ID NO: 60414 - DNA, 25 bp, SARS Virus
ttatacaattttcgacaaatgtcac

SEQ ID NO: 60415 - DNA, 25 bp, SARS Virus
tatacaatttttcacaaatgtcact

SEQ ID NO: 60416 - DNA, 25 bp, SARS Virus
atacaatttttgccaaatgtcacta

SEQ ID NO: 60417 - DNA, 25 bp, SARS Virus
tacaatttttgacaaatgtcactac

SEQ ID NO: 60418 - DNA, 25 bp, SARS Virus
acaatttttgaccaatgtcactaca

SEQ ID NO: 60419 - DNA, 25 bp, SARS Virus
caatttttgacacatgtcactacat

SEQ ID NO: 60420 - DNA, 25 bp, SARS Virus
aatttttgacaactgtcactacatc

SEQ ID NO: 60421 - DNA, 25 bp, SARS Virus
atttttgacaaacgtcactacatct

SEQ ID NO: 60422 - DNA, 25 bp, SARS Virus
tttttgacaaatctcactacatctt

SEQ ID NO: 60423 - DNA, 25 bp, SARS Virus
ttttgacaaatgccactacatcttt

SEQ ID NO: 60424 - DNA, 25 bp, SARS Virus
tttgacaaatgtcactacatctttg

SEQ ID NO: 60425 - DNA, 25 bp, SARS Virus
ttgacaaatgtccctacatctttga

SEQ ID NO: 60426 - DNA, 25 bp, SARS Virus
tgacaaatgtcactacatctttgag

SEQ ID NO: 60427 - DNA, 25 bp, SARS Virus
gacaaatgtcaccacatctttgagg

SEQ ID NO: 60428 - DNA, 25 bp, SARS Virus
acaaatgtcactccatctttgaggt

SEQ ID NO: 60429 - DNA, 25 bp, SARS Virus
caaatgtcactacatctttgaggtg

SEQ ID NO: 60430 - DNA, 25 bp, SARS Virus
aaatgtcactacctctttgaggtgt

SEQ ID NO: 60431 - DNA, 25 bp, SARS Virus
aatgtcactacacctttgaggtgtg

SEQ ID NO: 60432 - DNA, 25 bp, SARS Virus
atgtcactacatctttgaggtgtgg

SEQ ID NO: 60433 - DNA, 25 bp, SARS Virus
tgtcactacatccttgaggtgtgga

SEQ ID NO: 60434 - DNA, 25 bp, SARS Virus
gtcactacatctctgaggtgtggaa

SEQ ID NO: 60435 - DNA, 25 bp, SARS Virus
tcactacatcttcgaggtgtggaat

SEQ ID NO: 60436 - DNA, 25 bp, SARS Virus
cactacatctttcaggtgtggaata

SEQ ID NO: 60437 - DNA, 25 bp, SARS Virus
actacatctttgcggtgtggaatac

SEQ ID NO: 60438 - DNA, 25 bp, SARS Virus
ctacatctttgacgtgtggaatacc

SEQ ID NO: 60439 - DNA, 25 bp, SARS Virus
tacatctttgagctgtggaataccc

SEQ ID NO: 60440 - DNA, 25 bp, SARS Virus
acatctttgaggcgtggaataccca

SEQ ID NO: 60441 - DNA, 25 bp, SARS Virus
catctttgaggtctggaatacccaa

SEQ ID NO: 60442 - DNA, 25 bp, SARS Virus
atctttgaggtgcggaatacccaac

SEQ ID NO: 60443 - DNA, 25 bp, SARS Virus
tctttgaggtgtcgaatacccaacc

SEQ ID NO: 60444 - DNA, 25 bp, SARS Virus
ctttgaggtgtgcaatacccaaccc

SEQ ID NO: 60445 - DNA, 25 bp, SARS Virus
tttgaggtgtggcatacccaaccct

SEQ ID NO: 60446 - DNA, 25 bp, SARS Virus
ttgaggtgtggactacccaacccta

SEQ ID NO: 60447 - DNA, 25 bp, SARS Virus
tgaggtgtggaacacccaaccctaa

SEQ ID NO: 60448 - DNA, 25 bp, SARS Virus
gaggtgtggaatccccaaccctaat

SEQ ID NO: 60449 - DNA, 25 bp, SARS Virus
aggtgtggaatacccaaccctaata

SEQ ID NO: 60450 - DNA, 25 bp, SARS Virus
ggtgtggaatacccaaccctaatag

SEQ ID NO: 60451 - DNA, 25 bp, SARS Virus
gtgtggaatacccaaccctaatagg

SEQ ID NO: 60452 - DNA, 25 bp, SARS Virus
tgtggaataccccaccctaataggt

SEQ ID NO: 60453 - DNA, 25 bp, SARS Virus
gtggaatacccacccctaataggtt

SEQ ID NO: 60454 - DNA, 25 bp, SARS Virus
tggaatacccaaccctaataggttt

SEQ ID NO: 60455 - DNA, 25 bp, SARS Virus
ggaatacccaaccctaataggtttt

SEQ ID NO: 60456 - DNA, 25 bp, SARS Virus
gaatacccaaccctaataggtttta

SEQ ID NO: 60457 - DNA, 25 bp, SARS Virus
aatacccaaccccaataggttttac

SEQ ID NO: 60458 - DNA, 25 bp, SARS Virus
atacccaaccctcataggttttaca

SEQ ID NO: 60459 - DNA, 25 bp, SARS Virus
tacccaaccctactaggttttacac

SEQ ID NO: 60460 - DNA, 25 bp, SARS Virus
acccaaccctaacaggttttacact

SEQ ID NO: 60461 - DNA, 25 bp, SARS Virus
cccaaccctaatcggttttacactg

SEQ ID NO: 60462 - DNA, 25 bp, SARS Virus
ccaaccctaatacgttttacactgt

SEQ ID NO: 60463 - DNA, 25 bp, SARS Virus
caaccctaatagcttttacactgtc

SEQ ID NO: 60464 - DNA, 25 bp, SARS Virus
aaccctaataggctttacactgtct

SEQ ID NO: 60465 - DNA, 25 bp, SARS Virus
accctaataggtcttacactgtctc

SEQ ID NO: 60466 - DNA, 25 bp, SARS Virus
ccctaataggttctacactgtctcg

SEQ ID NO: 60467 - DNA, 25 bp, SARS Virus
cctaataggtttcacactgtctcgg

SEQ ID NO: 60468 - DNA, 25 bp, SARS Virus
ctaataggttttccactgtctcggt

SEQ ID NO: 60469 - DNA, 25 bp, SARS Virus
taataggttttacactgtctcggta

SEQ ID NO: 60470 - DNA, 25 bp, SARS Virus
aataggttttaccctgtctcggtac

SEQ ID NO: 60471 - DNA, 25 bp, SARS Virus
ataggttttacactgtctcggtacg

SEQ ID NO: 60472 - DNA, 25 bp, SARS Virus
taggttttacaccgtctcggtacgg

SEQ ID NO: 60473 - DNA, 25 bp, SARS Virus
aggttttacactctctcggtacgga

SEQ ID NO: 60474 - DNA, 25 bp, SARS Virus
ggttttacactgcctcggtacggat

SEQ ID NO: 60475 - DNA, 25 bp, SARS Virus
gttttacactgtctcggtacggatt

SEQ ID NO: 60476 - DNA, 25 bp, SARS Virus
ttttacactgtcccggtacggattg

SEQ ID NO: 60477 - DNA, 25 bp, SARS Virus
tttacactgtctcggtacggattgt

SEQ ID NO: 60478 - DNA, 25 bp, SARS Virus
ttacactgtctccgtacggattgta

SEQ ID NO: 60479 - DNA, 25 bp, SARS Virus
tacactgtctcgctacggattgtac

SEQ ID NO: 60480 - DNA, 25 bp, SARS Virus
acactgtctcggcacggattgtacg

SEQ ID NO: 60481 - DNA, 25 bp, SARS Virus
cactgtctcggtccggattgtacga

SEQ ID NO: 60482 - DNA, 25 bp, SARS Virus
actgtctcggtacggattgtacgaa

SEQ ID NO: 60483 - DNA, 25 bp, SARS Virus
ctgtctcggtaccgattgtacgaat

SEQ ID NO: 60484 - DNA, 25 bp, SARS Virus
tgtctcggtacgcattgtacgaatc

SEQ ID NO: 60485 - DNA, 25 bp, SARS Virus
gtctcggtacggcttgtacgaatcc

SEQ ID NO: 60486 - DNA, 25 bp, SARS Virus
tctcggtacggactgtacgaatcct

SEQ ID NO: 60487 - DNA, 25 bp, SARS Virus
ctcggtacggatcgtacgaatccta

SEQ ID NO: 60488 - DNA, 25 bp, SARS Virus
tcggtacggattctacgaatcctat

SEQ ID NO: 60489 - DNA, 25 bp, SARS Virus
cggtacggattgcacgaatcctatt

SEQ ID NO: 60490 - DNA, 25 bp, SARS Virus
ggtacggattgtccgaatcctatta

SEQ ID NO: 60491 - DNA, 25 bp, SARS Virus
gtacggattgtacgaatcctattac

SEQ ID NO: 60492 - DNA, 25 bp, SARS Virus
tacggattgtaccaatcctattacc

SEQ ID NO: 60493 - DNA, 25 bp, SARS Virus
acggattgtacgcatcctattaccg

SEQ ID NO: 60494 - DNA, 25 bp, SARS Virus
cggattgtacgactcctattaccgg

SEQ ID NO: 60495 - DNA, 25 bp, SARS Virus
ggattgtacgaaccctattaccgga

SEQ ID NO: 60496 - DNA, 25 bp, SARS Virus
gattgtacgaatcctattaccggag

SEQ ID NO: 60497 - DNA, 25 bp, SARS Virus
attgtacgaatcctattaccggaga

SEQ ID NO: 60498 - DNA, 25 bp, SARS Virus
ttgtacgaatcccattaccggagag

SEQ ID NO: 60499 - DNA, 25 bp, SARS Virus
tgtacgaatcctcttaccggagaga

SEQ ID NO: 60500 - DNA, 25 bp, SARS Virus
gtacgaatcctactaccggagagaa

SEQ ID NO: 60501 - DNA, 25 bp, SARS Virus
tacgaatcctatcaccggagagaac

SEQ ID NO: 60502 - DNA, 25 bp, SARS Virus
acgaatcctattcccggagagaaca

SEQ ID NO: 60503 - DNA, 25 bp, SARS Virus
cgaatcctattaccggagagaacaa

SEQ ID NO: 60504 - DNA, 25 bp, SARS Virus
gaatcctattaccggagagaacaag

SEQ ID NO: 60505 - DNA, 25 bp, SARS Virus
aatcctattacccgagagaacaaga

SEQ ID NO: 60506 - DNA, 25 bp, SARS Virus
atcctattaccgcagagaacaagaa

SEQ ID NO: 60507 - DNA, 25 bp, SARS Virus
tcctattaccggcgagaacaagaac

SEQ ID NO: 60508 - DNA, 25 bp, SARS Virus
cctattaccggacagaacaagaacg

SEQ ID NO: 60509 - DNA, 25 bp, SARS Virus
ctattaccggagcgaacaagaacga

SEQ ID NO: 60510 - DNA, 25 bp, SARS Virus
tattaccggagacaacaagaacgag

SEQ ID NO: 60511 - DNA, 25 bp, SARS Virus
attaccggagagcacaagaacgagc

SEQ ID NO: 60512 - DNA, 25 bp, SARS Virus
ttaccggagagaccaagaacgagcg

SEQ ID NO: 60513 - DNA, 25 bp, SARS Virus
taccggagagaacaagaacgagcgt

SEQ ID NO: 60514 - DNA, 25 bp, SARS Virus
accggagagaaccagaacgagcgtt

SEQ ID NO: 60515 - DNA, 25 bp, SARS Virus
ccggagagaacacgaacgagcgttt

SEQ ID NO: 60516 - DNA, 25 bp, SARS Virus
cggagagaacaacaacgagcgtttg

SEQ ID NO: 60517 - DNA, 25 bp, SARS Virus
ggagagaacaagcacgagcgtttgt

SEQ ID NO: 60518 - DNA, 25 bp, SARS Virus
gagagaacaagaccgagcgtttgta

SEQ ID NO: 60519 - DNA, 25 bp, SARS Virus
agagaacaagaacgagcgtttgtat

SEQ ID NO: 60520 - DNA, 25 bp, SARS Virus
gagaacaagaaccagcgtttgtatt

SEQ ID NO: 60521 - DNA, 25 bp, SARS Virus
agaacaagaacgcgcgtttgtattg

SEQ ID NO: 60522 - DNA, 25 bp, SARS Virus
gaacaagaacgaccgtttgtattgt

SEQ ID NO: 60523 - DNA, 25 bp, SARS Virus
aacaagaacgagcgtttgtattgtg

SEQ ID NO: 60524 - DNA, 25 bp, SARS Virus
acaagaacgagcctttgtattgtga

SEQ ID NO: 60525 - DNA, 25 bp, SARS Virus
caagaacgagcgcttgtattgtgaa

SEQ ID NO: 60526 - DNA, 25 bp, SARS Virus
aagaacgagcgtctgtattgtgaac

SEQ ID NO: 60527 - DNA, 25 bp, SARS Virus
agaacgagcgttcgtattgtgaacg

SEQ ID NO: 60528 - DNA, 25 bp, SARS Virus
gaacgagcgtttctattgtgaacga

SEQ ID NO: 60529 - DNA, 25 bp, SARS Virus
aacgagcgtttgcattgtgaacgac

SEQ ID NO: 60530 - DNA, 25 bp, SARS Virus
acgagcgtttgtcttgtgaacgaca

SEQ ID NO: 60531 - DNA, 25 bp, SARS Virus
cgagcgtttgtactgtgaacgacat

SEQ ID NO: 60532 - DNA, 25 bp, SARS Virus
gagcgtttgtatcgtgaacgacatt

SEQ ID NO: 60533 - DNA, 25 bp, SARS Virus
agcgtttgtattctgaacgacattg

SEQ ID NO: 60534 - DNA, 25 bp, SARS Virus
gcgtttgtattgcgaacgacattga

SEQ ID NO: 60535 - DNA, 25 bp, SARS Virus
cgtttgtattgtcaacgacattgaa

SEQ ID NO: 60536 - DNA, 25 bp, SARS Virus
gtttgtattgtgcacgacattgaat

SEQ ID NO: 60537 - DNA, 25 bp, SARS Virus
tttgtattgtgaccgacattgaata

SEQ ID NO: 60538 - DNA, 25 bp, SARS Virus
ttgtattgtgaacgacattgaatag

SEQ ID NO: 60539 - DNA, 25 bp, SARS Virus
tgtattgtgaaccacattgaatagt

SEQ ID NO: 60540 - DNA, 25 bp, SARS Virus
gtattgtgaacgccattgaatagtg

SEQ ID NO: 60541 - DNA, 25 bp, SARS Virus
tattgtgaacgacattgaatagtgt

SEQ ID NO: 60542 - DNA, 25 bp, SARS Virus
attgtgaacgaccttgaatagtgtg

SEQ ID NO: 60543 - DNA, 25 bp, SARS Virus
ttgtgaacgacactgaatagtgtgg

SEQ ID NO: 60544 - DNA, 25 bp, SARS Virus
tgtgaacgacatcgaatagtgtggc

SEQ ID NO: 60545 - DNA, 25 bp, SARS Virus
gtgaacgacattcaatagtgtggca

SEQ ID NO: 60546 - DNA, 25 bp, SARS Virus
tgaacgacattgcatagtgtggcaa

SEQ ID NO: 60547 - DNA, 25 bp, SARS Virus
gaacgacattgactagtgtggcaaa

SEQ ID NO: 60548 - DNA, 25 bp, SARS Virus
aacgacattgaacagtgtggcaaag

SEQ ID NO: 60549 - DNA, 25 bp, SARS Virus
acgacattgaatcgtgtggcaaaga

SEQ ID NO: 60550 - DNA, 25 bp, SARS Virus
cgacattgaatactgtggcaaagat

SEQ ID NO: 60551 - DNA, 25 bp, SARS Virus
gacattgaatagcgtggcaaagatg

SEQ ID NO: 60552 - DNA, 25 bp, SARS Virus
acattgaatagtctggcaaagatgt

SEQ ID NO: 60553 - DNA, 25 bp, SARS Virus
cattgaatagtgcggcaaagatgtc

SEQ ID NO: 60554 - DNA, 25 bp, SARS Virus
attgaatagtgtcgcaaagatgtcc

SEQ ID NO: 60555 - DNA, 25 bp, SARS Virus
ttgaatagtgtgccaaagatgtcca

SEQ ID NO: 60556 - DNA, 25 bp, SARS Virus
tgaatagtgtggcaaagatgtccaa

SEQ ID NO: 60557 - DNA, 25 bp, SARS Virus
gaatagtgtggccaagatgtccaat

SEQ ID NO: 60558 - DNA, 25 bp, SARS Virus
aatagtgtggcacagatgtccaatc

SEQ ID NO: 60559 - DNA, 25 bp, SARS Virus
atagtgtggcaacgatgtccaatcg

SEQ ID NO: 60560 - DNA, 25 bp, SARS Virus
tagtgtggcaaacatgtccaatcga

SEQ ID NO: 60561 - DNA, 25 bp, SARS Virus
agtgtggcaaagctgtccaatcgat

SEQ ID NO: 60562 - DNA, 25 bp, SARS Virus
gtgtggcaaagacgtccaatcgatt

SEQ ID NO: 60563 - DNA, 25 bp, SARS Virus
tgtggcaaagatctccaatcgattg

SEQ ID NO: 60564 - DNA, 25 bp, SARS Virus
gtggcaaagatgcccaatcgattgc

SEQ ID NO: 60565 - DNA, 25 bp, SARS Virus
tggcaaagatgtccaatcgattgct

SEQ ID NO: 60566 - DNA, 25 bp, SARS Virus
ggcaaagatgtccaatcgattgctc

SEQ ID NO: 60567 - DNA, 25 bp, SARS Virus
gcaaagatgtcccatcgattgctca

SEQ ID NO: 60568 - DNA, 25 bp, SARS Virus
caaagatgtccactcgattgctcac

SEQ ID NO: 60569 - DNA, 25 bp, SARS Virus
aaagatgtccaaccgattgctcaca

SEQ ID NO: 60570 - DNA, 25 bp, SARS Virus
aagatgtccaatcgattgctcacac

SEQ ID NO: 60571 - DNA, 25 bp, SARS Virus
agatgtccaatccattgctcacacg

SEQ ID NO: 60572 - DNA, 25 bp, SARS Virus
gatgtccaatcgcttgctcacacgc

SEQ ID NO: 60573 - DNA, 25 bp, SARS Virus
atgtccaatcgactgctcacacgcg

SEQ ID NO: 60574 - DNA, 25 bp, SARS Virus
tgtccaatcgatcgctcacacgcgt

SEQ ID NO: 60575 - DNA, 25 bp, SARS Virus
gtccaatcgattcctcacacgcgtt

SEQ ID NO: 60576 - DNA, 25 bp, SARS Virus
tccaatcgattgctcacacgcgttc

SEQ ID NO: 60577 - DNA, 25 bp, SARS Virus
ccaatcgattgcccacacgcgttca

SEQ ID NO: 60578 - DNA, 25 bp, SARS Virus
caatcgattgctcacacgcgttcat

SEQ ID NO: 60579 - DNA, 25 bp, SARS Virus
aatcgattgctcccacgcgttcata

SEQ ID NO: 60580 - DNA, 25 bp, SARS Virus
atcgattgctcacacgcgttcataa

SEQ ID NO: 60581 - DNA, 25 bp, SARS Virus
tcgattgctcacccgcgttcataat

SEQ ID NO: 60582 - DNA, 25 bp, SARS Virus
cgattgctcacacgcgttcataatt

SEQ ID NO: 60583 - DNA, 25 bp, SARS Virus
gattgctcacacccgttcataattc

SEQ ID NO: 60584 - DNA, 25 bp, SARS Virus
attgctcacacgcgttcataattca

SEQ ID NO: 60585 - DNA, 25 bp, SARS Virus
ttgctcacacgccttcataattcac

SEQ ID NO: 60586 - DNA, 25 bp, SARS Virus
tgctcacacgcgctcataattcact

SEQ ID NO: 60587 - DNA, 25 bp, SARS Virus
gctcacacgcgtccataattcactc

SEQ ID NO: 60588 - DNA, 25 bp, SARS Virus
ctcacacgcgttcataattcactct

SEQ ID NO: 60589 - DNA, 25 bp, SARS Virus
tcacacgcgttcctaattcactcta

SEQ ID NO: 60590 - DNA, 25 bp, SARS Virus
cacacgcgttcacaattcactctac

SEQ ID NO: 60591 - DNA, 25 bp, SARS Virus
acacgcgttcatcattcactctacc

SEQ ID NO: 60592 - DNA, 25 bp, SARS Virus
cacgcgttcatacttcactctacca

SEQ ID NO: 60593 - DNA, 25 bp, SARS Virus
acgcgttcataactcactctaccag

SEQ ID NO: 60594 - DNA, 25 bp, SARS Virus
cgcgttcataatccactctaccagt

SEQ ID NO: 60595 - DNA, 25 bp, SARS Virus
gcgttcataattcactctaccagta

SEQ ID NO: 60596 - DNA, 25 bp, SARS Virus
cgttcataattccctctaccagtac

SEQ ID NO: 60597 - DNA, 25 bp, SARS Virus
gttcataattcactctaccagtaca

SEQ ID NO: 60598 - DNA, 25 bp, SARS Virus
ttcataattcaccctaccagtacac

SEQ ID NO: 60599 - DNA, 25 bp, SARS Virus
tcataattcactctaccagtacaca

SEQ ID NO: 60600 - DNA, 25 bp, SARS Virus
cataattcactccaccagtacacac

SEQ ID NO: 60601 - DNA, 25 bp, SARS Virus
ataattcactctcccagtacacacc

SEQ ID NO: 60602 - DNA, 25 bp, SARS Virus
taattcactctaccagtacacaccg

SEQ ID NO: 60603 - DNA, 25 bp, SARS Virus
aattcactctaccagtacacaccgc

SEQ ID NO: 60604 - DNA, 25 bp, SARS Virus
attcactctacccgtacacaccgcc

SEQ ID NO: 60605 - DNA, 25 bp, SARS Virus
ttcactctaccactacacaccgccg

SEQ ID NO: 60606 - DNA, 25 bp, SARS Virus
tcactctaccagcacacaccgccga

SEQ ID NO: 60607 - DNA, 25 bp, SARS Virus
cactctaccagtccacaccgccgag

SEQ ID NO: 60608 - DNA, 25 bp, SARS Virus
actctaccagtacacaccgccgagt

SEQ ID NO: 60609 - DNA, 25 bp, SARS Virus
ctctaccagtacccaccgccgagtg

SEQ ID NO: 60610 - DNA, 25 bp, SARS Virus
tctaccagtacacaccgccgagtga

SEQ ID NO: 60611 - DNA, 25 bp, SARS Virus
ctaccagtacaccccgccgagtgat

SEQ ID NO: 60612 - DNA, 25 bp, SARS Virus
taccagtacacaccgccgagtgata

SEQ ID NO: 60613 - DNA, 25 bp, SARS Virus
accagtacacaccgccgagtgatat

SEQ ID NO: 60614 - DNA, 25 bp, SARS Virus
ccagtacacacccccgagtgatata

SEQ ID NO: 60615 - DNA, 25 bp, SARS Virus
cagtacacaccgccgagtgatatac

SEQ ID NO: 60616 - DNA, 25 bp, SARS Virus
agtacacaccgccgagtgatataca

SEQ ID NO: 60617 - DNA, 25 bp, SARS Virus
gtacacaccgcccagtgatatacaa

SEQ ID NO: 60618 - DNA, 25 bp, SARS Virus
tacacaccgccgcgtgatatacaat

SEQ ID NO: 60619 - DNA, 25 bp, SARS Virus
acacaccgccgactgatatacaatt

SEQ ID NO: 60620 - DNA, 25 bp, SARS Virus
cacaccgccgagcgatatacaattt

SEQ ID NO: 60621 - DNA, 25 bp, SARS Virus
acaccgccgagtcatatacaatttg

SEQ ID NO: 60622 - DNA, 25 bp, SARS Virus
caccgccgagtgctatacaatttgg

SEQ ID NO: 60623 - DNA, 25 bp, SARS Virus
accgccgagtgacatacaatttggt

SEQ ID NO: 60624 - DNA, 25 bp, SARS Virus
ccgccgagtgatctacaatttggtc

SEQ ID NO: 60625 - DNA, 25 bp, SARS Virus
cgccgagtgatacacaatttggtcc

SEQ ID NO: 60626 - DNA, 25 bp, SARS Virus
gccgagtgatatccaatttggtcca

SEQ ID NO: 60627 - DNA, 25 bp, SARS Virus
ccgagtgatatacaatttggtccac

SEQ ID NO: 60628 - DNA, 25 bp, SARS Virus
cgagtgatataccatttggtccacc

SEQ ID NO: 60629 - DNA, 25 bp, SARS Virus
gagtgatatacactttggtccacct

SEQ ID NO: 60630 - DNA, 25 bp, SARS Virus
agtgatatacaacttggtccacctt

SEQ ID NO: 60631 - DNA, 25 bp, SARS Virus
gtgatatacaatctggtccaccttg

SEQ ID NO: 60632 - DNA, 25 bp, SARS Virus
tgatatacaattcggtccaccttgt

SEQ ID NO: 60633 - DNA, 25 bp, SARS Virus
gatatacaatttcgtccaccttgta

SEQ ID NO: 60634 - DNA, 25 bp, SARS Virus
atatacaatttgctccaccttgtag

SEQ ID NO: 60635 - DNA, 25 bp, SARS Virus
tatacaatttggcccaccttgtagt

SEQ ID NO: 60636 - DNA, 25 bp, SARS Virus
atacaatttggtccaccttgtagta

SEQ ID NO: 60637 - DNA, 25 bp, SARS Virus
tacaatttggtccaccttgtagtag

SEQ ID NO: 60638 - DNA, 25 bp, SARS Virus
acaatttggtcccccttgtagtagg

SEQ ID NO: 60639 - DNA, 25 bp, SARS Virus
caatttggtccaccttgtagtaggc

SEQ ID NO: 60640 - DNA, 25 bp, SARS Virus
aatttggtccaccttgtagtaggcc

SEQ ID NO: 60641 - DNA, 25 bp, SARS Virus
tctgaaataatagtgagttactcaa

SEQ ID NO: 60642 - DNA, 25 bp, SARS Virus
ctgaaataatacggagttactcaat

SEQ ID NO: 60643 - DNA, 25 bp, SARS Virus
tgaaataatactgagttactcaata

SEQ ID NO: 60644 - DNA, 25 bp, SARS Virus
gaaataatactgggttactcaatac

SEQ ID NO: 60645 - DNA, 25 bp, SARS Virus
aaataatactgagttactcaatact

SEQ ID NO: 60646 - DNA, 25 bp, SARS Virus
aataatactgaggtactcaatactc

SEQ ID NO: 60647 - DNA, 25 bp, SARS Virus
ataatactgagtgactcaatactcc

SEQ ID NO: 60648 - DNA, 25 bp, SARS Virus
taatactgagttgctcaatactcct

SEQ ID NO: 60649 - DNA, 25 bp, SARS Virus
aatactgagttagtcaatactccta

SEQ ID NO: 60650 - DNA, 25 bp, SARS Virus
atactgagttacgcaatactcctag

SEQ ID NO: 60651 - DNA, 25 bp, SARS Virus
tactgagttactgaatactcctagt

SEQ ID NO: 60652 - DNA, 25 bp, SARS Virus
actgagttactcgatactcctagtt

SEQ ID NO: 60653 - DNA, 25 bp, SARS Virus
ctgagttactcagtactcctagttc

SEQ ID NO: 60654 - DNA, 25 bp, SARS Virus
tgagttactcaagactcctagttct

SEQ ID NO: 60655 - DNA, 25 bp, SARS Virus
gagttactcaatgctcctagttcta

SEQ ID NO: 60656 - DNA, 25 bp, SARS Virus
agttactcaatagtcctagttctac

SEQ ID NO: 60657 - DNA, 25 bp, SARS Virus
gttactcaatacgcctagttctacg

SEQ ID NO: 60658 - DNA, 25 bp, SARS Virus
ttactcaatactgctagttctacgt

SEQ ID NO: 60659 - DNA, 25 bp, SARS Virus
tactcaatactcgtagttctacgtg

SEQ ID NO: 60660 - DNA, 25 bp, SARS Virus
actcaatactccgagttctacgtga

SEQ ID NO: 60661 - DNA, 25 bp, SARS Virus
ctcaatactcctggttctacgtgaa

SEQ ID NO: 60662 - DNA, 25 bp, SARS Virus
tcaatactcctagttctacgtgaaa

SEQ ID NO: 60663 - DNA, 25 bp, SARS Virus
caatactcctaggtctacgtgaaaa

SEQ ID NO: 60664 - DNA, 25 bp, SARS Virus
aatactcctagtgctacgtgaaaag

SEQ ID NO: 60665 - DNA, 25 bp, SARS Virus
atactcctagttgtacgtgaaaagc

SEQ ID NO: 60666 - DNA, 25 bp, SARS Virus
tactcctagttcgacgtgaaaagcg

SEQ ID NO: 60667 - DNA, 25 bp, SARS Virus
actcctagttctgcgtgaaaagcgc

SEQ ID NO: 60668 - DNA, 25 bp, SARS Virus
ctcctagttctaggtgaaaagcgca

SEQ ID NO: 60669 - DNA, 25 bp, SARS Virus
tcctagttctacgtgaaaagcgcat

SEQ ID NO: 60670 - DNA, 25 bp, SARS Virus
cctagttctacgggaaaagcgcata

SEQ ID NO: 60671 - DNA, 25 bp, SARS Virus
ctagttctacgtgaaaagcgcatat

SEQ ID NO: 60672 - DNA, 25 bp, SARS Virus
tagttctacgtggaaagcgcatatg

SEQ ID NO: 60673 - DNA, 25 bp, SARS Virus
agttctacgtgagaagcgcatatga

SEQ ID NO: 60674 - DNA, 25 bp, SARS Virus
gttctacgtgaagagcgcatatgat

SEQ ID NO: 60675 - DNA, 25 bp, SARS Virus
ttctacgtgaaaggcgcatatgatt

SEQ ID NO: 60676 - DNA, 25 bp, SARS Virus
tctacgtgaaaagcgcatatgattc

SEQ ID NO: 60677 - DNA, 25 bp, SARS Virus
ctacgtgaaaagggcatatgattcg

SEQ ID NO: 60678 - DNA, 25 bp, SARS Virus
tacgtgaaaagcgcatatgattcgc

SEQ ID NO: 60679 - DNA, 25 bp, SARS Virus
acgtgaaaagcggatatgattcgca

SEQ ID NO: 60680 - DNA, 25 bp, SARS Virus
cgtgaaaagcgcgtatgattcgcat

SEQ ID NO: 60681 - DNA, 25 bp, SARS Virus
gtgaaaagcgcagatgattcgcatt

SEQ ID NO: 60682 - DNA, 25 bp, SARS Virus
tgaaaagcgcatgtgattcgcatta

SEQ ID NO: 60683 - DNA, 25 bp, SARS Virus
gaaaagcgcataggattcgcattac

SEQ ID NO: 60684 - DNA, 25 bp, SARS Virus
aaaagcgcatatgattcgcattaca

SEQ ID NO: 60685 - DNA, 25 bp, SARS Virus
aaagcgcatatggttcgcattacag

SEQ ID NO: 60686 - DNA, 25 bp, SARS Virus
aagcgcatatgagtcgcattacagt

SEQ ID NO: 60687 - DNA, 25 bp, SARS Virus
agcgcatatgatgcgcattacagta

SEQ ID NO: 60688 - DNA, 25 bp, SARS Virus
gcgcatatgattggcattacagtag

SEQ ID NO: 60689 - DNA, 25 bp, SARS Virus
cgcatatgattcgcattacagtagg

SEQ ID NO: 60690 - DNA, 25 bp, SARS Virus
gcatatgattcggattacagtaggg

SEQ ID NO: 60691 - DNA, 25 bp, SARS Virus
catatgattcgcgttacagtaggga

SEQ ID NO: 60692 - DNA, 25 bp, SARS Virus
atatgattcgcagtacagtagggat

SEQ ID NO: 60693 - DNA, 25 bp, SARS Virus
tatgattcgcatgacagtagggatg

SEQ ID NO: 60694 - DNA, 25 bp, SARS Virus
atgattcgcattgcagtagggatga

SEQ ID NO: 60695 - DNA, 25 bp, SARS Virus
tgattcgcattagagtagggatgat

SEQ ID NO: 60696 - DNA, 25 bp, SARS Virus
gattcgcattacggtagggatgata

SEQ ID NO: 60697 - DNA, 25 bp, SARS Virus
attcgcattacagtagggatgatat

SEQ ID NO: 60698 - DNA, 25 bp, SARS Virus
ttcgcattacaggagggatgatatt

SEQ ID NO: 60699 - DNA, 25 bp, SARS Virus
tcgcattacagtggggatgatattg

SEQ ID NO: 60700 - DNA, 25 bp, SARS Virus
cgcattacagtagggatgatattga

SEQ ID NO: 60701 - DNA, 25 bp, SARS Virus
gcattacagtagggatgatattgag

SEQ ID NO: 60702 - DNA, 25 bp, SARS Virus
cattacagtagggatgatattgagt

SEQ ID NO: 60703 - DNA, 25 bp, SARS Virus
attacagtaggggtgatattgagtt

SEQ ID NO: 60704 - DNA, 25 bp, SARS Virus
ttacagtagggaggatattgagttt

SEQ ID NO: 60705 - DNA, 25 bp, SARS Virus
tacagtagggatgatattgagttta

SEQ ID NO: 60706 - DNA, 25 bp, SARS Virus
acagtagggatggtattgagtttac

SEQ ID NO: 60707 - DNA, 25 bp, SARS Virus
cagtagggatgagattgagtttact

SEQ ID NO: 60708 - DNA, 25 bp, SARS Virus
agtagggatgatgttgagtttactt

SEQ ID NO: 60709 - DNA, 25 bp, SARS Virus
gtagggatgatagtgagtttactta

SEQ ID NO: 60710 - DNA, 25 bp, SARS Virus
tagggatgatatggagtttacttag

SEQ ID NO: 60711 - DNA, 25 bp, SARS Virus
agggatgatattgagtttacttaga

SEQ ID NO: 60712 - DNA, 25 bp, SARS Virus
gggatgatattgggtttacttagaa

SEQ ID NO: 60713 - DNA, 25 bp, SARS Virus
ggatgatattgagtttacttagaat

SEQ ID NO: 60714 - DNA, 25 bp, SARS Virus
gatgatattgaggttacttagaatt

SEQ ID NO: 60715 - DNA, 25 bp, SARS Virus
atgatattgagtgtacttagaattc

SEQ ID NO: 60716 - DNA, 25 bp, SARS Virus
tgatattgagttgacttagaattca

SEQ ID NO: 60717 - DNA, 25 bp, SARS Virus
gatattgagtttgcttagaattcat

SEQ ID NO: 60718 - DNA, 25 bp, SARS Virus
atattgagtttagttagaattcata

SEQ ID NO: 60719 - DNA, 25 bp, SARS Virus
tattgagtttacgtagaattcatac

SEQ ID NO: 60720 - DNA, 25 bp, SARS Virus
attgagtttactgagaattcatacg

SEQ ID NO: 60721 - DNA, 25 bp, SARS Virus
ttgagtttacttggaattcatacgg

SEQ ID NO: 60722 - DNA, 25 bp, SARS Virus
tgagtttacttagaattcatacggt

SEQ ID NO: 60723 - DNA, 25 bp, SARS Virus
gagtttacttaggattcatacggta

SEQ ID NO: 60724 - DNA, 25 bp, SARS Virus
agtttacttagagttcatacggtaa

SEQ ID NO: 60725 - DNA, 25 bp, SARS Virus
gtttacttagaagtcatacggtaat

SEQ ID NO: 60726 - DNA, 25 bp, SARS Virus
tttacttagaatgcatacggtaatc

SEQ ID NO: 60727 - DNA, 25 bp, SARS Virus
ttacttagaattgatacggtaatca

SEQ ID NO: 60728 - DNA, 25 bp, SARS Virus
tacttagaattcgtacggtaatcac

SEQ ID NO: 60729 - DNA, 25 bp, SARS Virus
acttagaattcagacggtaatcacg

SEQ ID NO: 60730 - DNA, 25 bp, SARS Virus
cttagaattcatgcggtaatcacgt

SEQ ID NO: 60731 - DNA, 25 bp, SARS Virus
ttagaattcatagggtaatcacgtt

SEQ ID NO: 60732 - DNA, 25 bp, SARS Virus
tagaattcatacggtaatcacgttt

SEQ ID NO: 60733 - DNA, 25 bp, SARS Virus
agaattcatacggtaatcacgtttc

SEQ ID NO: 60734 - DNA, 25 bp, SARS Virus
gaattcatacgggaatcacgtttct

SEQ ID NO: 60735 - DNA, 25 bp, SARS Virus
aattcatacggtgatcacgtttctt

SEQ ID NO: 60736 - DNA, 25 bp, SARS Virus
attcatacggtagtcacgtttctta

SEQ ID NO: 60737 - DNA, 25 bp, SARS Virus
ttcatacggtaagcacgtttcttat

SEQ ID NO: 60738 - DNA, 25 bp, SARS Virus
tcatacggtaatgacgtttcttatc

SEQ ID NO: 60739 - DNA, 25 bp, SARS Virus
catacggtaatcgcgtttcttatct

SEQ ID NO: 60740 - DNA, 25 bp, SARS Virus
atacggtaatcaggtttcttatctc

SEQ ID NO: 60741 - DNA, 25 bp, SARS Virus
tacggtaatcacgtttcttatctcg

SEQ ID NO: 60742 - DNA, 25 bp, SARS Virus
acggtaatcacggttcttatctcga

SEQ ID NO: 60743 - DNA, 25 bp, SARS Virus
cggtaatcacgtgtcttatctcgag

SEQ ID NO: 60744 - DNA, 25 bp, SARS Virus
ggtaatcacgttgcttatctcgagc

SEQ ID NO: 60745 - DNA, 25 bp, SARS Virus
gtaatcacgtttgttatctcgagcg

SEQ ID NO: 60746 - DNA, 25 bp, SARS Virus
taatcacgtttcgtatctcgagcgt

SEQ ID NO: 60747 - DNA, 25 bp, SARS Virus
aatcacgtttctgatctcgagcgtg

SEQ ID NO: 60748 - DNA, 25 bp, SARS Virus
atcacgtttcttgtctcgagcgtgg

SEQ ID NO: 60749 - DNA, 25 bp, SARS Virus
tcacgtttcttagctcgagcgtggc

SEQ ID NO: 60750 - DNA, 25 bp, SARS Virus
cacgtttcttatgtcgagcgtggca

SEQ ID NO: 60751 - DNA, 25 bp, SARS Virus
acgtttcttatcgcgagcgtggcat

SEQ ID NO: 60752 - DNA, 25 bp, SARS Virus
cgtttcttatctggagcgtggcatc

SEQ ID NO: 60753 - DNA, 25 bp, SARS Virus
gtttcttatctcgagcgtggcatcg

SEQ ID NO: 60754 - DNA, 25 bp, SARS Virus
tttcttatctcgggcgtggcatcga

SEQ ID NO: 60755 - DNA, 25 bp, SARS Virus
ttcttatctcgagcgtggcatcgac

SEQ ID NO: 60756 - DNA, 25 bp, SARS Virus
tcttatctcgagggtggcatcgacc

SEQ ID NO: 60757 - DNA, 25 bp, SARS Virus
cttatctcgagcgtggcatcgacca

SEQ ID NO: 60758 - DNA, 25 bp, SARS Virus
ttatctcgagcggggcatcgaccac

SEQ ID NO: 60759 - DNA, 25 bp, SARS Virus
tatctcgagcgtggcatcgaccaca

SEQ ID NO: 60760 - DNA, 25 bp, SARS Virus
atctcgagcgtggcatcgaccacag

SEQ ID NO: 60761 - DNA, 25 bp, SARS Virus
tctcgagcgtgggatcgaccacaga

SEQ ID NO: 60762 - DNA, 25 bp, SARS Virus
ctcgagcgtggcgtcgaccacagag

SEQ ID NO: 60763 - DNA, 25 bp, SARS Virus
tcgagcgtggcagcgaccacagaga

SEQ ID NO: 60764 - DNA, 25 bp, SARS Virus
cgagcgtggcatggaccacagagat

SEQ ID NO: 60765 - DNA, 25 bp, SARS Virus
gagcgtggcatcgaccacagagata

SEQ ID NO: 60766 - DNA, 25 bp, SARS Virus
agcgtggcatcggccacagagatag

SEQ ID NO: 60767 - DNA, 25 bp, SARS Virus
gcgtggcatcgagcacagagataga

SEQ ID NO: 60768 - DNA, 25 bp, SARS Virus
cgtggcatcgacgacagagatagac

SEQ ID NO: 60769 - DNA, 25 bp, SARS Virus
gtggcatcgaccgcagagatagaca

SEQ ID NO: 60770 - DNA, 25 bp, SARS Virus
tggcatcgaccagagagatagacat

SEQ ID NO: 60771 - DNA, 25 bp, SARS Virus
ggcatcgaccacggagatagacatc

SEQ ID NO: 60772 - DNA, 25 bp, SARS Virus
gcatcgaccacagagatagacatca

SEQ ID NO: 60773 - DNA, 25 bp, SARS Virus
catcgaccacagggatagacatcat

SEQ ID NO: 60774 - DNA, 25 bp, SARS Virus
atcgaccacagagatagacatcatg

SEQ ID NO: 60775 - DNA, 25 bp, SARS Virus
tcgaccacagaggtagacatcatga

SEQ ID NO: 60776 - DNA, 25 bp, SARS Virus
cgaccacagagagagacatcatgat

SEQ ID NO: 60777 - DNA, 25 bp, SARS Virus
gaccacagagatggacatcatgata

SEQ ID NO: 60778 - DNA, 25 bp, SARS Virus
accacagagatagacatcatgatac

SEQ ID NO: 60779 - DNA, 25 bp, SARS Virus
ccacagagataggcatcatgatact

SEQ ID NO: 60780 - DNA, 25 bp, SARS Virus
cacagagatagagatcatgatactg

SEQ ID NO: 60781 - DNA, 25 bp, SARS Virus
acagagatagacgtcatgatactgt

SEQ ID NO: 60782 - DNA, 25 bp, SARS Virus
cagagatagacagcatgatactgtt

SEQ ID NO: 60783 - DNA, 25 bp, SARS Virus
agagatagacatgatgatactgttt

SEQ ID NO: 60784 - DNA, 25 bp, SARS Virus
gagatagacatcgtgatactgttta

SEQ ID NO: 60785 - DNA, 25 bp, SARS Virus
agatagacatcaggatactgtttat

SEQ ID NO: 60786 - DNA, 25 bp, SARS Virus
gatagacatcatgatactgtttatc

SEQ ID NO: 60787 - DNA, 25 bp, SARS Virus
atagacatcatggtactgtttatct

SEQ ID NO: 60788 - DNA, 25 bp, SARS Virus
tagacatcatgagactgtttatctg

SEQ ID NO: 60789 - DNA, 25 bp, SARS Virus
agacatcatgatgctgtttatctgt

SEQ ID NO: 60790 - DNA, 25 bp, SARS Virus
gacatcatgatagtgtttatctgtc

SEQ ID NO: 60791 - DNA, 25 bp, SARS Virus
acatcatgatacggtttatctgtca

SEQ ID NO: 60792 - DNA, 25 bp, SARS Virus
catcatgatactgtttatctgtcaa

SEQ ID NO: 60793 - DNA, 25 bp, SARS Virus
atcatgatactggttatctgtcaaa

SEQ ID NO: 60794 - DNA, 25 bp, SARS Virus
tcatgatactgtgtatctgtcaaag

SEQ ID NO: 60795 - DNA, 25 bp, SARS Virus
catgatactgttgatctgtcaaagt

SEQ ID NO: 60796 - DNA, 25 bp, SARS Virus
atgatactgtttgtctgtcaaagta

SEQ ID NO: 60797 - DNA, 25 bp, SARS Virus
tgatactgtttagctgtcaaagtag

SEQ ID NO: 60798 - DNA, 25 bp, SARS Virus
gatactgtttatgtgtcaaagtagt

SEQ ID NO: 60799 - DNA, 25 bp, SARS Virus
atactgtttatcggtcaaagtagtc

SEQ ID NO: 60800 - DNA, 25 bp, SARS Virus
tactgtttatctgtcaaagtagtct

SEQ ID NO: 60801 - DNA, 25 bp, SARS Virus
actgtttatctggcaaagtagtctt

SEQ ID NO: 60802 - DNA, 25 bp, SARS Virus
ctgtttatctgtgaaagtagtcttt

SEQ ID NO: 60803 - DNA, 25 bp, SARS Virus
tgtttatctgtcgaagtagtcttta

SEQ ID NO: 60804 - DNA, 25 bp, SARS Virus
gtttatctgtcagagtagtctttaa

SEQ ID NO: 60805 - DNA, 25 bp, SARS Virus
tttatctgtcaaggtagtctttaat

SEQ ID NO: 60806 - DNA, 25 bp, SARS Virus
ttatctgtcaaagtagtctttaata

SEQ ID NO: 60807 - DNA, 25 bp, SARS Virus
tatctgtcaaaggagtctttaataa

SEQ ID NO: 60808 - DNA, 25 bp, SARS Virus
atctgtcaaagtggtctttaataac

SEQ ID NO: 60809 - DNA, 25 bp, SARS Virus
tctgtcaaagtagtctttaataact

SEQ ID NO: 60810 - DNA, 25 bp, SARS Virus
ctgtcaaagtaggctttaataactt

SEQ ID NO: 60811 - DNA, 25 bp, SARS Virus
tgtcaaagtagtgtttaataacttc

SEQ ID NO: 60812 - DNA, 25 bp, SARS Virus
gtcaaagtagtcgttaataacttca

SEQ ID NO: 60813 - DNA, 25 bp, SARS Virus
tcaaagtagtctgtaataacttcag

SEQ ID NO: 60814 - DNA, 25 bp, SARS Virus
caaagtagtcttgaataacttcagt

SEQ ID NO: 60815 - DNA, 25 bp, SARS Virus
aaagtagtctttgataacttcagtt

SEQ ID NO: 60816 - DNA, 25 bp, SARS Virus
aagtagtctttagtaacttcagtta

SEQ ID NO: 60817 - DNA, 25 bp, SARS Virus
agtagtctttaagaacttcagttat

SEQ ID NO: 60818 - DNA, 25 bp, SARS Virus
gtagtctttaatgacttcagttatc

SEQ ID NO: 60819 - DNA, 25 bp, SARS Virus
tagtctttaatagcttcagttatcg

SEQ ID NO: 60820 - DNA, 25 bp, SARS Virus
agtctttaataagttcagttatcgg

SEQ ID NO: 60821 - DNA, 25 bp, SARS Virus
gtctttaataacgtcagttatcggc

SEQ ID NO: 60822 - DNA, 25 bp, SARS Virus
tctttaataactgcagttatcggcg

SEQ ID NO: 60823 - DNA, 25 bp, SARS Virus
ctttaataacttgagttatcggcgg

SEQ ID NO: 60824 - DNA, 25 bp, SARS Virus
tttaataacttcggttatcggcggt

SEQ ID NO: 60825 - DNA, 25 bp, SARS Virus
ttaataacttcagttatcggcggtg

SEQ ID NO: 60826 - DNA, 25 bp, SARS Virus
taataacttcaggtatcggcggtga

SEQ ID NO: 60827 - DNA, 25 bp, SARS Virus
aataacttcagtgatcggcggtgat

SEQ ID NO: 60828 - DNA, 25 bp, SARS Virus
ataacttcagttgtcggcggtgatc

SEQ ID NO: 60829 - DNA, 25 bp, SARS Virus
taacttcagttagcggcggtgatct

SEQ ID NO: 60830 - DNA, 25 bp, SARS Virus
aacttcagttatgggcggtgatctc

SEQ ID NO: 60831 - DNA, 25 bp, SARS Virus
acttcagttatcggcggtgatctcc

SEQ ID NO: 60832 - DNA, 25 bp, SARS Virus
cttcagttatcggcggtgatctcct

SEQ ID NO: 60833 - DNA, 25 bp, SARS Virus
ttcagttatcgggggtgatctcctc

SEQ ID NO: 60834 - DNA, 25 bp, SARS Virus
tcagttatcggcggtgatctcctcg

SEQ ID NO: 60835 - DNA, 25 bp, SARS Virus
cagttatcggcggtgatctcctcga

SEQ ID NO: 60836 - DNA, 25 bp, SARS Virus
agttatcggcggggatctcctcgat

SEQ ID NO: 60837 - DNA, 25 bp, SARS Virus
gttatcggcggtgatctcctcgatg

SEQ ID NO: 60838 - DNA, 25 bp, SARS Virus
ttatcggcggtggtctcctcgatga

SEQ ID NO: 60839 - DNA, 25 bp, SARS Virus
tatcggcggtgagctcctcgatgac

SEQ ID NO: 60840 - DNA, 25 bp, SARS Virus
atcggcggtgatgtcctcgatgaca

SEQ ID NO: 60841 - DNA, 25 bp, SARS Virus
tcggcggtgatcgcctcgatgacac

SEQ ID NO: 60842 - DNA, 25 bp, SARS Virus
cggcggtgatctgctcgatgacacc

SEQ ID NO: 60843 - DNA, 25 bp, SARS Virus
ggcggtgatctcgtcgatgacacca

SEQ ID NO: 60844 - DNA, 25 bp, SARS Virus
gcggtgatctccgcgatgacaccat

SEQ ID NO: 60845 - DNA, 25 bp, SARS Virus
cggtgatctcctggatgacaccatt

SEQ ID NO: 60846 - DNA, 25 bp, SARS Virus
ggtgatctcctcgatgacaccatta

SEQ ID NO: 60847 - DNA, 25 bp, SARS Virus
gtgatctcctcggtgacaccattaa

SEQ ID NO: 60848 - DNA, 25 bp, SARS Virus
tgatctcctcgaggacaccattaac

SEQ ID NO: 60849 - DNA, 25 bp, SARS Virus
gatctcctcgatgacaccattaacc

SEQ ID NO: 60850 - DNA, 25 bp, SARS Virus
atctcctcgatggcaccattaacct

SEQ ID NO: 60851 - DNA, 25 bp, SARS Virus
tctcctcgatgagaccattaacctt

SEQ ID NO: 60852 - DNA, 25 bp, SARS Virus
ctcctcgatgacgccattaaccttg

SEQ ID NO: 60853 - DNA, 25 bp, SARS Virus
tcctcgatgacagcattaaccttgt

SEQ ID NO: 60854 - DNA, 25 bp, SARS Virus
cctcgatgacacgattaaccttgtt

SEQ ID NO: 60855 - DNA, 25 bp, SARS Virus
ctcgatgacaccgttaaccttgttc

SEQ ID NO: 60856 - DNA, 25 bp, SARS Virus
tcgatgacaccagtaaccttgttcg

SEQ ID NO: 60857 - DNA, 25 bp, SARS Virus
cgatgacaccatgaaccttgttcgt

SEQ ID NO: 60858 - DNA, 25 bp, SARS Virus
gatgacaccattgaccttgttcgtt

SEQ ID NO: 60859 - DNA, 25 bp, SARS Virus
atgacaccattagccttgttcgttc

SEQ ID NO: 60860 - DNA, 25 bp, SARS Virus
tgacaccattaagcttgttcgttca

SEQ ID NO: 60861 - DNA, 25 bp, SARS Virus
gacaccattaacgttgttcgttcaa

SEQ ID NO: 60862 - DNA, 25 bp, SARS Virus
acaccattaaccgtgttcgttcaaa

SEQ ID NO: 60863 - DNA, 25 bp, SARS Virus
caccattaacctggttcgttcaaaa

SEQ ID NO: 60864 - DNA, 25 bp, SARS Virus
accattaaccttgttcgttcaaaat

SEQ ID NO: 60865 - DNA, 25 bp, SARS Virus
ccattaaccttggtcgttcaaaatg

SEQ ID NO: 60866 - DNA, 25 bp, SARS Virus
cattaaccttgtgcgttcaaaatgc

SEQ ID NO: 60867 - DNA, 25 bp, SARS Virus
attaaccttgttggttcaaaatgcc

SEQ ID NO: 60868 - DNA, 25 bp, SARS Virus
ttaaccttgttcgttcaaaatgcca

SEQ ID NO: 60869 - DNA, 25 bp, SARS Virus
taaccttgttcggtcaaaatgccac

SEQ ID NO: 60870 - DNA, 25 bp, SARS Virus
aaccttgttcgtgcaaaatgccacc

SEQ ID NO: 60871 - DNA, 25 bp, SARS Virus
accttgttcgttgaaaatgccaccg

SEQ ID NO: 60872 - DNA, 25 bp, SARS Virus
ccttgttcgttcgaaatgccaccga

SEQ ID NO: 60873 - DNA, 25 bp, SARS Virus
cttgttcgttcagaatgccaccgac

SEQ ID NO: 60874 - DNA, 25 bp, SARS Virus
ttgttcgttcaagatgccaccgacc

SEQ ID NO: 60875 - DNA, 25 bp, SARS Virus
tgttcgttcaaagtgccaccgaccg

SEQ ID NO: 60876 - DNA, 25 bp, SARS Virus
gttcgttcaaaaggccaccgaccgt

SEQ ID NO: 60877 - DNA, 25 bp, SARS Virus
ttcgttcaaaatgccaccgaccgta

SEQ ID NO: 60878 - DNA, 25 bp, SARS Virus
tcgttcaaaatggcaccgaccgtat

SEQ ID NO: 60879 - DNA, 25 bp, SARS Virus
cgttcaaaatgcgaccgaccgtatt

SEQ ID NO: 60880 - DNA, 25 bp, SARS Virus
gttcaaaatgccgccgaccgtatta

SEQ ID NO: 60881 - DNA, 25 bp, SARS Virus
ttcaaaatgccagcgaccgtattat

SEQ ID NO: 60882 - DNA, 25 bp, SARS Virus
tcaaaatgccacggaccgtattata

SEQ ID NO: 60883 - DNA, 25 bp, SARS Virus
caaaatgccaccgaccgtattatac

SEQ ID NO: 60884 - DNA, 25 bp, SARS Virus
aaaatgccaccggccgtattataca

SEQ ID NO: 60885 - DNA, 25 bp, SARS Virus
aaatgccaccgagcgtattatacaa

SEQ ID NO: 60886 - DNA, 25 bp, SARS Virus
aatgccaccgacggtattatacaat

SEQ ID NO: 60887 - DNA, 25 bp, SARS Virus
atgccaccgaccgtattatacaatt

SEQ ID NO: 60888 - DNA, 25 bp, SARS Virus
tgccaccgaccggattatacaattt

SEQ ID NO: 60889 - DNA, 25 bp, SARS Virus
gccaccgaccgtgttatacaatttt

SEQ ID NO: 60890 - DNA, 25 bp, SARS Virus
ccaccgaccgtagtatacaattttt

SEQ ID NO: 60891 - DNA, 25 bp, SARS Virus
caccgaccgtatgatacaatttttg

SEQ ID NO: 60892 - DNA, 25 bp, SARS Virus
accgaccgtattgtacaatttttga

SEQ ID NO: 60893 - DNA, 25 bp, SARS Virus
ccgaccgtattagacaatttttgac

SEQ ID NO: 60894 - DNA, 25 bp, SARS Virus
cgaccgtattatgcaatttttgaca

SEQ ID NO: 60895 - DNA, 25 bp, SARS Virus
gaccgtattatagaatttttgacaa

SEQ ID NO: 60896 - DNA, 25 bp, SARS Virus
accgtattatacgatttttgacaaa

SEQ ID NO: 60897 - DNA, 25 bp, SARS Virus
ccgtattatacagtttttgacaaat

SEQ ID NO: 60898 - DNA, 25 bp, SARS Virus
cgtattatacaagttttgacaaatg

SEQ ID NO: 60899 - DNA, 25 bp, SARS Virus
gtattatacaatgtttgacaaatgt

SEQ ID NO: 60900 - DNA, 25 bp, SARS Virus
tattatacaattgttgacaaatgtc

SEQ ID NO: 60901 - DNA, 25 bp, SARS Virus
attatacaatttgtgacaaatgtca

SEQ ID NO: 60902 - DNA, 25 bp, SARS Virus
ttatacaattttggacaaatgtcac

SEQ ID NO: 60903 - DNA, 25 bp, SARS Virus
tatacaatttttgacaaatgtcact

SEQ ID NO: 60904 - DNA, 25 bp, SARS Virus
atacaatttttggcaaatgtcacta

SEQ ID NO: 60905 - DNA, 25 bp, SARS Virus
tacaatttttgagaaatgtcactac

SEQ ID NO: 60906 - DNA, 25 bp, SARS Virus
acaatttttgacgaatgtcactaca

SEQ ID NO: 60907 - DNA, 25 bp, SARS Virus
caatttttgacagatgtcactacat

SEQ ID NO: 60908 - DNA, 25 bp, SARS Virus
aatttttgacaagtgtcactacatc

SEQ ID NO: 60909 - DNA, 25 bp, SARS Virus
atttttgacaaaggtcactacatct

SEQ ID NO: 60910 - DNA, 25 bp, SARS Virus
tttttgacaaatgtcactacatctt

SEQ ID NO: 60911 - DNA, 25 bp, SARS Virus
ttttgacaaatggcactacatcttt

SEQ ID NO: 60912 - DNA, 25 bp, SARS Virus
tttgacaaatgtgactacatctttg

SEQ ID NO: 60913 - DNA, 25 bp, SARS Virus
ttgacaaatgtcgctacatctttga

SEQ ID NO: 60914 - DNA, 25 bp, SARS Virus
tgacaaatgtcagtacatctttgag

SEQ ID NO: 60915 - DNA, 25 bp, SARS Virus
gacaaatgtcacgacatctttgagg

SEQ ID NO: 60916 - DNA, 25 bp, SARS Virus
acaaatgtcactgcatctttgaggt

SEQ ID NO: 60917 - DNA, 25 bp, SARS Virus
caaatgtcactagatctttgaggtg

SEQ ID NO: 60918 - DNA, 25 bp, SARS Virus
aaatgtcactacgtctttgaggtgt

SEQ ID NO: 60919 - DNA, 25 bp, SARS Virus
aatgtcactacagctttgaggtgtg

SEQ ID NO: 60920 - DNA, 25 bp, SARS Virus
atgtcactacatgtttgaggtgtgg

SEQ ID NO: 60921 - DNA, 25 bp, SARS Virus
tgtcactacatcgttgaggtgtgga

SEQ ID NO: 60922 - DNA, 25 bp, SARS Virus
gtcactacatctgtgaggtgtggaa

SEQ ID NO: 60923 - DNA, 25 bp, SARS Virus
tcactacatcttggaggtgtggaat

SEQ ID NO: 60924 - DNA, 25 bp, SARS Virus
cactacatctttgaggtgtggaata

SEQ ID NO: 60925 - DNA, 25 bp, SARS Virus
actacatctttggggtgtggaatac

SEQ ID NO: 60926 - DNA, 25 bp, SARS Virus
ctacatctttgaggtgtggaatacc

SEQ ID NO: 60927 - DNA, 25 bp, SARS Virus
tacatctttgaggtgtggaataccc

SEQ ID NO: 60928 - DNA, 25 bp, SARS Virus
acatctttgaggggtggaataccca

SEQ ID NO: 60929 - DNA, 25 bp, SARS Virus
catctttgaggtgtggaatacccaa

SEQ ID NO: 60930 - DNA, 25 bp, SARS Virus
atctttgaggtggggaatacccaac

SEQ ID NO: 60931 - DNA, 25 bp, SARS Virus
tctttgaggtgtggaatacccaacc

SEQ ID NO: 60932 - DNA, 25 bp, SARS Virus
ctttgaggtgtggaatacccaaccc

SEQ ID NO: 60933 - DNA, 25 bp, SARS Virus
tttgaggtgtgggatacccaaccct

SEQ ID NO: 60934 - DNA, 25 bp, SARS Virus
ttgaggtgtggagtacccaacccta

SEQ ID NO: 60935 - DNA, 25 bp, SARS Virus
tgaggtgtggaagacccaaccctaa

SEQ ID NO: 60936 - DNA, 25 bp, SARS Virus
gaggtgtggaatgcccaaccctaat

SEQ ID NO: 60937 - DNA, 25 bp, SARS Virus
aggtgtggaatagccaaccctaata

SEQ ID NO: 60938 - DNA, 25 bp, SARS Virus
ggtgtggaatacgcaaccctaatag

SEQ ID NO: 60939 - DNA, 25 bp, SARS Virus
gtgtggaataccgaaccctaatagg

SEQ ID NO: 60940 - DNA, 25 bp, SARS Virus
tgtggaatacccgaccctaataggt

SEQ ID NO: 60941 - DNA, 25 bp, SARS Virus
gtggaatacccagccctaataggtt

SEQ ID NO: 60942 - DNA, 25 bp, SARS Virus
tggaatacccaagcctaataggttt

SEQ ID NO: 60943 - DNA, 25 bp, SARS Virus
ggaatacccaacgctaataggtttt

SEQ ID NO: 60944 - DNA, 25 bp, SARS Virus
gaatacccaaccgtaataggtttta

SEQ ID NO: 60945 - DNA, 25 bp, SARS Virus
aatacccaacccgaataggttttac

SEQ ID NO: 60946 - DNA, 25 bp, SARS Virus
atacccaaccctgataggttttaca

SEQ ID NO: 60947 - DNA, 25 bp, SARS Virus
tacccaaccctagtaggttttacac

SEQ ID NO: 60948 - DNA, 25 bp, SARS Virus
acccaaccctaagaggttttacact

SEQ ID NO: 60949 - DNA, 25 bp, SARS Virus
cccaaccctaatgggttttacactg

SEQ ID NO: 60950 - DNA, 25 bp, SARS Virus
ccaaccctaataggttttacactgt

SEQ ID NO: 60951 - DNA, 25 bp, SARS Virus
caaccctaataggttttacactgtc

SEQ ID NO: 60952 - DNA, 25 bp, SARS Virus
aaccctaatagggtttacactgtct

SEQ ID NO: 60953 - DNA, 25 bp, SARS Virus
accctaataggtgttacactgtctc

SEQ ID NO: 60954 - DNA, 25 bp, SARS Virus
ccctaataggttgtacactgtctcg

SEQ ID NO: 60955 - DNA, 25 bp, SARS Virus
cctaataggtttgacactgtctcgg

SEQ ID NO: 60956 - DNA, 25 bp, SARS Virus
ctaataggttttgcactgtctcggt

SEQ ID NO: 60957 - DNA, 25 bp, SARS Virus
taataggttttagactgtctcggta

SEQ ID NO: 60958 - DNA, 25 bp, SARS Virus
aataggttttacgctgtctcggtac

SEQ ID NO: 60959 - DNA, 25 bp, SARS Virus
ataggttttacagtgtctcggtacg

SEQ ID NO: 60960 - DNA, 25 bp, SARS Virus
taggttttacacggtctcggtacgg

SEQ ID NO: 60961 - DNA, 25 bp, SARS Virus
aggttttacactgtctcggtacgga

SEQ ID NO: 60962 - DNA, 25 bp, SARS Virus
ggttttacactggctcggtacggat

SEQ ID NO: 60963 - DNA, 25 bp, SARS Virus
gttttacactgtgtcggtacggatt

SEQ ID NO: 60964 - DNA, 25 bp, SARS Virus
ttttacactgtcgcggtacggattg

SEQ ID NO: 60965 - DNA, 25 bp, SARS Virus
tttacactgtctgggtacggattgt

SEQ ID NO: 60966 - DNA, 25 bp, SARS Virus
ttacactgtctcggtacggattgta

SEQ ID NO: 60967 - DNA, 25 bp, SARS Virus
tacactgtctcggtacggattgtac

SEQ ID NO: 60968 - DNA, 25 bp, SARS Virus
acactgtctcgggacggattgtacg

SEQ ID NO: 60969 - DNA, 25 bp, SARS Virus
cactgtctcggtgcggattgtacga

SEQ ID NO: 60970 - DNA, 25 bp, SARS Virus
actgtctcggtagggattgtacgaa

SEQ ID NO: 60971 - DNA, 25 bp, SARS Virus
ctgtctcggtacggattgtacgaat

SEQ ID NO: 60972 - DNA, 25 bp, SARS Virus
tgtctcggtacggattgtacgaatc

SEQ ID NO: 60973 - DNA, 25 bp, SARS Virus
gtctcggtacgggttgtacgaatcc

SEQ ID NO: 60974 - DNA, 25 bp, SARS Virus
tctcggtacggagtgtacgaatcct

SEQ ID NO: 60975 - DNA, 25 bp, SARS Virus
ctcggtacggatggtacgaatccta

SEQ ID NO: 60976 - DNA, 25 bp, SARS Virus
tcggtacggattgtacgaatcctat

SEQ ID NO: 60977 - DNA, 25 bp, SARS Virus
cggtacggattggacgaatcctatt

SEQ ID NO: 60978 - DNA, 25 bp, SARS Virus
ggtacggattgtgcgaatcctatta

SEQ ID NO: 60979 - DNA, 25 bp, SARS Virus
gtacggattgtaggaatcctattac

SEQ ID NO: 60980 - DNA, 25 bp, SARS Virus
tacggattgtacgaatcctattacc

SEQ ID NO: 60981 - DNA, 25 bp, SARS Virus
acggattgtacggatcctattaccg

SEQ ID NO: 60982 - DNA, 25 bp, SARS Virus
cggattgtacgagtcctattaccgg

SEQ ID NO: 60983 - DNA, 25 bp, SARS Virus
ggattgtacgaagcctattaccgga

SEQ ID NO: 60984 - DNA, 25 bp, SARS Virus
gattgtacgaatgctattaccggag

SEQ ID NO: 60985 - DNA, 25 bp, SARS Virus
attgtacgaatcgtattaccggaga

SEQ ID NO: 60986 - DNA, 25 bp, SARS Virus
ttgtacgaatccgattaccggagag

SEQ ID NO: 60987 - DNA, 25 bp, SARS Virus
tgtacgaatcctgttaccggagaga

SEQ ID NO: 60988 - DNA, 25 bp, SARS Virus
gtacgaatcctagtaccggagagaa

SEQ ID NO: 60989 - DNA, 25 bp, SARS Virus
tacgaatcctatgaccggagagaac

SEQ ID NO: 60990 - DNA, 25 bp, SARS Virus
acgaatcctattgccggagagaaca

SEQ ID NO: 60991 - DNA, 25 bp, SARS Virus
cgaatcctattagcggagagaacaa

SEQ ID NO: 60992 - DNA, 25 bp, SARS Virus
gaatcctattacgggagagaacaag

SEQ ID NO: 60993 - DNA, 25 bp, SARS Virus
aatcctattaccggagagaacaaga

SEQ ID NO: 60994 - DNA, 25 bp, SARS Virus
atcctattaccggagagaacaagaa

SEQ ID NO: 60995 - DNA, 25 bp, SARS Virus
tcctattaccggggagaacaagaac

SEQ ID NO: 60996 - DNA, 25 bp, SARS Virus
cctattaccggagagaacaagaacg

SEQ ID NO: 60997 - DNA, 25 bp, SARS Virus
ctattaccggagggaacaagaacga

SEQ ID NO: 60998 - DNA, 25 bp, SARS Virus
tattaccggagagaacaagaacgag

SEQ ID NO: 60999 - DNA, 25 bp, SARS Virus
attaccggagaggacaagaacgagc

SEQ ID NO: 61000 - DNA, 25 bp, SARS Virus
ttaccggagagagcaagaacgagcg

SEQ ID NO: 61001 - DNA, 25 bp, SARS Virus
taccggagagaagaagaacgagcgt

SEQ ID NO: 61002 - DNA, 25 bp, SARS Virus
accggagagaacgagaacgagcgtt

SEQ ID NO: 61003 - DNA, 25 bp, SARS Virus
ccggagagaacaggaacgagcgttt

SEQ ID NO: 61004 - DNA, 25 bp, SARS Virus
cggagagaacaagaacgagcgtttg

SEQ ID NO: 61005 - DNA, 25 bp, SARS Virus
ggagagaacaaggacgagcgtttgt

SEQ ID NO: 61006 - DNA, 25 bp, SARS Virus
gagagaacaagagcgagcgtttgta

SEQ ID NO: 61007 - DNA, 25 bp, SARS Virus
agagaacaagaaggagcgtttgtat

SEQ ID NO: 61008 - DNA, 25 bp, SARS Virus
gagaacaagaacgagcgtttgtatt

SEQ ID NO: 61009 - DNA, 25 bp, SARS Virus
agaacaagaacgggcgtttgtattg

SEQ ID NO: 61010 - DNA, 25 bp, SARS Virus
gaacaagaacgagcgtttgtattgt

SEQ ID NO: 61011 - DNA, 25 bp, SARS Virus
aacaagaacgagggtttgtattgtg

SEQ ID NO: 61012 - DNA, 25 bp, SARS Virus
acaagaacgagcgtttgtattgtga

SEQ ID NO: 61013 - DNA, 25 bp, SARS Virus
caagaacgagcggttgtattgtgaa

SEQ ID NO: 61014 - DNA, 25 bp, SARS Virus
aagaacgagcgtgtgtattgtgaac

SEQ ID NO: 61015 - DNA, 25 bp, SARS Virus
agaacgagcgttggtattgtgaacg

SEQ ID NO: 61016 - DNA, 25 bp, SARS Virus
gaacgagcgtttgtattgtgaacga

SEQ ID NO: 61017 - DNA, 25 bp, SARS Virus
aacgagcgtttggattgtgaacgac

SEQ ID NO: 61018 - DNA, 25 bp, SARS Virus
acgagcgtttgtgttgtgaacgaca

SEQ ID NO: 61019 - DNA, 25 bp, SARS Virus
cgagcgtttgtagtgtgaacgacat

SEQ ID NO: 61020 - DNA, 25 bp, SARS Virus
gagcgtttgtatggtgaacgacatt

SEQ ID NO: 61021 - DNA, 25 bp, SARS Virus
agcgtttgtattgtgaacgacattg

SEQ ID NO: 61022 - DNA, 25 bp, SARS Virus
gcgtttgtattgggaacgacattga

SEQ ID NO: 61023 - DNA, 25 bp, SARS Virus
cgtttgtattgtgaacgacattgaa

SEQ ID NO: 61024 - DNA, 25 bp, SARS Virus
gtttgtattgtggacgacattgaat

SEQ ID NO: 61025 - DNA, 25 bp, SARS Virus
tttgtattgtgagcgacattgaata

SEQ ID NO: 61026 - DNA, 25 bp, SARS Virus
ttgtattgtgaaggacattgaatag

SEQ ID NO: 61027 - DNA, 25 bp, SARS Virus
tgtattgtgaacgacattgaatagt

SEQ ID NO: 61028 - DNA, 25 bp, SARS Virus
gtattgtgaacggcattgaatagtg

SEQ ID NO: 61029 - DNA, 25 bp, SARS Virus
tattgtgaacgagattgaatagtgt

SEQ ID NO: 61030 - DNA, 25 bp, SARS Virus
attgtgaacgacgttgaatagtgtg

SEQ ID NO: 61031 - DNA, 25 bp, SARS Virus
ttgtgaacgacagtgaatagtgtgg

SEQ ID NO: 61032 - DNA, 25 bp, SARS Virus
tgtgaacgacatggaatagtgtggc

SEQ ID NO: 61033 - DNA, 25 bp, SARS Virus
gtgaacgacattgaatagtgtggca

SEQ ID NO: 61034 - DNA, 25 bp, SARS Virus
tgaacgacattggatagtgtggcaa

SEQ ID NO: 61035 - DNA, 25 bp, SARS Virus
gaacgacattgagtagtgtggcaaa

SEQ ID NO: 61036 - DNA, 25 bp, SARS Virus
aacgacattgaagagtgtggcaaag

SEQ ID NO: 61037 - DNA, 25 bp, SARS Virus
acgacattgaatggtgtggcaaaga

SEQ ID NO: 61038 - DNA, 25 bp, SARS Virus
cgacattgaatagtgtggcaaagat

SEQ ID NO: 61039 - DNA, 25 bp, SARS Virus
gacattgaatagggtggcaaagatg

SEQ ID NO: 61040 - DNA, 25 bp, SARS Virus
acattgaatagtgtggcaaagatgt

SEQ ID NO: 61041 - DNA, 25 bp, SARS Virus
cattgaatagtggggcaaagatgtc

SEQ ID NO: 61042 - DNA, 25 bp, SARS Virus
attgaatagtgtggcaaagatgtcc

SEQ ID NO: 61043 - DNA, 25 bp, SARS Virus
ttgaatagtgtggcaaagatgtcca

SEQ ID NO: 61044 - DNA, 25 bp, SARS Virus
tgaatagtgtgggaaagatgtccaa

SEQ ID NO: 61045 - DNA, 25 bp, SARS Virus
gaatagtgtggcgaagatgtccaat

SEQ ID NO: 61046 - DNA, 25 bp, SARS Virus
aatagtgtggcagagatgtccaatc

SEQ ID NO: 61047 - DNA, 25 bp, SARS Virus
atagtgtggcaaggatgtccaatcg

SEQ ID NO: 61048 - DNA, 25 bp, SARS Virus
tagtgtggcaaagatgtccaatcga

SEQ ID NO: 61049 - DNA, 25 bp, SARS Virus
agtgtggcaaaggtgtccaatcgat

SEQ ID NO: 61050 - DNA, 25 bp, SARS Virus
gtgtggcaaagaggtccaatcgatt

SEQ ID NO: 61051 - DNA, 25 bp, SARS Virus
tgtggcaaagatgtccaatcgattg

SEQ ID NO: 61052 - DNA, 25 bp, SARS Virus
gtggcaaagatggccaatcgattgc

SEQ ID NO: 61053 - DNA, 25 bp, SARS Virus
tggcaaagatgtgcaatcgattgct

SEQ ID NO: 61054 - DNA, 25 bp, SARS Virus
ggcaaagatgtcgaatcgattgctc

SEQ ID NO: 61055 - DNA, 25 bp, SARS Virus
gcaaagatgtccgatcgattgctca

SEQ ID NO: 61056 - DNA, 25 bp, SARS Virus
caaagatgtccagtcgattgctcac

SEQ ID NO: 61057 - DNA, 25 bp, SARS Virus
aaagatgtccaagcgattgctcaca

SEQ ID NO: 61058 - DNA, 25 bp, SARS Virus
aagatgtccaatggattgctcacac

SEQ ID NO: 61059 - DNA, 25 bp, SARS Virus
agatgtccaatcgattgctcacacg

SEQ ID NO: 61060 - DNA, 25 bp, SARS Virus
gatgtccaatcggttgctcacacgc

SEQ ID NO: 61061 - DNA, 25 bp, SARS Virus
atgtccaatcgagtgctcacacgcg

SEQ ID NO: 61062 - DNA, 25 bp, SARS Virus
tgtccaatcgatggctcacacgcgt

SEQ ID NO: 61063 - DNA, 25 bp, SARS Virus
gtccaatcgattgctcacacgcgtt

SEQ ID NO: 61064 - DNA, 25 bp, SARS Virus
tccaatcgattggtcacacgcgttc

SEQ ID NO: 61065 - DNA, 25 bp, SARS Virus
ccaatcgattgcgcacacgcgttca

SEQ ID NO: 61066 - DNA, 25 bp, SARS Virus
caatcgattgctgacacgcgttcat

SEQ ID NO: 61067 - DNA, 25 bp, SARS Virus
aatcgattgctcgcacgcgttcata

SEQ ID NO: 61068 - DNA, 25 bp, SARS Virus
atcgattgctcagacgcgttcataa

SEQ ID NO: 61069 - DNA, 25 bp, SARS Virus
tcgattgctcacgcgcgttcataat

SEQ ID NO: 61070 - DNA, 25 bp, SARS Virus
cgattgctcacaggcgttcataatt

SEQ ID NO: 61071 - DNA, 25 bp, SARS Virus
gattgctcacacgcgttcataattc

SEQ ID NO: 61072 - DNA, 25 bp, SARS Virus
attgctcacacgggttcataattca

SEQ ID NO: 61073 - DNA, 25 bp, SARS Virus
ttgctcacacgcgttcataattcac

SEQ ID NO: 61074 - DNA, 25 bp, SARS Virus
tgctcacacgcggtcataattcact

SEQ ID NO: 61075 - DNA, 25 bp, SARS Virus
gctcacacgcgtgcataattcactc

SEQ ID NO: 61076 - DNA, 25 bp, SARS Virus
ctcacacgcgttgataattcactct

SEQ ID NO: 61077 - DNA, 25 bp, SARS Virus
tcacacgcgttcgtaattcactcta

SEQ ID NO: 61078 - DNA, 25 bp, SARS Virus
cacacgcgttcagaattcactctac

SEQ ID NO: 61079 - DNA, 25 bp, SARS Virus
acacgcgttcatgattcactctacc

SEQ ID NO: 61080 - DNA, 25 bp, SARS Virus
cacgcgttcatagttcactctacca

SEQ ID NO: 61081 - DNA, 25 bp, SARS Virus
acgcgttcataagtcactctaccag

SEQ ID NO: 61082 - DNA, 25 bp, SARS Virus
cgcgttcataatgcactctaccagt

SEQ ID NO: 61083 - DNA, 25 bp, SARS Virus
gcgttcataattgactctaccagta

SEQ ID NO: 61084 - DNA, 25 bp, SARS Virus
cgttcataattcgctctaccagtac

SEQ ID NO: 61085 - DNA, 25 bp, SARS Virus
gttcataattcagtctaccagtaca

SEQ ID NO: 61086 - DNA, 25 bp, SARS Virus
ttcataattcacgctaccagtacac

SEQ ID NO: 61087 - DNA, 25 bp, SARS Virus
tcataattcactgtaccagtacaca

SEQ ID NO: 61088 - DNA, 25 bp, SARS Virus
cataattcactcgaccagtacacac

SEQ ID NO: 61089 - DNA, 25 bp, SARS Virus
ataattcactctgccagtacacacc

SEQ ID NO: 61090 - DNA, 25 bp, SARS Virus
taattcactctagcagtacacaccg

SEQ ID NO: 61091 - DNA, 25 bp, SARS Virus
aattcactctacgagtacacaccgc

SEQ ID NO: 61092 - DNA, 25 bp, SARS Virus
attcactctaccggtacacaccgcc

SEQ ID NO: 61093 - DNA, 25 bp, SARS Virus
ttcactctaccagtacacaccgccg

SEQ ID NO: 61094 - DNA, 25 bp, SARS Virus
tcactctaccaggacacaccgccga

SEQ ID NO: 61095 - DNA, 25 bp, SARS Virus
cactctaccagtgcacaccgccgag

SEQ ID NO: 61096 - DNA, 25 bp, SARS Virus
actctaccagtagacaccgccgagt

SEQ ID NO: 61097 - DNA, 25 bp, SARS Virus
ctctaccagtacgcaccgccgagtg

SEQ ID NO: 61098 - DNA, 25 bp, SARS Virus
tctaccagtacagaccgccgagtga

SEQ ID NO: 61099 - DNA, 25 bp, SARS Virus
ctaccagtacacgccgccgagtgat

SEQ ID NO: 61100 - DNA, 25 bp, SARS Virus
taccagtacacagcgccgagtgata

SEQ ID NO: 61101 - DNA, 25 bp, SARS Virus
accagtacacacggccgagtgatat

SEQ ID NO: 61102 - DNA, 25 bp, SARS Virus
ccagtacacaccgccgagtgatata

SEQ ID NO: 61103 - DNA, 25 bp, SARS Virus
cagtacacaccggcgagtgatatac

SEQ ID NO: 61104 - DNA, 25 bp, SARS Virus
agtacacaccgcggagtgatataca

SEQ ID NO: 61105 - DNA, 25 bp, SARS Virus
gtacacaccgccgagtgatatacaa

SEQ ID NO: 61106 - DNA, 25 bp, SARS Virus
tacacaccgccgggtgatatacaat

SEQ ID NO: 61107 - DNA, 25 bp, SARS Virus
acacaccgccgagtgatatacaatt

SEQ ID NO: 61108 - DNA, 25 bp, SARS Virus
cacaccgccgagggatatacaattt

SEQ ID NO: 61109 - DNA, 25 bp, SARS Virus
acaccgccgagtgatatacaatttg

SEQ ID NO: 61110 - DNA, 25 bp, SARS Virus
caccgccgagtggtatacaatttgg

SEQ ID NO: 61111 - DNA, 25 bp, SARS Virus
accgccgagtgagatacaatttggt

SEQ ID NO: 61112 - DNA, 25 bp, SARS Virus
ccgccgagtgatgtacaatttggtc

SEQ ID NO: 61113 - DNA, 25 bp, SARS Virus
cgccgagtgatagacaatttggtcc

SEQ ID NO: 61114 - DNA, 25 bp, SARS Virus
gccgagtgatatgcaatttggtcca

SEQ ID NO: 61115 - DNA, 25 bp, SARS Virus
ccgagtgatatagaatttggtccac

SEQ ID NO: 61116 - DNA, 25 bp, SARS Virus
cgagtgatatacgatttggtccacc

SEQ ID NO: 61117 - DNA, 25 bp, SARS Virus
gagtgatatacagtttggtccacct

SEQ ID NO: 61118 - DNA, 25 bp, SARS Virus
agtgatatacaagttggtccacctt

SEQ ID NO: 61119 - DNA, 25 bp, SARS Virus
gtgatatacaatgtggtccaccttg

SEQ ID NO: 61120 - DNA, 25 bp, SARS Virus
tgatatacaattgggtccaccttgt

SEQ ID NO: 61121 - DNA, 25 bp, SARS Virus
gatatacaatttggtccaccttgta

SEQ ID NO: 61122 - DNA, 25 bp, SARS Virus
atatacaatttggtccaccttgtag

SEQ ID NO: 61123 - DNA, 25 bp, SARS Virus
tatacaatttgggccaccttgtagt

SEQ ID NO: 61124 - DNA, 25 bp, SARS Virus
atacaatttggtgcaccttgtagta

SEQ ID NO: 61125 - DNA, 25 bp, SARS Virus
tacaatttggtcgaccttgtagtag

SEQ ID NO: 61126 - DNA, 25 bp, SARS Virus
acaatttggtccgccttgtagtagg

SEQ ID NO: 61127 - DNA, 25 bp, SARS Virus
caatttggtccagcttgtagtaggc

SEQ ID NO: 61128 - DNA, 25 bp, SARS Virus
aatttggtccacgttgtagtaggcc

SEQ ID NO: 61129 - DNA, 25 bp, SARS Virus
tctgaaataatattgagttactcaa

SEQ ID NO: 61130 - DNA, 25 bp, SARS Virus
ctgaaataatactgagttactcaat

SEQ ID NO: 61131 - DNA, 25 bp, SARS Virus
tgaaataatacttagttactcaata

SEQ ID NO: 61132 - DNA, 25 bp, SARS Virus
gaaataatactgtgttactcaatac

SEQ ID NO: 61133 - DNA, 25 bp, SARS Virus
aaataatactgatttactcaatact

SEQ ID NO: 61134 - DNA, 25 bp, SARS Virus
aataatactgagttactcaatactc

SEQ ID NO: 61135 - DNA, 25 bp, SARS Virus
ataatactgagttactcaatactcc

SEQ ID NO: 61136 - DNA, 25 bp, SARS Virus
taatactgagtttctcaatactcct

SEQ ID NO: 61137 - DNA, 25 bp, SARS Virus
aatactgagttattcaatactccta

SEQ ID NO: 61138 - DNA, 25 bp, SARS Virus
atactgagttactcaatactcctag

SEQ ID NO: 61139 - DNA, 25 bp, SARS Virus
tactgagttacttaatactcctagt

SEQ ID NO: 61140 - DNA, 25 bp, SARS Virus
actgagttactctatactcctagtt

SEQ ID NO: 61141 - DNA, 25 bp, SARS Virus
ctgagttactcattactcctagttc

SEQ ID NO: 61142 - DNA, 25 bp, SARS Virus
tgagttactcaatactcctagttct

SEQ ID NO: 61143 - DNA, 25 bp, SARS Virus
gagttactcaattctcctagttcta

SEQ ID NO: 61144 - DNA, 25 bp, SARS Virus
agttactcaatattcctagttctac

SEQ ID NO: 61145 - DNA, 25 bp, SARS Virus
gttactcaatactcctagttctacg

SEQ ID NO: 61146 - DNA, 25 bp, SARS Virus
ttactcaatacttctagttctacgt

SEQ ID NO: 61147 - DNA, 25 bp, SARS Virus
tactcaatactcttagttctacgtg

SEQ ID NO: 61148 - DNA, 25 bp, SARS Virus
actcaatactcctagttctacgtga

SEQ ID NO: 61149 - DNA, 25 bp, SARS Virus
ctcaatactccttgttctacgtgaa

SEQ ID NO: 61150 - DNA, 25 bp, SARS Virus
tcaatactcctatttctacgtgaaa

SEQ ID NO: 61151 - DNA, 25 bp, SARS Virus
caatactcctagttctacgtgaaaa

SEQ ID NO: 61152 - DNA, 25 bp, SARS Virus
aatactcctagttctacgtgaaaag

SEQ ID NO: 61153 - DNA, 25 bp, SARS Virus
atactcctagttttacgtgaaaagc

SEQ ID NO: 61154 - DNA, 25 bp, SARS Virus
tactcctagttctacgtgaaaagcg

SEQ ID NO: 61155 - DNA, 25 bp, SARS Virus
actcctagttcttcgtgaaaagcgc

SEQ ID NO: 61156 - DNA, 25 bp, SARS Virus
ctcctagttctatgtgaaaagcgca

SEQ ID NO: 61157 - DNA, 25 bp, SARS Virus
tcctagttctacttgaaaagcgcat

SEQ ID NO: 61158 - DNA, 25 bp, SARS Virus
cctagttctacgtgaaaagcgcata

SEQ ID NO: 61159 - DNA, 25 bp, SARS Virus
ctagttctacgttaaaagcgcatat

SEQ ID NO: 61160 - DNA, 25 bp, SARS Virus
tagttctacgtgtaaagcgcatatg

SEQ ID NO: 61161 - DNA, 25 bp, SARS Virus
agttctacgtgataagcgcatatga

SEQ ID NO: 61162 - DNA, 25 bp, SARS Virus
gttctacgtgaatagcgcatatgat

SEQ ID NO: 61163 - DNA, 25 bp, SARS Virus
ttctacgtgaaatgcgcatatgatt

SEQ ID NO: 61164 - DNA, 25 bp, SARS Virus
tctacgtgaaaatcgcatatgattc

SEQ ID NO: 61165 - DNA, 25 bp, SARS Virus
ctacgtgaaaagtgcatatgattcg

SEQ ID NO: 61166 - DNA, 25 bp, SARS Virus
tacgtgaaaagctcatatgattcgc

SEQ ID NO: 61167 - DNA, 25 bp, SARS Virus
acgtgaaaagcgtatatgattcgca

SEQ ID NO: 61168 - DNA, 25 bp, SARS Virus
cgtgaaaagcgcttatgattcgcat

SEQ ID NO: 61169 - DNA, 25 bp, SARS Virus
gtgaaaagcgcatatgattcgcatt

SEQ ID NO: 61170 - DNA, 25 bp, SARS Virus
tgaaaagcgcatttgattcgcatta

SEQ ID NO: 61171 - DNA, 25 bp, SARS Virus
gaaaagcgcatatgattcgcattac

SEQ ID NO: 61172 - DNA, 25 bp, SARS Virus
aaaagcgcatattattcgcattaca

SEQ ID NO: 61173 - DNA, 25 bp, SARS Virus
aaagcgcatatgtttcgcattacag

SEQ ID NO: 61174 - DNA, 25 bp, SARS Virus
aagcgcatatgattcgcattacagt

SEQ ID NO: 61175 - DNA, 25 bp, SARS Virus
agcgcatatgattcgcattacagta

SEQ ID NO: 61176 - DNA, 25 bp, SARS Virus
gcgcatatgatttgcattacagtag

SEQ ID NO: 61177 - DNA, 25 bp, SARS Virus
cgcatatgattctcattacagtagg

SEQ ID NO: 61178 - DNA, 25 bp, SARS Virus
gcatatgattcgtattacagtaggg

SEQ ID NO: 61179 - DNA, 25 bp, SARS Virus
catatgattcgctttacagtaggga

SEQ ID NO: 61180 - DNA, 25 bp, SARS Virus
atatgattcgcattacagtagggat

SEQ ID NO: 61181 - DNA, 25 bp, SARS Virus
tatgattcgcattacagtagggatg

SEQ ID NO: 61182 - DNA, 25 bp, SARS Virus
atgattcgcatttcagtagggatga

SEQ ID NO: 61183 - DNA, 25 bp, SARS Virus
tgattcgcattatagtagggatgat

SEQ ID NO: 61184 - DNA, 25 bp, SARS Virus
gattcgcattactgtagggatgata

SEQ ID NO: 61185 - DNA, 25 bp, SARS Virus
attcgcattacattagggatgatat

SEQ ID NO: 61186 - DNA, 25 bp, SARS Virus
ttcgcattacagtagggatgatatt

SEQ ID NO: 61187 - DNA, 25 bp, SARS Virus
tcgcattacagttgggatgatattg

SEQ ID NO: 61188 - DNA, 25 bp, SARS Virus
cgcattacagtatggatgatattga

SEQ ID NO: 61189 - DNA, 25 bp, SARS Virus
gcattacagtagtgatgatattgag

SEQ ID NO: 61190 - DNA, 25 bp, SARS Virus
cattacagtaggtatgatattgagt

SEQ ID NO: 61191 - DNA, 25 bp, SARS Virus
attacagtagggttgatattgagtt

SEQ ID NO: 61192 - DNA, 25 bp, SARS Virus
ttacagtagggatgatattgagttt

SEQ ID NO: 61193 - DNA, 25 bp, SARS Virus
tacagtagggattatattgagttta

SEQ ID NO: 61194 - DNA, 25 bp, SARS Virus
acagtagggatgttattgagtttac

SEQ ID NO: 61195 - DNA, 25 bp, SARS Virus
cagtagggatgatattgagtttact

SEQ ID NO: 61196 - DNA, 25 bp, SARS Virus
agtagggatgattttgagtttactt

SEQ ID NO: 61197 - DNA, 25 bp, SARS Virus
gtagggatgatattgagtttactta

SEQ ID NO: 61198 - DNA, 25 bp, SARS Virus
tagggatgatattgagtttacttag

SEQ ID NO: 61199 - DNA, 25 bp, SARS Virus
agggatgatatttagtttacttaga

SEQ ID NO: 61200 - DNA, 25 bp, SARS Virus
gggatgatattgtgtttacttagaa

SEQ ID NO: 61201 - DNA, 25 bp, SARS Virus
ggatgatattgattttacttagaat

SEQ ID NO: 61202 - DNA, 25 bp, SARS Virus
gatgatattgagtttacttagaatt

SEQ ID NO: 61203 - DNA, 25 bp, SARS Virus
atgatattgagtttacttagaattc

SEQ ID NO: 61204 - DNA, 25 bp, SARS Virus
tgatattgagtttacttagaattca

SEQ ID NO: 61205 - DNA, 25 bp, SARS Virus
gatattgagttttcttagaattcat

SEQ ID NO: 61206 - DNA, 25 bp, SARS Virus
atattgagtttatttagaattcata

SEQ ID NO: 61207 - DNA, 25 bp, SARS Virus
tattgagtttacttagaattcatac

SEQ ID NO: 61208 - DNA, 25 bp, SARS Virus
attgagtttacttagaattcatacg

SEQ ID NO: 61209 - DNA, 25 bp, SARS Virus
ttgagtttactttgaattcatacgg

SEQ ID NO: 61210 - DNA, 25 bp, SARS Virus
tgagtttacttataattcatacggt

SEQ ID NO: 61211 - DNA, 25 bp, SARS Virus
gagtttacttagtattcatacggta

SEQ ID NO: 61212 - DNA, 25 bp, SARS Virus
agtttacttagatttcatacggtaa

SEQ ID NO: 61213 - DNA, 25 bp, SARS Virus
gtttacttagaattcatacggtaat

SEQ ID NO: 61214 - DNA, 25 bp, SARS Virus
tttacttagaattcatacggtaatc

SEQ ID NO: 61215 - DNA, 25 bp, SARS Virus
ttacttagaatttatacggtaatca

SEQ ID NO: 61216 - DNA, 25 bp, SARS Virus
tacttagaattcttacggtaatcac

SEQ ID NO: 61217 - DNA, 25 bp, SARS Virus
acttagaattcatacggtaatcacg

SEQ ID NO: 61218 - DNA, 25 bp, SARS Virus
cttagaattcattcggtaatcacgt

SEQ ID NO: 61219 - DNA, 25 bp, SARS Virus
ttagaattcatatggtaatcacgtt

SEQ ID NO: 61220 - DNA, 25 bp, SARS Virus
tagaattcatactgtaatcacgttt

SEQ ID NO: 61221 - DNA, 25 bp, SARS Virus
agaattcatacgttaatcacgtttc

SEQ ID NO: 61222 - DNA, 25 bp, SARS Virus
gaattcatacggtaatcacgtttct

SEQ ID NO: 61223 - DNA, 25 bp, SARS Virus
aattcatacggttatcacgtttctt

SEQ ID NO: 61224 - DNA, 25 bp, SARS Virus
attcatacggtattcacgtttctta

SEQ ID NO: 61225 - DNA, 25 bp, SARS Virus
ttcatacggtaatcacgtttcttat

SEQ ID NO: 61226 - DNA, 25 bp, SARS Virus
tcatacggtaattacgtttcttatc

SEQ ID NO: 61227 - DNA, 25 bp, SARS Virus
catacggtaatctcgtttcttatct

SEQ ID NO: 61228 - DNA, 25 bp, SARS Virus
atacggtaatcatgtttcttatctc

SEQ ID NO: 61229 - DNA, 25 bp, SARS Virus
tacggtaatcacttttcttatctcg

SEQ ID NO: 61230 - DNA, 25 bp, SARS Virus
acggtaatcacgtttcttatctcga

SEQ ID NO: 61231 - DNA, 25 bp, SARS Virus
cggtaatcacgtttcttatctcgag

SEQ ID NO: 61232 - DNA, 25 bp, SARS Virus
ggtaatcacgtttcttatctcgagc

SEQ ID NO: 61233 - DNA, 25 bp, SARS Virus
gtaatcacgttttttatctcgagcg

SEQ ID NO: 61234 - DNA, 25 bp, SARS Virus
taatcacgtttcttatctcgagcgt

SEQ ID NO: 61235 - DNA, 25 bp, SARS Virus
aatcacgtttcttatctcgagcgtg

SEQ ID NO: 61236 - DNA, 25 bp, SARS Virus
atcacgtttcttttctcgagcgtgg

SEQ ID NO: 61237 - DNA, 25 bp, SARS Virus
tcacgtttcttatctcgagcgtggc

SEQ ID NO: 61238 - DNA, 25 bp, SARS Virus
cacgtttcttatttcgagcgtggca

SEQ ID NO: 61239 - DNA, 25 bp, SARS Virus
acgtttcttatctcgagcgtggcat

SEQ ID NO: 61240 - DNA, 25 bp, SARS Virus
cgtttcttatcttgagcgtggcatc

SEQ ID NO: 61241 - DNA, 25 bp, SARS Virus
gtttcttatctctagcgtggcatcg

SEQ ID NO: 61242 - DNA, 25 bp, SARS Virus
tttcttatctcgtgcgtggcatcga

SEQ ID NO: 61243 - DNA, 25 bp, SARS Virus
ttcttatctcgatcgtggcatcgac

SEQ ID NO: 61244 - DNA, 25 bp, SARS Virus
tcttatctcgagtgtggcatcgacc

SEQ ID NO: 61245 - DNA, 25 bp, SARS Virus
cttatctcgagcttggcatcgacca

SEQ ID NO: 61246 - DNA, 25 bp, SARS Virus
ttatctcgagcgtggcatcgaccac

SEQ ID NO: 61247 - DNA, 25 bp, SARS Virus
tatctcgagcgttgcatcgaccaca

SEQ ID NO: 61248 - DNA, 25 bp, SARS Virus
atctcgagcgtgtcatcgaccacag

SEQ ID NO: 61249 - DNA, 25 bp, SARS Virus
tctcgagcgtggtatcgaccacaga

SEQ ID NO: 61250 - DNA, 25 bp, SARS Virus
ctcgagcgtggcttcgaccacagag

SEQ ID NO: 61251 - DNA, 25 bp, SARS Virus
tcgagcgtggcatcgaccacagaga

SEQ ID NO: 61252 - DNA, 25 bp, SARS Virus
cgagcgtggcattgaccacagagat

SEQ ID NO: 61253 - DNA, 25 bp, SARS Virus
gagcgtggcatctaccacagagata

SEQ ID NO: 61254 - DNA, 25 bp, SARS Virus
agcgtggcatcgtccacagagatag

SEQ ID NO: 61255 - DNA, 25 bp, SARS Virus
gcgtggcatcgatcacagagataga

SEQ ID NO: 61256 - DNA, 25 bp, SARS Virus
cgtggcatcgactacagagatagac

SEQ ID NO: 61257 - DNA, 25 bp, SARS Virus
gtggcatcgacctcagagatagaca

SEQ ID NO: 61258 - DNA, 25 bp, SARS Virus
tggcatcgaccatagagatagacat

SEQ ID NO: 61259 - DNA, 25 bp, SARS Virus
ggcatcgaccactgagatagacatc

SEQ ID NO: 61260 - DNA, 25 bp, SARS Virus
gcatcgaccacatagatagacatca

SEQ ID NO: 61261 - DNA, 25 bp, SARS Virus
catcgaccacagtgatagacatcat

SEQ ID NO: 61262 - DNA, 25 bp, SARS Virus
atcgaccacagatatagacatcatg

SEQ ID NO: 61263 - DNA, 25 bp, SARS Virus
tcgaccacagagttagacatcatga

SEQ ID NO: 61264 - DNA, 25 bp, SARS Virus
cgaccacagagatagacatcatgat

SEQ ID NO: 61265 - DNA, 25 bp, SARS Virus
gaccacagagattgacatcatgata

SEQ ID NO: 61266 - DNA, 25 bp, SARS Virus
accacagagatatacatcatgatac

SEQ ID NO: 61267 - DNA, 25 bp, SARS Virus
ccacagagatagtcatcatgatact

SEQ ID NO: 61268 - DNA, 25 bp, SARS Virus
cacagagatagatatcatgatactg

SEQ ID NO: 61269 - DNA, 25 bp, SARS Virus
acagagatagacttcatgatactgt

SEQ ID NO: 61270 - DNA, 25 bp, SARS Virus
cagagatagacatcatgatactgtt

SEQ ID NO: 61271 - DNA, 25 bp, SARS Virus
agagatagacattatgatactgttt

SEQ ID NO: 61272 - DNA, 25 bp, SARS Virus
gagatagacatcttgatactgttta

SEQ ID NO: 61273 - DNA, 25 bp, SARS Virus
agatagacatcatgatactgtttat

SEQ ID NO: 61274 - DNA, 25 bp, SARS Virus
gatagacatcattatactgtttatc

SEQ ID NO: 61275 - DNA, 25 bp, SARS Virus
atagacatcatgttactgtttatct

SEQ ID NO: 61276 - DNA, 25 bp, SARS Virus
tagacatcatgatactgtttatctg

SEQ ID NO: 61277 - DNA, 25 bp, SARS Virus
agacatcatgattctgtttatctgt

SEQ ID NO: 61278 - DNA, 25 bp, SARS Virus
gacatcatgatattgtttatctgtc

SEQ ID NO: 61279 - DNA, 25 bp, SARS Virus
acatcatgatactgtttatctgtca

SEQ ID NO: 61280 - DNA, 25 bp, SARS Virus
catcatgatactttttatctgtcaa

SEQ ID NO: 61281 - DNA, 25 bp, SARS Virus
atcatgatactgtttatctgtcaaa

SEQ ID NO: 61282 - DNA, 25 bp, SARS Virus
tcatgatactgtttatctgtcaaag

SEQ ID NO: 61283 - DNA, 25 bp, SARS Virus
catgatactgtttatctgtcaaagt

SEQ ID NO: 61284 - DNA, 25 bp, SARS Virus
atgatactgtttttctgtcaaagta

SEQ ID NO: 61285 - DNA, 25 bp, SARS Virus
tgatactgtttatctgtcaaagtag

SEQ ID NO: 61286 - DNA, 25 bp, SARS Virus
gatactgtttatttgtcaaagtagt

SEQ ID NO: 61287 - DNA, 25 bp, SARS Virus
atactgtttatctgtcaaagtagtc

SEQ ID NO: 61288 - DNA, 25 bp, SARS Virus
tactgtttatctttcaaagtagtct

SEQ ID NO: 61289 - DNA, 25 bp, SARS Virus
actgtttatctgtcaaagtagtctt

SEQ ID NO: 61290 - DNA, 25 bp, SARS Virus
ctgtttatctgttaaagtagtcttt

SEQ ID NO: 61291 - DNA, 25 bp, SARS Virus
tgtttatctgtctaagtagtcttta

SEQ ID NO: 61292 - DNA, 25 bp, SARS Virus
gtttatctgtcatagtagtctttaa

SEQ ID NO: 61293 - DNA, 25 bp, SARS Virus
tttatctgtcaatgtagtctttaat

SEQ ID NO: 61294 - DNA, 25 bp, SARS Virus
ttatctgtcaaattagtctttaata

SEQ ID NO: 61295 - DNA, 25 bp, SARS Virus
tatctgtcaaagtagtctttaataa

SEQ ID NO: 61296 - DNA, 25 bp, SARS Virus
atctgtcaaagttgtctttaataac

SEQ ID NO: 61297 - DNA, 25 bp, SARS Virus
tctgtcaaagtattctttaataact

SEQ ID NO: 61298 - DNA, 25 bp, SARS Virus
ctgtcaaagtagtctttaataactt

SEQ ID NO: 61299 - DNA, 25 bp, SARS Virus
tgtcaaagtagtttttaataacttc

SEQ ID NO: 61300 - DNA, 25 bp, SARS Virus
gtcaaagtagtctttaataacttca

SEQ ID NO: 61301 - DNA, 25 bp, SARS Virus
tcaaagtagtctttaataacttcag

SEQ ID NO: 61302 - DNA, 25 bp, SARS Virus
caaagtagtctttaataacttcagt

SEQ ID NO: 61303 - DNA, 25 bp, SARS Virus
aaagtagtcttttataacttcagtt

SEQ ID NO: 61304 - DNA, 25 bp, SARS Virus
aagtagtctttattaacttcagtta

SEQ ID NO: 61305 - DNA, 25 bp, SARS Virus
agtagtctttaataacttcagttat

SEQ ID NO: 61306 - DNA, 25 bp, SARS Virus
gtagtctttaattacttcagttatc

SEQ ID NO: 61307 - DNA, 25 bp, SARS Virus
tagtctttaatatcttcagttatcg

SEQ ID NO: 61308 - DNA, 25 bp, SARS Virus
agtctttaataatttcagttatcgg

SEQ ID NO: 61309 - DNA, 25 bp, SARS Virus
gtctttaataacttcagttatcggc

SEQ ID NO: 61310 - DNA, 25 bp, SARS Virus
tctttaataacttcagttatcggcg

SEQ ID NO: 61311 - DNA, 25 bp, SARS Virus
ctttaataactttagttatcggcgg

SEQ ID NO: 61312 - DNA, 25 bp, SARS Virus
tttaataacttctgttatcggcggt

SEQ ID NO: 61313 - DNA, 25 bp, SARS Virus
ttaataacttcatttatcggcggtg

SEQ ID NO: 61314 - DNA, 25 bp, SARS Virus
taataacttcagttatcggcggtga

SEQ ID NO: 61315 - DNA, 25 bp, SARS Virus
aataacttcagttatcggcggtgat

SEQ ID NO: 61316 - DNA, 25 bp, SARS Virus
ataacttcagttttcggcggtgatc

SEQ ID NO: 61317 - DNA, 25 bp, SARS Virus
taacttcagttatcggcggtgatct

SEQ ID NO: 61318 - DNA, 25 bp, SARS Virus
aacttcagttattggcggtgatctc

SEQ ID NO: 61319 - DNA, 25 bp, SARS Virus
acttcagttatctgcggtgatctcc

SEQ ID NO: 61320 - DNA, 25 bp, SARS Virus
cttcagttatcgtcggtgatctcct

SEQ ID NO: 61321 - DNA, 25 bp, SARS Virus
ttcagttatcggtggtgatctcctc

SEQ ID NO: 61322 - DNA, 25 bp, SARS Virus
tcagttatcggctgtgatctcctcg

SEQ ID NO: 61323 - DNA, 25 bp, SARS Virus
cagttatcggcgttgatctcctcga

SEQ ID NO: 61324 - DNA, 25 bp, SARS Virus
agttatcggcggtgatctcctcgat

SEQ ID NO: 61325 - DNA, 25 bp, SARS Virus
gttatcggcggttatctcctcgatg

SEQ ID NO: 61326 - DNA, 25 bp, SARS Virus
ttatcggcggtgttctcctcgatga

SEQ ID NO: 61327 - DNA, 25 bp, SARS Virus
tatcggcggtgatctcctcgatgac

SEQ ID NO: 61328 - DNA, 25 bp, SARS Virus
atcggcggtgatttcctcgatgaca

SEQ ID NO: 61329 - DNA, 25 bp, SARS Virus
tcggcggtgatctcctcgatgacac

SEQ ID NO: 61330 - DNA, 25 bp, SARS Virus
cggcggtgatcttctcgatgacacc

SEQ ID NO: 61331 - DNA, 25 bp, SARS Virus
ggcggtgatctcttcgatgacacca

SEQ ID NO: 61332 - DNA, 25 bp, SARS Virus
gcggtgatctcctcgatgacaccat

SEQ ID NO: 61333 - DNA, 25 bp, SARS Virus
cggtgatctccttgatgacaccatt

SEQ ID NO: 61334 - DNA, 25 bp, SARS Virus
ggtgatctcctctatgacaccatta

SEQ ID NO: 61335 - DNA, 25 bp, SARS Virus
gtgatctcctcgttgacaccattaa

SEQ ID NO: 61336 - DNA, 25 bp, SARS Virus
tgatctcctcgatgacaccattaac

SEQ ID NO: 61337 - DNA, 25 bp, SARS Virus
gatctcctcgattacaccattaacc

SEQ ID NO: 61338 - DNA, 25 bp, SARS Virus
atctcctcgatgtcaccattaacct

SEQ ID NO: 61339 - DNA, 25 bp, SARS Virus
tctcctcgatgataccattaacctt

SEQ ID NO: 61340 - DNA, 25 bp, SARS Virus
ctcctcgatgactccattaaccttg

SEQ ID NO: 61341 - DNA, 25 bp, SARS Virus
tcctcgatgacatcattaaccttgt

SEQ ID NO: 61342 - DNA, 25 bp, SARS Virus
cctcgatgacactattaaccttgtt

SEQ ID NO: 61343 - DNA, 25 bp, SARS Virus
ctcgatgacacctttaaccttgttc

SEQ ID NO: 61344 - DNA, 25 bp, SARS Virus
tcgatgacaccattaaccttgttcg

SEQ ID NO: 61345 - DNA, 25 bp, SARS Virus
cgatgacaccattaaccttgttcgt

SEQ ID NO: 61346 - DNA, 25 bp, SARS Virus
gatgacaccatttaccttgttcgtt

SEQ ID NO: 61347 - DNA, 25 bp, SARS Virus
atgacaccattatccttgttcgttc

SEQ ID NO: 61348 - DNA, 25 bp, SARS Virus
tgacaccattaatcttgttcgttca

SEQ ID NO: 61349 - DNA, 25 bp, SARS Virus
gacaccattaactttgttcgttcaa

SEQ ID NO: 61350 - DNA, 25 bp, SARS Virus
acaccattaaccttgttcgttcaaa

SEQ ID NO: 61351 - DNA, 25 bp, SARS Virus
caccattaaccttgttcgttcaaaa

SEQ ID NO: 61352 - DNA, 25 bp, SARS Virus
accattaacctttttcgttcaaaat

SEQ ID NO: 61353 - DNA, 25 bp, SARS Virus
ccattaaccttgttcgttcaaaatg

SEQ ID NO: 61354 - DNA, 25 bp, SARS Virus
cattaaccttgttcgttcaaaatgc

SEQ ID NO: 61355 - DNA, 25 bp, SARS Virus
attaaccttgtttgttcaaaatgcc

SEQ ID NO: 61356 - DNA, 25 bp, SARS Virus
ttaaccttgttctttcaaaatgcca

SEQ ID NO: 61357 - DNA, 25 bp, SARS Virus
taaccttgttcgttcaaaatgccac

SEQ ID NO: 61358 - DNA, 25 bp, SARS Virus
aaccttgttcgttcaaaatgccacc

SEQ ID NO: 61359 - DNA, 25 bp, SARS Virus
accttgttcgtttaaaatgccaccg

SEQ ID NO: 61360 - DNA, 25 bp, SARS Virus
ccttgttcgttctaaatgccaccga

SEQ ID NO: 61361 - DNA, 25 bp, SARS Virus
cttgttcgttcataatgccaccgac

SEQ ID NO: 61362 - DNA, 25 bp, SARS Virus
ttgttcgttcaatatgccaccgacc

SEQ ID NO: 61363 - DNA, 25 bp, SARS Virus
tgttcgttcaaattgccaccgaccg

SEQ ID NO: 61364 - DNA, 25 bp, SARS Virus
gttcgttcaaaatgccaccgaccgt

SEQ ID NO: 61365 - DNA, 25 bp, SARS Virus
ttcgttcaaaattccaccgaccgta

SEQ ID NO: 61366 - DNA, 25 bp, SARS Virus
tcgttcaaaatgtcaccgaccgtat

SEQ ID NO: 61367 - DNA, 25 bp, SARS Virus
cgttcaaaatgctaccgaccgtatt

SEQ ID NO: 61368 - DNA, 25 bp, SARS Virus
gttcaaaatgcctccgaccgtatta

SEQ ID NO: 61369 - DNA, 25 bp, SARS Virus
ttcaaaatgccatcgaccgtattat

SEQ ID NO: 61370 - DNA, 25 bp, SARS Virus
tcaaaatgccactgaccgtattata

SEQ ID NO: 61371 - DNA, 25 bp, SARS Virus
caaaatgccacctaccgtattatac

SEQ ID NO: 61372 - DNA, 25 bp, SARS Virus
aaaatgccaccgtccgtattataca

SEQ ID NO: 61373 - DNA, 25 bp, SARS Virus
aaatgccaccgatcgtattatacaa

SEQ ID NO: 61374 - DNA, 25 bp, SARS Virus
aatgccaccgactgtattatacaat

SEQ ID NO: 61375 - DNA, 25 bp, SARS Virus
atgccaccgaccttattatacaatt

SEQ ID NO: 61376 - DNA, 25 bp, SARS Virus
tgccaccgaccgtattatacaattt

SEQ ID NO: 61377 - DNA, 25 bp, SARS Virus
gccaccgaccgttttatacaatttt

SEQ ID NO: 61378 - DNA, 25 bp, SARS Virus
ccaccgaccgtattatacaattttt

SEQ ID NO: 61379 - DNA, 25 bp, SARS Virus
caccgaccgtattatacaatttttg

SEQ ID NO: 61380 - DNA, 25 bp, SARS Virus
accgaccgtattttacaatttttga

SEQ ID NO: 61381 - DNA, 25 bp, SARS Virus
ccgaccgtattatacaatttttgac

SEQ ID NO: 61382 - DNA, 25 bp, SARS Virus
cgaccgtattattcaatttttgaca

SEQ ID NO: 61383 - DNA, 25 bp, SARS Virus
gaccgtattatataatttttgacaa

SEQ ID NO: 61384 - DNA, 25 bp, SARS Virus
accgtattatactatttttgacaaa

SEQ ID NO: 61385 - DNA, 25 bp, SARS Virus
ccgtattatacattttttgacaaat

SEQ ID NO: 61386 - DNA, 25 bp, SARS Virus
cgtattatacaatttttgacaaatg

SEQ ID NO: 61387 - DNA, 25 bp, SARS Virus
gtattatacaatttttgacaaatgt

SEQ ID NO: 61388 - DNA, 25 bp, SARS Virus
tattatacaatttttgacaaatgtc

SEQ ID NO: 61389 - DNA, 25 bp, SARS Virus
attatacaatttttgacaaatgtca

SEQ ID NO: 61390 - DNA, 25 bp, SARS Virus
ttatacaatttttgacaaatgtcac

SEQ ID NO: 61391 - DNA, 25 bp, SARS Virus
tatacaattttttacaaatgtcact

SEQ ID NO: 61392 - DNA, 25 bp, SARS Virus
atacaatttttgtcaaatgtcacta

SEQ ID NO: 61393 - DNA, 25 bp, SARS Virus
tacaatttttgataaatgtcactac

SEQ ID NO: 61394 - DNA, 25 bp, SARS Virus
acaatttttgactaatgtcactaca

SEQ ID NO: 61395 - DNA, 25 bp, SARS Virus
caatttttgacatatgtcactacat

SEQ ID NO: 61396 - DNA, 25 bp, SARS Virus
aatttttgacaattgtcactacatc

SEQ ID NO: 61397 - DNA, 25 bp, SARS Virus
atttttgacaaatgtcactacatct

SEQ ID NO: 61398 - DNA, 25 bp, SARS Virus
tttttgacaaatttcactacatctt

SEQ ID NO: 61399 - DNA, 25 bp, SARS Virus
ttttgacaaatgtcactacatcttt

SEQ ID NO: 61400 - DNA, 25 bp, SARS Virus
tttgacaaatgttactacatctttg

SEQ ID NO: 61401 - DNA, 25 bp, SARS Virus
ttgacaaatgtctctacatctttga

SEQ ID NO: 61402 - DNA, 25 bp, SARS Virus
tgacaaatgtcattacatctttgag

SEQ ID NO: 61403 - DNA, 25 bp, SARS Virus
gacaaatgtcactacatctttgagg

SEQ ID NO: 61404 - DNA, 25 bp, SARS Virus
acaaatgtcacttcatctttgaggt

SEQ ID NO: 61405 - DNA, 25 bp, SARS Virus
caaatgtcactatatctttgaggtg

SEQ ID NO: 61406 - DNA, 25 bp, SARS Virus
aaatgtcactacttctttgaggtgt

SEQ ID NO: 61407 - DNA, 25 bp, SARS Virus
aatgtcactacatctttgaggtgtg

SEQ ID NO: 61408 - DNA, 25 bp, SARS Virus
atgtcactacatttttgaggtgtgg

SEQ ID NO: 61409 - DNA, 25 bp, SARS Virus
tgtcactacatctttgaggtgtgga

SEQ ID NO: 61410 - DNA, 25 bp, SARS Virus
gtcactacatctttgaggtgtggaa

SEQ ID NO: 61411 - DNA, 25 bp, SARS Virus
tcactacatctttgaggtgtggaat

SEQ ID NO: 61412 - DNA, 25 bp, SARS Virus
cactacatcttttaggtgtggaata

SEQ ID NO: 61413 - DNA, 25 bp, SARS Virus
actacatctttgtggtgtggaatac

SEQ ID NO: 61414 - DNA, 25 bp, SARS Virus
ctacatctttgatgtgtggaatacc

SEQ ID NO: 61415 - DNA, 25 bp, SARS Virus
tacatctttgagttgtggaataccc

SEQ ID NO: 61416 - DNA, 25 bp, SARS Virus
acatctttgaggtgtggaataccca

SEQ ID NO: 61417 - DNA, 25 bp, SARS Virus
catctttgaggtttggaatacccaa

SEQ ID NO: 61418 - DNA, 25 bp, SARS Virus
atctttgaggtgtggaatacccaac

SEQ ID NO: 61419 - DNA, 25 bp, SARS Virus
tctttgaggtgttgaatacccaacc

SEQ ID NO: 61420 - DNA, 25 bp, SARS Virus
ctttgaggtgtgtaatacccaaccc

SEQ ID NO: 61421 - DNA, 25 bp, SARS Virus
tttgaggtgtggtatacccaaccct

SEQ ID NO: 61422 - DNA, 25 bp, SARS Virus
ttgaggtgtggattacccaacccta

SEQ ID NO: 61423 - DNA, 25 bp, SARS Virus
tgaggtgtggaatacccaaccctaa

SEQ ID NO: 61424 - DNA, 25 bp, SARS Virus
gaggtgtggaattcccaaccctaat

SEQ ID NO: 61425 - DNA, 25 bp, SARS Virus
aggtgtggaatatccaaccctaata

SEQ ID NO: 61426 - DNA, 25 bp, SARS Virus
ggtgtggaatactcaaccctaatag

SEQ ID NO: 61427 - DNA, 25 bp, SARS Virus
gtgtggaatacctaaccctaatagg

SEQ ID NO: 61428 - DNA, 25 bp, SARS Virus
tgtggaataccctaccctaataggt

SEQ ID NO: 61429 - DNA, 25 bp, SARS Virus
gtggaatacccatccctaataggtt

SEQ ID NO: 61430 - DNA, 25 bp, SARS Virus
tggaatacccaatcctaataggttt

SEQ ID NO: 61431 - DNA, 25 bp, SARS Virus
ggaatacccaactctaataggtttt

SEQ ID NO: 61432 - DNA, 25 bp, SARS Virus
gaatacccaaccttaataggtttta

SEQ ID NO: 61433 - DNA, 25 bp, SARS Virus
aatacccaaccctaataggttttac

SEQ ID NO: 61434 - DNA, 25 bp, SARS Virus
atacccaacccttataggttttaca

SEQ ID NO: 61435 - DNA, 25 bp, SARS Virus
tacccaaccctattaggttttacac

SEQ ID NO: 61436 - DNA, 25 bp, SARS Virus
acccaaccctaataggttttacact

SEQ ID NO: 61437 - DNA, 25 bp, SARS Virus
cccaaccctaattggttttacactg

SEQ ID NO: 61438 - DNA, 25 bp, SARS Virus
ccaaccctaatatgttttacactgt

SEQ ID NO: 61439 - DNA, 25 bp, SARS Virus
caaccctaatagtttttacactgtc

SEQ ID NO: 61440 - DNA, 25 bp, SARS Virus
aaccctaataggttttacactgtct

SEQ ID NO: 61441 - DNA, 25 bp, SARS Virus
accctaataggttttacactgtctc

SEQ ID NO: 61442 - DNA, 25 bp, SARS Virus
ccctaataggttttacactgtctcg

SEQ ID NO: 61443 - DNA, 25 bp, SARS Virus
cctaataggttttacactgtctcgg

SEQ ID NO: 61444 - DNA, 25 bp, SARS Virus
ctaataggtttttcactgtctcggt

SEQ ID NO: 61445 - DNA, 25 bp, SARS Virus
taataggttttatactgtctcggta

SEQ ID NO: 61446 - DNA, 25 bp, SARS Virus
aataggttttactctgtctcggtac

SEQ ID NO: 61447 - DNA, 25 bp, SARS Virus
ataggttttacattgtctcggtacg

SEQ ID NO: 61448 - DNA, 25 bp, SARS Virus
taggttttacactgtctcggtacgg

SEQ ID NO: 61449 - DNA, 25 bp, SARS Virus
aggttttacactttctcggtacgga

SEQ ID NO: 61450 - DNA, 25 bp, SARS Virus
ggttttacactgtctcggtacggat

SEQ ID NO: 61451 - DNA, 25 bp, SARS Virus
gttttacactgtttcggtacggatt

SEQ ID NO: 61452 - DNA, 25 bp, SARS Virus
ttttacactgtctcggtacggattg

SEQ ID NO: 61453 - DNA, 25 bp, SARS Virus
tttacactgtcttggtacggattgt

SEQ ID NO: 61454 - DNA, 25 bp, SARS Virus
ttacactgtctctgtacggattgta

SEQ ID NO: 61455 - DNA, 25 bp, SARS Virus
tacactgtctcgttacggattgtac

SEQ ID NO: 61456 - DNA, 25 bp, SARS Virus
acactgtctcggtacggattgtacg

SEQ ID NO: 61457 - DNA, 25 bp, SARS Virus
cactgtctcggttcggattgtacga

SEQ ID NO: 61458 - DNA, 25 bp, SARS Virus
actgtctcggtatggattgtacgaa

SEQ ID NO: 61459 - DNA, 25 bp, SARS Virus
ctgtctcggtactgattgtacgaat

SEQ ID NO: 61460 - DNA, 25 bp, SARS Virus
tgtctcggtacgtattgtacgaatc

SEQ ID NO: 61461 - DNA, 25 bp, SARS Virus
gtctcggtacggtttgtacgaatcc

SEQ ID NO: 61462 - DNA, 25 bp, SARS Virus
tctcggtacggattgtacgaatcct

SEQ ID NO: 61463 - DNA, 25 bp, SARS Virus
ctcggtacggattgtacgaatccta

SEQ ID NO: 61464 - DNA, 25 bp, SARS Virus
tcggtacggattttacgaatcctat

SEQ ID NO: 61465 - DNA, 25 bp, SARS Virus
cggtacggattgtacgaatcctatt

SEQ ID NO: 61466 - DNA, 25 bp, SARS Virus
ggtacggattgttcgaatcctatta

SEQ ID NO: 61467 - DNA, 25 bp, SARS Virus
gtacggattgtatgaatcctattac

SEQ ID NO: 61468 - DNA, 25 bp, SARS Virus
tacggattgtactaatcctattacc

SEQ ID NO: 61469 - DNA, 25 bp, SARS Virus
acggattgtacgtatcctattaccg

SEQ ID NO: 61470 - DNA, 25 bp, SARS Virus
cggattgtacgattcctattaccgg

SEQ ID NO: 61471 - DNA, 25 bp, SARS Virus
ggattgtacgaatcctattaccgga

SEQ ID NO: 61472 - DNA, 25 bp, SARS Virus
gattgtacgaattctattaccggag

SEQ ID NO: 61473 - DNA, 25 bp, SARS Virus
attgtacgaatcttattaccggaga

SEQ ID NO: 61474 - DNA, 25 bp, SARS Virus
ttgtacgaatcctattaccggagag

SEQ ID NO: 61475 - DNA, 25 bp, SARS Virus
tgtacgaatccttttaccggagaga

SEQ ID NO: 61476 - DNA, 25 bp, SARS Virus
gtacgaatcctattaccggagagaa

SEQ ID NO: 61477 - DNA, 25 bp, SARS Virus
tacgaatcctattaccggagagaac

SEQ ID NO: 61478 - DNA, 25 bp, SARS Virus
acgaatcctatttccggagagaaca

SEQ ID NO: 61479 - DNA, 25 bp, SARS Virus
cgaatcctattatcggagagaacaa

SEQ ID NO: 61480 - DNA, 25 bp, SARS Virus
gaatcctattactggagagaacaag

SEQ ID NO: 61481 - DNA, 25 bp, SARS Virus
aatcctattacctgagagaacaaga

SEQ ID NO: 61482 - DNA, 25 bp, SARS Virus
atcctattaccgtagagaacaagaa

SEQ ID NO: 61483 - DNA, 25 bp, SARS Virus
tcctattaccggtgagaacaagaac

SEQ ID NO: 61484 - DNA, 25 bp, SARS Virus
cctattaccggatagaacaagaacg

SEQ ID NO: 61485 - DNA, 25 bp, SARS Virus
ctattaccggagtgaacaagaacga

SEQ ID NO: 61486 - DNA, 25 bp, SARS Virus
tattaccggagataacaagaacgag

SEQ ID NO: 61487 - DNA, 25 bp, SARS Virus
attaccggagagtacaagaacgagc

SEQ ID NO: 61488 - DNA, 25 bp, SARS Virus
ttaccggagagatcaagaacgagcg

SEQ ID NO: 61489 - DNA, 25 bp, SARS Virus
taccggagagaataagaacgagcgt

SEQ ID NO: 61490 - DNA, 25 bp, SARS Virus
accggagagaactagaacgagcgtt

SEQ ID NO: 61491 - DNA, 25 bp, SARS Virus
ccggagagaacatgaacgagcgttt

SEQ ID NO: 61492 - DNA, 25 bp, SARS Virus
cggagagaacaataacgagcgtttg

SEQ ID NO: 61493 - DNA, 25 bp, SARS Virus
ggagagaacaagtacgagcgtttgt

SEQ ID NO: 61494 - DNA, 25 bp, SARS Virus
gagagaacaagatcgagcgtttgta

SEQ ID NO: 61495 - DNA, 25 bp, SARS Virus
agagaacaagaatgagcgtttgtat

SEQ ID NO: 61496 - DNA, 25 bp, SARS Virus
gagaacaagaactagcgtttgtatt

SEQ ID NO: 61497 - DNA, 25 bp, SARS Virus
agaacaagaacgtgcgtttgtattg

SEQ ID NO: 61498 - DNA, 25 bp, SARS Virus
gaacaagaacgatcgtttgtattgt

SEQ ID NO: 61499 - DNA, 25 bp, SARS Virus
aacaagaacgagtgtttgtattgtg

SEQ ID NO: 61500 - DNA, 25 bp, SARS Virus
acaagaacgagcttttgtattgtga

SEQ ID NO: 61501 - DNA, 25 bp, SARS Virus
caagaacgagcgtttgtattgtgaa

SEQ ID NO: 61502 - DNA, 25 bp, SARS Virus
aagaacgagcgtttgtattgtgaac

SEQ ID NO: 61503 - DNA, 25 bp, SARS Virus
agaacgagcgtttgtattgtgaacg

SEQ ID NO: 61504 - DNA, 25 bp, SARS Virus
gaacgagcgtttttattgtgaacga

SEQ ID NO: 61505 - DNA, 25 bp, SARS Virus
aacgagcgtttgtattgtgaacgac

SEQ ID NO: 61506 - DNA, 25 bp, SARS Virus
acgagcgtttgttttgtgaacgaca

SEQ ID NO: 61507 - DNA, 25 bp, SARS Virus
cgagcgtttgtattgtgaacgacat

SEQ ID NO: 61508 - DNA, 25 bp, SARS Virus
gagcgtttgtattgtgaacgacatt

SEQ ID NO: 61509 - DNA, 25 bp, SARS Virus
agcgtttgtattttgaacgacattg

SEQ ID NO: 61510 - DNA, 25 bp, SARS Virus
gcgtttgtattgtgaacgacattga

SEQ ID NO: 61511 - DNA, 25 bp, SARS Virus
cgtttgtattgttaacgacattgaa

SEQ ID NO: 61512 - DNA, 25 bp, SARS Virus
gtttgtattgtgtacgacattgaat

SEQ ID NO: 61513 - DNA, 25 bp, SARS Virus
tttgtattgtgatcgacattgaata

SEQ ID NO: 61514 - DNA, 25 bp, SARS Virus
ttgtattgtgaatgacattgaatag

SEQ ID NO: 61515 - DNA, 25 bp, SARS Virus
tgtattgtgaactacattgaatagt

SEQ ID NO: 61516 - DNA, 25 bp, SARS Virus
gtattgtgaacgtcattgaatagtg

SEQ ID NO: 61517 - DNA, 25 bp, SARS Virus
tattgtgaacgatattgaatagtgt

SEQ ID NO: 61518 - DNA, 25 bp, SARS Virus
attgtgaacgactttgaatagtgtg

SEQ ID NO: 61519 - DNA, 25 bp, SARS Virus
ttgtgaacgacattgaatagtgtgg

SEQ ID NO: 61520 - DNA, 25 bp, SARS Virus
tgtgaacgacattgaatagtgtggc

SEQ ID NO: 61521 - DNA, 25 bp, SARS Virus
gtgaacgacatttaatagtgtggca

SEQ ID NO: 61522 - DNA, 25 bp, SARS Virus
tgaacgacattgtatagtgtggcaa

SEQ ID NO: 61523 - DNA, 25 bp, SARS Virus
gaacgacattgattagtgtggcaaa

SEQ ID NO: 61524 - DNA, 25 bp, SARS Virus
aacgacattgaatagtgtggcaaag

SEQ ID NO: 61525 - DNA, 25 bp, SARS Virus
acgacattgaattgtgtggcaaaga

SEQ ID NO: 61526 - DNA, 25 bp, SARS Virus
cgacattgaatattgtggcaaagat

SEQ ID NO: 61527 - DNA, 25 bp, SARS Virus
gacattgaatagtgtggcaaagatg

SEQ ID NO: 61528 - DNA, 25 bp, SARS Virus
acattgaatagtttggcaaagatgt

SEQ ID NO: 61529 - DNA, 25 bp, SARS Virus
cattgaatagtgtggcaaagatgtc

SEQ ID NO: 61530 - DNA, 25 bp, SARS Virus
attgaatagtgttgcaaagatgtcc

SEQ ID NO: 61531 - DNA, 25 bp, SARS Virus
ttgaatagtgtgtcaaagatgtcca

SEQ ID NO: 61532 - DNA, 25 bp, SARS Virus
tgaatagtgtggtaaagatgtccaa

SEQ ID NO: 61533 - DNA, 25 bp, SARS Virus
gaatagtgtggctaagatgtccaat

SEQ ID NO: 61534 - DNA, 25 bp, SARS Virus
aatagtgtggcatagatgtccaatc

SEQ ID NO: 61535 - DNA, 25 bp, SARS Virus
atagtgtggcaatgatgtccaatcg

SEQ ID NO: 61536 - DNA, 25 bp, SARS Virus
tagtgtggcaaatatgtccaatcga

SEQ ID NO: 61537 - DNA, 25 bp, SARS Virus
agtgtggcaaagttgtccaatcgat

SEQ ID NO: 61538 - DNA, 25 bp, SARS Virus
gtgtggcaaagatgtccaatcgatt

SEQ ID NO: 61539 - DNA, 25 bp, SARS Virus
tgtggcaaagatttccaatcgattg

SEQ ID NO: 61540 - DNA, 25 bp, SARS Virus
gtggcaaagatgtccaatcgattgc

SEQ ID NO: 61541 - DNA, 25 bp, SARS Virus
tggcaaagatgttcaatcgattgct

SEQ ID NO: 61542 - DNA, 25 bp, SARS Virus
ggcaaagatgtctaatcgattgctc

SEQ ID NO: 61543 - DNA, 25 bp, SARS Virus
gcaaagatgtcctatcgattgctca

SEQ ID NO: 61544 - DNA, 25 bp, SARS Virus
caaagatgtccattcgattgctcac

SEQ ID NO: 61545 - DNA, 25 bp, SARS Virus
aaagatgtccaatcgattgctcaca

SEQ ID NO: 61546 - DNA, 25 bp, SARS Virus
aagatgtccaattgattgctcacac

SEQ ID NO: 61547 - DNA, 25 bp, SARS Virus
agatgtccaatctattgctcacacg

SEQ ID NO: 61548 - DNA, 25 bp, SARS Virus
gatgtccaatcgtttgctcacacgc

SEQ ID NO: 61549 - DNA, 25 bp, SARS Virus
atgtccaatcgattgctcacacgcg

SEQ ID NO: 61550 - DNA, 25 bp, SARS Virus
tgtccaatcgattgctcacacgcgt

SEQ ID NO: 61551 - DNA, 25 bp, SARS Virus
gtccaatcgatttctcacacgcgtt

SEQ ID NO: 61552 - DNA, 25 bp, SARS Virus
tccaatcgattgttcacacgcgttc

SEQ ID NO: 61553 - DNA, 25 bp, SARS Virus
ccaatcgattgctcacacgcgttca

SEQ ID NO: 61554 - DNA, 25 bp, SARS Virus
caatcgattgcttacacgcgttcat

SEQ ID NO: 61555 - DNA, 25 bp, SARS Virus
aatcgattgctctcacgcgttcata

SEQ ID NO: 61556 - DNA, 25 bp, SARS Virus
atcgattgctcatacgcgttcataa

SEQ ID NO: 61557 - DNA, 25 bp, SARS Virus
tcgattgctcactcgcgttcataat

SEQ ID NO: 61558 - DNA, 25 bp, SARS Virus
cgattgctcacatgcgttcataatt

SEQ ID NO: 61559 - DNA, 25 bp, SARS Virus
gattgctcacactcgttcataattc

SEQ ID NO: 61560 - DNA, 25 bp, SARS Virus
attgctcacacgtgttcataattca

SEQ ID NO: 61561 - DNA, 25 bp, SARS Virus
ttgctcacacgctttcataattcac

SEQ ID NO: 61562 - DNA, 25 bp, SARS Virus
tgctcacacgcgttcataattcact

SEQ ID NO: 61563 - DNA, 25 bp, SARS Virus
gctcacacgcgttcataattcactc

SEQ ID NO: 61564 - DNA, 25 bp, SARS Virus
ctcacacgcgtttataattcactct

SEQ ID NO: 61565 - DNA, 25 bp, SARS Virus
tcacacgcgttcttaattcactcta

SEQ ID NO: 61566 - DNA, 25 bp, SARS Virus
cacacgcgttcataattcactctac

SEQ ID NO: 61567 - DNA, 25 bp, SARS Virus
acacgcgttcattattcactctacc

SEQ ID NO: 61568 - DNA, 25 bp, SARS Virus
cacgcgttcatatttcactctacca

SEQ ID NO: 61569 - DNA, 25 bp, SARS Virus
acgcgttcataattcactctaccag

SEQ ID NO: 61570 - DNA, 25 bp, SARS Virus
cgcgttcataattcactctaccagt

SEQ ID NO: 61571 - DNA, 25 bp, SARS Virus
gcgttcataatttactctaccagta

SEQ ID NO: 61572 - DNA, 25 bp, SARS Virus
cgttcataattctctctaccagtac

SEQ ID NO: 61573 - DNA, 25 bp, SARS Virus
gttcataattcattctaccagtaca

SEQ ID NO: 61574 - DNA, 25 bp, SARS Virus
ttcataattcactctaccagtacac

SEQ ID NO: 61575 - DNA, 25 bp, SARS Virus
tcataattcactttaccagtacaca

SEQ ID NO: 61576 - DNA, 25 bp, SARS Virus
cataattcactctaccagtacacac

SEQ ID NO: 61577 - DNA, 25 bp, SARS Virus
ataattcactcttccagtacacacc

SEQ ID NO: 61578 - DNA, 25 bp, SARS Virus
taattcactctatcagtacacaccg

SEQ ID NO: 61579 - DNA, 25 bp, SARS Virus
aattcactctactagtacacaccgc

SEQ ID NO: 61580 - DNA, 25 bp, SARS Virus
attcactctacctgtacacaccgcc

SEQ ID NO: 61581 - DNA, 25 bp, SARS Virus
ttcactctaccattacacaccgccg

SEQ ID NO: 61582 - DNA, 25 bp, SARS Virus
tcactctaccagtacacaccgccga

SEQ ID NO: 61583 - DNA, 25 bp, SARS Virus
cactctaccagttcacaccgccgag

SEQ ID NO: 61584 - DNA, 25 bp, SARS Virus
actctaccagtatacaccgccgagt

SEQ ID NO: 61585 - DNA, 25 bp, SARS Virus
ctctaccagtactcaccgccgagtg

SEQ ID NO: 61586 - DNA, 25 bp, SARS Virus
tctaccagtacataccgccgagtga

SEQ ID NO: 61587 - DNA, 25 bp, SARS Virus
ctaccagtacactccgccgagtgat

SEQ ID NO: 61588 - DNA, 25 bp, SARS Virus
taccagtacacatcgccgagtgata

SEQ ID NO: 61589 - DNA, 25 bp, SARS Virus
accagtacacactgccgagtgatat

SEQ ID NO: 61590 - DNA, 25 bp, SARS Virus
ccagtacacacctccgagtgatata

SEQ ID NO: 61591 - DNA, 25 bp, SARS Virus
cagtacacaccgtcgagtgatatac

SEQ ID NO: 61592 - DNA, 25 bp, SARS Virus
agtacacaccgctgagtgatataca

SEQ ID NO: 61593 - DNA, 25 bp, SARS Virus
gtacacaccgcctagtgatatacaa

SEQ ID NO: 61594 - DNA, 25 bp, SARS Virus
tacacaccgccgtgtgatatacaat

SEQ ID NO: 61595 - DNA, 25 bp, SARS Virus
acacaccgccgattgatatacaatt

SEQ ID NO: 61596 - DNA, 25 bp, SARS Virus
cacaccgccgagtgatatacaattt

SEQ ID NO: 61597 - DNA, 25 bp, SARS Virus
acaccgccgagttatatacaatttg

SEQ ID NO: 61598 - DNA, 25 bp, SARS Virus
caccgccgagtgttatacaatttgg

SEQ ID NO: 61599 - DNA, 25 bp, SARS Virus
accgccgagtgatatacaatttggt

SEQ ID NO: 61600 - DNA, 25 bp, SARS Virus
ccgccgagtgatttacaatttggtc

SEQ ID NO: 61601 - DNA, 25 bp, SARS Virus
cgccgagtgatatacaatttggtcc

SEQ ID NO: 61602 - DNA, 25 bp, SARS Virus
gccgagtgatattcaatttggtcca

SEQ ID NO: 61603 - DNA, 25 bp, SARS Virus
ccgagtgatatataatttggtccac

SEQ ID NO: 61604 - DNA, 25 bp, SARS Virus
cgagtgatatactatttggtccacc

SEQ ID NO: 61605 - DNA, 25 bp, SARS Virus
gagtgatatacattttggtccacct

SEQ ID NO: 61606 - DNA, 25 bp, SARS Virus
agtgatatacaatttggtccacctt

SEQ ID NO: 61607 - DNA, 25 bp, SARS Virus
gtgatatacaatttggtccaccttg

SEQ ID NO: 61608 - DNA, 25 bp, SARS Virus
tgatatacaatttggtccaccttgt

SEQ ID NO: 61609 - DNA, 25 bp, SARS Virus
gatatacaattttgtccaccttgta

SEQ ID NO: 61610 - DNA, 25 bp, SARS Virus
atatacaatttgttccaccttgtag

SEQ ID NO: 61611 - DNA, 25 bp, SARS Virus
tatacaatttggtccaccttgtagt

SEQ ID NO: 61612 - DNA, 25 bp, SARS Virus
atacaatttggttcaccttgtagta

SEQ ID NO: 61613 - DNA, 25 bp, SARS Virus
tacaatttggtctaccttgtagtag

SEQ ID NO: 61614 - DNA, 25 bp, SARS Virus
acaatttggtcctccttgtagtagg

SEQ ID NO: 61615 - DNA, 25 bp, SARS Virus
caatttggtccatcttgtagtaggc

SEQ ID NO: 61616 - DNA, 25 bp, SARS Virus
aatttggtccactttgtagtaggcc

SEQ ID NO: 61617 - DNA, 25 bp, SARS Virus
atttggtccaccatgtagtaggcca

SEQ ID NO: 61618 - DNA, 25 bp, SARS Virus
tttggtccacctagtagtaggccac

SEQ ID NO: 61619 - DNA, 25 bp, SARS Virus
ttggtccaccttatagtaggccact

SEQ ID NO: 61620 - DNA, 25 bp, SARS Virus
tggtccaccttgaagtaggccacta

SEQ ID NO: 61621 - DNA, 25 bp, SARS Virus
ggtccaccttgtagtaggccactac

SEQ ID NO: 61622 - DNA, 25 bp, SARS Virus
gtccaccttgtaataggccactacg

SEQ ID NO: 61623 - DNA, 25 bp, SARS Virus
tccaccttgtagaaggccactacga

SEQ ID NO: 61624 - DNA, 25 bp, SARS Virus
ccaccttgtagtaggccactacgat

SEQ ID NO: 61625 - DNA, 25 bp, SARS Virus
caccttgtagtaagccactacgatg

SEQ ID NO: 61626 - DNA, 25 bp, SARS Virus
accttgtagtagaccactacgatgt

SEQ ID NO: 61627 - DNA, 25 bp, SARS Virus
ccttgtagtaggacactacgatgtt

SEQ ID NO: 61628 - DNA, 25 bp, SARS Virus
cttgtagtaggcaactacgatgttg

SEQ ID NO: 61629 - DNA, 25 bp, SARS Virus
ttgtagtaggccactacgatgttga

SEQ ID NO: 61630 - DNA, 25 bp, SARS Virus
tgtagtaggccaatacgatgttgac

SEQ ID NO: 61631 - DNA, 25 bp, SARS Virus
gtagtaggccacaacgatgttgacg

SEQ ID NO: 61632 - DNA, 25 bp, SARS Virus
tagtaggccactacgatgttgacga

SEQ ID NO: 61633 - DNA, 25 bp, SARS Virus
agtaggccactaagatgttgacgaa

SEQ ID NO: 61634 - DNA, 25 bp, SARS Virus
gtaggccactacaatgttgacgaat

SEQ ID NO: 61635 - DNA, 25 bp, SARS Virus
taggccactacgatgttgacgaata

SEQ ID NO: 61636 - DNA, 25 bp, SARS Virus
aggccactacgaagttgacgaatac

SEQ ID NO: 61637 - DNA, 25 bp, SARS Virus
ggccactacgatattgacgaatacg

SEQ ID NO: 61638 - DNA, 25 bp, SARS Virus
gccactacgatgatgacgaatacga

SEQ ID NO: 61639 - DNA, 25 bp, SARS Virus
ccactacgatgtagacgaatacgat

SEQ ID NO: 61640 - DNA, 25 bp, SARS Virus
cactacgatgttaacgaatacgatt

SEQ ID NO: 61641 - DNA, 25 bp, SARS Virus
actacgatgttgacgaatacgatta

SEQ ID NO: 61642 - DNA, 25 bp, SARS Virus
ctacgatgttgaagaatacgattat

SEQ ID NO: 61643 - DNA, 25 bp, SARS Virus
tacgatgttgacaaatacgattatc

SEQ ID NO: 61644 - DNA, 25 bp, SARS Virus
acgatgttgacgaatacgattatca

SEQ ID NO: 61645 - DNA, 25 bp, SARS Virus
cgatgttgacgaatacgattatcac

SEQ ID NO: 61646 - DNA, 25 bp, SARS Virus
gatgttgacgaaaacgattatcaca

SEQ ID NO: 61647 - DNA, 25 bp, SARS Virus
atgttgacgaatacgattatcacag

SEQ ID NO: 61648 - DNA, 25 bp, SARS Virus
tgttgacgaataagattatcacaga

SEQ ID NO: 61649 - DNA, 25 bp, SARS Virus
gttgacgaatacaattatcacagaa

SEQ ID NO: 61650 - DNA, 25 bp, SARS Virus
ttgacgaatacgattatcacagaaa

SEQ ID NO: 61651 - DNA, 25 bp, SARS Virus
tgacgaatacgaatatcacagaaat

SEQ ID NO: 61652 - DNA, 25 bp, SARS Virus
gacgaatacgataatcacagaaatt

SEQ ID NO: 61653 - DNA, 25 bp, SARS Virus
acgaatacgattatcacagaaattg

SEQ ID NO: 61654 - DNA, 25 bp, SARS Virus
cgaatacgattaacacagaaattgt

SEQ ID NO: 61655 - DNA, 25 bp, SARS Virus
gaatacgattataacagaaattgta

SEQ ID NO: 61656 - DNA, 25 bp, SARS Virus
aatacgattatcacagaaattgtaa

SEQ ID NO: 61657 - DNA, 25 bp, SARS Virus
atacgattatcaaagaaattgtaaa

SEQ ID NO: 61658 - DNA, 25 bp, SARS Virus
tacgattatcacagaaattgtaaac

SEQ ID NO: 61659 - DNA, 25 bp, SARS Virus
acgattatcacaaaaattgtaaaca

SEQ ID NO: 61660 - DNA, 25 bp, SARS Virus
cgattatcacagaaattgtaaacag

SEQ ID NO: 61661 - DNA, 25 bp, SARS Virus
gattatcacagaaattgtaaacagt

SEQ ID NO: 61662 - DNA, 25 bp, SARS Virus
attatcacagaaattgtaaacagtt

SEQ ID NO: 61663 - DNA, 25 bp, SARS Virus
ttatcacagaaaatgtaaacagttc

SEQ ID NO: 61664 - DNA, 25 bp, SARS Virus
tatcacagaaatagtaaacagttcg

SEQ ID NO: 61665 - DNA, 25 bp, SARS Virus
atcacagaaattataaacagttcga

SEQ ID NO: 61666 - DNA, 25 bp, SARS Virus
tcacagaaattgaaaacagttcgac

SEQ ID NO: 61667 - DNA, 25 bp, SARS Virus
cacagaaattgtaaacagttcgaca

SEQ ID NO: 61668 - DNA, 25 bp, SARS Virus
acagaaattgtaaacagttcgacaa

SEQ ID NO: 61669 - DNA, 25 bp, SARS Virus
cagaaattgtaaacagttcgacaat

SEQ ID NO: 61670 - DNA, 25 bp, SARS Virus
agaaattgtaaaaagttcgacaatg

SEQ ID NO: 61671 - DNA, 25 bp, SARS Virus
gaaattgtaaacagttcgacaatgt

SEQ ID NO: 61672 - DNA, 25 bp, SARS Virus
aaattgtaaacaattcgacaatgtc

SEQ ID NO: 61673 - DNA, 25 bp, SARS Virus
aattgtaaacagatcgacaatgtcg

SEQ ID NO: 61674 - DNA, 25 bp, SARS Virus
attgtaaacagtacgacaatgtcgg

SEQ ID NO: 61675 - DNA, 25 bp, SARS Virus
ttgtaaacagttagacaatgtcggt

SEQ ID NO: 61676 - DNA, 25 bp, SARS Virus
tgtaaacagttcaacaatgtcggtt

SEQ ID NO: 61677 - DNA, 25 bp, SARS Virus
gtaaacagttcgacaatgtcggtta

SEQ ID NO: 61678 - DNA, 25 bp, SARS Virus
taaacagttcgaaaatgtcggttac

SEQ ID NO: 61679 - DNA, 25 bp, SARS Virus
aaacagttcgacaatgtcggttaca

SEQ ID NO: 61680 - DNA, 25 bp, SARS Virus
aacagttcgacaatgtcggttacat

SEQ ID NO: 61681 - DNA, 25 bp, SARS Virus
acagttcgacaaagtcggttacatt

SEQ ID NO: 61682 - DNA, 25 bp, SARS Virus
cagttcgacaatatcggttacattt

SEQ ID NO: 61683 - DNA, 25 bp, SARS Virus
agttcgacaatgacggttacattta

SEQ ID NO: 61684 - DNA, 25 bp, SARS Virus
gttcgacaatgtaggttacatttac

SEQ ID NO: 61685 - DNA, 25 bp, SARS Virus
ttcgacaatgtcagttacatttacg

SEQ ID NO: 61686 - DNA, 25 bp, SARS Virus
tcgacaatgtcgattacatttacgt

SEQ ID NO: 61687 - DNA, 25 bp, SARS Virus
cgacaatgtcggatacatttacgtg

SEQ ID NO: 61688 - DNA, 25 bp, SARS Virus
gacaatgtcggtaacatttacgtga

SEQ ID NO: 61689 - DNA, 25 bp, SARS Virus
acaatgtcggttacatttacgtgaa

SEQ ID NO: 61690 - DNA, 25 bp, SARS Virus
caatgtcggttaaatttacgtgaag

SEQ ID NO: 61691 - DNA, 25 bp, SARS Virus
aatgtcggttacatttacgtgaaga

SEQ ID NO: 61692 - DNA, 25 bp, SARS Virus
atgtcggttacaattacgtgaagaa

SEQ ID NO: 61693 - DNA, 25 bp, SARS Virus
tgtcggttacatatacgtgaagaaa

SEQ ID NO: 61694 - DNA, 25 bp, SARS Virus
gtcggttacattaacgtgaagaaag

SEQ ID NO: 61695 - DNA, 25 bp, SARS Virus
tcggttacatttacgtgaagaaagt

SEQ ID NO: 61696 - DNA, 25 bp, SARS Virus
cggttacatttaagtgaagaaagtt

SEQ ID NO: 61697 - DNA, 25 bp, SARS Virus
ggttacatttacatgaagaaagttg

SEQ ID NO: 61698 - DNA, 25 bp, SARS Virus
gttacatttacgagaagaaagttga

SEQ ID NO: 61699 - DNA, 25 bp, SARS Virus
ttacatttacgtaaagaaagttgac

SEQ ID NO: 61700 - DNA, 25 bp, SARS Virus
tacatttacgtgaagaaagttgact

SEQ ID NO: 61701 - DNA, 25 bp, SARS Virus
acatttacgtgaagaaagttgacta

SEQ ID NO: 61702 - DNA, 25 bp, SARS Virus
catttacgtgaaaaaagttgactac

SEQ ID NO: 61703 - DNA, 25 bp, SARS Virus
atttacgtgaagaaagttgactacc

SEQ ID NO: 61704 - DNA, 25 bp, SARS Virus
tttacgtgaagaaagttgactacca

SEQ ID NO: 61705 - DNA, 25 bp, SARS Virus
ttacgtgaagaaagttgactaccat

SEQ ID NO: 61706 - DNA, 25 bp, SARS Virus
tacgtgaagaaaattgactaccatt

SEQ ID NO: 61707 - DNA, 25 bp, SARS Virus
acgtgaagaaagatgactaccatta

SEQ ID NO: 61708 - DNA, 25 bp, SARS Virus
cgtgaagaaagtagactaccattat

SEQ ID NO: 61709 - DNA, 25 bp, SARS Virus
gtgaagaaagttaactaccattatt

SEQ ID NO: 61710 - DNA, 25 bp, SARS Virus
tgaagaaagttgactaccattattc

SEQ ID NO: 61711 - DNA, 25 bp, SARS Virus
gaagaaagttgaataccattattct

SEQ ID NO: 61712 - DNA, 25 bp, SARS Virus
aagaaagttgacaaccattattcta

SEQ ID NO: 61713 - DNA, 25 bp, SARS Virus
agaaagttgactaccattattctat

SEQ ID NO: 61714 - DNA, 25 bp, SARS Virus
gaaagttgactaacattattctatc

SEQ ID NO: 61715 - DNA, 25 bp, SARS Virus
aaagttgactacaattattctatcg

SEQ ID NO: 61716 - DNA, 25 bp, SARS Virus
aagttgactaccattattctatcga

SEQ ID NO: 61717 - DNA, 25 bp, SARS Virus
agttgactaccaatattctatcgac

SEQ ID NO: 61718 - DNA, 25 bp, SARS Virus
gttgactaccataattctatcgact

SEQ ID NO: 61719 - DNA, 25 bp, SARS Virus
ttgactaccattattctatcgactg

SEQ ID NO: 61720 - DNA, 25 bp, SARS Virus
tgactaccattaatctatcgactgt

SEQ ID NO: 61721 - DNA, 25 bp, SARS Virus
gactaccattatactatcgactgtt

SEQ ID NO: 61722 - DNA, 25 bp, SARS Virus
actaccattattatatcgactgttc

SEQ ID NO: 61723 - DNA, 25 bp, SARS Virus
ctaccattattcaatcgactgttca

SEQ ID NO: 61724 - DNA, 25 bp, SARS Virus
taccattattctatcgactgttcat

SEQ ID NO: 61725 - DNA, 25 bp, SARS Virus
accattattctaacgactgttcata

SEQ ID NO: 61726 - DNA, 25 bp, SARS Virus
ccattattctatagactgttcatac

SEQ ID NO: 61727 - DNA, 25 bp, SARS Virus
cattattctatcaactgttcataca

SEQ ID NO: 61728 - DNA, 25 bp, SARS Virus
attattctatcgactgttcatacag

SEQ ID NO: 61729 - DNA, 25 bp, SARS Virus
ttattctatcgaatgttcatacagg

SEQ ID NO: 61730 - DNA, 25 bp, SARS Virus
tattctatcgacagttcatacaggc

SEQ ID NO: 61731 - DNA, 25 bp, SARS Virus
attctatcgactattcatacaggcg

SEQ ID NO: 61732 - DNA, 25 bp, SARS Virus
ttctatcgactgatcatacaggcgt

SEQ ID NO: 61733 - DNA, 25 bp, SARS Virus
tctatcgactgtacatacaggcgtt

SEQ ID NO: 61734 - DNA, 25 bp, SARS Virus
ctatcgactgttaatacaggcgtta

SEQ ID NO: 61735 - DNA, 25 bp, SARS Virus
tatcgactgttcatacaggcgttag

SEQ ID NO: 61736 - DNA, 25 bp, SARS Virus
atcgactgttcaaacaggcgttaga

SEQ ID NO: 61737 - DNA, 25 bp, SARS Virus
tcgactgttcatacaggcgttagat

SEQ ID NO: 61738 - DNA, 25 bp, SARS Virus
cgactgttcataaaggcgttagatg

SEQ ID NO: 61739 - DNA, 25 bp, SARS Virus
gactgttcatacaggcgttagatgt

SEQ ID NO: 61740 - DNA, 25 bp, SARS Virus
actgttcatacaagcgttagatgtt

SEQ ID NO: 61741 - DNA, 25 bp, SARS Virus
ctgttcatacagacgttagatgttg

SEQ ID NO: 61742 - DNA, 25 bp, SARS Virus
tgttcatacaggagttagatgttgt

SEQ ID NO: 61743 - DNA, 25 bp, SARS Virus
gttcatacaggcattagatgttgtg

SEQ ID NO: 61744 - DNA, 25 bp, SARS Virus
ttcatacaggcgatagatgttgtgt

SEQ ID NO: 61745 - DNA, 25 bp, SARS Virus
tcatacaggcgtaagatgttgtgtc

SEQ ID NO: 61746 - DNA, 25 bp, SARS Virus
catacaggcgttagatgttgtgtcc

SEQ ID NO: 61747 - DNA, 25 bp, SARS Virus
atacaggcgttaaatgttgtgtccg

SEQ ID NO: 61748 - DNA, 25 bp, SARS Virus
tacaggcgttagatgttgtgtccga

SEQ ID NO: 61749 - DNA, 25 bp, SARS Virus
acaggcgttagaagttgtgtccgag

SEQ ID NO: 61750 - DNA, 25 bp, SARS Virus
caggcgttagatattgtgtccgaga

SEQ ID NO: 61751 - DNA, 25 bp, SARS Virus
aggcgttagatgatgtgtccgagat

SEQ ID NO: 61752 - DNA, 25 bp, SARS Virus
ggcgttagatgtagtgtccgagata

SEQ ID NO: 61753 - DNA, 25 bp, SARS Virus
gcgttagatgttatgtccgagatac

SEQ ID NO: 61754 - DNA, 25 bp, SARS Virus
cgttagatgttgagtccgagatact

SEQ ID NO: 61755 - DNA, 25 bp, SARS Virus
gttagatgttgtatccgagatactc

SEQ ID NO: 61756 - DNA, 25 bp, SARS Virus
ttagatgttgtgaccgagatactca

SEQ ID NO: 61757 - DNA, 25 bp, SARS Virus
tagatgttgtgtacgagatactcac

SEQ ID NO: 61758 - DNA, 25 bp, SARS Virus
agatgttgtgtcagagatactcaca

SEQ ID NO: 61759 - DNA, 25 bp, SARS Virus
gatgttgtgtccaagatactcacag

SEQ ID NO: 61760 - DNA, 25 bp, SARS Virus
atgttgtgtccgagatactcacaga

SEQ ID NO: 61761 - DNA, 25 bp, SARS Virus
tgttgtgtccgaaatactcacagag

SEQ ID NO: 61762 - DNA, 25 bp, SARS Virus
gttgtgtccgagatactcacagaga

SEQ ID NO: 61763 - DNA, 25 bp, SARS Virus
ttgtgtccgagaaactcacagagat

SEQ ID NO: 61764 - DNA, 25 bp, SARS Virus
tgtgtccgagatactcacagagata

SEQ ID NO: 61765 - DNA, 25 bp, SARS Virus
gtgtccgagataatcacagagatat

SEQ ID NO: 61766 - DNA, 25 bp, SARS Virus
tgtccgagatacacacagagatatc

SEQ ID NO: 61767 - DNA, 25 bp, SARS Virus
gtccgagatactaacagagatatct

SEQ ID NO: 61768 - DNA, 25 bp, SARS Virus
tccgagatactcacagagatatctt

SEQ ID NO: 61769 - DNA, 25 bp, SARS Virus
ccgagatactcaaagagatatcttt

SEQ ID NO: 61770 - DNA, 25 bp, SARS Virus
cgagatactcacagagatatcttta

SEQ ID NO: 61771 - DNA, 25 bp, SARS Virus
gagatactcacaaagatatctttat

SEQ ID NO: 61772 - DNA, 25 bp, SARS Virus
agatactcacagagatatctttatc

SEQ ID NO: 61773 - DNA, 25 bp, SARS Virus
gatactcacagaaatatctttatcc

SEQ ID NO: 61774 - DNA, 25 bp, SARS Virus
atactcacagagatatctttatccc

SEQ ID NO: 61775 - DNA, 25 bp, SARS Virus
tactcacagagaaatctttatccct

SEQ ID NO: 61776 - DNA, 25 bp, SARS Virus
actcacagagatatctttatcccta

SEQ ID NO: 61777 - DNA, 25 bp, SARS Virus
ctcacagagataactttatccctac

SEQ ID NO: 61778 - DNA, 25 bp, SARS Virus
tcacagagatatatttatccctaca

SEQ ID NO: 61779 - DNA, 25 bp, SARS Virus
cacagagatatcattatccctacaa

SEQ ID NO: 61780 - DNA, 25 bp, SARS Virus
acagagatatctatatccctacaac

SEQ ID NO: 61781 - DNA, 25 bp, SARS Virus
cagagatatcttaatccctacaact

SEQ ID NO: 61782 - DNA, 25 bp, SARS Virus
agagatatctttatccctacaacta

SEQ ID NO: 61783 - DNA, 25 bp, SARS Virus
gagatatctttaaccctacaactag

SEQ ID NO: 61784 - DNA, 25 bp, SARS Virus
agatatctttatacctacaactagt

SEQ ID NO: 61785 - DNA, 25 bp, SARS Virus
gatatctttatcactacaactagta

SEQ ID NO: 61786 - DNA, 25 bp, SARS Virus
atatctttatccatacaactagtac

SEQ ID NO: 61787 - DNA, 25 bp, SARS Virus
tatctttatcccaacaactagtact

SEQ ID NO: 61788 - DNA, 25 bp, SARS Virus
atctttatccctacaactagtactt

SEQ ID NO: 61789 - DNA, 25 bp, SARS Virus
tctttatccctaaaactagtactta

SEQ ID NO: 61790 - DNA, 25 bp, SARS Virus
ctttatccctacaactagtacttaa

SEQ ID NO: 61791 - DNA, 25 bp, SARS Virus
tttatccctacaactagtacttaag

SEQ ID NO: 61792 - DNA, 25 bp, SARS Virus
ttatccctacaaatagtacttaagc

SEQ ID NO: 61793 - DNA, 25 bp, SARS Virus
tatccctacaacaagtacttaagca

SEQ ID NO: 61794 - DNA, 25 bp, SARS Virus
atccctacaactagtacttaagcac

SEQ ID NO: 61795 - DNA, 25 bp, SARS Virus
tccctacaactaatacttaagcacc

SEQ ID NO: 61796 - DNA, 25 bp, SARS Virus
ccctacaactagaacttaagcacct

SEQ ID NO: 61797 - DNA, 25 bp, SARS Virus
cctacaactagtacttaagcaccta

SEQ ID NO: 61798 - DNA, 25 bp, SARS Virus
ctacaactagtaattaagcacctac

SEQ ID NO: 61799 - DNA, 25 bp, SARS Virus
tacaactagtacataagcacctact

SEQ ID NO: 61800 - DNA, 25 bp, SARS Virus
acaactagtactaaagcacctactc

SEQ ID NO: 61801 - DNA, 25 bp, SARS Virus
caactagtacttaagcacctactca

SEQ ID NO: 61802 - DNA, 25 bp, SARS Virus
aactagtacttaagcacctactcaa

SEQ ID NO: 61803 - DNA, 25 bp, SARS Virus
actagtacttaaacacctactcaaa

SEQ ID NO: 61804 - DNA, 25 bp, SARS Virus
ctagtacttaagaacctactcaaaa

SEQ ID NO: 61805 - DNA, 25 bp, SARS Virus
tagtacttaagcacctactcaaaat

SEQ ID NO: 61806 - DNA, 25 bp, SARS Virus
agtacttaagcaactactcaaaatg

SEQ ID NO: 61807 - DNA, 25 bp, SARS Virus
gtacttaagcacatactcaaaatgc

SEQ ID NO: 61808 - DNA, 25 bp, SARS Virus
tacttaagcaccaactcaaaatgcg

SEQ ID NO: 61809 - DNA, 25 bp, SARS Virus
acttaagcacctactcaaaatgcga

SEQ ID NO: 61810 - DNA, 25 bp, SARS Virus
cttaagcacctaatcaaaatgcgaa

SEQ ID NO: 61811 - DNA, 25 bp, SARS Virus
ttaagcacctacacaaaatgcgaat

SEQ ID NO: 61812 - DNA, 25 bp, SARS Virus
taagcacctactaaaaatgcgaatg

SEQ ID NO: 61813 - DNA, 25 bp, SARS Virus
aagcacctactcaaaatgcgaatgg

SEQ ID NO: 61814 - DNA, 25 bp, SARS Virus
agcacctactcaaaatgcgaatgga

SEQ ID NO: 61815 - DNA, 25 bp, SARS Virus
gcacctactcaaaatgcgaatggac

SEQ ID NO: 61816 - DNA, 25 bp, SARS Virus
cacctactcaaaatgcgaatggacg

SEQ ID NO: 61817 - DNA, 25 bp, SARS Virus
acctactcaaaaagcgaatggacgc

SEQ ID NO: 61818 - DNA, 25 bp, SARS Virus
cctactcaaaatacgaatggacgca

SEQ ID NO: 61819 - DNA, 25 bp, SARS Virus
ctactcaaaatgagaatggacgcat

SEQ ID NO: 61820 - DNA, 25 bp, SARS Virus
tactcaaaatgcaaatggacgcatt

SEQ ID NO: 61821 - DNA, 25 bp, SARS Virus
actcaaaatgcgaatggacgcattt

SEQ ID NO: 61822 - DNA, 25 bp, SARS Virus
ctcaaaatgcgaatggacgcatttg

SEQ ID NO: 61823 - DNA, 25 bp, SARS Virus
tcaaaatgcgaaaggacgcatttgt

SEQ ID NO: 61824 - DNA, 25 bp, SARS Virus
caaaatgcgaatagacgcatttgta

SEQ ID NO: 61825 - DNA, 25 bp, SARS Virus
aaaatgcgaatgaacgcatttgtaa

SEQ ID NO: 61826 - DNA, 25 bp, SARS Virus
aaatgcgaatggacgcatttgtaaa

SEQ ID NO: 61827 - DNA, 25 bp, SARS Virus
aatgcgaatggaagcatttgtaaag

SEQ ID NO: 61828 - DNA, 25 bp, SARS Virus
atgcgaatggacacatttgtaaaga

SEQ ID NO: 61829 - DNA, 25 bp, SARS Virus
tgcgaatggacgaatttgtaaagag

SEQ ID NO: 61830 - DNA, 25 bp, SARS Virus
gcgaatggacgcatttgtaaagagg

SEQ ID NO: 61831 - DNA, 25 bp, SARS Virus
cgaatggacgcaattgtaaagaggt

SEQ ID NO: 61832 - DNA, 25 bp, SARS Virus
gaatggacgcatatgtaaagaggta

SEQ ID NO: 61833 - DNA, 25 bp, SARS Virus
aatggacgcattagtaaagaggtac

SEQ ID NO: 61834 - DNA, 25 bp, SARS Virus
atggacgcatttataaagaggtact

SEQ ID NO: 61835 - DNA, 25 bp, SARS Virus
tggacgcatttgaaaagaggtacta

SEQ ID NO: 61836 - DNA, 25 bp, SARS Virus
ggacgcatttgtaaagaggtactac

SEQ ID NO: 61837 - DNA, 25 bp, SARS Virus
gacgcatttgtaaagaggtactact

SEQ ID NO: 61838 - DNA, 25 bp, SARS Virus
acgcatttgtaaagaggtactacta

SEQ ID NO: 61839 - DNA, 25 bp, SARS Virus
cgcatttgtaaaaaggtactactaa

SEQ ID NO: 61840 - DNA, 25 bp, SARS Virus
gcatttgtaaagaggtactactaag

SEQ ID NO: 61841 - DNA, 25 bp, SARS Virus
catttgtaaagaagtactactaaga

SEQ ID NO: 61842 - DNA, 25 bp, SARS Virus
atttgtaaagagatactactaagaa

SEQ ID NO: 61843 - DNA, 25 bp, SARS Virus
tttgtaaagaggaactactaagaaa

SEQ ID NO: 61844 - DNA, 25 bp, SARS Virus
ttgtaaagaggtactactaagaaag

SEQ ID NO: 61845 - DNA, 25 bp, SARS Virus
tgtaaagaggtaatactaagaaaga

SEQ ID NO: 61846 - DNA, 25 bp, SARS Virus
gtaaagaggtacaactaagaaagac

SEQ ID NO: 61847 - DNA, 25 bp, SARS Virus
taaagaggtactactaagaaagact

SEQ ID NO: 61848 - DNA, 25 bp, SARS Virus
aaagaggtactaataagaaagacta

SEQ ID NO: 61849 - DNA, 25 bp, SARS Virus
aagaggtactacaaagaaagactac

SEQ ID NO: 61850 - DNA, 25 bp, SARS Virus
agaggtactactaagaaagactact

SEQ ID NO: 61851 - DNA, 25 bp, SARS Virus
gaggtactactaagaaagactacta

SEQ ID NO: 61852 - DNA, 25 bp, SARS Virus
aggtactactaaaaaagactactac

SEQ ID NO: 61853 - DNA, 25 bp, SARS Virus
ggtactactaagaaagactactacg

SEQ ID NO: 61854 - DNA, 25 bp, SARS Virus
gtactactaagaaagactactacgg

SEQ ID NO: 61855 - DNA, 25 bp, SARS Virus
tactactaagaaagactactacggc

SEQ ID NO: 61856 - DNA, 25 bp, SARS Virus
actactaagaaaaactactacggca

SEQ ID NO: 61857 - DNA, 25 bp, SARS Virus
ctactaagaaagactactacggcaa

SEQ ID NO: 61858 - DNA, 25 bp, SARS Virus
tactaagaaagaatactacggcaac

SEQ ID NO: 61859 - DNA, 25 bp, SARS Virus
actaagaaagacaactacggcaaca

SEQ ID NO: 61860 - DNA, 25 bp, SARS Virus
ctaagaaagactactacggcaacac

SEQ ID NO: 61861 - DNA, 25 bp, SARS Virus
taagaaagactaatacggcaacaca

SEQ ID NO: 61862 - DNA, 25 bp, SARS Virus
aagaaagactacaacggcaacacac

SEQ ID NO: 61863 - DNA, 25 bp, SARS Virus
agaaagactactacggcaacacacg

SEQ ID NO: 61864 - DNA, 25 bp, SARS Virus
gaaagactactaaggcaacacacga

SEQ ID NO: 61865 - DNA, 25 bp, SARS Virus
aaagactactacagcaacacacgat

SEQ ID NO: 61866 - DNA, 25 bp, SARS Virus
aagactactacgacaacacacgata

SEQ ID NO: 61867 - DNA, 25 bp, SARS Virus
agactactacggaaacacacgatat

SEQ ID NO: 61868 - DNA, 25 bp, SARS Virus
gactactacggcaacacacgatatt

SEQ ID NO: 61869 - DNA, 25 bp, SARS Virus
actactacggcaacacacgatattg

SEQ ID NO: 61870 - DNA, 25 bp, SARS Virus
ctactacggcaaaacacgatattgt

SEQ ID NO: 61871 - DNA, 25 bp, SARS Virus
tactacggcaacacacgatattgtc

SEQ ID NO: 61872 - DNA, 25 bp, SARS Virus
actacggcaacaaacgatattgtca

SEQ ID NO: 61873 - DNA, 25 bp, SARS Virus
ctacggcaacacacgatattgtcat

SEQ ID NO: 61874 - DNA, 25 bp, SARS Virus
tacggcaacacaagatattgtcatt

SEQ ID NO: 61875 - DNA, 25 bp, SARS Virus
acggcaacacacaatattgtcattg

SEQ ID NO: 61876 - DNA, 25 bp, SARS Virus
cggcaacacacgatattgtcattga

SEQ ID NO: 61877 - DNA, 25 bp, SARS Virus
ggcaacacacgaaattgtcattgat

SEQ ID NO: 61878 - DNA, 25 bp, SARS Virus
gcaacacacgatattgtcattgata

SEQ ID NO: 61879 - DNA, 25 bp, SARS Virus
caacacacgataatgtcattgatac

SEQ ID NO: 61880 - DNA, 25 bp, SARS Virus
aacacacgatatagtcattgatacg

SEQ ID NO: 61881 - DNA, 25 bp, SARS Virus
acacacgatattatcattgatacgc

SEQ ID NO: 61882 - DNA, 25 bp, SARS Virus
cacacgatattgacattgatacgcc

SEQ ID NO: 61883 - DNA, 25 bp, SARS Virus
acacgatattgtaattgatacgccg

SEQ ID NO: 61884 - DNA, 25 bp, SARS Virus
cacgatattgtcattgatacgccga

SEQ ID NO: 61885 - DNA, 25 bp, SARS Virus
acgatattgtcaatgatacgccgag

SEQ ID NO: 61886 - DNA, 25 bp, SARS Virus
cgatattgtcatagatacgccgagt

SEQ ID NO: 61887 - DNA, 25 bp, SARS Virus
gatattgtcattaatacgccgagtt

SEQ ID NO: 61888 - DNA, 25 bp, SARS Virus
atattgtcattgatacgccgagttc

SEQ ID NO: 61889 - DNA, 25 bp, SARS Virus
tattgtcattgaaacgccgagttcc

SEQ ID NO: 61890 - DNA, 25 bp, SARS Virus
attgtcattgatacgccgagttcca

SEQ ID NO: 61891 - DNA, 25 bp, SARS Virus
ttgtcattgataagccgagttccaa

SEQ ID NO: 61892 - DNA, 25 bp, SARS Virus
tgtcattgatacaccgagttccaaa

SEQ ID NO: 61893 - DNA, 25 bp, SARS Virus
gtcattgatacgacgagttccaaat

SEQ ID NO: 61894 - DNA, 25 bp, SARS Virus
tcattgatacgcagagttccaaatc

SEQ ID NO: 61895 - DNA, 25 bp, SARS Virus
cattgatacgccaagttccaaatca

SEQ ID NO: 61896 - DNA, 25 bp, SARS Virus
attgatacgccgagttccaaatcat

SEQ ID NO: 61897 - DNA, 25 bp, SARS Virus
ttgatacgccgaattccaaatcatc

SEQ ID NO: 61898 - DNA, 25 bp, SARS Virus
tgatacgccgagatccaaatcatcg

SEQ ID NO: 61899 - DNA, 25 bp, SARS Virus
gatacgccgagtaccaaatcatcga

SEQ ID NO: 61900 - DNA, 25 bp, SARS Virus
atacgccgagttacaaatcatcgat

SEQ ID NO: 61901 - DNA, 25 bp, SARS Virus
tacgccgagttcaaaatcatcgatc

SEQ ID NO: 61902 - DNA, 25 bp, SARS Virus
acgccgagttccaaatcatcgatcg

SEQ ID NO: 61903 - DNA, 25 bp, SARS Virus
cgccgagttccaaatcatcgatcgt

SEQ ID NO: 61904 - DNA, 25 bp, SARS Virus
gccgagttccaaatcatcgatcgta

SEQ ID NO: 61905 - DNA, 25 bp, SARS Virus
ccgagttccaaaacatcgatcgtaa

SEQ ID NO: 61906 - DNA, 25 bp, SARS Virus
cgagttccaaataatcgatcgtaat

SEQ ID NO: 61907 - DNA, 25 bp, SARS Virus
gagttccaaatcatcgatcgtaatt

SEQ ID NO: 61908 - DNA, 25 bp, SARS Virus
agttccaaatcaacgatcgtaattc

SEQ ID NO: 61909 - DNA, 25 bp, SARS Virus
gttccaaatcatagatcgtaattct

SEQ ID NO: 61910 - DNA, 25 bp, SARS Virus
ttccaaatcatcaatcgtaattctt

SEQ ID NO: 61911 - DNA, 25 bp, SARS Virus
tccaaatcatcgatcgtaattcttg

SEQ ID NO: 61912 - DNA, 25 bp, SARS Virus
ccaaatcatcgaacgtaattcttga

SEQ ID NO: 61913 - DNA, 25 bp, SARS Virus
caaatcatcgatagtaattcttgaa

SEQ ID NO: 61914 - DNA, 25 bp, SARS Virus
aaatcatcgatcataattcttgaaa

SEQ ID NO: 61915 - DNA, 25 bp, SARS Virus
aatcatcgatcgaaattcttgaaat

SEQ ID NO: 61916 - DNA, 25 bp, SARS Virus
atcatcgatcgtaattcttgaaatt

SEQ ID NO: 61917 - DNA, 25 bp, SARS Virus
tcatcgatcgtaattcttgaaattc

SEQ ID NO: 61918 - DNA, 25 bp, SARS Virus
catcgatcgtaaatcttgaaattcc

SEQ ID NO: 61919 - DNA, 25 bp, SARS Virus
atcgatcgtaatacttgaaattccg

SEQ ID NO: 61920 - DNA, 25 bp, SARS Virus
tcgatcgtaattattgaaattccgt

SEQ ID NO: 61921 - DNA, 25 bp, SARS Virus
cgatcgtaattcatgaaattccgtc

SEQ ID NO: 61922 - DNA, 25 bp, SARS Virus
gatcgtaattctagaaattccgtca

SEQ ID NO: 61923 - DNA, 25 bp, SARS Virus
atcgtaattcttaaaattccgtcaa

SEQ ID NO: 61924 - DNA, 25 bp, SARS Virus
tcgtaattcttgaaattccgtcaag

SEQ ID NO: 61925 - DNA, 25 bp, SARS Virus
cgtaattcttgaaattccgtcaaga

SEQ ID NO: 61926 - DNA, 25 bp, SARS Virus
gtaattcttgaaattccgtcaagaa

SEQ ID NO: 61927 - DNA, 25 bp, SARS Virus
taattcttgaaaatccgtcaagaaa

SEQ ID NO: 61928 - DNA, 25 bp, SARS Virus
aattcttgaaataccgtcaagaaat

SEQ ID NO: 61929 - DNA, 25 bp, SARS Virus
attcttgaaattacgtcaagaaata

SEQ ID NO: 61930 - DNA, 25 bp, SARS Virus
ttcttgaaattcagtcaagaaataa

SEQ ID NO: 61931 - DNA, 25 bp, SARS Virus
tcttgaaattccatcaagaaataat

SEQ ID NO: 61932 - DNA, 25 bp, SARS Virus
cttgaaattccgacaagaaataata

SEQ ID NO: 61933 - DNA, 25 bp, SARS Virus
ttgaaattccgtaaagaaataatag

SEQ ID NO: 61934 - DNA, 25 bp, SARS Virus
tgaaattccgtcaagaaataatagt

SEQ ID NO: 61935 - DNA, 25 bp, SARS Virus
gaaattccgtcaagaaataatagtt

SEQ ID NO: 61936 - DNA, 25 bp, SARS Virus
aaattccgtcaaaaaataatagttt

SEQ ID NO: 61937 - DNA, 25 bp, SARS Virus
aattccgtcaagaaataatagtttt

SEQ ID NO: 61938 - DNA, 25 bp, SARS Virus
attccgtcaagaaataatagtttta

SEQ ID NO: 61939 - DNA, 25 bp, SARS Virus
ttccgtcaagaaataatagttttat

SEQ ID NO: 61940 - DNA, 25 bp, SARS Virus
tccgtcaagaaaaaatagttttatt

SEQ ID NO: 61941 - DNA, 25 bp, SARS Virus
ccgtcaagaaataatagttttatta

SEQ ID NO: 61942 - DNA, 25 bp, SARS Virus
cgtcaagaaataatagttttattac

SEQ ID NO: 61943 - DNA, 25 bp, SARS Virus
gtcaagaaataaaagttttattaca

SEQ ID NO: 61944 - DNA, 25 bp, SARS Virus
tcaagaaataatagttttattacac

SEQ ID NO: 61945 - DNA, 25 bp, SARS Virus
caagaaataataattttattacaca

SEQ ID NO: 61946 - DNA, 25 bp, SARS Virus
aagaaataatagatttattacacaa

SEQ ID NO: 61947 - DNA, 25 bp, SARS Virus
agaaataatagtattattacacaag

SEQ ID NO: 61948 - DNA, 25 bp, SARS Virus
gaaataatagttatattacacaagt

SEQ ID NO: 61949 - DNA, 25 bp, SARS Virus
aaataatagtttaattacacaagta

SEQ ID NO: 61950 - DNA, 25 bp, SARS Virus
aataatagttttattacacaagtac

SEQ ID NO: 61951 - DNA, 25 bp, SARS Virus
ataatagttttaatacacaagtaca

SEQ ID NO: 61952 - DNA, 25 bp, SARS Virus
taatagttttataacacaagtacag

SEQ ID NO: 61953 - DNA, 25 bp, SARS Virus
aatagttttattacacaagtacaga

SEQ ID NO: 61954 - DNA, 25 bp, SARS Virus
atagttttattaaacaagtacagac

SEQ ID NO: 61955 - DNA, 25 bp, SARS Virus
tagttttattacacaagtacagact

SEQ ID NO: 61956 - DNA, 25 bp, SARS Virus
agttttattacaaaagtacagactc

SEQ ID NO: 61957 - DNA, 25 bp, SARS Virus
gttttattacacaagtacagactcc

SEQ ID NO: 61958 - DNA, 25 bp, SARS Virus
ttttattacacaagtacagactccg

SEQ ID NO: 61959 - DNA, 25 bp, SARS Virus
tttattacacaaatacagactccgt

SEQ ID NO: 61960 - DNA, 25 bp, SARS Virus
ttattacacaagaacagactccgtt

SEQ ID NO: 61961 - DNA, 25 bp, SARS Virus
tattacacaagtacagactccgttt

SEQ ID NO: 61962 - DNA, 25 bp, SARS Virus
attacacaagtaaagactccgtttt

SEQ ID NO: 61963 - DNA, 25 bp, SARS Virus
ttacacaagtacagactccgtttta

SEQ ID NO: 61964 - DNA, 25 bp, SARS Virus
tacacaagtacaaactccgttttac

SEQ ID NO: 61965 - DNA, 25 bp, SARS Virus
acacaagtacagactccgttttaca

SEQ ID NO: 61966 - DNA, 25 bp, SARS Virus
cacaagtacagaatccgttttacaa

SEQ ID NO: 61967 - DNA, 25 bp, SARS Virus
acaagtacagacaccgttttacaac

SEQ ID NO: 61968 - DNA, 25 bp, SARS Virus
caagtacagactacgttttacaacc

SEQ ID NO: 61969 - DNA, 25 bp, SARS Virus
aagtacagactcagttttacaacct

SEQ ID NO: 61970 - DNA, 25 bp, SARS Virus
agtacagactccattttacaacctg

SEQ ID NO: 61971 - DNA, 25 bp, SARS Virus
gtacagactccgatttacaacctga

SEQ ID NO: 61972 - DNA, 25 bp, SARS Virus
tacagactccgtattacaacctgac

SEQ ID NO: 61973 - DNA, 25 bp, SARS Virus
acagactccgttatacaacctgact

SEQ ID NO: 61974 - DNA, 25 bp, SARS Virus
cagactccgtttaacaacctgactc

SEQ ID NO: 61975 - DNA, 25 bp, SARS Virus
agactccgttttacaacctgactct

SEQ ID NO: 61976 - DNA, 25 bp, SARS Virus
gactccgttttaaaacctgactctg

SEQ ID NO: 61977 - DNA, 25 bp, SARS Virus
actccgttttacaacctgactctga

SEQ ID NO: 61978 - DNA, 25 bp, SARS Virus
ctccgttttacaacctgactctgac

SEQ ID NO: 61979 - DNA, 25 bp, SARS Virus
tccgttttacaaactgactctgact

SEQ ID NO: 61980 - DNA, 25 bp, SARS Virus
ccgttttacaacatgactctgactg

SEQ ID NO: 61981 - DNA, 25 bp, SARS Virus
cgttttacaaccagactctgactgg

SEQ ID NO: 61982 - DNA, 25 bp, SARS Virus
gttttacaacctaactctgactgga

SEQ ID NO: 61983 - DNA, 25 bp, SARS Virus
ttttacaacctgactctgactggaa

SEQ ID NO: 61984 - DNA, 25 bp, SARS Virus
tttacaacctgaatctgactggaat

SEQ ID NO: 61985 - DNA, 25 bp, SARS Virus
ttacaacctgacactgactggaatg

SEQ ID NO: 61986 - DNA, 25 bp, SARS Virus
tacaacctgactatgactggaatga

SEQ ID NO: 61987 - DNA, 25 bp, SARS Virus
acaacctgactcagactggaatgat

SEQ ID NO: 61988 - DNA, 25 bp, SARS Virus
caacctgactctaactggaatgatt

SEQ ID NO: 61989 - DNA, 25 bp, SARS Virus
aacctgactctgactggaatgattt

SEQ ID NO: 61990 - DNA, 25 bp, SARS Virus
acctgactctgaatggaatgatttc

SEQ ID NO: 61991 - DNA, 25 bp, SARS Virus
cctgactctgacaggaatgatttcc

SEQ ID NO: 61992 - DNA, 25 bp, SARS Virus
ctgactctgactagaatgatttcct

SEQ ID NO: 61993 - DNA, 25 bp, SARS Virus
tgactctgactgaaatgatttcctg

SEQ ID NO: 61994 - DNA, 25 bp, SARS Virus
gactctgactggaatgatttcctgg

SEQ ID NO: 61995 - DNA, 25 bp, SARS Virus
actctgactggaatgatttcctgga

SEQ ID NO: 61996 - DNA, 25 bp, SARS Virus
ctctgactggaaagatttcctggag

SEQ ID NO: 61997 - DNA, 25 bp, SARS Virus
tctgactggaataatttcctggagt

SEQ ID NO: 61998 - DNA, 25 bp, SARS Virus
ctgactggaatgatttcctggagtg

SEQ ID NO: 61999 - DNA, 25 bp, SARS Virus
tgactggaatgaattcctggagtgc

SEQ ID NO: 62000 - DNA, 25 bp, SARS Virus
gactggaatgatatcctggagtgct

SEQ ID NO: 62001 - DNA, 25 bp, SARS Virus
actggaatgattacctggagtgctt

SEQ ID NO: 62002 - DNA, 25 bp, SARS Virus
ctggaatgatttactggagtgctta

SEQ ID NO: 62003 - DNA, 25 bp, SARS Virus
tggaatgatttcatggagtgcttaa

SEQ ID NO: 62004 - DNA, 25 bp, SARS Virus
ggaatgatttccaggagtgcttaaa

SEQ ID NO: 62005 - DNA, 25 bp, SARS Virus
gaatgatttcctagagtgcttaaaa

SEQ ID NO: 62006 - DNA, 25 bp, SARS Virus
aatgatttcctgaagtgcttaaaac

SEQ ID NO: 62007 - DNA, 25 bp, SARS Virus
atgatttcctggagtgcttaaaacg

SEQ ID NO: 62008 - DNA, 25 bp, SARS Virus
tgatttcctggaatgcttaaaacga

SEQ ID NO: 62009 - DNA, 25 bp, SARS Virus
gatttcctggagagcttaaaacgag

SEQ ID NO: 62010 - DNA, 25 bp, SARS Virus
atttcctggagtacttaaaacgagt

SEQ ID NO: 62011 - DNA, 25 bp, SARS Virus
tttcctggagtgattaaaacgagtg

SEQ ID NO: 62012 - DNA, 25 bp, SARS Virus
ttcctggagtgcataaaacgagtgt

SEQ ID NO: 62013 - DNA, 25 bp, SARS Virus
tcctggagtgctaaaaacgagtgtc

SEQ ID NO: 62014 - DNA, 25 bp, SARS Virus
cctggagtgcttaaaacgagtgtcg

SEQ ID NO: 62015 - DNA, 25 bp, SARS Virus
ctggagtgcttaaaacgagtgtcgt

SEQ ID NO: 62016 - DNA, 25 bp, SARS Virus
tggagtgcttaaaacgagtgtcgta

SEQ ID NO: 62017 - DNA, 25 bp, SARS Virus
ggagtgcttaaaacgagtgtcgtat

SEQ ID NO: 62018 - DNA, 25 bp, SARS Virus
gagtgcttaaaaagagtgtcgtatg

SEQ ID NO: 62019 - DNA, 25 bp, SARS Virus
agtgcttaaaacaagtgtcgtatgt

SEQ ID NO: 62020 - DNA, 25 bp, SARS Virus
gtgcttaaaacgagtgtcgtatgtt

SEQ ID NO: 62021 - DNA, 25 bp, SARS Virus
tgcttaaaacgaatgtcgtatgtta

SEQ ID NO: 62022 - DNA, 25 bp, SARS Virus
gcttaaaacgagagtcgtatgttac

SEQ ID NO: 62023 - DNA, 25 bp, SARS Virus
cttaaaacgagtatcgtatgttacg

SEQ ID NO: 62024 - DNA, 25 bp, SARS Virus
ttaaaacgagtgacgtatgttacga

SEQ ID NO: 62025 - DNA, 25 bp, SARS Virus
taaaacgagtgtagtatgttacgat

SEQ ID NO: 62026 - DNA, 25 bp, SARS Virus
aaaacgagtgtcatatgttacgatc

SEQ ID NO: 62027 - DNA, 25 bp, SARS Virus
aaacgagtgtcgaatgttacgatca

SEQ ID NO: 62028 - DNA, 25 bp, SARS Virus
aacgagtgtcgtatgttacgatcaa

SEQ ID NO: 62029 - DNA, 25 bp, SARS Virus
acgagtgtcgtaagttacgatcaat

SEQ ID NO: 62030 - DNA, 25 bp, SARS Virus
cgagtgtcgtatattacgatcaatt

SEQ ID NO: 62031 - DNA, 25 bp, SARS Virus
gagtgtcgtatgatacgatcaattt

SEQ ID NO: 62032 - DNA, 25 bp, SARS Virus
agtgtcgtatgtaacgatcaatttg

SEQ ID NO: 62033 - DNA, 25 bp, SARS Virus
gtgtcgtatgttacgatcaatttgt

SEQ ID NO: 62034 - DNA, 25 bp, SARS Virus
tgtcgtatgttaagatcaatttgtt

SEQ ID NO: 62035 - DNA, 25 bp, SARS Virus
gtcgtatgttacaatcaatttgttc

SEQ ID NO: 62036 - DNA, 25 bp, SARS Virus
tcgtatgttacgatcaatttgttcc

SEQ ID NO: 62037 - DNA, 25 bp, SARS Virus
cgtatgttacgaacaatttgttcct

SEQ ID NO: 62038 - DNA, 25 bp, SARS Virus
gtatgttacgataaatttgttcctc

SEQ ID NO: 62039 - DNA, 25 bp, SARS Virus
tatgttacgatcaatttgttcctct

SEQ ID NO: 62040 - DNA, 25 bp, SARS Virus
atgttacgatcaatttgttcctcta

SEQ ID NO: 62041 - DNA, 25 bp, SARS Virus
tgttacgatcaaattgttcctctac

SEQ ID NO: 62042 - DNA, 25 bp, SARS Virus
gttacgatcaatatgttcctctact

SEQ ID NO: 62043 - DNA, 25 bp, SARS Virus
ttacgatcaattagttcctctacta

SEQ ID NO: 62044 - DNA, 25 bp, SARS Virus
tacgatcaatttattcctctactaa

SEQ ID NO: 62045 - DNA, 25 bp, SARS Virus
acgatcaatttgatcctctactaat

SEQ ID NO: 62046 - DNA, 25 bp, SARS Virus
cgatcaatttgtacctctactaatg

SEQ ID NO: 62047 - DNA, 25 bp, SARS Virus
gatcaatttgttactctactaatgc

SEQ ID NO: 62048 - DNA, 25 bp, SARS Virus
atcaatttgttcatctactaatgca

SEQ ID NO: 62049 - DNA, 25 bp, SARS Virus
tcaatttgttccactactaatgcac

SEQ ID NO: 62050 - DNA, 25 bp, SARS Virus
caatttgttcctatactaatgcaca

SEQ ID NO: 62051 - DNA, 25 bp, SARS Virus
aatttgttcctcaactaatgcacat

SEQ ID NO: 62052 - DNA, 25 bp, SARS Virus
atttgttcctctactaatgcacatg

SEQ ID NO: 62053 - DNA, 25 bp, SARS Virus
tttgttcctctaataatgcacatgg

SEQ ID NO: 62054 - DNA, 25 bp, SARS Virus
ttgttcctctacaaatgcacatgga

SEQ ID NO: 62055 - DNA, 25 bp, SARS Virus
tgttcctctactaatgcacatggac

SEQ ID NO: 62056 - DNA, 25 bp, SARS Virus
gttcctctactaatgcacatggacg

SEQ ID NO: 62057 - DNA, 25 bp, SARS Virus
ttcctctactaaagcacatggacgg

SEQ ID NO: 62058 - DNA, 25 bp, SARS Virus
tcctctactaatacacatggacgga

SEQ ID NO: 62059 - DNA, 25 bp, SARS Virus
cctctactaatgaacatggacggaa

SEQ ID NO: 62060 - DNA, 25 bp, SARS Virus
ctctactaatgcacatggacggaat

SEQ ID NO: 62061 - DNA, 25 bp, SARS Virus
tctactaatgcaaatggacggaatg

SEQ ID NO: 62062 - DNA, 25 bp, SARS Virus
ctactaatgcacatggacggaatgg

SEQ ID NO: 62063 - DNA, 25 bp, SARS Virus
tactaatgcacaaggacggaatggg

SEQ ID NO: 62064 - DNA, 25 bp, SARS Virus
actaatgcacatagacggaatgggt

SEQ ID NO: 62065 - DNA, 25 bp, SARS Virus
ctaatgcacatgaacggaatgggtc

SEQ ID NO: 62066 - DNA, 25 bp, SARS Virus
taatgcacatggacggaatgggtct

SEQ ID NO: 62067 - DNA, 25 bp, SARS Virus
aatgcacatggaaggaatgggtcta

SEQ ID NO: 62068 - DNA, 25 bp, SARS Virus
atgcacatggacagaatgggtctag

SEQ ID NO: 62069 - DNA, 25 bp, SARS Virus
tgcacatggacgaaatgggtctagg

SEQ ID NO: 62070 - DNA, 25 bp, SARS Virus
gcacatggacggaatgggtctaggt

SEQ ID NO: 62071 - DNA, 25 bp, SARS Virus
cacatggacggaatgggtctaggta

SEQ ID NO: 62072 - DNA, 25 bp, SARS Virus
acatggacggaaagggtctaggtag

SEQ ID NO: 62073 - DNA, 25 bp, SARS Virus
catggacggaataggtctaggtagt

SEQ ID NO: 62074 - DNA, 25 bp, SARS Virus
atggacggaatgagtctaggtagtt

SEQ ID NO: 62075 - DNA, 25 bp, SARS Virus
tggacggaatggatctaggtagttc

SEQ ID NO: 62076 - DNA, 25 bp, SARS Virus
ggacggaatgggactaggtagttct

SEQ ID NO: 62077 - DNA, 25 bp, SARS Virus
gacggaatgggtataggtagttctt

SEQ ID NO: 62078 - DNA, 25 bp, SARS Virus
acggaatgggtcaaggtagttctta

SEQ ID NO: 62079 - DNA, 25 bp, SARS Virus
cggaatgggtctaggtagttcttat

SEQ ID NO: 62080 - DNA, 25 bp, SARS Virus
ggaatgggtctaagtagttcttata

SEQ ID NO: 62081 - DNA, 25 bp, SARS Virus
gaatgggtctagatagttcttataa

SEQ ID NO: 62082 - DNA, 25 bp, SARS Virus
aatgggtctaggaagttcttataat

SEQ ID NO: 62083 - DNA, 25 bp, SARS Virus
atgggtctaggtagttcttataatc

SEQ ID NO: 62084 - DNA, 25 bp, SARS Virus
tgggtctaggtaattcttataatcc

SEQ ID NO: 62085 - DNA, 25 bp, SARS Virus
gggtctaggtagatcttataatccg

SEQ ID NO: 62086 - DNA, 25 bp, SARS Virus
ggtctaggtagtacttataatccgc

SEQ ID NO: 62087 - DNA, 25 bp, SARS Virus
gtctaggtagttattataatccgcg

SEQ ID NO: 62088 - DNA, 25 bp, SARS Virus
tctaggtagttcatataatccgcgt

SEQ ID NO: 62089 - DNA, 25 bp, SARS Virus
ctaggtagttctaataatccgcgtc

SEQ ID NO: 62090 - DNA, 25 bp, SARS Virus
taggtagttcttataatccgcgtcc

SEQ ID NO: 62091 - DNA, 25 bp, SARS Virus
aggtagttcttaaaatccgcgtccg

SEQ ID NO: 62092 - DNA, 25 bp, SARS Virus
ggtagttcttataatccgcgtccga

SEQ ID NO: 62093 - DNA, 25 bp, SARS Virus
gtagttcttataatccgcgtccgac

SEQ ID NO: 62094 - DNA, 25 bp, SARS Virus
tagttcttataaaccgcgtccgaca

SEQ ID NO: 62095 - DNA, 25 bp, SARS Virus
agttcttataatacgcgtccgacaa

SEQ ID NO: 62096 - DNA, 25 bp, SARS Virus
gttcttataatcagcgtccgacaaa

SEQ ID NO: 62097 - DNA, 25 bp, SARS Virus
ttcttataatccacgtccgacaaaa

SEQ ID NO: 62098 - DNA, 25 bp, SARS Virus
tcttataatccgagtccgacaaaac

SEQ ID NO: 62099 - DNA, 25 bp, SARS Virus
cttataatccgcatccgacaaaaca

SEQ ID NO: 62100 - DNA, 25 bp, SARS Virus
ttataatccgcgaccgacaaaacag

SEQ ID NO: 62101 - DNA, 25 bp, SARS Virus
tataatccgcgtacgacaaaacagc

SEQ ID NO: 62102 - DNA, 25 bp, SARS Virus
ataatccgcgtcagacaaaacagct

SEQ ID NO: 62103 - DNA, 25 bp, SARS Virus
taatccgcgtccaacaaaacagcta

SEQ ID NO: 62104 - DNA, 25 bp, SARS Virus
aatccgcgtccgacaaaacagctac

SEQ ID NO: 62105 - DNA, 25 bp, SARS Virus
atttggtccaccctgtagtaggcca

SEQ ID NO: 62106 - DNA, 25 bp, SARS Virus
tttggtccacctcgtagtaggccac

SEQ ID NO: 62107 - DNA, 25 bp, SARS Virus
ttggtccaccttctagtaggccact

SEQ ID NO: 62108 - DNA, 25 bp, SARS Virus
tggtccaccttgcagtaggccacta

SEQ ID NO: 62109 - DNA, 25 bp, SARS Virus
ggtccaccttgtcgtaggccactac

SEQ ID NO: 62110 - DNA, 25 bp, SARS Virus
gtccaccttgtactaggccactacg

SEQ ID NO: 62111 - DNA, 25 bp, SARS Virus
tccaccttgtagcaggccactacga

SEQ ID NO: 62112 - DNA, 25 bp, SARS Virus
ccaccttgtagtcggccactacgat

SEQ ID NO: 62113 - DNA, 25 bp, SARS Virus
caccttgtagtacgccactacgatg

SEQ ID NO: 62114 - DNA, 25 bp, SARS Virus
accttgtagtagcccactacgatgt

SEQ ID NO: 62115 - DNA, 25 bp, SARS Virus
ccttgtagtaggccactacgatgtt

SEQ ID NO: 62116 - DNA, 25 bp, SARS Virus
cttgtagtaggccactacgatgttg

SEQ ID NO: 62117 - DNA, 25 bp, SARS Virus
ttgtagtaggcccctacgatgttga

SEQ ID NO: 62118 - DNA, 25 bp, SARS Virus
tgtagtaggccactacgatgttgac

SEQ ID NO: 62119 - DNA, 25 bp, SARS Virus
gtagtaggccaccacgatgttgacg

SEQ ID NO: 62120 - DNA, 25 bp, SARS Virus
tagtaggccactccgatgttgacga

SEQ ID NO: 62121 - DNA, 25 bp, SARS Virus
agtaggccactacgatgttgacgaa

SEQ ID NO: 62122 - DNA, 25 bp, SARS Virus
gtaggccactaccatgttgacgaat

SEQ ID NO: 62123 - DNA, 25 bp, SARS Virus
taggccactacgctgttgacgaata

SEQ ID NO: 62124 - DNA, 25 bp, SARS Virus
aggccactacgacgttgacgaatac

SEQ ID NO: 62125 - DNA, 25 bp, SARS Virus
ggccactacgatcttgacgaatacg

SEQ ID NO: 62126 - DNA, 25 bp, SARS Virus
gccactacgatgctgacgaatacga

SEQ ID NO: 62127 - DNA, 25 bp, SARS Virus
ccactacgatgtcgacgaatacgat

SEQ ID NO: 62128 - DNA, 25 bp, SARS Virus
cactacgatgttcacgaatacgatt

SEQ ID NO: 62129 - DNA, 25 bp, SARS Virus
actacgatgttgccgaatacgatta

SEQ ID NO: 62130 - DNA, 25 bp, SARS Virus
ctacgatgttgacgaatacgattat

SEQ ID NO: 62131 - DNA, 25 bp, SARS Virus
tacgatgttgaccaatacgattatc

SEQ ID NO: 62132 - DNA, 25 bp, SARS Virus
acgatgttgacgcatacgattatca

SEQ ID NO: 62133 - DNA, 25 bp, SARS Virus
cgatgttgacgactacgattatcac

SEQ ID NO: 62134 - DNA, 25 bp, SARS Virus
gatgttgacgaacacgattatcaca

SEQ ID NO: 62135 - DNA, 25 bp, SARS Virus
atgttgacgaatccgattatcacag

SEQ ID NO: 62136 - DNA, 25 bp, SARS Virus
tgttgacgaatacgattatcacaga

SEQ ID NO: 62137 - DNA, 25 bp, SARS Virus
gttgacgaataccattatcacagaa

SEQ ID NO: 62138 - DNA, 25 bp, SARS Virus
ttgacgaatacgcttatcacagaaa

SEQ ID NO: 62139 - DNA, 25 bp, SARS Virus
tgacgaatacgactatcacagaaat

SEQ ID NO: 62140 - DNA, 25 bp, SARS Virus
gacgaatacgatcatcacagaaatt

SEQ ID NO: 62141 - DNA, 25 bp, SARS Virus
acgaatacgattctcacagaaattg

SEQ ID NO: 62142 - DNA, 25 bp, SARS Virus
cgaatacgattaccacagaaattgt

SEQ ID NO: 62143 - DNA, 25 bp, SARS Virus
gaatacgattatcacagaaattgta

SEQ ID NO: 62144 - DNA, 25 bp, SARS Virus
aatacgattatcccagaaattgtaa

SEQ ID NO: 62145 - DNA, 25 bp, SARS Virus
atacgattatcacagaaattgtaaa

SEQ ID NO: 62146 - DNA, 25 bp, SARS Virus
tacgattatcaccgaaattgtaaac

SEQ ID NO: 62147 - DNA, 25 bp, SARS Virus
acgattatcacacaaattgtaaaca

SEQ ID NO: 62148 - DNA, 25 bp, SARS Virus
cgattatcacagcaattgtaaacag

SEQ ID NO: 62149 - DNA, 25 bp, SARS Virus
gattatcacagacattgtaaacagt

SEQ ID NO: 62150 - DNA, 25 bp, SARS Virus
attatcacagaacttgtaaacagtt

SEQ ID NO: 62151 - DNA, 25 bp, SARS Virus
ttatcacagaaactgtaaacagttc

SEQ ID NO: 62152 - DNA, 25 bp, SARS Virus
tatcacagaaatcgtaaacagttcg

SEQ ID NO: 62153 - DNA, 25 bp, SARS Virus
atcacagaaattctaaacagttcga

SEQ ID NO: 62154 - DNA, 25 bp, SARS Virus
tcacagaaattgcaaacagttcgac

SEQ ID NO: 62155 - DNA, 25 bp, SARS Virus
cacagaaattgtcaacagttcgaca

SEQ ID NO: 62156 - DNA, 25 bp, SARS Virus
acagaaattgtacacagttcgacaa

SEQ ID NO: 62157 - DNA, 25 bp, SARS Virus
cagaaattgtaaccagttcgacaat

SEQ ID NO: 62158 - DNA, 25 bp, SARS Virus
agaaattgtaaacagttcgacaatg

SEQ ID NO: 62159 - DNA, 25 bp, SARS Virus
gaaattgtaaaccgttcgacaatgt

SEQ ID NO: 62160 - DNA, 25 bp, SARS Virus
aaattgtaaacacttcgacaatgtc

SEQ ID NO: 62161 - DNA, 25 bp, SARS Virus
aattgtaaacagctcgacaatgtcg

SEQ ID NO: 62162 - DNA, 25 bp, SARS Virus
attgtaaacagtccgacaatgtcgg

SEQ ID NO: 62163 - DNA, 25 bp, SARS Virus
ttgtaaacagttcgacaatgtcggt

SEQ ID NO: 62164 - DNA, 25 bp, SARS Virus
tgtaaacagttccacaatgtcggtt

SEQ ID NO: 62165 - DNA, 25 bp, SARS Virus
gtaaacagttcgccaatgtcggtta

SEQ ID NO: 62166 - DNA, 25 bp, SARS Virus
taaacagttcgacaatgtcggttac

SEQ ID NO: 62167 - DNA, 25 bp, SARS Virus
aaacagttcgaccatgtcggttaca

SEQ ID NO: 62168 - DNA, 25 bp, SARS Virus
aacagttcgacactgtcggttacat

SEQ ID NO: 62169 - DNA, 25 bp, SARS Virus
acagttcgacaacgtcggttacatt

SEQ ID NO: 62170 - DNA, 25 bp, SARS Virus
cagttcgacaatctcggttacattt

SEQ ID NO: 62171 - DNA, 25 bp, SARS Virus
agttcgacaatgccggttacattta

SEQ ID NO: 62172 - DNA, 25 bp, SARS Virus
gttcgacaatgtcggttacatttac

SEQ ID NO: 62173 - DNA, 25 bp, SARS Virus
ttcgacaatgtccgttacatttacg

SEQ ID NO: 62174 - DNA, 25 bp, SARS Virus
tcgacaatgtcgcttacatttacgt

SEQ ID NO: 62175 - DNA, 25 bp, SARS Virus
cgacaatgtcggctacatttacgtg

SEQ ID NO: 62176 - DNA, 25 bp, SARS Virus
gacaatgtcggtcacatttacgtga

SEQ ID NO: 62177 - DNA, 25 bp, SARS Virus
acaatgtcggttccatttacgtgaa

SEQ ID NO: 62178 - DNA, 25 bp, SARS Virus
caatgtcggttacatttacgtgaag

SEQ ID NO: 62179 - DNA, 25 bp, SARS Virus
aatgtcggttacctttacgtgaaga

SEQ ID NO: 62180 - DNA, 25 bp, SARS Virus
atgtcggttacacttacgtgaagaa

SEQ ID NO: 62181 - DNA, 25 bp, SARS Virus
tgtcggttacatctacgtgaagaaa

SEQ ID NO: 62182 - DNA, 25 bp, SARS Virus
gtcggttacattcacgtgaagaaag

SEQ ID NO: 62183 - DNA, 25 bp, SARS Virus
tcggttacatttccgtgaagaaagt

SEQ ID NO: 62184 - DNA, 25 bp, SARS Virus
cggttacatttacgtgaagaaagtt

SEQ ID NO: 62185 - DNA, 25 bp, SARS Virus
ggttacatttacctgaagaaagttg

SEQ ID NO: 62186 - DNA, 25 bp, SARS Virus
gttacatttacgcgaagaaagttga

SEQ ID NO: 62187 - DNA, 25 bp, SARS Virus
ttacatttacgtcaagaaagttgac

SEQ ID NO: 62188 - DNA, 25 bp, SARS Virus
tacatttacgtgcagaaagttgact

SEQ ID NO: 62189 - DNA, 25 bp, SARS Virus
acatttacgtgacgaaagttgacta

SEQ ID NO: 62190 - DNA, 25 bp, SARS Virus
catttacgtgaacaaagttgactac

SEQ ID NO: 62191 - DNA, 25 bp, SARS Virus
atttacgtgaagcaagttgactacc

SEQ ID NO: 62192 - DNA, 25 bp, SARS Virus
tttacgtgaagacagttgactacca

SEQ ID NO: 62193 - DNA, 25 bp, SARS Virus
ttacgtgaagaacgttgactaccat

SEQ ID NO: 62194 - DNA, 25 bp, SARS Virus
tacgtgaagaaacttgactaccatt

SEQ ID NO: 62195 - DNA, 25 bp, SARS Virus
acgtgaagaaagctgactaccatta

SEQ ID NO: 62196 - DNA, 25 bp, SARS Virus
cgtgaagaaagtcgactaccattat

SEQ ID NO: 62197 - DNA, 25 bp, SARS Virus
gtgaagaaagttcactaccattatt

SEQ ID NO: 62198 - DNA, 25 bp, SARS Virus
tgaagaaagttgcctaccattattc

SEQ ID NO: 62199 - DNA, 25 bp, SARS Virus
gaagaaagttgactaccattattct

SEQ ID NO: 62200 - DNA, 25 bp, SARS Virus
aagaaagttgaccaccattattcta

SEQ ID NO: 62201 - DNA, 25 bp, SARS Virus
agaaagttgactcccattattctat

SEQ ID NO: 62202 - DNA, 25 bp, SARS Virus
gaaagttgactaccattattctatc

SEQ ID NO: 62203 - DNA, 25 bp, SARS Virus
aaagttgactaccattattctatcg

SEQ ID NO: 62204 - DNA, 25 bp, SARS Virus
aagttgactacccttattctatcga

SEQ ID NO: 62205 - DNA, 25 bp, SARS Virus
agttgactaccactattctatcgac

SEQ ID NO: 62206 - DNA, 25 bp, SARS Virus
gttgactaccatcattctatcgact

SEQ ID NO: 62207 - DNA, 25 bp, SARS Virus
ttgactaccattcttctatcgactg

SEQ ID NO: 62208 - DNA, 25 bp, SARS Virus
tgactaccattactctatcgactgt

SEQ ID NO: 62209 - DNA, 25 bp, SARS Virus
gactaccattatcctatcgactgtt

SEQ ID NO: 62210 - DNA, 25 bp, SARS Virus
actaccattattctatcgactgttc

SEQ ID NO: 62211 - DNA, 25 bp, SARS Virus
ctaccattattccatcgactgttca

SEQ ID NO: 62212 - DNA, 25 bp, SARS Virus
taccattattctctcgactgttcat

SEQ ID NO: 62213 - DNA, 25 bp, SARS Virus
accattattctaccgactgttcata

SEQ ID NO: 62214 - DNA, 25 bp, SARS Virus
ccattattctatcgactgttcatac

SEQ ID NO: 62215 - DNA, 25 bp, SARS Virus
cattattctatccactgttcataca

SEQ ID NO: 62216 - DNA, 25 bp, SARS Virus
attattctatcgcctgttcatacag

SEQ ID NO: 62217 - DNA, 25 bp, SARS Virus
ttattctatcgactgttcatacagg

SEQ ID NO: 62218 - DNA, 25 bp, SARS Virus
tattctatcgaccgttcatacaggc

SEQ ID NO: 62219 - DNA, 25 bp, SARS Virus
attctatcgactcttcatacaggcg

SEQ ID NO: 62220 - DNA, 25 bp, SARS Virus
ttctatcgactgctcatacaggcgt

SEQ ID NO: 62221 - DNA, 25 bp, SARS Virus
tctatcgactgtccatacaggcgtt

SEQ ID NO: 62222 - DNA, 25 bp, SARS Virus
ctatcgactgttcatacaggcgtta

SEQ ID NO: 62223 - DNA, 25 bp, SARS Virus
tatcgactgttcctacaggcgttag

SEQ ID NO: 62224 - DNA, 25 bp, SARS Virus
atcgactgttcacacaggcgttaga

SEQ ID NO: 62225 - DNA, 25 bp, SARS Virus
tcgactgttcatccaggcgttagat

SEQ ID NO: 62226 - DNA, 25 bp, SARS Virus
cgactgttcatacaggcgttagatg

SEQ ID NO: 62227 - DNA, 25 bp, SARS Virus
gactgttcataccggcgttagatgt

SEQ ID NO: 62228 - DNA, 25 bp, SARS Virus
actgttcatacacgcgttagatgtt

SEQ ID NO: 62229 - DNA, 25 bp, SARS Virus
ctgttcatacagccgttagatgttg

SEQ ID NO: 62230 - DNA, 25 bp, SARS Virus
tgttcatacaggcgttagatgttgt

SEQ ID NO: 62231 - DNA, 25 bp, SARS Virus
gttcatacaggccttagatgttgtg

SEQ ID NO: 62232 - DNA, 25 bp, SARS Virus
ttcatacaggcgctagatgttgtgt

SEQ ID NO: 62233 - DNA, 25 bp, SARS Virus
tcatacaggcgtcagatgttgtgtc

SEQ ID NO: 62234 - DNA, 25 bp, SARS Virus
catacaggcgttcgatgttgtgtcc

SEQ ID NO: 62235 - DNA, 25 bp, SARS Virus
atacaggcgttacatgttgtgtccg

SEQ ID NO: 62236 - DNA, 25 bp, SARS Virus
tacaggcgttagctgttgtgtccga

SEQ ID NO: 62237 - DNA, 25 bp, SARS Virus
acaggcgttagacgttgtgtccgag

SEQ ID NO: 62238 - DNA, 25 bp, SARS Virus
caggcgttagatcttgtgtccgaga

SEQ ID NO: 62239 - DNA, 25 bp, SARS Virus
aggcgttagatgctgtgtccgagat

SEQ ID NO: 62240 - DNA, 25 bp, SARS Virus
ggcgttagatgtcgtgtccgagata

SEQ ID NO: 62241 - DNA, 25 bp, SARS Virus
gcgttagatgttctgtccgagatac

SEQ ID NO: 62242 - DNA, 25 bp, SARS Virus
cgttagatgttgcgtccgagatact

SEQ ID NO: 62243 - DNA, 25 bp, SARS Virus
gttagatgttgtctccgagatactc

SEQ ID NO: 62244 - DNA, 25 bp, SARS Virus
ttagatgttgtgcccgagatactca

SEQ ID NO: 62245 - DNA, 25 bp, SARS Virus
tagatgttgtgtccgagatactcac

SEQ ID NO: 62246 - DNA, 25 bp, SARS Virus
agatgttgtgtccgagatactcaca

SEQ ID NO: 62247 - DNA, 25 bp, SARS Virus
gatgttgtgtcccagatactcacag

SEQ ID NO: 62248 - DNA, 25 bp, SARS Virus
atgttgtgtccgcgatactcacaga

SEQ ID NO: 62249 - DNA, 25 bp, SARS Virus
tgttgtgtccgacatactcacagag

SEQ ID NO: 62250 - DNA, 25 bp, SARS Virus
gttgtgtccgagctactcacagaga

SEQ ID NO: 62251 - DNA, 25 bp, SARS Virus
ttgtgtccgagacactcacagagat

SEQ ID NO: 62252 - DNA, 25 bp, SARS Virus
tgtgtccgagatcctcacagagata

SEQ ID NO: 62253 - DNA, 25 bp, SARS Virus
gtgtccgagatactcacagagatat

SEQ ID NO: 62254 - DNA, 25 bp, SARS Virus
tgtccgagatacccacagagatatc

SEQ ID NO: 62255 - DNA, 25 bp, SARS Virus
gtccgagatactcacagagatatct

SEQ ID NO: 62256 - DNA, 25 bp, SARS Virus
tccgagatactcccagagatatctt

SEQ ID NO: 62257 - DNA, 25 bp, SARS Virus
ccgagatactcacagagatatcttt

SEQ ID NO: 62258 - DNA, 25 bp, SARS Virus
cgagatactcaccgagatatcttta

SEQ ID NO: 62259 - DNA, 25 bp, SARS Virus
gagatactcacacagatatctttat

SEQ ID NO: 62260 - DNA, 25 bp, SARS Virus
agatactcacagcgatatctttatc

SEQ ID NO: 62261 - DNA, 25 bp, SARS Virus
gatactcacagacatatctttatcc

SEQ ID NO: 62262 - DNA, 25 bp, SARS Virus
atactcacagagctatctttatccc

SEQ ID NO: 62263 - DNA, 25 bp, SARS Virus
tactcacagagacatctttatccct

SEQ ID NO: 62264 - DNA, 25 bp, SARS Virus
actcacagagatctctttatcccta

SEQ ID NO: 62265 - DNA, 25 bp, SARS Virus
ctcacagagatacctttatccctac

SEQ ID NO: 62266 - DNA, 25 bp, SARS Virus
tcacagagatatctttatccctaca

SEQ ID NO: 62267 - DNA, 25 bp, SARS Virus
cacagagatatccttatccctacaa

SEQ ID NO: 62268 - DNA, 25 bp, SARS Virus
acagagatatctctatccctacaac

SEQ ID NO: 62269 - DNA, 25 bp, SARS Virus
cagagatatcttcatccctacaact

SEQ ID NO: 62270 - DNA, 25 bp, SARS Virus
agagatatctttctccctacaacta

SEQ ID NO: 62271 - DNA, 25 bp, SARS Virus
gagatatctttacccctacaactag

SEQ ID NO: 62272 - DNA, 25 bp, SARS Virus
agatatctttatccctacaactagt

SEQ ID NO: 62273 - DNA, 25 bp, SARS Virus
gatatctttatccctacaactagta

SEQ ID NO: 62274 - DNA, 25 bp, SARS Virus
atatctttatccctacaactagtac

SEQ ID NO: 62275 - DNA, 25 bp, SARS Virus
tatctttatccccacaactagtact

SEQ ID NO: 62276 - DNA, 25 bp, SARS Virus
atctttatccctccaactagtactt

SEQ ID NO: 62277 - DNA, 25 bp, SARS Virus
tctttatccctacaactagtactta

SEQ ID NO: 62278 - DNA, 25 bp, SARS Virus
ctttatccctaccactagtacttaa

SEQ ID NO: 62279 - DNA, 25 bp, SARS Virus
tttatccctacacctagtacttaag

SEQ ID NO: 62280 - DNA, 25 bp, SARS Virus
ttatccctacaactagtacttaagc

SEQ ID NO: 62281 - DNA, 25 bp, SARS Virus
tatccctacaaccagtacttaagca

SEQ ID NO: 62282 - DNA, 25 bp, SARS Virus
atccctacaactcgtacttaagcac

SEQ ID NO: 62283 - DNA, 25 bp, SARS Virus
tccctacaactactacttaagcacc

SEQ ID NO: 62284 - DNA, 25 bp, SARS Virus
ccctacaactagcacttaagcacct

SEQ ID NO: 62285 - DNA, 25 bp, SARS Virus
cctacaactagtccttaagcaccta

SEQ ID NO: 62286 - DNA, 25 bp, SARS Virus
ctacaactagtacttaagcacctac

SEQ ID NO: 62287 - DNA, 25 bp, SARS Virus
tacaactagtacctaagcacctact

SEQ ID NO: 62288 - DNA, 25 bp, SARS Virus
acaactagtactcaagcacctactc

SEQ ID NO: 62289 - DNA, 25 bp, SARS Virus
caactagtacttcagcacctactca

SEQ ID NO: 62290 - DNA, 25 bp, SARS Virus
aactagtacttacgcacctactcaa

SEQ ID NO: 62291 - DNA, 25 bp, SARS Virus
actagtacttaaccacctactcaaa

SEQ ID NO: 62292 - DNA, 25 bp, SARS Virus
ctagtacttaagcacctactcaaaa

SEQ ID NO: 62293 - DNA, 25 bp, SARS Virus
tagtacttaagcccctactcaaaat

SEQ ID NO: 62294 - DNA, 25 bp, SARS Virus
agtacttaagcacctactcaaaatg

SEQ ID NO: 62295 - DNA, 25 bp, SARS Virus
gtacttaagcacctactcaaaatgc

SEQ ID NO: 62296 - DNA, 25 bp, SARS Virus
tacttaagcacccactcaaaatgcg

SEQ ID NO: 62297 - DNA, 25 bp, SARS Virus
acttaagcacctcctcaaaatgcga

SEQ ID NO: 62298 - DNA, 25 bp, SARS Virus
cttaagcacctactcaaaatgcgaa

SEQ ID NO: 62299 - DNA, 25 bp, SARS Virus
ttaagcacctacccaaaatgcgaat

SEQ ID NO: 62300 - DNA, 25 bp, SARS Virus
taagcacctactcaaaatgcgaatg

SEQ ID NO: 62301 - DNA, 25 bp, SARS Virus
aagcacctactccaaatgcgaatgg

SEQ ID NO: 62302 - DNA, 25 bp, SARS Virus
agcacctactcacaatgcgaatgga

SEQ ID NO: 62303 - DNA, 25 bp, SARS Virus
gcacctactcaacatgcgaatggac

SEQ ID NO: 62304 - DNA, 25 bp, SARS Virus
cacctactcaaactgcgaatggacg

SEQ ID NO: 62305 - DNA, 25 bp, SARS Virus
acctactcaaaacgcgaatggacgc

SEQ ID NO: 62306 - DNA, 25 bp, SARS Virus
cctactcaaaatccgaatggacgca

SEQ ID NO: 62307 - DNA, 25 bp, SARS Virus
ctactcaaaatgcgaatggacgcat

SEQ ID NO: 62308 - DNA, 25 bp, SARS Virus
tactcaaaatgccaatggacgcatt

SEQ ID NO: 62309 - DNA, 25 bp, SARS Virus
actcaaaatgcgcatggacgcattt

SEQ ID NO: 62310 - DNA, 25 bp, SARS Virus
ctcaaaatgcgactggacgcatttg

SEQ ID NO: 62311 - DNA, 25 bp, SARS Virus
tcaaaatgcgaacggacgcatttgt

SEQ ID NO: 62312 - DNA, 25 bp, SARS Virus
caaaatgcgaatcgacgcatttgta

SEQ ID NO: 62313 - DNA, 25 bp, SARS Virus
aaaatgcgaatgcacgcatttgtaa

SEQ ID NO: 62314 - DNA, 25 bp, SARS Virus
aaatgcgaatggccgcatttgtaaa

SEQ ID NO: 62315 - DNA, 25 bp, SARS Virus
aatgcgaatggacgcatttgtaaag

SEQ ID NO: 62316 - DNA, 25 bp, SARS Virus
atgcgaatggacccatttgtaaaga

SEQ ID NO: 62317 - DNA, 25 bp, SARS Virus
tgcgaatggacgcatttgtaaagag

SEQ ID NO: 62318 - DNA, 25 bp, SARS Virus
gcgaatggacgcctttgtaaagagg

SEQ ID NO: 62319 - DNA, 25 bp, SARS Virus
cgaatggacgcacttgtaaagaggt

SEQ ID NO: 62320 - DNA, 25 bp, SARS Virus
gaatggacgcatctgtaaagaggta

SEQ ID NO: 62321 - DNA, 25 bp, SARS Virus
aatggacgcattcgtaaagaggtac

SEQ ID NO: 62322 - DNA, 25 bp, SARS Virus
atggacgcatttctaaagaggtact

SEQ ID NO: 62323 - DNA, 25 bp, SARS Virus
tggacgcatttgcaaagaggtacta

SEQ ID NO: 62324 - DNA, 25 bp, SARS Virus
ggacgcatttgtcaagaggtactac

SEQ ID NO: 62325 - DNA, 25 bp, SARS Virus
gacgcatttgtacagaggtactact

SEQ ID NO: 62326 - DNA, 25 bp, SARS Virus
acgcatttgtaacgaggtactacta

SEQ ID NO: 62327 - DNA, 25 bp, SARS Virus
cgcatttgtaaacaggtactactaa

SEQ ID NO: 62328 - DNA, 25 bp, SARS Virus
gcatttgtaaagcggtactactaag

SEQ ID NO: 62329 - DNA, 25 bp, SARS Virus
catttgtaaagacgtactactaaga

SEQ ID NO: 62330 - DNA, 25 bp, SARS Virus
atttgtaaagagctactactaagaa

SEQ ID NO: 62331 - DNA, 25 bp, SARS Virus
tttgtaaagaggcactactaagaaa

SEQ ID NO: 62332 - DNA, 25 bp, SARS Virus
ttgtaaagaggtcctactaagaaag

SEQ ID NO: 62333 - DNA, 25 bp, SARS Virus
tgtaaagaggtactactaagaaaga

SEQ ID NO: 62334 - DNA, 25 bp, SARS Virus
gtaaagaggtaccactaagaaagac

SEQ ID NO: 62335 - DNA, 25 bp, SARS Virus
taaagaggtactcctaagaaagact

SEQ ID NO: 62336 - DNA, 25 bp, SARS Virus
aaagaggtactactaagaaagacta

SEQ ID NO: 62337 - DNA, 25 bp, SARS Virus
aagaggtactaccaagaaagactac

SEQ ID NO: 62338 - DNA, 25 bp, SARS Virus
agaggtactactcagaaagactact

SEQ ID NO: 62339 - DNA, 25 bp, SARS Virus
gaggtactactacgaaagactacta

SEQ ID NO: 62340 - DNA, 25 bp, SARS Virus
aggtactactaacaaagactactac

SEQ ID NO: 62341 - DNA, 25 bp, SARS Virus
ggtactactaagcaagactactacg

SEQ ID NO: 62342 - DNA, 25 bp, SARS Virus
gtactactaagacagactactacgg

SEQ ID NO: 62343 - DNA, 25 bp, SARS Virus
tactactaagaacgactactacggc

SEQ ID NO: 62344 - DNA, 25 bp, SARS Virus
actactaagaaacactactacggca

SEQ ID NO: 62345 - DNA, 25 bp, SARS Virus
ctactaagaaagcctactacggcaa

SEQ ID NO: 62346 - DNA, 25 bp, SARS Virus
tactaagaaagactactacggcaac

SEQ ID NO: 62347 - DNA, 25 bp, SARS Virus
actaagaaagaccactacggcaaca

SEQ ID NO: 62348 - DNA, 25 bp, SARS Virus
ctaagaaagactcctacggcaacac

SEQ ID NO: 62349 - DNA, 25 bp, SARS Virus
taagaaagactactacggcaacaca

SEQ ID NO: 62350 - DNA, 25 bp, SARS Virus
aagaaagactaccacggcaacacac

SEQ ID NO: 62351 - DNA, 25 bp, SARS Virus
agaaagactactccggcaacacacg

SEQ ID NO: 62352 - DNA, 25 bp, SARS Virus
gaaagactactacggcaacacacga

SEQ ID NO: 62353 - DNA, 25 bp, SARS Virus
aaagactactaccgcaacacacgat

SEQ ID NO: 62354 - DNA, 25 bp, SARS Virus
aagactactacgccaacacacgata

SEQ ID NO: 62355 - DNA, 25 bp, SARS Virus
agactactacggcaacacacgatat

SEQ ID NO: 62356 - DNA, 25 bp, SARS Virus
gactactacggccacacacgatatt

SEQ ID NO: 62357 - DNA, 25 bp, SARS Virus
actactacggcaccacacgatattg

SEQ ID NO: 62358 - DNA, 25 bp, SARS Virus
ctactacggcaacacacgatattgt

SEQ ID NO: 62359 - DNA, 25 bp, SARS Virus
tactacggcaacccacgatattgtc

SEQ ID NO: 62360 - DNA, 25 bp, SARS Virus
actacggcaacacacgatattgtca

SEQ ID NO: 62361 - DNA, 25 bp, SARS Virus
ctacggcaacacccgatattgtcat

SEQ ID NO: 62362 - DNA, 25 bp, SARS Virus
tacggcaacacacgatattgtcatt

SEQ ID NO: 62363 - DNA, 25 bp, SARS Virus
acggcaacacaccatattgtcattg

SEQ ID NO: 62364 - DNA, 25 bp, SARS Virus
cggcaacacacgctattgtcattga

SEQ ID NO: 62365 - DNA, 25 bp, SARS Virus
ggcaacacacgacattgtcattgat

SEQ ID NO: 62366 - DNA, 25 bp, SARS Virus
gcaacacacgatcttgtcattgata

SEQ ID NO: 62367 - DNA, 25 bp, SARS Virus
caacacacgatactgtcattgatac

SEQ ID NO: 62368 - DNA, 25 bp, SARS Virus
aacacacgatatcgtcattgatacg

SEQ ID NO: 62369 - DNA, 25 bp, SARS Virus
acacacgatattctcattgatacgc

SEQ ID NO: 62370 - DNA, 25 bp, SARS Virus
cacacgatattgccattgatacgcc

SEQ ID NO: 62371 - DNA, 25 bp, SARS Virus
acacgatattgtcattgatacgccg

SEQ ID NO: 62372 - DNA, 25 bp, SARS Virus
cacgatattgtccttgatacgccga

SEQ ID NO: 62373 - DNA, 25 bp, SARS Virus
acgatattgtcactgatacgccgag

SEQ ID NO: 62374 - DNA, 25 bp, SARS Virus
cgatattgtcatcgatacgccgagt

SEQ ID NO: 62375 - DNA, 25 bp, SARS Virus
gatattgtcattcatacgccgagtt

SEQ ID NO: 62376 - DNA, 25 bp, SARS Virus
atattgtcattgctacgccgagttc

SEQ ID NO: 62377 - DNA, 25 bp, SARS Virus
tattgtcattgacacgccgagttcc

SEQ ID NO: 62378 - DNA, 25 bp, SARS Virus
attgtcattgatccgccgagttcca

SEQ ID NO: 62379 - DNA, 25 bp, SARS Virus
ttgtcattgatacgccgagttccaa

SEQ ID NO: 62380 - DNA, 25 bp, SARS Virus
tgtcattgataccccgagttccaaa

SEQ ID NO: 62381 - DNA, 25 bp, SARS Virus
gtcattgatacgccgagttccaaat

SEQ ID NO: 62382 - DNA, 25 bp, SARS Virus
tcattgatacgccgagttccaaatc

SEQ ID NO: 62383 - DNA, 25 bp, SARS Virus
cattgatacgcccagttccaaatca

SEQ ID NO: 62384 - DNA, 25 bp, SARS Virus
attgatacgccgcgttccaaatcat

SEQ ID NO: 62385 - DNA, 25 bp, SARS Virus
ttgatacgccgacttccaaatcatc

SEQ ID NO: 62386 - DNA, 25 bp, SARS Virus
tgatacgccgagctccaaatcatcg

SEQ ID NO: 62387 - DNA, 25 bp, SARS Virus
gatacgccgagtcccaaatcatcga

SEQ ID NO: 62388 - DNA, 25 bp, SARS Virus
atacgccgagttccaaatcatcgat

SEQ ID NO: 62389 - DNA, 25 bp, SARS Virus
tacgccgagttccaaatcatcgatc

SEQ ID NO: 62390 - DNA, 25 bp, SARS Virus
acgccgagttcccaatcatcgatcg

SEQ ID NO: 62391 - DNA, 25 bp, SARS Virus
cgccgagttccacatcatcgatcgt

SEQ ID NO: 62392 - DNA, 25 bp, SARS Virus
gccgagttccaactcatcgatcgta

SEQ ID NO: 62393 - DNA, 25 bp, SARS Virus
ccgagttccaaaccatcgatcgtaa

SEQ ID NO: 62394 - DNA, 25 bp, SARS Virus
cgagttccaaatcatcgatcgtaat

SEQ ID NO: 62395 - DNA, 25 bp, SARS Virus
gagttccaaatcctcgatcgtaatt

SEQ ID NO: 62396 - DNA, 25 bp, SARS Virus
agttccaaatcaccgatcgtaattc

SEQ ID NO: 62397 - DNA, 25 bp, SARS Virus
gttccaaatcatcgatcgtaattct

SEQ ID NO: 62398 - DNA, 25 bp, SARS Virus
ttccaaatcatccatcgtaattctt

SEQ ID NO: 62399 - DNA, 25 bp, SARS Virus
tccaaatcatcgctcgtaattcttg

SEQ ID NO: 62400 - DNA, 25 bp, SARS Virus
ccaaatcatcgaccgtaattcttga

SEQ ID NO: 62401 - DNA, 25 bp, SARS Virus
caaatcatcgatcgtaattcttgaa

SEQ ID NO: 62402 - DNA, 25 bp, SARS Virus
aaatcatcgatcctaattcttgaaa

SEQ ID NO: 62403 - DNA, 25 bp, SARS Virus
aatcatcgatcgcaattcttgaaat

SEQ ID NO: 62404 - DNA, 25 bp, SARS Virus
atcatcgatcgtcattcttgaaatt

SEQ ID NO: 62405 - DNA, 25 bp, SARS Virus
tcatcgatcgtacttcttgaaattc

SEQ ID NO: 62406 - DNA, 25 bp, SARS Virus
catcgatcgtaactcttgaaattcc

SEQ ID NO: 62407 - DNA, 25 bp, SARS Virus
atcgatcgtaatccttgaaattccg

SEQ ID NO: 62408 - DNA, 25 bp, SARS Virus
tcgatcgtaattcttgaaattccgt

SEQ ID NO: 62409 - DNA, 25 bp, SARS Virus
cgatcgtaattcctgaaattccgtc

SEQ ID NO: 62410 - DNA, 25 bp, SARS Virus
gatcgtaattctcgaaattccgtca

SEQ ID NO: 62411 - DNA, 25 bp, SARS Virus
atcgtaattcttcaaattccgtcaa

SEQ ID NO: 62412 - DNA, 25 bp, SARS Virus
tcgtaattcttgcaattccgtcaag

SEQ ID NO: 62413 - DNA, 25 bp, SARS Virus
cgtaattcttgacattccgtcaaga

SEQ ID NO: 62414 - DNA, 25 bp, SARS Virus
gtaattcttgaacttccgtcaagaa

SEQ ID NO: 62415 - DNA, 25 bp, SARS Virus
taattcttgaaactccgtcaagaaa

SEQ ID NO: 62416 - DNA, 25 bp, SARS Virus
aattcttgaaatcccgtcaagaaat

SEQ ID NO: 62417 - DNA, 25 bp, SARS Virus
attcttgaaattccgtcaagaaata

SEQ ID NO: 62418 - DNA, 25 bp, SARS Virus
ttcttgaaattccgtcaagaaataa

SEQ ID NO: 62419 - DNA, 25 bp, SARS Virus
tcttgaaattccctcaagaaataat

SEQ ID NO: 62420 - DNA, 25 bp, SARS Virus
cttgaaattccgccaagaaataata

SEQ ID NO: 62421 - DNA, 25 bp, SARS Virus
ttgaaattccgtcaagaaataatag

SEQ ID NO: 62422 - DNA, 25 bp, SARS Virus
tgaaattccgtccagaaataatagt

SEQ ID NO: 62423 - DNA, 25 bp, SARS Virus
gaaattccgtcacgaaataatagtt

SEQ ID NO: 62424 - DNA, 25 bp, SARS Virus
aaattccgtcaacaaataatagttt

SEQ ID NO: 62425 - DNA, 25 bp, SARS Virus
aattccgtcaagcaataatagtttt

SEQ ID NO: 62426 - DNA, 25 bp, SARS Virus
attccgtcaagacataatagtttta

SEQ ID NO: 62427 - DNA, 25 bp, SARS Virus
ttccgtcaagaactaatagttttat

SEQ ID NO: 62428 - DNA, 25 bp, SARS Virus
tccgtcaagaaacaatagttttatt

SEQ ID NO: 62429 - DNA, 25 bp, SARS Virus
ccgtcaagaaatcatagttttatta

SEQ ID NO: 62430 - DNA, 25 bp, SARS Virus
cgtcaagaaatactagttttattac

SEQ ID NO: 62431 - DNA, 25 bp, SARS Virus
gtcaagaaataacagttttattaca

SEQ ID NO: 62432 - DNA, 25 bp, SARS Virus
tcaagaaataatcgttttattacac

SEQ ID NO: 62433 - DNA, 25 bp, SARS Virus
caagaaataatacttttattacaca

SEQ ID NO: 62434 - DNA, 25 bp, SARS Virus
aagaaataatagctttattacacaa

SEQ ID NO: 62435 - DNA, 25 bp, SARS Virus
agaaataatagtcttattacacaag

SEQ ID NO: 62436 - DNA, 25 bp, SARS Virus
gaaataatagttctattacacaagt

SEQ ID NO: 62437 - DNA, 25 bp, SARS Virus
aaataatagtttcattacacaagta

SEQ ID NO: 62438 - DNA, 25 bp, SARS Virus
aataatagttttcttacacaagtac

SEQ ID NO: 62439 - DNA, 25 bp, SARS Virus
ataatagttttactacacaagtaca

SEQ ID NO: 62440 - DNA, 25 bp, SARS Virus
taatagttttatcacacaagtacag

SEQ ID NO: 62441 - DNA, 25 bp, SARS Virus
aatagttttattccacaagtacaga

SEQ ID NO: 62442 - DNA, 25 bp, SARS Virus
atagttttattacacaagtacagac

SEQ ID NO: 62443 - DNA, 25 bp, SARS Virus
tagttttattacccaagtacagact

SEQ ID NO: 62444 - DNA, 25 bp, SARS Virus
agttttattacacaagtacagactc

SEQ ID NO: 62445 - DNA, 25 bp, SARS Virus
gttttattacaccagtacagactcc

SEQ ID NO: 62446 - DNA, 25 bp, SARS Virus
ttttattacacacgtacagactccg

SEQ ID NO: 62447 - DNA, 25 bp, SARS Virus
tttattacacaactacagactccgt

SEQ ID NO: 62448 - DNA, 25 bp, SARS Virus
ttattacacaagcacagactccgtt

SEQ ID NO: 62449 - DNA, 25 bp, SARS Virus
tattacacaagtccagactccgttt

SEQ ID NO: 62450 - DNA, 25 bp, SARS Virus
attacacaagtacagactccgtttt

SEQ ID NO: 62451 - DNA, 25 bp, SARS Virus
ttacacaagtaccgactccgtttta

SEQ ID NO: 62452 - DNA, 25 bp, SARS Virus
tacacaagtacacactccgttttac

SEQ ID NO: 62453 - DNA, 25 bp, SARS Virus
acacaagtacagcctccgttttaca

SEQ ID NO: 62454 - DNA, 25 bp, SARS Virus
cacaagtacagactccgttttacaa

SEQ ID NO: 62455 - DNA, 25 bp, SARS Virus
acaagtacagaccccgttttacaac

SEQ ID NO: 62456 - DNA, 25 bp, SARS Virus
caagtacagactccgttttacaacc

SEQ ID NO: 62457 - DNA, 25 bp, SARS Virus
aagtacagactccgttttacaacct

SEQ ID NO: 62458 - DNA, 25 bp, SARS Virus
agtacagactcccttttacaacctg

SEQ ID NO: 62459 - DNA, 25 bp, SARS Virus
gtacagactccgctttacaacctga

SEQ ID NO: 62460 - DNA, 25 bp, SARS Virus
tacagactccgtcttacaacctgac

SEQ ID NO: 62461 - DNA, 25 bp, SARS Virus
acagactccgttctacaacctgact

SEQ ID NO: 62462 - DNA, 25 bp, SARS Virus
cagactccgtttcacaacctgactc

SEQ ID NO: 62463 - DNA, 25 bp, SARS Virus
agactccgttttccaacctgactct

SEQ ID NO: 62464 - DNA, 25 bp, SARS Virus
gactccgttttacaacctgactctg

SEQ ID NO: 62465 - DNA, 25 bp, SARS Virus
actccgttttaccacctgactctga

SEQ ID NO: 62466 - DNA, 25 bp, SARS Virus
ctccgttttacaccctgactctgac

SEQ ID NO: 62467 - DNA, 25 bp, SARS Virus
tccgttttacaacctgactctgact

SEQ ID NO: 62468 - DNA, 25 bp, SARS Virus
ccgttttacaacctgactctgactg

SEQ ID NO: 62469 - DNA, 25 bp, SARS Virus
cgttttacaacccgactctgactgg

SEQ ID NO: 62470 - DNA, 25 bp, SARS Virus
gttttacaacctcactctgactgga

SEQ ID NO: 62471 - DNA, 25 bp, SARS Virus
ttttacaacctgcctctgactggaa

SEQ ID NO: 62472 - DNA, 25 bp, SARS Virus
tttacaacctgactctgactggaat

SEQ ID NO: 62473 - DNA, 25 bp, SARS Virus
ttacaacctgaccctgactggaatg

SEQ ID NO: 62474 - DNA, 25 bp, SARS Virus
tacaacctgactctgactggaatga

SEQ ID NO: 62475 - DNA, 25 bp, SARS Virus
acaacctgactccgactggaatgat

SEQ ID NO: 62476 - DNA, 25 bp, SARS Virus
caacctgactctcactggaatgatt

SEQ ID NO: 62477 - DNA, 25 bp, SARS Virus
aacctgactctgcctggaatgattt

SEQ ID NO: 62478 - DNA, 25 bp, SARS Virus
acctgactctgactggaatgatttc

SEQ ID NO: 62479 - DNA, 25 bp, SARS Virus
cctgactctgaccggaatgatttcc

SEQ ID NO: 62480 - DNA, 25 bp, SARS Virus
ctgactctgactcgaatgatttcct

SEQ ID NO: 62481 - DNA, 25 bp, SARS Virus
tgactctgactgcaatgatttcctg

SEQ ID NO: 62482 - DNA, 25 bp, SARS Virus
gactctgactggcatgatttcctgg

SEQ ID NO: 62483 - DNA, 25 bp, SARS Virus
actctgactggactgatttcctgga

SEQ ID NO: 62484 - DNA, 25 bp, SARS Virus
ctctgactggaacgatttcctggag

SEQ ID NO: 62485 - DNA, 25 bp, SARS Virus
tctgactggaatcatttcctggagt

SEQ ID NO: 62486 - DNA, 25 bp, SARS Virus
ctgactggaatgctttcctggagtg

SEQ ID NO: 62487 - DNA, 25 bp, SARS Virus
tgactggaatgacttcctggagtgc

SEQ ID NO: 62488 - DNA, 25 bp, SARS Virus
gactggaatgatctcctggagtgct

SEQ ID NO: 62489 - DNA, 25 bp, SARS Virus
actggaatgattccctggagtgctt

SEQ ID NO: 62490 - DNA, 25 bp, SARS Virus
ctggaatgatttcctggagtgctta

SEQ ID NO: 62491 - DNA, 25 bp, SARS Virus
tggaatgatttcctggagtgcttaa

SEQ ID NO: 62492 - DNA, 25 bp, SARS Virus
ggaatgatttcccggagtgcttaaa

SEQ ID NO: 62493 - DNA, 25 bp, SARS Virus
gaatgatttcctcgagtgcttaaaa

SEQ ID NO: 62494 - DNA, 25 bp, SARS Virus
aatgatttcctgcagtgcttaaaac

SEQ ID NO: 62495 - DNA, 25 bp, SARS Virus
atgatttcctggcgtgcttaaaacg

SEQ ID NO: 62496 - DNA, 25 bp, SARS Virus
tgatttcctggactgcttaaaacga

SEQ ID NO: 62497 - DNA, 25 bp, SARS Virus
gatttcctggagcgcttaaaacgag

SEQ ID NO: 62498 - DNA, 25 bp, SARS Virus
atttcctggagtccttaaaacgagt

SEQ ID NO: 62499 - DNA, 25 bp, SARS Virus
tttcctggagtgcttaaaacgagtg

SEQ ID NO: 62500 - DNA, 25 bp, SARS Virus
ttcctggagtgcctaaaacgagtgt

SEQ ID NO: 62501 - DNA, 25 bp, SARS Virus
tcctggagtgctcaaaacgagtgtc

SEQ ID NO: 62502 - DNA, 25 bp, SARS Virus
cctggagtgcttcaaacgagtgtcg

SEQ ID NO: 62503 - DNA, 25 bp, SARS Virus
ctggagtgcttacaacgagtgtcgt

SEQ ID NO: 62504 - DNA, 25 bp, SARS Virus
tggagtgcttaacacgagtgtcgta

SEQ ID NO: 62505 - DNA, 25 bp, SARS Virus
ggagtgcttaaaccgagtgtcgtat

SEQ ID NO: 62506 - DNA, 25 bp, SARS Virus
gagtgcttaaaacgagtgtcgtatg

SEQ ID NO: 62507 - DNA, 25 bp, SARS Virus
agtgcttaaaaccagtgtcgtatgt

SEQ ID NO: 62508 - DNA, 25 bp, SARS Virus
gtgcttaaaacgcgtgtcgtatgtt

SEQ ID NO: 62509 - DNA, 25 bp, SARS Virus
tgcttaaaacgactgtcgtatgtta

SEQ ID NO: 62510 - DNA, 25 bp, SARS Virus
gcttaaaacgagcgtcgtatgttac

SEQ ID NO: 62511 - DNA, 25 bp, SARS Virus
cttaaaacgagtctcgtatgttacg

SEQ ID NO: 62512 - DNA, 25 bp, SARS Virus
ttaaaacgagtgccgtatgttacga

SEQ ID NO: 62513 - DNA, 25 bp, SARS Virus
taaaacgagtgtcgtatgttacgat

SEQ ID NO: 62514 - DNA, 25 bp, SARS Virus
aaaacgagtgtcctatgttacgatc

SEQ ID NO: 62515 - DNA, 25 bp, SARS Virus
aaacgagtgtcgcatgttacgatca

SEQ ID NO: 62516 - DNA, 25 bp, SARS Virus
aacgagtgtcgtctgttacgatcaa

SEQ ID NO: 62517 - DNA, 25 bp, SARS Virus
acgagtgtcgtacgttacgatcaat

SEQ ID NO: 62518 - DNA, 25 bp, SARS Virus
cgagtgtcgtatcttacgatcaatt

SEQ ID NO: 62519 - DNA, 25 bp, SARS Virus
gagtgtcgtatgctacgatcaattt

SEQ ID NO: 62520 - DNA, 25 bp, SARS Virus
agtgtcgtatgtcacgatcaatttg

SEQ ID NO: 62521 - DNA, 25 bp, SARS Virus
gtgtcgtatgttccgatcaatttgt

SEQ ID NO: 62522 - DNA, 25 bp, SARS Virus
tgtcgtatgttacgatcaatttgtt

SEQ ID NO: 62523 - DNA, 25 bp, SARS Virus
gtcgtatgttaccatcaatttgttc

SEQ ID NO: 62524 - DNA, 25 bp, SARS Virus
tcgtatgttacgctcaatttgttcc

SEQ ID NO: 62525 - DNA, 25 bp, SARS Virus
cgtatgttacgaccaatttgttcct

SEQ ID NO: 62526 - DNA, 25 bp, SARS Virus
gtatgttacgatcaatttgttcctc

SEQ ID NO: 62527 - DNA, 25 bp, SARS Virus
tatgttacgatccatttgttcctct

SEQ ID NO: 62528 - DNA, 25 bp, SARS Virus
atgttacgatcactttgttcctcta

SEQ ID NO: 62529 - DNA, 25 bp, SARS Virus
tgttacgatcaacttgttcctctac

SEQ ID NO: 62530 - DNA, 25 bp, SARS Virus
gttacgatcaatctgttcctctact

SEQ ID NO: 62531 - DNA, 25 bp, SARS Virus
ttacgatcaattcgttcctctacta

SEQ ID NO: 62532 - DNA, 25 bp, SARS Virus
tacgatcaatttcttcctctactaa

SEQ ID NO: 62533 - DNA, 25 bp, SARS Virus
acgatcaatttgctcctctactaat

SEQ ID NO: 62534 - DNA, 25 bp, SARS Virus
cgatcaatttgtccctctactaatg

SEQ ID NO: 62535 - DNA, 25 bp, SARS Virus
gatcaatttgttcctctactaatgc

SEQ ID NO: 62536 - DNA, 25 bp, SARS Virus
atcaatttgttcctctactaatgca

SEQ ID NO: 62537 - DNA, 25 bp, SARS Virus
tcaatttgttcccctactaatgcac

SEQ ID NO: 62538 - DNA, 25 bp, SARS Virus
caatttgttcctctactaatgcaca

SEQ ID NO: 62539 - DNA, 25 bp, SARS Virus
aatttgttcctccactaatgcacat

SEQ ID NO: 62540 - DNA, 25 bp, SARS Virus
atttgttcctctcctaatgcacatg

SEQ ID NO: 62541 - DNA, 25 bp, SARS Virus
tttgttcctctactaatgcacatgg

SEQ ID NO: 62542 - DNA, 25 bp, SARS Virus
ttgttcctctaccaatgcacatgga

SEQ ID NO: 62543 - DNA, 25 bp, SARS Virus
tgttcctctactcatgcacatggac

SEQ ID NO: 62544 - DNA, 25 bp, SARS Virus
gttcctctactactgcacatggacg

SEQ ID NO: 62545 - DNA, 25 bp, SARS Virus
ttcctctactaacgcacatggacgg

SEQ ID NO: 62546 - DNA, 25 bp, SARS Virus
tcctctactaatccacatggacgga

SEQ ID NO: 62547 - DNA, 25 bp, SARS Virus
cctctactaatgcacatggacggaa

SEQ ID NO: 62548 - DNA, 25 bp, SARS Virus
ctctactaatgcccatggacggaat

SEQ ID NO: 62549 - DNA, 25 bp, SARS Virus
tctactaatgcacatggacggaatg

SEQ ID NO: 62550 - DNA, 25 bp, SARS Virus
ctactaatgcacctggacggaatgg

SEQ ID NO: 62551 - DNA, 25 bp, SARS Virus
tactaatgcacacggacggaatggg

SEQ ID NO: 62552 - DNA, 25 bp, SARS Virus
actaatgcacatcgacggaatgggt

SEQ ID NO: 62553 - DNA, 25 bp, SARS Virus
ctaatgcacatgcacggaatgggtc

SEQ ID NO: 62554 - DNA, 25 bp, SARS Virus
taatgcacatggccggaatgggtct

SEQ ID NO: 62555 - DNA, 25 bp, SARS Virus
aatgcacatggacggaatgggtcta

SEQ ID NO: 62556 - DNA, 25 bp, SARS Virus
atgcacatggaccgaatgggtctag

SEQ ID NO: 62557 - DNA, 25 bp, SARS Virus
tgcacatggacgcaatgggtctagg

SEQ ID NO: 62558 - DNA, 25 bp, SARS Virus
gcacatggacggcatgggtctaggt

SEQ ID NO: 62559 - DNA, 25 bp, SARS Virus
cacatggacggactgggtctaggta

SEQ ID NO: 62560 - DNA, 25 bp, SARS Virus
acatggacggaacgggtctaggtag

SEQ ID NO: 62561 - DNA, 25 bp, SARS Virus
catggacggaatcggtctaggtagt

SEQ ID NO: 62562 - DNA, 25 bp, SARS Virus
atggacggaatgcgtctaggtagtt

SEQ ID NO: 62563 - DNA, 25 bp, SARS Virus
tggacggaatggctctaggtagttc

SEQ ID NO: 62564 - DNA, 25 bp, SARS Virus
ggacggaatgggcctaggtagttct

SEQ ID NO: 62565 - DNA, 25 bp, SARS Virus
gacggaatgggtctaggtagttctt

SEQ ID NO: 62566 - DNA, 25 bp, SARS Virus
acggaatgggtccaggtagttctta

SEQ ID NO: 62567 - DNA, 25 bp, SARS Virus
cggaatgggtctcggtagttcttat

SEQ ID NO: 62568 - DNA, 25 bp, SARS Virus
ggaatgggtctacgtagttcttata

SEQ ID NO: 62569 - DNA, 25 bp, SARS Virus
gaatgggtctagctagttcttataa

SEQ ID NO: 62570 - DNA, 25 bp, SARS Virus
aatgggtctaggcagttcttataat

SEQ ID NO: 62571 - DNA, 25 bp, SARS Virus
atgggtctaggtcgttcttataatc

SEQ ID NO: 62572 - DNA, 25 bp, SARS Virus
tgggtctaggtacttcttataatcc

SEQ ID NO: 62573 - DNA, 25 bp, SARS Virus
gggtctaggtagctcttataatccg

SEQ ID NO: 62574 - DNA, 25 bp, SARS Virus
ggtctaggtagtccttataatccgc

SEQ ID NO: 62575 - DNA, 25 bp, SARS Virus
gtctaggtagttcttataatccgcg

SEQ ID NO: 62576 - DNA, 25 bp, SARS Virus
tctaggtagttcctataatccgcgt

SEQ ID NO: 62577 - DNA, 25 bp, SARS Virus
ctaggtagttctcataatccgcgtc

SEQ ID NO: 62578 - DNA, 25 bp, SARS Virus
taggtagttcttctaatccgcgtcc

SEQ ID NO: 62579 - DNA, 25 bp, SARS Virus
aggtagttcttacaatccgcgtccg

SEQ ID NO: 62580 - DNA, 25 bp, SARS Virus
ggtagttcttatcatccgcgtccga

SEQ ID NO: 62581 - DNA, 25 bp, SARS Virus
gtagttcttatactccgcgtccgac

SEQ ID NO: 62582 - DNA, 25 bp, SARS Virus
tagttcttataacccgcgtccgaca

SEQ ID NO: 62583 - DNA, 25 bp, SARS Virus
agttcttataatccgcgtccgacaa

SEQ ID NO: 62584 - DNA, 25 bp, SARS Virus
gttcttataatccgcgtccgacaaa

SEQ ID NO: 62585 - DNA, 25 bp, SARS Virus
ttcttataatccccgtccgacaaaa

SEQ ID NO: 62586 - DNA, 25 bp, SARS Virus
tcttataatccgcgtccgacaaaac

SEQ ID NO: 62587 - DNA, 25 bp, SARS Virus
cttataatccgcctccgacaaaaca

SEQ ID NO: 62588 - DNA, 25 bp, SARS Virus
ttataatccgcgcccgacaaaacag

SEQ ID NO: 62589 - DNA, 25 bp, SARS Virus
tataatccgcgtccgacaaaacagc

SEQ ID NO: 62590 - DNA, 25 bp, SARS Virus
ataatccgcgtccgacaaaacagct

SEQ ID NO: 62591 - DNA, 25 bp, SARS Virus
taatccgcgtcccacaaaacagcta

SEQ ID NO: 62592 - DNA, 25 bp, SARS Virus
aatccgcgtccgccaaaacagctac

SEQ ID NO: 62593 - DNA, 25 bp, SARS Virus
atttggtccaccgtgtagtaggcca

SEQ ID NO: 62594 - DNA, 25 bp, SARS Virus
tttggtccacctggtagtaggccac

SEQ ID NO: 62595 - DNA, 25 bp, SARS Virus
ttggtccaccttgtagtaggccact

SEQ ID NO: 62596 - DNA, 25 bp, SARS Virus
tggtccaccttggagtaggccacta

SEQ ID NO: 62597 - DNA, 25 bp, SARS Virus
ggtccaccttgtggtaggccactac

SEQ ID NO: 62598 - DNA, 25 bp, SARS Virus
gtccaccttgtagtaggccactacg

SEQ ID NO: 62599 - DNA, 25 bp, SARS Virus
tccaccttgtaggaggccactacga

SEQ ID NO: 62600 - DNA, 25 bp, SARS Virus
ccaccttgtagtgggccactacgat

SEQ ID NO: 62601 - DNA, 25 bp, SARS Virus
caccttgtagtaggccactacgatg

SEQ ID NO: 62602 - DNA, 25 bp, SARS Virus
accttgtagtaggccactacgatgt

SEQ ID NO: 62603 - DNA, 25 bp, SARS Virus
ccttgtagtagggcactacgatgtt

SEQ ID NO: 62604 - DNA, 25 bp, SARS Virus
cttgtagtaggcgactacgatgttg

SEQ ID NO: 62605 - DNA, 25 bp, SARS Virus
ttgtagtaggccgctacgatgttga

SEQ ID NO: 62606 - DNA, 25 bp, SARS Virus
tgtagtaggccagtacgatgttgac

SEQ ID NO: 62607 - DNA, 25 bp, SARS Virus
gtagtaggccacgacgatgttgacg

SEQ ID NO: 62608 - DNA, 25 bp, SARS Virus
tagtaggccactgcgatgttgacga

SEQ ID NO: 62609 - DNA, 25 bp, SARS Virus
agtaggccactaggatgttgacgaa

SEQ ID NO: 62610 - DNA, 25 bp, SARS Virus
gtaggccactacgatgttgacgaat

SEQ ID NO: 62611 - DNA, 25 bp, SARS Virus
taggccactacggtgttgacgaata

SEQ ID NO: 62612 - DNA, 25 bp, SARS Virus
aggccactacgaggttgacgaatac

SEQ ID NO: 62613 - DNA, 25 bp, SARS Virus
ggccactacgatgttgacgaatacg

SEQ ID NO: 62614 - DNA, 25 bp, SARS Virus
gccactacgatggtgacgaatacga

SEQ ID NO: 62615 - DNA, 25 bp, SARS Virus
ccactacgatgtggacgaatacgat

SEQ ID NO: 62616 - DNA, 25 bp, SARS Virus
cactacgatgttgacgaatacgatt

SEQ ID NO: 62617 - DNA, 25 bp, SARS Virus
actacgatgttggcgaatacgatta

SEQ ID NO: 62618 - DNA, 25 bp, SARS Virus
ctacgatgttgaggaatacgattat

SEQ ID NO: 62619 - DNA, 25 bp, SARS Virus
tacgatgttgacgaatacgattatc

SEQ ID NO: 62620 - DNA, 25 bp, SARS Virus
acgatgttgacggatacgattatca

SEQ ID NO: 62621 - DNA, 25 bp, SARS Virus
cgatgttgacgagtacgattatcac

SEQ ID NO: 62622 - DNA, 25 bp, SARS Virus
gatgttgacgaagacgattatcaca

SEQ ID NO: 62623 - DNA, 25 bp, SARS Virus
atgttgacgaatgcgattatcacag

SEQ ID NO: 62624 - DNA, 25 bp, SARS Virus
tgttgacgaataggattatcacaga

SEQ ID NO: 62625 - DNA, 25 bp, SARS Virus
gttgacgaatacgattatcacagaa

SEQ ID NO: 62626 - DNA, 25 bp, SARS Virus
ttgacgaatacggttatcacagaaa

SEQ ID NO: 62627 - DNA, 25 bp, SARS Virus
tgacgaatacgagtatcacagaaat

SEQ ID NO: 62628 - DNA, 25 bp, SARS Virus
gacgaatacgatgatcacagaaatt

SEQ ID NO: 62629 - DNA, 25 bp, SARS Virus
acgaatacgattgtcacagaaattg

SEQ ID NO: 62630 - DNA, 25 bp, SARS Virus
cgaatacgattagcacagaaattgt

SEQ ID NO: 62631 - DNA, 25 bp, SARS Virus
gaatacgattatgacagaaattgta

SEQ ID NO: 62632 - DNA, 25 bp, SARS Virus
aatacgattatcgcagaaattgtaa

SEQ ID NO: 62633 - DNA, 25 bp, SARS Virus
atacgattatcagagaaattgtaaa

SEQ ID NO: 62634 - DNA, 25 bp, SARS Virus
tacgattatcacggaaattgtaaac

SEQ ID NO: 62635 - DNA, 25 bp, SARS Virus
acgattatcacagaaattgtaaaca

SEQ ID NO: 62636 - DNA, 25 bp, SARS Virus
cgattatcacaggaattgtaaacag

SEQ ID NO: 62637 - DNA, 25 bp, SARS Virus
gattatcacagagattgtaaacagt

SEQ ID NO: 62638 - DNA, 25 bp, SARS Virus
attatcacagaagttgtaaacagtt

SEQ ID NO: 62639 - DNA, 25 bp, SARS Virus
ttatcacagaaagtgtaaacagttc

SEQ ID NO: 62640 - DNA, 25 bp, SARS Virus
tatcacagaaatggtaaacagttcg

SEQ ID NO: 62641 - DNA, 25 bp, SARS Virus
atcacagaaattgtaaacagttcga

SEQ ID NO: 62642 - DNA, 25 bp, SARS Virus
tcacagaaattggaaacagttcgac

SEQ ID NO: 62643 - DNA, 25 bp, SARS Virus
cacagaaattgtgaacagttcgaca

SEQ ID NO: 62644 - DNA, 25 bp, SARS Virus
acagaaattgtagacagttcgacaa

SEQ ID NO: 62645 - DNA, 25 bp, SARS Virus
cagaaattgtaagcagttcgacaat

SEQ ID NO: 62646 - DNA, 25 bp, SARS Virus
agaaattgtaaagagttcgacaatg

SEQ ID NO: 62647 - DNA, 25 bp, SARS Virus
gaaattgtaaacggttcgacaatgt

SEQ ID NO: 62648 - DNA, 25 bp, SARS Virus
aaattgtaaacagttcgacaatgtc

SEQ ID NO: 62649 - DNA, 25 bp, SARS Virus
aattgtaaacaggtcgacaatgtcg

SEQ ID NO: 62650 - DNA, 25 bp, SARS Virus
attgtaaacagtgcgacaatgtcgg

SEQ ID NO: 62651 - DNA, 25 bp, SARS Virus
ttgtaaacagttggacaatgtcggt

SEQ ID NO: 62652 - DNA, 25 bp, SARS Virus
tgtaaacagttcgacaatgtcggtt

SEQ ID NO: 62653 - DNA, 25 bp, SARS Virus
gtaaacagttcggcaatgtcggtta

SEQ ID NO: 62654 - DNA, 25 bp, SARS Virus
taaacagttcgagaatgtcggttac

SEQ ID NO: 62655 - DNA, 25 bp, SARS Virus
aaacagttcgacgatgtcggttaca

SEQ ID NO: 62656 - DNA, 25 bp, SARS Virus
aacagttcgacagtgtcggttacat

SEQ ID NO: 62657 - DNA, 25 bp, SARS Virus
acagttcgacaaggtcggttacatt

SEQ ID NO: 62658 - DNA, 25 bp, SARS Virus
cagttcgacaatgtcggttacattt

SEQ ID NO: 62659 - DNA, 25 bp, SARS Virus
agttcgacaatggcggttacattta

SEQ ID NO: 62660 - DNA, 25 bp, SARS Virus
gttcgacaatgtgggttacatttac

SEQ ID NO: 62661 - DNA, 25 bp, SARS Virus
ttcgacaatgtcggttacatttacg

SEQ ID NO: 62662 - DNA, 25 bp, SARS Virus
tcgacaatgtcggttacatttacgt

SEQ ID NO: 62663 - DNA, 25 bp, SARS Virus
cgacaatgtcgggtacatttacgtg

SEQ ID NO: 62664 - DNA, 25 bp, SARS Virus
gacaatgtcggtgacatttacgtga

SEQ ID NO: 62665 - DNA, 25 bp, SARS Virus
acaatgtcggttgcatttacgtgaa

SEQ ID NO: 62666 - DNA, 25 bp, SARS Virus
caatgtcggttagatttacgtgaag

SEQ ID NO: 62667 - DNA, 25 bp, SARS Virus
aatgtcggttacgtttacgtgaaga

SEQ ID NO: 62668 - DNA, 25 bp, SARS Virus
atgtcggttacagttacgtgaagaa

SEQ ID NO: 62669 - DNA, 25 bp, SARS Virus
tgtcggttacatgtacgtgaagaaa

SEQ ID NO: 62670 - DNA, 25 bp, SARS Virus
gtcggttacattgacgtgaagaaag

SEQ ID NO: 62671 - DNA, 25 bp, SARS Virus
tcggttacatttgcgtgaagaaagt

SEQ ID NO: 62672 - DNA, 25 bp, SARS Virus
cggttacatttaggtgaagaaagtt

SEQ ID NO: 62673 - DNA, 25 bp, SARS Virus
ggttacatttacgtgaagaaagttg

SEQ ID NO: 62674 - DNA, 25 bp, SARS Virus
gttacatttacgggaagaaagttga

SEQ ID NO: 62675 - DNA, 25 bp, SARS Virus
ttacatttacgtgaagaaagttgac

SEQ ID NO: 62676 - DNA, 25 bp, SARS Virus
tacatttacgtggagaaagttgact

SEQ ID NO: 62677 - DNA, 25 bp, SARS Virus
acatttacgtgaggaaagttgacta

SEQ ID NO: 62678 - DNA, 25 bp, SARS Virus
catttacgtgaagaaagttgactac

SEQ ID NO: 62679 - DNA, 25 bp, SARS Virus
atttacgtgaaggaagttgactacc

SEQ ID NO: 62680 - DNA, 25 bp, SARS Virus
tttacgtgaagagagttgactacca

SEQ ID NO: 62681 - DNA, 25 bp, SARS Virus
ttacgtgaagaaggttgactaccat

SEQ ID NO: 62682 - DNA, 25 bp, SARS Virus
tacgtgaagaaagttgactaccatt

SEQ ID NO: 62683 - DNA, 25 bp, SARS Virus
acgtgaagaaaggtgactaccatta

SEQ ID NO: 62684 - DNA, 25 bp, SARS Virus
cgtgaagaaagtggactaccattat

SEQ ID NO: 62685 - DNA, 25 bp, SARS Virus
gtgaagaaagttgactaccattatt

SEQ ID NO: 62686 - DNA, 25 bp, SARS Virus
tgaagaaagttggctaccattattc

SEQ ID NO: 62687 - DNA, 25 bp, SARS Virus
gaagaaagttgagtaccattattct

SEQ ID NO: 62688 - DNA, 25 bp, SARS Virus
aagaaagttgacgaccattattcta

SEQ ID NO: 62689 - DNA, 25 bp, SARS Virus
agaaagttgactgccattattctat

SEQ ID NO: 62690 - DNA, 25 bp, SARS Virus
gaaagttgactagcattattctatc

SEQ ID NO: 62691 - DNA, 25 bp, SARS Virus
aaagttgactacgattattctatcg

SEQ ID NO: 62692 - DNA, 25 bp, SARS Virus
aagttgactaccgttattctatcga

SEQ ID NO: 62693 - DNA, 25 bp, SARS Virus
agttgactaccagtattctatcgac

SEQ ID NO: 62694 - DNA, 25 bp, SARS Virus
gttgactaccatgattctatcgact

SEQ ID NO: 62695 - DNA, 25 bp, SARS Virus
ttgactaccattgttctatcgactg

SEQ ID NO: 62696 - DNA, 25 bp, SARS Virus
tgactaccattagtctatcgactgt

SEQ ID NO: 62697 - DNA, 25 bp, SARS Virus
gactaccattatgctatcgactgtt

SEQ ID NO: 62698 - DNA, 25 bp, SARS Virus
actaccattattgtatcgactgttc

SEQ ID NO: 62699 - DNA, 25 bp, SARS Virus
ctaccattattcgatcgactgttca

SEQ ID NO: 62700 - DNA, 25 bp, SARS Virus
taccattattctgtcgactgttcat

SEQ ID NO: 62701 - DNA, 25 bp, SARS Virus
accattattctagcgactgttcata

SEQ ID NO: 62702 - DNA, 25 bp, SARS Virus
ccattattctatggactgttcatac

SEQ ID NO: 62703 - DNA, 25 bp, SARS Virus
cattattctatcgactgttcataca

SEQ ID NO: 62704 - DNA, 25 bp, SARS Virus
attattctatcggctgttcatacag

SEQ ID NO: 62705 - DNA, 25 bp, SARS Virus
ttattctatcgagtgttcatacagg

SEQ ID NO: 62706 - DNA, 25 bp, SARS Virus
tattctatcgacggttcatacaggc

SEQ ID NO: 62707 - DNA, 25 bp, SARS Virus
attctatcgactgttcatacaggcg

SEQ ID NO: 62708 - DNA, 25 bp, SARS Virus
ttctatcgactggtcatacaggcgt

SEQ ID NO: 62709 - DNA, 25 bp, SARS Virus
tctatcgactgtgcatacaggcgtt

SEQ ID NO: 62710 - DNA, 25 bp, SARS Virus
ctatcgactgttgatacaggcgtta

SEQ ID NO: 62711 - DNA, 25 bp, SARS Virus
tatcgactgttcgtacaggcgttag

SEQ ID NO: 62712 - DNA, 25 bp, SARS Virus
atcgactgttcagacaggcgttaga

SEQ ID NO: 62713 - DNA, 25 bp, SARS Virus
tcgactgttcatgcaggcgttagat

SEQ ID NO: 62714 - DNA, 25 bp, SARS Virus
cgactgttcatagaggcgttagatg

SEQ ID NO: 62715 - DNA, 25 bp, SARS Virus
gactgttcatacgggcgttagatgt

SEQ ID NO: 62716 - DNA, 25 bp, SARS Virus
actgttcatacaggcgttagatgtt

SEQ ID NO: 62717 - DNA, 25 bp, SARS Virus
ctgttcatacaggcgttagatgttg

SEQ ID NO: 62718 - DNA, 25 bp, SARS Virus
tgttcatacaggggttagatgttgt

SEQ ID NO: 62719 - DNA, 25 bp, SARS Virus
gttcatacaggcgttagatgttgtg

SEQ ID NO: 62720 - DNA, 25 bp, SARS Virus
ttcatacaggcggtagatgttgtgt

SEQ ID NO: 62721 - DNA, 25 bp, SARS Virus
tcatacaggcgtgagatgttgtgtc

SEQ ID NO: 62722 - DNA, 25 bp, SARS Virus
catacaggcgttggatgttgtgtcc

SEQ ID NO: 62723 - DNA, 25 bp, SARS Virus
atacaggcgttagatgttgtgtccg

SEQ ID NO: 62724 - DNA, 25 bp, SARS Virus
tacaggcgttaggtgttgtgtccga

SEQ ID NO: 62725 - DNA, 25 bp, SARS Virus
acaggcgttagaggttgtgtccgag

SEQ ID NO: 62726 - DNA, 25 bp, SARS Virus
caggcgttagatgttgtgtccgaga

SEQ ID NO: 62727 - DNA, 25 bp, SARS Virus
aggcgttagatggtgtgtccgagat

SEQ ID NO: 62728 - DNA, 25 bp, SARS Virus
ggcgttagatgtggtgtccgagata

SEQ ID NO: 62729 - DNA, 25 bp, SARS Virus
gcgttagatgttgtgtccgagatac

SEQ ID NO: 62730 - DNA, 25 bp, SARS Virus
cgttagatgttgggtccgagatact

SEQ ID NO: 62731 - DNA, 25 bp, SARS Virus
gttagatgttgtgtccgagatactc

SEQ ID NO: 62732 - DNA, 25 bp, SARS Virus
ttagatgttgtggccgagatactca

SEQ ID NO: 62733 - DNA, 25 bp, SARS Virus
tagatgttgtgtgcgagatactcac

SEQ ID NO: 62734 - DNA, 25 bp, SARS Virus
agatgttgtgtcggagatactcaca

SEQ ID NO: 62735 - DNA, 25 bp, SARS Virus
gatgttgtgtccgagatactcacag

SEQ ID NO: 62736 - DNA, 25 bp, SARS Virus
atgttgtgtccgggatactcacaga

SEQ ID NO: 62737 - DNA, 25 bp, SARS Virus
tgttgtgtccgagatactcacagag

SEQ ID NO: 62738 - DNA, 25 bp, SARS Virus
gttgtgtccgaggtactcacagaga

SEQ ID NO: 62739 - DNA, 25 bp, SARS Virus
ttgtgtccgagagactcacagagat

SEQ ID NO: 62740 - DNA, 25 bp, SARS Virus
tgtgtccgagatgctcacagagata

SEQ ID NO: 62741 - DNA, 25 bp, SARS Virus
gtgtccgagatagtcacagagatat

SEQ ID NO: 62742 - DNA, 25 bp, SARS Virus
tgtccgagatacgcacagagatatc

SEQ ID NO: 62743 - DNA, 25 bp, SARS Virus
gtccgagatactgacagagatatct

SEQ ID NO: 62744 - DNA, 25 bp, SARS Virus
tccgagatactcgcagagatatctt

SEQ ID NO: 62745 - DNA, 25 bp, SARS Virus
ccgagatactcagagagatatcttt

SEQ ID NO: 62746 - DNA, 25 bp, SARS Virus
cgagatactcacggagatatcttta

SEQ ID NO: 62747 - DNA, 25 bp, SARS Virus
gagatactcacagagatatctttat

SEQ ID NO: 62748 - DNA, 25 bp, SARS Virus
agatactcacagggatatctttatc

SEQ ID NO: 62749 - DNA, 25 bp, SARS Virus
gatactcacagagatatctttatcc

SEQ ID NO: 62750 - DNA, 25 bp, SARS Virus
atactcacagaggtatctttatccc

SEQ ID NO: 62751 - DNA, 25 bp, SARS Virus
tactcacagagagatctttatccct

SEQ ID NO: 62752 - DNA, 25 bp, SARS Virus
actcacagagatgtctttatcccta

SEQ ID NO: 62753 - DNA, 25 bp, SARS Virus
ctcacagagatagctttatccctac

SEQ ID NO: 62754 - DNA, 25 bp, SARS Virus
tcacagagatatgtttatccctaca

SEQ ID NO: 62755 - DNA, 25 bp, SARS Virus
cacagagatatcgttatccctacaa

SEQ ID NO: 62756 - DNA, 25 bp, SARS Virus
acagagatatctgtatccctacaac

SEQ ID NO: 62757 - DNA, 25 bp, SARS Virus
cagagatatcttgatccctacaact

SEQ ID NO: 62758 - DNA, 25 bp, SARS Virus
agagatatctttgtccctacaacta

SEQ ID NO: 62759 - DNA, 25 bp, SARS Virus
gagatatctttagccctacaactag

SEQ ID NO: 62760 - DNA, 25 bp, SARS Virus
agatatctttatgcctacaactagt

SEQ ID NO: 62761 - DNA, 25 bp, SARS Virus
gatatctttatcgctacaactagta

SEQ ID NO: 62762 - DNA, 25 bp, SARS Virus
atatctttatccgtacaactagtac

SEQ ID NO: 62763 - DNA, 25 bp, SARS Virus
tatctttatcccgacaactagtact

SEQ ID NO: 62764 - DNA, 25 bp, SARS Virus
atctttatccctgcaactagtactt

SEQ ID NO: 62765 - DNA, 25 bp, SARS Virus
tctttatccctagaactagtactta

SEQ ID NO: 62766 - DNA, 25 bp, SARS Virus
ctttatccctacgactagtacttaa

SEQ ID NO: 62767 - DNA, 25 bp, SARS Virus
tttatccctacagctagtacttaag

SEQ ID NO: 62768 - DNA, 25 bp, SARS Virus
ttatccctacaagtagtacttaagc

SEQ ID NO: 62769 - DNA, 25 bp, SARS Virus
tatccctacaacgagtacttaagca

SEQ ID NO: 62770 - DNA, 25 bp, SARS Virus
atccctacaactggtacttaagcac

SEQ ID NO: 62771 - DNA, 25 bp, SARS Virus
tccctacaactagtacttaagcacc

SEQ ID NO: 62772 - DNA, 25 bp, SARS Virus
ccctacaactaggacttaagcacct

SEQ ID NO: 62773 - DNA, 25 bp, SARS Virus
cctacaactagtgcttaagcaccta

SEQ ID NO: 62774 - DNA, 25 bp, SARS Virus
ctacaactagtagttaagcacctac

SEQ ID NO: 62775 - DNA, 25 bp, SARS Virus
tacaactagtacgtaagcacctact

SEQ ID NO: 62776 - DNA, 25 bp, SARS Virus
acaactagtactgaagcacctactc

SEQ ID NO: 62777 - DNA, 25 bp, SARS Virus
caactagtacttgagcacctactca

SEQ ID NO: 62778 - DNA, 25 bp, SARS Virus
aactagtacttaggcacctactcaa

SEQ ID NO: 62779 - DNA, 25 bp, SARS Virus
actagtacttaagcacctactcaaa

SEQ ID NO: 62780 - DNA, 25 bp, SARS Virus
ctagtacttaaggacctactcaaaa

SEQ ID NO: 62781 - DNA, 25 bp, SARS Virus
tagtacttaagcgcctactcaaaat

SEQ ID NO: 62782 - DNA, 25 bp, SARS Virus
agtacttaagcagctactcaaaatg

SEQ ID NO: 62783 - DNA, 25 bp, SARS Virus
gtacttaagcacgtactcaaaatgc

SEQ ID NO: 62784 - DNA, 25 bp, SARS Virus
tacttaagcaccgactcaaaatgcg

SEQ ID NO: 62785 - DNA, 25 bp, SARS Virus
acttaagcacctgctcaaaatgcga

SEQ ID NO: 62786 - DNA, 25 bp, SARS Virus
cttaagcacctagtcaaaatgcgaa

SEQ ID NO: 62787 - DNA, 25 bp, SARS Virus
ttaagcacctacgcaaaatgcgaat

SEQ ID NO: 62788 - DNA, 25 bp, SARS Virus
taagcacctactgaaaatgcgaatg

SEQ ID NO: 62789 - DNA, 25 bp, SARS Virus
aagcacctactcgaaatgcgaatgg

SEQ ID NO: 62790 - DNA, 25 bp, SARS Virus
agcacctactcagaatgcgaatgga

SEQ ID NO: 62791 - DNA, 25 bp, SARS Virus
gcacctactcaagatgcgaatggac

SEQ ID NO: 62792 - DNA, 25 bp, SARS Virus
cacctactcaaagtgcgaatggacg

SEQ ID NO: 62793 - DNA, 25 bp, SARS Virus
acctactcaaaaggcgaatggacgc

SEQ ID NO: 62794 - DNA, 25 bp, SARS Virus
cctactcaaaatgcgaatggacgca

SEQ ID NO: 62795 - DNA, 25 bp, SARS Virus
ctactcaaaatgggaatggacgcat

SEQ ID NO: 62796 - DNA, 25 bp, SARS Virus
tactcaaaatgcgaatggacgcatt

SEQ ID NO: 62797 - DNA, 25 bp, SARS Virus
actcaaaatgcggatggacgcattt

SEQ ID NO: 62798 - DNA, 25 bp, SARS Virus
ctcaaaatgcgagtggacgcatttg

SEQ ID NO: 62799 - DNA, 25 bp, SARS Virus
tcaaaatgcgaagggacgcatttgt

SEQ ID NO: 62800 - DNA, 25 bp, SARS Virus
caaaatgcgaatggacgcatttgta

SEQ ID NO: 62801 - DNA, 25 bp, SARS Virus
aaaatgcgaatggacgcatttgtaa

SEQ ID NO: 62802 - DNA, 25 bp, SARS Virus
aaatgcgaatgggcgcatttgtaaa

SEQ ID NO: 62803 - DNA, 25 bp, SARS Virus
aatgcgaatggaggcatttgtaaag

SEQ ID NO: 62804 - DNA, 25 bp, SARS Virus
atgcgaatggacgcatttgtaaaga

SEQ ID NO: 62805 - DNA, 25 bp, SARS Virus
tgcgaatggacggatttgtaaagag

SEQ ID NO: 62806 - DNA, 25 bp, SARS Virus
gcgaatggacgcgtttgtaaagagg

SEQ ID NO: 62807 - DNA, 25 bp, SARS Virus
cgaatggacgcagttgtaaagaggt

SEQ ID NO: 62808 - DNA, 25 bp, SARS Virus
gaatggacgcatgtgtaaagaggta

SEQ ID NO: 62809 - DNA, 25 bp, SARS Virus
aatggacgcattggtaaagaggtac

SEQ ID NO: 62810 - DNA, 25 bp, SARS Virus
atggacgcatttgtaaagaggtact

SEQ ID NO: 62811 - DNA, 25 bp, SARS Virus
tggacgcatttggaaagaggtacta

SEQ ID NO: 62812 - DNA, 25 bp, SARS Virus
ggacgcatttgtgaagaggtactac

SEQ ID NO: 62813 - DNA, 25 bp, SARS Virus
gacgcatttgtagagaggtactact

SEQ ID NO: 62814 - DNA, 25 bp, SARS Virus
acgcatttgtaaggaggtactacta

SEQ ID NO: 62815 - DNA, 25 bp, SARS Virus
cgcatttgtaaagaggtactactaa

SEQ ID NO: 62816 - DNA, 25 bp, SARS Virus
gcatttgtaaaggggtactactaag

SEQ ID NO: 62817 - DNA, 25 bp, SARS Virus
catttgtaaagaggtactactaaga

SEQ ID NO: 62818 - DNA, 25 bp, SARS Virus
atttgtaaagaggtactactaagaa

SEQ ID NO: 62819 - DNA, 25 bp, SARS Virus
tttgtaaagagggactactaagaaa

SEQ ID NO: 62820 - DNA, 25 bp, SARS Virus
ttgtaaagaggtgctactaagaaag

SEQ ID NO: 62821 - DNA, 25 bp, SARS Virus
tgtaaagaggtagtactaagaaaga

SEQ ID NO: 62822 - DNA, 25 bp, SARS Virus
gtaaagaggtacgactaagaaagac

SEQ ID NO: 62823 - DNA, 25 bp, SARS Virus
taaagaggtactgctaagaaagact

SEQ ID NO: 62824 - DNA, 25 bp, SARS Virus
aaagaggtactagtaagaaagacta

SEQ ID NO: 62825 - DNA, 25 bp, SARS Virus
aagaggtactacgaagaaagactac

SEQ ID NO: 62826 - DNA, 25 bp, SARS Virus
agaggtactactgagaaagactact

SEQ ID NO: 62827 - DNA, 25 bp, SARS Virus
gaggtactactaggaaagactacta

SEQ ID NO: 62828 - DNA, 25 bp, SARS Virus
aggtactactaagaaagactactac

SEQ ID NO: 62829 - DNA, 25 bp, SARS Virus
ggtactactaaggaagactactacg

SEQ ID NO: 62830 - DNA, 25 bp, SARS Virus
gtactactaagagagactactacgg

SEQ ID NO: 62831 - DNA, 25 bp, SARS Virus
tactactaagaaggactactacggc

SEQ ID NO: 62832 - DNA, 25 bp, SARS Virus
actactaagaaagactactacggca

SEQ ID NO: 62833 - DNA, 25 bp, SARS Virus
ctactaagaaaggctactacggcaa

SEQ ID NO: 62834 - DNA, 25 bp, SARS Virus
tactaagaaagagtactacggcaac

SEQ ID NO: 62835 - DNA, 25 bp, SARS Virus
actaagaaagacgactacggcaaca

SEQ ID NO: 62836 - DNA, 25 bp, SARS Virus
ctaagaaagactgctacggcaacac

SEQ ID NO: 62837 - DNA, 25 bp, SARS Virus
taagaaagactagtacggcaacaca

SEQ ID NO: 62838 - DNA, 25 bp, SARS Virus
aagaaagactacgacggcaacacac

SEQ ID NO: 62839 - DNA, 25 bp, SARS Virus
agaaagactactgcggcaacacacg

SEQ ID NO: 62840 - DNA, 25 bp, SARS Virus
gaaagactactagggcaacacacga

SEQ ID NO: 62841 - DNA, 25 bp, SARS Virus
aaagactactacggcaacacacgat

SEQ ID NO: 62842 - DNA, 25 bp, SARS Virus
aagactactacggcaacacacgata

SEQ ID NO: 62843 - DNA, 25 bp, SARS Virus
agactactacgggaacacacgatat

SEQ ID NO: 62844 - DNA, 25 bp, SARS Virus
gactactacggcgacacacgatatt

SEQ ID NO: 62845 - DNA, 25 bp, SARS Virus
actactacggcagcacacgatattg

SEQ ID NO: 62846 - DNA, 25 bp, SARS Virus
ctactacggcaagacacgatattgt

SEQ ID NO: 62847 - DNA, 25 bp, SARS Virus
tactacggcaacgcacgatattgtc

SEQ ID NO: 62848 - DNA, 25 bp, SARS Virus
actacggcaacagacgatattgtca

SEQ ID NO: 62849 - DNA, 25 bp, SARS Virus
ctacggcaacacgcgatattgtcat

SEQ ID NO: 62850 - DNA, 25 bp, SARS Virus
tacggcaacacaggatattgtcatt

SEQ ID NO: 62851 - DNA, 25 bp, SARS Virus
acggcaacacacgatattgtcattg

SEQ ID NO: 62852 - DNA, 25 bp, SARS Virus
cggcaacacacggtattgtcattga

SEQ ID NO: 62853 - DNA, 25 bp, SARS Virus
ggcaacacacgagattgtcattgat

SEQ ID NO: 62854 - DNA, 25 bp, SARS Virus
gcaacacacgatgttgtcattgata

SEQ ID NO: 62855 - DNA, 25 bp, SARS Virus
caacacacgatagtgtcattgatac

SEQ ID NO: 62856 - DNA, 25 bp, SARS Virus
aacacacgatatggtcattgatacg

SEQ ID NO: 62857 - DNA, 25 bp, SARS Virus
acacacgatattgtcattgatacgc

SEQ ID NO: 62858 - DNA, 25 bp, SARS Virus
cacacgatattggcattgatacgcc

SEQ ID NO: 62859 - DNA, 25 bp, SARS Virus
acacgatattgtgattgatacgccg

SEQ ID NO: 62860 - DNA, 25 bp, SARS Virus
cacgatattgtcgttgatacgccga

SEQ ID NO: 62861 - DNA, 25 bp, SARS Virus
acgatattgtcagtgatacgccgag

SEQ ID NO: 62862 - DNA, 25 bp, SARS Virus
cgatattgtcatggatacgccgagt

SEQ ID NO: 62863 - DNA, 25 bp, SARS Virus
gatattgtcattgatacgccgagtt

SEQ ID NO: 62864 - DNA, 25 bp, SARS Virus
atattgtcattggtacgccgagttc

SEQ ID NO: 62865 - DNA, 25 bp, SARS Virus
tattgtcattgagacgccgagttcc

SEQ ID NO: 62866 - DNA, 25 bp, SARS Virus
attgtcattgatgcgccgagttcca

SEQ ID NO: 62867 - DNA, 25 bp, SARS Virus
ttgtcattgataggccgagttccaa

SEQ ID NO: 62868 - DNA, 25 bp, SARS Virus
tgtcattgatacgccgagttccaaa

SEQ ID NO: 62869 - DNA, 25 bp, SARS Virus
gtcattgatacggcgagttccaaat

SEQ ID NO: 62870 - DNA, 25 bp, SARS Virus
tcattgatacgcggagttccaaatc

SEQ ID NO: 62871 - DNA, 25 bp, SARS Virus
cattgatacgccgagttccaaatca

SEQ ID NO: 62872 - DNA, 25 bp, SARS Virus
attgatacgccgggttccaaatcat

SEQ ID NO: 62873 - DNA, 25 bp, SARS Virus
ttgatacgccgagttccaaatcatc

SEQ ID NO: 62874 - DNA, 25 bp, SARS Virus
tgatacgccgaggtccaaatcatcg

SEQ ID NO: 62875 - DNA, 25 bp, SARS Virus
gatacgccgagtgccaaatcatcga

SEQ ID NO: 62876 - DNA, 25 bp, SARS Virus
atacgccgagttgcaaatcatcgat

SEQ ID NO: 62877 - DNA, 25 bp, SARS Virus
tacgccgagttcgaaatcatcgatc

SEQ ID NO: 62878 - DNA, 25 bp, SARS Virus
acgccgagttccgaatcatcgatcg

SEQ ID NO: 62879 - DNA, 25 bp, SARS Virus
cgccgagttccagatcatcgatcgt

SEQ ID NO: 62880 - DNA, 25 bp, SARS Virus
gccgagttccaagtcatcgatcgta

SEQ ID NO: 62881 - DNA, 25 bp, SARS Virus
ccgagttccaaagcatcgatcgtaa

SEQ ID NO: 62882 - DNA, 25 bp, SARS Virus
cgagttccaaatgatcgatcgtaat

SEQ ID NO: 62883 - DNA, 25 bp, SARS Virus
gagttccaaatcgtcgatcgtaatt

SEQ ID NO: 62884 - DNA, 25 bp, SARS Virus
agttccaaatcagcgatcgtaattc

SEQ ID NO: 62885 - DNA, 25 bp, SARS Virus
gttccaaatcatggatcgtaattct

SEQ ID NO: 62886 - DNA, 25 bp, SARS Virus
ttccaaatcatcgatcgtaattctt

SEQ ID NO: 62887 - DNA, 25 bp, SARS Virus
tccaaatcatcggtcgtaattcttg

SEQ ID NO: 62888 - DNA, 25 bp, SARS Virus
ccaaatcatcgagcgtaattcttga

SEQ ID NO: 62889 - DNA, 25 bp, SARS Virus
caaatcatcgatggtaattcttgaa

SEQ ID NO: 62890 - DNA, 25 bp, SARS Virus
aaatcatcgatcgtaattcttgaaa

SEQ ID NO: 62891 - DNA, 25 bp, SARS Virus
aatcatcgatcggaattcttgaaat

SEQ ID NO: 62892 - DNA, 25 bp, SARS Virus
atcatcgatcgtgattcttgaaatt

SEQ ID NO: 62893 - DNA, 25 bp, SARS Virus
tcatcgatcgtagttcttgaaattc

SEQ ID NO: 62894 - DNA, 25 bp, SARS Virus
catcgatcgtaagtcttgaaattcc

SEQ ID NO: 62895 - DNA, 25 bp, SARS Virus
atcgatcgtaatgcttgaaattccg

SEQ ID NO: 62896 - DNA, 25 bp, SARS Virus
tcgatcgtaattgttgaaattccgt

SEQ ID NO: 62897 - DNA, 25 bp, SARS Virus
cgatcgtaattcgtgaaattccgtc

SEQ ID NO: 62898 - DNA, 25 bp, SARS Virus
gatcgtaattctggaaattccgtca

SEQ ID NO: 62899 - DNA, 25 bp, SARS Virus
atcgtaattcttgaaattccgtcaa

SEQ ID NO: 62900 - DNA, 25 bp, SARS Virus
tcgtaattcttggaattccgtcaag

SEQ ID NO: 62901 - DNA, 25 bp, SARS Virus
cgtaattcttgagattccgtcaaga

SEQ ID NO: 62902 - DNA, 25 bp, SARS Virus
gtaattcttgaagttccgtcaagaa

SEQ ID NO: 62903 - DNA, 25 bp, SARS Virus
taattcttgaaagtccgtcaagaaa

SEQ ID NO: 62904 - DNA, 25 bp, SARS Virus
aattcttgaaatgccgtcaagaaat

SEQ ID NO: 62905 - DNA, 25 bp, SARS Virus
attcttgaaattgcgtcaagaaata

SEQ ID NO: 62906 - DNA, 25 bp, SARS Virus
ttcttgaaattcggtcaagaaataa

SEQ ID NO: 62907 - DNA, 25 bp, SARS Virus
tcttgaaattccgtcaagaaataat

SEQ ID NO: 62908 - DNA, 25 bp, SARS Virus
cttgaaattccggcaagaaataata

SEQ ID NO: 62909 - DNA, 25 bp, SARS Virus
ttgaaattccgtgaagaaataatag

SEQ ID NO: 62910 - DNA, 25 bp, SARS Virus
tgaaattccgtcgagaaataatagt

SEQ ID NO: 62911 - DNA, 25 bp, SARS Virus
gaaattccgtcaggaaataatagtt

SEQ ID NO: 62912 - DNA, 25 bp, SARS Virus
aaattccgtcaagaaataatagttt

SEQ ID NO: 62913 - DNA, 25 bp, SARS Virus
aattccgtcaaggaataatagtttt

SEQ ID NO: 62914 - DNA, 25 bp, SARS Virus
attccgtcaagagataatagtttta

SEQ ID NO: 62915 - DNA, 25 bp, SARS Virus
ttccgtcaagaagtaatagttttat

SEQ ID NO: 62916 - DNA, 25 bp, SARS Virus
tccgtcaagaaagaatagttttatt

SEQ ID NO: 62917 - DNA, 25 bp, SARS Virus
ccgtcaagaaatgatagttttatta

SEQ ID NO: 62918 - DNA, 25 bp, SARS Virus
cgtcaagaaatagtagttttattac

SEQ ID NO: 62919 - DNA, 25 bp, SARS Virus
gtcaagaaataagagttttattaca

SEQ ID NO: 62920 - DNA, 25 bp, SARS Virus
tcaagaaataatggttttattacac

SEQ ID NO: 62921 - DNA, 25 bp, SARS Virus
caagaaataatagttttattacaca

SEQ ID NO: 62922 - DNA, 25 bp, SARS Virus
aagaaataataggtttattacacaa

SEQ ID NO: 62923 - DNA, 25 bp, SARS Virus
agaaataatagtgttattacacaag

SEQ ID NO: 62924 - DNA, 25 bp, SARS Virus
gaaataatagttgtattacacaagt

SEQ ID NO: 62925 - DNA, 25 bp, SARS Virus
aaataatagtttgattacacaagta

SEQ ID NO: 62926 - DNA, 25 bp, SARS Virus
aataatagttttgttacacaagtac

SEQ ID NO: 62927 - DNA, 25 bp, SARS Virus
ataatagttttagtacacaagtaca

SEQ ID NO: 62928 - DNA, 25 bp, SARS Virus
taatagttttatgacacaagtacag

SEQ ID NO: 62929 - DNA, 25 bp, SARS Virus
aatagttttattgcacaagtacaga

SEQ ID NO: 62930 - DNA, 25 bp, SARS Virus
atagttttattagacaagtacagac

SEQ ID NO: 62931 - DNA, 25 bp, SARS Virus
tagttttattacgcaagtacagact

SEQ ID NO: 62932 - DNA, 25 bp, SARS Virus
agttttattacagaagtacagactc

SEQ ID NO: 62933 - DNA, 25 bp, SARS Virus
gttttattacacgagtacagactcc

SEQ ID NO: 62934 - DNA, 25 bp, SARS Virus
ttttattacacaggtacagactccg

SEQ ID NO: 62935 - DNA, 25 bp, SARS Virus
tttattacacaagtacagactccgt

SEQ ID NO: 62936 - DNA, 25 bp, SARS Virus
ttattacacaaggacagactccgtt

SEQ ID NO: 62937 - DNA, 25 bp, SARS Virus
tattacacaagtgcagactccgttt

SEQ ID NO: 62938 - DNA, 25 bp, SARS Virus
attacacaagtagagactccgtttt

SEQ ID NO: 62939 - DNA, 25 bp, SARS Virus
ttacacaagtacggactccgtttta

SEQ ID NO: 62940 - DNA, 25 bp, SARS Virus
tacacaagtacagactccgttttac

SEQ ID NO: 62941 - DNA, 25 bp, SARS Virus
acacaagtacaggctccgttttaca

SEQ ID NO: 62942 - DNA, 25 bp, SARS Virus
cacaagtacagagtccgttttacaa

SEQ ID NO: 62943 - DNA, 25 bp, SARS Virus
acaagtacagacgccgttttacaac

SEQ ID NO: 62944 - DNA, 25 bp, SARS Virus
caagtacagactgcgttttacaacc

SEQ ID NO: 62945 - DNA, 25 bp, SARS Virus
aagtacagactcggttttacaacct

SEQ ID NO: 62946 - DNA, 25 bp, SARS Virus
agtacagactccgttttacaacctg

SEQ ID NO: 62947 - DNA, 25 bp, SARS Virus
gtacagactccggtttacaacctga

SEQ ID NO: 62948 - DNA, 25 bp, SARS Virus
tacagactccgtgttacaacctgac

SEQ ID NO: 62949 - DNA, 25 bp, SARS Virus
acagactccgttgtacaacctgact

SEQ ID NO: 62950 - DNA, 25 bp, SARS Virus
cagactccgtttgacaacctgactc

SEQ ID NO: 62951 - DNA, 25 bp, SARS Virus
agactccgttttgcaacctgactct

SEQ ID NO: 62952 - DNA, 25 bp, SARS Virus
gactccgttttagaacctgactctg

SEQ ID NO: 62953 - DNA, 25 bp, SARS Virus
actccgttttacgacctgactctga

SEQ ID NO: 62954 - DNA, 25 bp, SARS Virus
ctccgttttacagcctgactctgac

SEQ ID NO: 62955 - DNA, 25 bp, SARS Virus
tccgttttacaagctgactctgact

SEQ ID NO: 62956 - DNA, 25 bp, SARS Virus
ccgttttacaacgtgactctgactg

SEQ ID NO: 62957 - DNA, 25 bp, SARS Virus
cgttttacaaccggactctgactgg

SEQ ID NO: 62958 - DNA, 25 bp, SARS Virus
gttttacaacctgactctgactgga

SEQ ID NO: 62959 - DNA, 25 bp, SARS Virus
ttttacaacctggctctgactggaa

SEQ ID NO: 62960 - DNA, 25 bp, SARS Virus
tttacaacctgagtctgactggaat

SEQ ID NO: 62961 - DNA, 25 bp, SARS Virus
ttacaacctgacgctgactggaatg

SEQ ID NO: 62962 - DNA, 25 bp, SARS Virus
tacaacctgactgtgactggaatga

SEQ ID NO: 62963 - DNA, 25 bp, SARS Virus
acaacctgactcggactggaatgat

SEQ ID NO: 62964 - DNA, 25 bp, SARS Virus
caacctgactctgactggaatgatt

SEQ ID NO: 62965 - DNA, 25 bp, SARS Virus
aacctgactctggctggaatgattt

SEQ ID NO: 62966 - DNA, 25 bp, SARS Virus
acctgactctgagtggaatgatttc

SEQ ID NO: 62967 - DNA, 25 bp, SARS Virus
cctgactctgacgggaatgatttcc

SEQ ID NO: 62968 - DNA, 25 bp, SARS Virus
ctgactctgactggaatgatttcct

SEQ ID NO: 62969 - DNA, 25 bp, SARS Virus
tgactctgactggaatgatttcctg

SEQ ID NO: 62970 - DNA, 25 bp, SARS Virus
gactctgactgggatgatttcctgg

SEQ ID NO: 62971 - DNA, 25 bp, SARS Virus
actctgactggagtgatttcctgga

SEQ ID NO: 62972 - DNA, 25 bp, SARS Virus
ctctgactggaaggatttcctggag

SEQ ID NO: 62973 - DNA, 25 bp, SARS Virus
tctgactggaatgatttcctggagt

SEQ ID NO: 62974 - DNA, 25 bp, SARS Virus
ctgactggaatggtttcctggagtg

SEQ ID NO: 62975 - DNA, 25 bp, SARS Virus
tgactggaatgagttcctggagtgc

SEQ ID NO: 62976 - DNA, 25 bp, SARS Virus
gactggaatgatgtcctggagtgct

SEQ ID NO: 62977 - DNA, 25 bp, SARS Virus
actggaatgattgcctggagtgctt

SEQ ID NO: 62978 - DNA, 25 bp, SARS Virus
ctggaatgatttgctggagtgctta

SEQ ID NO: 62979 - DNA, 25 bp, SARS Virus
tggaatgatttcgtggagtgcttaa

SEQ ID NO: 62980 - DNA, 25 bp, SARS Virus
ggaatgatttccgggagtgcttaaa

SEQ ID NO: 62981 - DNA, 25 bp, SARS Virus
gaatgatttcctggagtgcttaaaa

SEQ ID NO: 62982 - DNA, 25 bp, SARS Virus
aatgatttcctggagtgcttaaaac

SEQ ID NO: 62983 - DNA, 25 bp, SARS Virus
atgatttcctggggtgcttaaaacg

SEQ ID NO: 62984 - DNA, 25 bp, SARS Virus
tgatttcctggagtgcttaaaacga

SEQ ID NO: 62985 - DNA, 25 bp, SARS Virus
gatttcctggagggcttaaaacgag

SEQ ID NO: 62986 - DNA, 25 bp, SARS Virus
atttcctggagtgcttaaaacgagt

SEQ ID NO: 62987 - DNA, 25 bp, SARS Virus
tttcctggagtggttaaaacgagtg

SEQ ID NO: 62988 - DNA, 25 bp, SARS Virus
ttcctggagtgcgtaaaacgagtgt

SEQ ID NO: 62989 - DNA, 25 bp, SARS Virus
tcctggagtgctgaaaacgagtgtc

SEQ ID NO: 62990 - DNA, 25 bp, SARS Virus
cctggagtgcttgaaacgagtgtcg

SEQ ID NO: 62991 - DNA, 25 bp, SARS Virus
ctggagtgcttagaacgagtgtcgt

SEQ ID NO: 62992 - DNA, 25 bp, SARS Virus
tggagtgcttaagacgagtgtcgta

SEQ ID NO: 62993 - DNA, 25 bp, SARS Virus
ggagtgcttaaagcgagtgtcgtat

SEQ ID NO: 62994 - DNA, 25 bp, SARS Virus
gagtgcttaaaaggagtgtcgtatg

SEQ ID NO: 62995 - DNA, 25 bp, SARS Virus
agtgcttaaaacgagtgtcgtatgt

SEQ ID NO: 62996 - DNA, 25 bp, SARS Virus
gtgcttaaaacgggtgtcgtatgtt

SEQ ID NO: 62997 - DNA, 25 bp, SARS Virus
tgcttaaaacgagtgtcgtatgtta

SEQ ID NO: 62998 - DNA, 25 bp, SARS Virus
gcttaaaacgagggtcgtatgttac

SEQ ID NO: 62999 - DNA, 25 bp, SARS Virus
cttaaaacgagtgtcgtatgttacg

SEQ ID NO: 63000 - DNA, 25 bp, SARS Virus
ttaaaacgagtggcgtatgttacga

SEQ ID NO: 63001 - DNA, 25 bp, SARS Virus
taaaacgagtgtggtatgttacgat

SEQ ID NO: 63002 - DNA, 25 bp, SARS Virus
aaaacgagtgtcgtatgttacgatc

SEQ ID NO: 63003 - DNA, 25 bp, SARS Virus
aaacgagtgtcggatgttacgatca

SEQ ID NO: 63004 - DNA, 25 bp, SARS Virus
aacgagtgtcgtgtgttacgatcaa

SEQ ID NO: 63005 - DNA, 25 bp, SARS Virus
acgagtgtcgtaggttacgatcaat

SEQ ID NO: 63006 - DNA, 25 bp, SARS Virus
cgagtgtcgtatgttacgatcaatt

SEQ ID NO: 63007 - DNA, 25 bp, SARS Virus
gagtgtcgtatggtacgatcaattt

SEQ ID NO: 63008 - DNA, 25 bp, SARS Virus
agtgtcgtatgtgacgatcaatttg

SEQ ID NO: 63009 - DNA, 25 bp, SARS Virus
gtgtcgtatgttgcgatcaatttgt

SEQ ID NO: 63010 - DNA, 25 bp, SARS Virus
tgtcgtatgttaggatcaatttgtt

SEQ ID NO: 63011 - DNA, 25 bp, SARS Virus
gtcgtatgttacgatcaatttgttc

SEQ ID NO: 63012 - DNA, 25 bp, SARS Virus
tcgtatgttacggtcaatttgttcc

SEQ ID NO: 63013 - DNA, 25 bp, SARS Virus
cgtatgttacgagcaatttgttcct

SEQ ID NO: 63014 - DNA, 25 bp, SARS Virus
gtatgttacgatgaatttgttcctc

SEQ ID NO: 63015 - DNA, 25 bp, SARS Virus
tatgttacgatcgatttgttcctct

SEQ ID NO: 63016 - DNA, 25 bp, SARS Virus
atgttacgatcagtttgttcctcta

SEQ ID NO: 63017 - DNA, 25 bp, SARS Virus
tgttacgatcaagttgttcctctac

SEQ ID NO: 63018 - DNA, 25 bp, SARS Virus
gttacgatcaatgtgttcctctact

SEQ ID NO: 63019 - DNA, 25 bp, SARS Virus
ttacgatcaattggttcctctacta

SEQ ID NO: 63020 - DNA, 25 bp, SARS Virus
tacgatcaatttgttcctctactaa

SEQ ID NO: 63021 - DNA, 25 bp, SARS Virus
acgatcaatttggtcctctactaat

SEQ ID NO: 63022 - DNA, 25 bp, SARS Virus
cgatcaatttgtgcctctactaatg

SEQ ID NO: 63023 - DNA, 25 bp, SARS Virus
gatcaatttgttgctctactaatgc

SEQ ID NO: 63024 - DNA, 25 bp, SARS Virus
atcaatttgttcgtctactaatgca

SEQ ID NO: 63025 - DNA, 25 bp, SARS Virus
tcaatttgttccgctactaatgcac

SEQ ID NO: 63026 - DNA, 25 bp, SARS Virus
caatttgttcctgtactaatgcaca

SEQ ID NO: 63027 - DNA, 25 bp, SARS Virus
aatttgttcctcgactaatgcacat

SEQ ID NO: 63028 - DNA, 25 bp, SARS Virus
atttgttcctctgctaatgcacatg

SEQ ID NO: 63029 - DNA, 25 bp, SARS Virus
tttgttcctctagtaatgcacatgg

SEQ ID NO: 63030 - DNA, 25 bp, SARS Virus
ttgttcctctacgaatgcacatgga

SEQ ID NO: 63031 - DNA, 25 bp, SARS Virus
tgttcctctactgatgcacatggac

SEQ ID NO: 63032 - DNA, 25 bp, SARS Virus
gttcctctactagtgcacatggacg

SEQ ID NO: 63033 - DNA, 25 bp, SARS Virus
ttcctctactaaggcacatggacgg

SEQ ID NO: 63034 - DNA, 25 bp, SARS Virus
tcctctactaatgcacatggacgga

SEQ ID NO: 63035 - DNA, 25 bp, SARS Virus
cctctactaatggacatggacggaa

SEQ ID NO: 63036 - DNA, 25 bp, SARS Virus
ctctactaatgcgcatggacggaat

SEQ ID NO: 63037 - DNA, 25 bp, SARS Virus
tctactaatgcagatggacggaatg

SEQ ID NO: 63038 - DNA, 25 bp, SARS Virus
ctactaatgcacgtggacggaatgg

SEQ ID NO: 63039 - DNA, 25 bp, SARS Virus
tactaatgcacagggacggaatggg

SEQ ID NO: 63040 - DNA, 25 bp, SARS Virus
actaatgcacatggacggaatgggt

SEQ ID NO: 63041 - DNA, 25 bp, SARS Virus
ctaatgcacatggacggaatgggtc

SEQ ID NO: 63042 - DNA, 25 bp, SARS Virus
taatgcacatgggcggaatgggtct

SEQ ID NO: 63043 - DNA, 25 bp, SARS Virus
aatgcacatggagggaatgggtcta

SEQ ID NO: 63044 - DNA, 25 bp, SARS Virus
atgcacatggacggaatgggtctag

SEQ ID NO: 63045 - DNA, 25 bp, SARS Virus
tgcacatggacggaatgggtctagg

SEQ ID NO: 63046 - DNA, 25 bp, SARS Virus
gcacatggacgggatgggtctaggt

SEQ ID NO: 63047 - DNA, 25 bp, SARS Virus
cacatggacggagtgggtctaggta

SEQ ID NO: 63048 - DNA, 25 bp, SARS Virus
acatggacggaaggggtctaggtag

SEQ ID NO: 63049 - DNA, 25 bp, SARS Virus
catggacggaatgggtctaggtagt

SEQ ID NO: 63050 - DNA, 25 bp, SARS Virus
atggacggaatgggtctaggtagtt

SEQ ID NO: 63051 - DNA, 25 bp, SARS Virus
tggacggaatgggtctaggtagttc

SEQ ID NO: 63052 - DNA, 25 bp, SARS Virus
ggacggaatggggctaggtagttct

SEQ ID NO: 63053 - DNA, 25 bp, SARS Virus
gacggaatgggtgtaggtagttctt

SEQ ID NO: 63054 - DNA, 25 bp, SARS Virus
acggaatgggtcgaggtagttctta

SEQ ID NO: 63055 - DNA, 25 bp, SARS Virus
cggaatgggtctgggtagttcttat

SEQ ID NO: 63056 - DNA, 25 bp, SARS Virus
ggaatgggtctaggtagttcttata

SEQ ID NO: 63057 - DNA, 25 bp, SARS Virus
gaatgggtctaggtagttcttataa

SEQ ID NO: 63058 - DNA, 25 bp, SARS Virus
aatgggtctagggagttcttataat

SEQ ID NO: 63059 - DNA, 25 bp, SARS Virus
atgggtctaggtggttcttataatc

SEQ ID NO: 63060 - DNA, 25 bp, SARS Virus
tgggtctaggtagttcttataatcc

SEQ ID NO: 63061 - DNA, 25 bp, SARS Virus
gggtctaggtaggtcttataatccg

SEQ ID NO: 63062 - DNA, 25 bp, SARS Virus
ggtctaggtagtgcttataatccgc

SEQ ID NO: 63063 - DNA, 25 bp, SARS Virus
gtctaggtagttgttataatccgcg

SEQ ID NO: 63064 - DNA, 25 bp, SARS Virus
tctaggtagttcgtataatccgcgt

SEQ ID NO: 63065 - DNA, 25 bp, SARS Virus
ctaggtagttctgataatccgcgtc

SEQ ID NO: 63066 - DNA, 25 bp, SARS Virus
taggtagttcttgtaatccgcgtcc

SEQ ID NO: 63067 - DNA, 25 bp, SARS Virus
aggtagttcttagaatccgcgtccg

SEQ ID NO: 63068 - DNA, 25 bp, SARS Virus
ggtagttcttatgatccgcgtccga

SEQ ID NO: 63069 - DNA, 25 bp, SARS Virus
gtagttcttatagtccgcgtccgac

SEQ ID NO: 63070 - DNA, 25 bp, SARS Virus
tagttcttataagccgcgtccgaca

SEQ ID NO: 63071 - DNA, 25 bp, SARS Virus
agttcttataatgcgcgtccgacaa

SEQ ID NO: 63072 - DNA, 25 bp, SARS Virus
gttcttataatcggcgtccgacaaa

SEQ ID NO: 63073 - DNA, 25 bp, SARS Virus
ttcttataatccgcgtccgacaaaa

SEQ ID NO: 63074 - DNA, 25 bp, SARS Virus
tcttataatccgggtccgacaaaac

SEQ ID NO: 63075 - DNA, 25 bp, SARS Virus
cttataatccgcgtccgacaaaaca

SEQ ID NO: 63076 - DNA, 25 bp, SARS Virus
ttataatccgcggccgacaaaacag

SEQ ID NO: 63077 - DNA, 25 bp, SARS Virus
tataatccgcgtgcgacaaaacagc

SEQ ID NO: 63078 - DNA, 25 bp, SARS Virus
ataatccgcgtcggacaaaacagct

SEQ ID NO: 63079 - DNA, 25 bp, SARS Virus
taatccgcgtccgacaaaacagcta

SEQ ID NO: 63080 - DNA, 25 bp, SARS Virus
aatccgcgtccggcaaaacagctac

SEQ ID NO: 63081 - DNA, 25 bp, SARS Virus
atttggtccaccttgtagtaggcca

SEQ ID NO: 63082 - DNA, 25 bp, SARS Virus
tttggtccaccttgtagtaggccac

SEQ ID NO: 63083 - DNA, 25 bp, SARS Virus
ttggtccaccttttagtaggccact

SEQ ID NO: 63084 - DNA, 25 bp, SARS Virus
tggtccaccttgtagtaggccacta

SEQ ID NO: 63085 - DNA, 25 bp, SARS Virus
ggtccaccttgttgtaggccactac

SEQ ID NO: 63086 - DNA, 25 bp, SARS Virus
gtccaccttgtattaggccactacg

SEQ ID NO: 63087 - DNA, 25 bp, SARS Virus
tccaccttgtagtaggccactacga

SEQ ID NO: 63088 - DNA, 25 bp, SARS Virus
ccaccttgtagttggccactacgat

SEQ ID NO: 63089 - DNA, 25 bp, SARS Virus
caccttgtagtatgccactacgatg

SEQ ID NO: 63090 - DNA, 25 bp, SARS Virus
accttgtagtagtccactacgatgt

SEQ ID NO: 63091 - DNA, 25 bp, SARS Virus
ccttgtagtaggtcactacgatgtt

SEQ ID NO: 63092 - DNA, 25 bp, SARS Virus
cttgtagtaggctactacgatgttg

SEQ ID NO: 63093 - DNA, 25 bp, SARS Virus
ttgtagtaggcctctacgatgttga

SEQ ID NO: 63094 - DNA, 25 bp, SARS Virus
tgtagtaggccattacgatgttgac

SEQ ID NO: 63095 - DNA, 25 bp, SARS Virus
gtagtaggccactacgatgttgacg

SEQ ID NO: 63096 - DNA, 25 bp, SARS Virus
tagtaggccacttcgatgttgacga

SEQ ID NO: 63097 - DNA, 25 bp, SARS Virus
agtaggccactatgatgttgacgaa

SEQ ID NO: 63098 - DNA, 25 bp, SARS Virus
gtaggccactactatgttgacgaat

SEQ ID NO: 63099 - DNA, 25 bp, SARS Virus
taggccactacgttgttgacgaata

SEQ ID NO: 63100 - DNA, 25 bp, SARS Virus
aggccactacgatgttgacgaatac

SEQ ID NO: 63101 - DNA, 25 bp, SARS Virus
ggccactacgattttgacgaatacg

SEQ ID NO: 63102 - DNA, 25 bp, SARS Virus
gccactacgatgttgacgaatacga

SEQ ID NO: 63103 - DNA, 25 bp, SARS Virus
ccactacgatgttgacgaatacgat

SEQ ID NO: 63104 - DNA, 25 bp, SARS Virus
cactacgatgtttacgaatacgatt

SEQ ID NO: 63105 - DNA, 25 bp, SARS Virus
actacgatgttgtcgaatacgatta

SEQ ID NO: 63106 - DNA, 25 bp, SARS Virus
ctacgatgttgatgaatacgattat

SEQ ID NO: 63107 - DNA, 25 bp, SARS Virus
tacgatgttgactaatacgattatc

SEQ ID NO: 63108 - DNA, 25 bp, SARS Virus
acgatgttgacgtatacgattatca

SEQ ID NO: 63109 - DNA, 25 bp, SARS Virus
cgatgttgacgattacgattatcac

SEQ ID NO: 63110 - DNA, 25 bp, SARS Virus
gatgttgacgaatacgattatcaca

SEQ ID NO: 63111 - DNA, 25 bp, SARS Virus
atgttgacgaattcgattatcacag

SEQ ID NO: 63112 - DNA, 25 bp, SARS Virus
tgttgacgaatatgattatcacaga

SEQ ID NO: 63113 - DNA, 25 bp, SARS Virus
gttgacgaatactattatcacagaa

SEQ ID NO: 63114 - DNA, 25 bp, SARS Virus
ttgacgaatacgtttatcacagaaa

SEQ ID NO: 63115 - DNA, 25 bp, SARS Virus
tgacgaatacgattatcacagaaat

SEQ ID NO: 63116 - DNA, 25 bp, SARS Virus
gacgaatacgattatcacagaaatt

SEQ ID NO: 63117 - DNA, 25 bp, SARS Virus
acgaatacgattttcacagaaattg

SEQ ID NO: 63118 - DNA, 25 bp, SARS Virus
cgaatacgattatcacagaaattgt

SEQ ID NO: 63119 - DNA, 25 bp, SARS Virus
gaatacgattattacagaaattgta

SEQ ID NO: 63120 - DNA, 25 bp, SARS Virus
aatacgattatctcagaaattgtaa

SEQ ID NO: 63121 - DNA, 25 bp, SARS Virus
atacgattatcatagaaattgtaaa

SEQ ID NO: 63122 - DNA, 25 bp, SARS Virus
tacgattatcactgaaattgtaaac

SEQ ID NO: 63123 - DNA, 25 bp, SARS Virus
acgattatcacataaattgtaaaca

SEQ ID NO: 63124 - DNA, 25 bp, SARS Virus
cgattatcacagtaattgtaaacag

SEQ ID NO: 63125 - DNA, 25 bp, SARS Virus
gattatcacagatattgtaaacagt

SEQ ID NO: 63126 - DNA, 25 bp, SARS Virus
attatcacagaatttgtaaacagtt

SEQ ID NO: 63127 - DNA, 25 bp, SARS Virus
ttatcacagaaattgtaaacagttc

SEQ ID NO: 63128 - DNA, 25 bp, SARS Virus
tatcacagaaattgtaaacagttcg

SEQ ID NO: 63129 - DNA, 25 bp, SARS Virus
atcacagaaattttaaacagttcga

SEQ ID NO: 63130 - DNA, 25 bp, SARS Virus
tcacagaaattgtaaacagttcgac

SEQ ID NO: 63131 - DNA, 25 bp, SARS Virus
cacagaaattgttaacagttcgaca

SEQ ID NO: 63132 - DNA, 25 bp, SARS Virus
acagaaattgtatacagttcgacaa

SEQ ID NO: 63133 - DNA, 25 bp, SARS Virus
cagaaattgtaatcagttcgacaat

SEQ ID NO: 63134 - DNA, 25 bp, SARS Virus
agaaattgtaaatagttcgacaatg

SEQ ID NO: 63135 - DNA, 25 bp, SARS Virus
gaaattgtaaactgttcgacaatgt

SEQ ID NO: 63136 - DNA, 25 bp, SARS Virus
aaattgtaaacatttcgacaatgtc

SEQ ID NO: 63137 - DNA, 25 bp, SARS Virus
aattgtaaacagttcgacaatgtcg

SEQ ID NO: 63138 - DNA, 25 bp, SARS Virus
attgtaaacagttcgacaatgtcgg

SEQ ID NO: 63139 - DNA, 25 bp, SARS Virus
ttgtaaacagtttgacaatgtcggt

SEQ ID NO: 63140 - DNA, 25 bp, SARS Virus
tgtaaacagttctacaatgtcggtt

SEQ ID NO: 63141 - DNA, 25 bp, SARS Virus
gtaaacagttcgtcaatgtcggtta

SEQ ID NO: 63142 - DNA, 25 bp, SARS Virus
taaacagttcgataatgtcggttac

SEQ ID NO: 63143 - DNA, 25 bp, SARS Virus
aaacagttcgactatgtcggttaca

SEQ ID NO: 63144 - DNA, 25 bp, SARS Virus
aacagttcgacattgtcggttacat

SEQ ID NO: 63145 - DNA, 25 bp, SARS Virus
acagttcgacaatgtcggttacatt

SEQ ID NO: 63146 - DNA, 25 bp, SARS Virus
cagttcgacaatttcggttacattt

SEQ ID NO: 63147 - DNA, 25 bp, SARS Virus
agttcgacaatgtcggttacattta

SEQ ID NO: 63148 - DNA, 25 bp, SARS Virus
gttcgacaatgttggttacatttac

SEQ ID NO: 63149 - DNA, 25 bp, SARS Virus
ttcgacaatgtctgttacatttacg

SEQ ID NO: 63150 - DNA, 25 bp, SARS Virus
tcgacaatgtcgtttacatttacgt

SEQ ID NO: 63151 - DNA, 25 bp, SARS Virus
cgacaatgtcggttacatttacgtg

SEQ ID NO: 63152 - DNA, 25 bp, SARS Virus
gacaatgtcggttacatttacgtga

SEQ ID NO: 63153 - DNA, 25 bp, SARS Virus
acaatgtcggtttcatttacgtgaa

SEQ ID NO: 63154 - DNA, 25 bp, SARS Virus
caatgtcggttatatttacgtgaag

SEQ ID NO: 63155 - DNA, 25 bp, SARS Virus
aatgtcggttacttttacgtgaaga

SEQ ID NO: 63156 - DNA, 25 bp, SARS Virus
atgtcggttacatttacgtgaagaa

SEQ ID NO: 63157 - DNA, 25 bp, SARS Virus
tgtcggttacatttacgtgaagaaa

SEQ ID NO: 63158 - DNA, 25 bp, SARS Virus
gtcggttacatttacgtgaagaaag

SEQ ID NO: 63159 - DNA, 25 bp, SARS Virus
tcggttacattttcgtgaagaaagt

SEQ ID NO: 63160 - DNA, 25 bp, SARS Virus
cggttacatttatgtgaagaaagtt

SEQ ID NO: 63161 - DNA, 25 bp, SARS Virus
ggttacatttacttgaagaaagttg

SEQ ID NO: 63162 - DNA, 25 bp, SARS Virus
gttacatttacgtgaagaaagttga

SEQ ID NO: 63163 - DNA, 25 bp, SARS Virus
ttacatttacgttaagaaagttgac

SEQ ID NO: 63164 - DNA, 25 bp, SARS Virus
tacatttacgtgtagaaagttgact

SEQ ID NO: 63165 - DNA, 25 bp, SARS Virus
acatttacgtgatgaaagttgacta

SEQ ID NO: 63166 - DNA, 25 bp, SARS Virus
catttacgtgaataaagttgactac

SEQ ID NO: 63167 - DNA, 25 bp, SARS Virus
atttacgtgaagtaagttgactacc

SEQ ID NO: 63168 - DNA, 25 bp, SARS Virus
tttacgtgaagatagttgactacca

SEQ ID NO: 63169 - DNA, 25 bp, SARS Virus
ttacgtgaagaatgttgactaccat

SEQ ID NO: 63170 - DNA, 25 bp, SARS Virus
tacgtgaagaaatttgactaccatt

SEQ ID NO: 63171 - DNA, 25 bp, SARS Virus
acgtgaagaaagttgactaccatta

SEQ ID NO: 63172 - DNA, 25 bp, SARS Virus
cgtgaagaaagttgactaccattat

SEQ ID NO: 63173 - DNA, 25 bp, SARS Virus
gtgaagaaagtttactaccattatt

SEQ ID NO: 63174 - DNA, 25 bp, SARS Virus
tgaagaaagttgtctaccattattc

SEQ ID NO: 63175 - DNA, 25 bp, SARS Virus
gaagaaagttgattaccattattct

SEQ ID NO: 63176 - DNA, 25 bp, SARS Virus
aagaaagttgactaccattattcta

SEQ ID NO: 63177 - DNA, 25 bp, SARS Virus
agaaagttgacttccattattctat

SEQ ID NO: 63178 - DNA, 25 bp, SARS Virus
gaaagttgactatcattattctatc

SEQ ID NO: 63179 - DNA, 25 bp, SARS Virus
aaagttgactactattattctatcg

SEQ ID NO: 63180 - DNA, 25 bp, SARS Virus
aagttgactacctttattctatcga

SEQ ID NO: 63181 - DNA, 25 bp, SARS Virus
agttgactaccattattctatcgac

SEQ ID NO: 63182 - DNA, 25 bp, SARS Virus
gttgactaccattattctatcgact

SEQ ID NO: 63183 - DNA, 25 bp, SARS Virus
ttgactaccatttttctatcgactg

SEQ ID NO: 63184 - DNA, 25 bp, SARS Virus
tgactaccattattctatcgactgt

SEQ ID NO: 63185 - DNA, 25 bp, SARS Virus
gactaccattattctatcgactgtt

SEQ ID NO: 63186 - DNA, 25 bp, SARS Virus
actaccattattttatcgactgttc

SEQ ID NO: 63187 - DNA, 25 bp, SARS Virus
ctaccattattctatcgactgttca

SEQ ID NO: 63188 - DNA, 25 bp, SARS Virus
taccattattctttcgactgttcat

SEQ ID NO: 63189 - DNA, 25 bp, SARS Virus
accattattctatcgactgttcata

SEQ ID NO: 63190 - DNA, 25 bp, SARS Virus
ccattattctattgactgttcatac

SEQ ID NO: 63191 - DNA, 25 bp, SARS Virus
cattattctatctactgttcataca

SEQ ID NO: 63192 - DNA, 25 bp, SARS Virus
attattctatcgtctgttcatacag

SEQ ID NO: 63193 - DNA, 25 bp, SARS Virus
ttattctatcgattgttcatacagg

SEQ ID NO: 63194 - DNA, 25 bp, SARS Virus
tattctatcgactgttcatacaggc

SEQ ID NO: 63195 - DNA, 25 bp, SARS Virus
attctatcgacttttcatacaggcg

SEQ ID NO: 63196 - DNA, 25 bp, SARS Virus
ttctatcgactgttcatacaggcgt

SEQ ID NO: 63197 - DNA, 25 bp, SARS Virus
tctatcgactgttcatacaggcgtt

SEQ ID NO: 63198 - DNA, 25 bp, SARS Virus
ctatcgactgtttatacaggcgtta

SEQ ID NO: 63199 - DNA, 25 bp, SARS Virus
tatcgactgttcttacaggcgttag

SEQ ID NO: 63200 - DNA, 25 bp, SARS Virus
atcgactgttcatacaggcgttaga

SEQ ID NO: 63201 - DNA, 25 bp, SARS Virus
tcgactgttcattcaggcgttagat

SEQ ID NO: 63202 - DNA, 25 bp, SARS Virus
cgactgttcatataggcgttagatg

SEQ ID NO: 63203 - DNA, 25 bp, SARS Virus
gactgttcatactggcgttagatgt

SEQ ID NO: 63204 - DNA, 25 bp, SARS Virus
actgttcatacatgcgttagatgtt

SEQ ID NO: 63205 - DNA, 25 bp, SARS Virus
ctgttcatacagtcgttagatgttg

SEQ ID NO: 63206 - DNA, 25 bp, SARS Virus
tgttcatacaggtgttagatgttgt

SEQ ID NO: 63207 - DNA, 25 bp, SARS Virus
gttcatacaggctttagatgttgtg

SEQ ID NO: 63208 - DNA, 25 bp, SARS Virus
ttcatacaggcgttagatgttgtgt

SEQ ID NO: 63209 - DNA, 25 bp, SARS Virus
tcatacaggcgttagatgttgtgtc

SEQ ID NO: 63210 - DNA, 25 bp, SARS Virus
catacaggcgtttgatgttgtgtcc

SEQ ID NO: 63211 - DNA, 25 bp, SARS Virus
atacaggcgttatatgttgtgtccg

SEQ ID NO: 63212 - DNA, 25 bp, SARS Virus
tacaggcgttagttgttgtgtccga

SEQ ID NO: 63213 - DNA, 25 bp, SARS Virus
acaggcgttagatgttgtgtccgag

SEQ ID NO: 63214 - DNA, 25 bp, SARS Virus
caggcgttagattttgtgtccgaga

SEQ ID NO: 63215 - DNA, 25 bp, SARS Virus
aggcgttagatgttgtgtccgagat

SEQ ID NO: 63216 - DNA, 25 bp, SARS Virus
ggcgttagatgttgtgtccgagata

SEQ ID NO: 63217 - DNA, 25 bp, SARS Virus
gcgttagatgttttgtccgagatac

SEQ ID NO: 63218 - DNA, 25 bp, SARS Virus
cgttagatgttgtgtccgagatact

SEQ ID NO: 63219 - DNA, 25 bp, SARS Virus
gttagatgttgtttccgagatactc

SEQ ID NO: 63220 - DNA, 25 bp, SARS Virus
ttagatgttgtgtccgagatactca

SEQ ID NO: 63221 - DNA, 25 bp, SARS Virus
tagatgttgtgttcgagatactcac

SEQ ID NO: 63222 - DNA, 25 bp, SARS Virus
agatgttgtgtctgagatactcaca

SEQ ID NO: 63223 - DNA, 25 bp, SARS Virus
gatgttgtgtcctagatactcacag

SEQ ID NO: 63224 - DNA, 25 bp, SARS Virus
atgttgtgtccgtgatactcacaga

SEQ ID NO: 63225 - DNA, 25 bp, SARS Virus
tgttgtgtccgatatactcacagag

SEQ ID NO: 63226 - DNA, 25 bp, SARS Virus
gttgtgtccgagttactcacagaga

SEQ ID NO: 63227 - DNA, 25 bp, SARS Virus
ttgtgtccgagatactcacagagat

SEQ ID NO: 63228 - DNA, 25 bp, SARS Virus
tgtgtccgagattctcacagagata

SEQ ID NO: 63229 - DNA, 25 bp, SARS Virus
gtgtccgagatattcacagagatat

SEQ ID NO: 63230 - DNA, 25 bp, SARS Virus
tgtccgagatactcacagagatatc

SEQ ID NO: 63231 - DNA, 25 bp, SARS Virus
gtccgagatacttacagagatatct

SEQ ID NO: 63232 - DNA, 25 bp, SARS Virus
tccgagatactctcagagatatctt

SEQ ID NO: 63233 - DNA, 25 bp, SARS Virus
ccgagatactcatagagatatcttt

SEQ ID NO: 63234 - DNA, 25 bp, SARS Virus
cgagatactcactgagatatcttta

SEQ ID NO: 63235 - DNA, 25 bp, SARS Virus
gagatactcacatagatatctttat

SEQ ID NO: 63236 - DNA, 25 bp, SARS Virus
agatactcacagtgatatctttatc

SEQ ID NO: 63237 - DNA, 25 bp, SARS Virus
gatactcacagatatatctttatcc

SEQ ID NO: 63238 - DNA, 25 bp, SARS Virus
atactcacagagttatctttatccc

SEQ ID NO: 63239 - DNA, 25 bp, SARS Virus
tactcacagagatatctttatccct

SEQ ID NO: 63240 - DNA, 25 bp, SARS Virus
actcacagagatttctttatcccta

SEQ ID NO: 63241 - DNA, 25 bp, SARS Virus
ctcacagagatatctttatccctac

SEQ ID NO: 63242 - DNA, 25 bp, SARS Virus
tcacagagatatttttatccctaca

SEQ ID NO: 63243 - DNA, 25 bp, SARS Virus
cacagagatatctttatccctacaa

SEQ ID NO: 63244 - DNA, 25 bp, SARS Virus
acagagatatctttatccctacaac

SEQ ID NO: 63245 - DNA, 25 bp, SARS Virus
cagagatatctttatccctacaact

SEQ ID NO: 63246 - DNA, 25 bp, SARS Virus
agagatatctttttccctacaacta

SEQ ID NO: 63247 - DNA, 25 bp, SARS Virus
gagatatctttatccctacaactag

SEQ ID NO: 63248 - DNA, 25 bp, SARS Virus
agatatctttattcctacaactagt

SEQ ID NO: 63249 - DNA, 25 bp, SARS Virus
gatatctttatctctacaactagta

SEQ ID NO: 63250 - DNA, 25 bp, SARS Virus
atatctttatccttacaactagtac

SEQ ID NO: 63251 - DNA, 25 bp, SARS Virus
tatctttatccctacaactagtact

SEQ ID NO: 63252 - DNA, 25 bp, SARS Virus
atctttatcccttcaactagtactt

SEQ ID NO: 63253 - DNA, 25 bp, SARS Virus
tctttatccctataactagtactta

SEQ ID NO: 63254 - DNA, 25 bp, SARS Virus
ctttatccctactactagtacttaa

SEQ ID NO: 63255 - DNA, 25 bp, SARS Virus
tttatccctacatctagtacttaag

SEQ ID NO: 63256 - DNA, 25 bp, SARS Virus
ttatccctacaattagtacttaagc

SEQ ID NO: 63257 - DNA, 25 bp, SARS Virus
tatccctacaactagtacttaagca

SEQ ID NO: 63258 - DNA, 25 bp, SARS Virus
atccctacaacttgtacttaagcac

SEQ ID NO: 63259 - DNA, 25 bp, SARS Virus
tccctacaactattacttaagcacc

SEQ ID NO: 63260 - DNA, 25 bp, SARS Virus
ccctacaactagtacttaagcacct

SEQ ID NO: 63261 - DNA, 25 bp, SARS Virus
cctacaactagttcttaagcaccta

SEQ ID NO: 63262 - DNA, 25 bp, SARS Virus
ctacaactagtatttaagcacctac

SEQ ID NO: 63263 - DNA, 25 bp, SARS Virus
tacaactagtacttaagcacctact

SEQ ID NO: 63264 - DNA, 25 bp, SARS Virus
acaactagtacttaagcacctactc

SEQ ID NO: 63265 - DNA, 25 bp, SARS Virus
caactagtactttagcacctactca

SEQ ID NO: 63266 - DNA, 25 bp, SARS Virus
aactagtacttatgcacctactcaa

SEQ ID NO: 63267 - DNA, 25 bp, SARS Virus
actagtacttaatcacctactcaaa

SEQ ID NO: 63268 - DNA, 25 bp, SARS Virus
ctagtacttaagtacctactcaaaa

SEQ ID NO: 63269 - DNA, 25 bp, SARS Virus
tagtacttaagctcctactcaaaat

SEQ ID NO: 63270 - DNA, 25 bp, SARS Virus
agtacttaagcatctactcaaaatg

SEQ ID NO: 63271 - DNA, 25 bp, SARS Virus
gtacttaagcacttactcaaaatgc

SEQ ID NO: 63272 - DNA, 25 bp, SARS Virus
tacttaagcacctactcaaaatgcg

SEQ ID NO: 63273 - DNA, 25 bp, SARS Virus
acttaagcaccttctcaaaatgcga

SEQ ID NO: 63274 - DNA, 25 bp, SARS Virus
cttaagcacctattcaaaatgcgaa

SEQ ID NO: 63275 - DNA, 25 bp, SARS Virus
ttaagcacctactcaaaatgcgaat

SEQ ID NO: 63276 - DNA, 25 bp, SARS Virus
taagcacctacttaaaatgcgaatg

SEQ ID NO: 63277 - DNA, 25 bp, SARS Virus
aagcacctactctaaatgcgaatgg

SEQ ID NO: 63278 - DNA, 25 bp, SARS Virus
agcacctactcataatgcgaatgga

SEQ ID NO: 63279 - DNA, 25 bp, SARS Virus
gcacctactcaatatgcgaatggac

SEQ ID NO: 63280 - DNA, 25 bp, SARS Virus
cacctactcaaattgcgaatggacg

SEQ ID NO: 63281 - DNA, 25 bp, SARS Virus
acctactcaaaatgcgaatggacgc

SEQ ID NO: 63282 - DNA, 25 bp, SARS Virus
cctactcaaaattcgaatggacgca

SEQ ID NO: 63283 - DNA, 25 bp, SARS Virus
ctactcaaaatgtgaatggacgcat

SEQ ID NO: 63284 - DNA, 25 bp, SARS Virus
tactcaaaatgctaatggacgcatt

SEQ ID NO: 63285 - DNA, 25 bp, SARS Virus
actcaaaatgcgtatggacgcattt

SEQ ID NO: 63286 - DNA, 25 bp, SARS Virus
ctcaaaatgcgattggacgcatttg

SEQ ID NO: 63287 - DNA, 25 bp, SARS Virus
tcaaaatgcgaatggacgcatttgt

SEQ ID NO: 63288 - DNA, 25 bp, SARS Virus
caaaatgcgaattgacgcatttgta

SEQ ID NO: 63289 - DNA, 25 bp, SARS Virus
aaaatgcgaatgtacgcatttgtaa

SEQ ID NO: 63290 - DNA, 25 bp, SARS Virus
aaatgcgaatggtcgcatttgtaaa

SEQ ID NO: 63291 - DNA, 25 bp, SARS Virus
aatgcgaatggatgcatttgtaaag

SEQ ID NO: 63292 - DNA, 25 bp, SARS Virus
atgcgaatggactcatttgtaaaga

SEQ ID NO: 63293 - DNA, 25 bp, SARS Virus
tgcgaatggacgtatttgtaaagag

SEQ ID NO: 63294 - DNA, 25 bp, SARS Virus
gcgaatggacgcttttgtaaagagg

SEQ ID NO: 63295 - DNA, 25 bp, SARS Virus
cgaatggacgcatttgtaaagaggt

SEQ ID NO: 63296 - DNA, 25 bp, SARS Virus
gaatggacgcatttgtaaagaggta

SEQ ID NO: 63297 - DNA, 25 bp, SARS Virus
aatggacgcatttgtaaagaggtac

SEQ ID NO: 63298 - DNA, 25 bp, SARS Virus
atggacgcatttttaaagaggtact

SEQ ID NO: 63299 - DNA, 25 bp, SARS Virus
tggacgcatttgtaaagaggtacta

SEQ ID NO: 63300 - DNA, 25 bp, SARS Virus
ggacgcatttgttaagaggtactac

SEQ ID NO: 63301 - DNA, 25 bp, SARS Virus
gacgcatttgtatagaggtactact

SEQ ID NO: 63302 - DNA, 25 bp, SARS Virus
acgcatttgtaatgaggtactacta

SEQ ID NO: 63303 - DNA, 25 bp, SARS Virus
cgcatttgtaaataggtactactaa

SEQ ID NO: 63304 - DNA, 25 bp, SARS Virus
gcatttgtaaagtggtactactaag

SEQ ID NO: 63305 - DNA, 25 bp, SARS Virus
catttgtaaagatgtactactaaga

SEQ ID NO: 63306 - DNA, 25 bp, SARS Virus
atttgtaaagagttactactaagaa

SEQ ID NO: 63307 - DNA, 25 bp, SARS Virus
tttgtaaagaggtactactaagaaa

SEQ ID NO: 63308 - DNA, 25 bp, SARS Virus
ttgtaaagaggttctactaagaaag

SEQ ID NO: 63309 - DNA, 25 bp, SARS Virus
tgtaaagaggtattactaagaaaga

SEQ ID NO: 63310 - DNA, 25 bp, SARS Virus
gtaaagaggtactactaagaaagac

SEQ ID NO: 63311 - DNA, 25 bp, SARS Virus
taaagaggtacttctaagaaagact

SEQ ID NO: 63312 - DNA, 25 bp, SARS Virus
aaagaggtactattaagaaagacta

SEQ ID NO: 63313 - DNA, 25 bp, SARS Virus
aagaggtactactaagaaagactac

SEQ ID NO: 63314 - DNA, 25 bp, SARS Virus
agaggtactacttagaaagactact

SEQ ID NO: 63315 - DNA, 25 bp, SARS Virus
gaggtactactatgaaagactacta

SEQ ID NO: 63316 - DNA, 25 bp, SARS Virus
aggtactactaataaagactactac

SEQ ID NO: 63317 - DNA, 25 bp, SARS Virus
ggtactactaagtaagactactacg

SEQ ID NO: 63318 - DNA, 25 bp, SARS Virus
gtactactaagatagactactacgg

SEQ ID NO: 63319 - DNA, 25 bp, SARS Virus
tactactaagaatgactactacggc

SEQ ID NO: 63320 - DNA, 25 bp, SARS Virus
actactaagaaatactactacggca

SEQ ID NO: 63321 - DNA, 25 bp, SARS Virus
ctactaagaaagtctactacggcaa

SEQ ID NO: 63322 - DNA, 25 bp, SARS Virus
tactaagaaagattactacggcaac

SEQ ID NO: 63323 - DNA, 25 bp, SARS Virus
actaagaaagactactacggcaaca

SEQ ID NO: 63324 - DNA, 25 bp, SARS Virus
ctaagaaagacttctacggcaacac

SEQ ID NO: 63325 - DNA, 25 bp, SARS Virus
taagaaagactattacggcaacaca

SEQ ID NO: 63326 - DNA, 25 bp, SARS Virus
aagaaagactactacggcaacacac

SEQ ID NO: 63327 - DNA, 25 bp, SARS Virus
agaaagactacttcggcaacacacg

SEQ ID NO: 63328 - DNA, 25 bp, SARS Virus
gaaagactactatggcaacacacga

SEQ ID NO: 63329 - DNA, 25 bp, SARS Virus
aaagactactactgcaacacacgat

SEQ ID NO: 63330 - DNA, 25 bp, SARS Virus
aagactactacgtcaacacacgata

SEQ ID NO: 63331 - DNA, 25 bp, SARS Virus
agactactacggtaacacacgatat

SEQ ID NO: 63332 - DNA, 25 bp, SARS Virus
gactactacggctacacacgatatt

SEQ ID NO: 63333 - DNA, 25 bp, SARS Virus
actactacggcatcacacgatattg

SEQ ID NO: 63334 - DNA, 25 bp, SARS Virus
ctactacggcaatacacgatattgt

SEQ ID NO: 63335 - DNA, 25 bp, SARS Virus
tactacggcaactcacgatattgtc

SEQ ID NO: 63336 - DNA, 25 bp, SARS Virus
actacggcaacatacgatattgtca

SEQ ID NO: 63337 - DNA, 25 bp, SARS Virus
ctacggcaacactcgatattgtcat

SEQ ID NO: 63338 - DNA, 25 bp, SARS Virus
tacggcaacacatgatattgtcatt

SEQ ID NO: 63339 - DNA, 25 bp, SARS Virus
acggcaacacactatattgtcattg

SEQ ID NO: 63340 - DNA, 25 bp, SARS Virus
cggcaacacacgttattgtcattga

SEQ ID NO: 63341 - DNA, 25 bp, SARS Virus
ggcaacacacgatattgtcattgat

SEQ ID NO: 63342 - DNA, 25 bp, SARS Virus
gcaacacacgattttgtcattgata

SEQ ID NO: 63343 - DNA, 25 bp, SARS Virus
caacacacgatattgtcattgatac

SEQ ID NO: 63344 - DNA, 25 bp, SARS Virus
aacacacgatattgtcattgatacg

SEQ ID NO: 63345 - DNA, 25 bp, SARS Virus
acacacgatattttcattgatacgc

SEQ ID NO: 63346 - DNA, 25 bp, SARS Virus
cacacgatattgtcattgatacgcc

SEQ ID NO: 63347 - DNA, 25 bp, SARS Virus
acacgatattgttattgatacgccg

SEQ ID NO: 63348 - DNA, 25 bp, SARS Virus
cacgatattgtctttgatacgccga

SEQ ID NO: 63349 - DNA, 25 bp, SARS Virus
acgatattgtcattgatacgccgag

SEQ ID NO: 63350 - DNA, 25 bp, SARS Virus
cgatattgtcattgatacgccgagt

SEQ ID NO: 63351 - DNA, 25 bp, SARS Virus
gatattgtcatttatacgccgagtt

SEQ ID NO: 63352 - DNA, 25 bp, SARS Virus
atattgtcattgttacgccgagttc

SEQ ID NO: 63353 - DNA, 25 bp, SARS Virus
tattgtcattgatacgccgagttcc

SEQ ID NO: 63354 - DNA, 25 bp, SARS Virus
attgtcattgattcgccgagttcca

SEQ ID NO: 63355 - DNA, 25 bp, SARS Virus
ttgtcattgatatgccgagttccaa

SEQ ID NO: 63356 - DNA, 25 bp, SARS Virus
tgtcattgatactccgagttccaaa

SEQ ID NO: 63357 - DNA, 25 bp, SARS Virus
gtcattgatacgtcgagttccaaat

SEQ ID NO: 63358 - DNA, 25 bp, SARS Virus
tcattgatacgctgagttccaaatc

SEQ ID NO: 63359 - DNA, 25 bp, SARS Virus
cattgatacgcctagttccaaatca

SEQ ID NO: 63360 - DNA, 25 bp, SARS Virus
attgatacgccgtgttccaaatcat

SEQ ID NO: 63361 - DNA, 25 bp, SARS Virus
ttgatacgccgatttccaaatcatc

SEQ ID NO: 63362 - DNA, 25 bp, SARS Virus
tgatacgccgagttccaaatcatcg

SEQ ID NO: 63363 - DNA, 25 bp, SARS Virus
gatacgccgagttccaaatcatcga

SEQ ID NO: 63364 - DNA, 25 bp, SARS Virus
atacgccgagtttcaaatcatcgat

SEQ ID NO: 63365 - DNA, 25 bp, SARS Virus
tacgccgagttctaaatcatcgatc

SEQ ID NO: 63366 - DNA, 25 bp, SARS Virus
acgccgagttcctaatcatcgatcg

SEQ ID NO: 63367 - DNA, 25 bp, SARS Virus
cgccgagttccatatcatcgatcgt

SEQ ID NO: 63368 - DNA, 25 bp, SARS Virus
gccgagttccaattcatcgatcgta

SEQ ID NO: 63369 - DNA, 25 bp, SARS Virus
ccgagttccaaatcatcgatcgtaa

SEQ ID NO: 63370 - DNA, 25 bp, SARS Virus
cgagttccaaattatcgatcgtaat

SEQ ID NO: 63371 - DNA, 25 bp, SARS Virus
gagttccaaatcttcgatcgtaatt

SEQ ID NO: 63372 - DNA, 25 bp, SARS Virus
agttccaaatcatcgatcgtaattc

SEQ ID NO: 63373 - DNA, 25 bp, SARS Virus
gttccaaatcattgatcgtaattct

SEQ ID NO: 63374 - DNA, 25 bp, SARS Virus
ttccaaatcatctatcgtaattctt

SEQ ID NO: 63375 - DNA, 25 bp, SARS Virus
tccaaatcatcgttcgtaattcttg

SEQ ID NO: 63376 - DNA, 25 bp, SARS Virus
ccaaatcatcgatcgtaattcttga

SEQ ID NO: 63377 - DNA, 25 bp, SARS Virus
caaatcatcgattgtaattcttgaa

SEQ ID NO: 63378 - DNA, 25 bp, SARS Virus
aaatcatcgatcttaattcttgaaa

SEQ ID NO: 63379 - DNA, 25 bp, SARS Virus
aatcatcgatcgtaattcttgaaat

SEQ ID NO: 63380 - DNA, 25 bp, SARS Virus
atcatcgatcgttattcttgaaatt

SEQ ID NO: 63381 - DNA, 25 bp, SARS Virus
tcatcgatcgtatttcttgaaattc

SEQ ID NO: 63382 - DNA, 25 bp, SARS Virus
catcgatcgtaattcttgaaattcc

SEQ ID NO: 63383 - DNA, 25 bp, SARS Virus
atcgatcgtaattcttgaaattccg

SEQ ID NO: 63384 - DNA, 25 bp, SARS Virus
tcgatcgtaatttttgaaattccgt

SEQ ID NO: 63385 - DNA, 25 bp, SARS Virus
cgatcgtaattcttgaaattccgtc

SEQ ID NO: 63386 - DNA, 25 bp, SARS Virus
gatcgtaattcttgaaattccgtca

SEQ ID NO: 63387 - DNA, 25 bp, SARS Virus
atcgtaattctttaaattccgtcaa

SEQ ID NO: 63388 - DNA, 25 bp, SARS Virus
tcgtaattcttgtaattccgtcaag

SEQ ID NO: 63389 - DNA, 25 bp, SARS Virus
cgtaattcttgatattccgtcaaga

SEQ ID NO: 63390 - DNA, 25 bp, SARS Virus
gtaattcttgaatttccgtcaagaa

SEQ ID NO: 63391 - DNA, 25 bp, SARS Virus
taattcttgaaattccgtcaagaaa

SEQ ID NO: 63392 - DNA, 25 bp, SARS Virus
aattcttgaaattccgtcaagaaat

SEQ ID NO: 63393 - DNA, 25 bp, SARS Virus
attcttgaaatttcgtcaagaaata

SEQ ID NO: 63394 - DNA, 25 bp, SARS Virus
ttcttgaaattctgtcaagaaataa

SEQ ID NO: 63395 - DNA, 25 bp, SARS Virus
tcttgaaattccttcaagaaataat

SEQ ID NO: 63396 - DNA, 25 bp, SARS Virus
cttgaaattccgtcaagaaataata

SEQ ID NO: 63397 - DNA, 25 bp, SARS Virus
ttgaaattccgttaagaaataatag

SEQ ID NO: 63398 - DNA, 25 bp, SARS Virus
tgaaattccgtctagaaataatagt

SEQ ID NO: 63399 - DNA, 25 bp, SARS Virus
gaaattccgtcatgaaataatagtt

SEQ ID NO: 63400 - DNA, 25 bp, SARS Virus
aaattccgtcaataaataatagttt

SEQ ID NO: 63401 - DNA, 25 bp, SARS Virus
aattccgtcaagtaataatagtttt

SEQ ID NO: 63402 - DNA, 25 bp, SARS Virus
attccgtcaagatataatagtttta

SEQ ID NO: 63403 - DNA, 25 bp, SARS Virus
ttccgtcaagaattaatagttttat

SEQ ID NO: 63404 - DNA, 25 bp, SARS Virus
tccgtcaagaaataatagttttatt

SEQ ID NO: 63405 - DNA, 25 bp, SARS Virus
ccgtcaagaaattatagttttatta

SEQ ID NO: 63406 - DNA, 25 bp, SARS Virus
cgtcaagaaatattagttttattac

SEQ ID NO: 63407 - DNA, 25 bp, SARS Virus
gtcaagaaataatagttttattaca

SEQ ID NO: 63408 - DNA, 25 bp, SARS Virus
tcaagaaataattgttttattacac

SEQ ID NO: 63409 - DNA, 25 bp, SARS Virus
caagaaataatatttttattacaca

SEQ ID NO: 63410 - DNA, 25 bp, SARS Virus
aagaaataatagttttattacacaa

SEQ ID NO: 63411 - DNA, 25 bp, SARS Virus
agaaataatagttttattacacaag

SEQ ID NO: 63412 - DNA, 25 bp, SARS Virus
gaaataatagttttattacacaagt

SEQ ID NO: 63413 - DNA, 25 bp, SARS Virus
aaataatagttttattacacaagta

SEQ ID NO: 63414 - DNA, 25 bp, SARS Virus
aataatagtttttttacacaagtac

SEQ ID NO: 63415 - DNA, 25 bp, SARS Virus
ataatagttttattacacaagtaca

SEQ ID NO: 63416 - DNA, 25 bp, SARS Virus
taatagttttattacacaagtacag

SEQ ID NO: 63417 - DNA, 25 bp, SARS Virus
aatagttttatttcacaagtacaga

SEQ ID NO: 63418 - DNA, 25 bp, SARS Virus
atagttttattatacaagtacagac

SEQ ID NO: 63419 - DNA, 25 bp, SARS Virus
tagttttattactcaagtacagact

SEQ ID NO: 63420 - DNA, 25 bp, SARS Virus
agttttattacataagtacagactc

SEQ ID NO: 63421 - DNA, 25 bp, SARS Virus
gttttattacactagtacagactcc

SEQ ID NO: 63422 - DNA, 25 bp, SARS Virus
ttttattacacatgtacagactccg

SEQ ID NO: 63423 - DNA, 25 bp, SARS Virus
tttattacacaattacagactccgt

SEQ ID NO: 63424 - DNA, 25 bp, SARS Virus
ttattacacaagtacagactccgtt

SEQ ID NO: 63425 - DNA, 25 bp, SARS Virus
tattacacaagttcagactccgttt

SEQ ID NO: 63426 - DNA, 25 bp, SARS Virus
attacacaagtatagactccgtttt

SEQ ID NO: 63427 - DNA, 25 bp, SARS Virus
ttacacaagtactgactccgtttta

SEQ ID NO: 63428 - DNA, 25 bp, SARS Virus
tacacaagtacatactccgttttac

SEQ ID NO: 63429 - DNA, 25 bp, SARS Virus
acacaagtacagtctccgttttaca

SEQ ID NO: 63430 - DNA, 25 bp, SARS Virus
cacaagtacagattccgttttacaa

SEQ ID NO: 63431 - DNA, 25 bp, SARS Virus
acaagtacagactccgttttacaac

SEQ ID NO: 63432 - DNA, 25 bp, SARS Virus
caagtacagacttcgttttacaacc

SEQ ID NO: 63433 - DNA, 25 bp, SARS Virus
aagtacagactctgttttacaacct

SEQ ID NO: 63434 - DNA, 25 bp, SARS Virus
agtacagactcctttttacaacctg

SEQ ID NO: 63435 - DNA, 25 bp, SARS Virus
gtacagactccgttttacaacctga

SEQ ID NO: 63436 - DNA, 25 bp, SARS Virus
tacagactccgttttacaacctgac

SEQ ID NO: 63437 - DNA, 25 bp, SARS Virus
acagactccgttttacaacctgact

SEQ ID NO: 63438 - DNA, 25 bp, SARS Virus
cagactccgttttacaacctgactc

SEQ ID NO: 63439 - DNA, 25 bp, SARS Virus
agactccgtttttcaacctgactct

SEQ ID NO: 63440 - DNA, 25 bp, SARS Virus
gactccgttttataacctgactctg

SEQ ID NO: 63441 - DNA, 25 bp, SARS Virus
actccgttttactacctgactctga

SEQ ID NO: 63442 - DNA, 25 bp, SARS Virus
ctccgttttacatcctgactctgac

SEQ ID NO: 63443 - DNA, 25 bp, SARS Virus
tccgttttacaatctgactctgact

SEQ ID NO: 63444 - DNA, 25 bp, SARS Virus
ccgttttacaacttgactctgactg

SEQ ID NO: 63445 - DNA, 25 bp, SARS Virus
cgttttacaacctgactctgactgg

SEQ ID NO: 63446 - DNA, 25 bp, SARS Virus
gttttacaaccttactctgactgga

SEQ ID NO: 63447 - DNA, 25 bp, SARS Virus
ttttacaacctgtctctgactggaa

SEQ ID NO: 63448 - DNA, 25 bp, SARS Virus
tttacaacctgattctgactggaat

SEQ ID NO: 63449 - DNA, 25 bp, SARS Virus
ttacaacctgactctgactggaatg

SEQ ID NO: 63450 - DNA, 25 bp, SARS Virus
tacaacctgactttgactggaatga

SEQ ID NO: 63451 - DNA, 25 bp, SARS Virus
acaacctgactctgactggaatgat

SEQ ID NO: 63452 - DNA, 25 bp, SARS Virus
caacctgactcttactggaatgatt

SEQ ID NO: 63453 - DNA, 25 bp, SARS Virus
aacctgactctgtctggaatgattt

SEQ ID NO: 63454 - DNA, 25 bp, SARS Virus
acctgactctgattggaatgatttc

SEQ ID NO: 63455 - DNA, 25 bp, SARS Virus
cctgactctgactggaatgatttcc

SEQ ID NO: 63456 - DNA, 25 bp, SARS Virus
ctgactctgacttgaatgatttcct

SEQ ID NO: 63457 - DNA, 25 bp, SARS Virus
tgactctgactgtaatgatttcctg

SEQ ID NO: 63458 - DNA, 25 bp, SARS Virus
gactctgactggtatgatttcctgg

SEQ ID NO: 63459 - DNA, 25 bp, SARS Virus
actctgactggattgatttcctgga

SEQ ID NO: 63460 - DNA, 25 bp, SARS Virus
ctctgactggaatgatttcctggag

SEQ ID NO: 63461 - DNA, 25 bp, SARS Virus
tctgactggaattatttcctggagt

SEQ ID NO: 63462 - DNA, 25 bp, SARS Virus
ctgactggaatgttttcctggagtg

SEQ ID NO: 63463 - DNA, 25 bp, SARS Virus
tgactggaatgatttcctggagtgc

SEQ ID NO: 63464 - DNA, 25 bp, SARS Virus
gactggaatgatttcctggagtgct

SEQ ID NO: 63465 - DNA, 25 bp, SARS Virus
actggaatgatttcctggagtgctt

SEQ ID NO: 63466 - DNA, 25 bp, SARS Virus
ctggaatgattttctggagtgctta

SEQ ID NO: 63467 - DNA, 25 bp, SARS Virus
tggaatgatttcttggagtgcttaa

SEQ ID NO: 63468 - DNA, 25 bp, SARS Virus
ggaatgatttcctggagtgcttaaa

SEQ ID NO: 63469 - DNA, 25 bp, SARS Virus
gaatgatttccttgagtgcttaaaa

SEQ ID NO: 63470 - DNA, 25 bp, SARS Virus
aatgatttcctgtagtgcttaaaac

SEQ ID NO: 63471 - DNA, 25 bp, SARS Virus
atgatttcctggtgtgcttaaaacg

SEQ ID NO: 63472 - DNA, 25 bp, SARS Virus
tgatttcctggattgcttaaaacga

SEQ ID NO: 63473 - DNA, 25 bp, SARS Virus
gatttcctggagtgcttaaaacgag

SEQ ID NO: 63474 - DNA, 25 bp, SARS Virus
atttcctggagttcttaaaacgagt

SEQ ID NO: 63475 - DNA, 25 bp, SARS Virus
tttcctggagtgtttaaaacgagtg

SEQ ID NO: 63476 - DNA, 25 bp, SARS Virus
ttcctggagtgcttaaaacgagtgt

SEQ ID NO: 63477 - DNA, 25 bp, SARS Virus
tcctggagtgcttaaaacgagtgtc

SEQ ID NO: 63478 - DNA, 25 bp, SARS Virus
cctggagtgctttaaacgagtgtcg

SEQ ID NO: 63479 - DNA, 25 bp, SARS Virus
ctggagtgcttataacgagtgtcgt

SEQ ID NO: 63480 - DNA, 25 bp, SARS Virus
tggagtgcttaatacgagtgtcgta

SEQ ID NO: 63481 - DNA, 25 bp, SARS Virus
ggagtgcttaaatcgagtgtcgtat

SEQ ID NO: 63482 - DNA, 25 bp, SARS Virus
gagtgcttaaaatgagtgtcgtatg

SEQ ID NO: 63483 - DNA, 25 bp, SARS Virus
agtgcttaaaactagtgtcgtatgt

SEQ ID NO: 63484 - DNA, 25 bp, SARS Virus
gtgcttaaaacgtgtgtcgtatgtt

SEQ ID NO: 63485 - DNA, 25 bp, SARS Virus
tgcttaaaacgattgtcgtatgtta

SEQ ID NO: 63486 - DNA, 25 bp, SARS Virus
gcttaaaacgagtgtcgtatgttac

SEQ ID NO: 63487 - DNA, 25 bp, SARS Virus
cttaaaacgagtttcgtatgttacg

SEQ ID NO: 63488 - DNA, 25 bp, SARS Virus
ttaaaacgagtgtcgtatgttacga

SEQ ID NO: 63489 - DNA, 25 bp, SARS Virus
taaaacgagtgttgtatgttacgat

SEQ ID NO: 63490 - DNA, 25 bp, SARS Virus
aaaacgagtgtcttatgttacgatc

SEQ ID NO: 63491 - DNA, 25 bp, SARS Virus
aaacgagtgtcgtatgttacgatca

SEQ ID NO: 63492 - DNA, 25 bp, SARS Virus
aacgagtgtcgtttgttacgatcaa

SEQ ID NO: 63493 - DNA, 25 bp, SARS Virus
acgagtgtcgtatgttacgatcaat

SEQ ID NO: 63494 - DNA, 25 bp, SARS Virus
cgagtgtcgtattttacgatcaatt

SEQ ID NO: 63495 - DNA, 25 bp, SARS Virus
gagtgtcgtatgttacgatcaattt

SEQ ID NO: 63496 - DNA, 25 bp, SARS Virus
agtgtcgtatgttacgatcaatttg

SEQ ID NO: 63497 - DNA, 25 bp, SARS Virus
gtgtcgtatgtttcgatcaatttgt

SEQ ID NO: 63498 - DNA, 25 bp, SARS Virus
tgtcgtatgttatgatcaatttgtt

SEQ ID NO: 63499 - DNA, 25 bp, SARS Virus
gtcgtatgttactatcaatttgttc

SEQ ID NO: 63500 - DNA, 25 bp, SARS Virus
tcgtatgttacgttcaatttgttcc

SEQ ID NO: 63501 - DNA, 25 bp, SARS Virus
cgtatgttacgatcaatttgttcct

SEQ ID NO: 63502 - DNA, 25 bp, SARS Virus
gtatgttacgattaatttgttcctc

SEQ ID NO: 63503 - DNA, 25 bp, SARS Virus
tatgttacgatctatttgttcctct

SEQ ID NO: 63504 - DNA, 25 bp, SARS Virus
atgttacgatcattttgttcctcta

SEQ ID NO: 63505 - DNA, 25 bp, SARS Virus
tgttacgatcaatttgttcctctac

SEQ ID NO: 63506 - DNA, 25 bp, SARS Virus
gttacgatcaatttgttcctctact

SEQ ID NO: 63507 - DNA, 25 bp, SARS Virus
ttacgatcaatttgttcctctacta

SEQ ID NO: 63508 - DNA, 25 bp, SARS Virus
tacgatcaattttttcctctactaa

SEQ ID NO: 63509 - DNA, 25 bp, SARS Virus
acgatcaatttgttcctctactaat

SEQ ID NO: 63510 - DNA, 25 bp, SARS Virus
cgatcaatttgttcctctactaatg

SEQ ID NO: 63511 - DNA, 25 bp, SARS Virus
gatcaatttgtttctctactaatgc

SEQ ID NO: 63512 - DNA, 25 bp, SARS Virus
atcaatttgttcttctactaatgca

SEQ ID NO: 63513 - DNA, 25 bp, SARS Virus
tcaatttgttcctctactaatgcac

SEQ ID NO: 63514 - DNA, 25 bp, SARS Virus
caatttgttcctttactaatgcaca

SEQ ID NO: 63515 - DNA, 25 bp, SARS Virus
aatttgttcctctactaatgcacat

SEQ ID NO: 63516 - DNA, 25 bp, SARS Virus
atttgttcctcttctaatgcacatg

SEQ ID NO: 63517 - DNA, 25 bp, SARS Virus
tttgttcctctattaatgcacatgg

SEQ ID NO: 63518 - DNA, 25 bp, SARS Virus
ttgttcctctactaatgcacatgga

SEQ ID NO: 63519 - DNA, 25 bp, SARS Virus
tgttcctctacttatgcacatggac

SEQ ID NO: 63520 - DNA, 25 bp, SARS Virus
gttcctctactattgcacatggacg

SEQ ID NO: 63521 - DNA, 25 bp, SARS Virus
ttcctctactaatgcacatggacgg

SEQ ID NO: 63522 - DNA, 25 bp, SARS Virus
tcctctactaattcacatggacgga

SEQ ID NO: 63523 - DNA, 25 bp, SARS Virus
cctctactaatgtacatggacggaa

SEQ ID NO: 63524 - DNA, 25 bp, SARS Virus
ctctactaatgctcatggacggaat

SEQ ID NO: 63525 - DNA, 25 bp, SARS Virus
tctactaatgcatatggacggaatg

SEQ ID NO: 63526 - DNA, 25 bp, SARS Virus
ctactaatgcacttggacggaatgg

SEQ ID NO: 63527 - DNA, 25 bp, SARS Virus
tactaatgcacatggacggaatggg

SEQ ID NO: 63528 - DNA, 25 bp, SARS Virus
actaatgcacattgacggaatgggt

SEQ ID NO: 63529 - DNA, 25 bp, SARS Virus
ctaatgcacatgtacggaatgggtc

SEQ ID NO: 63530 - DNA, 25 bp, SARS Virus
taatgcacatggtcggaatgggtct

SEQ ID NO: 63531 - DNA, 25 bp, SARS Virus
aatgcacatggatggaatgggtcta

SEQ ID NO: 63532 - DNA, 25 bp, SARS Virus
atgcacatggactgaatgggtctag

SEQ ID NO: 63533 - DNA, 25 bp, SARS Virus
tgcacatggacgtaatgggtctagg

SEQ ID NO: 63534 - DNA, 25 bp, SARS Virus
gcacatggacggtatgggtctaggt

SEQ ID NO: 63535 - DNA, 25 bp, SARS Virus
cacatggacggattgggtctaggta

SEQ ID NO: 63536 - DNA, 25 bp, SARS Virus
acatggacggaatgggtctaggtag

SEQ ID NO: 63537 - DNA, 25 bp, SARS Virus
catggacggaattggtctaggtagt

SEQ ID NO: 63538 - DNA, 25 bp, SARS Virus
atggacggaatgtgtctaggtagtt

SEQ ID NO: 63539 - DNA, 25 bp, SARS Virus
tggacggaatggttctaggtagttc

SEQ ID NO: 63540 - DNA, 25 bp, SARS Virus
ggacggaatgggtctaggtagttct

SEQ ID NO: 63541 - DNA, 25 bp, SARS Virus
gacggaatgggtttaggtagttctt

SEQ ID NO: 63542 - DNA, 25 bp, SARS Virus
acggaatgggtctaggtagttctta

SEQ ID NO: 63543 - DNA, 25 bp, SARS Virus
cggaatgggtcttggtagttcttat

SEQ ID NO: 63544 - DNA, 25 bp, SARS Virus
ggaatgggtctatgtagttcttata

SEQ ID NO: 63545 - DNA, 25 bp, SARS Virus
gaatgggtctagttagttcttataa

SEQ ID NO: 63546 - DNA, 25 bp, SARS Virus
aatgggtctaggtagttcttataat

SEQ ID NO: 63547 - DNA, 25 bp, SARS Virus
atgggtctaggttgttcttataatc

SEQ ID NO: 63548 - DNA, 25 bp, SARS Virus
tgggtctaggtatttcttataatcc

SEQ ID NO: 63549 - DNA, 25 bp, SARS Virus
gggtctaggtagttcttataatccg

SEQ ID NO: 63550 - DNA, 25 bp, SARS Virus
ggtctaggtagttcttataatccgc

SEQ ID NO: 63551 - DNA, 25 bp, SARS Virus
gtctaggtagtttttataatccgcg

SEQ ID NO: 63552 - DNA, 25 bp, SARS Virus
tctaggtagttcttataatccgcgt

SEQ ID NO: 63553 - DNA, 25 bp, SARS Virus
ctaggtagttcttataatccgcgtc

SEQ ID NO: 63554 - DNA, 25 bp, SARS Virus
taggtagttcttttaatccgcgtcc

SEQ ID NO: 63555 - DNA, 25 bp, SARS Virus
aggtagttcttataatccgcgtccg

SEQ ID NO: 63556 - DNA, 25 bp, SARS Virus
ggtagttcttattatccgcgtccga

SEQ ID NO: 63557 - DNA, 25 bp, SARS Virus
gtagttcttatattccgcgtccgac

SEQ ID NO: 63558 - DNA, 25 bp, SARS Virus
tagttcttataatccgcgtccgaca

SEQ ID NO: 63559 - DNA, 25 bp, SARS Virus
agttcttataattcgcgtccgacaa

SEQ ID NO: 63560 - DNA, 25 bp, SARS Virus
gttcttataatctgcgtccgacaaa

SEQ ID NO: 63561 - DNA, 25 bp, SARS Virus
ttcttataatcctcgtccgacaaaa

SEQ ID NO: 63562 - DNA, 25 bp, SARS Virus
tcttataatccgtgtccgacaaaac

SEQ ID NO: 63563 - DNA, 25 bp, SARS Virus
cttataatccgcttccgacaaaaca

SEQ ID NO: 63564 - DNA, 25 bp, SARS Virus
ttataatccgcgtccgacaaaacag

SEQ ID NO: 63565 - DNA, 25 bp, SARS Virus
tataatccgcgttcgacaaaacagc

SEQ ID NO: 63566 - DNA, 25 bp, SARS Virus
ataatccgcgtctgacaaaacagct

SEQ ID NO: 63567 - DNA, 25 bp, SARS Virus
taatccgcgtcctacaaaacagcta

SEQ ID NO: 63568 - DNA, 25 bp, SARS Virus
aatccgcgtccgtcaaaacagctac

SEQ ID NO: 63569 - DNA, 25 bp, SARS Virus
atccgcgtccgaaaaaacagctact

SEQ ID NO: 63570 - DNA, 25 bp, SARS Virus
tccgcgtccgacaaaacagctacta

SEQ ID NO: 63571 - DNA, 25 bp, SARS Virus
ccgcgtccgacaaaacagctactat

SEQ ID NO: 63572 - DNA, 25 bp, SARS Virus
cgcgtccgacaaaacagctactata

SEQ ID NO: 63573 - DNA, 25 bp, SARS Virus
gcgtccgacaaaacagctactataa

SEQ ID NO: 63574 - DNA, 25 bp, SARS Virus
cgtccgacaaaaaagctactataac

SEQ ID NO: 63575 - DNA, 25 bp, SARS Virus
gtccgacaaaacagctactataaca

SEQ ID NO: 63576 - DNA, 25 bp, SARS Virus
tccgacaaaacaactactataacag

SEQ ID NO: 63577 - DNA, 25 bp, SARS Virus
ccgacaaaacagatactataacagt

SEQ ID NO: 63578 - DNA, 25 bp, SARS Virus
cgacaaaacagcaactataacagtt

SEQ ID NO: 63579 - DNA, 25 bp, SARS Virus
gacaaaacagctactataacagttt

SEQ ID NO: 63580 - DNA, 25 bp, SARS Virus
acaaaacagctaatataacagtttt

SEQ ID NO: 63581 - DNA, 25 bp, SARS Virus
caaaacagctacaataacagttttg

SEQ ID NO: 63582 - DNA, 25 bp, SARS Virus
aaaacagctactataacagttttgt

SEQ ID NO: 63583 - DNA, 25 bp, SARS Virus
aaacagctactaaaacagttttgtc

SEQ ID NO: 63584 - DNA, 25 bp, SARS Virus
aacagctactataacagttttgtct

SEQ ID NO: 63585 - DNA, 25 bp, SARS Virus
acagctactataacagttttgtcta

SEQ ID NO: 63586 - DNA, 25 bp, SARS Virus
cagctactataaaagttttgtctac

SEQ ID NO: 63587 - DNA, 25 bp, SARS Virus
agctactataacagttttgtctacc

SEQ ID NO: 63588 - DNA, 25 bp, SARS Virus
gctactataacaattttgtctacca

SEQ ID NO: 63589 - DNA, 25 bp, SARS Virus
ctactataacagatttgtctaccat

SEQ ID NO: 63590 - DNA, 25 bp, SARS Virus
tactataacagtattgtctaccatg

SEQ ID NO: 63591 - DNA, 25 bp, SARS Virus
actataacagttatgtctaccatgt

SEQ ID NO: 63592 - DNA, 25 bp, SARS Virus
ctataacagtttagtctaccatgtg

SEQ ID NO: 63593 - DNA, 25 bp, SARS Virus
tataacagttttatctaccatgtga

SEQ ID NO: 63594 - DNA, 25 bp, SARS Virus
ataacagttttgactaccatgtgaa

SEQ ID NO: 63595 - DNA, 25 bp, SARS Virus
taacagttttgtataccatgtgaat

SEQ ID NO: 63596 - DNA, 25 bp, SARS Virus
aacagttttgtcaaccatgtgaata

SEQ ID NO: 63597 - DNA, 25 bp, SARS Virus
acagttttgtctaccatgtgaatac

SEQ ID NO: 63598 - DNA, 25 bp, SARS Virus
cagttttgtctaacatgtgaatact

SEQ ID NO: 63599 - DNA, 25 bp, SARS Virus
agttttgtctacaatgtgaatacta

SEQ ID NO: 63600 - DNA, 25 bp, SARS Virus
gttttgtctaccatgtgaatactaa

SEQ ID NO: 63601 - DNA, 25 bp, SARS Virus
ttttgtctaccaagtgaatactaac

SEQ ID NO: 63602 - DNA, 25 bp, SARS Virus
tttgtctaccatatgaatactaact

SEQ ID NO: 63603 - DNA, 25 bp, SARS Virus
ttgtctaccatgagaatactaactt

SEQ ID NO: 63604 - DNA, 25 bp, SARS Virus
tgtctaccatgtaaatactaacttt

SEQ ID NO: 63605 - DNA, 25 bp, SARS Virus
gtctaccatgtgaatactaactttc

SEQ ID NO: 63606 - DNA, 25 bp, SARS Virus
tctaccatgtgaatactaactttcc

SEQ ID NO: 63607 - DNA, 25 bp, SARS Virus
ctaccatgtgaaaactaactttcca

SEQ ID NO: 63608 - DNA, 25 bp, SARS Virus
taccatgtgaatactaactttccaa

SEQ ID NO: 63609 - DNA, 25 bp, SARS Virus
accatgtgaataataactttccaag

SEQ ID NO: 63610 - DNA, 25 bp, SARS Virus
ccatgtgaatacaaactttccaagc

SEQ ID NO: 63611 - DNA, 25 bp, SARS Virus
catgtgaatactaactttccaagca

SEQ ID NO: 63612 - DNA, 25 bp, SARS Virus
atgtgaatactaactttccaagcac

SEQ ID NO: 63613 - DNA, 25 bp, SARS Virus
tgtgaatactaaatttccaagcaca

SEQ ID NO: 63614 - DNA, 25 bp, SARS Virus
gtgaatactaacattccaagcacag

SEQ ID NO: 63615 - DNA, 25 bp, SARS Virus
tgaatactaactatccaagcacagt

SEQ ID NO: 63616 - DNA, 25 bp, SARS Virus
gaatactaacttaccaagcacagtg

SEQ ID NO: 63617 - DNA, 25 bp, SARS Virus
aatactaactttacaagcacagtga

SEQ ID NO: 63618 - DNA, 25 bp, SARS Virus
atactaactttcaaagcacagtgac

SEQ ID NO: 63619 - DNA, 25 bp, SARS Virus
tactaactttccaagcacagtgacc

SEQ ID NO: 63620 - DNA, 25 bp, SARS Virus
actaactttccaagcacagtgaccg

SEQ ID NO: 63621 - DNA, 25 bp, SARS Virus
ctaactttccaaacacagtgaccga

SEQ ID NO: 63622 - DNA, 25 bp, SARS Virus
taactttccaagaacagtgaccgat

SEQ ID NO: 63623 - DNA, 25 bp, SARS Virus
aactttccaagcacagtgaccgata

SEQ ID NO: 63624 - DNA, 25 bp, SARS Virus
actttccaagcaaagtgaccgataa

SEQ ID NO: 63625 - DNA, 25 bp, SARS Virus
ctttccaagcacagtgaccgataac

SEQ ID NO: 63626 - DNA, 25 bp, SARS Virus
tttccaagcacaatgaccgataact

SEQ ID NO: 63627 - DNA, 25 bp, SARS Virus
ttccaagcacagagaccgataacta

SEQ ID NO: 63628 - DNA, 25 bp, SARS Virus
tccaagcacagtaaccgataactac

SEQ ID NO: 63629 - DNA, 25 bp, SARS Virus
ccaagcacagtgaccgataactacg

SEQ ID NO: 63630 - DNA, 25 bp, SARS Virus
caagcacagtgaacgataactacga

SEQ ID NO: 63631 - DNA, 25 bp, SARS Virus
aagcacagtgacagataactacgaa

SEQ ID NO: 63632 - DNA, 25 bp, SARS Virus
agcacagtgaccaataactacgaat

SEQ ID NO: 63633 - DNA, 25 bp, SARS Virus
gcacagtgaccgataactacgaatg

SEQ ID NO: 63634 - DNA, 25 bp, SARS Virus
cacagtgaccgaaaactacgaatgg

SEQ ID NO: 63635 - DNA, 25 bp, SARS Virus
acagtgaccgataactacgaatggg

SEQ ID NO: 63636 - DNA, 25 bp, SARS Virus
cagtgaccgataactacgaatgggt

SEQ ID NO: 63637 - DNA, 25 bp, SARS Virus
agtgaccgataaatacgaatgggtg

SEQ ID NO: 63638 - DNA, 25 bp, SARS Virus
gtgaccgataacaacgaatgggtga

SEQ ID NO: 63639 - DNA, 25 bp, SARS Virus
tgaccgataactacgaatgggtgaa

SEQ ID NO: 63640 - DNA, 25 bp, SARS Virus
gaccgataactaagaatgggtgaat

SEQ ID NO: 63641 - DNA, 25 bp, SARS Virus
accgataactacaaatgggtgaatg

SEQ ID NO: 63642 - DNA, 25 bp, SARS Virus
ccgataactacgaatgggtgaatgt

SEQ ID NO: 63643 - DNA, 25 bp, SARS Virus
cgataactacgaatgggtgaatgtt

SEQ ID NO: 63644 - DNA, 25 bp, SARS Virus
gataactacgaaagggtgaatgttt

SEQ ID NO: 63645 - DNA, 25 bp, SARS Virus
ataactacgaataggtgaatgtttt

SEQ ID NO: 63646 - DNA, 25 bp, SARS Virus
taactacgaatgagtgaatgttttg

SEQ ID NO: 63647 - DNA, 25 bp, SARS Virus
aactacgaatggatgaatgttttgt

SEQ ID NO: 63648 - DNA, 25 bp, SARS Virus
actacgaatgggagaatgttttgta

SEQ ID NO: 63649 - DNA, 25 bp, SARS Virus
ctacgaatgggtaaatgttttgtag

SEQ ID NO: 63650 - DNA, 25 bp, SARS Virus
tacgaatgggtgaatgttttgtagg

SEQ ID NO: 63651 - DNA, 25 bp, SARS Virus
acgaatgggtgaatgttttgtagga

SEQ ID NO: 63652 - DNA, 25 bp, SARS Virus
cgaatgggtgaaagttttgtaggat

SEQ ID NO: 63653 - DNA, 25 bp, SARS Virus
gaatgggtgaatattttgtaggatt

SEQ ID NO: 63654 - DNA, 25 bp, SARS Virus
aatgggtgaatgatttgtaggatta

SEQ ID NO: 63655 - DNA, 25 bp, SARS Virus
atgggtgaatgtattgtaggattag

SEQ ID NO: 63656 - DNA, 25 bp, SARS Virus
tgggtgaatgttatgtaggattagt

SEQ ID NO: 63657 - DNA, 25 bp, SARS Virus
gggtgaatgtttagtaggattagtc

SEQ ID NO: 63658 - DNA, 25 bp, SARS Virus
ggtgaatgttttataggattagtcc

SEQ ID NO: 63659 - DNA, 25 bp, SARS Virus
gtgaatgttttgaaggattagtcct

SEQ ID NO: 63660 - DNA, 25 bp, SARS Virus
tgaatgttttgtaggattagtcctc

SEQ ID NO: 63661 - DNA, 25 bp, SARS Virus
gaatgttttgtaagattagtcctca

SEQ ID NO: 63662 - DNA, 25 bp, SARS Virus
aatgttttgtagaattagtcctcat

SEQ ID NO: 63663 - DNA, 25 bp, SARS Virus
atgttttgtaggattagtcctcata

SEQ ID NO: 63664 - DNA, 25 bp, SARS Virus
tgttttgtaggaatagtcctcatac

SEQ ID NO: 63665 - DNA, 25 bp, SARS Virus
gttttgtaggataagtcctcatacg

SEQ ID NO: 63666 - DNA, 25 bp, SARS Virus
ttttgtaggattagtcctcatacga

SEQ ID NO: 63667 - DNA, 25 bp, SARS Virus
tttgtaggattaatcctcatacgac

SEQ ID NO: 63668 - DNA, 25 bp, SARS Virus
ttgtaggattagacctcatacgact

SEQ ID NO: 63669 - DNA, 25 bp, SARS Virus
tgtaggattagtactcatacgacta

SEQ ID NO: 63670 - DNA, 25 bp, SARS Virus
gtaggattagtcatcatacgactac

SEQ ID NO: 63671 - DNA, 25 bp, SARS Virus
taggattagtccacatacgactaca

SEQ ID NO: 63672 - DNA, 25 bp, SARS Virus
aggattagtcctaatacgactacag

SEQ ID NO: 63673 - DNA, 25 bp, SARS Virus
ggattagtcctcatacgactacaga

SEQ ID NO: 63674 - DNA, 25 bp, SARS Virus
gattagtcctcaaacgactacagaa

SEQ ID NO: 63675 - DNA, 25 bp, SARS Virus
attagtcctcatacgactacagaaa

SEQ ID NO: 63676 - DNA, 25 bp, SARS Virus
ttagtcctcataagactacagaaag

SEQ ID NO: 63677 - DNA, 25 bp, SARS Virus
tagtcctcatacaactacagaaagt

SEQ ID NO: 63678 - DNA, 25 bp, SARS Virus
agtcctcatacgactacagaaagtg

SEQ ID NO: 63679 - DNA, 25 bp, SARS Virus
gtcctcatacgaatacagaaagtga

SEQ ID NO: 63680 - DNA, 25 bp, SARS Virus
tcctcatacgacaacagaaagtgaa

SEQ ID NO: 63681 - DNA, 25 bp, SARS Virus
cctcatacgactacagaaagtgaac

SEQ ID NO: 63682 - DNA, 25 bp, SARS Virus
ctcatacgactaaagaaagtgaaca

SEQ ID NO: 63683 - DNA, 25 bp, SARS Virus
tcatacgactacagaaagtgaacat

SEQ ID NO: 63684 - DNA, 25 bp, SARS Virus
catacgactacaaaaagtgaacata

SEQ ID NO: 63685 - DNA, 25 bp, SARS Virus
atacgactacagaaagtgaacataa

SEQ ID NO: 63686 - DNA, 25 bp, SARS Virus
tacgactacagaaagtgaacataaa

SEQ ID NO: 63687 - DNA, 25 bp, SARS Virus
acgactacagaaagtgaacataaat

SEQ ID NO: 63688 - DNA, 25 bp, SARS Virus
cgactacagaaaatgaacataaatg

SEQ ID NO: 63689 - DNA, 25 bp, SARS Virus
gactacagaaagagaacataaatgt

SEQ ID NO: 63690 - DNA, 25 bp, SARS Virus
actacagaaagtaaacataaatgtt

SEQ ID NO: 63691 - DNA, 25 bp, SARS Virus
ctacagaaagtgaacataaatgtta

SEQ ID NO: 63692 - DNA, 25 bp, SARS Virus
tacagaaagtgaacataaatgttat

SEQ ID NO: 63693 - DNA, 25 bp, SARS Virus
acagaaagtgaaaataaatgttatg

SEQ ID NO: 63694 - DNA, 25 bp, SARS Virus
cagaaagtgaacataaatgttatgt

SEQ ID NO: 63695 - DNA, 25 bp, SARS Virus
agaaagtgaacaaaaatgttatgta

SEQ ID NO: 63696 - DNA, 25 bp, SARS Virus
gaaagtgaacataaatgttatgtaa

SEQ ID NO: 63697 - DNA, 25 bp, SARS Virus
aaagtgaacataaatgttatgtaat

SEQ ID NO: 63698 - DNA, 25 bp, SARS Virus
aagtgaacataaatgttatgtaatc

SEQ ID NO: 63699 - DNA, 25 bp, SARS Virus
agtgaacataaaagttatgtaatct

SEQ ID NO: 63700 - DNA, 25 bp, SARS Virus
gtgaacataaatattatgtaatctt

SEQ ID NO: 63701 - DNA, 25 bp, SARS Virus
tgaacataaatgatatgtaatcttt

SEQ ID NO: 63702 - DNA, 25 bp, SARS Virus
gaacataaatgtaatgtaatctttc

SEQ ID NO: 63703 - DNA, 25 bp, SARS Virus
aacataaatgttatgtaatctttca

SEQ ID NO: 63704 - DNA, 25 bp, SARS Virus
acataaatgttaagtaatctttcaa

SEQ ID NO: 63705 - DNA, 25 bp, SARS Virus
cataaatgttatataatctttcaat

SEQ ID NO: 63706 - DNA, 25 bp, SARS Virus
ataaatgttatgaaatctttcaatg

SEQ ID NO: 63707 - DNA, 25 bp, SARS Virus
taaatgttatgtaatctttcaatgt

SEQ ID NO: 63708 - DNA, 25 bp, SARS Virus
aaatgttatgtaatctttcaatgta

SEQ ID NO: 63709 - DNA, 25 bp, SARS Virus
aatgttatgtaaactttcaatgtac

SEQ ID NO: 63710 - DNA, 25 bp, SARS Virus
atgttatgtaatatttcaatgtact

SEQ ID NO: 63711 - DNA, 25 bp, SARS Virus
tgttatgtaatcattcaatgtacta

SEQ ID NO: 63712 - DNA, 25 bp, SARS Virus
gttatgtaatctatcaatgtactac

SEQ ID NO: 63713 - DNA, 25 bp, SARS Virus
ttatgtaatcttacaatgtactact

SEQ ID NO: 63714 - DNA, 25 bp, SARS Virus
tatgtaatctttaaatgtactactc

SEQ ID NO: 63715 - DNA, 25 bp, SARS Virus
atgtaatctttcaatgtactactcg

SEQ ID NO: 63716 - DNA, 25 bp, SARS Virus
tgtaatctttcaatgtactactcga

SEQ ID NO: 63717 - DNA, 25 bp, SARS Virus
gtaatctttcaaagtactactcgaa

SEQ ID NO: 63718 - DNA, 25 bp, SARS Virus
taatctttcaatatactactcgaat

SEQ ID NO: 63719 - DNA, 25 bp, SARS Virus
aatctttcaatgaactactcgaatg

SEQ ID NO: 63720 - DNA, 25 bp, SARS Virus
atctttcaatgtactactcgaatga

SEQ ID NO: 63721 - DNA, 25 bp, SARS Virus
tctttcaatgtaatactcgaatgac

SEQ ID NO: 63722 - DNA, 25 bp, SARS Virus
ctttcaatgtacaactcgaatgacc

SEQ ID NO: 63723 - DNA, 25 bp, SARS Virus
tttcaatgtactactcgaatgaccg

SEQ ID NO: 63724 - DNA, 25 bp, SARS Virus
ttcaatgtactaatcgaatgaccgg

SEQ ID NO: 63725 - DNA, 25 bp, SARS Virus
tcaatgtactacacgaatgaccggt

SEQ ID NO: 63726 - DNA, 25 bp, SARS Virus
caatgtactactagaatgaccggtg

SEQ ID NO: 63727 - DNA, 25 bp, SARS Virus
aatgtactactcaaatgaccggtgt

SEQ ID NO: 63728 - DNA, 25 bp, SARS Virus
atgtactactcgaatgaccggtgta

SEQ ID NO: 63729 - DNA, 25 bp, SARS Virus
tgtactactcgaatgaccggtgtac

SEQ ID NO: 63730 - DNA, 25 bp, SARS Virus
gtactactcgaaagaccggtgtaca

SEQ ID NO: 63731 - DNA, 25 bp, SARS Virus
tactactcgaataaccggtgtacaa

SEQ ID NO: 63732 - DNA, 25 bp, SARS Virus
actactcgaatgaccggtgtacaac

SEQ ID NO: 63733 - DNA, 25 bp, SARS Virus
ctactcgaatgaacggtgtacaacc

SEQ ID NO: 63734 - DNA, 25 bp, SARS Virus
tactcgaatgacaggtgtacaacct

SEQ ID NO: 63735 - DNA, 25 bp, SARS Virus
actcgaatgaccagtgtacaacctg

SEQ ID NO: 63736 - DNA, 25 bp, SARS Virus
ctcgaatgaccgatgtacaacctgt

SEQ ID NO: 63737 - DNA, 25 bp, SARS Virus
tcgaatgaccggagtacaacctgta

SEQ ID NO: 63738 - DNA, 25 bp, SARS Virus
cgaatgaccggtatacaacctgtac

SEQ ID NO: 63739 - DNA, 25 bp, SARS Virus
gaatgaccggtgaacaacctgtaca

SEQ ID NO: 63740 - DNA, 25 bp, SARS Virus
aatgaccggtgtacaacctgtacat

SEQ ID NO: 63741 - DNA, 25 bp, SARS Virus
atgaccggtgtaaaacctgtacata

SEQ ID NO: 63742 - DNA, 25 bp, SARS Virus
tgaccggtgtacaacctgtacataa

SEQ ID NO: 63743 - DNA, 25 bp, SARS Virus
gaccggtgtacaacctgtacataag

SEQ ID NO: 63744 - DNA, 25 bp, SARS Virus
accggtgtacaaactgtacataagg

SEQ ID NO: 63745 - DNA, 25 bp, SARS Virus
ccggtgtacaacatgtacataaggc

SEQ ID NO: 63746 - DNA, 25 bp, SARS Virus
cggtgtacaaccagtacataaggca

SEQ ID NO: 63747 - DNA, 25 bp, SARS Virus
ggtgtacaacctatacataaggcat

SEQ ID NO: 63748 - DNA, 25 bp, SARS Virus
gtgtacaacctgaacataaggcatt

SEQ ID NO: 63749 - DNA, 25 bp, SARS Virus
tgtacaacctgtacataaggcatta

SEQ ID NO: 63750 - DNA, 25 bp, SARS Virus
gtacaacctgtaaataaggcattac

SEQ ID NO: 63751 - DNA, 25 bp, SARS Virus
tacaacctgtacataaggcattacg

SEQ ID NO: 63752 - DNA, 25 bp, SARS Virus
acaacctgtacaaaaggcattacga

SEQ ID NO: 63753 - DNA, 25 bp, SARS Virus
caacctgtacataaggcattacgat

SEQ ID NO: 63754 - DNA, 25 bp, SARS Virus
aacctgtacataaggcattacgatt

SEQ ID NO: 63755 - DNA, 25 bp, SARS Virus
acctgtacataaagcattacgattg

SEQ ID NO: 63756 - DNA, 25 bp, SARS Virus
cctgtacataagacattacgattga

SEQ ID NO: 63757 - DNA, 25 bp, SARS Virus
ctgtacataaggaattacgattgat

SEQ ID NO: 63758 - DNA, 25 bp, SARS Virus
tgtacataaggcattacgattgatt

SEQ ID NO: 63759 - DNA, 25 bp, SARS Virus
gtacataaggcaatacgattgatta

SEQ ID NO: 63760 - DNA, 25 bp, SARS Virus
tacataaggcataacgattgattac

SEQ ID NO: 63761 - DNA, 25 bp, SARS Virus
acataaggcattacgattgattact

SEQ ID NO: 63762 - DNA, 25 bp, SARS Virus
cataaggcattaagattgattacta

SEQ ID NO: 63763 - DNA, 25 bp, SARS Virus
ataaggcattacaattgattactat

SEQ ID NO: 63764 - DNA, 25 bp, SARS Virus
taaggcattacgattgattactatt

SEQ ID NO: 63765 - DNA, 25 bp, SARS Virus
aaggcattacgaatgattactattg

SEQ ID NO: 63766 - DNA, 25 bp, SARS Virus
aggcattacgatagattactattgt

SEQ ID NO: 63767 - DNA, 25 bp, SARS Virus
ggcattacgattaattactattgtg

SEQ ID NO: 63768 - DNA, 25 bp, SARS Virus
gcattacgattgattactattgtgg

SEQ ID NO: 63769 - DNA, 25 bp, SARS Virus
cattacgattgaatactattgtgga

SEQ ID NO: 63770 - DNA, 25 bp, SARS Virus
attacgattgataactattgtggag

SEQ ID NO: 63771 - DNA, 25 bp, SARS Virus
ttacgattgattactattgtggagt

SEQ ID NO: 63772 - DNA, 25 bp, SARS Virus
tacgattgattaatattgtggagtg

SEQ ID NO: 63773 - DNA, 25 bp, SARS Virus
acgattgattacaattgtggagtgc

SEQ ID NO: 63774 - DNA, 25 bp, SARS Virus
cgattgattactattgtggagtgcc

SEQ ID NO: 63775 - DNA, 25 bp, SARS Virus
gattgattactaatgtggagtgcca

SEQ ID NO: 63776 - DNA, 25 bp, SARS Virus
attgattactatagtggagtgccat

SEQ ID NO: 63777 - DNA, 25 bp, SARS Virus
ttgattactattatggagtgccatg

SEQ ID NO: 63778 - DNA, 25 bp, SARS Virus
tgattactattgaggagtgccatga

SEQ ID NO: 63779 - DNA, 25 bp, SARS Virus
gattactattgtagagtgccatgac

SEQ ID NO: 63780 - DNA, 25 bp, SARS Virus
attactattgtgaagtgccatgacc

SEQ ID NO: 63781 - DNA, 25 bp, SARS Virus
ttactattgtggagtgccatgaccc

SEQ ID NO: 63782 - DNA, 25 bp, SARS Virus
tactattgtggaatgccatgaccct

SEQ ID NO: 63783 - DNA, 25 bp, SARS Virus
actattgtggagagccatgaccctt

SEQ ID NO: 63784 - DNA, 25 bp, SARS Virus
ctattgtggagtaccatgacccttg

SEQ ID NO: 63785 - DNA, 25 bp, SARS Virus
tattgtggagtgacatgacccttgg

SEQ ID NO: 63786 - DNA, 25 bp, SARS Virus
attgtggagtgcaatgacccttgga

SEQ ID NO: 63787 - DNA, 25 bp, SARS Virus
ttgtggagtgccatgacccttggac

SEQ ID NO: 63788 - DNA, 25 bp, SARS Virus
tgtggagtgccaagacccttggact

SEQ ID NO: 63789 - DNA, 25 bp, SARS Virus
gtggagtgccataacccttggactc

SEQ ID NO: 63790 - DNA, 25 bp, SARS Virus
tggagtgccatgacccttggactca

SEQ ID NO: 63791 - DNA, 25 bp, SARS Virus
ggagtgccatgaaccttggactcaa

SEQ ID NO: 63792 - DNA, 25 bp, SARS Virus
gagtgccatgacacttggactcaaa

SEQ ID NO: 63793 - DNA, 25 bp, SARS Virus
agtgccatgaccattggactcaaaa

SEQ ID NO: 63794 - DNA, 25 bp, SARS Virus
gtgccatgacccatggactcaaaat

SEQ ID NO: 63795 - DNA, 25 bp, SARS Virus
tgccatgaccctaggactcaaaata

SEQ ID NO: 63796 - DNA, 25 bp, SARS Virus
gccatgacccttagactcaaaatac

SEQ ID NO: 63797 - DNA, 25 bp, SARS Virus
ccatgacccttgaactcaaaatact

SEQ ID NO: 63798 - DNA, 25 bp, SARS Virus
catgacccttggactcaaaatactc

SEQ ID NO: 63799 - DNA, 25 bp, SARS Virus
atgacccttggaatcaaaatactcc

SEQ ID NO: 63800 - DNA, 25 bp, SARS Virus
tgacccttggacacaaaatactccg

SEQ ID NO: 63801 - DNA, 25 bp, SARS Virus
gacccttggactaaaaatactccga

SEQ ID NO: 63802 - DNA, 25 bp, SARS Virus
acccttggactcaaaatactccgat

SEQ ID NO: 63803 - DNA, 25 bp, SARS Virus
cccttggactcaaaatactccgata

SEQ ID NO: 63804 - DNA, 25 bp, SARS Virus
ccttggactcaaaatactccgatac

SEQ ID NO: 63805 - DNA, 25 bp, SARS Virus
cttggactcaaaatactccgataca

SEQ ID NO: 63806 - DNA, 25 bp, SARS Virus
ttggactcaaaaaactccgatacat

SEQ ID NO: 63807 - DNA, 25 bp, SARS Virus
tggactcaaaatactccgatacatg

SEQ ID NO: 63808 - DNA, 25 bp, SARS Virus
ggactcaaaataatccgatacatgt

SEQ ID NO: 63809 - DNA, 25 bp, SARS Virus
gactcaaaatacaccgatacatgtg

SEQ ID NO: 63810 - DNA, 25 bp, SARS Virus
actcaaaatactacgatacatgtgt

SEQ ID NO: 63811 - DNA, 25 bp, SARS Virus
ctcaaaatactcagatacatgtgtg

SEQ ID NO: 63812 - DNA, 25 bp, SARS Virus
tcaaaatactccaatacatgtgtgg

SEQ ID NO: 63813 - DNA, 25 bp, SARS Virus
caaaatactccgatacatgtgtggt

SEQ ID NO: 63814 - DNA, 25 bp, SARS Virus
aaaatactccgaaacatgtgtggtg

SEQ ID NO: 63815 - DNA, 25 bp, SARS Virus
aaatactccgatacatgtgtggtgt

SEQ ID NO: 63816 - DNA, 25 bp, SARS Virus
aatactccgataaatgtgtggtgta

SEQ ID NO: 63817 - DNA, 25 bp, SARS Virus
atactccgatacatgtgtggtgtat

SEQ ID NO: 63818 - DNA, 25 bp, SARS Virus
tactccgatacaagtgtggtgtatg

SEQ ID NO: 63819 - DNA, 25 bp, SARS Virus
actccgatacatatgtggtgtatgt

SEQ ID NO: 63820 - DNA, 25 bp, SARS Virus
ctccgatacatgagtggtgtatgtc

SEQ ID NO: 63821 - DNA, 25 bp, SARS Virus
tccgatacatgtatggtgtatgtca

SEQ ID NO: 63822 - DNA, 25 bp, SARS Virus
ccgatacatgtgaggtgtatgtcag

SEQ ID NO: 63823 - DNA, 25 bp, SARS Virus
cgatacatgtgtagtgtatgtcaga

SEQ ID NO: 63824 - DNA, 25 bp, SARS Virus
gatacatgtgtgatgtatgtcagaa

SEQ ID NO: 63825 - DNA, 25 bp, SARS Virus
atacatgtgtggagtatgtcagaac

SEQ ID NO: 63826 - DNA, 25 bp, SARS Virus
tacatgtgtggtatatgtcagaacg

SEQ ID NO: 63827 - DNA, 25 bp, SARS Virus
acatgtgtggtgaatgtcagaacgt

SEQ ID NO: 63828 - DNA, 25 bp, SARS Virus
catgtgtggtgtatgtcagaacgtc

SEQ ID NO: 63829 - DNA, 25 bp, SARS Virus
atgtgtggtgtaagtcagaacgtcc

SEQ ID NO: 63830 - DNA, 25 bp, SARS Virus
tgtgtggtgtatatcagaacgtccg

SEQ ID NO: 63831 - DNA, 25 bp, SARS Virus
gtgtggtgtatgacagaacgtccga

SEQ ID NO: 63832 - DNA, 25 bp, SARS Virus
tgtggtgtatgtaagaacgtccgac

SEQ ID NO: 63833 - DNA, 25 bp, SARS Virus
gtggtgtatgtcagaacgtccgaca

SEQ ID NO: 63834 - DNA, 25 bp, SARS Virus
tggtgtatgtcaaaacgtccgacat

SEQ ID NO: 63835 - DNA, 25 bp, SARS Virus
ggtgtatgtcagaacgtccgacatc

SEQ ID NO: 63836 - DNA, 25 bp, SARS Virus
gtgtatgtcagaacgtccgacatcc

SEQ ID NO: 63837 - DNA, 25 bp, SARS Virus
tgtatgtcagaaagtccgacatcca

SEQ ID NO: 63838 - DNA, 25 bp, SARS Virus
gtatgtcagaacatccgacatccac

SEQ ID NO: 63839 - DNA, 25 bp, SARS Virus
tatgtcagaacgaccgacatccacg

SEQ ID NO: 63840 - DNA, 25 bp, SARS Virus
atgtcagaacgtacgacatccacga

SEQ ID NO: 63841 - DNA, 25 bp, SARS Virus
tgtcagaacgtcagacatccacgaa

SEQ ID NO: 63842 - DNA, 25 bp, SARS Virus
gtcagaacgtccaacatccacgaac

SEQ ID NO: 63843 - DNA, 25 bp, SARS Virus
tcagaacgtccgacatccacgaaca

SEQ ID NO: 63844 - DNA, 25 bp, SARS Virus
cagaacgtccgaaatccacgaacac

SEQ ID NO: 63845 - DNA, 25 bp, SARS Virus
agaacgtccgacatccacgaacaca

SEQ ID NO: 63846 - DNA, 25 bp, SARS Virus
gaacgtccgacaaccacgaacacat

SEQ ID NO: 63847 - DNA, 25 bp, SARS Virus
aacgtccgacatacacgaacacata

SEQ ID NO: 63848 - DNA, 25 bp, SARS Virus
acgtccgacatcaacgaacacataa

SEQ ID NO: 63849 - DNA, 25 bp, SARS Virus
cgtccgacatccacgaacacataac

SEQ ID NO: 63850 - DNA, 25 bp, SARS Virus
gtccgacatccaagaacacataaca

SEQ ID NO: 63851 - DNA, 25 bp, SARS Virus
tccgacatccacaaacacataacac

SEQ ID NO: 63852 - DNA, 25 bp, SARS Virus
ccgacatccacgaacacataacacg

SEQ ID NO: 63853 - DNA, 25 bp, SARS Virus
cgacatccacgaacacataacacgt

SEQ ID NO: 63854 - DNA, 25 bp, SARS Virus
gacatccacgaaaacataacacgtt

SEQ ID NO: 63855 - DNA, 25 bp, SARS Virus
acatccacgaacacataacacgtta

SEQ ID NO: 63856 - DNA, 25 bp, SARS Virus
catccacgaacaaataacacgttaa

SEQ ID NO: 63857 - DNA, 25 bp, SARS Virus
atccacgaacacataacacgttaag

SEQ ID NO: 63858 - DNA, 25 bp, SARS Virus
tccacgaacacaaaacacgttaagt

SEQ ID NO: 63859 - DNA, 25 bp, SARS Virus
ccacgaacacataacacgttaagtg

SEQ ID NO: 63860 - DNA, 25 bp, SARS Virus
cacgaacacataacacgttaagtgt

SEQ ID NO: 63861 - DNA, 25 bp, SARS Virus
acgaacacataaaacgttaagtgtc

SEQ ID NO: 63862 - DNA, 25 bp, SARS Virus
cgaacacataacacgttaagtgtct

SEQ ID NO: 63863 - DNA, 25 bp, SARS Virus
gaacacataacaagttaagtgtctg

SEQ ID NO: 63864 - DNA, 25 bp, SARS Virus
aacacataacacattaagtgtctga

SEQ ID NO: 63865 - DNA, 25 bp, SARS Virus
acacataacacgataagtgtctgaa

SEQ ID NO: 63866 - DNA, 25 bp, SARS Virus
cacataacacgtaaagtgtctgaag

SEQ ID NO: 63867 - DNA, 25 bp, SARS Virus
acataacacgttaagtgtctgaagt

SEQ ID NO: 63868 - DNA, 25 bp, SARS Virus
cataacacgttaagtgtctgaagtg

SEQ ID NO: 63869 - DNA, 25 bp, SARS Virus
ataacacgttaaatgtctgaagtga

SEQ ID NO: 63870 - DNA, 25 bp, SARS Virus
taacacgttaagagtctgaagtgaa

SEQ ID NO: 63871 - DNA, 25 bp, SARS Virus
aacacgttaagtatctgaagtgaag

SEQ ID NO: 63872 - DNA, 25 bp, SARS Virus
acacgttaagtgactgaagtgaagc

SEQ ID NO: 63873 - DNA, 25 bp, SARS Virus
cacgttaagtgtatgaagtgaagca

SEQ ID NO: 63874 - DNA, 25 bp, SARS Virus
acgttaagtgtcagaagtgaagcaa

SEQ ID NO: 63875 - DNA, 25 bp, SARS Virus
cgttaagtgtctaaagtgaagcaac

SEQ ID NO: 63876 - DNA, 25 bp, SARS Virus
gttaagtgtctgaagtgaagcaacg

SEQ ID NO: 63877 - DNA, 25 bp, SARS Virus
ttaagtgtctgaagtgaagcaacgc

SEQ ID NO: 63878 - DNA, 25 bp, SARS Virus
taagtgtctgaaatgaagcaacgcc

SEQ ID NO: 63879 - DNA, 25 bp, SARS Virus
aagtgtctgaagagaagcaacgcca

SEQ ID NO: 63880 - DNA, 25 bp, SARS Virus
agtgtctgaagtaaagcaacgccac

SEQ ID NO: 63881 - DNA, 25 bp, SARS Virus
gtgtctgaagtgaagcaacgccacg

SEQ ID NO: 63882 - DNA, 25 bp, SARS Virus
tgtctgaagtgaagcaacgccacgg

SEQ ID NO: 63883 - DNA, 25 bp, SARS Virus
gtctgaagtgaaacaacgccacgga

SEQ ID NO: 63884 - DNA, 25 bp, SARS Virus
tctgaagtgaagaaacgccacggac

SEQ ID NO: 63885 - DNA, 25 bp, SARS Virus
ctgaagtgaagcaacgccacggaca

SEQ ID NO: 63886 - DNA, 25 bp, SARS Virus
tgaagtgaagcaacgccacggacat

SEQ ID NO: 63887 - DNA, 25 bp, SARS Virus
gaagtgaagcaaagccacggacata

SEQ ID NO: 63888 - DNA, 25 bp, SARS Virus
aagtgaagcaacaccacggacataa

SEQ ID NO: 63889 - DNA, 25 bp, SARS Virus
agtgaagcaacgacacggacataat

SEQ ID NO: 63890 - DNA, 25 bp, SARS Virus
gtgaagcaacgcaacggacataatc

SEQ ID NO: 63891 - DNA, 25 bp, SARS Virus
tgaagcaacgccacggacataatcc

SEQ ID NO: 63892 - DNA, 25 bp, SARS Virus
gaagcaacgccaaggacataatcct

SEQ ID NO: 63893 - DNA, 25 bp, SARS Virus
aagcaacgccacagacataatcctc

SEQ ID NO: 63894 - DNA, 25 bp, SARS Virus
agcaacgccacgaacataatcctct

SEQ ID NO: 63895 - DNA, 25 bp, SARS Virus
gcaacgccacggacataatcctctg

SEQ ID NO: 63896 - DNA, 25 bp, SARS Virus
caacgccacggaaataatcctctgg

SEQ ID NO: 63897 - DNA, 25 bp, SARS Virus
aacgccacggacataatcctctggt

SEQ ID NO: 63898 - DNA, 25 bp, SARS Virus
acgccacggacaaaatcctctggta

SEQ ID NO: 63899 - DNA, 25 bp, SARS Virus
cgccacggacataatcctctggtaa

SEQ ID NO: 63900 - DNA, 25 bp, SARS Virus
gccacggacataatcctctggtaag

SEQ ID NO: 63901 - DNA, 25 bp, SARS Virus
ccacggacataaacctctggtaagg

SEQ ID NO: 63902 - DNA, 25 bp, SARS Virus
cacggacataatactctggtaagga

SEQ ID NO: 63903 - DNA, 25 bp, SARS Virus
acggacataatcatctggtaaggat

SEQ ID NO: 63904 - DNA, 25 bp, SARS Virus
cggacataatccactggtaaggata

SEQ ID NO: 63905 - DNA, 25 bp, SARS Virus
ggacataatcctatggtaaggatac

SEQ ID NO: 63906 - DNA, 25 bp, SARS Virus
gacataatcctcaggtaaggataca

SEQ ID NO: 63907 - DNA, 25 bp, SARS Virus
acataatcctctagtaaggatacaa

SEQ ID NO: 63908 - DNA, 25 bp, SARS Virus
cataatcctctgataaggatacaac

SEQ ID NO: 63909 - DNA, 25 bp, SARS Virus
ataatcctctggaaaggatacaacg

SEQ ID NO: 63910 - DNA, 25 bp, SARS Virus
taatcctctggtaaggatacaacgt

SEQ ID NO: 63911 - DNA, 25 bp, SARS Virus
aatcctctggtaaggatacaacgtt

SEQ ID NO: 63912 - DNA, 25 bp, SARS Virus
atcctctggtaaagatacaacgttc

SEQ ID NO: 63913 - DNA, 25 bp, SARS Virus
tcctctggtaagaatacaacgttca

SEQ ID NO: 63914 - DNA, 25 bp, SARS Virus
cctctggtaaggatacaacgttcac

SEQ ID NO: 63915 - DNA, 25 bp, SARS Virus
ctctggtaaggaaacaacgttcacg

SEQ ID NO: 63916 - DNA, 25 bp, SARS Virus
tctggtaaggatacaacgttcacga

SEQ ID NO: 63917 - DNA, 25 bp, SARS Virus
ctggtaaggataaaacgttcacgac

SEQ ID NO: 63918 - DNA, 25 bp, SARS Virus
tggtaaggatacaacgttcacgacg

SEQ ID NO: 63919 - DNA, 25 bp, SARS Virus
ggtaaggatacaacgttcacgacga

SEQ ID NO: 63920 - DNA, 25 bp, SARS Virus
gtaaggatacaaagttcacgacgat

SEQ ID NO: 63921 - DNA, 25 bp, SARS Virus
taaggatacaacattcacgacgata

SEQ ID NO: 63922 - DNA, 25 bp, SARS Virus
aaggatacaacgatcacgacgatac

SEQ ID NO: 63923 - DNA, 25 bp, SARS Virus
aggatacaacgtacacgacgatact

SEQ ID NO: 63924 - DNA, 25 bp, SARS Virus
ggatacaacgttaacgacgatactg

SEQ ID NO: 63925 - DNA, 25 bp, SARS Virus
gatacaacgttcacgacgatactgg

SEQ ID NO: 63926 - DNA, 25 bp, SARS Virus
atacaacgttcaagacgatactggt

SEQ ID NO: 63927 - DNA, 25 bp, SARS Virus
tacaacgttcacaacgatactggta

SEQ ID NO: 63928 - DNA, 25 bp, SARS Virus
acaacgttcacgacgatactggtac

SEQ ID NO: 63929 - DNA, 25 bp, SARS Virus
caacgttcacgaagatactggtaca

SEQ ID NO: 63930 - DNA, 25 bp, SARS Virus
aacgttcacgacaatactggtacag

SEQ ID NO: 63931 - DNA, 25 bp, SARS Virus
acgttcacgacgatactggtacagt

SEQ ID NO: 63932 - DNA, 25 bp, SARS Virus
cgttcacgacgaaactggtacagta

SEQ ID NO: 63933 - DNA, 25 bp, SARS Virus
gttcacgacgatactggtacagtaa

SEQ ID NO: 63934 - DNA, 25 bp, SARS Virus
ttcacgacgataatggtacagtaaa

SEQ ID NO: 63935 - DNA, 25 bp, SARS Virus
tcacgacgatacaggtacagtaaag

SEQ ID NO: 63936 - DNA, 25 bp, SARS Virus
cacgacgatactagtacagtaaagt

SEQ ID NO: 63937 - DNA, 25 bp, SARS Virus
acgacgatactgatacagtaaagtt

SEQ ID NO: 63938 - DNA, 25 bp, SARS Virus
cgacgatactggaacagtaaagttg

SEQ ID NO: 63939 - DNA, 25 bp, SARS Virus
gacgatactggtacagtaaagttgt

SEQ ID NO: 63940 - DNA, 25 bp, SARS Virus
acgatactggtaaagtaaagttgta

SEQ ID NO: 63941 - DNA, 25 bp, SARS Virus
cgatactggtacagtaaagttgtag

SEQ ID NO: 63942 - DNA, 25 bp, SARS Virus
gatactggtacaataaagttgtagt

SEQ ID NO: 63943 - DNA, 25 bp, SARS Virus
atactggtacagaaaagttgtagtg

SEQ ID NO: 63944 - DNA, 25 bp, SARS Virus
tactggtacagtaaagttgtagtgt

SEQ ID NO: 63945 - DNA, 25 bp, SARS Virus
actggtacagtaaagttgtagtgtg

SEQ ID NO: 63946 - DNA, 25 bp, SARS Virus
ctggtacagtaaagttgtagtgtgt

SEQ ID NO: 63947 - DNA, 25 bp, SARS Virus
tggtacagtaaaattgtagtgtgtt

SEQ ID NO: 63948 - DNA, 25 bp, SARS Virus
ggtacagtaaagatgtagtgtgttt

SEQ ID NO: 63949 - DNA, 25 bp, SARS Virus
gtacagtaaagtagtagtgtgttta

SEQ ID NO: 63950 - DNA, 25 bp, SARS Virus
tacagtaaagttatagtgtgtttaa

SEQ ID NO: 63951 - DNA, 25 bp, SARS Virus
acagtaaagttgaagtgtgtttaat

SEQ ID NO: 63952 - DNA, 25 bp, SARS Virus
cagtaaagttgtagtgtgtttaatc

SEQ ID NO: 63953 - DNA, 25 bp, SARS Virus
agtaaagttgtaatgtgtttaatca

SEQ ID NO: 63954 - DNA, 25 bp, SARS Virus
gtaaagttgtagagtgtttaatcac

SEQ ID NO: 63955 - DNA, 25 bp, SARS Virus
taaagttgtagtatgtttaatcaca

SEQ ID NO: 63956 - DNA, 25 bp, SARS Virus
aaagttgtagtgagtttaatcacaa

SEQ ID NO: 63957 - DNA, 25 bp, SARS Virus
aagttgtagtgtatttaatcacaac

SEQ ID NO: 63958 - DNA, 25 bp, SARS Virus
agttgtagtgtgattaatcacaaca

SEQ ID NO: 63959 - DNA, 25 bp, SARS Virus
gttgtagtgtgtataatcacaacag

SEQ ID NO: 63960 - DNA, 25 bp, SARS Virus
ttgtagtgtgttaaatcacaacaga

SEQ ID NO: 63961 - DNA, 25 bp, SARS Virus
tgtagtgtgtttaatcacaacagac

SEQ ID NO: 63962 - DNA, 25 bp, SARS Virus
gtagtgtgtttaatcacaacagaca

SEQ ID NO: 63963 - DNA, 25 bp, SARS Virus
tagtgtgtttaaacacaacagacaa

SEQ ID NO: 63964 - DNA, 25 bp, SARS Virus
agtgtgtttaataacaacagacaat

SEQ ID NO: 63965 - DNA, 25 bp, SARS Virus
gtgtgtttaatcacaacagacaatt

SEQ ID NO: 63966 - DNA, 25 bp, SARS Virus
tgtgtttaatcaaaacagacaatta

SEQ ID NO: 63967 - DNA, 25 bp, SARS Virus
gtgtttaatcacaacagacaattag

SEQ ID NO: 63968 - DNA, 25 bp, SARS Virus
tgtttaatcacaacagacaattagg

SEQ ID NO: 63969 - DNA, 25 bp, SARS Virus
gtttaatcacaaaagacaattaggg

SEQ ID NO: 63970 - DNA, 25 bp, SARS Virus
tttaatcacaacagacaattaggga

SEQ ID NO: 63971 - DNA, 25 bp, SARS Virus
ttaatcacaacaaacaattagggat

SEQ ID NO: 63972 - DNA, 25 bp, SARS Virus
taatcacaacagacaattagggata

SEQ ID NO: 63973 - DNA, 25 bp, SARS Virus
aatcacaacagaaaattagggatac

SEQ ID NO: 63974 - DNA, 25 bp, SARS Virus
atcacaacagacaattagggataca

SEQ ID NO: 63975 - DNA, 25 bp, SARS Virus
tcacaacagacaattagggatacaa

SEQ ID NO: 63976 - DNA, 25 bp, SARS Virus
cacaacagacaaatagggatacaaa

SEQ ID NO: 63977 - DNA, 25 bp, SARS Virus
acaacagacaataagggatacaaac

SEQ ID NO: 63978 - DNA, 25 bp, SARS Virus
caacagacaattagggatacaaacg

SEQ ID NO: 63979 - DNA, 25 bp, SARS Virus
aacagacaattaaggatacaaacgt

SEQ ID NO: 63980 - DNA, 25 bp, SARS Virus
acagacaattagagatacaaacgtt

SEQ ID NO: 63981 - DNA, 25 bp, SARS Virus
cagacaattaggaatacaaacgtta

SEQ ID NO: 63982 - DNA, 25 bp, SARS Virus
agacaattagggatacaaacgttac

SEQ ID NO: 63983 - DNA, 25 bp, SARS Virus
gacaattagggaaacaaacgttacg

SEQ ID NO: 63984 - DNA, 25 bp, SARS Virus
acaattagggatacaaacgttacgg

SEQ ID NO: 63985 - DNA, 25 bp, SARS Virus
caattagggataaaaacgttacggg

SEQ ID NO: 63986 - DNA, 25 bp, SARS Virus
aattagggatacaaacgttacgggg

SEQ ID NO: 63987 - DNA, 25 bp, SARS Virus
attagggatacaaacgttacggggt

SEQ ID NO: 63988 - DNA, 25 bp, SARS Virus
ttagggatacaaacgttacggggtc

SEQ ID NO: 63989 - DNA, 25 bp, SARS Virus
tagggatacaaaagttacggggtcc

SEQ ID NO: 63990 - DNA, 25 bp, SARS Virus
agggatacaaacattacggggtcca

SEQ ID NO: 63991 - DNA, 25 bp, SARS Virus
gggatacaaacgatacggggtccaa

SEQ ID NO: 63992 - DNA, 25 bp, SARS Virus
ggatacaaacgtaacggggtccaac

SEQ ID NO: 63993 - DNA, 25 bp, SARS Virus
gatacaaacgttacggggtccaaca

SEQ ID NO: 63994 - DNA, 25 bp, SARS Virus
atacaaacgttaaggggtccaacac

SEQ ID NO: 63995 - DNA, 25 bp, SARS Virus
tacaaacgttacagggtccaacact

SEQ ID NO: 63996 - DNA, 25 bp, SARS Virus
acaaacgttacgaggtccaacacta

SEQ ID NO: 63997 - DNA, 25 bp, SARS Virus
caaacgttacggagtccaacactac

SEQ ID NO: 63998 - DNA, 25 bp, SARS Virus
aaacgttacgggatccaacactaca

SEQ ID NO: 63999 - DNA, 25 bp, SARS Virus
aacgttacggggaccaacactacag

SEQ ID NO: 64000 - DNA, 25 bp, SARS Virus
acgttacggggtacaacactacagt

SEQ ID NO: 64001 - DNA, 25 bp, SARS Virus
cgttacggggtcaaacactacagtg

SEQ ID NO: 64002 - DNA, 25 bp, SARS Virus
gttacggggtccaacactacagtga

SEQ ID NO: 64003 - DNA, 25 bp, SARS Virus
ttacggggtccaacactacagtgac

SEQ ID NO: 64004 - DNA, 25 bp, SARS Virus
tacggggtccaaaactacagtgact

SEQ ID NO: 64005 - DNA, 25 bp, SARS Virus
acggggtccaacactacagtgacta

SEQ ID NO: 64006 - DNA, 25 bp, SARS Virus
cggggtccaacaatacagtgactac

SEQ ID NO: 64007 - DNA, 25 bp, SARS Virus
ggggtccaacacaacagtgactaca

SEQ ID NO: 64008 - DNA, 25 bp, SARS Virus
gggtccaacactacagtgactacac

SEQ ID NO: 64009 - DNA, 25 bp, SARS Virus
ggtccaacactaaagtgactacact

SEQ ID NO: 64010 - DNA, 25 bp, SARS Virus
gtccaacactacagtgactacactg

SEQ ID NO: 64011 - DNA, 25 bp, SARS Virus
tccaacactacaatgactacactgt

SEQ ID NO: 64012 - DNA, 25 bp, SARS Virus
ccaacactacagagactacactgtg

SEQ ID NO: 64013 - DNA, 25 bp, SARS Virus
caacactacagtaactacactgtgt

SEQ ID NO: 64014 - DNA, 25 bp, SARS Virus
aacactacagtgactacactgtgtt

SEQ ID NO: 64015 - DNA, 25 bp, SARS Virus
acactacagtgaatacactgtgttg

SEQ ID NO: 64016 - DNA, 25 bp, SARS Virus
cactacagtgacaacactgtgttga

SEQ ID NO: 64017 - DNA, 25 bp, SARS Virus
actacagtgactacactgtgttgac

SEQ ID NO: 64018 - DNA, 25 bp, SARS Virus
ctacagtgactaaactgtgttgaca

SEQ ID NO: 64019 - DNA, 25 bp, SARS Virus
tacagtgactacactgtgttgacat

SEQ ID NO: 64020 - DNA, 25 bp, SARS Virus
acagtgactacaatgtgttgacata

SEQ ID NO: 64021 - DNA, 25 bp, SARS Virus
cagtgactacacagtgttgacatag

SEQ ID NO: 64022 - DNA, 25 bp, SARS Virus
agtgactacactatgttgacataga

SEQ ID NO: 64023 - DNA, 25 bp, SARS Virus
gtgactacactgagttgacatagat

SEQ ID NO: 64024 - DNA, 25 bp, SARS Virus
tgactacactgtattgacatagatc

SEQ ID NO: 64025 - DNA, 25 bp, SARS Virus
gactacactgtgatgacatagatcc

SEQ ID NO: 64026 - DNA, 25 bp, SARS Virus
actacactgtgtagacatagatcct

SEQ ID NO: 64027 - DNA, 25 bp, SARS Virus
ctacactgtgttaacatagatcctc

SEQ ID NO: 64028 - DNA, 25 bp, SARS Virus
tacactgtgttgacatagatcctcc

SEQ ID NO: 64029 - DNA, 25 bp, SARS Virus
acactgtgttgaaatagatcctcca

SEQ ID NO: 64030 - DNA, 25 bp, SARS Virus
cactgtgttgacatagatcctccat

SEQ ID NO: 64031 - DNA, 25 bp, SARS Virus
actgtgttgacaaagatcctccata

SEQ ID NO: 64032 - DNA, 25 bp, SARS Virus
ctgtgttgacatagatcctccatac

SEQ ID NO: 64033 - DNA, 25 bp, SARS Virus
tgtgttgacataaatcctccatact

SEQ ID NO: 64034 - DNA, 25 bp, SARS Virus
gtgttgacatagatcctccatactc

SEQ ID NO: 64035 - DNA, 25 bp, SARS Virus
tgttgacatagaacctccatactcg

SEQ ID NO: 64036 - DNA, 25 bp, SARS Virus
gttgacatagatactccatactcga

SEQ ID NO: 64037 - DNA, 25 bp, SARS Virus
ttgacatagatcatccatactcgat

SEQ ID NO: 64038 - DNA, 25 bp, SARS Virus
tgacatagatccaccatactcgata

SEQ ID NO: 64039 - DNA, 25 bp, SARS Virus
gacatagatcctacatactcgataa

SEQ ID NO: 64040 - DNA, 25 bp, SARS Virus
acatagatcctcaatactcgataat

SEQ ID NO: 64041 - DNA, 25 bp, SARS Virus
catagatcctccatactcgataata

SEQ ID NO: 64042 - DNA, 25 bp, SARS Virus
atagatcctccaaactcgataataa

SEQ ID NO: 64043 - DNA, 25 bp, SARS Virus
tagatcctccatactcgataataac

SEQ ID NO: 64044 - DNA, 25 bp, SARS Virus
agatcctccataatcgataataacg

SEQ ID NO: 64045 - DNA, 25 bp, SARS Virus
gatcctccatacacgataataacgt

SEQ ID NO: 64046 - DNA, 25 bp, SARS Virus
atcctccatactagataataacgtt

SEQ ID NO: 64047 - DNA, 25 bp, SARS Virus
tcctccatactcaataataacgttc

SEQ ID NO: 64048 - DNA, 25 bp, SARS Virus
cctccatactcgataataacgttca

SEQ ID NO: 64049 - DNA, 25 bp, SARS Virus
ctccatactcgaaaataacgttcag

SEQ ID NO: 64050 - DNA, 25 bp, SARS Virus
tccatactcgataataacgttcagt

SEQ ID NO: 64051 - DNA, 25 bp, SARS Virus
ccatactcgataataacgttcagtg

SEQ ID NO: 64052 - DNA, 25 bp, SARS Virus
catactcgataaaaacgttcagtgt

SEQ ID NO: 64053 - DNA, 25 bp, SARS Virus
atactcgataataacgttcagtgta

SEQ ID NO: 64054 - DNA, 25 bp, SARS Virus
tactcgataataacgttcagtgtat

SEQ ID NO: 64055 - DNA, 25 bp, SARS Virus
actcgataataaagttcagtgtatt

SEQ ID NO: 64056 - DNA, 25 bp, SARS Virus
ctcgataataacattcagtgtattc

SEQ ID NO: 64057 - DNA, 25 bp, SARS Virus
atccgcgtccgacaaaacagctact

SEQ ID NO: 64058 - DNA, 25 bp, SARS Virus
tccgcgtccgaccaaacagctacta

SEQ ID NO: 64059 - DNA, 25 bp, SARS Virus
ccgcgtccgacacaacagctactat

SEQ ID NO: 64060 - DNA, 25 bp, SARS Virus
cgcgtccgacaacacagctactata

SEQ ID NO: 64061 - DNA, 25 bp, SARS Virus
gcgtccgacaaaccagctactataa

SEQ ID NO: 64062 - DNA, 25 bp, SARS Virus
cgtccgacaaaacagctactataac

SEQ ID NO: 64063 - DNA, 25 bp, SARS Virus
gtccgacaaaaccgctactataaca

SEQ ID NO: 64064 - DNA, 25 bp, SARS Virus
tccgacaaaacacctactataacag

SEQ ID NO: 64065 - DNA, 25 bp, SARS Virus
ccgacaaaacagctactataacagt

SEQ ID NO: 64066 - DNA, 25 bp, SARS Virus
cgacaaaacagccactataacagtt

SEQ ID NO: 64067 - DNA, 25 bp, SARS Virus
gacaaaacagctcctataacagttt

SEQ ID NO: 64068 - DNA, 25 bp, SARS Virus
acaaaacagctactataacagtttt

SEQ ID NO: 64069 - DNA, 25 bp, SARS Virus
caaaacagctaccataacagttttg

SEQ ID NO: 64070 - DNA, 25 bp, SARS Virus
aaaacagctactctaacagttttgt

SEQ ID NO: 64071 - DNA, 25 bp, SARS Virus
aaacagctactacaacagttttgtc

SEQ ID NO: 64072 - DNA, 25 bp, SARS Virus
aacagctactatcacagttttgtct

SEQ ID NO: 64073 - DNA, 25 bp, SARS Virus
acagctactataccagttttgtcta

SEQ ID NO: 64074 - DNA, 25 bp, SARS Virus
cagctactataacagttttgtctac

SEQ ID NO: 64075 - DNA, 25 bp, SARS Virus
agctactataaccgttttgtctacc

SEQ ID NO: 64076 - DNA, 25 bp, SARS Virus
gctactataacacttttgtctacca

SEQ ID NO: 64077 - DNA, 25 bp, SARS Virus
ctactataacagctttgtctaccat

SEQ ID NO: 64078 - DNA, 25 bp, SARS Virus
tactataacagtcttgtctaccatg

SEQ ID NO: 64079 - DNA, 25 bp, SARS Virus
actataacagttctgtctaccatgt

SEQ ID NO: 64080 - DNA, 25 bp, SARS Virus
ctataacagtttcgtctaccatgtg

SEQ ID NO: 64081 - DNA, 25 bp, SARS Virus
tataacagttttctctaccatgtga

SEQ ID NO: 64082 - DNA, 25 bp, SARS Virus
ataacagttttgcctaccatgtgaa

SEQ ID NO: 64083 - DNA, 25 bp, SARS Virus
taacagttttgtctaccatgtgaat

SEQ ID NO: 64084 - DNA, 25 bp, SARS Virus
aacagttttgtccaccatgtgaata

SEQ ID NO: 64085 - DNA, 25 bp, SARS Virus
acagttttgtctcccatgtgaatac

SEQ ID NO: 64086 - DNA, 25 bp, SARS Virus
cagttttgtctaccatgtgaatact

SEQ ID NO: 64087 - DNA, 25 bp, SARS Virus
agttttgtctaccatgtgaatacta

SEQ ID NO: 64088 - DNA, 25 bp, SARS Virus
gttttgtctaccctgtgaatactaa

SEQ ID NO: 64089 - DNA, 25 bp, SARS Virus
ttttgtctaccacgtgaatactaac

SEQ ID NO: 64090 - DNA, 25 bp, SARS Virus
tttgtctaccatctgaatactaact

SEQ ID NO: 64091 - DNA, 25 bp, SARS Virus
ttgtctaccatgcgaatactaactt

SEQ ID NO: 64092 - DNA, 25 bp, SARS Virus
tgtctaccatgtcaatactaacttt

SEQ ID NO: 64093 - DNA, 25 bp, SARS Virus
gtctaccatgtgcatactaactttc

SEQ ID NO: 64094 - DNA, 25 bp, SARS Virus
tctaccatgtgactactaactttcc

SEQ ID NO: 64095 - DNA, 25 bp, SARS Virus
ctaccatgtgaacactaactttcca

SEQ ID NO: 64096 - DNA, 25 bp, SARS Virus
taccatgtgaatcctaactttccaa

SEQ ID NO: 64097 - DNA, 25 bp, SARS Virus
accatgtgaatactaactttccaag

SEQ ID NO: 64098 - DNA, 25 bp, SARS Virus
ccatgtgaataccaactttccaagc

SEQ ID NO: 64099 - DNA, 25 bp, SARS Virus
catgtgaatactcactttccaagca

SEQ ID NO: 64100 - DNA, 25 bp, SARS Virus
atgtgaatactacctttccaagcac

SEQ ID NO: 64101 - DNA, 25 bp, SARS Virus
tgtgaatactaactttccaagcaca

SEQ ID NO: 64102 - DNA, 25 bp, SARS Virus
gtgaatactaaccttccaagcacag

SEQ ID NO: 64103 - DNA, 25 bp, SARS Virus
tgaatactaactctccaagcacagt

SEQ ID NO: 64104 - DNA, 25 bp, SARS Virus
gaatactaacttcccaagcacagtg

SEQ ID NO: 64105 - DNA, 25 bp, SARS Virus
aatactaactttccaagcacagtga

SEQ ID NO: 64106 - DNA, 25 bp, SARS Virus
atactaactttccaagcacagtgac

SEQ ID NO: 64107 - DNA, 25 bp, SARS Virus
tactaactttcccagcacagtgacc

SEQ ID NO: 64108 - DNA, 25 bp, SARS Virus
actaactttccacgcacagtgaccg

SEQ ID NO: 64109 - DNA, 25 bp, SARS Virus
ctaactttccaaccacagtgaccga

SEQ ID NO: 64110 - DNA, 25 bp, SARS Virus
taactttccaagcacagtgaccgat

SEQ ID NO: 64111 - DNA, 25 bp, SARS Virus
aactttccaagcccagtgaccgata

SEQ ID NO: 64112 - DNA, 25 bp, SARS Virus
actttccaagcacagtgaccgataa

SEQ ID NO: 64113 - DNA, 25 bp, SARS Virus
ctttccaagcaccgtgaccgataac

SEQ ID NO: 64114 - DNA, 25 bp, SARS Virus
tttccaagcacactgaccgataact

SEQ ID NO: 64115 - DNA, 25 bp, SARS Virus
ttccaagcacagcgaccgataacta

SEQ ID NO: 64116 - DNA, 25 bp, SARS Virus
tccaagcacagtcaccgataactac

SEQ ID NO: 64117 - DNA, 25 bp, SARS Virus
ccaagcacagtgcccgataactacg

SEQ ID NO: 64118 - DNA, 25 bp, SARS Virus
caagcacagtgaccgataactacga

SEQ ID NO: 64119 - DNA, 25 bp, SARS Virus
aagcacagtgaccgataactacgaa

SEQ ID NO: 64120 - DNA, 25 bp, SARS Virus
agcacagtgacccataactacgaat

SEQ ID NO: 64121 - DNA, 25 bp, SARS Virus
gcacagtgaccgctaactacgaatg

SEQ ID NO: 64122 - DNA, 25 bp, SARS Virus
cacagtgaccgacaactacgaatgg

SEQ ID NO: 64123 - DNA, 25 bp, SARS Virus
acagtgaccgatcactacgaatggg

SEQ ID NO: 64124 - DNA, 25 bp, SARS Virus
cagtgaccgatacctacgaatgggt

SEQ ID NO: 64125 - DNA, 25 bp, SARS Virus
agtgaccgataactacgaatgggtg

SEQ ID NO: 64126 - DNA, 25 bp, SARS Virus
gtgaccgataaccacgaatgggtga

SEQ ID NO: 64127 - DNA, 25 bp, SARS Virus
tgaccgataactccgaatgggtgaa

SEQ ID NO: 64128 - DNA, 25 bp, SARS Virus
gaccgataactacgaatgggtgaat

SEQ ID NO: 64129 - DNA, 25 bp, SARS Virus
accgataactaccaatgggtgaatg

SEQ ID NO: 64130 - DNA, 25 bp, SARS Virus
ccgataactacgcatgggtgaatgt

SEQ ID NO: 64131 - DNA, 25 bp, SARS Virus
cgataactacgactgggtgaatgtt

SEQ ID NO: 64132 - DNA, 25 bp, SARS Virus
gataactacgaacgggtgaatgttt

SEQ ID NO: 64133 - DNA, 25 bp, SARS Virus
ataactacgaatcggtgaatgtttt

SEQ ID NO: 64134 - DNA, 25 bp, SARS Virus
taactacgaatgcgtgaatgttttg

SEQ ID NO: 64135 - DNA, 25 bp, SARS Virus
aactacgaatggctgaatgttttgt

SEQ ID NO: 64136 - DNA, 25 bp, SARS Virus
actacgaatgggcgaatgttttgta

SEQ ID NO: 64137 - DNA, 25 bp, SARS Virus
ctacgaatgggtcaatgttttgtag

SEQ ID NO: 64138 - DNA, 25 bp, SARS Virus
tacgaatgggtgcatgttttgtagg

SEQ ID NO: 64139 - DNA, 25 bp, SARS Virus
acgaatgggtgactgttttgtagga

SEQ ID NO: 64140 - DNA, 25 bp, SARS Virus
cgaatgggtgaacgttttgtaggat

SEQ ID NO: 64141 - DNA, 25 bp, SARS Virus
gaatgggtgaatcttttgtaggatt

SEQ ID NO: 64142 - DNA, 25 bp, SARS Virus
aatgggtgaatgctttgtaggatta

SEQ ID NO: 64143 - DNA, 25 bp, SARS Virus
atgggtgaatgtcttgtaggattag

SEQ ID NO: 64144 - DNA, 25 bp, SARS Virus
tgggtgaatgttctgtaggattagt

SEQ ID NO: 64145 - DNA, 25 bp, SARS Virus
gggtgaatgtttcgtaggattagtc

SEQ ID NO: 64146 - DNA, 25 bp, SARS Virus
ggtgaatgttttctaggattagtcc

SEQ ID NO: 64147 - DNA, 25 bp, SARS Virus
gtgaatgttttgcaggattagtcct

SEQ ID NO: 64148 - DNA, 25 bp, SARS Virus
tgaatgttttgtcggattagtcctc

SEQ ID NO: 64149 - DNA, 25 bp, SARS Virus
gaatgttttgtacgattagtcctca

SEQ ID NO: 64150 - DNA, 25 bp, SARS Virus
aatgttttgtagcattagtcctcat

SEQ ID NO: 64151 - DNA, 25 bp, SARS Virus
atgttttgtaggcttagtcctcata

SEQ ID NO: 64152 - DNA, 25 bp, SARS Virus
tgttttgtaggactagtcctcatac

SEQ ID NO: 64153 - DNA, 25 bp, SARS Virus
gttttgtaggatcagtcctcatacg

SEQ ID NO: 64154 - DNA, 25 bp, SARS Virus
ttttgtaggattcgtcctcatacga

SEQ ID NO: 64155 - DNA, 25 bp, SARS Virus
tttgtaggattactcctcatacgac

SEQ ID NO: 64156 - DNA, 25 bp, SARS Virus
ttgtaggattagccctcatacgact

SEQ ID NO: 64157 - DNA, 25 bp, SARS Virus
tgtaggattagtcctcatacgacta

SEQ ID NO: 64158 - DNA, 25 bp, SARS Virus
gtaggattagtcctcatacgactac

SEQ ID NO: 64159 - DNA, 25 bp, SARS Virus
taggattagtccccatacgactaca

SEQ ID NO: 64160 - DNA, 25 bp, SARS Virus
aggattagtcctcatacgactacag

SEQ ID NO: 64161 - DNA, 25 bp, SARS Virus
ggattagtcctcctacgactacaga

SEQ ID NO: 64162 - DNA, 25 bp, SARS Virus
gattagtcctcacacgactacagaa

SEQ ID NO: 64163 - DNA, 25 bp, SARS Virus
attagtcctcatccgactacagaaa

SEQ ID NO: 64164 - DNA, 25 bp, SARS Virus
ttagtcctcatacgactacagaaag

SEQ ID NO: 64165 - DNA, 25 bp, SARS Virus
tagtcctcataccactacagaaagt

SEQ ID NO: 64166 - DNA, 25 bp, SARS Virus
agtcctcatacgcctacagaaagtg

SEQ ID NO: 64167 - DNA, 25 bp, SARS Virus
gtcctcatacgactacagaaagtga

SEQ ID NO: 64168 - DNA, 25 bp, SARS Virus
tcctcatacgaccacagaaagtgaa

SEQ ID NO: 64169 - DNA, 25 bp, SARS Virus
cctcatacgactccagaaagtgaac

SEQ ID NO: 64170 - DNA, 25 bp, SARS Virus
ctcatacgactacagaaagtgaaca

SEQ ID NO: 64171 - DNA, 25 bp, SARS Virus
tcatacgactaccgaaagtgaacat

SEQ ID NO: 64172 - DNA, 25 bp, SARS Virus
catacgactacacaaagtgaacata

SEQ ID NO: 64173 - DNA, 25 bp, SARS Virus
atacgactacagcaagtgaacataa

SEQ ID NO: 64174 - DNA, 25 bp, SARS Virus
tacgactacagacagtgaacataaa

SEQ ID NO: 64175 - DNA, 25 bp, SARS Virus
acgactacagaacgtgaacataaat

SEQ ID NO: 64176 - DNA, 25 bp, SARS Virus
cgactacagaaactgaacataaatg

SEQ ID NO: 64177 - DNA, 25 bp, SARS Virus
gactacagaaagcgaacataaatgt

SEQ ID NO: 64178 - DNA, 25 bp, SARS Virus
actacagaaagtcaacataaatgtt

SEQ ID NO: 64179 - DNA, 25 bp, SARS Virus
ctacagaaagtgcacataaatgtta

SEQ ID NO: 64180 - DNA, 25 bp, SARS Virus
tacagaaagtgaccataaatgttat

SEQ ID NO: 64181 - DNA, 25 bp, SARS Virus
acagaaagtgaacataaatgttatg

SEQ ID NO: 64182 - DNA, 25 bp, SARS Virus
cagaaagtgaacctaaatgttatgt

SEQ ID NO: 64183 - DNA, 25 bp, SARS Virus
agaaagtgaacacaaatgttatgta

SEQ ID NO: 64184 - DNA, 25 bp, SARS Virus
gaaagtgaacatcaatgttatgtaa

SEQ ID NO: 64185 - DNA, 25 bp, SARS Virus
aaagtgaacatacatgttatgtaat

SEQ ID NO: 64186 - DNA, 25 bp, SARS Virus
aagtgaacataactgttatgtaatc

SEQ ID NO: 64187 - DNA, 25 bp, SARS Virus
agtgaacataaacgttatgtaatct

SEQ ID NO: 64188 - DNA, 25 bp, SARS Virus
gtgaacataaatcttatgtaatctt

SEQ ID NO: 64189 - DNA, 25 bp, SARS Virus
tgaacataaatgctatgtaatcttt

SEQ ID NO: 64190 - DNA, 25 bp, SARS Virus
gaacataaatgtcatgtaatctttc

SEQ ID NO: 64191 - DNA, 25 bp, SARS Virus
aacataaatgttctgtaatctttca

SEQ ID NO: 64192 - DNA, 25 bp, SARS Virus
acataaatgttacgtaatctttcaa

SEQ ID NO: 64193 - DNA, 25 bp, SARS Virus
cataaatgttatctaatctttcaat

SEQ ID NO: 64194 - DNA, 25 bp, SARS Virus
ataaatgttatgcaatctttcaatg

SEQ ID NO: 64195 - DNA, 25 bp, SARS Virus
taaatgttatgtcatctttcaatgt

SEQ ID NO: 64196 - DNA, 25 bp, SARS Virus
aaatgttatgtactctttcaatgta

SEQ ID NO: 64197 - DNA, 25 bp, SARS Virus
aatgttatgtaacctttcaatgtac

SEQ ID NO: 64198 - DNA, 25 bp, SARS Virus
atgttatgtaatctttcaatgtact

SEQ ID NO: 64199 - DNA, 25 bp, SARS Virus
tgttatgtaatccttcaatgtacta

SEQ ID NO: 64200 - DNA, 25 bp, SARS Virus
gttatgtaatctctcaatgtactac

SEQ ID NO: 64201 - DNA, 25 bp, SARS Virus
ttatgtaatcttccaatgtactact

SEQ ID NO: 64202 - DNA, 25 bp, SARS Virus
tatgtaatctttcaatgtactactc

SEQ ID NO: 64203 - DNA, 25 bp, SARS Virus
atgtaatctttccatgtactactcg

SEQ ID NO: 64204 - DNA, 25 bp, SARS Virus
tgtaatctttcactgtactactcga

SEQ ID NO: 64205 - DNA, 25 bp, SARS Virus
gtaatctttcaacgtactactcgaa

SEQ ID NO: 64206 - DNA, 25 bp, SARS Virus
taatctttcaatctactactcgaat

SEQ ID NO: 64207 - DNA, 25 bp, SARS Virus
aatctttcaatgcactactcgaatg

SEQ ID NO: 64208 - DNA, 25 bp, SARS Virus
atctttcaatgtcctactcgaatga

SEQ ID NO: 64209 - DNA, 25 bp, SARS Virus
tctttcaatgtactactcgaatgac

SEQ ID NO: 64210 - DNA, 25 bp, SARS Virus
ctttcaatgtaccactcgaatgacc

SEQ ID NO: 64211 - DNA, 25 bp, SARS Virus
tttcaatgtactcctcgaatgaccg

SEQ ID NO: 64212 - DNA, 25 bp, SARS Virus
ttcaatgtactactcgaatgaccgg

SEQ ID NO: 64213 - DNA, 25 bp, SARS Virus
tcaatgtactacccgaatgaccggt

SEQ ID NO: 64214 - DNA, 25 bp, SARS Virus
caatgtactactcgaatgaccggtg

SEQ ID NO: 64215 - DNA, 25 bp, SARS Virus
aatgtactactccaatgaccggtgt

SEQ ID NO: 64216 - DNA, 25 bp, SARS Virus
atgtactactcgcatgaccggtgta

SEQ ID NO: 64217 - DNA, 25 bp, SARS Virus
tgtactactcgactgaccggtgtac

SEQ ID NO: 64218 - DNA, 25 bp, SARS Virus
gtactactcgaacgaccggtgtaca

SEQ ID NO: 64219 - DNA, 25 bp, SARS Virus
tactactcgaatcaccggtgtacaa

SEQ ID NO: 64220 - DNA, 25 bp, SARS Virus
actactcgaatgcccggtgtacaac

SEQ ID NO: 64221 - DNA, 25 bp, SARS Virus
ctactcgaatgaccggtgtacaacc

SEQ ID NO: 64222 - DNA, 25 bp, SARS Virus
tactcgaatgaccggtgtacaacct

SEQ ID NO: 64223 - DNA, 25 bp, SARS Virus
actcgaatgacccgtgtacaacctg

SEQ ID NO: 64224 - DNA, 25 bp, SARS Virus
ctcgaatgaccgctgtacaacctgt

SEQ ID NO: 64225 - DNA, 25 bp, SARS Virus
tcgaatgaccggcgtacaacctgta

SEQ ID NO: 64226 - DNA, 25 bp, SARS Virus
cgaatgaccggtctacaacctgtac

SEQ ID NO: 64227 - DNA, 25 bp, SARS Virus
gaatgaccggtgcacaacctgtaca

SEQ ID NO: 64228 - DNA, 25 bp, SARS Virus
aatgaccggtgtccaacctgtacat

SEQ ID NO: 64229 - DNA, 25 bp, SARS Virus
atgaccggtgtacaacctgtacata

SEQ ID NO: 64230 - DNA, 25 bp, SARS Virus
tgaccggtgtaccacctgtacataa

SEQ ID NO: 64231 - DNA, 25 bp, SARS Virus
gaccggtgtacaccctgtacataag

SEQ ID NO: 64232 - DNA, 25 bp, SARS Virus
accggtgtacaacctgtacataagg

SEQ ID NO: 64233 - DNA, 25 bp, SARS Virus
ccggtgtacaacctgtacataaggc

SEQ ID NO: 64234 - DNA, 25 bp, SARS Virus
cggtgtacaacccgtacataaggca

SEQ ID NO: 64235 - DNA, 25 bp, SARS Virus
ggtgtacaacctctacataaggcat

SEQ ID NO: 64236 - DNA, 25 bp, SARS Virus
gtgtacaacctgcacataaggcatt

SEQ ID NO: 64237 - DNA, 25 bp, SARS Virus
tgtacaacctgtccataaggcatta

SEQ ID NO: 64238 - DNA, 25 bp, SARS Virus
gtacaacctgtacataaggcattac

SEQ ID NO: 64239 - DNA, 25 bp, SARS Virus
tacaacctgtacctaaggcattacg

SEQ ID NO: 64240 - DNA, 25 bp, SARS Virus
acaacctgtacacaaggcattacga

SEQ ID NO: 64241 - DNA, 25 bp, SARS Virus
caacctgtacatcaggcattacgat

SEQ ID NO: 64242 - DNA, 25 bp, SARS Virus
aacctgtacatacggcattacgatt

SEQ ID NO: 64243 - DNA, 25 bp, SARS Virus
acctgtacataacgcattacgattg

SEQ ID NO: 64244 - DNA, 25 bp, SARS Virus
cctgtacataagccattacgattga

SEQ ID NO: 64245 - DNA, 25 bp, SARS Virus
ctgtacataaggcattacgattgat

SEQ ID NO: 64246 - DNA, 25 bp, SARS Virus
tgtacataaggccttacgattgatt

SEQ ID NO: 64247 - DNA, 25 bp, SARS Virus
gtacataaggcactacgattgatta

SEQ ID NO: 64248 - DNA, 25 bp, SARS Virus
tacataaggcatcacgattgattac

SEQ ID NO: 64249 - DNA, 25 bp, SARS Virus
acataaggcattccgattgattact

SEQ ID NO: 64250 - DNA, 25 bp, SARS Virus
cataaggcattacgattgattacta

SEQ ID NO: 64251 - DNA, 25 bp, SARS Virus
ataaggcattaccattgattactat

SEQ ID NO: 64252 - DNA, 25 bp, SARS Virus
taaggcattacgcttgattactatt

SEQ ID NO: 64253 - DNA, 25 bp, SARS Virus
aaggcattacgactgattactattg

SEQ ID NO: 64254 - DNA, 25 bp, SARS Virus
aggcattacgatcgattactattgt

SEQ ID NO: 64255 - DNA, 25 bp, SARS Virus
ggcattacgattcattactattgtg

SEQ ID NO: 64256 - DNA, 25 bp, SARS Virus
gcattacgattgcttactattgtgg

SEQ ID NO: 64257 - DNA, 25 bp, SARS Virus
cattacgattgactactattgtgga

SEQ ID NO: 64258 - DNA, 25 bp, SARS Virus
attacgattgatcactattgtggag

SEQ ID NO: 64259 - DNA, 25 bp, SARS Virus
ttacgattgattcctattgtggagt

SEQ ID NO: 64260 - DNA, 25 bp, SARS Virus
tacgattgattactattgtggagtg

SEQ ID NO: 64261 - DNA, 25 bp, SARS Virus
acgattgattaccattgtggagtgc

SEQ ID NO: 64262 - DNA, 25 bp, SARS Virus
cgattgattactcttgtggagtgcc

SEQ ID NO: 64263 - DNA, 25 bp, SARS Virus
gattgattactactgtggagtgcca

SEQ ID NO: 64264 - DNA, 25 bp, SARS Virus
attgattactatcgtggagtgccat

SEQ ID NO: 64265 - DNA, 25 bp, SARS Virus
ttgattactattctggagtgccatg

SEQ ID NO: 64266 - DNA, 25 bp, SARS Virus
tgattactattgcggagtgccatga

SEQ ID NO: 64267 - DNA, 25 bp, SARS Virus
gattactattgtcgagtgccatgac

SEQ ID NO: 64268 - DNA, 25 bp, SARS Virus
attactattgtgcagtgccatgacc

SEQ ID NO: 64269 - DNA, 25 bp, SARS Virus
ttactattgtggcgtgccatgaccc

SEQ ID NO: 64270 - DNA, 25 bp, SARS Virus
tactattgtggactgccatgaccct

SEQ ID NO: 64271 - DNA, 25 bp, SARS Virus
actattgtggagcgccatgaccctt

SEQ ID NO: 64272 - DNA, 25 bp, SARS Virus
ctattgtggagtcccatgacccttg

SEQ ID NO: 64273 - DNA, 25 bp, SARS Virus
tattgtggagtgccatgacccttgg

SEQ ID NO: 64274 - DNA, 25 bp, SARS Virus
attgtggagtgccatgacccttgga

SEQ ID NO: 64275 - DNA, 25 bp, SARS Virus
ttgtggagtgccctgacccttggac

SEQ ID NO: 64276 - DNA, 25 bp, SARS Virus
tgtggagtgccacgacccttggact

SEQ ID NO: 64277 - DNA, 25 bp, SARS Virus
gtggagtgccatcacccttggactc

SEQ ID NO: 64278 - DNA, 25 bp, SARS Virus
tggagtgccatgccccttggactca

SEQ ID NO: 64279 - DNA, 25 bp, SARS Virus
ggagtgccatgacccttggactcaa

SEQ ID NO: 64280 - DNA, 25 bp, SARS Virus
gagtgccatgacccttggactcaaa

SEQ ID NO: 64281 - DNA, 25 bp, SARS Virus
agtgccatgacccttggactcaaaa

SEQ ID NO: 64282 - DNA, 25 bp, SARS Virus
gtgccatgacccctggactcaaaat

SEQ ID NO: 64283 - DNA, 25 bp, SARS Virus
tgccatgaccctcggactcaaaata

SEQ ID NO: 64284 - DNA, 25 bp, SARS Virus
gccatgacccttcgactcaaaatac

SEQ ID NO: 64285 - DNA, 25 bp, SARS Virus
ccatgacccttgcactcaaaatact

SEQ ID NO: 64286 - DNA, 25 bp, SARS Virus
catgacccttggcctcaaaatactc

SEQ ID NO: 64287 - DNA, 25 bp, SARS Virus
atgacccttggactcaaaatactcc

SEQ ID NO: 64288 - DNA, 25 bp, SARS Virus
tgacccttggacccaaaatactccg

SEQ ID NO: 64289 - DNA, 25 bp, SARS Virus
gacccttggactcaaaatactccga

SEQ ID NO: 64290 - DNA, 25 bp, SARS Virus
acccttggactccaaatactccgat

SEQ ID NO: 64291 - DNA, 25 bp, SARS Virus
cccttggactcacaatactccgata

SEQ ID NO: 64292 - DNA, 25 bp, SARS Virus
ccttggactcaacatactccgatac

SEQ ID NO: 64293 - DNA, 25 bp, SARS Virus
cttggactcaaactactccgataca

SEQ ID NO: 64294 - DNA, 25 bp, SARS Virus
ttggactcaaaacactccgatacat

SEQ ID NO: 64295 - DNA, 25 bp, SARS Virus
tggactcaaaatcctccgatacatg

SEQ ID NO: 64296 - DNA, 25 bp, SARS Virus
ggactcaaaatactccgatacatgt

SEQ ID NO: 64297 - DNA, 25 bp, SARS Virus
gactcaaaataccccgatacatgtg

SEQ ID NO: 64298 - DNA, 25 bp, SARS Virus
actcaaaatactccgatacatgtgt

SEQ ID NO: 64299 - DNA, 25 bp, SARS Virus
ctcaaaatactccgatacatgtgtg

SEQ ID NO: 64300 - DNA, 25 bp, SARS Virus
tcaaaatactcccatacatgtgtgg

SEQ ID NO: 64301 - DNA, 25 bp, SARS Virus
caaaatactccgctacatgtgtggt

SEQ ID NO: 64302 - DNA, 25 bp, SARS Virus
aaaatactccgacacatgtgtggtg

SEQ ID NO: 64303 - DNA, 25 bp, SARS Virus
aaatactccgatccatgtgtggtgt

SEQ ID NO: 64304 - DNA, 25 bp, SARS Virus
aatactccgatacatgtgtggtgta

SEQ ID NO: 64305 - DNA, 25 bp, SARS Virus
atactccgatacctgtgtggtgtat

SEQ ID NO: 64306 - DNA, 25 bp, SARS Virus
tactccgatacacgtgtggtgtatg

SEQ ID NO: 64307 - DNA, 25 bp, SARS Virus
actccgatacatctgtggtgtatgt

SEQ ID NO: 64308 - DNA, 25 bp, SARS Virus
ctccgatacatgcgtggtgtatgtc

SEQ ID NO: 64309 - DNA, 25 bp, SARS Virus
tccgatacatgtctggtgtatgtca

SEQ ID NO: 64310 - DNA, 25 bp, SARS Virus
ccgatacatgtgcggtgtatgtcag

SEQ ID NO: 64311 - DNA, 25 bp, SARS Virus
cgatacatgtgtcgtgtatgtcaga

SEQ ID NO: 64312 - DNA, 25 bp, SARS Virus
gatacatgtgtgctgtatgtcagaa

SEQ ID NO: 64313 - DNA, 25 bp, SARS Virus
atacatgtgtggcgtatgtcagaac

SEQ ID NO: 64314 - DNA, 25 bp, SARS Virus
tacatgtgtggtctatgtcagaacg

SEQ ID NO: 64315 - DNA, 25 bp, SARS Virus
acatgtgtggtgcatgtcagaacgt

SEQ ID NO: 64316 - DNA, 25 bp, SARS Virus
catgtgtggtgtctgtcagaacgtc

SEQ ID NO: 64317 - DNA, 25 bp, SARS Virus
atgtgtggtgtacgtcagaacgtcc

SEQ ID NO: 64318 - DNA, 25 bp, SARS Virus
tgtgtggtgtatctcagaacgtccg

SEQ ID NO: 64319 - DNA, 25 bp, SARS Virus
gtgtggtgtatgccagaacgtccga

SEQ ID NO: 64320 - DNA, 25 bp, SARS Virus
tgtggtgtatgtcagaacgtccgac

SEQ ID NO: 64321 - DNA, 25 bp, SARS Virus
gtggtgtatgtccgaacgtccgaca

SEQ ID NO: 64322 - DNA, 25 bp, SARS Virus
tggtgtatgtcacaacgtccgacat

SEQ ID NO: 64323 - DNA, 25 bp, SARS Virus
ggtgtatgtcagcacgtccgacatc

SEQ ID NO: 64324 - DNA, 25 bp, SARS Virus
gtgtatgtcagaccgtccgacatcc

SEQ ID NO: 64325 - DNA, 25 bp, SARS Virus
tgtatgtcagaacgtccgacatcca

SEQ ID NO: 64326 - DNA, 25 bp, SARS Virus
gtatgtcagaacctccgacatccac

SEQ ID NO: 64327 - DNA, 25 bp, SARS Virus
tatgtcagaacgcccgacatccacg

SEQ ID NO: 64328 - DNA, 25 bp, SARS Virus
atgtcagaacgtccgacatccacga

SEQ ID NO: 64329 - DNA, 25 bp, SARS Virus
tgtcagaacgtccgacatccacgaa

SEQ ID NO: 64330 - DNA, 25 bp, SARS Virus
gtcagaacgtcccacatccacgaac

SEQ ID NO: 64331 - DNA, 25 bp, SARS Virus
tcagaacgtccgccatccacgaaca

SEQ ID NO: 64332 - DNA, 25 bp, SARS Virus
cagaacgtccgacatccacgaacac

SEQ ID NO: 64333 - DNA, 25 bp, SARS Virus
agaacgtccgacctccacgaacaca

SEQ ID NO: 64334 - DNA, 25 bp, SARS Virus
gaacgtccgacacccacgaacacat

SEQ ID NO: 64335 - DNA, 25 bp, SARS Virus
aacgtccgacatccacgaacacata

SEQ ID NO: 64336 - DNA, 25 bp, SARS Virus
acgtccgacatccacgaacacataa

SEQ ID NO: 64337 - DNA, 25 bp, SARS Virus
cgtccgacatccccgaacacataac

SEQ ID NO: 64338 - DNA, 25 bp, SARS Virus
gtccgacatccacgaacacataaca

SEQ ID NO: 64339 - DNA, 25 bp, SARS Virus
tccgacatccaccaacacataacac

SEQ ID NO: 64340 - DNA, 25 bp, SARS Virus
ccgacatccacgcacacataacacg

SEQ ID NO: 64341 - DNA, 25 bp, SARS Virus
cgacatccacgaccacataacacgt

SEQ ID NO: 64342 - DNA, 25 bp, SARS Virus
gacatccacgaacacataacacgtt

SEQ ID NO: 64343 - DNA, 25 bp, SARS Virus
acatccacgaacccataacacgtta

SEQ ID NO: 64344 - DNA, 25 bp, SARS Virus
catccacgaacacataacacgttaa

SEQ ID NO: 64345 - DNA, 25 bp, SARS Virus
atccacgaacacctaacacgttaag

SEQ ID NO: 64346 - DNA, 25 bp, SARS Virus
tccacgaacacacaacacgttaagt

SEQ ID NO: 64347 - DNA, 25 bp, SARS Virus
ccacgaacacatcacacgttaagtg

SEQ ID NO: 64348 - DNA, 25 bp, SARS Virus
cacgaacacataccacgttaagtgt

SEQ ID NO: 64349 - DNA, 25 bp, SARS Virus
acgaacacataacacgttaagtgtc

SEQ ID NO: 64350 - DNA, 25 bp, SARS Virus
cgaacacataacccgttaagtgtct

SEQ ID NO: 64351 - DNA, 25 bp, SARS Virus
gaacacataacacgttaagtgtctg

SEQ ID NO: 64352 - DNA, 25 bp, SARS Virus
aacacataacaccttaagtgtctga

SEQ ID NO: 64353 - DNA, 25 bp, SARS Virus
acacataacacgctaagtgtctgaa

SEQ ID NO: 64354 - DNA, 25 bp, SARS Virus
cacataacacgtcaagtgtctgaag

SEQ ID NO: 64355 - DNA, 25 bp, SARS Virus
acataacacgttcagtgtctgaagt

SEQ ID NO: 64356 - DNA, 25 bp, SARS Virus
cataacacgttacgtgtctgaagtg

SEQ ID NO: 64357 - DNA, 25 bp, SARS Virus
ataacacgttaactgtctgaagtga

SEQ ID NO: 64358 - DNA, 25 bp, SARS Virus
taacacgttaagcgtctgaagtgaa

SEQ ID NO: 64359 - DNA, 25 bp, SARS Virus
aacacgttaagtctctgaagtgaag

SEQ ID NO: 64360 - DNA, 25 bp, SARS Virus
acacgttaagtgcctgaagtgaagc

SEQ ID NO: 64361 - DNA, 25 bp, SARS Virus
cacgttaagtgtctgaagtgaagca

SEQ ID NO: 64362 - DNA, 25 bp, SARS Virus
acgttaagtgtccgaagtgaagcaa

SEQ ID NO: 64363 - DNA, 25 bp, SARS Virus
cgttaagtgtctcaagtgaagcaac

SEQ ID NO: 64364 - DNA, 25 bp, SARS Virus
gttaagtgtctgcagtgaagcaacg

SEQ ID NO: 64365 - DNA, 25 bp, SARS Virus
ttaagtgtctgacgtgaagcaacgc

SEQ ID NO: 64366 - DNA, 25 bp, SARS Virus
taagtgtctgaactgaagcaacgcc

SEQ ID NO: 64367 - DNA, 25 bp, SARS Virus
aagtgtctgaagcgaagcaacgcca

SEQ ID NO: 64368 - DNA, 25 bp, SARS Virus
agtgtctgaagtcaagcaacgccac

SEQ ID NO: 64369 - DNA, 25 bp, SARS Virus
gtgtctgaagtgcagcaacgccacg

SEQ ID NO: 64370 - DNA, 25 bp, SARS Virus
tgtctgaagtgacgcaacgccacgg

SEQ ID NO: 64371 - DNA, 25 bp, SARS Virus
gtctgaagtgaaccaacgccacgga

SEQ ID NO: 64372 - DNA, 25 bp, SARS Virus
tctgaagtgaagcaacgccacggac

SEQ ID NO: 64373 - DNA, 25 bp, SARS Virus
ctgaagtgaagccacgccacggaca

SEQ ID NO: 64374 - DNA, 25 bp, SARS Virus
tgaagtgaagcaccgccacggacat

SEQ ID NO: 64375 - DNA, 25 bp, SARS Virus
gaagtgaagcaacgccacggacata

SEQ ID NO: 64376 - DNA, 25 bp, SARS Virus
aagtgaagcaaccccacggacataa

SEQ ID NO: 64377 - DNA, 25 bp, SARS Virus
agtgaagcaacgccacggacataat

SEQ ID NO: 64378 - DNA, 25 bp, SARS Virus
gtgaagcaacgccacggacataatc

SEQ ID NO: 64379 - DNA, 25 bp, SARS Virus
tgaagcaacgccccggacataatcc

SEQ ID NO: 64380 - DNA, 25 bp, SARS Virus
gaagcaacgccacggacataatcct

SEQ ID NO: 64381 - DNA, 25 bp, SARS Virus
aagcaacgccaccgacataatcctc

SEQ ID NO: 64382 - DNA, 25 bp, SARS Virus
agcaacgccacgcacataatcctct

SEQ ID NO: 64383 - DNA, 25 bp, SARS Virus
gcaacgccacggccataatcctctg

SEQ ID NO: 64384 - DNA, 25 bp, SARS Virus
caacgccacggacataatcctctgg

SEQ ID NO: 64385 - DNA, 25 bp, SARS Virus
aacgccacggacctaatcctctggt

SEQ ID NO: 64386 - DNA, 25 bp, SARS Virus
acgccacggacacaatcctctggta

SEQ ID NO: 64387 - DNA, 25 bp, SARS Virus
cgccacggacatcatcctctggtaa

SEQ ID NO: 64388 - DNA, 25 bp, SARS Virus
gccacggacatactcctctggtaag

SEQ ID NO: 64389 - DNA, 25 bp, SARS Virus
ccacggacataaccctctggtaagg

SEQ ID NO: 64390 - DNA, 25 bp, SARS Virus
cacggacataatcctctggtaagga

SEQ ID NO: 64391 - DNA, 25 bp, SARS Virus
acggacataatcctctggtaaggat

SEQ ID NO: 64392 - DNA, 25 bp, SARS Virus
cggacataatcccctggtaaggata

SEQ ID NO: 64393 - DNA, 25 bp, SARS Virus
ggacataatcctctggtaaggatac

SEQ ID NO: 64394 - DNA, 25 bp, SARS Virus
gacataatcctccggtaaggataca

SEQ ID NO: 64395 - DNA, 25 bp, SARS Virus
acataatcctctcgtaaggatacaa

SEQ ID NO: 64396 - DNA, 25 bp, SARS Virus
cataatcctctgctaaggatacaac

SEQ ID NO: 64397 - DNA, 25 bp, SARS Virus
ataatcctctggcaaggatacaacg

SEQ ID NO: 64398 - DNA, 25 bp, SARS Virus
taatcctctggtcaggatacaacgt

SEQ ID NO: 64399 - DNA, 25 bp, SARS Virus
aatcctctggtacggatacaacgtt

SEQ ID NO: 64400 - DNA, 25 bp, SARS Virus
atcctctggtaacgatacaacgttc

SEQ ID NO: 64401 - DNA, 25 bp, SARS Virus
tcctctggtaagcatacaacgttca

SEQ ID NO: 64402 - DNA, 25 bp, SARS Virus
cctctggtaaggctacaacgttcac

SEQ ID NO: 64403 - DNA, 25 bp, SARS Virus
ctctggtaaggacacaacgttcacg

SEQ ID NO: 64404 - DNA, 25 bp, SARS Virus
tctggtaaggatccaacgttcacga

SEQ ID NO: 64405 - DNA, 25 bp, SARS Virus
ctggtaaggatacaacgttcacgac

SEQ ID NO: 64406 - DNA, 25 bp, SARS Virus
tggtaaggataccacgttcacgacg

SEQ ID NO: 64407 - DNA, 25 bp, SARS Virus
ggtaaggatacaccgttcacgacga

SEQ ID NO: 64408 - DNA, 25 bp, SARS Virus
gtaaggatacaacgttcacgacgat

SEQ ID NO: 64409 - DNA, 25 bp, SARS Virus
taaggatacaaccttcacgacgata

SEQ ID NO: 64410 - DNA, 25 bp, SARS Virus
aaggatacaacgctcacgacgatac

SEQ ID NO: 64411 - DNA, 25 bp, SARS Virus
aggatacaacgtccacgacgatact

SEQ ID NO: 64412 - DNA, 25 bp, SARS Virus
ggatacaacgttcacgacgatactg

SEQ ID NO: 64413 - DNA, 25 bp, SARS Virus
gatacaacgttcccgacgatactgg

SEQ ID NO: 64414 - DNA, 25 bp, SARS Virus
atacaacgttcacgacgatactggt

SEQ ID NO: 64415 - DNA, 25 bp, SARS Virus
tacaacgttcaccacgatactggta

SEQ ID NO: 64416 - DNA, 25 bp, SARS Virus
acaacgttcacgccgatactggtac

SEQ ID NO: 64417 - DNA, 25 bp, SARS Virus
caacgttcacgacgatactggtaca

SEQ ID NO: 64418 - DNA, 25 bp, SARS Virus
aacgttcacgaccatactggtacag

SEQ ID NO: 64419 - DNA, 25 bp, SARS Virus
acgttcacgacgctactggtacagt

SEQ ID NO: 64420 - DNA, 25 bp, SARS Virus
cgttcacgacgacactggtacagta

SEQ ID NO: 64421 - DNA, 25 bp, SARS Virus
gttcacgacgatcctggtacagtaa

SEQ ID NO: 64422 - DNA, 25 bp, SARS Virus
ttcacgacgatactggtacagtaaa

SEQ ID NO: 64423 - DNA, 25 bp, SARS Virus
tcacgacgataccggtacagtaaag

SEQ ID NO: 64424 - DNA, 25 bp, SARS Virus
cacgacgatactcgtacagtaaagt

SEQ ID NO: 64425 - DNA, 25 bp, SARS Virus
acgacgatactgctacagtaaagtt

SEQ ID NO: 64426 - DNA, 25 bp, SARS Virus
cgacgatactggcacagtaaagttg

SEQ ID NO: 64427 - DNA, 25 bp, SARS Virus
gacgatactggtccagtaaagttgt

SEQ ID NO: 64428 - DNA, 25 bp, SARS Virus
acgatactggtacagtaaagttgta

SEQ ID NO: 64429 - DNA, 25 bp, SARS Virus
cgatactggtaccgtaaagttgtag

SEQ ID NO: 64430 - DNA, 25 bp, SARS Virus
gatactggtacactaaagttgtagt

SEQ ID NO: 64431 - DNA, 25 bp, SARS Virus
atactggtacagcaaagttgtagtg

SEQ ID NO: 64432 - DNA, 25 bp, SARS Virus
tactggtacagtcaagttgtagtgt

SEQ ID NO: 64433 - DNA, 25 bp, SARS Virus
actggtacagtacagttgtagtgtg

SEQ ID NO: 64434 - DNA, 25 bp, SARS Virus
ctggtacagtaacgttgtagtgtgt

SEQ ID NO: 64435 - DNA, 25 bp, SARS Virus
tggtacagtaaacttgtagtgtgtt

SEQ ID NO: 64436 - DNA, 25 bp, SARS Virus
ggtacagtaaagctgtagtgtgttt

SEQ ID NO: 64437 - DNA, 25 bp, SARS Virus
gtacagtaaagtcgtagtgtgttta

SEQ ID NO: 64438 - DNA, 25 bp, SARS Virus
tacagtaaagttctagtgtgtttaa

SEQ ID NO: 64439 - DNA, 25 bp, SARS Virus
acagtaaagttgcagtgtgtttaat

SEQ ID NO: 64440 - DNA, 25 bp, SARS Virus
cagtaaagttgtcgtgtgtttaatc

SEQ ID NO: 64441 - DNA, 25 bp, SARS Virus
agtaaagttgtactgtgtttaatca

SEQ ID NO: 64442 - DNA, 25 bp, SARS Virus
gtaaagttgtagcgtgtttaatcac

SEQ ID NO: 64443 - DNA, 25 bp, SARS Virus
taaagttgtagtctgtttaatcaca

SEQ ID NO: 64444 - DNA, 25 bp, SARS Virus
aaagttgtagtgcgtttaatcacaa

SEQ ID NO: 64445 - DNA, 25 bp, SARS Virus
aagttgtagtgtctttaatcacaac

SEQ ID NO: 64446 - DNA, 25 bp, SARS Virus
agttgtagtgtgcttaatcacaaca

SEQ ID NO: 64447 - DNA, 25 bp, SARS Virus
gttgtagtgtgtctaatcacaacag

SEQ ID NO: 64448 - DNA, 25 bp, SARS Virus
ttgtagtgtgttcaatcacaacaga

SEQ ID NO: 64449 - DNA, 25 bp, SARS Virus
tgtagtgtgtttcatcacaacagac

SEQ ID NO: 64450 - DNA, 25 bp, SARS Virus
gtagtgtgtttactcacaacagaca

SEQ ID NO: 64451 - DNA, 25 bp, SARS Virus
tagtgtgtttaaccacaacagacaa

SEQ ID NO: 64452 - DNA, 25 bp, SARS Virus
agtgtgtttaatcacaacagacaat

SEQ ID NO: 64453 - DNA, 25 bp, SARS Virus
gtgtgtttaatcccaacagacaatt

SEQ ID NO: 64454 - DNA, 25 bp, SARS Virus
tgtgtttaatcacaacagacaatta

SEQ ID NO: 64455 - DNA, 25 bp, SARS Virus
gtgtttaatcaccacagacaattag

SEQ ID NO: 64456 - DNA, 25 bp, SARS Virus
tgtttaatcacaccagacaattagg

SEQ ID NO: 64457 - DNA, 25 bp, SARS Virus
gtttaatcacaacagacaattaggg

SEQ ID NO: 64458 - DNA, 25 bp, SARS Virus
tttaatcacaaccgacaattaggga

SEQ ID NO: 64459 - DNA, 25 bp, SARS Virus
ttaatcacaacacacaattagggat

SEQ ID NO: 64460 - DNA, 25 bp, SARS Virus
taatcacaacagccaattagggata

SEQ ID NO: 64461 - DNA, 25 bp, SARS Virus
aatcacaacagacaattagggatac

SEQ ID NO: 64462 - DNA, 25 bp, SARS Virus
atcacaacagaccattagggataca

SEQ ID NO: 64463 - DNA, 25 bp, SARS Virus
tcacaacagacacttagggatacaa

SEQ ID NO: 64464 - DNA, 25 bp, SARS Virus
cacaacagacaactagggatacaaa

SEQ ID NO: 64465 - DNA, 25 bp, SARS Virus
acaacagacaatcagggatacaaac

SEQ ID NO: 64466 - DNA, 25 bp, SARS Virus
caacagacaattcgggatacaaacg

SEQ ID NO: 64467 - DNA, 25 bp, SARS Virus
aacagacaattacggatacaaacgt

SEQ ID NO: 64468 - DNA, 25 bp, SARS Virus
acagacaattagcgatacaaacgtt

SEQ ID NO: 64469 - DNA, 25 bp, SARS Virus
cagacaattaggcatacaaacgtta

SEQ ID NO: 64470 - DNA, 25 bp, SARS Virus
agacaattagggctacaaacgttac

SEQ ID NO: 64471 - DNA, 25 bp, SARS Virus
gacaattagggacacaaacgttacg

SEQ ID NO: 64472 - DNA, 25 bp, SARS Virus
acaattagggatccaaacgttacgg

SEQ ID NO: 64473 - DNA, 25 bp, SARS Virus
caattagggatacaaacgttacggg

SEQ ID NO: 64474 - DNA, 25 bp, SARS Virus
aattagggataccaacgttacgggg

SEQ ID NO: 64475 - DNA, 25 bp, SARS Virus
attagggatacacacgttacggggt

SEQ ID NO: 64476 - DNA, 25 bp, SARS Virus
ttagggatacaaccgttacggggtc

SEQ ID NO: 64477 - DNA, 25 bp, SARS Virus
tagggatacaaacgttacggggtcc

SEQ ID NO: 64478 - DNA, 25 bp, SARS Virus
agggatacaaaccttacggggtcca

SEQ ID NO: 64479 - DNA, 25 bp, SARS Virus
gggatacaaacgctacggggtccaa

SEQ ID NO: 64480 - DNA, 25 bp, SARS Virus
ggatacaaacgtcacggggtccaac

SEQ ID NO: 64481 - DNA, 25 bp, SARS Virus
gatacaaacgttccggggtccaaca

SEQ ID NO: 64482 - DNA, 25 bp, SARS Virus
atacaaacgttacggggtccaacac

SEQ ID NO: 64483 - DNA, 25 bp, SARS Virus
tacaaacgttaccgggtccaacact

SEQ ID NO: 64484 - DNA, 25 bp, SARS Virus
acaaacgttacgcggtccaacacta

SEQ ID NO: 64485 - DNA, 25 bp, SARS Virus
caaacgttacggcgtccaacactac

SEQ ID NO: 64486 - DNA, 25 bp, SARS Virus
aaacgttacgggctccaacactaca

SEQ ID NO: 64487 - DNA, 25 bp, SARS Virus
aacgttacggggcccaacactacag

SEQ ID NO: 64488 - DNA, 25 bp, SARS Virus
acgttacggggtccaacactacagt

SEQ ID NO: 64489 - DNA, 25 bp, SARS Virus
cgttacggggtccaacactacagtg

SEQ ID NO: 64490 - DNA, 25 bp, SARS Virus
gttacggggtcccacactacagtga

SEQ ID NO: 64491 - DNA, 25 bp, SARS Virus
ttacggggtccaccactacagtgac

SEQ ID NO: 64492 - DNA, 25 bp, SARS Virus
tacggggtccaacactacagtgact

SEQ ID NO: 64493 - DNA, 25 bp, SARS Virus
acggggtccaaccctacagtgacta

SEQ ID NO: 64494 - DNA, 25 bp, SARS Virus
cggggtccaacactacagtgactac

SEQ ID NO: 64495 - DNA, 25 bp, SARS Virus
ggggtccaacaccacagtgactaca

SEQ ID NO: 64496 - DNA, 25 bp, SARS Virus
gggtccaacactccagtgactacac

SEQ ID NO: 64497 - DNA, 25 bp, SARS Virus
ggtccaacactacagtgactacact

SEQ ID NO: 64498 - DNA, 25 bp, SARS Virus
gtccaacactaccgtgactacactg

SEQ ID NO: 64499 - DNA, 25 bp, SARS Virus
tccaacactacactgactacactgt

SEQ ID NO: 64500 - DNA, 25 bp, SARS Virus
ccaacactacagcgactacactgtg

SEQ ID NO: 64501 - DNA, 25 bp, SARS Virus
caacactacagtcactacactgtgt

SEQ ID NO: 64502 - DNA, 25 bp, SARS Virus
aacactacagtgcctacactgtgtt

SEQ ID NO: 64503 - DNA, 25 bp, SARS Virus
acactacagtgactacactgtgttg

SEQ ID NO: 64504 - DNA, 25 bp, SARS Virus
cactacagtgaccacactgtgttga

SEQ ID NO: 64505 - DNA, 25 bp, SARS Virus
actacagtgactccactgtgttgac

SEQ ID NO: 64506 - DNA, 25 bp, SARS Virus
ctacagtgactacactgtgttgaca

SEQ ID NO: 64507 - DNA, 25 bp, SARS Virus
tacagtgactaccctgtgttgacat

SEQ ID NO: 64508 - DNA, 25 bp, SARS Virus
acagtgactacactgtgttgacata

SEQ ID NO: 64509 - DNA, 25 bp, SARS Virus
cagtgactacaccgtgttgacatag

SEQ ID NO: 64510 - DNA, 25 bp, SARS Virus
agtgactacactctgttgacataga

SEQ ID NO: 64511 - DNA, 25 bp, SARS Virus
gtgactacactgcgttgacatagat

SEQ ID NO: 64512 - DNA, 25 bp, SARS Virus
tgactacactgtcttgacatagatc

SEQ ID NO: 64513 - DNA, 25 bp, SARS Virus
gactacactgtgctgacatagatcc

SEQ ID NO: 64514 - DNA, 25 bp, SARS Virus
actacactgtgtcgacatagatcct

SEQ ID NO: 64515 - DNA, 25 bp, SARS Virus
ctacactgtgttcacatagatcctc

SEQ ID NO: 64516 - DNA, 25 bp, SARS Virus
tacactgtgttgccatagatcctcc

SEQ ID NO: 64517 - DNA, 25 bp, SARS Virus
acactgtgttgacatagatcctcca

SEQ ID NO: 64518 - DNA, 25 bp, SARS Virus
cactgtgttgacctagatcctccat

SEQ ID NO: 64519 - DNA, 25 bp, SARS Virus
actgtgttgacacagatcctccata

SEQ ID NO: 64520 - DNA, 25 bp, SARS Virus
ctgtgttgacatcgatcctccatac

SEQ ID NO: 64521 - DNA, 25 bp, SARS Virus
tgtgttgacatacatcctccatact

SEQ ID NO: 64522 - DNA, 25 bp, SARS Virus
gtgttgacatagctcctccatactc

SEQ ID NO: 64523 - DNA, 25 bp, SARS Virus
tgttgacatagaccctccatactcg

SEQ ID NO: 64524 - DNA, 25 bp, SARS Virus
gttgacatagatcctccatactcga

SEQ ID NO: 64525 - DNA, 25 bp, SARS Virus
ttgacatagatcctccatactcgat

SEQ ID NO: 64526 - DNA, 25 bp, SARS Virus
tgacatagatcccccatactcgata

SEQ ID NO: 64527 - DNA, 25 bp, SARS Virus
gacatagatcctccatactcgataa

SEQ ID NO: 64528 - DNA, 25 bp, SARS Virus
acatagatcctccatactcgataat

SEQ ID NO: 64529 - DNA, 25 bp, SARS Virus
catagatcctccctactcgataata

SEQ ID NO: 64530 - DNA, 25 bp, SARS Virus
atagatcctccacactcgataataa

SEQ ID NO: 64531 - DNA, 25 bp, SARS Virus
tagatcctccatcctcgataataac

SEQ ID NO: 64532 - DNA, 25 bp, SARS Virus
agatcctccatactcgataataacg

SEQ ID NO: 64533 - DNA, 25 bp, SARS Virus
gatcctccatacccgataataacgt

SEQ ID NO: 64534 - DNA, 25 bp, SARS Virus
atcctccatactcgataataacgtt

SEQ ID NO: 64535 - DNA, 25 bp, SARS Virus
tcctccatactccataataacgttc

SEQ ID NO: 64536 - DNA, 25 bp, SARS Virus
cctccatactcgctaataacgttca

SEQ ID NO: 64537 - DNA, 25 bp, SARS Virus
ctccatactcgacaataacgttcag

SEQ ID NO: 64538 - DNA, 25 bp, SARS Virus
tccatactcgatcataacgttcagt

SEQ ID NO: 64539 - DNA, 25 bp, SARS Virus
ccatactcgatactaacgttcagtg

SEQ ID NO: 64540 - DNA, 25 bp, SARS Virus
catactcgataacaacgttcagtgt

SEQ ID NO: 64541 - DNA, 25 bp, SARS Virus
atactcgataatcacgttcagtgta

SEQ ID NO: 64542 - DNA, 25 bp, SARS Virus
tactcgataataccgttcagtgtat

SEQ ID NO: 64543 - DNA, 25 bp, SARS Virus
actcgataataacgttcagtgtatt

SEQ ID NO: 64544 - DNA, 25 bp, SARS Virus
ctcgataataaccttcagtgtattc

SEQ ID NO: 64545 - DNA, 25 bp, SARS Virus
atccgcgtccgagaaaacagctact

SEQ ID NO: 64546 - DNA, 25 bp, SARS Virus
tccgcgtccgacgaaacagctacta

SEQ ID NO: 64547 - DNA, 25 bp, SARS Virus
ccgcgtccgacagaacagctactat

SEQ ID NO: 64548 - DNA, 25 bp, SARS Virus
cgcgtccgacaagacagctactata

SEQ ID NO: 64549 - DNA, 25 bp, SARS Virus
gcgtccgacaaagcagctactataa

SEQ ID NO: 64550 - DNA, 25 bp, SARS Virus
cgtccgacaaaagagctactataac

SEQ ID NO: 64551 - DNA, 25 bp, SARS Virus
gtccgacaaaacggctactataaca

SEQ ID NO: 64552 - DNA, 25 bp, SARS Virus
tccgacaaaacagctactataacag

SEQ ID NO: 64553 - DNA, 25 bp, SARS Virus
ccgacaaaacaggtactataacagt

SEQ ID NO: 64554 - DNA, 25 bp, SARS Virus
cgacaaaacagcgactataacagtt

SEQ ID NO: 64555 - DNA, 25 bp, SARS Virus
gacaaaacagctgctataacagttt

SEQ ID NO: 64556 - DNA, 25 bp, SARS Virus
acaaaacagctagtataacagtttt

SEQ ID NO: 64557 - DNA, 25 bp, SARS Virus
caaaacagctacgataacagttttg

SEQ ID NO: 64558 - DNA, 25 bp, SARS Virus
aaaacagctactgtaacagttttgt

SEQ ID NO: 64559 - DNA, 25 bp, SARS Virus
aaacagctactagaacagttttgtc

SEQ ID NO: 64560 - DNA, 25 bp, SARS Virus
aacagctactatgacagttttgtct

SEQ ID NO: 64561 - DNA, 25 bp, SARS Virus
acagctactatagcagttttgtcta

SEQ ID NO: 64562 - DNA, 25 bp, SARS Virus
cagctactataagagttttgtctac

SEQ ID NO: 64563 - DNA, 25 bp, SARS Virus
agctactataacggttttgtctacc

SEQ ID NO: 64564 - DNA, 25 bp, SARS Virus
gctactataacagttttgtctacca

SEQ ID NO: 64565 - DNA, 25 bp, SARS Virus
ctactataacaggtttgtctaccat

SEQ ID NO: 64566 - DNA, 25 bp, SARS Virus
tactataacagtgttgtctaccatg

SEQ ID NO: 64567 - DNA, 25 bp, SARS Virus
actataacagttgtgtctaccatgt

SEQ ID NO: 64568 - DNA, 25 bp, SARS Virus
ctataacagtttggtctaccatgtg

SEQ ID NO: 64569 - DNA, 25 bp, SARS Virus
tataacagttttgtctaccatgtga

SEQ ID NO: 64570 - DNA, 25 bp, SARS Virus
ataacagttttggctaccatgtgaa

SEQ ID NO: 64571 - DNA, 25 bp, SARS Virus
taacagttttgtgtaccatgtgaat

SEQ ID NO: 64572 - DNA, 25 bp, SARS Virus
aacagttttgtcgaccatgtgaata

SEQ ID NO: 64573 - DNA, 25 bp, SARS Virus
acagttttgtctgccatgtgaatac

SEQ ID NO: 64574 - DNA, 25 bp, SARS Virus
cagttttgtctagcatgtgaatact

SEQ ID NO: 64575 - DNA, 25 bp, SARS Virus
agttttgtctacgatgtgaatacta

SEQ ID NO: 64576 - DNA, 25 bp, SARS Virus
gttttgtctaccgtgtgaatactaa

SEQ ID NO: 64577 - DNA, 25 bp, SARS Virus
ttttgtctaccaggtgaatactaac

SEQ ID NO: 64578 - DNA, 25 bp, SARS Virus
tttgtctaccatgtgaatactaact

SEQ ID NO: 64579 - DNA, 25 bp, SARS Virus
ttgtctaccatgggaatactaactt

SEQ ID NO: 64580 - DNA, 25 bp, SARS Virus
tgtctaccatgtgaatactaacttt

SEQ ID NO: 64581 - DNA, 25 bp, SARS Virus
gtctaccatgtggatactaactttc

SEQ ID NO: 64582 - DNA, 25 bp, SARS Virus
tctaccatgtgagtactaactttcc

SEQ ID NO: 64583 - DNA, 25 bp, SARS Virus
ctaccatgtgaagactaactttcca

SEQ ID NO: 64584 - DNA, 25 bp, SARS Virus
taccatgtgaatgctaactttccaa

SEQ ID NO: 64585 - DNA, 25 bp, SARS Virus
accatgtgaatagtaactttccaag

SEQ ID NO: 64586 - DNA, 25 bp, SARS Virus
ccatgtgaatacgaactttccaagc

SEQ ID NO: 64587 - DNA, 25 bp, SARS Virus
catgtgaatactgactttccaagca

SEQ ID NO: 64588 - DNA, 25 bp, SARS Virus
atgtgaatactagctttccaagcac

SEQ ID NO: 64589 - DNA, 25 bp, SARS Virus
tgtgaatactaagtttccaagcaca

SEQ ID NO: 64590 - DNA, 25 bp, SARS Virus
gtgaatactaacgttccaagcacag

SEQ ID NO: 64591 - DNA, 25 bp, SARS Virus
tgaatactaactgtccaagcacagt

SEQ ID NO: 64592 - DNA, 25 bp, SARS Virus
gaatactaacttgccaagcacagtg

SEQ ID NO: 64593 - DNA, 25 bp, SARS Virus
aatactaactttgcaagcacagtga

SEQ ID NO: 64594 - DNA, 25 bp, SARS Virus
atactaactttcgaagcacagtgac

SEQ ID NO: 64595 - DNA, 25 bp, SARS Virus
tactaactttccgagcacagtgacc

SEQ ID NO: 64596 - DNA, 25 bp, SARS Virus
actaactttccaggcacagtgaccg

SEQ ID NO: 64597 - DNA, 25 bp, SARS Virus
ctaactttccaagcacagtgaccga

SEQ ID NO: 64598 - DNA, 25 bp, SARS Virus
taactttccaaggacagtgaccgat

SEQ ID NO: 64599 - DNA, 25 bp, SARS Virus
aactttccaagcgcagtgaccgata

SEQ ID NO: 64600 - DNA, 25 bp, SARS Virus
actttccaagcagagtgaccgataa

SEQ ID NO: 64601 - DNA, 25 bp, SARS Virus
ctttccaagcacggtgaccgataac

SEQ ID NO: 64602 - DNA, 25 bp, SARS Virus
tttccaagcacagtgaccgataact

SEQ ID NO: 64603 - DNA, 25 bp, SARS Virus
ttccaagcacagggaccgataacta

SEQ ID NO: 64604 - DNA, 25 bp, SARS Virus
tccaagcacagtgaccgataactac

SEQ ID NO: 64605 - DNA, 25 bp, SARS Virus
ccaagcacagtggccgataactacg

SEQ ID NO: 64606 - DNA, 25 bp, SARS Virus
caagcacagtgagcgataactacga

SEQ ID NO: 64607 - DNA, 25 bp, SARS Virus
aagcacagtgacggataactacgaa

SEQ ID NO: 64608 - DNA, 25 bp, SARS Virus
agcacagtgaccgataactacgaat

SEQ ID NO: 64609 - DNA, 25 bp, SARS Virus
gcacagtgaccggtaactacgaatg

SEQ ID NO: 64610 - DNA, 25 bp, SARS Virus
cacagtgaccgagaactacgaatgg

SEQ ID NO: 64611 - DNA, 25 bp, SARS Virus
acagtgaccgatgactacgaatggg

SEQ ID NO: 64612 - DNA, 25 bp, SARS Virus
cagtgaccgatagctacgaatgggt

SEQ ID NO: 64613 - DNA, 25 bp, SARS Virus
agtgaccgataagtacgaatgggtg

SEQ ID NO: 64614 - DNA, 25 bp, SARS Virus
gtgaccgataacgacgaatgggtga

SEQ ID NO: 64615 - DNA, 25 bp, SARS Virus
tgaccgataactgcgaatgggtgaa

SEQ ID NO: 64616 - DNA, 25 bp, SARS Virus
gaccgataactaggaatgggtgaat

SEQ ID NO: 64617 - DNA, 25 bp, SARS Virus
accgataactacgaatgggtgaatg

SEQ ID NO: 64618 - DNA, 25 bp, SARS Virus
ccgataactacggatgggtgaatgt

SEQ ID NO: 64619 - DNA, 25 bp, SARS Virus
cgataactacgagtgggtgaatgtt

SEQ ID NO: 64620 - DNA, 25 bp, SARS Virus
gataactacgaaggggtgaatgttt

SEQ ID NO: 64621 - DNA, 25 bp, SARS Virus
ataactacgaatgggtgaatgtttt

SEQ ID NO: 64622 - DNA, 25 bp, SARS Virus
taactacgaatgggtgaatgttttg

SEQ ID NO: 64623 - DNA, 25 bp, SARS Virus
aactacgaatgggtgaatgttttgt

SEQ ID NO: 64624 - DNA, 25 bp, SARS Virus
actacgaatgggggaatgttttgta

SEQ ID NO: 64625 - DNA, 25 bp, SARS Virus
ctacgaatgggtgaatgttttgtag

SEQ ID NO: 64626 - DNA, 25 bp, SARS Virus
tacgaatgggtggatgttttgtagg

SEQ ID NO: 64627 - DNA, 25 bp, SARS Virus
acgaatgggtgagtgttttgtagga

SEQ ID NO: 64628 - DNA, 25 bp, SARS Virus
cgaatgggtgaaggttttgtaggat

SEQ ID NO: 64629 - DNA, 25 bp, SARS Virus
gaatgggtgaatgttttgtaggatt

SEQ ID NO: 64630 - DNA, 25 bp, SARS Virus
aatgggtgaatggtttgtaggatta

SEQ ID NO: 64631 - DNA, 25 bp, SARS Virus
atgggtgaatgtgttgtaggattag

SEQ ID NO: 64632 - DNA, 25 bp, SARS Virus
tgggtgaatgttgtgtaggattagt

SEQ ID NO: 64633 - DNA, 25 bp, SARS Virus
gggtgaatgtttggtaggattagtc

SEQ ID NO: 64634 - DNA, 25 bp, SARS Virus
ggtgaatgttttgtaggattagtcc

SEQ ID NO: 64635 - DNA, 25 bp, SARS Virus
gtgaatgttttggaggattagtcct

SEQ ID NO: 64636 - DNA, 25 bp, SARS Virus
tgaatgttttgtgggattagtcctc

SEQ ID NO: 64637 - DNA, 25 bp, SARS Virus
gaatgttttgtaggattagtcctca

SEQ ID NO: 64638 - DNA, 25 bp, SARS Virus
aatgttttgtaggattagtcctcat

SEQ ID NO: 64639 - DNA, 25 bp, SARS Virus
atgttttgtagggttagtcctcata

SEQ ID NO: 64640 - DNA, 25 bp, SARS Virus
tgttttgtaggagtagtcctcatac

SEQ ID NO: 64641 - DNA, 25 bp, SARS Virus
gttttgtaggatgagtcctcatacg

SEQ ID NO: 64642 - DNA, 25 bp, SARS Virus
ttttgtaggattggtcctcatacga

SEQ ID NO: 64643 - DNA, 25 bp, SARS Virus
tttgtaggattagtcctcatacgac

SEQ ID NO: 64644 - DNA, 25 bp, SARS Virus
ttgtaggattaggcctcatacgact

SEQ ID NO: 64645 - DNA, 25 bp, SARS Virus
tgtaggattagtgctcatacgacta

SEQ ID NO: 64646 - DNA, 25 bp, SARS Virus
gtaggattagtcgtcatacgactac

SEQ ID NO: 64647 - DNA, 25 bp, SARS Virus
taggattagtccgcatacgactaca

SEQ ID NO: 64648 - DNA, 25 bp, SARS Virus
aggattagtcctgatacgactacag

SEQ ID NO: 64649 - DNA, 25 bp, SARS Virus
ggattagtcctcgtacgactacaga

SEQ ID NO: 64650 - DNA, 25 bp, SARS Virus
gattagtcctcagacgactacagaa

SEQ ID NO: 64651 - DNA, 25 bp, SARS Virus
attagtcctcatgcgactacagaaa

SEQ ID NO: 64652 - DNA, 25 bp, SARS Virus
ttagtcctcataggactacagaaag

SEQ ID NO: 64653 - DNA, 25 bp, SARS Virus
tagtcctcatacgactacagaaagt

SEQ ID NO: 64654 - DNA, 25 bp, SARS Virus
agtcctcatacggctacagaaagtg

SEQ ID NO: 64655 - DNA, 25 bp, SARS Virus
gtcctcatacgagtacagaaagtga

SEQ ID NO: 64656 - DNA, 25 bp, SARS Virus
tcctcatacgacgacagaaagtgaa

SEQ ID NO: 64657 - DNA, 25 bp, SARS Virus
cctcatacgactgcagaaagtgaac

SEQ ID NO: 64658 - DNA, 25 bp, SARS Virus
ctcatacgactagagaaagtgaaca

SEQ ID NO: 64659 - DNA, 25 bp, SARS Virus
tcatacgactacggaaagtgaacat

SEQ ID NO: 64660 - DNA, 25 bp, SARS Virus
catacgactacagaaagtgaacata

SEQ ID NO: 64661 - DNA, 25 bp, SARS Virus
atacgactacaggaagtgaacataa

SEQ ID NO: 64662 - DNA, 25 bp, SARS Virus
tacgactacagagagtgaacataaa

SEQ ID NO: 64663 - DNA, 25 bp, SARS Virus
acgactacagaaggtgaacataaat

SEQ ID NO: 64664 - DNA, 25 bp, SARS Virus
cgactacagaaagtgaacataaatg

SEQ ID NO: 64665 - DNA, 25 bp, SARS Virus
gactacagaaagggaacataaatgt

SEQ ID NO: 64666 - DNA, 25 bp, SARS Virus
actacagaaagtgaacataaatgtt

SEQ ID NO: 64667 - DNA, 25 bp, SARS Virus
ctacagaaagtggacataaatgtta

SEQ ID NO: 64668 - DNA, 25 bp, SARS Virus
tacagaaagtgagcataaatgttat

SEQ ID NO: 64669 - DNA, 25 bp, SARS Virus
acagaaagtgaagataaatgttatg

SEQ ID NO: 64670 - DNA, 25 bp, SARS Virus
cagaaagtgaacgtaaatgttatgt

SEQ ID NO: 64671 - DNA, 25 bp, SARS Virus
agaaagtgaacagaaatgttatgta

SEQ ID NO: 64672 - DNA, 25 bp, SARS Virus
gaaagtgaacatgaatgttatgtaa

SEQ ID NO: 64673 - DNA, 25 bp, SARS Virus
aaagtgaacatagatgttatgtaat

SEQ ID NO: 64674 - DNA, 25 bp, SARS Virus
aagtgaacataagtgttatgtaatc

SEQ ID NO: 64675 - DNA, 25 bp, SARS Virus
agtgaacataaaggttatgtaatct

SEQ ID NO: 64676 - DNA, 25 bp, SARS Virus
gtgaacataaatgttatgtaatctt

SEQ ID NO: 64677 - DNA, 25 bp, SARS Virus
tgaacataaatggtatgtaatcttt

SEQ ID NO: 64678 - DNA, 25 bp, SARS Virus
gaacataaatgtgatgtaatctttc

SEQ ID NO: 64679 - DNA, 25 bp, SARS Virus
aacataaatgttgtgtaatctttca

SEQ ID NO: 64680 - DNA, 25 bp, SARS Virus
acataaatgttaggtaatctttcaa

SEQ ID NO: 64681 - DNA, 25 bp, SARS Virus
cataaatgttatgtaatctttcaat

SEQ ID NO: 64682 - DNA, 25 bp, SARS Virus
ataaatgttatggaatctttcaatg

SEQ ID NO: 64683 - DNA, 25 bp, SARS Virus
taaatgttatgtgatctttcaatgt

SEQ ID NO: 64684 - DNA, 25 bp, SARS Virus
aaatgttatgtagtctttcaatgta

SEQ ID NO: 64685 - DNA, 25 bp, SARS Virus
aatgttatgtaagctttcaatgtac

SEQ ID NO: 64686 - DNA, 25 bp, SARS Virus
atgttatgtaatgtttcaatgtact

SEQ ID NO: 64687 - DNA, 25 bp, SARS Virus
tgttatgtaatcgttcaatgtacta

SEQ ID NO: 64688 - DNA, 25 bp, SARS Virus
gttatgtaatctgtcaatgtactac

SEQ ID NO: 64689 - DNA, 25 bp, SARS Virus
ttatgtaatcttgcaatgtactact

SEQ ID NO: 64690 - DNA, 25 bp, SARS Virus
tatgtaatctttgaatgtactactc

SEQ ID NO: 64691 - DNA, 25 bp, SARS Virus
atgtaatctttcgatgtactactcg

SEQ ID NO: 64692 - DNA, 25 bp, SARS Virus
tgtaatctttcagtgtactactcga

SEQ ID NO: 64693 - DNA, 25 bp, SARS Virus
gtaatctttcaaggtactactcgaa

SEQ ID NO: 64694 - DNA, 25 bp, SARS Virus
taatctttcaatgtactactcgaat

SEQ ID NO: 64695 - DNA, 25 bp, SARS Virus
aatctttcaatggactactcgaatg

SEQ ID NO: 64696 - DNA, 25 bp, SARS Virus
atctttcaatgtgctactcgaatga

SEQ ID NO: 64697 - DNA, 25 bp, SARS Virus
tctttcaatgtagtactcgaatgac

SEQ ID NO: 64698 - DNA, 25 bp, SARS Virus
ctttcaatgtacgactcgaatgacc

SEQ ID NO: 64699 - DNA, 25 bp, SARS Virus
tttcaatgtactgctcgaatgaccg

SEQ ID NO: 64700 - DNA, 25 bp, SARS Virus
ttcaatgtactagtcgaatgaccgg

SEQ ID NO: 64701 - DNA, 25 bp, SARS Virus
tcaatgtactacgcgaatgaccggt

SEQ ID NO: 64702 - DNA, 25 bp, SARS Virus
caatgtactactggaatgaccggtg

SEQ ID NO: 64703 - DNA, 25 bp, SARS Virus
aatgtactactcgaatgaccggtgt

SEQ ID NO: 64704 - DNA, 25 bp, SARS Virus
atgtactactcggatgaccggtgta

SEQ ID NO: 64705 - DNA, 25 bp, SARS Virus
tgtactactcgagtgaccggtgtac

SEQ ID NO: 64706 - DNA, 25 bp, SARS Virus
gtactactcgaaggaccggtgtaca

SEQ ID NO: 64707 - DNA, 25 bp, SARS Virus
tactactcgaatgaccggtgtacaa

SEQ ID NO: 64708 - DNA, 25 bp, SARS Virus
actactcgaatggccggtgtacaac

SEQ ID NO: 64709 - DNA, 25 bp, SARS Virus
ctactcgaatgagcggtgtacaacc

SEQ ID NO: 64710 - DNA, 25 bp, SARS Virus
tactcgaatgacgggtgtacaacct

SEQ ID NO: 64711 - DNA, 25 bp, SARS Virus
actcgaatgaccggtgtacaacctg

SEQ ID NO: 64712 - DNA, 25 bp, SARS Virus
ctcgaatgaccggtgtacaacctgt

SEQ ID NO: 64713 - DNA, 25 bp, SARS Virus
tcgaatgaccggggtacaacctgta

SEQ ID NO: 64714 - DNA, 25 bp, SARS Virus
cgaatgaccggtgtacaacctgtac

SEQ ID NO: 64715 - DNA, 25 bp, SARS Virus
gaatgaccggtggacaacctgtaca

SEQ ID NO: 64716 - DNA, 25 bp, SARS Virus
aatgaccggtgtgcaacctgtacat

SEQ ID NO: 64717 - DNA, 25 bp, SARS Virus
atgaccggtgtagaacctgtacata

SEQ ID NO: 64718 - DNA, 25 bp, SARS Virus
tgaccggtgtacgacctgtacataa

SEQ ID NO: 64719 - DNA, 25 bp, SARS Virus
gaccggtgtacagcctgtacataag

SEQ ID NO: 64720 - DNA, 25 bp, SARS Virus
accggtgtacaagctgtacataagg

SEQ ID NO: 64721 - DNA, 25 bp, SARS Virus
ccggtgtacaacgtgtacataaggc

SEQ ID NO: 64722 - DNA, 25 bp, SARS Virus
cggtgtacaaccggtacataaggca

SEQ ID NO: 64723 - DNA, 25 bp, SARS Virus
ggtgtacaacctgtacataaggcat

SEQ ID NO: 64724 - DNA, 25 bp, SARS Virus
gtgtacaacctggacataaggcatt

SEQ ID NO: 64725 - DNA, 25 bp, SARS Virus
tgtacaacctgtgcataaggcatta

SEQ ID NO: 64726 - DNA, 25 bp, SARS Virus
gtacaacctgtagataaggcattac

SEQ ID NO: 64727 - DNA, 25 bp, SARS Virus
tacaacctgtacgtaaggcattacg

SEQ ID NO: 64728 - DNA, 25 bp, SARS Virus
acaacctgtacagaaggcattacga

SEQ ID NO: 64729 - DNA, 25 bp, SARS Virus
caacctgtacatgaggcattacgat

SEQ ID NO: 64730 - DNA, 25 bp, SARS Virus
aacctgtacatagggcattacgatt

SEQ ID NO: 64731 - DNA, 25 bp, SARS Virus
acctgtacataaggcattacgattg

SEQ ID NO: 64732 - DNA, 25 bp, SARS Virus
cctgtacataaggcattacgattga

SEQ ID NO: 64733 - DNA, 25 bp, SARS Virus
ctgtacataagggattacgattgat

SEQ ID NO: 64734 - DNA, 25 bp, SARS Virus
tgtacataaggcgttacgattgatt

SEQ ID NO: 64735 - DNA, 25 bp, SARS Virus
gtacataaggcagtacgattgatta

SEQ ID NO: 64736 - DNA, 25 bp, SARS Virus
tacataaggcatgacgattgattac

SEQ ID NO: 64737 - DNA, 25 bp, SARS Virus
acataaggcattgcgattgattact

SEQ ID NO: 64738 - DNA, 25 bp, SARS Virus
cataaggcattaggattgattacta

SEQ ID NO: 64739 - DNA, 25 bp, SARS Virus
ataaggcattacgattgattactat

SEQ ID NO: 64740 - DNA, 25 bp, SARS Virus
taaggcattacggttgattactatt

SEQ ID NO: 64741 - DNA, 25 bp, SARS Virus
aaggcattacgagtgattactattg

SEQ ID NO: 64742 - DNA, 25 bp, SARS Virus
aggcattacgatggattactattgt

SEQ ID NO: 64743 - DNA, 25 bp, SARS Virus
ggcattacgattgattactattgtg

SEQ ID NO: 64744 - DNA, 25 bp, SARS Virus
gcattacgattggttactattgtgg

SEQ ID NO: 64745 - DNA, 25 bp, SARS Virus
cattacgattgagtactattgtgga

SEQ ID NO: 64746 - DNA, 25 bp, SARS Virus
attacgattgatgactattgtggag

SEQ ID NO: 64747 - DNA, 25 bp, SARS Virus
ttacgattgattgctattgtggagt

SEQ ID NO: 64748 - DNA, 25 bp, SARS Virus
tacgattgattagtattgtggagtg

SEQ ID NO: 64749 - DNA, 25 bp, SARS Virus
acgattgattacgattgtggagtgc

SEQ ID NO: 64750 - DNA, 25 bp, SARS Virus
cgattgattactgttgtggagtgcc

SEQ ID NO: 64751 - DNA, 25 bp, SARS Virus
gattgattactagtgtggagtgcca

SEQ ID NO: 64752 - DNA, 25 bp, SARS Virus
attgattactatggtggagtgccat

SEQ ID NO: 64753 - DNA, 25 bp, SARS Virus
ttgattactattgtggagtgccatg

SEQ ID NO: 64754 - DNA, 25 bp, SARS Virus
tgattactattggggagtgccatga

SEQ ID NO: 64755 - DNA, 25 bp, SARS Virus
gattactattgtggagtgccatgac

SEQ ID NO: 64756 - DNA, 25 bp, SARS Virus
attactattgtggagtgccatgacc

SEQ ID NO: 64757 - DNA, 25 bp, SARS Virus
ttactattgtggggtgccatgaccc

SEQ ID NO: 64758 - DNA, 25 bp, SARS Virus
tactattgtggagtgccatgaccct

SEQ ID NO: 64759 - DNA, 25 bp, SARS Virus
actattgtggagggccatgaccctt

SEQ ID NO: 64760 - DNA, 25 bp, SARS Virus
ctattgtggagtgccatgacccttg

SEQ ID NO: 64761 - DNA, 25 bp, SARS Virus
tattgtggagtggcatgacccttgg

SEQ ID NO: 64762 - DNA, 25 bp, SARS Virus
attgtggagtgcgatgacccttgga

SEQ ID NO: 64763 - DNA, 25 bp, SARS Virus
ttgtggagtgccgtgacccttggac

SEQ ID NO: 64764 - DNA, 25 bp, SARS Virus
tgtggagtgccaggacccttggact

SEQ ID NO: 64765 - DNA, 25 bp, SARS Virus
gtggagtgccatgacccttggactc

SEQ ID NO: 64766 - DNA, 25 bp, SARS Virus
tggagtgccatggcccttggactca

SEQ ID NO: 64767 - DNA, 25 bp, SARS Virus
ggagtgccatgagccttggactcaa

SEQ ID NO: 64768 - DNA, 25 bp, SARS Virus
gagtgccatgacgcttggactcaaa

SEQ ID NO: 64769 - DNA, 25 bp, SARS Virus
agtgccatgaccgttggactcaaaa

SEQ ID NO: 64770 - DNA, 25 bp, SARS Virus
gtgccatgacccgtggactcaaaat

SEQ ID NO: 64771 - DNA, 25 bp, SARS Virus
tgccatgaccctgggactcaaaata

SEQ ID NO: 64772 - DNA, 25 bp, SARS Virus
gccatgacccttggactcaaaatac

SEQ ID NO: 64773 - DNA, 25 bp, SARS Virus
ccatgacccttggactcaaaatact

SEQ ID NO: 64774 - DNA, 25 bp, SARS Virus
catgacccttgggctcaaaatactc

SEQ ID NO: 64775 - DNA, 25 bp, SARS Virus
atgacccttggagtcaaaatactcc

SEQ ID NO: 64776 - DNA, 25 bp, SARS Virus
tgacccttggacgcaaaatactccg

SEQ ID NO: 64777 - DNA, 25 bp, SARS Virus
gacccttggactgaaaatactccga

SEQ ID NO: 64778 - DNA, 25 bp, SARS Virus
acccttggactcgaaatactccgat

SEQ ID NO: 64779 - DNA, 25 bp, SARS Virus
cccttggactcagaatactccgata

SEQ ID NO: 64780 - DNA, 25 bp, SARS Virus
ccttggactcaagatactccgatac

SEQ ID NO: 64781 - DNA, 25 bp, SARS Virus
cttggactcaaagtactccgataca

SEQ ID NO: 64782 - DNA, 25 bp, SARS Virus
ttggactcaaaagactccgatacat

SEQ ID NO: 64783 - DNA, 25 bp, SARS Virus
tggactcaaaatgctccgatacatg

SEQ ID NO: 64784 - DNA, 25 bp, SARS Virus
ggactcaaaatagtccgatacatgt

SEQ ID NO: 64785 - DNA, 25 bp, SARS Virus
gactcaaaatacgccgatacatgtg

SEQ ID NO: 64786 - DNA, 25 bp, SARS Virus
actcaaaatactgcgatacatgtgt

SEQ ID NO: 64787 - DNA, 25 bp, SARS Virus
ctcaaaatactcggatacatgtgtg

SEQ ID NO: 64788 - DNA, 25 bp, SARS Virus
tcaaaatactccgatacatgtgtgg

SEQ ID NO: 64789 - DNA, 25 bp, SARS Virus
caaaatactccggtacatgtgtggt

SEQ ID NO: 64790 - DNA, 25 bp, SARS Virus
aaaatactccgagacatgtgtggtg

SEQ ID NO: 64791 - DNA, 25 bp, SARS Virus
aaatactccgatgcatgtgtggtgt

SEQ ID NO: 64792 - DNA, 25 bp, SARS Virus
aatactccgatagatgtgtggtgta

SEQ ID NO: 64793 - DNA, 25 bp, SARS Virus
atactccgatacgtgtgtggtgtat

SEQ ID NO: 64794 - DNA, 25 bp, SARS Virus
tactccgatacaggtgtggtgtatg

SEQ ID NO: 64795 - DNA, 25 bp, SARS Virus
actccgatacatgtgtggtgtatgt

SEQ ID NO: 64796 - DNA, 25 bp, SARS Virus
ctccgatacatgggtggtgtatgtc

SEQ ID NO: 64797 - DNA, 25 bp, SARS Virus
tccgatacatgtgtggtgtatgtca

SEQ ID NO: 64798 - DNA, 25 bp, SARS Virus
ccgatacatgtggggtgtatgtcag

SEQ ID NO: 64799 - DNA, 25 bp, SARS Virus
cgatacatgtgtggtgtatgtcaga

SEQ ID NO: 64800 - DNA, 25 bp, SARS Virus
gatacatgtgtggtgtatgtcagaa

SEQ ID NO: 64801 - DNA, 25 bp, SARS Virus
atacatgtgtggggtatgtcagaac

SEQ ID NO: 64802 - DNA, 25 bp, SARS Virus
tacatgtgtggtgtatgtcagaacg

SEQ ID NO: 64803 - DNA, 25 bp, SARS Virus
acatgtgtggtggatgtcagaacgt

SEQ ID NO: 64804 - DNA, 25 bp, SARS Virus
catgtgtggtgtgtgtcagaacgtc

SEQ ID NO: 64805 - DNA, 25 bp, SARS Virus
atgtgtggtgtaggtcagaacgtcc

SEQ ID NO: 64806 - DNA, 25 bp, SARS Virus
tgtgtggtgtatgtcagaacgtccg

SEQ ID NO: 64807 - DNA, 25 bp, SARS Virus
gtgtggtgtatggcagaacgtccga

SEQ ID NO: 64808 - DNA, 25 bp, SARS Virus
tgtggtgtatgtgagaacgtccgac

SEQ ID NO: 64809 - DNA, 25 bp, SARS Virus
gtggtgtatgtcggaacgtccgaca

SEQ ID NO: 64810 - DNA, 25 bp, SARS Virus
tggtgtatgtcagaacgtccgacat

SEQ ID NO: 64811 - DNA, 25 bp, SARS Virus
ggtgtatgtcaggacgtccgacatc

SEQ ID NO: 64812 - DNA, 25 bp, SARS Virus
gtgtatgtcagagcgtccgacatcc

SEQ ID NO: 64813 - DNA, 25 bp, SARS Virus
tgtatgtcagaaggtccgacatcca

SEQ ID NO: 64814 - DNA, 25 bp, SARS Virus
gtatgtcagaacgtccgacatccac

SEQ ID NO: 64815 - DNA, 25 bp, SARS Virus
tatgtcagaacggccgacatccacg

SEQ ID NO: 64816 - DNA, 25 bp, SARS Virus
atgtcagaacgtgcgacatccacga

SEQ ID NO: 64817 - DNA, 25 bp, SARS Virus
tgtcagaacgtcggacatccacgaa

SEQ ID NO: 64818 - DNA, 25 bp, SARS Virus
gtcagaacgtccgacatccacgaac

SEQ ID NO: 64819 - DNA, 25 bp, SARS Virus
tcagaacgtccggcatccacgaaca

SEQ ID NO: 64820 - DNA, 25 bp, SARS Virus
cagaacgtccgagatccacgaacac

SEQ ID NO: 64821 - DNA, 25 bp, SARS Virus
agaacgtccgacgtccacgaacaca

SEQ ID NO: 64822 - DNA, 25 bp, SARS Virus
gaacgtccgacagccacgaacacat

SEQ ID NO: 64823 - DNA, 25 bp, SARS Virus
aacgtccgacatgcacgaacacata

SEQ ID NO: 64824 - DNA, 25 bp, SARS Virus
acgtccgacatcgacgaacacataa

SEQ ID NO: 64825 - DNA, 25 bp, SARS Virus
cgtccgacatccgcgaacacataac

SEQ ID NO: 64826 - DNA, 25 bp, SARS Virus
gtccgacatccaggaacacataaca

SEQ ID NO: 64827 - DNA, 25 bp, SARS Virus
tccgacatccacgaacacataacac

SEQ ID NO: 64828 - DNA, 25 bp, SARS Virus
ccgacatccacggacacataacacg

SEQ ID NO: 64829 - DNA, 25 bp, SARS Virus
cgacatccacgagcacataacacgt

SEQ ID NO: 64830 - DNA, 25 bp, SARS Virus
gacatccacgaagacataacacgtt

SEQ ID NO: 64831 - DNA, 25 bp, SARS Virus
acatccacgaacgcataacacgtta

SEQ ID NO: 64832 - DNA, 25 bp, SARS Virus
catccacgaacagataacacgttaa

SEQ ID NO: 64833 - DNA, 25 bp, SARS Virus
atccacgaacacgtaacacgttaag

SEQ ID NO: 64834 - DNA, 25 bp, SARS Virus
tccacgaacacagaacacgttaagt

SEQ ID NO: 64835 - DNA, 25 bp, SARS Virus
ccacgaacacatgacacgttaagtg

SEQ ID NO: 64836 - DNA, 25 bp, SARS Virus
cacgaacacatagcacgttaagtgt

SEQ ID NO: 64837 - DNA, 25 bp, SARS Virus
acgaacacataagacgttaagtgtc

SEQ ID NO: 64838 - DNA, 25 bp, SARS Virus
cgaacacataacgcgttaagtgtct

SEQ ID NO: 64839 - DNA, 25 bp, SARS Virus
gaacacataacaggttaagtgtctg

SEQ ID NO: 64840 - DNA, 25 bp, SARS Virus
aacacataacacgttaagtgtctga

SEQ ID NO: 64841 - DNA, 25 bp, SARS Virus
acacataacacggtaagtgtctgaa

SEQ ID NO: 64842 - DNA, 25 bp, SARS Virus
cacataacacgtgaagtgtctgaag

SEQ ID NO: 64843 - DNA, 25 bp, SARS Virus
acataacacgttgagtgtctgaagt

SEQ ID NO: 64844 - DNA, 25 bp, SARS Virus
cataacacgttaggtgtctgaagtg

SEQ ID NO: 64845 - DNA, 25 bp, SARS Virus
ataacacgttaagtgtctgaagtga

SEQ ID NO: 64846 - DNA, 25 bp, SARS Virus
taacacgttaagggtctgaagtgaa

SEQ ID NO: 64847 - DNA, 25 bp, SARS Virus
aacacgttaagtgtctgaagtgaag

SEQ ID NO: 64848 - DNA, 25 bp, SARS Virus
acacgttaagtggctgaagtgaagc

SEQ ID NO: 64849 - DNA, 25 bp, SARS Virus
cacgttaagtgtgtgaagtgaagca

SEQ ID NO: 64850 - DNA, 25 bp, SARS Virus
acgttaagtgtcggaagtgaagcaa

SEQ ID NO: 64851 - DNA, 25 bp, SARS Virus
cgttaagtgtctgaagtgaagcaac

SEQ ID NO: 64852 - DNA, 25 bp, SARS Virus
gttaagtgtctggagtgaagcaacg

SEQ ID NO: 64853 - DNA, 25 bp, SARS Virus
ttaagtgtctgaggtgaagcaacgc

SEQ ID NO: 64854 - DNA, 25 bp, SARS Virus
taagtgtctgaagtgaagcaacgcc

SEQ ID NO: 64855 - DNA, 25 bp, SARS Virus
aagtgtctgaagggaagcaacgcca

SEQ ID NO: 64856 - DNA, 25 bp, SARS Virus
agtgtctgaagtgaagcaacgccac

SEQ ID NO: 64857 - DNA, 25 bp, SARS Virus
gtgtctgaagtggagcaacgccacg

SEQ ID NO: 64858 - DNA, 25 bp, SARS Virus
tgtctgaagtgaggcaacgccacgg

SEQ ID NO: 64859 - DNA, 25 bp, SARS Virus
gtctgaagtgaagcaacgccacgga

SEQ ID NO: 64860 - DNA, 25 bp, SARS Virus
tctgaagtgaaggaacgccacggac

SEQ ID NO: 64861 - DNA, 25 bp, SARS Virus
ctgaagtgaagcgacgccacggaca

SEQ ID NO: 64862 - DNA, 25 bp, SARS Virus
tgaagtgaagcagcgccacggacat

SEQ ID NO: 64863 - DNA, 25 bp, SARS Virus
gaagtgaagcaaggccacggacata

SEQ ID NO: 64864 - DNA, 25 bp, SARS Virus
aagtgaagcaacgccacggacataa

SEQ ID NO: 64865 - DNA, 25 bp, SARS Virus
agtgaagcaacggcacggacataat

SEQ ID NO: 64866 - DNA, 25 bp, SARS Virus
gtgaagcaacgcgacggacataatc

SEQ ID NO: 64867 - DNA, 25 bp, SARS Virus
tgaagcaacgccgcggacataatcc

SEQ ID NO: 64868 - DNA, 25 bp, SARS Virus
gaagcaacgccagggacataatcct

SEQ ID NO: 64869 - DNA, 25 bp, SARS Virus
aagcaacgccacggacataatcctc

SEQ ID NO: 64870 - DNA, 25 bp, SARS Virus
agcaacgccacggacataatcctct

SEQ ID NO: 64871 - DNA, 25 bp, SARS Virus
gcaacgccacgggcataatcctctg

SEQ ID NO: 64872 - DNA, 25 bp, SARS Virus
caacgccacggagataatcctctgg

SEQ ID NO: 64873 - DNA, 25 bp, SARS Virus
aacgccacggacgtaatcctctggt

SEQ ID NO: 64874 - DNA, 25 bp, SARS Virus
acgccacggacagaatcctctggta

SEQ ID NO: 64875 - DNA, 25 bp, SARS Virus
cgccacggacatgatcctctggtaa

SEQ ID NO: 64876 - DNA, 25 bp, SARS Virus
gccacggacatagtcctctggtaag

SEQ ID NO: 64877 - DNA, 25 bp, SARS Virus
ccacggacataagcctctggtaagg

SEQ ID NO: 64878 - DNA, 25 bp, SARS Virus
cacggacataatgctctggtaagga

SEQ ID NO: 64879 - DNA, 25 bp, SARS Virus
acggacataatcgtctggtaaggat

SEQ ID NO: 64880 - DNA, 25 bp, SARS Virus
cggacataatccgctggtaaggata

SEQ ID NO: 64881 - DNA, 25 bp, SARS Virus
ggacataatcctgtggtaaggatac

SEQ ID NO: 64882 - DNA, 25 bp, SARS Virus
gacataatcctcgggtaaggataca

SEQ ID NO: 64883 - DNA, 25 bp, SARS Virus
acataatcctctggtaaggatacaa

SEQ ID NO: 64884 - DNA, 25 bp, SARS Virus
cataatcctctggtaaggatacaac

SEQ ID NO: 64885 - DNA, 25 bp, SARS Virus
ataatcctctgggaaggatacaacg

SEQ ID NO: 64886 - DNA, 25 bp, SARS Virus
taatcctctggtgaggatacaacgt

SEQ ID NO: 64887 - DNA, 25 bp, SARS Virus
aatcctctggtagggatacaacgtt

SEQ ID NO: 64888 - DNA, 25 bp, SARS Virus
atcctctggtaaggatacaacgttc

SEQ ID NO: 64889 - DNA, 25 bp, SARS Virus
tcctctggtaaggatacaacgttca

SEQ ID NO: 64890 - DNA, 25 bp, SARS Virus
cctctggtaagggtacaacgttcac

SEQ ID NO: 64891 - DNA, 25 bp, SARS Virus
ctctggtaaggagacaacgttcacg

SEQ ID NO: 64892 - DNA, 25 bp, SARS Virus
tctggtaaggatgcaacgttcacga

SEQ ID NO: 64893 - DNA, 25 bp, SARS Virus
ctggtaaggatagaacgttcacgac

SEQ ID NO: 64894 - DNA, 25 bp, SARS Virus
tggtaaggatacgacgttcacgacg

SEQ ID NO: 64895 - DNA, 25 bp, SARS Virus
ggtaaggatacagcgttcacgacga

SEQ ID NO: 64896 - DNA, 25 bp, SARS Virus
gtaaggatacaaggttcacgacgat

SEQ ID NO: 64897 - DNA, 25 bp, SARS Virus
taaggatacaacgttcacgacgata

SEQ ID NO: 64898 - DNA, 25 bp, SARS Virus
aaggatacaacggtcacgacgatac

SEQ ID NO: 64899 - DNA, 25 bp, SARS Virus
aggatacaacgtgcacgacgatact

SEQ ID NO: 64900 - DNA, 25 bp, SARS Virus
ggatacaacgttgacgacgatactg

SEQ ID NO: 64901 - DNA, 25 bp, SARS Virus
gatacaacgttcgcgacgatactgg

SEQ ID NO: 64902 - DNA, 25 bp, SARS Virus
atacaacgttcaggacgatactggt

SEQ ID NO: 64903 - DNA, 25 bp, SARS Virus
tacaacgttcacgacgatactggta

SEQ ID NO: 64904 - DNA, 25 bp, SARS Virus
acaacgttcacggcgatactggtac

SEQ ID NO: 64905 - DNA, 25 bp, SARS Virus
caacgttcacgaggatactggtaca

SEQ ID NO: 64906 - DNA, 25 bp, SARS Virus
aacgttcacgacgatactggtacag

SEQ ID NO: 64907 - DNA, 25 bp, SARS Virus
acgttcacgacggtactggtacagt

SEQ ID NO: 64908 - DNA, 25 bp, SARS Virus
cgttcacgacgagactggtacagta

SEQ ID NO: 64909 - DNA, 25 bp, SARS Virus
gttcacgacgatgctggtacagtaa

SEQ ID NO: 64910 - DNA, 25 bp, SARS Virus
ttcacgacgatagtggtacagtaaa

SEQ ID NO: 64911 - DNA, 25 bp, SARS Virus
tcacgacgatacgggtacagtaaag

SEQ ID NO: 64912 - DNA, 25 bp, SARS Virus
cacgacgatactggtacagtaaagt

SEQ ID NO: 64913 - DNA, 25 bp, SARS Virus
acgacgatactggtacagtaaagtt

SEQ ID NO: 64914 - DNA, 25 bp, SARS Virus
cgacgatactgggacagtaaagttg

SEQ ID NO: 64915 - DNA, 25 bp, SARS Virus
gacgatactggtgcagtaaagttgt

SEQ ID NO: 64916 - DNA, 25 bp, SARS Virus
acgatactggtagagtaaagttgta

SEQ ID NO: 64917 - DNA, 25 bp, SARS Virus
cgatactggtacggtaaagttgtag

SEQ ID NO: 64918 - DNA, 25 bp, SARS Virus
gatactggtacagtaaagttgtagt

SEQ ID NO: 64919 - DNA, 25 bp, SARS Virus
atactggtacaggaaagttgtagtg

SEQ ID NO: 64920 - DNA, 25 bp, SARS Virus
tactggtacagtgaagttgtagtgt

SEQ ID NO: 64921 - DNA, 25 bp, SARS Virus
actggtacagtagagttgtagtgtg

SEQ ID NO: 64922 - DNA, 25 bp, SARS Virus
ctggtacagtaaggttgtagtgtgt

SEQ ID NO: 64923 - DNA, 25 bp, SARS Virus
tggtacagtaaagttgtagtgtgtt

SEQ ID NO: 64924 - DNA, 25 bp, SARS Virus
ggtacagtaaaggtgtagtgtgttt

SEQ ID NO: 64925 - DNA, 25 bp, SARS Virus
gtacagtaaagtggtagtgtgttta

SEQ ID NO: 64926 - DNA, 25 bp, SARS Virus
tacagtaaagttgtagtgtgtttaa

SEQ ID NO: 64927 - DNA, 25 bp, SARS Virus
acagtaaagttggagtgtgtttaat

SEQ ID NO: 64928 - DNA, 25 bp, SARS Virus
cagtaaagttgtggtgtgtttaatc

SEQ ID NO: 64929 - DNA, 25 bp, SARS Virus
agtaaagttgtagtgtgtttaatca

SEQ ID NO: 64930 - DNA, 25 bp, SARS Virus
gtaaagttgtagggtgtttaatcac

SEQ ID NO: 64931 - DNA, 25 bp, SARS Virus
taaagttgtagtgtgtttaatcaca

SEQ ID NO: 64932 - DNA, 25 bp, SARS Virus
aaagttgtagtgggtttaatcacaa

SEQ ID NO: 64933 - DNA, 25 bp, SARS Virus
aagttgtagtgtgtttaatcacaac

SEQ ID NO: 64934 - DNA, 25 bp, SARS Virus
agttgtagtgtggttaatcacaaca

SEQ ID NO: 64935 - DNA, 25 bp, SARS Virus
gttgtagtgtgtgtaatcacaacag

SEQ ID NO: 64936 - DNA, 25 bp, SARS Virus
ttgtagtgtgttgaatcacaacaga

SEQ ID NO: 64937 - DNA, 25 bp, SARS Virus
tgtagtgtgtttgatcacaacagac

SEQ ID NO: 64938 - DNA, 25 bp, SARS Virus
gtagtgtgtttagtcacaacagaca

SEQ ID NO: 64939 - DNA, 25 bp, SARS Virus
tagtgtgtttaagcacaacagacaa

SEQ ID NO: 64940 - DNA, 25 bp, SARS Virus
agtgtgtttaatgacaacagacaat

SEQ ID NO: 64941 - DNA, 25 bp, SARS Virus
gtgtgtttaatcgcaacagacaatt

SEQ ID NO: 64942 - DNA, 25 bp, SARS Virus
tgtgtttaatcagaacagacaatta

SEQ ID NO: 64943 - DNA, 25 bp, SARS Virus
gtgtttaatcacgacagacaattag

SEQ ID NO: 64944 - DNA, 25 bp, SARS Virus
tgtttaatcacagcagacaattagg

SEQ ID NO: 64945 - DNA, 25 bp, SARS Virus
gtttaatcacaagagacaattaggg

SEQ ID NO: 64946 - DNA, 25 bp, SARS Virus
tttaatcacaacggacaattaggga

SEQ ID NO: 64947 - DNA, 25 bp, SARS Virus
ttaatcacaacagacaattagggat

SEQ ID NO: 64948 - DNA, 25 bp, SARS Virus
taatcacaacaggcaattagggata

SEQ ID NO: 64949 - DNA, 25 bp, SARS Virus
aatcacaacagagaattagggatac

SEQ ID NO: 64950 - DNA, 25 bp, SARS Virus
atcacaacagacgattagggataca

SEQ ID NO: 64951 - DNA, 25 bp, SARS Virus
tcacaacagacagttagggatacaa

SEQ ID NO: 64952 - DNA, 25 bp, SARS Virus
cacaacagacaagtagggatacaaa

SEQ ID NO: 64953 - DNA, 25 bp, SARS Virus
acaacagacaatgagggatacaaac

SEQ ID NO: 64954 - DNA, 25 bp, SARS Virus
caacagacaattggggatacaaacg

SEQ ID NO: 64955 - DNA, 25 bp, SARS Virus
aacagacaattagggatacaaacgt

SEQ ID NO: 64956 - DNA, 25 bp, SARS Virus
acagacaattagggatacaaacgtt

SEQ ID NO: 64957 - DNA, 25 bp, SARS Virus
cagacaattagggatacaaacgtta

SEQ ID NO: 64958 - DNA, 25 bp, SARS Virus
agacaattaggggtacaaacgttac

SEQ ID NO: 64959 - DNA, 25 bp, SARS Virus
gacaattagggagacaaacgttacg

SEQ ID NO: 64960 - DNA, 25 bp, SARS Virus
acaattagggatgcaaacgttacgg

SEQ ID NO: 64961 - DNA, 25 bp, SARS Virus
caattagggatagaaacgttacggg

SEQ ID NO: 64962 - DNA, 25 bp, SARS Virus
aattagggatacgaacgttacgggg

SEQ ID NO: 64963 - DNA, 25 bp, SARS Virus
attagggatacagacgttacggggt

SEQ ID NO: 64964 - DNA, 25 bp, SARS Virus
ttagggatacaagcgttacggggtc

SEQ ID NO: 64965 - DNA, 25 bp, SARS Virus
tagggatacaaaggttacggggtcc

SEQ ID NO: 64966 - DNA, 25 bp, SARS Virus
agggatacaaacgttacggggtcca

SEQ ID NO: 64967 - DNA, 25 bp, SARS Virus
gggatacaaacggtacggggtccaa

SEQ ID NO: 64968 - DNA, 25 bp, SARS Virus
ggatacaaacgtgacggggtccaac

SEQ ID NO: 64969 - DNA, 25 bp, SARS Virus
gatacaaacgttgcggggtccaaca

SEQ ID NO: 64970 - DNA, 25 bp, SARS Virus
atacaaacgttagggggtccaacac

SEQ ID NO: 64971 - DNA, 25 bp, SARS Virus
tacaaacgttacggggtccaacact

SEQ ID NO: 64972 - DNA, 25 bp, SARS Virus
acaaacgttacggggtccaacacta

SEQ ID NO: 64973 - DNA, 25 bp, SARS Virus
caaacgttacggggtccaacactac

SEQ ID NO: 64974 - DNA, 25 bp, SARS Virus
aaacgttacggggtccaacactaca

SEQ ID NO: 64975 - DNA, 25 bp, SARS Virus
aacgttacgggggccaacactacag

SEQ ID NO: 64976 - DNA, 25 bp, SARS Virus
acgttacggggtgcaacactacagt

SEQ ID NO: 64977 - DNA, 25 bp, SARS Virus
cgttacggggtcgaacactacagtg

SEQ ID NO: 64978 - DNA, 25 bp, SARS Virus
gttacggggtccgacactacagtga

SEQ ID NO: 64979 - DNA, 25 bp, SARS Virus
ttacggggtccagcactacagtgac

SEQ ID NO: 64980 - DNA, 25 bp, SARS Virus
tacggggtccaagactacagtgact

SEQ ID NO: 64981 - DNA, 25 bp, SARS Virus
acggggtccaacgctacagtgacta

SEQ ID NO: 64982 - DNA, 25 bp, SARS Virus
cggggtccaacagtacagtgactac

SEQ ID NO: 64983 - DNA, 25 bp, SARS Virus
ggggtccaacacgacagtgactaca

SEQ ID NO: 64984 - DNA, 25 bp, SARS Virus
gggtccaacactgcagtgactacac

SEQ ID NO: 64985 - DNA, 25 bp, SARS Virus
ggtccaacactagagtgactacact

SEQ ID NO: 64986 - DNA, 25 bp, SARS Virus
gtccaacactacggtgactacactg

SEQ ID NO: 64987 - DNA, 25 bp, SARS Virus
tccaacactacagtgactacactgt

SEQ ID NO: 64988 - DNA, 25 bp, SARS Virus
ccaacactacagggactacactgtg

SEQ ID NO: 64989 - DNA, 25 bp, SARS Virus
caacactacagtgactacactgtgt

SEQ ID NO: 64990 - DNA, 25 bp, SARS Virus
aacactacagtggctacactgtgtt

SEQ ID NO: 64991 - DNA, 25 bp, SARS Virus
acactacagtgagtacactgtgttg

SEQ ID NO: 64992 - DNA, 25 bp, SARS Virus
cactacagtgacgacactgtgttga

SEQ ID NO: 64993 - DNA, 25 bp, SARS Virus
actacagtgactgcactgtgttgac

SEQ ID NO: 64994 - DNA, 25 bp, SARS Virus
ctacagtgactagactgtgttgaca

SEQ ID NO: 64995 - DNA, 25 bp, SARS Virus
tacagtgactacgctgtgttgacat

SEQ ID NO: 64996 - DNA, 25 bp, SARS Virus
acagtgactacagtgtgttgacata

SEQ ID NO: 64997 - DNA, 25 bp, SARS Virus
cagtgactacacggtgttgacatag

SEQ ID NO: 64998 - DNA, 25 bp, SARS Virus
agtgactacactgtgttgacataga

SEQ ID NO: 64999 - DNA, 25 bp, SARS Virus
gtgactacactgggttgacatagat

SEQ ID NO: 65000 - DNA, 25 bp, SARS Virus
tgactacactgtgttgacatagatc

SEQ ID NO: 65001 - DNA, 25 bp, SARS Virus
gactacactgtggtgacatagatcc

SEQ ID NO: 65002 - DNA, 25 bp, SARS Virus
actacactgtgtggacatagatcct

SEQ ID NO: 65003 - DNA, 25 bp, SARS Virus
ctacactgtgttgacatagatcctc

SEQ ID NO: 65004 - DNA, 25 bp, SARS Virus
tacactgtgttggcatagatcctcc

SEQ ID NO: 65005 - DNA, 25 bp, SARS Virus
acactgtgttgagatagatcctcca

SEQ ID NO: 65006 - DNA, 25 bp, SARS Virus
cactgtgttgacgtagatcctccat

SEQ ID NO: 65007 - DNA, 25 bp, SARS Virus
actgtgttgacagagatcctccata

SEQ ID NO: 65008 - DNA, 25 bp, SARS Virus
ctgtgttgacatggatcctccatac

SEQ ID NO: 65009 - DNA, 25 bp, SARS Virus
tgtgttgacatagatcctccatact

SEQ ID NO: 65010 - DNA, 25 bp, SARS Virus
gtgttgacataggtcctccatactc

SEQ ID NO: 65011 - DNA, 25 bp, SARS Virus
tgttgacatagagcctccatactcg

SEQ ID NO: 65012 - DNA, 25 bp, SARS Virus
gttgacatagatgctccatactcga

SEQ ID NO: 65013 - DNA, 25 bp, SARS Virus
ttgacatagatcgtccatactcgat

SEQ ID NO: 65014 - DNA, 25 bp, SARS Virus
tgacatagatccgccatactcgata

SEQ ID NO: 65015 - DNA, 25 bp, SARS Virus
gacatagatcctgcatactcgataa

SEQ ID NO: 65016 - DNA, 25 bp, SARS Virus
acatagatcctcgatactcgataat

SEQ ID NO: 65017 - DNA, 25 bp, SARS Virus
catagatcctccgtactcgataata

SEQ ID NO: 65018 - DNA, 25 bp, SARS Virus
atagatcctccagactcgataataa

SEQ ID NO: 65019 - DNA, 25 bp, SARS Virus
tagatcctccatgctcgataataac

SEQ ID NO: 65020 - DNA, 25 bp, SARS Virus
agatcctccatagtcgataataacg

SEQ ID NO: 65021 - DNA, 25 bp, SARS Virus
gatcctccatacgcgataataacgt

SEQ ID NO: 65022 - DNA, 25 bp, SARS Virus
atcctccatactggataataacgtt

SEQ ID NO: 65023 - DNA, 25 bp, SARS Virus
tcctccatactcgataataacgttc

SEQ ID NO: 65024 - DNA, 25 bp, SARS Virus
cctccatactcggtaataacgttca

SEQ ID NO: 65025 - DNA, 25 bp, SARS Virus
ctccatactcgagaataacgttcag

SEQ ID NO: 65026 - DNA, 25 bp, SARS Virus
tccatactcgatgataacgttcagt

SEQ ID NO: 65027 - DNA, 25 bp, SARS Virus
ccatactcgatagtaacgttcagtg

SEQ ID NO: 65028 - DNA, 25 bp, SARS Virus
catactcgataagaacgttcagtgt

SEQ ID NO: 65029 - DNA, 25 bp, SARS Virus
atactcgataatgacgttcagtgta

SEQ ID NO: 65030 - DNA, 25 bp, SARS Virus
tactcgataatagcgttcagtgtat

SEQ ID NO: 65031 - DNA, 25 bp, SARS Virus
actcgataataaggttcagtgtatt

SEQ ID NO: 65032 - DNA, 25 bp, SARS Virus
ctcgataataacgttcagtgtattc

SEQ ID NO: 65033 - DNA, 25 bp, SARS Virus
atccgcgtccgataaaacagctact

SEQ ID NO: 65034 - DNA, 25 bp, SARS Virus
tccgcgtccgactaaacagctacta

SEQ ID NO: 65035 - DNA, 25 bp, SARS Virus
ccgcgtccgacataacagctactat

SEQ ID NO: 65036 - DNA, 25 bp, SARS Virus
cgcgtccgacaatacagctactata

SEQ ID NO: 65037 - DNA, 25 bp, SARS Virus
gcgtccgacaaatcagctactataa

SEQ ID NO: 65038 - DNA, 25 bp, SARS Virus
cgtccgacaaaatagctactataac

SEQ ID NO: 65039 - DNA, 25 bp, SARS Virus
gtccgacaaaactgctactataaca

SEQ ID NO: 65040 - DNA, 25 bp, SARS Virus
tccgacaaaacatctactataacag

SEQ ID NO: 65041 - DNA, 25 bp, SARS Virus
ccgacaaaacagttactataacagt

SEQ ID NO: 65042 - DNA, 25 bp, SARS Virus
cgacaaaacagctactataacagtt

SEQ ID NO: 65043 - DNA, 25 bp, SARS Virus
gacaaaacagcttctataacagttt

SEQ ID NO: 65044 - DNA, 25 bp, SARS Virus
acaaaacagctattataacagtttt

SEQ ID NO: 65045 - DNA, 25 bp, SARS Virus
caaaacagctactataacagttttg

SEQ ID NO: 65046 - DNA, 25 bp, SARS Virus
aaaacagctactttaacagttttgt

SEQ ID NO: 65047 - DNA, 25 bp, SARS Virus
aaacagctactataacagttttgtc

SEQ ID NO: 65048 - DNA, 25 bp, SARS Virus
aacagctactattacagttttgtct

SEQ ID NO: 65049 - DNA, 25 bp, SARS Virus
acagctactatatcagttttgtcta

SEQ ID NO: 65050 - DNA, 25 bp, SARS Virus
cagctactataatagttttgtctac

SEQ ID NO: 65051 - DNA, 25 bp, SARS Virus
agctactataactgttttgtctacc

SEQ ID NO: 65052 - DNA, 25 bp, SARS Virus
gctactataacatttttgtctacca

SEQ ID NO: 65053 - DNA, 25 bp, SARS Virus
ctactataacagttttgtctaccat

SEQ ID NO: 65054 - DNA, 25 bp, SARS Virus
tactataacagttttgtctaccatg

SEQ ID NO: 65055 - DNA, 25 bp, SARS Virus
actataacagttttgtctaccatgt

SEQ ID NO: 65056 - DNA, 25 bp, SARS Virus
ctataacagttttgtctaccatgtg

SEQ ID NO: 65057 - DNA, 25 bp, SARS Virus
tataacagttttttctaccatgtga

SEQ ID NO: 65058 - DNA, 25 bp, SARS Virus
ataacagttttgtctaccatgtgaa

SEQ ID NO: 65059 - DNA, 25 bp, SARS Virus
taacagttttgtttaccatgtgaat

SEQ ID NO: 65060 - DNA, 25 bp, SARS Virus
aacagttttgtctaccatgtgaata

SEQ ID NO: 65061 - DNA, 25 bp, SARS Virus
acagttttgtcttccatgtgaatac

SEQ ID NO: 65062 - DNA, 25 bp, SARS Virus
cagttttgtctatcatgtgaatact

SEQ ID NO: 65063 - DNA, 25 bp, SARS Virus
agttttgtctactatgtgaatacta

SEQ ID NO: 65064 - DNA, 25 bp, SARS Virus
gttttgtctaccttgtgaatactaa

SEQ ID NO: 65065 - DNA, 25 bp, SARS Virus
ttttgtctaccatgtgaatactaac

SEQ ID NO: 65066 - DNA, 25 bp, SARS Virus
tttgtctaccatttgaatactaact

SEQ ID NO: 65067 - DNA, 25 bp, SARS Virus
ttgtctaccatgtgaatactaactt

SEQ ID NO: 65068 - DNA, 25 bp, SARS Virus
tgtctaccatgttaatactaacttt

SEQ ID NO: 65069 - DNA, 25 bp, SARS Virus
gtctaccatgtgtatactaactttc

SEQ ID NO: 65070 - DNA, 25 bp, SARS Virus
tctaccatgtgattactaactttcc

SEQ ID NO: 65071 - DNA, 25 bp, SARS Virus
ctaccatgtgaatactaactttcca

SEQ ID NO: 65072 - DNA, 25 bp, SARS Virus
taccatgtgaattctaactttccaa

SEQ ID NO: 65073 - DNA, 25 bp, SARS Virus
accatgtgaatattaactttccaag

SEQ ID NO: 65074 - DNA, 25 bp, SARS Virus
ccatgtgaatactaactttccaagc

SEQ ID NO: 65075 - DNA, 25 bp, SARS Virus
catgtgaatacttactttccaagca

SEQ ID NO: 65076 - DNA, 25 bp, SARS Virus
atgtgaatactatctttccaagcac

SEQ ID NO: 65077 - DNA, 25 bp, SARS Virus
tgtgaatactaattttccaagcaca

SEQ ID NO: 65078 - DNA, 25 bp, SARS Virus
gtgaatactaactttccaagcacag

SEQ ID NO: 65079 - DNA, 25 bp, SARS Virus
tgaatactaactttccaagcacagt

SEQ ID NO: 65080 - DNA, 25 bp, SARS Virus
gaatactaactttccaagcacagtg

SEQ ID NO: 65081 - DNA, 25 bp, SARS Virus
aatactaacttttcaagcacagtga

SEQ ID NO: 65082 - DNA, 25 bp, SARS Virus
atactaactttctaagcacagtgac

SEQ ID NO: 65083 - DNA, 25 bp, SARS Virus
tactaactttcctagcacagtgacc

SEQ ID NO: 65084 - DNA, 25 bp, SARS Virus
actaactttccatgcacagtgaccg

SEQ ID NO: 65085 - DNA, 25 bp, SARS Virus
ctaactttccaatcacagtgaccga

SEQ ID NO: 65086 - DNA, 25 bp, SARS Virus
taactttccaagtacagtgaccgat

SEQ ID NO: 65087 - DNA, 25 bp, SARS Virus
aactttccaagctcagtgaccgata

SEQ ID NO: 65088 - DNA, 25 bp, SARS Virus
actttccaagcatagtgaccgataa

SEQ ID NO: 65089 - DNA, 25 bp, SARS Virus
ctttccaagcactgtgaccgataac

SEQ ID NO: 65090 - DNA, 25 bp, SARS Virus
tttccaagcacattgaccgataact

SEQ ID NO: 65091 - DNA, 25 bp, SARS Virus
ttccaagcacagtgaccgataacta

SEQ ID NO: 65092 - DNA, 25 bp, SARS Virus
tccaagcacagttaccgataactac

SEQ ID NO: 65093 - DNA, 25 bp, SARS Virus
ccaagcacagtgtccgataactacg

SEQ ID NO: 65094 - DNA, 25 bp, SARS Virus
caagcacagtgatcgataactacga

SEQ ID NO: 65095 - DNA, 25 bp, SARS Virus
aagcacagtgactgataactacgaa

SEQ ID NO: 65096 - DNA, 25 bp, SARS Virus
agcacagtgacctataactacgaat

SEQ ID NO: 65097 - DNA, 25 bp, SARS Virus
gcacagtgaccgttaactacgaatg

SEQ ID NO: 65098 - DNA, 25 bp, SARS Virus
cacagtgaccgataactacgaatgg

SEQ ID NO: 65099 - DNA, 25 bp, SARS Virus
acagtgaccgattactacgaatggg

SEQ ID NO: 65100 - DNA, 25 bp, SARS Virus
cagtgaccgatatctacgaatgggt

SEQ ID NO: 65101 - DNA, 25 bp, SARS Virus
agtgaccgataattacgaatgggtg

SEQ ID NO: 65102 - DNA, 25 bp, SARS Virus
gtgaccgataactacgaatgggtga

SEQ ID NO: 65103 - DNA, 25 bp, SARS Virus
tgaccgataacttcgaatgggtgaa

SEQ ID NO: 65104 - DNA, 25 bp, SARS Virus
gaccgataactatgaatgggtgaat

SEQ ID NO: 65105 - DNA, 25 bp, SARS Virus
accgataactactaatgggtgaatg

SEQ ID NO: 65106 - DNA, 25 bp, SARS Virus
ccgataactacgtatgggtgaatgt

SEQ ID NO: 65107 - DNA, 25 bp, SARS Virus
cgataactacgattgggtgaatgtt

SEQ ID NO: 65108 - DNA, 25 bp, SARS Virus
gataactacgaatgggtgaatgttt

SEQ ID NO: 65109 - DNA, 25 bp, SARS Virus
ataactacgaattggtgaatgtttt

SEQ ID NO: 65110 - DNA, 25 bp, SARS Virus
taactacgaatgtgtgaatgttttg

SEQ ID NO: 65111 - DNA, 25 bp, SARS Virus
aactacgaatggttgaatgttttgt

SEQ ID NO: 65112 - DNA, 25 bp, SARS Virus
actacgaatgggtgaatgttttgta

SEQ ID NO: 65113 - DNA, 25 bp, SARS Virus
ctacgaatgggttaatgttttgtag

SEQ ID NO: 65114 - DNA, 25 bp, SARS Virus
tacgaatgggtgtatgttttgtagg

SEQ ID NO: 65115 - DNA, 25 bp, SARS Virus
acgaatgggtgattgttttgtagga

SEQ ID NO: 65116 - DNA, 25 bp, SARS Virus
cgaatgggtgaatgttttgtaggat

SEQ ID NO: 65117 - DNA, 25 bp, SARS Virus
gaatgggtgaattttttgtaggatt

SEQ ID NO: 65118 - DNA, 25 bp, SARS Virus
aatgggtgaatgttttgtaggatta

SEQ ID NO: 65119 - DNA, 25 bp, SARS Virus
atgggtgaatgttttgtaggattag

SEQ ID NO: 65120 - DNA, 25 bp, SARS Virus
tgggtgaatgttttgtaggattagt

SEQ ID NO: 65121 - DNA, 25 bp, SARS Virus
gggtgaatgttttgtaggattagtc

SEQ ID NO: 65122 - DNA, 25 bp, SARS Virus
ggtgaatgttttttaggattagtcc

SEQ ID NO: 65123 - DNA, 25 bp, SARS Virus
gtgaatgttttgtaggattagtcct

SEQ ID NO: 65124 - DNA, 25 bp, SARS Virus
tgaatgttttgttggattagtcctc

SEQ ID NO: 65125 - DNA, 25 bp, SARS Virus
gaatgttttgtatgattagtcctca

SEQ ID NO: 65126 - DNA, 25 bp, SARS Virus
aatgttttgtagtattagtcctcat

SEQ ID NO: 65127 - DNA, 25 bp, SARS Virus
atgttttgtaggtttagtcctcata

SEQ ID NO: 65128 - DNA, 25 bp, SARS Virus
tgttttgtaggattagtcctcatac

SEQ ID NO: 65129 - DNA, 25 bp, SARS Virus
gttttgtaggattagtcctcatacg

SEQ ID NO: 65130 - DNA, 25 bp, SARS Virus
ttttgtaggatttgtcctcatacga

SEQ ID NO: 65131 - DNA, 25 bp, SARS Virus
tttgtaggattattcctcatacgac

SEQ ID NO: 65132 - DNA, 25 bp, SARS Virus
ttgtaggattagtcctcatacgact

SEQ ID NO: 65133 - DNA, 25 bp, SARS Virus
tgtaggattagttctcatacgacta

SEQ ID NO: 65134 - DNA, 25 bp, SARS Virus
gtaggattagtcttcatacgactac

SEQ ID NO: 65135 - DNA, 25 bp, SARS Virus
taggattagtcctcatacgactaca

SEQ ID NO: 65136 - DNA, 25 bp, SARS Virus
aggattagtccttatacgactacag

SEQ ID NO: 65137 - DNA, 25 bp, SARS Virus
ggattagtcctcttacgactacaga

SEQ ID NO: 65138 - DNA, 25 bp, SARS Virus
gattagtcctcatacgactacagaa

SEQ ID NO: 65139 - DNA, 25 bp, SARS Virus
attagtcctcattcgactacagaaa

SEQ ID NO: 65140 - DNA, 25 bp, SARS Virus
ttagtcctcatatgactacagaaag

SEQ ID NO: 65141 - DNA, 25 bp, SARS Virus
tagtcctcatactactacagaaagt

SEQ ID NO: 65142 - DNA, 25 bp, SARS Virus
agtcctcatacgtctacagaaagtg

SEQ ID NO: 65143 - DNA, 25 bp, SARS Virus
gtcctcatacgattacagaaagtga

SEQ ID NO: 65144 - DNA, 25 bp, SARS Virus
tcctcatacgactacagaaagtgaa

SEQ ID NO: 65145 - DNA, 25 bp, SARS Virus
cctcatacgacttcagaaagtgaac

SEQ ID NO: 65146 - DNA, 25 bp, SARS Virus
ctcatacgactatagaaagtgaaca

SEQ ID NO: 65147 - DNA, 25 bp, SARS Virus
tcatacgactactgaaagtgaacat

SEQ ID NO: 65148 - DNA, 25 bp, SARS Virus
catacgactacataaagtgaacata

SEQ ID NO: 65149 - DNA, 25 bp, SARS Virus
atacgactacagtaagtgaacataa

SEQ ID NO: 65150 - DNA, 25 bp, SARS Virus
tacgactacagatagtgaacataaa

SEQ ID NO: 65151 - DNA, 25 bp, SARS Virus
acgactacagaatgtgaacataaat

SEQ ID NO: 65152 - DNA, 25 bp, SARS Virus
cgactacagaaattgaacataaatg

SEQ ID NO: 65153 - DNA, 25 bp, SARS Virus
gactacagaaagtgaacataaatgt

SEQ ID NO: 65154 - DNA, 25 bp, SARS Virus
actacagaaagttaacataaatgtt

SEQ ID NO: 65155 - DNA, 25 bp, SARS Virus
ctacagaaagtgtacataaatgtta

SEQ ID NO: 65156 - DNA, 25 bp, SARS Virus
tacagaaagtgatcataaatgttat

SEQ ID NO: 65157 - DNA, 25 bp, SARS Virus
acagaaagtgaatataaatgttatg

SEQ ID NO: 65158 - DNA, 25 bp, SARS Virus
cagaaagtgaacttaaatgttatgt

SEQ ID NO: 65159 - DNA, 25 bp, SARS Virus
agaaagtgaacataaatgttatgta

SEQ ID NO: 65160 - DNA, 25 bp, SARS Virus
gaaagtgaacattaatgttatgtaa

SEQ ID NO: 65161 - DNA, 25 bp, SARS Virus
aaagtgaacatatatgttatgtaat

SEQ ID NO: 65162 - DNA, 25 bp, SARS Virus
aagtgaacataattgttatgtaatc

SEQ ID NO: 65163 - DNA, 25 bp, SARS Virus
agtgaacataaatgttatgtaatct

SEQ ID NO: 65164 - DNA, 25 bp, SARS Virus
gtgaacataaattttatgtaatctt

SEQ ID NO: 65165 - DNA, 25 bp, SARS Virus
tgaacataaatgttatgtaatcttt

SEQ ID NO: 65166 - DNA, 25 bp, SARS Virus
gaacataaatgttatgtaatctttc

SEQ ID NO: 65167 - DNA, 25 bp, SARS Virus
aacataaatgttttgtaatctttca

SEQ ID NO: 65168 - DNA, 25 bp, SARS Virus
acataaatgttatgtaatctttcaa

SEQ ID NO: 65169 - DNA, 25 bp, SARS Virus
cataaatgttatttaatctttcaat

SEQ ID NO: 65170 - DNA, 25 bp, SARS Virus
ataaatgttatgtaatctttcaatg

SEQ ID NO: 65171 - DNA, 25 bp, SARS Virus
taaatgttatgttatctttcaatgt

SEQ ID NO: 65172 - DNA, 25 bp, SARS Virus
aaatgttatgtattctttcaatgta

SEQ ID NO: 65173 - DNA, 25 bp, SARS Virus
aatgttatgtaatctttcaatgtac

SEQ ID NO: 65174 - DNA, 25 bp, SARS Virus
atgttatgtaatttttcaatgtact

SEQ ID NO: 65175 - DNA, 25 bp, SARS Virus
tgttatgtaatctttcaatgtacta

SEQ ID NO: 65176 - DNA, 25 bp, SARS Virus
gttatgtaatctttcaatgtactac

SEQ ID NO: 65177 - DNA, 25 bp, SARS Virus
ttatgtaatctttcaatgtactact

SEQ ID NO: 65178 - DNA, 25 bp, SARS Virus
tatgtaatcttttaatgtactactc

SEQ ID NO: 65179 - DNA, 25 bp, SARS Virus
atgtaatctttctatgtactactcg

SEQ ID NO: 65180 - DNA, 25 bp, SARS Virus
tgtaatctttcattgtactactcga

SEQ ID NO: 65181 - DNA, 25 bp, SARS Virus
gtaatctttcaatgtactactcgaa

SEQ ID NO: 65182 - DNA, 25 bp, SARS Virus
taatctttcaatttactactcgaat

SEQ ID NO: 65183 - DNA, 25 bp, SARS Virus
aatctttcaatgtactactcgaatg

SEQ ID NO: 65184 - DNA, 25 bp, SARS Virus
atctttcaatgttctactcgaatga

SEQ ID NO: 65185 - DNA, 25 bp, SARS Virus
tctttcaatgtattactcgaatgac

SEQ ID NO: 65186 - DNA, 25 bp, SARS Virus
ctttcaatgtactactcgaatgacc

SEQ ID NO: 65187 - DNA, 25 bp, SARS Virus
tttcaatgtacttctcgaatgaccg

SEQ ID NO: 65188 - DNA, 25 bp, SARS Virus
ttcaatgtactattcgaatgaccgg

SEQ ID NO: 65189 - DNA, 25 bp, SARS Virus
tcaatgtactactcgaatgaccggt

SEQ ID NO: 65190 - DNA, 25 bp, SARS Virus
caatgtactacttgaatgaccggtg

SEQ ID NO: 65191 - DNA, 25 bp, SARS Virus
aatgtactactctaatgaccggtgt

SEQ ID NO: 65192 - DNA, 25 bp, SARS Virus
atgtactactcgtatgaccggtgta

SEQ ID NO: 65193 - DNA, 25 bp, SARS Virus
tgtactactcgattgaccggtgtac

SEQ ID NO: 65194 - DNA, 25 bp, SARS Virus
gtactactcgaatgaccggtgtaca

SEQ ID NO: 65195 - DNA, 25 bp, SARS Virus
tactactcgaattaccggtgtacaa

SEQ ID NO: 65196 - DNA, 25 bp, SARS Virus
actactcgaatgtccggtgtacaac

SEQ ID NO: 65197 - DNA, 25 bp, SARS Virus
ctactcgaatgatcggtgtacaacc

SEQ ID NO: 65198 - DNA, 25 bp, SARS Virus
tactcgaatgactggtgtacaacct

SEQ ID NO: 65199 - DNA, 25 bp, SARS Virus
actcgaatgacctgtgtacaacctg

SEQ ID NO: 65200 - DNA, 25 bp, SARS Virus
ctcgaatgaccgttgtacaacctgt

SEQ ID NO: 65201 - DNA, 25 bp, SARS Virus
tcgaatgaccggtgtacaacctgta

SEQ ID NO: 65202 - DNA, 25 bp, SARS Virus
cgaatgaccggtttacaacctgtac

SEQ ID NO: 65203 - DNA, 25 bp, SARS Virus
gaatgaccggtgtacaacctgtaca

SEQ ID NO: 65204 - DNA, 25 bp, SARS Virus
aatgaccggtgttcaacctgtacat

SEQ ID NO: 65205 - DNA, 25 bp, SARS Virus
atgaccggtgtataacctgtacata

SEQ ID NO: 65206 - DNA, 25 bp, SARS Virus
tgaccggtgtactacctgtacataa

SEQ ID NO: 65207 - DNA, 25 bp, SARS Virus
gaccggtgtacatcctgtacataag

SEQ ID NO: 65208 - DNA, 25 bp, SARS Virus
accggtgtacaatctgtacataagg

SEQ ID NO: 65209 - DNA, 25 bp, SARS Virus
ccggtgtacaacttgtacataaggc

SEQ ID NO: 65210 - DNA, 25 bp, SARS Virus
cggtgtacaacctgtacataaggca

SEQ ID NO: 65211 - DNA, 25 bp, SARS Virus
ggtgtacaacctttacataaggcat

SEQ ID NO: 65212 - DNA, 25 bp, SARS Virus
gtgtacaacctgtacataaggcatt

SEQ ID NO: 65213 - DNA, 25 bp, SARS Virus
tgtacaacctgttcataaggcatta

SEQ ID NO: 65214 - DNA, 25 bp, SARS Virus
gtacaacctgtatataaggcattac

SEQ ID NO: 65215 - DNA, 25 bp, SARS Virus
tacaacctgtacttaaggcattacg

SEQ ID NO: 65216 - DNA, 25 bp, SARS Virus
acaacctgtacataaggcattacga

SEQ ID NO: 65217 - DNA, 25 bp, SARS Virus
caacctgtacattaggcattacgat

SEQ ID NO: 65218 - DNA, 25 bp, SARS Virus
aacctgtacatatggcattacgatt

SEQ ID NO: 65219 - DNA, 25 bp, SARS Virus
acctgtacataatgcattacgattg

SEQ ID NO: 65220 - DNA, 25 bp, SARS Virus
cctgtacataagtcattacgattga

SEQ ID NO: 65221 - DNA, 25 bp, SARS Virus
ctgtacataaggtattacgattgat

SEQ ID NO: 65222 - DNA, 25 bp, SARS Virus
tgtacataaggctttacgattgatt

SEQ ID NO: 65223 - DNA, 25 bp, SARS Virus
gtacataaggcattacgattgatta

SEQ ID NO: 65224 - DNA, 25 bp, SARS Virus
tacataaggcattacgattgattac

SEQ ID NO: 65225 - DNA, 25 bp, SARS Virus
acataaggcatttcgattgattact

SEQ ID NO: 65226 - DNA, 25 bp, SARS Virus
cataaggcattatgattgattacta

SEQ ID NO: 65227 - DNA, 25 bp, SARS Virus
ataaggcattactattgattactat

SEQ ID NO: 65228 - DNA, 25 bp, SARS Virus
taaggcattacgtttgattactatt

SEQ ID NO: 65229 - DNA, 25 bp, SARS Virus
aaggcattacgattgattactattg

SEQ ID NO: 65230 - DNA, 25 bp, SARS Virus
aggcattacgattgattactattgt

SEQ ID NO: 65231 - DNA, 25 bp, SARS Virus
ggcattacgatttattactattgtg

SEQ ID NO: 65232 - DNA, 25 bp, SARS Virus
gcattacgattgtttactattgtgg

SEQ ID NO: 65233 - DNA, 25 bp, SARS Virus
cattacgattgattactattgtgga

SEQ ID NO: 65234 - DNA, 25 bp, SARS Virus
attacgattgattactattgtggag

SEQ ID NO: 65235 - DNA, 25 bp, SARS Virus
ttacgattgatttctattgtggagt

SEQ ID NO: 65236 - DNA, 25 bp, SARS Virus
tacgattgattattattgtggagtg

SEQ ID NO: 65237 - DNA, 25 bp, SARS Virus
acgattgattactattgtggagtgc

SEQ ID NO: 65238 - DNA, 25 bp, SARS Virus
cgattgattacttttgtggagtgcc

SEQ ID NO: 65239 - DNA, 25 bp, SARS Virus
gattgattactattgtggagtgcca

SEQ ID NO: 65240 - DNA, 25 bp, SARS Virus
attgattactattgtggagtgccat

SEQ ID NO: 65241 - DNA, 25 bp, SARS Virus
ttgattactattttggagtgccatg

SEQ ID NO: 65242 - DNA, 25 bp, SARS Virus
tgattactattgtggagtgccatga

SEQ ID NO: 65243 - DNA, 25 bp, SARS Virus
gattactattgttgagtgccatgac

SEQ ID NO: 65244 - DNA, 25 bp, SARS Virus
attactattgtgtagtgccatgacc

SEQ ID NO: 65245 - DNA, 25 bp, SARS Virus
ttactattgtggtgtgccatgaccc

SEQ ID NO: 65246 - DNA, 25 bp, SARS Virus
tactattgtggattgccatgaccct

SEQ ID NO: 65247 - DNA, 25 bp, SARS Virus
actattgtggagtgccatgaccctt

SEQ ID NO: 65248 - DNA, 25 bp, SARS Virus
ctattgtggagttccatgacccttg

SEQ ID NO: 65249 - DNA, 25 bp, SARS Virus
tattgtggagtgtcatgacccttgg

SEQ ID NO: 65250 - DNA, 25 bp, SARS Virus
attgtggagtgctatgacccttgga

SEQ ID NO: 65251 - DNA, 25 bp, SARS Virus
ttgtggagtgccttgacccttggac

SEQ ID NO: 65252 - DNA, 25 bp, SARS Virus
tgtggagtgccatgacccttggact

SEQ ID NO: 65253 - DNA, 25 bp, SARS Virus
gtggagtgccattacccttggactc

SEQ ID NO: 65254 - DNA, 25 bp, SARS Virus
tggagtgccatgtcccttggactca

SEQ ID NO: 65255 - DNA, 25 bp, SARS Virus
ggagtgccatgatccttggactcaa

SEQ ID NO: 65256 - DNA, 25 bp, SARS Virus
gagtgccatgactcttggactcaaa

SEQ ID NO: 65257 - DNA, 25 bp, SARS Virus
agtgccatgacctttggactcaaaa

SEQ ID NO: 65258 - DNA, 25 bp, SARS Virus
gtgccatgacccttggactcaaaat

SEQ ID NO: 65259 - DNA, 25 bp, SARS Virus
tgccatgacccttggactcaaaata

SEQ ID NO: 65260 - DNA, 25 bp, SARS Virus
gccatgaccctttgactcaaaatac

SEQ ID NO: 65261 - DNA, 25 bp, SARS Virus
ccatgacccttgtactcaaaatact

SEQ ID NO: 65262 - DNA, 25 bp, SARS Virus
catgacccttggtctcaaaatactc

SEQ ID NO: 65263 - DNA, 25 bp, SARS Virus
atgacccttggattcaaaatactcc

SEQ ID NO: 65264 - DNA, 25 bp, SARS Virus
tgacccttggactcaaaatactccg

SEQ ID NO: 65265 - DNA, 25 bp, SARS Virus
gacccttggacttaaaatactccga

SEQ ID NO: 65266 - DNA, 25 bp, SARS Virus
acccttggactctaaatactccgat

SEQ ID NO: 65267 - DNA, 25 bp, SARS Virus
cccttggactcataatactccgata

SEQ ID NO: 65268 - DNA, 25 bp, SARS Virus
ccttggactcaatatactccgatac

SEQ ID NO: 65269 - DNA, 25 bp, SARS Virus
cttggactcaaattactccgataca

SEQ ID NO: 65270 - DNA, 25 bp, SARS Virus
ttggactcaaaatactccgatacat

SEQ ID NO: 65271 - DNA, 25 bp, SARS Virus
tggactcaaaattctccgatacatg

SEQ ID NO: 65272 - DNA, 25 bp, SARS Virus
ggactcaaaatattccgatacatgt

SEQ ID NO: 65273 - DNA, 25 bp, SARS Virus
gactcaaaatactccgatacatgtg

SEQ ID NO: 65274 - DNA, 25 bp, SARS Virus
actcaaaatacttcgatacatgtgt

SEQ ID NO: 65275 - DNA, 25 bp, SARS Virus
ctcaaaatactctgatacatgtgtg

SEQ ID NO: 65276 - DNA, 25 bp, SARS Virus
tcaaaatactcctatacatgtgtgg

SEQ ID NO: 65277 - DNA, 25 bp, SARS Virus
caaaatactccgttacatgtgtggt

SEQ ID NO: 65278 - DNA, 25 bp, SARS Virus
aaaatactccgatacatgtgtggtg

SEQ ID NO: 65279 - DNA, 25 bp, SARS Virus
aaatactccgattcatgtgtggtgt

SEQ ID NO: 65280 - DNA, 25 bp, SARS Virus
aatactccgatatatgtgtggtgta

SEQ ID NO: 65281 - DNA, 25 bp, SARS Virus
atactccgatacttgtgtggtgtat

SEQ ID NO: 65282 - DNA, 25 bp, SARS Virus
tactccgatacatgtgtggtgtatg

SEQ ID NO: 65283 - DNA, 25 bp, SARS Virus
actccgatacatttgtggtgtatgt

SEQ ID NO: 65284 - DNA, 25 bp, SARS Virus
ctccgatacatgtgtggtgtatgtc

SEQ ID NO: 65285 - DNA, 25 bp, SARS Virus
tccgatacatgtttggtgtatgtca

SEQ ID NO: 65286 - DNA, 25 bp, SARS Virus
ccgatacatgtgtggtgtatgtcag

SEQ ID NO: 65287 - DNA, 25 bp, SARS Virus
cgatacatgtgttgtgtatgtcaga

SEQ ID NO: 65288 - DNA, 25 bp, SARS Virus
gatacatgtgtgttgtatgtcagaa

SEQ ID NO: 65289 - DNA, 25 bp, SARS Virus
atacatgtgtggtgtatgtcagaac

SEQ ID NO: 65290 - DNA, 25 bp, SARS Virus
tacatgtgtggtttatgtcagaacg

SEQ ID NO: 65291 - DNA, 25 bp, SARS Virus
acatgtgtggtgtatgtcagaacgt

SEQ ID NO: 65292 - DNA, 25 bp, SARS Virus
catgtgtggtgtttgtcagaacgtc

SEQ ID NO: 65293 - DNA, 25 bp, SARS Virus
atgtgtggtgtatgtcagaacgtcc

SEQ ID NO: 65294 - DNA, 25 bp, SARS Virus
tgtgtggtgtatttcagaacgtccg

SEQ ID NO: 65295 - DNA, 25 bp, SARS Virus
gtgtggtgtatgtcagaacgtccga

SEQ ID NO: 65296 - DNA, 25 bp, SARS Virus
tgtggtgtatgttagaacgtccgac

SEQ ID NO: 65297 - DNA, 25 bp, SARS Virus
gtggtgtatgtctgaacgtccgaca

SEQ ID NO: 65298 - DNA, 25 bp, SARS Virus
tggtgtatgtcataacgtccgacat

SEQ ID NO: 65299 - DNA, 25 bp, SARS Virus
ggtgtatgtcagtacgtccgacatc

SEQ ID NO: 65300 - DNA, 25 bp, SARS Virus
gtgtatgtcagatcgtccgacatcc

SEQ ID NO: 65301 - DNA, 25 bp, SARS Virus
tgtatgtcagaatgtccgacatcca

SEQ ID NO: 65302 - DNA, 25 bp, SARS Virus
gtatgtcagaacttccgacatccac

SEQ ID NO: 65303 - DNA, 25 bp, SARS Virus
tatgtcagaacgtccgacatccacg

SEQ ID NO: 65304 - DNA, 25 bp, SARS Virus
atgtcagaacgttcgacatccacga

SEQ ID NO: 65305 - DNA, 25 bp, SARS Virus
tgtcagaacgtctgacatccacgaa

SEQ ID NO: 65306 - DNA, 25 bp, SARS Virus
gtcagaacgtcctacatccacgaac

SEQ ID NO: 65307 - DNA, 25 bp, SARS Virus
tcagaacgtccgtcatccacgaaca

SEQ ID NO: 65308 - DNA, 25 bp, SARS Virus
cagaacgtccgatatccacgaacac

SEQ ID NO: 65309 - DNA, 25 bp, SARS Virus
agaacgtccgacttccacgaacaca

SEQ ID NO: 65310 - DNA, 25 bp, SARS Virus
gaacgtccgacatccacgaacacat

SEQ ID NO: 65311 - DNA, 25 bp, SARS Virus
aacgtccgacattcacgaacacata

SEQ ID NO: 65312 - DNA, 25 bp, SARS Virus
acgtccgacatctacgaacacataa

SEQ ID NO: 65313 - DNA, 25 bp, SARS Virus
cgtccgacatcctcgaacacataac

SEQ ID NO: 65314 - DNA, 25 bp, SARS Virus
gtccgacatccatgaacacataaca

SEQ ID NO: 65315 - DNA, 25 bp, SARS Virus
tccgacatccactaacacataacac

SEQ ID NO: 65316 - DNA, 25 bp, SARS Virus
ccgacatccacgtacacataacacg

SEQ ID NO: 65317 - DNA, 25 bp, SARS Virus
cgacatccacgatcacataacacgt

SEQ ID NO: 65318 - DNA, 25 bp, SARS Virus
gacatccacgaatacataacacgtt

SEQ ID NO: 65319 - DNA, 25 bp, SARS Virus
acatccacgaactcataacacgtta

SEQ ID NO: 65320 - DNA, 25 bp, SARS Virus
catccacgaacatataacacgttaa

SEQ ID NO: 65321 - DNA, 25 bp, SARS Virus
atccacgaacacttaacacgttaag

SEQ ID NO: 65322 - DNA, 25 bp, SARS Virus
tccacgaacacataacacgttaagt

SEQ ID NO: 65323 - DNA, 25 bp, SARS Virus
ccacgaacacattacacgttaagtg

SEQ ID NO: 65324 - DNA, 25 bp, SARS Virus
cacgaacacatatcacgttaagtgt

SEQ ID NO: 65325 - DNA, 25 bp, SARS Virus
acgaacacataatacgttaagtgtc

SEQ ID NO: 65326 - DNA, 25 bp, SARS Virus
cgaacacataactcgttaagtgtct

SEQ ID NO: 65327 - DNA, 25 bp, SARS Virus
gaacacataacatgttaagtgtctg

SEQ ID NO: 65328 - DNA, 25 bp, SARS Virus
aacacataacactttaagtgtctga

SEQ ID NO: 65329 - DNA, 25 bp, SARS Virus
acacataacacgttaagtgtctgaa

SEQ ID NO: 65330 - DNA, 25 bp, SARS Virus
cacataacacgttaagtgtctgaag

SEQ ID NO: 65331 - DNA, 25 bp, SARS Virus
acataacacgtttagtgtctgaagt

SEQ ID NO: 65332 - DNA, 25 bp, SARS Virus
cataacacgttatgtgtctgaagtg

SEQ ID NO: 65333 - DNA, 25 bp, SARS Virus
ataacacgttaattgtctgaagtga

SEQ ID NO: 65334 - DNA, 25 bp, SARS Virus
taacacgttaagtgtctgaagtgaa

SEQ ID NO: 65335 - DNA, 25 bp, SARS Virus
aacacgttaagtttctgaagtgaag

SEQ ID NO: 65336 - DNA, 25 bp, SARS Virus
acacgttaagtgtctgaagtgaagc

SEQ ID NO: 65337 - DNA, 25 bp, SARS Virus
cacgttaagtgtttgaagtgaagca

SEQ ID NO: 65338 - DNA, 25 bp, SARS Virus
acgttaagtgtctgaagtgaagcaa

SEQ ID NO: 65339 - DNA, 25 bp, SARS Virus
cgttaagtgtcttaagtgaagcaac

SEQ ID NO: 65340 - DNA, 25 bp, SARS Virus
gttaagtgtctgtagtgaagcaacg

SEQ ID NO: 65341 - DNA, 25 bp, SARS Virus
ttaagtgtctgatgtgaagcaacgc

SEQ ID NO: 65342 - DNA, 25 bp, SARS Virus
taagtgtctgaattgaagcaacgcc

SEQ ID NO: 65343 - DNA, 25 bp, SARS Virus
aagtgtctgaagtgaagcaacgcca

SEQ ID NO: 65344 - DNA, 25 bp, SARS Virus
agtgtctgaagttaagcaacgccac

SEQ ID NO: 65345 - DNA, 25 bp, SARS Virus
gtgtctgaagtgtagcaacgccacg

SEQ ID NO: 65346 - DNA, 25 bp, SARS Virus
tgtctgaagtgatgcaacgccacgg

SEQ ID NO: 65347 - DNA, 25 bp, SARS Virus
gtctgaagtgaatcaacgccacgga

SEQ ID NO: 65348 - DNA, 25 bp, SARS Virus
tctgaagtgaagtaacgccacggac

SEQ ID NO: 65349 - DNA, 25 bp, SARS Virus
ctgaagtgaagctacgccacggaca

SEQ ID NO: 65350 - DNA, 25 bp, SARS Virus
tgaagtgaagcatcgccacggacat

SEQ ID NO: 65351 - DNA, 25 bp, SARS Virus
gaagtgaagcaatgccacggacata

SEQ ID NO: 65352 - DNA, 25 bp, SARS Virus
aagtgaagcaactccacggacataa

SEQ ID NO: 65353 - DNA, 25 bp, SARS Virus
agtgaagcaacgtcacggacataat

SEQ ID NO: 65354 - DNA, 25 bp, SARS Virus
gtgaagcaacgctacggacataatc

SEQ ID NO: 65355 - DNA, 25 bp, SARS Virus
tgaagcaacgcctcggacataatcc

SEQ ID NO: 65356 - DNA, 25 bp, SARS Virus
gaagcaacgccatggacataatcct

SEQ ID NO: 65357 - DNA, 25 bp, SARS Virus
aagcaacgccactgacataatcctc

SEQ ID NO: 65358 - DNA, 25 bp, SARS Virus
agcaacgccacgtacataatcctct

SEQ ID NO: 65359 - DNA, 25 bp, SARS Virus
gcaacgccacggtcataatcctctg

SEQ ID NO: 65360 - DNA, 25 bp, SARS Virus
caacgccacggatataatcctctgg

SEQ ID NO: 65361 - DNA, 25 bp, SARS Virus
aacgccacggacttaatcctctggt

SEQ ID NO: 65362 - DNA, 25 bp, SARS Virus
acgccacggacataatcctctggta

SEQ ID NO: 65363 - DNA, 25 bp, SARS Virus
cgccacggacattatcctctggtaa

SEQ ID NO: 65364 - DNA, 25 bp, SARS Virus
gccacggacatattcctctggtaag

SEQ ID NO: 65365 - DNA, 25 bp, SARS Virus
ccacggacataatcctctggtaagg

SEQ ID NO: 65366 - DNA, 25 bp, SARS Virus
cacggacataattctctggtaagga

SEQ ID NO: 65367 - DNA, 25 bp, SARS Virus
acggacataatcttctggtaaggat

SEQ ID NO: 65368 - DNA, 25 bp, SARS Virus
cggacataatcctctggtaaggata

SEQ ID NO: 65369 - DNA, 25 bp, SARS Virus
ggacataatcctttggtaaggatac

SEQ ID NO: 65370 - DNA, 25 bp, SARS Virus
gacataatcctctggtaaggataca

SEQ ID NO: 65371 - DNA, 25 bp, SARS Virus
acataatcctcttgtaaggatacaa

SEQ ID NO: 65372 - DNA, 25 bp, SARS Virus
cataatcctctgttaaggatacaac

SEQ ID NO: 65373 - DNA, 25 bp, SARS Virus
ataatcctctggtaaggatacaacg

SEQ ID NO: 65374 - DNA, 25 bp, SARS Virus
taatcctctggttaggatacaacgt

SEQ ID NO: 65375 - DNA, 25 bp, SARS Virus
aatcctctggtatggatacaacgtt

SEQ ID NO: 65376 - DNA, 25 bp, SARS Virus
atcctctggtaatgatacaacgttc

SEQ ID NO: 65377 - DNA, 25 bp, SARS Virus
tcctctggtaagtatacaacgttca

SEQ ID NO: 65378 - DNA, 25 bp, SARS Virus
cctctggtaaggttacaacgttcac

SEQ ID NO: 65379 - DNA, 25 bp, SARS Virus
ctctggtaaggatacaacgttcacg

SEQ ID NO: 65380 - DNA, 25 bp, SARS Virus
tctggtaaggattcaacgttcacga

SEQ ID NO: 65381 - DNA, 25 bp, SARS Virus
ctggtaaggatataacgttcacgac

SEQ ID NO: 65382 - DNA, 25 bp, SARS Virus
tggtaaggatactacgttcacgacg

SEQ ID NO: 65383 - DNA, 25 bp, SARS Virus
ggtaaggatacatcgttcacgacga

SEQ ID NO: 65384 - DNA, 25 bp, SARS Virus
gtaaggatacaatgttcacgacgat

SEQ ID NO: 65385 - DNA, 25 bp, SARS Virus
taaggatacaactttcacgacgata

SEQ ID NO: 65386 - DNA, 25 bp, SARS Virus
aaggatacaacgttcacgacgatac

SEQ ID NO: 65387 - DNA, 25 bp, SARS Virus
aggatacaacgttcacgacgatact

SEQ ID NO: 65388 - DNA, 25 bp, SARS Virus
ggatacaacgtttacgacgatactg

SEQ ID NO: 65389 - DNA, 25 bp, SARS Virus
gatacaacgttctcgacgatactgg

SEQ ID NO: 65390 - DNA, 25 bp, SARS Virus
atacaacgttcatgacgatactggt

SEQ ID NO: 65391 - DNA, 25 bp, SARS Virus
tacaacgttcactacgatactggta

SEQ ID NO: 65392 - DNA, 25 bp, SARS Virus
acaacgttcacgtcgatactggtac

SEQ ID NO: 65393 - DNA, 25 bp, SARS Virus
caacgttcacgatgatactggtaca

SEQ ID NO: 65394 - DNA, 25 bp, SARS Virus
aacgttcacgactatactggtacag

SEQ ID NO: 65395 - DNA, 25 bp, SARS Virus
acgttcacgacgttactggtacagt

SEQ ID NO: 65396 - DNA, 25 bp, SARS Virus
cgttcacgacgatactggtacagta

SEQ ID NO: 65397 - DNA, 25 bp, SARS Virus
gttcacgacgattctggtacagtaa

SEQ ID NO: 65398 - DNA, 25 bp, SARS Virus
ttcacgacgatattggtacagtaaa

SEQ ID NO: 65399 - DNA, 25 bp, SARS Virus
tcacgacgatactggtacagtaaag

SEQ ID NO: 65400 - DNA, 25 bp, SARS Virus
cacgacgatacttgtacagtaaagt

SEQ ID NO: 65401 - DNA, 25 bp, SARS Virus
acgacgatactgttacagtaaagtt

SEQ ID NO: 65402 - DNA, 25 bp, SARS Virus
cgacgatactggtacagtaaagttg

SEQ ID NO: 65403 - DNA, 25 bp, SARS Virus
gacgatactggttcagtaaagttgt

SEQ ID NO: 65404 - DNA, 25 bp, SARS Virus
acgatactggtatagtaaagttgta

SEQ ID NO: 65405 - DNA, 25 bp, SARS Virus
cgatactggtactgtaaagttgtag

SEQ ID NO: 65406 - DNA, 25 bp, SARS Virus
gatactggtacattaaagttgtagt

SEQ ID NO: 65407 - DNA, 25 bp, SARS Virus
atactggtacagtaaagttgtagtg

SEQ ID NO: 65408 - DNA, 25 bp, SARS Virus
tactggtacagttaagttgtagtgt

SEQ ID NO: 65409 - DNA, 25 bp, SARS Virus
actggtacagtatagttgtagtgtg

SEQ ID NO: 65410 - DNA, 25 bp, SARS Virus
ctggtacagtaatgttgtagtgtgt

SEQ ID NO: 65411 - DNA, 25 bp, SARS Virus
tggtacagtaaatttgtagtgtgtt

SEQ ID NO: 65412 - DNA, 25 bp, SARS Virus
ggtacagtaaagttgtagtgtgttt

SEQ ID NO: 65413 - DNA, 25 bp, SARS Virus
gtacagtaaagttgtagtgtgttta

SEQ ID NO: 65414 - DNA, 25 bp, SARS Virus
tacagtaaagttttagtgtgtttaa

SEQ ID NO: 65415 - DNA, 25 bp, SARS Virus
acagtaaagttgtagtgtgtttaat

SEQ ID NO: 65416 - DNA, 25 bp, SARS Virus
cagtaaagttgttgtgtgtttaatc

SEQ ID NO: 65417 - DNA, 25 bp, SARS Virus
agtaaagttgtattgtgtttaatca

SEQ ID NO: 65418 - DNA, 25 bp, SARS Virus
gtaaagttgtagtgtgtttaatcac

SEQ ID NO: 65419 - DNA, 25 bp, SARS Virus
taaagttgtagtttgtttaatcaca

SEQ ID NO: 65420 - DNA, 25 bp, SARS Virus
aaagttgtagtgtgtttaatcacaa

SEQ ID NO: 65421 - DNA, 25 bp, SARS Virus
aagttgtagtgtttttaatcacaac

SEQ ID NO: 65422 - DNA, 25 bp, SARS Virus
agttgtagtgtgtttaatcacaaca

SEQ ID NO: 65423 - DNA, 25 bp, SARS Virus
gttgtagtgtgtttaatcacaacag

SEQ ID NO: 65424 - DNA, 25 bp, SARS Virus
ttgtagtgtgtttaatcacaacaga

SEQ ID NO: 65425 - DNA, 25 bp, SARS Virus
tgtagtgtgttttatcacaacagac

SEQ ID NO: 65426 - DNA, 25 bp, SARS Virus
gtagtgtgtttattcacaacagaca

SEQ ID NO: 65427 - DNA, 25 bp, SARS Virus
tagtgtgtttaatcacaacagacaa

SEQ ID NO: 65428 - DNA, 25 bp, SARS Virus
agtgtgtttaattacaacagacaat

SEQ ID NO: 65429 - DNA, 25 bp, SARS Virus
gtgtgtttaatctcaacagacaatt

SEQ ID NO: 65430 - DNA, 25 bp, SARS Virus
tgtgtttaatcataacagacaatta

SEQ ID NO: 65431 - DNA, 25 bp, SARS Virus
gtgtttaatcactacagacaattag

SEQ ID NO: 65432 - DNA, 25 bp, SARS Virus
tgtttaatcacatcagacaattagg

SEQ ID NO: 65433 - DNA, 25 bp, SARS Virus
gtttaatcacaatagacaattaggg

SEQ ID NO: 65434 - DNA, 25 bp, SARS Virus
tttaatcacaactgacaattaggga

SEQ ID NO: 65435 - DNA, 25 bp, SARS Virus
ttaatcacaacatacaattagggat

SEQ ID NO: 65436 - DNA, 25 bp, SARS Virus
taatcacaacagtcaattagggata

SEQ ID NO: 65437 - DNA, 25 bp, SARS Virus
aatcacaacagataattagggatac

SEQ ID NO: 65438 - DNA, 25 bp, SARS Virus
atcacaacagactattagggataca

SEQ ID NO: 65439 - DNA, 25 bp, SARS Virus
tcacaacagacatttagggatacaa

SEQ ID NO: 65440 - DNA, 25 bp, SARS Virus
cacaacagacaattagggatacaaa

SEQ ID NO: 65441 - DNA, 25 bp, SARS Virus
acaacagacaattagggatacaaac

SEQ ID NO: 65442 - DNA, 25 bp, SARS Virus
caacagacaatttgggatacaaacg

SEQ ID NO: 65443 - DNA, 25 bp, SARS Virus
aacagacaattatggatacaaacgt

SEQ ID NO: 65444 - DNA, 25 bp, SARS Virus
acagacaattagtgatacaaacgtt

SEQ ID NO: 65445 - DNA, 25 bp, SARS Virus
cagacaattaggtatacaaacgtta

SEQ ID NO: 65446 - DNA, 25 bp, SARS Virus
agacaattagggttacaaacgttac

SEQ ID NO: 65447 - DNA, 25 bp, SARS Virus
gacaattagggatacaaacgttacg

SEQ ID NO: 65448 - DNA, 25 bp, SARS Virus
acaattagggattcaaacgttacgg

SEQ ID NO: 65449 - DNA, 25 bp, SARS Virus
caattagggatataaacgttacggg

SEQ ID NO: 65450 - DNA, 25 bp, SARS Virus
aattagggatactaacgttacgggg

SEQ ID NO: 65451 - DNA, 25 bp, SARS Virus
attagggatacatacgttacggggt

SEQ ID NO: 65452 - DNA, 25 bp, SARS Virus
ttagggatacaatcgttacggggtc

SEQ ID NO: 65453 - DNA, 25 bp, SARS Virus
tagggatacaaatgttacggggtcc

SEQ ID NO: 65454 - DNA, 25 bp, SARS Virus
agggatacaaactttacggggtcca

SEQ ID NO: 65455 - DNA, 25 bp, SARS Virus
gggatacaaacgttacggggtccaa

SEQ ID NO: 65456 - DNA, 25 bp, SARS Virus
ggatacaaacgttacggggtccaac

SEQ ID NO: 65457 - DNA, 25 bp, SARS Virus
gatacaaacgtttcggggtccaaca

SEQ ID NO: 65458 - DNA, 25 bp, SARS Virus
atacaaacgttatggggtccaacac

SEQ ID NO: 65459 - DNA, 25 bp, SARS Virus
tacaaacgttactgggtccaacact

SEQ ID NO: 65460 - DNA, 25 bp, SARS Virus
acaaacgttacgtggtccaacacta

SEQ ID NO: 65461 - DNA, 25 bp, SARS Virus
caaacgttacggtgtccaacactac

SEQ ID NO: 65462 - DNA, 25 bp, SARS Virus
aaacgttacgggttccaacactaca

SEQ ID NO: 65463 - DNA, 25 bp, SARS Virus
aacgttacggggtccaacactacag

SEQ ID NO: 65464 - DNA, 25 bp, SARS Virus
acgttacggggttcaacactacagt

SEQ ID NO: 65465 - DNA, 25 bp, SARS Virus
cgttacggggtctaacactacagtg

SEQ ID NO: 65466 - DNA, 25 bp, SARS Virus
gttacggggtcctacactacagtga

SEQ ID NO: 65467 - DNA, 25 bp, SARS Virus
ttacggggtccatcactacagtgac

SEQ ID NO: 65468 - DNA, 25 bp, SARS Virus
tacggggtccaatactacagtgact

SEQ ID NO: 65469 - DNA, 25 bp, SARS Virus
acggggtccaactctacagtgacta

SEQ ID NO: 65470 - DNA, 25 bp, SARS Virus
cggggtccaacattacagtgactac

SEQ ID NO: 65471 - DNA, 25 bp, SARS Virus
ggggtccaacactacagtgactaca

SEQ ID NO: 65472 - DNA, 25 bp, SARS Virus
gggtccaacacttcagtgactacac

SEQ ID NO: 65473 - DNA, 25 bp, SARS Virus
ggtccaacactatagtgactacact

SEQ ID NO: 65474 - DNA, 25 bp, SARS Virus
gtccaacactactgtgactacactg

SEQ ID NO: 65475 - DNA, 25 bp, SARS Virus
tccaacactacattgactacactgt

SEQ ID NO: 65476 - DNA, 25 bp, SARS Virus
ccaacactacagtgactacactgtg

SEQ ID NO: 65477 - DNA, 25 bp, SARS Virus
caacactacagttactacactgtgt

SEQ ID NO: 65478 - DNA, 25 bp, SARS Virus
aacactacagtgtctacactgtgtt

SEQ ID NO: 65479 - DNA, 25 bp, SARS Virus
acactacagtgattacactgtgttg

SEQ ID NO: 65480 - DNA, 25 bp, SARS Virus
cactacagtgactacactgtgttga

SEQ ID NO: 65481 - DNA, 25 bp, SARS Virus
actacagtgacttcactgtgttgac

SEQ ID NO: 65482 - DNA, 25 bp, SARS Virus
ctacagtgactatactgtgttgaca

SEQ ID NO: 65483 - DNA, 25 bp, SARS Virus
tacagtgactactctgtgttgacat

SEQ ID NO: 65484 - DNA, 25 bp, SARS Virus
acagtgactacattgtgttgacata

SEQ ID NO: 65485 - DNA, 25 bp, SARS Virus
cagtgactacactgtgttgacatag

SEQ ID NO: 65486 - DNA, 25 bp, SARS Virus
agtgactacactttgttgacataga

SEQ ID NO: 65487 - DNA, 25 bp, SARS Virus
gtgactacactgtgttgacatagat

SEQ ID NO: 65488 - DNA, 25 bp, SARS Virus
tgactacactgttttgacatagatc

SEQ ID NO: 65489 - DNA, 25 bp, SARS Virus
gactacactgtgttgacatagatcc

SEQ ID NO: 65490 - DNA, 25 bp, SARS Virus
actacactgtgttgacatagatcct

SEQ ID NO: 65491 - DNA, 25 bp, SARS Virus
ctacactgtgtttacatagatcctc

SEQ ID NO: 65492 - DNA, 25 bp, SARS Virus
tacactgtgttgtcatagatcctcc

SEQ ID NO: 65493 - DNA, 25 bp, SARS Virus
acactgtgttgatatagatcctcca

SEQ ID NO: 65494 - DNA, 25 bp, SARS Virus
cactgtgttgacttagatcctccat

SEQ ID NO: 65495 - DNA, 25 bp, SARS Virus
actgtgttgacatagatcctccata

SEQ ID NO: 65496 - DNA, 25 bp, SARS Virus
ctgtgttgacattgatcctccatac

SEQ ID NO: 65497 - DNA, 25 bp, SARS Virus
tgtgttgacatatatcctccatact

SEQ ID NO: 65498 - DNA, 25 bp, SARS Virus
gtgttgacatagttcctccatactc

SEQ ID NO: 65499 - DNA, 25 bp, SARS Virus
tgttgacatagatcctccatactcg

SEQ ID NO: 65500 - DNA, 25 bp, SARS Virus
gttgacatagattctccatactcga

SEQ ID NO: 65501 - DNA, 25 bp, SARS Virus
ttgacatagatcttccatactcgat

SEQ ID NO: 65502 - DNA, 25 bp, SARS Virus
tgacatagatcctccatactcgata

SEQ ID NO: 65503 - DNA, 25 bp, SARS Virus
gacatagatccttcatactcgataa

SEQ ID NO: 65504 - DNA, 25 bp, SARS Virus
acatagatcctctatactcgataat

SEQ ID NO: 65505 - DNA, 25 bp, SARS Virus
catagatcctccttactcgataata

SEQ ID NO: 65506 - DNA, 25 bp, SARS Virus
atagatcctccatactcgataataa

SEQ ID NO: 65507 - DNA, 25 bp, SARS Virus
tagatcctccattctcgataataac

SEQ ID NO: 65508 - DNA, 25 bp, SARS Virus
agatcctccatattcgataataacg

SEQ ID NO: 65509 - DNA, 25 bp, SARS Virus
gatcctccatactcgataataacgt

SEQ ID NO: 65510 - DNA, 25 bp, SARS Virus
atcctccatacttgataataacgtt

SEQ ID NO: 65511 - DNA, 25 bp, SARS Virus
tcctccatactctataataacgttc

SEQ ID NO: 65512 - DNA, 25 bp, SARS Virus
cctccatactcgttaataacgttca

SEQ ID NO: 65513 - DNA, 25 bp, SARS Virus
ctccatactcgataataacgttcag

SEQ ID NO: 65514 - DNA, 25 bp, SARS Virus
tccatactcgattataacgttcagt

SEQ ID NO: 65515 - DNA, 25 bp, SARS Virus
ccatactcgatattaacgttcagtg

SEQ ID NO: 65516 - DNA, 25 bp, SARS Virus
catactcgataataacgttcagtgt

SEQ ID NO: 65517 - DNA, 25 bp, SARS Virus
atactcgataattacgttcagtgta

SEQ ID NO: 65518 - DNA, 25 bp, SARS Virus
tactcgataatatcgttcagtgtat

SEQ ID NO: 65519 - DNA, 25 bp, SARS Virus
actcgataataatgttcagtgtatt

SEQ ID NO: 65520 - DNA, 25 bp, SARS Virus
ctcgataataactttcagtgtattc

SEQ ID NO: 65521 - DNA, 25 bp, SARS Virus
tcgataataacgatcagtgtattcg

SEQ ID NO: 65522 - DNA, 25 bp, SARS Virus
cgataataacgtacagtgtattcgg

SEQ ID NO: 65523 - DNA, 25 bp, SARS Virus
gataataacgttaagtgtattcgga

SEQ ID NO: 65524 - DNA, 25 bp, SARS Virus
ataataacgttcagtgtattcggag

SEQ ID NO: 65525 - DNA, 25 bp, SARS Virus
taataacgttcaatgtattcggagg

SEQ ID NO: 65526 - DNA, 25 bp, SARS Virus
aataacgttcagagtattcggaggg

SEQ ID NO: 65527 - DNA, 25 bp, SARS Virus
ataacgttcagtatattcggagggt

SEQ ID NO: 65528 - DNA, 25 bp, SARS Virus
taacgttcagtgaattcggagggta

SEQ ID NO: 65529 - DNA, 25 bp, SARS Virus
aacgttcagtgtattcggagggtaa

SEQ ID NO: 65530 - DNA, 25 bp, SARS Virus
acgttcagtgtaatcggagggtaat

SEQ ID NO: 65531 - DNA, 25 bp, SARS Virus
cgttcagtgtatacggagggtaatc

SEQ ID NO: 65532 - DNA, 25 bp, SARS Virus
gttcagtgtattaggagggtaatca

SEQ ID NO: 65533 - DNA, 25 bp, SARS Virus
ttcagtgtattcagagggtaatcaa

SEQ ID NO: 65534 - DNA, 25 bp, SARS Virus
tcagtgtattcgaagggtaatcaaa

SEQ ID NO: 65535 - DNA, 25 bp, SARS Virus
cagtgtattcggagggtaatcaaaa

SEQ ID NO: 65536 - DNA, 25 bp, SARS Virus
agtgtattcggaaggtaatcaaaag

SEQ ID NO: 65537 - DNA, 25 bp, SARS Virus
gtgtattcggagagtaatcaaaagg

SEQ ID NO: 65538 - DNA, 25 bp, SARS Virus
tgtattcggaggataatcaaaaggt

SEQ ID NO: 65539 - DNA, 25 bp, SARS Virus
gtattcggagggaaatcaaaaggta

SEQ ID NO: 65540 - DNA, 25 bp, SARS Virus
tattcggagggtaatcaaaaggtaa

SEQ ID NO: 65541 - DNA, 25 bp, SARS Virus
attcggagggtaatcaaaaggtaat

SEQ ID NO: 65542 - DNA, 25 bp, SARS Virus
ttcggagggtaaacaaaaggtaata

SEQ ID NO: 65543 - DNA, 25 bp, SARS Virus
tcggagggtaataaaaaggtaatac

SEQ ID NO: 65544 - DNA, 25 bp, SARS Virus
cggagggtaatcaaaaggtaataca

SEQ ID NO: 65545 - DNA, 25 bp, SARS Virus
ggagggtaatcaaaaggtaatacac

SEQ ID NO: 65546 - DNA, 25 bp, SARS Virus
gagggtaatcaaaaggtaatacacg

SEQ ID NO: 65547 - DNA, 25 bp, SARS Virus
agggtaatcaaaaggtaatacacga

SEQ ID NO: 65548 - DNA, 25 bp, SARS Virus
gggtaatcaaaaagtaatacacgat

SEQ ID NO: 65549 - DNA, 25 bp, SARS Virus
ggtaatcaaaagataatacacgatt

SEQ ID NO: 65550 - DNA, 25 bp, SARS Virus
gtaatcaaaaggaaatacacgatta

SEQ ID NO: 65551 - DNA, 25 bp, SARS Virus
taatcaaaaggtaatacacgattac

SEQ ID NO: 65552 - DNA, 25 bp, SARS Virus
aatcaaaaggtaatacacgattacc

SEQ ID NO: 65553 - DNA, 25 bp, SARS Virus
atcaaaaggtaaaacacgattacca

SEQ ID NO: 65554 - DNA, 25 bp, SARS Virus
tcaaaaggtaatacacgattaccag

SEQ ID NO: 65555 - DNA, 25 bp, SARS Virus
caaaaggtaataaacgattaccagt

SEQ ID NO: 65556 - DNA, 25 bp, SARS Virus
aaaaggtaatacacgattaccagtc

SEQ ID NO: 65557 - DNA, 25 bp, SARS Virus
aaaggtaatacaagattaccagtcc

SEQ ID NO: 65558 - DNA, 25 bp, SARS Virus
aaggtaatacacaattaccagtcca

SEQ ID NO: 65559 - DNA, 25 bp, SARS Virus
aggtaatacacgattaccagtccaa

SEQ ID NO: 65560 - DNA, 25 bp, SARS Virus
ggtaatacacgaataccagtccaaa

SEQ ID NO: 65561 - DNA, 25 bp, SARS Virus
gtaatacacgataaccagtccaaaa

SEQ ID NO: 65562 - DNA, 25 bp, SARS Virus
taatacacgattaccagtccaaaaa

SEQ ID NO: 65563 - DNA, 25 bp, SARS Virus
aatacacgattaacagtccaaaaac

SEQ ID NO: 65564 - DNA, 25 bp, SARS Virus
atacacgattacaagtccaaaaacc

SEQ ID NO: 65565 - DNA, 25 bp, SARS Virus
tacacgattaccagtccaaaaacca

SEQ ID NO: 65566 - DNA, 25 bp, SARS Virus
acacgattaccaatccaaaaaccaa

SEQ ID NO: 65567 - DNA, 25 bp, SARS Virus
cacgattaccagaccaaaaaccaaa

SEQ ID NO: 65568 - DNA, 25 bp, SARS Virus
acgattaccagtacaaaaaccaaat

SEQ ID NO: 65569 - DNA, 25 bp, SARS Virus
cgattaccagtcaaaaaaccaaata

SEQ ID NO: 65570 - DNA, 25 bp, SARS Virus
gattaccagtccaaaaaccaaatat

SEQ ID NO: 65571 - DNA, 25 bp, SARS Virus
attaccagtccaaaaaccaaatatg

SEQ ID NO: 65572 - DNA, 25 bp, SARS Virus
ttaccagtccaaaaaccaaatatgt

SEQ ID NO: 65573 - DNA, 25 bp, SARS Virus
taccagtccaaaaaccaaatatgtt

SEQ ID NO: 65574 - DNA, 25 bp, SARS Virus
accagtccaaaaaccaaatatgttt

SEQ ID NO: 65575 - DNA, 25 bp, SARS Virus
ccagtccaaaaaacaaatatgtttt

SEQ ID NO: 65576 - DNA, 25 bp, SARS Virus
cagtccaaaaacaaaatatgttttt

SEQ ID NO: 65577 - DNA, 25 bp, SARS Virus
agtccaaaaaccaaatatgtttttg

SEQ ID NO: 65578 - DNA, 25 bp, SARS Virus
gtccaaaaaccaaatatgtttttgt

SEQ ID NO: 65579 - DNA, 25 bp, SARS Virus
tccaaaaaccaaatatgtttttgtg

SEQ ID NO: 65580 - DNA, 25 bp, SARS Virus
ccaaaaaccaaaaatgtttttgtgt

SEQ ID NO: 65581 - DNA, 25 bp, SARS Virus
caaaaaccaaatatgtttttgtgta

SEQ ID NO: 65582 - DNA, 25 bp, SARS Virus
aaaaaccaaataagtttttgtgtac

SEQ ID NO: 65583 - DNA, 25 bp, SARS Virus
aaaaccaaatatatttttgtgtaca

SEQ ID NO: 65584 - DNA, 25 bp, SARS Virus
aaaccaaatatgattttgtgtacac

SEQ ID NO: 65585 - DNA, 25 bp, SARS Virus
aaccaaatatgtatttgtgtacaca

SEQ ID NO: 65586 - DNA, 25 bp, SARS Virus
accaaatatgttattgtgtacacat

SEQ ID NO: 65587 - DNA, 25 bp, SARS Virus
ccaaatatgtttatgtgtacacatc

SEQ ID NO: 65588 - DNA, 25 bp, SARS Virus
caaatatgttttagtgtacacatcc

SEQ ID NO: 65589 - DNA, 25 bp, SARS Virus
aaatatgtttttatgtacacatccg

SEQ ID NO: 65590 - DNA, 25 bp, SARS Virus
aatatgtttttgagtacacatccgt

SEQ ID NO: 65591 - DNA, 25 bp, SARS Virus
atatgtttttgtatacacatccgtc

SEQ ID NO: 65592 - DNA, 25 bp, SARS Virus
tatgtttttgtgaacacatccgtca

SEQ ID NO: 65593 - DNA, 25 bp, SARS Virus
atgtttttgtgtacacatccgtcac

SEQ ID NO: 65594 - DNA, 25 bp, SARS Virus
tgtttttgtgtaaacatccgtcact

SEQ ID NO: 65595 - DNA, 25 bp, SARS Virus
gtttttgtgtacacatccgtcactg

SEQ ID NO: 65596 - DNA, 25 bp, SARS Virus
tttttgtgtacaaatccgtcactgt

SEQ ID NO: 65597 - DNA, 25 bp, SARS Virus
ttttgtgtacacatccgtcactgtt

SEQ ID NO: 65598 - DNA, 25 bp, SARS Virus
tttgtgtacacaaccgtcactgtta

SEQ ID NO: 65599 - DNA, 25 bp, SARS Virus
ttgtgtacacatacgtcactgttac

SEQ ID NO: 65600 - DNA, 25 bp, SARS Virus
tgtgtacacatcagtcactgttaca

SEQ ID NO: 65601 - DNA, 25 bp, SARS Virus
gtgtacacatccatcactgttacag

SEQ ID NO: 65602 - DNA, 25 bp, SARS Virus
tgtacacatccgacactgttacagt

SEQ ID NO: 65603 - DNA, 25 bp, SARS Virus
gtacacatccgtaactgttacagtg

SEQ ID NO: 65604 - DNA, 25 bp, SARS Virus
tacacatccgtcactgttacagtga

SEQ ID NO: 65605 - DNA, 25 bp, SARS Virus
acacatccgtcaatgttacagtgac

SEQ ID NO: 65606 - DNA, 25 bp, SARS Virus
cacatccgtcacagttacagtgact

SEQ ID NO: 65607 - DNA, 25 bp, SARS Virus
acatccgtcactattacagtgactg

SEQ ID NO: 65608 - DNA, 25 bp, SARS Virus
catccgtcactgatacagtgactga

SEQ ID NO: 65609 - DNA, 25 bp, SARS Virus
atccgtcactgtaacagtgactgaa

SEQ ID NO: 65610 - DNA, 25 bp, SARS Virus
tccgtcactgttacagtgactgaag

SEQ ID NO: 65611 - DNA, 25 bp, SARS Virus
ccgtcactgttaaagtgactgaagt

SEQ ID NO: 65612 - DNA, 25 bp, SARS Virus
cgtcactgttacagtgactgaagtt

SEQ ID NO: 65613 - DNA, 25 bp, SARS Virus
gtcactgttacaatgactgaagtta

SEQ ID NO: 65614 - DNA, 25 bp, SARS Virus
tcactgttacagagactgaagttac

SEQ ID NO: 65615 - DNA, 25 bp, SARS Virus
cactgttacagtaactgaagttacg

SEQ ID NO: 65616 - DNA, 25 bp, SARS Virus
actgttacagtgactgaagttacgc

SEQ ID NO: 65617 - DNA, 25 bp, SARS Virus
ctgttacagtgaatgaagttacgct

SEQ ID NO: 65618 - DNA, 25 bp, SARS Virus
tgttacagtgacagaagttacgcta

SEQ ID NO: 65619 - DNA, 25 bp, SARS Virus
gttacagtgactaaagttacgctat

SEQ ID NO: 65620 - DNA, 25 bp, SARS Virus
ttacagtgactgaagttacgctatc

SEQ ID NO: 65621 - DNA, 25 bp, SARS Virus
tacagtgactgaagttacgctatcg

SEQ ID NO: 65622 - DNA, 25 bp, SARS Virus
acagtgactgaaattacgctatcgt

SEQ ID NO: 65623 - DNA, 25 bp, SARS Virus
cagtgactgaagatacgctatcgtt

SEQ ID NO: 65624 - DNA, 25 bp, SARS Virus
agtgactgaagtaacgctatcgttg

SEQ ID NO: 65625 - DNA, 25 bp, SARS Virus
gtgactgaagttacgctatcgttgt

SEQ ID NO: 65626 - DNA, 25 bp, SARS Virus
tgactgaagttaagctatcgttgta

SEQ ID NO: 65627 - DNA, 25 bp, SARS Virus
gactgaagttacactatcgttgtac

SEQ ID NO: 65628 - DNA, 25 bp, SARS Virus
actgaagttacgatatcgttgtaca

SEQ ID NO: 65629 - DNA, 25 bp, SARS Virus
ctgaagttacgcaatcgttgtacac

SEQ ID NO: 65630 - DNA, 25 bp, SARS Virus
tgaagttacgctatcgttgtacact

SEQ ID NO: 65631 - DNA, 25 bp, SARS Virus
gaagttacgctaacgttgtacacta

SEQ ID NO: 65632 - DNA, 25 bp, SARS Virus
aagttacgctatagttgtacactaa

SEQ ID NO: 65633 - DNA, 25 bp, SARS Virus
agttacgctatcattgtacactaac

SEQ ID NO: 65634 - DNA, 25 bp, SARS Virus
gttacgctatcgatgtacactaacc

SEQ ID NO: 65635 - DNA, 25 bp, SARS Virus
ttacgctatcgtagtacactaacct

SEQ ID NO: 65636 - DNA, 25 bp, SARS Virus
tacgctatcgttatacactaacctg

SEQ ID NO: 65637 - DNA, 25 bp, SARS Virus
acgctatcgttgaacactaacctga

SEQ ID NO: 65638 - DNA, 25 bp, SARS Virus
cgctatcgttgtacactaacctgat

SEQ ID NO: 65639 - DNA, 25 bp, SARS Virus
gctatcgttgtaaactaacctgatt

SEQ ID NO: 65640 - DNA, 25 bp, SARS Virus
ctatcgttgtacactaacctgatta

SEQ ID NO: 65641 - DNA, 25 bp, SARS Virus
tatcgttgtacaataacctgattac

SEQ ID NO: 65642 - DNA, 25 bp, SARS Virus
atcgttgtacacaaacctgattacg

SEQ ID NO: 65643 - DNA, 25 bp, SARS Virus
tcgttgtacactaacctgattacga

SEQ ID NO: 65644 - DNA, 25 bp, SARS Virus
cgttgtacactaacctgattacgac

SEQ ID NO: 65645 - DNA, 25 bp, SARS Virus
gttgtacactaaactgattacgacc

SEQ ID NO: 65646 - DNA, 25 bp, SARS Virus
ttgtacactaacatgattacgaccg

SEQ ID NO: 65647 - DNA, 25 bp, SARS Virus
tgtacactaaccagattacgaccgc

SEQ ID NO: 65648 - DNA, 25 bp, SARS Virus
gtacactaacctaattacgaccgct

SEQ ID NO: 65649 - DNA, 25 bp, SARS Virus
tacactaacctgattacgaccgcta

SEQ ID NO: 65650 - DNA, 25 bp, SARS Virus
acactaacctgaatacgaccgctaa

SEQ ID NO: 65651 - DNA, 25 bp, SARS Virus
cactaacctgataacgaccgctaat

SEQ ID NO: 65652 - DNA, 25 bp, SARS Virus
actaacctgattacgaccgctaatg

SEQ ID NO: 65653 - DNA, 25 bp, SARS Virus
ctaacctgattaagaccgctaatgt

SEQ ID NO: 65654 - DNA, 25 bp, SARS Virus
taacctgattacaaccgctaatgta

SEQ ID NO: 65655 - DNA, 25 bp, SARS Virus
aacctgattacgaccgctaatgtat

SEQ ID NO: 65656 - DNA, 25 bp, SARS Virus
acctgattacgaacgctaatgtatg

SEQ ID NO: 65657 - DNA, 25 bp, SARS Virus
cctgattacgacagctaatgtatga

SEQ ID NO: 65658 - DNA, 25 bp, SARS Virus
ctgattacgaccactaatgtatgaa

SEQ ID NO: 65659 - DNA, 25 bp, SARS Virus
tgattacgaccgataatgtatgaac

SEQ ID NO: 65660 - DNA, 25 bp, SARS Virus
gattacgaccgcaaatgtatgaacg

SEQ ID NO: 65661 - DNA, 25 bp, SARS Virus
attacgaccgctaatgtatgaacgg

SEQ ID NO: 65662 - DNA, 25 bp, SARS Virus
ttacgaccgctaatgtatgaacggt

SEQ ID NO: 65663 - DNA, 25 bp, SARS Virus
tacgaccgctaaagtatgaacggtt

SEQ ID NO: 65664 - DNA, 25 bp, SARS Virus
acgaccgctaatatatgaacggttg

SEQ ID NO: 65665 - DNA, 25 bp, SARS Virus
cgaccgctaatgaatgaacggttgt

SEQ ID NO: 65666 - DNA, 25 bp, SARS Virus
gaccgctaatgtatgaacggttgtg

SEQ ID NO: 65667 - DNA, 25 bp, SARS Virus
accgctaatgtaagaacggttgtga

SEQ ID NO: 65668 - DNA, 25 bp, SARS Virus
ccgctaatgtataaacggttgtgaa

SEQ ID NO: 65669 - DNA, 25 bp, SARS Virus
cgctaatgtatgaacggttgtgaac

SEQ ID NO: 65670 - DNA, 25 bp, SARS Virus
gctaatgtatgaacggttgtgaaca

SEQ ID NO: 65671 - DNA, 25 bp, SARS Virus
ctaatgtatgaaaggttgtgaacat

SEQ ID NO: 65672 - DNA, 25 bp, SARS Virus
taatgtatgaacagttgtgaacatg

SEQ ID NO: 65673 - DNA, 25 bp, SARS Virus
aatgtatgaacgattgtgaacatga

SEQ ID NO: 65674 - DNA, 25 bp, SARS Virus
atgtatgaacggatgtgaacatgac

SEQ ID NO: 65675 - DNA, 25 bp, SARS Virus
tgtatgaacggtagtgaacatgact

SEQ ID NO: 65676 - DNA, 25 bp, SARS Virus
gtatgaacggttatgaacatgactc

SEQ ID NO: 65677 - DNA, 25 bp, SARS Virus
tatgaacggttgagaacatgactct

SEQ ID NO: 65678 - DNA, 25 bp, SARS Virus
atgaacggttgtaaacatgactctc

SEQ ID NO: 65679 - DNA, 25 bp, SARS Virus
tgaacggttgtgaacatgactctct

SEQ ID NO: 65680 - DNA, 25 bp, SARS Virus
gaacggttgtgaacatgactctctg

SEQ ID NO: 65681 - DNA, 25 bp, SARS Virus
aacggttgtgaaaatgactctctga

SEQ ID NO: 65682 - DNA, 25 bp, SARS Virus
acggttgtgaacatgactctctgag

SEQ ID NO: 65683 - DNA, 25 bp, SARS Virus
cggttgtgaacaagactctctgagt

SEQ ID NO: 65684 - DNA, 25 bp, SARS Virus
ggttgtgaacataactctctgagtt

SEQ ID NO: 65685 - DNA, 25 bp, SARS Virus
gttgtgaacatgactctctgagttc

SEQ ID NO: 65686 - DNA, 25 bp, SARS Virus
ttgtgaacatgaatctctgagttcg

SEQ ID NO: 65687 - DNA, 25 bp, SARS Virus
tgtgaacatgacactctgagttcga

SEQ ID NO: 65688 - DNA, 25 bp, SARS Virus
gtgaacatgactatctgagttcgaa

SEQ ID NO: 65689 - DNA, 25 bp, SARS Virus
tgaacatgactcactgagttcgaaa

SEQ ID NO: 65690 - DNA, 25 bp, SARS Virus
gaacatgactctatgagttcgaaaa

SEQ ID NO: 65691 - DNA, 25 bp, SARS Virus
aacatgactctcagagttcgaaaag

SEQ ID NO: 65692 - DNA, 25 bp, SARS Virus
acatgactctctaagttcgaaaagc

SEQ ID NO: 65693 - DNA, 25 bp, SARS Virus
catgactctctgagttcgaaaagcg

SEQ ID NO: 65694 - DNA, 25 bp, SARS Virus
atgactctctgaattcgaaaagcgt

SEQ ID NO: 65695 - DNA, 25 bp, SARS Virus
tgactctctgagatcgaaaagcgtc

SEQ ID NO: 65696 - DNA, 25 bp, SARS Virus
gactctctgagtacgaaaagcgtcg

SEQ ID NO: 65697 - DNA, 25 bp, SARS Virus
actctctgagttagaaaagcgtcgt

SEQ ID NO: 65698 - DNA, 25 bp, SARS Virus
ctctctgagttcaaaaagcgtcgtc

SEQ ID NO: 65699 - DNA, 25 bp, SARS Virus
tctctgagttcgaaaagcgtcgtct

SEQ ID NO: 65700 - DNA, 25 bp, SARS Virus
ctctgagttcgaaaagcgtcgtctt

SEQ ID NO: 65701 - DNA, 25 bp, SARS Virus
tctgagttcgaaaagcgtcgtcttt

SEQ ID NO: 65702 - DNA, 25 bp, SARS Virus
ctgagttcgaaaagcgtcgtctttg

SEQ ID NO: 65703 - DNA, 25 bp, SARS Virus
tgagttcgaaaaacgtcgtctttgc

SEQ ID NO: 65704 - DNA, 25 bp, SARS Virus
gagttcgaaaagagtcgtctttgcg

SEQ ID NO: 65705 - DNA, 25 bp, SARS Virus
agttcgaaaagcatcgtctttgcga

SEQ ID NO: 65706 - DNA, 25 bp, SARS Virus
gttcgaaaagcgacgtctttgcgag

SEQ ID NO: 65707 - DNA, 25 bp, SARS Virus
ttcgaaaagcgtagtctttgcgagt

SEQ ID NO: 65708 - DNA, 25 bp, SARS Virus
tcgaaaagcgtcatctttgcgagtt

SEQ ID NO: 65709 - DNA, 25 bp, SARS Virus
cgaaaagcgtcgactttgcgagttt

SEQ ID NO: 65710 - DNA, 25 bp, SARS Virus
gaaaagcgtcgtatttgcgagtttc

SEQ ID NO: 65711 - DNA, 25 bp, SARS Virus
aaaagcgtcgtcattgcgagtttcg

SEQ ID NO: 65712 - DNA, 25 bp, SARS Virus
aaagcgtcgtctatgcgagtttcgg

SEQ ID NO: 65713 - DNA, 25 bp, SARS Virus
aagcgtcgtcttagcgagtttcggt

SEQ ID NO: 65714 - DNA, 25 bp, SARS Virus
agcgtcgtctttacgagtttcggtg

SEQ ID NO: 65715 - DNA, 25 bp, SARS Virus
gcgtcgtctttgagagtttcggtga

SEQ ID NO: 65716 - DNA, 25 bp, SARS Virus
cgtcgtctttgcaagtttcggtgac

SEQ ID NO: 65717 - DNA, 25 bp, SARS Virus
gtcgtctttgcgagtttcggtgact

SEQ ID NO: 65718 - DNA, 25 bp, SARS Virus
tcgtctttgcgaatttcggtgactc

SEQ ID NO: 65719 - DNA, 25 bp, SARS Virus
cgtctttgcgagattcggtgactcc

SEQ ID NO: 65720 - DNA, 25 bp, SARS Virus
gtctttgcgagtatcggtgactcct

SEQ ID NO: 65721 - DNA, 25 bp, SARS Virus
tctttgcgagttacggtgactcctt

SEQ ID NO: 65722 - DNA, 25 bp, SARS Virus
ctttgcgagtttaggtgactccttt

SEQ ID NO: 65723 - DNA, 25 bp, SARS Virus
tttgcgagtttcagtgactcctttg

SEQ ID NO: 65724 - DNA, 25 bp, SARS Virus
ttgcgagtttcgatgactcctttgt

SEQ ID NO: 65725 - DNA, 25 bp, SARS Virus
tgcgagtttcggagactcctttgta

SEQ ID NO: 65726 - DNA, 25 bp, SARS Virus
gcgagtttcggtaactcctttgtaa

SEQ ID NO: 65727 - DNA, 25 bp, SARS Virus
cgagtttcggtgactcctttgtaaa

SEQ ID NO: 65728 - DNA, 25 bp, SARS Virus
gagtttcggtgaatcctttgtaaat

SEQ ID NO: 65729 - DNA, 25 bp, SARS Virus
agtttcggtgacacctttgtaaatt

SEQ ID NO: 65730 - DNA, 25 bp, SARS Virus
gtttcggtgactactttgtaaattc

SEQ ID NO: 65731 - DNA, 25 bp, SARS Virus
tttcggtgactcatttgtaaattcg

SEQ ID NO: 65732 - DNA, 25 bp, SARS Virus
ttcggtgactccattgtaaattcga

SEQ ID NO: 65733 - DNA, 25 bp, SARS Virus
tcggtgactcctatgtaaattcgac

SEQ ID NO: 65734 - DNA, 25 bp, SARS Virus
cggtgactccttagtaaattcgaca

SEQ ID NO: 65735 - DNA, 25 bp, SARS Virus
ggtgactcctttataaattcgacag

SEQ ID NO: 65736 - DNA, 25 bp, SARS Virus
gtgactcctttgaaaattcgacagt

SEQ ID NO: 65737 - DNA, 25 bp, SARS Virus
tgactcctttgtaaattcgacagta

SEQ ID NO: 65738 - DNA, 25 bp, SARS Virus
gactcctttgtaaattcgacagtat

SEQ ID NO: 65739 - DNA, 25 bp, SARS Virus
actcctttgtaaattcgacagtata

SEQ ID NO: 65740 - DNA, 25 bp, SARS Virus
ctcctttgtaaaatcgacagtatac

SEQ ID NO: 65741 - DNA, 25 bp, SARS Virus
tcctttgtaaatacgacagtatacc

SEQ ID NO: 65742 - DNA, 25 bp, SARS Virus
cctttgtaaattagacagtatacca

SEQ ID NO: 65743 - DNA, 25 bp, SARS Virus
ctttgtaaattcaacagtataccat

SEQ ID NO: 65744 - DNA, 25 bp, SARS Virus
tttgtaaattcgacagtataccata

SEQ ID NO: 65745 - DNA, 25 bp, SARS Virus
ttgtaaattcgaaagtataccataa

SEQ ID NO: 65746 - DNA, 25 bp, SARS Virus
tgtaaattcgacagtataccataac

SEQ ID NO: 65747 - DNA, 25 bp, SARS Virus
gtaaattcgacaatataccataacg

SEQ ID NO: 65748 - DNA, 25 bp, SARS Virus
taaattcgacagaataccataacgg

SEQ ID NO: 65749 - DNA, 25 bp, SARS Virus
aaattcgacagtataccataacggt

SEQ ID NO: 65750 - DNA, 25 bp, SARS Virus
aattcgacagtaaaccataacggtg

SEQ ID NO: 65751 - DNA, 25 bp, SARS Virus
attcgacagtataccataacggtga

SEQ ID NO: 65752 - DNA, 25 bp, SARS Virus
ttcgacagtataacataacggtgac

SEQ ID NO: 65753 - DNA, 25 bp, SARS Virus
tcgacagtatacaataacggtgaca

SEQ ID NO: 65754 - DNA, 25 bp, SARS Virus
cgacagtataccataacggtgacat

SEQ ID NO: 65755 - DNA, 25 bp, SARS Virus
gacagtataccaaaacggtgacatg

SEQ ID NO: 65756 - DNA, 25 bp, SARS Virus
acagtataccataacggtgacatgc

SEQ ID NO: 65757 - DNA, 25 bp, SARS Virus
cagtataccataacggtgacatgcg

SEQ ID NO: 65758 - DNA, 25 bp, SARS Virus
agtataccataaaggtgacatgcgc

SEQ ID NO: 65759 - DNA, 25 bp, SARS Virus
gtataccataacagtgacatgcgct

SEQ ID NO: 65760 - DNA, 25 bp, SARS Virus
tataccataacgatgacatgcgctt

SEQ ID NO: 65761 - DNA, 25 bp, SARS Virus
ataccataacggagacatgcgcttc

SEQ ID NO: 65762 - DNA, 25 bp, SARS Virus
taccataacggtaacatgcgcttca

SEQ ID NO: 65763 - DNA, 25 bp, SARS Virus
accataacggtgacatgcgcttcat

SEQ ID NO: 65764 - DNA, 25 bp, SARS Virus
ccataacggtgaaatgcgcttcatg

SEQ ID NO: 65765 - DNA, 25 bp, SARS Virus
cataacggtgacatgcgcttcatga

SEQ ID NO: 65766 - DNA, 25 bp, SARS Virus
ataacggtgacaagcgcttcatgag

SEQ ID NO: 65767 - DNA, 25 bp, SARS Virus
taacggtgacatacgcttcatgaga

SEQ ID NO: 65768 - DNA, 25 bp, SARS Virus
aacggtgacatgagcttcatgagag

SEQ ID NO: 65769 - DNA, 25 bp, SARS Virus
acggtgacatgcacttcatgagaga

SEQ ID NO: 65770 - DNA, 25 bp, SARS Virus
cggtgacatgcgattcatgagagac

SEQ ID NO: 65771 - DNA, 25 bp, SARS Virus
ggtgacatgcgcatcatgagagact

SEQ ID NO: 65772 - DNA, 25 bp, SARS Virus
gtgacatgcgctacatgagagactg

SEQ ID NO: 65773 - DNA, 25 bp, SARS Virus
tgacatgcgcttaatgagagactgt

SEQ ID NO: 65774 - DNA, 25 bp, SARS Virus
gacatgcgcttcatgagagactgtc

SEQ ID NO: 65775 - DNA, 25 bp, SARS Virus
acatgcgcttcaagagagactgtct

SEQ ID NO: 65776 - DNA, 25 bp, SARS Virus
catgcgcttcataagagactgtctc

SEQ ID NO: 65777 - DNA, 25 bp, SARS Virus
atgcgcttcatgagagactgtctct

SEQ ID NO: 65778 - DNA, 25 bp, SARS Virus
tgcgcttcatgaaagactgtctctt

SEQ ID NO: 65779 - DNA, 25 bp, SARS Virus
gcgcttcatgagagactgtctctta

SEQ ID NO: 65780 - DNA, 25 bp, SARS Virus
cgcttcatgagaaactgtctcttaa

SEQ ID NO: 65781 - DNA, 25 bp, SARS Virus
gcttcatgagagactgtctcttaac

SEQ ID NO: 65782 - DNA, 25 bp, SARS Virus
cttcatgagagaatgtctcttaacg

SEQ ID NO: 65783 - DNA, 25 bp, SARS Virus
ttcatgagagacagtctcttaacgt

SEQ ID NO: 65784 - DNA, 25 bp, SARS Virus
tcatgagagactatctcttaacgta

SEQ ID NO: 65785 - DNA, 25 bp, SARS Virus
catgagagactgactcttaacgtag

SEQ ID NO: 65786 - DNA, 25 bp, SARS Virus
atgagagactgtatcttaacgtaga

SEQ ID NO: 65787 - DNA, 25 bp, SARS Virus
tgagagactgtcacttaacgtagaa

SEQ ID NO: 65788 - DNA, 25 bp, SARS Virus
gagagactgtctattaacgtagaaa

SEQ ID NO: 65789 - DNA, 25 bp, SARS Virus
agagactgtctcataacgtagaaag

SEQ ID NO: 65790 - DNA, 25 bp, SARS Virus
gagactgtctctaaacgtagaaagt

SEQ ID NO: 65791 - DNA, 25 bp, SARS Virus
agactgtctcttaacgtagaaagta

SEQ ID NO: 65792 - DNA, 25 bp, SARS Virus
gactgtctcttaacgtagaaagtac

SEQ ID NO: 65793 - DNA, 25 bp, SARS Virus
actgtctcttaaagtagaaagtacc

SEQ ID NO: 65794 - DNA, 25 bp, SARS Virus
ctgtctcttaacatagaaagtaccc

SEQ ID NO: 65795 - DNA, 25 bp, SARS Virus
tgtctcttaacgaagaaagtaccct

SEQ ID NO: 65796 - DNA, 25 bp, SARS Virus
gtctcttaacgtagaaagtaccctc

SEQ ID NO: 65797 - DNA, 25 bp, SARS Virus
tctcttaacgtaaaaagtaccctcc

SEQ ID NO: 65798 - DNA, 25 bp, SARS Virus
ctcttaacgtagaaagtaccctcca

SEQ ID NO: 65799 - DNA, 25 bp, SARS Virus
tcttaacgtagaaagtaccctccaa

SEQ ID NO: 65800 - DNA, 25 bp, SARS Virus
cttaacgtagaaagtaccctccaac

SEQ ID NO: 65801 - DNA, 25 bp, SARS Virus
ttaacgtagaaaataccctccaacc

SEQ ID NO: 65802 - DNA, 25 bp, SARS Virus
taacgtagaaagaaccctccaacct

SEQ ID NO: 65803 - DNA, 25 bp, SARS Virus
aacgtagaaagtaccctccaacctt

SEQ ID NO: 65804 - DNA, 25 bp, SARS Virus
acgtagaaagtaacctccaaccttt

SEQ ID NO: 65805 - DNA, 25 bp, SARS Virus
cgtagaaagtacactccaacctttt

SEQ ID NO: 65806 - DNA, 25 bp, SARS Virus
gtagaaagtaccatccaaccttttg

SEQ ID NO: 65807 - DNA, 25 bp, SARS Virus
tagaaagtacccaccaaccttttgg

SEQ ID NO: 65808 - DNA, 25 bp, SARS Virus
agaaagtaccctacaaccttttgga

SEQ ID NO: 65809 - DNA, 25 bp, SARS Virus
gaaagtaccctcaaaccttttggat

SEQ ID NO: 65810 - DNA, 25 bp, SARS Virus
aaagtaccctccaaccttttggatc

SEQ ID NO: 65811 - DNA, 25 bp, SARS Virus
aagtaccctccaaccttttggatct

SEQ ID NO: 65812 - DNA, 25 bp, SARS Virus
agtaccctccaaacttttggatctg

SEQ ID NO: 65813 - DNA, 25 bp, SARS Virus
gtaccctccaacattttggatctgg

SEQ ID NO: 65814 - DNA, 25 bp, SARS Virus
taccctccaaccatttggatctggt

SEQ ID NO: 65815 - DNA, 25 bp, SARS Virus
accctccaacctattggatctggtg

SEQ ID NO: 65816 - DNA, 25 bp, SARS Virus
ccctccaaccttatggatctggtgg

SEQ ID NO: 65817 - DNA, 25 bp, SARS Virus
cctccaacctttaggatctggtggt

SEQ ID NO: 65818 - DNA, 25 bp, SARS Virus
ctccaaccttttagatctggtggta

SEQ ID NO: 65819 - DNA, 25 bp, SARS Virus
tccaaccttttgaatctggtggtaa

SEQ ID NO: 65820 - DNA, 25 bp, SARS Virus
ccaaccttttggatctggtggtaac

SEQ ID NO: 65821 - DNA, 25 bp, SARS Virus
caaccttttggaactggtggtaact

SEQ ID NO: 65822 - DNA, 25 bp, SARS Virus
aaccttttggatatggtggtaactt

SEQ ID NO: 65823 - DNA, 25 bp, SARS Virus
accttttggatcaggtggtaacttg

SEQ ID NO: 65824 - DNA, 25 bp, SARS Virus
ccttttggatctagtggtaacttgt

SEQ ID NO: 65825 - DNA, 25 bp, SARS Virus
cttttggatctgatggtaacttgtc

SEQ ID NO: 65826 - DNA, 25 bp, SARS Virus
ttttggatctggaggtaacttgtct

SEQ ID NO: 65827 - DNA, 25 bp, SARS Virus
tttggatctggtagtaacttgtctt

SEQ ID NO: 65828 - DNA, 25 bp, SARS Virus
ttggatctggtgataacttgtcttt

SEQ ID NO: 65829 - DNA, 25 bp, SARS Virus
tggatctggtggaaacttgtctttg

SEQ ID NO: 65830 - DNA, 25 bp, SARS Virus
ggatctggtggtaacttgtctttga

SEQ ID NO: 65831 - DNA, 25 bp, SARS Virus
gatctggtggtaacttgtctttgat

SEQ ID NO: 65832 - DNA, 25 bp, SARS Virus
atctggtggtaaattgtctttgata

SEQ ID NO: 65833 - DNA, 25 bp, SARS Virus
tctggtggtaacatgtctttgatac

SEQ ID NO: 65834 - DNA, 25 bp, SARS Virus
ctggtggtaactagtctttgataca

SEQ ID NO: 65835 - DNA, 25 bp, SARS Virus
tggtggtaacttatctttgatacag

SEQ ID NO: 65836 - DNA, 25 bp, SARS Virus
ggtggtaacttgactttgatacaga

SEQ ID NO: 65837 - DNA, 25 bp, SARS Virus
gtggtaacttgtatttgatacagaa

SEQ ID NO: 65838 - DNA, 25 bp, SARS Virus
tggtaacttgtcattgatacagaaa

SEQ ID NO: 65839 - DNA, 25 bp, SARS Virus
ggtaacttgtctatgatacagaaat

SEQ ID NO: 65840 - DNA, 25 bp, SARS Virus
gtaacttgtcttagatacagaaatg

SEQ ID NO: 65841 - DNA, 25 bp, SARS Virus
taacttgtctttaatacagaaatga

SEQ ID NO: 65842 - DNA, 25 bp, SARS Virus
aacttgtctttgatacagaaatgac

SEQ ID NO: 65843 - DNA, 25 bp, SARS Virus
acttgtctttgaaacagaaatgacc

SEQ ID NO: 65844 - DNA, 25 bp, SARS Virus
cttgtctttgatacagaaatgacca

SEQ ID NO: 65845 - DNA, 25 bp, SARS Virus
ttgtctttgataaagaaatgaccaa

SEQ ID NO: 65846 - DNA, 25 bp, SARS Virus
tgtctttgatacagaaatgaccaat

SEQ ID NO: 65847 - DNA, 25 bp, SARS Virus
gtctttgatacaaaaatgaccaatg

SEQ ID NO: 65848 - DNA, 25 bp, SARS Virus
tctttgatacagaaatgaccaatgg

SEQ ID NO: 65849 - DNA, 25 bp, SARS Virus
ctttgatacagaaatgaccaatggc

SEQ ID NO: 65850 - DNA, 25 bp, SARS Virus
tttgatacagaaatgaccaatggca

SEQ ID NO: 65851 - DNA, 25 bp, SARS Virus
ttgatacagaaaagaccaatggcac

SEQ ID NO: 65852 - DNA, 25 bp, SARS Virus
tgatacagaaataaccaatggcaca

SEQ ID NO: 65853 - DNA, 25 bp, SARS Virus
gatacagaaatgaccaatggcacat

SEQ ID NO: 65854 - DNA, 25 bp, SARS Virus
atacagaaatgaacaatggcacatt

SEQ ID NO: 65855 - DNA, 25 bp, SARS Virus
tacagaaatgacaaatggcacattg

SEQ ID NO: 65856 - DNA, 25 bp, SARS Virus
acagaaatgaccaatggcacattga

SEQ ID NO: 65857 - DNA, 25 bp, SARS Virus
cagaaatgaccaatggcacattgat

SEQ ID NO: 65858 - DNA, 25 bp, SARS Virus
agaaatgaccaaaggcacattgatt

SEQ ID NO: 65859 - DNA, 25 bp, SARS Virus
gaaatgaccaatagcacattgattt

SEQ ID NO: 65860 - DNA, 25 bp, SARS Virus
aaatgaccaatgacacattgatttt

SEQ ID NO: 65861 - DNA, 25 bp, SARS Virus
aatgaccaatggaacattgattttt

SEQ ID NO: 65862 - DNA, 25 bp, SARS Virus
atgaccaatggcacattgattttta

SEQ ID NO: 65863 - DNA, 25 bp, SARS Virus
tgaccaatggcaaattgatttttat

SEQ ID NO: 65864 - DNA, 25 bp, SARS Virus
gaccaatggcacattgatttttatc

SEQ ID NO: 65865 - DNA, 25 bp, SARS Virus
accaatggcacaatgatttttatca

SEQ ID NO: 65866 - DNA, 25 bp, SARS Virus
ccaatggcacatagatttttatcat

SEQ ID NO: 65867 - DNA, 25 bp, SARS Virus
caatggcacattaatttttatcatt

SEQ ID NO: 65868 - DNA, 25 bp, SARS Virus
aatggcacattgatttttatcattt

SEQ ID NO: 65869 - DNA, 25 bp, SARS Virus
atggcacattgaattttatcatttc

SEQ ID NO: 65870 - DNA, 25 bp, SARS Virus
tggcacattgatatttatcatttca

SEQ ID NO: 65871 - DNA, 25 bp, SARS Virus
ggcacattgattattatcatttcat

SEQ ID NO: 65872 - DNA, 25 bp, SARS Virus
gcacattgatttatatcatttcatg

SEQ ID NO: 65873 - DNA, 25 bp, SARS Virus
cacattgattttaatcatttcatgt

SEQ ID NO: 65874 - DNA, 25 bp, SARS Virus
acattgatttttatcatttcatgtc

SEQ ID NO: 65875 - DNA, 25 bp, SARS Virus
cattgatttttaacatttcatgtct

SEQ ID NO: 65876 - DNA, 25 bp, SARS Virus
attgatttttataatttcatgtcta

SEQ ID NO: 65877 - DNA, 25 bp, SARS Virus
ttgatttttatcatttcatgtctaa

SEQ ID NO: 65878 - DNA, 25 bp, SARS Virus
tgatttttatcaattcatgtctaac

SEQ ID NO: 65879 - DNA, 25 bp, SARS Virus
gatttttatcatatcatgtctaacc

SEQ ID NO: 65880 - DNA, 25 bp, SARS Virus
atttttatcattacatgtctaacct

SEQ ID NO: 65881 - DNA, 25 bp, SARS Virus
tttttatcatttaatgtctaacctc

SEQ ID NO: 65882 - DNA, 25 bp, SARS Virus
ttttatcatttcatgtctaacctct

SEQ ID NO: 65883 - DNA, 25 bp, SARS Virus
tttatcatttcaagtctaacctctc

SEQ ID NO: 65884 - DNA, 25 bp, SARS Virus
ttatcatttcatatctaacctctca

SEQ ID NO: 65885 - DNA, 25 bp, SARS Virus
tatcatttcatgactaacctctcat

SEQ ID NO: 65886 - DNA, 25 bp, SARS Virus
atcatttcatgtataacctctcatg

SEQ ID NO: 65887 - DNA, 25 bp, SARS Virus
tcatttcatgtcaaacctctcatgt

SEQ ID NO: 65888 - DNA, 25 bp, SARS Virus
catttcatgtctaacctctcatgtg

SEQ ID NO: 65889 - DNA, 25 bp, SARS Virus
atttcatgtctaacctctcatgtgg

SEQ ID NO: 65890 - DNA, 25 bp, SARS Virus
tttcatgtctaaactctcatgtgga

SEQ ID NO: 65891 - DNA, 25 bp, SARS Virus
ttcatgtctaacatctcatgtggaa

SEQ ID NO: 65892 - DNA, 25 bp, SARS Virus
tcatgtctaaccactcatgtggaaa

SEQ ID NO: 65893 - DNA, 25 bp, SARS Virus
catgtctaacctatcatgtggaaac

SEQ ID NO: 65894 - DNA, 25 bp, SARS Virus
atgtctaacctcacatgtggaaact

SEQ ID NO: 65895 - DNA, 25 bp, SARS Virus
tgtctaacctctaatgtggaaactt

SEQ ID NO: 65896 - DNA, 25 bp, SARS Virus
gtctaacctctcatgtggaaacttt

SEQ ID NO: 65897 - DNA, 25 bp, SARS Virus
tctaacctctcaagtggaaactttt

SEQ ID NO: 65898 - DNA, 25 bp, SARS Virus
ctaacctctcatatggaaacttttt

SEQ ID NO: 65899 - DNA, 25 bp, SARS Virus
taacctctcatgaggaaactttttc

SEQ ID NO: 65900 - DNA, 25 bp, SARS Virus
aacctctcatgtagaaactttttcc

SEQ ID NO: 65901 - DNA, 25 bp, SARS Virus
acctctcatgtgaaaactttttcca

SEQ ID NO: 65902 - DNA, 25 bp, SARS Virus
cctctcatgtggaaactttttccac

SEQ ID NO: 65903 - DNA, 25 bp, SARS Virus
ctctcatgtggaaactttttccact

SEQ ID NO: 65904 - DNA, 25 bp, SARS Virus
tctcatgtggaaactttttccactg

SEQ ID NO: 65905 - DNA, 25 bp, SARS Virus
ctcatgtggaaaatttttccactga

SEQ ID NO: 65906 - DNA, 25 bp, SARS Virus
tcatgtggaaacattttccactgat

SEQ ID NO: 65907 - DNA, 25 bp, SARS Virus
catgtggaaactatttccactgata

SEQ ID NO: 65908 - DNA, 25 bp, SARS Virus
atgtggaaacttattccactgatac

SEQ ID NO: 65909 - DNA, 25 bp, SARS Virus
tgtggaaactttatccactgatacc

SEQ ID NO: 65910 - DNA, 25 bp, SARS Virus
gtggaaacttttaccactgatacca

SEQ ID NO: 65911 - DNA, 25 bp, SARS Virus
tggaaactttttacactgataccac

SEQ ID NO: 65912 - DNA, 25 bp, SARS Virus
ggaaactttttcaactgataccact

SEQ ID NO: 65913 - DNA, 25 bp, SARS Virus
gaaactttttccactgataccacta

SEQ ID NO: 65914 - DNA, 25 bp, SARS Virus
aaactttttccaatgataccactac

SEQ ID NO: 65915 - DNA, 25 bp, SARS Virus
aactttttccacagataccactacg

SEQ ID NO: 65916 - DNA, 25 bp, SARS Virus
actttttccactaataccactacga

SEQ ID NO: 65917 - DNA, 25 bp, SARS Virus
ctttttccactgataccactacgac

SEQ ID NO: 65918 - DNA, 25 bp, SARS Virus
tttttccactgaaaccactacgaca

SEQ ID NO: 65919 - DNA, 25 bp, SARS Virus
ttttccactgataccactacgacaa

SEQ ID NO: 65920 - DNA, 25 bp, SARS Virus
tttccactgataacactacgacaac

SEQ ID NO: 65921 - DNA, 25 bp, SARS Virus
ttccactgatacaactacgacaaca

SEQ ID NO: 65922 - DNA, 25 bp, SARS Virus
tccactgataccactacgacaacac

SEQ ID NO: 65923 - DNA, 25 bp, SARS Virus
ccactgataccaatacgacaacaca

SEQ ID NO: 65924 - DNA, 25 bp, SARS Virus
cactgataccacaacgacaacacat

SEQ ID NO: 65925 - DNA, 25 bp, SARS Virus
actgataccactacgacaacacatg

SEQ ID NO: 65926 - DNA, 25 bp, SARS Virus
ctgataccactaagacaacacatgt

SEQ ID NO: 65927 - DNA, 25 bp, SARS Virus
tgataccactacaacaacacatgtc

SEQ ID NO: 65928 - DNA, 25 bp, SARS Virus
gataccactacgacaacacatgtct

SEQ ID NO: 65929 - DNA, 25 bp, SARS Virus
ataccactacgaaaacacatgtctc

SEQ ID NO: 65930 - DNA, 25 bp, SARS Virus
taccactacgacaacacatgtctcc

SEQ ID NO: 65931 - DNA, 25 bp, SARS Virus
accactacgacaacacatgtctcca

SEQ ID NO: 65932 - DNA, 25 bp, SARS Virus
ccactacgacaaaacatgtctccat

SEQ ID NO: 65933 - DNA, 25 bp, SARS Virus
cactacgacaacacatgtctccatg

SEQ ID NO: 65934 - DNA, 25 bp, SARS Virus
actacgacaacaaatgtctccatga

SEQ ID NO: 65935 - DNA, 25 bp, SARS Virus
ctacgacaacacatgtctccatgat

SEQ ID NO: 65936 - DNA, 25 bp, SARS Virus
tacgacaacacaagtctccatgatg

SEQ ID NO: 65937 - DNA, 25 bp, SARS Virus
acgacaacacatatctccatgatgc

SEQ ID NO: 65938 - DNA, 25 bp, SARS Virus
cgacaacacatgactccatgatgct

SEQ ID NO: 65939 - DNA, 25 bp, SARS Virus
gacaacacatgtatccatgatgctg

SEQ ID NO: 65940 - DNA, 25 bp, SARS Virus
acaacacatgtcaccatgatgctgt

SEQ ID NO: 65941 - DNA, 25 bp, SARS Virus
caacacatgtctacatgatgctgta

SEQ ID NO: 65942 - DNA, 25 bp, SARS Virus
aacacatgtctcaatgatgctgtat

SEQ ID NO: 65943 - DNA, 25 bp, SARS Virus
acacatgtctccatgatgctgtatg

SEQ ID NO: 65944 - DNA, 25 bp, SARS Virus
cacatgtctccaagatgctgtatgt

SEQ ID NO: 65945 - DNA, 25 bp, SARS Virus
acatgtctccataatgctgtatgtt

SEQ ID NO: 65946 - DNA, 25 bp, SARS Virus
catgtctccatgatgctgtatgttc

SEQ ID NO: 65947 - DNA, 25 bp, SARS Virus
atgtctccatgaagctgtatgttca

SEQ ID NO: 65948 - DNA, 25 bp, SARS Virus
tgtctccatgatactgtatgttcaa

SEQ ID NO: 65949 - DNA, 25 bp, SARS Virus
gtctccatgatgatgtatgttcaac

SEQ ID NO: 65950 - DNA, 25 bp, SARS Virus
tctccatgatgcagtatgttcaact

SEQ ID NO: 65951 - DNA, 25 bp, SARS Virus
ctccatgatgctatatgttcaactt

SEQ ID NO: 65952 - DNA, 25 bp, SARS Virus
tccatgatgctgaatgttcaactta

SEQ ID NO: 65953 - DNA, 25 bp, SARS Virus
ccatgatgctgtatgttcaacttac

SEQ ID NO: 65954 - DNA, 25 bp, SARS Virus
catgatgctgtaagttcaacttaca

SEQ ID NO: 65955 - DNA, 25 bp, SARS Virus
atgatgctgtatattcaacttacaa

SEQ ID NO: 65956 - DNA, 25 bp, SARS Virus
tgatgctgtatgatcaacttacaac

SEQ ID NO: 65957 - DNA, 25 bp, SARS Virus
gatgctgtatgtacaacttacaacc

SEQ ID NO: 65958 - DNA, 25 bp, SARS Virus
atgctgtatgttaaacttacaacca

SEQ ID NO: 65959 - DNA, 25 bp, SARS Virus
tgctgtatgttcaacttacaaccac

SEQ ID NO: 65960 - DNA, 25 bp, SARS Virus
gctgtatgttcaacttacaaccact

SEQ ID NO: 65961 - DNA, 25 bp, SARS Virus
ctgtatgttcaaattacaaccacta

SEQ ID NO: 65962 - DNA, 25 bp, SARS Virus
tgtatgttcaacatacaaccactaa

SEQ ID NO: 65963 - DNA, 25 bp, SARS Virus
gtatgttcaactaacaaccactaat

SEQ ID NO: 65964 - DNA, 25 bp, SARS Virus
tatgttcaacttacaaccactaatg

SEQ ID NO: 65965 - DNA, 25 bp, SARS Virus
atgttcaacttaaaaccactaatga

SEQ ID NO: 65966 - DNA, 25 bp, SARS Virus
tgttcaacttacaaccactaatgaa

SEQ ID NO: 65967 - DNA, 25 bp, SARS Virus
gttcaacttacaaccactaatgaaa

SEQ ID NO: 65968 - DNA, 25 bp, SARS Virus
ttcaacttacaaacactaatgaaac

SEQ ID NO: 65969 - DNA, 25 bp, SARS Virus
tcaacttacaacaactaatgaaaca

SEQ ID NO: 65970 - DNA, 25 bp, SARS Virus
caacttacaaccactaatgaaacac

SEQ ID NO: 65971 - DNA, 25 bp, SARS Virus
aacttacaaccaataatgaaacaca

SEQ ID NO: 65972 - DNA, 25 bp, SARS Virus
acttacaaccacaaatgaaacacaa

SEQ ID NO: 65973 - DNA, 25 bp, SARS Virus
cttacaaccactaatgaaacacaac

SEQ ID NO: 65974 - DNA, 25 bp, SARS Virus
ttacaaccactaatgaaacacaact

SEQ ID NO: 65975 - DNA, 25 bp, SARS Virus
tacaaccactaaagaaacacaactg

SEQ ID NO: 65976 - DNA, 25 bp, SARS Virus
acaaccactaataaaacacaactgt

SEQ ID NO: 65977 - DNA, 25 bp, SARS Virus
caaccactaatgaaacacaactgta

SEQ ID NO: 65978 - DNA, 25 bp, SARS Virus
aaccactaatgaaacacaactgtag

SEQ ID NO: 65979 - DNA, 25 bp, SARS Virus
accactaatgaaacacaactgtaga

SEQ ID NO: 65980 - DNA, 25 bp, SARS Virus
ccactaatgaaaaacaactgtagag

SEQ ID NO: 65981 - DNA, 25 bp, SARS Virus
cactaatgaaacacaactgtagagt

SEQ ID NO: 65982 - DNA, 25 bp, SARS Virus
actaatgaaacaaaactgtagagtg

SEQ ID NO: 65983 - DNA, 25 bp, SARS Virus
ctaatgaaacacaactgtagagtgt

SEQ ID NO: 65984 - DNA, 25 bp, SARS Virus
taatgaaacacaactgtagagtgtg

SEQ ID NO: 65985 - DNA, 25 bp, SARS Virus
aatgaaacacaaatgtagagtgtga

SEQ ID NO: 65986 - DNA, 25 bp, SARS Virus
atgaaacacaacagtagagtgtgac

SEQ ID NO: 65987 - DNA, 25 bp, SARS Virus
tgaaacacaactatagagtgtgaca

SEQ ID NO: 65988 - DNA, 25 bp, SARS Virus
gaaacacaactgaagagtgtgacat

SEQ ID NO: 65989 - DNA, 25 bp, SARS Virus
aaacacaactgtagagtgtgacatt

SEQ ID NO: 65990 - DNA, 25 bp, SARS Virus
aacacaactgtaaagtgtgacatta

SEQ ID NO: 65991 - DNA, 25 bp, SARS Virus
acacaactgtagagtgtgacattac

SEQ ID NO: 65992 - DNA, 25 bp, SARS Virus
cacaactgtagaatgtgacattacg

SEQ ID NO: 65993 - DNA, 25 bp, SARS Virus
acaactgtagagagtgacattacgg

SEQ ID NO: 65994 - DNA, 25 bp, SARS Virus
caactgtagagtatgacattacggt

SEQ ID NO: 65995 - DNA, 25 bp, SARS Virus
aactgtagagtgagacattacggtg

SEQ ID NO: 65996 - DNA, 25 bp, SARS Virus
actgtagagtgtaacattacggtga

SEQ ID NO: 65997 - DNA, 25 bp, SARS Virus
ctgtagagtgtgacattacggtgaa

SEQ ID NO: 65998 - DNA, 25 bp, SARS Virus
tgtagagtgtgaaattacggtgaat

SEQ ID NO: 65999 - DNA, 25 bp, SARS Virus
gtagagtgtgacattacggtgaatc

SEQ ID NO: 66000 - DNA, 25 bp, SARS Virus
tagagtgtgacaatacggtgaatca

SEQ ID NO: 66001 - DNA, 25 bp, SARS Virus
agagtgtgacataacggtgaatcac

SEQ ID NO: 66002 - DNA, 25 bp, SARS Virus
gagtgtgacattacggtgaatcacg

SEQ ID NO: 66003 - DNA, 25 bp, SARS Virus
agtgtgacattaaggtgaatcacgt

SEQ ID NO: 66004 - DNA, 25 bp, SARS Virus
gtgtgacattacagtgaatcacgtg

SEQ ID NO: 66005 - DNA, 25 bp, SARS Virus
tgtgacattacgatgaatcacgtgg

SEQ ID NO: 66006 - DNA, 25 bp, SARS Virus
gtgacattacggagaatcacgtgga

SEQ ID NO: 66007 - DNA, 25 bp, SARS Virus
tgacattacggtaaatcacgtggat

SEQ ID NO: 66008 - DNA, 25 bp, SARS Virus
gacattacggtgaatcacgtggatg

SEQ ID NO: 66009 - DNA, 25 bp, SARS Virus
tcgataataacgctcagtgtattcg

SEQ ID NO: 66010 - DNA, 25 bp, SARS Virus
cgataataacgtccagtgtattcgg

SEQ ID NO: 66011 - DNA, 25 bp, SARS Virus
gataataacgttcagtgtattcgga

SEQ ID NO: 66012 - DNA, 25 bp, SARS Virus
ataataacgttccgtgtattcggag

SEQ ID NO: 66013 - DNA, 25 bp, SARS Virus
taataacgttcactgtattcggagg

SEQ ID NO: 66014 - DNA, 25 bp, SARS Virus
aataacgttcagcgtattcggaggg

SEQ ID NO: 66015 - DNA, 25 bp, SARS Virus
ataacgttcagtctattcggagggt

SEQ ID NO: 66016 - DNA, 25 bp, SARS Virus
taacgttcagtgcattcggagggta

SEQ ID NO: 66017 - DNA, 25 bp, SARS Virus
aacgttcagtgtcttcggagggtaa

SEQ ID NO: 66018 - DNA, 25 bp, SARS Virus
acgttcagtgtactcggagggtaat

SEQ ID NO: 66019 - DNA, 25 bp, SARS Virus
cgttcagtgtatccggagggtaatc

SEQ ID NO: 66020 - DNA, 25 bp, SARS Virus
gttcagtgtattcggagggtaatca

SEQ ID NO: 66021 - DNA, 25 bp, SARS Virus
ttcagtgtattccgagggtaatcaa

SEQ ID NO: 66022 - DNA, 25 bp, SARS Virus
tcagtgtattcgcagggtaatcaaa

SEQ ID NO: 66023 - DNA, 25 bp, SARS Virus
cagtgtattcggcgggtaatcaaaa

SEQ ID NO: 66024 - DNA, 25 bp, SARS Virus
agtgtattcggacggtaatcaaaag

SEQ ID NO: 66025 - DNA, 25 bp, SARS Virus
gtgtattcggagcgtaatcaaaagg

SEQ ID NO: 66026 - DNA, 25 bp, SARS Virus
tgtattcggaggctaatcaaaaggt

SEQ ID NO: 66027 - DNA, 25 bp, SARS Virus
gtattcggagggcaatcaaaaggta

SEQ ID NO: 66028 - DNA, 25 bp, SARS Virus
tattcggagggtcatcaaaaggtaa

SEQ ID NO: 66029 - DNA, 25 bp, SARS Virus
attcggagggtactcaaaaggtaat

SEQ ID NO: 66030 - DNA, 25 bp, SARS Virus
ttcggagggtaaccaaaaggtaata

SEQ ID NO: 66031 - DNA, 25 bp, SARS Virus
tcggagggtaatcaaaaggtaatac

SEQ ID NO: 66032 - DNA, 25 bp, SARS Virus
cggagggtaatccaaaggtaataca

SEQ ID NO: 66033 - DNA, 25 bp, SARS Virus
ggagggtaatcacaaggtaatacac

SEQ ID NO: 66034 - DNA, 25 bp, SARS Virus
gagggtaatcaacaggtaatacacg

SEQ ID NO: 66035 - DNA, 25 bp, SARS Virus
agggtaatcaaacggtaatacacga

SEQ ID NO: 66036 - DNA, 25 bp, SARS Virus
gggtaatcaaaacgtaatacacgat

SEQ ID NO: 66037 - DNA, 25 bp, SARS Virus
ggtaatcaaaagctaatacacgatt

SEQ ID NO: 66038 - DNA, 25 bp, SARS Virus
gtaatcaaaaggcaatacacgatta

SEQ ID NO: 66039 - DNA, 25 bp, SARS Virus
taatcaaaaggtcatacacgattac

SEQ ID NO: 66040 - DNA, 25 bp, SARS Virus
aatcaaaaggtactacacgattacc

SEQ ID NO: 66041 - DNA, 25 bp, SARS Virus
atcaaaaggtaacacacgattacca

SEQ ID NO: 66042 - DNA, 25 bp, SARS Virus
tcaaaaggtaatccacgattaccag

SEQ ID NO: 66043 - DNA, 25 bp, SARS Virus
caaaaggtaatacacgattaccagt

SEQ ID NO: 66044 - DNA, 25 bp, SARS Virus
aaaaggtaatacccgattaccagtc

SEQ ID NO: 66045 - DNA, 25 bp, SARS Virus
aaaggtaatacacgattaccagtcc

SEQ ID NO: 66046 - DNA, 25 bp, SARS Virus
aaggtaatacaccattaccagtcca

SEQ ID NO: 66047 - DNA, 25 bp, SARS Virus
aggtaatacacgcttaccagtccaa

SEQ ID NO: 66048 - DNA, 25 bp, SARS Virus
ggtaatacacgactaccagtccaaa

SEQ ID NO: 66049 - DNA, 25 bp, SARS Virus
gtaatacacgatcaccagtccaaaa

SEQ ID NO: 66050 - DNA, 25 bp, SARS Virus
taatacacgattcccagtccaaaaa

SEQ ID NO: 66051 - DNA, 25 bp, SARS Virus
aatacacgattaccagtccaaaaac

SEQ ID NO: 66052 - DNA, 25 bp, SARS Virus
atacacgattaccagtccaaaaacc

SEQ ID NO: 66053 - DNA, 25 bp, SARS Virus
tacacgattacccgtccaaaaacca

SEQ ID NO: 66054 - DNA, 25 bp, SARS Virus
acacgattaccactccaaaaaccaa

SEQ ID NO: 66055 - DNA, 25 bp, SARS Virus
cacgattaccagcccaaaaaccaaa

SEQ ID NO: 66056 - DNA, 25 bp, SARS Virus
acgattaccagtccaaaaaccaaat

SEQ ID NO: 66057 - DNA, 25 bp, SARS Virus
cgattaccagtccaaaaaccaaata

SEQ ID NO: 66058 - DNA, 25 bp, SARS Virus
gattaccagtcccaaaaccaaatat

SEQ ID NO: 66059 - DNA, 25 bp, SARS Virus
attaccagtccacaaaccaaatatg

SEQ ID NO: 66060 - DNA, 25 bp, SARS Virus
ttaccagtccaacaaccaaatatgt

SEQ ID NO: 66061 - DNA, 25 bp, SARS Virus
taccagtccaaacaccaaatatgtt

SEQ ID NO: 66062 - DNA, 25 bp, SARS Virus
accagtccaaaacccaaatatgttt

SEQ ID NO: 66063 - DNA, 25 bp, SARS Virus
ccagtccaaaaaccaaatatgtttt

SEQ ID NO: 66064 - DNA, 25 bp, SARS Virus
cagtccaaaaaccaaatatgttttt

SEQ ID NO: 66065 - DNA, 25 bp, SARS Virus
agtccaaaaacccaatatgtttttg

SEQ ID NO: 66066 - DNA, 25 bp, SARS Virus
gtccaaaaaccacatatgtttttgt

SEQ ID NO: 66067 - DNA, 25 bp, SARS Virus
tccaaaaaccaactatgtttttgtg

SEQ ID NO: 66068 - DNA, 25 bp, SARS Virus
ccaaaaaccaaacatgtttttgtgt

SEQ ID NO: 66069 - DNA, 25 bp, SARS Virus
caaaaaccaaatctgtttttgtgta

SEQ ID NO: 66070 - DNA, 25 bp, SARS Virus
aaaaaccaaatacgtttttgtgtac

SEQ ID NO: 66071 - DNA, 25 bp, SARS Virus
aaaaccaaatatctttttgtgtaca

SEQ ID NO: 66072 - DNA, 25 bp, SARS Virus
aaaccaaatatgcttttgtgtacac

SEQ ID NO: 66073 - DNA, 25 bp, SARS Virus
aaccaaatatgtctttgtgtacaca

SEQ ID NO: 66074 - DNA, 25 bp, SARS Virus
accaaatatgttcttgtgtacacat

SEQ ID NO: 66075 - DNA, 25 bp, SARS Virus
ccaaatatgtttctgtgtacacatc

SEQ ID NO: 66076 - DNA, 25 bp, SARS Virus
caaatatgttttcgtgtacacatcc

SEQ ID NO: 66077 - DNA, 25 bp, SARS Virus
aaatatgtttttctgtacacatccg

SEQ ID NO: 66078 - DNA, 25 bp, SARS Virus
aatatgtttttgcgtacacatccgt

SEQ ID NO: 66079 - DNA, 25 bp, SARS Virus
atatgtttttgtctacacatccgtc

SEQ ID NO: 66080 - DNA, 25 bp, SARS Virus
tatgtttttgtgcacacatccgtca

SEQ ID NO: 66081 - DNA, 25 bp, SARS Virus
atgtttttgtgtccacatccgtcac

SEQ ID NO: 66082 - DNA, 25 bp, SARS Virus
tgtttttgtgtacacatccgtcact

SEQ ID NO: 66083 - DNA, 25 bp, SARS Virus
gtttttgtgtacccatccgtcactg

SEQ ID NO: 66084 - DNA, 25 bp, SARS Virus
tttttgtgtacacatccgtcactgt

SEQ ID NO: 66085 - DNA, 25 bp, SARS Virus
ttttgtgtacacctccgtcactgtt

SEQ ID NO: 66086 - DNA, 25 bp, SARS Virus
tttgtgtacacacccgtcactgtta

SEQ ID NO: 66087 - DNA, 25 bp, SARS Virus
ttgtgtacacatccgtcactgttac

SEQ ID NO: 66088 - DNA, 25 bp, SARS Virus
tgtgtacacatccgtcactgttaca

SEQ ID NO: 66089 - DNA, 25 bp, SARS Virus
gtgtacacatccctcactgttacag

SEQ ID NO: 66090 - DNA, 25 bp, SARS Virus
tgtacacatccgccactgttacagt

SEQ ID NO: 66091 - DNA, 25 bp, SARS Virus
gtacacatccgtcactgttacagtg

SEQ ID NO: 66092 - DNA, 25 bp, SARS Virus
tacacatccgtccctgttacagtga

SEQ ID NO: 66093 - DNA, 25 bp, SARS Virus
acacatccgtcactgttacagtgac

SEQ ID NO: 66094 - DNA, 25 bp, SARS Virus
cacatccgtcaccgttacagtgact

SEQ ID NO: 66095 - DNA, 25 bp, SARS Virus
acatccgtcactcttacagtgactg

SEQ ID NO: 66096 - DNA, 25 bp, SARS Virus
catccgtcactgctacagtgactga

SEQ ID NO: 66097 - DNA, 25 bp, SARS Virus
atccgtcactgtcacagtgactgaa

SEQ ID NO: 66098 - DNA, 25 bp, SARS Virus
tccgtcactgttccagtgactgaag

SEQ ID NO: 66099 - DNA, 25 bp, SARS Virus
ccgtcactgttacagtgactgaagt

SEQ ID NO: 66100 - DNA, 25 bp, SARS Virus
cgtcactgttaccgtgactgaagtt

SEQ ID NO: 66101 - DNA, 25 bp, SARS Virus
gtcactgttacactgactgaagtta

SEQ ID NO: 66102 - DNA, 25 bp, SARS Virus
tcactgttacagcgactgaagttac

SEQ ID NO: 66103 - DNA, 25 bp, SARS Virus
cactgttacagtcactgaagttacg

SEQ ID NO: 66104 - DNA, 25 bp, SARS Virus
actgttacagtgcctgaagttacgc

SEQ ID NO: 66105 - DNA, 25 bp, SARS Virus
ctgttacagtgactgaagttacgct

SEQ ID NO: 66106 - DNA, 25 bp, SARS Virus
tgttacagtgaccgaagttacgcta

SEQ ID NO: 66107 - DNA, 25 bp, SARS Virus
gttacagtgactcaagttacgctat

SEQ ID NO: 66108 - DNA, 25 bp, SARS Virus
ttacagtgactgcagttacgctatc

SEQ ID NO: 66109 - DNA, 25 bp, SARS Virus
tacagtgactgacgttacgctatcg

SEQ ID NO: 66110 - DNA, 25 bp, SARS Virus
acagtgactgaacttacgctatcgt

SEQ ID NO: 66111 - DNA, 25 bp, SARS Virus
cagtgactgaagctacgctatcgtt

SEQ ID NO: 66112 - DNA, 25 bp, SARS Virus
agtgactgaagtcacgctatcgttg

SEQ ID NO: 66113 - DNA, 25 bp, SARS Virus
gtgactgaagttccgctatcgttgt

SEQ ID NO: 66114 - DNA, 25 bp, SARS Virus
tgactgaagttacgctatcgttgta

SEQ ID NO: 66115 - DNA, 25 bp, SARS Virus
gactgaagttaccctatcgttgtac

SEQ ID NO: 66116 - DNA, 25 bp, SARS Virus
actgaagttacgctatcgttgtaca

SEQ ID NO: 66117 - DNA, 25 bp, SARS Virus
ctgaagttacgccatcgttgtacac

SEQ ID NO: 66118 - DNA, 25 bp, SARS Virus
tgaagttacgctctcgttgtacact

SEQ ID NO: 66119 - DNA, 25 bp, SARS Virus
gaagttacgctaccgttgtacacta

SEQ ID NO: 66120 - DNA, 25 bp, SARS Virus
aagttacgctatcgttgtacactaa

SEQ ID NO: 66121 - DNA, 25 bp, SARS Virus
agttacgctatccttgtacactaac

SEQ ID NO: 66122 - DNA, 25 bp, SARS Virus
gttacgctatcgctgtacactaacc

SEQ ID NO: 66123 - DNA, 25 bp, SARS Virus
ttacgctatcgtcgtacactaacct

SEQ ID NO: 66124 - DNA, 25 bp, SARS Virus
tacgctatcgttctacactaacctg

SEQ ID NO: 66125 - DNA, 25 bp, SARS Virus
acgctatcgttgcacactaacctga

SEQ ID NO: 66126 - DNA, 25 bp, SARS Virus
cgctatcgttgtccactaacctgat

SEQ ID NO: 66127 - DNA, 25 bp, SARS Virus
gctatcgttgtacactaacctgatt

SEQ ID NO: 66128 - DNA, 25 bp, SARS Virus
ctatcgttgtaccctaacctgatta

SEQ ID NO: 66129 - DNA, 25 bp, SARS Virus
tatcgttgtacactaacctgattac

SEQ ID NO: 66130 - DNA, 25 bp, SARS Virus
atcgttgtacaccaacctgattacg

SEQ ID NO: 66131 - DNA, 25 bp, SARS Virus
tcgttgtacactcacctgattacga

SEQ ID NO: 66132 - DNA, 25 bp, SARS Virus
cgttgtacactaccctgattacgac

SEQ ID NO: 66133 - DNA, 25 bp, SARS Virus
gttgtacactaacctgattacgacc

SEQ ID NO: 66134 - DNA, 25 bp, SARS Virus
ttgtacactaacctgattacgaccg

SEQ ID NO: 66135 - DNA, 25 bp, SARS Virus
tgtacactaacccgattacgaccgc

SEQ ID NO: 66136 - DNA, 25 bp, SARS Virus
gtacactaacctcattacgaccgct

SEQ ID NO: 66137 - DNA, 25 bp, SARS Virus
tacactaacctgcttacgaccgcta

SEQ ID NO: 66138 - DNA, 25 bp, SARS Virus
acactaacctgactacgaccgctaa

SEQ ID NO: 66139 - DNA, 25 bp, SARS Virus
cactaacctgatcacgaccgctaat

SEQ ID NO: 66140 - DNA, 25 bp, SARS Virus
actaacctgattccgaccgctaatg

SEQ ID NO: 66141 - DNA, 25 bp, SARS Virus
ctaacctgattacgaccgctaatgt

SEQ ID NO: 66142 - DNA, 25 bp, SARS Virus
taacctgattaccaccgctaatgta

SEQ ID NO: 66143 - DNA, 25 bp, SARS Virus
aacctgattacgcccgctaatgtat

SEQ ID NO: 66144 - DNA, 25 bp, SARS Virus
acctgattacgaccgctaatgtatg

SEQ ID NO: 66145 - DNA, 25 bp, SARS Virus
cctgattacgaccgctaatgtatga

SEQ ID NO: 66146 - DNA, 25 bp, SARS Virus
ctgattacgacccctaatgtatgaa

SEQ ID NO: 66147 - DNA, 25 bp, SARS Virus
tgattacgaccgctaatgtatgaac

SEQ ID NO: 66148 - DNA, 25 bp, SARS Virus
gattacgaccgccaatgtatgaacg

SEQ ID NO: 66149 - DNA, 25 bp, SARS Virus
attacgaccgctcatgtatgaacgg

SEQ ID NO: 66150 - DNA, 25 bp, SARS Virus
ttacgaccgctactgtatgaacggt

SEQ ID NO: 66151 - DNA, 25 bp, SARS Virus
tacgaccgctaacgtatgaacggtt

SEQ ID NO: 66152 - DNA, 25 bp, SARS Virus
acgaccgctaatctatgaacggttg

SEQ ID NO: 66153 - DNA, 25 bp, SARS Virus
cgaccgctaatgcatgaacggttgt

SEQ ID NO: 66154 - DNA, 25 bp, SARS Virus
gaccgctaatgtctgaacggttgtg

SEQ ID NO: 66155 - DNA, 25 bp, SARS Virus
accgctaatgtacgaacggttgtga

SEQ ID NO: 66156 - DNA, 25 bp, SARS Virus
ccgctaatgtatcaacggttgtgaa

SEQ ID NO: 66157 - DNA, 25 bp, SARS Virus
cgctaatgtatgcacggttgtgaac

SEQ ID NO: 66158 - DNA, 25 bp, SARS Virus
gctaatgtatgaccggttgtgaaca

SEQ ID NO: 66159 - DNA, 25 bp, SARS Virus
ctaatgtatgaacggttgtgaacat

SEQ ID NO: 66160 - DNA, 25 bp, SARS Virus
taatgtatgaaccgttgtgaacatg

SEQ ID NO: 66161 - DNA, 25 bp, SARS Virus
aatgtatgaacgcttgtgaacatga

SEQ ID NO: 66162 - DNA, 25 bp, SARS Virus
atgtatgaacggctgtgaacatgac

SEQ ID NO: 66163 - DNA, 25 bp, SARS Virus
tgtatgaacggtcgtgaacatgact

SEQ ID NO: 66164 - DNA, 25 bp, SARS Virus
gtatgaacggttctgaacatgactc

SEQ ID NO: 66165 - DNA, 25 bp, SARS Virus
tatgaacggttgcgaacatgactct

SEQ ID NO: 66166 - DNA, 25 bp, SARS Virus
atgaacggttgtcaacatgactctc

SEQ ID NO: 66167 - DNA, 25 bp, SARS Virus
tgaacggttgtgcacatgactctct

SEQ ID NO: 66168 - DNA, 25 bp, SARS Virus
gaacggttgtgaccatgactctctg

SEQ ID NO: 66169 - DNA, 25 bp, SARS Virus
aacggttgtgaacatgactctctga

SEQ ID NO: 66170 - DNA, 25 bp, SARS Virus
acggttgtgaacctgactctctgag

SEQ ID NO: 66171 - DNA, 25 bp, SARS Virus
cggttgtgaacacgactctctgagt

SEQ ID NO: 66172 - DNA, 25 bp, SARS Virus
ggttgtgaacatcactctctgagtt

SEQ ID NO: 66173 - DNA, 25 bp, SARS Virus
gttgtgaacatgcctctctgagttc

SEQ ID NO: 66174 - DNA, 25 bp, SARS Virus
ttgtgaacatgactctctgagttcg

SEQ ID NO: 66175 - DNA, 25 bp, SARS Virus
tgtgaacatgaccctctgagttcga

SEQ ID NO: 66176 - DNA, 25 bp, SARS Virus
gtgaacatgactctctgagttcgaa

SEQ ID NO: 66177 - DNA, 25 bp, SARS Virus
tgaacatgactccctgagttcgaaa

SEQ ID NO: 66178 - DNA, 25 bp, SARS Virus
gaacatgactctctgagttcgaaaa

SEQ ID NO: 66179 - DNA, 25 bp, SARS Virus
aacatgactctccgagttcgaaaag

SEQ ID NO: 66180 - DNA, 25 bp, SARS Virus
acatgactctctcagttcgaaaagc

SEQ ID NO: 66181 - DNA, 25 bp, SARS Virus
catgactctctgcgttcgaaaagcg

SEQ ID NO: 66182 - DNA, 25 bp, SARS Virus
atgactctctgacttcgaaaagcgt

SEQ ID NO: 66183 - DNA, 25 bp, SARS Virus
tgactctctgagctcgaaaagcgtc

SEQ ID NO: 66184 - DNA, 25 bp, SARS Virus
gactctctgagtccgaaaagcgtcg

SEQ ID NO: 66185 - DNA, 25 bp, SARS Virus
actctctgagttcgaaaagcgtcgt

SEQ ID NO: 66186 - DNA, 25 bp, SARS Virus
ctctctgagttccaaaagcgtcgtc

SEQ ID NO: 66187 - DNA, 25 bp, SARS Virus
tctctgagttcgcaaagcgtcgtct

SEQ ID NO: 66188 - DNA, 25 bp, SARS Virus
ctctgagttcgacaagcgtcgtctt

SEQ ID NO: 66189 - DNA, 25 bp, SARS Virus
tctgagttcgaacagcgtcgtcttt

SEQ ID NO: 66190 - DNA, 25 bp, SARS Virus
ctgagttcgaaacgcgtcgtctttg

SEQ ID NO: 66191 - DNA, 25 bp, SARS Virus
tgagttcgaaaaccgtcgtctttgc

SEQ ID NO: 66192 - DNA, 25 bp, SARS Virus
gagttcgaaaagcgtcgtctttgcg

SEQ ID NO: 66193 - DNA, 25 bp, SARS Virus
agttcgaaaagcctcgtctttgcga

SEQ ID NO: 66194 - DNA, 25 bp, SARS Virus
gttcgaaaagcgccgtctttgcgag

SEQ ID NO: 66195 - DNA, 25 bp, SARS Virus
ttcgaaaagcgtcgtctttgcgagt

SEQ ID NO: 66196 - DNA, 25 bp, SARS Virus
tcgaaaagcgtcctctttgcgagtt

SEQ ID NO: 66197 - DNA, 25 bp, SARS Virus
cgaaaagcgtcgcctttgcgagttt

SEQ ID NO: 66198 - DNA, 25 bp, SARS Virus
gaaaagcgtcgtctttgcgagtttc

SEQ ID NO: 66199 - DNA, 25 bp, SARS Virus
aaaagcgtcgtccttgcgagtttcg

SEQ ID NO: 66200 - DNA, 25 bp, SARS Virus
aaagcgtcgtctctgcgagtttcgg

SEQ ID NO: 66201 - DNA, 25 bp, SARS Virus
aagcgtcgtcttcgcgagtttcggt

SEQ ID NO: 66202 - DNA, 25 bp, SARS Virus
agcgtcgtctttccgagtttcggtg

SEQ ID NO: 66203 - DNA, 25 bp, SARS Virus
gcgtcgtctttgcgagtttcggtga

SEQ ID NO: 66204 - DNA, 25 bp, SARS Virus
cgtcgtctttgccagtttcggtgac

SEQ ID NO: 66205 - DNA, 25 bp, SARS Virus
gtcgtctttgcgcgtttcggtgact

SEQ ID NO: 66206 - DNA, 25 bp, SARS Virus
tcgtctttgcgactttcggtgactc

SEQ ID NO: 66207 - DNA, 25 bp, SARS Virus
cgtctttgcgagcttcggtgactcc

SEQ ID NO: 66208 - DNA, 25 bp, SARS Virus
gtctttgcgagtctcggtgactcct

SEQ ID NO: 66209 - DNA, 25 bp, SARS Virus
tctttgcgagttccggtgactcctt

SEQ ID NO: 66210 - DNA, 25 bp, SARS Virus
ctttgcgagtttcggtgactccttt

SEQ ID NO: 66211 - DNA, 25 bp, SARS Virus
tttgcgagtttccgtgactcctttg

SEQ ID NO: 66212 - DNA, 25 bp, SARS Virus
ttgcgagtttcgctgactcctttgt

SEQ ID NO: 66213 - DNA, 25 bp, SARS Virus
tgcgagtttcggcgactcctttgta

SEQ ID NO: 66214 - DNA, 25 bp, SARS Virus
gcgagtttcggtcactcctttgtaa

SEQ ID NO: 66215 - DNA, 25 bp, SARS Virus
cgagtttcggtgcctcctttgtaaa

SEQ ID NO: 66216 - DNA, 25 bp, SARS Virus
gagtttcggtgactcctttgtaaat

SEQ ID NO: 66217 - DNA, 25 bp, SARS Virus
agtttcggtgacccctttgtaaatt

SEQ ID NO: 66218 - DNA, 25 bp, SARS Virus
gtttcggtgactcctttgtaaattc

SEQ ID NO: 66219 - DNA, 25 bp, SARS Virus
tttcggtgactcctttgtaaattcg

SEQ ID NO: 66220 - DNA, 25 bp, SARS Virus
ttcggtgactcccttgtaaattcga

SEQ ID NO: 66221 - DNA, 25 bp, SARS Virus
tcggtgactcctctgtaaattcgac

SEQ ID NO: 66222 - DNA, 25 bp, SARS Virus
cggtgactccttcgtaaattcgaca

SEQ ID NO: 66223 - DNA, 25 bp, SARS Virus
ggtgactcctttctaaattcgacag

SEQ ID NO: 66224 - DNA, 25 bp, SARS Virus
gtgactcctttgcaaattcgacagt

SEQ ID NO: 66225 - DNA, 25 bp, SARS Virus
tgactcctttgtcaattcgacagta

SEQ ID NO: 66226 - DNA, 25 bp, SARS Virus
gactcctttgtacattcgacagtat

SEQ ID NO: 66227 - DNA, 25 bp, SARS Virus
actcctttgtaacttcgacagtata

SEQ ID NO: 66228 - DNA, 25 bp, SARS Virus
ctcctttgtaaactcgacagtatac

SEQ ID NO: 66229 - DNA, 25 bp, SARS Virus
tcctttgtaaatccgacagtatacc

SEQ ID NO: 66230 - DNA, 25 bp, SARS Virus
cctttgtaaattcgacagtatacca

SEQ ID NO: 66231 - DNA, 25 bp, SARS Virus
ctttgtaaattccacagtataccat

SEQ ID NO: 66232 - DNA, 25 bp, SARS Virus
tttgtaaattcgccagtataccata

SEQ ID NO: 66233 - DNA, 25 bp, SARS Virus
ttgtaaattcgacagtataccataa

SEQ ID NO: 66234 - DNA, 25 bp, SARS Virus
tgtaaattcgaccgtataccataac

SEQ ID NO: 66235 - DNA, 25 bp, SARS Virus
gtaaattcgacactataccataacg

SEQ ID NO: 66236 - DNA, 25 bp, SARS Virus
taaattcgacagcataccataacgg

SEQ ID NO: 66237 - DNA, 25 bp, SARS Virus
aaattcgacagtctaccataacggt

SEQ ID NO: 66238 - DNA, 25 bp, SARS Virus
aattcgacagtacaccataacggtg

SEQ ID NO: 66239 - DNA, 25 bp, SARS Virus
attcgacagtatcccataacggtga

SEQ ID NO: 66240 - DNA, 25 bp, SARS Virus
ttcgacagtataccataacggtgac

SEQ ID NO: 66241 - DNA, 25 bp, SARS Virus
tcgacagtataccataacggtgaca

SEQ ID NO: 66242 - DNA, 25 bp, SARS Virus
cgacagtataccctaacggtgacat

SEQ ID NO: 66243 - DNA, 25 bp, SARS Virus
gacagtataccacaacggtgacatg

SEQ ID NO: 66244 - DNA, 25 bp, SARS Virus
acagtataccatcacggtgacatgc

SEQ ID NO: 66245 - DNA, 25 bp, SARS Virus
cagtataccataccggtgacatgcg

SEQ ID NO: 66246 - DNA, 25 bp, SARS Virus
agtataccataacggtgacatgcgc

SEQ ID NO: 66247 - DNA, 25 bp, SARS Virus
gtataccataaccgtgacatgcgct

SEQ ID NO: 66248 - DNA, 25 bp, SARS Virus
tataccataacgctgacatgcgctt

SEQ ID NO: 66249 - DNA, 25 bp, SARS Virus
ataccataacggcgacatgcgcttc

SEQ ID NO: 66250 - DNA, 25 bp, SARS Virus
taccataacggtcacatgcgcttca

SEQ ID NO: 66251 - DNA, 25 bp, SARS Virus
accataacggtgccatgcgcttcat

SEQ ID NO: 66252 - DNA, 25 bp, SARS Virus
ccataacggtgacatgcgcttcatg

SEQ ID NO: 66253 - DNA, 25 bp, SARS Virus
cataacggtgacctgcgcttcatga

SEQ ID NO: 66254 - DNA, 25 bp, SARS Virus
ataacggtgacacgcgcttcatgag

SEQ ID NO: 66255 - DNA, 25 bp, SARS Virus
taacggtgacatccgcttcatgaga

SEQ ID NO: 66256 - DNA, 25 bp, SARS Virus
aacggtgacatgcgcttcatgagag

SEQ ID NO: 66257 - DNA, 25 bp, SARS Virus
acggtgacatgcccttcatgagaga

SEQ ID NO: 66258 - DNA, 25 bp, SARS Virus
cggtgacatgcgcttcatgagagac

SEQ ID NO: 66259 - DNA, 25 bp, SARS Virus
ggtgacatgcgcctcatgagagact

SEQ ID NO: 66260 - DNA, 25 bp, SARS Virus
gtgacatgcgctccatgagagactg

SEQ ID NO: 66261 - DNA, 25 bp, SARS Virus
tgacatgcgcttcatgagagactgt

SEQ ID NO: 66262 - DNA, 25 bp, SARS Virus
gacatgcgcttcctgagagactgtc

SEQ ID NO: 66263 - DNA, 25 bp, SARS Virus
acatgcgcttcacgagagactgtct

SEQ ID NO: 66264 - DNA, 25 bp, SARS Virus
catgcgcttcatcagagactgtctc

SEQ ID NO: 66265 - DNA, 25 bp, SARS Virus
atgcgcttcatgcgagactgtctct

SEQ ID NO: 66266 - DNA, 25 bp, SARS Virus
tgcgcttcatgacagactgtctctt

SEQ ID NO: 66267 - DNA, 25 bp, SARS Virus
gcgcttcatgagcgactgtctctta

SEQ ID NO: 66268 - DNA, 25 bp, SARS Virus
cgcttcatgagacactgtctcttaa

SEQ ID NO: 66269 - DNA, 25 bp, SARS Virus
gcttcatgagagcctgtctcttaac

SEQ ID NO: 66270 - DNA, 25 bp, SARS Virus
cttcatgagagactgtctcttaacg

SEQ ID NO: 66271 - DNA, 25 bp, SARS Virus
ttcatgagagaccgtctcttaacgt

SEQ ID NO: 66272 - DNA, 25 bp, SARS Virus
tcatgagagactctctcttaacgta

SEQ ID NO: 66273 - DNA, 25 bp, SARS Virus
catgagagactgcctcttaacgtag

SEQ ID NO: 66274 - DNA, 25 bp, SARS Virus
atgagagactgtctcttaacgtaga

SEQ ID NO: 66275 - DNA, 25 bp, SARS Virus
tgagagactgtcccttaacgtagaa

SEQ ID NO: 66276 - DNA, 25 bp, SARS Virus
gagagactgtctcttaacgtagaaa

SEQ ID NO: 66277 - DNA, 25 bp, SARS Virus
agagactgtctcctaacgtagaaag

SEQ ID NO: 66278 - DNA, 25 bp, SARS Virus
gagactgtctctcaacgtagaaagt

SEQ ID NO: 66279 - DNA, 25 bp, SARS Virus
agactgtctcttcacgtagaaagta

SEQ ID NO: 66280 - DNA, 25 bp, SARS Virus
gactgtctcttaccgtagaaagtac

SEQ ID NO: 66281 - DNA, 25 bp, SARS Virus
actgtctcttaacgtagaaagtacc

SEQ ID NO: 66282 - DNA, 25 bp, SARS Virus
ctgtctcttaacctagaaagtaccc

SEQ ID NO: 66283 - DNA, 25 bp, SARS Virus
tgtctcttaacgcagaaagtaccct

SEQ ID NO: 66284 - DNA, 25 bp, SARS Virus
gtctcttaacgtcgaaagtaccctc

SEQ ID NO: 66285 - DNA, 25 bp, SARS Virus
tctcttaacgtacaaagtaccctcc

SEQ ID NO: 66286 - DNA, 25 bp, SARS Virus
ctcttaacgtagcaagtaccctcca

SEQ ID NO: 66287 - DNA, 25 bp, SARS Virus
tcttaacgtagacagtaccctccaa

SEQ ID NO: 66288 - DNA, 25 bp, SARS Virus
cttaacgtagaacgtaccctccaac

SEQ ID NO: 66289 - DNA, 25 bp, SARS Virus
ttaacgtagaaactaccctccaacc

SEQ ID NO: 66290 - DNA, 25 bp, SARS Virus
taacgtagaaagcaccctccaacct

SEQ ID NO: 66291 - DNA, 25 bp, SARS Virus
aacgtagaaagtcccctccaacctt

SEQ ID NO: 66292 - DNA, 25 bp, SARS Virus
acgtagaaagtaccctccaaccttt

SEQ ID NO: 66293 - DNA, 25 bp, SARS Virus
cgtagaaagtaccctccaacctttt

SEQ ID NO: 66294 - DNA, 25 bp, SARS Virus
gtagaaagtaccctccaaccttttg

SEQ ID NO: 66295 - DNA, 25 bp, SARS Virus
tagaaagtaccccccaaccttttgg

SEQ ID NO: 66296 - DNA, 25 bp, SARS Virus
agaaagtaccctccaaccttttgga

SEQ ID NO: 66297 - DNA, 25 bp, SARS Virus
gaaagtaccctccaaccttttggat

SEQ ID NO: 66298 - DNA, 25 bp, SARS Virus
aaagtaccctcccaccttttggatc

SEQ ID NO: 66299 - DNA, 25 bp, SARS Virus
aagtaccctccacccttttggatct

SEQ ID NO: 66300 - DNA, 25 bp, SARS Virus
agtaccctccaaccttttggatctg

SEQ ID NO: 66301 - DNA, 25 bp, SARS Virus
gtaccctccaaccttttggatctgg

SEQ ID NO: 66302 - DNA, 25 bp, SARS Virus
taccctccaaccctttggatctggt

SEQ ID NO: 66303 - DNA, 25 bp, SARS Virus
accctccaacctcttggatctggtg

SEQ ID NO: 66304 - DNA, 25 bp, SARS Virus
ccctccaaccttctggatctggtgg

SEQ ID NO: 66305 - DNA, 25 bp, SARS Virus
cctccaacctttcggatctggtggt

SEQ ID NO: 66306 - DNA, 25 bp, SARS Virus
ctccaaccttttcgatctggtggta

SEQ ID NO: 66307 - DNA, 25 bp, SARS Virus
tccaaccttttgcatctggtggtaa

SEQ ID NO: 66308 - DNA, 25 bp, SARS Virus
ccaaccttttggctctggtggtaac

SEQ ID NO: 66309 - DNA, 25 bp, SARS Virus
caaccttttggacctggtggtaact

SEQ ID NO: 66310 - DNA, 25 bp, SARS Virus
aaccttttggatctggtggtaactt

SEQ ID NO: 66311 - DNA, 25 bp, SARS Virus
accttttggatccggtggtaacttg

SEQ ID NO: 66312 - DNA, 25 bp, SARS Virus
ccttttggatctcgtggtaacttgt

SEQ ID NO: 66313 - DNA, 25 bp, SARS Virus
cttttggatctgctggtaacttgtc

SEQ ID NO: 66314 - DNA, 25 bp, SARS Virus
ttttggatctggcggtaacttgtct

SEQ ID NO: 66315 - DNA, 25 bp, SARS Virus
tttggatctggtcgtaacttgtctt

SEQ ID NO: 66316 - DNA, 25 bp, SARS Virus
ttggatctggtgctaacttgtcttt

SEQ ID NO: 66317 - DNA, 25 bp, SARS Virus
tggatctggtggcaacttgtctttg

SEQ ID NO: 66318 - DNA, 25 bp, SARS Virus
ggatctggtggtcacttgtctttga

SEQ ID NO: 66319 - DNA, 25 bp, SARS Virus
gatctggtggtaccttgtctttgat

SEQ ID NO: 66320 - DNA, 25 bp, SARS Virus
atctggtggtaacttgtctttgata

SEQ ID NO: 66321 - DNA, 25 bp, SARS Virus
tctggtggtaacctgtctttgatac

SEQ ID NO: 66322 - DNA, 25 bp, SARS Virus
ctggtggtaactcgtctttgataca

SEQ ID NO: 66323 - DNA, 25 bp, SARS Virus
tggtggtaacttctctttgatacag

SEQ ID NO: 66324 - DNA, 25 bp, SARS Virus
ggtggtaacttgcctttgatacaga

SEQ ID NO: 66325 - DNA, 25 bp, SARS Virus
gtggtaacttgtctttgatacagaa

SEQ ID NO: 66326 - DNA, 25 bp, SARS Virus
tggtaacttgtccttgatacagaaa

SEQ ID NO: 66327 - DNA, 25 bp, SARS Virus
ggtaacttgtctctgatacagaaat

SEQ ID NO: 66328 - DNA, 25 bp, SARS Virus
gtaacttgtcttcgatacagaaatg

SEQ ID NO: 66329 - DNA, 25 bp, SARS Virus
taacttgtctttcatacagaaatga

SEQ ID NO: 66330 - DNA, 25 bp, SARS Virus
aacttgtctttgctacagaaatgac

SEQ ID NO: 66331 - DNA, 25 bp, SARS Virus
acttgtctttgacacagaaatgacc

SEQ ID NO: 66332 - DNA, 25 bp, SARS Virus
cttgtctttgatccagaaatgacca

SEQ ID NO: 66333 - DNA, 25 bp, SARS Virus
ttgtctttgatacagaaatgaccaa

SEQ ID NO: 66334 - DNA, 25 bp, SARS Virus
tgtctttgataccgaaatgaccaat

SEQ ID NO: 66335 - DNA, 25 bp, SARS Virus
gtctttgatacacaaatgaccaatg

SEQ ID NO: 66336 - DNA, 25 bp, SARS Virus
tctttgatacagcaatgaccaatgg

SEQ ID NO: 66337 - DNA, 25 bp, SARS Virus
ctttgatacagacatgaccaatggc

SEQ ID NO: 66338 - DNA, 25 bp, SARS Virus
tttgatacagaactgaccaatggca

SEQ ID NO: 66339 - DNA, 25 bp, SARS Virus
ttgatacagaaacgaccaatggcac

SEQ ID NO: 66340 - DNA, 25 bp, SARS Virus
tgatacagaaatcaccaatggcaca

SEQ ID NO: 66341 - DNA, 25 bp, SARS Virus
gatacagaaatgcccaatggcacat

SEQ ID NO: 66342 - DNA, 25 bp, SARS Virus
atacagaaatgaccaatggcacatt

SEQ ID NO: 66343 - DNA, 25 bp, SARS Virus
tacagaaatgaccaatggcacattg

SEQ ID NO: 66344 - DNA, 25 bp, SARS Virus
acagaaatgacccatggcacattga

SEQ ID NO: 66345 - DNA, 25 bp, SARS Virus
cagaaatgaccactggcacattgat

SEQ ID NO: 66346 - DNA, 25 bp, SARS Virus
agaaatgaccaacggcacattgatt

SEQ ID NO: 66347 - DNA, 25 bp, SARS Virus
gaaatgaccaatcgcacattgattt

SEQ ID NO: 66348 - DNA, 25 bp, SARS Virus
aaatgaccaatgccacattgatttt

SEQ ID NO: 66349 - DNA, 25 bp, SARS Virus
aatgaccaatggcacattgattttt

SEQ ID NO: 66350 - DNA, 25 bp, SARS Virus
atgaccaatggcccattgattttta

SEQ ID NO: 66351 - DNA, 25 bp, SARS Virus
tgaccaatggcacattgatttttat

SEQ ID NO: 66352 - DNA, 25 bp, SARS Virus
gaccaatggcaccttgatttttatc

SEQ ID NO: 66353 - DNA, 25 bp, SARS Virus
accaatggcacactgatttttatca

SEQ ID NO: 66354 - DNA, 25 bp, SARS Virus
ccaatggcacatcgatttttatcat

SEQ ID NO: 66355 - DNA, 25 bp, SARS Virus
caatggcacattcatttttatcatt

SEQ ID NO: 66356 - DNA, 25 bp, SARS Virus
aatggcacattgctttttatcattt

SEQ ID NO: 66357 - DNA, 25 bp, SARS Virus
atggcacattgacttttatcatttc

SEQ ID NO: 66358 - DNA, 25 bp, SARS Virus
tggcacattgatctttatcatttca

SEQ ID NO: 66359 - DNA, 25 bp, SARS Virus
ggcacattgattcttatcatttcat

SEQ ID NO: 66360 - DNA, 25 bp, SARS Virus
gcacattgatttctatcatttcatg

SEQ ID NO: 66361 - DNA, 25 bp, SARS Virus
cacattgattttcatcatttcatgt

SEQ ID NO: 66362 - DNA, 25 bp, SARS Virus
acattgatttttctcatttcatgtc

SEQ ID NO: 66363 - DNA, 25 bp, SARS Virus
cattgatttttaccatttcatgtct

SEQ ID NO: 66364 - DNA, 25 bp, SARS Virus
attgatttttatcatttcatgtcta

SEQ ID NO: 66365 - DNA, 25 bp, SARS Virus
ttgatttttatcctttcatgtctaa

SEQ ID NO: 66366 - DNA, 25 bp, SARS Virus
tgatttttatcacttcatgtctaac

SEQ ID NO: 66367 - DNA, 25 bp, SARS Virus
gatttttatcatctcatgtctaacc

SEQ ID NO: 66368 - DNA, 25 bp, SARS Virus
atttttatcattccatgtctaacct

SEQ ID NO: 66369 - DNA, 25 bp, SARS Virus
tttttatcatttcatgtctaacctc

SEQ ID NO: 66370 - DNA, 25 bp, SARS Virus
ttttatcatttcctgtctaacctct

SEQ ID NO: 66371 - DNA, 25 bp, SARS Virus
tttatcatttcacgtctaacctctc

SEQ ID NO: 66372 - DNA, 25 bp, SARS Virus
ttatcatttcatctctaacctctca

SEQ ID NO: 66373 - DNA, 25 bp, SARS Virus
tatcatttcatgcctaacctctcat

SEQ ID NO: 66374 - DNA, 25 bp, SARS Virus
atcatttcatgtctaacctctcatg

SEQ ID NO: 66375 - DNA, 25 bp, SARS Virus
tcatttcatgtccaacctctcatgt

SEQ ID NO: 66376 - DNA, 25 bp, SARS Virus
catttcatgtctcacctctcatgtg

SEQ ID NO: 66377 - DNA, 25 bp, SARS Virus
atttcatgtctaccctctcatgtgg

SEQ ID NO: 66378 - DNA, 25 bp, SARS Virus
tttcatgtctaacctctcatgtgga

SEQ ID NO: 66379 - DNA, 25 bp, SARS Virus
ttcatgtctaacctctcatgtggaa

SEQ ID NO: 66380 - DNA, 25 bp, SARS Virus
tcatgtctaacccctcatgtggaaa

SEQ ID NO: 66381 - DNA, 25 bp, SARS Virus
catgtctaacctctcatgtggaaac

SEQ ID NO: 66382 - DNA, 25 bp, SARS Virus
atgtctaacctcccatgtggaaact

SEQ ID NO: 66383 - DNA, 25 bp, SARS Virus
tgtctaacctctcatgtggaaactt

SEQ ID NO: 66384 - DNA, 25 bp, SARS Virus
gtctaacctctcctgtggaaacttt

SEQ ID NO: 66385 - DNA, 25 bp, SARS Virus
tctaacctctcacgtggaaactttt

SEQ ID NO: 66386 - DNA, 25 bp, SARS Virus
ctaacctctcatctggaaacttttt

SEQ ID NO: 66387 - DNA, 25 bp, SARS Virus
taacctctcatgcggaaactttttc

SEQ ID NO: 66388 - DNA, 25 bp, SARS Virus
aacctctcatgtcgaaactttttcc

SEQ ID NO: 66389 - DNA, 25 bp, SARS Virus
acctctcatgtgcaaactttttcca

SEQ ID NO: 66390 - DNA, 25 bp, SARS Virus
cctctcatgtggcaactttttccac

SEQ ID NO: 66391 - DNA, 25 bp, SARS Virus
ctctcatgtggacactttttccact

SEQ ID NO: 66392 - DNA, 25 bp, SARS Virus
tctcatgtggaacctttttccactg

SEQ ID NO: 66393 - DNA, 25 bp, SARS Virus
ctcatgtggaaactttttccactga

SEQ ID NO: 66394 - DNA, 25 bp, SARS Virus
tcatgtggaaaccttttccactgat

SEQ ID NO: 66395 - DNA, 25 bp, SARS Virus
catgtggaaactctttccactgata

SEQ ID NO: 66396 - DNA, 25 bp, SARS Virus
atgtggaaacttcttccactgatac

SEQ ID NO: 66397 - DNA, 25 bp, SARS Virus
tgtggaaactttctccactgatacc

SEQ ID NO: 66398 - DNA, 25 bp, SARS Virus
gtggaaacttttcccactgatacca

SEQ ID NO: 66399 - DNA, 25 bp, SARS Virus
tggaaactttttccactgataccac

SEQ ID NO: 66400 - DNA, 25 bp, SARS Virus
ggaaactttttccactgataccact

SEQ ID NO: 66401 - DNA, 25 bp, SARS Virus
gaaactttttcccctgataccacta

SEQ ID NO: 66402 - DNA, 25 bp, SARS Virus
aaactttttccactgataccactac

SEQ ID NO: 66403 - DNA, 25 bp, SARS Virus
aactttttccaccgataccactacg

SEQ ID NO: 66404 - DNA, 25 bp, SARS Virus
actttttccactcataccactacga

SEQ ID NO: 66405 - DNA, 25 bp, SARS Virus
ctttttccactgctaccactacgac

SEQ ID NO: 66406 - DNA, 25 bp, SARS Virus
tttttccactgacaccactacgaca

SEQ ID NO: 66407 - DNA, 25 bp, SARS Virus
ttttccactgatcccactacgacaa

SEQ ID NO: 66408 - DNA, 25 bp, SARS Virus
tttccactgataccactacgacaac

SEQ ID NO: 66409 - DNA, 25 bp, SARS Virus
ttccactgataccactacgacaaca

SEQ ID NO: 66410 - DNA, 25 bp, SARS Virus
tccactgatacccctacgacaacac

SEQ ID NO: 66411 - DNA, 25 bp, SARS Virus
ccactgataccactacgacaacaca

SEQ ID NO: 66412 - DNA, 25 bp, SARS Virus
cactgataccaccacgacaacacat

SEQ ID NO: 66413 - DNA, 25 bp, SARS Virus
actgataccactccgacaacacatg

SEQ ID NO: 66414 - DNA, 25 bp, SARS Virus
ctgataccactacgacaacacatgt

SEQ ID NO: 66415 - DNA, 25 bp, SARS Virus
tgataccactaccacaacacatgtc

SEQ ID NO: 66416 - DNA, 25 bp, SARS Virus
gataccactacgccaacacatgtct

SEQ ID NO: 66417 - DNA, 25 bp, SARS Virus
ataccactacgacaacacatgtctc

SEQ ID NO: 66418 - DNA, 25 bp, SARS Virus
taccactacgaccacacatgtctcc

SEQ ID NO: 66419 - DNA, 25 bp, SARS Virus
accactacgacaccacatgtctcca

SEQ ID NO: 66420 - DNA, 25 bp, SARS Virus
ccactacgacaacacatgtctccat

SEQ ID NO: 66421 - DNA, 25 bp, SARS Virus
cactacgacaacccatgtctccatg

SEQ ID NO: 66422 - DNA, 25 bp, SARS Virus
actacgacaacacatgtctccatga

SEQ ID NO: 66423 - DNA, 25 bp, SARS Virus
ctacgacaacacctgtctccatgat

SEQ ID NO: 66424 - DNA, 25 bp, SARS Virus
tacgacaacacacgtctccatgatg

SEQ ID NO: 66425 - DNA, 25 bp, SARS Virus
acgacaacacatctctccatgatgc

SEQ ID NO: 66426 - DNA, 25 bp, SARS Virus
cgacaacacatgcctccatgatgct

SEQ ID NO: 66427 - DNA, 25 bp, SARS Virus
gacaacacatgtctccatgatgctg

SEQ ID NO: 66428 - DNA, 25 bp, SARS Virus
acaacacatgtccccatgatgctgt

SEQ ID NO: 66429 - DNA, 25 bp, SARS Virus
caacacatgtctccatgatgctgta

SEQ ID NO: 66430 - DNA, 25 bp, SARS Virus
aacacatgtctccatgatgctgtat

SEQ ID NO: 66431 - DNA, 25 bp, SARS Virus
acacatgtctccctgatgctgtatg

SEQ ID NO: 66432 - DNA, 25 bp, SARS Virus
cacatgtctccacgatgctgtatgt

SEQ ID NO: 66433 - DNA, 25 bp, SARS Virus
acatgtctccatcatgctgtatgtt

SEQ ID NO: 66434 - DNA, 25 bp, SARS Virus
catgtctccatgctgctgtatgttc

SEQ ID NO: 66435 - DNA, 25 bp, SARS Virus
atgtctccatgacgctgtatgttca

SEQ ID NO: 66436 - DNA, 25 bp, SARS Virus
tgtctccatgatcctgtatgttcaa

SEQ ID NO: 66437 - DNA, 25 bp, SARS Virus
gtctccatgatgctgtatgttcaac

SEQ ID NO: 66438 - DNA, 25 bp, SARS Virus
tctccatgatgccgtatgttcaact

SEQ ID NO: 66439 - DNA, 25 bp, SARS Virus
ctccatgatgctctatgttcaactt

SEQ ID NO: 66440 - DNA, 25 bp, SARS Virus
tccatgatgctgcatgttcaactta

SEQ ID NO: 66441 - DNA, 25 bp, SARS Virus
ccatgatgctgtctgttcaacttac

SEQ ID NO: 66442 - DNA, 25 bp, SARS Virus
catgatgctgtacgttcaacttaca

SEQ ID NO: 66443 - DNA, 25 bp, SARS Virus
atgatgctgtatcttcaacttacaa

SEQ ID NO: 66444 - DNA, 25 bp, SARS Virus
tgatgctgtatgctcaacttacaac

SEQ ID NO: 66445 - DNA, 25 bp, SARS Virus
gatgctgtatgtccaacttacaacc

SEQ ID NO: 66446 - DNA, 25 bp, SARS Virus
atgctgtatgttcaacttacaacca

SEQ ID NO: 66447 - DNA, 25 bp, SARS Virus
tgctgtatgttccacttacaaccac

SEQ ID NO: 66448 - DNA, 25 bp, SARS Virus
gctgtatgttcaccttacaaccact

SEQ ID NO: 66449 - DNA, 25 bp, SARS Virus
ctgtatgttcaacttacaaccacta

SEQ ID NO: 66450 - DNA, 25 bp, SARS Virus
tgtatgttcaacctacaaccactaa

SEQ ID NO: 66451 - DNA, 25 bp, SARS Virus
gtatgttcaactcacaaccactaat

SEQ ID NO: 66452 - DNA, 25 bp, SARS Virus
tatgttcaacttccaaccactaatg

SEQ ID NO: 66453 - DNA, 25 bp, SARS Virus
atgttcaacttacaaccactaatga

SEQ ID NO: 66454 - DNA, 25 bp, SARS Virus
tgttcaacttaccaccactaatgaa

SEQ ID NO: 66455 - DNA, 25 bp, SARS Virus
gttcaacttacacccactaatgaaa

SEQ ID NO: 66456 - DNA, 25 bp, SARS Virus
ttcaacttacaaccactaatgaaac

SEQ ID NO: 66457 - DNA, 25 bp, SARS Virus
tcaacttacaaccactaatgaaaca

SEQ ID NO: 66458 - DNA, 25 bp, SARS Virus
caacttacaacccctaatgaaacac

SEQ ID NO: 66459 - DNA, 25 bp, SARS Virus
aacttacaaccactaatgaaacaca

SEQ ID NO: 66460 - DNA, 25 bp, SARS Virus
acttacaaccaccaatgaaacacaa

SEQ ID NO: 66461 - DNA, 25 bp, SARS Virus
cttacaaccactcatgaaacacaac

SEQ ID NO: 66462 - DNA, 25 bp, SARS Virus
ttacaaccactactgaaacacaact

SEQ ID NO: 66463 - DNA, 25 bp, SARS Virus
tacaaccactaacgaaacacaactg

SEQ ID NO: 66464 - DNA, 25 bp, SARS Virus
acaaccactaatcaaacacaactgt

SEQ ID NO: 66465 - DNA, 25 bp, SARS Virus
caaccactaatgcaacacaactgta

SEQ ID NO: 66466 - DNA, 25 bp, SARS Virus
aaccactaatgacacacaactgtag

SEQ ID NO: 66467 - DNA, 25 bp, SARS Virus
accactaatgaaccacaactgtaga

SEQ ID NO: 66468 - DNA, 25 bp, SARS Virus
ccactaatgaaacacaactgtagag

SEQ ID NO: 66469 - DNA, 25 bp, SARS Virus
cactaatgaaacccaactgtagagt

SEQ ID NO: 66470 - DNA, 25 bp, SARS Virus
actaatgaaacacaactgtagagtg

SEQ ID NO: 66471 - DNA, 25 bp, SARS Virus
ctaatgaaacaccactgtagagtgt

SEQ ID NO: 66472 - DNA, 25 bp, SARS Virus
taatgaaacacacctgtagagtgtg

SEQ ID NO: 66473 - DNA, 25 bp, SARS Virus
aatgaaacacaactgtagagtgtga

SEQ ID NO: 66474 - DNA, 25 bp, SARS Virus
atgaaacacaaccgtagagtgtgac

SEQ ID NO: 66475 - DNA, 25 bp, SARS Virus
tgaaacacaactctagagtgtgaca

SEQ ID NO: 66476 - DNA, 25 bp, SARS Virus
gaaacacaactgcagagtgtgacat

SEQ ID NO: 66477 - DNA, 25 bp, SARS Virus
aaacacaactgtcgagtgtgacatt

SEQ ID NO: 66478 - DNA, 25 bp, SARS Virus
aacacaactgtacagtgtgacatta

SEQ ID NO: 66479 - DNA, 25 bp, SARS Virus
acacaactgtagcgtgtgacattac

SEQ ID NO: 66480 - DNA, 25 bp, SARS Virus
cacaactgtagactgtgacattacg

SEQ ID NO: 66481 - DNA, 25 bp, SARS Virus
acaactgtagagcgtgacattacgg

SEQ ID NO: 66482 - DNA, 25 bp, SARS Virus
caactgtagagtctgacattacggt

SEQ ID NO: 66483 - DNA, 25 bp, SARS Virus
aactgtagagtgcgacattacggtg

SEQ ID NO: 66484 - DNA, 25 bp, SARS Virus
actgtagagtgtcacattacggtga

SEQ ID NO: 66485 - DNA, 25 bp, SARS Virus
ctgtagagtgtgccattacggtgaa

SEQ ID NO: 66486 - DNA, 25 bp, SARS Virus
tgtagagtgtgacattacggtgaat

SEQ ID NO: 66487 - DNA, 25 bp, SARS Virus
gtagagtgtgaccttacggtgaatc

SEQ ID NO: 66488 - DNA, 25 bp, SARS Virus
tagagtgtgacactacggtgaatca

SEQ ID NO: 66489 - DNA, 25 bp, SARS Virus
agagtgtgacatcacggtgaatcac

SEQ ID NO: 66490 - DNA, 25 bp, SARS Virus
gagtgtgacattccggtgaatcacg

SEQ ID NO: 66491 - DNA, 25 bp, SARS Virus
agtgtgacattacggtgaatcacgt

SEQ ID NO: 66492 - DNA, 25 bp, SARS Virus
gtgtgacattaccgtgaatcacgtg

SEQ ID NO: 66493 - DNA, 25 bp, SARS Virus
tgtgacattacgctgaatcacgtgg

SEQ ID NO: 66494 - DNA, 25 bp, SARS Virus
gtgacattacggcgaatcacgtgga

SEQ ID NO: 66495 - DNA, 25 bp, SARS Virus
tgacattacggtcaatcacgtggat

SEQ ID NO: 66496 - DNA, 25 bp, SARS Virus
gacattacggtgcatcacgtggatg

SEQ ID NO: 66497 - DNA, 25 bp, SARS Virus
tcgataataacggtcagtgtattcg

SEQ ID NO: 66498 - DNA, 25 bp, SARS Virus
cgataataacgtgcagtgtattcgg

SEQ ID NO: 66499 - DNA, 25 bp, SARS Virus
gataataacgttgagtgtattcgga

SEQ ID NO: 66500 - DNA, 25 bp, SARS Virus
ataataacgttcggtgtattcggag

SEQ ID NO: 66501 - DNA, 25 bp, SARS Virus
taataacgttcagtgtattcggagg

SEQ ID NO: 66502 - DNA, 25 bp, SARS Virus
aataacgttcagggtattcggaggg

SEQ ID NO: 66503 - DNA, 25 bp, SARS Virus
ataacgttcagtgtattcggagggt

SEQ ID NO: 66504 - DNA, 25 bp, SARS Virus
taacgttcagtggattcggagggta

SEQ ID NO: 66505 - DNA, 25 bp, SARS Virus
aacgttcagtgtgttcggagggtaa

SEQ ID NO: 66506 - DNA, 25 bp, SARS Virus
acgttcagtgtagtcggagggtaat

SEQ ID NO: 66507 - DNA, 25 bp, SARS Virus
cgttcagtgtatgcggagggtaatc

SEQ ID NO: 66508 - DNA, 25 bp, SARS Virus
gttcagtgtattgggagggtaatca

SEQ ID NO: 66509 - DNA, 25 bp, SARS Virus
ttcagtgtattcggagggtaatcaa

SEQ ID NO: 66510 - DNA, 25 bp, SARS Virus
tcagtgtattcggagggtaatcaaa

SEQ ID NO: 66511 - DNA, 25 bp, SARS Virus
cagtgtattcggggggtaatcaaaa

SEQ ID NO: 66512 - DNA, 25 bp, SARS Virus
agtgtattcggagggtaatcaaaag

SEQ ID NO: 66513 - DNA, 25 bp, SARS Virus
gtgtattcggagggtaatcaaaagg

SEQ ID NO: 66514 - DNA, 25 bp, SARS Virus
tgtattcggagggtaatcaaaaggt

SEQ ID NO: 66515 - DNA, 25 bp, SARS Virus
gtattcggaggggaatcaaaaggta

SEQ ID NO: 66516 - DNA, 25 bp, SARS Virus
tattcggagggtgatcaaaaggtaa

SEQ ID NO: 66517 - DNA, 25 bp, SARS Virus
attcggagggtagtcaaaaggtaat

SEQ ID NO: 66518 - DNA, 25 bp, SARS Virus
ttcggagggtaagcaaaaggtaata

SEQ ID NO: 66519 - DNA, 25 bp, SARS Virus
tcggagggtaatgaaaaggtaatac

SEQ ID NO: 66520 - DNA, 25 bp, SARS Virus
cggagggtaatcgaaaggtaataca

SEQ ID NO: 66521 - DNA, 25 bp, SARS Virus
ggagggtaatcagaaggtaatacac

SEQ ID NO: 66522 - DNA, 25 bp, SARS Virus
gagggtaatcaagaggtaatacacg

SEQ ID NO: 66523 - DNA, 25 bp, SARS Virus
agggtaatcaaagggtaatacacga

SEQ ID NO: 66524 - DNA, 25 bp, SARS Virus
gggtaatcaaaaggtaatacacgat

SEQ ID NO: 66525 - DNA, 25 bp, SARS Virus
ggtaatcaaaaggtaatacacgatt

SEQ ID NO: 66526 - DNA, 25 bp, SARS Virus
gtaatcaaaagggaatacacgatta

SEQ ID NO: 66527 - DNA, 25 bp, SARS Virus
taatcaaaaggtgatacacgattac

SEQ ID NO: 66528 - DNA, 25 bp, SARS Virus
aatcaaaaggtagtacacgattacc

SEQ ID NO: 66529 - DNA, 25 bp, SARS Virus
atcaaaaggtaagacacgattacca

SEQ ID NO: 66530 - DNA, 25 bp, SARS Virus
tcaaaaggtaatgcacgattaccag

SEQ ID NO: 66531 - DNA, 25 bp, SARS Virus
caaaaggtaatagacgattaccagt

SEQ ID NO: 66532 - DNA, 25 bp, SARS Virus
aaaaggtaatacgcgattaccagtc

SEQ ID NO: 66533 - DNA, 25 bp, SARS Virus
aaaggtaatacaggattaccagtcc

SEQ ID NO: 66534 - DNA, 25 bp, SARS Virus
aaggtaatacacgattaccagtcca

SEQ ID NO: 66535 - DNA, 25 bp, SARS Virus
aggtaatacacggttaccagtccaa

SEQ ID NO: 66536 - DNA, 25 bp, SARS Virus
ggtaatacacgagtaccagtccaaa

SEQ ID NO: 66537 - DNA, 25 bp, SARS Virus
gtaatacacgatgaccagtccaaaa

SEQ ID NO: 66538 - DNA, 25 bp, SARS Virus
taatacacgattgccagtccaaaaa

SEQ ID NO: 66539 - DNA, 25 bp, SARS Virus
aatacacgattagcagtccaaaaac

SEQ ID NO: 66540 - DNA, 25 bp, SARS Virus
atacacgattacgagtccaaaaacc

SEQ ID NO: 66541 - DNA, 25 bp, SARS Virus
tacacgattaccggtccaaaaacca

SEQ ID NO: 66542 - DNA, 25 bp, SARS Virus
acacgattaccagtccaaaaaccaa

SEQ ID NO: 66543 - DNA, 25 bp, SARS Virus
cacgattaccaggccaaaaaccaaa

SEQ ID NO: 66544 - DNA, 25 bp, SARS Virus
acgattaccagtgcaaaaaccaaat

SEQ ID NO: 66545 - DNA, 25 bp, SARS Virus
cgattaccagtcgaaaaaccaaata

SEQ ID NO: 66546 - DNA, 25 bp, SARS Virus
gattaccagtccgaaaaccaaatat

SEQ ID NO: 66547 - DNA, 25 bp, SARS Virus
attaccagtccagaaaccaaatatg

SEQ ID NO: 66548 - DNA, 25 bp, SARS Virus
ttaccagtccaagaaccaaatatgt

SEQ ID NO: 66549 - DNA, 25 bp, SARS Virus
taccagtccaaagaccaaatatgtt

SEQ ID NO: 66550 - DNA, 25 bp, SARS Virus
accagtccaaaagccaaatatgttt

SEQ ID NO: 66551 - DNA, 25 bp, SARS Virus
ccagtccaaaaagcaaatatgtttt

SEQ ID NO: 66552 - DNA, 25 bp, SARS Virus
cagtccaaaaacgaaatatgttttt

SEQ ID NO: 66553 - DNA, 25 bp, SARS Virus
agtccaaaaaccgaatatgtttttg

SEQ ID NO: 66554 - DNA, 25 bp, SARS Virus
gtccaaaaaccagatatgtttttgt

SEQ ID NO: 66555 - DNA, 25 bp, SARS Virus
tccaaaaaccaagtatgtttttgtg

SEQ ID NO: 66556 - DNA, 25 bp, SARS Virus
ccaaaaaccaaagatgtttttgtgt

SEQ ID NO: 66557 - DNA, 25 bp, SARS Virus
caaaaaccaaatgtgtttttgtgta

SEQ ID NO: 66558 - DNA, 25 bp, SARS Virus
aaaaaccaaataggtttttgtgtac

SEQ ID NO: 66559 - DNA, 25 bp, SARS Virus
aaaaccaaatatgtttttgtgtaca

SEQ ID NO: 66560 - DNA, 25 bp, SARS Virus
aaaccaaatatggttttgtgtacac

SEQ ID NO: 66561 - DNA, 25 bp, SARS Virus
aaccaaatatgtgtttgtgtacaca

SEQ ID NO: 66562 - DNA, 25 bp, SARS Virus
accaaatatgttgttgtgtacacat

SEQ ID NO: 66563 - DNA, 25 bp, SARS Virus
ccaaatatgtttgtgtgtacacatc

SEQ ID NO: 66564 - DNA, 25 bp, SARS Virus
caaatatgttttggtgtacacatcc

SEQ ID NO: 66565 - DNA, 25 bp, SARS Virus
aaatatgtttttgtgtacacatccg

SEQ ID NO: 66566 - DNA, 25 bp, SARS Virus
aatatgtttttgggtacacatccgt

SEQ ID NO: 66567 - DNA, 25 bp, SARS Virus
atatgtttttgtgtacacatccgtc

SEQ ID NO: 66568 - DNA, 25 bp, SARS Virus
tatgtttttgtggacacatccgtca

SEQ ID NO: 66569 - DNA, 25 bp, SARS Virus
atgtttttgtgtgcacatccgtcac

SEQ ID NO: 66570 - DNA, 25 bp, SARS Virus
tgtttttgtgtagacatccgtcact

SEQ ID NO: 66571 - DNA, 25 bp, SARS Virus
gtttttgtgtacgcatccgtcactg

SEQ ID NO: 66572 - DNA, 25 bp, SARS Virus
tttttgtgtacagatccgtcactgt

SEQ ID NO: 66573 - DNA, 25 bp, SARS Virus
ttttgtgtacacgtccgtcactgtt

SEQ ID NO: 66574 - DNA, 25 bp, SARS Virus
tttgtgtacacagccgtcactgtta

SEQ ID NO: 66575 - DNA, 25 bp, SARS Virus
ttgtgtacacatgcgtcactgttac

SEQ ID NO: 66576 - DNA, 25 bp, SARS Virus
tgtgtacacatcggtcactgttaca

SEQ ID NO: 66577 - DNA, 25 bp, SARS Virus
gtgtacacatccgtcactgttacag

SEQ ID NO: 66578 - DNA, 25 bp, SARS Virus
tgtacacatccggcactgttacagt

SEQ ID NO: 66579 - DNA, 25 bp, SARS Virus
gtacacatccgtgactgttacagtg

SEQ ID NO: 66580 - DNA, 25 bp, SARS Virus
tacacatccgtcgctgttacagtga

SEQ ID NO: 66581 - DNA, 25 bp, SARS Virus
acacatccgtcagtgttacagtgac

SEQ ID NO: 66582 - DNA, 25 bp, SARS Virus
cacatccgtcacggttacagtgact

SEQ ID NO: 66583 - DNA, 25 bp, SARS Virus
acatccgtcactgttacagtgactg

SEQ ID NO: 66584 - DNA, 25 bp, SARS Virus
catccgtcactggtacagtgactga

SEQ ID NO: 66585 - DNA, 25 bp, SARS Virus
atccgtcactgtgacagtgactgaa

SEQ ID NO: 66586 - DNA, 25 bp, SARS Virus
tccgtcactgttgcagtgactgaag

SEQ ID NO: 66587 - DNA, 25 bp, SARS Virus
ccgtcactgttagagtgactgaagt

SEQ ID NO: 66588 - DNA, 25 bp, SARS Virus
cgtcactgttacggtgactgaagtt

SEQ ID NO: 66589 - DNA, 25 bp, SARS Virus
gtcactgttacagtgactgaagtta

SEQ ID NO: 66590 - DNA, 25 bp, SARS Virus
tcactgttacagggactgaagttac

SEQ ID NO: 66591 - DNA, 25 bp, SARS Virus
cactgttacagtgactgaagttacg

SEQ ID NO: 66592 - DNA, 25 bp, SARS Virus
actgttacagtggctgaagttacgc

SEQ ID NO: 66593 - DNA, 25 bp, SARS Virus
ctgttacagtgagtgaagttacgct

SEQ ID NO: 66594 - DNA, 25 bp, SARS Virus
tgttacagtgacggaagttacgcta

SEQ ID NO: 66595 - DNA, 25 bp, SARS Virus
gttacagtgactgaagttacgctat

SEQ ID NO: 66596 - DNA, 25 bp, SARS Virus
ttacagtgactggagttacgctatc

SEQ ID NO: 66597 - DNA, 25 bp, SARS Virus
tacagtgactgaggttacgctatcg

SEQ ID NO: 66598 - DNA, 25 bp, SARS Virus
acagtgactgaagttacgctatcgt

SEQ ID NO: 66599 - DNA, 25 bp, SARS Virus
cagtgactgaaggtacgctatcgtt

SEQ ID NO: 66600 - DNA, 25 bp, SARS Virus
agtgactgaagtgacgctatcgttg

SEQ ID NO: 66601 - DNA, 25 bp, SARS Virus
gtgactgaagttgcgctatcgttgt

SEQ ID NO: 66602 - DNA, 25 bp, SARS Virus
tgactgaagttaggctatcgttgta

SEQ ID NO: 66603 - DNA, 25 bp, SARS Virus
gactgaagttacgctatcgttgtac

SEQ ID NO: 66604 - DNA, 25 bp, SARS Virus
actgaagttacggtatcgttgtaca

SEQ ID NO: 66605 - DNA, 25 bp, SARS Virus
ctgaagttacgcgatcgttgtacac

SEQ ID NO: 66606 - DNA, 25 bp, SARS Virus
tgaagttacgctgtcgttgtacact

SEQ ID NO: 66607 - DNA, 25 bp, SARS Virus
gaagttacgctagcgttgtacacta

SEQ ID NO: 66608 - DNA, 25 bp, SARS Virus
aagttacgctatggttgtacactaa

SEQ ID NO: 66609 - DNA, 25 bp, SARS Virus
agttacgctatcgttgtacactaac

SEQ ID NO: 66610 - DNA, 25 bp, SARS Virus
gttacgctatcggtgtacactaacc

SEQ ID NO: 66611 - DNA, 25 bp, SARS Virus
ttacgctatcgtggtacactaacct

SEQ ID NO: 66612 - DNA, 25 bp, SARS Virus
tacgctatcgttgtacactaacctg

SEQ ID NO: 66613 - DNA, 25 bp, SARS Virus
acgctatcgttggacactaacctga

SEQ ID NO: 66614 - DNA, 25 bp, SARS Virus
cgctatcgttgtgcactaacctgat

SEQ ID NO: 66615 - DNA, 25 bp, SARS Virus
gctatcgttgtagactaacctgatt

SEQ ID NO: 66616 - DNA, 25 bp, SARS Virus
ctatcgttgtacgctaacctgatta

SEQ ID NO: 66617 - DNA, 25 bp, SARS Virus
tatcgttgtacagtaacctgattac

SEQ ID NO: 66618 - DNA, 25 bp, SARS Virus
atcgttgtacacgaacctgattacg

SEQ ID NO: 66619 - DNA, 25 bp, SARS Virus
tcgttgtacactgacctgattacga

SEQ ID NO: 66620 - DNA, 25 bp, SARS Virus
cgttgtacactagcctgattacgac

SEQ ID NO: 66621 - DNA, 25 bp, SARS Virus
gttgtacactaagctgattacgacc

SEQ ID NO: 66622 - DNA, 25 bp, SARS Virus
ttgtacactaacgtgattacgaccg

SEQ ID NO: 66623 - DNA, 25 bp, SARS Virus
tgtacactaaccggattacgaccgc

SEQ ID NO: 66624 - DNA, 25 bp, SARS Virus
gtacactaacctgattacgaccgct

SEQ ID NO: 66625 - DNA, 25 bp, SARS Virus
tacactaacctggttacgaccgcta

SEQ ID NO: 66626 - DNA, 25 bp, SARS Virus
acactaacctgagtacgaccgctaa

SEQ ID NO: 66627 - DNA, 25 bp, SARS Virus
cactaacctgatgacgaccgctaat

SEQ ID NO: 66628 - DNA, 25 bp, SARS Virus
actaacctgattgcgaccgctaatg

SEQ ID NO: 66629 - DNA, 25 bp, SARS Virus
ctaacctgattaggaccgctaatgt

SEQ ID NO: 66630 - DNA, 25 bp, SARS Virus
taacctgattacgaccgctaatgta

SEQ ID NO: 66631 - DNA, 25 bp, SARS Virus
aacctgattacggccgctaatgtat

SEQ ID NO: 66632 - DNA, 25 bp, SARS Virus
acctgattacgagcgctaatgtatg

SEQ ID NO: 66633 - DNA, 25 bp, SARS Virus
cctgattacgacggctaatgtatga

SEQ ID NO: 66634 - DNA, 25 bp, SARS Virus
ctgattacgaccgctaatgtatgaa

SEQ ID NO: 66635 - DNA, 25 bp, SARS Virus
tgattacgaccggtaatgtatgaac

SEQ ID NO: 66636 - DNA, 25 bp, SARS Virus
gattacgaccgcgaatgtatgaacg

SEQ ID NO: 66637 - DNA, 25 bp, SARS Virus
attacgaccgctgatgtatgaacgg

SEQ ID NO: 66638 - DNA, 25 bp, SARS Virus
ttacgaccgctagtgtatgaacggt

SEQ ID NO: 66639 - DNA, 25 bp, SARS Virus
tacgaccgctaaggtatgaacggtt

SEQ ID NO: 66640 - DNA, 25 bp, SARS Virus
acgaccgctaatgtatgaacggttg

SEQ ID NO: 66641 - DNA, 25 bp, SARS Virus
cgaccgctaatggatgaacggttgt

SEQ ID NO: 66642 - DNA, 25 bp, SARS Virus
gaccgctaatgtgtgaacggttgtg

SEQ ID NO: 66643 - DNA, 25 bp, SARS Virus
accgctaatgtaggaacggttgtga

SEQ ID NO: 66644 - DNA, 25 bp, SARS Virus
ccgctaatgtatgaacggttgtgaa

SEQ ID NO: 66645 - DNA, 25 bp, SARS Virus
cgctaatgtatggacggttgtgaac

SEQ ID NO: 66646 - DNA, 25 bp, SARS Virus
gctaatgtatgagcggttgtgaaca

SEQ ID NO: 66647 - DNA, 25 bp, SARS Virus
ctaatgtatgaagggttgtgaacat

SEQ ID NO: 66648 - DNA, 25 bp, SARS Virus
taatgtatgaacggttgtgaacatg

SEQ ID NO: 66649 - DNA, 25 bp, SARS Virus
aatgtatgaacggttgtgaacatga

SEQ ID NO: 66650 - DNA, 25 bp, SARS Virus
atgtatgaacgggtgtgaacatgac

SEQ ID NO: 66651 - DNA, 25 bp, SARS Virus
tgtatgaacggtggtgaacatgact

SEQ ID NO: 66652 - DNA, 25 bp, SARS Virus
gtatgaacggttgtgaacatgactc

SEQ ID NO: 66653 - DNA, 25 bp, SARS Virus
tatgaacggttgggaacatgactct

SEQ ID NO: 66654 - DNA, 25 bp, SARS Virus
atgaacggttgtgaacatgactctc

SEQ ID NO: 66655 - DNA, 25 bp, SARS Virus
tgaacggttgtggacatgactctct

SEQ ID NO: 66656 - DNA, 25 bp, SARS Virus
gaacggttgtgagcatgactctctg

SEQ ID NO: 66657 - DNA, 25 bp, SARS Virus
aacggttgtgaagatgactctctga

SEQ ID NO: 66658 - DNA, 25 bp, SARS Virus
acggttgtgaacgtgactctctgag

SEQ ID NO: 66659 - DNA, 25 bp, SARS Virus
cggttgtgaacaggactctctgagt

SEQ ID NO: 66660 - DNA, 25 bp, SARS Virus
ggttgtgaacatgactctctgagtt

SEQ ID NO: 66661 - DNA, 25 bp, SARS Virus
gttgtgaacatggctctctgagttc

SEQ ID NO: 66662 - DNA, 25 bp, SARS Virus
ttgtgaacatgagtctctgagttcg

SEQ ID NO: 66663 - DNA, 25 bp, SARS Virus
tgtgaacatgacgctctgagttcga

SEQ ID NO: 66664 - DNA, 25 bp, SARS Virus
gtgaacatgactgtctgagttcgaa

SEQ ID NO: 66665 - DNA, 25 bp, SARS Virus
tgaacatgactcgctgagttcgaaa

SEQ ID NO: 66666 - DNA, 25 bp, SARS Virus
gaacatgactctgtgagttcgaaaa

SEQ ID NO: 66667 - DNA, 25 bp, SARS Virus
aacatgactctcggagttcgaaaag

SEQ ID NO: 66668 - DNA, 25 bp, SARS Virus
acatgactctctgagttcgaaaagc

SEQ ID NO: 66669 - DNA, 25 bp, SARS Virus
catgactctctgggttcgaaaagcg

SEQ ID NO: 66670 - DNA, 25 bp, SARS Virus
atgactctctgagttcgaaaagcgt

SEQ ID NO: 66671 - DNA, 25 bp, SARS Virus
tgactctctgaggtcgaaaagcgtc

SEQ ID NO: 66672 - DNA, 25 bp, SARS Virus
gactctctgagtgcgaaaagcgtcg

SEQ ID NO: 66673 - DNA, 25 bp, SARS Virus
actctctgagttggaaaagcgtcgt

SEQ ID NO: 66674 - DNA, 25 bp, SARS Virus
ctctctgagttcgaaaagcgtcgtc

SEQ ID NO: 66675 - DNA, 25 bp, SARS Virus
tctctgagttcggaaagcgtcgtct

SEQ ID NO: 66676 - DNA, 25 bp, SARS Virus
ctctgagttcgagaagcgtcgtctt

SEQ ID NO: 66677 - DNA, 25 bp, SARS Virus
tctgagttcgaagagcgtcgtcttt

SEQ ID NO: 66678 - DNA, 25 bp, SARS Virus
ctgagttcgaaaggcgtcgtctttg

SEQ ID NO: 66679 - DNA, 25 bp, SARS Virus
tgagttcgaaaagcgtcgtctttgc

SEQ ID NO: 66680 - DNA, 25 bp, SARS Virus
gagttcgaaaagggtcgtctttgcg

SEQ ID NO: 66681 - DNA, 25 bp, SARS Virus
agttcgaaaagcgtcgtctttgcga

SEQ ID NO: 66682 - DNA, 25 bp, SARS Virus
gttcgaaaagcggcgtctttgcgag

SEQ ID NO: 66683 - DNA, 25 bp, SARS Virus
ttcgaaaagcgtggtctttgcgagt

SEQ ID NO: 66684 - DNA, 25 bp, SARS Virus
tcgaaaagcgtcgtctttgcgagtt

SEQ ID NO: 66685 - DNA, 25 bp, SARS Virus
cgaaaagcgtcggctttgcgagttt

SEQ ID NO: 66686 - DNA, 25 bp, SARS Virus
gaaaagcgtcgtgtttgcgagtttc

SEQ ID NO: 66687 - DNA, 25 bp, SARS Virus
aaaagcgtcgtcgttgcgagtttcg

SEQ ID NO: 66688 - DNA, 25 bp, SARS Virus
aaagcgtcgtctgtgcgagtttcgg

SEQ ID NO: 66689 - DNA, 25 bp, SARS Virus
aagcgtcgtcttggcgagtttcggt

SEQ ID NO: 66690 - DNA, 25 bp, SARS Virus
agcgtcgtctttgcgagtttcggtg

SEQ ID NO: 66691 - DNA, 25 bp, SARS Virus
gcgtcgtctttgggagtttcggtga

SEQ ID NO: 66692 - DNA, 25 bp, SARS Virus
cgtcgtctttgcgagtttcggtgac

SEQ ID NO: 66693 - DNA, 25 bp, SARS Virus
gtcgtctttgcgggtttcggtgact

SEQ ID NO: 66694 - DNA, 25 bp, SARS Virus
tcgtctttgcgagtttcggtgactc

SEQ ID NO: 66695 - DNA, 25 bp, SARS Virus
cgtctttgcgaggttcggtgactcc

SEQ ID NO: 66696 - DNA, 25 bp, SARS Virus
gtctttgcgagtgtcggtgactcct

SEQ ID NO: 66697 - DNA, 25 bp, SARS Virus
tctttgcgagttgcggtgactcctt

SEQ ID NO: 66698 - DNA, 25 bp, SARS Virus
ctttgcgagtttgggtgactccttt

SEQ ID NO: 66699 - DNA, 25 bp, SARS Virus
tttgcgagtttcggtgactcctttg

SEQ ID NO: 66700 - DNA, 25 bp, SARS Virus
ttgcgagtttcggtgactcctttgt

SEQ ID NO: 66701 - DNA, 25 bp, SARS Virus
tgcgagtttcggggactcctttgta

SEQ ID NO: 66702 - DNA, 25 bp, SARS Virus
gcgagtttcggtgactcctttgtaa

SEQ ID NO: 66703 - DNA, 25 bp, SARS Virus
cgagtttcggtggctcctttgtaaa

SEQ ID NO: 66704 - DNA, 25 bp, SARS Virus
gagtttcggtgagtcctttgtaaat

SEQ ID NO: 66705 - DNA, 25 bp, SARS Virus
agtttcggtgacgcctttgtaaatt

SEQ ID NO: 66706 - DNA, 25 bp, SARS Virus
gtttcggtgactgctttgtaaattc

SEQ ID NO: 66707 - DNA, 25 bp, SARS Virus
tttcggtgactcgtttgtaaattcg

SEQ ID NO: 66708 - DNA, 25 bp, SARS Virus
ttcggtgactccgttgtaaattcga

SEQ ID NO: 66709 - DNA, 25 bp, SARS Virus
tcggtgactcctgtgtaaattcgac

SEQ ID NO: 66710 - DNA, 25 bp, SARS Virus
cggtgactccttggtaaattcgaca

SEQ ID NO: 66711 - DNA, 25 bp, SARS Virus
ggtgactcctttgtaaattcgacag

SEQ ID NO: 66712 - DNA, 25 bp, SARS Virus
gtgactcctttggaaattcgacagt

SEQ ID NO: 66713 - DNA, 25 bp, SARS Virus
tgactcctttgtgaattcgacagta

SEQ ID NO: 66714 - DNA, 25 bp, SARS Virus
gactcctttgtagattcgacagtat

SEQ ID NO: 66715 - DNA, 25 bp, SARS Virus
actcctttgtaagttcgacagtata

SEQ ID NO: 66716 - DNA, 25 bp, SARS Virus
ctcctttgtaaagtcgacagtatac

SEQ ID NO: 66717 - DNA, 25 bp, SARS Virus
tcctttgtaaatgcgacagtatacc

SEQ ID NO: 66718 - DNA, 25 bp, SARS Virus
cctttgtaaattggacagtatacca

SEQ ID NO: 66719 - DNA, 25 bp, SARS Virus
ctttgtaaattcgacagtataccat

SEQ ID NO: 66720 - DNA, 25 bp, SARS Virus
tttgtaaattcggcagtataccata

SEQ ID NO: 66721 - DNA, 25 bp, SARS Virus
ttgtaaattcgagagtataccataa

SEQ ID NO: 66722 - DNA, 25 bp, SARS Virus
tgtaaattcgacggtataccataac

SEQ ID NO: 66723 - DNA, 25 bp, SARS Virus
gtaaattcgacagtataccataacg

SEQ ID NO: 66724 - DNA, 25 bp, SARS Virus
taaattcgacaggataccataacgg

SEQ ID NO: 66725 - DNA, 25 bp, SARS Virus
aaattcgacagtgtaccataacggt

SEQ ID NO: 66726 - DNA, 25 bp, SARS Virus
aattcgacagtagaccataacggtg

SEQ ID NO: 66727 - DNA, 25 bp, SARS Virus
attcgacagtatgccataacggtga

SEQ ID NO: 66728 - DNA, 25 bp, SARS Virus
ttcgacagtatagcataacggtgac

SEQ ID NO: 66729 - DNA, 25 bp, SARS Virus
tcgacagtatacgataacggtgaca

SEQ ID NO: 66730 - DNA, 25 bp, SARS Virus
cgacagtataccgtaacggtgacat

SEQ ID NO: 66731 - DNA, 25 bp, SARS Virus
gacagtataccagaacggtgacatg

SEQ ID NO: 66732 - DNA, 25 bp, SARS Virus
acagtataccatgacggtgacatgc

SEQ ID NO: 66733 - DNA, 25 bp, SARS Virus
cagtataccatagcggtgacatgcg

SEQ ID NO: 66734 - DNA, 25 bp, SARS Virus
agtataccataagggtgacatgcgc

SEQ ID NO: 66735 - DNA, 25 bp, SARS Virus
gtataccataacggtgacatgcgct

SEQ ID NO: 66736 - DNA, 25 bp, SARS Virus
tataccataacggtgacatgcgctt

SEQ ID NO: 66737 - DNA, 25 bp, SARS Virus
ataccataacggggacatgcgcttc

SEQ ID NO: 66738 - DNA, 25 bp, SARS Virus
taccataacggtgacatgcgcttca

SEQ ID NO: 66739 - DNA, 25 bp, SARS Virus
accataacggtggcatgcgcttcat

SEQ ID NO: 66740 - DNA, 25 bp, SARS Virus
ccataacggtgagatgcgcttcatg

SEQ ID NO: 66741 - DNA, 25 bp, SARS Virus
cataacggtgacgtgcgcttcatga

SEQ ID NO: 66742 - DNA, 25 bp, SARS Virus
ataacggtgacaggcgcttcatgag

SEQ ID NO: 66743 - DNA, 25 bp, SARS Virus
taacggtgacatgcgcttcatgaga

SEQ ID NO: 66744 - DNA, 25 bp, SARS Virus
aacggtgacatgggcttcatgagag

SEQ ID NO: 66745 - DNA, 25 bp, SARS Virus
acggtgacatgcgcttcatgagaga

SEQ ID NO: 66746 - DNA, 25 bp, SARS Virus
cggtgacatgcggttcatgagagac

SEQ ID NO: 66747 - DNA, 25 bp, SARS Virus
ggtgacatgcgcgtcatgagagact

SEQ ID NO: 66748 - DNA, 25 bp, SARS Virus
gtgacatgcgctgcatgagagactg

SEQ ID NO: 66749 - DNA, 25 bp, SARS Virus
tgacatgcgcttgatgagagactgt

SEQ ID NO: 66750 - DNA, 25 bp, SARS Virus
gacatgcgcttcgtgagagactgtc

SEQ ID NO: 66751 - DNA, 25 bp, SARS Virus
acatgcgcttcaggagagactgtct

SEQ ID NO: 66752 - DNA, 25 bp, SARS Virus
catgcgcttcatgagagactgtctc

SEQ ID NO: 66753 - DNA, 25 bp, SARS Virus
atgcgcttcatgggagactgtctct

SEQ ID NO: 66754 - DNA, 25 bp, SARS Virus
tgcgcttcatgagagactgtctctt

SEQ ID NO: 66755 - DNA, 25 bp, SARS Virus
gcgcttcatgagggactgtctctta

SEQ ID NO: 66756 - DNA, 25 bp, SARS Virus
cgcttcatgagagactgtctcttaa

SEQ ID NO: 66757 - DNA, 25 bp, SARS Virus
gcttcatgagaggctgtctcttaac

SEQ ID NO: 66758 - DNA, 25 bp, SARS Virus
cttcatgagagagtgtctcttaacg

SEQ ID NO: 66759 - DNA, 25 bp, SARS Virus
ttcatgagagacggtctcttaacgt

SEQ ID NO: 66760 - DNA, 25 bp, SARS Virus
tcatgagagactgtctcttaacgta

SEQ ID NO: 66761 - DNA, 25 bp, SARS Virus
catgagagactggctcttaacgtag

SEQ ID NO: 66762 - DNA, 25 bp, SARS Virus
atgagagactgtgtcttaacgtaga

SEQ ID NO: 66763 - DNA, 25 bp, SARS Virus
tgagagactgtcgcttaacgtagaa

SEQ ID NO: 66764 - DNA, 25 bp, SARS Virus
gagagactgtctgttaacgtagaaa

SEQ ID NO: 66765 - DNA, 25 bp, SARS Virus
agagactgtctcgtaacgtagaaag

SEQ ID NO: 66766 - DNA, 25 bp, SARS Virus
gagactgtctctgaacgtagaaagt

SEQ ID NO: 66767 - DNA, 25 bp, SARS Virus
agactgtctcttgacgtagaaagta

SEQ ID NO: 66768 - DNA, 25 bp, SARS Virus
gactgtctcttagcgtagaaagtac

SEQ ID NO: 66769 - DNA, 25 bp, SARS Virus
actgtctcttaaggtagaaagtacc

SEQ ID NO: 66770 - DNA, 25 bp, SARS Virus
ctgtctcttaacgtagaaagtaccc

SEQ ID NO: 66771 - DNA, 25 bp, SARS Virus
tgtctcttaacggagaaagtaccct

SEQ ID NO: 66772 - DNA, 25 bp, SARS Virus
gtctcttaacgtggaaagtaccctc

SEQ ID NO: 66773 - DNA, 25 bp, SARS Virus
tctcttaacgtagaaagtaccctcc

SEQ ID NO: 66774 - DNA, 25 bp, SARS Virus
ctcttaacgtaggaagtaccctcca

SEQ ID NO: 66775 - DNA, 25 bp, SARS Virus
tcttaacgtagagagtaccctccaa

SEQ ID NO: 66776 - DNA, 25 bp, SARS Virus
cttaacgtagaaggtaccctccaac

SEQ ID NO: 66777 - DNA, 25 bp, SARS Virus
ttaacgtagaaagtaccctccaacc

SEQ ID NO: 66778 - DNA, 25 bp, SARS Virus
taacgtagaaaggaccctccaacct

SEQ ID NO: 66779 - DNA, 25 bp, SARS Virus
aacgtagaaagtgccctccaacctt

SEQ ID NO: 66780 - DNA, 25 bp, SARS Virus
acgtagaaagtagcctccaaccttt

SEQ ID NO: 66781 - DNA, 25 bp, SARS Virus
cgtagaaagtacgctccaacctttt

SEQ ID NO: 66782 - DNA, 25 bp, SARS Virus
gtagaaagtaccgtccaaccttttg

SEQ ID NO: 66783 - DNA, 25 bp, SARS Virus
tagaaagtacccgccaaccttttgg

SEQ ID NO: 66784 - DNA, 25 bp, SARS Virus
agaaagtaccctgcaaccttttgga

SEQ ID NO: 66785 - DNA, 25 bp, SARS Virus
gaaagtaccctcgaaccttttggat

SEQ ID NO: 66786 - DNA, 25 bp, SARS Virus
aaagtaccctccgaccttttggatc

SEQ ID NO: 66787 - DNA, 25 bp, SARS Virus
aagtaccctccagccttttggatct

SEQ ID NO: 66788 - DNA, 25 bp, SARS Virus
agtaccctccaagcttttggatctg

SEQ ID NO: 66789 - DNA, 25 bp, SARS Virus
gtaccctccaacgttttggatctgg

SEQ ID NO: 66790 - DNA, 25 bp, SARS Virus
taccctccaaccgtttggatctggt

SEQ ID NO: 66791 - DNA, 25 bp, SARS Virus
accctccaacctgttggatctggtg

SEQ ID NO: 66792 - DNA, 25 bp, SARS Virus
ccctccaaccttgtggatctggtgg

SEQ ID NO: 66793 - DNA, 25 bp, SARS Virus
cctccaacctttgggatctggtggt

SEQ ID NO: 66794 - DNA, 25 bp, SARS Virus
ctccaaccttttggatctggtggta

SEQ ID NO: 66795 - DNA, 25 bp, SARS Virus
tccaaccttttggatctggtggtaa

SEQ ID NO: 66796 - DNA, 25 bp, SARS Virus
ccaaccttttgggtctggtggtaac

SEQ ID NO: 66797 - DNA, 25 bp, SARS Virus
caaccttttggagctggtggtaact

SEQ ID NO: 66798 - DNA, 25 bp, SARS Virus
aaccttttggatgtggtggtaactt

SEQ ID NO: 66799 - DNA, 25 bp, SARS Virus
accttttggatcgggtggtaacttg

SEQ ID NO: 66800 - DNA, 25 bp, SARS Virus
ccttttggatctggtggtaacttgt

SEQ ID NO: 66801 - DNA, 25 bp, SARS Virus
cttttggatctggtggtaacttgtc

SEQ ID NO: 66802 - DNA, 25 bp, SARS Virus
ttttggatctgggggtaacttgtct

SEQ ID NO: 66803 - DNA, 25 bp, SARS Virus
tttggatctggtggtaacttgtctt

SEQ ID NO: 66804 - DNA, 25 bp, SARS Virus
ttggatctggtggtaacttgtcttt

SEQ ID NO: 66805 - DNA, 25 bp, SARS Virus
tggatctggtgggaacttgtctttg

SEQ ID NO: 66806 - DNA, 25 bp, SARS Virus
ggatctggtggtgacttgtctttga

SEQ ID NO: 66807 - DNA, 25 bp, SARS Virus
gatctggtggtagcttgtctttgat

SEQ ID NO: 66808 - DNA, 25 bp, SARS Virus
atctggtggtaagttgtctttgata

SEQ ID NO: 66809 - DNA, 25 bp, SARS Virus
tctggtggtaacgtgtctttgatac

SEQ ID NO: 66810 - DNA, 25 bp, SARS Virus
ctggtggtaactggtctttgataca

SEQ ID NO: 66811 - DNA, 25 bp, SARS Virus
tggtggtaacttgtctttgatacag

SEQ ID NO: 66812 - DNA, 25 bp, SARS Virus
ggtggtaacttggctttgatacaga

SEQ ID NO: 66813 - DNA, 25 bp, SARS Virus
gtggtaacttgtgtttgatacagaa

SEQ ID NO: 66814 - DNA, 25 bp, SARS Virus
tggtaacttgtcgttgatacagaaa

SEQ ID NO: 66815 - DNA, 25 bp, SARS Virus
ggtaacttgtctgtgatacagaaat

SEQ ID NO: 66816 - DNA, 25 bp, SARS Virus
gtaacttgtcttggatacagaaatg

SEQ ID NO: 66817 - DNA, 25 bp, SARS Virus
taacttgtctttgatacagaaatga

SEQ ID NO: 66818 - DNA, 25 bp, SARS Virus
aacttgtctttggtacagaaatgac

SEQ ID NO: 66819 - DNA, 25 bp, SARS Virus
acttgtctttgagacagaaatgacc

SEQ ID NO: 66820 - DNA, 25 bp, SARS Virus
cttgtctttgatgcagaaatgacca

SEQ ID NO: 66821 - DNA, 25 bp, SARS Virus
ttgtctttgatagagaaatgaccaa

SEQ ID NO: 66822 - DNA, 25 bp, SARS Virus
tgtctttgatacggaaatgaccaat

SEQ ID NO: 66823 - DNA, 25 bp, SARS Virus
gtctttgatacagaaatgaccaatg

SEQ ID NO: 66824 - DNA, 25 bp, SARS Virus
tctttgatacaggaatgaccaatgg

SEQ ID NO: 66825 - DNA, 25 bp, SARS Virus
ctttgatacagagatgaccaatggc

SEQ ID NO: 66826 - DNA, 25 bp, SARS Virus
tttgatacagaagtgaccaatggca

SEQ ID NO: 66827 - DNA, 25 bp, SARS Virus
ttgatacagaaaggaccaatggcac

SEQ ID NO: 66828 - DNA, 25 bp, SARS Virus
tgatacagaaatgaccaatggcaca

SEQ ID NO: 66829 - DNA, 25 bp, SARS Virus
gatacagaaatggccaatggcacat

SEQ ID NO: 66830 - DNA, 25 bp, SARS Virus
atacagaaatgagcaatggcacatt

SEQ ID NO: 66831 - DNA, 25 bp, SARS Virus
tacagaaatgacgaatggcacattg

SEQ ID NO: 66832 - DNA, 25 bp, SARS Virus
acagaaatgaccgatggcacattga

SEQ ID NO: 66833 - DNA, 25 bp, SARS Virus
cagaaatgaccagtggcacattgat

SEQ ID NO: 66834 - DNA, 25 bp, SARS Virus
agaaatgaccaagggcacattgatt

SEQ ID NO: 66835 - DNA, 25 bp, SARS Virus
gaaatgaccaatggcacattgattt

SEQ ID NO: 66836 - DNA, 25 bp, SARS Virus
aaatgaccaatggcacattgatttt

SEQ ID NO: 66837 - DNA, 25 bp, SARS Virus
aatgaccaatgggacattgattttt

SEQ ID NO: 66838 - DNA, 25 bp, SARS Virus
atgaccaatggcgcattgattttta

SEQ ID NO: 66839 - DNA, 25 bp, SARS Virus
tgaccaatggcagattgatttttat

SEQ ID NO: 66840 - DNA, 25 bp, SARS Virus
gaccaatggcacgttgatttttatc

SEQ ID NO: 66841 - DNA, 25 bp, SARS Virus
accaatggcacagtgatttttatca

SEQ ID NO: 66842 - DNA, 25 bp, SARS Virus
ccaatggcacatggatttttatcat

SEQ ID NO: 66843 - DNA, 25 bp, SARS Virus
caatggcacattgatttttatcatt

SEQ ID NO: 66844 - DNA, 25 bp, SARS Virus
aatggcacattggtttttatcattt

SEQ ID NO: 66845 - DNA, 25 bp, SARS Virus
atggcacattgagttttatcatttc

SEQ ID NO: 66846 - DNA, 25 bp, SARS Virus
tggcacattgatgtttatcatttca

SEQ ID NO: 66847 - DNA, 25 bp, SARS Virus
ggcacattgattgttatcatttcat

SEQ ID NO: 66848 - DNA, 25 bp, SARS Virus
gcacattgatttgtatcatttcatg

SEQ ID NO: 66849 - DNA, 25 bp, SARS Virus
cacattgattttgatcatttcatgt

SEQ ID NO: 66850 - DNA, 25 bp, SARS Virus
acattgatttttgtcatttcatgtc

SEQ ID NO: 66851 - DNA, 25 bp, SARS Virus
cattgatttttagcatttcatgtct

SEQ ID NO: 66852 - DNA, 25 bp, SARS Virus
attgatttttatgatttcatgtcta

SEQ ID NO: 66853 - DNA, 25 bp, SARS Virus
ttgatttttatcgtttcatgtctaa

SEQ ID NO: 66854 - DNA, 25 bp, SARS Virus
tgatttttatcagttcatgtctaac

SEQ ID NO: 66855 - DNA, 25 bp, SARS Virus
gatttttatcatgtcatgtctaacc

SEQ ID NO: 66856 - DNA, 25 bp, SARS Virus
atttttatcattgcatgtctaacct

SEQ ID NO: 66857 - DNA, 25 bp, SARS Virus
tttttatcatttgatgtctaacctc

SEQ ID NO: 66858 - DNA, 25 bp, SARS Virus
ttttatcatttcgtgtctaacctct

SEQ ID NO: 66859 - DNA, 25 bp, SARS Virus
tttatcatttcaggtctaacctctc

SEQ ID NO: 66860 - DNA, 25 bp, SARS Virus
ttatcatttcatgtctaacctctca

SEQ ID NO: 66861 - DNA, 25 bp, SARS Virus
tatcatttcatggctaacctctcat

SEQ ID NO: 66862 - DNA, 25 bp, SARS Virus
atcatttcatgtgtaacctctcatg

SEQ ID NO: 66863 - DNA, 25 bp, SARS Virus
tcatttcatgtcgaacctctcatgt

SEQ ID NO: 66864 - DNA, 25 bp, SARS Virus
catttcatgtctgacctctcatgtg

SEQ ID NO: 66865 - DNA, 25 bp, SARS Virus
atttcatgtctagcctctcatgtgg

SEQ ID NO: 66866 - DNA, 25 bp, SARS Virus
tttcatgtctaagctctcatgtgga

SEQ ID NO: 66867 - DNA, 25 bp, SARS Virus
ttcatgtctaacgtctcatgtggaa

SEQ ID NO: 66868 - DNA, 25 bp, SARS Virus
tcatgtctaaccgctcatgtggaaa

SEQ ID NO: 66869 - DNA, 25 bp, SARS Virus
catgtctaacctgtcatgtggaaac

SEQ ID NO: 66870 - DNA, 25 bp, SARS Virus
atgtctaacctcgcatgtggaaact

SEQ ID NO: 66871 - DNA, 25 bp, SARS Virus
tgtctaacctctgatgtggaaactt

SEQ ID NO: 66872 - DNA, 25 bp, SARS Virus
gtctaacctctcgtgtggaaacttt

SEQ ID NO: 66873 - DNA, 25 bp, SARS Virus
tctaacctctcaggtggaaactttt

SEQ ID NO: 66874 - DNA, 25 bp, SARS Virus
ctaacctctcatgtggaaacttttt

SEQ ID NO: 66875 - DNA, 25 bp, SARS Virus
taacctctcatggggaaactttttc

SEQ ID NO: 66876 - DNA, 25 bp, SARS Virus
aacctctcatgtggaaactttttcc

SEQ ID NO: 66877 - DNA, 25 bp, SARS Virus
acctctcatgtggaaactttttcca

SEQ ID NO: 66878 - DNA, 25 bp, SARS Virus
cctctcatgtgggaactttttccac

SEQ ID NO: 66879 - DNA, 25 bp, SARS Virus
ctctcatgtggagactttttccact

SEQ ID NO: 66880 - DNA, 25 bp, SARS Virus
tctcatgtggaagctttttccactg

SEQ ID NO: 66881 - DNA, 25 bp, SARS Virus
ctcatgtggaaagtttttccactga

SEQ ID NO: 66882 - DNA, 25 bp, SARS Virus
tcatgtggaaacgttttccactgat

SEQ ID NO: 66883 - DNA, 25 bp, SARS Virus
catgtggaaactgtttccactgata

SEQ ID NO: 66884 - DNA, 25 bp, SARS Virus
atgtggaaacttgttccactgatac

SEQ ID NO: 66885 - DNA, 25 bp, SARS Virus
tgtggaaactttgtccactgatacc

SEQ ID NO: 66886 - DNA, 25 bp, SARS Virus
gtggaaacttttgccactgatacca

SEQ ID NO: 66887 - DNA, 25 bp, SARS Virus
tggaaactttttgcactgataccac

SEQ ID NO: 66888 - DNA, 25 bp, SARS Virus
ggaaactttttcgactgataccact

SEQ ID NO: 66889 - DNA, 25 bp, SARS Virus
gaaactttttccgctgataccacta

SEQ ID NO: 66890 - DNA, 25 bp, SARS Virus
aaactttttccagtgataccactac

SEQ ID NO: 66891 - DNA, 25 bp, SARS Virus
aactttttccacggataccactacg

SEQ ID NO: 66892 - DNA, 25 bp, SARS Virus
actttttccactgataccactacga

SEQ ID NO: 66893 - DNA, 25 bp, SARS Virus
ctttttccactggtaccactacgac

SEQ ID NO: 66894 - DNA, 25 bp, SARS Virus
tttttccactgagaccactacgaca

SEQ ID NO: 66895 - DNA, 25 bp, SARS Virus
ttttccactgatgccactacgacaa

SEQ ID NO: 66896 - DNA, 25 bp, SARS Virus
tttccactgatagcactacgacaac

SEQ ID NO: 66897 - DNA, 25 bp, SARS Virus
ttccactgatacgactacgacaaca

SEQ ID NO: 66898 - DNA, 25 bp, SARS Virus
tccactgataccgctacgacaacac

SEQ ID NO: 66899 - DNA, 25 bp, SARS Virus
ccactgataccagtacgacaacaca

SEQ ID NO: 66900 - DNA, 25 bp, SARS Virus
cactgataccacgacgacaacacat

SEQ ID NO: 66901 - DNA, 25 bp, SARS Virus
actgataccactgcgacaacacatg

SEQ ID NO: 66902 - DNA, 25 bp, SARS Virus
ctgataccactaggacaacacatgt

SEQ ID NO: 66903 - DNA, 25 bp, SARS Virus
tgataccactacgacaacacatgtc

SEQ ID NO: 66904 - DNA, 25 bp, SARS Virus
gataccactacggcaacacatgtct

SEQ ID NO: 66905 - DNA, 25 bp, SARS Virus
ataccactacgagaacacatgtctc

SEQ ID NO: 66906 - DNA, 25 bp, SARS Virus
taccactacgacgacacatgtctcc

SEQ ID NO: 66907 - DNA, 25 bp, SARS Virus
accactacgacagcacatgtctcca

SEQ ID NO: 66908 - DNA, 25 bp, SARS Virus
ccactacgacaagacatgtctccat

SEQ ID NO: 66909 - DNA, 25 bp, SARS Virus
cactacgacaacgcatgtctccatg

SEQ ID NO: 66910 - DNA, 25 bp, SARS Virus
actacgacaacagatgtctccatga

SEQ ID NO: 66911 - DNA, 25 bp, SARS Virus
ctacgacaacacgtgtctccatgat

SEQ ID NO: 66912 - DNA, 25 bp, SARS Virus
tacgacaacacaggtctccatgatg

SEQ ID NO: 66913 - DNA, 25 bp, SARS Virus
acgacaacacatgtctccatgatgc

SEQ ID NO: 66914 - DNA, 25 bp, SARS Virus
cgacaacacatggctccatgatgct

SEQ ID NO: 66915 - DNA, 25 bp, SARS Virus
gacaacacatgtgtccatgatgctg

SEQ ID NO: 66916 - DNA, 25 bp, SARS Virus
acaacacatgtcgccatgatgctgt

SEQ ID NO: 66917 - DNA, 25 bp, SARS Virus
caacacatgtctgcatgatgctgta

SEQ ID NO: 66918 - DNA, 25 bp, SARS Virus
aacacatgtctcgatgatgctgtat

SEQ ID NO: 66919 - DNA, 25 bp, SARS Virus
acacatgtctccgtgatgctgtatg

SEQ ID NO: 66920 - DNA, 25 bp, SARS Virus
cacatgtctccaggatgctgtatgt

SEQ ID NO: 66921 - DNA, 25 bp, SARS Virus
acatgtctccatgatgctgtatgtt

SEQ ID NO: 66922 - DNA, 25 bp, SARS Virus
catgtctccatggtgctgtatgttc

SEQ ID NO: 66923 - DNA, 25 bp, SARS Virus
atgtctccatgaggctgtatgttca

SEQ ID NO: 66924 - DNA, 25 bp, SARS Virus
tgtctccatgatgctgtatgttcaa

SEQ ID NO: 66925 - DNA, 25 bp, SARS Virus
gtctccatgatggtgtatgttcaac

SEQ ID NO: 66926 - DNA, 25 bp, SARS Virus
tctccatgatgcggtatgttcaact

SEQ ID NO: 66927 - DNA, 25 bp, SARS Virus
ctccatgatgctgtatgttcaactt

SEQ ID NO: 66928 - DNA, 25 bp, SARS Virus
tccatgatgctggatgttcaactta

SEQ ID NO: 66929 - DNA, 25 bp, SARS Virus
ccatgatgctgtgtgttcaacttac

SEQ ID NO: 66930 - DNA, 25 bp, SARS Virus
catgatgctgtaggttcaacttaca

SEQ ID NO: 66931 - DNA, 25 bp, SARS Virus
atgatgctgtatgttcaacttacaa

SEQ ID NO: 66932 - DNA, 25 bp, SARS Virus
tgatgctgtatggtcaacttacaac

SEQ ID NO: 66933 - DNA, 25 bp, SARS Virus
gatgctgtatgtgcaacttacaacc

SEQ ID NO: 66934 - DNA, 25 bp, SARS Virus
atgctgtatgttgaacttacaacca

SEQ ID NO: 66935 - DNA, 25 bp, SARS Virus
tgctgtatgttcgacttacaaccac

SEQ ID NO: 66936 - DNA, 25 bp, SARS Virus
gctgtatgttcagcttacaaccact

SEQ ID NO: 66937 - DNA, 25 bp, SARS Virus
ctgtatgttcaagttacaaccacta

SEQ ID NO: 66938 - DNA, 25 bp, SARS Virus
tgtatgttcaacgtacaaccactaa

SEQ ID NO: 66939 - DNA, 25 bp, SARS Virus
gtatgttcaactgacaaccactaat

SEQ ID NO: 66940 - DNA, 25 bp, SARS Virus
tatgttcaacttgcaaccactaatg

SEQ ID NO: 66941 - DNA, 25 bp, SARS Virus
atgttcaacttagaaccactaatga

SEQ ID NO: 66942 - DNA, 25 bp, SARS Virus
tgttcaacttacgaccactaatgaa

SEQ ID NO: 66943 - DNA, 25 bp, SARS Virus
gttcaacttacagccactaatgaaa

SEQ ID NO: 66944 - DNA, 25 bp, SARS Virus
ttcaacttacaagcactaatgaaac

SEQ ID NO: 66945 - DNA, 25 bp, SARS Virus
tcaacttacaacgactaatgaaaca

SEQ ID NO: 66946 - DNA, 25 bp, SARS Virus
caacttacaaccgctaatgaaacac

SEQ ID NO: 66947 - DNA, 25 bp, SARS Virus
aacttacaaccagtaatgaaacaca

SEQ ID NO: 66948 - DNA, 25 bp, SARS Virus
acttacaaccacgaatgaaacacaa

SEQ ID NO: 66949 - DNA, 25 bp, SARS Virus
cttacaaccactgatgaaacacaac

SEQ ID NO: 66950 - DNA, 25 bp, SARS Virus
ttacaaccactagtgaaacacaact

SEQ ID NO: 66951 - DNA, 25 bp, SARS Virus
tacaaccactaaggaaacacaactg

SEQ ID NO: 66952 - DNA, 25 bp, SARS Virus
acaaccactaatgaaacacaactgt

SEQ ID NO: 66953 - DNA, 25 bp, SARS Virus
caaccactaatggaacacaactgta

SEQ ID NO: 66954 - DNA, 25 bp, SARS Virus
aaccactaatgagacacaactgtag

SEQ ID NO: 66955 - DNA, 25 bp, SARS Virus
accactaatgaagcacaactgtaga

SEQ ID NO: 66956 - DNA, 25 bp, SARS Virus
ccactaatgaaagacaactgtagag

SEQ ID NO: 66957 - DNA, 25 bp, SARS Virus
cactaatgaaacgcaactgtagagt

SEQ ID NO: 66958 - DNA, 25 bp, SARS Virus
actaatgaaacagaactgtagagtg

SEQ ID NO: 66959 - DNA, 25 bp, SARS Virus
ctaatgaaacacgactgtagagtgt

SEQ ID NO: 66960 - DNA, 25 bp, SARS Virus
taatgaaacacagctgtagagtgtg

SEQ ID NO: 66961 - DNA, 25 bp, SARS Virus
aatgaaacacaagtgtagagtgtga

SEQ ID NO: 66962 - DNA, 25 bp, SARS Virus
atgaaacacaacggtagagtgtgac

SEQ ID NO: 66963 - DNA, 25 bp, SARS Virus
tgaaacacaactgtagagtgtgaca

SEQ ID NO: 66964 - DNA, 25 bp, SARS Virus
gaaacacaactggagagtgtgacat

SEQ ID NO: 66965 - DNA, 25 bp, SARS Virus
aaacacaactgtggagtgtgacatt

SEQ ID NO: 66966 - DNA, 25 bp, SARS Virus
aacacaactgtagagtgtgacatta

SEQ ID NO: 66967 - DNA, 25 bp, SARS Virus
acacaactgtagggtgtgacattac

SEQ ID NO: 66968 - DNA, 25 bp, SARS Virus
cacaactgtagagtgtgacattacg

SEQ ID NO: 66969 - DNA, 25 bp, SARS Virus
acaactgtagagggtgacattacgg

SEQ ID NO: 66970 - DNA, 25 bp, SARS Virus
caactgtagagtgtgacattacggt

SEQ ID NO: 66971 - DNA, 25 bp, SARS Virus
aactgtagagtgggacattacggtg

SEQ ID NO: 66972 - DNA, 25 bp, SARS Virus
actgtagagtgtgacattacggtga

SEQ ID NO: 66973 - DNA, 25 bp, SARS Virus
ctgtagagtgtggcattacggtgaa

SEQ ID NO: 66974 - DNA, 25 bp, SARS Virus
tgtagagtgtgagattacggtgaat

SEQ ID NO: 66975 - DNA, 25 bp, SARS Virus
gtagagtgtgacgttacggtgaatc

SEQ ID NO: 66976 - DNA, 25 bp, SARS Virus
tagagtgtgacagtacggtgaatca

SEQ ID NO: 66977 - DNA, 25 bp, SARS Virus
agagtgtgacatgacggtgaatcac

SEQ ID NO: 66978 - DNA, 25 bp, SARS Virus
gagtgtgacattgcggtgaatcacg

SEQ ID NO: 66979 - DNA, 25 bp, SARS Virus
agtgtgacattagggtgaatcacgt

SEQ ID NO: 66980 - DNA, 25 bp, SARS Virus
gtgtgacattacggtgaatcacgtg

SEQ ID NO: 66981 - DNA, 25 bp, SARS Virus
tgtgacattacggtgaatcacgtgg

SEQ ID NO: 66982 - DNA, 25 bp, SARS Virus
gtgacattacggggaatcacgtgga

SEQ ID NO: 66983 - DNA, 25 bp, SARS Virus
tgacattacggtgaatcacgtggat

SEQ ID NO: 66984 - DNA, 25 bp, SARS Virus
gacattacggtggatcacgtggatg

SEQ ID NO: 66985 - DNA, 25 bp, SARS Virus
tcgataataacgttcagtgtattcg

SEQ ID NO: 66986 - DNA, 25 bp, SARS Virus
cgataataacgttcagtgtattcgg

SEQ ID NO: 66987 - DNA, 25 bp, SARS Virus
gataataacgtttagtgtattcgga

SEQ ID NO: 66988 - DNA, 25 bp, SARS Virus
ataataacgttctgtgtattcggag

SEQ ID NO: 66989 - DNA, 25 bp, SARS Virus
taataacgttcattgtattcggagg

SEQ ID NO: 66990 - DNA, 25 bp, SARS Virus
aataacgttcagtgtattcggaggg

SEQ ID NO: 66991 - DNA, 25 bp, SARS Virus
ataacgttcagtttattcggagggt

SEQ ID NO: 66992 - DNA, 25 bp, SARS Virus
taacgttcagtgtattcggagggta

SEQ ID NO: 66993 - DNA, 25 bp, SARS Virus
aacgttcagtgttttcggagggtaa

SEQ ID NO: 66994 - DNA, 25 bp, SARS Virus
acgttcagtgtattcggagggtaat

SEQ ID NO: 66995 - DNA, 25 bp, SARS Virus
cgttcagtgtattcggagggtaatc

SEQ ID NO: 66996 - DNA, 25 bp, SARS Virus
gttcagtgtatttggagggtaatca

SEQ ID NO: 66997 - DNA, 25 bp, SARS Virus
ttcagtgtattctgagggtaatcaa

SEQ ID NO: 66998 - DNA, 25 bp, SARS Virus
tcagtgtattcgtagggtaatcaaa

SEQ ID NO: 66999 - DNA, 25 bp, SARS Virus
cagtgtattcggtgggtaatcaaaa

SEQ ID NO: 67000 - DNA, 25 bp, SARS Virus
agtgtattcggatggtaatcaaaag

SEQ ID NO: 67001 - DNA, 25 bp, SARS Virus
gtgtattcggagtgtaatcaaaagg

SEQ ID NO: 67002 - DNA, 25 bp, SARS Virus
tgtattcggaggttaatcaaaaggt

SEQ ID NO: 67003 - DNA, 25 bp, SARS Virus
gtattcggagggtaatcaaaaggta

SEQ ID NO: 67004 - DNA, 25 bp, SARS Virus
tattcggagggttatcaaaaggtaa

SEQ ID NO: 67005 - DNA, 25 bp, SARS Virus
attcggagggtattcaaaaggtaat

SEQ ID NO: 67006 - DNA, 25 bp, SARS Virus
ttcggagggtaatcaaaaggtaata

SEQ ID NO: 67007 - DNA, 25 bp, SARS Virus
tcggagggtaattaaaaggtaatac

SEQ ID NO: 67008 - DNA, 25 bp, SARS Virus
cggagggtaatctaaaggtaataca

SEQ ID NO: 67009 - DNA, 25 bp, SARS Virus
ggagggtaatcataaggtaatacac

SEQ ID NO: 67010 - DNA, 25 bp, SARS Virus
gagggtaatcaataggtaatacacg

SEQ ID NO: 67011 - DNA, 25 bp, SARS Virus
agggtaatcaaatggtaatacacga

SEQ ID NO: 67012 - DNA, 25 bp, SARS Virus
gggtaatcaaaatgtaatacacgat

SEQ ID NO: 67013 - DNA, 25 bp, SARS Virus
ggtaatcaaaagttaatacacgatt

SEQ ID NO: 67014 - DNA, 25 bp, SARS Virus
gtaatcaaaaggtaatacacgatta

SEQ ID NO: 67015 - DNA, 25 bp, SARS Virus
taatcaaaaggttatacacgattac

SEQ ID NO: 67016 - DNA, 25 bp, SARS Virus
aatcaaaaggtattacacgattacc

SEQ ID NO: 67017 - DNA, 25 bp, SARS Virus
atcaaaaggtaatacacgattacca

SEQ ID NO: 67018 - DNA, 25 bp, SARS Virus
tcaaaaggtaattcacgattaccag

SEQ ID NO: 67019 - DNA, 25 bp, SARS Virus
caaaaggtaatatacgattaccagt

SEQ ID NO: 67020 - DNA, 25 bp, SARS Virus
aaaaggtaatactcgattaccagtc

SEQ ID NO: 67021 - DNA, 25 bp, SARS Virus
aaaggtaatacatgattaccagtcc

SEQ ID NO: 67022 - DNA, 25 bp, SARS Virus
aaggtaatacactattaccagtcca

SEQ ID NO: 67023 - DNA, 25 bp, SARS Virus
aggtaatacacgtttaccagtccaa

SEQ ID NO: 67024 - DNA, 25 bp, SARS Virus
ggtaatacacgattaccagtccaaa

SEQ ID NO: 67025 - DNA, 25 bp, SARS Virus
gtaatacacgattaccagtccaaaa

SEQ ID NO: 67026 - DNA, 25 bp, SARS Virus
taatacacgatttccagtccaaaaa

SEQ ID NO: 67027 - DNA, 25 bp, SARS Virus
aatacacgattatcagtccaaaaac

SEQ ID NO: 67028 - DNA, 25 bp, SARS Virus
atacacgattactagtccaaaaacc

SEQ ID NO: 67029 - DNA, 25 bp, SARS Virus
tacacgattacctgtccaaaaacca

SEQ ID NO: 67030 - DNA, 25 bp, SARS Virus
acacgattaccattccaaaaaccaa

SEQ ID NO: 67031 - DNA, 25 bp, SARS Virus
cacgattaccagtccaaaaaccaaa

SEQ ID NO: 67032 - DNA, 25 bp, SARS Virus
acgattaccagttcaaaaaccaaat

SEQ ID NO: 67033 - DNA, 25 bp, SARS Virus
cgattaccagtctaaaaaccaaata

SEQ ID NO: 67034 - DNA, 25 bp, SARS Virus
gattaccagtcctaaaaccaaatat

SEQ ID NO: 67035 - DNA, 25 bp, SARS Virus
attaccagtccataaaccaaatatg

SEQ ID NO: 67036 - DNA, 25 bp, SARS Virus
ttaccagtccaataaccaaatatgt

SEQ ID NO: 67037 - DNA, 25 bp, SARS Virus
taccagtccaaataccaaatatgtt

SEQ ID NO: 67038 - DNA, 25 bp, SARS Virus
accagtccaaaatccaaatatgttt

SEQ ID NO: 67039 - DNA, 25 bp, SARS Virus
ccagtccaaaaatcaaatatgtttt

SEQ ID NO: 67040 - DNA, 25 bp, SARS Virus
cagtccaaaaactaaatatgttttt

SEQ ID NO: 67041 - DNA, 25 bp, SARS Virus
agtccaaaaacctaatatgtttttg

SEQ ID NO: 67042 - DNA, 25 bp, SARS Virus
gtccaaaaaccatatatgtttttgt

SEQ ID NO: 67043 - DNA, 25 bp, SARS Virus
tccaaaaaccaattatgtttttgtg

SEQ ID NO: 67044 - DNA, 25 bp, SARS Virus
ccaaaaaccaaatatgtttttgtgt

SEQ ID NO: 67045 - DNA, 25 bp, SARS Virus
caaaaaccaaatttgtttttgtgta

SEQ ID NO: 67046 - DNA, 25 bp, SARS Virus
aaaaaccaaatatgtttttgtgtac

SEQ ID NO: 67047 - DNA, 25 bp, SARS Virus
aaaaccaaatatttttttgtgtaca

SEQ ID NO: 67048 - DNA, 25 bp, SARS Virus
aaaccaaatatgtttttgtgtacac

SEQ ID NO: 67049 - DNA, 25 bp, SARS Virus
aaccaaatatgtttttgtgtacaca

SEQ ID NO: 67050 - DNA, 25 bp, SARS Virus
accaaatatgtttttgtgtacacat

SEQ ID NO: 67051 - DNA, 25 bp, SARS Virus
ccaaatatgtttttgtgtacacatc

SEQ ID NO: 67052 - DNA, 25 bp, SARS Virus
caaatatgtttttgtgtacacatcc

SEQ ID NO: 67053 - DNA, 25 bp, SARS Virus
aaatatgtttttttgtacacatccg

SEQ ID NO: 67054 - DNA, 25 bp, SARS Virus
aatatgtttttgtgtacacatccgt

SEQ ID NO: 67055 - DNA, 25 bp, SARS Virus
atatgtttttgtttacacatccgtc

SEQ ID NO: 67056 - DNA, 25 bp, SARS Virus
tatgtttttgtgtacacatccgtca

SEQ ID NO: 67057 - DNA, 25 bp, SARS Virus
atgtttttgtgttcacatccgtcac

SEQ ID NO: 67058 - DNA, 25 bp, SARS Virus
tgtttttgtgtatacatccgtcact

SEQ ID NO: 67059 - DNA, 25 bp, SARS Virus
gtttttgtgtactcatccgtcactg

SEQ ID NO: 67060 - DNA, 25 bp, SARS Virus
tttttgtgtacatatccgtcactgt

SEQ ID NO: 67061 - DNA, 25 bp, SARS Virus
ttttgtgtacacttccgtcactgtt

SEQ ID NO: 67062 - DNA, 25 bp, SARS Virus
tttgtgtacacatccgtcactgtta

SEQ ID NO: 67063 - DNA, 25 bp, SARS Virus
ttgtgtacacattcgtcactgttac

SEQ ID NO: 67064 - DNA, 25 bp, SARS Virus
tgtgtacacatctgtcactgttaca

SEQ ID NO: 67065 - DNA, 25 bp, SARS Virus
gtgtacacatccttcactgttacag

SEQ ID NO: 67066 - DNA, 25 bp, SARS Virus
tgtacacatccgtcactgttacagt

SEQ ID NO: 67067 - DNA, 25 bp, SARS Virus
gtacacatccgttactgttacagtg

SEQ ID NO: 67068 - DNA, 25 bp, SARS Virus
tacacatccgtctctgttacagtga

SEQ ID NO: 67069 - DNA, 25 bp, SARS Virus
acacatccgtcattgttacagtgac

SEQ ID NO: 67070 - DNA, 25 bp, SARS Virus
cacatccgtcactgttacagtgact

SEQ ID NO: 67071 - DNA, 25 bp, SARS Virus
acatccgtcacttttacagtgactg

SEQ ID NO: 67072 - DNA, 25 bp, SARS Virus
catccgtcactgttacagtgactga

SEQ ID NO: 67073 - DNA, 25 bp, SARS Virus
atccgtcactgttacagtgactgaa

SEQ ID NO: 67074 - DNA, 25 bp, SARS Virus
tccgtcactgtttcagtgactgaag

SEQ ID NO: 67075 - DNA, 25 bp, SARS Virus
ccgtcactgttatagtgactgaagt

SEQ ID NO: 67076 - DNA, 25 bp, SARS Virus
cgtcactgttactgtgactgaagtt

SEQ ID NO: 67077 - DNA, 25 bp, SARS Virus
gtcactgttacattgactgaagtta

SEQ ID NO: 67078 - DNA, 25 bp, SARS Virus
tcactgttacagtgactgaagttac

SEQ ID NO: 67079 - DNA, 25 bp, SARS Virus
cactgttacagttactgaagttacg

SEQ ID NO: 67080 - DNA, 25 bp, SARS Virus
actgttacagtgtctgaagttacgc

SEQ ID NO: 67081 - DNA, 25 bp, SARS Virus
ctgttacagtgattgaagttacgct

SEQ ID NO: 67082 - DNA, 25 bp, SARS Virus
tgttacagtgactgaagttacgcta

SEQ ID NO: 67083 - DNA, 25 bp, SARS Virus
gttacagtgacttaagttacgctat

SEQ ID NO: 67084 - DNA, 25 bp, SARS Virus
ttacagtgactgtagttacgctatc

SEQ ID NO: 67085 - DNA, 25 bp, SARS Virus
tacagtgactgatgttacgctatcg

SEQ ID NO: 67086 - DNA, 25 bp, SARS Virus
acagtgactgaatttacgctatcgt

SEQ ID NO: 67087 - DNA, 25 bp, SARS Virus
cagtgactgaagttacgctatcgtt

SEQ ID NO: 67088 - DNA, 25 bp, SARS Virus
agtgactgaagttacgctatcgttg

SEQ ID NO: 67089 - DNA, 25 bp, SARS Virus
gtgactgaagtttcgctatcgttgt

SEQ ID NO: 67090 - DNA, 25 bp, SARS Virus
tgactgaagttatgctatcgttgta

SEQ ID NO: 67091 - DNA, 25 bp, SARS Virus
gactgaagttactctatcgttgtac

SEQ ID NO: 67092 - DNA, 25 bp, SARS Virus
actgaagttacgttatcgttgtaca

SEQ ID NO: 67093 - DNA, 25 bp, SARS Virus
ctgaagttacgctatcgttgtacac

SEQ ID NO: 67094 - DNA, 25 bp, SARS Virus
tgaagttacgctttcgttgtacact

SEQ ID NO: 67095 - DNA, 25 bp, SARS Virus
gaagttacgctatcgttgtacacta

SEQ ID NO: 67096 - DNA, 25 bp, SARS Virus
aagttacgctattgttgtacactaa

SEQ ID NO: 67097 - DNA, 25 bp, SARS Virus
agttacgctatctttgtacactaac

SEQ ID NO: 67098 - DNA, 25 bp, SARS Virus
gttacgctatcgttgtacactaacc

SEQ ID NO: 67099 - DNA, 25 bp, SARS Virus
ttacgctatcgttgtacactaacct

SEQ ID NO: 67100 - DNA, 25 bp, SARS Virus
tacgctatcgttttacactaacctg

SEQ ID NO: 67101 - DNA, 25 bp, SARS Virus
acgctatcgttgtacactaacctga

SEQ ID NO: 67102 - DNA, 25 bp, SARS Virus
cgctatcgttgttcactaacctgat

SEQ ID NO: 67103 - DNA, 25 bp, SARS Virus
gctatcgttgtatactaacctgatt

SEQ ID NO: 67104 - DNA, 25 bp, SARS Virus
ctatcgttgtactctaacctgatta

SEQ ID NO: 67105 - DNA, 25 bp, SARS Virus
tatcgttgtacattaacctgattac

SEQ ID NO: 67106 - DNA, 25 bp, SARS Virus
atcgttgtacactaacctgattacg

SEQ ID NO: 67107 - DNA, 25 bp, SARS Virus
tcgttgtacacttacctgattacga

SEQ ID NO: 67108 - DNA, 25 bp, SARS Virus
cgttgtacactatcctgattacgac

SEQ ID NO: 67109 - DNA, 25 bp, SARS Virus
gttgtacactaatctgattacgacc

SEQ ID NO: 67110 - DNA, 25 bp, SARS Virus
ttgtacactaacttgattacgaccg

SEQ ID NO: 67111 - DNA, 25 bp, SARS Virus
tgtacactaacctgattacgaccgc

SEQ ID NO: 67112 - DNA, 25 bp, SARS Virus
gtacactaaccttattacgaccgct

SEQ ID NO: 67113 - DNA, 25 bp, SARS Virus
tacactaacctgtttacgaccgcta

SEQ ID NO: 67114 - DNA, 25 bp, SARS Virus
acactaacctgattacgaccgctaa

SEQ ID NO: 67115 - DNA, 25 bp, SARS Virus
cactaacctgattacgaccgctaat

SEQ ID NO: 67116 - DNA, 25 bp, SARS Virus
actaacctgatttcgaccgctaatg

SEQ ID NO: 67117 - DNA, 25 bp, SARS Virus
ctaacctgattatgaccgctaatgt

SEQ ID NO: 67118 - DNA, 25 bp, SARS Virus
taacctgattactaccgctaatgta

SEQ ID NO: 67119 - DNA, 25 bp, SARS Virus
aacctgattacgtccgctaatgtat

SEQ ID NO: 67120 - DNA, 25 bp, SARS Virus
acctgattacgatcgctaatgtatg

SEQ ID NO: 67121 - DNA, 25 bp, SARS Virus
cctgattacgactgctaatgtatga

SEQ ID NO: 67122 - DNA, 25 bp, SARS Virus
ctgattacgacctctaatgtatgaa

SEQ ID NO: 67123 - DNA, 25 bp, SARS Virus
tgattacgaccgttaatgtatgaac

SEQ ID NO: 67124 - DNA, 25 bp, SARS Virus
gattacgaccgctaatgtatgaacg

SEQ ID NO: 67125 - DNA, 25 bp, SARS Virus
attacgaccgcttatgtatgaacgg

SEQ ID NO: 67126 - DNA, 25 bp, SARS Virus
ttacgaccgctattgtatgaacggt

SEQ ID NO: 67127 - DNA, 25 bp, SARS Virus
tacgaccgctaatgtatgaacggtt

SEQ ID NO: 67128 - DNA, 25 bp, SARS Virus
acgaccgctaatttatgaacggttg

SEQ ID NO: 67129 - DNA, 25 bp, SARS Virus
cgaccgctaatgtatgaacggttgt

SEQ ID NO: 67130 - DNA, 25 bp, SARS Virus
gaccgctaatgtttgaacggttgtg

SEQ ID NO: 67131 - DNA, 25 bp, SARS Virus
accgctaatgtatgaacggttgtga

SEQ ID NO: 67132 - DNA, 25 bp, SARS Virus
ccgctaatgtattaacggttgtgaa

SEQ ID NO: 67133 - DNA, 25 bp, SARS Virus
cgctaatgtatgtacggttgtgaac

SEQ ID NO: 67134 - DNA, 25 bp, SARS Virus
gctaatgtatgatcggttgtgaaca

SEQ ID NO: 67135 - DNA, 25 bp, SARS Virus
ctaatgtatgaatggttgtgaacat

SEQ ID NO: 67136 - DNA, 25 bp, SARS Virus
taatgtatgaactgttgtgaacatg

SEQ ID NO: 67137 - DNA, 25 bp, SARS Virus
aatgtatgaacgtttgtgaacatga

SEQ ID NO: 67138 - DNA, 25 bp, SARS Virus
atgtatgaacggttgtgaacatgac

SEQ ID NO: 67139 - DNA, 25 bp, SARS Virus
tgtatgaacggttgtgaacatgact

SEQ ID NO: 67140 - DNA, 25 bp, SARS Virus
gtatgaacggttttgaacatgactc

SEQ ID NO: 67141 - DNA, 25 bp, SARS Virus
tatgaacggttgtgaacatgactct

SEQ ID NO: 67142 - DNA, 25 bp, SARS Virus
atgaacggttgttaacatgactctc

SEQ ID NO: 67143 - DNA, 25 bp, SARS Virus
tgaacggttgtgtacatgactctct

SEQ ID NO: 67144 - DNA, 25 bp, SARS Virus
gaacggttgtgatcatgactctctg

SEQ ID NO: 67145 - DNA, 25 bp, SARS Virus
aacggttgtgaatatgactctctga

SEQ ID NO: 67146 - DNA, 25 bp, SARS Virus
acggttgtgaacttgactctctgag

SEQ ID NO: 67147 - DNA, 25 bp, SARS Virus
cggttgtgaacatgactctctgagt

SEQ ID NO: 67148 - DNA, 25 bp, SARS Virus
ggttgtgaacattactctctgagtt

SEQ ID NO: 67149 - DNA, 25 bp, SARS Virus
gttgtgaacatgtctctctgagttc

SEQ ID NO: 67150 - DNA, 25 bp, SARS Virus
ttgtgaacatgattctctgagttcg

SEQ ID NO: 67151 - DNA, 25 bp, SARS Virus
tgtgaacatgactctctgagttcga

SEQ ID NO: 67152 - DNA, 25 bp, SARS Virus
gtgaacatgactttctgagttcgaa

SEQ ID NO: 67153 - DNA, 25 bp, SARS Virus
tgaacatgactctctgagttcgaaa

SEQ ID NO: 67154 - DNA, 25 bp, SARS Virus
gaacatgactctttgagttcgaaaa

SEQ ID NO: 67155 - DNA, 25 bp, SARS Virus
aacatgactctctgagttcgaaaag

SEQ ID NO: 67156 - DNA, 25 bp, SARS Virus
acatgactctcttagttcgaaaagc

SEQ ID NO: 67157 - DNA, 25 bp, SARS Virus
catgactctctgtgttcgaaaagcg

SEQ ID NO: 67158 - DNA, 25 bp, SARS Virus
atgactctctgatttcgaaaagcgt

SEQ ID NO: 67159 - DNA, 25 bp, SARS Virus
tgactctctgagttcgaaaagcgtc

SEQ ID NO: 67160 - DNA, 25 bp, SARS Virus
gactctctgagttcgaaaagcgtcg

SEQ ID NO: 67161 - DNA, 25 bp, SARS Virus
actctctgagtttgaaaagcgtcgt

SEQ ID NO: 67162 - DNA, 25 bp, SARS Virus
ctctctgagttctaaaagcgtcgtc

SEQ ID NO: 67163 - DNA, 25 bp, SARS Virus
tctctgagttcgtaaagcgtcgtct

SEQ ID NO: 67164 - DNA, 25 bp, SARS Virus
ctctgagttcgataagcgtcgtctt

SEQ ID NO: 67165 - DNA, 25 bp, SARS Virus
tctgagttcgaatagcgtcgtcttt

SEQ ID NO: 67166 - DNA, 25 bp, SARS Virus
ctgagttcgaaatgcgtcgtctttg

SEQ ID NO: 67167 - DNA, 25 bp, SARS Virus
tgagttcgaaaatcgtcgtctttgc

SEQ ID NO: 67168 - DNA, 25 bp, SARS Virus
gagttcgaaaagtgtcgtctttgcg

SEQ ID NO: 67169 - DNA, 25 bp, SARS Virus
agttcgaaaagcttcgtctttgcga

SEQ ID NO: 67170 - DNA, 25 bp, SARS Virus
gttcgaaaagcgtcgtctttgcgag

SEQ ID NO: 67171 - DNA, 25 bp, SARS Virus
ttcgaaaagcgttgtctttgcgagt

SEQ ID NO: 67172 - DNA, 25 bp, SARS Virus
tcgaaaagcgtcttctttgcgagtt

SEQ ID NO: 67173 - DNA, 25 bp, SARS Virus
cgaaaagcgtcgtctttgcgagttt

SEQ ID NO: 67174 - DNA, 25 bp, SARS Virus
gaaaagcgtcgtttttgcgagtttc

SEQ ID NO: 67175 - DNA, 25 bp, SARS Virus
aaaagcgtcgtctttgcgagtttcg

SEQ ID NO: 67176 - DNA, 25 bp, SARS Virus
aaagcgtcgtctttgcgagtttcgg

SEQ ID NO: 67177 - DNA, 25 bp, SARS Virus
aagcgtcgtctttgcgagtttcggt

SEQ ID NO: 67178 - DNA, 25 bp, SARS Virus
agcgtcgtcttttcgagtttcggtg

SEQ ID NO: 67179 - DNA, 25 bp, SARS Virus
gcgtcgtctttgtgagtttcggtga

SEQ ID NO: 67180 - DNA, 25 bp, SARS Virus
cgtcgtctttgctagtttcggtgac

SEQ ID NO: 67181 - DNA, 25 bp, SARS Virus
gtcgtctttgcgtgtttcggtgact

SEQ ID NO: 67182 - DNA, 25 bp, SARS Virus
tcgtctttgcgattttcggtgactc

SEQ ID NO: 67183 - DNA, 25 bp, SARS Virus
cgtctttgcgagtttcggtgactcc

SEQ ID NO: 67184 - DNA, 25 bp, SARS Virus
gtctttgcgagtttcggtgactcct

SEQ ID NO: 67185 - DNA, 25 bp, SARS Virus
tctttgcgagtttcggtgactcctt

SEQ ID NO: 67186 - DNA, 25 bp, SARS Virus
ctttgcgagttttggtgactccttt

SEQ ID NO: 67187 - DNA, 25 bp, SARS Virus
tttgcgagtttctgtgactcctttg

SEQ ID NO: 67188 - DNA, 25 bp, SARS Virus
ttgcgagtttcgttgactcctttgt

SEQ ID NO: 67189 - DNA, 25 bp, SARS Virus
tgcgagtttcggtgactcctttgta

SEQ ID NO: 67190 - DNA, 25 bp, SARS Virus
gcgagtttcggttactcctttgtaa

SEQ ID NO: 67191 - DNA, 25 bp, SARS Virus
cgagtttcggtgtctcctttgtaaa

SEQ ID NO: 67192 - DNA, 25 bp, SARS Virus
gagtttcggtgattcctttgtaaat

SEQ ID NO: 67193 - DNA, 25 bp, SARS Virus
agtttcggtgactcctttgtaaatt

SEQ ID NO: 67194 - DNA, 25 bp, SARS Virus
gtttcggtgacttctttgtaaattc

SEQ ID NO: 67195 - DNA, 25 bp, SARS Virus
tttcggtgactcttttgtaaattcg

SEQ ID NO: 67196 - DNA, 25 bp, SARS Virus
ttcggtgactcctttgtaaattcga

SEQ ID NO: 67197 - DNA, 25 bp, SARS Virus
tcggtgactcctttgtaaattcgac

SEQ ID NO: 67198 - DNA, 25 bp, SARS Virus
cggtgactcctttgtaaattcgaca

SEQ ID NO: 67199 - DNA, 25 bp, SARS Virus
ggtgactcctttttaaattcgacag

SEQ ID NO: 67200 - DNA, 25 bp, SARS Virus
gtgactcctttgtaaattcgacagt

SEQ ID NO: 67201 - DNA, 25 bp, SARS Virus
tgactcctttgttaattcgacagta

SEQ ID NO: 67202 - DNA, 25 bp, SARS Virus
gactcctttgtatattcgacagtat

SEQ ID NO: 67203 - DNA, 25 bp, SARS Virus
actcctttgtaatttcgacagtata

SEQ ID NO: 67204 - DNA, 25 bp, SARS Virus
ctcctttgtaaattcgacagtatac

SEQ ID NO: 67205 - DNA, 25 bp, SARS Virus
tcctttgtaaattcgacagtatacc

SEQ ID NO: 67206 - DNA, 25 bp, SARS Virus
cctttgtaaatttgacagtatacca

SEQ ID NO: 67207 - DNA, 25 bp, SARS Virus
ctttgtaaattctacagtataccat

SEQ ID NO: 67208 - DNA, 25 bp, SARS Virus
tttgtaaattcgtcagtataccata

SEQ ID NO: 67209 - DNA, 25 bp, SARS Virus
ttgtaaattcgatagtataccataa

SEQ ID NO: 67210 - DNA, 25 bp, SARS Virus
tgtaaattcgactgtataccataac

SEQ ID NO: 67211 - DNA, 25 bp, SARS Virus
gtaaattcgacattataccataacg

SEQ ID NO: 67212 - DNA, 25 bp, SARS Virus
taaattcgacagtataccataacgg

SEQ ID NO: 67213 - DNA, 25 bp, SARS Virus
aaattcgacagtttaccataacggt

SEQ ID NO: 67214 - DNA, 25 bp, SARS Virus
aattcgacagtataccataacggtg

SEQ ID NO: 67215 - DNA, 25 bp, SARS Virus
attcgacagtattccataacggtga

SEQ ID NO: 67216 - DNA, 25 bp, SARS Virus
ttcgacagtatatcataacggtgac

SEQ ID NO: 67217 - DNA, 25 bp, SARS Virus
tcgacagtatactataacggtgaca

SEQ ID NO: 67218 - DNA, 25 bp, SARS Virus
cgacagtataccttaacggtgacat

SEQ ID NO: 67219 - DNA, 25 bp, SARS Virus
gacagtataccataacggtgacatg

SEQ ID NO: 67220 - DNA, 25 bp, SARS Virus
acagtataccattacggtgacatgc

SEQ ID NO: 67221 - DNA, 25 bp, SARS Virus
cagtataccatatcggtgacatgcg

SEQ ID NO: 67222 - DNA, 25 bp, SARS Virus
agtataccataatggtgacatgcgc

SEQ ID NO: 67223 - DNA, 25 bp, SARS Virus
gtataccataactgtgacatgcgct

SEQ ID NO: 67224 - DNA, 25 bp, SARS Virus
tataccataacgttgacatgcgctt

SEQ ID NO: 67225 - DNA, 25 bp, SARS Virus
ataccataacggtgacatgcgcttc

SEQ ID NO: 67226 - DNA, 25 bp, SARS Virus
taccataacggttacatgcgcttca

SEQ ID NO: 67227 - DNA, 25 bp, SARS Virus
accataacggtgtcatgcgcttcat

SEQ ID NO: 67228 - DNA, 25 bp, SARS Virus
ccataacggtgatatgcgcttcatg

SEQ ID NO: 67229 - DNA, 25 bp, SARS Virus
cataacggtgacttgcgcttcatga

SEQ ID NO: 67230 - DNA, 25 bp, SARS Virus
ataacggtgacatgcgcttcatgag

SEQ ID NO: 67231 - DNA, 25 bp, SARS Virus
taacggtgacattcgcttcatgaga

SEQ ID NO: 67232 - DNA, 25 bp, SARS Virus
aacggtgacatgtgcttcatgagag

SEQ ID NO: 67233 - DNA, 25 bp, SARS Virus
acggtgacatgctcttcatgagaga

SEQ ID NO: 67234 - DNA, 25 bp, SARS Virus
cggtgacatgcgtttcatgagagac

SEQ ID NO: 67235 - DNA, 25 bp, SARS Virus
ggtgacatgcgcttcatgagagact

SEQ ID NO: 67236 - DNA, 25 bp, SARS Virus
gtgacatgcgcttcatgagagactg

SEQ ID NO: 67237 - DNA, 25 bp, SARS Virus
tgacatgcgctttatgagagactgt

SEQ ID NO: 67238 - DNA, 25 bp, SARS Virus
gacatgcgcttcttgagagactgtc

SEQ ID NO: 67239 - DNA, 25 bp, SARS Virus
acatgcgcttcatgagagactgtct

SEQ ID NO: 67240 - DNA, 25 bp, SARS Virus
catgcgcttcattagagactgtctc

SEQ ID NO: 67241 - DNA, 25 bp, SARS Virus
atgcgcttcatgtgagactgtctct

SEQ ID NO: 67242 - DNA, 25 bp, SARS Virus
tgcgcttcatgatagactgtctctt

SEQ ID NO: 67243 - DNA, 25 bp, SARS Virus
gcgcttcatgagtgactgtctctta

SEQ ID NO: 67244 - DNA, 25 bp, SARS Virus
cgcttcatgagatactgtctcttaa

SEQ ID NO: 67245 - DNA, 25 bp, SARS Virus
gcttcatgagagtctgtctcttaac

SEQ ID NO: 67246 - DNA, 25 bp, SARS Virus
cttcatgagagattgtctcttaacg

SEQ ID NO: 67247 - DNA, 25 bp, SARS Virus
ttcatgagagactgtctcttaacgt

SEQ ID NO: 67248 - DNA, 25 bp, SARS Virus
tcatgagagactttctcttaacgta

SEQ ID NO: 67249 - DNA, 25 bp, SARS Virus
catgagagactgtctcttaacgtag

SEQ ID NO: 67250 - DNA, 25 bp, SARS Virus
atgagagactgtttcttaacgtaga

SEQ ID NO: 67251 - DNA, 25 bp, SARS Virus
tgagagactgtctcttaacgtagaa

SEQ ID NO: 67252 - DNA, 25 bp, SARS Virus
gagagactgtcttttaacgtagaaa

SEQ ID NO: 67253 - DNA, 25 bp, SARS Virus
agagactgtctcttaacgtagaaag

SEQ ID NO: 67254 - DNA, 25 bp, SARS Virus
gagactgtctcttaacgtagaaagt

SEQ ID NO: 67255 - DNA, 25 bp, SARS Virus
agactgtctctttacgtagaaagta

SEQ ID NO: 67256 - DNA, 25 bp, SARS Virus
gactgtctcttatcgtagaaagtac

SEQ ID NO: 67257 - DNA, 25 bp, SARS Virus
actgtctcttaatgtagaaagtacc

SEQ ID NO: 67258 - DNA, 25 bp, SARS Virus
ctgtctcttaacttagaaagtaccc

SEQ ID NO: 67259 - DNA, 25 bp, SARS Virus
tgtctcttaacgtagaaagtaccct

SEQ ID NO: 67260 - DNA, 25 bp, SARS Virus
gtctcttaacgttgaaagtaccctc

SEQ ID NO: 67261 - DNA, 25 bp, SARS Virus
tctcttaacgtataaagtaccctcc

SEQ ID NO: 67262 - DNA, 25 bp, SARS Virus
ctcttaacgtagtaagtaccctcca

SEQ ID NO: 67263 - DNA, 25 bp, SARS Virus
tcttaacgtagatagtaccctccaa

SEQ ID NO: 67264 - DNA, 25 bp, SARS Virus
cttaacgtagaatgtaccctccaac

SEQ ID NO: 67265 - DNA, 25 bp, SARS Virus
ttaacgtagaaattaccctccaacc

SEQ ID NO: 67266 - DNA, 25 bp, SARS Virus
taacgtagaaagtaccctccaacct

SEQ ID NO: 67267 - DNA, 25 bp, SARS Virus
aacgtagaaagttccctccaacctt

SEQ ID NO: 67268 - DNA, 25 bp, SARS Virus
acgtagaaagtatcctccaaccttt

SEQ ID NO: 67269 - DNA, 25 bp, SARS Virus
cgtagaaagtactctccaacctttt

SEQ ID NO: 67270 - DNA, 25 bp, SARS Virus
gtagaaagtaccttccaaccttttg

SEQ ID NO: 67271 - DNA, 25 bp, SARS Virus
tagaaagtaccctccaaccttttgg

SEQ ID NO: 67272 - DNA, 25 bp, SARS Virus
agaaagtacccttcaaccttttgga

SEQ ID NO: 67273 - DNA, 25 bp, SARS Virus
gaaagtaccctctaaccttttggat

SEQ ID NO: 67274 - DNA, 25 bp, SARS Virus
aaagtaccctcctaccttttggatc

SEQ ID NO: 67275 - DNA, 25 bp, SARS Virus
aagtaccctccatccttttggatct

SEQ ID NO: 67276 - DNA, 25 bp, SARS Virus
agtaccctccaatcttttggatctg

SEQ ID NO: 67277 - DNA, 25 bp, SARS Virus
gtaccctccaactttttggatctgg

SEQ ID NO: 67278 - DNA, 25 bp, SARS Virus
taccctccaaccttttggatctggt

SEQ ID NO: 67279 - DNA, 25 bp, SARS Virus
accctccaaccttttggatctggtg

SEQ ID NO: 67280 - DNA, 25 bp, SARS Virus
ccctccaaccttttggatctggtgg

SEQ ID NO: 67281 - DNA, 25 bp, SARS Virus
cctccaaccttttggatctggtggt

SEQ ID NO: 67282 - DNA, 25 bp, SARS Virus
ctccaacctttttgatctggtggta

SEQ ID NO: 67283 - DNA, 25 bp, SARS Virus
tccaaccttttgtatctggtggtaa

SEQ ID NO: 67284 - DNA, 25 bp, SARS Virus
ccaaccttttggttctggtggtaac

SEQ ID NO: 67285 - DNA, 25 bp, SARS Virus
caaccttttggatctggtggtaact

SEQ ID NO: 67286 - DNA, 25 bp, SARS Virus
aaccttttggatttggtggtaactt

SEQ ID NO: 67287 - DNA, 25 bp, SARS Virus
accttttggatctggtggtaacttg

SEQ ID NO: 67288 - DNA, 25 bp, SARS Virus
ccttttggatcttgtggtaacttgt

SEQ ID NO: 67289 - DNA, 25 bp, SARS Virus
cttttggatctgttggtaacttgtc

SEQ ID NO: 67290 - DNA, 25 bp, SARS Virus
ttttggatctggtggtaacttgtct

SEQ ID NO: 67291 - DNA, 25 bp, SARS Virus
tttggatctggttgtaacttgtctt

SEQ ID NO: 67292 - DNA, 25 bp, SARS Virus
ttggatctggtgttaacttgtcttt

SEQ ID NO: 67293 - DNA, 25 bp, SARS Virus
tggatctggtggtaacttgtctttg

SEQ ID NO: 67294 - DNA, 25 bp, SARS Virus
ggatctggtggttacttgtctttga

SEQ ID NO: 67295 - DNA, 25 bp, SARS Virus
gatctggtggtatcttgtctttgat

SEQ ID NO: 67296 - DNA, 25 bp, SARS Virus
atctggtggtaatttgtctttgata

SEQ ID NO: 67297 - DNA, 25 bp, SARS Virus
tctggtggtaacttgtctttgatac

SEQ ID NO: 67298 - DNA, 25 bp, SARS Virus
ctggtggtaacttgtctttgataca

SEQ ID NO: 67299 - DNA, 25 bp, SARS Virus
tggtggtaacttttctttgatacag

SEQ ID NO: 67300 - DNA, 25 bp, SARS Virus
ggtggtaacttgtctttgatacaga

SEQ ID NO: 67301 - DNA, 25 bp, SARS Virus
gtggtaacttgtttttgatacagaa

SEQ ID NO: 67302 - DNA, 25 bp, SARS Virus
tggtaacttgtctttgatacagaaa

SEQ ID NO: 67303 - DNA, 25 bp, SARS Virus
ggtaacttgtctttgatacagaaat

SEQ ID NO: 67304 - DNA, 25 bp, SARS Virus
gtaacttgtctttgatacagaaatg

SEQ ID NO: 67305 - DNA, 25 bp, SARS Virus
taacttgtcttttatacagaaatga

SEQ ID NO: 67306 - DNA, 25 bp, SARS Virus
aacttgtctttgttacagaaatgac

SEQ ID NO: 67307 - DNA, 25 bp, SARS Virus
acttgtctttgatacagaaatgacc

SEQ ID NO: 67308 - DNA, 25 bp, SARS Virus
cttgtctttgattcagaaatgacca

SEQ ID NO: 67309 - DNA, 25 bp, SARS Virus
ttgtctttgatatagaaatgaccaa

SEQ ID NO: 67310 - DNA, 25 bp, SARS Virus
tgtctttgatactgaaatgaccaat

SEQ ID NO: 67311 - DNA, 25 bp, SARS Virus
gtctttgatacataaatgaccaatg

SEQ ID NO: 67312 - DNA, 25 bp, SARS Virus
tctttgatacagtaatgaccaatgg

SEQ ID NO: 67313 - DNA, 25 bp, SARS Virus
ctttgatacagatatgaccaatggc

SEQ ID NO: 67314 - DNA, 25 bp, SARS Virus
tttgatacagaattgaccaatggca

SEQ ID NO: 67315 - DNA, 25 bp, SARS Virus
ttgatacagaaatgaccaatggcac

SEQ ID NO: 67316 - DNA, 25 bp, SARS Virus
tgatacagaaattaccaatggcaca

SEQ ID NO: 67317 - DNA, 25 bp, SARS Virus
gatacagaaatgtccaatggcacat

SEQ ID NO: 67318 - DNA, 25 bp, SARS Virus
atacagaaatgatcaatggcacatt

SEQ ID NO: 67319 - DNA, 25 bp, SARS Virus
tacagaaatgactaatggcacattg

SEQ ID NO: 67320 - DNA, 25 bp, SARS Virus
acagaaatgacctatggcacattga

SEQ ID NO: 67321 - DNA, 25 bp, SARS Virus
cagaaatgaccattggcacattgat

SEQ ID NO: 67322 - DNA, 25 bp, SARS Virus
agaaatgaccaatggcacattgatt

SEQ ID NO: 67323 - DNA, 25 bp, SARS Virus
gaaatgaccaattgcacattgattt

SEQ ID NO: 67324 - DNA, 25 bp, SARS Virus
aaatgaccaatgtcacattgatttt

SEQ ID NO: 67325 - DNA, 25 bp, SARS Virus
aatgaccaatggtacattgattttt

SEQ ID NO: 67326 - DNA, 25 bp, SARS Virus
atgaccaatggctcattgattttta

SEQ ID NO: 67327 - DNA, 25 bp, SARS Virus
tgaccaatggcatattgatttttat

SEQ ID NO: 67328 - DNA, 25 bp, SARS Virus
gaccaatggcactttgatttttatc

SEQ ID NO: 67329 - DNA, 25 bp, SARS Virus
accaatggcacattgatttttatca

SEQ ID NO: 67330 - DNA, 25 bp, SARS Virus
ccaatggcacattgatttttatcat

SEQ ID NO: 67331 - DNA, 25 bp, SARS Virus
caatggcacatttatttttatcatt

SEQ ID NO: 67332 - DNA, 25 bp, SARS Virus
aatggcacattgttttttatcattt

SEQ ID NO: 67333 - DNA, 25 bp, SARS Virus
atggcacattgatttttatcatttc

SEQ ID NO: 67334 - DNA, 25 bp, SARS Virus
tggcacattgatttttatcatttca

SEQ ID NO: 67335 - DNA, 25 bp, SARS Virus
ggcacattgatttttatcatttcat

SEQ ID NO: 67336 - DNA, 25 bp, SARS Virus
gcacattgatttttatcatttcatg

SEQ ID NO: 67337 - DNA, 25 bp, SARS Virus
cacattgatttttatcatttcatgt

SEQ ID NO: 67338 - DNA, 25 bp, SARS Virus
acattgatttttttcatttcatgtc

SEQ ID NO: 67339 - DNA, 25 bp, SARS Virus
cattgatttttatcatttcatgtct

SEQ ID NO: 67340 - DNA, 25 bp, SARS Virus
attgatttttattatttcatgtcta

SEQ ID NO: 67341 - DNA, 25 bp, SARS Virus
ttgatttttatcttttcatgtctaa

SEQ ID NO: 67342 - DNA, 25 bp, SARS Virus
tgatttttatcatttcatgtctaac

SEQ ID NO: 67343 - DNA, 25 bp, SARS Virus
gatttttatcatttcatgtctaacc

SEQ ID NO: 67344 - DNA, 25 bp, SARS Virus
atttttatcatttcatgtctaacct

SEQ ID NO: 67345 - DNA, 25 bp, SARS Virus
tttttatcattttatgtctaacctc

SEQ ID NO: 67346 - DNA, 25 bp, SARS Virus
ttttatcatttcttgtctaacctct

SEQ ID NO: 67347 - DNA, 25 bp, SARS Virus
tttatcatttcatgtctaacctctc

SEQ ID NO: 67348 - DNA, 25 bp, SARS Virus
ttatcatttcatttctaacctctca

SEQ ID NO: 67349 - DNA, 25 bp, SARS Virus
tatcatttcatgtctaacctctcat

SEQ ID NO: 67350 - DNA, 25 bp, SARS Virus
atcatttcatgtttaacctctcatg

SEQ ID NO: 67351 - DNA, 25 bp, SARS Virus
tcatttcatgtctaacctctcatgt

SEQ ID NO: 67352 - DNA, 25 bp, SARS Virus
catttcatgtcttacctctcatgtg

SEQ ID NO: 67353 - DNA, 25 bp, SARS Virus
atttcatgtctatcctctcatgtgg

SEQ ID NO: 67354 - DNA, 25 bp, SARS Virus
tttcatgtctaatctctcatgtgga

SEQ ID NO: 67355 - DNA, 25 bp, SARS Virus
ttcatgtctaacttctcatgtggaa

SEQ ID NO: 67356 - DNA, 25 bp, SARS Virus
tcatgtctaacctctcatgtggaaa

SEQ ID NO: 67357 - DNA, 25 bp, SARS Virus
catgtctaacctttcatgtggaaac

SEQ ID NO: 67358 - DNA, 25 bp, SARS Virus
atgtctaacctctcatgtggaaact

SEQ ID NO: 67359 - DNA, 25 bp, SARS Virus
tgtctaacctcttatgtggaaactt

SEQ ID NO: 67360 - DNA, 25 bp, SARS Virus
gtctaacctctcttgtggaaacttt

SEQ ID NO: 67361 - DNA, 25 bp, SARS Virus
tctaacctctcatgtggaaactttt

SEQ ID NO: 67362 - DNA, 25 bp, SARS Virus
ctaacctctcatttggaaacttttt

SEQ ID NO: 67363 - DNA, 25 bp, SARS Virus
taacctctcatgtggaaactttttc

SEQ ID NO: 67364 - DNA, 25 bp, SARS Virus
aacctctcatgttgaaactttttcc

SEQ ID NO: 67365 - DNA, 25 bp, SARS Virus
acctctcatgtgtaaactttttcca

SEQ ID NO: 67366 - DNA, 25 bp, SARS Virus
cctctcatgtggtaactttttccac

SEQ ID NO: 67367 - DNA, 25 bp, SARS Virus
ctctcatgtggatactttttccact

SEQ ID NO: 67368 - DNA, 25 bp, SARS Virus
tctcatgtggaatctttttccactg

SEQ ID NO: 67369 - DNA, 25 bp, SARS Virus
ctcatgtggaaattttttccactga

SEQ ID NO: 67370 - DNA, 25 bp, SARS Virus
tcatgtggaaactttttccactgat

SEQ ID NO: 67371 - DNA, 25 bp, SARS Virus
catgtggaaactttttccactgata

SEQ ID NO: 67372 - DNA, 25 bp, SARS Virus
atgtggaaactttttccactgatac

SEQ ID NO: 67373 - DNA, 25 bp, SARS Virus
tgtggaaactttttccactgatacc

SEQ ID NO: 67374 - DNA, 25 bp, SARS Virus
gtggaaactttttccactgatacca

SEQ ID NO: 67375 - DNA, 25 bp, SARS Virus
tggaaacttttttcactgataccac

SEQ ID NO: 67376 - DNA, 25 bp, SARS Virus
ggaaactttttctactgataccact

SEQ ID NO: 67377 - DNA, 25 bp, SARS Virus
gaaactttttcctctgataccacta

SEQ ID NO: 67378 - DNA, 25 bp, SARS Virus
aaactttttccattgataccactac

SEQ ID NO: 67379 - DNA, 25 bp, SARS Virus
aactttttccactgataccactacg

SEQ ID NO: 67380 - DNA, 25 bp, SARS Virus
actttttccacttataccactacga

SEQ ID NO: 67381 - DNA, 25 bp, SARS Virus
ctttttccactgttaccactacgac

SEQ ID NO: 67382 - DNA, 25 bp, SARS Virus
tttttccactgataccactacgaca

SEQ ID NO: 67383 - DNA, 25 bp, SARS Virus
ttttccactgattccactacgacaa

SEQ ID NO: 67384 - DNA, 25 bp, SARS Virus
tttccactgatatcactacgacaac

SEQ ID NO: 67385 - DNA, 25 bp, SARS Virus
ttccactgatactactacgacaaca

SEQ ID NO: 67386 - DNA, 25 bp, SARS Virus
tccactgatacctctacgacaacac

SEQ ID NO: 67387 - DNA, 25 bp, SARS Virus
ccactgataccattacgacaacaca

SEQ ID NO: 67388 - DNA, 25 bp, SARS Virus
cactgataccactacgacaacacat

SEQ ID NO: 67389 - DNA, 25 bp, SARS Virus
actgataccacttcgacaacacatg

SEQ ID NO: 67390 - DNA, 25 bp, SARS Virus
ctgataccactatgacaacacatgt

SEQ ID NO: 67391 - DNA, 25 bp, SARS Virus
tgataccactactacaacacatgtc

SEQ ID NO: 67392 - DNA, 25 bp, SARS Virus
gataccactacgtcaacacatgtct

SEQ ID NO: 67393 - DNA, 25 bp, SARS Virus
ataccactacgataacacatgtctc

SEQ ID NO: 67394 - DNA, 25 bp, SARS Virus
taccactacgactacacatgtctcc

SEQ ID NO: 67395 - DNA, 25 bp, SARS Virus
accactacgacatcacatgtctcca

SEQ ID NO: 67396 - DNA, 25 bp, SARS Virus
ccactacgacaatacatgtctccat

SEQ ID NO: 67397 - DNA, 25 bp, SARS Virus
cactacgacaactcatgtctccatg

SEQ ID NO: 67398 - DNA, 25 bp, SARS Virus
actacgacaacatatgtctccatga

SEQ ID NO: 67399 - DNA, 25 bp, SARS Virus
ctacgacaacacttgtctccatgat

SEQ ID NO: 67400 - DNA, 25 bp, SARS Virus
tacgacaacacatgtctccatgatg

SEQ ID NO: 67401 - DNA, 25 bp, SARS Virus
acgacaacacatttctccatgatgc

SEQ ID NO: 67402 - DNA, 25 bp, SARS Virus
cgacaacacatgtctccatgatgct

SEQ ID NO: 67403 - DNA, 25 bp, SARS Virus
gacaacacatgtttccatgatgctg

SEQ ID NO: 67404 - DNA, 25 bp, SARS Virus
acaacacatgtctccatgatgctgt

SEQ ID NO: 67405 - DNA, 25 bp, SARS Virus
caacacatgtcttcatgatgctgta

SEQ ID NO: 67406 - DNA, 25 bp, SARS Virus
aacacatgtctctatgatgctgtat

SEQ ID NO: 67407 - DNA, 25 bp, SARS Virus
acacatgtctccttgatgctgtatg

SEQ ID NO: 67408 - DNA, 25 bp, SARS Virus
cacatgtctccatgatgctgtatgt

SEQ ID NO: 67409 - DNA, 25 bp, SARS Virus
acatgtctccattatgctgtatgtt

SEQ ID NO: 67410 - DNA, 25 bp, SARS Virus
catgtctccatgttgctgtatgttc

SEQ ID NO: 67411 - DNA, 25 bp, SARS Virus
atgtctccatgatgctgtatgttca

SEQ ID NO: 67412 - DNA, 25 bp, SARS Virus
tgtctccatgattctgtatgttcaa

SEQ ID NO: 67413 - DNA, 25 bp, SARS Virus
gtctccatgatgttgtatgttcaac

SEQ ID NO: 67414 - DNA, 25 bp, SARS Virus
tctccatgatgctgtatgttcaact

SEQ ID NO: 67415 - DNA, 25 bp, SARS Virus
ctccatgatgctttatgttcaactt

SEQ ID NO: 67416 - DNA, 25 bp, SARS Virus
tccatgatgctgtatgttcaactta

SEQ ID NO: 67417 - DNA, 25 bp, SARS Virus
ccatgatgctgtttgttcaacttac

SEQ ID NO: 67418 - DNA, 25 bp, SARS Virus
catgatgctgtatgttcaacttaca

SEQ ID NO: 67419 - DNA, 25 bp, SARS Virus
atgatgctgtattttcaacttacaa

SEQ ID NO: 67420 - DNA, 25 bp, SARS Virus
tgatgctgtatgttcaacttacaac

SEQ ID NO: 67421 - DNA, 25 bp, SARS Virus
gatgctgtatgttcaacttacaacc

SEQ ID NO: 67422 - DNA, 25 bp, SARS Virus
atgctgtatgtttaacttacaacca

SEQ ID NO: 67423 - DNA, 25 bp, SARS Virus
tgctgtatgttctacttacaaccac

SEQ ID NO: 67424 - DNA, 25 bp, SARS Virus
gctgtatgttcatcttacaaccact

SEQ ID NO: 67425 - DNA, 25 bp, SARS Virus
ctgtatgttcaatttacaaccacta

SEQ ID NO: 67426 - DNA, 25 bp, SARS Virus
tgtatgttcaacttacaaccactaa

SEQ ID NO: 67427 - DNA, 25 bp, SARS Virus
gtatgttcaacttacaaccactaat

SEQ ID NO: 67428 - DNA, 25 bp, SARS Virus
tatgttcaactttcaaccactaatg

SEQ ID NO: 67429 - DNA, 25 bp, SARS Virus
atgttcaacttataaccactaatga

SEQ ID NO: 67430 - DNA, 25 bp, SARS Virus
tgttcaacttactaccactaatgaa

SEQ ID NO: 67431 - DNA, 25 bp, SARS Virus
gttcaacttacatccactaatgaaa

SEQ ID NO: 67432 - DNA, 25 bp, SARS Virus
ttcaacttacaatcactaatgaaac

SEQ ID NO: 67433 - DNA, 25 bp, SARS Virus
tcaacttacaactactaatgaaaca

SEQ ID NO: 67434 - DNA, 25 bp, SARS Virus
caacttacaacctctaatgaaacac

SEQ ID NO: 67435 - DNA, 25 bp, SARS Virus
aacttacaaccattaatgaaacaca

SEQ ID NO: 67436 - DNA, 25 bp, SARS Virus
acttacaaccactaatgaaacacaa

SEQ ID NO: 67437 - DNA, 25 bp, SARS Virus
cttacaaccacttatgaaacacaac

SEQ ID NO: 67438 - DNA, 25 bp, SARS Virus
ttacaaccactattgaaacacaact

SEQ ID NO: 67439 - DNA, 25 bp, SARS Virus
tacaaccactaatgaaacacaactg

SEQ ID NO: 67440 - DNA, 25 bp, SARS Virus
acaaccactaattaaacacaactgt

SEQ ID NO: 67441 - DNA, 25 bp, SARS Virus
caaccactaatgtaacacaactgta

SEQ ID NO: 67442 - DNA, 25 bp, SARS Virus
aaccactaatgatacacaactgtag

SEQ ID NO: 67443 - DNA, 25 bp, SARS Virus
accactaatgaatcacaactgtaga

SEQ ID NO: 67444 - DNA, 25 bp, SARS Virus
ccactaatgaaatacaactgtagag

SEQ ID NO: 67445 - DNA, 25 bp, SARS Virus
cactaatgaaactcaactgtagagt

SEQ ID NO: 67446 - DNA, 25 bp, SARS Virus
actaatgaaacataactgtagagtg

SEQ ID NO: 67447 - DNA, 25 bp, SARS Virus
ctaatgaaacactactgtagagtgt

SEQ ID NO: 67448 - DNA, 25 bp, SARS Virus
taatgaaacacatctgtagagtgtg

SEQ ID NO: 67449 - DNA, 25 bp, SARS Virus
aatgaaacacaattgtagagtgtga

SEQ ID NO: 67450 - DNA, 25 bp, SARS Virus
atgaaacacaactgtagagtgtgac

SEQ ID NO: 67451 - DNA, 25 bp, SARS Virus
tgaaacacaactttagagtgtgaca

SEQ ID NO: 67452 - DNA, 25 bp, SARS Virus
gaaacacaactgtagagtgtgacat

SEQ ID NO: 67453 - DNA, 25 bp, SARS Virus
aaacacaactgttgagtgtgacatt

SEQ ID NO: 67454 - DNA, 25 bp, SARS Virus
aacacaactgtatagtgtgacatta

SEQ ID NO: 67455 - DNA, 25 bp, SARS Virus
acacaactgtagtgtgtgacattac

SEQ ID NO: 67456 - DNA, 25 bp, SARS Virus
cacaactgtagattgtgacattacg

SEQ ID NO: 67457 - DNA, 25 bp, SARS Virus
acaactgtagagtgtgacattacgg

SEQ ID NO: 67458 - DNA, 25 bp, SARS Virus
caactgtagagtttgacattacggt

SEQ ID NO: 67459 - DNA, 25 bp, SARS Virus
aactgtagagtgtgacattacggtg

SEQ ID NO: 67460 - DNA, 25 bp, SARS Virus
actgtagagtgttacattacggtga

SEQ ID NO: 67461 - DNA, 25 bp, SARS Virus
ctgtagagtgtgtcattacggtgaa

SEQ ID NO: 67462 - DNA, 25 bp, SARS Virus
tgtagagtgtgatattacggtgaat

SEQ ID NO: 67463 - DNA, 25 bp, SARS Virus
gtagagtgtgactttacggtgaatc

SEQ ID NO: 67464 - DNA, 25 bp, SARS Virus
tagagtgtgacattacggtgaatca

SEQ ID NO: 67465 - DNA, 25 bp, SARS Virus
agagtgtgacattacggtgaatcac

SEQ ID NO: 67466 - DNA, 25 bp, SARS Virus
gagtgtgacatttcggtgaatcacg

SEQ ID NO: 67467 - DNA, 25 bp, SARS Virus
agtgtgacattatggtgaatcacgt

SEQ ID NO: 67468 - DNA, 25 bp, SARS Virus
gtgtgacattactgtgaatcacgtg

SEQ ID NO: 67469 - DNA, 25 bp, SARS Virus
tgtgacattacgttgaatcacgtgg

SEQ ID NO: 67470 - DNA, 25 bp, SARS Virus
gtgacattacggtgaatcacgtgga

SEQ ID NO: 67471 - DNA, 25 bp, SARS Virus
tgacattacggttaatcacgtggat

SEQ ID NO: 67472 - DNA, 25 bp, SARS Virus
gacattacggtgtatcacgtggatg

SEQ ID NO: 67473 - DNA, 25 bp, SARS Virus
acattacggtgaatcacgtggatga

SEQ ID NO: 67474 - DNA, 25 bp, SARS Virus
cattacggtgaaacacgtggatgag

SEQ ID NO: 67475 - DNA, 25 bp, SARS Virus
attacggtgaataacgtggatgaga

SEQ ID NO: 67476 - DNA, 25 bp, SARS Virus
ttacggtgaatcacgtggatgagat

SEQ ID NO: 67477 - DNA, 25 bp, SARS Virus
tacggtgaatcaagtggatgagatc

SEQ ID NO: 67478 - DNA, 25 bp, SARS Virus
acggtgaatcacatggatgagatca

SEQ ID NO: 67479 - DNA, 25 bp, SARS Virus
cggtgaatcacgaggatgagatcac

SEQ ID NO: 67480 - DNA, 25 bp, SARS Virus
ggtgaatcacgtagatgagatcacg

SEQ ID NO: 67481 - DNA, 25 bp, SARS Virus
gtgaatcacgtgaatgagatcacgg

SEQ ID NO: 67482 - DNA, 25 bp, SARS Virus
tgaatcacgtggatgagatcacggt

SEQ ID NO: 67483 - DNA, 25 bp, SARS Virus
gaatcacgtggaagagatcacggtg

SEQ ID NO: 67484 - DNA, 25 bp, SARS Virus
aatcacgtggataagatcacggtgt

SEQ ID NO: 67485 - DNA, 25 bp, SARS Virus
atcacgtggatgagatcacggtgtt

SEQ ID NO: 67486 - DNA, 25 bp, SARS Virus
tcacgtggatgaaatcacggtgttc

SEQ ID NO: 67487 - DNA, 25 bp, SARS Virus
cacgtggatgagatcacggtgttct

SEQ ID NO: 67488 - DNA, 25 bp, SARS Virus
acgtggatgagaacacggtgttctc

SEQ ID NO: 67489 - DNA, 25 bp, SARS Virus
cgtggatgagataacggtgttctcg

SEQ ID NO: 67490 - DNA, 25 bp, SARS Virus
gtggatgagatcacggtgttctcgt

SEQ ID NO: 67491 - DNA, 25 bp, SARS Virus
tggatgagatcaaggtgttctcgtg

SEQ ID NO: 67492 - DNA, 25 bp, SARS Virus
ggatgagatcacagtgttctcgtga

SEQ ID NO: 67493 - DNA, 25 bp, SARS Virus
gatgagatcacgatgttctcgtgat

SEQ ID NO: 67494 - DNA, 25 bp, SARS Virus
atgagatcacggagttctcgtgata

SEQ ID NO: 67495 - DNA, 25 bp, SARS Virus
tgagatcacggtattctcgtgatac

SEQ ID NO: 67496 - DNA, 25 bp, SARS Virus
gagatcacggtgatctcgtgataca

SEQ ID NO: 67497 - DNA, 25 bp, SARS Virus
agatcacggtgtactcgtgatacac

SEQ ID NO: 67498 - DNA, 25 bp, SARS Virus
gatcacggtgttatcgtgatacact

SEQ ID NO: 67499 - DNA, 25 bp, SARS Virus
atcacggtgttcacgtgatacactc

SEQ ID NO: 67500 - DNA, 25 bp, SARS Virus
tcacggtgttctagtgatacactct

SEQ ID NO: 67501 - DNA, 25 bp, SARS Virus
cacggtgttctcatgatacactctt

SEQ ID NO: 67502 - DNA, 25 bp, SARS Virus
acggtgttctcgagatacactctta

SEQ ID NO: 67503 - DNA, 25 bp, SARS Virus
cggtgttctcgtaatacactcttaa

SEQ ID NO: 67504 - DNA, 25 bp, SARS Virus
ggtgttctcgtgatacactcttaat

SEQ ID NO: 67505 - DNA, 25 bp, SARS Virus
gtgttctcgtgaaacactcttaatg

SEQ ID NO: 67506 - DNA, 25 bp, SARS Virus
tgttctcgtgatacactcttaatga

SEQ ID NO: 67507 - DNA, 25 bp, SARS Virus
gttctcgtgataaactcttaatgac

SEQ ID NO: 67508 - DNA, 25 bp, SARS Virus
ttctcgtgatacactcttaatgacc

SEQ ID NO: 67509 - DNA, 25 bp, SARS Virus
tctcgtgatacaatcttaatgaccg

SEQ ID NO: 67510 - DNA, 25 bp, SARS Virus
ctcgtgatacacacttaatgaccga

SEQ ID NO: 67511 - DNA, 25 bp, SARS Virus
tcgtgatacactattaatgaccgaa

SEQ ID NO: 67512 - DNA, 25 bp, SARS Virus
cgtgatacactcataatgaccgaac

SEQ ID NO: 67513 - DNA, 25 bp, SARS Virus
gtgatacactctaaatgaccgaaca

SEQ ID NO: 67514 - DNA, 25 bp, SARS Virus
tgatacactcttaatgaccgaacat

SEQ ID NO: 67515 - DNA, 25 bp, SARS Virus
gatacactcttaatgaccgaacatg

SEQ ID NO: 67516 - DNA, 25 bp, SARS Virus
atacactcttaaagaccgaacatgg

SEQ ID NO: 67517 - DNA, 25 bp, SARS Virus
tacactcttaataaccgaacatggg

SEQ ID NO: 67518 - DNA, 25 bp, SARS Virus
acactcttaatgaccgaacatgggt

SEQ ID NO: 67519 - DNA, 25 bp, SARS Virus
cactcttaatgaacgaacatgggtt

SEQ ID NO: 67520 - DNA, 25 bp, SARS Virus
actcttaatgacagaacatgggttg

SEQ ID NO: 67521 - DNA, 25 bp, SARS Virus
ctcttaatgaccaaacatgggttgt

SEQ ID NO: 67522 - DNA, 25 bp, SARS Virus
tcttaatgaccgaacatgggttgtg

SEQ ID NO: 67523 - DNA, 25 bp, SARS Virus
cttaatgaccgaacatgggttgtga

SEQ ID NO: 67524 - DNA, 25 bp, SARS Virus
ttaatgaccgaaaatgggttgtgag

SEQ ID NO: 67525 - DNA, 25 bp, SARS Virus
taatgaccgaacatgggttgtgagt

SEQ ID NO: 67526 - DNA, 25 bp, SARS Virus
aatgaccgaacaagggttgtgagtt

SEQ ID NO: 67527 - DNA, 25 bp, SARS Virus
atgaccgaacataggttgtgagttg

SEQ ID NO: 67528 - DNA, 25 bp, SARS Virus
tgaccgaacatgagttgtgagttgt

SEQ ID NO: 67529 - DNA, 25 bp, SARS Virus
gaccgaacatggattgtgagttgta

SEQ ID NO: 67530 - DNA, 25 bp, SARS Virus
accgaacatgggatgtgagttgtag

SEQ ID NO: 67531 - DNA, 25 bp, SARS Virus
ccgaacatgggtagtgagttgtaga

SEQ ID NO: 67532 - DNA, 25 bp, SARS Virus
cgaacatgggttatgagttgtagag

SEQ ID NO: 67533 - DNA, 25 bp, SARS Virus
gaacatgggttgagagttgtagagt

SEQ ID NO: 67534 - DNA, 25 bp, SARS Virus
aacatgggttgtaagttgtagagtc

SEQ ID NO: 67535 - DNA, 25 bp, SARS Virus
acatgggttgtgagttgtagagtct

SEQ ID NO: 67536 - DNA, 25 bp, SARS Virus
catgggttgtgaattgtagagtcta

SEQ ID NO: 67537 - DNA, 25 bp, SARS Virus
atgggttgtgagatgtagagtctac

SEQ ID NO: 67538 - DNA, 25 bp, SARS Virus
tgggttgtgagtagtagagtctact

SEQ ID NO: 67539 - DNA, 25 bp, SARS Virus
gggttgtgagttatagagtctactc

SEQ ID NO: 67540 - DNA, 25 bp, SARS Virus
ggttgtgagttgaagagtctactca

SEQ ID NO: 67541 - DNA, 25 bp, SARS Virus
gttgtgagttgtagagtctactcaa

SEQ ID NO: 67542 - DNA, 25 bp, SARS Virus
ttgtgagttgtaaagtctactcaaa

SEQ ID NO: 67543 - DNA, 25 bp, SARS Virus
tgtgagttgtagagtctactcaaaa

SEQ ID NO: 67544 - DNA, 25 bp, SARS Virus
gtgagttgtagaatctactcaaaag

SEQ ID NO: 67545 - DNA, 25 bp, SARS Virus
tgagttgtagagactactcaaaaga

SEQ ID NO: 67546 - DNA, 25 bp, SARS Virus
gagttgtagagtatactcaaaagat

SEQ ID NO: 67547 - DNA, 25 bp, SARS Virus
agttgtagagtcaactcaaaagatc

SEQ ID NO: 67548 - DNA, 25 bp, SARS Virus
gttgtagagtctactcaaaagatcg

SEQ ID NO: 67549 - DNA, 25 bp, SARS Virus
ttgtagagtctaatcaaaagatcgt

SEQ ID NO: 67550 - DNA, 25 bp, SARS Virus
tgtagagtctacacaaaagatcgtt

SEQ ID NO: 67551 - DNA, 25 bp, SARS Virus
gtagagtctactaaaaagatcgtta

SEQ ID NO: 67552 - DNA, 25 bp, SARS Virus
tagagtctactcaaaagatcgttac

SEQ ID NO: 67553 - DNA, 25 bp, SARS Virus
agagtctactcaaaagatcgttaca

SEQ ID NO: 67554 - DNA, 25 bp, SARS Virus
gagtctactcaaaagatcgttacaa

SEQ ID NO: 67555 - DNA, 25 bp, SARS Virus
agtctactcaaaagatcgttacaac

SEQ ID NO: 67556 - DNA, 25 bp, SARS Virus
gtctactcaaaaaatcgttacaacg

SEQ ID NO: 67557 - DNA, 25 bp, SARS Virus
tctactcaaaagatcgttacaacgt

SEQ ID NO: 67558 - DNA, 25 bp, SARS Virus
ctactcaaaagaacgttacaacgtt

SEQ ID NO: 67559 - DNA, 25 bp, SARS Virus
tactcaaaagatagttacaacgttt

SEQ ID NO: 67560 - DNA, 25 bp, SARS Virus
actcaaaagatcattacaacgttta

SEQ ID NO: 67561 - DNA, 25 bp, SARS Virus
ctcaaaagatcgatacaacgtttaa

SEQ ID NO: 67562 - DNA, 25 bp, SARS Virus
tcaaaagatcgtaacaacgtttaat

SEQ ID NO: 67563 - DNA, 25 bp, SARS Virus
caaaagatcgttacaacgtttaata

SEQ ID NO: 67564 - DNA, 25 bp, SARS Virus
aaaagatcgttaaaacgtttaatag

SEQ ID NO: 67565 - DNA, 25 bp, SARS Virus
aaagatcgttacaacgtttaatagt

SEQ ID NO: 67566 - DNA, 25 bp, SARS Virus
aagatcgttacaacgtttaatagtt

SEQ ID NO: 67567 - DNA, 25 bp, SARS Virus
agatcgttacaaagtttaatagttt

SEQ ID NO: 67568 - DNA, 25 bp, SARS Virus
gatcgttacaacatttaatagtttt

SEQ ID NO: 67569 - DNA, 25 bp, SARS Virus
atcgttacaacgattaatagttttc

SEQ ID NO: 67570 - DNA, 25 bp, SARS Virus
tcgttacaacgtataatagttttcc

SEQ ID NO: 67571 - DNA, 25 bp, SARS Virus
cgttacaacgttaaatagttttcca

SEQ ID NO: 67572 - DNA, 25 bp, SARS Virus
gttacaacgtttaatagttttccag

SEQ ID NO: 67573 - DNA, 25 bp, SARS Virus
ttacaacgtttaatagttttccagc

SEQ ID NO: 67574 - DNA, 25 bp, SARS Virus
tacaacgtttaaaagttttccagcc

SEQ ID NO: 67575 - DNA, 25 bp, SARS Virus
acaacgtttaatagttttccagccg

SEQ ID NO: 67576 - DNA, 25 bp, SARS Virus
caacgtttaataattttccagccgt

SEQ ID NO: 67577 - DNA, 25 bp, SARS Virus
aacgtttaatagatttccagccgta

SEQ ID NO: 67578 - DNA, 25 bp, SARS Virus
acgtttaatagtattccagccgtac

SEQ ID NO: 67579 - DNA, 25 bp, SARS Virus
cgtttaatagttatccagccgtacg

SEQ ID NO: 67580 - DNA, 25 bp, SARS Virus
gtttaatagtttaccagccgtacgt

SEQ ID NO: 67581 - DNA, 25 bp, SARS Virus
tttaatagttttacagccgtacgtt

SEQ ID NO: 67582 - DNA, 25 bp, SARS Virus
ttaatagttttcaagccgtacgttt

SEQ ID NO: 67583 - DNA, 25 bp, SARS Virus
taatagttttccagccgtacgtttt

SEQ ID NO: 67584 - DNA, 25 bp, SARS Virus
aatagttttccaaccgtacgttttc

SEQ ID NO: 67585 - DNA, 25 bp, SARS Virus
atagttttccagacgtacgttttca

SEQ ID NO: 67586 - DNA, 25 bp, SARS Virus
tagttttccagcagtacgttttcat

SEQ ID NO: 67587 - DNA, 25 bp, SARS Virus
agttttccagccatacgttttcatg

SEQ ID NO: 67588 - DNA, 25 bp, SARS Virus
gttttccagccgaacgttttcatga

SEQ ID NO: 67589 - DNA, 25 bp, SARS Virus
ttttccagccgtacgttttcatgag

SEQ ID NO: 67590 - DNA, 25 bp, SARS Virus
tttccagccgtaagttttcatgaga

SEQ ID NO: 67591 - DNA, 25 bp, SARS Virus
ttccagccgtacattttcatgagat

SEQ ID NO: 67592 - DNA, 25 bp, SARS Virus
tccagccgtacgatttcatgagatg

SEQ ID NO: 67593 - DNA, 25 bp, SARS Virus
ccagccgtacgtattcatgagatgt

SEQ ID NO: 67594 - DNA, 25 bp, SARS Virus
cagccgtacgttatcatgagatgtg

SEQ ID NO: 67595 - DNA, 25 bp, SARS Virus
agccgtacgtttacatgagatgtga

SEQ ID NO: 67596 - DNA, 25 bp, SARS Virus
gccgtacgttttaatgagatgtgag

SEQ ID NO: 67597 - DNA, 25 bp, SARS Virus
ccgtacgttttcatgagatgtgagg

SEQ ID NO: 67598 - DNA, 25 bp, SARS Virus
cgtacgttttcaagagatgtgaggt

SEQ ID NO: 67599 - DNA, 25 bp, SARS Virus
gtacgttttcataagatgtgaggtt

SEQ ID NO: 67600 - DNA, 25 bp, SARS Virus
tacgttttcatgagatgtgaggttc

SEQ ID NO: 67601 - DNA, 25 bp, SARS Virus
acgttttcatgaaatgtgaggttcc

SEQ ID NO: 67602 - DNA, 25 bp, SARS Virus
cgttttcatgagatgtgaggttcct

SEQ ID NO: 67603 - DNA, 25 bp, SARS Virus
gttttcatgagaagtgaggttcctg

SEQ ID NO: 67604 - DNA, 25 bp, SARS Virus
ttttcatgagatatgaggttcctgg

SEQ ID NO: 67605 - DNA, 25 bp, SARS Virus
tttcatgagatgagaggttcctggt

SEQ ID NO: 67606 - DNA, 25 bp, SARS Virus
ttcatgagatgtaaggttcctggtg

SEQ ID NO: 67607 - DNA, 25 bp, SARS Virus
tcatgagatgtgaggttcctggtgg

SEQ ID NO: 67608 - DNA, 25 bp, SARS Virus
catgagatgtgaagttcctggtgga

SEQ ID NO: 67609 - DNA, 25 bp, SARS Virus
atgagatgtgagattcctggtggac

SEQ ID NO: 67610 - DNA, 25 bp, SARS Virus
tgagatgtgaggatcctggtggacc

SEQ ID NO: 67611 - DNA, 25 bp, SARS Virus
gagatgtgaggtacctggtggacca

SEQ ID NO: 67612 - DNA, 25 bp, SARS Virus
agatgtgaggttactggtggaccat

SEQ ID NO: 67613 - DNA, 25 bp, SARS Virus
gatgtgaggttcatggtggaccatg

SEQ ID NO: 67614 - DNA, 25 bp, SARS Virus
atgtgaggttccaggtggaccatga

SEQ ID NO: 67615 - DNA, 25 bp, SARS Virus
tgtgaggttcctagtggaccatgac

SEQ ID NO: 67616 - DNA, 25 bp, SARS Virus
gtgaggttcctgatggaccatgacc

SEQ ID NO: 67617 - DNA, 25 bp, SARS Virus
tgaggttcctggaggaccatgacca

SEQ ID NO: 67618 - DNA, 25 bp, SARS Virus
gaggttcctggtagaccatgaccat

SEQ ID NO: 67619 - DNA, 25 bp, SARS Virus
aggttcctggtgaaccatgaccatt

SEQ ID NO: 67620 - DNA, 25 bp, SARS Virus
ggttcctggtggaccatgaccattc

SEQ ID NO: 67621 - DNA, 25 bp, SARS Virus
gttcctggtggaacatgaccattct

SEQ ID NO: 67622 - DNA, 25 bp, SARS Virus
ttcctggtggacaatgaccattctc

SEQ ID NO: 67623 - DNA, 25 bp, SARS Virus
tcctggtggaccatgaccattctca

SEQ ID NO: 67624 - DNA, 25 bp, SARS Virus
cctggtggaccaagaccattctcag

SEQ ID NO: 67625 - DNA, 25 bp, SARS Virus
ctggtggaccataaccattctcagt

SEQ ID NO: 67626 - DNA, 25 bp, SARS Virus
tggtggaccatgaccattctcagta

SEQ ID NO: 67627 - DNA, 25 bp, SARS Virus
ggtggaccatgaacattctcagtaa

SEQ ID NO: 67628 - DNA, 25 bp, SARS Virus
gtggaccatgacaattctcagtaaa

SEQ ID NO: 67629 - DNA, 25 bp, SARS Virus
tggaccatgaccattctcagtaaaa

SEQ ID NO: 67630 - DNA, 25 bp, SARS Virus
ggaccatgaccaatctcagtaaaac

SEQ ID NO: 67631 - DNA, 25 bp, SARS Virus
gaccatgaccatactcagtaaaacg

SEQ ID NO: 67632 - DNA, 25 bp, SARS Virus
accatgaccattatcagtaaaacgg

SEQ ID NO: 67633 - DNA, 25 bp, SARS Virus
ccatgaccattcacagtaaaacggt

SEQ ID NO: 67634 - DNA, 25 bp, SARS Virus
catgaccattctaagtaaaacggta

SEQ ID NO: 67635 - DNA, 25 bp, SARS Virus
atgaccattctcagtaaaacggtag

SEQ ID NO: 67636 - DNA, 25 bp, SARS Virus
tgaccattctcaataaaacggtagc

SEQ ID NO: 67637 - DNA, 25 bp, SARS Virus
gaccattctcagaaaaacggtagcc

SEQ ID NO: 67638 - DNA, 25 bp, SARS Virus
accattctcagtaaaacggtagcct

SEQ ID NO: 67639 - DNA, 25 bp, SARS Virus
ccattctcagtaaaacggtagcctg

SEQ ID NO: 67640 - DNA, 25 bp, SARS Virus
cattctcagtaaaacggtagcctga

SEQ ID NO: 67641 - DNA, 25 bp, SARS Virus
attctcagtaaaacggtagcctgaa

SEQ ID NO: 67642 - DNA, 25 bp, SARS Virus
ttctcagtaaaaaggtagcctgaac

SEQ ID NO: 67643 - DNA, 25 bp, SARS Virus
tctcagtaaaacagtagcctgaacg

SEQ ID NO: 67644 - DNA, 25 bp, SARS Virus
ctcagtaaaacgatagcctgaacga

SEQ ID NO: 67645 - DNA, 25 bp, SARS Virus
tcagtaaaacggaagcctgaacgag

SEQ ID NO: 67646 - DNA, 25 bp, SARS Virus
cagtaaaacggtagcctgaacgaga

SEQ ID NO: 67647 - DNA, 25 bp, SARS Virus
agtaaaacggtaacctgaacgagag

SEQ ID NO: 67648 - DNA, 25 bp, SARS Virus
gtaaaacggtagactgaacgagaga

SEQ ID NO: 67649 - DNA, 25 bp, SARS Virus
taaaacggtagcatgaacgagagat

SEQ ID NO: 67650 - DNA, 25 bp, SARS Virus
aaaacggtagccagaacgagagata

SEQ ID NO: 67651 - DNA, 25 bp, SARS Virus
aaacggtagcctaaacgagagataa

SEQ ID NO: 67652 - DNA, 25 bp, SARS Virus
aacggtagcctgaacgagagataat

SEQ ID NO: 67653 - DNA, 25 bp, SARS Virus
acggtagcctgaacgagagataatg

SEQ ID NO: 67654 - DNA, 25 bp, SARS Virus
cggtagcctgaaagagagataatgg

SEQ ID NO: 67655 - DNA, 25 bp, SARS Virus
ggtagcctgaacaagagataatggg

SEQ ID NO: 67656 - DNA, 25 bp, SARS Virus
gtagcctgaacgagagataatgggt

SEQ ID NO: 67657 - DNA, 25 bp, SARS Virus
tagcctgaacgaaagataatgggta

SEQ ID NO: 67658 - DNA, 25 bp, SARS Virus
agcctgaacgagagataatgggtag

SEQ ID NO: 67659 - DNA, 25 bp, SARS Virus
gcctgaacgagaaataatgggtaga

SEQ ID NO: 67660 - DNA, 25 bp, SARS Virus
cctgaacgagagataatgggtagac

SEQ ID NO: 67661 - DNA, 25 bp, SARS Virus
ctgaacgagagaaaatgggtagacg

SEQ ID NO: 67662 - DNA, 25 bp, SARS Virus
tgaacgagagataatgggtagacga

SEQ ID NO: 67663 - DNA, 25 bp, SARS Virus
gaacgagagataatgggtagacgag

SEQ ID NO: 67664 - DNA, 25 bp, SARS Virus
aacgagagataaagggtagacgagc

SEQ ID NO: 67665 - DNA, 25 bp, SARS Virus
acgagagataataggtagacgagcg

SEQ ID NO: 67666 - DNA, 25 bp, SARS Virus
cgagagataatgagtagacgagcgt

SEQ ID NO: 67667 - DNA, 25 bp, SARS Virus
gagagataatggatagacgagcgta

SEQ ID NO: 67668 - DNA, 25 bp, SARS Virus
agagataatgggaagacgagcgtat

SEQ ID NO: 67669 - DNA, 25 bp, SARS Virus
gagataatgggtagacgagcgtatc

SEQ ID NO: 67670 - DNA, 25 bp, SARS Virus
agataatgggtaaacgagcgtatca

SEQ ID NO: 67671 - DNA, 25 bp, SARS Virus
gataatgggtagacgagcgtatcac

SEQ ID NO: 67672 - DNA, 25 bp, SARS Virus
ataatgggtagaagagcgtatcaca

SEQ ID NO: 67673 - DNA, 25 bp, SARS Virus
taatgggtagacaagcgtatcacat

SEQ ID NO: 67674 - DNA, 25 bp, SARS Virus
aatgggtagacgagcgtatcacata

SEQ ID NO: 67675 - DNA, 25 bp, SARS Virus
atgggtagacgaacgtatcacatat

SEQ ID NO: 67676 - DNA, 25 bp, SARS Virus
tgggtagacgagagtatcacatatg

SEQ ID NO: 67677 - DNA, 25 bp, SARS Virus
gggtagacgagcatatcacatatgc

SEQ ID NO: 67678 - DNA, 25 bp, SARS Virus
ggtagacgagcgaatcacatatgcc

SEQ ID NO: 67679 - DNA, 25 bp, SARS Virus
gtagacgagcgtatcacatatgccg

SEQ ID NO: 67680 - DNA, 25 bp, SARS Virus
tagacgagcgtaacacatatgccgt

SEQ ID NO: 67681 - DNA, 25 bp, SARS Virus
agacgagcgtataacatatgccgta

SEQ ID NO: 67682 - DNA, 25 bp, SARS Virus
gacgagcgtatcacatatgccgtac

SEQ ID NO: 67683 - DNA, 25 bp, SARS Virus
acgagcgtatcaaatatgccgtacg

SEQ ID NO: 67684 - DNA, 25 bp, SARS Virus
cgagcgtatcacatatgccgtacga

SEQ ID NO: 67685 - DNA, 25 bp, SARS Virus
gagcgtatcacaaatgccgtacgag

SEQ ID NO: 67686 - DNA, 25 bp, SARS Virus
agcgtatcacatatgccgtacgaga

SEQ ID NO: 67687 - DNA, 25 bp, SARS Virus
gcgtatcacataagccgtacgagag

SEQ ID NO: 67688 - DNA, 25 bp, SARS Virus
cgtatcacatataccgtacgagagt

SEQ ID NO: 67689 - DNA, 25 bp, SARS Virus
gtatcacatatgacgtacgagagta

SEQ ID NO: 67690 - DNA, 25 bp, SARS Virus
tatcacatatgcagtacgagagtac

SEQ ID NO: 67691 - DNA, 25 bp, SARS Virus
atcacatatgccatacgagagtacg

SEQ ID NO: 67692 - DNA, 25 bp, SARS Virus
tcacatatgccgaacgagagtacgt

SEQ ID NO: 67693 - DNA, 25 bp, SARS Virus
cacatatgccgtacgagagtacgtc

SEQ ID NO: 67694 - DNA, 25 bp, SARS Virus
acatatgccgtaagagagtacgtcg

SEQ ID NO: 67695 - DNA, 25 bp, SARS Virus
catatgccgtacaagagtacgtcga

SEQ ID NO: 67696 - DNA, 25 bp, SARS Virus
atatgccgtacgagagtacgtcgac

SEQ ID NO: 67697 - DNA, 25 bp, SARS Virus
tatgccgtacgaaagtacgtcgaca

SEQ ID NO: 67698 - DNA, 25 bp, SARS Virus
atgccgtacgagagtacgtcgacaa

SEQ ID NO: 67699 - DNA, 25 bp, SARS Virus
tgccgtacgagaatacgtcgacaac

SEQ ID NO: 67700 - DNA, 25 bp, SARS Virus
gccgtacgagagaacgtcgacaact

SEQ ID NO: 67701 - DNA, 25 bp, SARS Virus
ccgtacgagagtacgtcgacaacta

SEQ ID NO: 67702 - DNA, 25 bp, SARS Virus
cgtacgagagtaagtcgacaactac

SEQ ID NO: 67703 - DNA, 25 bp, SARS Virus
gtacgagagtacatcgacaactacg

SEQ ID NO: 67704 - DNA, 25 bp, SARS Virus
tacgagagtacgacgacaactacgg

SEQ ID NO: 67705 - DNA, 25 bp, SARS Virus
acgagagtacgtagacaactacggg

SEQ ID NO: 67706 - DNA, 25 bp, SARS Virus
cgagagtacgtcaacaactacggga

SEQ ID NO: 67707 - DNA, 25 bp, SARS Virus
gagagtacgtcgacaactacgggat

SEQ ID NO: 67708 - DNA, 25 bp, SARS Virus
agagtacgtcgaaaactacgggata

SEQ ID NO: 67709 - DNA, 25 bp, SARS Virus
gagtacgtcgacaactacgggatac

SEQ ID NO: 67710 - DNA, 25 bp, SARS Virus
agtacgtcgacaactacgggataca

SEQ ID NO: 67711 - DNA, 25 bp, SARS Virus
gtacgtcgacaaatacgggatacac

SEQ ID NO: 67712 - DNA, 25 bp, SARS Virus
tacgtcgacaacaacgggatacact

SEQ ID NO: 67713 - DNA, 25 bp, SARS Virus
acgtcgacaactacgggatacactt

SEQ ID NO: 67714 - DNA, 25 bp, SARS Virus
cgtcgacaactaagggatacacttt

SEQ ID NO: 67715 - DNA, 25 bp, SARS Virus
gtcgacaactacaggatacactttt

SEQ ID NO: 67716 - DNA, 25 bp, SARS Virus
tcgacaactacgagatacacttttc

SEQ ID NO: 67717 - DNA, 25 bp, SARS Virus
cgacaactacggaatacacttttcc

SEQ ID NO: 67718 - DNA, 25 bp, SARS Virus
gacaactacgggatacacttttccg

SEQ ID NO: 67719 - DNA, 25 bp, SARS Virus
acaactacgggaaacacttttccgt

SEQ ID NO: 67720 - DNA, 25 bp, SARS Virus
caactacgggatacacttttccgta

SEQ ID NO: 67721 - DNA, 25 bp, SARS Virus
aactacgggataaacttttccgtaa

SEQ ID NO: 67722 - DNA, 25 bp, SARS Virus
actacgggatacacttttccgtaat

SEQ ID NO: 67723 - DNA, 25 bp, SARS Virus
ctacgggatacaattttccgtaatt

SEQ ID NO: 67724 - DNA, 25 bp, SARS Virus
tacgggatacacatttccgtaattt

SEQ ID NO: 67725 - DNA, 25 bp, SARS Virus
acgggatacactattccgtaatttt

SEQ ID NO: 67726 - DNA, 25 bp, SARS Virus
cgggatacacttatccgtaatttta

SEQ ID NO: 67727 - DNA, 25 bp, SARS Virus
gggatacactttaccgtaattttat

SEQ ID NO: 67728 - DNA, 25 bp, SARS Virus
ggatacacttttacgtaattttata

SEQ ID NO: 67729 - DNA, 25 bp, SARS Virus
gatacacttttcagtaattttataa

SEQ ID NO: 67730 - DNA, 25 bp, SARS Virus
atacacttttccataattttataaa

SEQ ID NO: 67731 - DNA, 25 bp, SARS Virus
tacacttttccgaaattttataaac

SEQ ID NO: 67732 - DNA, 25 bp, SARS Virus
acacttttccgtaattttataaacg

SEQ ID NO: 67733 - DNA, 25 bp, SARS Virus
cacttttccgtaattttataaacgg

SEQ ID NO: 67734 - DNA, 25 bp, SARS Virus
acttttccgtaaatttataaacggg

SEQ ID NO: 67735 - DNA, 25 bp, SARS Virus
cttttccgtaatattataaacgggt

SEQ ID NO: 67736 - DNA, 25 bp, SARS Virus
ttttccgtaattatataaacgggta

SEQ ID NO: 67737 - DNA, 25 bp, SARS Virus
tttccgtaatttaataaacgggtat

SEQ ID NO: 67738 - DNA, 25 bp, SARS Virus
ttccgtaattttataaacgggtatc

SEQ ID NO: 67739 - DNA, 25 bp, SARS Virus
tccgtaattttaaaaacgggtatct

SEQ ID NO: 67740 - DNA, 25 bp, SARS Virus
ccgtaattttataaacgggtatcta

SEQ ID NO: 67741 - DNA, 25 bp, SARS Virus
cgtaattttataaacgggtatctat

SEQ ID NO: 67742 - DNA, 25 bp, SARS Virus
gtaattttataaacgggtatctatt

SEQ ID NO: 67743 - DNA, 25 bp, SARS Virus
taattttataaaagggtatctattt

SEQ ID NO: 67744 - DNA, 25 bp, SARS Virus
aattttataaacaggtatctattta

SEQ ID NO: 67745 - DNA, 25 bp, SARS Virus
attttataaacgagtatctatttac

SEQ ID NO: 67746 - DNA, 25 bp, SARS Virus
ttttataaacggatatctatttaca

SEQ ID NO: 67747 - DNA, 25 bp, SARS Virus
tttataaacgggaatctatttacat

SEQ ID NO: 67748 - DNA, 25 bp, SARS Virus
ttataaacgggtatctatttacatc

SEQ ID NO: 67749 - DNA, 25 bp, SARS Virus
tataaacgggtaactatttacatca

SEQ ID NO: 67750 - DNA, 25 bp, SARS Virus
ataaacgggtatatatttacatcat

SEQ ID NO: 67751 - DNA, 25 bp, SARS Virus
taaacgggtatcaatttacatcatc

SEQ ID NO: 67752 - DNA, 25 bp, SARS Virus
aaacgggtatctatttacatcatct

SEQ ID NO: 67753 - DNA, 25 bp, SARS Virus
aacgggtatctaattacatcatctt

SEQ ID NO: 67754 - DNA, 25 bp, SARS Virus
acgggtatctatatacatcatctta

SEQ ID NO: 67755 - DNA, 25 bp, SARS Virus
cgggtatctattaacatcatcttag

SEQ ID NO: 67756 - DNA, 25 bp, SARS Virus
gggtatctatttacatcatcttagt

SEQ ID NO: 67757 - DNA, 25 bp, SARS Virus
ggtatctatttaaatcatcttagta

SEQ ID NO: 67758 - DNA, 25 bp, SARS Virus
gtatctatttacatcatcttagtat

SEQ ID NO: 67759 - DNA, 25 bp, SARS Virus
tatctatttacaacatcttagtatg

SEQ ID NO: 67760 - DNA, 25 bp, SARS Virus
atctatttacataatcttagtatgg

SEQ ID NO: 67761 - DNA, 25 bp, SARS Virus
tctatttacatcatcttagtatgga

SEQ ID NO: 67762 - DNA, 25 bp, SARS Virus
ctatttacatcaacttagtatggac

SEQ ID NO: 67763 - DNA, 25 bp, SARS Virus
tatttacatcatattagtatggacg

SEQ ID NO: 67764 - DNA, 25 bp, SARS Virus
atttacatcatcatagtatggacgc

SEQ ID NO: 67765 - DNA, 25 bp, SARS Virus
tttacatcatctaagtatggacgcg

SEQ ID NO: 67766 - DNA, 25 bp, SARS Virus
ttacatcatcttagtatggacgcgc

SEQ ID NO: 67767 - DNA, 25 bp, SARS Virus
tacatcatcttaatatggacgcgca

SEQ ID NO: 67768 - DNA, 25 bp, SARS Virus
acatcatcttagaatggacgcgcac

SEQ ID NO: 67769 - DNA, 25 bp, SARS Virus
catcatcttagtatggacgcgcacg

SEQ ID NO: 67770 - DNA, 25 bp, SARS Virus
atcatcttagtaaggacgcgcacgc

SEQ ID NO: 67771 - DNA, 25 bp, SARS Virus
tcatcttagtatagacgcgcacgcg

SEQ ID NO: 67772 - DNA, 25 bp, SARS Virus
catcttagtatgaacgcgcacgcgc

SEQ ID NO: 67773 - DNA, 25 bp, SARS Virus
atcttagtatggacgcgcacgcgcg

SEQ ID NO: 67774 - DNA, 25 bp, SARS Virus
tcttagtatggaagcgcacgcgcgc

SEQ ID NO: 67775 - DNA, 25 bp, SARS Virus
cttagtatggacacgcacgcgcgca

SEQ ID NO: 67776 - DNA, 25 bp, SARS Virus
ttagtatggacgagcacgcgcgcat

SEQ ID NO: 67777 - DNA, 25 bp, SARS Virus
tagtatggacgcacacgcgcgcatc

SEQ ID NO: 67778 - DNA, 25 bp, SARS Virus
agtatggacgcgaacgcgcgcatct

SEQ ID NO: 67779 - DNA, 25 bp, SARS Virus
gtatggacgcgcacgcgcgcatctc

SEQ ID NO: 67780 - DNA, 25 bp, SARS Virus
tatggacgcgcaagcgcgcatctca

SEQ ID NO: 67781 - DNA, 25 bp, SARS Virus
atggacgcgcacacgcgcatctcac

SEQ ID NO: 67782 - DNA, 25 bp, SARS Virus
tggacgcgcacgagcgcatctcaca

SEQ ID NO: 67783 - DNA, 25 bp, SARS Virus
ggacgcgcacgcacgcatctcacaa

SEQ ID NO: 67784 - DNA, 25 bp, SARS Virus
gacgcgcacgcgagcatctcacaaa

SEQ ID NO: 67785 - DNA, 25 bp, SARS Virus
acgcgcacgcgcacatctcacaaaa

SEQ ID NO: 67786 - DNA, 25 bp, SARS Virus
cgcgcacgcgcgaatctcacaaaac

SEQ ID NO: 67787 - DNA, 25 bp, SARS Virus
gcgcacgcgcgcatctcacaaaact

SEQ ID NO: 67788 - DNA, 25 bp, SARS Virus
cgcacgcgcgcaactcacaaaacta

SEQ ID NO: 67789 - DNA, 25 bp, SARS Virus
gcacgcgcgcatatcacaaaactat

SEQ ID NO: 67790 - DNA, 25 bp, SARS Virus
cacgcgcgcatcacacaaaactatt

SEQ ID NO: 67791 - DNA, 25 bp, SARS Virus
acgcgcgcatctaacaaaactattt

SEQ ID NO: 67792 - DNA, 25 bp, SARS Virus
cgcgcgcatctcacaaaactattta

SEQ ID NO: 67793 - DNA, 25 bp, SARS Virus
gcgcgcatctcaaaaaactatttaa

SEQ ID NO: 67794 - DNA, 25 bp, SARS Virus
cgcgcatctcacaaaactatttaag

SEQ ID NO: 67795 - DNA, 25 bp, SARS Virus
gcgcatctcacaaaactatttaagt

SEQ ID NO: 67796 - DNA, 25 bp, SARS Virus
cgcatctcacaaaactatttaagtt

SEQ ID NO: 67797 - DNA, 25 bp, SARS Virus
gcatctcacaaaactatttaagttt

SEQ ID NO: 67798 - DNA, 25 bp, SARS Virus
catctcacaaaaatatttaagtttc

SEQ ID NO: 67799 - DNA, 25 bp, SARS Virus
atctcacaaaacaatttaagtttca

SEQ ID NO: 67800 - DNA, 25 bp, SARS Virus
tctcacaaaactatttaagtttcac

SEQ ID NO: 67801 - DNA, 25 bp, SARS Virus
ctcacaaaactaattaagtttcact

SEQ ID NO: 67802 - DNA, 25 bp, SARS Virus
tcacaaaactatataagtttcactt

SEQ ID NO: 67803 - DNA, 25 bp, SARS Virus
cacaaaactattaaagtttcactta

SEQ ID NO: 67804 - DNA, 25 bp, SARS Virus
acaaaactatttaagtttcacttaa

SEQ ID NO: 67805 - DNA, 25 bp, SARS Virus
caaaactatttaagtttcacttaag

SEQ ID NO: 67806 - DNA, 25 bp, SARS Virus
aaaactatttaaatttcacttaagt

SEQ ID NO: 67807 - DNA, 25 bp, SARS Virus
aaactatttaagattcacttaagtt

SEQ ID NO: 67808 - DNA, 25 bp, SARS Virus
aactatttaagtatcacttaagttg

SEQ ID NO: 67809 - DNA, 25 bp, SARS Virus
actatttaagttacacttaagttgt

SEQ ID NO: 67810 - DNA, 25 bp, SARS Virus
ctatttaagtttaacttaagttgtg

SEQ ID NO: 67811 - DNA, 25 bp, SARS Virus
tatttaagtttcacttaagttgtga

SEQ ID NO: 67812 - DNA, 25 bp, SARS Virus
atttaagtttcaattaagttgtgat

SEQ ID NO: 67813 - DNA, 25 bp, SARS Virus
tttaagtttcacataagttgtgatc

SEQ ID NO: 67814 - DNA, 25 bp, SARS Virus
ttaagtttcactaaagttgtgatct

SEQ ID NO: 67815 - DNA, 25 bp, SARS Virus
taagtttcacttaagttgtgatctt

SEQ ID NO: 67816 - DNA, 25 bp, SARS Virus
aagtttcacttaagttgtgatcttg

SEQ ID NO: 67817 - DNA, 25 bp, SARS Virus
agtttcacttaaattgtgatcttgt

SEQ ID NO: 67818 - DNA, 25 bp, SARS Virus
gtttcacttaagatgtgatcttgtc

SEQ ID NO: 67819 - DNA, 25 bp, SARS Virus
tttcacttaagtagtgatcttgtca

SEQ ID NO: 67820 - DNA, 25 bp, SARS Virus
ttcacttaagttatgatcttgtcat

SEQ ID NO: 67821 - DNA, 25 bp, SARS Virus
tcacttaagttgagatcttgtcata

SEQ ID NO: 67822 - DNA, 25 bp, SARS Virus
cacttaagttgtaatcttgtcatac

SEQ ID NO: 67823 - DNA, 25 bp, SARS Virus
acttaagttgtgatcttgtcataca

SEQ ID NO: 67824 - DNA, 25 bp, SARS Virus
cttaagttgtgaacttgtcatacaa

SEQ ID NO: 67825 - DNA, 25 bp, SARS Virus
ttaagttgtgatattgtcatacaaa

SEQ ID NO: 67826 - DNA, 25 bp, SARS Virus
taagttgtgatcatgtcatacaaaa

SEQ ID NO: 67827 - DNA, 25 bp, SARS Virus
aagttgtgatctagtcatacaaaag

SEQ ID NO: 67828 - DNA, 25 bp, SARS Virus
agttgtgatcttatcatacaaaaga

SEQ ID NO: 67829 - DNA, 25 bp, SARS Virus
gttgtgatcttgacatacaaaagac

SEQ ID NO: 67830 - DNA, 25 bp, SARS Virus
ttgtgatcttgtaatacaaaagacg

SEQ ID NO: 67831 - DNA, 25 bp, SARS Virus
tgtgatcttgtcatacaaaagacgt

SEQ ID NO: 67832 - DNA, 25 bp, SARS Virus
gtgatcttgtcaaacaaaagacgtg

SEQ ID NO: 67833 - DNA, 25 bp, SARS Virus
tgatcttgtcatacaaaagacgtga

SEQ ID NO: 67834 - DNA, 25 bp, SARS Virus
gatcttgtcataaaaaagacgtgac

SEQ ID NO: 67835 - DNA, 25 bp, SARS Virus
atcttgtcatacaaaagacgtgaca

SEQ ID NO: 67836 - DNA, 25 bp, SARS Virus
tcttgtcatacaaaagacgtgacat

SEQ ID NO: 67837 - DNA, 25 bp, SARS Virus
cttgtcatacaaaagacgtgacatt

SEQ ID NO: 67838 - DNA, 25 bp, SARS Virus
ttgtcatacaaaagacgtgacattt

SEQ ID NO: 67839 - DNA, 25 bp, SARS Virus
tgtcatacaaaaaacgtgacattta

SEQ ID NO: 67840 - DNA, 25 bp, SARS Virus
gtcatacaaaagacgtgacatttac

SEQ ID NO: 67841 - DNA, 25 bp, SARS Virus
tcatacaaaagaagtgacatttacg

SEQ ID NO: 67842 - DNA, 25 bp, SARS Virus
catacaaaagacatgacatttacgt

SEQ ID NO: 67843 - DNA, 25 bp, SARS Virus
atacaaaagacgagacatttacgta

SEQ ID NO: 67844 - DNA, 25 bp, SARS Virus
tacaaaagacgtaacatttacgtaa

SEQ ID NO: 67845 - DNA, 25 bp, SARS Virus
acaaaagacgtgacatttacgtaac

SEQ ID NO: 67846 - DNA, 25 bp, SARS Virus
caaaagacgtgaaatttacgtaacg

SEQ ID NO: 67847 - DNA, 25 bp, SARS Virus
aaaagacgtgacatttacgtaacgg

SEQ ID NO: 67848 - DNA, 25 bp, SARS Virus
aaagacgtgacaattacgtaacggt

SEQ ID NO: 67849 - DNA, 25 bp, SARS Virus
aagacgtgacatatacgtaacggtc

SEQ ID NO: 67850 - DNA, 25 bp, SARS Virus
agacgtgacattaacgtaacggtct

SEQ ID NO: 67851 - DNA, 25 bp, SARS Virus
gacgtgacatttacgtaacggtctt

SEQ ID NO: 67852 - DNA, 25 bp, SARS Virus
acgtgacatttaagtaacggtcttt

SEQ ID NO: 67853 - DNA, 25 bp, SARS Virus
cgtgacatttacataacggtctttg

SEQ ID NO: 67854 - DNA, 25 bp, SARS Virus
gtgacatttacgaaacggtctttgt

SEQ ID NO: 67855 - DNA, 25 bp, SARS Virus
tgacatttacgtaacggtctttgtt

SEQ ID NO: 67856 - DNA, 25 bp, SARS Virus
gacatttacgtaacggtctttgttg

SEQ ID NO: 67857 - DNA, 25 bp, SARS Virus
acatttacgtaaaggtctttgttga

SEQ ID NO: 67858 - DNA, 25 bp, SARS Virus
catttacgtaacagtctttgttgac

SEQ ID NO: 67859 - DNA, 25 bp, SARS Virus
atttacgtaacgatctttgttgacg

SEQ ID NO: 67860 - DNA, 25 bp, SARS Virus
tttacgtaacggactttgttgacga

SEQ ID NO: 67861 - DNA, 25 bp, SARS Virus
ttacgtaacggtatttgttgacgac

SEQ ID NO: 67862 - DNA, 25 bp, SARS Virus
tacgtaacggtcattgttgacgact

SEQ ID NO: 67863 - DNA, 25 bp, SARS Virus
acgtaacggtctatgttgacgactg

SEQ ID NO: 67864 - DNA, 25 bp, SARS Virus
cgtaacggtcttagttgacgactgt

SEQ ID NO: 67865 - DNA, 25 bp, SARS Virus
gtaacggtctttattgacgactgta

SEQ ID NO: 67866 - DNA, 25 bp, SARS Virus
taacggtctttgatgacgactgtaa

SEQ ID NO: 67867 - DNA, 25 bp, SARS Virus
aacggtctttgtagacgactgtaac

SEQ ID NO: 67868 - DNA, 25 bp, SARS Virus
acggtctttgttaacgactgtaaca

SEQ ID NO: 67869 - DNA, 25 bp, SARS Virus
cggtctttgttgacgactgtaacat

SEQ ID NO: 67870 - DNA, 25 bp, SARS Virus
ggtctttgttgaagactgtaacatc

SEQ ID NO: 67871 - DNA, 25 bp, SARS Virus
gtctttgttgacaactgtaacatca

SEQ ID NO: 67872 - DNA, 25 bp, SARS Virus
tctttgttgacgactgtaacatcag

SEQ ID NO: 67873 - DNA, 25 bp, SARS Virus
ctttgttgacgaatgtaacatcaga

SEQ ID NO: 67874 - DNA, 25 bp, SARS Virus
tttgttgacgacagtaacatcagaa

SEQ ID NO: 67875 - DNA, 25 bp, SARS Virus
ttgttgacgactataacatcagaaa

SEQ ID NO: 67876 - DNA, 25 bp, SARS Virus
tgttgacgactgaaacatcagaaac

SEQ ID NO: 67877 - DNA, 25 bp, SARS Virus
gttgacgactgtaacatcagaaact

SEQ ID NO: 67878 - DNA, 25 bp, SARS Virus
ttgacgactgtaacatcagaaacta

SEQ ID NO: 67879 - DNA, 25 bp, SARS Virus
tgacgactgtaaaatcagaaactac

SEQ ID NO: 67880 - DNA, 25 bp, SARS Virus
gacgactgtaacatcagaaactact

SEQ ID NO: 67881 - DNA, 25 bp, SARS Virus
acgactgtaacaacagaaactactt

SEQ ID NO: 67882 - DNA, 25 bp, SARS Virus
cgactgtaacataagaaactacttt

SEQ ID NO: 67883 - DNA, 25 bp, SARS Virus
gactgtaacatcagaaactacttta

SEQ ID NO: 67884 - DNA, 25 bp, SARS Virus
actgtaacatcaaaaactactttag

SEQ ID NO: 67885 - DNA, 25 bp, SARS Virus
ctgtaacatcagaaactactttaga

SEQ ID NO: 67886 - DNA, 25 bp, SARS Virus
tgtaacatcagaaactactttagag

SEQ ID NO: 67887 - DNA, 25 bp, SARS Virus
gtaacatcagaaactactttagaga

SEQ ID NO: 67888 - DNA, 25 bp, SARS Virus
taacatcagaaaatactttagagat

SEQ ID NO: 67889 - DNA, 25 bp, SARS Virus
aacatcagaaacaactttagagata

SEQ ID NO: 67890 - DNA, 25 bp, SARS Virus
acatcagaaactactttagagatac

SEQ ID NO: 67891 - DNA, 25 bp, SARS Virus
catcagaaactaatttagagatacc

SEQ ID NO: 67892 - DNA, 25 bp, SARS Virus
atcagaaactacattagagataccg

SEQ ID NO: 67893 - DNA, 25 bp, SARS Virus
tcagaaactactatagagataccga

SEQ ID NO: 67894 - DNA, 25 bp, SARS Virus
cagaaactacttaagagataccgat

SEQ ID NO: 67895 - DNA, 25 bp, SARS Virus
agaaactactttagagataccgatg

SEQ ID NO: 67896 - DNA, 25 bp, SARS Virus
gaaactactttaaagataccgatga

SEQ ID NO: 67897 - DNA, 25 bp, SARS Virus
aaactactttagagataccgatgat

SEQ ID NO: 67898 - DNA, 25 bp, SARS Virus
aactactttagaaataccgatgatt

SEQ ID NO: 67899 - DNA, 25 bp, SARS Virus
actactttagagataccgatgatta

SEQ ID NO: 67900 - DNA, 25 bp, SARS Virus
ctactttagagaaaccgatgattaa

SEQ ID NO: 67901 - DNA, 25 bp, SARS Virus
tactttagagataccgatgattaat

SEQ ID NO: 67902 - DNA, 25 bp, SARS Virus
actttagagataacgatgattaata

SEQ ID NO: 67903 - DNA, 25 bp, SARS Virus
ctttagagatacagatgattaatac

SEQ ID NO: 67904 - DNA, 25 bp, SARS Virus
tttagagataccaatgattaatact

SEQ ID NO: 67905 - DNA, 25 bp, SARS Virus
ttagagataccgatgattaatactg

SEQ ID NO: 67906 - DNA, 25 bp, SARS Virus
tagagataccgaagattaatactga

SEQ ID NO: 67907 - DNA, 25 bp, SARS Virus
agagataccgataattaatactgaa

SEQ ID NO: 67908 - DNA, 25 bp, SARS Virus
gagataccgatgattaatactgaac

SEQ ID NO: 67909 - DNA, 25 bp, SARS Virus
agataccgatgaataatactgaact

SEQ ID NO: 67910 - DNA, 25 bp, SARS Virus
gataccgatgataaatactgaactc

SEQ ID NO: 67911 - DNA, 25 bp, SARS Virus
ataccgatgattaatactgaactca

SEQ ID NO: 67912 - DNA, 25 bp, SARS Virus
taccgatgattaatactgaactcac

SEQ ID NO: 67913 - DNA, 25 bp, SARS Virus
accgatgattaaaactgaactcaca

SEQ ID NO: 67914 - DNA, 25 bp, SARS Virus
ccgatgattaatactgaactcacaa

SEQ ID NO: 67915 - DNA, 25 bp, SARS Virus
cgatgattaataatgaactcacaac

SEQ ID NO: 67916 - DNA, 25 bp, SARS Virus
gatgattaatacagaactcacaaca

SEQ ID NO: 67917 - DNA, 25 bp, SARS Virus
atgattaatactaaactcacaacag

SEQ ID NO: 67918 - DNA, 25 bp, SARS Virus
tgattaatactgaactcacaacagt

SEQ ID NO: 67919 - DNA, 25 bp, SARS Virus
gattaatactgaactcacaacagtt

SEQ ID NO: 67920 - DNA, 25 bp, SARS Virus
attaatactgaaatcacaacagtta

SEQ ID NO: 67921 - DNA, 25 bp, SARS Virus
ttaatactgaacacacaacagttac

SEQ ID NO: 67922 - DNA, 25 bp, SARS Virus
taatactgaactaacaacagttacg

SEQ ID NO: 67923 - DNA, 25 bp, SARS Virus
aatactgaactcacaacagttacga

SEQ ID NO: 67924 - DNA, 25 bp, SARS Virus
atactgaactcaaaacagttacgat

SEQ ID NO: 67925 - DNA, 25 bp, SARS Virus
tactgaactcacaacagttacgatc

SEQ ID NO: 67926 - DNA, 25 bp, SARS Virus
actgaactcacaacagttacgatct

SEQ ID NO: 67927 - DNA, 25 bp, SARS Virus
ctgaactcacaaaagttacgatctg

SEQ ID NO: 67928 - DNA, 25 bp, SARS Virus
tgaactcacaacagttacgatctga

SEQ ID NO: 67929 - DNA, 25 bp, SARS Virus
gaactcacaacaattacgatctgaa

SEQ ID NO: 67930 - DNA, 25 bp, SARS Virus
aactcacaacagatacgatctgaag

SEQ ID NO: 67931 - DNA, 25 bp, SARS Virus
actcacaacagtaacgatctgaagc

SEQ ID NO: 67932 - DNA, 25 bp, SARS Virus
ctcacaacagttacgatctgaagca

SEQ ID NO: 67933 - DNA, 25 bp, SARS Virus
tcacaacagttaagatctgaagcac

SEQ ID NO: 67934 - DNA, 25 bp, SARS Virus
cacaacagttacaatctgaagcacg

SEQ ID NO: 67935 - DNA, 25 bp, SARS Virus
acaacagttacgatctgaagcacgt

SEQ ID NO: 67936 - DNA, 25 bp, SARS Virus
caacagttacgaactgaagcacgtt

SEQ ID NO: 67937 - DNA, 25 bp, SARS Virus
aacagttacgatatgaagcacgttt

SEQ ID NO: 67938 - DNA, 25 bp, SARS Virus
acagttacgatcagaagcacgtttt

SEQ ID NO: 67939 - DNA, 25 bp, SARS Virus
cagttacgatctaaagcacgttttg

SEQ ID NO: 67940 - DNA, 25 bp, SARS Virus
agttacgatctgaagcacgttttgt

SEQ ID NO: 67941 - DNA, 25 bp, SARS Virus
gttacgatctgaagcacgttttgtg

SEQ ID NO: 67942 - DNA, 25 bp, SARS Virus
ttacgatctgaaacacgttttgtga

SEQ ID NO: 67943 - DNA, 25 bp, SARS Virus
tacgatctgaagaacgttttgtgat

SEQ ID NO: 67944 - DNA, 25 bp, SARS Virus
acgatctgaagcacgttttgtgatg

SEQ ID NO: 67945 - DNA, 25 bp, SARS Virus
cgatctgaagcaagttttgtgatgc

SEQ ID NO: 67946 - DNA, 25 bp, SARS Virus
gatctgaagcacattttgtgatgca

SEQ ID NO: 67947 - DNA, 25 bp, SARS Virus
atctgaagcacgatttgtgatgcag

SEQ ID NO: 67948 - DNA, 25 bp, SARS Virus
tctgaagcacgtattgtgatgcaga

SEQ ID NO: 67949 - DNA, 25 bp, SARS Virus
ctgaagcacgttatgtgatgcagat

SEQ ID NO: 67950 - DNA, 25 bp, SARS Virus
tgaagcacgtttagtgatgcagata

SEQ ID NO: 67951 - DNA, 25 bp, SARS Virus
gaagcacgttttatgatgcagatat

SEQ ID NO: 67952 - DNA, 25 bp, SARS Virus
aagcacgttttgagatgcagatata

SEQ ID NO: 67953 - DNA, 25 bp, SARS Virus
agcacgttttgtaatgcagatataa

SEQ ID NO: 67954 - DNA, 25 bp, SARS Virus
gcacgttttgtgatgcagatataac

SEQ ID NO: 67955 - DNA, 25 bp, SARS Virus
cacgttttgtgaagcagatataacc

SEQ ID NO: 67956 - DNA, 25 bp, SARS Virus
acgttttgtgatacagatataaccg

SEQ ID NO: 67957 - DNA, 25 bp, SARS Virus
cgttttgtgatgaagatataaccgc

SEQ ID NO: 67958 - DNA, 25 bp, SARS Virus
gttttgtgatgcagatataaccgct

SEQ ID NO: 67959 - DNA, 25 bp, SARS Virus
ttttgtgatgcaaatataaccgcta

SEQ ID NO: 67960 - DNA, 25 bp, SARS Virus
tttgtgatgcagatataaccgctag

SEQ ID NO: 67961 - DNA, 25 bp, SARS Virus
acattacggtgactcacgtggatga

SEQ ID NO: 67962 - DNA, 25 bp, SARS Virus
cattacggtgaaccacgtggatgag

SEQ ID NO: 67963 - DNA, 25 bp, SARS Virus
attacggtgaatcacgtggatgaga

SEQ ID NO: 67964 - DNA, 25 bp, SARS Virus
ttacggtgaatcccgtggatgagat

SEQ ID NO: 67965 - DNA, 25 bp, SARS Virus
tacggtgaatcacgtggatgagatc

SEQ ID NO: 67966 - DNA, 25 bp, SARS Virus
acggtgaatcacctggatgagatca

SEQ ID NO: 67967 - DNA, 25 bp, SARS Virus
cggtgaatcacgcggatgagatcac

SEQ ID NO: 67968 - DNA, 25 bp, SARS Virus
ggtgaatcacgtcgatgagatcacg

SEQ ID NO: 67969 - DNA, 25 bp, SARS Virus
gtgaatcacgtgcatgagatcacgg

SEQ ID NO: 67970 - DNA, 25 bp, SARS Virus
tgaatcacgtggctgagatcacggt

SEQ ID NO: 67971 - DNA, 25 bp, SARS Virus
gaatcacgtggacgagatcacggtg

SEQ ID NO: 67972 - DNA, 25 bp, SARS Virus
aatcacgtggatcagatcacggtgt

SEQ ID NO: 67973 - DNA, 25 bp, SARS Virus
atcacgtggatgcgatcacggtgtt

SEQ ID NO: 67974 - DNA, 25 bp, SARS Virus
tcacgtggatgacatcacggtgttc

SEQ ID NO: 67975 - DNA, 25 bp, SARS Virus
cacgtggatgagctcacggtgttct

SEQ ID NO: 67976 - DNA, 25 bp, SARS Virus
acgtggatgagaccacggtgttctc

SEQ ID NO: 67977 - DNA, 25 bp, SARS Virus
cgtggatgagatcacggtgttctcg

SEQ ID NO: 67978 - DNA, 25 bp, SARS Virus
gtggatgagatcccggtgttctcgt

SEQ ID NO: 67979 - DNA, 25 bp, SARS Virus
tggatgagatcacggtgttctcgtg

SEQ ID NO: 67980 - DNA, 25 bp, SARS Virus
ggatgagatcaccgtgttctcgtga

SEQ ID NO: 67981 - DNA, 25 bp, SARS Virus
gatgagatcacgctgttctcgtgat

SEQ ID NO: 67982 - DNA, 25 bp, SARS Virus
atgagatcacggcgttctcgtgata

SEQ ID NO: 67983 - DNA, 25 bp, SARS Virus
tgagatcacggtcttctcgtgatac

SEQ ID NO: 67984 - DNA, 25 bp, SARS Virus
gagatcacggtgctctcgtgataca

SEQ ID NO: 67985 - DNA, 25 bp, SARS Virus
agatcacggtgtcctcgtgatacac

SEQ ID NO: 67986 - DNA, 25 bp, SARS Virus
gatcacggtgttctcgtgatacact

SEQ ID NO: 67987 - DNA, 25 bp, SARS Virus
atcacggtgttcccgtgatacactc

SEQ ID NO: 67988 - DNA, 25 bp, SARS Virus
tcacggtgttctcgtgatacactct

SEQ ID NO: 67989 - DNA, 25 bp, SARS Virus
cacggtgttctcctgatacactctt

SEQ ID NO: 67990 - DNA, 25 bp, SARS Virus
acggtgttctcgcgatacactctta

SEQ ID NO: 67991 - DNA, 25 bp, SARS Virus
cggtgttctcgtcatacactcttaa

SEQ ID NO: 67992 - DNA, 25 bp, SARS Virus
ggtgttctcgtgctacactcttaat

SEQ ID NO: 67993 - DNA, 25 bp, SARS Virus
gtgttctcgtgacacactcttaatg

SEQ ID NO: 67994 - DNA, 25 bp, SARS Virus
tgttctcgtgatccactcttaatga

SEQ ID NO: 67995 - DNA, 25 bp, SARS Virus
gttctcgtgatacactcttaatgac

SEQ ID NO: 67996 - DNA, 25 bp, SARS Virus
ttctcgtgataccctcttaatgacc

SEQ ID NO: 67997 - DNA, 25 bp, SARS Virus
tctcgtgatacactcttaatgaccg

SEQ ID NO: 67998 - DNA, 25 bp, SARS Virus
ctcgtgatacacccttaatgaccga

SEQ ID NO: 67999 - DNA, 25 bp, SARS Virus
tcgtgatacactcttaatgaccgaa

SEQ ID NO: 68000 - DNA, 25 bp, SARS Virus
cgtgatacactcctaatgaccgaac

SEQ ID NO: 68001 - DNA, 25 bp, SARS Virus
gtgatacactctcaatgaccgaaca

SEQ ID NO: 68002 - DNA, 25 bp, SARS Virus
tgatacactcttcatgaccgaacat

SEQ ID NO: 68003 - DNA, 25 bp, SARS Virus
gatacactcttactgaccgaacatg

SEQ ID NO: 68004 - DNA, 25 bp, SARS Virus
atacactcttaacgaccgaacatgg

SEQ ID NO: 68005 - DNA, 25 bp, SARS Virus
tacactcttaatcaccgaacatggg

SEQ ID NO: 68006 - DNA, 25 bp, SARS Virus
acactcttaatgcccgaacatgggt

SEQ ID NO: 68007 - DNA, 25 bp, SARS Virus
cactcttaatgaccgaacatgggtt

SEQ ID NO: 68008 - DNA, 25 bp, SARS Virus
actcttaatgaccgaacatgggttg

SEQ ID NO: 68009 - DNA, 25 bp, SARS Virus
ctcttaatgacccaacatgggttgt

SEQ ID NO: 68010 - DNA, 25 bp, SARS Virus
tcttaatgaccgcacatgggttgtg

SEQ ID NO: 68011 - DNA, 25 bp, SARS Virus
cttaatgaccgaccatgggttgtga

SEQ ID NO: 68012 - DNA, 25 bp, SARS Virus
ttaatgaccgaacatgggttgtgag

SEQ ID NO: 68013 - DNA, 25 bp, SARS Virus
taatgaccgaacctgggttgtgagt

SEQ ID NO: 68014 - DNA, 25 bp, SARS Virus
aatgaccgaacacgggttgtgagtt

SEQ ID NO: 68015 - DNA, 25 bp, SARS Virus
atgaccgaacatcggttgtgagttg

SEQ ID NO: 68016 - DNA, 25 bp, SARS Virus
tgaccgaacatgcgttgtgagttgt

SEQ ID NO: 68017 - DNA, 25 bp, SARS Virus
gaccgaacatggcttgtgagttgta

SEQ ID NO: 68018 - DNA, 25 bp, SARS Virus
accgaacatgggctgtgagttgtag

SEQ ID NO: 68019 - DNA, 25 bp, SARS Virus
ccgaacatgggtcgtgagttgtaga

SEQ ID NO: 68020 - DNA, 25 bp, SARS Virus
cgaacatgggttctgagttgtagag

SEQ ID NO: 68021 - DNA, 25 bp, SARS Virus
gaacatgggttgcgagttgtagagt

SEQ ID NO: 68022 - DNA, 25 bp, SARS Virus
aacatgggttgtcagttgtagagtc

SEQ ID NO: 68023 - DNA, 25 bp, SARS Virus
acatgggttgtgcgttgtagagtct

SEQ ID NO: 68024 - DNA, 25 bp, SARS Virus
catgggttgtgacttgtagagtcta

SEQ ID NO: 68025 - DNA, 25 bp, SARS Virus
atgggttgtgagctgtagagtctac

SEQ ID NO: 68026 - DNA, 25 bp, SARS Virus
tgggttgtgagtcgtagagtctact

SEQ ID NO: 68027 - DNA, 25 bp, SARS Virus
gggttgtgagttctagagtctactc

SEQ ID NO: 68028 - DNA, 25 bp, SARS Virus
ggttgtgagttgcagagtctactca

SEQ ID NO: 68029 - DNA, 25 bp, SARS Virus
gttgtgagttgtcgagtctactcaa

SEQ ID NO: 68030 - DNA, 25 bp, SARS Virus
ttgtgagttgtacagtctactcaaa

SEQ ID NO: 68031 - DNA, 25 bp, SARS Virus
tgtgagttgtagcgtctactcaaaa

SEQ ID NO: 68032 - DNA, 25 bp, SARS Virus
gtgagttgtagactctactcaaaag

SEQ ID NO: 68033 - DNA, 25 bp, SARS Virus
tgagttgtagagcctactcaaaaga

SEQ ID NO: 68034 - DNA, 25 bp, SARS Virus
gagttgtagagtctactcaaaagat

SEQ ID NO: 68035 - DNA, 25 bp, SARS Virus
agttgtagagtccactcaaaagatc

SEQ ID NO: 68036 - DNA, 25 bp, SARS Virus
gttgtagagtctcctcaaaagatcg

SEQ ID NO: 68037 - DNA, 25 bp, SARS Virus
ttgtagagtctactcaaaagatcgt

SEQ ID NO: 68038 - DNA, 25 bp, SARS Virus
tgtagagtctacccaaaagatcgtt

SEQ ID NO: 68039 - DNA, 25 bp, SARS Virus
gtagagtctactcaaaagatcgtta

SEQ ID NO: 68040 - DNA, 25 bp, SARS Virus
tagagtctactccaaagatcgttac

SEQ ID NO: 68041 - DNA, 25 bp, SARS Virus
agagtctactcacaagatcgttaca

SEQ ID NO: 68042 - DNA, 25 bp, SARS Virus
gagtctactcaacagatcgttacaa

SEQ ID NO: 68043 - DNA, 25 bp, SARS Virus
agtctactcaaacgatcgttacaac

SEQ ID NO: 68044 - DNA, 25 bp, SARS Virus
gtctactcaaaacatcgttacaacg

SEQ ID NO: 68045 - DNA, 25 bp, SARS Virus
tctactcaaaagctcgttacaacgt

SEQ ID NO: 68046 - DNA, 25 bp, SARS Virus
ctactcaaaagaccgttacaacgtt

SEQ ID NO: 68047 - DNA, 25 bp, SARS Virus
tactcaaaagatcgttacaacgttt

SEQ ID NO: 68048 - DNA, 25 bp, SARS Virus
actcaaaagatccttacaacgttta

SEQ ID NO: 68049 - DNA, 25 bp, SARS Virus
ctcaaaagatcgctacaacgtttaa

SEQ ID NO: 68050 - DNA, 25 bp, SARS Virus
tcaaaagatcgtcacaacgtttaat

SEQ ID NO: 68051 - DNA, 25 bp, SARS Virus
caaaagatcgttccaacgtttaata

SEQ ID NO: 68052 - DNA, 25 bp, SARS Virus
aaaagatcgttacaacgtttaatag

SEQ ID NO: 68053 - DNA, 25 bp, SARS Virus
aaagatcgttaccacgtttaatagt

SEQ ID NO: 68054 - DNA, 25 bp, SARS Virus
aagatcgttacaccgtttaatagtt

SEQ ID NO: 68055 - DNA, 25 bp, SARS Virus
agatcgttacaacgtttaatagttt

SEQ ID NO: 68056 - DNA, 25 bp, SARS Virus
gatcgttacaacctttaatagtttt

SEQ ID NO: 68057 - DNA, 25 bp, SARS Virus
atcgttacaacgcttaatagttttc

SEQ ID NO: 68058 - DNA, 25 bp, SARS Virus
tcgttacaacgtctaatagttttcc

SEQ ID NO: 68059 - DNA, 25 bp, SARS Virus
cgttacaacgttcaatagttttcca

SEQ ID NO: 68060 - DNA, 25 bp, SARS Virus
gttacaacgtttcatagttttccag

SEQ ID NO: 68061 - DNA, 25 bp, SARS Virus
ttacaacgtttactagttttccagc

SEQ ID NO: 68062 - DNA, 25 bp, SARS Virus
tacaacgtttaacagttttccagcc

SEQ ID NO: 68063 - DNA, 25 bp, SARS Virus
acaacgtttaatcgttttccagccg

SEQ ID NO: 68064 - DNA, 25 bp, SARS Virus
caacgtttaatacttttccagccgt

SEQ ID NO: 68065 - DNA, 25 bp, SARS Virus
aacgtttaatagctttccagccgta

SEQ ID NO: 68066 - DNA, 25 bp, SARS Virus
acgtttaatagtcttccagccgtac

SEQ ID NO: 68067 - DNA, 25 bp, SARS Virus
cgtttaatagttctccagccgtacg

SEQ ID NO: 68068 - DNA, 25 bp, SARS Virus
gtttaatagtttcccagccgtacgt

SEQ ID NO: 68069 - DNA, 25 bp, SARS Virus
tttaatagttttccagccgtacgtt

SEQ ID NO: 68070 - DNA, 25 bp, SARS Virus
ttaatagttttccagccgtacgttt

SEQ ID NO: 68071 - DNA, 25 bp, SARS Virus
taatagttttcccgccgtacgtttt

SEQ ID NO: 68072 - DNA, 25 bp, SARS Virus
aatagttttccacccgtacgttttc

SEQ ID NO: 68073 - DNA, 25 bp, SARS Virus
atagttttccagccgtacgttttca

SEQ ID NO: 68074 - DNA, 25 bp, SARS Virus
tagttttccagccgtacgttttcat

SEQ ID NO: 68075 - DNA, 25 bp, SARS Virus
agttttccagccctacgttttcatg

SEQ ID NO: 68076 - DNA, 25 bp, SARS Virus
gttttccagccgcacgttttcatga

SEQ ID NO: 68077 - DNA, 25 bp, SARS Virus
ttttccagccgtccgttttcatgag

SEQ ID NO: 68078 - DNA, 25 bp, SARS Virus
tttccagccgtacgttttcatgaga

SEQ ID NO: 68079 - DNA, 25 bp, SARS Virus
ttccagccgtaccttttcatgagat

SEQ ID NO: 68080 - DNA, 25 bp, SARS Virus
tccagccgtacgctttcatgagatg

SEQ ID NO: 68081 - DNA, 25 bp, SARS Virus
ccagccgtacgtcttcatgagatgt

SEQ ID NO: 68082 - DNA, 25 bp, SARS Virus
cagccgtacgttctcatgagatgtg

SEQ ID NO: 68083 - DNA, 25 bp, SARS Virus
agccgtacgtttccatgagatgtga

SEQ ID NO: 68084 - DNA, 25 bp, SARS Virus
gccgtacgttttcatgagatgtgag

SEQ ID NO: 68085 - DNA, 25 bp, SARS Virus
ccgtacgttttcctgagatgtgagg

SEQ ID NO: 68086 - DNA, 25 bp, SARS Virus
cgtacgttttcacgagatgtgaggt

SEQ ID NO: 68087 - DNA, 25 bp, SARS Virus
gtacgttttcatcagatgtgaggtt

SEQ ID NO: 68088 - DNA, 25 bp, SARS Virus
tacgttttcatgcgatgtgaggttc

SEQ ID NO: 68089 - DNA, 25 bp, SARS Virus
acgttttcatgacatgtgaggttcc

SEQ ID NO: 68090 - DNA, 25 bp, SARS Virus
cgttttcatgagctgtgaggttcct

SEQ ID NO: 68091 - DNA, 25 bp, SARS Virus
gttttcatgagacgtgaggttcctg

SEQ ID NO: 68092 - DNA, 25 bp, SARS Virus
ttttcatgagatctgaggttcctgg

SEQ ID NO: 68093 - DNA, 25 bp, SARS Virus
tttcatgagatgcgaggttcctggt

SEQ ID NO: 68094 - DNA, 25 bp, SARS Virus
ttcatgagatgtcaggttcctggtg

SEQ ID NO: 68095 - DNA, 25 bp, SARS Virus
tcatgagatgtgcggttcctggtgg

SEQ ID NO: 68096 - DNA, 25 bp, SARS Virus
catgagatgtgacgttcctggtgga

SEQ ID NO: 68097 - DNA, 25 bp, SARS Virus
atgagatgtgagcttcctggtggac

SEQ ID NO: 68098 - DNA, 25 bp, SARS Virus
tgagatgtgaggctcctggtggacc

SEQ ID NO: 68099 - DNA, 25 bp, SARS Virus
gagatgtgaggtccctggtggacca

SEQ ID NO: 68100 - DNA, 25 bp, SARS Virus
agatgtgaggttcctggtggaccat

SEQ ID NO: 68101 - DNA, 25 bp, SARS Virus
gatgtgaggttcctggtggaccatg

SEQ ID NO: 68102 - DNA, 25 bp, SARS Virus
atgtgaggttcccggtggaccatga

SEQ ID NO: 68103 - DNA, 25 bp, SARS Virus
tgtgaggttcctcgtggaccatgac

SEQ ID NO: 68104 - DNA, 25 bp, SARS Virus
gtgaggttcctgctggaccatgacc

SEQ ID NO: 68105 - DNA, 25 bp, SARS Virus
tgaggttcctggcggaccatgacca

SEQ ID NO: 68106 - DNA, 25 bp, SARS Virus
gaggttcctggtcgaccatgaccat

SEQ ID NO: 68107 - DNA, 25 bp, SARS Virus
aggttcctggtgcaccatgaccatt

SEQ ID NO: 68108 - DNA, 25 bp, SARS Virus
ggttcctggtggcccatgaccattc

SEQ ID NO: 68109 - DNA, 25 bp, SARS Virus
gttcctggtggaccatgaccattct

SEQ ID NO: 68110 - DNA, 25 bp, SARS Virus
ttcctggtggaccatgaccattctc

SEQ ID NO: 68111 - DNA, 25 bp, SARS Virus
tcctggtggaccctgaccattctca

SEQ ID NO: 68112 - DNA, 25 bp, SARS Virus
cctggtggaccacgaccattctcag

SEQ ID NO: 68113 - DNA, 25 bp, SARS Virus
ctggtggaccatcaccattctcagt

SEQ ID NO: 68114 - DNA, 25 bp, SARS Virus
tggtggaccatgcccattctcagta

SEQ ID NO: 68115 - DNA, 25 bp, SARS Virus
ggtggaccatgaccattctcagtaa

SEQ ID NO: 68116 - DNA, 25 bp, SARS Virus
gtggaccatgaccattctcagtaaa

SEQ ID NO: 68117 - DNA, 25 bp, SARS Virus
tggaccatgacccttctcagtaaaa

SEQ ID NO: 68118 - DNA, 25 bp, SARS Virus
ggaccatgaccactctcagtaaaac

SEQ ID NO: 68119 - DNA, 25 bp, SARS Virus
gaccatgaccatcctcagtaaaacg

SEQ ID NO: 68120 - DNA, 25 bp, SARS Virus
accatgaccattctcagtaaaacgg

SEQ ID NO: 68121 - DNA, 25 bp, SARS Virus
ccatgaccattcccagtaaaacggt

SEQ ID NO: 68122 - DNA, 25 bp, SARS Virus
catgaccattctcagtaaaacggta

SEQ ID NO: 68123 - DNA, 25 bp, SARS Virus
atgaccattctccgtaaaacggtag

SEQ ID NO: 68124 - DNA, 25 bp, SARS Virus
tgaccattctcactaaaacggtagc

SEQ ID NO: 68125 - DNA, 25 bp, SARS Virus
gaccattctcagcaaaacggtagcc

SEQ ID NO: 68126 - DNA, 25 bp, SARS Virus
accattctcagtcaaacggtagcct

SEQ ID NO: 68127 - DNA, 25 bp, SARS Virus
ccattctcagtacaacggtagcctg

SEQ ID NO: 68128 - DNA, 25 bp, SARS Virus
cattctcagtaacacggtagcctga

SEQ ID NO: 68129 - DNA, 25 bp, SARS Virus
attctcagtaaaccggtagcctgaa

SEQ ID NO: 68130 - DNA, 25 bp, SARS Virus
ttctcagtaaaacggtagcctgaac

SEQ ID NO: 68131 - DNA, 25 bp, SARS Virus
tctcagtaaaaccgtagcctgaacg

SEQ ID NO: 68132 - DNA, 25 bp, SARS Virus
ctcagtaaaacgctagcctgaacga

SEQ ID NO: 68133 - DNA, 25 bp, SARS Virus
tcagtaaaacggcagcctgaacgag

SEQ ID NO: 68134 - DNA, 25 bp, SARS Virus
cagtaaaacggtcgcctgaacgaga

SEQ ID NO: 68135 - DNA, 25 bp, SARS Virus
agtaaaacggtaccctgaacgagag

SEQ ID NO: 68136 - DNA, 25 bp, SARS Virus
gtaaaacggtagcctgaacgagaga

SEQ ID NO: 68137 - DNA, 25 bp, SARS Virus
taaaacggtagcctgaacgagagat

SEQ ID NO: 68138 - DNA, 25 bp, SARS Virus
aaaacggtagcccgaacgagagata

SEQ ID NO: 68139 - DNA, 25 bp, SARS Virus
aaacggtagcctcaacgagagataa

SEQ ID NO: 68140 - DNA, 25 bp, SARS Virus
aacggtagcctgcacgagagataat

SEQ ID NO: 68141 - DNA, 25 bp, SARS Virus
acggtagcctgaccgagagataatg

SEQ ID NO: 68142 - DNA, 25 bp, SARS Virus
cggtagcctgaacgagagataatgg

SEQ ID NO: 68143 - DNA, 25 bp, SARS Virus
ggtagcctgaaccagagataatggg

SEQ ID NO: 68144 - DNA, 25 bp, SARS Virus
gtagcctgaacgcgagataatgggt

SEQ ID NO: 68145 - DNA, 25 bp, SARS Virus
tagcctgaacgacagataatgggta

SEQ ID NO: 68146 - DNA, 25 bp, SARS Virus
agcctgaacgagcgataatgggtag

SEQ ID NO: 68147 - DNA, 25 bp, SARS Virus
gcctgaacgagacataatgggtaga

SEQ ID NO: 68148 - DNA, 25 bp, SARS Virus
cctgaacgagagctaatgggtagac

SEQ ID NO: 68149 - DNA, 25 bp, SARS Virus
ctgaacgagagacaatgggtagacg

SEQ ID NO: 68150 - DNA, 25 bp, SARS Virus
tgaacgagagatcatgggtagacga

SEQ ID NO: 68151 - DNA, 25 bp, SARS Virus
gaacgagagatactgggtagacgag

SEQ ID NO: 68152 - DNA, 25 bp, SARS Virus
aacgagagataacgggtagacgagc

SEQ ID NO: 68153 - DNA, 25 bp, SARS Virus
acgagagataatcggtagacgagcg

SEQ ID NO: 68154 - DNA, 25 bp, SARS Virus
cgagagataatgcgtagacgagcgt

SEQ ID NO: 68155 - DNA, 25 bp, SARS Virus
gagagataatggctagacgagcgta

SEQ ID NO: 68156 - DNA, 25 bp, SARS Virus
agagataatgggcagacgagcgtat

SEQ ID NO: 68157 - DNA, 25 bp, SARS Virus
gagataatgggtcgacgagcgtatc

SEQ ID NO: 68158 - DNA, 25 bp, SARS Virus
agataatgggtacacgagcgtatca

SEQ ID NO: 68159 - DNA, 25 bp, SARS Virus
gataatgggtagccgagcgtatcac

SEQ ID NO: 68160 - DNA, 25 bp, SARS Virus
ataatgggtagacgagcgtatcaca

SEQ ID NO: 68161 - DNA, 25 bp, SARS Virus
taatgggtagaccagcgtatcacat

SEQ ID NO: 68162 - DNA, 25 bp, SARS Virus
aatgggtagacgcgcgtatcacata

SEQ ID NO: 68163 - DNA, 25 bp, SARS Virus
atgggtagacgaccgtatcacatat

SEQ ID NO: 68164 - DNA, 25 bp, SARS Virus
tgggtagacgagcgtatcacatatg

SEQ ID NO: 68165 - DNA, 25 bp, SARS Virus
gggtagacgagcctatcacatatgc

SEQ ID NO: 68166 - DNA, 25 bp, SARS Virus
ggtagacgagcgcatcacatatgcc

SEQ ID NO: 68167 - DNA, 25 bp, SARS Virus
gtagacgagcgtctcacatatgccg

SEQ ID NO: 68168 - DNA, 25 bp, SARS Virus
tagacgagcgtaccacatatgccgt

SEQ ID NO: 68169 - DNA, 25 bp, SARS Virus
agacgagcgtatcacatatgccgta

SEQ ID NO: 68170 - DNA, 25 bp, SARS Virus
gacgagcgtatcccatatgccgtac

SEQ ID NO: 68171 - DNA, 25 bp, SARS Virus
acgagcgtatcacatatgccgtacg

SEQ ID NO: 68172 - DNA, 25 bp, SARS Virus
cgagcgtatcacctatgccgtacga

SEQ ID NO: 68173 - DNA, 25 bp, SARS Virus
gagcgtatcacacatgccgtacgag

SEQ ID NO: 68174 - DNA, 25 bp, SARS Virus
agcgtatcacatctgccgtacgaga

SEQ ID NO: 68175 - DNA, 25 bp, SARS Virus
gcgtatcacatacgccgtacgagag

SEQ ID NO: 68176 - DNA, 25 bp, SARS Virus
cgtatcacatatcccgtacgagagt

SEQ ID NO: 68177 - DNA, 25 bp, SARS Virus
gtatcacatatgccgtacgagagta

SEQ ID NO: 68178 - DNA, 25 bp, SARS Virus
tatcacatatgccgtacgagagtac

SEQ ID NO: 68179 - DNA, 25 bp, SARS Virus
atcacatatgccctacgagagtacg

SEQ ID NO: 68180 - DNA, 25 bp, SARS Virus
tcacatatgccgcacgagagtacgt

SEQ ID NO: 68181 - DNA, 25 bp, SARS Virus
cacatatgccgtccgagagtacgtc

SEQ ID NO: 68182 - DNA, 25 bp, SARS Virus
acatatgccgtacgagagtacgtcg

SEQ ID NO: 68183 - DNA, 25 bp, SARS Virus
catatgccgtaccagagtacgtcga

SEQ ID NO: 68184 - DNA, 25 bp, SARS Virus
atatgccgtacgcgagtacgtcgac

SEQ ID NO: 68185 - DNA, 25 bp, SARS Virus
tatgccgtacgacagtacgtcgaca

SEQ ID NO: 68186 - DNA, 25 bp, SARS Virus
atgccgtacgagcgtacgtcgacaa

SEQ ID NO: 68187 - DNA, 25 bp, SARS Virus
tgccgtacgagactacgtcgacaac

SEQ ID NO: 68188 - DNA, 25 bp, SARS Virus
gccgtacgagagcacgtcgacaact

SEQ ID NO: 68189 - DNA, 25 bp, SARS Virus
ccgtacgagagtccgtcgacaacta

SEQ ID NO: 68190 - DNA, 25 bp, SARS Virus
cgtacgagagtacgtcgacaactac

SEQ ID NO: 68191 - DNA, 25 bp, SARS Virus
gtacgagagtacctcgacaactacg

SEQ ID NO: 68192 - DNA, 25 bp, SARS Virus
tacgagagtacgccgacaactacgg

SEQ ID NO: 68193 - DNA, 25 bp, SARS Virus
acgagagtacgtcgacaactacggg

SEQ ID NO: 68194 - DNA, 25 bp, SARS Virus
cgagagtacgtccacaactacggga

SEQ ID NO: 68195 - DNA, 25 bp, SARS Virus
gagagtacgtcgccaactacgggat

SEQ ID NO: 68196 - DNA, 25 bp, SARS Virus
agagtacgtcgacaactacgggata

SEQ ID NO: 68197 - DNA, 25 bp, SARS Virus
gagtacgtcgaccactacgggatac

SEQ ID NO: 68198 - DNA, 25 bp, SARS Virus
agtacgtcgacacctacgggataca

SEQ ID NO: 68199 - DNA, 25 bp, SARS Virus
gtacgtcgacaactacgggatacac

SEQ ID NO: 68200 - DNA, 25 bp, SARS Virus
tacgtcgacaaccacgggatacact

SEQ ID NO: 68201 - DNA, 25 bp, SARS Virus
acgtcgacaactccgggatacactt

SEQ ID NO: 68202 - DNA, 25 bp, SARS Virus
cgtcgacaactacgggatacacttt

SEQ ID NO: 68203 - DNA, 25 bp, SARS Virus
gtcgacaactaccggatacactttt

SEQ ID NO: 68204 - DNA, 25 bp, SARS Virus
tcgacaactacgcgatacacttttc

SEQ ID NO: 68205 - DNA, 25 bp, SARS Virus
cgacaactacggcatacacttttcc

SEQ ID NO: 68206 - DNA, 25 bp, SARS Virus
gacaactacgggctacacttttccg

SEQ ID NO: 68207 - DNA, 25 bp, SARS Virus
acaactacgggacacacttttccgt

SEQ ID NO: 68208 - DNA, 25 bp, SARS Virus
caactacgggatccacttttccgta

SEQ ID NO: 68209 - DNA, 25 bp, SARS Virus
aactacgggatacacttttccgtaa

SEQ ID NO: 68210 - DNA, 25 bp, SARS Virus
actacgggatacccttttccgtaat

SEQ ID NO: 68211 - DNA, 25 bp, SARS Virus
ctacgggatacacttttccgtaatt

SEQ ID NO: 68212 - DNA, 25 bp, SARS Virus
tacgggatacacctttccgtaattt

SEQ ID NO: 68213 - DNA, 25 bp, SARS Virus
acgggatacactcttccgtaatttt

SEQ ID NO: 68214 - DNA, 25 bp, SARS Virus
cgggatacacttctccgtaatttta

SEQ ID NO: 68215 - DNA, 25 bp, SARS Virus
gggatacactttcccgtaattttat

SEQ ID NO: 68216 - DNA, 25 bp, SARS Virus
ggatacacttttccgtaattttata

SEQ ID NO: 68217 - DNA, 25 bp, SARS Virus
gatacacttttccgtaattttataa

SEQ ID NO: 68218 - DNA, 25 bp, SARS Virus
atacacttttccctaattttataaa

SEQ ID NO: 68219 - DNA, 25 bp, SARS Virus
tacacttttccgcaattttataaac

SEQ ID NO: 68220 - DNA, 25 bp, SARS Virus
acacttttccgtcattttataaacg

SEQ ID NO: 68221 - DNA, 25 bp, SARS Virus
cacttttccgtacttttataaacgg

SEQ ID NO: 68222 - DNA, 25 bp, SARS Virus
acttttccgtaactttataaacggg

SEQ ID NO: 68223 - DNA, 25 bp, SARS Virus
cttttccgtaatcttataaacgggt

SEQ ID NO: 68224 - DNA, 25 bp, SARS Virus
ttttccgtaattctataaacgggta

SEQ ID NO: 68225 - DNA, 25 bp, SARS Virus
tttccgtaatttcataaacgggtat

SEQ ID NO: 68226 - DNA, 25 bp, SARS Virus
ttccgtaattttctaaacgggtatc

SEQ ID NO: 68227 - DNA, 25 bp, SARS Virus
tccgtaattttacaaacgggtatct

SEQ ID NO: 68228 - DNA, 25 bp, SARS Virus
ccgtaattttatcaacgggtatcta

SEQ ID NO: 68229 - DNA, 25 bp, SARS Virus
cgtaattttatacacgggtatctat

SEQ ID NO: 68230 - DNA, 25 bp, SARS Virus
gtaattttataaccgggtatctatt

SEQ ID NO: 68231 - DNA, 25 bp, SARS Virus
taattttataaacgggtatctattt

SEQ ID NO: 68232 - DNA, 25 bp, SARS Virus
aattttataaaccggtatctattta

SEQ ID NO: 68233 - DNA, 25 bp, SARS Virus
attttataaacgcgtatctatttac

SEQ ID NO: 68234 - DNA, 25 bp, SARS Virus
ttttataaacggctatctatttaca

SEQ ID NO: 68235 - DNA, 25 bp, SARS Virus
tttataaacgggcatctatttacat

SEQ ID NO: 68236 - DNA, 25 bp, SARS Virus
ttataaacgggtctctatttacatc

SEQ ID NO: 68237 - DNA, 25 bp, SARS Virus
tataaacgggtacctatttacatca

SEQ ID NO: 68238 - DNA, 25 bp, SARS Virus
ataaacgggtatctatttacatcat

SEQ ID NO: 68239 - DNA, 25 bp, SARS Virus
taaacgggtatccatttacatcatc

SEQ ID NO: 68240 - DNA, 25 bp, SARS Virus
aaacgggtatctctttacatcatct

SEQ ID NO: 68241 - DNA, 25 bp, SARS Virus
aacgggtatctacttacatcatctt

SEQ ID NO: 68242 - DNA, 25 bp, SARS Virus
acgggtatctatctacatcatctta

SEQ ID NO: 68243 - DNA, 25 bp, SARS Virus
cgggtatctattcacatcatcttag

SEQ ID NO: 68244 - DNA, 25 bp, SARS Virus
gggtatctatttccatcatcttagt

SEQ ID NO: 68245 - DNA, 25 bp, SARS Virus
ggtatctatttacatcatcttagta

SEQ ID NO: 68246 - DNA, 25 bp, SARS Virus
gtatctatttacctcatcttagtat

SEQ ID NO: 68247 - DNA, 25 bp, SARS Virus
tatctatttacaccatcttagtatg

SEQ ID NO: 68248 - DNA, 25 bp, SARS Virus
atctatttacatcatcttagtatgg

SEQ ID NO: 68249 - DNA, 25 bp, SARS Virus
tctatttacatcctcttagtatgga

SEQ ID NO: 68250 - DNA, 25 bp, SARS Virus
ctatttacatcaccttagtatggac

SEQ ID NO: 68251 - DNA, 25 bp, SARS Virus
tatttacatcatcttagtatggacg

SEQ ID NO: 68252 - DNA, 25 bp, SARS Virus
atttacatcatcctagtatggacgc

SEQ ID NO: 68253 - DNA, 25 bp, SARS Virus
tttacatcatctcagtatggacgcg

SEQ ID NO: 68254 - DNA, 25 bp, SARS Virus
ttacatcatcttcgtatggacgcgc

SEQ ID NO: 68255 - DNA, 25 bp, SARS Virus
tacatcatcttactatggacgcgca

SEQ ID NO: 68256 - DNA, 25 bp, SARS Virus
acatcatcttagcatggacgcgcac

SEQ ID NO: 68257 - DNA, 25 bp, SARS Virus
catcatcttagtctggacgcgcacg

SEQ ID NO: 68258 - DNA, 25 bp, SARS Virus
atcatcttagtacggacgcgcacgc

SEQ ID NO: 68259 - DNA, 25 bp, SARS Virus
tcatcttagtatcgacgcgcacgcg

SEQ ID NO: 68260 - DNA, 25 bp, SARS Virus
catcttagtatgcacgcgcacgcgc

SEQ ID NO: 68261 - DNA, 25 bp, SARS Virus
atcttagtatggccgcgcacgcgcg

SEQ ID NO: 68262 - DNA, 25 bp, SARS Virus
tcttagtatggacgcgcacgcgcgc

SEQ ID NO: 68263 - DNA, 25 bp, SARS Virus
cttagtatggacccgcacgcgcgca

SEQ ID NO: 68264 - DNA, 25 bp, SARS Virus
ttagtatggacgcgcacgcgcgcat

SEQ ID NO: 68265 - DNA, 25 bp, SARS Virus
tagtatggacgcccacgcgcgcatc

SEQ ID NO: 68266 - DNA, 25 bp, SARS Virus
agtatggacgcgcacgcgcgcatct

SEQ ID NO: 68267 - DNA, 25 bp, SARS Virus
gtatggacgcgcccgcgcgcatctc

SEQ ID NO: 68268 - DNA, 25 bp, SARS Virus
tatggacgcgcacgcgcgcatctca

SEQ ID NO: 68269 - DNA, 25 bp, SARS Virus
atggacgcgcacccgcgcatctcac

SEQ ID NO: 68270 - DNA, 25 bp, SARS Virus
tggacgcgcacgcgcgcatctcaca

SEQ ID NO: 68271 - DNA, 25 bp, SARS Virus
ggacgcgcacgcccgcatctcacaa

SEQ ID NO: 68272 - DNA, 25 bp, SARS Virus
gacgcgcacgcgcgcatctcacaaa

SEQ ID NO: 68273 - DNA, 25 bp, SARS Virus
acgcgcacgcgcccatctcacaaaa

SEQ ID NO: 68274 - DNA, 25 bp, SARS Virus
cgcgcacgcgcgcatctcacaaaac

SEQ ID NO: 68275 - DNA, 25 bp, SARS Virus
gcgcacgcgcgcctctcacaaaact

SEQ ID NO: 68276 - DNA, 25 bp, SARS Virus
cgcacgcgcgcacctcacaaaacta

SEQ ID NO: 68277 - DNA, 25 bp, SARS Virus
gcacgcgcgcatctcacaaaactat

SEQ ID NO: 68278 - DNA, 25 bp, SARS Virus
cacgcgcgcatcccacaaaactatt

SEQ ID NO: 68279 - DNA, 25 bp, SARS Virus
acgcgcgcatctcacaaaactattt

SEQ ID NO: 68280 - DNA, 25 bp, SARS Virus
cgcgcgcatctcccaaaactattta

SEQ ID NO: 68281 - DNA, 25 bp, SARS Virus
gcgcgcatctcacaaaactatttaa

SEQ ID NO: 68282 - DNA, 25 bp, SARS Virus
cgcgcatctcaccaaactatttaag

SEQ ID NO: 68283 - DNA, 25 bp, SARS Virus
gcgcatctcacacaactatttaagt

SEQ ID NO: 68284 - DNA, 25 bp, SARS Virus
cgcatctcacaacactatttaagtt

SEQ ID NO: 68285 - DNA, 25 bp, SARS Virus
gcatctcacaaacctatttaagttt

SEQ ID NO: 68286 - DNA, 25 bp, SARS Virus
catctcacaaaactatttaagtttc

SEQ ID NO: 68287 - DNA, 25 bp, SARS Virus
atctcacaaaaccatttaagtttca

SEQ ID NO: 68288 - DNA, 25 bp, SARS Virus
tctcacaaaactctttaagtttcac

SEQ ID NO: 68289 - DNA, 25 bp, SARS Virus
ctcacaaaactacttaagtttcact

SEQ ID NO: 68290 - DNA, 25 bp, SARS Virus
tcacaaaactatctaagtttcactt

SEQ ID NO: 68291 - DNA, 25 bp, SARS Virus
cacaaaactattcaagtttcactta

SEQ ID NO: 68292 - DNA, 25 bp, SARS Virus
acaaaactatttcagtttcacttaa

SEQ ID NO: 68293 - DNA, 25 bp, SARS Virus
caaaactatttacgtttcacttaag

SEQ ID NO: 68294 - DNA, 25 bp, SARS Virus
aaaactatttaactttcacttaagt

SEQ ID NO: 68295 - DNA, 25 bp, SARS Virus
aaactatttaagcttcacttaagtt

SEQ ID NO: 68296 - DNA, 25 bp, SARS Virus
aactatttaagtctcacttaagttg

SEQ ID NO: 68297 - DNA, 25 bp, SARS Virus
actatttaagttccacttaagttgt

SEQ ID NO: 68298 - DNA, 25 bp, SARS Virus
ctatttaagtttcacttaagttgtg

SEQ ID NO: 68299 - DNA, 25 bp, SARS Virus
tatttaagtttcccttaagttgtga

SEQ ID NO: 68300 - DNA, 25 bp, SARS Virus
atttaagtttcacttaagttgtgat

SEQ ID NO: 68301 - DNA, 25 bp, SARS Virus
tttaagtttcacctaagttgtgatc

SEQ ID NO: 68302 - DNA, 25 bp, SARS Virus
ttaagtttcactcaagttgtgatct

SEQ ID NO: 68303 - DNA, 25 bp, SARS Virus
taagtttcacttcagttgtgatctt

SEQ ID NO: 68304 - DNA, 25 bp, SARS Virus
aagtttcacttacgttgtgatcttg

SEQ ID NO: 68305 - DNA, 25 bp, SARS Virus
agtttcacttaacttgtgatcttgt

SEQ ID NO: 68306 - DNA, 25 bp, SARS Virus
gtttcacttaagctgtgatcttgtc

SEQ ID NO: 68307 - DNA, 25 bp, SARS Virus
tttcacttaagtcgtgatcttgtca

SEQ ID NO: 68308 - DNA, 25 bp, SARS Virus
ttcacttaagttctgatcttgtcat

SEQ ID NO: 68309 - DNA, 25 bp, SARS Virus
tcacttaagttgcgatcttgtcata

SEQ ID NO: 68310 - DNA, 25 bp, SARS Virus
cacttaagttgtcatcttgtcatac

SEQ ID NO: 68311 - DNA, 25 bp, SARS Virus
acttaagttgtgctcttgtcataca

SEQ ID NO: 68312 - DNA, 25 bp, SARS Virus
cttaagttgtgaccttgtcatacaa

SEQ ID NO: 68313 - DNA, 25 bp, SARS Virus
ttaagttgtgatcttgtcatacaaa

SEQ ID NO: 68314 - DNA, 25 bp, SARS Virus
taagttgtgatcctgtcatacaaaa

SEQ ID NO: 68315 - DNA, 25 bp, SARS Virus
aagttgtgatctcgtcatacaaaag

SEQ ID NO: 68316 - DNA, 25 bp, SARS Virus
agttgtgatcttctcatacaaaaga

SEQ ID NO: 68317 - DNA, 25 bp, SARS Virus
gttgtgatcttgccatacaaaagac

SEQ ID NO: 68318 - DNA, 25 bp, SARS Virus
ttgtgatcttgtcatacaaaagacg

SEQ ID NO: 68319 - DNA, 25 bp, SARS Virus
tgtgatcttgtcctacaaaagacgt

SEQ ID NO: 68320 - DNA, 25 bp, SARS Virus
gtgatcttgtcacacaaaagacgtg

SEQ ID NO: 68321 - DNA, 25 bp, SARS Virus
tgatcttgtcatccaaaagacgtga

SEQ ID NO: 68322 - DNA, 25 bp, SARS Virus
gatcttgtcatacaaaagacgtgac

SEQ ID NO: 68323 - DNA, 25 bp, SARS Virus
atcttgtcataccaaagacgtgaca

SEQ ID NO: 68324 - DNA, 25 bp, SARS Virus
tcttgtcatacacaagacgtgacat

SEQ ID NO: 68325 - DNA, 25 bp, SARS Virus
cttgtcatacaacagacgtgacatt

SEQ ID NO: 68326 - DNA, 25 bp, SARS Virus
ttgtcatacaaacgacgtgacattt

SEQ ID NO: 68327 - DNA, 25 bp, SARS Virus
tgtcatacaaaacacgtgacattta

SEQ ID NO: 68328 - DNA, 25 bp, SARS Virus
gtcatacaaaagccgtgacatttac

SEQ ID NO: 68329 - DNA, 25 bp, SARS Virus
tcatacaaaagacgtgacatttacg

SEQ ID NO: 68330 - DNA, 25 bp, SARS Virus
catacaaaagacctgacatttacgt

SEQ ID NO: 68331 - DNA, 25 bp, SARS Virus
atacaaaagacgcgacatttacgta

SEQ ID NO: 68332 - DNA, 25 bp, SARS Virus
tacaaaagacgtcacatttacgtaa

SEQ ID NO: 68333 - DNA, 25 bp, SARS Virus
acaaaagacgtgccatttacgtaac

SEQ ID NO: 68334 - DNA, 25 bp, SARS Virus
caaaagacgtgacatttacgtaacg

SEQ ID NO: 68335 - DNA, 25 bp, SARS Virus
aaaagacgtgacctttacgtaacgg

SEQ ID NO: 68336 - DNA, 25 bp, SARS Virus
aaagacgtgacacttacgtaacggt

SEQ ID NO: 68337 - DNA, 25 bp, SARS Virus
aagacgtgacatctacgtaacggtc

SEQ ID NO: 68338 - DNA, 25 bp, SARS Virus
agacgtgacattcacgtaacggtct

SEQ ID NO: 68339 - DNA, 25 bp, SARS Virus
gacgtgacatttccgtaacggtctt

SEQ ID NO: 68340 - DNA, 25 bp, SARS Virus
acgtgacatttacgtaacggtcttt

SEQ ID NO: 68341 - DNA, 25 bp, SARS Virus
cgtgacatttacctaacggtctttg

SEQ ID NO: 68342 - DNA, 25 bp, SARS Virus
gtgacatttacgcaacggtctttgt

SEQ ID NO: 68343 - DNA, 25 bp, SARS Virus
tgacatttacgtcacggtctttgtt

SEQ ID NO: 68344 - DNA, 25 bp, SARS Virus
gacatttacgtaccggtctttgttg

SEQ ID NO: 68345 - DNA, 25 bp, SARS Virus
acatttacgtaacggtctttgttga

SEQ ID NO: 68346 - DNA, 25 bp, SARS Virus
catttacgtaaccgtctttgttgac

SEQ ID NO: 68347 - DNA, 25 bp, SARS Virus
atttacgtaacgctctttgttgacg

SEQ ID NO: 68348 - DNA, 25 bp, SARS Virus
tttacgtaacggcctttgttgacga

SEQ ID NO: 68349 - DNA, 25 bp, SARS Virus
ttacgtaacggtctttgttgacgac

SEQ ID NO: 68350 - DNA, 25 bp, SARS Virus
tacgtaacggtccttgttgacgact

SEQ ID NO: 68351 - DNA, 25 bp, SARS Virus
acgtaacggtctctgttgacgactg

SEQ ID NO: 68352 - DNA, 25 bp, SARS Virus
cgtaacggtcttcgttgacgactgt

SEQ ID NO: 68353 - DNA, 25 bp, SARS Virus
gtaacggtctttcttgacgactgta

SEQ ID NO: 68354 - DNA, 25 bp, SARS Virus
taacggtctttgctgacgactgtaa

SEQ ID NO: 68355 - DNA, 25 bp, SARS Virus
aacggtctttgtcgacgactgtaac

SEQ ID NO: 68356 - DNA, 25 bp, SARS Virus
acggtctttgttcacgactgtaaca

SEQ ID NO: 68357 - DNA, 25 bp, SARS Virus
cggtctttgttgccgactgtaacat

SEQ ID NO: 68358 - DNA, 25 bp, SARS Virus
ggtctttgttgacgactgtaacatc

SEQ ID NO: 68359 - DNA, 25 bp, SARS Virus
gtctttgttgaccactgtaacatca

SEQ ID NO: 68360 - DNA, 25 bp, SARS Virus
tctttgttgacgcctgtaacatcag

SEQ ID NO: 68361 - DNA, 25 bp, SARS Virus
ctttgttgacgactgtaacatcaga

SEQ ID NO: 68362 - DNA, 25 bp, SARS Virus
tttgttgacgaccgtaacatcagaa

SEQ ID NO: 68363 - DNA, 25 bp, SARS Virus
ttgttgacgactctaacatcagaaa

SEQ ID NO: 68364 - DNA, 25 bp, SARS Virus
tgttgacgactgcaacatcagaaac

SEQ ID NO: 68365 - DNA, 25 bp, SARS Virus
gttgacgactgtcacatcagaaact

SEQ ID NO: 68366 - DNA, 25 bp, SARS Virus
ttgacgactgtaccatcagaaacta

SEQ ID NO: 68367 - DNA, 25 bp, SARS Virus
tgacgactgtaacatcagaaactac

SEQ ID NO: 68368 - DNA, 25 bp, SARS Virus
gacgactgtaacctcagaaactact

SEQ ID NO: 68369 - DNA, 25 bp, SARS Virus
acgactgtaacaccagaaactactt

SEQ ID NO: 68370 - DNA, 25 bp, SARS Virus
cgactgtaacatcagaaactacttt

SEQ ID NO: 68371 - DNA, 25 bp, SARS Virus
gactgtaacatccgaaactacttta

SEQ ID NO: 68372 - DNA, 25 bp, SARS Virus
actgtaacatcacaaactactttag

SEQ ID NO: 68373 - DNA, 25 bp, SARS Virus
ctgtaacatcagcaactactttaga

SEQ ID NO: 68374 - DNA, 25 bp, SARS Virus
tgtaacatcagacactactttagag

SEQ ID NO: 68375 - DNA, 25 bp, SARS Virus
gtaacatcagaacctactttagaga

SEQ ID NO: 68376 - DNA, 25 bp, SARS Virus
taacatcagaaactactttagagat

SEQ ID NO: 68377 - DNA, 25 bp, SARS Virus
aacatcagaaaccactttagagata

SEQ ID NO: 68378 - DNA, 25 bp, SARS Virus
acatcagaaactcctttagagatac

SEQ ID NO: 68379 - DNA, 25 bp, SARS Virus
catcagaaactactttagagatacc

SEQ ID NO: 68380 - DNA, 25 bp, SARS Virus
atcagaaactaccttagagataccg

SEQ ID NO: 68381 - DNA, 25 bp, SARS Virus
tcagaaactactctagagataccga

SEQ ID NO: 68382 - DNA, 25 bp, SARS Virus
cagaaactacttcagagataccgat

SEQ ID NO: 68383 - DNA, 25 bp, SARS Virus
agaaactactttcgagataccgatg

SEQ ID NO: 68384 - DNA, 25 bp, SARS Virus
gaaactactttacagataccgatga

SEQ ID NO: 68385 - DNA, 25 bp, SARS Virus
aaactactttagcgataccgatgat

SEQ ID NO: 68386 - DNA, 25 bp, SARS Virus
aactactttagacataccgatgatt

SEQ ID NO: 68387 - DNA, 25 bp, SARS Virus
actactttagagctaccgatgatta

SEQ ID NO: 68388 - DNA, 25 bp, SARS Virus
ctactttagagacaccgatgattaa

SEQ ID NO: 68389 - DNA, 25 bp, SARS Virus
tactttagagatcccgatgattaat

SEQ ID NO: 68390 - DNA, 25 bp, SARS Virus
actttagagataccgatgattaata

SEQ ID NO: 68391 - DNA, 25 bp, SARS Virus
ctttagagataccgatgattaatac

SEQ ID NO: 68392 - DNA, 25 bp, SARS Virus
tttagagatacccatgattaatact

SEQ ID NO: 68393 - DNA, 25 bp, SARS Virus
ttagagataccgctgattaatactg

SEQ ID NO: 68394 - DNA, 25 bp, SARS Virus
tagagataccgacgattaatactga

SEQ ID NO: 68395 - DNA, 25 bp, SARS Virus
agagataccgatcattaatactgaa

SEQ ID NO: 68396 - DNA, 25 bp, SARS Virus
gagataccgatgcttaatactgaac

SEQ ID NO: 68397 - DNA, 25 bp, SARS Virus
agataccgatgactaatactgaact

SEQ ID NO: 68398 - DNA, 25 bp, SARS Virus
gataccgatgatcaatactgaactc

SEQ ID NO: 68399 - DNA, 25 bp, SARS Virus
ataccgatgattcatactgaactca

SEQ ID NO: 68400 - DNA, 25 bp, SARS Virus
taccgatgattactactgaactcac

SEQ ID NO: 68401 - DNA, 25 bp, SARS Virus
accgatgattaacactgaactcaca

SEQ ID NO: 68402 - DNA, 25 bp, SARS Virus
ccgatgattaatcctgaactcacaa

SEQ ID NO: 68403 - DNA, 25 bp, SARS Virus
cgatgattaatactgaactcacaac

SEQ ID NO: 68404 - DNA, 25 bp, SARS Virus
gatgattaataccgaactcacaaca

SEQ ID NO: 68405 - DNA, 25 bp, SARS Virus
atgattaatactcaactcacaacag

SEQ ID NO: 68406 - DNA, 25 bp, SARS Virus
tgattaatactgcactcacaacagt

SEQ ID NO: 68407 - DNA, 25 bp, SARS Virus
gattaatactgacctcacaacagtt

SEQ ID NO: 68408 - DNA, 25 bp, SARS Virus
attaatactgaactcacaacagtta

SEQ ID NO: 68409 - DNA, 25 bp, SARS Virus
ttaatactgaacccacaacagttac

SEQ ID NO: 68410 - DNA, 25 bp, SARS Virus
taatactgaactcacaacagttacg

SEQ ID NO: 68411 - DNA, 25 bp, SARS Virus
aatactgaactcccaacagttacga

SEQ ID NO: 68412 - DNA, 25 bp, SARS Virus
atactgaactcacaacagttacgat

SEQ ID NO: 68413 - DNA, 25 bp, SARS Virus
tactgaactcaccacagttacgatc

SEQ ID NO: 68414 - DNA, 25 bp, SARS Virus
actgaactcacaccagttacgatct

SEQ ID NO: 68415 - DNA, 25 bp, SARS Virus
ctgaactcacaacagttacgatctg

SEQ ID NO: 68416 - DNA, 25 bp, SARS Virus
tgaactcacaaccgttacgatctga

SEQ ID NO: 68417 - DNA, 25 bp, SARS Virus
gaactcacaacacttacgatctgaa

SEQ ID NO: 68418 - DNA, 25 bp, SARS Virus
aactcacaacagctacgatctgaag

SEQ ID NO: 68419 - DNA, 25 bp, SARS Virus
actcacaacagtcacgatctgaagc

SEQ ID NO: 68420 - DNA, 25 bp, SARS Virus
ctcacaacagttccgatctgaagca

SEQ ID NO: 68421 - DNA, 25 bp, SARS Virus
tcacaacagttacgatctgaagcac

SEQ ID NO: 68422 - DNA, 25 bp, SARS Virus
cacaacagttaccatctgaagcacg

SEQ ID NO: 68423 - DNA, 25 bp, SARS Virus
acaacagttacgctctgaagcacgt

SEQ ID NO: 68424 - DNA, 25 bp, SARS Virus
caacagttacgacctgaagcacgtt

SEQ ID NO: 68425 - DNA, 25 bp, SARS Virus
aacagttacgatctgaagcacgttt

SEQ ID NO: 68426 - DNA, 25 bp, SARS Virus
acagttacgatccgaagcacgtttt

SEQ ID NO: 68427 - DNA, 25 bp, SARS Virus
cagttacgatctcaagcacgttttg

SEQ ID NO: 68428 - DNA, 25 bp, SARS Virus
agttacgatctgcagcacgttttgt

SEQ ID NO: 68429 - DNA, 25 bp, SARS Virus
gttacgatctgacgcacgttttgtg

SEQ ID NO: 68430 - DNA, 25 bp, SARS Virus
ttacgatctgaaccacgttttgtga

SEQ ID NO: 68431 - DNA, 25 bp, SARS Virus
tacgatctgaagcacgttttgtgat

SEQ ID NO: 68432 - DNA, 25 bp, SARS Virus
acgatctgaagcccgttttgtgatg

SEQ ID NO: 68433 - DNA, 25 bp, SARS Virus
cgatctgaagcacgttttgtgatgc

SEQ ID NO: 68434 - DNA, 25 bp, SARS Virus
gatctgaagcaccttttgtgatgca

SEQ ID NO: 68435 - DNA, 25 bp, SARS Virus
atctgaagcacgctttgtgatgcag

SEQ ID NO: 68436 - DNA, 25 bp, SARS Virus
tctgaagcacgtcttgtgatgcaga

SEQ ID NO: 68437 - DNA, 25 bp, SARS Virus
ctgaagcacgttctgtgatgcagat

SEQ ID NO: 68438 - DNA, 25 bp, SARS Virus
tgaagcacgtttcgtgatgcagata

SEQ ID NO: 68439 - DNA, 25 bp, SARS Virus
gaagcacgttttctgatgcagatat

SEQ ID NO: 68440 - DNA, 25 bp, SARS Virus
aagcacgttttgcgatgcagatata

SEQ ID NO: 68441 - DNA, 25 bp, SARS Virus
agcacgttttgtcatgcagatataa

SEQ ID NO: 68442 - DNA, 25 bp, SARS Virus
gcacgttttgtgctgcagatataac

SEQ ID NO: 68443 - DNA, 25 bp, SARS Virus
cacgttttgtgacgcagatataacc

SEQ ID NO: 68444 - DNA, 25 bp, SARS Virus
acgttttgtgatccagatataaccg

SEQ ID NO: 68445 - DNA, 25 bp, SARS Virus
cgttttgtgatgcagatataaccgc

SEQ ID NO: 68446 - DNA, 25 bp, SARS Virus
gttttgtgatgccgatataaccgct

SEQ ID NO: 68447 - DNA, 25 bp, SARS Virus
ttttgtgatgcacatataaccgcta

SEQ ID NO: 68448 - DNA, 25 bp, SARS Virus
tttgtgatgcagctataaccgctag

SEQ ID NO: 68449 - DNA, 25 bp, SARS Virus
acattacggtgagtcacgtggatga

SEQ ID NO: 68450 - DNA, 25 bp, SARS Virus
cattacggtgaagcacgtggatgag

SEQ ID NO: 68451 - DNA, 25 bp, SARS Virus
attacggtgaatgacgtggatgaga

SEQ ID NO: 68452 - DNA, 25 bp, SARS Virus
ttacggtgaatcgcgtggatgagat

SEQ ID NO: 68453 - DNA, 25 bp, SARS Virus
tacggtgaatcaggtggatgagatc

SEQ ID NO: 68454 - DNA, 25 bp, SARS Virus
acggtgaatcacgtggatgagatca

SEQ ID NO: 68455 - DNA, 25 bp, SARS Virus
cggtgaatcacggggatgagatcac

SEQ ID NO: 68456 - DNA, 25 bp, SARS Virus
ggtgaatcacgtggatgagatcacg

SEQ ID NO: 68457 - DNA, 25 bp, SARS Virus
gtgaatcacgtggatgagatcacgg

SEQ ID NO: 68458 - DNA, 25 bp, SARS Virus
tgaatcacgtgggtgagatcacggt

SEQ ID NO: 68459 - DNA, 25 bp, SARS Virus
gaatcacgtggaggagatcacggtg

SEQ ID NO: 68460 - DNA, 25 bp, SARS Virus
aatcacgtggatgagatcacggtgt

SEQ ID NO: 68461 - DNA, 25 bp, SARS Virus
atcacgtggatgggatcacggtgtt

SEQ ID NO: 68462 - DNA, 25 bp, SARS Virus
tcacgtggatgagatcacggtgttc

SEQ ID NO: 68463 - DNA, 25 bp, SARS Virus
cacgtggatgaggtcacggtgttct

SEQ ID NO: 68464 - DNA, 25 bp, SARS Virus
acgtggatgagagcacggtgttctc

SEQ ID NO: 68465 - DNA, 25 bp, SARS Virus
cgtggatgagatgacggtgttctcg

SEQ ID NO: 68466 - DNA, 25 bp, SARS Virus
gtggatgagatcgcggtgttctcgt

SEQ ID NO: 68467 - DNA, 25 bp, SARS Virus
tggatgagatcagggtgttctcgtg

SEQ ID NO: 68468 - DNA, 25 bp, SARS Virus
ggatgagatcacggtgttctcgtga

SEQ ID NO: 68469 - DNA, 25 bp, SARS Virus
gatgagatcacggtgttctcgtgat

SEQ ID NO: 68470 - DNA, 25 bp, SARS Virus
atgagatcacggggttctcgtgata

SEQ ID NO: 68471 - DNA, 25 bp, SARS Virus
tgagatcacggtgttctcgtgatac

SEQ ID NO: 68472 - DNA, 25 bp, SARS Virus
gagatcacggtggtctcgtgataca

SEQ ID NO: 68473 - DNA, 25 bp, SARS Virus
agatcacggtgtgctcgtgatacac

SEQ ID NO: 68474 - DNA, 25 bp, SARS Virus
gatcacggtgttgtcgtgatacact

SEQ ID NO: 68475 - DNA, 25 bp, SARS Virus
atcacggtgttcgcgtgatacactc

SEQ ID NO: 68476 - DNA, 25 bp, SARS Virus
tcacggtgttctggtgatacactct

SEQ ID NO: 68477 - DNA, 25 bp, SARS Virus
cacggtgttctcgtgatacactctt

SEQ ID NO: 68478 - DNA, 25 bp, SARS Virus
acggtgttctcgggatacactctta

SEQ ID NO: 68479 - DNA, 25 bp, SARS Virus
cggtgttctcgtgatacactcttaa

SEQ ID NO: 68480 - DNA, 25 bp, SARS Virus
ggtgttctcgtggtacactcttaat

SEQ ID NO: 68481 - DNA, 25 bp, SARS Virus
gtgttctcgtgagacactcttaatg

SEQ ID NO: 68482 - DNA, 25 bp, SARS Virus
tgttctcgtgatgcactcttaatga

SEQ ID NO: 68483 - DNA, 25 bp, SARS Virus
gttctcgtgatagactcttaatgac

SEQ ID NO: 68484 - DNA, 25 bp, SARS Virus
ttctcgtgatacgctcttaatgacc

SEQ ID NO: 68485 - DNA, 25 bp, SARS Virus
tctcgtgatacagtcttaatgaccg

SEQ ID NO: 68486 - DNA, 25 bp, SARS Virus
ctcgtgatacacgcttaatgaccga

SEQ ID NO: 68487 - DNA, 25 bp, SARS Virus
tcgtgatacactgttaatgaccgaa

SEQ ID NO: 68488 - DNA, 25 bp, SARS Virus
cgtgatacactcgtaatgaccgaac

SEQ ID NO: 68489 - DNA, 25 bp, SARS Virus
gtgatacactctgaatgaccgaaca

SEQ ID NO: 68490 - DNA, 25 bp, SARS Virus
tgatacactcttgatgaccgaacat

SEQ ID NO: 68491 - DNA, 25 bp, SARS Virus
gatacactcttagtgaccgaacatg

SEQ ID NO: 68492 - DNA, 25 bp, SARS Virus
atacactcttaaggaccgaacatgg

SEQ ID NO: 68493 - DNA, 25 bp, SARS Virus
tacactcttaatgaccgaacatggg

SEQ ID NO: 68494 - DNA, 25 bp, SARS Virus
acactcttaatggccgaacatgggt

SEQ ID NO: 68495 - DNA, 25 bp, SARS Virus
cactcttaatgagcgaacatgggtt

SEQ ID NO: 68496 - DNA, 25 bp, SARS Virus
actcttaatgacggaacatgggttg

SEQ ID NO: 68497 - DNA, 25 bp, SARS Virus
ctcttaatgaccgaacatgggttgt

SEQ ID NO: 68498 - DNA, 25 bp, SARS Virus
tcttaatgaccggacatgggttgtg

SEQ ID NO: 68499 - DNA, 25 bp, SARS Virus
cttaatgaccgagcatgggttgtga

SEQ ID NO: 68500 - DNA, 25 bp, SARS Virus
ttaatgaccgaagatgggttgtgag

SEQ ID NO: 68501 - DNA, 25 bp, SARS Virus
taatgaccgaacgtgggttgtgagt

SEQ ID NO: 68502 - DNA, 25 bp, SARS Virus
aatgaccgaacaggggttgtgagtt

SEQ ID NO: 68503 - DNA, 25 bp, SARS Virus
atgaccgaacatgggttgtgagttg

SEQ ID NO: 68504 - DNA, 25 bp, SARS Virus
tgaccgaacatgggttgtgagttgt

SEQ ID NO: 68505 - DNA, 25 bp, SARS Virus
gaccgaacatgggttgtgagttgta

SEQ ID NO: 68506 - DNA, 25 bp, SARS Virus
accgaacatggggtgtgagttgtag

SEQ ID NO: 68507 - DNA, 25 bp, SARS Virus
ccgaacatgggtggtgagttgtaga

SEQ ID NO: 68508 - DNA, 25 bp, SARS Virus
cgaacatgggttgtgagttgtagag

SEQ ID NO: 68509 - DNA, 25 bp, SARS Virus
gaacatgggttgggagttgtagagt

SEQ ID NO: 68510 - DNA, 25 bp, SARS Virus
aacatgggttgtgagttgtagagtc

SEQ ID NO: 68511 - DNA, 25 bp, SARS Virus
acatgggttgtgggttgtagagtct

SEQ ID NO: 68512 - DNA, 25 bp, SARS Virus
catgggttgtgagttgtagagtcta

SEQ ID NO: 68513 - DNA, 25 bp, SARS Virus
atgggttgtgaggtgtagagtctac

SEQ ID NO: 68514 - DNA, 25 bp, SARS Virus
tgggttgtgagtggtagagtctact

SEQ ID NO: 68515 - DNA, 25 bp, SARS Virus
gggttgtgagttgtagagtctactc

SEQ ID NO: 68516 - DNA, 25 bp, SARS Virus
ggttgtgagttggagagtctactca

SEQ ID NO: 68517 - DNA, 25 bp, SARS Virus
gttgtgagttgtggagtctactcaa

SEQ ID NO: 68518 - DNA, 25 bp, SARS Virus
ttgtgagttgtagagtctactcaaa

SEQ ID NO: 68519 - DNA, 25 bp, SARS Virus
tgtgagttgtagggtctactcaaaa

SEQ ID NO: 68520 - DNA, 25 bp, SARS Virus
gtgagttgtagagtctactcaaaag

SEQ ID NO: 68521 - DNA, 25 bp, SARS Virus
tgagttgtagaggctactcaaaaga

SEQ ID NO: 68522 - DNA, 25 bp, SARS Virus
gagttgtagagtgtactcaaaagat

SEQ ID NO: 68523 - DNA, 25 bp, SARS Virus
agttgtagagtcgactcaaaagatc

SEQ ID NO: 68524 - DNA, 25 bp, SARS Virus
gttgtagagtctgctcaaaagatcg

SEQ ID NO: 68525 - DNA, 25 bp, SARS Virus
ttgtagagtctagtcaaaagatcgt

SEQ ID NO: 68526 - DNA, 25 bp, SARS Virus
tgtagagtctacgcaaaagatcgtt

SEQ ID NO: 68527 - DNA, 25 bp, SARS Virus
gtagagtctactgaaaagatcgtta

SEQ ID NO: 68528 - DNA, 25 bp, SARS Virus
tagagtctactcgaaagatcgttac

SEQ ID NO: 68529 - DNA, 25 bp, SARS Virus
agagtctactcagaagatcgttaca

SEQ ID NO: 68530 - DNA, 25 bp, SARS Virus
gagtctactcaagagatcgttacaa

SEQ ID NO: 68531 - DNA, 25 bp, SARS Virus
agtctactcaaaggatcgttacaac

SEQ ID NO: 68532 - DNA, 25 bp, SARS Virus
gtctactcaaaagatcgttacaacg

SEQ ID NO: 68533 - DNA, 25 bp, SARS Virus
tctactcaaaaggtcgttacaacgt

SEQ ID NO: 68534 - DNA, 25 bp, SARS Virus
ctactcaaaagagcgttacaacgtt

SEQ ID NO: 68535 - DNA, 25 bp, SARS Virus
tactcaaaagatggttacaacgttt

SEQ ID NO: 68536 - DNA, 25 bp, SARS Virus
actcaaaagatcgttacaacgttta

SEQ ID NO: 68537 - DNA, 25 bp, SARS Virus
ctcaaaagatcggtacaacgtttaa

SEQ ID NO: 68538 - DNA, 25 bp, SARS Virus
tcaaaagatcgtgacaacgtttaat

SEQ ID NO: 68539 - DNA, 25 bp, SARS Virus
caaaagatcgttgcaacgtttaata

SEQ ID NO: 68540 - DNA, 25 bp, SARS Virus
aaaagatcgttagaacgtttaatag

SEQ ID NO: 68541 - DNA, 25 bp, SARS Virus
aaagatcgttacgacgtttaatagt

SEQ ID NO: 68542 - DNA, 25 bp, SARS Virus
aagatcgttacagcgtttaatagtt

SEQ ID NO: 68543 - DNA, 25 bp, SARS Virus
agatcgttacaaggtttaatagttt

SEQ ID NO: 68544 - DNA, 25 bp, SARS Virus
gatcgttacaacgtttaatagtttt

SEQ ID NO: 68545 - DNA, 25 bp, SARS Virus
atcgttacaacggttaatagttttc

SEQ ID NO: 68546 - DNA, 25 bp, SARS Virus
tcgttacaacgtgtaatagttttcc

SEQ ID NO: 68547 - DNA, 25 bp, SARS Virus
cgttacaacgttgaatagttttcca

SEQ ID NO: 68548 - DNA, 25 bp, SARS Virus
gttacaacgtttgatagttttccag

SEQ ID NO: 68549 - DNA, 25 bp, SARS Virus
ttacaacgtttagtagttttccagc

SEQ ID NO: 68550 - DNA, 25 bp, SARS Virus
tacaacgtttaagagttttccagcc

SEQ ID NO: 68551 - DNA, 25 bp, SARS Virus
acaacgtttaatggttttccagccg

SEQ ID NO: 68552 - DNA, 25 bp, SARS Virus
caacgtttaatagttttccagccgt

SEQ ID NO: 68553 - DNA, 25 bp, SARS Virus
aacgtttaataggtttccagccgta

SEQ ID NO: 68554 - DNA, 25 bp, SARS Virus
acgtttaatagtgttccagccgtac

SEQ ID NO: 68555 - DNA, 25 bp, SARS Virus
cgtttaatagttgtccagccgtacg

SEQ ID NO: 68556 - DNA, 25 bp, SARS Virus
gtttaatagtttgccagccgtacgt

SEQ ID NO: 68557 - DNA, 25 bp, SARS Virus
tttaatagttttgcagccgtacgtt

SEQ ID NO: 68558 - DNA, 25 bp, SARS Virus
ttaatagttttcgagccgtacgttt

SEQ ID NO: 68559 - DNA, 25 bp, SARS Virus
taatagttttccggccgtacgtttt

SEQ ID NO: 68560 - DNA, 25 bp, SARS Virus
aatagttttccagccgtacgttttc

SEQ ID NO: 68561 - DNA, 25 bp, SARS Virus
atagttttccaggcgtacgttttca

SEQ ID NO: 68562 - DNA, 25 bp, SARS Virus
tagttttccagcggtacgttttcat

SEQ ID NO: 68563 - DNA, 25 bp, SARS Virus
agttttccagccgtacgttttcatg

SEQ ID NO: 68564 - DNA, 25 bp, SARS Virus
gttttccagccggacgttttcatga

SEQ ID NO: 68565 - DNA, 25 bp, SARS Virus
ttttccagccgtgcgttttcatgag

SEQ ID NO: 68566 - DNA, 25 bp, SARS Virus
tttccagccgtaggttttcatgaga

SEQ ID NO: 68567 - DNA, 25 bp, SARS Virus
ttccagccgtacgttttcatgagat

SEQ ID NO: 68568 - DNA, 25 bp, SARS Virus
tccagccgtacggtttcatgagatg

SEQ ID NO: 68569 - DNA, 25 bp, SARS Virus
ccagccgtacgtgttcatgagatgt

SEQ ID NO: 68570 - DNA, 25 bp, SARS Virus
cagccgtacgttgtcatgagatgtg

SEQ ID NO: 68571 - DNA, 25 bp, SARS Virus
agccgtacgtttgcatgagatgtga

SEQ ID NO: 68572 - DNA, 25 bp, SARS Virus
gccgtacgttttgatgagatgtgag

SEQ ID NO: 68573 - DNA, 25 bp, SARS Virus
ccgtacgttttcgtgagatgtgagg

SEQ ID NO: 68574 - DNA, 25 bp, SARS Virus
cgtacgttttcaggagatgtgaggt

SEQ ID NO: 68575 - DNA, 25 bp, SARS Virus
gtacgttttcatgagatgtgaggtt

SEQ ID NO: 68576 - DNA, 25 bp, SARS Virus
tacgttttcatgggatgtgaggttc

SEQ ID NO: 68577 - DNA, 25 bp, SARS Virus
acgttttcatgagatgtgaggttcc

SEQ ID NO: 68578 - DNA, 25 bp, SARS Virus
cgttttcatgaggtgtgaggttcct

SEQ ID NO: 68579 - DNA, 25 bp, SARS Virus
gttttcatgagaggtgaggttcctg

SEQ ID NO: 68580 - DNA, 25 bp, SARS Virus
ttttcatgagatgtgaggttcctgg

SEQ ID NO: 68581 - DNA, 25 bp, SARS Virus
tttcatgagatgggaggttcctggt

SEQ ID NO: 68582 - DNA, 25 bp, SARS Virus
ttcatgagatgtgaggttcctggtg

SEQ ID NO: 68583 - DNA, 25 bp, SARS Virus
tcatgagatgtggggttcctggtgg

SEQ ID NO: 68584 - DNA, 25 bp, SARS Virus
catgagatgtgaggttcctggtgga

SEQ ID NO: 68585 - DNA, 25 bp, SARS Virus
atgagatgtgaggttcctggtggac

SEQ ID NO: 68586 - DNA, 25 bp, SARS Virus
tgagatgtgagggtcctggtggacc

SEQ ID NO: 68587 - DNA, 25 bp, SARS Virus
gagatgtgaggtgcctggtggacca

SEQ ID NO: 68588 - DNA, 25 bp, SARS Virus
agatgtgaggttgctggtggaccat

SEQ ID NO: 68589 - DNA, 25 bp, SARS Virus
gatgtgaggttcgtggtggaccatg

SEQ ID NO: 68590 - DNA, 25 bp, SARS Virus
atgtgaggttccgggtggaccatga

SEQ ID NO: 68591 - DNA, 25 bp, SARS Virus
tgtgaggttcctggtggaccatgac

SEQ ID NO: 68592 - DNA, 25 bp, SARS Virus
gtgaggttcctggtggaccatgacc

SEQ ID NO: 68593 - DNA, 25 bp, SARS Virus
tgaggttcctgggggaccatgacca

SEQ ID NO: 68594 - DNA, 25 bp, SARS Virus
gaggttcctggtggaccatgaccat

SEQ ID NO: 68595 - DNA, 25 bp, SARS Virus
aggttcctggtggaccatgaccatt

SEQ ID NO: 68596 - DNA, 25 bp, SARS Virus
ggttcctggtgggccatgaccattc

SEQ ID NO: 68597 - DNA, 25 bp, SARS Virus
gttcctggtggagcatgaccattct

SEQ ID NO: 68598 - DNA, 25 bp, SARS Virus
ttcctggtggacgatgaccattctc

SEQ ID NO: 68599 - DNA, 25 bp, SARS Virus
tcctggtggaccgtgaccattctca

SEQ ID NO: 68600 - DNA, 25 bp, SARS Virus
cctggtggaccaggaccattctcag

SEQ ID NO: 68601 - DNA, 25 bp, SARS Virus
ctggtggaccatgaccattctcagt

SEQ ID NO: 68602 - DNA, 25 bp, SARS Virus
tggtggaccatggccattctcagta

SEQ ID NO: 68603 - DNA, 25 bp, SARS Virus
ggtggaccatgagcattctcagtaa

SEQ ID NO: 68604 - DNA, 25 bp, SARS Virus
gtggaccatgacgattctcagtaaa

SEQ ID NO: 68605 - DNA, 25 bp, SARS Virus
tggaccatgaccgttctcagtaaaa

SEQ ID NO: 68606 - DNA, 25 bp, SARS Virus
ggaccatgaccagtctcagtaaaac

SEQ ID NO: 68607 - DNA, 25 bp, SARS Virus
gaccatgaccatgctcagtaaaacg

SEQ ID NO: 68608 - DNA, 25 bp, SARS Virus
accatgaccattgtcagtaaaacgg

SEQ ID NO: 68609 - DNA, 25 bp, SARS Virus
ccatgaccattcgcagtaaaacggt

SEQ ID NO: 68610 - DNA, 25 bp, SARS Virus
catgaccattctgagtaaaacggta

SEQ ID NO: 68611 - DNA, 25 bp, SARS Virus
atgaccattctcggtaaaacggtag

SEQ ID NO: 68612 - DNA, 25 bp, SARS Virus
tgaccattctcagtaaaacggtagc

SEQ ID NO: 68613 - DNA, 25 bp, SARS Virus
gaccattctcaggaaaacggtagcc

SEQ ID NO: 68614 - DNA, 25 bp, SARS Virus
accattctcagtgaaacggtagcct

SEQ ID NO: 68615 - DNA, 25 bp, SARS Virus
ccattctcagtagaacggtagcctg

SEQ ID NO: 68616 - DNA, 25 bp, SARS Virus
cattctcagtaagacggtagcctga

SEQ ID NO: 68617 - DNA, 25 bp, SARS Virus
attctcagtaaagcggtagcctgaa

SEQ ID NO: 68618 - DNA, 25 bp, SARS Virus
ttctcagtaaaagggtagcctgaac

SEQ ID NO: 68619 - DNA, 25 bp, SARS Virus
tctcagtaaaacggtagcctgaacg

SEQ ID NO: 68620 - DNA, 25 bp, SARS Virus
ctcagtaaaacggtagcctgaacga

SEQ ID NO: 68621 - DNA, 25 bp, SARS Virus
tcagtaaaacgggagcctgaacgag

SEQ ID NO: 68622 - DNA, 25 bp, SARS Virus
cagtaaaacggtggcctgaacgaga

SEQ ID NO: 68623 - DNA, 25 bp, SARS Virus
agtaaaacggtagcctgaacgagag

SEQ ID NO: 68624 - DNA, 25 bp, SARS Virus
gtaaaacggtaggctgaacgagaga

SEQ ID NO: 68625 - DNA, 25 bp, SARS Virus
taaaacggtagcgtgaacgagagat

SEQ ID NO: 68626 - DNA, 25 bp, SARS Virus
aaaacggtagccggaacgagagata

SEQ ID NO: 68627 - DNA, 25 bp, SARS Virus
aaacggtagcctgaacgagagataa

SEQ ID NO: 68628 - DNA, 25 bp, SARS Virus
aacggtagcctggacgagagataat

SEQ ID NO: 68629 - DNA, 25 bp, SARS Virus
acggtagcctgagcgagagataatg

SEQ ID NO: 68630 - DNA, 25 bp, SARS Virus
cggtagcctgaaggagagataatgg

SEQ ID NO: 68631 - DNA, 25 bp, SARS Virus
ggtagcctgaacgagagataatggg

SEQ ID NO: 68632 - DNA, 25 bp, SARS Virus
gtagcctgaacgggagataatgggt

SEQ ID NO: 68633 - DNA, 25 bp, SARS Virus
tagcctgaacgagagataatgggta

SEQ ID NO: 68634 - DNA, 25 bp, SARS Virus
agcctgaacgagggataatgggtag

SEQ ID NO: 68635 - DNA, 25 bp, SARS Virus
gcctgaacgagagataatgggtaga

SEQ ID NO: 68636 - DNA, 25 bp, SARS Virus
cctgaacgagaggtaatgggtagac

SEQ ID NO: 68637 - DNA, 25 bp, SARS Virus
ctgaacgagagagaatgggtagacg

SEQ ID NO: 68638 - DNA, 25 bp, SARS Virus
tgaacgagagatgatgggtagacga

SEQ ID NO: 68639 - DNA, 25 bp, SARS Virus
gaacgagagatagtgggtagacgag

SEQ ID NO: 68640 - DNA, 25 bp, SARS Virus
aacgagagataaggggtagacgagc

SEQ ID NO: 68641 - DNA, 25 bp, SARS Virus
acgagagataatgggtagacgagcg

SEQ ID NO: 68642 - DNA, 25 bp, SARS Virus
cgagagataatgggtagacgagcgt

SEQ ID NO: 68643 - DNA, 25 bp, SARS Virus
gagagataatgggtagacgagcgta

SEQ ID NO: 68644 - DNA, 25 bp, SARS Virus
agagataatggggagacgagcgtat

SEQ ID NO: 68645 - DNA, 25 bp, SARS Virus
gagataatgggtggacgagcgtatc

SEQ ID NO: 68646 - DNA, 25 bp, SARS Virus
agataatgggtagacgagcgtatca

SEQ ID NO: 68647 - DNA, 25 bp, SARS Virus
gataatgggtaggcgagcgtatcac

SEQ ID NO: 68648 - DNA, 25 bp, SARS Virus
ataatgggtagaggagcgtatcaca

SEQ ID NO: 68649 - DNA, 25 bp, SARS Virus
taatgggtagacgagcgtatcacat

SEQ ID NO: 68650 - DNA, 25 bp, SARS Virus
aatgggtagacgggcgtatcacata

SEQ ID NO: 68651 - DNA, 25 bp, SARS Virus
atgggtagacgagcgtatcacatat

SEQ ID NO: 68652 - DNA, 25 bp, SARS Virus
tgggtagacgagggtatcacatatg

SEQ ID NO: 68653 - DNA, 25 bp, SARS Virus
gggtagacgagcgtatcacatatgc

SEQ ID NO: 68654 - DNA, 25 bp, SARS Virus
ggtagacgagcggatcacatatgcc

SEQ ID NO: 68655 - DNA, 25 bp, SARS Virus
gtagacgagcgtgtcacatatgccg

SEQ ID NO: 68656 - DNA, 25 bp, SARS Virus
tagacgagcgtagcacatatgccgt

SEQ ID NO: 68657 - DNA, 25 bp, SARS Virus
agacgagcgtatgacatatgccgta

SEQ ID NO: 68658 - DNA, 25 bp, SARS Virus
gacgagcgtatcgcatatgccgtac

SEQ ID NO: 68659 - DNA, 25 bp, SARS Virus
acgagcgtatcagatatgccgtacg

SEQ ID NO: 68660 - DNA, 25 bp, SARS Virus
cgagcgtatcacgtatgccgtacga

SEQ ID NO: 68661 - DNA, 25 bp, SARS Virus
gagcgtatcacagatgccgtacgag

SEQ ID NO: 68662 - DNA, 25 bp, SARS Virus
agcgtatcacatgtgccgtacgaga

SEQ ID NO: 68663 - DNA, 25 bp, SARS Virus
gcgtatcacataggccgtacgagag

SEQ ID NO: 68664 - DNA, 25 bp, SARS Virus
cgtatcacatatgccgtacgagagt

SEQ ID NO: 68665 - DNA, 25 bp, SARS Virus
gtatcacatatggcgtacgagagta

SEQ ID NO: 68666 - DNA, 25 bp, SARS Virus
tatcacatatgcggtacgagagtac

SEQ ID NO: 68667 - DNA, 25 bp, SARS Virus
atcacatatgccgtacgagagtacg

SEQ ID NO: 68668 - DNA, 25 bp, SARS Virus
tcacatatgccggacgagagtacgt

SEQ ID NO: 68669 - DNA, 25 bp, SARS Virus
cacatatgccgtgcgagagtacgtc

SEQ ID NO: 68670 - DNA, 25 bp, SARS Virus
acatatgccgtaggagagtacgtcg

SEQ ID NO: 68671 - DNA, 25 bp, SARS Virus
catatgccgtacgagagtacgtcga

SEQ ID NO: 68672 - DNA, 25 bp, SARS Virus
atatgccgtacgggagtacgtcgac

SEQ ID NO: 68673 - DNA, 25 bp, SARS Virus
tatgccgtacgagagtacgtcgaca

SEQ ID NO: 68674 - DNA, 25 bp, SARS Virus
atgccgtacgagggtacgtcgacaa

SEQ ID NO: 68675 - DNA, 25 bp, SARS Virus
tgccgtacgagagtacgtcgacaac

SEQ ID NO: 68676 - DNA, 25 bp, SARS Virus
gccgtacgagaggacgtcgacaact

SEQ ID NO: 68677 - DNA, 25 bp, SARS Virus
ccgtacgagagtgcgtcgacaacta

SEQ ID NO: 68678 - DNA, 25 bp, SARS Virus
cgtacgagagtaggtcgacaactac

SEQ ID NO: 68679 - DNA, 25 bp, SARS Virus
gtacgagagtacgtcgacaactacg

SEQ ID NO: 68680 - DNA, 25 bp, SARS Virus
tacgagagtacggcgacaactacgg

SEQ ID NO: 68681 - DNA, 25 bp, SARS Virus
acgagagtacgtggacaactacggg

SEQ ID NO: 68682 - DNA, 25 bp, SARS Virus
cgagagtacgtcgacaactacggga

SEQ ID NO: 68683 - DNA, 25 bp, SARS Virus
gagagtacgtcggcaactacgggat

SEQ ID NO: 68684 - DNA, 25 bp, SARS Virus
agagtacgtcgagaactacgggata

SEQ ID NO: 68685 - DNA, 25 bp, SARS Virus
gagtacgtcgacgactacgggatac

SEQ ID NO: 68686 - DNA, 25 bp, SARS Virus
agtacgtcgacagctacgggataca

SEQ ID NO: 68687 - DNA, 25 bp, SARS Virus
gtacgtcgacaagtacgggatacac

SEQ ID NO: 68688 - DNA, 25 bp, SARS Virus
tacgtcgacaacgacgggatacact

SEQ ID NO: 68689 - DNA, 25 bp, SARS Virus
acgtcgacaactgcgggatacactt

SEQ ID NO: 68690 - DNA, 25 bp, SARS Virus
cgtcgacaactaggggatacacttt

SEQ ID NO: 68691 - DNA, 25 bp, SARS Virus
gtcgacaactacgggatacactttt

SEQ ID NO: 68692 - DNA, 25 bp, SARS Virus
tcgacaactacgggatacacttttc

SEQ ID NO: 68693 - DNA, 25 bp, SARS Virus
cgacaactacgggatacacttttcc

SEQ ID NO: 68694 - DNA, 25 bp, SARS Virus
gacaactacggggtacacttttccg

SEQ ID NO: 68695 - DNA, 25 bp, SARS Virus
acaactacgggagacacttttccgt

SEQ ID NO: 68696 - DNA, 25 bp, SARS Virus
caactacgggatgcacttttccgta

SEQ ID NO: 68697 - DNA, 25 bp, SARS Virus
aactacgggatagacttttccgtaa

SEQ ID NO: 68698 - DNA, 25 bp, SARS Virus
actacgggatacgcttttccgtaat

SEQ ID NO: 68699 - DNA, 25 bp, SARS Virus
ctacgggatacagttttccgtaatt

SEQ ID NO: 68700 - DNA, 25 bp, SARS Virus
tacgggatacacgtttccgtaattt

SEQ ID NO: 68701 - DNA, 25 bp, SARS Virus
acgggatacactgttccgtaatttt

SEQ ID NO: 68702 - DNA, 25 bp, SARS Virus
cgggatacacttgtccgtaatttta

SEQ ID NO: 68703 - DNA, 25 bp, SARS Virus
gggatacactttgccgtaattttat

SEQ ID NO: 68704 - DNA, 25 bp, SARS Virus
ggatacacttttgcgtaattttata

SEQ ID NO: 68705 - DNA, 25 bp, SARS Virus
gatacacttttcggtaattttataa

SEQ ID NO: 68706 - DNA, 25 bp, SARS Virus
atacacttttccgtaattttataaa

SEQ ID NO: 68707 - DNA, 25 bp, SARS Virus
tacacttttccggaattttataaac

SEQ ID NO: 68708 - DNA, 25 bp, SARS Virus
acacttttccgtgattttataaacg

SEQ ID NO: 68709 - DNA, 25 bp, SARS Virus
cacttttccgtagttttataaacgg

SEQ ID NO: 68710 - DNA, 25 bp, SARS Virus
acttttccgtaagtttataaacggg

SEQ ID NO: 68711 - DNA, 25 bp, SARS Virus
cttttccgtaatgttataaacgggt

SEQ ID NO: 68712 - DNA, 25 bp, SARS Virus
ttttccgtaattgtataaacgggta

SEQ ID NO: 68713 - DNA, 25 bp, SARS Virus
tttccgtaatttgataaacgggtat

SEQ ID NO: 68714 - DNA, 25 bp, SARS Virus
ttccgtaattttgtaaacgggtatc

SEQ ID NO: 68715 - DNA, 25 bp, SARS Virus
tccgtaattttagaaacgggtatct

SEQ ID NO: 68716 - DNA, 25 bp, SARS Virus
ccgtaattttatgaacgggtatcta

SEQ ID NO: 68717 - DNA, 25 bp, SARS Virus
cgtaattttatagacgggtatctat

SEQ ID NO: 68718 - DNA, 25 bp, SARS Virus
gtaattttataagcgggtatctatt

SEQ ID NO: 68719 - DNA, 25 bp, SARS Virus
taattttataaaggggtatctattt

SEQ ID NO: 68720 - DNA, 25 bp, SARS Virus
aattttataaacgggtatctattta

SEQ ID NO: 68721 - DNA, 25 bp, SARS Virus
attttataaacgggtatctatttac

SEQ ID NO: 68722 - DNA, 25 bp, SARS Virus
ttttataaacgggtatctatttaca

SEQ ID NO: 68723 - DNA, 25 bp, SARS Virus
tttataaacggggatctatttacat

SEQ ID NO: 68724 - DNA, 25 bp, SARS Virus
ttataaacgggtgtctatttacatc

SEQ ID NO: 68725 - DNA, 25 bp, SARS Virus
tataaacgggtagctatttacatca

SEQ ID NO: 68726 - DNA, 25 bp, SARS Virus
ataaacgggtatgtatttacatcat

SEQ ID NO: 68727 - DNA, 25 bp, SARS Virus
taaacgggtatcgatttacatcatc

SEQ ID NO: 68728 - DNA, 25 bp, SARS Virus
aaacgggtatctgtttacatcatct

SEQ ID NO: 68729 - DNA, 25 bp, SARS Virus
aacgggtatctagttacatcatctt

SEQ ID NO: 68730 - DNA, 25 bp, SARS Virus
acgggtatctatgtacatcatctta

SEQ ID NO: 68731 - DNA, 25 bp, SARS Virus
cgggtatctattgacatcatcttag

SEQ ID NO: 68732 - DNA, 25 bp, SARS Virus
gggtatctatttgcatcatcttagt

SEQ ID NO: 68733 - DNA, 25 bp, SARS Virus
ggtatctatttagatcatcttagta

SEQ ID NO: 68734 - DNA, 25 bp, SARS Virus
gtatctatttacgtcatcttagtat

SEQ ID NO: 68735 - DNA, 25 bp, SARS Virus
tatctatttacagcatcttagtatg

SEQ ID NO: 68736 - DNA, 25 bp, SARS Virus
atctatttacatgatcttagtatgg

SEQ ID NO: 68737 - DNA, 25 bp, SARS Virus
tctatttacatcgtcttagtatgga

SEQ ID NO: 68738 - DNA, 25 bp, SARS Virus
ctatttacatcagcttagtatggac

SEQ ID NO: 68739 - DNA, 25 bp, SARS Virus
tatttacatcatgttagtatggacg

SEQ ID NO: 68740 - DNA, 25 bp, SARS Virus
atttacatcatcgtagtatggacgc

SEQ ID NO: 68741 - DNA, 25 bp, SARS Virus
tttacatcatctgagtatggacgcg

SEQ ID NO: 68742 - DNA, 25 bp, SARS Virus
ttacatcatcttggtatggacgcgc

SEQ ID NO: 68743 - DNA, 25 bp, SARS Virus
tacatcatcttagtatggacgcgca

SEQ ID NO: 68744 - DNA, 25 bp, SARS Virus
acatcatcttaggatggacgcgcac

SEQ ID NO: 68745 - DNA, 25 bp, SARS Virus
catcatcttagtgtggacgcgcacg

SEQ ID NO: 68746 - DNA, 25 bp, SARS Virus
atcatcttagtagggacgcgcacgc

SEQ ID NO: 68747 - DNA, 25 bp, SARS Virus
tcatcttagtatggacgcgcacgcg

SEQ ID NO: 68748 - DNA, 25 bp, SARS Virus
catcttagtatggacgcgcacgcgc

SEQ ID NO: 68749 - DNA, 25 bp, SARS Virus
atcttagtatgggcgcgcacgcgcg

SEQ ID NO: 68750 - DNA, 25 bp, SARS Virus
tcttagtatggaggcgcacgcgcgc

SEQ ID NO: 68751 - DNA, 25 bp, SARS Virus
cttagtatggacgcgcacgcgcgca

SEQ ID NO: 68752 - DNA, 25 bp, SARS Virus
ttagtatggacgggcacgcgcgcat

SEQ ID NO: 68753 - DNA, 25 bp, SARS Virus
tagtatggacgcgcacgcgcgcatc

SEQ ID NO: 68754 - DNA, 25 bp, SARS Virus
agtatggacgcggacgcgcgcatct

SEQ ID NO: 68755 - DNA, 25 bp, SARS Virus
gtatggacgcgcgcgcgcgcatctc

SEQ ID NO: 68756 - DNA, 25 bp, SARS Virus
tatggacgcgcaggcgcgcatctca

SEQ ID NO: 68757 - DNA, 25 bp, SARS Virus
atggacgcgcacgcgcgcatctcac

SEQ ID NO: 68758 - DNA, 25 bp, SARS Virus
tggacgcgcacgggcgcatctcaca

SEQ ID NO: 68759 - DNA, 25 bp, SARS Virus
ggacgcgcacgcgcgcatctcacaa

SEQ ID NO: 68760 - DNA, 25 bp, SARS Virus
gacgcgcacgcgggcatctcacaaa

SEQ ID NO: 68761 - DNA, 25 bp, SARS Virus
acgcgcacgcgcgcatctcacaaaa

SEQ ID NO: 68762 - DNA, 25 bp, SARS Virus
cgcgcacgcgcggatctcacaaaac

SEQ ID NO: 68763 - DNA, 25 bp, SARS Virus
gcgcacgcgcgcgtctcacaaaact

SEQ ID NO: 68764 - DNA, 25 bp, SARS Virus
cgcacgcgcgcagctcacaaaacta

SEQ ID NO: 68765 - DNA, 25 bp, SARS Virus
gcacgcgcgcatgtcacaaaactat

SEQ ID NO: 68766 - DNA, 25 bp, SARS Virus
cacgcgcgcatcgcacaaaactatt

SEQ ID NO: 68767 - DNA, 25 bp, SARS Virus
acgcgcgcatctgacaaaactattt

SEQ ID NO: 68768 - DNA, 25 bp, SARS Virus
cgcgcgcatctcgcaaaactattta

SEQ ID NO: 68769 - DNA, 25 bp, SARS Virus
gcgcgcatctcagaaaactatttaa

SEQ ID NO: 68770 - DNA, 25 bp, SARS Virus
cgcgcatctcacgaaactatttaag

SEQ ID NO: 68771 - DNA, 25 bp, SARS Virus
gcgcatctcacagaactatttaagt

SEQ ID NO: 68772 - DNA, 25 bp, SARS Virus
cgcatctcacaagactatttaagtt

SEQ ID NO: 68773 - DNA, 25 bp, SARS Virus
gcatctcacaaagctatttaagttt

SEQ ID NO: 68774 - DNA, 25 bp, SARS Virus
catctcacaaaagtatttaagtttc

SEQ ID NO: 68775 - DNA, 25 bp, SARS Virus
atctcacaaaacgatttaagtttca

SEQ ID NO: 68776 - DNA, 25 bp, SARS Virus
tctcacaaaactgtttaagtttcac

SEQ ID NO: 68777 - DNA, 25 bp, SARS Virus
ctcacaaaactagttaagtttcact

SEQ ID NO: 68778 - DNA, 25 bp, SARS Virus
tcacaaaactatgtaagtttcactt

SEQ ID NO: 68779 - DNA, 25 bp, SARS Virus
cacaaaactattgaagtttcactta

SEQ ID NO: 68780 - DNA, 25 bp, SARS Virus
acaaaactatttgagtttcacttaa

SEQ ID NO: 68781 - DNA, 25 bp, SARS Virus
caaaactatttaggtttcacttaag

SEQ ID NO: 68782 - DNA, 25 bp, SARS Virus
aaaactatttaagtttcacttaagt

SEQ ID NO: 68783 - DNA, 25 bp, SARS Virus
aaactatttaaggttcacttaagtt

SEQ ID NO: 68784 - DNA, 25 bp, SARS Virus
aactatttaagtgtcacttaagttg

SEQ ID NO: 68785 - DNA, 25 bp, SARS Virus
actatttaagttgcacttaagttgt

SEQ ID NO: 68786 - DNA, 25 bp, SARS Virus
ctatttaagtttgacttaagttgtg

SEQ ID NO: 68787 - DNA, 25 bp, SARS Virus
tatttaagtttcgcttaagttgtga

SEQ ID NO: 68788 - DNA, 25 bp, SARS Virus
atttaagtttcagttaagttgtgat

SEQ ID NO: 68789 - DNA, 25 bp, SARS Virus
tttaagtttcacgtaagttgtgatc

SEQ ID NO: 68790 - DNA, 25 bp, SARS Virus
ttaagtttcactgaagttgtgatct

SEQ ID NO: 68791 - DNA, 25 bp, SARS Virus
taagtttcacttgagttgtgatctt

SEQ ID NO: 68792 - DNA, 25 bp, SARS Virus
aagtttcacttaggttgtgatcttg

SEQ ID NO: 68793 - DNA, 25 bp, SARS Virus
agtttcacttaagttgtgatcttgt

SEQ ID NO: 68794 - DNA, 25 bp, SARS Virus
gtttcacttaaggtgtgatcttgtc

SEQ ID NO: 68795 - DNA, 25 bp, SARS Virus
tttcacttaagtggtgatcttgtca

SEQ ID NO: 68796 - DNA, 25 bp, SARS Virus
ttcacttaagttgtgatcttgtcat

SEQ ID NO: 68797 - DNA, 25 bp, SARS Virus
tcacttaagttgggatcttgtcata

SEQ ID NO: 68798 - DNA, 25 bp, SARS Virus
cacttaagttgtgatcttgtcatac

SEQ ID NO: 68799 - DNA, 25 bp, SARS Virus
acttaagttgtggtcttgtcataca

SEQ ID NO: 68800 - DNA, 25 bp, SARS Virus
cttaagttgtgagcttgtcatacaa

SEQ ID NO: 68801 - DNA, 25 bp, SARS Virus
ttaagttgtgatgttgtcatacaaa

SEQ ID NO: 68802 - DNA, 25 bp, SARS Virus
taagttgtgatcgtgtcatacaaaa

SEQ ID NO: 68803 - DNA, 25 bp, SARS Virus
aagttgtgatctggtcatacaaaag

SEQ ID NO: 68804 - DNA, 25 bp, SARS Virus
agttgtgatcttgtcatacaaaaga

SEQ ID NO: 68805 - DNA, 25 bp, SARS Virus
gttgtgatcttggcatacaaaagac

SEQ ID NO: 68806 - DNA, 25 bp, SARS Virus
ttgtgatcttgtgatacaaaagacg

SEQ ID NO: 68807 - DNA, 25 bp, SARS Virus
tgtgatcttgtcgtacaaaagacgt

SEQ ID NO: 68808 - DNA, 25 bp, SARS Virus
gtgatcttgtcagacaaaagacgtg

SEQ ID NO: 68809 - DNA, 25 bp, SARS Virus
tgatcttgtcatgcaaaagacgtga

SEQ ID NO: 68810 - DNA, 25 bp, SARS Virus
gatcttgtcatagaaaagacgtgac

SEQ ID NO: 68811 - DNA, 25 bp, SARS Virus
atcttgtcatacgaaagacgtgaca

SEQ ID NO: 68812 - DNA, 25 bp, SARS Virus
tcttgtcatacagaagacgtgacat

SEQ ID NO: 68813 - DNA, 25 bp, SARS Virus
cttgtcatacaagagacgtgacatt

SEQ ID NO: 68814 - DNA, 25 bp, SARS Virus
ttgtcatacaaaggacgtgacattt

SEQ ID NO: 68815 - DNA, 25 bp, SARS Virus
tgtcatacaaaagacgtgacattta

SEQ ID NO: 68816 - DNA, 25 bp, SARS Virus
gtcatacaaaaggcgtgacatttac

SEQ ID NO: 68817 - DNA, 25 bp, SARS Virus
tcatacaaaagaggtgacatttacg

SEQ ID NO: 68818 - DNA, 25 bp, SARS Virus
catacaaaagacgtgacatttacgt

SEQ ID NO: 68819 - DNA, 25 bp, SARS Virus
atacaaaagacgggacatttacgta

SEQ ID NO: 68820 - DNA, 25 bp, SARS Virus
tacaaaagacgtgacatttacgtaa

SEQ ID NO: 68821 - DNA, 25 bp, SARS Virus
acaaaagacgtggcatttacgtaac

SEQ ID NO: 68822 - DNA, 25 bp, SARS Virus
caaaagacgtgagatttacgtaacg

SEQ ID NO: 68823 - DNA, 25 bp, SARS Virus
aaaagacgtgacgtttacgtaacgg

SEQ ID NO: 68824 - DNA, 25 bp, SARS Virus
aaagacgtgacagttacgtaacggt

SEQ ID NO: 68825 - DNA, 25 bp, SARS Virus
aagacgtgacatgtacgtaacggtc

SEQ ID NO: 68826 - DNA, 25 bp, SARS Virus
agacgtgacattgacgtaacggtct

SEQ ID NO: 68827 - DNA, 25 bp, SARS Virus
gacgtgacatttgcgtaacggtctt

SEQ ID NO: 68828 - DNA, 25 bp, SARS Virus
acgtgacatttaggtaacggtcttt

SEQ ID NO: 68829 - DNA, 25 bp, SARS Virus
cgtgacatttacgtaacggtctttg

SEQ ID NO: 68830 - DNA, 25 bp, SARS Virus
gtgacatttacggaacggtctttgt

SEQ ID NO: 68831 - DNA, 25 bp, SARS Virus
tgacatttacgtgacggtctttgtt

SEQ ID NO: 68832 - DNA, 25 bp, SARS Virus
gacatttacgtagcggtctttgttg

SEQ ID NO: 68833 - DNA, 25 bp, SARS Virus
acatttacgtaagggtctttgttga

SEQ ID NO: 68834 - DNA, 25 bp, SARS Virus
catttacgtaacggtctttgttgac

SEQ ID NO: 68835 - DNA, 25 bp, SARS Virus
atttacgtaacggtctttgttgacg

SEQ ID NO: 68836 - DNA, 25 bp, SARS Virus
tttacgtaacgggctttgttgacga

SEQ ID NO: 68837 - DNA, 25 bp, SARS Virus
ttacgtaacggtgtttgttgacgac

SEQ ID NO: 68838 - DNA, 25 bp, SARS Virus
tacgtaacggtcgttgttgacgact

SEQ ID NO: 68839 - DNA, 25 bp, SARS Virus
acgtaacggtctgtgttgacgactg

SEQ ID NO: 68840 - DNA, 25 bp, SARS Virus
cgtaacggtcttggttgacgactgt

SEQ ID NO: 68841 - DNA, 25 bp, SARS Virus
gtaacggtctttgttgacgactgta

SEQ ID NO: 68842 - DNA, 25 bp, SARS Virus
taacggtctttggtgacgactgtaa

SEQ ID NO: 68843 - DNA, 25 bp, SARS Virus
aacggtctttgtggacgactgtaac

SEQ ID NO: 68844 - DNA, 25 bp, SARS Virus
acggtctttgttgacgactgtaaca

SEQ ID NO: 68845 - DNA, 25 bp, SARS Virus
cggtctttgttggcgactgtaacat

SEQ ID NO: 68846 - DNA, 25 bp, SARS Virus
ggtctttgttgaggactgtaacatc

SEQ ID NO: 68847 - DNA, 25 bp, SARS Virus
gtctttgttgacgactgtaacatca

SEQ ID NO: 68848 - DNA, 25 bp, SARS Virus
tctttgttgacggctgtaacatcag

SEQ ID NO: 68849 - DNA, 25 bp, SARS Virus
ctttgttgacgagtgtaacatcaga

SEQ ID NO: 68850 - DNA, 25 bp, SARS Virus
tttgttgacgacggtaacatcagaa

SEQ ID NO: 68851 - DNA, 25 bp, SARS Virus
ttgttgacgactgtaacatcagaaa

SEQ ID NO: 68852 - DNA, 25 bp, SARS Virus
tgttgacgactggaacatcagaaac

SEQ ID NO: 68853 - DNA, 25 bp, SARS Virus
gttgacgactgtgacatcagaaact

SEQ ID NO: 68854 - DNA, 25 bp, SARS Virus
ttgacgactgtagcatcagaaacta

SEQ ID NO: 68855 - DNA, 25 bp, SARS Virus
tgacgactgtaagatcagaaactac

SEQ ID NO: 68856 - DNA, 25 bp, SARS Virus
gacgactgtaacgtcagaaactact

SEQ ID NO: 68857 - DNA, 25 bp, SARS Virus
acgactgtaacagcagaaactactt

SEQ ID NO: 68858 - DNA, 25 bp, SARS Virus
cgactgtaacatgagaaactacttt

SEQ ID NO: 68859 - DNA, 25 bp, SARS Virus
gactgtaacatcggaaactacttta

SEQ ID NO: 68860 - DNA, 25 bp, SARS Virus
actgtaacatcagaaactactttag

SEQ ID NO: 68861 - DNA, 25 bp, SARS Virus
ctgtaacatcaggaactactttaga

SEQ ID NO: 68862 - DNA, 25 bp, SARS Virus
tgtaacatcagagactactttagag

SEQ ID NO: 68863 - DNA, 25 bp, SARS Virus
gtaacatcagaagctactttagaga

SEQ ID NO: 68864 - DNA, 25 bp, SARS Virus
taacatcagaaagtactttagagat

SEQ ID NO: 68865 - DNA, 25 bp, SARS Virus
aacatcagaaacgactttagagata

SEQ ID NO: 68866 - DNA, 25 bp, SARS Virus
acatcagaaactgctttagagatac

SEQ ID NO: 68867 - DNA, 25 bp, SARS Virus
catcagaaactagtttagagatacc

SEQ ID NO: 68868 - DNA, 25 bp, SARS Virus
atcagaaactacgttagagataccg

SEQ ID NO: 68869 - DNA, 25 bp, SARS Virus
tcagaaactactgtagagataccga

SEQ ID NO: 68870 - DNA, 25 bp, SARS Virus
cagaaactacttgagagataccgat

SEQ ID NO: 68871 - DNA, 25 bp, SARS Virus
agaaactactttggagataccgatg

SEQ ID NO: 68872 - DNA, 25 bp, SARS Virus
gaaactactttagagataccgatga

SEQ ID NO: 68873 - DNA, 25 bp, SARS Virus
aaactactttagggataccgatgat

SEQ ID NO: 68874 - DNA, 25 bp, SARS Virus
aactactttagagataccgatgatt

SEQ ID NO: 68875 - DNA, 25 bp, SARS Virus
actactttagaggtaccgatgatta

SEQ ID NO: 68876 - DNA, 25 bp, SARS Virus
ctactttagagagaccgatgattaa

SEQ ID NO: 68877 - DNA, 25 bp, SARS Virus
tactttagagatgccgatgattaat

SEQ ID NO: 68878 - DNA, 25 bp, SARS Virus
actttagagatagcgatgattaata

SEQ ID NO: 68879 - DNA, 25 bp, SARS Virus
ctttagagatacggatgattaatac

SEQ ID NO: 68880 - DNA, 25 bp, SARS Virus
tttagagataccgatgattaatact

SEQ ID NO: 68881 - DNA, 25 bp, SARS Virus
ttagagataccggtgattaatactg

SEQ ID NO: 68882 - DNA, 25 bp, SARS Virus
tagagataccgaggattaatactga

SEQ ID NO: 68883 - DNA, 25 bp, SARS Virus
agagataccgatgattaatactgaa

SEQ ID NO: 68884 - DNA, 25 bp, SARS Virus
gagataccgatggttaatactgaac

SEQ ID NO: 68885 - DNA, 25 bp, SARS Virus
agataccgatgagtaatactgaact

SEQ ID NO: 68886 - DNA, 25 bp, SARS Virus
gataccgatgatgaatactgaactc

SEQ ID NO: 68887 - DNA, 25 bp, SARS Virus
ataccgatgattgatactgaactca

SEQ ID NO: 68888 - DNA, 25 bp, SARS Virus
taccgatgattagtactgaactcac

SEQ ID NO: 68889 - DNA, 25 bp, SARS Virus
accgatgattaagactgaactcaca

SEQ ID NO: 68890 - DNA, 25 bp, SARS Virus
ccgatgattaatgctgaactcacaa

SEQ ID NO: 68891 - DNA, 25 bp, SARS Virus
cgatgattaatagtgaactcacaac

SEQ ID NO: 68892 - DNA, 25 bp, SARS Virus
gatgattaatacggaactcacaaca

SEQ ID NO: 68893 - DNA, 25 bp, SARS Virus
atgattaatactgaactcacaacag

SEQ ID NO: 68894 - DNA, 25 bp, SARS Virus
tgattaatactggactcacaacagt

SEQ ID NO: 68895 - DNA, 25 bp, SARS Virus
gattaatactgagctcacaacagtt

SEQ ID NO: 68896 - DNA, 25 bp, SARS Virus
attaatactgaagtcacaacagtta

SEQ ID NO: 68897 - DNA, 25 bp, SARS Virus
ttaatactgaacgcacaacagttac

SEQ ID NO: 68898 - DNA, 25 bp, SARS Virus
taatactgaactgacaacagttacg

SEQ ID NO: 68899 - DNA, 25 bp, SARS Virus
aatactgaactcgcaacagttacga

SEQ ID NO: 68900 - DNA, 25 bp, SARS Virus
atactgaactcagaacagttacgat

SEQ ID NO: 68901 - DNA, 25 bp, SARS Virus
tactgaactcacgacagttacgatc

SEQ ID NO: 68902 - DNA, 25 bp, SARS Virus
actgaactcacagcagttacgatct

SEQ ID NO: 68903 - DNA, 25 bp, SARS Virus
ctgaactcacaagagttacgatctg

SEQ ID NO: 68904 - DNA, 25 bp, SARS Virus
tgaactcacaacggttacgatctga

SEQ ID NO: 68905 - DNA, 25 bp, SARS Virus
gaactcacaacagttacgatctgaa

SEQ ID NO: 68906 - DNA, 25 bp, SARS Virus
aactcacaacaggtacgatctgaag

SEQ ID NO: 68907 - DNA, 25 bp, SARS Virus
actcacaacagtgacgatctgaagc

SEQ ID NO: 68908 - DNA, 25 bp, SARS Virus
ctcacaacagttgcgatctgaagca

SEQ ID NO: 68909 - DNA, 25 bp, SARS Virus
tcacaacagttaggatctgaagcac

SEQ ID NO: 68910 - DNA, 25 bp, SARS Virus
cacaacagttacgatctgaagcacg

SEQ ID NO: 68911 - DNA, 25 bp, SARS Virus
acaacagttacggtctgaagcacgt

SEQ ID NO: 68912 - DNA, 25 bp, SARS Virus
caacagttacgagctgaagcacgtt

SEQ ID NO: 68913 - DNA, 25 bp, SARS Virus
aacagttacgatgtgaagcacgttt

SEQ ID NO: 68914 - DNA, 25 bp, SARS Virus
acagttacgatcggaagcacgtttt

SEQ ID NO: 68915 - DNA, 25 bp, SARS Virus
cagttacgatctgaagcacgttttg

SEQ ID NO: 68916 - DNA, 25 bp, SARS Virus
agttacgatctggagcacgttttgt

SEQ ID NO: 68917 - DNA, 25 bp, SARS Virus
gttacgatctgaggcacgttttgtg

SEQ ID NO: 68918 - DNA, 25 bp, SARS Virus
ttacgatctgaagcacgttttgtga

SEQ ID NO: 68919 - DNA, 25 bp, SARS Virus
tacgatctgaaggacgttttgtgat

SEQ ID NO: 68920 - DNA, 25 bp, SARS Virus
acgatctgaagcgcgttttgtgatg

SEQ ID NO: 68921 - DNA, 25 bp, SARS Virus
cgatctgaagcaggttttgtgatgc

SEQ ID NO: 68922 - DNA, 25 bp, SARS Virus
gatctgaagcacgttttgtgatgca

SEQ ID NO: 68923 - DNA, 25 bp, SARS Virus
atctgaagcacggtttgtgatgcag

SEQ ID NO: 68924 - DNA, 25 bp, SARS Virus
tctgaagcacgtgttgtgatgcaga

SEQ ID NO: 68925 - DNA, 25 bp, SARS Virus
ctgaagcacgttgtgtgatgcagat

SEQ ID NO: 68926 - DNA, 25 bp, SARS Virus
tgaagcacgtttggtgatgcagata

SEQ ID NO: 68927 - DNA, 25 bp, SARS Virus
gaagcacgttttgtgatgcagatat

SEQ ID NO: 68928 - DNA, 25 bp, SARS Virus
aagcacgttttgggatgcagatata

SEQ ID NO: 68929 - DNA, 25 bp, SARS Virus
agcacgttttgtgatgcagatataa

SEQ ID NO: 68930 - DNA, 25 bp, SARS Virus
gcacgttttgtggtgcagatataac

SEQ ID NO: 68931 - DNA, 25 bp, SARS Virus
cacgttttgtgaggcagatataacc

SEQ ID NO: 68932 - DNA, 25 bp, SARS Virus
acgttttgtgatgcagatataaccg

SEQ ID NO: 68933 - DNA, 25 bp, SARS Virus
cgttttgtgatggagatataaccgc

SEQ ID NO: 68934 - DNA, 25 bp, SARS Virus
gttttgtgatgcggatataaccgct

SEQ ID NO: 68935 - DNA, 25 bp, SARS Virus
ttttgtgatgcagatataaccgcta

SEQ ID NO: 68936 - DNA, 25 bp, SARS Virus
tttgtgatgcaggtataaccgctag

SEQ ID NO: 68937 - DNA, 25 bp, SARS Virus
acattacggtgattcacgtggatga

SEQ ID NO: 68938 - DNA, 25 bp, SARS Virus
cattacggtgaatcacgtggatgag

SEQ ID NO: 68939 - DNA, 25 bp, SARS Virus
attacggtgaattacgtggatgaga

SEQ ID NO: 68940 - DNA, 25 bp, SARS Virus
ttacggtgaatctcgtggatgagat

SEQ ID NO: 68941 - DNA, 25 bp, SARS Virus
tacggtgaatcatgtggatgagatc

SEQ ID NO: 68942 - DNA, 25 bp, SARS Virus
acggtgaatcacttggatgagatca

SEQ ID NO: 68943 - DNA, 25 bp, SARS Virus
cggtgaatcacgtggatgagatcac

SEQ ID NO: 68944 - DNA, 25 bp, SARS Virus
ggtgaatcacgttgatgagatcacg

SEQ ID NO: 68945 - DNA, 25 bp, SARS Virus
gtgaatcacgtgtatgagatcacgg

SEQ ID NO: 68946 - DNA, 25 bp, SARS Virus
tgaatcacgtggttgagatcacggt

SEQ ID NO: 68947 - DNA, 25 bp, SARS Virus
gaatcacgtggatgagatcacggtg

SEQ ID NO: 68948 - DNA, 25 bp, SARS Virus
aatcacgtggattagatcacggtgt

SEQ ID NO: 68949 - DNA, 25 bp, SARS Virus
atcacgtggatgtgatcacggtgtt

SEQ ID NO: 68950 - DNA, 25 bp, SARS Virus
tcacgtggatgatatcacggtgttc

SEQ ID NO: 68951 - DNA, 25 bp, SARS Virus
cacgtggatgagttcacggtgttct

SEQ ID NO: 68952 - DNA, 25 bp, SARS Virus
acgtggatgagatcacggtgttctc

SEQ ID NO: 68953 - DNA, 25 bp, SARS Virus
cgtggatgagattacggtgttctcg

SEQ ID NO: 68954 - DNA, 25 bp, SARS Virus
gtggatgagatctcggtgttctcgt

SEQ ID NO: 68955 - DNA, 25 bp, SARS Virus
tggatgagatcatggtgttctcgtg

SEQ ID NO: 68956 - DNA, 25 bp, SARS Virus
ggatgagatcactgtgttctcgtga

SEQ ID NO: 68957 - DNA, 25 bp, SARS Virus
gatgagatcacgttgttctcgtgat

SEQ ID NO: 68958 - DNA, 25 bp, SARS Virus
atgagatcacggtgttctcgtgata

SEQ ID NO: 68959 - DNA, 25 bp, SARS Virus
tgagatcacggttttctcgtgatac

SEQ ID NO: 68960 - DNA, 25 bp, SARS Virus
gagatcacggtgttctcgtgataca

SEQ ID NO: 68961 - DNA, 25 bp, SARS Virus
agatcacggtgttctcgtgatacac

SEQ ID NO: 68962 - DNA, 25 bp, SARS Virus
gatcacggtgttttcgtgatacact

SEQ ID NO: 68963 - DNA, 25 bp, SARS Virus
atcacggtgttctcgtgatacactc

SEQ ID NO: 68964 - DNA, 25 bp, SARS Virus
tcacggtgttcttgtgatacactct

SEQ ID NO: 68965 - DNA, 25 bp, SARS Virus
cacggtgttctcttgatacactctt

SEQ ID NO: 68966 - DNA, 25 bp, SARS Virus
acggtgttctcgtgatacactctta

SEQ ID NO: 68967 - DNA, 25 bp, SARS Virus
cggtgttctcgttatacactcttaa

SEQ ID NO: 68968 - DNA, 25 bp, SARS Virus
ggtgttctcgtgttacactcttaat

SEQ ID NO: 68969 - DNA, 25 bp, SARS Virus
gtgttctcgtgatacactcttaatg

SEQ ID NO: 68970 - DNA, 25 bp, SARS Virus
tgttctcgtgattcactcttaatga

SEQ ID NO: 68971 - DNA, 25 bp, SARS Virus
gttctcgtgatatactcttaatgac

SEQ ID NO: 68972 - DNA, 25 bp, SARS Virus
ttctcgtgatactctcttaatgacc

SEQ ID NO: 68973 - DNA, 25 bp, SARS Virus
tctcgtgatacattcttaatgaccg

SEQ ID NO: 68974 - DNA, 25 bp, SARS Virus
ctcgtgatacactcttaatgaccga

SEQ ID NO: 68975 - DNA, 25 bp, SARS Virus
tcgtgatacacttttaatgaccgaa

SEQ ID NO: 68976 - DNA, 25 bp, SARS Virus
cgtgatacactcttaatgaccgaac

SEQ ID NO: 68977 - DNA, 25 bp, SARS Virus
gtgatacactcttaatgaccgaaca

SEQ ID NO: 68978 - DNA, 25 bp, SARS Virus
tgatacactctttatgaccgaacat

SEQ ID NO: 68979 - DNA, 25 bp, SARS Virus
gatacactcttattgaccgaacatg

SEQ ID NO: 68980 - DNA, 25 bp, SARS Virus
atacactcttaatgaccgaacatgg

SEQ ID NO: 68981 - DNA, 25 bp, SARS Virus
tacactcttaattaccgaacatggg

SEQ ID NO: 68982 - DNA, 25 bp, SARS Virus
acactcttaatgtccgaacatgggt

SEQ ID NO: 68983 - DNA, 25 bp, SARS Virus
cactcttaatgatcgaacatgggtt

SEQ ID NO: 68984 - DNA, 25 bp, SARS Virus
actcttaatgactgaacatgggttg

SEQ ID NO: 68985 - DNA, 25 bp, SARS Virus
ctcttaatgacctaacatgggttgt

SEQ ID NO: 68986 - DNA, 25 bp, SARS Virus
tcttaatgaccgtacatgggttgtg

SEQ ID NO: 68987 - DNA, 25 bp, SARS Virus
cttaatgaccgatcatgggttgtga

SEQ ID NO: 68988 - DNA, 25 bp, SARS Virus
ttaatgaccgaatatgggttgtgag

SEQ ID NO: 68989 - DNA, 25 bp, SARS Virus
taatgaccgaacttgggttgtgagt

SEQ ID NO: 68990 - DNA, 25 bp, SARS Virus
aatgaccgaacatgggttgtgagtt

SEQ ID NO: 68991 - DNA, 25 bp, SARS Virus
atgaccgaacattggttgtgagttg

SEQ ID NO: 68992 - DNA, 25 bp, SARS Virus
tgaccgaacatgtgttgtgagttgt

SEQ ID NO: 68993 - DNA, 25 bp, SARS Virus
gaccgaacatggtttgtgagttgta

SEQ ID NO: 68994 - DNA, 25 bp, SARS Virus
accgaacatgggttgtgagttgtag

SEQ ID NO: 68995 - DNA, 25 bp, SARS Virus
ccgaacatgggttgtgagttgtaga

SEQ ID NO: 68996 - DNA, 25 bp, SARS Virus
cgaacatgggttttgagttgtagag

SEQ ID NO: 68997 - DNA, 25 bp, SARS Virus
gaacatgggttgtgagttgtagagt

SEQ ID NO: 68998 - DNA, 25 bp, SARS Virus
aacatgggttgttagttgtagagtc

SEQ ID NO: 68999 - DNA, 25 bp, SARS Virus
acatgggttgtgtgttgtagagtct

SEQ ID NO: 69000 - DNA, 25 bp, SARS Virus
catgggttgtgatttgtagagtcta

SEQ ID NO: 69001 - DNA, 25 bp, SARS Virus
atgggttgtgagttgtagagtctac

SEQ ID NO: 69002 - DNA, 25 bp, SARS Virus
tgggttgtgagttgtagagtctact

SEQ ID NO: 69003 - DNA, 25 bp, SARS Virus
gggttgtgagttttagagtctactc

SEQ ID NO: 69004 - DNA, 25 bp, SARS Virus
ggttgtgagttgtagagtctactca

SEQ ID NO: 69005 - DNA, 25 bp, SARS Virus
gttgtgagttgttgagtctactcaa

SEQ ID NO: 69006 - DNA, 25 bp, SARS Virus
ttgtgagttgtatagtctactcaaa

SEQ ID NO: 69007 - DNA, 25 bp, SARS Virus
tgtgagttgtagtgtctactcaaaa

SEQ ID NO: 69008 - DNA, 25 bp, SARS Virus
gtgagttgtagattctactcaaaag

SEQ ID NO: 69009 - DNA, 25 bp, SARS Virus
tgagttgtagagtctactcaaaaga

SEQ ID NO: 69010 - DNA, 25 bp, SARS Virus
gagttgtagagtttactcaaaagat

SEQ ID NO: 69011 - DNA, 25 bp, SARS Virus
agttgtagagtctactcaaaagatc

SEQ ID NO: 69012 - DNA, 25 bp, SARS Virus
gttgtagagtcttctcaaaagatcg

SEQ ID NO: 69013 - DNA, 25 bp, SARS Virus
ttgtagagtctattcaaaagatcgt

SEQ ID NO: 69014 - DNA, 25 bp, SARS Virus
tgtagagtctactcaaaagatcgtt

SEQ ID NO: 69015 - DNA, 25 bp, SARS Virus
gtagagtctacttaaaagatcgtta

SEQ ID NO: 69016 - DNA, 25 bp, SARS Virus
tagagtctactctaaagatcgttac

SEQ ID NO: 69017 - DNA, 25 bp, SARS Virus
agagtctactcataagatcgttaca

SEQ ID NO: 69018 - DNA, 25 bp, SARS Virus
gagtctactcaatagatcgttacaa

SEQ ID NO: 69019 - DNA, 25 bp, SARS Virus
agtctactcaaatgatcgttacaac

SEQ ID NO: 69020 - DNA, 25 bp, SARS Virus
gtctactcaaaatatcgttacaacg

SEQ ID NO: 69021 - DNA, 25 bp, SARS Virus
tctactcaaaagttcgttacaacgt

SEQ ID NO: 69022 - DNA, 25 bp, SARS Virus
ctactcaaaagatcgttacaacgtt

SEQ ID NO: 69023 - DNA, 25 bp, SARS Virus
tactcaaaagattgttacaacgttt

SEQ ID NO: 69024 - DNA, 25 bp, SARS Virus
actcaaaagatctttacaacgttta

SEQ ID NO: 69025 - DNA, 25 bp, SARS Virus
ctcaaaagatcgttacaacgtttaa

SEQ ID NO: 69026 - DNA, 25 bp, SARS Virus
tcaaaagatcgttacaacgtttaat

SEQ ID NO: 69027 - DNA, 25 bp, SARS Virus
caaaagatcgtttcaacgtttaata

SEQ ID NO: 69028 - DNA, 25 bp, SARS Virus
aaaagatcgttataacgtttaatag

SEQ ID NO: 69029 - DNA, 25 bp, SARS Virus
aaagatcgttactacgtttaatagt

SEQ ID NO: 69030 - DNA, 25 bp, SARS Virus
aagatcgttacatcgtttaatagtt

SEQ ID NO: 69031 - DNA, 25 bp, SARS Virus
agatcgttacaatgtttaatagttt

SEQ ID NO: 69032 - DNA, 25 bp, SARS Virus
gatcgttacaacttttaatagtttt

SEQ ID NO: 69033 - DNA, 25 bp, SARS Virus
atcgttacaacgtttaatagttttc

SEQ ID NO: 69034 - DNA, 25 bp, SARS Virus
tcgttacaacgtttaatagttttcc

SEQ ID NO: 69035 - DNA, 25 bp, SARS Virus
cgttacaacgtttaatagttttcca

SEQ ID NO: 69036 - DNA, 25 bp, SARS Virus
gttacaacgttttatagttttccag

SEQ ID NO: 69037 - DNA, 25 bp, SARS Virus
ttacaacgtttattagttttccagc

SEQ ID NO: 69038 - DNA, 25 bp, SARS Virus
tacaacgtttaatagttttccagcc

SEQ ID NO: 69039 - DNA, 25 bp, SARS Virus
acaacgtttaattgttttccagccg

SEQ ID NO: 69040 - DNA, 25 bp, SARS Virus
caacgtttaatatttttccagccgt

SEQ ID NO: 69041 - DNA, 25 bp, SARS Virus
aacgtttaatagttttccagccgta

SEQ ID NO: 69042 - DNA, 25 bp, SARS Virus
acgtttaatagttttccagccgtac

SEQ ID NO: 69043 - DNA, 25 bp, SARS Virus
cgtttaatagttttccagccgtacg

SEQ ID NO: 69044 - DNA, 25 bp, SARS Virus
gtttaatagttttccagccgtacgt

SEQ ID NO: 69045 - DNA, 25 bp, SARS Virus
tttaatagtttttcagccgtacgtt

SEQ ID NO: 69046 - DNA, 25 bp, SARS Virus
ttaatagttttctagccgtacgttt

SEQ ID NO: 69047 - DNA, 25 bp, SARS Virus
taatagttttcctgccgtacgtttt

SEQ ID NO: 69048 - DNA, 25 bp, SARS Virus
aatagttttccatccgtacgttttc

SEQ ID NO: 69049 - DNA, 25 bp, SARS Virus
atagttttccagtcgtacgttttca

SEQ ID NO: 69050 - DNA, 25 bp, SARS Virus
tagttttccagctgtacgttttcat

SEQ ID NO: 69051 - DNA, 25 bp, SARS Virus
agttttccagccttacgttttcatg

SEQ ID NO: 69052 - DNA, 25 bp, SARS Virus
gttttccagccgtacgttttcatga

SEQ ID NO: 69053 - DNA, 25 bp, SARS Virus
ttttccagccgttcgttttcatgag

SEQ ID NO: 69054 - DNA, 25 bp, SARS Virus
tttccagccgtatgttttcatgaga

SEQ ID NO: 69055 - DNA, 25 bp, SARS Virus
ttccagccgtactttttcatgagat

SEQ ID NO: 69056 - DNA, 25 bp, SARS Virus
tccagccgtacgttttcatgagatg

SEQ ID NO: 69057 - DNA, 25 bp, SARS Virus
ccagccgtacgttttcatgagatgt

SEQ ID NO: 69058 - DNA, 25 bp, SARS Virus
cagccgtacgttttcatgagatgtg

SEQ ID NO: 69059 - DNA, 25 bp, SARS Virus
agccgtacgttttcatgagatgtga

SEQ ID NO: 69060 - DNA, 25 bp, SARS Virus
gccgtacgtttttatgagatgtgag

SEQ ID NO: 69061 - DNA, 25 bp, SARS Virus
ccgtacgttttcttgagatgtgagg

SEQ ID NO: 69062 - DNA, 25 bp, SARS Virus
cgtacgttttcatgagatgtgaggt

SEQ ID NO: 69063 - DNA, 25 bp, SARS Virus
gtacgttttcattagatgtgaggtt

SEQ ID NO: 69064 - DNA, 25 bp, SARS Virus
tacgttttcatgtgatgtgaggttc

SEQ ID NO: 69065 - DNA, 25 bp, SARS Virus
acgttttcatgatatgtgaggttcc

SEQ ID NO: 69066 - DNA, 25 bp, SARS Virus
cgttttcatgagttgtgaggttcct

SEQ ID NO: 69067 - DNA, 25 bp, SARS Virus
gttttcatgagatgtgaggttcctg

SEQ ID NO: 69068 - DNA, 25 bp, SARS Virus
ttttcatgagatttgaggttcctgg

SEQ ID NO: 69069 - DNA, 25 bp, SARS Virus
tttcatgagatgtgaggttcctggt

SEQ ID NO: 69070 - DNA, 25 bp, SARS Virus
ttcatgagatgttaggttcctggtg

SEQ ID NO: 69071 - DNA, 25 bp, SARS Virus
tcatgagatgtgtggttcctggtgg

SEQ ID NO: 69072 - DNA, 25 bp, SARS Virus
catgagatgtgatgttcctggtgga

SEQ ID NO: 69073 - DNA, 25 bp, SARS Virus
atgagatgtgagtttcctggtggac

SEQ ID NO: 69074 - DNA, 25 bp, SARS Virus
tgagatgtgaggttcctggtggacc

SEQ ID NO: 69075 - DNA, 25 bp, SARS Virus
gagatgtgaggttcctggtggacca

SEQ ID NO: 69076 - DNA, 25 bp, SARS Virus
agatgtgaggtttctggtggaccat

SEQ ID NO: 69077 - DNA, 25 bp, SARS Virus
gatgtgaggttcttggtggaccatg

SEQ ID NO: 69078 - DNA, 25 bp, SARS Virus
atgtgaggttcctggtggaccatga

SEQ ID NO: 69079 - DNA, 25 bp, SARS Virus
tgtgaggttccttgtggaccatgac

SEQ ID NO: 69080 - DNA, 25 bp, SARS Virus
gtgaggttcctgttggaccatgacc

SEQ ID NO: 69081 - DNA, 25 bp, SARS Virus
tgaggttcctggtggaccatgacca

SEQ ID NO: 69082 - DNA, 25 bp, SARS Virus
gaggttcctggttgaccatgaccat

SEQ ID NO: 69083 - DNA, 25 bp, SARS Virus
aggttcctggtgtaccatgaccatt

SEQ ID NO: 69084 - DNA, 25 bp, SARS Virus
ggttcctggtggtccatgaccattc

SEQ ID NO: 69085 - DNA, 25 bp, SARS Virus
gttcctggtggatcatgaccattct

SEQ ID NO: 69086 - DNA, 25 bp, SARS Virus
ttcctggtggactatgaccattctc

SEQ ID NO: 69087 - DNA, 25 bp, SARS Virus
tcctggtggaccttgaccattctca

SEQ ID NO: 69088 - DNA, 25 bp, SARS Virus
cctggtggaccatgaccattctcag

SEQ ID NO: 69089 - DNA, 25 bp, SARS Virus
ctggtggaccattaccattctcagt

SEQ ID NO: 69090 - DNA, 25 bp, SARS Virus
tggtggaccatgtccattctcagta

SEQ ID NO: 69091 - DNA, 25 bp, SARS Virus
ggtggaccatgatcattctcagtaa

SEQ ID NO: 69092 - DNA, 25 bp, SARS Virus
gtggaccatgactattctcagtaaa

SEQ ID NO: 69093 - DNA, 25 bp, SARS Virus
tggaccatgacctttctcagtaaaa

SEQ ID NO: 69094 - DNA, 25 bp, SARS Virus
ggaccatgaccattctcagtaaaac

SEQ ID NO: 69095 - DNA, 25 bp, SARS Virus
gaccatgaccattctcagtaaaacg

SEQ ID NO: 69096 - DNA, 25 bp, SARS Virus
accatgaccattttcagtaaaacgg

SEQ ID NO: 69097 - DNA, 25 bp, SARS Virus
ccatgaccattctcagtaaaacggt

SEQ ID NO: 69098 - DNA, 25 bp, SARS Virus
catgaccattcttagtaaaacggta

SEQ ID NO: 69099 - DNA, 25 bp, SARS Virus
atgaccattctctgtaaaacggtag

SEQ ID NO: 69100 - DNA, 25 bp, SARS Virus
tgaccattctcattaaaacggtagc

SEQ ID NO: 69101 - DNA, 25 bp, SARS Virus
gaccattctcagtaaaacggtagcc

SEQ ID NO: 69102 - DNA, 25 bp, SARS Virus
accattctcagttaaacggtagcct

SEQ ID NO: 69103 - DNA, 25 bp, SARS Virus
ccattctcagtataacggtagcctg

SEQ ID NO: 69104 - DNA, 25 bp, SARS Virus
cattctcagtaatacggtagcctga

SEQ ID NO: 69105 - DNA, 25 bp, SARS Virus
attctcagtaaatcggtagcctgaa

SEQ ID NO: 69106 - DNA, 25 bp, SARS Virus
ttctcagtaaaatggtagcctgaac

SEQ ID NO: 69107 - DNA, 25 bp, SARS Virus
tctcagtaaaactgtagcctgaacg

SEQ ID NO: 69108 - DNA, 25 bp, SARS Virus
ctcagtaaaacgttagcctgaacga

SEQ ID NO: 69109 - DNA, 25 bp, SARS Virus
tcagtaaaacggtagcctgaacgag

SEQ ID NO: 69110 - DNA, 25 bp, SARS Virus
cagtaaaacggttgcctgaacgaga

SEQ ID NO: 69111 - DNA, 25 bp, SARS Virus
agtaaaacggtatcctgaacgagag

SEQ ID NO: 69112 - DNA, 25 bp, SARS Virus
gtaaaacggtagtctgaacgagaga

SEQ ID NO: 69113 - DNA, 25 bp, SARS Virus
taaaacggtagcttgaacgagagat

SEQ ID NO: 69114 - DNA, 25 bp, SARS Virus
aaaacggtagcctgaacgagagata

SEQ ID NO: 69115 - DNA, 25 bp, SARS Virus
aaacggtagccttaacgagagataa

SEQ ID NO: 69116 - DNA, 25 bp, SARS Virus
aacggtagcctgtacgagagataat

SEQ ID NO: 69117 - DNA, 25 bp, SARS Virus
acggtagcctgatcgagagataatg

SEQ ID NO: 69118 - DNA, 25 bp, SARS Virus
cggtagcctgaatgagagataatgg

SEQ ID NO: 69119 - DNA, 25 bp, SARS Virus
ggtagcctgaactagagataatggg

SEQ ID NO: 69120 - DNA, 25 bp, SARS Virus
gtagcctgaacgtgagataatgggt

SEQ ID NO: 69121 - DNA, 25 bp, SARS Virus
tagcctgaacgatagataatgggta

SEQ ID NO: 69122 - DNA, 25 bp, SARS Virus
agcctgaacgagtgataatgggtag

SEQ ID NO: 69123 - DNA, 25 bp, SARS Virus
gcctgaacgagatataatgggtaga

SEQ ID NO: 69124 - DNA, 25 bp, SARS Virus
cctgaacgagagttaatgggtagac

SEQ ID NO: 69125 - DNA, 25 bp, SARS Virus
ctgaacgagagataatgggtagacg

SEQ ID NO: 69126 - DNA, 25 bp, SARS Virus
tgaacgagagattatgggtagacga

SEQ ID NO: 69127 - DNA, 25 bp, SARS Virus
gaacgagagatattgggtagacgag

SEQ ID NO: 69128 - DNA, 25 bp, SARS Virus
aacgagagataatgggtagacgagc

SEQ ID NO: 69129 - DNA, 25 bp, SARS Virus
acgagagataattggtagacgagcg

SEQ ID NO: 69130 - DNA, 25 bp, SARS Virus
cgagagataatgtgtagacgagcgt

SEQ ID NO: 69131 - DNA, 25 bp, SARS Virus
gagagataatggttagacgagcgta

SEQ ID NO: 69132 - DNA, 25 bp, SARS Virus
agagataatgggtagacgagcgtat

SEQ ID NO: 69133 - DNA, 25 bp, SARS Virus
gagataatgggttgacgagcgtatc

SEQ ID NO: 69134 - DNA, 25 bp, SARS Virus
agataatgggtatacgagcgtatca

SEQ ID NO: 69135 - DNA, 25 bp, SARS Virus
gataatgggtagtcgagcgtatcac

SEQ ID NO: 69136 - DNA, 25 bp, SARS Virus
ataatgggtagatgagcgtatcaca

SEQ ID NO: 69137 - DNA, 25 bp, SARS Virus
taatgggtagactagcgtatcacat

SEQ ID NO: 69138 - DNA, 25 bp, SARS Virus
aatgggtagacgtgcgtatcacata

SEQ ID NO: 69139 - DNA, 25 bp, SARS Virus
atgggtagacgatcgtatcacatat

SEQ ID NO: 69140 - DNA, 25 bp, SARS Virus
tgggtagacgagtgtatcacatatg

SEQ ID NO: 69141 - DNA, 25 bp, SARS Virus
gggtagacgagcttatcacatatgc

SEQ ID NO: 69142 - DNA, 25 bp, SARS Virus
ggtagacgagcgtatcacatatgcc

SEQ ID NO: 69143 - DNA, 25 bp, SARS Virus
gtagacgagcgtttcacatatgccg

SEQ ID NO: 69144 - DNA, 25 bp, SARS Virus
tagacgagcgtatcacatatgccgt

SEQ ID NO: 69145 - DNA, 25 bp, SARS Virus
agacgagcgtattacatatgccgta

SEQ ID NO: 69146 - DNA, 25 bp, SARS Virus
gacgagcgtatctcatatgccgtac

SEQ ID NO: 69147 - DNA, 25 bp, SARS Virus
acgagcgtatcatatatgccgtacg

SEQ ID NO: 69148 - DNA, 25 bp, SARS Virus
cgagcgtatcacttatgccgtacga

SEQ ID NO: 69149 - DNA, 25 bp, SARS Virus
gagcgtatcacatatgccgtacgag

SEQ ID NO: 69150 - DNA, 25 bp, SARS Virus
agcgtatcacatttgccgtacgaga

SEQ ID NO: 69151 - DNA, 25 bp, SARS Virus
gcgtatcacatatgccgtacgagag

SEQ ID NO: 69152 - DNA, 25 bp, SARS Virus
cgtatcacatattccgtacgagagt

SEQ ID NO: 69153 - DNA, 25 bp, SARS Virus
gtatcacatatgtcgtacgagagta

SEQ ID NO: 69154 - DNA, 25 bp, SARS Virus
tatcacatatgctgtacgagagtac

SEQ ID NO: 69155 - DNA, 25 bp, SARS Virus
atcacatatgccttacgagagtacg

SEQ ID NO: 69156 - DNA, 25 bp, SARS Virus
tcacatatgccgtacgagagtacgt

SEQ ID NO: 69157 - DNA, 25 bp, SARS Virus
cacatatgccgttcgagagtacgtc

SEQ ID NO: 69158 - DNA, 25 bp, SARS Virus
acatatgccgtatgagagtacgtcg

SEQ ID NO: 69159 - DNA, 25 bp, SARS Virus
catatgccgtactagagtacgtcga

SEQ ID NO: 69160 - DNA, 25 bp, SARS Virus
atatgccgtacgtgagtacgtcgac

SEQ ID NO: 69161 - DNA, 25 bp, SARS Virus
tatgccgtacgatagtacgtcgaca

SEQ ID NO: 69162 - DNA, 25 bp, SARS Virus
atgccgtacgagtgtacgtcgacaa

SEQ ID NO: 69163 - DNA, 25 bp, SARS Virus
tgccgtacgagattacgtcgacaac

SEQ ID NO: 69164 - DNA, 25 bp, SARS Virus
gccgtacgagagtacgtcgacaact

SEQ ID NO: 69165 - DNA, 25 bp, SARS Virus
ccgtacgagagttcgtcgacaacta

SEQ ID NO: 69166 - DNA, 25 bp, SARS Virus
cgtacgagagtatgtcgacaactac

SEQ ID NO: 69167 - DNA, 25 bp, SARS Virus
gtacgagagtacttcgacaactacg

SEQ ID NO: 69168 - DNA, 25 bp, SARS Virus
tacgagagtacgtcgacaactacgg

SEQ ID NO: 69169 - DNA, 25 bp, SARS Virus
acgagagtacgttgacaactacggg

SEQ ID NO: 69170 - DNA, 25 bp, SARS Virus
cgagagtacgtctacaactacggga

SEQ ID NO: 69171 - DNA, 25 bp, SARS Virus
gagagtacgtcgtcaactacgggat

SEQ ID NO: 69172 - DNA, 25 bp, SARS Virus
agagtacgtcgataactacgggata

SEQ ID NO: 69173 - DNA, 25 bp, SARS Virus
gagtacgtcgactactacgggatac

SEQ ID NO: 69174 - DNA, 25 bp, SARS Virus
agtacgtcgacatctacgggataca

SEQ ID NO: 69175 - DNA, 25 bp, SARS Virus
gtacgtcgacaattacgggatacac

SEQ ID NO: 69176 - DNA, 25 bp, SARS Virus
tacgtcgacaactacgggatacact

SEQ ID NO: 69177 - DNA, 25 bp, SARS Virus
acgtcgacaacttcgggatacactt

SEQ ID NO: 69178 - DNA, 25 bp, SARS Virus
cgtcgacaactatgggatacacttt

SEQ ID NO: 69179 - DNA, 25 bp, SARS Virus
gtcgacaactactggatacactttt

SEQ ID NO: 69180 - DNA, 25 bp, SARS Virus
tcgacaactacgtgatacacttttc

SEQ ID NO: 69181 - DNA, 25 bp, SARS Virus
cgacaactacggtatacacttttcc

SEQ ID NO: 69182 - DNA, 25 bp, SARS Virus
gacaactacgggttacacttttccg

SEQ ID NO: 69183 - DNA, 25 bp, SARS Virus
acaactacgggatacacttttccgt

SEQ ID NO: 69184 - DNA, 25 bp, SARS Virus
caactacgggattcacttttccgta

SEQ ID NO: 69185 - DNA, 25 bp, SARS Virus
aactacgggatatacttttccgtaa

SEQ ID NO: 69186 - DNA, 25 bp, SARS Virus
actacgggatactcttttccgtaat

SEQ ID NO: 69187 - DNA, 25 bp, SARS Virus
ctacgggatacatttttccgtaatt

SEQ ID NO: 69188 - DNA, 25 bp, SARS Virus
tacgggatacacttttccgtaattt

SEQ ID NO: 69189 - DNA, 25 bp, SARS Virus
acgggatacacttttccgtaatttt

SEQ ID NO: 69190 - DNA, 25 bp, SARS Virus
cgggatacacttttccgtaatttta

SEQ ID NO: 69191 - DNA, 25 bp, SARS Virus
gggatacacttttccgtaattttat

SEQ ID NO: 69192 - DNA, 25 bp, SARS Virus
ggatacactttttcgtaattttata

SEQ ID NO: 69193 - DNA, 25 bp, SARS Virus
gatacacttttctgtaattttataa

SEQ ID NO: 69194 - DNA, 25 bp, SARS Virus
atacacttttccttaattttataaa

SEQ ID NO: 69195 - DNA, 25 bp, SARS Virus
tacacttttccgtaattttataaac

SEQ ID NO: 69196 - DNA, 25 bp, SARS Virus
acacttttccgttattttataaacg

SEQ ID NO: 69197 - DNA, 25 bp, SARS Virus
cacttttccgtatttttataaacgg

SEQ ID NO: 69198 - DNA, 25 bp, SARS Virus
acttttccgtaattttataaacggg

SEQ ID NO: 69199 - DNA, 25 bp, SARS Virus
cttttccgtaattttataaacgggt

SEQ ID NO: 69200 - DNA, 25 bp, SARS Virus
ttttccgtaattttataaacgggta

SEQ ID NO: 69201 - DNA, 25 bp, SARS Virus
tttccgtaattttataaacgggtat

SEQ ID NO: 69202 - DNA, 25 bp, SARS Virus
ttccgtaattttttaaacgggtatc

SEQ ID NO: 69203 - DNA, 25 bp, SARS Virus
tccgtaattttataaacgggtatct

SEQ ID NO: 69204 - DNA, 25 bp, SARS Virus
ccgtaattttattaacgggtatcta

SEQ ID NO: 69205 - DNA, 25 bp, SARS Virus
cgtaattttatatacgggtatctat

SEQ ID NO: 69206 - DNA, 25 bp, SARS Virus
gtaattttataatcgggtatctatt

SEQ ID NO: 69207 - DNA, 25 bp, SARS Virus
taattttataaatgggtatctattt

SEQ ID NO: 69208 - DNA, 25 bp, SARS Virus
aattttataaactggtatctattta

SEQ ID NO: 69209 - DNA, 25 bp, SARS Virus
attttataaacgtgtatctatttac

SEQ ID NO: 69210 - DNA, 25 bp, SARS Virus
ttttataaacggttatctatttaca

SEQ ID NO: 69211 - DNA, 25 bp, SARS Virus
tttataaacgggtatctatttacat

SEQ ID NO: 69212 - DNA, 25 bp, SARS Virus
ttataaacgggtttctatttacatc

SEQ ID NO: 69213 - DNA, 25 bp, SARS Virus
tataaacgggtatctatttacatca

SEQ ID NO: 69214 - DNA, 25 bp, SARS Virus
ataaacgggtatttatttacatcat

SEQ ID NO: 69215 - DNA, 25 bp, SARS Virus
taaacgggtatctatttacatcatc

SEQ ID NO: 69216 - DNA, 25 bp, SARS Virus
aaacgggtatctttttacatcatct

SEQ ID NO: 69217 - DNA, 25 bp, SARS Virus
aacgggtatctatttacatcatctt

SEQ ID NO: 69218 - DNA, 25 bp, SARS Virus
acgggtatctatttacatcatctta

SEQ ID NO: 69219 - DNA, 25 bp, SARS Virus
cgggtatctatttacatcatcttag

SEQ ID NO: 69220 - DNA, 25 bp, SARS Virus
gggtatctattttcatcatcttagt

SEQ ID NO: 69221 - DNA, 25 bp, SARS Virus
ggtatctatttatatcatcttagta

SEQ ID NO: 69222 - DNA, 25 bp, SARS Virus
gtatctatttacttcatcttagtat

SEQ ID NO: 69223 - DNA, 25 bp, SARS Virus
tatctatttacatcatcttagtatg

SEQ ID NO: 69224 - DNA, 25 bp, SARS Virus
atctatttacattatcttagtatgg

SEQ ID NO: 69225 - DNA, 25 bp, SARS Virus
tctatttacatcttcttagtatgga

SEQ ID NO: 69226 - DNA, 25 bp, SARS Virus
ctatttacatcatcttagtatggac

SEQ ID NO: 69227 - DNA, 25 bp, SARS Virus
tatttacatcattttagtatggacg

SEQ ID NO: 69228 - DNA, 25 bp, SARS Virus
atttacatcatcttagtatggacgc

SEQ ID NO: 69229 - DNA, 25 bp, SARS Virus
tttacatcatcttagtatggacgcg

SEQ ID NO: 69230 - DNA, 25 bp, SARS Virus
ttacatcatctttgtatggacgcgc

SEQ ID NO: 69231 - DNA, 25 bp, SARS Virus
tacatcatcttattatggacgcgca

SEQ ID NO: 69232 - DNA, 25 bp, SARS Virus
acatcatcttagtatggacgcgcac

SEQ ID NO: 69233 - DNA, 25 bp, SARS Virus
catcatcttagtttggacgcgcacg

SEQ ID NO: 69234 - DNA, 25 bp, SARS Virus
atcatcttagtatggacgcgcacgc

SEQ ID NO: 69235 - DNA, 25 bp, SARS Virus
tcatcttagtattgacgcgcacgcg

SEQ ID NO: 69236 - DNA, 25 bp, SARS Virus
catcttagtatgtacgcgcacgcgc

SEQ ID NO: 69237 - DNA, 25 bp, SARS Virus
atcttagtatggtcgcgcacgcgcg

SEQ ID NO: 69238 - DNA, 25 bp, SARS Virus
tcttagtatggatgcgcacgcgcgc

SEQ ID NO: 69239 - DNA, 25 bp, SARS Virus
cttagtatggactcgcacgcgcgca

SEQ ID NO: 69240 - DNA, 25 bp, SARS Virus
ttagtatggacgtgcacgcgcgcat

SEQ ID NO: 69241 - DNA, 25 bp, SARS Virus
tagtatggacgctcacgcgcgcatc

SEQ ID NO: 69242 - DNA, 25 bp, SARS Virus
agtatggacgcgtacgcgcgcatct

SEQ ID NO: 69243 - DNA, 25 bp, SARS Virus
gtatggacgcgctcgcgcgcatctc

SEQ ID NO: 69244 - DNA, 25 bp, SARS Virus
tatggacgcgcatgcgcgcatctca

SEQ ID NO: 69245 - DNA, 25 bp, SARS Virus
atggacgcgcactcgcgcatctcac

SEQ ID NO: 69246 - DNA, 25 bp, SARS Virus
tggacgcgcacgtgcgcatctcaca

SEQ ID NO: 69247 - DNA, 25 bp, SARS Virus
ggacgcgcacgctcgcatctcacaa

SEQ ID NO: 69248 - DNA, 25 bp, SARS Virus
gacgcgcacgcgtgcatctcacaaa

SEQ ID NO: 69249 - DNA, 25 bp, SARS Virus
acgcgcacgcgctcatctcacaaaa

SEQ ID NO: 69250 - DNA, 25 bp, SARS Virus
cgcgcacgcgcgtatctcacaaaac

SEQ ID NO: 69251 - DNA, 25 bp, SARS Virus
gcgcacgcgcgcttctcacaaaact

SEQ ID NO: 69252 - DNA, 25 bp, SARS Virus
cgcacgcgcgcatctcacaaaacta

SEQ ID NO: 69253 - DNA, 25 bp, SARS Virus
gcacgcgcgcatttcacaaaactat

SEQ ID NO: 69254 - DNA, 25 bp, SARS Virus
cacgcgcgcatctcacaaaactatt

SEQ ID NO: 69255 - DNA, 25 bp, SARS Virus
acgcgcgcatcttacaaaactattt

SEQ ID NO: 69256 - DNA, 25 bp, SARS Virus
cgcgcgcatctctcaaaactattta

SEQ ID NO: 69257 - DNA, 25 bp, SARS Virus
gcgcgcatctcataaaactatttaa

SEQ ID NO: 69258 - DNA, 25 bp, SARS Virus
cgcgcatctcactaaactatttaag

SEQ ID NO: 69259 - DNA, 25 bp, SARS Virus
gcgcatctcacataactatttaagt

SEQ ID NO: 69260 - DNA, 25 bp, SARS Virus
cgcatctcacaatactatttaagtt

SEQ ID NO: 69261 - DNA, 25 bp, SARS Virus
gcatctcacaaatctatttaagttt

SEQ ID NO: 69262 - DNA, 25 bp, SARS Virus
catctcacaaaattatttaagtttc

SEQ ID NO: 69263 - DNA, 25 bp, SARS Virus
atctcacaaaactatttaagtttca

SEQ ID NO: 69264 - DNA, 25 bp, SARS Virus
tctcacaaaactttttaagtttcac

SEQ ID NO: 69265 - DNA, 25 bp, SARS Virus
ctcacaaaactatttaagtttcact

SEQ ID NO: 69266 - DNA, 25 bp, SARS Virus
tcacaaaactatttaagtttcactt

SEQ ID NO: 69267 - DNA, 25 bp, SARS Virus
cacaaaactatttaagtttcactta

SEQ ID NO: 69268 - DNA, 25 bp, SARS Virus
acaaaactattttagtttcacttaa

SEQ ID NO: 69269 - DNA, 25 bp, SARS Virus
caaaactatttatgtttcacttaag

SEQ ID NO: 69270 - DNA, 25 bp, SARS Virus
aaaactatttaattttcacttaagt

SEQ ID NO: 69271 - DNA, 25 bp, SARS Virus
aaactatttaagtttcacttaagtt

SEQ ID NO: 69272 - DNA, 25 bp, SARS Virus
aactatttaagtttcacttaagttg

SEQ ID NO: 69273 - DNA, 25 bp, SARS Virus
actatttaagtttcacttaagttgt

SEQ ID NO: 69274 - DNA, 25 bp, SARS Virus
ctatttaagttttacttaagttgtg

SEQ ID NO: 69275 - DNA, 25 bp, SARS Virus
tatttaagtttctcttaagttgtga

SEQ ID NO: 69276 - DNA, 25 bp, SARS Virus
atttaagtttcatttaagttgtgat

SEQ ID NO: 69277 - DNA, 25 bp, SARS Virus
tttaagtttcacttaagttgtgatc

SEQ ID NO: 69278 - DNA, 25 bp, SARS Virus
ttaagtttcacttaagttgtgatct

SEQ ID NO: 69279 - DNA, 25 bp, SARS Virus
taagtttcactttagttgtgatctt

SEQ ID NO: 69280 - DNA, 25 bp, SARS Virus
aagtttcacttatgttgtgatcttg

SEQ ID NO: 69281 - DNA, 25 bp, SARS Virus
agtttcacttaatttgtgatcttgt

SEQ ID NO: 69282 - DNA, 25 bp, SARS Virus
gtttcacttaagttgtgatcttgtc

SEQ ID NO: 69283 - DNA, 25 bp, SARS Virus
tttcacttaagttgtgatcttgtca

SEQ ID NO: 69284 - DNA, 25 bp, SARS Virus
ttcacttaagttttgatcttgtcat

SEQ ID NO: 69285 - DNA, 25 bp, SARS Virus
tcacttaagttgtgatcttgtcata

SEQ ID NO: 69286 - DNA, 25 bp, SARS Virus
cacttaagttgttatcttgtcatac

SEQ ID NO: 69287 - DNA, 25 bp, SARS Virus
acttaagttgtgttcttgtcataca

SEQ ID NO: 69288 - DNA, 25 bp, SARS Virus
cttaagttgtgatcttgtcatacaa

SEQ ID NO: 69289 - DNA, 25 bp, SARS Virus
ttaagttgtgattttgtcatacaaa

SEQ ID NO: 69290 - DNA, 25 bp, SARS Virus
taagttgtgatcttgtcatacaaaa

SEQ ID NO: 69291 - DNA, 25 bp, SARS Virus
aagttgtgatcttgtcatacaaaag

SEQ ID NO: 69292 - DNA, 25 bp, SARS Virus
agttgtgatcttttcatacaaaaga

SEQ ID NO: 69293 - DNA, 25 bp, SARS Virus
gttgtgatcttgtcatacaaaagac

SEQ ID NO: 69294 - DNA, 25 bp, SARS Virus
ttgtgatcttgttatacaaaagacg

SEQ ID NO: 69295 - DNA, 25 bp, SARS Virus
tgtgatcttgtcttacaaaagacgt

SEQ ID NO: 69296 - DNA, 25 bp, SARS Virus
gtgatcttgtcatacaaaagacgtg

SEQ ID NO: 69297 - DNA, 25 bp, SARS Virus
tgatcttgtcattcaaaagacgtga

SEQ ID NO: 69298 - DNA, 25 bp, SARS Virus
gatcttgtcatataaaagacgtgac

SEQ ID NO: 69299 - DNA, 25 bp, SARS Virus
atcttgtcatactaaagacgtgaca

SEQ ID NO: 69300 - DNA, 25 bp, SARS Virus
tcttgtcatacataagacgtgacat

SEQ ID NO: 69301 - DNA, 25 bp, SARS Virus
cttgtcatacaatagacgtgacatt

SEQ ID NO: 69302 - DNA, 25 bp, SARS Virus
ttgtcatacaaatgacgtgacattt

SEQ ID NO: 69303 - DNA, 25 bp, SARS Virus
tgtcatacaaaatacgtgacattta

SEQ ID NO: 69304 - DNA, 25 bp, SARS Virus
gtcatacaaaagtcgtgacatttac

SEQ ID NO: 69305 - DNA, 25 bp, SARS Virus
tcatacaaaagatgtgacatttacg

SEQ ID NO: 69306 - DNA, 25 bp, SARS Virus
catacaaaagacttgacatttacgt

SEQ ID NO: 69307 - DNA, 25 bp, SARS Virus
atacaaaagacgtgacatttacgta

SEQ ID NO: 69308 - DNA, 25 bp, SARS Virus
tacaaaagacgttacatttacgtaa

SEQ ID NO: 69309 - DNA, 25 bp, SARS Virus
acaaaagacgtgtcatttacgtaac

SEQ ID NO: 69310 - DNA, 25 bp, SARS Virus
caaaagacgtgatatttacgtaacg

SEQ ID NO: 69311 - DNA, 25 bp, SARS Virus
aaaagacgtgacttttacgtaacgg

SEQ ID NO: 69312 - DNA, 25 bp, SARS Virus
aaagacgtgacatttacgtaacggt

SEQ ID NO: 69313 - DNA, 25 bp, SARS Virus
aagacgtgacatttacgtaacggtc

SEQ ID NO: 69314 - DNA, 25 bp, SARS Virus
agacgtgacatttacgtaacggtct

SEQ ID NO: 69315 - DNA, 25 bp, SARS Virus
gacgtgacattttcgtaacggtctt

SEQ ID NO: 69316 - DNA, 25 bp, SARS Virus
acgtgacatttatgtaacggtcttt

SEQ ID NO: 69317 - DNA, 25 bp, SARS Virus
cgtgacatttacttaacggtctttg

SEQ ID NO: 69318 - DNA, 25 bp, SARS Virus
gtgacatttacgtaacggtctttgt

SEQ ID NO: 69319 - DNA, 25 bp, SARS Virus
tgacatttacgttacggtctttgtt

SEQ ID NO: 69320 - DNA, 25 bp, SARS Virus
gacatttacgtatcggtctttgttg

SEQ ID NO: 69321 - DNA, 25 bp, SARS Virus
acatttacgtaatggtctttgttga

SEQ ID NO: 69322 - DNA, 25 bp, SARS Virus
catttacgtaactgtctttgttgac

SEQ ID NO: 69323 - DNA, 25 bp, SARS Virus
atttacgtaacgttctttgttgacg

SEQ ID NO: 69324 - DNA, 25 bp, SARS Virus
tttacgtaacggtctttgttgacga

SEQ ID NO: 69325 - DNA, 25 bp, SARS Virus
ttacgtaacggtttttgttgacgac

SEQ ID NO: 69326 - DNA, 25 bp, SARS Virus
tacgtaacggtctttgttgacgact

SEQ ID NO: 69327 - DNA, 25 bp, SARS Virus
acgtaacggtctttgttgacgactg

SEQ ID NO: 69328 - DNA, 25 bp, SARS Virus
cgtaacggtctttgttgacgactgt

SEQ ID NO: 69329 - DNA, 25 bp, SARS Virus
gtaacggtcttttttgacgactgta

SEQ ID NO: 69330 - DNA, 25 bp, SARS Virus
taacggtctttgttgacgactgtaa

SEQ ID NO: 69331 - DNA, 25 bp, SARS Virus
aacggtctttgttgacgactgtaac

SEQ ID NO: 69332 - DNA, 25 bp, SARS Virus
acggtctttgtttacgactgtaaca

SEQ ID NO: 69333 - DNA, 25 bp, SARS Virus
cggtctttgttgtcgactgtaacat

SEQ ID NO: 69334 - DNA, 25 bp, SARS Virus
ggtctttgttgatgactgtaacatc

SEQ ID NO: 69335 - DNA, 25 bp, SARS Virus
gtctttgttgactactgtaacatca

SEQ ID NO: 69336 - DNA, 25 bp, SARS Virus
tctttgttgacgtctgtaacatcag

SEQ ID NO: 69337 - DNA, 25 bp, SARS Virus
ctttgttgacgattgtaacatcaga

SEQ ID NO: 69338 - DNA, 25 bp, SARS Virus
tttgttgacgactgtaacatcagaa

SEQ ID NO: 69339 - DNA, 25 bp, SARS Virus
ttgttgacgactttaacatcagaaa

SEQ ID NO: 69340 - DNA, 25 bp, SARS Virus
tgttgacgactgtaacatcagaaac

SEQ ID NO: 69341 - DNA, 25 bp, SARS Virus
gttgacgactgttacatcagaaact

SEQ ID NO: 69342 - DNA, 25 bp, SARS Virus
ttgacgactgtatcatcagaaacta

SEQ ID NO: 69343 - DNA, 25 bp, SARS Virus
tgacgactgtaatatcagaaactac

SEQ ID NO: 69344 - DNA, 25 bp, SARS Virus
gacgactgtaacttcagaaactact

SEQ ID NO: 69345 - DNA, 25 bp, SARS Virus
acgactgtaacatcagaaactactt

SEQ ID NO: 69346 - DNA, 25 bp, SARS Virus
cgactgtaacattagaaactacttt

SEQ ID NO: 69347 - DNA, 25 bp, SARS Virus
gactgtaacatctgaaactacttta

SEQ ID NO: 69348 - DNA, 25 bp, SARS Virus
actgtaacatcataaactactttag

SEQ ID NO: 69349 - DNA, 25 bp, SARS Virus
ctgtaacatcagtaactactttaga

SEQ ID NO: 69350 - DNA, 25 bp, SARS Virus
tgtaacatcagatactactttagag

SEQ ID NO: 69351 - DNA, 25 bp, SARS Virus
gtaacatcagaatctactttagaga

SEQ ID NO: 69352 - DNA, 25 bp, SARS Virus
taacatcagaaattactttagagat

SEQ ID NO: 69353 - DNA, 25 bp, SARS Virus
aacatcagaaactactttagagata

SEQ ID NO: 69354 - DNA, 25 bp, SARS Virus
acatcagaaacttctttagagatac

SEQ ID NO: 69355 - DNA, 25 bp, SARS Virus
catcagaaactattttagagatacc

SEQ ID NO: 69356 - DNA, 25 bp, SARS Virus
atcagaaactactttagagataccg

SEQ ID NO: 69357 - DNA, 25 bp, SARS Virus
tcagaaactactttagagataccga

SEQ ID NO: 69358 - DNA, 25 bp, SARS Virus
cagaaactactttagagataccgat

SEQ ID NO: 69359 - DNA, 25 bp, SARS Virus
agaaactacttttgagataccgatg

SEQ ID NO: 69360 - DNA, 25 bp, SARS Virus
gaaactactttatagataccgatga

SEQ ID NO: 69361 - DNA, 25 bp, SARS Virus
aaactactttagtgataccgatgat

SEQ ID NO: 69362 - DNA, 25 bp, SARS Virus
aactactttagatataccgatgatt

SEQ ID NO: 69363 - DNA, 25 bp, SARS Virus
actactttagagttaccgatgatta

SEQ ID NO: 69364 - DNA, 25 bp, SARS Virus
ctactttagagataccgatgattaa

SEQ ID NO: 69365 - DNA, 25 bp, SARS Virus
tactttagagattccgatgattaat

SEQ ID NO: 69366 - DNA, 25 bp, SARS Virus
actttagagatatcgatgattaata

SEQ ID NO: 69367 - DNA, 25 bp, SARS Virus
ctttagagatactgatgattaatac

SEQ ID NO: 69368 - DNA, 25 bp, SARS Virus
tttagagatacctatgattaatact

SEQ ID NO: 69369 - DNA, 25 bp, SARS Virus
ttagagataccgttgattaatactg

SEQ ID NO: 69370 - DNA, 25 bp, SARS Virus
tagagataccgatgattaatactga

SEQ ID NO: 69371 - DNA, 25 bp, SARS Virus
agagataccgattattaatactgaa

SEQ ID NO: 69372 - DNA, 25 bp, SARS Virus
gagataccgatgtttaatactgaac

SEQ ID NO: 69373 - DNA, 25 bp, SARS Virus
agataccgatgattaatactgaact

SEQ ID NO: 69374 - DNA, 25 bp, SARS Virus
gataccgatgattaatactgaactc

SEQ ID NO: 69375 - DNA, 25 bp, SARS Virus
ataccgatgatttatactgaactca

SEQ ID NO: 69376 - DNA, 25 bp, SARS Virus
taccgatgattattactgaactcac

SEQ ID NO: 69377 - DNA, 25 bp, SARS Virus
accgatgattaatactgaactcaca

SEQ ID NO: 69378 - DNA, 25 bp, SARS Virus
ccgatgattaattctgaactcacaa

SEQ ID NO: 69379 - DNA, 25 bp, SARS Virus
cgatgattaatattgaactcacaac

SEQ ID NO: 69380 - DNA, 25 bp, SARS Virus
gatgattaatactgaactcacaaca

SEQ ID NO: 69381 - DNA, 25 bp, SARS Virus
atgattaatacttaactcacaacag

SEQ ID NO: 69382 - DNA, 25 bp, SARS Virus
tgattaatactgtactcacaacagt

SEQ ID NO: 69383 - DNA, 25 bp, SARS Virus
gattaatactgatctcacaacagtt

SEQ ID NO: 69384 - DNA, 25 bp, SARS Virus
attaatactgaattcacaacagtta

SEQ ID NO: 69385 - DNA, 25 bp, SARS Virus
ttaatactgaactcacaacagttac

SEQ ID NO: 69386 - DNA, 25 bp, SARS Virus
taatactgaacttacaacagttacg

SEQ ID NO: 69387 - DNA, 25 bp, SARS Virus
aatactgaactctcaacagttacga

SEQ ID NO: 69388 - DNA, 25 bp, SARS Virus
atactgaactcataacagttacgat

SEQ ID NO: 69389 - DNA, 25 bp, SARS Virus
tactgaactcactacagttacgatc

SEQ ID NO: 69390 - DNA, 25 bp, SARS Virus
actgaactcacatcagttacgatct

SEQ ID NO: 69391 - DNA, 25 bp, SARS Virus
ctgaactcacaatagttacgatctg

SEQ ID NO: 69392 - DNA, 25 bp, SARS Virus
tgaactcacaactgttacgatctga

SEQ ID NO: 69393 - DNA, 25 bp, SARS Virus
gaactcacaacatttacgatctgaa

SEQ ID NO: 69394 - DNA, 25 bp, SARS Virus
aactcacaacagttacgatctgaag

SEQ ID NO: 69395 - DNA, 25 bp, SARS Virus
actcacaacagttacgatctgaagc

SEQ ID NO: 69396 - DNA, 25 bp, SARS Virus
ctcacaacagtttcgatctgaagca

SEQ ID NO: 69397 - DNA, 25 bp, SARS Virus
tcacaacagttatgatctgaagcac

SEQ ID NO: 69398 - DNA, 25 bp, SARS Virus
cacaacagttactatctgaagcacg

SEQ ID NO: 69399 - DNA, 25 bp, SARS Virus
acaacagttacgttctgaagcacgt

SEQ ID NO: 69400 - DNA, 25 bp, SARS Virus
caacagttacgatctgaagcacgtt

SEQ ID NO: 69401 - DNA, 25 bp, SARS Virus
aacagttacgatttgaagcacgttt

SEQ ID NO: 69402 - DNA, 25 bp, SARS Virus
acagttacgatctgaagcacgtttt

SEQ ID NO: 69403 - DNA, 25 bp, SARS Virus
cagttacgatcttaagcacgttttg

SEQ ID NO: 69404 - DNA, 25 bp, SARS Virus
agttacgatctgtagcacgttttgt

SEQ ID NO: 69405 - DNA, 25 bp, SARS Virus
gttacgatctgatgcacgttttgtg

SEQ ID NO: 69406 - DNA, 25 bp, SARS Virus
ttacgatctgaatcacgttttgtga

SEQ ID NO: 69407 - DNA, 25 bp, SARS Virus
tacgatctgaagtacgttttgtgat

SEQ ID NO: 69408 - DNA, 25 bp, SARS Virus
acgatctgaagctcgttttgtgatg

SEQ ID NO: 69409 - DNA, 25 bp, SARS Virus
cgatctgaagcatgttttgtgatgc

SEQ ID NO: 69410 - DNA, 25 bp, SARS Virus
gatctgaagcactttttgtgatgca

SEQ ID NO: 69411 - DNA, 25 bp, SARS Virus
atctgaagcacgttttgtgatgcag

SEQ ID NO: 69412 - DNA, 25 bp, SARS Virus
tctgaagcacgttttgtgatgcaga

SEQ ID NO: 69413 - DNA, 25 bp, SARS Virus
ctgaagcacgttttgtgatgcagat

SEQ ID NO: 69414 - DNA, 25 bp, SARS Virus
tgaagcacgttttgtgatgcagata

SEQ ID NO: 69415 - DNA, 25 bp, SARS Virus
gaagcacgttttttgatgcagatat

SEQ ID NO: 69416 - DNA, 25 bp, SARS Virus
aagcacgttttgtgatgcagatata

SEQ ID NO: 69417 - DNA, 25 bp, SARS Virus
agcacgttttgttatgcagatataa

SEQ ID NO: 69418 - DNA, 25 bp, SARS Virus
gcacgttttgtgttgcagatataac

SEQ ID NO: 69419 - DNA, 25 bp, SARS Virus
cacgttttgtgatgcagatataacc

SEQ ID NO: 69420 - DNA, 25 bp, SARS Virus
acgttttgtgattcagatataaccg

SEQ ID NO: 69421 - DNA, 25 bp, SARS Virus
cgttttgtgatgtagatataaccgc

SEQ ID NO: 69422 - DNA, 25 bp, SARS Virus
gttttgtgatgctgatataaccgct

SEQ ID NO: 69423 - DNA, 25 bp, SARS Virus
ttttgtgatgcatatataaccgcta

SEQ ID NO: 69424 - DNA, 25 bp, SARS Virus
tttgtgatgcagttataaccgctag

SEQ ID NO: 69425 - DNA, 25 bp, SARS Virus
ttgtgatgcagaaataaccgctagg

SEQ ID NO: 69426 - DNA, 25 bp, SARS Virus
tgtgatgcagatataaccgctagga

SEQ ID NO: 69427 - DNA, 25 bp, SARS Virus
gtgatgcagataaaaccgctaggac

SEQ ID NO: 69428 - DNA, 25 bp, SARS Virus
tgatgcagatataaccgctaggacg

SEQ ID NO: 69429 - DNA, 25 bp, SARS Virus
gatgcagatataaccgctaggacga

SEQ ID NO: 69430 - DNA, 25 bp, SARS Virus
atgcagatataaacgctaggacgag

SEQ ID NO: 69431 - DNA, 25 bp, SARS Virus
tgcagatataacagctaggacgagt

SEQ ID NO: 69432 - DNA, 25 bp, SARS Virus
gcagatataaccactaggacgagtt

SEQ ID NO: 69433 - DNA, 25 bp, SARS Virus
cagatataaccgataggacgagtta

SEQ ID NO: 69434 - DNA, 25 bp, SARS Virus
agatataaccgcaaggacgagttaa

SEQ ID NO: 69435 - DNA, 25 bp, SARS Virus
gatataaccgctaggacgagttaat

SEQ ID NO: 69436 - DNA, 25 bp, SARS Virus
atataaccgctaagacgagttaatg

SEQ ID NO: 69437 - DNA, 25 bp, SARS Virus
tataaccgctagaacgagttaatgg

SEQ ID NO: 69438 - DNA, 25 bp, SARS Virus
ataaccgctaggacgagttaatggt

SEQ ID NO: 69439 - DNA, 25 bp, SARS Virus
taaccgctaggaagagttaatggtc

SEQ ID NO: 69440 - DNA, 25 bp, SARS Virus
aaccgctaggacaagttaatggtcg

SEQ ID NO: 69441 - DNA, 25 bp, SARS Virus
accgctaggacgagttaatggtcgg

SEQ ID NO: 69442 - DNA, 25 bp, SARS Virus
ccgctaggacgaattaatggtcggg

SEQ ID NO: 69443 - DNA, 25 bp, SARS Virus
cgctaggacgagataatggtcgggg

SEQ ID NO: 69444 - DNA, 25 bp, SARS Virus
gctaggacgagtaaatggtcggggg

SEQ ID NO: 69445 - DNA, 25 bp, SARS Virus
ctaggacgagttaatggtcgggggg

SEQ ID NO: 69446 - DNA, 25 bp, SARS Virus
taggacgagttaatggtcggggggc

SEQ ID NO: 69447 - DNA, 25 bp, SARS Virus
aggacgagttaaaggtcggggggcg

SEQ ID NO: 69448 - DNA, 25 bp, SARS Virus
ggacgagttaatagtcggggggcgt

SEQ ID NO: 69449 - DNA, 25 bp, SARS Virus
gacgagttaatgatcggggggcgtg

SEQ ID NO: 69450 - DNA, 25 bp, SARS Virus
acgagttaatggacggggggcgtgt

SEQ ID NO: 69451 - DNA, 25 bp, SARS Virus
cgagttaatggtaggggggcgtgta

SEQ ID NO: 69452 - DNA, 25 bp, SARS Virus
gagttaatggtcagggggcgtgtaa

SEQ ID NO: 69453 - DNA, 25 bp, SARS Virus
agttaatggtcgaggggcgtgtaac

SEQ ID NO: 69454 - DNA, 25 bp, SARS Virus
gttaatggtcggagggcgtgtaacg

SEQ ID NO: 69455 - DNA, 25 bp, SARS Virus
ttaatggtcgggaggcgtgtaacga

SEQ ID NO: 69456 - DNA, 25 bp, SARS Virus
taatggtcggggagcgtgtaacgac

SEQ ID NO: 69457 - DNA, 25 bp, SARS Virus
aatggtcgggggacgtgtaacgact

SEQ ID NO: 69458 - DNA, 25 bp, SARS Virus
atggtcggggggagtgtaacgactg

SEQ ID NO: 69459 - DNA, 25 bp, SARS Virus
tggtcggggggcatgtaacgactga

SEQ ID NO: 69460 - DNA, 25 bp, SARS Virus
ggtcggggggcgagtaacgactgat

SEQ ID NO: 69461 - DNA, 25 bp, SARS Virus
gtcggggggcgtataacgactgatt

SEQ ID NO: 69462 - DNA, 25 bp, SARS Virus
tcggggggcgtgaaacgactgattt

SEQ ID NO: 69463 - DNA, 25 bp, SARS Virus
cggggggcgtgtaacgactgatttc

SEQ ID NO: 69464 - DNA, 25 bp, SARS Virus
ggggggcgtgtaacgactgatttcc

SEQ ID NO: 69465 - DNA, 25 bp, SARS Virus
gggggcgtgtaaagactgatttccg

SEQ ID NO: 69466 - DNA, 25 bp, SARS Virus
ggggcgtgtaacaactgatttccgt

SEQ ID NO: 69467 - DNA, 25 bp, SARS Virus
gggcgtgtaacgactgatttccgtg

SEQ ID NO: 69468 - DNA, 25 bp, SARS Virus
ggcgtgtaacgaatgatttccgtgt

SEQ ID NO: 69469 - DNA, 25 bp, SARS Virus
gcgtgtaacgacagatttccgtgtg

SEQ ID NO: 69470 - DNA, 25 bp, SARS Virus
cgtgtaacgactaatttccgtgtga

SEQ ID NO: 69471 - DNA, 25 bp, SARS Virus
gtgtaacgactgatttccgtgtgat

SEQ ID NO: 69472 - DNA, 25 bp, SARS Virus
tgtaacgactgaattccgtgtgatc

SEQ ID NO: 69473 - DNA, 25 bp, SARS Virus
gtaacgactgatatccgtgtgatct

SEQ ID NO: 69474 - DNA, 25 bp, SARS Virus
taacgactgattaccgtgtgatctt

SEQ ID NO: 69475 - DNA, 25 bp, SARS Virus
aacgactgatttacgtgtgatcttg

SEQ ID NO: 69476 - DNA, 25 bp, SARS Virus
acgactgatttcagtgtgatcttgg

SEQ ID NO: 69477 - DNA, 25 bp, SARS Virus
cgactgatttccatgtgatcttggt

SEQ ID NO: 69478 - DNA, 25 bp, SARS Virus
gactgatttccgagtgatcttggtc

SEQ ID NO: 69479 - DNA, 25 bp, SARS Virus
actgatttccgtatgatcttggtct

SEQ ID NO: 69480 - DNA, 25 bp, SARS Virus
ctgatttccgtgagatcttggtctt

SEQ ID NO: 69481 - DNA, 25 bp, SARS Virus
tgatttccgtgtaatcttggtctta

SEQ ID NO: 69482 - DNA, 25 bp, SARS Virus
gatttccgtgtgatcttggtcttat

SEQ ID NO: 69483 - DNA, 25 bp, SARS Virus
atttccgtgtgaacttggtcttata

SEQ ID NO: 69484 - DNA, 25 bp, SARS Virus
tttccgtgtgatattggtcttataa

SEQ ID NO: 69485 - DNA, 25 bp, SARS Virus
ttccgtgtgatcatggtcttataaa

SEQ ID NO: 69486 - DNA, 25 bp, SARS Virus
tccgtgtgatctaggtcttataaaa

SEQ ID NO: 69487 - DNA, 25 bp, SARS Virus
ccgtgtgatcttagtcttataaaat

SEQ ID NO: 69488 - DNA, 25 bp, SARS Virus
cgtgtgatcttgatcttataaaatt

SEQ ID NO: 69489 - DNA, 25 bp, SARS Virus
gtgtgatcttggacttataaaatta

SEQ ID NO: 69490 - DNA, 25 bp, SARS Virus
tgtgatcttggtattataaaattaa

SEQ ID NO: 69491 - DNA, 25 bp, SARS Virus
gtgatcttggtcatataaaattaag

SEQ ID NO: 69492 - DNA, 25 bp, SARS Virus
tgatcttggtctaataaaattaagt

SEQ ID NO: 69493 - DNA, 25 bp, SARS Virus
gatcttggtcttataaaattaagtc

SEQ ID NO: 69494 - DNA, 25 bp, SARS Virus
atcttggtcttaaaaaattaagtca

SEQ ID NO: 69495 - DNA, 25 bp, SARS Virus
tcttggtcttataaaattaagtcac

SEQ ID NO: 69496 - DNA, 25 bp, SARS Virus
cttggtcttataaaattaagtcaca

SEQ ID NO: 69497 - DNA, 25 bp, SARS Virus
ttggtcttataaaattaagtcacac

SEQ ID NO: 69498 - DNA, 25 bp, SARS Virus
tggtcttataaaattaagtcacacg

SEQ ID NO: 69499 - DNA, 25 bp, SARS Virus
ggtcttataaaaataagtcacacgt

SEQ ID NO: 69500 - DNA, 25 bp, SARS Virus
gtcttataaaataaagtcacacgtc

SEQ ID NO: 69501 - DNA, 25 bp, SARS Virus
tcttataaaattaagtcacacgtct

SEQ ID NO: 69502 - DNA, 25 bp, SARS Virus
cttataaaattaagtcacacgtctg

SEQ ID NO: 69503 - DNA, 25 bp, SARS Virus
ttataaaattaaatcacacgtctga

SEQ ID NO: 69504 - DNA, 25 bp, SARS Virus
tataaaattaagacacacgtctgaa

SEQ ID NO: 69505 - DNA, 25 bp, SARS Virus
ataaaattaagtaacacgtctgaat

SEQ ID NO: 69506 - DNA, 25 bp, SARS Virus
taaaattaagtcacacgtctgaata

SEQ ID NO: 69507 - DNA, 25 bp, SARS Virus
aaaattaagtcaaacgtctgaatac

SEQ ID NO: 69508 - DNA, 25 bp, SARS Virus
aaattaagtcacacgtctgaatact

SEQ ID NO: 69509 - DNA, 25 bp, SARS Virus
aattaagtcacaagtctgaatactt

SEQ ID NO: 69510 - DNA, 25 bp, SARS Virus
attaagtcacacatctgaatacttt

SEQ ID NO: 69511 - DNA, 25 bp, SARS Virus
ttaagtcacacgactgaatactttt

SEQ ID NO: 69512 - DNA, 25 bp, SARS Virus
taagtcacacgtatgaatacttttg

SEQ ID NO: 69513 - DNA, 25 bp, SARS Virus
aagtcacacgtcagaatacttttgt

SEQ ID NO: 69514 - DNA, 25 bp, SARS Virus
agtcacacgtctaaatacttttgtt

SEQ ID NO: 69515 - DNA, 25 bp, SARS Virus
gtcacacgtctgaatacttttgtta

SEQ ID NO: 69516 - DNA, 25 bp, SARS Virus
tcacacgtctgaatacttttgttat

SEQ ID NO: 69517 - DNA, 25 bp, SARS Virus
cacacgtctgaaaacttttgttatc

SEQ ID NO: 69518 - DNA, 25 bp, SARS Virus
acacgtctgaatacttttgttatcc

SEQ ID NO: 69519 - DNA, 25 bp, SARS Virus
cacgtctgaataattttgttatcca

SEQ ID NO: 69520 - DNA, 25 bp, SARS Virus
acgtctgaatacatttgttatccag

SEQ ID NO: 69521 - DNA, 25 bp, SARS Virus
cgtctgaatactattgttatccagg

SEQ ID NO: 69522 - DNA, 25 bp, SARS Virus
gtctgaatacttatgttatccaggt

SEQ ID NO: 69523 - DNA, 25 bp, SARS Virus
tctgaatactttagttatccaggtc

SEQ ID NO: 69524 - DNA, 25 bp, SARS Virus
ctgaatacttttattatccaggtct

SEQ ID NO: 69525 - DNA, 25 bp, SARS Virus
tgaatacttttgatatccaggtctg

SEQ ID NO: 69526 - DNA, 25 bp, SARS Virus
gaatacttttgtaatccaggtctgt

SEQ ID NO: 69527 - DNA, 25 bp, SARS Virus
aatacttttgttatccaggtctgta

SEQ ID NO: 69528 - DNA, 25 bp, SARS Virus
atacttttgttaaccaggtctgtac

SEQ ID NO: 69529 - DNA, 25 bp, SARS Virus
tacttttgttatacaggtctgtaca

SEQ ID NO: 69530 - DNA, 25 bp, SARS Virus
acttttgttatcaaggtctgtacaa

SEQ ID NO: 69531 - DNA, 25 bp, SARS Virus
cttttgttatccaggtctgtacaag

SEQ ID NO: 69532 - DNA, 25 bp, SARS Virus
ttttgttatccaagtctgtacaagg

SEQ ID NO: 69533 - DNA, 25 bp, SARS Virus
tttgttatccagatctgtacaagga

SEQ ID NO: 69534 - DNA, 25 bp, SARS Virus
ttgttatccaggactgtacaaggaa

SEQ ID NO: 69535 - DNA, 25 bp, SARS Virus
tgttatccaggtatgtacaaggaac

SEQ ID NO: 69536 - DNA, 25 bp, SARS Virus
gttatccaggtcagtacaaggaacc

SEQ ID NO: 69537 - DNA, 25 bp, SARS Virus
ttatccaggtctatacaaggaacct

SEQ ID NO: 69538 - DNA, 25 bp, SARS Virus
tatccaggtctgaacaaggaacctt

SEQ ID NO: 69539 - DNA, 25 bp, SARS Virus
atccaggtctgtacaaggaaccttg

SEQ ID NO: 69540 - DNA, 25 bp, SARS Virus
tccaggtctgtaaaaggaaccttga

SEQ ID NO: 69541 - DNA, 25 bp, SARS Virus
ccaggtctgtacaaggaaccttgaa

SEQ ID NO: 69542 - DNA, 25 bp, SARS Virus
caggtctgtacaaggaaccttgaac

SEQ ID NO: 69543 - DNA, 25 bp, SARS Virus
aggtctgtacaaagaaccttgaaca

SEQ ID NO: 69544 - DNA, 25 bp, SARS Virus
ggtctgtacaagaaaccttgaacag

SEQ ID NO: 69545 - DNA, 25 bp, SARS Virus
gtctgtacaaggaaccttgaacagc

SEQ ID NO: 69546 - DNA, 25 bp, SARS Virus
tctgtacaaggaaccttgaacagcg

SEQ ID NO: 69547 - DNA, 25 bp, SARS Virus
ctgtacaaggaaacttgaacagcgg

SEQ ID NO: 69548 - DNA, 25 bp, SARS Virus
tgtacaaggaacattgaacagcggc

SEQ ID NO: 69549 - DNA, 25 bp, SARS Virus
gtacaaggaaccatgaacagcggca

SEQ ID NO: 69550 - DNA, 25 bp, SARS Virus
tacaaggaacctagaacagcggcaa

SEQ ID NO: 69551 - DNA, 25 bp, SARS Virus
acaaggaaccttaaacagcggcaac

SEQ ID NO: 69552 - DNA, 25 bp, SARS Virus
caaggaaccttgaacagcggcaaca

SEQ ID NO: 69553 - DNA, 25 bp, SARS Virus
aaggaaccttgaacagcggcaacag

SEQ ID NO: 69554 - DNA, 25 bp, SARS Virus
aggaaccttgaaaagcggcaacagg

SEQ ID NO: 69555 - DNA, 25 bp, SARS Virus
ggaaccttgaacagcggcaacagga

SEQ ID NO: 69556 - DNA, 25 bp, SARS Virus
gaaccttgaacaacggcaacaggac

SEQ ID NO: 69557 - DNA, 25 bp, SARS Virus
aaccttgaacagaggcaacaggacg

SEQ ID NO: 69558 - DNA, 25 bp, SARS Virus
accttgaacagcagcaacaggacga

SEQ ID NO: 69559 - DNA, 25 bp, SARS Virus
ccttgaacagcgacaacaggacgac

SEQ ID NO: 69560 - DNA, 25 bp, SARS Virus
cttgaacagcggaaacaggacgact

SEQ ID NO: 69561 - DNA, 25 bp, SARS Virus
ttgaacagcggcaacaggacgactt

SEQ ID NO: 69562 - DNA, 25 bp, SARS Virus
tgaacagcggcaacaggacgacttt

SEQ ID NO: 69563 - DNA, 25 bp, SARS Virus
gaacagcggcaaaaggacgacttta

SEQ ID NO: 69564 - DNA, 25 bp, SARS Virus
aacagcggcaacaggacgactttaa

SEQ ID NO: 69565 - DNA, 25 bp, SARS Virus
acagcggcaacaagacgactttaac

SEQ ID NO: 69566 - DNA, 25 bp, SARS Virus
cagcggcaacagaacgactttaaca

SEQ ID NO: 69567 - DNA, 25 bp, SARS Virus
agcggcaacaggacgactttaacaa

SEQ ID NO: 69568 - DNA, 25 bp, SARS Virus
gcggcaacaggaagactttaacaac

SEQ ID NO: 69569 - DNA, 25 bp, SARS Virus
cggcaacaggacaactttaacaact

SEQ ID NO: 69570 - DNA, 25 bp, SARS Virus
ggcaacaggacgactttaacaactg

SEQ ID NO: 69571 - DNA, 25 bp, SARS Virus
gcaacaggacgaatttaacaactgt

SEQ ID NO: 69572 - DNA, 25 bp, SARS Virus
caacaggacgacattaacaactgtg

SEQ ID NO: 69573 - DNA, 25 bp, SARS Virus
aacaggacgactataacaactgtga

SEQ ID NO: 69574 - DNA, 25 bp, SARS Virus
acaggacgacttaaacaactgtgac

SEQ ID NO: 69575 - DNA, 25 bp, SARS Virus
caggacgactttaacaactgtgaca

SEQ ID NO: 69576 - DNA, 25 bp, SARS Virus
aggacgactttaacaactgtgacac

SEQ ID NO: 69577 - DNA, 25 bp, SARS Virus
ggacgactttaaaaactgtgacact

SEQ ID NO: 69578 - DNA, 25 bp, SARS Virus
gacgactttaacaactgtgacactc

SEQ ID NO: 69579 - DNA, 25 bp, SARS Virus
acgactttaacaactgtgacactca

SEQ ID NO: 69580 - DNA, 25 bp, SARS Virus
cgactttaacaaatgtgacactcac

SEQ ID NO: 69581 - DNA, 25 bp, SARS Virus
gactttaacaacagtgacactcacg

SEQ ID NO: 69582 - DNA, 25 bp, SARS Virus
actttaacaactatgacactcacga

SEQ ID NO: 69583 - DNA, 25 bp, SARS Virus
ctttaacaactgagacactcacgaa

SEQ ID NO: 69584 - DNA, 25 bp, SARS Virus
tttaacaactgtaacactcacgaaa

SEQ ID NO: 69585 - DNA, 25 bp, SARS Virus
ttaacaactgtgacactcacgaaat

SEQ ID NO: 69586 - DNA, 25 bp, SARS Virus
taacaactgtgaaactcacgaaatc

SEQ ID NO: 69587 - DNA, 25 bp, SARS Virus
aacaactgtgacactcacgaaatca

SEQ ID NO: 69588 - DNA, 25 bp, SARS Virus
acaactgtgacaatcacgaaatcaa

SEQ ID NO: 69589 - DNA, 25 bp, SARS Virus
caactgtgacacacacgaaatcaaa

SEQ ID NO: 69590 - DNA, 25 bp, SARS Virus
aactgtgacactaacgaaatcaaat

SEQ ID NO: 69591 - DNA, 25 bp, SARS Virus
actgtgacactcacgaaatcaaata

SEQ ID NO: 69592 - DNA, 25 bp, SARS Virus
ctgtgacactcaagaaatcaaatac

SEQ ID NO: 69593 - DNA, 25 bp, SARS Virus
tgtgacactcacaaaatcaaatact

SEQ ID NO: 69594 - DNA, 25 bp, SARS Virus
gtgacactcacgaaatcaaatactg

SEQ ID NO: 69595 - DNA, 25 bp, SARS Virus
tgacactcacgaaatcaaatactgt

SEQ ID NO: 69596 - DNA, 25 bp, SARS Virus
gacactcacgaaatcaaatactgtt

SEQ ID NO: 69597 - DNA, 25 bp, SARS Virus
acactcacgaaaacaaatactgtta

SEQ ID NO: 69598 - DNA, 25 bp, SARS Virus
cactcacgaaataaaatactgttat

SEQ ID NO: 69599 - DNA, 25 bp, SARS Virus
actcacgaaatcaaatactgttatt

SEQ ID NO: 69600 - DNA, 25 bp, SARS Virus
ctcacgaaatcaaatactgttattc

SEQ ID NO: 69601 - DNA, 25 bp, SARS Virus
tcacgaaatcaaatactgttattcg

SEQ ID NO: 69602 - DNA, 25 bp, SARS Virus
cacgaaatcaaaaactgttattcga

SEQ ID NO: 69603 - DNA, 25 bp, SARS Virus
acgaaatcaaatactgttattcgat

SEQ ID NO: 69604 - DNA, 25 bp, SARS Virus
cgaaatcaaataatgttattcgatt

SEQ ID NO: 69605 - DNA, 25 bp, SARS Virus
gaaatcaaatacagttattcgattt

SEQ ID NO: 69606 - DNA, 25 bp, SARS Virus
aaatcaaatactattattcgatttt

SEQ ID NO: 69607 - DNA, 25 bp, SARS Virus
aatcaaatactgatattcgattttc

SEQ ID NO: 69608 - DNA, 25 bp, SARS Virus
atcaaatactgtaattcgattttcg

SEQ ID NO: 69609 - DNA, 25 bp, SARS Virus
tcaaatactgttattcgattttcgt

SEQ ID NO: 69610 - DNA, 25 bp, SARS Virus
caaatactgttaatcgattttcgtg

SEQ ID NO: 69611 - DNA, 25 bp, SARS Virus
aaatactgttatacgattttcgtgt

SEQ ID NO: 69612 - DNA, 25 bp, SARS Virus
aatactgttattagattttcgtgtg

SEQ ID NO: 69613 - DNA, 25 bp, SARS Virus
atactgttattcaattttcgtgtgt

SEQ ID NO: 69614 - DNA, 25 bp, SARS Virus
tactgttattcgattttcgtgtgtt

SEQ ID NO: 69615 - DNA, 25 bp, SARS Virus
actgttattcgaatttcgtgtgttc

SEQ ID NO: 69616 - DNA, 25 bp, SARS Virus
ctgttattcgatattcgtgtgttcc

SEQ ID NO: 69617 - DNA, 25 bp, SARS Virus
tgttattcgattatcgtgtgttcct

SEQ ID NO: 69618 - DNA, 25 bp, SARS Virus
gttattcgatttacgtgtgttccta

SEQ ID NO: 69619 - DNA, 25 bp, SARS Virus
ttattcgattttagtgtgttcctat

SEQ ID NO: 69620 - DNA, 25 bp, SARS Virus
tattcgattttcatgtgttcctatt

SEQ ID NO: 69621 - DNA, 25 bp, SARS Virus
attcgattttcgagtgttcctattc

SEQ ID NO: 69622 - DNA, 25 bp, SARS Virus
ttcgattttcgtatgttcctattca

SEQ ID NO: 69623 - DNA, 25 bp, SARS Virus
tcgattttcgtgagttcctattcag

SEQ ID NO: 69624 - DNA, 25 bp, SARS Virus
cgattttcgtgtattcctattcagt

SEQ ID NO: 69625 - DNA, 25 bp, SARS Virus
gattttcgtgtgatcctattcagtc

SEQ ID NO: 69626 - DNA, 25 bp, SARS Virus
attttcgtgtgtacctattcagtcg

SEQ ID NO: 69627 - DNA, 25 bp, SARS Virus
ttttcgtgtgttactattcagtcga

SEQ ID NO: 69628 - DNA, 25 bp, SARS Virus
tttcgtgtgttcatattcagtcgag

SEQ ID NO: 69629 - DNA, 25 bp, SARS Virus
ttcgtgtgttccaattcagtcgagt

SEQ ID NO: 69630 - DNA, 25 bp, SARS Virus
tcgtgtgttcctattcagtcgagtt

SEQ ID NO: 69631 - DNA, 25 bp, SARS Virus
cgtgtgttcctaatcagtcgagtta

SEQ ID NO: 69632 - DNA, 25 bp, SARS Virus
gtgtgttcctatacagtcgagttac

SEQ ID NO: 69633 - DNA, 25 bp, SARS Virus
tgtgttcctattaagtcgagttacg

SEQ ID NO: 69634 - DNA, 25 bp, SARS Virus
gtgttcctattcagtcgagttacga

SEQ ID NO: 69635 - DNA, 25 bp, SARS Virus
tgttcctattcaatcgagttacgaa

SEQ ID NO: 69636 - DNA, 25 bp, SARS Virus
gttcctattcagacgagttacgaag

SEQ ID NO: 69637 - DNA, 25 bp, SARS Virus
ttcctattcagtagagttacgaagt

SEQ ID NO: 69638 - DNA, 25 bp, SARS Virus
tcctattcagtcaagttacgaagtt

SEQ ID NO: 69639 - DNA, 25 bp, SARS Virus
cctattcagtcgagttacgaagttt

SEQ ID NO: 69640 - DNA, 25 bp, SARS Virus
ctattcagtcgaattacgaagtttt

SEQ ID NO: 69641 - DNA, 25 bp, SARS Virus
tattcagtcgagatacgaagtttta

SEQ ID NO: 69642 - DNA, 25 bp, SARS Virus
attcagtcgagtaacgaagttttac

SEQ ID NO: 69643 - DNA, 25 bp, SARS Virus
ttcagtcgagttacgaagttttaca

SEQ ID NO: 69644 - DNA, 25 bp, SARS Virus
tcagtcgagttaagaagttttacaa

SEQ ID NO: 69645 - DNA, 25 bp, SARS Virus
cagtcgagttacaaagttttacaag

SEQ ID NO: 69646 - DNA, 25 bp, SARS Virus
agtcgagttacgaagttttacaaga

SEQ ID NO: 69647 - DNA, 25 bp, SARS Virus
gtcgagttacgaagttttacaagat

SEQ ID NO: 69648 - DNA, 25 bp, SARS Virus
tcgagttacgaaattttacaagatg

SEQ ID NO: 69649 - DNA, 25 bp, SARS Virus
cgagttacgaagatttacaagatgt

SEQ ID NO: 69650 - DNA, 25 bp, SARS Virus
gagttacgaagtattacaagatgtt

SEQ ID NO: 69651 - DNA, 25 bp, SARS Virus
agttacgaagttatacaagatgttt

SEQ ID NO: 69652 - DNA, 25 bp, SARS Virus
gttacgaagtttaacaagatgtttc

SEQ ID NO: 69653 - DNA, 25 bp, SARS Virus
ttacgaagttttacaagatgtttcc

SEQ ID NO: 69654 - DNA, 25 bp, SARS Virus
tacgaagttttaaaagatgtttcca

SEQ ID NO: 69655 - DNA, 25 bp, SARS Virus
acgaagttttacaagatgtttccac

SEQ ID NO: 69656 - DNA, 25 bp, SARS Virus
cgaagttttacaagatgtttccaca

SEQ ID NO: 69657 - DNA, 25 bp, SARS Virus
gaagttttacaaaatgtttccacaa

SEQ ID NO: 69658 - DNA, 25 bp, SARS Virus
aagttttacaagatgtttccacaat

SEQ ID NO: 69659 - DNA, 25 bp, SARS Virus
agttttacaagaagtttccacaata

SEQ ID NO: 69660 - DNA, 25 bp, SARS Virus
gttttacaagatatttccacaataa

SEQ ID NO: 69661 - DNA, 25 bp, SARS Virus
ttttacaagatgattccacaataat

SEQ ID NO: 69662 - DNA, 25 bp, SARS Virus
tttacaagatgtatccacaataatg

SEQ ID NO: 69663 - DNA, 25 bp, SARS Virus
ttacaagatgttaccacaataatgt

SEQ ID NO: 69664 - DNA, 25 bp, SARS Virus
tacaagatgtttacacaataatgtg

SEQ ID NO: 69665 - DNA, 25 bp, SARS Virus
acaagatgtttcaacaataatgtgt

SEQ ID NO: 69666 - DNA, 25 bp, SARS Virus
caagatgtttccacaataatgtgta

SEQ ID NO: 69667 - DNA, 25 bp, SARS Virus
aagatgtttccaaaataatgtgtac

SEQ ID NO: 69668 - DNA, 25 bp, SARS Virus
agatgtttccacaataatgtgtact

SEQ ID NO: 69669 - DNA, 25 bp, SARS Virus
gatgtttccacaataatgtgtacta

SEQ ID NO: 69670 - DNA, 25 bp, SARS Virus
atgtttccacaaaaatgtgtactac

SEQ ID NO: 69671 - DNA, 25 bp, SARS Virus
tgtttccacaataatgtgtactaca

SEQ ID NO: 69672 - DNA, 25 bp, SARS Virus
gtttccacaataatgtgtactacaa

SEQ ID NO: 69673 - DNA, 25 bp, SARS Virus
tttccacaataaagtgtactacaaa

SEQ ID NO: 69674 - DNA, 25 bp, SARS Virus
ttccacaataatatgtactacaaag

SEQ ID NO: 69675 - DNA, 25 bp, SARS Virus
tccacaataatgagtactacaaagt

SEQ ID NO: 69676 - DNA, 25 bp, SARS Virus
ccacaataatgtatactacaaagta

SEQ ID NO: 69677 - DNA, 25 bp, SARS Virus
cacaataatgtgaactacaaagtag

SEQ ID NO: 69678 - DNA, 25 bp, SARS Virus
acaataatgtgtactacaaagtaga

SEQ ID NO: 69679 - DNA, 25 bp, SARS Virus
caataatgtgtaatacaaagtagac

SEQ ID NO: 69680 - DNA, 25 bp, SARS Virus
aataatgtgtacaacaaagtagacg

SEQ ID NO: 69681 - DNA, 25 bp, SARS Virus
ataatgtgtactacaaagtagacgt

SEQ ID NO: 69682 - DNA, 25 bp, SARS Virus
taatgtgtactaaaaagtagacgtt

SEQ ID NO: 69683 - DNA, 25 bp, SARS Virus
aatgtgtactacaaagtagacgtta

SEQ ID NO: 69684 - DNA, 25 bp, SARS Virus
atgtgtactacaaagtagacgttag

SEQ ID NO: 69685 - DNA, 25 bp, SARS Virus
tgtgtactacaaagtagacgttagt

SEQ ID NO: 69686 - DNA, 25 bp, SARS Virus
gtgtactacaaaatagacgttagtt

SEQ ID NO: 69687 - DNA, 25 bp, SARS Virus
tgtactacaaagaagacgttagttg

SEQ ID NO: 69688 - DNA, 25 bp, SARS Virus
gtactacaaagtagacgttagttgt

SEQ ID NO: 69689 - DNA, 25 bp, SARS Virus
tactacaaagtaaacgttagttgtc

SEQ ID NO: 69690 - DNA, 25 bp, SARS Virus
actacaaagtagacgttagttgtct

SEQ ID NO: 69691 - DNA, 25 bp, SARS Virus
ctacaaagtagaagttagttgtctg

SEQ ID NO: 69692 - DNA, 25 bp, SARS Virus
tacaaagtagacattagttgtctgg

SEQ ID NO: 69693 - DNA, 25 bp, SARS Virus
acaaagtagacgatagttgtctgga

SEQ ID NO: 69694 - DNA, 25 bp, SARS Virus
caaagtagacgtaagttgtctggag

SEQ ID NO: 69695 - DNA, 25 bp, SARS Virus
aaagtagacgttagttgtctggagt

SEQ ID NO: 69696 - DNA, 25 bp, SARS Virus
aagtagacgttaattgtctggagtt

SEQ ID NO: 69697 - DNA, 25 bp, SARS Virus
agtagacgttagatgtctggagttt

SEQ ID NO: 69698 - DNA, 25 bp, SARS Virus
gtagacgttagtagtctggagttta

SEQ ID NO: 69699 - DNA, 25 bp, SARS Virus
tagacgttagttatctggagtttat

SEQ ID NO: 69700 - DNA, 25 bp, SARS Virus
agacgttagttgactggagtttatc

SEQ ID NO: 69701 - DNA, 25 bp, SARS Virus
gacgttagttgtatggagtttatcc

SEQ ID NO: 69702 - DNA, 25 bp, SARS Virus
acgttagttgtcaggagtttatccg

SEQ ID NO: 69703 - DNA, 25 bp, SARS Virus
cgttagttgtctagagtttatccgc

SEQ ID NO: 69704 - DNA, 25 bp, SARS Virus
gttagttgtctgaagtttatccgca

SEQ ID NO: 69705 - DNA, 25 bp, SARS Virus
ttagttgtctggagtttatccgcaa

SEQ ID NO: 69706 - DNA, 25 bp, SARS Virus
tagttgtctggaatttatccgcaac

SEQ ID NO: 69707 - DNA, 25 bp, SARS Virus
agttgtctggagattatccgcaaca

SEQ ID NO: 69708 - DNA, 25 bp, SARS Virus
gttgtctggagtatatccgcaacat

SEQ ID NO: 69709 - DNA, 25 bp, SARS Virus
ttgtctggagttaatccgcaacatt

SEQ ID NO: 69710 - DNA, 25 bp, SARS Virus
tgtctggagtttatccgcaacattc

SEQ ID NO: 69711 - DNA, 25 bp, SARS Virus
gtctggagtttaaccgcaacattct

SEQ ID NO: 69712 - DNA, 25 bp, SARS Virus
tctggagtttatacgcaacattctc

SEQ ID NO: 69713 - DNA, 25 bp, SARS Virus
ctggagtttatcagcaacattctct

SEQ ID NO: 69714 - DNA, 25 bp, SARS Virus
tggagtttatccacaacattctctt

SEQ ID NO: 69715 - DNA, 25 bp, SARS Virus
ggagtttatccgaaacattctctta

SEQ ID NO: 69716 - DNA, 25 bp, SARS Virus
gagtttatccgcaacattctcttaa

SEQ ID NO: 69717 - DNA, 25 bp, SARS Virus
agtttatccgcaacattctcttaaa

SEQ ID NO: 69718 - DNA, 25 bp, SARS Virus
gtttatccgcaaaattctcttaaag

SEQ ID NO: 69719 - DNA, 25 bp, SARS Virus
tttatccgcaacattctcttaaaga

SEQ ID NO: 69720 - DNA, 25 bp, SARS Virus
ttatccgcaacaatctcttaaagaa

SEQ ID NO: 69721 - DNA, 25 bp, SARS Virus
tatccgcaacatactcttaaagaat

SEQ ID NO: 69722 - DNA, 25 bp, SARS Virus
atccgcaacattatcttaaagaatg

SEQ ID NO: 69723 - DNA, 25 bp, SARS Virus
tccgcaacattcacttaaagaatgt

SEQ ID NO: 69724 - DNA, 25 bp, SARS Virus
ccgcaacattctattaaagaatgtg

SEQ ID NO: 69725 - DNA, 25 bp, SARS Virus
cgcaacattctcataaagaatgtgc

SEQ ID NO: 69726 - DNA, 25 bp, SARS Virus
gcaacattctctaaaagaatgtgcg

SEQ ID NO: 69727 - DNA, 25 bp, SARS Virus
caacattctcttaaagaatgtgcgt

SEQ ID NO: 69728 - DNA, 25 bp, SARS Virus
aacattctcttaaagaatgtgcgtt

SEQ ID NO: 69729 - DNA, 25 bp, SARS Virus
acattctcttaaagaatgtgcgtta

SEQ ID NO: 69730 - DNA, 25 bp, SARS Virus
cattctcttaaaaaatgtgcgttag

SEQ ID NO: 69731 - DNA, 25 bp, SARS Virus
attctcttaaagaatgtgcgttagg

SEQ ID NO: 69732 - DNA, 25 bp, SARS Virus
ttctcttaaagaatgtgcgttagga

SEQ ID NO: 69733 - DNA, 25 bp, SARS Virus
tctcttaaagaaagtgcgttaggac

SEQ ID NO: 69734 - DNA, 25 bp, SARS Virus
ctcttaaagaatatgcgttaggacg

SEQ ID NO: 69735 - DNA, 25 bp, SARS Virus
tcttaaagaatgagcgttaggacga

SEQ ID NO: 69736 - DNA, 25 bp, SARS Virus
cttaaagaatgtacgttaggacgaa

SEQ ID NO: 69737 - DNA, 25 bp, SARS Virus
ttaaagaatgtgagttaggacgaac

SEQ ID NO: 69738 - DNA, 25 bp, SARS Virus
taaagaatgtgcattaggacgaacc

SEQ ID NO: 69739 - DNA, 25 bp, SARS Virus
aaagaatgtgcgataggacgaacct

SEQ ID NO: 69740 - DNA, 25 bp, SARS Virus
aagaatgtgcgtaaggacgaacctc

SEQ ID NO: 69741 - DNA, 25 bp, SARS Virus
agaatgtgcgttaggacgaacctct

SEQ ID NO: 69742 - DNA, 25 bp, SARS Virus
gaatgtgcgttaagacgaacctctt

SEQ ID NO: 69743 - DNA, 25 bp, SARS Virus
aatgtgcgttagaacgaacctcttt

SEQ ID NO: 69744 - DNA, 25 bp, SARS Virus
atgtgcgttaggacgaacctctttt

SEQ ID NO: 69745 - DNA, 25 bp, SARS Virus
tgtgcgttaggaagaacctcttttc

SEQ ID NO: 69746 - DNA, 25 bp, SARS Virus
gtgcgttaggacaaacctcttttcg

SEQ ID NO: 69747 - DNA, 25 bp, SARS Virus
tgcgttaggacgaacctcttttcga

SEQ ID NO: 69748 - DNA, 25 bp, SARS Virus
gcgttaggacgaacctcttttcgac

SEQ ID NO: 69749 - DNA, 25 bp, SARS Virus
cgttaggacgaaactcttttcgaca

SEQ ID NO: 69750 - DNA, 25 bp, SARS Virus
gttaggacgaacatcttttcgacaa

SEQ ID NO: 69751 - DNA, 25 bp, SARS Virus
ttaggacgaaccacttttcgacaaa

SEQ ID NO: 69752 - DNA, 25 bp, SARS Virus
taggacgaacctattttcgacaaaa

SEQ ID NO: 69753 - DNA, 25 bp, SARS Virus
aggacgaacctcatttcgacaaaaa

SEQ ID NO: 69754 - DNA, 25 bp, SARS Virus
ggacgaacctctattcgacaaaaat

SEQ ID NO: 69755 - DNA, 25 bp, SARS Virus
gacgaacctcttatcgacaaaaata

SEQ ID NO: 69756 - DNA, 25 bp, SARS Virus
acgaacctctttacgacaaaaatag

SEQ ID NO: 69757 - DNA, 25 bp, SARS Virus
cgaacctcttttagacaaaaataga

SEQ ID NO: 69758 - DNA, 25 bp, SARS Virus
gaacctcttttcaacaaaaatagag

SEQ ID NO: 69759 - DNA, 25 bp, SARS Virus
aacctcttttcgacaaaaatagagt

SEQ ID NO: 69760 - DNA, 25 bp, SARS Virus
acctcttttcgaaaaaaatagagtg

SEQ ID NO: 69761 - DNA, 25 bp, SARS Virus
cctcttttcgacaaaaatagagtgg

SEQ ID NO: 69762 - DNA, 25 bp, SARS Virus
ctcttttcgacaaaaatagagtgga

SEQ ID NO: 69763 - DNA, 25 bp, SARS Virus
tcttttcgacaaaaatagagtggaa

SEQ ID NO: 69764 - DNA, 25 bp, SARS Virus
cttttcgacaaaaatagagtggaat

SEQ ID NO: 69765 - DNA, 25 bp, SARS Virus
ttttcgacaaaaatagagtggaata

SEQ ID NO: 69766 - DNA, 25 bp, SARS Virus
tttcgacaaaaaaagagtggaatat

SEQ ID NO: 69767 - DNA, 25 bp, SARS Virus
ttcgacaaaaatagagtggaatatt

SEQ ID NO: 69768 - DNA, 25 bp, SARS Virus
tcgacaaaaataaagtggaatatta

SEQ ID NO: 69769 - DNA, 25 bp, SARS Virus
cgacaaaaatagagtggaatattaa

SEQ ID NO: 69770 - DNA, 25 bp, SARS Virus
gacaaaaatagaatggaatattaag

SEQ ID NO: 69771 - DNA, 25 bp, SARS Virus
acaaaaatagagaggaatattaagt

SEQ ID NO: 69772 - DNA, 25 bp, SARS Virus
caaaaatagagtagaatattaagtg

SEQ ID NO: 69773 - DNA, 25 bp, SARS Virus
aaaaatagagtgaaatattaagtgt

SEQ ID NO: 69774 - DNA, 25 bp, SARS Virus
aaaatagagtggaatattaagtgtc

SEQ ID NO: 69775 - DNA, 25 bp, SARS Virus
aaatagagtggaatattaagtgtct

SEQ ID NO: 69776 - DNA, 25 bp, SARS Virus
aatagagtggaaaattaagtgtctt

SEQ ID NO: 69777 - DNA, 25 bp, SARS Virus
atagagtggaatattaagtgtcttg

SEQ ID NO: 69778 - DNA, 25 bp, SARS Virus
tagagtggaataataagtgtcttgc

SEQ ID NO: 69779 - DNA, 25 bp, SARS Virus
agagtggaatataaagtgtcttgcg

SEQ ID NO: 69780 - DNA, 25 bp, SARS Virus
gagtggaatattaagtgtcttgcga

SEQ ID NO: 69781 - DNA, 25 bp, SARS Virus
agtggaatattaagtgtcttgcgac

SEQ ID NO: 69782 - DNA, 25 bp, SARS Virus
gtggaatattaaatgtcttgcgaca

SEQ ID NO: 69783 - DNA, 25 bp, SARS Virus
tggaatattaagagtcttgcgacat

SEQ ID NO: 69784 - DNA, 25 bp, SARS Virus
ggaatattaagtatcttgcgacatc

SEQ ID NO: 69785 - DNA, 25 bp, SARS Virus
gaatattaagtgacttgcgacatcg

SEQ ID NO: 69786 - DNA, 25 bp, SARS Virus
aatattaagtgtattgcgacatcga

SEQ ID NO: 69787 - DNA, 25 bp, SARS Virus
atattaagtgtcatgcgacatcgaa

SEQ ID NO: 69788 - DNA, 25 bp, SARS Virus
tattaagtgtctagcgacatcgaag

SEQ ID NO: 69789 - DNA, 25 bp, SARS Virus
attaagtgtcttacgacatcgaagt

SEQ ID NO: 69790 - DNA, 25 bp, SARS Virus
ttaagtgtcttgagacatcgaagtt

SEQ ID NO: 69791 - DNA, 25 bp, SARS Virus
taagtgtcttgcaacatcgaagttt

SEQ ID NO: 69792 - DNA, 25 bp, SARS Virus
aagtgtcttgcgacatcgaagtttt

SEQ ID NO: 69793 - DNA, 25 bp, SARS Virus
agtgtcttgcgaaatcgaagttttt

SEQ ID NO: 69794 - DNA, 25 bp, SARS Virus
gtgtcttgcgacatcgaagttttta

SEQ ID NO: 69795 - DNA, 25 bp, SARS Virus
tgtcttgcgacaacgaagtttttag

SEQ ID NO: 69796 - DNA, 25 bp, SARS Virus
gtcttgcgacatagaagtttttaga

SEQ ID NO: 69797 - DNA, 25 bp, SARS Virus
tcttgcgacatcaaagtttttagaa

SEQ ID NO: 69798 - DNA, 25 bp, SARS Virus
cttgcgacatcgaagtttttagaat

SEQ ID NO: 69799 - DNA, 25 bp, SARS Virus
ttgcgacatcgaagtttttagaatc

SEQ ID NO: 69800 - DNA, 25 bp, SARS Virus
tgcgacatcgaaatttttagaatcc

SEQ ID NO: 69801 - DNA, 25 bp, SARS Virus
gcgacatcgaagattttagaatcct

SEQ ID NO: 69802 - DNA, 25 bp, SARS Virus
cgacatcgaagtatttagaatccta

SEQ ID NO: 69803 - DNA, 25 bp, SARS Virus
gacatcgaagttattagaatcctaa

SEQ ID NO: 69804 - DNA, 25 bp, SARS Virus
acatcgaagtttatagaatcctaac

SEQ ID NO: 69805 - DNA, 25 bp, SARS Virus
catcgaagttttaagaatcctaacg

SEQ ID NO: 69806 - DNA, 25 bp, SARS Virus
atcgaagtttttagaatcctaacgg

SEQ ID NO: 69807 - DNA, 25 bp, SARS Virus
tcgaagtttttaaaatcctaacgga

SEQ ID NO: 69808 - DNA, 25 bp, SARS Virus
cgaagtttttagaatcctaacggat

SEQ ID NO: 69809 - DNA, 25 bp, SARS Virus
gaagtttttagaatcctaacggatg

SEQ ID NO: 69810 - DNA, 25 bp, SARS Virus
aagtttttagaaacctaacggatgc

SEQ ID NO: 69811 - DNA, 25 bp, SARS Virus
agtttttagaatactaacggatgcg

SEQ ID NO: 69812 - DNA, 25 bp, SARS Virus
gtttttagaatcataacggatgcgt

SEQ ID NO: 69813 - DNA, 25 bp, SARS Virus
tttttagaatccaaacggatgcgtc

SEQ ID NO: 69814 - DNA, 25 bp, SARS Virus
ttttagaatcctaacggatgcgtct

SEQ ID NO: 69815 - DNA, 25 bp, SARS Virus
tttagaatcctaacggatgcgtctg

SEQ ID NO: 69816 - DNA, 25 bp, SARS Virus
ttagaatcctaaaggatgcgtctga

SEQ ID NO: 69817 - DNA, 25 bp, SARS Virus
tagaatcctaacagatgcgtctgac

SEQ ID NO: 69818 - DNA, 25 bp, SARS Virus
agaatcctaacgaatgcgtctgaca

SEQ ID NO: 69819 - DNA, 25 bp, SARS Virus
gaatcctaacggatgcgtctgacaa

SEQ ID NO: 69820 - DNA, 25 bp, SARS Virus
aatcctaacggaagcgtctgacaac

SEQ ID NO: 69821 - DNA, 25 bp, SARS Virus
atcctaacggatacgtctgacaact

SEQ ID NO: 69822 - DNA, 25 bp, SARS Virus
tcctaacggatgagtctgacaacta

SEQ ID NO: 69823 - DNA, 25 bp, SARS Virus
cctaacggatgcatctgacaactaa

SEQ ID NO: 69824 - DNA, 25 bp, SARS Virus
ctaacggatgcgactgacaactaag

SEQ ID NO: 69825 - DNA, 25 bp, SARS Virus
taacggatgcgtatgacaactaagt

SEQ ID NO: 69826 - DNA, 25 bp, SARS Virus
aacggatgcgtcagacaactaagta

SEQ ID NO: 69827 - DNA, 25 bp, SARS Virus
acggatgcgtctaacaactaagtag

SEQ ID NO: 69828 - DNA, 25 bp, SARS Virus
cggatgcgtctgacaactaagtagt

SEQ ID NO: 69829 - DNA, 25 bp, SARS Virus
ggatgcgtctgaaaactaagtagtg

SEQ ID NO: 69830 - DNA, 25 bp, SARS Virus
gatgcgtctgacaactaagtagtgt

SEQ ID NO: 69831 - DNA, 25 bp, SARS Virus
atgcgtctgacaactaagtagtgtc

SEQ ID NO: 69832 - DNA, 25 bp, SARS Virus
tgcgtctgacaaataagtagtgtcc

SEQ ID NO: 69833 - DNA, 25 bp, SARS Virus
gcgtctgacaacaaagtagtgtccc

SEQ ID NO: 69834 - DNA, 25 bp, SARS Virus
cgtctgacaactaagtagtgtccca

SEQ ID NO: 69835 - DNA, 25 bp, SARS Virus
gtctgacaactaagtagtgtcccaa

SEQ ID NO: 69836 - DNA, 25 bp, SARS Virus
tctgacaactaaatagtgtcccaag

SEQ ID NO: 69837 - DNA, 25 bp, SARS Virus
ctgacaactaagaagtgtcccaaga

SEQ ID NO: 69838 - DNA, 25 bp, SARS Virus
tgacaactaagtagtgtcccaagac

SEQ ID NO: 69839 - DNA, 25 bp, SARS Virus
gacaactaagtaatgtcccaagact

SEQ ID NO: 69840 - DNA, 25 bp, SARS Virus
acaactaagtagagtcccaagactt

SEQ ID NO: 69841 - DNA, 25 bp, SARS Virus
caactaagtagtatcccaagactta

SEQ ID NO: 69842 - DNA, 25 bp, SARS Virus
aactaagtagtgacccaagacttat

SEQ ID NO: 69843 - DNA, 25 bp, SARS Virus
actaagtagtgtaccaagacttata

SEQ ID NO: 69844 - DNA, 25 bp, SARS Virus
ctaagtagtgtcacaagacttatac

SEQ ID NO: 69845 - DNA, 25 bp, SARS Virus
taagtagtgtccaaagacttatact

SEQ ID NO: 69846 - DNA, 25 bp, SARS Virus
aagtagtgtcccaagacttatactg

SEQ ID NO: 69847 - DNA, 25 bp, SARS Virus
agtagtgtcccaagacttatactga

SEQ ID NO: 69848 - DNA, 25 bp, SARS Virus
gtagtgtcccaaaacttatactgat

SEQ ID NO: 69849 - DNA, 25 bp, SARS Virus
tagtgtcccaagacttatactgata

SEQ ID NO: 69850 - DNA, 25 bp, SARS Virus
agtgtcccaagaattatactgatac

SEQ ID NO: 69851 - DNA, 25 bp, SARS Virus
gtgtcccaagacatatactgataca

SEQ ID NO: 69852 - DNA, 25 bp, SARS Virus
tgtcccaagactaatactgatacag

SEQ ID NO: 69853 - DNA, 25 bp, SARS Virus
gtcccaagacttatactgatacagt

SEQ ID NO: 69854 - DNA, 25 bp, SARS Virus
tcccaagacttaaactgatacagta

SEQ ID NO: 69855 - DNA, 25 bp, SARS Virus
cccaagacttatactgatacagtat

SEQ ID NO: 69856 - DNA, 25 bp, SARS Virus
ccaagacttataatgatacagtata

SEQ ID NO: 69857 - DNA, 25 bp, SARS Virus
caagacttatacagatacagtataa

SEQ ID NO: 69858 - DNA, 25 bp, SARS Virus
aagacttatactaatacagtataag

SEQ ID NO: 69859 - DNA, 25 bp, SARS Virus
agacttatactgatacagtataagt

SEQ ID NO: 69860 - DNA, 25 bp, SARS Virus
gacttatactgaaacagtataagtg

SEQ ID NO: 69861 - DNA, 25 bp, SARS Virus
acttatactgatacagtataagtgt

SEQ ID NO: 69862 - DNA, 25 bp, SARS Virus
cttatactgataaagtataagtgtg

SEQ ID NO: 69863 - DNA, 25 bp, SARS Virus
ttatactgatacagtataagtgtgt

SEQ ID NO: 69864 - DNA, 25 bp, SARS Virus
tatactgatacaatataagtgtgtt

SEQ ID NO: 69865 - DNA, 25 bp, SARS Virus
atactgatacagaataagtgtgttt

SEQ ID NO: 69866 - DNA, 25 bp, SARS Virus
tactgatacagtataagtgtgtttg

SEQ ID NO: 69867 - DNA, 25 bp, SARS Virus
actgatacagtaaaagtgtgtttga

SEQ ID NO: 69868 - DNA, 25 bp, SARS Virus
ctgatacagtataagtgtgtttgat

SEQ ID NO: 69869 - DNA, 25 bp, SARS Virus
tgatacagtataagtgtgtttgatg

SEQ ID NO: 69870 - DNA, 25 bp, SARS Virus
gatacagtataaatgtgtttgatga

SEQ ID NO: 69871 - DNA, 25 bp, SARS Virus
atacagtataagagtgtttgatgac

SEQ ID NO: 69872 - DNA, 25 bp, SARS Virus
tacagtataagtatgtttgatgact

SEQ ID NO: 69873 - DNA, 25 bp, SARS Virus
acagtataagtgagtttgatgactt

SEQ ID NO: 69874 - DNA, 25 bp, SARS Virus
cagtataagtgtatttgatgacttt

SEQ ID NO: 69875 - DNA, 25 bp, SARS Virus
agtataagtgtgattgatgactttg

SEQ ID NO: 69876 - DNA, 25 bp, SARS Virus
gtataagtgtgtatgatgactttgt

SEQ ID NO: 69877 - DNA, 25 bp, SARS Virus
tataagtgtgttagatgactttgtc

SEQ ID NO: 69878 - DNA, 25 bp, SARS Virus
ataagtgtgtttaatgactttgtcg

SEQ ID NO: 69879 - DNA, 25 bp, SARS Virus
taagtgtgtttgatgactttgtcgt

SEQ ID NO: 69880 - DNA, 25 bp, SARS Virus
aagtgtgtttgaagactttgtcgtg

SEQ ID NO: 69881 - DNA, 25 bp, SARS Virus
agtgtgtttgataactttgtcgtgt

SEQ ID NO: 69882 - DNA, 25 bp, SARS Virus
gtgtgtttgatgactttgtcgtgtg

SEQ ID NO: 69883 - DNA, 25 bp, SARS Virus
tgtgtttgatgaatttgtcgtgtga

SEQ ID NO: 69884 - DNA, 25 bp, SARS Virus
gtgtttgatgacattgtcgtgtgag

SEQ ID NO: 69885 - DNA, 25 bp, SARS Virus
tgtttgatgactatgtcgtgtgaga

SEQ ID NO: 69886 - DNA, 25 bp, SARS Virus
gtttgatgacttagtcgtgtgagaa

SEQ ID NO: 69887 - DNA, 25 bp, SARS Virus
tttgatgactttatcgtgtgagaac

SEQ ID NO: 69888 - DNA, 25 bp, SARS Virus
ttgatgactttgacgtgtgagaaca

SEQ ID NO: 69889 - DNA, 25 bp, SARS Virus
tgatgactttgtagtgtgagaacat

SEQ ID NO: 69890 - DNA, 25 bp, SARS Virus
gatgactttgtcatgtgagaacatt

SEQ ID NO: 69891 - DNA, 25 bp, SARS Virus
atgactttgtcgagtgagaacatta

SEQ ID NO: 69892 - DNA, 25 bp, SARS Virus
tgactttgtcgtatgagaacattac

SEQ ID NO: 69893 - DNA, 25 bp, SARS Virus
gactttgtcgtgagagaacattaca

SEQ ID NO: 69894 - DNA, 25 bp, SARS Virus
actttgtcgtgtaagaacattacag

SEQ ID NO: 69895 - DNA, 25 bp, SARS Virus
ctttgtcgtgtgagaacattacagt

SEQ ID NO: 69896 - DNA, 25 bp, SARS Virus
tttgtcgtgtgaaaacattacagtt

SEQ ID NO: 69897 - DNA, 25 bp, SARS Virus
ttgtcgtgtgagaacattacagttg

SEQ ID NO: 69898 - DNA, 25 bp, SARS Virus
tgtcgtgtgagaacattacagttgg

SEQ ID NO: 69899 - DNA, 25 bp, SARS Virus
gtcgtgtgagaaaattacagttggc

SEQ ID NO: 69900 - DNA, 25 bp, SARS Virus
tcgtgtgagaacattacagttggcg

SEQ ID NO: 69901 - DNA, 25 bp, SARS Virus
cgtgtgagaacaatacagttggcga

SEQ ID NO: 69902 - DNA, 25 bp, SARS Virus
gtgtgagaacataacagttggcgaa

SEQ ID NO: 69903 - DNA, 25 bp, SARS Virus
tgtgagaacattacagttggcgaag

SEQ ID NO: 69904 - DNA, 25 bp, SARS Virus
gtgagaacattaaagttggcgaagt

SEQ ID NO: 69905 - DNA, 25 bp, SARS Virus
tgagaacattacagttggcgaagtt

SEQ ID NO: 69906 - DNA, 25 bp, SARS Virus
gagaacattacaattggcgaagtta

SEQ ID NO: 69907 - DNA, 25 bp, SARS Virus
agaacattacagatggcgaagttac

SEQ ID NO: 69908 - DNA, 25 bp, SARS Virus
gaacattacagtaggcgaagttaca

SEQ ID NO: 69909 - DNA, 25 bp, SARS Virus
aacattacagttagcgaagttacac

SEQ ID NO: 69910 - DNA, 25 bp, SARS Virus
acattacagttgacgaagttacacc

SEQ ID NO: 69911 - DNA, 25 bp, SARS Virus
cattacagttggagaagttacaccg

SEQ ID NO: 69912 - DNA, 25 bp, SARS Virus
attacagttggcaaagttacaccga

SEQ ID NO: 69913 - DNA, 25 bp, SARS Virus
ttgtgatgcagacataaccgctagg

SEQ ID NO: 69914 - DNA, 25 bp, SARS Virus
tgtgatgcagatctaaccgctagga

SEQ ID NO: 69915 - DNA, 25 bp, SARS Virus
gtgatgcagatacaaccgctaggac

SEQ ID NO: 69916 - DNA, 25 bp, SARS Virus
tgatgcagatatcaccgctaggacg

SEQ ID NO: 69917 - DNA, 25 bp, SARS Virus
gatgcagatatacccgctaggacga

SEQ ID NO: 69918 - DNA, 25 bp, SARS Virus
atgcagatataaccgctaggacgag

SEQ ID NO: 69919 - DNA, 25 bp, SARS Virus
tgcagatataaccgctaggacgagt

SEQ ID NO: 69920 - DNA, 25 bp, SARS Virus
gcagatataacccctaggacgagtt

SEQ ID NO: 69921 - DNA, 25 bp, SARS Virus
cagatataaccgctaggacgagtta

SEQ ID NO: 69922 - DNA, 25 bp, SARS Virus
agatataaccgccaggacgagttaa

SEQ ID NO: 69923 - DNA, 25 bp, SARS Virus
gatataaccgctcggacgagttaat

SEQ ID NO: 69924 - DNA, 25 bp, SARS Virus
atataaccgctacgacgagttaatg

SEQ ID NO: 69925 - DNA, 25 bp, SARS Virus
tataaccgctagcacgagttaatgg

SEQ ID NO: 69926 - DNA, 25 bp, SARS Virus
ataaccgctaggccgagttaatggt

SEQ ID NO: 69927 - DNA, 25 bp, SARS Virus
taaccgctaggacgagttaatggtc

SEQ ID NO: 69928 - DNA, 25 bp, SARS Virus
aaccgctaggaccagttaatggtcg

SEQ ID NO: 69929 - DNA, 25 bp, SARS Virus
accgctaggacgcgttaatggtcgg

SEQ ID NO: 69930 - DNA, 25 bp, SARS Virus
ccgctaggacgacttaatggtcggg

SEQ ID NO: 69931 - DNA, 25 bp, SARS Virus
cgctaggacgagctaatggtcgggg

SEQ ID NO: 69932 - DNA, 25 bp, SARS Virus
gctaggacgagtcaatggtcggggg

SEQ ID NO: 69933 - DNA, 25 bp, SARS Virus
ctaggacgagttcatggtcgggggg

SEQ ID NO: 69934 - DNA, 25 bp, SARS Virus
taggacgagttactggtcggggggc

SEQ ID NO: 69935 - DNA, 25 bp, SARS Virus
aggacgagttaacggtcggggggcg

SEQ ID NO: 69936 - DNA, 25 bp, SARS Virus
ggacgagttaatcgtcggggggcgt

SEQ ID NO: 69937 - DNA, 25 bp, SARS Virus
gacgagttaatgctcggggggcgtg

SEQ ID NO: 69938 - DNA, 25 bp, SARS Virus
acgagttaatggccggggggcgtgt

SEQ ID NO: 69939 - DNA, 25 bp, SARS Virus
cgagttaatggtcggggggcgtgta

SEQ ID NO: 69940 - DNA, 25 bp, SARS Virus
gagttaatggtccgggggcgtgtaa

SEQ ID NO: 69941 - DNA, 25 bp, SARS Virus
agttaatggtcgcggggcgtgtaac

SEQ ID NO: 69942 - DNA, 25 bp, SARS Virus
gttaatggtcggcgggcgtgtaacg

SEQ ID NO: 69943 - DNA, 25 bp, SARS Virus
ttaatggtcgggcggcgtgtaacga

SEQ ID NO: 69944 - DNA, 25 bp, SARS Virus
taatggtcggggcgcgtgtaacgac

SEQ ID NO: 69945 - DNA, 25 bp, SARS Virus
aatggtcgggggccgtgtaacgact

SEQ ID NO: 69946 - DNA, 25 bp, SARS Virus
atggtcggggggcgtgtaacgactg

SEQ ID NO: 69947 - DNA, 25 bp, SARS Virus
tggtcggggggcctgtaacgactga

SEQ ID NO: 69948 - DNA, 25 bp, SARS Virus
ggtcggggggcgcgtaacgactgat

SEQ ID NO: 69949 - DNA, 25 bp, SARS Virus
gtcggggggcgtctaacgactgatt

SEQ ID NO: 69950 - DNA, 25 bp, SARS Virus
tcggggggcgtgcaacgactgattt

SEQ ID NO: 69951 - DNA, 25 bp, SARS Virus
cggggggcgtgtcacgactgatttc

SEQ ID NO: 69952 - DNA, 25 bp, SARS Virus
ggggggcgtgtaccgactgatttcc

SEQ ID NO: 69953 - DNA, 25 bp, SARS Virus
gggggcgtgtaacgactgatttccg

SEQ ID NO: 69954 - DNA, 25 bp, SARS Virus
ggggcgtgtaaccactgatttccgt

SEQ ID NO: 69955 - DNA, 25 bp, SARS Virus
gggcgtgtaacgcctgatttccgtg

SEQ ID NO: 69956 - DNA, 25 bp, SARS Virus
ggcgtgtaacgactgatttccgtgt

SEQ ID NO: 69957 - DNA, 25 bp, SARS Virus
gcgtgtaacgaccgatttccgtgtg

SEQ ID NO: 69958 - DNA, 25 bp, SARS Virus
cgtgtaacgactcatttccgtgtga

SEQ ID NO: 69959 - DNA, 25 bp, SARS Virus
gtgtaacgactgctttccgtgtgat

SEQ ID NO: 69960 - DNA, 25 bp, SARS Virus
tgtaacgactgacttccgtgtgatc

SEQ ID NO: 69961 - DNA, 25 bp, SARS Virus
gtaacgactgatctccgtgtgatct

SEQ ID NO: 69962 - DNA, 25 bp, SARS Virus
taacgactgattcccgtgtgatctt

SEQ ID NO: 69963 - DNA, 25 bp, SARS Virus
aacgactgatttccgtgtgatcttg

SEQ ID NO: 69964 - DNA, 25 bp, SARS Virus
acgactgatttccgtgtgatcttgg

SEQ ID NO: 69965 - DNA, 25 bp, SARS Virus
cgactgatttccctgtgatcttggt

SEQ ID NO: 69966 - DNA, 25 bp, SARS Virus
gactgatttccgcgtgatcttggtc

SEQ ID NO: 69967 - DNA, 25 bp, SARS Virus
actgatttccgtctgatcttggtct

SEQ ID NO: 69968 - DNA, 25 bp, SARS Virus
ctgatttccgtgcgatcttggtctt

SEQ ID NO: 69969 - DNA, 25 bp, SARS Virus
tgatttccgtgtcatcttggtctta

SEQ ID NO: 69970 - DNA, 25 bp, SARS Virus
gatttccgtgtgctcttggtcttat

SEQ ID NO: 69971 - DNA, 25 bp, SARS Virus
atttccgtgtgaccttggtcttata

SEQ ID NO: 69972 - DNA, 25 bp, SARS Virus
tttccgtgtgatcttggtcttataa

SEQ ID NO: 69973 - DNA, 25 bp, SARS Virus
ttccgtgtgatcctggtcttataaa

SEQ ID NO: 69974 - DNA, 25 bp, SARS Virus
tccgtgtgatctcggtcttataaaa

SEQ ID NO: 69975 - DNA, 25 bp, SARS Virus
ccgtgtgatcttcgtcttataaaat

SEQ ID NO: 69976 - DNA, 25 bp, SARS Virus
cgtgtgatcttgctcttataaaatt

SEQ ID NO: 69977 - DNA, 25 bp, SARS Virus
gtgtgatcttggccttataaaatta

SEQ ID NO: 69978 - DNA, 25 bp, SARS Virus
tgtgatcttggtcttataaaattaa

SEQ ID NO: 69979 - DNA, 25 bp, SARS Virus
gtgatcttggtcctataaaattaag

SEQ ID NO: 69980 - DNA, 25 bp, SARS Virus
tgatcttggtctcataaaattaagt

SEQ ID NO: 69981 - DNA, 25 bp, SARS Virus
gatcttggtcttctaaaattaagtc

SEQ ID NO: 69982 - DNA, 25 bp, SARS Virus
atcttggtcttacaaaattaagtca

SEQ ID NO: 69983 - DNA, 25 bp, SARS Virus
tcttggtcttatcaaattaagtcac

SEQ ID NO: 69984 - DNA, 25 bp, SARS Virus
cttggtcttatacaattaagtcaca

SEQ ID NO: 69985 - DNA, 25 bp, SARS Virus
ttggtcttataacattaagtcacac

SEQ ID NO: 69986 - DNA, 25 bp, SARS Virus
tggtcttataaacttaagtcacacg

SEQ ID NO: 69987 - DNA, 25 bp, SARS Virus
ggtcttataaaactaagtcacacgt

SEQ ID NO: 69988 - DNA, 25 bp, SARS Virus
gtcttataaaatcaagtcacacgtc

SEQ ID NO: 69989 - DNA, 25 bp, SARS Virus
tcttataaaattcagtcacacgtct

SEQ ID NO: 69990 - DNA, 25 bp, SARS Virus
cttataaaattacgtcacacgtctg

SEQ ID NO: 69991 - DNA, 25 bp, SARS Virus
ttataaaattaactcacacgtctga

SEQ ID NO: 69992 - DNA, 25 bp, SARS Virus
tataaaattaagccacacgtctgaa

SEQ ID NO: 69993 - DNA, 25 bp, SARS Virus
ataaaattaagtcacacgtctgaat

SEQ ID NO: 69994 - DNA, 25 bp, SARS Virus
taaaattaagtcccacgtctgaata

SEQ ID NO: 69995 - DNA, 25 bp, SARS Virus
aaaattaagtcacacgtctgaatac

SEQ ID NO: 69996 - DNA, 25 bp, SARS Virus
aaattaagtcacccgtctgaatact

SEQ ID NO: 69997 - DNA, 25 bp, SARS Virus
aattaagtcacacgtctgaatactt

SEQ ID NO: 69998 - DNA, 25 bp, SARS Virus
attaagtcacacctctgaatacttt

SEQ ID NO: 69999 - DNA, 25 bp, SARS Virus
ttaagtcacacgcctgaatactttt

SEQ ID NO: 70000 - DNA, 25 bp, SARS Virus
taagtcacacgtctgaatacttttg

SEQ ID NO: 70001 - DNA, 25 bp, SARS Virus
aagtcacacgtccgaatacttttgt

SEQ ID NO: 70002 - DNA, 25 bp, SARS Virus
agtcacacgtctcaatacttttgtt

SEQ ID NO: 70003 - DNA, 25 bp, SARS Virus
gtcacacgtctgcatacttttgtta

SEQ ID NO: 70004 - DNA, 25 bp, SARS Virus
tcacacgtctgactacttttgttat

SEQ ID NO: 70005 - DNA, 25 bp, SARS Virus
cacacgtctgaacacttttgttatc

SEQ ID NO: 70006 - DNA, 25 bp, SARS Virus
acacgtctgaatccttttgttatcc

SEQ ID NO: 70007 - DNA, 25 bp, SARS Virus
cacgtctgaatacttttgttatcca

SEQ ID NO: 70008 - DNA, 25 bp, SARS Virus
acgtctgaatacctttgttatccag

SEQ ID NO: 70009 - DNA, 25 bp, SARS Virus
cgtctgaatactcttgttatccagg

SEQ ID NO: 70010 - DNA, 25 bp, SARS Virus
gtctgaatacttctgttatccaggt

SEQ ID NO: 70011 - DNA, 25 bp, SARS Virus
tctgaatactttcgttatccaggtc

SEQ ID NO: 70012 - DNA, 25 bp, SARS Virus
ctgaatacttttcttatccaggtct

SEQ ID NO: 70013 - DNA, 25 bp, SARS Virus
tgaatacttttgctatccaggtctg

SEQ ID NO: 70014 - DNA, 25 bp, SARS Virus
gaatacttttgtcatccaggtctgt

SEQ ID NO: 70015 - DNA, 25 bp, SARS Virus
aatacttttgttctccaggtctgta

SEQ ID NO: 70016 - DNA, 25 bp, SARS Virus
atacttttgttacccaggtctgtac

SEQ ID NO: 70017 - DNA, 25 bp, SARS Virus
tacttttgttatccaggtctgtaca

SEQ ID NO: 70018 - DNA, 25 bp, SARS Virus
acttttgttatccaggtctgtacaa

SEQ ID NO: 70019 - DNA, 25 bp, SARS Virus
cttttgttatcccggtctgtacaag

SEQ ID NO: 70020 - DNA, 25 bp, SARS Virus
ttttgttatccacgtctgtacaagg

SEQ ID NO: 70021 - DNA, 25 bp, SARS Virus
tttgttatccagctctgtacaagga

SEQ ID NO: 70022 - DNA, 25 bp, SARS Virus
ttgttatccaggcctgtacaaggaa

SEQ ID NO: 70023 - DNA, 25 bp, SARS Virus
tgttatccaggtctgtacaaggaac

SEQ ID NO: 70024 - DNA, 25 bp, SARS Virus
gttatccaggtccgtacaaggaacc

SEQ ID NO: 70025 - DNA, 25 bp, SARS Virus
ttatccaggtctctacaaggaacct

SEQ ID NO: 70026 - DNA, 25 bp, SARS Virus
tatccaggtctgcacaaggaacctt

SEQ ID NO: 70027 - DNA, 25 bp, SARS Virus
atccaggtctgtccaaggaaccttg

SEQ ID NO: 70028 - DNA, 25 bp, SARS Virus
tccaggtctgtacaaggaaccttga

SEQ ID NO: 70029 - DNA, 25 bp, SARS Virus
ccaggtctgtaccaggaaccttgaa

SEQ ID NO: 70030 - DNA, 25 bp, SARS Virus
caggtctgtacacggaaccttgaac

SEQ ID NO: 70031 - DNA, 25 bp, SARS Virus
aggtctgtacaacgaaccttgaaca

SEQ ID NO: 70032 - DNA, 25 bp, SARS Virus
ggtctgtacaagcaaccttgaacag

SEQ ID NO: 70033 - DNA, 25 bp, SARS Virus
gtctgtacaaggcaccttgaacagc

SEQ ID NO: 70034 - DNA, 25 bp, SARS Virus
tctgtacaaggacccttgaacagcg

SEQ ID NO: 70035 - DNA, 25 bp, SARS Virus
ctgtacaaggaaccttgaacagcgg

SEQ ID NO: 70036 - DNA, 25 bp, SARS Virus
tgtacaaggaaccttgaacagcggc

SEQ ID NO: 70037 - DNA, 25 bp, SARS Virus
gtacaaggaaccctgaacagcggca

SEQ ID NO: 70038 - DNA, 25 bp, SARS Virus
tacaaggaacctcgaacagcggcaa

SEQ ID NO: 70039 - DNA, 25 bp, SARS Virus
acaaggaaccttcaacagcggcaac

SEQ ID NO: 70040 - DNA, 25 bp, SARS Virus
caaggaaccttgcacagcggcaaca

SEQ ID NO: 70041 - DNA, 25 bp, SARS Virus
aaggaaccttgaccagcggcaacag

SEQ ID NO: 70042 - DNA, 25 bp, SARS Virus
aggaaccttgaacagcggcaacagg

SEQ ID NO: 70043 - DNA, 25 bp, SARS Virus
ggaaccttgaaccgcggcaacagga

SEQ ID NO: 70044 - DNA, 25 bp, SARS Virus
gaaccttgaacaccggcaacaggac

SEQ ID NO: 70045 - DNA, 25 bp, SARS Virus
aaccttgaacagcggcaacaggacg

SEQ ID NO: 70046 - DNA, 25 bp, SARS Virus
accttgaacagccgcaacaggacga

SEQ ID NO: 70047 - DNA, 25 bp, SARS Virus
ccttgaacagcgccaacaggacgac

SEQ ID NO: 70048 - DNA, 25 bp, SARS Virus
cttgaacagcggcaacaggacgact

SEQ ID NO: 70049 - DNA, 25 bp, SARS Virus
ttgaacagcggccacaggacgactt

SEQ ID NO: 70050 - DNA, 25 bp, SARS Virus
tgaacagcggcaccaggacgacttt

SEQ ID NO: 70051 - DNA, 25 bp, SARS Virus
gaacagcggcaacaggacgacttta

SEQ ID NO: 70052 - DNA, 25 bp, SARS Virus
aacagcggcaaccggacgactttaa

SEQ ID NO: 70053 - DNA, 25 bp, SARS Virus
acagcggcaacacgacgactttaac

SEQ ID NO: 70054 - DNA, 25 bp, SARS Virus
cagcggcaacagcacgactttaaca

SEQ ID NO: 70055 - DNA, 25 bp, SARS Virus
agcggcaacaggccgactttaacaa

SEQ ID NO: 70056 - DNA, 25 bp, SARS Virus
gcggcaacaggacgactttaacaac

SEQ ID NO: 70057 - DNA, 25 bp, SARS Virus
cggcaacaggaccactttaacaact

SEQ ID NO: 70058 - DNA, 25 bp, SARS Virus
ggcaacaggacgcctttaacaactg

SEQ ID NO: 70059 - DNA, 25 bp, SARS Virus
gcaacaggacgactttaacaactgt

SEQ ID NO: 70060 - DNA, 25 bp, SARS Virus
caacaggacgaccttaacaactgtg

SEQ ID NO: 70061 - DNA, 25 bp, SARS Virus
aacaggacgactctaacaactgtga

SEQ ID NO: 70062 - DNA, 25 bp, SARS Virus
acaggacgacttcaacaactgtgac

SEQ ID NO: 70063 - DNA, 25 bp, SARS Virus
caggacgactttcacaactgtgaca

SEQ ID NO: 70064 - DNA, 25 bp, SARS Virus
aggacgactttaccaactgtgacac

SEQ ID NO: 70065 - DNA, 25 bp, SARS Virus
ggacgactttaacaactgtgacact

SEQ ID NO: 70066 - DNA, 25 bp, SARS Virus
gacgactttaaccactgtgacactc

SEQ ID NO: 70067 - DNA, 25 bp, SARS Virus
acgactttaacacctgtgacactca

SEQ ID NO: 70068 - DNA, 25 bp, SARS Virus
cgactttaacaactgtgacactcac

SEQ ID NO: 70069 - DNA, 25 bp, SARS Virus
gactttaacaaccgtgacactcacg

SEQ ID NO: 70070 - DNA, 25 bp, SARS Virus
actttaacaactctgacactcacga

SEQ ID NO: 70071 - DNA, 25 bp, SARS Virus
ctttaacaactgcgacactcacgaa

SEQ ID NO: 70072 - DNA, 25 bp, SARS Virus
tttaacaactgtcacactcacgaaa

SEQ ID NO: 70073 - DNA, 25 bp, SARS Virus
ttaacaactgtgccactcacgaaat

SEQ ID NO: 70074 - DNA, 25 bp, SARS Virus
taacaactgtgacactcacgaaatc

SEQ ID NO: 70075 - DNA, 25 bp, SARS Virus
aacaactgtgaccctcacgaaatca

SEQ ID NO: 70076 - DNA, 25 bp, SARS Virus
acaactgtgacactcacgaaatcaa

SEQ ID NO: 70077 - DNA, 25 bp, SARS Virus
caactgtgacacccacgaaatcaaa

SEQ ID NO: 70078 - DNA, 25 bp, SARS Virus
aactgtgacactcacgaaatcaaat

SEQ ID NO: 70079 - DNA, 25 bp, SARS Virus
actgtgacactcccgaaatcaaata

SEQ ID NO: 70080 - DNA, 25 bp, SARS Virus
ctgtgacactcacgaaatcaaatac

SEQ ID NO: 70081 - DNA, 25 bp, SARS Virus
tgtgacactcaccaaatcaaatact

SEQ ID NO: 70082 - DNA, 25 bp, SARS Virus
gtgacactcacgcaatcaaatactg

SEQ ID NO: 70083 - DNA, 25 bp, SARS Virus
tgacactcacgacatcaaatactgt

SEQ ID NO: 70084 - DNA, 25 bp, SARS Virus
gacactcacgaactcaaatactgtt

SEQ ID NO: 70085 - DNA, 25 bp, SARS Virus
acactcacgaaaccaaatactgtta

SEQ ID NO: 70086 - DNA, 25 bp, SARS Virus
cactcacgaaatcaaatactgttat

SEQ ID NO: 70087 - DNA, 25 bp, SARS Virus
actcacgaaatccaatactgttatt

SEQ ID NO: 70088 - DNA, 25 bp, SARS Virus
ctcacgaaatcacatactgttattc

SEQ ID NO: 70089 - DNA, 25 bp, SARS Virus
tcacgaaatcaactactgttattcg

SEQ ID NO: 70090 - DNA, 25 bp, SARS Virus
cacgaaatcaaacactgttattcga

SEQ ID NO: 70091 - DNA, 25 bp, SARS Virus
acgaaatcaaatcctgttattcgat

SEQ ID NO: 70092 - DNA, 25 bp, SARS Virus
cgaaatcaaatactgttattcgatt

SEQ ID NO: 70093 - DNA, 25 bp, SARS Virus
gaaatcaaataccgttattcgattt

SEQ ID NO: 70094 - DNA, 25 bp, SARS Virus
aaatcaaatactcttattcgatttt

SEQ ID NO: 70095 - DNA, 25 bp, SARS Virus
aatcaaatactgctattcgattttc

SEQ ID NO: 70096 - DNA, 25 bp, SARS Virus
atcaaatactgtcattcgattttcg

SEQ ID NO: 70097 - DNA, 25 bp, SARS Virus
tcaaatactgttcttcgattttcgt

SEQ ID NO: 70098 - DNA, 25 bp, SARS Virus
caaatactgttactcgattttcgtg

SEQ ID NO: 70099 - DNA, 25 bp, SARS Virus
aaatactgttatccgattttcgtgt

SEQ ID NO: 70100 - DNA, 25 bp, SARS Virus
aatactgttattcgattttcgtgtg

SEQ ID NO: 70101 - DNA, 25 bp, SARS Virus
atactgttattccattttcgtgtgt

SEQ ID NO: 70102 - DNA, 25 bp, SARS Virus
tactgttattcgcttttcgtgtgtt

SEQ ID NO: 70103 - DNA, 25 bp, SARS Virus
actgttattcgactttcgtgtgttc

SEQ ID NO: 70104 - DNA, 25 bp, SARS Virus
ctgttattcgatcttcgtgtgttcc

SEQ ID NO: 70105 - DNA, 25 bp, SARS Virus
tgttattcgattctcgtgtgttcct

SEQ ID NO: 70106 - DNA, 25 bp, SARS Virus
gttattcgatttccgtgtgttccta

SEQ ID NO: 70107 - DNA, 25 bp, SARS Virus
ttattcgattttcgtgtgttcctat

SEQ ID NO: 70108 - DNA, 25 bp, SARS Virus
tattcgattttcctgtgttcctatt

SEQ ID NO: 70109 - DNA, 25 bp, SARS Virus
attcgattttcgcgtgttcctattc

SEQ ID NO: 70110 - DNA, 25 bp, SARS Virus
ttcgattttcgtctgttcctattca

SEQ ID NO: 70111 - DNA, 25 bp, SARS Virus
tcgattttcgtgcgttcctattcag

SEQ ID NO: 70112 - DNA, 25 bp, SARS Virus
cgattttcgtgtcttcctattcagt

SEQ ID NO: 70113 - DNA, 25 bp, SARS Virus
gattttcgtgtgctcctattcagtc

SEQ ID NO: 70114 - DNA, 25 bp, SARS Virus
attttcgtgtgtccctattcagtcg

SEQ ID NO: 70115 - DNA, 25 bp, SARS Virus
ttttcgtgtgttcctattcagtcga

SEQ ID NO: 70116 - DNA, 25 bp, SARS Virus
tttcgtgtgttcctattcagtcgag

SEQ ID NO: 70117 - DNA, 25 bp, SARS Virus
ttcgtgtgttcccattcagtcgagt

SEQ ID NO: 70118 - DNA, 25 bp, SARS Virus
tcgtgtgttcctcttcagtcgagtt

SEQ ID NO: 70119 - DNA, 25 bp, SARS Virus
cgtgtgttcctactcagtcgagtta

SEQ ID NO: 70120 - DNA, 25 bp, SARS Virus
gtgtgttcctatccagtcgagttac

SEQ ID NO: 70121 - DNA, 25 bp, SARS Virus
tgtgttcctattcagtcgagttacg

SEQ ID NO: 70122 - DNA, 25 bp, SARS Virus
gtgttcctattccgtcgagttacga

SEQ ID NO: 70123 - DNA, 25 bp, SARS Virus
tgttcctattcactcgagttacgaa

SEQ ID NO: 70124 - DNA, 25 bp, SARS Virus
gttcctattcagccgagttacgaag

SEQ ID NO: 70125 - DNA, 25 bp, SARS Virus
ttcctattcagtcgagttacgaagt

SEQ ID NO: 70126 - DNA, 25 bp, SARS Virus
tcctattcagtccagttacgaagtt

SEQ ID NO: 70127 - DNA, 25 bp, SARS Virus
cctattcagtcgcgttacgaagttt

SEQ ID NO: 70128 - DNA, 25 bp, SARS Virus
ctattcagtcgacttacgaagtttt

SEQ ID NO: 70129 - DNA, 25 bp, SARS Virus
tattcagtcgagctacgaagtttta

SEQ ID NO: 70130 - DNA, 25 bp, SARS Virus
attcagtcgagtcacgaagttttac

SEQ ID NO: 70131 - DNA, 25 bp, SARS Virus
ttcagtcgagttccgaagttttaca

SEQ ID NO: 70132 - DNA, 25 bp, SARS Virus
tcagtcgagttacgaagttttacaa

SEQ ID NO: 70133 - DNA, 25 bp, SARS Virus
cagtcgagttaccaagttttacaag

SEQ ID NO: 70134 - DNA, 25 bp, SARS Virus
agtcgagttacgcagttttacaaga

SEQ ID NO: 70135 - DNA, 25 bp, SARS Virus
gtcgagttacgacgttttacaagat

SEQ ID NO: 70136 - DNA, 25 bp, SARS Virus
tcgagttacgaacttttacaagatg

SEQ ID NO: 70137 - DNA, 25 bp, SARS Virus
cgagttacgaagctttacaagatgt

SEQ ID NO: 70138 - DNA, 25 bp, SARS Virus
gagttacgaagtcttacaagatgtt

SEQ ID NO: 70139 - DNA, 25 bp, SARS Virus
agttacgaagttctacaagatgttt

SEQ ID NO: 70140 - DNA, 25 bp, SARS Virus
gttacgaagtttcacaagatgtttc

SEQ ID NO: 70141 - DNA, 25 bp, SARS Virus
ttacgaagttttccaagatgtttcc

SEQ ID NO: 70142 - DNA, 25 bp, SARS Virus
tacgaagttttacaagatgtttcca

SEQ ID NO: 70143 - DNA, 25 bp, SARS Virus
acgaagttttaccagatgtttccac

SEQ ID NO: 70144 - DNA, 25 bp, SARS Virus
cgaagttttacacgatgtttccaca

SEQ ID NO: 70145 - DNA, 25 bp, SARS Virus
gaagttttacaacatgtttccacaa

SEQ ID NO: 70146 - DNA, 25 bp, SARS Virus
aagttttacaagctgtttccacaat

SEQ ID NO: 70147 - DNA, 25 bp, SARS Virus
agttttacaagacgtttccacaata

SEQ ID NO: 70148 - DNA, 25 bp, SARS Virus
gttttacaagatctttccacaataa

SEQ ID NO: 70149 - DNA, 25 bp, SARS Virus
ttttacaagatgcttccacaataat

SEQ ID NO: 70150 - DNA, 25 bp, SARS Virus
tttacaagatgtctccacaataatg

SEQ ID NO: 70151 - DNA, 25 bp, SARS Virus
ttacaagatgttcccacaataatgt

SEQ ID NO: 70152 - DNA, 25 bp, SARS Virus
tacaagatgtttccacaataatgtg

SEQ ID NO: 70153 - DNA, 25 bp, SARS Virus
acaagatgtttccacaataatgtgt

SEQ ID NO: 70154 - DNA, 25 bp, SARS Virus
caagatgtttccccaataatgtgta

SEQ ID NO: 70155 - DNA, 25 bp, SARS Virus
aagatgtttccacaataatgtgtac

SEQ ID NO: 70156 - DNA, 25 bp, SARS Virus
agatgtttccaccataatgtgtact

SEQ ID NO: 70157 - DNA, 25 bp, SARS Virus
gatgtttccacactaatgtgtacta

SEQ ID NO: 70158 - DNA, 25 bp, SARS Virus
atgtttccacaacaatgtgtactac

SEQ ID NO: 70159 - DNA, 25 bp, SARS Virus
tgtttccacaatcatgtgtactaca

SEQ ID NO: 70160 - DNA, 25 bp, SARS Virus
gtttccacaatactgtgtactacaa

SEQ ID NO: 70161 - DNA, 25 bp, SARS Virus
tttccacaataacgtgtactacaaa

SEQ ID NO: 70162 - DNA, 25 bp, SARS Virus
ttccacaataatctgtactacaaag

SEQ ID NO: 70163 - DNA, 25 bp, SARS Virus
tccacaataatgcgtactacaaagt

SEQ ID NO: 70164 - DNA, 25 bp, SARS Virus
ccacaataatgtctactacaaagta

SEQ ID NO: 70165 - DNA, 25 bp, SARS Virus
cacaataatgtgcactacaaagtag

SEQ ID NO: 70166 - DNA, 25 bp, SARS Virus
acaataatgtgtcctacaaagtaga

SEQ ID NO: 70167 - DNA, 25 bp, SARS Virus
caataatgtgtactacaaagtagac

SEQ ID NO: 70168 - DNA, 25 bp, SARS Virus
aataatgtgtaccacaaagtagacg

SEQ ID NO: 70169 - DNA, 25 bp, SARS Virus
ataatgtgtactccaaagtagacgt

SEQ ID NO: 70170 - DNA, 25 bp, SARS Virus
taatgtgtactacaaagtagacgtt

SEQ ID NO: 70171 - DNA, 25 bp, SARS Virus
aatgtgtactaccaagtagacgtta

SEQ ID NO: 70172 - DNA, 25 bp, SARS Virus
atgtgtactacacagtagacgttag

SEQ ID NO: 70173 - DNA, 25 bp, SARS Virus
tgtgtactacaacgtagacgttagt

SEQ ID NO: 70174 - DNA, 25 bp, SARS Virus
gtgtactacaaactagacgttagtt

SEQ ID NO: 70175 - DNA, 25 bp, SARS Virus
tgtactacaaagcagacgttagttg

SEQ ID NO: 70176 - DNA, 25 bp, SARS Virus
gtactacaaagtcgacgttagttgt

SEQ ID NO: 70177 - DNA, 25 bp, SARS Virus
tactacaaagtacacgttagttgtc

SEQ ID NO: 70178 - DNA, 25 bp, SARS Virus
actacaaagtagccgttagttgtct

SEQ ID NO: 70179 - DNA, 25 bp, SARS Virus
ctacaaagtagacgttagttgtctg

SEQ ID NO: 70180 - DNA, 25 bp, SARS Virus
tacaaagtagaccttagttgtctgg

SEQ ID NO: 70181 - DNA, 25 bp, SARS Virus
acaaagtagacgctagttgtctgga

SEQ ID NO: 70182 - DNA, 25 bp, SARS Virus
caaagtagacgtcagttgtctggag

SEQ ID NO: 70183 - DNA, 25 bp, SARS Virus
aaagtagacgttcgttgtctggagt

SEQ ID NO: 70184 - DNA, 25 bp, SARS Virus
aagtagacgttacttgtctggagtt

SEQ ID NO: 70185 - DNA, 25 bp, SARS Virus
agtagacgttagctgtctggagttt

SEQ ID NO: 70186 - DNA, 25 bp, SARS Virus
gtagacgttagtcgtctggagttta

SEQ ID NO: 70187 - DNA, 25 bp, SARS Virus
tagacgttagttctctggagtttat

SEQ ID NO: 70188 - DNA, 25 bp, SARS Virus
agacgttagttgcctggagtttatc

SEQ ID NO: 70189 - DNA, 25 bp, SARS Virus
gacgttagttgtctggagtttatcc

SEQ ID NO: 70190 - DNA, 25 bp, SARS Virus
acgttagttgtccggagtttatccg

SEQ ID NO: 70191 - DNA, 25 bp, SARS Virus
cgttagttgtctcgagtttatccgc

SEQ ID NO: 70192 - DNA, 25 bp, SARS Virus
gttagttgtctgcagtttatccgca

SEQ ID NO: 70193 - DNA, 25 bp, SARS Virus
ttagttgtctggcgtttatccgcaa

SEQ ID NO: 70194 - DNA, 25 bp, SARS Virus
tagttgtctggactttatccgcaac

SEQ ID NO: 70195 - DNA, 25 bp, SARS Virus
agttgtctggagcttatccgcaaca

SEQ ID NO: 70196 - DNA, 25 bp, SARS Virus
gttgtctggagtctatccgcaacat

SEQ ID NO: 70197 - DNA, 25 bp, SARS Virus
ttgtctggagttcatccgcaacatt

SEQ ID NO: 70198 - DNA, 25 bp, SARS Virus
tgtctggagtttctccgcaacattc

SEQ ID NO: 70199 - DNA, 25 bp, SARS Virus
gtctggagtttacccgcaacattct

SEQ ID NO: 70200 - DNA, 25 bp, SARS Virus
tctggagtttatccgcaacattctc

SEQ ID NO: 70201 - DNA, 25 bp, SARS Virus
ctggagtttatccgcaacattctct

SEQ ID NO: 70202 - DNA, 25 bp, SARS Virus
tggagtttatccccaacattctctt

SEQ ID NO: 70203 - DNA, 25 bp, SARS Virus
ggagtttatccgcaacattctctta

SEQ ID NO: 70204 - DNA, 25 bp, SARS Virus
gagtttatccgccacattctcttaa

SEQ ID NO: 70205 - DNA, 25 bp, SARS Virus
agtttatccgcaccattctcttaaa

SEQ ID NO: 70206 - DNA, 25 bp, SARS Virus
gtttatccgcaacattctcttaaag

SEQ ID NO: 70207 - DNA, 25 bp, SARS Virus
tttatccgcaaccttctcttaaaga

SEQ ID NO: 70208 - DNA, 25 bp, SARS Virus
ttatccgcaacactctcttaaagaa

SEQ ID NO: 70209 - DNA, 25 bp, SARS Virus
tatccgcaacatcctcttaaagaat

SEQ ID NO: 70210 - DNA, 25 bp, SARS Virus
atccgcaacattctcttaaagaatg

SEQ ID NO: 70211 - DNA, 25 bp, SARS Virus
tccgcaacattcccttaaagaatgt

SEQ ID NO: 70212 - DNA, 25 bp, SARS Virus
ccgcaacattctcttaaagaatgtg

SEQ ID NO: 70213 - DNA, 25 bp, SARS Virus
cgcaacattctcctaaagaatgtgc

SEQ ID NO: 70214 - DNA, 25 bp, SARS Virus
gcaacattctctcaaagaatgtgcg

SEQ ID NO: 70215 - DNA, 25 bp, SARS Virus
caacattctcttcaagaatgtgcgt

SEQ ID NO: 70216 - DNA, 25 bp, SARS Virus
aacattctcttacagaatgtgcgtt

SEQ ID NO: 70217 - DNA, 25 bp, SARS Virus
acattctcttaacgaatgtgcgtta

SEQ ID NO: 70218 - DNA, 25 bp, SARS Virus
cattctcttaaacaatgtgcgttag

SEQ ID NO: 70219 - DNA, 25 bp, SARS Virus
attctcttaaagcatgtgcgttagg

SEQ ID NO: 70220 - DNA, 25 bp, SARS Virus
ttctcttaaagactgtgcgttagga

SEQ ID NO: 70221 - DNA, 25 bp, SARS Virus
tctcttaaagaacgtgcgttaggac

SEQ ID NO: 70222 - DNA, 25 bp, SARS Virus
ctcttaaagaatctgcgttaggacg

SEQ ID NO: 70223 - DNA, 25 bp, SARS Virus
tcttaaagaatgcgcgttaggacga

SEQ ID NO: 70224 - DNA, 25 bp, SARS Virus
cttaaagaatgtccgttaggacgaa

SEQ ID NO: 70225 - DNA, 25 bp, SARS Virus
ttaaagaatgtgcgttaggacgaac

SEQ ID NO: 70226 - DNA, 25 bp, SARS Virus
taaagaatgtgccttaggacgaacc

SEQ ID NO: 70227 - DNA, 25 bp, SARS Virus
aaagaatgtgcgctaggacgaacct

SEQ ID NO: 70228 - DNA, 25 bp, SARS Virus
aagaatgtgcgtcaggacgaacctc

SEQ ID NO: 70229 - DNA, 25 bp, SARS Virus
agaatgtgcgttcggacgaacctct

SEQ ID NO: 70230 - DNA, 25 bp, SARS Virus
gaatgtgcgttacgacgaacctctt

SEQ ID NO: 70231 - DNA, 25 bp, SARS Virus
aatgtgcgttagcacgaacctcttt

SEQ ID NO: 70232 - DNA, 25 bp, SARS Virus
atgtgcgttaggccgaacctctttt

SEQ ID NO: 70233 - DNA, 25 bp, SARS Virus
tgtgcgttaggacgaacctcttttc

SEQ ID NO: 70234 - DNA, 25 bp, SARS Virus
gtgcgttaggaccaacctcttttcg

SEQ ID NO: 70235 - DNA, 25 bp, SARS Virus
tgcgttaggacgcacctcttttcga

SEQ ID NO: 70236 - DNA, 25 bp, SARS Virus
gcgttaggacgaccctcttttcgac

SEQ ID NO: 70237 - DNA, 25 bp, SARS Virus
cgttaggacgaacctcttttcgaca

SEQ ID NO: 70238 - DNA, 25 bp, SARS Virus
gttaggacgaacctcttttcgacaa

SEQ ID NO: 70239 - DNA, 25 bp, SARS Virus
ttaggacgaaccccttttcgacaaa

SEQ ID NO: 70240 - DNA, 25 bp, SARS Virus
taggacgaacctcttttcgacaaaa

SEQ ID NO: 70241 - DNA, 25 bp, SARS Virus
aggacgaacctcctttcgacaaaaa

SEQ ID NO: 70242 - DNA, 25 bp, SARS Virus
ggacgaacctctcttcgacaaaaat

SEQ ID NO: 70243 - DNA, 25 bp, SARS Virus
gacgaacctcttctcgacaaaaata

SEQ ID NO: 70244 - DNA, 25 bp, SARS Virus
acgaacctctttccgacaaaaatag

SEQ ID NO: 70245 - DNA, 25 bp, SARS Virus
cgaacctcttttcgacaaaaataga

SEQ ID NO: 70246 - DNA, 25 bp, SARS Virus
gaacctcttttccacaaaaatagag

SEQ ID NO: 70247 - DNA, 25 bp, SARS Virus
aacctcttttcgccaaaaatagagt

SEQ ID NO: 70248 - DNA, 25 bp, SARS Virus
acctcttttcgacaaaaatagagtg

SEQ ID NO: 70249 - DNA, 25 bp, SARS Virus
cctcttttcgaccaaaatagagtgg

SEQ ID NO: 70250 - DNA, 25 bp, SARS Virus
ctcttttcgacacaaatagagtgga

SEQ ID NO: 70251 - DNA, 25 bp, SARS Virus
tcttttcgacaacaatagagtggaa

SEQ ID NO: 70252 - DNA, 25 bp, SARS Virus
cttttcgacaaacatagagtggaat

SEQ ID NO: 70253 - DNA, 25 bp, SARS Virus
ttttcgacaaaactagagtggaata

SEQ ID NO: 70254 - DNA, 25 bp, SARS Virus
tttcgacaaaaacagagtggaatat

SEQ ID NO: 70255 - DNA, 25 bp, SARS Virus
ttcgacaaaaatcgagtggaatatt

SEQ ID NO: 70256 - DNA, 25 bp, SARS Virus
tcgacaaaaatacagtggaatatta

SEQ ID NO: 70257 - DNA, 25 bp, SARS Virus
cgacaaaaatagcgtggaatattaa

SEQ ID NO: 70258 - DNA, 25 bp, SARS Virus
gacaaaaatagactggaatattaag

SEQ ID NO: 70259 - DNA, 25 bp, SARS Virus
acaaaaatagagcggaatattaagt

SEQ ID NO: 70260 - DNA, 25 bp, SARS Virus
caaaaatagagtcgaatattaagtg

SEQ ID NO: 70261 - DNA, 25 bp, SARS Virus
aaaaatagagtgcaatattaagtgt

SEQ ID NO: 70262 - DNA, 25 bp, SARS Virus
aaaatagagtggcatattaagtgtc

SEQ ID NO: 70263 - DNA, 25 bp, SARS Virus
aaatagagtggactattaagtgtct

SEQ ID NO: 70264 - DNA, 25 bp, SARS Virus
aatagagtggaacattaagtgtctt

SEQ ID NO: 70265 - DNA, 25 bp, SARS Virus
atagagtggaatcttaagtgtcttg

SEQ ID NO: 70266 - DNA, 25 bp, SARS Virus
tagagtggaatactaagtgtcttgc

SEQ ID NO: 70267 - DNA, 25 bp, SARS Virus
agagtggaatatcaagtgtcttgcg

SEQ ID NO: 70268 - DNA, 25 bp, SARS Virus
gagtggaatattcagtgtcttgcga

SEQ ID NO: 70269 - DNA, 25 bp, SARS Virus
agtggaatattacgtgtcttgcgac

SEQ ID NO: 70270 - DNA, 25 bp, SARS Virus
gtggaatattaactgtcttgcgaca

SEQ ID NO: 70271 - DNA, 25 bp, SARS Virus
tggaatattaagcgtcttgcgacat

SEQ ID NO: 70272 - DNA, 25 bp, SARS Virus
ggaatattaagtctcttgcgacatc

SEQ ID NO: 70273 - DNA, 25 bp, SARS Virus
gaatattaagtgccttgcgacatcg

SEQ ID NO: 70274 - DNA, 25 bp, SARS Virus
aatattaagtgtcttgcgacatcga

SEQ ID NO: 70275 - DNA, 25 bp, SARS Virus
atattaagtgtcctgcgacatcgaa

SEQ ID NO: 70276 - DNA, 25 bp, SARS Virus
tattaagtgtctcgcgacatcgaag

SEQ ID NO: 70277 - DNA, 25 bp, SARS Virus
attaagtgtcttccgacatcgaagt

SEQ ID NO: 70278 - DNA, 25 bp, SARS Virus
ttaagtgtcttgcgacatcgaagtt

SEQ ID NO: 70279 - DNA, 25 bp, SARS Virus
taagtgtcttgccacatcgaagttt

SEQ ID NO: 70280 - DNA, 25 bp, SARS Virus
aagtgtcttgcgccatcgaagtttt

SEQ ID NO: 70281 - DNA, 25 bp, SARS Virus
agtgtcttgcgacatcgaagttttt

SEQ ID NO: 70282 - DNA, 25 bp, SARS Virus
gtgtcttgcgacctcgaagttttta

SEQ ID NO: 70283 - DNA, 25 bp, SARS Virus
tgtcttgcgacaccgaagtttttag

SEQ ID NO: 70284 - DNA, 25 bp, SARS Virus
gtcttgcgacatcgaagtttttaga

SEQ ID NO: 70285 - DNA, 25 bp, SARS Virus
tcttgcgacatccaagtttttagaa

SEQ ID NO: 70286 - DNA, 25 bp, SARS Virus
cttgcgacatcgcagtttttagaat

SEQ ID NO: 70287 - DNA, 25 bp, SARS Virus
ttgcgacatcgacgtttttagaatc

SEQ ID NO: 70288 - DNA, 25 bp, SARS Virus
tgcgacatcgaactttttagaatcc

SEQ ID NO: 70289 - DNA, 25 bp, SARS Virus
gcgacatcgaagcttttagaatcct

SEQ ID NO: 70290 - DNA, 25 bp, SARS Virus
cgacatcgaagtctttagaatccta

SEQ ID NO: 70291 - DNA, 25 bp, SARS Virus
gacatcgaagttcttagaatcctaa

SEQ ID NO: 70292 - DNA, 25 bp, SARS Virus
acatcgaagtttctagaatcctaac

SEQ ID NO: 70293 - DNA, 25 bp, SARS Virus
catcgaagttttcagaatcctaacg

SEQ ID NO: 70294 - DNA, 25 bp, SARS Virus
atcgaagtttttcgaatcctaacgg

SEQ ID NO: 70295 - DNA, 25 bp, SARS Virus
tcgaagtttttacaatcctaacgga

SEQ ID NO: 70296 - DNA, 25 bp, SARS Virus
cgaagtttttagcatcctaacggat

SEQ ID NO: 70297 - DNA, 25 bp, SARS Virus
gaagtttttagactcctaacggatg

SEQ ID NO: 70298 - DNA, 25 bp, SARS Virus
aagtttttagaaccctaacggatgc

SEQ ID NO: 70299 - DNA, 25 bp, SARS Virus
agtttttagaatcctaacggatgcg

SEQ ID NO: 70300 - DNA, 25 bp, SARS Virus
gtttttagaatcctaacggatgcgt

SEQ ID NO: 70301 - DNA, 25 bp, SARS Virus
tttttagaatcccaacggatgcgtc

SEQ ID NO: 70302 - DNA, 25 bp, SARS Virus
ttttagaatcctcacggatgcgtct

SEQ ID NO: 70303 - DNA, 25 bp, SARS Virus
tttagaatcctaccggatgcgtctg

SEQ ID NO: 70304 - DNA, 25 bp, SARS Virus
ttagaatcctaacggatgcgtctga

SEQ ID NO: 70305 - DNA, 25 bp, SARS Virus
tagaatcctaaccgatgcgtctgac

SEQ ID NO: 70306 - DNA, 25 bp, SARS Virus
agaatcctaacgcatgcgtctgaca

SEQ ID NO: 70307 - DNA, 25 bp, SARS Virus
gaatcctaacggctgcgtctgacaa

SEQ ID NO: 70308 - DNA, 25 bp, SARS Virus
aatcctaacggacgcgtctgacaac

SEQ ID NO: 70309 - DNA, 25 bp, SARS Virus
atcctaacggatccgtctgacaact

SEQ ID NO: 70310 - DNA, 25 bp, SARS Virus
tcctaacggatgcgtctgacaacta

SEQ ID NO: 70311 - DNA, 25 bp, SARS Virus
cctaacggatgcctctgacaactaa

SEQ ID NO: 70312 - DNA, 25 bp, SARS Virus
ctaacggatgcgcctgacaactaag

SEQ ID NO: 70313 - DNA, 25 bp, SARS Virus
taacggatgcgtctgacaactaagt

SEQ ID NO: 70314 - DNA, 25 bp, SARS Virus
aacggatgcgtccgacaactaagta

SEQ ID NO: 70315 - DNA, 25 bp, SARS Virus
acggatgcgtctcacaactaagtag

SEQ ID NO: 70316 - DNA, 25 bp, SARS Virus
cggatgcgtctgccaactaagtagt

SEQ ID NO: 70317 - DNA, 25 bp, SARS Virus
ggatgcgtctgacaactaagtagtg

SEQ ID NO: 70318 - DNA, 25 bp, SARS Virus
gatgcgtctgaccactaagtagtgt

SEQ ID NO: 70319 - DNA, 25 bp, SARS Virus
atgcgtctgacacctaagtagtgtc

SEQ ID NO: 70320 - DNA, 25 bp, SARS Virus
tgcgtctgacaactaagtagtgtcc

SEQ ID NO: 70321 - DNA, 25 bp, SARS Virus
gcgtctgacaaccaagtagtgtccc

SEQ ID NO: 70322 - DNA, 25 bp, SARS Virus
cgtctgacaactcagtagtgtccca

SEQ ID NO: 70323 - DNA, 25 bp, SARS Virus
gtctgacaactacgtagtgtcccaa

SEQ ID NO: 70324 - DNA, 25 bp, SARS Virus
tctgacaactaactagtgtcccaag

SEQ ID NO: 70325 - DNA, 25 bp, SARS Virus
ctgacaactaagcagtgtcccaaga

SEQ ID NO: 70326 - DNA, 25 bp, SARS Virus
tgacaactaagtcgtgtcccaagac

SEQ ID NO: 70327 - DNA, 25 bp, SARS Virus
gacaactaagtactgtcccaagact

SEQ ID NO: 70328 - DNA, 25 bp, SARS Virus
acaactaagtagcgtcccaagactt

SEQ ID NO: 70329 - DNA, 25 bp, SARS Virus
caactaagtagtctcccaagactta

SEQ ID NO: 70330 - DNA, 25 bp, SARS Virus
aactaagtagtgccccaagacttat

SEQ ID NO: 70331 - DNA, 25 bp, SARS Virus
actaagtagtgtcccaagacttata

SEQ ID NO: 70332 - DNA, 25 bp, SARS Virus
ctaagtagtgtcccaagacttatac

SEQ ID NO: 70333 - DNA, 25 bp, SARS Virus
taagtagtgtcccaagacttatact

SEQ ID NO: 70334 - DNA, 25 bp, SARS Virus
aagtagtgtccccagacttatactg

SEQ ID NO: 70335 - DNA, 25 bp, SARS Virus
agtagtgtcccacgacttatactga

SEQ ID NO: 70336 - DNA, 25 bp, SARS Virus
gtagtgtcccaacacttatactgat

SEQ ID NO: 70337 - DNA, 25 bp, SARS Virus
tagtgtcccaagccttatactgata

SEQ ID NO: 70338 - DNA, 25 bp, SARS Virus
agtgtcccaagacttatactgatac

SEQ ID NO: 70339 - DNA, 25 bp, SARS Virus
gtgtcccaagacctatactgataca

SEQ ID NO: 70340 - DNA, 25 bp, SARS Virus
tgtcccaagactcatactgatacag

SEQ ID NO: 70341 - DNA, 25 bp, SARS Virus
gtcccaagacttctactgatacagt

SEQ ID NO: 70342 - DNA, 25 bp, SARS Virus
tcccaagacttacactgatacagta

SEQ ID NO: 70343 - DNA, 25 bp, SARS Virus
cccaagacttatcctgatacagtat

SEQ ID NO: 70344 - DNA, 25 bp, SARS Virus
ccaagacttatactgatacagtata

SEQ ID NO: 70345 - DNA, 25 bp, SARS Virus
caagacttataccgatacagtataa

SEQ ID NO: 70346 - DNA, 25 bp, SARS Virus
aagacttatactcatacagtataag

SEQ ID NO: 70347 - DNA, 25 bp, SARS Virus
agacttatactgctacagtataagt

SEQ ID NO: 70348 - DNA, 25 bp, SARS Virus
gacttatactgacacagtataagtg

SEQ ID NO: 70349 - DNA, 25 bp, SARS Virus
acttatactgatccagtataagtgt

SEQ ID NO: 70350 - DNA, 25 bp, SARS Virus
cttatactgatacagtataagtgtg

SEQ ID NO: 70351 - DNA, 25 bp, SARS Virus
ttatactgataccgtataagtgtgt

SEQ ID NO: 70352 - DNA, 25 bp, SARS Virus
tatactgatacactataagtgtgtt

SEQ ID NO: 70353 - DNA, 25 bp, SARS Virus
atactgatacagcataagtgtgttt

SEQ ID NO: 70354 - DNA, 25 bp, SARS Virus
tactgatacagtctaagtgtgtttg

SEQ ID NO: 70355 - DNA, 25 bp, SARS Virus
actgatacagtacaagtgtgtttga

SEQ ID NO: 70356 - DNA, 25 bp, SARS Virus
ctgatacagtatcagtgtgtttgat

SEQ ID NO: 70357 - DNA, 25 bp, SARS Virus
tgatacagtatacgtgtgtttgatg

SEQ ID NO: 70358 - DNA, 25 bp, SARS Virus
gatacagtataactgtgtttgatga

SEQ ID NO: 70359 - DNA, 25 bp, SARS Virus
atacagtataagcgtgtttgatgac

SEQ ID NO: 70360 - DNA, 25 bp, SARS Virus
tacagtataagtctgtttgatgact

SEQ ID NO: 70361 - DNA, 25 bp, SARS Virus
acagtataagtgcgtttgatgactt

SEQ ID NO: 70362 - DNA, 25 bp, SARS Virus
cagtataagtgtctttgatgacttt

SEQ ID NO: 70363 - DNA, 25 bp, SARS Virus
agtataagtgtgcttgatgactttg

SEQ ID NO: 70364 - DNA, 25 bp, SARS Virus
gtataagtgtgtctgatgactttgt

SEQ ID NO: 70365 - DNA, 25 bp, SARS Virus
tataagtgtgttcgatgactttgtc

SEQ ID NO: 70366 - DNA, 25 bp, SARS Virus
ataagtgtgtttcatgactttgtcg

SEQ ID NO: 70367 - DNA, 25 bp, SARS Virus
taagtgtgtttgctgactttgtcgt

SEQ ID NO: 70368 - DNA, 25 bp, SARS Virus
aagtgtgtttgacgactttgtcgtg

SEQ ID NO: 70369 - DNA, 25 bp, SARS Virus
agtgtgtttgatcactttgtcgtgt

SEQ ID NO: 70370 - DNA, 25 bp, SARS Virus
gtgtgtttgatgcctttgtcgtgtg

SEQ ID NO: 70371 - DNA, 25 bp, SARS Virus
tgtgtttgatgactttgtcgtgtga

SEQ ID NO: 70372 - DNA, 25 bp, SARS Virus
gtgtttgatgaccttgtcgtgtgag

SEQ ID NO: 70373 - DNA, 25 bp, SARS Virus
tgtttgatgactctgtcgtgtgaga

SEQ ID NO: 70374 - DNA, 25 bp, SARS Virus
gtttgatgacttcgtcgtgtgagaa

SEQ ID NO: 70375 - DNA, 25 bp, SARS Virus
tttgatgactttctcgtgtgagaac

SEQ ID NO: 70376 - DNA, 25 bp, SARS Virus
ttgatgactttgccgtgtgagaaca

SEQ ID NO: 70377 - DNA, 25 bp, SARS Virus
tgatgactttgtcgtgtgagaacat

SEQ ID NO: 70378 - DNA, 25 bp, SARS Virus
gatgactttgtcctgtgagaacatt

SEQ ID NO: 70379 - DNA, 25 bp, SARS Virus
atgactttgtcgcgtgagaacatta

SEQ ID NO: 70380 - DNA, 25 bp, SARS Virus
tgactttgtcgtctgagaacattac

SEQ ID NO: 70381 - DNA, 25 bp, SARS Virus
gactttgtcgtgcgagaacattaca

SEQ ID NO: 70382 - DNA, 25 bp, SARS Virus
actttgtcgtgtcagaacattacag

SEQ ID NO: 70383 - DNA, 25 bp, SARS Virus
ctttgtcgtgtgcgaacattacagt

SEQ ID NO: 70384 - DNA, 25 bp, SARS Virus
tttgtcgtgtgacaacattacagtt

SEQ ID NO: 70385 - DNA, 25 bp, SARS Virus
ttgtcgtgtgagcacattacagttg

SEQ ID NO: 70386 - DNA, 25 bp, SARS Virus
tgtcgtgtgagaccattacagttgg

SEQ ID NO: 70387 - DNA, 25 bp, SARS Virus
gtcgtgtgagaacattacagttggc

SEQ ID NO: 70388 - DNA, 25 bp, SARS Virus
tcgtgtgagaaccttacagttggcg

SEQ ID NO: 70389 - DNA, 25 bp, SARS Virus
cgtgtgagaacactacagttggcga

SEQ ID NO: 70390 - DNA, 25 bp, SARS Virus
gtgtgagaacatcacagttggcgaa

SEQ ID NO: 70391 - DNA, 25 bp, SARS Virus
tgtgagaacattccagttggcgaag

SEQ ID NO: 70392 - DNA, 25 bp, SARS Virus
gtgagaacattacagttggcgaagt

SEQ ID NO: 70393 - DNA, 25 bp, SARS Virus
tgagaacattaccgttggcgaagtt

SEQ ID NO: 70394 - DNA, 25 bp, SARS Virus
gagaacattacacttggcgaagtta

SEQ ID NO: 70395 - DNA, 25 bp, SARS Virus
agaacattacagctggcgaagttac

SEQ ID NO: 70396 - DNA, 25 bp, SARS Virus
gaacattacagtcggcgaagttaca

SEQ ID NO: 70397 - DNA, 25 bp, SARS Virus
aacattacagttcgcgaagttacac

SEQ ID NO: 70398 - DNA, 25 bp, SARS Virus
acattacagttgccgaagttacacc

SEQ ID NO: 70399 - DNA, 25 bp, SARS Virus
cattacagttggcgaagttacaccg

SEQ ID NO: 70400 - DNA, 25 bp, SARS Virus
attacagttggccaagttacaccga

SEQ ID NO: 70401 - DNA, 25 bp, SARS Virus
ttgtgatgcagagataaccgctagg

SEQ ID NO: 70402 - DNA, 25 bp, SARS Virus
tgtgatgcagatgtaaccgctagga

SEQ ID NO: 70403 - DNA, 25 bp, SARS Virus
gtgatgcagatagaaccgctaggac

SEQ ID NO: 70404 - DNA, 25 bp, SARS Virus
tgatgcagatatgaccgctaggacg

SEQ ID NO: 70405 - DNA, 25 bp, SARS Virus
gatgcagatatagccgctaggacga

SEQ ID NO: 70406 - DNA, 25 bp, SARS Virus
atgcagatataagcgctaggacgag

SEQ ID NO: 70407 - DNA, 25 bp, SARS Virus
tgcagatataacggctaggacgagt

SEQ ID NO: 70408 - DNA, 25 bp, SARS Virus
gcagatataaccgctaggacgagtt

SEQ ID NO: 70409 - DNA, 25 bp, SARS Virus
cagatataaccggtaggacgagtta

SEQ ID NO: 70410 - DNA, 25 bp, SARS Virus
agatataaccgcgaggacgagttaa

SEQ ID NO: 70411 - DNA, 25 bp, SARS Virus
gatataaccgctgggacgagttaat

SEQ ID NO: 70412 - DNA, 25 bp, SARS Virus
atataaccgctaggacgagttaatg

SEQ ID NO: 70413 - DNA, 25 bp, SARS Virus
tataaccgctaggacgagttaatgg

SEQ ID NO: 70414 - DNA, 25 bp, SARS Virus
ataaccgctagggcgagttaatggt

SEQ ID NO: 70415 - DNA, 25 bp, SARS Virus
taaccgctaggaggagttaatggtc

SEQ ID NO: 70416 - DNA, 25 bp, SARS Virus
aaccgctaggacgagttaatggtcg

SEQ ID NO: 70417 - DNA, 25 bp, SARS Virus
accgctaggacgggttaatggtcgg

SEQ ID NO: 70418 - DNA, 25 bp, SARS Virus
ccgctaggacgagttaatggtcggg

SEQ ID NO: 70419 - DNA, 25 bp, SARS Virus
cgctaggacgaggtaatggtcgggg

SEQ ID NO: 70420 - DNA, 25 bp, SARS Virus
gctaggacgagtgaatggtcggggg

SEQ ID NO: 70421 - DNA, 25 bp, SARS Virus
ctaggacgagttgatggtcgggggg

SEQ ID NO: 70422 - DNA, 25 bp, SARS Virus
taggacgagttagtggtcggggggc

SEQ ID NO: 70423 - DNA, 25 bp, SARS Virus
aggacgagttaagggtcggggggcg

SEQ ID NO: 70424 - DNA, 25 bp, SARS Virus
ggacgagttaatggtcggggggcgt

SEQ ID NO: 70425 - DNA, 25 bp, SARS Virus
gacgagttaatggtcggggggcgtg

SEQ ID NO: 70426 - DNA, 25 bp, SARS Virus
acgagttaatgggcggggggcgtgt

SEQ ID NO: 70427 - DNA, 25 bp, SARS Virus
cgagttaatggtgggggggcgtgta

SEQ ID NO: 70428 - DNA, 25 bp, SARS Virus
gagttaatggtcggggggcgtgtaa

SEQ ID NO: 70429 - DNA, 25 bp, SARS Virus
agttaatggtcggggggcgtgtaac

SEQ ID NO: 70430 - DNA, 25 bp, SARS Virus
gttaatggtcggggggcgtgtaacg

SEQ ID NO: 70431 - DNA, 25 bp, SARS Virus
ttaatggtcggggggcgtgtaacga

SEQ ID NO: 70432 - DNA, 25 bp, SARS Virus
taatggtcggggggcgtgtaacgac

SEQ ID NO: 70433 - DNA, 25 bp, SARS Virus
aatggtcggggggcgtgtaacgact

SEQ ID NO: 70434 - DNA, 25 bp, SARS Virus
atggtcggggggggtgtaacgactg

SEQ ID NO: 70435 - DNA, 25 bp, SARS Virus
tggtcggggggcgtgtaacgactga

SEQ ID NO: 70436 - DNA, 25 bp, SARS Virus
ggtcggggggcgggtaacgactgat

SEQ ID NO: 70437 - DNA, 25 bp, SARS Virus
gtcggggggcgtgtaacgactgatt

SEQ ID NO: 70438 - DNA, 25 bp, SARS Virus
tcggggggcgtggaacgactgattt

SEQ ID NO: 70439 - DNA, 25 bp, SARS Virus
cggggggcgtgtgacgactgatttc

SEQ ID NO: 70440 - DNA, 25 bp, SARS Virus
ggggggcgtgtagcgactgatttcc

SEQ ID NO: 70441 - DNA, 25 bp, SARS Virus
gggggcgtgtaaggactgatttccg

SEQ ID NO: 70442 - DNA, 25 bp, SARS Virus
ggggcgtgtaacgactgatttccgt

SEQ ID NO: 70443 - DNA, 25 bp, SARS Virus
gggcgtgtaacggctgatttccgtg

SEQ ID NO: 70444 - DNA, 25 bp, SARS Virus
ggcgtgtaacgagtgatttccgtgt

SEQ ID NO: 70445 - DNA, 25 bp, SARS Virus
gcgtgtaacgacggatttccgtgtg

SEQ ID NO: 70446 - DNA, 25 bp, SARS Virus
cgtgtaacgactgatttccgtgtga

SEQ ID NO: 70447 - DNA, 25 bp, SARS Virus
gtgtaacgactggtttccgtgtgat

SEQ ID NO: 70448 - DNA, 25 bp, SARS Virus
tgtaacgactgagttccgtgtgatc

SEQ ID NO: 70449 - DNA, 25 bp, SARS Virus
gtaacgactgatgtccgtgtgatct

SEQ ID NO: 70450 - DNA, 25 bp, SARS Virus
taacgactgattgccgtgtgatctt

SEQ ID NO: 70451 - DNA, 25 bp, SARS Virus
aacgactgatttgcgtgtgatcttg

SEQ ID NO: 70452 - DNA, 25 bp, SARS Virus
acgactgatttcggtgtgatcttgg

SEQ ID NO: 70453 - DNA, 25 bp, SARS Virus
cgactgatttccgtgtgatcttggt

SEQ ID NO: 70454 - DNA, 25 bp, SARS Virus
gactgatttccgggtgatcttggtc

SEQ ID NO: 70455 - DNA, 25 bp, SARS Virus
actgatttccgtgtgatcttggtct

SEQ ID NO: 70456 - DNA, 25 bp, SARS Virus
ctgatttccgtgggatcttggtctt

SEQ ID NO: 70457 - DNA, 25 bp, SARS Virus
tgatttccgtgtgatcttggtctta

SEQ ID NO: 70458 - DNA, 25 bp, SARS Virus
gatttccgtgtggtcttggtcttat

SEQ ID NO: 70459 - DNA, 25 bp, SARS Virus
atttccgtgtgagcttggtcttata

SEQ ID NO: 70460 - DNA, 25 bp, SARS Virus
tttccgtgtgatgttggtcttataa

SEQ ID NO: 70461 - DNA, 25 bp, SARS Virus
ttccgtgtgatcgtggtcttataaa

SEQ ID NO: 70462 - DNA, 25 bp, SARS Virus
tccgtgtgatctgggtcttataaaa

SEQ ID NO: 70463 - DNA, 25 bp, SARS Virus
ccgtgtgatcttggtcttataaaat

SEQ ID NO: 70464 - DNA, 25 bp, SARS Virus
cgtgtgatcttggtcttataaaatt

SEQ ID NO: 70465 - DNA, 25 bp, SARS Virus
gtgtgatcttgggcttataaaatta

SEQ ID NO: 70466 - DNA, 25 bp, SARS Virus
tgtgatcttggtgttataaaattaa

SEQ ID NO: 70467 - DNA, 25 bp, SARS Virus
gtgatcttggtcgtataaaattaag

SEQ ID NO: 70468 - DNA, 25 bp, SARS Virus
tgatcttggtctgataaaattaagt

SEQ ID NO: 70469 - DNA, 25 bp, SARS Virus
gatcttggtcttgtaaaattaagtc

SEQ ID NO: 70470 - DNA, 25 bp, SARS Virus
atcttggtcttagaaaattaagtca

SEQ ID NO: 70471 - DNA, 25 bp, SARS Virus
tcttggtcttatgaaattaagtcac

SEQ ID NO: 70472 - DNA, 25 bp, SARS Virus
cttggtcttatagaattaagtcaca

SEQ ID NO: 70473 - DNA, 25 bp, SARS Virus
ttggtcttataagattaagtcacac

SEQ ID NO: 70474 - DNA, 25 bp, SARS Virus
tggtcttataaagttaagtcacacg

SEQ ID NO: 70475 - DNA, 25 bp, SARS Virus
ggtcttataaaagtaagtcacacgt

SEQ ID NO: 70476 - DNA, 25 bp, SARS Virus
gtcttataaaatgaagtcacacgtc

SEQ ID NO: 70477 - DNA, 25 bp, SARS Virus
tcttataaaattgagtcacacgtct

SEQ ID NO: 70478 - DNA, 25 bp, SARS Virus
cttataaaattaggtcacacgtctg

SEQ ID NO: 70479 - DNA, 25 bp, SARS Virus
ttataaaattaagtcacacgtctga

SEQ ID NO: 70480 - DNA, 25 bp, SARS Virus
tataaaattaaggcacacgtctgaa

SEQ ID NO: 70481 - DNA, 25 bp, SARS Virus
ataaaattaagtgacacgtctgaat

SEQ ID NO: 70482 - DNA, 25 bp, SARS Virus
taaaattaagtcgcacgtctgaata

SEQ ID NO: 70483 - DNA, 25 bp, SARS Virus
aaaattaagtcagacgtctgaatac

SEQ ID NO: 70484 - DNA, 25 bp, SARS Virus
aaattaagtcacgcgtctgaatact

SEQ ID NO: 70485 - DNA, 25 bp, SARS Virus
aattaagtcacaggtctgaatactt

SEQ ID NO: 70486 - DNA, 25 bp, SARS Virus
attaagtcacacgtctgaatacttt

SEQ ID NO: 70487 - DNA, 25 bp, SARS Virus
ttaagtcacacggctgaatactttt

SEQ ID NO: 70488 - DNA, 25 bp, SARS Virus
taagtcacacgtgtgaatacttttg

SEQ ID NO: 70489 - DNA, 25 bp, SARS Virus
aagtcacacgtcggaatacttttgt

SEQ ID NO: 70490 - DNA, 25 bp, SARS Virus
agtcacacgtctgaatacttttgtt

SEQ ID NO: 70491 - DNA, 25 bp, SARS Virus
gtcacacgtctggatacttttgtta

SEQ ID NO: 70492 - DNA, 25 bp, SARS Virus
tcacacgtctgagtacttttgttat

SEQ ID NO: 70493 - DNA, 25 bp, SARS Virus
cacacgtctgaagacttttgttatc

SEQ ID NO: 70494 - DNA, 25 bp, SARS Virus
acacgtctgaatgcttttgttatcc

SEQ ID NO: 70495 - DNA, 25 bp, SARS Virus
cacgtctgaatagttttgttatcca

SEQ ID NO: 70496 - DNA, 25 bp, SARS Virus
acgtctgaatacgtttgttatccag

SEQ ID NO: 70497 - DNA, 25 bp, SARS Virus
cgtctgaatactgttgttatccagg

SEQ ID NO: 70498 - DNA, 25 bp, SARS Virus
gtctgaatacttgtgttatccaggt

SEQ ID NO: 70499 - DNA, 25 bp, SARS Virus
tctgaatactttggttatccaggtc

SEQ ID NO: 70500 - DNA, 25 bp, SARS Virus
ctgaatacttttgttatccaggtct

SEQ ID NO: 70501 - DNA, 25 bp, SARS Virus
tgaatacttttggtatccaggtctg

SEQ ID NO: 70502 - DNA, 25 bp, SARS Virus
gaatacttttgtgatccaggtctgt

SEQ ID NO: 70503 - DNA, 25 bp, SARS Virus
aatacttttgttgtccaggtctgta

SEQ ID NO: 70504 - DNA, 25 bp, SARS Virus
atacttttgttagccaggtctgtac

SEQ ID NO: 70505 - DNA, 25 bp, SARS Virus
tacttttgttatgcaggtctgtaca

SEQ ID NO: 70506 - DNA, 25 bp, SARS Virus
acttttgttatcgaggtctgtacaa

SEQ ID NO: 70507 - DNA, 25 bp, SARS Virus
cttttgttatccgggtctgtacaag

SEQ ID NO: 70508 - DNA, 25 bp, SARS Virus
ttttgttatccaggtctgtacaagg

SEQ ID NO: 70509 - DNA, 25 bp, SARS Virus
tttgttatccaggtctgtacaagga

SEQ ID NO: 70510 - DNA, 25 bp, SARS Virus
ttgttatccagggctgtacaaggaa

SEQ ID NO: 70511 - DNA, 25 bp, SARS Virus
tgttatccaggtgtgtacaaggaac

SEQ ID NO: 70512 - DNA, 25 bp, SARS Virus
gttatccaggtcggtacaaggaacc

SEQ ID NO: 70513 - DNA, 25 bp, SARS Virus
ttatccaggtctgtacaaggaacct

SEQ ID NO: 70514 - DNA, 25 bp, SARS Virus
tatccaggtctggacaaggaacctt

SEQ ID NO: 70515 - DNA, 25 bp, SARS Virus
atccaggtctgtgcaaggaaccttg

SEQ ID NO: 70516 - DNA, 25 bp, SARS Virus
tccaggtctgtagaaggaaccttga

SEQ ID NO: 70517 - DNA, 25 bp, SARS Virus
ccaggtctgtacgaggaaccttgaa

SEQ ID NO: 70518 - DNA, 25 bp, SARS Virus
caggtctgtacagggaaccttgaac

SEQ ID NO: 70519 - DNA, 25 bp, SARS Virus
aggtctgtacaaggaaccttgaaca

SEQ ID NO: 70520 - DNA, 25 bp, SARS Virus
ggtctgtacaaggaaccttgaacag

SEQ ID NO: 70521 - DNA, 25 bp, SARS Virus
gtctgtacaagggaccttgaacagc

SEQ ID NO: 70522 - DNA, 25 bp, SARS Virus
tctgtacaaggagccttgaacagcg

SEQ ID NO: 70523 - DNA, 25 bp, SARS Virus
ctgtacaaggaagcttgaacagcgg

SEQ ID NO: 70524 - DNA, 25 bp, SARS Virus
tgtacaaggaacgttgaacagcggc

SEQ ID NO: 70525 - DNA, 25 bp, SARS Virus
gtacaaggaaccgtgaacagcggca

SEQ ID NO: 70526 - DNA, 25 bp, SARS Virus
tacaaggaacctggaacagcggcaa

SEQ ID NO: 70527 - DNA, 25 bp, SARS Virus
acaaggaaccttgaacagcggcaac

SEQ ID NO: 70528 - DNA, 25 bp, SARS Virus
caaggaaccttggacagcggcaaca

SEQ ID NO: 70529 - DNA, 25 bp, SARS Virus
aaggaaccttgagcagcggcaacag

SEQ ID NO: 70530 - DNA, 25 bp, SARS Virus
aggaaccttgaagagcggcaacagg

SEQ ID NO: 70531 - DNA, 25 bp, SARS Virus
ggaaccttgaacggcggcaacagga

SEQ ID NO: 70532 - DNA, 25 bp, SARS Virus
gaaccttgaacagcggcaacaggac

SEQ ID NO: 70533 - DNA, 25 bp, SARS Virus
aaccttgaacaggggcaacaggacg

SEQ ID NO: 70534 - DNA, 25 bp, SARS Virus
accttgaacagcggcaacaggacga

SEQ ID NO: 70535 - DNA, 25 bp, SARS Virus
ccttgaacagcggcaacaggacgac

SEQ ID NO: 70536 - DNA, 25 bp, SARS Virus
cttgaacagcgggaacaggacgact

SEQ ID NO: 70537 - DNA, 25 bp, SARS Virus
ttgaacagcggcgacaggacgactt

SEQ ID NO: 70538 - DNA, 25 bp, SARS Virus
tgaacagcggcagcaggacgacttt

SEQ ID NO: 70539 - DNA, 25 bp, SARS Virus
gaacagcggcaagaggacgacttta

SEQ ID NO: 70540 - DNA, 25 bp, SARS Virus
aacagcggcaacgggacgactttaa

SEQ ID NO: 70541 - DNA, 25 bp, SARS Virus
acagcggcaacaggacgactttaac

SEQ ID NO: 70542 - DNA, 25 bp, SARS Virus
cagcggcaacaggacgactttaaca

SEQ ID NO: 70543 - DNA, 25 bp, SARS Virus
agcggcaacagggcgactttaacaa

SEQ ID NO: 70544 - DNA, 25 bp, SARS Virus
gcggcaacaggaggactttaacaac

SEQ ID NO: 70545 - DNA, 25 bp, SARS Virus
cggcaacaggacgactttaacaact

SEQ ID NO: 70546 - DNA, 25 bp, SARS Virus
ggcaacaggacggctttaacaactg

SEQ ID NO: 70547 - DNA, 25 bp, SARS Virus
gcaacaggacgagtttaacaactgt

SEQ ID NO: 70548 - DNA, 25 bp, SARS Virus
caacaggacgacgttaacaactgtg

SEQ ID NO: 70549 - DNA, 25 bp, SARS Virus
aacaggacgactgtaacaactgtga

SEQ ID NO: 70550 - DNA, 25 bp, SARS Virus
acaggacgacttgaacaactgtgac

SEQ ID NO: 70551 - DNA, 25 bp, SARS Virus
caggacgactttgacaactgtgaca

SEQ ID NO: 70552 - DNA, 25 bp, SARS Virus
aggacgactttagcaactgtgacac

SEQ ID NO: 70553 - DNA, 25 bp, SARS Virus
ggacgactttaagaactgtgacact

SEQ ID NO: 70554 - DNA, 25 bp, SARS Virus
gacgactttaacgactgtgacactc

SEQ ID NO: 70555 - DNA, 25 bp, SARS Virus
acgactttaacagctgtgacactca

SEQ ID NO: 70556 - DNA, 25 bp, SARS Virus
cgactttaacaagtgtgacactcac

SEQ ID NO: 70557 - DNA, 25 bp, SARS Virus
gactttaacaacggtgacactcacg

SEQ ID NO: 70558 - DNA, 25 bp, SARS Virus
actttaacaactgtgacactcacga

SEQ ID NO: 70559 - DNA, 25 bp, SARS Virus
ctttaacaactgggacactcacgaa

SEQ ID NO: 70560 - DNA, 25 bp, SARS Virus
tttaacaactgtgacactcacgaaa

SEQ ID NO: 70561 - DNA, 25 bp, SARS Virus
ttaacaactgtggcactcacgaaat

SEQ ID NO: 70562 - DNA, 25 bp, SARS Virus
taacaactgtgagactcacgaaatc

SEQ ID NO: 70563 - DNA, 25 bp, SARS Virus
aacaactgtgacgctcacgaaatca

SEQ ID NO: 70564 - DNA, 25 bp, SARS Virus
acaactgtgacagtcacgaaatcaa

SEQ ID NO: 70565 - DNA, 25 bp, SARS Virus
caactgtgacacgcacgaaatcaaa

SEQ ID NO: 70566 - DNA, 25 bp, SARS Virus
aactgtgacactgacgaaatcaaat

SEQ ID NO: 70567 - DNA, 25 bp, SARS Virus
actgtgacactcgcgaaatcaaata

SEQ ID NO: 70568 - DNA, 25 bp, SARS Virus
ctgtgacactcaggaaatcaaatac

SEQ ID NO: 70569 - DNA, 25 bp, SARS Virus
tgtgacactcacgaaatcaaatact

SEQ ID NO: 70570 - DNA, 25 bp, SARS Virus
gtgacactcacggaatcaaatactg

SEQ ID NO: 70571 - DNA, 25 bp, SARS Virus
tgacactcacgagatcaaatactgt

SEQ ID NO: 70572 - DNA, 25 bp, SARS Virus
gacactcacgaagtcaaatactgtt

SEQ ID NO: 70573 - DNA, 25 bp, SARS Virus
acactcacgaaagcaaatactgtta

SEQ ID NO: 70574 - DNA, 25 bp, SARS Virus
cactcacgaaatgaaatactgttat

SEQ ID NO: 70575 - DNA, 25 bp, SARS Virus
actcacgaaatcgaatactgttatt

SEQ ID NO: 70576 - DNA, 25 bp, SARS Virus
ctcacgaaatcagatactgttattc

SEQ ID NO: 70577 - DNA, 25 bp, SARS Virus
tcacgaaatcaagtactgttattcg

SEQ ID NO: 70578 - DNA, 25 bp, SARS Virus
cacgaaatcaaagactgttattcga

SEQ ID NO: 70579 - DNA, 25 bp, SARS Virus
acgaaatcaaatgctgttattcgat

SEQ ID NO: 70580 - DNA, 25 bp, SARS Virus
cgaaatcaaatagtgttattcgatt

SEQ ID NO: 70581 - DNA, 25 bp, SARS Virus
gaaatcaaatacggttattcgattt

SEQ ID NO: 70582 - DNA, 25 bp, SARS Virus
aaatcaaatactgttattcgatttt

SEQ ID NO: 70583 - DNA, 25 bp, SARS Virus
aatcaaatactggtattcgattttc

SEQ ID NO: 70584 - DNA, 25 bp, SARS Virus
atcaaatactgtgattcgattttcg

SEQ ID NO: 70585 - DNA, 25 bp, SARS Virus
tcaaatactgttgttcgattttcgt

SEQ ID NO: 70586 - DNA, 25 bp, SARS Virus
caaatactgttagtcgattttcgtg

SEQ ID NO: 70587 - DNA, 25 bp, SARS Virus
aaatactgttatgcgattttcgtgt

SEQ ID NO: 70588 - DNA, 25 bp, SARS Virus
aatactgttattggattttcgtgtg

SEQ ID NO: 70589 - DNA, 25 bp, SARS Virus
atactgttattcgattttcgtgtgt

SEQ ID NO: 70590 - DNA, 25 bp, SARS Virus
tactgttattcggttttcgtgtgtt

SEQ ID NO: 70591 - DNA, 25 bp, SARS Virus
actgttattcgagtttcgtgtgttc

SEQ ID NO: 70592 - DNA, 25 bp, SARS Virus
ctgttattcgatgttcgtgtgttcc

SEQ ID NO: 70593 - DNA, 25 bp, SARS Virus
tgttattcgattgtcgtgtgttcct

SEQ ID NO: 70594 - DNA, 25 bp, SARS Virus
gttattcgatttgcgtgtgttccta

SEQ ID NO: 70595 - DNA, 25 bp, SARS Virus
ttattcgattttggtgtgttcctat

SEQ ID NO: 70596 - DNA, 25 bp, SARS Virus
tattcgattttcgtgtgttcctatt

SEQ ID NO: 70597 - DNA, 25 bp, SARS Virus
attcgattttcgggtgttcctattc

SEQ ID NO: 70598 - DNA, 25 bp, SARS Virus
ttcgattttcgtgtgttcctattca

SEQ ID NO: 70599 - DNA, 25 bp, SARS Virus
tcgattttcgtgggttcctattcag

SEQ ID NO: 70600 - DNA, 25 bp, SARS Virus
cgattttcgtgtgttcctattcagt

SEQ ID NO: 70601 - DNA, 25 bp, SARS Virus
gattttcgtgtggtcctattcagtc

SEQ ID NO: 70602 - DNA, 25 bp, SARS Virus
attttcgtgtgtgcctattcagtcg

SEQ ID NO: 70603 - DNA, 25 bp, SARS Virus
ttttcgtgtgttgctattcagtcga

SEQ ID NO: 70604 - DNA, 25 bp, SARS Virus
tttcgtgtgttcgtattcagtcgag

SEQ ID NO: 70605 - DNA, 25 bp, SARS Virus
ttcgtgtgttccgattcagtcgagt

SEQ ID NO: 70606 - DNA, 25 bp, SARS Virus
tcgtgtgttcctgttcagtcgagtt

SEQ ID NO: 70607 - DNA, 25 bp, SARS Virus
cgtgtgttcctagtcagtcgagtta

SEQ ID NO: 70608 - DNA, 25 bp, SARS Virus
gtgtgttcctatgcagtcgagttac

SEQ ID NO: 70609 - DNA, 25 bp, SARS Virus
tgtgttcctattgagtcgagttacg

SEQ ID NO: 70610 - DNA, 25 bp, SARS Virus
gtgttcctattcggtcgagttacga

SEQ ID NO: 70611 - DNA, 25 bp, SARS Virus
tgttcctattcagtcgagttacgaa

SEQ ID NO: 70612 - DNA, 25 bp, SARS Virus
gttcctattcaggcgagttacgaag

SEQ ID NO: 70613 - DNA, 25 bp, SARS Virus
ttcctattcagtggagttacgaagt

SEQ ID NO: 70614 - DNA, 25 bp, SARS Virus
tcctattcagtcgagttacgaagtt

SEQ ID NO: 70615 - DNA, 25 bp, SARS Virus
cctattcagtcgggttacgaagttt

SEQ ID NO: 70616 - DNA, 25 bp, SARS Virus
ctattcagtcgagttacgaagtttt

SEQ ID NO: 70617 - DNA, 25 bp, SARS Virus
tattcagtcgaggtacgaagtttta

SEQ ID NO: 70618 - DNA, 25 bp, SARS Virus
attcagtcgagtgacgaagttttac

SEQ ID NO: 70619 - DNA, 25 bp, SARS Virus
ttcagtcgagttgcgaagttttaca

SEQ ID NO: 70620 - DNA, 25 bp, SARS Virus
tcagtcgagttaggaagttttacaa

SEQ ID NO: 70621 - DNA, 25 bp, SARS Virus
cagtcgagttacgaagttttacaag

SEQ ID NO: 70622 - DNA, 25 bp, SARS Virus
agtcgagttacggagttttacaaga

SEQ ID NO: 70623 - DNA, 25 bp, SARS Virus
gtcgagttacgaggttttacaagat

SEQ ID NO: 70624 - DNA, 25 bp, SARS Virus
tcgagttacgaagttttacaagatg

SEQ ID NO: 70625 - DNA, 25 bp, SARS Virus
cgagttacgaaggtttacaagatgt

SEQ ID NO: 70626 - DNA, 25 bp, SARS Virus
gagttacgaagtgttacaagatgtt

SEQ ID NO: 70627 - DNA, 25 bp, SARS Virus
agttacgaagttgtacaagatgttt

SEQ ID NO: 70628 - DNA, 25 bp, SARS Virus
gttacgaagtttgacaagatgtttc

SEQ ID NO: 70629 - DNA, 25 bp, SARS Virus
ttacgaagttttgcaagatgtttcc

SEQ ID NO: 70630 - DNA, 25 bp, SARS Virus
tacgaagttttagaagatgtttcca

SEQ ID NO: 70631 - DNA, 25 bp, SARS Virus
acgaagttttacgagatgtttccac

SEQ ID NO: 70632 - DNA, 25 bp, SARS Virus
cgaagttttacaggatgtttccaca

SEQ ID NO: 70633 - DNA, 25 bp, SARS Virus
gaagttttacaagatgtttccacaa

SEQ ID NO: 70634 - DNA, 25 bp, SARS Virus
aagttttacaaggtgtttccacaat

SEQ ID NO: 70635 - DNA, 25 bp, SARS Virus
agttttacaagaggtttccacaata

SEQ ID NO: 70636 - DNA, 25 bp, SARS Virus
gttttacaagatgtttccacaataa

SEQ ID NO: 70637 - DNA, 25 bp, SARS Virus
ttttacaagatggttccacaataat

SEQ ID NO: 70638 - DNA, 25 bp, SARS Virus
tttacaagatgtgtccacaataatg

SEQ ID NO: 70639 - DNA, 25 bp, SARS Virus
ttacaagatgttgccacaataatgt

SEQ ID NO: 70640 - DNA, 25 bp, SARS Virus
tacaagatgtttgcacaataatgtg

SEQ ID NO: 70641 - DNA, 25 bp, SARS Virus
acaagatgtttcgacaataatgtgt

SEQ ID NO: 70642 - DNA, 25 bp, SARS Virus
caagatgtttccgcaataatgtgta

SEQ ID NO: 70643 - DNA, 25 bp, SARS Virus
aagatgtttccagaataatgtgtac

SEQ ID NO: 70644 - DNA, 25 bp, SARS Virus
agatgtttccacgataatgtgtact

SEQ ID NO: 70645 - DNA, 25 bp, SARS Virus
gatgtttccacagtaatgtgtacta

SEQ ID NO: 70646 - DNA, 25 bp, SARS Virus
atgtttccacaagaatgtgtactac

SEQ ID NO: 70647 - DNA, 25 bp, SARS Virus
tgtttccacaatgatgtgtactaca

SEQ ID NO: 70648 - DNA, 25 bp, SARS Virus
gtttccacaatagtgtgtactacaa

SEQ ID NO: 70649 - DNA, 25 bp, SARS Virus
tttccacaataaggtgtactacaaa

SEQ ID NO: 70650 - DNA, 25 bp, SARS Virus
ttccacaataatgtgtactacaaag

SEQ ID NO: 70651 - DNA, 25 bp, SARS Virus
tccacaataatgggtactacaaagt

SEQ ID NO: 70652 - DNA, 25 bp, SARS Virus
ccacaataatgtgtactacaaagta

SEQ ID NO: 70653 - DNA, 25 bp, SARS Virus
cacaataatgtggactacaaagtag

SEQ ID NO: 70654 - DNA, 25 bp, SARS Virus
acaataatgtgtgctacaaagtaga

SEQ ID NO: 70655 - DNA, 25 bp, SARS Virus
caataatgtgtagtacaaagtagac

SEQ ID NO: 70656 - DNA, 25 bp, SARS Virus
aataatgtgtacgacaaagtagacg

SEQ ID NO: 70657 - DNA, 25 bp, SARS Virus
ataatgtgtactgcaaagtagacgt

SEQ ID NO: 70658 - DNA, 25 bp, SARS Virus
taatgtgtactagaaagtagacgtt

SEQ ID NO: 70659 - DNA, 25 bp, SARS Virus
aatgtgtactacgaagtagacgtta

SEQ ID NO: 70660 - DNA, 25 bp, SARS Virus
atgtgtactacagagtagacgttag

SEQ ID NO: 70661 - DNA, 25 bp, SARS Virus
tgtgtactacaaggtagacgttagt

SEQ ID NO: 70662 - DNA, 25 bp, SARS Virus
gtgtactacaaagtagacgttagtt

SEQ ID NO: 70663 - DNA, 25 bp, SARS Virus
tgtactacaaaggagacgttagttg

SEQ ID NO: 70664 - DNA, 25 bp, SARS Virus
gtactacaaagtggacgttagttgt

SEQ ID NO: 70665 - DNA, 25 bp, SARS Virus
tactacaaagtagacgttagttgtc

SEQ ID NO: 70666 - DNA, 25 bp, SARS Virus
actacaaagtaggcgttagttgtct

SEQ ID NO: 70667 - DNA, 25 bp, SARS Virus
ctacaaagtagaggttagttgtctg

SEQ ID NO: 70668 - DNA, 25 bp, SARS Virus
tacaaagtagacgttagttgtctgg

SEQ ID NO: 70669 - DNA, 25 bp, SARS Virus
acaaagtagacggtagttgtctgga

SEQ ID NO: 70670 - DNA, 25 bp, SARS Virus
caaagtagacgtgagttgtctggag

SEQ ID NO: 70671 - DNA, 25 bp, SARS Virus
aaagtagacgttggttgtctggagt

SEQ ID NO: 70672 - DNA, 25 bp, SARS Virus
aagtagacgttagttgtctggagtt

SEQ ID NO: 70673 - DNA, 25 bp, SARS Virus
agtagacgttaggtgtctggagttt

SEQ ID NO: 70674 - DNA, 25 bp, SARS Virus
gtagacgttagtggtctggagttta

SEQ ID NO: 70675 - DNA, 25 bp, SARS Virus
tagacgttagttgtctggagtttat

SEQ ID NO: 70676 - DNA, 25 bp, SARS Virus
agacgttagttggctggagtttatc

SEQ ID NO: 70677 - DNA, 25 bp, SARS Virus
gacgttagttgtgtggagtttatcc

SEQ ID NO: 70678 - DNA, 25 bp, SARS Virus
acgttagttgtcgggagtttatccg

SEQ ID NO: 70679 - DNA, 25 bp, SARS Virus
cgttagttgtctggagtttatccgc

SEQ ID NO: 70680 - DNA, 25 bp, SARS Virus
gttagttgtctggagtttatccgca

SEQ ID NO: 70681 - DNA, 25 bp, SARS Virus
ttagttgtctggggtttatccgcaa

SEQ ID NO: 70682 - DNA, 25 bp, SARS Virus
tagttgtctggagtttatccgcaac

SEQ ID NO: 70683 - DNA, 25 bp, SARS Virus
agttgtctggaggttatccgcaaca

SEQ ID NO: 70684 - DNA, 25 bp, SARS Virus
gttgtctggagtgtatccgcaacat

SEQ ID NO: 70685 - DNA, 25 bp, SARS Virus
ttgtctggagttgatccgcaacatt

SEQ ID NO: 70686 - DNA, 25 bp, SARS Virus
tgtctggagtttgtccgcaacattc

SEQ ID NO: 70687 - DNA, 25 bp, SARS Virus
gtctggagtttagccgcaacattct

SEQ ID NO: 70688 - DNA, 25 bp, SARS Virus
tctggagtttatgcgcaacattctc

SEQ ID NO: 70689 - DNA, 25 bp, SARS Virus
ctggagtttatcggcaacattctct

SEQ ID NO: 70690 - DNA, 25 bp, SARS Virus
tggagtttatccgcaacattctctt

SEQ ID NO: 70691 - DNA, 25 bp, SARS Virus
ggagtttatccggaacattctctta

SEQ ID NO: 70692 - DNA, 25 bp, SARS Virus
gagtttatccgcgacattctcttaa

SEQ ID NO: 70693 - DNA, 25 bp, SARS Virus
agtttatccgcagcattctcttaaa

SEQ ID NO: 70694 - DNA, 25 bp, SARS Virus
gtttatccgcaagattctcttaaag

SEQ ID NO: 70695 - DNA, 25 bp, SARS Virus
tttatccgcaacgttctcttaaaga

SEQ ID NO: 70696 - DNA, 25 bp, SARS Virus
ttatccgcaacagtctcttaaagaa

SEQ ID NO: 70697 - DNA, 25 bp, SARS Virus
tatccgcaacatgctcttaaagaat

SEQ ID NO: 70698 - DNA, 25 bp, SARS Virus
atccgcaacattgtcttaaagaatg

SEQ ID NO: 70699 - DNA, 25 bp, SARS Virus
tccgcaacattcgcttaaagaatgt

SEQ ID NO: 70700 - DNA, 25 bp, SARS Virus
ccgcaacattctgttaaagaatgtg

SEQ ID NO: 70701 - DNA, 25 bp, SARS Virus
cgcaacattctcgtaaagaatgtgc

SEQ ID NO: 70702 - DNA, 25 bp, SARS Virus
gcaacattctctgaaagaatgtgcg

SEQ ID NO: 70703 - DNA, 25 bp, SARS Virus
caacattctcttgaagaatgtgcgt

SEQ ID NO: 70704 - DNA, 25 bp, SARS Virus
aacattctcttagagaatgtgcgtt

SEQ ID NO: 70705 - DNA, 25 bp, SARS Virus
acattctcttaaggaatgtgcgtta

SEQ ID NO: 70706 - DNA, 25 bp, SARS Virus
cattctcttaaagaatgtgcgttag

SEQ ID NO: 70707 - DNA, 25 bp, SARS Virus
attctcttaaaggatgtgcgttagg

SEQ ID NO: 70708 - DNA, 25 bp, SARS Virus
ttctcttaaagagtgtgcgttagga

SEQ ID NO: 70709 - DNA, 25 bp, SARS Virus
tctcttaaagaaggtgcgttaggac

SEQ ID NO: 70710 - DNA, 25 bp, SARS Virus
ctcttaaagaatgtgcgttaggacg

SEQ ID NO: 70711 - DNA, 25 bp, SARS Virus
tcttaaagaatgggcgttaggacga

SEQ ID NO: 70712 - DNA, 25 bp, SARS Virus
cttaaagaatgtgcgttaggacgaa

SEQ ID NO: 70713 - DNA, 25 bp, SARS Virus
ttaaagaatgtgggttaggacgaac

SEQ ID NO: 70714 - DNA, 25 bp, SARS Virus
taaagaatgtgcgttaggacgaacc

SEQ ID NO: 70715 - DNA, 25 bp, SARS Virus
aaagaatgtgcggtaggacgaacct

SEQ ID NO: 70716 - DNA, 25 bp, SARS Virus
aagaatgtgcgtgaggacgaacctc

SEQ ID NO: 70717 - DNA, 25 bp, SARS Virus
agaatgtgcgttgggacgaacctct

SEQ ID NO: 70718 - DNA, 25 bp, SARS Virus
gaatgtgcgttaggacgaacctctt

SEQ ID NO: 70719 - DNA, 25 bp, SARS Virus
aatgtgcgttaggacgaacctcttt

SEQ ID NO: 70720 - DNA, 25 bp, SARS Virus
atgtgcgttagggcgaacctctttt

SEQ ID NO: 70721 - DNA, 25 bp, SARS Virus
tgtgcgttaggaggaacctcttttc

SEQ ID NO: 70722 - DNA, 25 bp, SARS Virus
gtgcgttaggacgaacctcttttcg

SEQ ID NO: 70723 - DNA, 25 bp, SARS Virus
tgcgttaggacggacctcttttcga

SEQ ID NO: 70724 - DNA, 25 bp, SARS Virus
gcgttaggacgagcctcttttcgac

SEQ ID NO: 70725 - DNA, 25 bp, SARS Virus
cgttaggacgaagctcttttcgaca

SEQ ID NO: 70726 - DNA, 25 bp, SARS Virus
gttaggacgaacgtcttttcgacaa

SEQ ID NO: 70727 - DNA, 25 bp, SARS Virus
ttaggacgaaccgcttttcgacaaa

SEQ ID NO: 70728 - DNA, 25 bp, SARS Virus
taggacgaacctgttttcgacaaaa

SEQ ID NO: 70729 - DNA, 25 bp, SARS Virus
aggacgaacctcgtttcgacaaaaa

SEQ ID NO: 70730 - DNA, 25 bp, SARS Virus
ggacgaacctctgttcgacaaaaat

SEQ ID NO: 70731 - DNA, 25 bp, SARS Virus
gacgaacctcttgtcgacaaaaata

SEQ ID NO: 70732 - DNA, 25 bp, SARS Virus
acgaacctctttgcgacaaaaatag

SEQ ID NO: 70733 - DNA, 25 bp, SARS Virus
cgaacctcttttggacaaaaataga

SEQ ID NO: 70734 - DNA, 25 bp, SARS Virus
gaacctcttttcgacaaaaatagag

SEQ ID NO: 70735 - DNA, 25 bp, SARS Virus
aacctcttttcggcaaaaatagagt

SEQ ID NO: 70736 - DNA, 25 bp, SARS Virus
acctcttttcgagaaaaatagagtg

SEQ ID NO: 70737 - DNA, 25 bp, SARS Virus
cctcttttcgacgaaaatagagtgg

SEQ ID NO: 70738 - DNA, 25 bp, SARS Virus
ctcttttcgacagaaatagagtgga

SEQ ID NO: 70739 - DNA, 25 bp, SARS Virus
tcttttcgacaagaatagagtggaa

SEQ ID NO: 70740 - DNA, 25 bp, SARS Virus
cttttcgacaaagatagagtggaat

SEQ ID NO: 70741 - DNA, 25 bp, SARS Virus
ttttcgacaaaagtagagtggaata

SEQ ID NO: 70742 - DNA, 25 bp, SARS Virus
tttcgacaaaaagagagtggaatat

SEQ ID NO: 70743 - DNA, 25 bp, SARS Virus
ttcgacaaaaatggagtggaatatt

SEQ ID NO: 70744 - DNA, 25 bp, SARS Virus
tcgacaaaaatagagtggaatatta

SEQ ID NO: 70745 - DNA, 25 bp, SARS Virus
cgacaaaaatagggtggaatattaa

SEQ ID NO: 70746 - DNA, 25 bp, SARS Virus
gacaaaaatagagtggaatattaag

SEQ ID NO: 70747 - DNA, 25 bp, SARS Virus
acaaaaatagaggggaatattaagt

SEQ ID NO: 70748 - DNA, 25 bp, SARS Virus
caaaaatagagtggaatattaagtg

SEQ ID NO: 70749 - DNA, 25 bp, SARS Virus
aaaaatagagtggaatattaagtgt

SEQ ID NO: 70750 - DNA, 25 bp, SARS Virus
aaaatagagtgggatattaagtgtc

SEQ ID NO: 70751 - DNA, 25 bp, SARS Virus
aaatagagtggagtattaagtgtct

SEQ ID NO: 70752 - DNA, 25 bp, SARS Virus
aatagagtggaagattaagtgtctt

SEQ ID NO: 70753 - DNA, 25 bp, SARS Virus
atagagtggaatgttaagtgtcttg

SEQ ID NO: 70754 - DNA, 25 bp, SARS Virus
tagagtggaatagtaagtgtcttgc

SEQ ID NO: 70755 - DNA, 25 bp, SARS Virus
agagtggaatatgaagtgtcttgcg

SEQ ID NO: 70756 - DNA, 25 bp, SARS Virus
gagtggaatattgagtgtcttgcga

SEQ ID NO: 70757 - DNA, 25 bp, SARS Virus
agtggaatattaggtgtcttgcgac

SEQ ID NO: 70758 - DNA, 25 bp, SARS Virus
gtggaatattaagtgtcttgcgaca

SEQ ID NO: 70759 - DNA, 25 bp, SARS Virus
tggaatattaagggtcttgcgacat

SEQ ID NO: 70760 - DNA, 25 bp, SARS Virus
ggaatattaagtgtcttgcgacatc

SEQ ID NO: 70761 - DNA, 25 bp, SARS Virus
gaatattaagtggcttgcgacatcg

SEQ ID NO: 70762 - DNA, 25 bp, SARS Virus
aatattaagtgtgttgcgacatcga

SEQ ID NO: 70763 - DNA, 25 bp, SARS Virus
atattaagtgtcgtgcgacatcgaa

SEQ ID NO: 70764 - DNA, 25 bp, SARS Virus
tattaagtgtctggcgacatcgaag

SEQ ID NO: 70765 - DNA, 25 bp, SARS Virus
attaagtgtcttgcgacatcgaagt

SEQ ID NO: 70766 - DNA, 25 bp, SARS Virus
ttaagtgtcttgggacatcgaagtt

SEQ ID NO: 70767 - DNA, 25 bp, SARS Virus
taagtgtcttgcgacatcgaagttt

SEQ ID NO: 70768 - DNA, 25 bp, SARS Virus
aagtgtcttgcggcatcgaagtttt

SEQ ID NO: 70769 - DNA, 25 bp, SARS Virus
agtgtcttgcgagatcgaagttttt

SEQ ID NO: 70770 - DNA, 25 bp, SARS Virus
gtgtcttgcgacgtcgaagttttta

SEQ ID NO: 70771 - DNA, 25 bp, SARS Virus
tgtcttgcgacagcgaagtttttag

SEQ ID NO: 70772 - DNA, 25 bp, SARS Virus
gtcttgcgacatggaagtttttaga

SEQ ID NO: 70773 - DNA, 25 bp, SARS Virus
tcttgcgacatcgaagtttttagaa

SEQ ID NO: 70774 - DNA, 25 bp, SARS Virus
cttgcgacatcggagtttttagaat

SEQ ID NO: 70775 - DNA, 25 bp, SARS Virus
ttgcgacatcgaggtttttagaatc

SEQ ID NO: 70776 - DNA, 25 bp, SARS Virus
tgcgacatcgaagtttttagaatcc

SEQ ID NO: 70777 - DNA, 25 bp, SARS Virus
gcgacatcgaaggttttagaatcct

SEQ ID NO: 70778 - DNA, 25 bp, SARS Virus
cgacatcgaagtgtttagaatccta

SEQ ID NO: 70779 - DNA, 25 bp, SARS Virus
gacatcgaagttgttagaatcctaa

SEQ ID NO: 70780 - DNA, 25 bp, SARS Virus
acatcgaagtttgtagaatcctaac

SEQ ID NO: 70781 - DNA, 25 bp, SARS Virus
catcgaagttttgagaatcctaacg

SEQ ID NO: 70782 - DNA, 25 bp, SARS Virus
atcgaagtttttggaatcctaacgg

SEQ ID NO: 70783 - DNA, 25 bp, SARS Virus
tcgaagtttttagaatcctaacgga

SEQ ID NO: 70784 - DNA, 25 bp, SARS Virus
cgaagtttttaggatcctaacggat

SEQ ID NO: 70785 - DNA, 25 bp, SARS Virus
gaagtttttagagtcctaacggatg

SEQ ID NO: 70786 - DNA, 25 bp, SARS Virus
aagtttttagaagcctaacggatgc

SEQ ID NO: 70787 - DNA, 25 bp, SARS Virus
agtttttagaatgctaacggatgcg

SEQ ID NO: 70788 - DNA, 25 bp, SARS Virus
gtttttagaatcgtaacggatgcgt

SEQ ID NO: 70789 - DNA, 25 bp, SARS Virus
tttttagaatccgaacggatgcgtc

SEQ ID NO: 70790 - DNA, 25 bp, SARS Virus
ttttagaatcctgacggatgcgtct

SEQ ID NO: 70791 - DNA, 25 bp, SARS Virus
tttagaatcctagcggatgcgtctg

SEQ ID NO: 70792 - DNA, 25 bp, SARS Virus
ttagaatcctaagggatgcgtctga

SEQ ID NO: 70793 - DNA, 25 bp, SARS Virus
tagaatcctaacggatgcgtctgac

SEQ ID NO: 70794 - DNA, 25 bp, SARS Virus
agaatcctaacggatgcgtctgaca

SEQ ID NO: 70795 - DNA, 25 bp, SARS Virus
gaatcctaacgggtgcgtctgacaa

SEQ ID NO: 70796 - DNA, 25 bp, SARS Virus
aatcctaacggaggcgtctgacaac

SEQ ID NO: 70797 - DNA, 25 bp, SARS Virus
atcctaacggatgcgtctgacaact

SEQ ID NO: 70798 - DNA, 25 bp, SARS Virus
tcctaacggatgggtctgacaacta

SEQ ID NO: 70799 - DNA, 25 bp, SARS Virus
cctaacggatgcgtctgacaactaa

SEQ ID NO: 70800 - DNA, 25 bp, SARS Virus
ctaacggatgcggctgacaactaag

SEQ ID NO: 70801 - DNA, 25 bp, SARS Virus
taacggatgcgtgtgacaactaagt

SEQ ID NO: 70802 - DNA, 25 bp, SARS Virus
aacggatgcgtcggacaactaagta

SEQ ID NO: 70803 - DNA, 25 bp, SARS Virus
acggatgcgtctgacaactaagtag

SEQ ID NO: 70804 - DNA, 25 bp, SARS Virus
cggatgcgtctggcaactaagtagt

SEQ ID NO: 70805 - DNA, 25 bp, SARS Virus
ggatgcgtctgagaactaagtagtg

SEQ ID NO: 70806 - DNA, 25 bp, SARS Virus
gatgcgtctgacgactaagtagtgt

SEQ ID NO: 70807 - DNA, 25 bp, SARS Virus
atgcgtctgacagctaagtagtgtc

SEQ ID NO: 70808 - DNA, 25 bp, SARS Virus
tgcgtctgacaagtaagtagtgtcc

SEQ ID NO: 70809 - DNA, 25 bp, SARS Virus
gcgtctgacaacgaagtagtgtccc

SEQ ID NO: 70810 - DNA, 25 bp, SARS Virus
cgtctgacaactgagtagtgtccca

SEQ ID NO: 70811 - DNA, 25 bp, SARS Virus
gtctgacaactaggtagtgtcccaa

SEQ ID NO: 70812 - DNA, 25 bp, SARS Virus
tctgacaactaagtagtgtcccaag

SEQ ID NO: 70813 - DNA, 25 bp, SARS Virus
ctgacaactaaggagtgtcccaaga

SEQ ID NO: 70814 - DNA, 25 bp, SARS Virus
tgacaactaagtggtgtcccaagac

SEQ ID NO: 70815 - DNA, 25 bp, SARS Virus
gacaactaagtagtgtcccaagact

SEQ ID NO: 70816 - DNA, 25 bp, SARS Virus
acaactaagtagggtcccaagactt

SEQ ID NO: 70817 - DNA, 25 bp, SARS Virus
caactaagtagtgtcccaagactta

SEQ ID NO: 70818 - DNA, 25 bp, SARS Virus
aactaagtagtggcccaagacttat

SEQ ID NO: 70819 - DNA, 25 bp, SARS Virus
actaagtagtgtgccaagacttata

SEQ ID NO: 70820 - DNA, 25 bp, SARS Virus
ctaagtagtgtcgcaagacttatac

SEQ ID NO: 70821 - DNA, 25 bp, SARS Virus
taagtagtgtccgaagacttatact

SEQ ID NO: 70822 - DNA, 25 bp, SARS Virus
aagtagtgtcccgagacttatactg

SEQ ID NO: 70823 - DNA, 25 bp, SARS Virus
agtagtgtcccaggacttatactga

SEQ ID NO: 70824 - DNA, 25 bp, SARS Virus
gtagtgtcccaagacttatactgat

SEQ ID NO: 70825 - DNA, 25 bp, SARS Virus
tagtgtcccaaggcttatactgata

SEQ ID NO: 70826 - DNA, 25 bp, SARS Virus
agtgtcccaagagttatactgatac

SEQ ID NO: 70827 - DNA, 25 bp, SARS Virus
gtgtcccaagacgtatactgataca

SEQ ID NO: 70828 - DNA, 25 bp, SARS Virus
tgtcccaagactgatactgatacag

SEQ ID NO: 70829 - DNA, 25 bp, SARS Virus
gtcccaagacttgtactgatacagt

SEQ ID NO: 70830 - DNA, 25 bp, SARS Virus
tcccaagacttagactgatacagta

SEQ ID NO: 70831 - DNA, 25 bp, SARS Virus
cccaagacttatgctgatacagtat

SEQ ID NO: 70832 - DNA, 25 bp, SARS Virus
ccaagacttatagtgatacagtata

SEQ ID NO: 70833 - DNA, 25 bp, SARS Virus
caagacttatacggatacagtataa

SEQ ID NO: 70834 - DNA, 25 bp, SARS Virus
aagacttatactgatacagtataag

SEQ ID NO: 70835 - DNA, 25 bp, SARS Virus
agacttatactggtacagtataagt

SEQ ID NO: 70836 - DNA, 25 bp, SARS Virus
gacttatactgagacagtataagtg

SEQ ID NO: 70837 - DNA, 25 bp, SARS Virus
acttatactgatgcagtataagtgt

SEQ ID NO: 70838 - DNA, 25 bp, SARS Virus
cttatactgatagagtataagtgtg

SEQ ID NO: 70839 - DNA, 25 bp, SARS Virus
ttatactgatacggtataagtgtgt

SEQ ID NO: 70840 - DNA, 25 bp, SARS Virus
tatactgatacagtataagtgtgtt

SEQ ID NO: 70841 - DNA, 25 bp, SARS Virus
atactgatacaggataagtgtgttt

SEQ ID NO: 70842 - DNA, 25 bp, SARS Virus
tactgatacagtgtaagtgtgtttg

SEQ ID NO: 70843 - DNA, 25 bp, SARS Virus
actgatacagtagaagtgtgtttga

SEQ ID NO: 70844 - DNA, 25 bp, SARS Virus
ctgatacagtatgagtgtgtttgat

SEQ ID NO: 70845 - DNA, 25 bp, SARS Virus
tgatacagtataggtgtgtttgatg

SEQ ID NO: 70846 - DNA, 25 bp, SARS Virus
gatacagtataagtgtgtttgatga

SEQ ID NO: 70847 - DNA, 25 bp, SARS Virus
atacagtataagggtgtttgatgac

SEQ ID NO: 70848 - DNA, 25 bp, SARS Virus
tacagtataagtgtgtttgatgact

SEQ ID NO: 70849 - DNA, 25 bp, SARS Virus
acagtataagtgggtttgatgactt

SEQ ID NO: 70850 - DNA, 25 bp, SARS Virus
cagtataagtgtgtttgatgacttt

SEQ ID NO: 70851 - DNA, 25 bp, SARS Virus
agtataagtgtggttgatgactttg

SEQ ID NO: 70852 - DNA, 25 bp, SARS Virus
gtataagtgtgtgtgatgactttgt

SEQ ID NO: 70853 - DNA, 25 bp, SARS Virus
tataagtgtgttggatgactttgtc

SEQ ID NO: 70854 - DNA, 25 bp, SARS Virus
ataagtgtgtttgatgactttgtcg

SEQ ID NO: 70855 - DNA, 25 bp, SARS Virus
taagtgtgtttggtgactttgtcgt

SEQ ID NO: 70856 - DNA, 25 bp, SARS Virus
aagtgtgtttgaggactttgtcgtg

SEQ ID NO: 70857 - DNA, 25 bp, SARS Virus
agtgtgtttgatgactttgtcgtgt

SEQ ID NO: 70858 - DNA, 25 bp, SARS Virus
gtgtgtttgatggctttgtcgtgtg

SEQ ID NO: 70859 - DNA, 25 bp, SARS Virus
tgtgtttgatgagtttgtcgtgtga

SEQ ID NO: 70860 - DNA, 25 bp, SARS Virus
gtgtttgatgacgttgtcgtgtgag

SEQ ID NO: 70861 - DNA, 25 bp, SARS Virus
tgtttgatgactgtgtcgtgtgaga

SEQ ID NO: 70862 - DNA, 25 bp, SARS Virus
gtttgatgacttggtcgtgtgagaa

SEQ ID NO: 70863 - DNA, 25 bp, SARS Virus
tttgatgactttgtcgtgtgagaac

SEQ ID NO: 70864 - DNA, 25 bp, SARS Virus
ttgatgactttggcgtgtgagaaca

SEQ ID NO: 70865 - DNA, 25 bp, SARS Virus
tgatgactttgtggtgtgagaacat

SEQ ID NO: 70866 - DNA, 25 bp, SARS Virus
gatgactttgtcgtgtgagaacatt

SEQ ID NO: 70867 - DNA, 25 bp, SARS Virus
atgactttgtcgggtgagaacatta

SEQ ID NO: 70868 - DNA, 25 bp, SARS Virus
tgactttgtcgtgtgagaacattac

SEQ ID NO: 70869 - DNA, 25 bp, SARS Virus
gactttgtcgtgggagaacattaca

SEQ ID NO: 70870 - DNA, 25 bp, SARS Virus
actttgtcgtgtgagaacattacag

SEQ ID NO: 70871 - DNA, 25 bp, SARS Virus
ctttgtcgtgtgggaacattacagt

SEQ ID NO: 70872 - DNA, 25 bp, SARS Virus
tttgtcgtgtgagaacattacagtt

SEQ ID NO: 70873 - DNA, 25 bp, SARS Virus
ttgtcgtgtgaggacattacagttg

SEQ ID NO: 70874 - DNA, 25 bp, SARS Virus
tgtcgtgtgagagcattacagttgg

SEQ ID NO: 70875 - DNA, 25 bp, SARS Virus
gtcgtgtgagaagattacagttggc

SEQ ID NO: 70876 - DNA, 25 bp, SARS Virus
tcgtgtgagaacgttacagttggcg

SEQ ID NO: 70877 - DNA, 25 bp, SARS Virus
cgtgtgagaacagtacagttggcga

SEQ ID NO: 70878 - DNA, 25 bp, SARS Virus
gtgtgagaacatgacagttggcgaa

SEQ ID NO: 70879 - DNA, 25 bp, SARS Virus
tgtgagaacattgcagttggcgaag

SEQ ID NO: 70880 - DNA, 25 bp, SARS Virus
gtgagaacattagagttggcgaagt

SEQ ID NO: 70881 - DNA, 25 bp, SARS Virus
tgagaacattacggttggcgaagtt

SEQ ID NO: 70882 - DNA, 25 bp, SARS Virus
gagaacattacagttggcgaagtta

SEQ ID NO: 70883 - DNA, 25 bp, SARS Virus
agaacattacaggtggcgaagttac

SEQ ID NO: 70884 - DNA, 25 bp, SARS Virus
gaacattacagtgggcgaagttaca

SEQ ID NO: 70885 - DNA, 25 bp, SARS Virus
aacattacagttggcgaagttacac

SEQ ID NO: 70886 - DNA, 25 bp, SARS Virus
acattacagttggcgaagttacacc

SEQ ID NO: 70887 - DNA, 25 bp, SARS Virus
cattacagttggggaagttacaccg

SEQ ID NO: 70888 - DNA, 25 bp, SARS Virus
attacagttggcgaagttacaccga

SEQ ID NO: 70889 - DNA, 25 bp, SARS Virus
ttgtgatgcagatataaccgctagg

SEQ ID NO: 70890 - DNA, 25 bp, SARS Virus
tgtgatgcagatttaaccgctagga

SEQ ID NO: 70891 - DNA, 25 bp, SARS Virus
gtgatgcagatataaccgctaggac

SEQ ID NO: 70892 - DNA, 25 bp, SARS Virus
tgatgcagatattaccgctaggacg

SEQ ID NO: 70893 - DNA, 25 bp, SARS Virus
gatgcagatatatccgctaggacga

SEQ ID NO: 70894 - DNA, 25 bp, SARS Virus
atgcagatataatcgctaggacgag

SEQ ID NO: 70895 - DNA, 25 bp, SARS Virus
tgcagatataactgctaggacgagt

SEQ ID NO: 70896 - DNA, 25 bp, SARS Virus
gcagatataacctctaggacgagtt

SEQ ID NO: 70897 - DNA, 25 bp, SARS Virus
cagatataaccgttaggacgagtta

SEQ ID NO: 70898 - DNA, 25 bp, SARS Virus
agatataaccgctaggacgagttaa

SEQ ID NO: 70899 - DNA, 25 bp, SARS Virus
gatataaccgcttggacgagttaat

SEQ ID NO: 70900 - DNA, 25 bp, SARS Virus
atataaccgctatgacgagttaatg

SEQ ID NO: 70901 - DNA, 25 bp, SARS Virus
tataaccgctagtacgagttaatgg

SEQ ID NO: 70902 - DNA, 25 bp, SARS Virus
ataaccgctaggtcgagttaatggt

SEQ ID NO: 70903 - DNA, 25 bp, SARS Virus
taaccgctaggatgagttaatggtc

SEQ ID NO: 70904 - DNA, 25 bp, SARS Virus
aaccgctaggactagttaatggtcg

SEQ ID NO: 70905 - DNA, 25 bp, SARS Virus
accgctaggacgtgttaatggtcgg

SEQ ID NO: 70906 - DNA, 25 bp, SARS Virus
ccgctaggacgatttaatggtcggg

SEQ ID NO: 70907 - DNA, 25 bp, SARS Virus
cgctaggacgagttaatggtcgggg

SEQ ID NO: 70908 - DNA, 25 bp, SARS Virus
gctaggacgagttaatggtcggggg

SEQ ID NO: 70909 - DNA, 25 bp, SARS Virus
ctaggacgagtttatggtcgggggg

SEQ ID NO: 70910 - DNA, 25 bp, SARS Virus
taggacgagttattggtcggggggc

SEQ ID NO: 70911 - DNA, 25 bp, SARS Virus
aggacgagttaatggtcggggggcg

SEQ ID NO: 70912 - DNA, 25 bp, SARS Virus
ggacgagttaattgtcggggggcgt

SEQ ID NO: 70913 - DNA, 25 bp, SARS Virus
gacgagttaatgttcggggggcgtg

SEQ ID NO: 70914 - DNA, 25 bp, SARS Virus
acgagttaatggtcggggggcgtgt

SEQ ID NO: 70915 - DNA, 25 bp, SARS Virus
cgagttaatggttggggggcgtgta

SEQ ID NO: 70916 - DNA, 25 bp, SARS Virus
gagttaatggtctgggggcgtgtaa

SEQ ID NO: 70917 - DNA, 25 bp, SARS Virus
agttaatggtcgtggggcgtgtaac

SEQ ID NO: 70918 - DNA, 25 bp, SARS Virus
gttaatggtcggtgggcgtgtaacg

SEQ ID NO: 70919 - DNA, 25 bp, SARS Virus
ttaatggtcgggtggcgtgtaacga

SEQ ID NO: 70920 - DNA, 25 bp, SARS Virus
taatggtcggggtgcgtgtaacgac

SEQ ID NO: 70921 - DNA, 25 bp, SARS Virus
aatggtcgggggtcgtgtaacgact

SEQ ID NO: 70922 - DNA, 25 bp, SARS Virus
atggtcggggggtgtgtaacgactg

SEQ ID NO: 70923 - DNA, 25 bp, SARS Virus
tggtcggggggcttgtaacgactga

SEQ ID NO: 70924 - DNA, 25 bp, SARS Virus
ggtcggggggcgtgtaacgactgat

SEQ ID NO: 70925 - DNA, 25 bp, SARS Virus
gtcggggggcgtttaacgactgatt

SEQ ID NO: 70926 - DNA, 25 bp, SARS Virus
tcggggggcgtgtaacgactgattt

SEQ ID NO: 70927 - DNA, 25 bp, SARS Virus
cggggggcgtgttacgactgatttc

SEQ ID NO: 70928 - DNA, 25 bp, SARS Virus
ggggggcgtgtatcgactgatttcc

SEQ ID NO: 70929 - DNA, 25 bp, SARS Virus
gggggcgtgtaatgactgatttccg

SEQ ID NO: 70930 - DNA, 25 bp, SARS Virus
ggggcgtgtaactactgatttccgt

SEQ ID NO: 70931 - DNA, 25 bp, SARS Virus
gggcgtgtaacgtctgatttccgtg

SEQ ID NO: 70932 - DNA, 25 bp, SARS Virus
ggcgtgtaacgattgatttccgtgt

SEQ ID NO: 70933 - DNA, 25 bp, SARS Virus
gcgtgtaacgactgatttccgtgtg

SEQ ID NO: 70934 - DNA, 25 bp, SARS Virus
cgtgtaacgacttatttccgtgtga

SEQ ID NO: 70935 - DNA, 25 bp, SARS Virus
gtgtaacgactgttttccgtgtgat

SEQ ID NO: 70936 - DNA, 25 bp, SARS Virus
tgtaacgactgatttccgtgtgatc

SEQ ID NO: 70937 - DNA, 25 bp, SARS Virus
gtaacgactgatttccgtgtgatct

SEQ ID NO: 70938 - DNA, 25 bp, SARS Virus
taacgactgatttccgtgtgatctt

SEQ ID NO: 70939 - DNA, 25 bp, SARS Virus
aacgactgattttcgtgtgatcttg

SEQ ID NO: 70940 - DNA, 25 bp, SARS Virus
acgactgatttctgtgtgatcttgg

SEQ ID NO: 70941 - DNA, 25 bp, SARS Virus
cgactgatttccttgtgatcttggt

SEQ ID NO: 70942 - DNA, 25 bp, SARS Virus
gactgatttccgtgtgatcttggtc

SEQ ID NO: 70943 - DNA, 25 bp, SARS Virus
actgatttccgtttgatcttggtct

SEQ ID NO: 70944 - DNA, 25 bp, SARS Virus
ctgatttccgtgtgatcttggtctt

SEQ ID NO: 70945 - DNA, 25 bp, SARS Virus
tgatttccgtgttatcttggtctta

SEQ ID NO: 70946 - DNA, 25 bp, SARS Virus
gatttccgtgtgttcttggtcttat

SEQ ID NO: 70947 - DNA, 25 bp, SARS Virus
atttccgtgtgatcttggtcttata

SEQ ID NO: 70948 - DNA, 25 bp, SARS Virus
tttccgtgtgattttggtcttataa

SEQ ID NO: 70949 - DNA, 25 bp, SARS Virus
ttccgtgtgatcttggtcttataaa

SEQ ID NO: 70950 - DNA, 25 bp, SARS Virus
tccgtgtgatcttggtcttataaaa

SEQ ID NO: 70951 - DNA, 25 bp, SARS Virus
ccgtgtgatctttgtcttataaaat

SEQ ID NO: 70952 - DNA, 25 bp, SARS Virus
cgtgtgatcttgttcttataaaatt

SEQ ID NO: 70953 - DNA, 25 bp, SARS Virus
gtgtgatcttggtcttataaaatta

SEQ ID NO: 70954 - DNA, 25 bp, SARS Virus
tgtgatcttggttttataaaattaa

SEQ ID NO: 70955 - DNA, 25 bp, SARS Virus
gtgatcttggtcttataaaattaag

SEQ ID NO: 70956 - DNA, 25 bp, SARS Virus
tgatcttggtcttataaaattaagt

SEQ ID NO: 70957 - DNA, 25 bp, SARS Virus
gatcttggtcttttaaaattaagtc

SEQ ID NO: 70958 - DNA, 25 bp, SARS Virus
atcttggtcttataaaattaagtca

SEQ ID NO: 70959 - DNA, 25 bp, SARS Virus
tcttggtcttattaaattaagtcac

SEQ ID NO: 70960 - DNA, 25 bp, SARS Virus
cttggtcttatataattaagtcaca

SEQ ID NO: 70961 - DNA, 25 bp, SARS Virus
ttggtcttataatattaagtcacac

SEQ ID NO: 70962 - DNA, 25 bp, SARS Virus
tggtcttataaatttaagtcacacg

SEQ ID NO: 70963 - DNA, 25 bp, SARS Virus
ggtcttataaaattaagtcacacgt

SEQ ID NO: 70964 - DNA, 25 bp, SARS Virus
gtcttataaaattaagtcacacgtc

SEQ ID NO: 70965 - DNA, 25 bp, SARS Virus
tcttataaaatttagtcacacgtct

SEQ ID NO: 70966 - DNA, 25 bp, SARS Virus
cttataaaattatgtcacacgtctg

SEQ ID NO: 70967 - DNA, 25 bp, SARS Virus
ttataaaattaattcacacgtctga

SEQ ID NO: 70968 - DNA, 25 bp, SARS Virus
tataaaattaagtcacacgtctgaa

SEQ ID NO: 70969 - DNA, 25 bp, SARS Virus
ataaaattaagttacacgtctgaat

SEQ ID NO: 70970 - DNA, 25 bp, SARS Virus
taaaattaagtctcacgtctgaata

SEQ ID NO: 70971 - DNA, 25 bp, SARS Virus
aaaattaagtcatacgtctgaatac

SEQ ID NO: 70972 - DNA, 25 bp, SARS Virus
aaattaagtcactcgtctgaatact

SEQ ID NO: 70973 - DNA, 25 bp, SARS Virus
aattaagtcacatgtctgaatactt

SEQ ID NO: 70974 - DNA, 25 bp, SARS Virus
attaagtcacacttctgaatacttt

SEQ ID NO: 70975 - DNA, 25 bp, SARS Virus
ttaagtcacacgtctgaatactttt

SEQ ID NO: 70976 - DNA, 25 bp, SARS Virus
taagtcacacgtttgaatacttttg

SEQ ID NO: 70977 - DNA, 25 bp, SARS Virus
aagtcacacgtctgaatacttttgt

SEQ ID NO: 70978 - DNA, 25 bp, SARS Virus
agtcacacgtcttaatacttttgtt

SEQ ID NO: 70979 - DNA, 25 bp, SARS Virus
gtcacacgtctgtatacttttgtta

SEQ ID NO: 70980 - DNA, 25 bp, SARS Virus
tcacacgtctgattacttttgttat

SEQ ID NO: 70981 - DNA, 25 bp, SARS Virus
cacacgtctgaatacttttgttatc

SEQ ID NO: 70982 - DNA, 25 bp, SARS Virus
acacgtctgaattcttttgttatcc

SEQ ID NO: 70983 - DNA, 25 bp, SARS Virus
cacgtctgaatatttttgttatcca

SEQ ID NO: 70984 - DNA, 25 bp, SARS Virus
acgtctgaatacttttgttatccag

SEQ ID NO: 70985 - DNA, 25 bp, SARS Virus
cgtctgaatacttttgttatccagg

SEQ ID NO: 70986 - DNA, 25 bp, SARS Virus
gtctgaatacttttgttatccaggt

SEQ ID NO: 70987 - DNA, 25 bp, SARS Virus
tctgaatacttttgttatccaggtc

SEQ ID NO: 70988 - DNA, 25 bp, SARS Virus
ctgaatactttttttatccaggtct

SEQ ID NO: 70989 - DNA, 25 bp, SARS Virus
tgaatacttttgttatccaggtctg

SEQ ID NO: 70990 - DNA, 25 bp, SARS Virus
gaatacttttgttatccaggtctgt

SEQ ID NO: 70991 - DNA, 25 bp, SARS Virus
aatacttttgttttccaggtctgta

SEQ ID NO: 70992 - DNA, 25 bp, SARS Virus
atacttttgttatccaggtctgtac

SEQ ID NO: 70993 - DNA, 25 bp, SARS Virus
tacttttgttattcaggtctgtaca

SEQ ID NO: 70994 - DNA, 25 bp, SARS Virus
acttttgttatctaggtctgtacaa

SEQ ID NO: 70995 - DNA, 25 bp, SARS Virus
cttttgttatcctggtctgtacaag

SEQ ID NO: 70996 - DNA, 25 bp, SARS Virus
ttttgttatccatgtctgtacaagg

SEQ ID NO: 70997 - DNA, 25 bp, SARS Virus
tttgttatccagttctgtacaagga

SEQ ID NO: 70998 - DNA, 25 bp, SARS Virus
ttgttatccaggtctgtacaaggaa

SEQ ID NO: 70999 - DNA, 25 bp, SARS Virus
tgttatccaggtttgtacaaggaac

SEQ ID NO: 71000 - DNA, 25 bp, SARS Virus
gttatccaggtctgtacaaggaacc

SEQ ID NO: 71001 - DNA, 25 bp, SARS Virus
ttatccaggtctttacaaggaacct

SEQ ID NO: 71002 - DNA, 25 bp, SARS Virus
tatccaggtctgtacaaggaacctt

SEQ ID NO: 71003 - DNA, 25 bp, SARS Virus
atccaggtctgttcaaggaaccttg

SEQ ID NO: 71004 - DNA, 25 bp, SARS Virus
tccaggtctgtataaggaaccttga

SEQ ID NO: 71005 - DNA, 25 bp, SARS Virus
ccaggtctgtactaggaaccttgaa

SEQ ID NO: 71006 - DNA, 25 bp, SARS Virus
caggtctgtacatggaaccttgaac

SEQ ID NO: 71007 - DNA, 25 bp, SARS Virus
aggtctgtacaatgaaccttgaaca

SEQ ID NO: 71008 - DNA, 25 bp, SARS Virus
ggtctgtacaagtaaccttgaacag

SEQ ID NO: 71009 - DNA, 25 bp, SARS Virus
gtctgtacaaggtaccttgaacagc

SEQ ID NO: 71010 - DNA, 25 bp, SARS Virus
tctgtacaaggatccttgaacagcg

SEQ ID NO: 71011 - DNA, 25 bp, SARS Virus
ctgtacaaggaatcttgaacagcgg

SEQ ID NO: 71012 - DNA, 25 bp, SARS Virus
tgtacaaggaactttgaacagcggc

SEQ ID NO: 71013 - DNA, 25 bp, SARS Virus
gtacaaggaaccttgaacagcggca

SEQ ID NO: 71014 - DNA, 25 bp, SARS Virus
tacaaggaaccttgaacagcggcaa

SEQ ID NO: 71015 - DNA, 25 bp, SARS Virus
acaaggaacctttaacagcggcaac

SEQ ID NO: 71016 - DNA, 25 bp, SARS Virus
caaggaaccttgtacagcggcaaca

SEQ ID NO: 71017 - DNA, 25 bp, SARS Virus
aaggaaccttgatcagcggcaacag

SEQ ID NO: 71018 - DNA, 25 bp, SARS Virus
aggaaccttgaatagcggcaacagg

SEQ ID NO: 71019 - DNA, 25 bp, SARS Virus
ggaaccttgaactgcggcaacagga

SEQ ID NO: 71020 - DNA, 25 bp, SARS Virus
gaaccttgaacatcggcaacaggac

SEQ ID NO: 71021 - DNA, 25 bp, SARS Virus
aaccttgaacagtggcaacaggacg

SEQ ID NO: 71022 - DNA, 25 bp, SARS Virus
accttgaacagctgcaacaggacga

SEQ ID NO: 71023 - DNA, 25 bp, SARS Virus
ccttgaacagcgtcaacaggacgac

SEQ ID NO: 71024 - DNA, 25 bp, SARS Virus
cttgaacagcggtaacaggacgact

SEQ ID NO: 71025 - DNA, 25 bp, SARS Virus
ttgaacagcggctacaggacgactt

SEQ ID NO: 71026 - DNA, 25 bp, SARS Virus
tgaacagcggcatcaggacgacttt

SEQ ID NO: 71027 - DNA, 25 bp, SARS Virus
gaacagcggcaataggacgacttta

SEQ ID NO: 71028 - DNA, 25 bp, SARS Virus
aacagcggcaactggacgactttaa

SEQ ID NO: 71029 - DNA, 25 bp, SARS Virus
acagcggcaacatgacgactttaac

SEQ ID NO: 71030 - DNA, 25 bp, SARS Virus
cagcggcaacagtacgactttaaca

SEQ ID NO: 71031 - DNA, 25 bp, SARS Virus
agcggcaacaggtcgactttaacaa

SEQ ID NO: 71032 - DNA, 25 bp, SARS Virus
gcggcaacaggatgactttaacaac

SEQ ID NO: 71033 - DNA, 25 bp, SARS Virus
cggcaacaggactactttaacaact

SEQ ID NO: 71034 - DNA, 25 bp, SARS Virus
ggcaacaggacgtctttaacaactg

SEQ ID NO: 71035 - DNA, 25 bp, SARS Virus
gcaacaggacgattttaacaactgt

SEQ ID NO: 71036 - DNA, 25 bp, SARS Virus
caacaggacgactttaacaactgtg

SEQ ID NO: 71037 - DNA, 25 bp, SARS Virus
aacaggacgactttaacaactgtga

SEQ ID NO: 71038 - DNA, 25 bp, SARS Virus
acaggacgactttaacaactgtgac

SEQ ID NO: 71039 - DNA, 25 bp, SARS Virus
caggacgacttttacaactgtgaca

SEQ ID NO: 71040 - DNA, 25 bp, SARS Virus
aggacgactttatcaactgtgacac

SEQ ID NO: 71041 - DNA, 25 bp, SARS Virus
ggacgactttaataactgtgacact

SEQ ID NO: 71042 - DNA, 25 bp, SARS Virus
gacgactttaactactgtgacactc

SEQ ID NO: 71043 - DNA, 25 bp, SARS Virus
acgactttaacatctgtgacactca

SEQ ID NO: 71044 - DNA, 25 bp, SARS Virus
cgactttaacaattgtgacactcac

SEQ ID NO: 71045 - DNA, 25 bp, SARS Virus
gactttaacaactgtgacactcacg

SEQ ID NO: 71046 - DNA, 25 bp, SARS Virus
actttaacaactttgacactcacga

SEQ ID NO: 71047 - DNA, 25 bp, SARS Virus
ctttaacaactgtgacactcacgaa

SEQ ID NO: 71048 - DNA, 25 bp, SARS Virus
tttaacaactgttacactcacgaaa

SEQ ID NO: 71049 - DNA, 25 bp, SARS Virus
ttaacaactgtgtcactcacgaaat

SEQ ID NO: 71050 - DNA, 25 bp, SARS Virus
taacaactgtgatactcacgaaatc

SEQ ID NO: 71051 - DNA, 25 bp, SARS Virus
aacaactgtgactctcacgaaatca

SEQ ID NO: 71052 - DNA, 25 bp, SARS Virus
acaactgtgacattcacgaaatcaa

SEQ ID NO: 71053 - DNA, 25 bp, SARS Virus
caactgtgacactcacgaaatcaaa

SEQ ID NO: 71054 - DNA, 25 bp, SARS Virus
aactgtgacacttacgaaatcaaat

SEQ ID NO: 71055 - DNA, 25 bp, SARS Virus
actgtgacactctcgaaatcaaata

SEQ ID NO: 71056 - DNA, 25 bp, SARS Virus
ctgtgacactcatgaaatcaaatac

SEQ ID NO: 71057 - DNA, 25 bp, SARS Virus
tgtgacactcactaaatcaaatact

SEQ ID NO: 71058 - DNA, 25 bp, SARS Virus
gtgacactcacgtaatcaaatactg

SEQ ID NO: 71059 - DNA, 25 bp, SARS Virus
tgacactcacgatatcaaatactgt

SEQ ID NO: 71060 - DNA, 25 bp, SARS Virus
gacactcacgaattcaaatactgtt

SEQ ID NO: 71061 - DNA, 25 bp, SARS Virus
acactcacgaaatcaaatactgtta

SEQ ID NO: 71062 - DNA, 25 bp, SARS Virus
cactcacgaaattaaatactgttat

SEQ ID NO: 71063 - DNA, 25 bp, SARS Virus
actcacgaaatctaatactgttatt

SEQ ID NO: 71064 - DNA, 25 bp, SARS Virus
ctcacgaaatcatatactgttattc

SEQ ID NO: 71065 - DNA, 25 bp, SARS Virus
tcacgaaatcaattactgttattcg

SEQ ID NO: 71066 - DNA, 25 bp, SARS Virus
cacgaaatcaaatactgttattcga

SEQ ID NO: 71067 - DNA, 25 bp, SARS Virus
acgaaatcaaattctgttattcgat

SEQ ID NO: 71068 - DNA, 25 bp, SARS Virus
cgaaatcaaatattgttattcgatt

SEQ ID NO: 71069 - DNA, 25 bp, SARS Virus
gaaatcaaatactgttattcgattt

SEQ ID NO: 71070 - DNA, 25 bp, SARS Virus
aaatcaaatacttttattcgatttt

SEQ ID NO: 71071 - DNA, 25 bp, SARS Virus
aatcaaatactgttattcgattttc

SEQ ID NO: 71072 - DNA, 25 bp, SARS Virus
atcaaatactgttattcgattttcg

SEQ ID NO: 71073 - DNA, 25 bp, SARS Virus
tcaaatactgtttttcgattttcgt

SEQ ID NO: 71074 - DNA, 25 bp, SARS Virus
caaatactgttattcgattttcgtg

SEQ ID NO: 71075 - DNA, 25 bp, SARS Virus
aaatactgttattcgattttcgtgt

SEQ ID NO: 71076 - DNA, 25 bp, SARS Virus
aatactgttatttgattttcgtgtg

SEQ ID NO: 71077 - DNA, 25 bp, SARS Virus
atactgttattctattttcgtgtgt

SEQ ID NO: 71078 - DNA, 25 bp, SARS Virus
tactgttattcgtttttcgtgtgtt

SEQ ID NO: 71079 - DNA, 25 bp, SARS Virus
actgttattcgattttcgtgtgttc

SEQ ID NO: 71080 - DNA, 25 bp, SARS Virus
ctgttattcgattttcgtgtgttcc

SEQ ID NO: 71081 - DNA, 25 bp, SARS Virus
tgttattcgattttcgtgtgttcct

SEQ ID NO: 71082 - DNA, 25 bp, SARS Virus
gttattcgattttcgtgtgttccta

SEQ ID NO: 71083 - DNA, 25 bp, SARS Virus
ttattcgatttttgtgtgttcctat

SEQ ID NO: 71084 - DNA, 25 bp, SARS Virus
tattcgattttcttgtgttcctatt

SEQ ID NO: 71085 - DNA, 25 bp, SARS Virus
attcgattttcgtgtgttcctattc

SEQ ID NO: 71086 - DNA, 25 bp, SARS Virus
ttcgattttcgtttgttcctattca

SEQ ID NO: 71087 - DNA, 25 bp, SARS Virus
tcgattttcgtgtgttcctattcag

SEQ ID NO: 71088 - DNA, 25 bp, SARS Virus
cgattttcgtgttttcctattcagt

SEQ ID NO: 71089 - DNA, 25 bp, SARS Virus
gattttcgtgtgttcctattcagtc

SEQ ID NO: 71090 - DNA, 25 bp, SARS Virus
attttcgtgtgttcctattcagtcg

SEQ ID NO: 71091 - DNA, 25 bp, SARS Virus
ttttcgtgtgtttctattcagtcga

SEQ ID NO: 71092 - DNA, 25 bp, SARS Virus
tttcgtgtgttcttattcagtcgag

SEQ ID NO: 71093 - DNA, 25 bp, SARS Virus
ttcgtgtgttcctattcagtcgagt

SEQ ID NO: 71094 - DNA, 25 bp, SARS Virus
tcgtgtgttccttttcagtcgagtt

SEQ ID NO: 71095 - DNA, 25 bp, SARS Virus
cgtgtgttcctattcagtcgagtta

SEQ ID NO: 71096 - DNA, 25 bp, SARS Virus
gtgtgttcctattcagtcgagttac

SEQ ID NO: 71097 - DNA, 25 bp, SARS Virus
tgtgttcctatttagtcgagttacg

SEQ ID NO: 71098 - DNA, 25 bp, SARS Virus
gtgttcctattctgtcgagttacga

SEQ ID NO: 71099 - DNA, 25 bp, SARS Virus
tgttcctattcattcgagttacgaa

SEQ ID NO: 71100 - DNA, 25 bp, SARS Virus
gttcctattcagtcgagttacgaag

SEQ ID NO: 71101 - DNA, 25 bp, SARS Virus
ttcctattcagttgagttacgaagt

SEQ ID NO: 71102 - DNA, 25 bp, SARS Virus
tcctattcagtctagttacgaagtt

SEQ ID NO: 71103 - DNA, 25 bp, SARS Virus
cctattcagtcgtgttacgaagttt

SEQ ID NO: 71104 - DNA, 25 bp, SARS Virus
ctattcagtcgatttacgaagtttt

SEQ ID NO: 71105 - DNA, 25 bp, SARS Virus
tattcagtcgagttacgaagtttta

SEQ ID NO: 71106 - DNA, 25 bp, SARS Virus
attcagtcgagttacgaagttttac

SEQ ID NO: 71107 - DNA, 25 bp, SARS Virus
ttcagtcgagtttcgaagttttaca

SEQ ID NO: 71108 - DNA, 25 bp, SARS Virus
tcagtcgagttatgaagttttacaa

SEQ ID NO: 71109 - DNA, 25 bp, SARS Virus
cagtcgagttactaagttttacaag

SEQ ID NO: 71110 - DNA, 25 bp, SARS Virus
agtcgagttacgtagttttacaaga

SEQ ID NO: 71111 - DNA, 25 bp, SARS Virus
gtcgagttacgatgttttacaagat

SEQ ID NO: 71112 - DNA, 25 bp, SARS Virus
tcgagttacgaatttttacaagatg

SEQ ID NO: 71113 - DNA, 25 bp, SARS Virus
cgagttacgaagttttacaagatgt

SEQ ID NO: 71114 - DNA, 25 bp, SARS Virus
gagttacgaagttttacaagatgtt

SEQ ID NO: 71115 - DNA, 25 bp, SARS Virus
agttacgaagttttacaagatgttt

SEQ ID NO: 71116 - DNA, 25 bp, SARS Virus
gttacgaagttttacaagatgtttc

SEQ ID NO: 71117 - DNA, 25 bp, SARS Virus
ttacgaagtttttcaagatgtttcc

SEQ ID NO: 71118 - DNA, 25 bp, SARS Virus
tacgaagttttataagatgtttcca

SEQ ID NO: 71119 - DNA, 25 bp, SARS Virus
acgaagttttactagatgtttccac

SEQ ID NO: 71120 - DNA, 25 bp, SARS Virus
cgaagttttacatgatgtttccaca

SEQ ID NO: 71121 - DNA, 25 bp, SARS Virus
gaagttttacaatatgtttccacaa

SEQ ID NO: 71122 - DNA, 25 bp, SARS Virus
aagttttacaagttgtttccacaat

SEQ ID NO: 71123 - DNA, 25 bp, SARS Virus
agttttacaagatgtttccacaata

SEQ ID NO: 71124 - DNA, 25 bp, SARS Virus
gttttacaagatttttccacaataa

SEQ ID NO: 71125 - DNA, 25 bp, SARS Virus
ttttacaagatgtttccacaataat

SEQ ID NO: 71126 - DNA, 25 bp, SARS Virus
tttacaagatgtttccacaataatg

SEQ ID NO: 71127 - DNA, 25 bp, SARS Virus
ttacaagatgtttccacaataatgt

SEQ ID NO: 71128 - DNA, 25 bp, SARS Virus
tacaagatgttttcacaataatgtg

SEQ ID NO: 71129 - DNA, 25 bp, SARS Virus
acaagatgtttctacaataatgtgt

SEQ ID NO: 71130 - DNA, 25 bp, SARS Virus
caagatgtttcctcaataatgtgta

SEQ ID NO: 71131 - DNA, 25 bp, SARS Virus
aagatgtttccataataatgtgtac

SEQ ID NO: 71132 - DNA, 25 bp, SARS Virus
agatgtttccactataatgtgtact

SEQ ID NO: 71133 - DNA, 25 bp, SARS Virus
gatgtttccacattaatgtgtacta

SEQ ID NO: 71134 - DNA, 25 bp, SARS Virus
atgtttccacaataatgtgtactac

SEQ ID NO: 71135 - DNA, 25 bp, SARS Virus
tgtttccacaattatgtgtactaca

SEQ ID NO: 71136 - DNA, 25 bp, SARS Virus
gtttccacaatattgtgtactacaa

SEQ ID NO: 71137 - DNA, 25 bp, SARS Virus
tttccacaataatgtgtactacaaa

SEQ ID NO: 71138 - DNA, 25 bp, SARS Virus
ttccacaataatttgtactacaaag

SEQ ID NO: 71139 - DNA, 25 bp, SARS Virus
tccacaataatgtgtactacaaagt

SEQ ID NO: 71140 - DNA, 25 bp, SARS Virus
ccacaataatgtttactacaaagta

SEQ ID NO: 71141 - DNA, 25 bp, SARS Virus
cacaataatgtgtactacaaagtag

SEQ ID NO: 71142 - DNA, 25 bp, SARS Virus
acaataatgtgttctacaaagtaga

SEQ ID NO: 71143 - DNA, 25 bp, SARS Virus
caataatgtgtattacaaagtagac

SEQ ID NO: 71144 - DNA, 25 bp, SARS Virus
aataatgtgtactacaaagtagacg

SEQ ID NO: 71145 - DNA, 25 bp, SARS Virus
ataatgtgtacttcaaagtagacgt

SEQ ID NO: 71146 - DNA, 25 bp, SARS Virus
taatgtgtactataaagtagacgtt

SEQ ID NO: 71147 - DNA, 25 bp, SARS Virus
aatgtgtactactaagtagacgtta

SEQ ID NO: 71148 - DNA, 25 bp, SARS Virus
atgtgtactacatagtagacgttag

SEQ ID NO: 71149 - DNA, 25 bp, SARS Virus
tgtgtactacaatgtagacgttagt

SEQ ID NO: 71150 - DNA, 25 bp, SARS Virus
gtgtactacaaattagacgttagtt

SEQ ID NO: 71151 - DNA, 25 bp, SARS Virus
tgtactacaaagtagacgttagttg

SEQ ID NO: 71152 - DNA, 25 bp, SARS Virus
gtactacaaagttgacgttagttgt

SEQ ID NO: 71153 - DNA, 25 bp, SARS Virus
tactacaaagtatacgttagttgtc

SEQ ID NO: 71154 - DNA, 25 bp, SARS Virus
actacaaagtagtcgttagttgtct

SEQ ID NO: 71155 - DNA, 25 bp, SARS Virus
ctacaaagtagatgttagttgtctg

SEQ ID NO: 71156 - DNA, 25 bp, SARS Virus
tacaaagtagactttagttgtctgg

SEQ ID NO: 71157 - DNA, 25 bp, SARS Virus
acaaagtagacgttagttgtctgga

SEQ ID NO: 71158 - DNA, 25 bp, SARS Virus
caaagtagacgttagttgtctggag

SEQ ID NO: 71159 - DNA, 25 bp, SARS Virus
aaagtagacgtttgttgtctggagt

SEQ ID NO: 71160 - DNA, 25 bp, SARS Virus
aagtagacgttatttgtctggagtt

SEQ ID NO: 71161 - DNA, 25 bp, SARS Virus
agtagacgttagttgtctggagttt

SEQ ID NO: 71162 - DNA, 25 bp, SARS Virus
gtagacgttagttgtctggagttta

SEQ ID NO: 71163 - DNA, 25 bp, SARS Virus
tagacgttagttttctggagtttat

SEQ ID NO: 71164 - DNA, 25 bp, SARS Virus
agacgttagttgtctggagtttatc

SEQ ID NO: 71165 - DNA, 25 bp, SARS Virus
gacgttagttgtttggagtttatcc

SEQ ID NO: 71166 - DNA, 25 bp, SARS Virus
acgttagttgtctggagtttatccg

SEQ ID NO: 71167 - DNA, 25 bp, SARS Virus
cgttagttgtcttgagtttatccgc

SEQ ID NO: 71168 - DNA, 25 bp, SARS Virus
gttagttgtctgtagtttatccgca

SEQ ID NO: 71169 - DNA, 25 bp, SARS Virus
ttagttgtctggtgtttatccgcaa

SEQ ID NO: 71170 - DNA, 25 bp, SARS Virus
tagttgtctggattttatccgcaac

SEQ ID NO: 71171 - DNA, 25 bp, SARS Virus
agttgtctggagtttatccgcaaca

SEQ ID NO: 71172 - DNA, 25 bp, SARS Virus
gttgtctggagtttatccgcaacat

SEQ ID NO: 71173 - DNA, 25 bp, SARS Virus
ttgtctggagtttatccgcaacatt

SEQ ID NO: 71174 - DNA, 25 bp, SARS Virus
tgtctggagtttttccgcaacattc

SEQ ID NO: 71175 - DNA, 25 bp, SARS Virus
gtctggagtttatccgcaacattct

SEQ ID NO: 71176 - DNA, 25 bp, SARS Virus
tctggagtttattcgcaacattctc

SEQ ID NO: 71177 - DNA, 25 bp, SARS Virus
ctggagtttatctgcaacattctct

SEQ ID NO: 71178 - DNA, 25 bp, SARS Virus
tggagtttatcctcaacattctctt

SEQ ID NO: 71179 - DNA, 25 bp, SARS Virus
ggagtttatccgtaacattctctta

SEQ ID NO: 71180 - DNA, 25 bp, SARS Virus
gagtttatccgctacattctcttaa

SEQ ID NO: 71181 - DNA, 25 bp, SARS Virus
agtttatccgcatcattctcttaaa

SEQ ID NO: 71182 - DNA, 25 bp, SARS Virus
gtttatccgcaatattctcttaaag

SEQ ID NO: 71183 - DNA, 25 bp, SARS Virus
tttatccgcaactttctcttaaaga

SEQ ID NO: 71184 - DNA, 25 bp, SARS Virus
ttatccgcaacattctcttaaagaa

SEQ ID NO: 71185 - DNA, 25 bp, SARS Virus
tatccgcaacattctcttaaagaat

SEQ ID NO: 71186 - DNA, 25 bp, SARS Virus
atccgcaacattttcttaaagaatg

SEQ ID NO: 71187 - DNA, 25 bp, SARS Virus
tccgcaacattctcttaaagaatgt

SEQ ID NO: 71188 - DNA, 25 bp, SARS Virus
ccgcaacattcttttaaagaatgtg

SEQ ID NO: 71189 - DNA, 25 bp, SARS Virus
cgcaacattctcttaaagaatgtgc

SEQ ID NO: 71190 - DNA, 25 bp, SARS Virus
gcaacattctcttaaagaatgtgcg

SEQ ID NO: 71191 - DNA, 25 bp, SARS Virus
caacattctctttaagaatgtgcgt

SEQ ID NO: 71192 - DNA, 25 bp, SARS Virus
aacattctcttatagaatgtgcgtt

SEQ ID NO: 71193 - DNA, 25 bp, SARS Virus
acattctcttaatgaatgtgcgtta

SEQ ID NO: 71194 - DNA, 25 bp, SARS Virus
cattctcttaaataatgtgcgttag

SEQ ID NO: 71195 - DNA, 25 bp, SARS Virus
attctcttaaagtatgtgcgttagg

SEQ ID NO: 71196 - DNA, 25 bp, SARS Virus
ttctcttaaagattgtgcgttagga

SEQ ID NO: 71197 - DNA, 25 bp, SARS Virus
tctcttaaagaatgtgcgttaggac

SEQ ID NO: 71198 - DNA, 25 bp, SARS Virus
ctcttaaagaatttgcgttaggacg

SEQ ID NO: 71199 - DNA, 25 bp, SARS Virus
tcttaaagaatgtgcgttaggacga

SEQ ID NO: 71200 - DNA, 25 bp, SARS Virus
cttaaagaatgttcgttaggacgaa

SEQ ID NO: 71201 - DNA, 25 bp, SARS Virus
ttaaagaatgtgtgttaggacgaac

SEQ ID NO: 71202 - DNA, 25 bp, SARS Virus
taaagaatgtgctttaggacgaacc

SEQ ID NO: 71203 - DNA, 25 bp, SARS Virus
aaagaatgtgcgttaggacgaacct

SEQ ID NO: 71204 - DNA, 25 bp, SARS Virus
aagaatgtgcgttaggacgaacctc

SEQ ID NO: 71205 - DNA, 25 bp, SARS Virus
agaatgtgcgtttggacgaacctct

SEQ ID NO: 71206 - DNA, 25 bp, SARS Virus
gaatgtgcgttatgacgaacctctt

SEQ ID NO: 71207 - DNA, 25 bp, SARS Virus
aatgtgcgttagtacgaacctcttt

SEQ ID NO: 71208 - DNA, 25 bp, SARS Virus
atgtgcgttaggtcgaacctctttt

SEQ ID NO: 71209 - DNA, 25 bp, SARS Virus
tgtgcgttaggatgaacctcttttc

SEQ ID NO: 71210 - DNA, 25 bp, SARS Virus
gtgcgttaggactaacctcttttcg

SEQ ID NO: 71211 - DNA, 25 bp, SARS Virus
tgcgttaggacgtacctcttttcga

SEQ ID NO: 71212 - DNA, 25 bp, SARS Virus
gcgttaggacgatcctcttttcgac

SEQ ID NO: 71213 - DNA, 25 bp, SARS Virus
cgttaggacgaatctcttttcgaca

SEQ ID NO: 71214 - DNA, 25 bp, SARS Virus
gttaggacgaacttcttttcgacaa

SEQ ID NO: 71215 - DNA, 25 bp, SARS Virus
ttaggacgaacctcttttcgacaaa

SEQ ID NO: 71216 - DNA, 25 bp, SARS Virus
taggacgaaccttttttcgacaaaa

SEQ ID NO: 71217 - DNA, 25 bp, SARS Virus
aggacgaacctcttttcgacaaaaa

SEQ ID NO: 71218 - DNA, 25 bp, SARS Virus
ggacgaacctcttttcgacaaaaat

SEQ ID NO: 71219 - DNA, 25 bp, SARS Virus
gacgaacctcttttcgacaaaaata

SEQ ID NO: 71220 - DNA, 25 bp, SARS Virus
acgaacctcttttcgacaaaaatag

SEQ ID NO: 71221 - DNA, 25 bp, SARS Virus
cgaacctctttttgacaaaaataga

SEQ ID NO: 71222 - DNA, 25 bp, SARS Virus
gaacctcttttctacaaaaatagag

SEQ ID NO: 71223 - DNA, 25 bp, SARS Virus
aacctcttttcgtcaaaaatagagt

SEQ ID NO: 71224 - DNA, 25 bp, SARS Virus
acctcttttcgataaaaatagagtg

SEQ ID NO: 71225 - DNA, 25 bp, SARS Virus
cctcttttcgactaaaatagagtgg

SEQ ID NO: 71226 - DNA, 25 bp, SARS Virus
ctcttttcgacataaatagagtgga

SEQ ID NO: 71227 - DNA, 25 bp, SARS Virus
tcttttcgacaataatagagtggaa

SEQ ID NO: 71228 - DNA, 25 bp, SARS Virus
cttttcgacaaatatagagtggaat

SEQ ID NO: 71229 - DNA, 25 bp, SARS Virus
ttttcgacaaaattagagtggaata

SEQ ID NO: 71230 - DNA, 25 bp, SARS Virus
tttcgacaaaaatagagtggaatat

SEQ ID NO: 71231 - DNA, 25 bp, SARS Virus
ttcgacaaaaattgagtggaatatt

SEQ ID NO: 71232 - DNA, 25 bp, SARS Virus
tcgacaaaaatatagtggaatatta

SEQ ID NO: 71233 - DNA, 25 bp, SARS Virus
cgacaaaaatagtgtggaatattaa

SEQ ID NO: 71234 - DNA, 25 bp, SARS Virus
gacaaaaatagattggaatattaag

SEQ ID NO: 71235 - DNA, 25 bp, SARS Virus
acaaaaatagagtggaatattaagt

SEQ ID NO: 71236 - DNA, 25 bp, SARS Virus
caaaaatagagttgaatattaagtg

SEQ ID NO: 71237 - DNA, 25 bp, SARS Virus
aaaaatagagtgtaatattaagtgt

SEQ ID NO: 71238 - DNA, 25 bp, SARS Virus
aaaatagagtggtatattaagtgtc

SEQ ID NO: 71239 - DNA, 25 bp, SARS Virus
aaatagagtggattattaagtgtct

SEQ ID NO: 71240 - DNA, 25 bp, SARS Virus
aatagagtggaatattaagtgtctt

SEQ ID NO: 71241 - DNA, 25 bp, SARS Virus
atagagtggaattttaagtgtcttg

SEQ ID NO: 71242 - DNA, 25 bp, SARS Virus
tagagtggaatattaagtgtcttgc

SEQ ID NO: 71243 - DNA, 25 bp, SARS Virus
agagtggaatattaagtgtcttgcg

SEQ ID NO: 71244 - DNA, 25 bp, SARS Virus
gagtggaatatttagtgtcttgcga

SEQ ID NO: 71245 - DNA, 25 bp, SARS Virus
agtggaatattatgtgtcttgcgac

SEQ ID NO: 71246 - DNA, 25 bp, SARS Virus
gtggaatattaattgtcttgcgaca

SEQ ID NO: 71247 - DNA, 25 bp, SARS Virus
tggaatattaagtgtcttgcgacat

SEQ ID NO: 71248 - DNA, 25 bp, SARS Virus
ggaatattaagtttcttgcgacatc

SEQ ID NO: 71249 - DNA, 25 bp, SARS Virus
gaatattaagtgtcttgcgacatcg

SEQ ID NO: 71250 - DNA, 25 bp, SARS Virus
aatattaagtgttttgcgacatcga

SEQ ID NO: 71251 - DNA, 25 bp, SARS Virus
atattaagtgtcttgcgacatcgaa

SEQ ID NO: 71252 - DNA, 25 bp, SARS Virus
tattaagtgtcttgcgacatcgaag

SEQ ID NO: 71253 - DNA, 25 bp, SARS Virus
attaagtgtctttcgacatcgaagt

SEQ ID NO: 71254 - DNA, 25 bp, SARS Virus
ttaagtgtcttgtgacatcgaagtt

SEQ ID NO: 71255 - DNA, 25 bp, SARS Virus
taagtgtcttgctacatcgaagttt

SEQ ID NO: 71256 - DNA, 25 bp, SARS Virus
aagtgtcttgcgtcatcgaagtttt

SEQ ID NO: 71257 - DNA, 25 bp, SARS Virus
agtgtcttgcgatatcgaagttttt

SEQ ID NO: 71258 - DNA, 25 bp, SARS Virus
gtgtcttgcgacttcgaagttttta

SEQ ID NO: 71259 - DNA, 25 bp, SARS Virus
tgtcttgcgacatcgaagtttttag

SEQ ID NO: 71260 - DNA, 25 bp, SARS Virus
gtcttgcgacattgaagtttttaga

SEQ ID NO: 71261 - DNA, 25 bp, SARS Virus
tcttgcgacatctaagtttttagaa

SEQ ID NO: 71262 - DNA, 25 bp, SARS Virus
cttgcgacatcgtagtttttagaat

SEQ ID NO: 71263 - DNA, 25 bp, SARS Virus
ttgcgacatcgatgtttttagaatc

SEQ ID NO: 71264 - DNA, 25 bp, SARS Virus
tgcgacatcgaattttttagaatcc

SEQ ID NO: 71265 - DNA, 25 bp, SARS Virus
gcgacatcgaagtttttagaatcct

SEQ ID NO: 71266 - DNA, 25 bp, SARS Virus
cgacatcgaagtttttagaatccta

SEQ ID NO: 71267 - DNA, 25 bp, SARS Virus
gacatcgaagtttttagaatcctaa

SEQ ID NO: 71268 - DNA, 25 bp, SARS Virus
acatcgaagtttttagaatcctaac

SEQ ID NO: 71269 - DNA, 25 bp, SARS Virus
catcgaagtttttagaatcctaacg

SEQ ID NO: 71270 - DNA, 25 bp, SARS Virus
atcgaagttttttgaatcctaacgg

SEQ ID NO: 71271 - DNA, 25 bp, SARS Virus
tcgaagtttttataatcctaacgga

SEQ ID NO: 71272 - DNA, 25 bp, SARS Virus
cgaagtttttagtatcctaacggat

SEQ ID NO: 71273 - DNA, 25 bp, SARS Virus
gaagtttttagattcctaacggatg

SEQ ID NO: 71274 - DNA, 25 bp, SARS Virus
aagtttttagaatcctaacggatgc

SEQ ID NO: 71275 - DNA, 25 bp, SARS Virus
agtttttagaattctaacggatgcg

SEQ ID NO: 71276 - DNA, 25 bp, SARS Virus
gtttttagaatcttaacggatgcgt

SEQ ID NO: 71277 - DNA, 25 bp, SARS Virus
tttttagaatcctaacggatgcgtc

SEQ ID NO: 71278 - DNA, 25 bp, SARS Virus
ttttagaatccttacggatgcgtct

SEQ ID NO: 71279 - DNA, 25 bp, SARS Virus
tttagaatcctatcggatgcgtctg

SEQ ID NO: 71280 - DNA, 25 bp, SARS Virus
ttagaatcctaatggatgcgtctga

SEQ ID NO: 71281 - DNA, 25 bp, SARS Virus
tagaatcctaactgatgcgtctgac

SEQ ID NO: 71282 - DNA, 25 bp, SARS Virus
agaatcctaacgtatgcgtctgaca

SEQ ID NO: 71283 - DNA, 25 bp, SARS Virus
gaatcctaacggttgcgtctgacaa

SEQ ID NO: 71284 - DNA, 25 bp, SARS Virus
aatcctaacggatgcgtctgacaac

SEQ ID NO: 71285 - DNA, 25 bp, SARS Virus
atcctaacggattcgtctgacaact

SEQ ID NO: 71286 - DNA, 25 bp, SARS Virus
tcctaacggatgtgtctgacaacta

SEQ ID NO: 71287 - DNA, 25 bp, SARS Virus
cctaacggatgcttctgacaactaa

SEQ ID NO: 71288 - DNA, 25 bp, SARS Virus
ctaacggatgcgtctgacaactaag

SEQ ID NO: 71289 - DNA, 25 bp, SARS Virus
taacggatgcgtttgacaactaagt

SEQ ID NO: 71290 - DNA, 25 bp, SARS Virus
aacggatgcgtctgacaactaagta

SEQ ID NO: 71291 - DNA, 25 bp, SARS Virus
acggatgcgtcttacaactaagtag

SEQ ID NO: 71292 - DNA, 25 bp, SARS Virus
cggatgcgtctgtcaactaagtagt

SEQ ID NO: 71293 - DNA, 25 bp, SARS Virus
ggatgcgtctgataactaagtagtg

SEQ ID NO: 71294 - DNA, 25 bp, SARS Virus
gatgcgtctgactactaagtagtgt

SEQ ID NO: 71295 - DNA, 25 bp, SARS Virus
atgcgtctgacatctaagtagtgtc

SEQ ID NO: 71296 - DNA, 25 bp, SARS Virus
tgcgtctgacaattaagtagtgtcc

SEQ ID NO: 71297 - DNA, 25 bp, SARS Virus
gcgtctgacaactaagtagtgtccc

SEQ ID NO: 71298 - DNA, 25 bp, SARS Virus
cgtctgacaacttagtagtgtccca

SEQ ID NO: 71299 - DNA, 25 bp, SARS Virus
gtctgacaactatgtagtgtcccaa

SEQ ID NO: 71300 - DNA, 25 bp, SARS Virus
tctgacaactaattagtgtcccaag

SEQ ID NO: 71301 - DNA, 25 bp, SARS Virus
ctgacaactaagtagtgtcccaaga

SEQ ID NO: 71302 - DNA, 25 bp, SARS Virus
tgacaactaagttgtgtcccaagac

SEQ ID NO: 71303 - DNA, 25 bp, SARS Virus
gacaactaagtattgtcccaagact

SEQ ID NO: 71304 - DNA, 25 bp, SARS Virus
acaactaagtagtgtcccaagactt

SEQ ID NO: 71305 - DNA, 25 bp, SARS Virus
caactaagtagtttcccaagactta

SEQ ID NO: 71306 - DNA, 25 bp, SARS Virus
aactaagtagtgtcccaagacttat

SEQ ID NO: 71307 - DNA, 25 bp, SARS Virus
actaagtagtgttccaagacttata

SEQ ID NO: 71308 - DNA, 25 bp, SARS Virus
ctaagtagtgtctcaagacttatac

SEQ ID NO: 71309 - DNA, 25 bp, SARS Virus
taagtagtgtcctaagacttatact

SEQ ID NO: 71310 - DNA, 25 bp, SARS Virus
aagtagtgtccctagacttatactg

SEQ ID NO: 71311 - DNA, 25 bp, SARS Virus
agtagtgtcccatgacttatactga

SEQ ID NO: 71312 - DNA, 25 bp, SARS Virus
gtagtgtcccaatacttatactgat

SEQ ID NO: 71313 - DNA, 25 bp, SARS Virus
tagtgtcccaagtcttatactgata

SEQ ID NO: 71314 - DNA, 25 bp, SARS Virus
agtgtcccaagatttatactgatac

SEQ ID NO: 71315 - DNA, 25 bp, SARS Virus
gtgtcccaagacttatactgataca

SEQ ID NO: 71316 - DNA, 25 bp, SARS Virus
tgtcccaagacttatactgatacag

SEQ ID NO: 71317 - DNA, 25 bp, SARS Virus
gtcccaagacttttactgatacagt

SEQ ID NO: 71318 - DNA, 25 bp, SARS Virus
tcccaagacttatactgatacagta

SEQ ID NO: 71319 - DNA, 25 bp, SARS Virus
cccaagacttattctgatacagtat

SEQ ID NO: 71320 - DNA, 25 bp, SARS Virus
ccaagacttatattgatacagtata

SEQ ID NO: 71321 - DNA, 25 bp, SARS Virus
caagacttatactgatacagtataa

SEQ ID NO: 71322 - DNA, 25 bp, SARS Virus
aagacttatacttatacagtataag

SEQ ID NO: 71323 - DNA, 25 bp, SARS Virus
agacttatactgttacagtataagt

SEQ ID NO: 71324 - DNA, 25 bp, SARS Virus
gacttatactgatacagtataagtg

SEQ ID NO: 71325 - DNA, 25 bp, SARS Virus
acttatactgattcagtataagtgt

SEQ ID NO: 71326 - DNA, 25 bp, SARS Virus
cttatactgatatagtataagtgtg

SEQ ID NO: 71327 - DNA, 25 bp, SARS Virus
ttatactgatactgtataagtgtgt

SEQ ID NO: 71328 - DNA, 25 bp, SARS Virus
tatactgatacattataagtgtgtt

SEQ ID NO: 71329 - DNA, 25 bp, SARS Virus
atactgatacagtataagtgtgttt

SEQ ID NO: 71330 - DNA, 25 bp, SARS Virus
tactgatacagtttaagtgtgtttg

SEQ ID NO: 71331 - DNA, 25 bp, SARS Virus
actgatacagtataagtgtgtttga

SEQ ID NO: 71332 - DNA, 25 bp, SARS Virus
ctgatacagtattagtgtgtttgat

SEQ ID NO: 71333 - DNA, 25 bp, SARS Virus
tgatacagtatatgtgtgtttgatg

SEQ ID NO: 71334 - DNA, 25 bp, SARS Virus
gatacagtataattgtgtttgatga

SEQ ID NO: 71335 - DNA, 25 bp, SARS Virus
atacagtataagtgtgtttgatgac

SEQ ID NO: 71336 - DNA, 25 bp, SARS Virus
tacagtataagtttgtttgatgact

SEQ ID NO: 71337 - DNA, 25 bp, SARS Virus
acagtataagtgtgtttgatgactt

SEQ ID NO: 71338 - DNA, 25 bp, SARS Virus
cagtataagtgtttttgatgacttt

SEQ ID NO: 71339 - DNA, 25 bp, SARS Virus
agtataagtgtgtttgatgactttg

SEQ ID NO: 71340 - DNA, 25 bp, SARS Virus
gtataagtgtgtttgatgactttgt

SEQ ID NO: 71341 - DNA, 25 bp, SARS Virus
tataagtgtgtttgatgactttgtc

SEQ ID NO: 71342 - DNA, 25 bp, SARS Virus
ataagtgtgttttatgactttgtcg

SEQ ID NO: 71343 - DNA, 25 bp, SARS Virus
taagtgtgtttgttgactttgtcgt

SEQ ID NO: 71344 - DNA, 25 bp, SARS Virus
aagtgtgtttgatgactttgtcgtg

SEQ ID NO: 71345 - DNA, 25 bp, SARS Virus
agtgtgtttgattactttgtcgtgt

SEQ ID NO: 71346 - DNA, 25 bp, SARS Virus
gtgtgtttgatgtctttgtcgtgtg

SEQ ID NO: 71347 - DNA, 25 bp, SARS Virus
tgtgtttgatgattttgtcgtgtga

SEQ ID NO: 71348 - DNA, 25 bp, SARS Virus
gtgtttgatgactttgtcgtgtgag

SEQ ID NO: 71349 - DNA, 25 bp, SARS Virus
tgtttgatgactttgtcgtgtgaga

SEQ ID NO: 71350 - DNA, 25 bp, SARS Virus
gtttgatgactttgtcgtgtgagaa

SEQ ID NO: 71351 - DNA, 25 bp, SARS Virus
tttgatgactttttcgtgtgagaac

SEQ ID NO: 71352 - DNA, 25 bp, SARS Virus
ttgatgactttgtcgtgtgagaaca

SEQ ID NO: 71353 - DNA, 25 bp, SARS Virus
tgatgactttgttgtgtgagaacat

SEQ ID NO: 71354 - DNA, 25 bp, SARS Virus
gatgactttgtcttgtgagaacatt

SEQ ID NO: 71355 - DNA, 25 bp, SARS Virus
atgactttgtcgtgtgagaacatta

SEQ ID NO: 71356 - DNA, 25 bp, SARS Virus
tgactttgtcgtttgagaacattac

SEQ ID NO: 71357 - DNA, 25 bp, SARS Virus
gactttgtcgtgtgagaacattaca

SEQ ID NO: 71358 - DNA, 25 bp, SARS Virus
actttgtcgtgttagaacattacag

SEQ ID NO: 71359 - DNA, 25 bp, SARS Virus
ctttgtcgtgtgtgaacattacagt

SEQ ID NO: 71360 - DNA, 25 bp, SARS Virus
tttgtcgtgtgataacattacagtt

SEQ ID NO: 71361 - DNA, 25 bp, SARS Virus
ttgtcgtgtgagtacattacagttg

SEQ ID NO: 71362 - DNA, 25 bp, SARS Virus
tgtcgtgtgagatcattacagttgg

SEQ ID NO: 71363 - DNA, 25 bp, SARS Virus
gtcgtgtgagaatattacagttggc

SEQ ID NO: 71364 - DNA, 25 bp, SARS Virus
tcgtgtgagaactttacagttggcg

SEQ ID NO: 71365 - DNA, 25 bp, SARS Virus
cgtgtgagaacattacagttggcga

SEQ ID NO: 71366 - DNA, 25 bp, SARS Virus
gtgtgagaacattacagttggcgaa

SEQ ID NO: 71367 - DNA, 25 bp, SARS Virus
tgtgagaacatttcagttggcgaag

SEQ ID NO: 71368 - DNA, 25 bp, SARS Virus
gtgagaacattatagttggcgaagt

SEQ ID NO: 71369 - DNA, 25 bp, SARS Virus
tgagaacattactgttggcgaagtt

SEQ ID NO: 71370 - DNA, 25 bp, SARS Virus
gagaacattacatttggcgaagtta

SEQ ID NO: 71371 - DNA, 25 bp, SARS Virus
agaacattacagttggcgaagttac

SEQ ID NO: 71372 - DNA, 25 bp, SARS Virus
gaacattacagttggcgaagttaca

SEQ ID NO: 71373 - DNA, 25 bp, SARS Virus
aacattacagtttgcgaagttacac

SEQ ID NO: 71374 - DNA, 25 bp, SARS Virus
acattacagttgtcgaagttacacc

SEQ ID NO: 71375 - DNA, 25 bp, SARS Virus
cattacagttggtgaagttacaccg

SEQ ID NO: 71376 - DNA, 25 bp, SARS Virus
attacagttggctaagttacaccga

SEQ ID NO: 71377 - DNA, 25 bp, SARS Virus
ttacagttggcgaagttacaccgat

SEQ ID NO: 71378 - DNA, 25 bp, SARS Virus
tacagttggcgaagttacaccgata

SEQ ID NO: 71379 - DNA, 25 bp, SARS Virus
acagttggcgaaattacaccgatag

SEQ ID NO: 71380 - DNA, 25 bp, SARS Virus
cagttggcgaagatacaccgatagt

SEQ ID NO: 71381 - DNA, 25 bp, SARS Virus
agttggcgaagtaacaccgatagtg

SEQ ID NO: 71382 - DNA, 25 bp, SARS Virus
gttggcgaagttacaccgatagtgt

SEQ ID NO: 71383 - DNA, 25 bp, SARS Virus
ttggcgaagttaaaccgatagtgtt

SEQ ID NO: 71384 - DNA, 25 bp, SARS Virus
tggcgaagttacaccgatagtgttc

SEQ ID NO: 71385 - DNA, 25 bp, SARS Virus
ggcgaagttacaacgatagtgttcc

SEQ ID NO: 71386 - DNA, 25 bp, SARS Virus
gcgaagttacacagatagtgttccc

SEQ ID NO: 71387 - DNA, 25 bp, SARS Virus
cgaagttacaccaatagtgttcccg

SEQ ID NO: 71388 - DNA, 25 bp, SARS Virus
gaagttacaccgatagtgttcccgt

SEQ ID NO: 71389 - DNA, 25 bp, SARS Virus
aagttacaccgaaagtgttcccgtt

SEQ ID NO: 71390 - DNA, 25 bp, SARS Virus
agttacaccgatagtgttcccgttt

SEQ ID NO: 71391 - DNA, 25 bp, SARS Virus
gttacaccgataatgttcccgtttt

SEQ ID NO: 71392 - DNA, 25 bp, SARS Virus
ttacaccgatagagttcccgttttt

SEQ ID NO: 71393 - DNA, 25 bp, SARS Virus
tacaccgatagtattcccgttttta

SEQ ID NO: 71394 - DNA, 25 bp, SARS Virus
acaccgatagtgatcccgtttttaa

SEQ ID NO: 71395 - DNA, 25 bp, SARS Virus
caccgatagtgtacccgtttttaac

SEQ ID NO: 71396 - DNA, 25 bp, SARS Virus
accgatagtgttaccgtttttaacc

SEQ ID NO: 71397 - DNA, 25 bp, SARS Virus
ccgatagtgttcacgtttttaaccg

SEQ ID NO: 71398 - DNA, 25 bp, SARS Virus
cgatagtgttccagtttttaaccgt

SEQ ID NO: 71399 - DNA, 25 bp, SARS Virus
gatagtgttcccatttttaaccgta

SEQ ID NO: 71400 - DNA, 25 bp, SARS Virus
atagtgttcccgattttaaccgtaa

SEQ ID NO: 71401 - DNA, 25 bp, SARS Virus
tagtgttcccgtatttaaccgtaaa

SEQ ID NO: 71402 - DNA, 25 bp, SARS Virus
agtgttcccgttattaaccgtaaaa

SEQ ID NO: 71403 - DNA, 25 bp, SARS Virus
gtgttcccgtttataaccgtaaaac

SEQ ID NO: 71404 - DNA, 25 bp, SARS Virus
tgttcccgttttaaaccgtaaaaca

SEQ ID NO: 71405 - DNA, 25 bp, SARS Virus
gttcccgtttttaaccgtaaaacac

SEQ ID NO: 71406 - DNA, 25 bp, SARS Virus
ttcccgtttttaaccgtaaaacacg

SEQ ID NO: 71407 - DNA, 25 bp, SARS Virus
tcccgtttttaaacgtaaaacacgt

SEQ ID NO: 71408 - DNA, 25 bp, SARS Virus
cccgtttttaacagtaaaacacgta

SEQ ID NO: 71409 - DNA, 25 bp, SARS Virus
ccgtttttaaccataaaacacgtat

SEQ ID NO: 71410 - DNA, 25 bp, SARS Virus
cgtttttaaccgaaaaacacgtatt

SEQ ID NO: 71411 - DNA, 25 bp, SARS Virus
gtttttaaccgtaaaacacgtatta

SEQ ID NO: 71412 - DNA, 25 bp, SARS Virus
tttttaaccgtaaaacacgtattac

SEQ ID NO: 71413 - DNA, 25 bp, SARS Virus
ttttaaccgtaaaacacgtattaca

SEQ ID NO: 71414 - DNA, 25 bp, SARS Virus
tttaaccgtaaaacacgtattacag

SEQ ID NO: 71415 - DNA, 25 bp, SARS Virus
ttaaccgtaaaaaacgtattacaga

SEQ ID NO: 71416 - DNA, 25 bp, SARS Virus
taaccgtaaaacacgtattacagac

SEQ ID NO: 71417 - DNA, 25 bp, SARS Virus
aaccgtaaaacaagtattacagact

SEQ ID NO: 71418 - DNA, 25 bp, SARS Virus
accgtaaaacacatattacagacta

SEQ ID NO: 71419 - DNA, 25 bp, SARS Virus
ccgtaaaacacgaattacagactat

SEQ ID NO: 71420 - DNA, 25 bp, SARS Virus
cgtaaaacacgtattacagactatc

SEQ ID NO: 71421 - DNA, 25 bp, SARS Virus
gtaaaacacgtaatacagactatct

SEQ ID NO: 71422 - DNA, 25 bp, SARS Virus
taaaacacgtataacagactatctc

SEQ ID NO: 71423 - DNA, 25 bp, SARS Virus
aaaacacgtattacagactatctct

SEQ ID NO: 71424 - DNA, 25 bp, SARS Virus
aaacacgtattaaagactatctcta

SEQ ID NO: 71425 - DNA, 25 bp, SARS Virus
aacacgtattacagactatctctag

SEQ ID NO: 71426 - DNA, 25 bp, SARS Virus
acacgtattacaaactatctctaga

SEQ ID NO: 71427 - DNA, 25 bp, SARS Virus
cacgtattacagactatctctagaa

SEQ ID NO: 71428 - DNA, 25 bp, SARS Virus
acgtattacagaatatctctagaaa

SEQ ID NO: 71429 - DNA, 25 bp, SARS Virus
cgtattacagacaatctctagaaat

SEQ ID NO: 71430 - DNA, 25 bp, SARS Virus
gtattacagactatctctagaaata

SEQ ID NO: 71431 - DNA, 25 bp, SARS Virus
tattacagactaactctagaaatac

SEQ ID NO: 71432 - DNA, 25 bp, SARS Virus
attacagactatatctagaaatact

SEQ ID NO: 71433 - DNA, 25 bp, SARS Virus
ttacagactatcactagaaatactg

SEQ ID NO: 71434 - DNA, 25 bp, SARS Virus
tacagactatctatagaaatactgt

SEQ ID NO: 71435 - DNA, 25 bp, SARS Virus
acagactatctcaagaaatactgtt

SEQ ID NO: 71436 - DNA, 25 bp, SARS Virus
cagactatctctagaaatactgttt

SEQ ID NO: 71437 - DNA, 25 bp, SARS Virus
agactatctctaaaaatactgtttg

SEQ ID NO: 71438 - DNA, 25 bp, SARS Virus
gactatctctagaaatactgtttga

SEQ ID NO: 71439 - DNA, 25 bp, SARS Virus
actatctctagaaatactgtttgac

SEQ ID NO: 71440 - DNA, 25 bp, SARS Virus
ctatctctagaaatactgtttgacg

SEQ ID NO: 71441 - DNA, 25 bp, SARS Virus
tatctctagaaaaactgtttgacgt

SEQ ID NO: 71442 - DNA, 25 bp, SARS Virus
atctctagaaatactgtttgacgtt

SEQ ID NO: 71443 - DNA, 25 bp, SARS Virus
tctctagaaataatgtttgacgtta

SEQ ID NO: 71444 - DNA, 25 bp, SARS Virus
ctctagaaatacagtttgacgttaa

SEQ ID NO: 71445 - DNA, 25 bp, SARS Virus
tctagaaatactatttgacgttaaa

SEQ ID NO: 71446 - DNA, 25 bp, SARS Virus
ctagaaatactgattgacgttaaat

SEQ ID NO: 71447 - DNA, 25 bp, SARS Virus
tagaaatactgtatgacgttaaatg

SEQ ID NO: 71448 - DNA, 25 bp, SARS Virus
agaaatactgttagacgttaaatgt

SEQ ID NO: 71449 - DNA, 25 bp, SARS Virus
gaaatactgtttaacgttaaatgtt

SEQ ID NO: 71450 - DNA, 25 bp, SARS Virus
aaatactgtttgacgttaaatgttc

SEQ ID NO: 71451 - DNA, 25 bp, SARS Virus
aatactgtttgaagttaaatgttca

SEQ ID NO: 71452 - DNA, 25 bp, SARS Virus
atactgtttgacattaaatgttcag

SEQ ID NO: 71453 - DNA, 25 bp, SARS Virus
tactgtttgacgataaatgttcaga

SEQ ID NO: 71454 - DNA, 25 bp, SARS Virus
actgtttgacgtaaaatgttcagat

SEQ ID NO: 71455 - DNA, 25 bp, SARS Virus
ctgtttgacgttaaatgttcagatc

SEQ ID NO: 71456 - DNA, 25 bp, SARS Virus
tgtttgacgttaaatgttcagatct

SEQ ID NO: 71457 - DNA, 25 bp, SARS Virus
gtttgacgttaaatgttcagatctt

SEQ ID NO: 71458 - DNA, 25 bp, SARS Virus
tttgacgttaaaagttcagatcttt

SEQ ID NO: 71459 - DNA, 25 bp, SARS Virus
ttgacgttaaatattcagatcttta

SEQ ID NO: 71460 - DNA, 25 bp, SARS Virus
tgacgttaaatgatcagatctttat

SEQ ID NO: 71461 - DNA, 25 bp, SARS Virus
gacgttaaatgtacagatctttatg

SEQ ID NO: 71462 - DNA, 25 bp, SARS Virus
acgttaaatgttaagatctttatgg

SEQ ID NO: 71463 - DNA, 25 bp, SARS Virus
cgttaaatgttcagatctttatggt

SEQ ID NO: 71464 - DNA, 25 bp, SARS Virus
gttaaatgttcaaatctttatggtg

SEQ ID NO: 71465 - DNA, 25 bp, SARS Virus
ttaaatgttcagatctttatggtgc

SEQ ID NO: 71466 - DNA, 25 bp, SARS Virus
taaatgttcagaactttatggtgca

SEQ ID NO: 71467 - DNA, 25 bp, SARS Virus
aaatgttcagatatttatggtgcag

SEQ ID NO: 71468 - DNA, 25 bp, SARS Virus
aatgttcagatcattatggtgcagc

SEQ ID NO: 71469 - DNA, 25 bp, SARS Virus
atgttcagatctatatggtgcagcg

SEQ ID NO: 71470 - DNA, 25 bp, SARS Virus
tgttcagatcttaatggtgcagcgt

SEQ ID NO: 71471 - DNA, 25 bp, SARS Virus
gttcagatctttatggtgcagcgtt

SEQ ID NO: 71472 - DNA, 25 bp, SARS Virus
ttcagatctttaaggtgcagcgtta

SEQ ID NO: 71473 - DNA, 25 bp, SARS Virus
tcagatctttatagtgcagcgttac

SEQ ID NO: 71474 - DNA, 25 bp, SARS Virus
cagatctttatgatgcagcgttaca

SEQ ID NO: 71475 - DNA, 25 bp, SARS Virus
agatctttatggagcagcgttacac

SEQ ID NO: 71476 - DNA, 25 bp, SARS Virus
gatctttatggtacagcgttacacc

SEQ ID NO: 71477 - DNA, 25 bp, SARS Virus
atctttatggtgaagcgttacaccg

SEQ ID NO: 71478 - DNA, 25 bp, SARS Virus
tctttatggtgcagcgttacaccga

SEQ ID NO: 71479 - DNA, 25 bp, SARS Virus
ctttatggtgcaacgttacaccgat

SEQ ID NO: 71480 - DNA, 25 bp, SARS Virus
tttatggtgcagagttacaccgatg

SEQ ID NO: 71481 - DNA, 25 bp, SARS Virus
ttatggtgcagcattacaccgatgt

SEQ ID NO: 71482 - DNA, 25 bp, SARS Virus
tatggtgcagcgatacaccgatgta

SEQ ID NO: 71483 - DNA, 25 bp, SARS Virus
atggtgcagcgtaacaccgatgtaa

SEQ ID NO: 71484 - DNA, 25 bp, SARS Virus
tggtgcagcgttacaccgatgtaat

SEQ ID NO: 71485 - DNA, 25 bp, SARS Virus
ggtgcagcgttaaaccgatgtaatg

SEQ ID NO: 71486 - DNA, 25 bp, SARS Virus
gtgcagcgttacaccgatgtaatgt

SEQ ID NO: 71487 - DNA, 25 bp, SARS Virus
tgcagcgttacaacgatgtaatgtt

SEQ ID NO: 71488 - DNA, 25 bp, SARS Virus
gcagcgttacacagatgtaatgttc

SEQ ID NO: 71489 - DNA, 25 bp, SARS Virus
cagcgttacaccaatgtaatgttcg

SEQ ID NO: 71490 - DNA, 25 bp, SARS Virus
agcgttacaccgatgtaatgttcgt

SEQ ID NO: 71491 - DNA, 25 bp, SARS Virus
gcgttacaccgaagtaatgttcgtc

SEQ ID NO: 71492 - DNA, 25 bp, SARS Virus
cgttacaccgatataatgttcgtct

SEQ ID NO: 71493 - DNA, 25 bp, SARS Virus
gttacaccgatgaaatgttcgtctt

SEQ ID NO: 71494 - DNA, 25 bp, SARS Virus
ttacaccgatgtaatgttcgtcttt

SEQ ID NO: 71495 - DNA, 25 bp, SARS Virus
tacaccgatgtaatgttcgtctttt

SEQ ID NO: 71496 - DNA, 25 bp, SARS Virus
acaccgatgtaaagttcgtctttta

SEQ ID NO: 71497 - DNA, 25 bp, SARS Virus
caccgatgtaatattcgtcttttac

SEQ ID NO: 71498 - DNA, 25 bp, SARS Virus
accgatgtaatgatcgtcttttaca

SEQ ID NO: 71499 - DNA, 25 bp, SARS Virus
ccgatgtaatgtacgtcttttacat

SEQ ID NO: 71500 - DNA, 25 bp, SARS Virus
cgatgtaatgttagtcttttacatt

SEQ ID NO: 71501 - DNA, 25 bp, SARS Virus
gatgtaatgttcatcttttacattg

SEQ ID NO: 71502 - DNA, 25 bp, SARS Virus
atgtaatgttcgacttttacattga

SEQ ID NO: 71503 - DNA, 25 bp, SARS Virus
tgtaatgttcgtattttacattgac

SEQ ID NO: 71504 - DNA, 25 bp, SARS Virus
gtaatgttcgtcatttacattgacc

SEQ ID NO: 71505 - DNA, 25 bp, SARS Virus
taatgttcgtctattacattgacct

SEQ ID NO: 71506 - DNA, 25 bp, SARS Virus
aatgttcgtcttatacattgacctg

SEQ ID NO: 71507 - DNA, 25 bp, SARS Virus
atgttcgtctttaacattgacctga

SEQ ID NO: 71508 - DNA, 25 bp, SARS Virus
tgttcgtcttttacattgacctgaa

SEQ ID NO: 71509 - DNA, 25 bp, SARS Virus
gttcgtcttttaaattgacctgaaa

SEQ ID NO: 71510 - DNA, 25 bp, SARS Virus
ttcgtcttttacattgacctgaaaa

SEQ ID NO: 71511 - DNA, 25 bp, SARS Virus
tcgtcttttacaatgacctgaaaaa

SEQ ID NO: 71512 - DNA, 25 bp, SARS Virus
cgtcttttacatagacctgaaaaat

SEQ ID NO: 71513 - DNA, 25 bp, SARS Virus
gtcttttacattaacctgaaaaatt

SEQ ID NO: 71514 - DNA, 25 bp, SARS Virus
tcttttacattgacctgaaaaattc

SEQ ID NO: 71515 - DNA, 25 bp, SARS Virus
cttttacattgaactgaaaaattcc

SEQ ID NO: 71516 - DNA, 25 bp, SARS Virus
ttttacattgacatgaaaaattcct

SEQ ID NO: 71517 - DNA, 25 bp, SARS Virus
tttacattgaccagaaaaattcctg

SEQ ID NO: 71518 - DNA, 25 bp, SARS Virus
ttacattgacctaaaaaattcctga

SEQ ID NO: 71519 - DNA, 25 bp, SARS Virus
tacattgacctgaaaaattcctgac

SEQ ID NO: 71520 - DNA, 25 bp, SARS Virus
acattgacctgaaaaattcctgaca

SEQ ID NO: 71521 - DNA, 25 bp, SARS Virus
cattgacctgaaaaattcctgacat

SEQ ID NO: 71522 - DNA, 25 bp, SARS Virus
attgacctgaaaaattcctgacatc

SEQ ID NO: 71523 - DNA, 25 bp, SARS Virus
ttgacctgaaaaattcctgacatca

SEQ ID NO: 71524 - DNA, 25 bp, SARS Virus
tgacctgaaaaaatcctgacatcat

SEQ ID NO: 71525 - DNA, 25 bp, SARS Virus
gacctgaaaaatacctgacatcatt

SEQ ID NO: 71526 - DNA, 25 bp, SARS Virus
acctgaaaaattactgacatcattc

SEQ ID NO: 71527 - DNA, 25 bp, SARS Virus
cctgaaaaattcatgacatcattct

SEQ ID NO: 71528 - DNA, 25 bp, SARS Virus
ctgaaaaattccagacatcattcta

SEQ ID NO: 71529 - DNA, 25 bp, SARS Virus
tgaaaaattcctaacatcattctag

SEQ ID NO: 71530 - DNA, 25 bp, SARS Virus
gaaaaattcctgacatcattctagt

SEQ ID NO: 71531 - DNA, 25 bp, SARS Virus
aaaaattcctgaaatcattctagta

SEQ ID NO: 71532 - DNA, 25 bp, SARS Virus
aaaattcctgacatcattctagtaa

SEQ ID NO: 71533 - DNA, 25 bp, SARS Virus
aaattcctgacaacattctagtaat

SEQ ID NO: 71534 - DNA, 25 bp, SARS Virus
aattcctgacataattctagtaatg

SEQ ID NO: 71535 - DNA, 25 bp, SARS Virus
attcctgacatcattctagtaatga

SEQ ID NO: 71536 - DNA, 25 bp, SARS Virus
ttcctgacatcaatctagtaatgac

SEQ ID NO: 71537 - DNA, 25 bp, SARS Virus
tcctgacatcatactagtaatgacc

SEQ ID NO: 71538 - DNA, 25 bp, SARS Virus
cctgacatcattatagtaatgacca

SEQ ID NO: 71539 - DNA, 25 bp, SARS Virus
ctgacatcattcaagtaatgaccag

SEQ ID NO: 71540 - DNA, 25 bp, SARS Virus
tgacatcattctagtaatgaccaga

SEQ ID NO: 71541 - DNA, 25 bp, SARS Virus
gacatcattctaataatgaccagaa

SEQ ID NO: 71542 - DNA, 25 bp, SARS Virus
acatcattctagaaatgaccagaag

SEQ ID NO: 71543 - DNA, 25 bp, SARS Virus
catcattctagtaatgaccagaagt

SEQ ID NO: 71544 - DNA, 25 bp, SARS Virus
atcattctagtaatgaccagaagta

SEQ ID NO: 71545 - DNA, 25 bp, SARS Virus
tcattctagtaaagaccagaagtag

SEQ ID NO: 71546 - DNA, 25 bp, SARS Virus
cattctagtaataaccagaagtagg

SEQ ID NO: 71547 - DNA, 25 bp, SARS Virus
attctagtaatgaccagaagtagga

SEQ ID NO: 71548 - DNA, 25 bp, SARS Virus
ttctagtaatgaacagaagtaggat

SEQ ID NO: 71549 - DNA, 25 bp, SARS Virus
tctagtaatgacaagaagtaggatg

SEQ ID NO: 71550 - DNA, 25 bp, SARS Virus
ctagtaatgaccagaagtaggatgt

SEQ ID NO: 71551 - DNA, 25 bp, SARS Virus
tagtaatgaccaaaagtaggatgtg

SEQ ID NO: 71552 - DNA, 25 bp, SARS Virus
agtaatgaccagaagtaggatgtgt

SEQ ID NO: 71553 - DNA, 25 bp, SARS Virus
gtaatgaccagaagtaggatgtgtc

SEQ ID NO: 71554 - DNA, 25 bp, SARS Virus
taatgaccagaaataggatgtgtcc

SEQ ID NO: 71555 - DNA, 25 bp, SARS Virus
aatgaccagaagaaggatgtgtccg

SEQ ID NO: 71556 - DNA, 25 bp, SARS Virus
atgaccagaagtaggatgtgtccgt

SEQ ID NO: 71557 - DNA, 25 bp, SARS Virus
tgaccagaagtaagatgtgtccgtg

SEQ ID NO: 71558 - DNA, 25 bp, SARS Virus
gaccagaagtagaatgtgtccgtgg

SEQ ID NO: 71559 - DNA, 25 bp, SARS Virus
accagaagtaggatgtgtccgtgga

SEQ ID NO: 71560 - DNA, 25 bp, SARS Virus
ccagaagtaggaagtgtccgtggat

SEQ ID NO: 71561 - DNA, 25 bp, SARS Virus
cagaagtaggatatgtccgtggatg

SEQ ID NO: 71562 - DNA, 25 bp, SARS Virus
agaagtaggatgagtccgtggatgt

SEQ ID NO: 71563 - DNA, 25 bp, SARS Virus
gaagtaggatgtatccgtggatgtg

SEQ ID NO: 71564 - DNA, 25 bp, SARS Virus
aagtaggatgtgaccgtggatgtgt

SEQ ID NO: 71565 - DNA, 25 bp, SARS Virus
agtaggatgtgtacgtggatgtgtg

SEQ ID NO: 71566 - DNA, 25 bp, SARS Virus
gtaggatgtgtcagtggatgtgtgg

SEQ ID NO: 71567 - DNA, 25 bp, SARS Virus
taggatgtgtccatggatgtgtgga

SEQ ID NO: 71568 - DNA, 25 bp, SARS Virus
aggatgtgtccgaggatgtgtggag

SEQ ID NO: 71569 - DNA, 25 bp, SARS Virus
ggatgtgtccgtagatgtgtggagt

SEQ ID NO: 71570 - DNA, 25 bp, SARS Virus
gatgtgtccgtgaatgtgtggagtc

SEQ ID NO: 71571 - DNA, 25 bp, SARS Virus
atgtgtccgtggatgtgtggagtcg

SEQ ID NO: 71572 - DNA, 25 bp, SARS Virus
tgtgtccgtggaagtgtggagtcgc

SEQ ID NO: 71573 - DNA, 25 bp, SARS Virus
gtgtccgtggatatgtggagtcgca

SEQ ID NO: 71574 - DNA, 25 bp, SARS Virus
tgtccgtggatgagtggagtcgcaa

SEQ ID NO: 71575 - DNA, 25 bp, SARS Virus
gtccgtggatgtatggagtcgcaac

SEQ ID NO: 71576 - DNA, 25 bp, SARS Virus
tccgtggatgtgaggagtcgcaact

SEQ ID NO: 71577 - DNA, 25 bp, SARS Virus
ccgtggatgtgtagagtcgcaacta

SEQ ID NO: 71578 - DNA, 25 bp, SARS Virus
cgtggatgtgtgaagtcgcaactat

SEQ ID NO: 71579 - DNA, 25 bp, SARS Virus
gtggatgtgtggagtcgcaactata

SEQ ID NO: 71580 - DNA, 25 bp, SARS Virus
tggatgtgtggaatcgcaactatat

SEQ ID NO: 71581 - DNA, 25 bp, SARS Virus
ggatgtgtggagacgcaactatatt

SEQ ID NO: 71582 - DNA, 25 bp, SARS Virus
gatgtgtggagtagcaactatattt

SEQ ID NO: 71583 - DNA, 25 bp, SARS Virus
atgtgtggagtcacaactatatttc

SEQ ID NO: 71584 - DNA, 25 bp, SARS Virus
tgtgtggagtcgaaactatatttca

SEQ ID NO: 71585 - DNA, 25 bp, SARS Virus
gtgtggagtcgcaactatatttcaa

SEQ ID NO: 71586 - DNA, 25 bp, SARS Virus
tgtggagtcgcaactatatttcaag

SEQ ID NO: 71587 - DNA, 25 bp, SARS Virus
gtggagtcgcaaatatatttcaagt

SEQ ID NO: 71588 - DNA, 25 bp, SARS Virus
tggagtcgcaacaatatttcaagtt

SEQ ID NO: 71589 - DNA, 25 bp, SARS Virus
ggagtcgcaactatatttcaagttc

SEQ ID NO: 71590 - DNA, 25 bp, SARS Virus
gagtcgcaactaaatttcaagttct

SEQ ID NO: 71591 - DNA, 25 bp, SARS Virus
agtcgcaactatatttcaagttctg

SEQ ID NO: 71592 - DNA, 25 bp, SARS Virus
gtcgcaactataattcaagttctga

SEQ ID NO: 71593 - DNA, 25 bp, SARS Virus
tcgcaactatatatcaagttctgac

SEQ ID NO: 71594 - DNA, 25 bp, SARS Virus
cgcaactatattacaagttctgact

SEQ ID NO: 71595 - DNA, 25 bp, SARS Virus
gcaactatatttaaagttctgactt

SEQ ID NO: 71596 - DNA, 25 bp, SARS Virus
caactatatttcaagttctgacttc

SEQ ID NO: 71597 - DNA, 25 bp, SARS Virus
aactatatttcaagttctgacttcc

SEQ ID NO: 71598 - DNA, 25 bp, SARS Virus
actatatttcaaattctgacttcct

SEQ ID NO: 71599 - DNA, 25 bp, SARS Virus
ctatatttcaagatctgacttccta

SEQ ID NO: 71600 - DNA, 25 bp, SARS Virus
tatatttcaagtactgacttcctaa

SEQ ID NO: 71601 - DNA, 25 bp, SARS Virus
atatttcaagttatgacttcctaat

SEQ ID NO: 71602 - DNA, 25 bp, SARS Virus
tatttcaagttcagacttcctaata

SEQ ID NO: 71603 - DNA, 25 bp, SARS Virus
atttcaagttctaacttcctaatac

SEQ ID NO: 71604 - DNA, 25 bp, SARS Virus
tttcaagttctgacttcctaataca

SEQ ID NO: 71605 - DNA, 25 bp, SARS Virus
ttcaagttctgaattcctaatacac

SEQ ID NO: 71606 - DNA, 25 bp, SARS Virus
tcaagttctgacatcctaatacaca

SEQ ID NO: 71607 - DNA, 25 bp, SARS Virus
caagttctgactacctaatacacaa

SEQ ID NO: 71608 - DNA, 25 bp, SARS Virus
aagttctgacttactaatacacaac

SEQ ID NO: 71609 - DNA, 25 bp, SARS Virus
agttctgacttcataatacacaact

SEQ ID NO: 71610 - DNA, 25 bp, SARS Virus
gttctgacttccaaatacacaactg

SEQ ID NO: 71611 - DNA, 25 bp, SARS Virus
ttctgacttcctaatacacaactgt

SEQ ID NO: 71612 - DNA, 25 bp, SARS Virus
tctgacttcctaatacacaactgta

SEQ ID NO: 71613 - DNA, 25 bp, SARS Virus
ctgacttcctaaaacacaactgtat

SEQ ID NO: 71614 - DNA, 25 bp, SARS Virus
tgacttcctaatacacaactgtatg

SEQ ID NO: 71615 - DNA, 25 bp, SARS Virus
gacttcctaataaacaactgtatgg

SEQ ID NO: 71616 - DNA, 25 bp, SARS Virus
acttcctaatacacaactgtatggt

SEQ ID NO: 71617 - DNA, 25 bp, SARS Virus
cttcctaatacaaaactgtatggtc

SEQ ID NO: 71618 - DNA, 25 bp, SARS Virus
ttcctaatacacaactgtatggtcc

SEQ ID NO: 71619 - DNA, 25 bp, SARS Virus
tcctaatacacaactgtatggtccg

SEQ ID NO: 71620 - DNA, 25 bp, SARS Virus
cctaatacacaaatgtatggtccgt

SEQ ID NO: 71621 - DNA, 25 bp, SARS Virus
ctaatacacaacagtatggtccgta

SEQ ID NO: 71622 - DNA, 25 bp, SARS Virus
taatacacaactatatggtccgtat

SEQ ID NO: 71623 - DNA, 25 bp, SARS Virus
aatacacaactgaatggtccgtatg

SEQ ID NO: 71624 - DNA, 25 bp, SARS Virus
atacacaactgtatggtccgtatgg

SEQ ID NO: 71625 - DNA, 25 bp, SARS Virus
tacacaactgtaaggtccgtatggt

SEQ ID NO: 71626 - DNA, 25 bp, SARS Virus
acacaactgtatagtccgtatggtt

SEQ ID NO: 71627 - DNA, 25 bp, SARS Virus
cacaactgtatgatccgtatggttt

SEQ ID NO: 71628 - DNA, 25 bp, SARS Virus
acaactgtatggaccgtatggtttc

SEQ ID NO: 71629 - DNA, 25 bp, SARS Virus
caactgtatggtacgtatggtttcc

SEQ ID NO: 71630 - DNA, 25 bp, SARS Virus
aactgtatggtcagtatggtttcct

SEQ ID NO: 71631 - DNA, 25 bp, SARS Virus
actgtatggtccatatggtttcctg

SEQ ID NO: 71632 - DNA, 25 bp, SARS Virus
ctgtatggtccgaatggtttcctgt

SEQ ID NO: 71633 - DNA, 25 bp, SARS Virus
tgtatggtccgtatggtttcctgta

SEQ ID NO: 71634 - DNA, 25 bp, SARS Virus
gtatggtccgtaaggtttcctgtac

SEQ ID NO: 71635 - DNA, 25 bp, SARS Virus
tatggtccgtatagtttcctgtact

SEQ ID NO: 71636 - DNA, 25 bp, SARS Virus
atggtccgtatgatttcctgtactg

SEQ ID NO: 71637 - DNA, 25 bp, SARS Virus
tggtccgtatggattcctgtactgg

SEQ ID NO: 71638 - DNA, 25 bp, SARS Virus
ggtccgtatggtatcctgtactgga

SEQ ID NO: 71639 - DNA, 25 bp, SARS Virus
gtccgtatggttacctgtactggat

SEQ ID NO: 71640 - DNA, 25 bp, SARS Virus
tccgtatggtttactgtactggatg

SEQ ID NO: 71641 - DNA, 25 bp, SARS Virus
ccgtatggtttcatgtactggatgg

SEQ ID NO: 71642 - DNA, 25 bp, SARS Virus
cgtatggtttccagtactggatggc

SEQ ID NO: 71643 - DNA, 25 bp, SARS Virus
gtatggtttcctatactggatggca

SEQ ID NO: 71644 - DNA, 25 bp, SARS Virus
tatggtttcctgaactggatggcat

SEQ ID NO: 71645 - DNA, 25 bp, SARS Virus
atggtttcctgtactggatggcatc

SEQ ID NO: 71646 - DNA, 25 bp, SARS Virus
tggtttcctgtaatggatggcatct

SEQ ID NO: 71647 - DNA, 25 bp, SARS Virus
ggtttcctgtacaggatggcatctg

SEQ ID NO: 71648 - DNA, 25 bp, SARS Virus
gtttcctgtactagatggcatctga

SEQ ID NO: 71649 - DNA, 25 bp, SARS Virus
tttcctgtactgaatggcatctgag

SEQ ID NO: 71650 - DNA, 25 bp, SARS Virus
ttcctgtactggatggcatctgagt

SEQ ID NO: 71651 - DNA, 25 bp, SARS Virus
tcctgtactggaaggcatctgagta

SEQ ID NO: 71652 - DNA, 25 bp, SARS Virus
cctgtactggatagcatctgagtag

SEQ ID NO: 71653 - DNA, 25 bp, SARS Virus
ctgtactggatgacatctgagtaga

SEQ ID NO: 71654 - DNA, 25 bp, SARS Virus
tgtactggatggaatctgagtagag

SEQ ID NO: 71655 - DNA, 25 bp, SARS Virus
gtactggatggcatctgagtagaga

SEQ ID NO: 71656 - DNA, 25 bp, SARS Virus
tactggatggcaactgagtagagat

SEQ ID NO: 71657 - DNA, 25 bp, SARS Virus
actggatggcatatgagtagagata

SEQ ID NO: 71658 - DNA, 25 bp, SARS Virus
ctggatggcatcagagtagagatac

SEQ ID NO: 71659 - DNA, 25 bp, SARS Virus
tggatggcatctaagtagagatact

SEQ ID NO: 71660 - DNA, 25 bp, SARS Virus
ggatggcatctgagtagagatacta

SEQ ID NO: 71661 - DNA, 25 bp, SARS Virus
gatggcatctgaatagagatactac

SEQ ID NO: 71662 - DNA, 25 bp, SARS Virus
atggcatctgagaagagatactacc

SEQ ID NO: 71663 - DNA, 25 bp, SARS Virus
tggcatctgagtagagatactaccc

SEQ ID NO: 71664 - DNA, 25 bp, SARS Virus
ggcatctgagtaaagatactaccca

SEQ ID NO: 71665 - DNA, 25 bp, SARS Virus
gcatctgagtagagatactacccaa

SEQ ID NO: 71666 - DNA, 25 bp, SARS Virus
catctgagtagaaatactacccaaa

SEQ ID NO: 71667 - DNA, 25 bp, SARS Virus
atctgagtagagatactacccaaag

SEQ ID NO: 71668 - DNA, 25 bp, SARS Virus
tctgagtagagaaactacccaaagt

SEQ ID NO: 71669 - DNA, 25 bp, SARS Virus
ctgagtagagatactacccaaagtt

SEQ ID NO: 71670 - DNA, 25 bp, SARS Virus
tgagtagagataatacccaaagttt

SEQ ID NO: 71671 - DNA, 25 bp, SARS Virus
gagtagagatacaacccaaagtttt

SEQ ID NO: 71672 - DNA, 25 bp, SARS Virus
agtagagatactacccaaagtttta

SEQ ID NO: 71673 - DNA, 25 bp, SARS Virus
gtagagatactaaccaaagttttac

SEQ ID NO: 71674 - DNA, 25 bp, SARS Virus
tagagatactacacaaagttttact

SEQ ID NO: 71675 - DNA, 25 bp, SARS Virus
agagatactaccaaaagttttactt

SEQ ID NO: 71676 - DNA, 25 bp, SARS Virus
gagatactacccaaagttttactta

SEQ ID NO: 71677 - DNA, 25 bp, SARS Virus
agatactacccaaagttttacttaa

SEQ ID NO: 71678 - DNA, 25 bp, SARS Virus
gatactacccaaagttttacttaat

SEQ ID NO: 71679 - DNA, 25 bp, SARS Virus
atactacccaaaattttacttaatg

SEQ ID NO: 71680 - DNA, 25 bp, SARS Virus
tactacccaaagatttacttaatgg

SEQ ID NO: 71681 - DNA, 25 bp, SARS Virus
actacccaaagtattacttaatggt

SEQ ID NO: 71682 - DNA, 25 bp, SARS Virus
ctacccaaagttatacttaatggtt

SEQ ID NO: 71683 - DNA, 25 bp, SARS Virus
tacccaaagtttaacttaatggttc

SEQ ID NO: 71684 - DNA, 25 bp, SARS Virus
acccaaagttttacttaatggttca

SEQ ID NO: 71685 - DNA, 25 bp, SARS Virus
cccaaagttttaattaatggttcag

SEQ ID NO: 71686 - DNA, 25 bp, SARS Virus
ccaaagttttacataatggttcagt

SEQ ID NO: 71687 - DNA, 25 bp, SARS Virus
caaagttttactaaatggttcagtt

SEQ ID NO: 71688 - DNA, 25 bp, SARS Virus
aaagttttacttaatggttcagtta

SEQ ID NO: 71689 - DNA, 25 bp, SARS Virus
aagttttacttaatggttcagttac

SEQ ID NO: 71690 - DNA, 25 bp, SARS Virus
agttttacttaaaggttcagttacc

SEQ ID NO: 71691 - DNA, 25 bp, SARS Virus
gttttacttaatagttcagttacca

SEQ ID NO: 71692 - DNA, 25 bp, SARS Virus
ttttacttaatgattcagttaccaa

SEQ ID NO: 71693 - DNA, 25 bp, SARS Virus
tttacttaatggatcagttaccaat

SEQ ID NO: 71694 - DNA, 25 bp, SARS Virus
ttacttaatggtacagttaccaatg

SEQ ID NO: 71695 - DNA, 25 bp, SARS Virus
tacttaatggttaagttaccaatgg

SEQ ID NO: 71696 - DNA, 25 bp, SARS Virus
acttaatggttcagttaccaatggg

SEQ ID NO: 71697 - DNA, 25 bp, SARS Virus
cttaatggttcaattaccaatggga

SEQ ID NO: 71698 - DNA, 25 bp, SARS Virus
ttaatggttcagataccaatgggat

SEQ ID NO: 71699 - DNA, 25 bp, SARS Virus
taatggttcagtaaccaatgggatt

SEQ ID NO: 71700 - DNA, 25 bp, SARS Virus
aatggttcagttaccaatgggatta

SEQ ID NO: 71701 - DNA, 25 bp, SARS Virus
atggttcagttaacaatgggattat

SEQ ID NO: 71702 - DNA, 25 bp, SARS Virus
tggttcagttacaaatgggattata

SEQ ID NO: 71703 - DNA, 25 bp, SARS Virus
ggttcagttaccaatgggattatac

SEQ ID NO: 71704 - DNA, 25 bp, SARS Virus
gttcagttaccaatgggattataca

SEQ ID NO: 71705 - DNA, 25 bp, SARS Virus
ttcagttaccaaagggattatacaa

SEQ ID NO: 71706 - DNA, 25 bp, SARS Virus
tcagttaccaataggattatacaaa

SEQ ID NO: 71707 - DNA, 25 bp, SARS Virus
cagttaccaatgagattatacaaat

SEQ ID NO: 71708 - DNA, 25 bp, SARS Virus
agttaccaatggaattatacaaata

SEQ ID NO: 71709 - DNA, 25 bp, SARS Virus
gttaccaatgggattatacaaatag

SEQ ID NO: 71710 - DNA, 25 bp, SARS Virus
ttaccaatgggaatatacaaatagt

SEQ ID NO: 71711 - DNA, 25 bp, SARS Virus
taccaatgggataatacaaatagtg

SEQ ID NO: 71712 - DNA, 25 bp, SARS Virus
accaatgggattatacaaatagtgg

SEQ ID NO: 71713 - DNA, 25 bp, SARS Virus
ccaatgggattaaacaaatagtggg

SEQ ID NO: 71714 - DNA, 25 bp, SARS Virus
caatgggattatacaaatagtgggc

SEQ ID NO: 71715 - DNA, 25 bp, SARS Virus
aatgggattataaaaatagtgggcg

SEQ ID NO: 71716 - DNA, 25 bp, SARS Virus
atgggattatacaaatagtgggcgc

SEQ ID NO: 71717 - DNA, 25 bp, SARS Virus
tgggattatacaaatagtgggcgct

SEQ ID NO: 71718 - DNA, 25 bp, SARS Virus
gggattatacaaatagtgggcgctt

SEQ ID NO: 71719 - DNA, 25 bp, SARS Virus
ggattatacaaaaagtgggcgcttc

SEQ ID NO: 71720 - DNA, 25 bp, SARS Virus
gattatacaaatagtgggcgcttct

SEQ ID NO: 71721 - DNA, 25 bp, SARS Virus
attatacaaataatgggcgcttctt

SEQ ID NO: 71722 - DNA, 25 bp, SARS Virus
ttatacaaatagagggcgcttcttc

SEQ ID NO: 71723 - DNA, 25 bp, SARS Virus
tatacaaatagtaggcgcttcttcg

SEQ ID NO: 71724 - DNA, 25 bp, SARS Virus
atacaaatagtgagcgcttcttcga

SEQ ID NO: 71725 - DNA, 25 bp, SARS Virus
tacaaatagtggacgcttcttcgat

SEQ ID NO: 71726 - DNA, 25 bp, SARS Virus
acaaatagtgggagcttcttcgata

SEQ ID NO: 71727 - DNA, 25 bp, SARS Virus
caaatagtgggcacttcttcgataa

SEQ ID NO: 71728 - DNA, 25 bp, SARS Virus
aaatagtgggcgattcttcgataag

SEQ ID NO: 71729 - DNA, 25 bp, SARS Virus
aatagtgggcgcatcttcgataagc

SEQ ID NO: 71730 - DNA, 25 bp, SARS Virus
atagtgggcgctacttcgataagca

SEQ ID NO: 71731 - DNA, 25 bp, SARS Virus
tagtgggcgcttattcgataagcag

SEQ ID NO: 71732 - DNA, 25 bp, SARS Virus
agtgggcgcttcatcgataagcagt

SEQ ID NO: 71733 - DNA, 25 bp, SARS Virus
gtgggcgcttctacgataagcagtg

SEQ ID NO: 71734 - DNA, 25 bp, SARS Virus
tgggcgcttcttagataagcagtgc

SEQ ID NO: 71735 - DNA, 25 bp, SARS Virus
gggcgcttcttcaataagcagtgca

SEQ ID NO: 71736 - DNA, 25 bp, SARS Virus
ggcgcttcttcgataagcagtgcaa

SEQ ID NO: 71737 - DNA, 25 bp, SARS Virus
gcgcttcttcgaaaagcagtgcaag

SEQ ID NO: 71738 - DNA, 25 bp, SARS Virus
cgcttcttcgataagcagtgcaagc

SEQ ID NO: 71739 - DNA, 25 bp, SARS Virus
gcttcttcgataagcagtgcaagca

SEQ ID NO: 71740 - DNA, 25 bp, SARS Virus
cttcttcgataaacagtgcaagcac

SEQ ID NO: 71741 - DNA, 25 bp, SARS Virus
ttcttcgataagaagtgcaagcacg

SEQ ID NO: 71742 - DNA, 25 bp, SARS Virus
tcttcgataagcagtgcaagcacgc

SEQ ID NO: 71743 - DNA, 25 bp, SARS Virus
cttcgataagcaatgcaagcacgca

SEQ ID NO: 71744 - DNA, 25 bp, SARS Virus
ttcgataagcagagcaagcacgcac

SEQ ID NO: 71745 - DNA, 25 bp, SARS Virus
tcgataagcagtacaagcacgcacc

SEQ ID NO: 71746 - DNA, 25 bp, SARS Virus
cgataagcagtgaaagcacgcacct

SEQ ID NO: 71747 - DNA, 25 bp, SARS Virus
gataagcagtgcaagcacgcaccta

SEQ ID NO: 71748 - DNA, 25 bp, SARS Virus
ataagcagtgcaagcacgcacctaa

SEQ ID NO: 71749 - DNA, 25 bp, SARS Virus
taagcagtgcaaacacgcacctaac

SEQ ID NO: 71750 - DNA, 25 bp, SARS Virus
aagcagtgcaagaacgcacctaacc

SEQ ID NO: 71751 - DNA, 25 bp, SARS Virus
agcagtgcaagcacgcacctaaccg

SEQ ID NO: 71752 - DNA, 25 bp, SARS Virus
gcagtgcaagcaagcacctaaccga

SEQ ID NO: 71753 - DNA, 25 bp, SARS Virus
cagtgcaagcacacacctaaccgaa

SEQ ID NO: 71754 - DNA, 25 bp, SARS Virus
agtgcaagcacgaacctaaccgaaa

SEQ ID NO: 71755 - DNA, 25 bp, SARS Virus
gtgcaagcacgcacctaaccgaaac

SEQ ID NO: 71756 - DNA, 25 bp, SARS Virus
tgcaagcacgcaactaaccgaaact

SEQ ID NO: 71757 - DNA, 25 bp, SARS Virus
gcaagcacgcacataaccgaaacta

SEQ ID NO: 71758 - DNA, 25 bp, SARS Virus
caagcacgcaccaaaccgaaactac

SEQ ID NO: 71759 - DNA, 25 bp, SARS Virus
aagcacgcacctaaccgaaactaca

SEQ ID NO: 71760 - DNA, 25 bp, SARS Virus
agcacgcacctaaccgaaactacat

SEQ ID NO: 71761 - DNA, 25 bp, SARS Virus
gcacgcacctaaacgaaactacatc

SEQ ID NO: 71762 - DNA, 25 bp, SARS Virus
cacgcacctaacagaaactacatct

SEQ ID NO: 71763 - DNA, 25 bp, SARS Virus
acgcacctaaccaaaactacatctc

SEQ ID NO: 71764 - DNA, 25 bp, SARS Virus
cgcacctaaccgaaactacatctcc

SEQ ID NO: 71765 - DNA, 25 bp, SARS Virus
gcacctaaccgaaactacatctccc

SEQ ID NO: 71766 - DNA, 25 bp, SARS Virus
cacctaaccgaaactacatctcccg

SEQ ID NO: 71767 - DNA, 25 bp, SARS Virus
acctaaccgaaaatacatctcccga

SEQ ID NO: 71768 - DNA, 25 bp, SARS Virus
cctaaccgaaacaacatctcccgac

SEQ ID NO: 71769 - DNA, 25 bp, SARS Virus
ctaaccgaaactacatctcccgaca

SEQ ID NO: 71770 - DNA, 25 bp, SARS Virus
taaccgaaactaaatctcccgacag

SEQ ID NO: 71771 - DNA, 25 bp, SARS Virus
aaccgaaactacatctcccgacagt

SEQ ID NO: 71772 - DNA, 25 bp, SARS Virus
accgaaactacaactcccgacagta

SEQ ID NO: 71773 - DNA, 25 bp, SARS Virus
ccgaaactacatatcccgacagtac

SEQ ID NO: 71774 - DNA, 25 bp, SARS Virus
cgaaactacatcacccgacagtacg

SEQ ID NO: 71775 - DNA, 25 bp, SARS Virus
gaaactacatctaccgacagtacgt

SEQ ID NO: 71776 - DNA, 25 bp, SARS Virus
aaactacatctcacgacagtacgtt

SEQ ID NO: 71777 - DNA, 25 bp, SARS Virus
aactacatctccagacagtacgttg

SEQ ID NO: 71778 - DNA, 25 bp, SARS Virus
actacatctcccaacagtacgttga

SEQ ID NO: 71779 - DNA, 25 bp, SARS Virus
ctacatctcccgacagtacgttgat

SEQ ID NO: 71780 - DNA, 25 bp, SARS Virus
tacatctcccgaaagtacgttgatc

SEQ ID NO: 71781 - DNA, 25 bp, SARS Virus
acatctcccgacagtacgttgatct

SEQ ID NO: 71782 - DNA, 25 bp, SARS Virus
catctcccgacaatacgttgatctc

SEQ ID NO: 71783 - DNA, 25 bp, SARS Virus
atctcccgacagaacgttgatctct

SEQ ID NO: 71784 - DNA, 25 bp, SARS Virus
tctcccgacagtacgttgatctcta

SEQ ID NO: 71785 - DNA, 25 bp, SARS Virus
ctcccgacagtaagttgatctctac

SEQ ID NO: 71786 - DNA, 25 bp, SARS Virus
tcccgacagtacattgatctctacg

SEQ ID NO: 71787 - DNA, 25 bp, SARS Virus
cccgacagtacgatgatctctacga

SEQ ID NO: 71788 - DNA, 25 bp, SARS Virus
ccgacagtacgtagatctctacgac

SEQ ID NO: 71789 - DNA, 25 bp, SARS Virus
cgacagtacgttaatctctacgaca

SEQ ID NO: 71790 - DNA, 25 bp, SARS Virus
gacagtacgttgatctctacgacac

SEQ ID NO: 71791 - DNA, 25 bp, SARS Virus
acagtacgttgaactctacgacacc

SEQ ID NO: 71792 - DNA, 25 bp, SARS Virus
cagtacgttgatatctacgacaccc

SEQ ID NO: 71793 - DNA, 25 bp, SARS Virus
agtacgttgatcactacgacaccca

SEQ ID NO: 71794 - DNA, 25 bp, SARS Virus
gtacgttgatctatacgacacccat

SEQ ID NO: 71795 - DNA, 25 bp, SARS Virus
tacgttgatctcaacgacacccatg

SEQ ID NO: 71796 - DNA, 25 bp, SARS Virus
acgttgatctctacgacacccatga

SEQ ID NO: 71797 - DNA, 25 bp, SARS Virus
cgttgatctctaagacacccatgat

SEQ ID NO: 71798 - DNA, 25 bp, SARS Virus
gttgatctctacaacacccatgatt

SEQ ID NO: 71799 - DNA, 25 bp, SARS Virus
ttgatctctacgacacccatgattg

SEQ ID NO: 71800 - DNA, 25 bp, SARS Virus
tgatctctacgaaacccatgattgg

SEQ ID NO: 71801 - DNA, 25 bp, SARS Virus
gatctctacgacacccatgattgga

SEQ ID NO: 71802 - DNA, 25 bp, SARS Virus
atctctacgacaaccatgattggat

SEQ ID NO: 71803 - DNA, 25 bp, SARS Virus
tctctacgacacacatgattggatg

SEQ ID NO: 71804 - DNA, 25 bp, SARS Virus
ctctacgacaccaatgattggatgg

SEQ ID NO: 71805 - DNA, 25 bp, SARS Virus
tctacgacacccatgattggatgga

SEQ ID NO: 71806 - DNA, 25 bp, SARS Virus
ctacgacacccaagattggatggag

SEQ ID NO: 71807 - DNA, 25 bp, SARS Virus
tacgacacccataattggatggaga

SEQ ID NO: 71808 - DNA, 25 bp, SARS Virus
acgacacccatgattggatggagag

SEQ ID NO: 71809 - DNA, 25 bp, SARS Virus
cgacacccatgaatggatggagagg

SEQ ID NO: 71810 - DNA, 25 bp, SARS Virus
gacacccatgataggatggagaggt

SEQ ID NO: 71811 - DNA, 25 bp, SARS Virus
acacccatgattagatggagaggtc

SEQ ID NO: 71812 - DNA, 25 bp, SARS Virus
cacccatgattgaatggagaggtcg

SEQ ID NO: 71813 - DNA, 25 bp, SARS Virus
acccatgattggatggagaggtcga

SEQ ID NO: 71814 - DNA, 25 bp, SARS Virus
cccatgattggaaggagaggtcgat

SEQ ID NO: 71815 - DNA, 25 bp, SARS Virus
ccatgattggatagagaggtcgatc

SEQ ID NO: 71816 - DNA, 25 bp, SARS Virus
catgattggatgaagaggtcgatcc

SEQ ID NO: 71817 - DNA, 25 bp, SARS Virus
atgattggatggagaggtcgatcct

SEQ ID NO: 71818 - DNA, 25 bp, SARS Virus
tgattggatggaaaggtcgatccta

SEQ ID NO: 71819 - DNA, 25 bp, SARS Virus
gattggatggagaggtcgatcctaa

SEQ ID NO: 71820 - DNA, 25 bp, SARS Virus
attggatggagaagtcgatcctaaa

SEQ ID NO: 71821 - DNA, 25 bp, SARS Virus
ttggatggagagatcgatcctaaaa

SEQ ID NO: 71822 - DNA, 25 bp, SARS Virus
tggatggagaggacgatcctaaaag

SEQ ID NO: 71823 - DNA, 25 bp, SARS Virus
ggatggagaggtagatcctaaaaga

SEQ ID NO: 71824 - DNA, 25 bp, SARS Virus
gatggagaggtcaatcctaaaagat

SEQ ID NO: 71825 - DNA, 25 bp, SARS Virus
atggagaggtcgatcctaaaagatg

SEQ ID NO: 71826 - DNA, 25 bp, SARS Virus
tggagaggtcgaacctaaaagatgt

SEQ ID NO: 71827 - DNA, 25 bp, SARS Virus
ggagaggtcgatactaaaagatgtc

SEQ ID NO: 71828 - DNA, 25 bp, SARS Virus
gagaggtcgatcataaaagatgtcc

SEQ ID NO: 71829 - DNA, 25 bp, SARS Virus
agaggtcgatccaaaaagatgtcca

SEQ ID NO: 71830 - DNA, 25 bp, SARS Virus
gaggtcgatcctaaaagatgtccac

SEQ ID NO: 71831 - DNA, 25 bp, SARS Virus
aggtcgatcctaaaagatgtccaca

SEQ ID NO: 71832 - DNA, 25 bp, SARS Virus
ggtcgatcctaaaagatgtccacaa

SEQ ID NO: 71833 - DNA, 25 bp, SARS Virus
gtcgatcctaaaagatgtccacaat

SEQ ID NO: 71834 - DNA, 25 bp, SARS Virus
tcgatcctaaaaaatgtccacaatt

SEQ ID NO: 71835 - DNA, 25 bp, SARS Virus
cgatcctaaaagatgtccacaattg

SEQ ID NO: 71836 - DNA, 25 bp, SARS Virus
gatcctaaaagaagtccacaattga

SEQ ID NO: 71837 - DNA, 25 bp, SARS Virus
atcctaaaagatatccacaattgaa

SEQ ID NO: 71838 - DNA, 25 bp, SARS Virus
tcctaaaagatgaccacaattgaat

SEQ ID NO: 71839 - DNA, 25 bp, SARS Virus
cctaaaagatgtacacaattgaatc

SEQ ID NO: 71840 - DNA, 25 bp, SARS Virus
ctaaaagatgtcaacaattgaatca

SEQ ID NO: 71841 - DNA, 25 bp, SARS Virus
taaaagatgtccacaattgaatcat

SEQ ID NO: 71842 - DNA, 25 bp, SARS Virus
aaaagatgtccaaaattgaatcatc

SEQ ID NO: 71843 - DNA, 25 bp, SARS Virus
aaagatgtccacaattgaatcatcg

SEQ ID NO: 71844 - DNA, 25 bp, SARS Virus
aagatgtccacaattgaatcatcga

SEQ ID NO: 71845 - DNA, 25 bp, SARS Virus
agatgtccacaaatgaatcatcgac

SEQ ID NO: 71846 - DNA, 25 bp, SARS Virus
gatgtccacaatagaatcatcgaca

SEQ ID NO: 71847 - DNA, 25 bp, SARS Virus
atgtccacaattaaatcatcgacat

SEQ ID NO: 71848 - DNA, 25 bp, SARS Virus
tgtccacaattgaatcatcgacatg

SEQ ID NO: 71849 - DNA, 25 bp, SARS Virus
gtccacaattgaatcatcgacatgg

SEQ ID NO: 71850 - DNA, 25 bp, SARS Virus
tccacaattgaaacatcgacatggc

SEQ ID NO: 71851 - DNA, 25 bp, SARS Virus
ccacaattgaataatcgacatggct

SEQ ID NO: 71852 - DNA, 25 bp, SARS Virus
cacaattgaatcatcgacatggctg

SEQ ID NO: 71853 - DNA, 25 bp, SARS Virus
acaattgaatcaacgacatggctga

SEQ ID NO: 71854 - DNA, 25 bp, SARS Virus
caattgaatcatagacatggctgac

SEQ ID NO: 71855 - DNA, 25 bp, SARS Virus
aattgaatcatcaacatggctgacc

SEQ ID NO: 71856 - DNA, 25 bp, SARS Virus
attgaatcatcgacatggctgacca

SEQ ID NO: 71857 - DNA, 25 bp, SARS Virus
ttgaatcatcgaaatggctgaccaa

SEQ ID NO: 71858 - DNA, 25 bp, SARS Virus
tgaatcatcgacatggctgaccaat

SEQ ID NO: 71859 - DNA, 25 bp, SARS Virus
gaatcatcgacaaggctgaccaata

SEQ ID NO: 71860 - DNA, 25 bp, SARS Virus
aatcatcgacatagctgaccaatac

SEQ ID NO: 71861 - DNA, 25 bp, SARS Virus
atcatcgacatgactgaccaataca

SEQ ID NO: 71862 - DNA, 25 bp, SARS Virus
tcatcgacatggatgaccaatacaa

SEQ ID NO: 71863 - DNA, 25 bp, SARS Virus
catcgacatggcagaccaatacaac

SEQ ID NO: 71864 - DNA, 25 bp, SARS Virus
atcgacatggctaaccaatacaact

SEQ ID NO: 71865 - DNA, 25 bp, SARS Virus
ttacagttggcgcagttacaccgat

SEQ ID NO: 71866 - DNA, 25 bp, SARS Virus
tacagttggcgacgttacaccgata

SEQ ID NO: 71867 - DNA, 25 bp, SARS Virus
acagttggcgaacttacaccgatag

SEQ ID NO: 71868 - DNA, 25 bp, SARS Virus
cagttggcgaagctacaccgatagt

SEQ ID NO: 71869 - DNA, 25 bp, SARS Virus
agttggcgaagtcacaccgatagtg

SEQ ID NO: 71870 - DNA, 25 bp, SARS Virus
gttggcgaagttccaccgatagtgt

SEQ ID NO: 71871 - DNA, 25 bp, SARS Virus
ttggcgaagttacaccgatagtgtt

SEQ ID NO: 71872 - DNA, 25 bp, SARS Virus
tggcgaagttaccccgatagtgttc

SEQ ID NO: 71873 - DNA, 25 bp, SARS Virus
ggcgaagttacaccgatagtgttcc

SEQ ID NO: 71874 - DNA, 25 bp, SARS Virus
gcgaagttacaccgatagtgttccc

SEQ ID NO: 71875 - DNA, 25 bp, SARS Virus
cgaagttacacccatagtgttcccg

SEQ ID NO: 71876 - DNA, 25 bp, SARS Virus
gaagttacaccgctagtgttcccgt

SEQ ID NO: 71877 - DNA, 25 bp, SARS Virus
aagttacaccgacagtgttcccgtt

SEQ ID NO: 71878 - DNA, 25 bp, SARS Virus
agttacaccgatcgtgttcccgttt

SEQ ID NO: 71879 - DNA, 25 bp, SARS Virus
gttacaccgatactgttcccgtttt

SEQ ID NO: 71880 - DNA, 25 bp, SARS Virus
ttacaccgatagcgttcccgttttt

SEQ ID NO: 71881 - DNA, 25 bp, SARS Virus
tacaccgatagtcttcccgttttta

SEQ ID NO: 71882 - DNA, 25 bp, SARS Virus
acaccgatagtgctcccgtttttaa

SEQ ID NO: 71883 - DNA, 25 bp, SARS Virus
caccgatagtgtccccgtttttaac

SEQ ID NO: 71884 - DNA, 25 bp, SARS Virus
accgatagtgttcccgtttttaacc

SEQ ID NO: 71885 - DNA, 25 bp, SARS Virus
ccgatagtgttcccgtttttaaccg

SEQ ID NO: 71886 - DNA, 25 bp, SARS Virus
cgatagtgttcccgtttttaaccgt

SEQ ID NO: 71887 - DNA, 25 bp, SARS Virus
gatagtgttcccctttttaaccgta

SEQ ID NO: 71888 - DNA, 25 bp, SARS Virus
atagtgttcccgcttttaaccgtaa

SEQ ID NO: 71889 - DNA, 25 bp, SARS Virus
tagtgttcccgtctttaaccgtaaa

SEQ ID NO: 71890 - DNA, 25 bp, SARS Virus
agtgttcccgttcttaaccgtaaaa

SEQ ID NO: 71891 - DNA, 25 bp, SARS Virus
gtgttcccgtttctaaccgtaaaac

SEQ ID NO: 71892 - DNA, 25 bp, SARS Virus
tgttcccgttttcaaccgtaaaaca

SEQ ID NO: 71893 - DNA, 25 bp, SARS Virus
gttcccgtttttcaccgtaaaacac

SEQ ID NO: 71894 - DNA, 25 bp, SARS Virus
ttcccgtttttacccgtaaaacacg

SEQ ID NO: 71895 - DNA, 25 bp, SARS Virus
tcccgtttttaaccgtaaaacacgt

SEQ ID NO: 71896 - DNA, 25 bp, SARS Virus
cccgtttttaaccgtaaaacacgta

SEQ ID NO: 71897 - DNA, 25 bp, SARS Virus
ccgtttttaaccctaaaacacgtat

SEQ ID NO: 71898 - DNA, 25 bp, SARS Virus
cgtttttaaccgcaaaacacgtatt

SEQ ID NO: 71899 - DNA, 25 bp, SARS Virus
gtttttaaccgtcaaacacgtatta

SEQ ID NO: 71900 - DNA, 25 bp, SARS Virus
tttttaaccgtacaacacgtattac

SEQ ID NO: 71901 - DNA, 25 bp, SARS Virus
ttttaaccgtaacacacgtattaca

SEQ ID NO: 71902 - DNA, 25 bp, SARS Virus
tttaaccgtaaaccacgtattacag

SEQ ID NO: 71903 - DNA, 25 bp, SARS Virus
ttaaccgtaaaacacgtattacaga

SEQ ID NO: 71904 - DNA, 25 bp, SARS Virus
taaccgtaaaacccgtattacagac

SEQ ID NO: 71905 - DNA, 25 bp, SARS Virus
aaccgtaaaacacgtattacagact

SEQ ID NO: 71906 - DNA, 25 bp, SARS Virus
accgtaaaacacctattacagacta

SEQ ID NO: 71907 - DNA, 25 bp, SARS Virus
ccgtaaaacacgcattacagactat

SEQ ID NO: 71908 - DNA, 25 bp, SARS Virus
cgtaaaacacgtcttacagactatc

SEQ ID NO: 71909 - DNA, 25 bp, SARS Virus
gtaaaacacgtactacagactatct

SEQ ID NO: 71910 - DNA, 25 bp, SARS Virus
taaaacacgtatcacagactatctc

SEQ ID NO: 71911 - DNA, 25 bp, SARS Virus
aaaacacgtattccagactatctct

SEQ ID NO: 71912 - DNA, 25 bp, SARS Virus
aaacacgtattacagactatctcta

SEQ ID NO: 71913 - DNA, 25 bp, SARS Virus
aacacgtattaccgactatctctag

SEQ ID NO: 71914 - DNA, 25 bp, SARS Virus
acacgtattacacactatctctaga

SEQ ID NO: 71915 - DNA, 25 bp, SARS Virus
cacgtattacagcctatctctagaa

SEQ ID NO: 71916 - DNA, 25 bp, SARS Virus
acgtattacagactatctctagaaa

SEQ ID NO: 71917 - DNA, 25 bp, SARS Virus
cgtattacagaccatctctagaaat

SEQ ID NO: 71918 - DNA, 25 bp, SARS Virus
gtattacagactctctctagaaata

SEQ ID NO: 71919 - DNA, 25 bp, SARS Virus
tattacagactacctctagaaatac

SEQ ID NO: 71920 - DNA, 25 bp, SARS Virus
attacagactatctctagaaatact

SEQ ID NO: 71921 - DNA, 25 bp, SARS Virus
ttacagactatccctagaaatactg

SEQ ID NO: 71922 - DNA, 25 bp, SARS Virus
tacagactatctctagaaatactgt

SEQ ID NO: 71923 - DNA, 25 bp, SARS Virus
acagactatctccagaaatactgtt

SEQ ID NO: 71924 - DNA, 25 bp, SARS Virus
cagactatctctcgaaatactgttt

SEQ ID NO: 71925 - DNA, 25 bp, SARS Virus
agactatctctacaaatactgtttg

SEQ ID NO: 71926 - DNA, 25 bp, SARS Virus
gactatctctagcaatactgtttga

SEQ ID NO: 71927 - DNA, 25 bp, SARS Virus
actatctctagacatactgtttgac

SEQ ID NO: 71928 - DNA, 25 bp, SARS Virus
ctatctctagaactactgtttgacg

SEQ ID NO: 71929 - DNA, 25 bp, SARS Virus
tatctctagaaacactgtttgacgt

SEQ ID NO: 71930 - DNA, 25 bp, SARS Virus
atctctagaaatcctgtttgacgtt

SEQ ID NO: 71931 - DNA, 25 bp, SARS Virus
tctctagaaatactgtttgacgtta

SEQ ID NO: 71932 - DNA, 25 bp, SARS Virus
ctctagaaataccgtttgacgttaa

SEQ ID NO: 71933 - DNA, 25 bp, SARS Virus
tctagaaatactctttgacgttaaa

SEQ ID NO: 71934 - DNA, 25 bp, SARS Virus
ctagaaatactgcttgacgttaaat

SEQ ID NO: 71935 - DNA, 25 bp, SARS Virus
tagaaatactgtctgacgttaaatg

SEQ ID NO: 71936 - DNA, 25 bp, SARS Virus
agaaatactgttcgacgttaaatgt

SEQ ID NO: 71937 - DNA, 25 bp, SARS Virus
gaaatactgtttcacgttaaatgtt

SEQ ID NO: 71938 - DNA, 25 bp, SARS Virus
aaatactgtttgccgttaaatgttc

SEQ ID NO: 71939 - DNA, 25 bp, SARS Virus
aatactgtttgacgttaaatgttca

SEQ ID NO: 71940 - DNA, 25 bp, SARS Virus
atactgtttgaccttaaatgttcag

SEQ ID NO: 71941 - DNA, 25 bp, SARS Virus
tactgtttgacgctaaatgttcaga

SEQ ID NO: 71942 - DNA, 25 bp, SARS Virus
actgtttgacgtcaaatgttcagat

SEQ ID NO: 71943 - DNA, 25 bp, SARS Virus
ctgtttgacgttcaatgttcagatc

SEQ ID NO: 71944 - DNA, 25 bp, SARS Virus
tgtttgacgttacatgttcagatct

SEQ ID NO: 71945 - DNA, 25 bp, SARS Virus
gtttgacgttaactgttcagatctt

SEQ ID NO: 71946 - DNA, 25 bp, SARS Virus
tttgacgttaaacgttcagatcttt

SEQ ID NO: 71947 - DNA, 25 bp, SARS Virus
ttgacgttaaatcttcagatcttta

SEQ ID NO: 71948 - DNA, 25 bp, SARS Virus
tgacgttaaatgctcagatctttat

SEQ ID NO: 71949 - DNA, 25 bp, SARS Virus
gacgttaaatgtccagatctttatg

SEQ ID NO: 71950 - DNA, 25 bp, SARS Virus
acgttaaatgttcagatctttatgg

SEQ ID NO: 71951 - DNA, 25 bp, SARS Virus
cgttaaatgttccgatctttatggt

SEQ ID NO: 71952 - DNA, 25 bp, SARS Virus
gttaaatgttcacatctttatggtg

SEQ ID NO: 71953 - DNA, 25 bp, SARS Virus
ttaaatgttcagctctttatggtgc

SEQ ID NO: 71954 - DNA, 25 bp, SARS Virus
taaatgttcagacctttatggtgca

SEQ ID NO: 71955 - DNA, 25 bp, SARS Virus
aaatgttcagatctttatggtgcag

SEQ ID NO: 71956 - DNA, 25 bp, SARS Virus
aatgttcagatccttatggtgcagc

SEQ ID NO: 71957 - DNA, 25 bp, SARS Virus
atgttcagatctctatggtgcagcg

SEQ ID NO: 71958 - DNA, 25 bp, SARS Virus
tgttcagatcttcatggtgcagcgt

SEQ ID NO: 71959 - DNA, 25 bp, SARS Virus
gttcagatctttctggtgcagcgtt

SEQ ID NO: 71960 - DNA, 25 bp, SARS Virus
ttcagatctttacggtgcagcgtta

SEQ ID NO: 71961 - DNA, 25 bp, SARS Virus
tcagatctttatcgtgcagcgttac

SEQ ID NO: 71962 - DNA, 25 bp, SARS Virus
cagatctttatgctgcagcgttaca

SEQ ID NO: 71963 - DNA, 25 bp, SARS Virus
agatctttatggcgcagcgttacac

SEQ ID NO: 71964 - DNA, 25 bp, SARS Virus
gatctttatggtccagcgttacacc

SEQ ID NO: 71965 - DNA, 25 bp, SARS Virus
atctttatggtgcagcgttacaccg

SEQ ID NO: 71966 - DNA, 25 bp, SARS Virus
tctttatggtgccgcgttacaccga

SEQ ID NO: 71967 - DNA, 25 bp, SARS Virus
ctttatggtgcaccgttacaccgat

SEQ ID NO: 71968 - DNA, 25 bp, SARS Virus
tttatggtgcagcgttacaccgatg

SEQ ID NO: 71969 - DNA, 25 bp, SARS Virus
ttatggtgcagccttacaccgatgt

SEQ ID NO: 71970 - DNA, 25 bp, SARS Virus
tatggtgcagcgctacaccgatgta

SEQ ID NO: 71971 - DNA, 25 bp, SARS Virus
atggtgcagcgtcacaccgatgtaa

SEQ ID NO: 71972 - DNA, 25 bp, SARS Virus
tggtgcagcgttccaccgatgtaat

SEQ ID NO: 71973 - DNA, 25 bp, SARS Virus
ggtgcagcgttacaccgatgtaatg

SEQ ID NO: 71974 - DNA, 25 bp, SARS Virus
gtgcagcgttaccccgatgtaatgt

SEQ ID NO: 71975 - DNA, 25 bp, SARS Virus
tgcagcgttacaccgatgtaatgtt

SEQ ID NO: 71976 - DNA, 25 bp, SARS Virus
gcagcgttacaccgatgtaatgttc

SEQ ID NO: 71977 - DNA, 25 bp, SARS Virus
cagcgttacacccatgtaatgttcg

SEQ ID NO: 71978 - DNA, 25 bp, SARS Virus
agcgttacaccgctgtaatgttcgt

SEQ ID NO: 71979 - DNA, 25 bp, SARS Virus
gcgttacaccgacgtaatgttcgtc

SEQ ID NO: 71980 - DNA, 25 bp, SARS Virus
cgttacaccgatctaatgttcgtct

SEQ ID NO: 71981 - DNA, 25 bp, SARS Virus
gttacaccgatgcaatgttcgtctt

SEQ ID NO: 71982 - DNA, 25 bp, SARS Virus
ttacaccgatgtcatgttcgtcttt

SEQ ID NO: 71983 - DNA, 25 bp, SARS Virus
tacaccgatgtactgttcgtctttt

SEQ ID NO: 71984 - DNA, 25 bp, SARS Virus
acaccgatgtaacgttcgtctttta

SEQ ID NO: 71985 - DNA, 25 bp, SARS Virus
caccgatgtaatcttcgtcttttac

SEQ ID NO: 71986 - DNA, 25 bp, SARS Virus
accgatgtaatgctcgtcttttaca

SEQ ID NO: 71987 - DNA, 25 bp, SARS Virus
ccgatgtaatgtccgtcttttacat

SEQ ID NO: 71988 - DNA, 25 bp, SARS Virus
cgatgtaatgttcgtcttttacatt

SEQ ID NO: 71989 - DNA, 25 bp, SARS Virus
gatgtaatgttcctcttttacattg

SEQ ID NO: 71990 - DNA, 25 bp, SARS Virus
atgtaatgttcgccttttacattga

SEQ ID NO: 71991 - DNA, 25 bp, SARS Virus
tgtaatgttcgtcttttacattgac

SEQ ID NO: 71992 - DNA, 25 bp, SARS Virus
gtaatgttcgtcctttacattgacc

SEQ ID NO: 71993 - DNA, 25 bp, SARS Virus
taatgttcgtctcttacattgacct

SEQ ID NO: 71994 - DNA, 25 bp, SARS Virus
aatgttcgtcttctacattgacctg

SEQ ID NO: 71995 - DNA, 25 bp, SARS Virus
atgttcgtctttcacattgacctga

SEQ ID NO: 71996 - DNA, 25 bp, SARS Virus
tgttcgtcttttccattgacctgaa

SEQ ID NO: 71997 - DNA, 25 bp, SARS Virus
gttcgtcttttacattgacctgaaa

SEQ ID NO: 71998 - DNA, 25 bp, SARS Virus
ttcgtcttttaccttgacctgaaaa

SEQ ID NO: 71999 - DNA, 25 bp, SARS Virus
tcgtcttttacactgacctgaaaaa

SEQ ID NO: 72000 - DNA, 25 bp, SARS Virus
cgtcttttacatcgacctgaaaaat

SEQ ID NO: 72001 - DNA, 25 bp, SARS Virus
gtcttttacattcacctgaaaaatt

SEQ ID NO: 72002 - DNA, 25 bp, SARS Virus
tcttttacattgccctgaaaaattc

SEQ ID NO: 72003 - DNA, 25 bp, SARS Virus
cttttacattgacctgaaaaattcc

SEQ ID NO: 72004 - DNA, 25 bp, SARS Virus
ttttacattgacctgaaaaattcct

SEQ ID NO: 72005 - DNA, 25 bp, SARS Virus
tttacattgacccgaaaaattcctg

SEQ ID NO: 72006 - DNA, 25 bp, SARS Virus
ttacattgacctcaaaaattcctga

SEQ ID NO: 72007 - DNA, 25 bp, SARS Virus
tacattgacctgcaaaattcctgac

SEQ ID NO: 72008 - DNA, 25 bp, SARS Virus
acattgacctgacaaattcctgaca

SEQ ID NO: 72009 - DNA, 25 bp, SARS Virus
cattgacctgaacaattcctgacat

SEQ ID NO: 72010 - DNA, 25 bp, SARS Virus
attgacctgaaacattcctgacatc

SEQ ID NO: 72011 - DNA, 25 bp, SARS Virus
ttgacctgaaaacttcctgacatca

SEQ ID NO: 72012 - DNA, 25 bp, SARS Virus
tgacctgaaaaactcctgacatcat

SEQ ID NO: 72013 - DNA, 25 bp, SARS Virus
gacctgaaaaatccctgacatcatt

SEQ ID NO: 72014 - DNA, 25 bp, SARS Virus
acctgaaaaattcctgacatcattc

SEQ ID NO: 72015 - DNA, 25 bp, SARS Virus
cctgaaaaattcctgacatcattct

SEQ ID NO: 72016 - DNA, 25 bp, SARS Virus
ctgaaaaattcccgacatcattcta

SEQ ID NO: 72017 - DNA, 25 bp, SARS Virus
tgaaaaattcctcacatcattctag

SEQ ID NO: 72018 - DNA, 25 bp, SARS Virus
gaaaaattcctgccatcattctagt

SEQ ID NO: 72019 - DNA, 25 bp, SARS Virus
aaaaattcctgacatcattctagta

SEQ ID NO: 72020 - DNA, 25 bp, SARS Virus
aaaattcctgacctcattctagtaa

SEQ ID NO: 72021 - DNA, 25 bp, SARS Virus
aaattcctgacaccattctagtaat

SEQ ID NO: 72022 - DNA, 25 bp, SARS Virus
aattcctgacatcattctagtaatg

SEQ ID NO: 72023 - DNA, 25 bp, SARS Virus
attcctgacatccttctagtaatga

SEQ ID NO: 72024 - DNA, 25 bp, SARS Virus
ttcctgacatcactctagtaatgac

SEQ ID NO: 72025 - DNA, 25 bp, SARS Virus
tcctgacatcatcctagtaatgacc

SEQ ID NO: 72026 - DNA, 25 bp, SARS Virus
cctgacatcattctagtaatgacca

SEQ ID NO: 72027 - DNA, 25 bp, SARS Virus
ctgacatcattccagtaatgaccag

SEQ ID NO: 72028 - DNA, 25 bp, SARS Virus
tgacatcattctcgtaatgaccaga

SEQ ID NO: 72029 - DNA, 25 bp, SARS Virus
gacatcattctactaatgaccagaa

SEQ ID NO: 72030 - DNA, 25 bp, SARS Virus
acatcattctagcaatgaccagaag

SEQ ID NO: 72031 - DNA, 25 bp, SARS Virus
catcattctagtcatgaccagaagt

SEQ ID NO: 72032 - DNA, 25 bp, SARS Virus
atcattctagtactgaccagaagta

SEQ ID NO: 72033 - DNA, 25 bp, SARS Virus
tcattctagtaacgaccagaagtag

SEQ ID NO: 72034 - DNA, 25 bp, SARS Virus
cattctagtaatcaccagaagtagg

SEQ ID NO: 72035 - DNA, 25 bp, SARS Virus
attctagtaatgcccagaagtagga

SEQ ID NO: 72036 - DNA, 25 bp, SARS Virus
ttctagtaatgaccagaagtaggat

SEQ ID NO: 72037 - DNA, 25 bp, SARS Virus
tctagtaatgaccagaagtaggatg

SEQ ID NO: 72038 - DNA, 25 bp, SARS Virus
ctagtaatgacccgaagtaggatgt

SEQ ID NO: 72039 - DNA, 25 bp, SARS Virus
tagtaatgaccacaagtaggatgtg

SEQ ID NO: 72040 - DNA, 25 bp, SARS Virus
agtaatgaccagcagtaggatgtgt

SEQ ID NO: 72041 - DNA, 25 bp, SARS Virus
gtaatgaccagacgtaggatgtgtc

SEQ ID NO: 72042 - DNA, 25 bp, SARS Virus
taatgaccagaactaggatgtgtcc

SEQ ID NO: 72043 - DNA, 25 bp, SARS Virus
aatgaccagaagcaggatgtgtccg

SEQ ID NO: 72044 - DNA, 25 bp, SARS Virus
atgaccagaagtcggatgtgtccgt

SEQ ID NO: 72045 - DNA, 25 bp, SARS Virus
tgaccagaagtacgatgtgtccgtg

SEQ ID NO: 72046 - DNA, 25 bp, SARS Virus
gaccagaagtagcatgtgtccgtgg

SEQ ID NO: 72047 - DNA, 25 bp, SARS Virus
accagaagtaggctgtgtccgtgga

SEQ ID NO: 72048 - DNA, 25 bp, SARS Virus
ccagaagtaggacgtgtccgtggat

SEQ ID NO: 72049 - DNA, 25 bp, SARS Virus
cagaagtaggatctgtccgtggatg

SEQ ID NO: 72050 - DNA, 25 bp, SARS Virus
agaagtaggatgcgtccgtggatgt

SEQ ID NO: 72051 - DNA, 25 bp, SARS Virus
gaagtaggatgtctccgtggatgtg

SEQ ID NO: 72052 - DNA, 25 bp, SARS Virus
aagtaggatgtgcccgtggatgtgt

SEQ ID NO: 72053 - DNA, 25 bp, SARS Virus
agtaggatgtgtccgtggatgtgtg

SEQ ID NO: 72054 - DNA, 25 bp, SARS Virus
gtaggatgtgtccgtggatgtgtgg

SEQ ID NO: 72055 - DNA, 25 bp, SARS Virus
taggatgtgtccctggatgtgtgga

SEQ ID NO: 72056 - DNA, 25 bp, SARS Virus
aggatgtgtccgcggatgtgtggag

SEQ ID NO: 72057 - DNA, 25 bp, SARS Virus
ggatgtgtccgtcgatgtgtggagt

SEQ ID NO: 72058 - DNA, 25 bp, SARS Virus
gatgtgtccgtgcatgtgtggagtc

SEQ ID NO: 72059 - DNA, 25 bp, SARS Virus
atgtgtccgtggctgtgtggagtcg

SEQ ID NO: 72060 - DNA, 25 bp, SARS Virus
tgtgtccgtggacgtgtggagtcgc

SEQ ID NO: 72061 - DNA, 25 bp, SARS Virus
gtgtccgtggatctgtggagtcgca

SEQ ID NO: 72062 - DNA, 25 bp, SARS Virus
tgtccgtggatgcgtggagtcgcaa

SEQ ID NO: 72063 - DNA, 25 bp, SARS Virus
gtccgtggatgtctggagtcgcaac

SEQ ID NO: 72064 - DNA, 25 bp, SARS Virus
tccgtggatgtgcggagtcgcaact

SEQ ID NO: 72065 - DNA, 25 bp, SARS Virus
ccgtggatgtgtcgagtcgcaacta

SEQ ID NO: 72066 - DNA, 25 bp, SARS Virus
cgtggatgtgtgcagtcgcaactat

SEQ ID NO: 72067 - DNA, 25 bp, SARS Virus
gtggatgtgtggcgtcgcaactata

SEQ ID NO: 72068 - DNA, 25 bp, SARS Virus
tggatgtgtggactcgcaactatat

SEQ ID NO: 72069 - DNA, 25 bp, SARS Virus
ggatgtgtggagccgcaactatatt

SEQ ID NO: 72070 - DNA, 25 bp, SARS Virus
gatgtgtggagtcgcaactatattt

SEQ ID NO: 72071 - DNA, 25 bp, SARS Virus
atgtgtggagtcccaactatatttc

SEQ ID NO: 72072 - DNA, 25 bp, SARS Virus
tgtgtggagtcgcaactatatttca

SEQ ID NO: 72073 - DNA, 25 bp, SARS Virus
gtgtggagtcgccactatatttcaa

SEQ ID NO: 72074 - DNA, 25 bp, SARS Virus
tgtggagtcgcacctatatttcaag

SEQ ID NO: 72075 - DNA, 25 bp, SARS Virus
gtggagtcgcaactatatttcaagt

SEQ ID NO: 72076 - DNA, 25 bp, SARS Virus
tggagtcgcaaccatatttcaagtt

SEQ ID NO: 72077 - DNA, 25 bp, SARS Virus
ggagtcgcaactctatttcaagttc

SEQ ID NO: 72078 - DNA, 25 bp, SARS Virus
gagtcgcaactacatttcaagttct

SEQ ID NO: 72079 - DNA, 25 bp, SARS Virus
agtcgcaactatctttcaagttctg

SEQ ID NO: 72080 - DNA, 25 bp, SARS Virus
gtcgcaactatacttcaagttctga

SEQ ID NO: 72081 - DNA, 25 bp, SARS Virus
tcgcaactatatctcaagttctgac

SEQ ID NO: 72082 - DNA, 25 bp, SARS Virus
cgcaactatattccaagttctgact

SEQ ID NO: 72083 - DNA, 25 bp, SARS Virus
gcaactatatttcaagttctgactt

SEQ ID NO: 72084 - DNA, 25 bp, SARS Virus
caactatatttccagttctgacttc

SEQ ID NO: 72085 - DNA, 25 bp, SARS Virus
aactatatttcacgttctgacttcc

SEQ ID NO: 72086 - DNA, 25 bp, SARS Virus
actatatttcaacttctgacttcct

SEQ ID NO: 72087 - DNA, 25 bp, SARS Virus
ctatatttcaagctctgacttccta

SEQ ID NO: 72088 - DNA, 25 bp, SARS Virus
tatatttcaagtcctgacttcctaa

SEQ ID NO: 72089 - DNA, 25 bp, SARS Virus
atatttcaagttctgacttcctaat

SEQ ID NO: 72090 - DNA, 25 bp, SARS Virus
tatttcaagttccgacttcctaata

SEQ ID NO: 72091 - DNA, 25 bp, SARS Virus
atttcaagttctcacttcctaatac

SEQ ID NO: 72092 - DNA, 25 bp, SARS Virus
tttcaagttctgccttcctaataca

SEQ ID NO: 72093 - DNA, 25 bp, SARS Virus
ttcaagttctgacttcctaatacac

SEQ ID NO: 72094 - DNA, 25 bp, SARS Virus
tcaagttctgacctcctaatacaca

SEQ ID NO: 72095 - DNA, 25 bp, SARS Virus
caagttctgactccctaatacacaa

SEQ ID NO: 72096 - DNA, 25 bp, SARS Virus
aagttctgacttcctaatacacaac

SEQ ID NO: 72097 - DNA, 25 bp, SARS Virus
agttctgacttcctaatacacaact

SEQ ID NO: 72098 - DNA, 25 bp, SARS Virus
gttctgacttcccaatacacaactg

SEQ ID NO: 72099 - DNA, 25 bp, SARS Virus
ttctgacttcctcatacacaactgt

SEQ ID NO: 72100 - DNA, 25 bp, SARS Virus
tctgacttcctactacacaactgta

SEQ ID NO: 72101 - DNA, 25 bp, SARS Virus
ctgacttcctaacacacaactgtat

SEQ ID NO: 72102 - DNA, 25 bp, SARS Virus
tgacttcctaatccacaactgtatg

SEQ ID NO: 72103 - DNA, 25 bp, SARS Virus
gacttcctaatacacaactgtatgg

SEQ ID NO: 72104 - DNA, 25 bp, SARS Virus
acttcctaatacccaactgtatggt

SEQ ID NO: 72105 - DNA, 25 bp, SARS Virus
cttcctaatacacaactgtatggtc

SEQ ID NO: 72106 - DNA, 25 bp, SARS Virus
ttcctaatacaccactgtatggtcc

SEQ ID NO: 72107 - DNA, 25 bp, SARS Virus
tcctaatacacacctgtatggtccg

SEQ ID NO: 72108 - DNA, 25 bp, SARS Virus
cctaatacacaactgtatggtccgt

SEQ ID NO: 72109 - DNA, 25 bp, SARS Virus
ctaatacacaaccgtatggtccgta

SEQ ID NO: 72110 - DNA, 25 bp, SARS Virus
taatacacaactctatggtccgtat

SEQ ID NO: 72111 - DNA, 25 bp, SARS Virus
aatacacaactgcatggtccgtatg

SEQ ID NO: 72112 - DNA, 25 bp, SARS Virus
atacacaactgtctggtccgtatgg

SEQ ID NO: 72113 - DNA, 25 bp, SARS Virus
tacacaactgtacggtccgtatggt

SEQ ID NO: 72114 - DNA, 25 bp, SARS Virus
acacaactgtatcgtccgtatggtt

SEQ ID NO: 72115 - DNA, 25 bp, SARS Virus
cacaactgtatgctccgtatggttt

SEQ ID NO: 72116 - DNA, 25 bp, SARS Virus
acaactgtatggcccgtatggtttc

SEQ ID NO: 72117 - DNA, 25 bp, SARS Virus
caactgtatggtccgtatggtttcc

SEQ ID NO: 72118 - DNA, 25 bp, SARS Virus
aactgtatggtccgtatggtttcct

SEQ ID NO: 72119 - DNA, 25 bp, SARS Virus
actgtatggtccctatggtttcctg

SEQ ID NO: 72120 - DNA, 25 bp, SARS Virus
ctgtatggtccgcatggtttcctgt

SEQ ID NO: 72121 - DNA, 25 bp, SARS Virus
tgtatggtccgtctggtttcctgta

SEQ ID NO: 72122 - DNA, 25 bp, SARS Virus
gtatggtccgtacggtttcctgtac

SEQ ID NO: 72123 - DNA, 25 bp, SARS Virus
tatggtccgtatcgtttcctgtact

SEQ ID NO: 72124 - DNA, 25 bp, SARS Virus
atggtccgtatgctttcctgtactg

SEQ ID NO: 72125 - DNA, 25 bp, SARS Virus
tggtccgtatggcttcctgtactgg

SEQ ID NO: 72126 - DNA, 25 bp, SARS Virus
ggtccgtatggtctcctgtactgga

SEQ ID NO: 72127 - DNA, 25 bp, SARS Virus
gtccgtatggttccctgtactggat

SEQ ID NO: 72128 - DNA, 25 bp, SARS Virus
tccgtatggtttcctgtactggatg

SEQ ID NO: 72129 - DNA, 25 bp, SARS Virus
ccgtatggtttcctgtactggatgg

SEQ ID NO: 72130 - DNA, 25 bp, SARS Virus
cgtatggtttcccgtactggatggc

SEQ ID NO: 72131 - DNA, 25 bp, SARS Virus
gtatggtttcctctactggatggca

SEQ ID NO: 72132 - DNA, 25 bp, SARS Virus
tatggtttcctgcactggatggcat

SEQ ID NO: 72133 - DNA, 25 bp, SARS Virus
atggtttcctgtcctggatggcatc

SEQ ID NO: 72134 - DNA, 25 bp, SARS Virus
tggtttcctgtactggatggcatct

SEQ ID NO: 72135 - DNA, 25 bp, SARS Virus
ggtttcctgtaccggatggcatctg

SEQ ID NO: 72136 - DNA, 25 bp, SARS Virus
gtttcctgtactcgatggcatctga

SEQ ID NO: 72137 - DNA, 25 bp, SARS Virus
tttcctgtactgcatggcatctgag

SEQ ID NO: 72138 - DNA, 25 bp, SARS Virus
ttcctgtactggctggcatctgagt

SEQ ID NO: 72139 - DNA, 25 bp, SARS Virus
tcctgtactggacggcatctgagta

SEQ ID NO: 72140 - DNA, 25 bp, SARS Virus
cctgtactggatcgcatctgagtag

SEQ ID NO: 72141 - DNA, 25 bp, SARS Virus
ctgtactggatgccatctgagtaga

SEQ ID NO: 72142 - DNA, 25 bp, SARS Virus
tgtactggatggcatctgagtagag

SEQ ID NO: 72143 - DNA, 25 bp, SARS Virus
gtactggatggcctctgagtagaga

SEQ ID NO: 72144 - DNA, 25 bp, SARS Virus
tactggatggcacctgagtagagat

SEQ ID NO: 72145 - DNA, 25 bp, SARS Virus
actggatggcatctgagtagagata

SEQ ID NO: 72146 - DNA, 25 bp, SARS Virus
ctggatggcatccgagtagagatac

SEQ ID NO: 72147 - DNA, 25 bp, SARS Virus
tggatggcatctcagtagagatact

SEQ ID NO: 72148 - DNA, 25 bp, SARS Virus
ggatggcatctgcgtagagatacta

SEQ ID NO: 72149 - DNA, 25 bp, SARS Virus
gatggcatctgactagagatactac

SEQ ID NO: 72150 - DNA, 25 bp, SARS Virus
atggcatctgagcagagatactacc

SEQ ID NO: 72151 - DNA, 25 bp, SARS Virus
tggcatctgagtcgagatactaccc

SEQ ID NO: 72152 - DNA, 25 bp, SARS Virus
ggcatctgagtacagatactaccca

SEQ ID NO: 72153 - DNA, 25 bp, SARS Virus
gcatctgagtagcgatactacccaa

SEQ ID NO: 72154 - DNA, 25 bp, SARS Virus
catctgagtagacatactacccaaa

SEQ ID NO: 72155 - DNA, 25 bp, SARS Virus
atctgagtagagctactacccaaag

SEQ ID NO: 72156 - DNA, 25 bp, SARS Virus
tctgagtagagacactacccaaagt

SEQ ID NO: 72157 - DNA, 25 bp, SARS Virus
ctgagtagagatcctacccaaagtt

SEQ ID NO: 72158 - DNA, 25 bp, SARS Virus
tgagtagagatactacccaaagttt

SEQ ID NO: 72159 - DNA, 25 bp, SARS Virus
gagtagagataccacccaaagtttt

SEQ ID NO: 72160 - DNA, 25 bp, SARS Virus
agtagagatactccccaaagtttta

SEQ ID NO: 72161 - DNA, 25 bp, SARS Virus
gtagagatactacccaaagttttac

SEQ ID NO: 72162 - DNA, 25 bp, SARS Virus
tagagatactacccaaagttttact

SEQ ID NO: 72163 - DNA, 25 bp, SARS Virus
agagatactacccaaagttttactt

SEQ ID NO: 72164 - DNA, 25 bp, SARS Virus
gagatactaccccaagttttactta

SEQ ID NO: 72165 - DNA, 25 bp, SARS Virus
agatactacccacagttttacttaa

SEQ ID NO: 72166 - DNA, 25 bp, SARS Virus
gatactacccaacgttttacttaat

SEQ ID NO: 72167 - DNA, 25 bp, SARS Virus
atactacccaaacttttacttaatg

SEQ ID NO: 72168 - DNA, 25 bp, SARS Virus
tactacccaaagctttacttaatgg

SEQ ID NO: 72169 - DNA, 25 bp, SARS Virus
actacccaaagtcttacttaatggt

SEQ ID NO: 72170 - DNA, 25 bp, SARS Virus
ctacccaaagttctacttaatggtt

SEQ ID NO: 72171 - DNA, 25 bp, SARS Virus
tacccaaagtttcacttaatggttc

SEQ ID NO: 72172 - DNA, 25 bp, SARS Virus
acccaaagttttccttaatggttca

SEQ ID NO: 72173 - DNA, 25 bp, SARS Virus
cccaaagttttacttaatggttcag

SEQ ID NO: 72174 - DNA, 25 bp, SARS Virus
ccaaagttttacctaatggttcagt

SEQ ID NO: 72175 - DNA, 25 bp, SARS Virus
caaagttttactcaatggttcagtt

SEQ ID NO: 72176 - DNA, 25 bp, SARS Virus
aaagttttacttcatggttcagtta

SEQ ID NO: 72177 - DNA, 25 bp, SARS Virus
aagttttacttactggttcagttac

SEQ ID NO: 72178 - DNA, 25 bp, SARS Virus
agttttacttaacggttcagttacc

SEQ ID NO: 72179 - DNA, 25 bp, SARS Virus
gttttacttaatcgttcagttacca

SEQ ID NO: 72180 - DNA, 25 bp, SARS Virus
ttttacttaatgcttcagttaccaa

SEQ ID NO: 72181 - DNA, 25 bp, SARS Virus
tttacttaatggctcagttaccaat

SEQ ID NO: 72182 - DNA, 25 bp, SARS Virus
ttacttaatggtccagttaccaatg

SEQ ID NO: 72183 - DNA, 25 bp, SARS Virus
tacttaatggttcagttaccaatgg

SEQ ID NO: 72184 - DNA, 25 bp, SARS Virus
acttaatggttccgttaccaatggg

SEQ ID NO: 72185 - DNA, 25 bp, SARS Virus
cttaatggttcacttaccaatggga

SEQ ID NO: 72186 - DNA, 25 bp, SARS Virus
ttaatggttcagctaccaatgggat

SEQ ID NO: 72187 - DNA, 25 bp, SARS Virus
taatggttcagtcaccaatgggatt

SEQ ID NO: 72188 - DNA, 25 bp, SARS Virus
aatggttcagttcccaatgggatta

SEQ ID NO: 72189 - DNA, 25 bp, SARS Virus
atggttcagttaccaatgggattat

SEQ ID NO: 72190 - DNA, 25 bp, SARS Virus
tggttcagttaccaatgggattata

SEQ ID NO: 72191 - DNA, 25 bp, SARS Virus
ggttcagttacccatgggattatac

SEQ ID NO: 72192 - DNA, 25 bp, SARS Virus
gttcagttaccactgggattataca

SEQ ID NO: 72193 - DNA, 25 bp, SARS Virus
ttcagttaccaacgggattatacaa

SEQ ID NO: 72194 - DNA, 25 bp, SARS Virus
tcagttaccaatcggattatacaaa

SEQ ID NO: 72195 - DNA, 25 bp, SARS Virus
cagttaccaatgcgattatacaaat

SEQ ID NO: 72196 - DNA, 25 bp, SARS Virus
agttaccaatggcattatacaaata

SEQ ID NO: 72197 - DNA, 25 bp, SARS Virus
gttaccaatgggcttatacaaatag

SEQ ID NO: 72198 - DNA, 25 bp, SARS Virus
ttaccaatgggactatacaaatagt

SEQ ID NO: 72199 - DNA, 25 bp, SARS Virus
taccaatgggatcatacaaatagtg

SEQ ID NO: 72200 - DNA, 25 bp, SARS Virus
accaatgggattctacaaatagtgg

SEQ ID NO: 72201 - DNA, 25 bp, SARS Virus
ccaatgggattacacaaatagtggg

SEQ ID NO: 72202 - DNA, 25 bp, SARS Virus
caatgggattatccaaatagtgggc

SEQ ID NO: 72203 - DNA, 25 bp, SARS Virus
aatgggattatacaaatagtgggcg

SEQ ID NO: 72204 - DNA, 25 bp, SARS Virus
atgggattataccaatagtgggcgc

SEQ ID NO: 72205 - DNA, 25 bp, SARS Virus
tgggattatacacatagtgggcgct

SEQ ID NO: 72206 - DNA, 25 bp, SARS Virus
gggattatacaactagtgggcgctt

SEQ ID NO: 72207 - DNA, 25 bp, SARS Virus
ggattatacaaacagtgggcgcttc

SEQ ID NO: 72208 - DNA, 25 bp, SARS Virus
gattatacaaatcgtgggcgcttct

SEQ ID NO: 72209 - DNA, 25 bp, SARS Virus
attatacaaatactgggcgcttctt

SEQ ID NO: 72210 - DNA, 25 bp, SARS Virus
ttatacaaatagcgggcgcttcttc

SEQ ID NO: 72211 - DNA, 25 bp, SARS Virus
tatacaaatagtcggcgcttcttcg

SEQ ID NO: 72212 - DNA, 25 bp, SARS Virus
atacaaatagtgcgcgcttcttcga

SEQ ID NO: 72213 - DNA, 25 bp, SARS Virus
tacaaatagtggccgcttcttcgat

SEQ ID NO: 72214 - DNA, 25 bp, SARS Virus
acaaatagtgggcgcttcttcgata

SEQ ID NO: 72215 - DNA, 25 bp, SARS Virus
caaatagtgggcccttcttcgataa

SEQ ID NO: 72216 - DNA, 25 bp, SARS Virus
aaatagtgggcgcttcttcgataag

SEQ ID NO: 72217 - DNA, 25 bp, SARS Virus
aatagtgggcgcctcttcgataagc

SEQ ID NO: 72218 - DNA, 25 bp, SARS Virus
atagtgggcgctccttcgataagca

SEQ ID NO: 72219 - DNA, 25 bp, SARS Virus
tagtgggcgcttcttcgataagcag

SEQ ID NO: 72220 - DNA, 25 bp, SARS Virus
agtgggcgcttcctcgataagcagt

SEQ ID NO: 72221 - DNA, 25 bp, SARS Virus
gtgggcgcttctccgataagcagtg

SEQ ID NO: 72222 - DNA, 25 bp, SARS Virus
tgggcgcttcttcgataagcagtgc

SEQ ID NO: 72223 - DNA, 25 bp, SARS Virus
gggcgcttcttccataagcagtgca

SEQ ID NO: 72224 - DNA, 25 bp, SARS Virus
ggcgcttcttcgctaagcagtgcaa

SEQ ID NO: 72225 - DNA, 25 bp, SARS Virus
gcgcttcttcgacaagcagtgcaag

SEQ ID NO: 72226 - DNA, 25 bp, SARS Virus
cgcttcttcgatcagcagtgcaagc

SEQ ID NO: 72227 - DNA, 25 bp, SARS Virus
gcttcttcgatacgcagtgcaagca

SEQ ID NO: 72228 - DNA, 25 bp, SARS Virus
cttcttcgataaccagtgcaagcac

SEQ ID NO: 72229 - DNA, 25 bp, SARS Virus
ttcttcgataagcagtgcaagcacg

SEQ ID NO: 72230 - DNA, 25 bp, SARS Virus
tcttcgataagccgtgcaagcacgc

SEQ ID NO: 72231 - DNA, 25 bp, SARS Virus
cttcgataagcactgcaagcacgca

SEQ ID NO: 72232 - DNA, 25 bp, SARS Virus
ttcgataagcagcgcaagcacgcac

SEQ ID NO: 72233 - DNA, 25 bp, SARS Virus
tcgataagcagtccaagcacgcacc

SEQ ID NO: 72234 - DNA, 25 bp, SARS Virus
cgataagcagtgcaagcacgcacct

SEQ ID NO: 72235 - DNA, 25 bp, SARS Virus
gataagcagtgccagcacgcaccta

SEQ ID NO: 72236 - DNA, 25 bp, SARS Virus
ataagcagtgcacgcacgcacctaa

SEQ ID NO: 72237 - DNA, 25 bp, SARS Virus
taagcagtgcaaccacgcacctaac

SEQ ID NO: 72238 - DNA, 25 bp, SARS Virus
aagcagtgcaagcacgcacctaacc

SEQ ID NO: 72239 - DNA, 25 bp, SARS Virus
agcagtgcaagcccgcacctaaccg

SEQ ID NO: 72240 - DNA, 25 bp, SARS Virus
gcagtgcaagcacgcacctaaccga

SEQ ID NO: 72241 - DNA, 25 bp, SARS Virus
cagtgcaagcacccacctaaccgaa

SEQ ID NO: 72242 - DNA, 25 bp, SARS Virus
agtgcaagcacgcacctaaccgaaa

SEQ ID NO: 72243 - DNA, 25 bp, SARS Virus
gtgcaagcacgcccctaaccgaaac

SEQ ID NO: 72244 - DNA, 25 bp, SARS Virus
tgcaagcacgcacctaaccgaaact

SEQ ID NO: 72245 - DNA, 25 bp, SARS Virus
gcaagcacgcacctaaccgaaacta

SEQ ID NO: 72246 - DNA, 25 bp, SARS Virus
caagcacgcacccaaccgaaactac

SEQ ID NO: 72247 - DNA, 25 bp, SARS Virus
aagcacgcacctcaccgaaactaca

SEQ ID NO: 72248 - DNA, 25 bp, SARS Virus
agcacgcacctacccgaaactacat

SEQ ID NO: 72249 - DNA, 25 bp, SARS Virus
gcacgcacctaaccgaaactacatc

SEQ ID NO: 72250 - DNA, 25 bp, SARS Virus
cacgcacctaaccgaaactacatct

SEQ ID NO: 72251 - DNA, 25 bp, SARS Virus
acgcacctaacccaaactacatctc

SEQ ID NO: 72252 - DNA, 25 bp, SARS Virus
cgcacctaaccgcaactacatctcc

SEQ ID NO: 72253 - DNA, 25 bp, SARS Virus
gcacctaaccgacactacatctccc

SEQ ID NO: 72254 - DNA, 25 bp, SARS Virus
cacctaaccgaacctacatctcccg

SEQ ID NO: 72255 - DNA, 25 bp, SARS Virus
acctaaccgaaactacatctcccga

SEQ ID NO: 72256 - DNA, 25 bp, SARS Virus
cctaaccgaaaccacatctcccgac

SEQ ID NO: 72257 - DNA, 25 bp, SARS Virus
ctaaccgaaactccatctcccgaca

SEQ ID NO: 72258 - DNA, 25 bp, SARS Virus
taaccgaaactacatctcccgacag

SEQ ID NO: 72259 - DNA, 25 bp, SARS Virus
aaccgaaactacctctcccgacagt

SEQ ID NO: 72260 - DNA, 25 bp, SARS Virus
accgaaactacacctcccgacagta

SEQ ID NO: 72261 - DNA, 25 bp, SARS Virus
ccgaaactacatctcccgacagtac

SEQ ID NO: 72262 - DNA, 25 bp, SARS Virus
cgaaactacatcccccgacagtacg

SEQ ID NO: 72263 - DNA, 25 bp, SARS Virus
gaaactacatctcccgacagtacgt

SEQ ID NO: 72264 - DNA, 25 bp, SARS Virus
aaactacatctcccgacagtacgtt

SEQ ID NO: 72265 - DNA, 25 bp, SARS Virus
aactacatctcccgacagtacgttg

SEQ ID NO: 72266 - DNA, 25 bp, SARS Virus
actacatctccccacagtacgttga

SEQ ID NO: 72267 - DNA, 25 bp, SARS Virus
ctacatctcccgccagtacgttgat

SEQ ID NO: 72268 - DNA, 25 bp, SARS Virus
tacatctcccgacagtacgttgatc

SEQ ID NO: 72269 - DNA, 25 bp, SARS Virus
acatctcccgaccgtacgttgatct

SEQ ID NO: 72270 - DNA, 25 bp, SARS Virus
catctcccgacactacgttgatctc

SEQ ID NO: 72271 - DNA, 25 bp, SARS Virus
atctcccgacagcacgttgatctct

SEQ ID NO: 72272 - DNA, 25 bp, SARS Virus
tctcccgacagtccgttgatctcta

SEQ ID NO: 72273 - DNA, 25 bp, SARS Virus
ctcccgacagtacgttgatctctac

SEQ ID NO: 72274 - DNA, 25 bp, SARS Virus
tcccgacagtaccttgatctctacg

SEQ ID NO: 72275 - DNA, 25 bp, SARS Virus
cccgacagtacgctgatctctacga

SEQ ID NO: 72276 - DNA, 25 bp, SARS Virus
ccgacagtacgtcgatctctacgac

SEQ ID NO: 72277 - DNA, 25 bp, SARS Virus
cgacagtacgttcatctctacgaca

SEQ ID NO: 72278 - DNA, 25 bp, SARS Virus
gacagtacgttgctctctacgacac

SEQ ID NO: 72279 - DNA, 25 bp, SARS Virus
acagtacgttgacctctacgacacc

SEQ ID NO: 72280 - DNA, 25 bp, SARS Virus
cagtacgttgatctctacgacaccc

SEQ ID NO: 72281 - DNA, 25 bp, SARS Virus
agtacgttgatccctacgacaccca

SEQ ID NO: 72282 - DNA, 25 bp, SARS Virus
gtacgttgatctctacgacacccat

SEQ ID NO: 72283 - DNA, 25 bp, SARS Virus
tacgttgatctccacgacacccatg

SEQ ID NO: 72284 - DNA, 25 bp, SARS Virus
acgttgatctctccgacacccatga

SEQ ID NO: 72285 - DNA, 25 bp, SARS Virus
cgttgatctctacgacacccatgat

SEQ ID NO: 72286 - DNA, 25 bp, SARS Virus
gttgatctctaccacacccatgatt

SEQ ID NO: 72287 - DNA, 25 bp, SARS Virus
ttgatctctacgccacccatgattg

SEQ ID NO: 72288 - DNA, 25 bp, SARS Virus
tgatctctacgacacccatgattgg

SEQ ID NO: 72289 - DNA, 25 bp, SARS Virus
gatctctacgacccccatgattgga

SEQ ID NO: 72290 - DNA, 25 bp, SARS Virus
atctctacgacacccatgattggat

SEQ ID NO: 72291 - DNA, 25 bp, SARS Virus
tctctacgacacccatgattggatg

SEQ ID NO: 72292 - DNA, 25 bp, SARS Virus
ctctacgacacccatgattggatgg

SEQ ID NO: 72293 - DNA, 25 bp, SARS Virus
tctacgacacccctgattggatgga

SEQ ID NO: 72294 - DNA, 25 bp, SARS Virus
ctacgacacccacgattggatggag

SEQ ID NO: 72295 - DNA, 25 bp, SARS Virus
tacgacacccatcattggatggaga

SEQ ID NO: 72296 - DNA, 25 bp, SARS Virus
acgacacccatgcttggatggagag

SEQ ID NO: 72297 - DNA, 25 bp, SARS Virus
cgacacccatgactggatggagagg

SEQ ID NO: 72298 - DNA, 25 bp, SARS Virus
gacacccatgatcggatggagaggt

SEQ ID NO: 72299 - DNA, 25 bp, SARS Virus
acacccatgattcgatggagaggtc

SEQ ID NO: 72300 - DNA, 25 bp, SARS Virus
cacccatgattgcatggagaggtcg

SEQ ID NO: 72301 - DNA, 25 bp, SARS Virus
acccatgattggctggagaggtcga

SEQ ID NO: 72302 - DNA, 25 bp, SARS Virus
cccatgattggacggagaggtcgat

SEQ ID NO: 72303 - DNA, 25 bp, SARS Virus
ccatgattggatcgagaggtcgatc

SEQ ID NO: 72304 - DNA, 25 bp, SARS Virus
catgattggatgcagaggtcgatcc

SEQ ID NO: 72305 - DNA, 25 bp, SARS Virus
atgattggatggcgaggtcgatcct

SEQ ID NO: 72306 - DNA, 25 bp, SARS Virus
tgattggatggacaggtcgatccta

SEQ ID NO: 72307 - DNA, 25 bp, SARS Virus
gattggatggagcggtcgatcctaa

SEQ ID NO: 72308 - DNA, 25 bp, SARS Virus
attggatggagacgtcgatcctaaa

SEQ ID NO: 72309 - DNA, 25 bp, SARS Virus
ttggatggagagctcgatcctaaaa

SEQ ID NO: 72310 - DNA, 25 bp, SARS Virus
tggatggagaggccgatcctaaaag

SEQ ID NO: 72311 - DNA, 25 bp, SARS Virus
ggatggagaggtcgatcctaaaaga

SEQ ID NO: 72312 - DNA, 25 bp, SARS Virus
gatggagaggtccatcctaaaagat

SEQ ID NO: 72313 - DNA, 25 bp, SARS Virus
atggagaggtcgctcctaaaagatg

SEQ ID NO: 72314 - DNA, 25 bp, SARS Virus
tggagaggtcgaccctaaaagatgt

SEQ ID NO: 72315 - DNA, 25 bp, SARS Virus
ggagaggtcgatcctaaaagatgtc

SEQ ID NO: 72316 - DNA, 25 bp, SARS Virus
gagaggtcgatcctaaaagatgtcc

SEQ ID NO: 72317 - DNA, 25 bp, SARS Virus
agaggtcgatcccaaaagatgtcca

SEQ ID NO: 72318 - DNA, 25 bp, SARS Virus
gaggtcgatcctcaaagatgtccac

SEQ ID NO: 72319 - DNA, 25 bp, SARS Virus
aggtcgatcctacaagatgtccaca

SEQ ID NO: 72320 - DNA, 25 bp, SARS Virus
ggtcgatcctaacagatgtccacaa

SEQ ID NO: 72321 - DNA, 25 bp, SARS Virus
gtcgatcctaaacgatgtccacaat

SEQ ID NO: 72322 - DNA, 25 bp, SARS Virus
tcgatcctaaaacatgtccacaatt

SEQ ID NO: 72323 - DNA, 25 bp, SARS Virus
cgatcctaaaagctgtccacaattg

SEQ ID NO: 72324 - DNA, 25 bp, SARS Virus
gatcctaaaagacgtccacaattga

SEQ ID NO: 72325 - DNA, 25 bp, SARS Virus
atcctaaaagatctccacaattgaa

SEQ ID NO: 72326 - DNA, 25 bp, SARS Virus
tcctaaaagatgcccacaattgaat

SEQ ID NO: 72327 - DNA, 25 bp, SARS Virus
cctaaaagatgtccacaattgaatc

SEQ ID NO: 72328 - DNA, 25 bp, SARS Virus
ctaaaagatgtccacaattgaatca

SEQ ID NO: 72329 - DNA, 25 bp, SARS Virus
taaaagatgtccccaattgaatcat

SEQ ID NO: 72330 - DNA, 25 bp, SARS Virus
aaaagatgtccacaattgaatcatc

SEQ ID NO: 72331 - DNA, 25 bp, SARS Virus
aaagatgtccaccattgaatcatcg

SEQ ID NO: 72332 - DNA, 25 bp, SARS Virus
aagatgtccacacttgaatcatcga

SEQ ID NO: 72333 - DNA, 25 bp, SARS Virus
agatgtccacaactgaatcatcgac

SEQ ID NO: 72334 - DNA, 25 bp, SARS Virus
gatgtccacaatcgaatcatcgaca

SEQ ID NO: 72335 - DNA, 25 bp, SARS Virus
atgtccacaattcaatcatcgacat

SEQ ID NO: 72336 - DNA, 25 bp, SARS Virus
tgtccacaattgcatcatcgacatg

SEQ ID NO: 72337 - DNA, 25 bp, SARS Virus
gtccacaattgactcatcgacatgg

SEQ ID NO: 72338 - DNA, 25 bp, SARS Virus
tccacaattgaaccatcgacatggc

SEQ ID NO: 72339 - DNA, 25 bp, SARS Virus
ccacaattgaatcatcgacatggct

SEQ ID NO: 72340 - DNA, 25 bp, SARS Virus
cacaattgaatcctcgacatggctg

SEQ ID NO: 72341 - DNA, 25 bp, SARS Virus
acaattgaatcaccgacatggctga

SEQ ID NO: 72342 - DNA, 25 bp, SARS Virus
caattgaatcatcgacatggctgac

SEQ ID NO: 72343 - DNA, 25 bp, SARS Virus
aattgaatcatccacatggctgacc

SEQ ID NO: 72344 - DNA, 25 bp, SARS Virus
attgaatcatcgccatggctgacca

SEQ ID NO: 72345 - DNA, 25 bp, SARS Virus
ttgaatcatcgacatggctgaccaa

SEQ ID NO: 72346 - DNA, 25 bp, SARS Virus
tgaatcatcgacctggctgaccaat

SEQ ID NO: 72347 - DNA, 25 bp, SARS Virus
gaatcatcgacacggctgaccaata

SEQ ID NO: 72348 - DNA, 25 bp, SARS Virus
aatcatcgacatcgctgaccaatac

SEQ ID NO: 72349 - DNA, 25 bp, SARS Virus
atcatcgacatgcctgaccaataca

SEQ ID NO: 72350 - DNA, 25 bp, SARS Virus
tcatcgacatggctgaccaatacaa

SEQ ID NO: 72351 - DNA, 25 bp, SARS Virus
catcgacatggccgaccaatacaac

SEQ ID NO: 72352 - DNA, 25 bp, SARS Virus
atcgacatggctcaccaatacaact

SEQ ID NO: 72353 - DNA, 25 bp, SARS Virus
ttacagttggcggagttacaccgat

SEQ ID NO: 72354 - DNA, 25 bp, SARS Virus
tacagttggcgaggttacaccgata

SEQ ID NO: 72355 - DNA, 25 bp, SARS Virus
acagttggcgaagttacaccgatag

SEQ ID NO: 72356 - DNA, 25 bp, SARS Virus
cagttggcgaaggtacaccgatagt

SEQ ID NO: 72357 - DNA, 25 bp, SARS Virus
agttggcgaagtgacaccgatagtg

SEQ ID NO: 72358 - DNA, 25 bp, SARS Virus
gttggcgaagttgcaccgatagtgt

SEQ ID NO: 72359 - DNA, 25 bp, SARS Virus
ttggcgaagttagaccgatagtgtt

SEQ ID NO: 72360 - DNA, 25 bp, SARS Virus
tggcgaagttacgccgatagtgttc

SEQ ID NO: 72361 - DNA, 25 bp, SARS Virus
ggcgaagttacagcgatagtgttcc

SEQ ID NO: 72362 - DNA, 25 bp, SARS Virus
gcgaagttacacggatagtgttccc

SEQ ID NO: 72363 - DNA, 25 bp, SARS Virus
cgaagttacaccgatagtgttcccg

SEQ ID NO: 72364 - DNA, 25 bp, SARS Virus
gaagttacaccggtagtgttcccgt

SEQ ID NO: 72365 - DNA, 25 bp, SARS Virus
aagttacaccgagagtgttcccgtt

SEQ ID NO: 72366 - DNA, 25 bp, SARS Virus
agttacaccgatggtgttcccgttt

SEQ ID NO: 72367 - DNA, 25 bp, SARS Virus
gttacaccgatagtgttcccgtttt

SEQ ID NO: 72368 - DNA, 25 bp, SARS Virus
ttacaccgatagggttcccgttttt

SEQ ID NO: 72369 - DNA, 25 bp, SARS Virus
tacaccgatagtgttcccgttttta

SEQ ID NO: 72370 - DNA, 25 bp, SARS Virus
acaccgatagtggtcccgtttttaa

SEQ ID NO: 72371 - DNA, 25 bp, SARS Virus
caccgatagtgtgcccgtttttaac

SEQ ID NO: 72372 - DNA, 25 bp, SARS Virus
accgatagtgttgccgtttttaacc

SEQ ID NO: 72373 - DNA, 25 bp, SARS Virus
ccgatagtgttcgcgtttttaaccg

SEQ ID NO: 72374 - DNA, 25 bp, SARS Virus
cgatagtgttccggtttttaaccgt

SEQ ID NO: 72375 - DNA, 25 bp, SARS Virus
gatagtgttcccgtttttaaccgta

SEQ ID NO: 72376 - DNA, 25 bp, SARS Virus
atagtgttcccggttttaaccgtaa

SEQ ID NO: 72377 - DNA, 25 bp, SARS Virus
tagtgttcccgtgtttaaccgtaaa

SEQ ID NO: 72378 - DNA, 25 bp, SARS Virus
agtgttcccgttgttaaccgtaaaa

SEQ ID NO: 72379 - DNA, 25 bp, SARS Virus
gtgttcccgtttgtaaccgtaaaac

SEQ ID NO: 72380 - DNA, 25 bp, SARS Virus
tgttcccgttttgaaccgtaaaaca

SEQ ID NO: 72381 - DNA, 25 bp, SARS Virus
gttcccgtttttgaccgtaaaacac

SEQ ID NO: 72382 - DNA, 25 bp, SARS Virus
ttcccgtttttagccgtaaaacacg

SEQ ID NO: 72383 - DNA, 25 bp, SARS Virus
tcccgtttttaagcgtaaaacacgt

SEQ ID NO: 72384 - DNA, 25 bp, SARS Virus
cccgtttttaacggtaaaacacgta

SEQ ID NO: 72385 - DNA, 25 bp, SARS Virus
ccgtttttaaccgtaaaacacgtat

SEQ ID NO: 72386 - DNA, 25 bp, SARS Virus
cgtttttaaccggaaaacacgtatt

SEQ ID NO: 72387 - DNA, 25 bp, SARS Virus
gtttttaaccgtgaaacacgtatta

SEQ ID NO: 72388 - DNA, 25 bp, SARS Virus
tttttaaccgtagaacacgtattac

SEQ ID NO: 72389 - DNA, 25 bp, SARS Virus
ttttaaccgtaagacacgtattaca

SEQ ID NO: 72390 - DNA, 25 bp, SARS Virus
tttaaccgtaaagcacgtattacag

SEQ ID NO: 72391 - DNA, 25 bp, SARS Virus
ttaaccgtaaaagacgtattacaga

SEQ ID NO: 72392 - DNA, 25 bp, SARS Virus
taaccgtaaaacgcgtattacagac

SEQ ID NO: 72393 - DNA, 25 bp, SARS Virus
aaccgtaaaacaggtattacagact

SEQ ID NO: 72394 - DNA, 25 bp, SARS Virus
accgtaaaacacgtattacagacta

SEQ ID NO: 72395 - DNA, 25 bp, SARS Virus
ccgtaaaacacggattacagactat

SEQ ID NO: 72396 - DNA, 25 bp, SARS Virus
cgtaaaacacgtgttacagactatc

SEQ ID NO: 72397 - DNA, 25 bp, SARS Virus
gtaaaacacgtagtacagactatct

SEQ ID NO: 72398 - DNA, 25 bp, SARS Virus
taaaacacgtatgacagactatctc

SEQ ID NO: 72399 - DNA, 25 bp, SARS Virus
aaaacacgtattgcagactatctct

SEQ ID NO: 72400 - DNA, 25 bp, SARS Virus
aaacacgtattagagactatctcta

SEQ ID NO: 72401 - DNA, 25 bp, SARS Virus
aacacgtattacggactatctctag

SEQ ID NO: 72402 - DNA, 25 bp, SARS Virus
acacgtattacagactatctctaga

SEQ ID NO: 72403 - DNA, 25 bp, SARS Virus
cacgtattacaggctatctctagaa

SEQ ID NO: 72404 - DNA, 25 bp, SARS Virus
acgtattacagagtatctctagaaa

SEQ ID NO: 72405 - DNA, 25 bp, SARS Virus
cgtattacagacgatctctagaaat

SEQ ID NO: 72406 - DNA, 25 bp, SARS Virus
gtattacagactgtctctagaaata

SEQ ID NO: 72407 - DNA, 25 bp, SARS Virus
tattacagactagctctagaaatac

SEQ ID NO: 72408 - DNA, 25 bp, SARS Virus
attacagactatgtctagaaatact

SEQ ID NO: 72409 - DNA, 25 bp, SARS Virus
ttacagactatcgctagaaatactg

SEQ ID NO: 72410 - DNA, 25 bp, SARS Virus
tacagactatctgtagaaatactgt

SEQ ID NO: 72411 - DNA, 25 bp, SARS Virus
acagactatctcgagaaatactgtt

SEQ ID NO: 72412 - DNA, 25 bp, SARS Virus
cagactatctctggaaatactgttt

SEQ ID NO: 72413 - DNA, 25 bp, SARS Virus
agactatctctagaaatactgtttg

SEQ ID NO: 72414 - DNA, 25 bp, SARS Virus
gactatctctaggaatactgtttga

SEQ ID NO: 72415 - DNA, 25 bp, SARS Virus
actatctctagagatactgtttgac

SEQ ID NO: 72416 - DNA, 25 bp, SARS Virus
ctatctctagaagtactgtttgacg

SEQ ID NO: 72417 - DNA, 25 bp, SARS Virus
tatctctagaaagactgtttgacgt

SEQ ID NO: 72418 - DNA, 25 bp, SARS Virus
atctctagaaatgctgtttgacgtt

SEQ ID NO: 72419 - DNA, 25 bp, SARS Virus
tctctagaaatagtgtttgacgtta

SEQ ID NO: 72420 - DNA, 25 bp, SARS Virus
ctctagaaatacggtttgacgttaa

SEQ ID NO: 72421 - DNA, 25 bp, SARS Virus
tctagaaatactgtttgacgttaaa

SEQ ID NO: 72422 - DNA, 25 bp, SARS Virus
ctagaaatactggttgacgttaaat

SEQ ID NO: 72423 - DNA, 25 bp, SARS Virus
tagaaatactgtgtgacgttaaatg

SEQ ID NO: 72424 - DNA, 25 bp, SARS Virus
agaaatactgttggacgttaaatgt

SEQ ID NO: 72425 - DNA, 25 bp, SARS Virus
gaaatactgtttgacgttaaatgtt

SEQ ID NO: 72426 - DNA, 25 bp, SARS Virus
aaatactgtttggcgttaaatgttc

SEQ ID NO: 72427 - DNA, 25 bp, SARS Virus
aatactgtttgaggttaaatgttca

SEQ ID NO: 72428 - DNA, 25 bp, SARS Virus
atactgtttgacgttaaatgttcag

SEQ ID NO: 72429 - DNA, 25 bp, SARS Virus
tactgtttgacggtaaatgttcaga

SEQ ID NO: 72430 - DNA, 25 bp, SARS Virus
actgtttgacgtgaaatgttcagat

SEQ ID NO: 72431 - DNA, 25 bp, SARS Virus
ctgtttgacgttgaatgttcagatc

SEQ ID NO: 72432 - DNA, 25 bp, SARS Virus
tgtttgacgttagatgttcagatct

SEQ ID NO: 72433 - DNA, 25 bp, SARS Virus
gtttgacgttaagtgttcagatctt

SEQ ID NO: 72434 - DNA, 25 bp, SARS Virus
tttgacgttaaaggttcagatcttt

SEQ ID NO: 72435 - DNA, 25 bp, SARS Virus
ttgacgttaaatgttcagatcttta

SEQ ID NO: 72436 - DNA, 25 bp, SARS Virus
tgacgttaaatggtcagatctttat

SEQ ID NO: 72437 - DNA, 25 bp, SARS Virus
gacgttaaatgtgcagatctttatg

SEQ ID NO: 72438 - DNA, 25 bp, SARS Virus
acgttaaatgttgagatctttatgg

SEQ ID NO: 72439 - DNA, 25 bp, SARS Virus
cgttaaatgttcggatctttatggt

SEQ ID NO: 72440 - DNA, 25 bp, SARS Virus
gttaaatgttcagatctttatggtg

SEQ ID NO: 72441 - DNA, 25 bp, SARS Virus
ttaaatgttcaggtctttatggtgc

SEQ ID NO: 72442 - DNA, 25 bp, SARS Virus
taaatgttcagagctttatggtgca

SEQ ID NO: 72443 - DNA, 25 bp, SARS Virus
aaatgttcagatgtttatggtgcag

SEQ ID NO: 72444 - DNA, 25 bp, SARS Virus
aatgttcagatcgttatggtgcagc

SEQ ID NO: 72445 - DNA, 25 bp, SARS Virus
atgttcagatctgtatggtgcagcg

SEQ ID NO: 72446 - DNA, 25 bp, SARS Virus
tgttcagatcttgatggtgcagcgt

SEQ ID NO: 72447 - DNA, 25 bp, SARS Virus
gttcagatctttgtggtgcagcgtt

SEQ ID NO: 72448 - DNA, 25 bp, SARS Virus
ttcagatctttagggtgcagcgtta

SEQ ID NO: 72449 - DNA, 25 bp, SARS Virus
tcagatctttatggtgcagcgttac

SEQ ID NO: 72450 - DNA, 25 bp, SARS Virus
cagatctttatggtgcagcgttaca

SEQ ID NO: 72451 - DNA, 25 bp, SARS Virus
agatctttatggggcagcgttacac

SEQ ID NO: 72452 - DNA, 25 bp, SARS Virus
gatctttatggtgcagcgttacacc

SEQ ID NO: 72453 - DNA, 25 bp, SARS Virus
atctttatggtggagcgttacaccg

SEQ ID NO: 72454 - DNA, 25 bp, SARS Virus
tctttatggtgcggcgttacaccga

SEQ ID NO: 72455 - DNA, 25 bp, SARS Virus
ctttatggtgcagcgttacaccgat

SEQ ID NO: 72456 - DNA, 25 bp, SARS Virus
tttatggtgcagggttacaccgatg

SEQ ID NO: 72457 - DNA, 25 bp, SARS Virus
ttatggtgcagcgttacaccgatgt

SEQ ID NO: 72458 - DNA, 25 bp, SARS Virus
tatggtgcagcggtacaccgatgta

SEQ ID NO: 72459 - DNA, 25 bp, SARS Virus
atggtgcagcgtgacaccgatgtaa

SEQ ID NO: 72460 - DNA, 25 bp, SARS Virus
tggtgcagcgttgcaccgatgtaat

SEQ ID NO: 72461 - DNA, 25 bp, SARS Virus
ggtgcagcgttagaccgatgtaatg

SEQ ID NO: 72462 - DNA, 25 bp, SARS Virus
gtgcagcgttacgccgatgtaatgt

SEQ ID NO: 72463 - DNA, 25 bp, SARS Virus
tgcagcgttacagcgatgtaatgtt

SEQ ID NO: 72464 - DNA, 25 bp, SARS Virus
gcagcgttacacggatgtaatgttc

SEQ ID NO: 72465 - DNA, 25 bp, SARS Virus
cagcgttacaccgatgtaatgttcg

SEQ ID NO: 72466 - DNA, 25 bp, SARS Virus
agcgttacaccggtgtaatgttcgt

SEQ ID NO: 72467 - DNA, 25 bp, SARS Virus
gcgttacaccgaggtaatgttcgtc

SEQ ID NO: 72468 - DNA, 25 bp, SARS Virus
cgttacaccgatgtaatgttcgtct

SEQ ID NO: 72469 - DNA, 25 bp, SARS Virus
gttacaccgatggaatgttcgtctt

SEQ ID NO: 72470 - DNA, 25 bp, SARS Virus
ttacaccgatgtgatgttcgtcttt

SEQ ID NO: 72471 - DNA, 25 bp, SARS Virus
tacaccgatgtagtgttcgtctttt

SEQ ID NO: 72472 - DNA, 25 bp, SARS Virus
acaccgatgtaaggttcgtctttta

SEQ ID NO: 72473 - DNA, 25 bp, SARS Virus
caccgatgtaatgttcgtcttttac

SEQ ID NO: 72474 - DNA, 25 bp, SARS Virus
accgatgtaatggtcgtcttttaca

SEQ ID NO: 72475 - DNA, 25 bp, SARS Virus
ccgatgtaatgtgcgtcttttacat

SEQ ID NO: 72476 - DNA, 25 bp, SARS Virus
cgatgtaatgttggtcttttacatt

SEQ ID NO: 72477 - DNA, 25 bp, SARS Virus
gatgtaatgttcgtcttttacattg

SEQ ID NO: 72478 - DNA, 25 bp, SARS Virus
atgtaatgttcggcttttacattga

SEQ ID NO: 72479 - DNA, 25 bp, SARS Virus
tgtaatgttcgtgttttacattgac

SEQ ID NO: 72480 - DNA, 25 bp, SARS Virus
gtaatgttcgtcgtttacattgacc

SEQ ID NO: 72481 - DNA, 25 bp, SARS Virus
taatgttcgtctgttacattgacct

SEQ ID NO: 72482 - DNA, 25 bp, SARS Virus
aatgttcgtcttgtacattgacctg

SEQ ID NO: 72483 - DNA, 25 bp, SARS Virus
atgttcgtctttgacattgacctga

SEQ ID NO: 72484 - DNA, 25 bp, SARS Virus
tgttcgtcttttgcattgacctgaa

SEQ ID NO: 72485 - DNA, 25 bp, SARS Virus
gttcgtcttttagattgacctgaaa

SEQ ID NO: 72486 - DNA, 25 bp, SARS Virus
ttcgtcttttacgttgacctgaaaa

SEQ ID NO: 72487 - DNA, 25 bp, SARS Virus
tcgtcttttacagtgacctgaaaaa

SEQ ID NO: 72488 - DNA, 25 bp, SARS Virus
cgtcttttacatggacctgaaaaat

SEQ ID NO: 72489 - DNA, 25 bp, SARS Virus
gtcttttacattgacctgaaaaatt

SEQ ID NO: 72490 - DNA, 25 bp, SARS Virus
tcttttacattggcctgaaaaattc

SEQ ID NO: 72491 - DNA, 25 bp, SARS Virus
cttttacattgagctgaaaaattcc

SEQ ID NO: 72492 - DNA, 25 bp, SARS Virus
ttttacattgacgtgaaaaattcct

SEQ ID NO: 72493 - DNA, 25 bp, SARS Virus
tttacattgaccggaaaaattcctg

SEQ ID NO: 72494 - DNA, 25 bp, SARS Virus
ttacattgacctgaaaaattcctga

SEQ ID NO: 72495 - DNA, 25 bp, SARS Virus
tacattgacctggaaaattcctgac

SEQ ID NO: 72496 - DNA, 25 bp, SARS Virus
acattgacctgagaaattcctgaca

SEQ ID NO: 72497 - DNA, 25 bp, SARS Virus
cattgacctgaagaattcctgacat

SEQ ID NO: 72498 - DNA, 25 bp, SARS Virus
attgacctgaaagattcctgacatc

SEQ ID NO: 72499 - DNA, 25 bp, SARS Virus
ttgacctgaaaagttcctgacatca

SEQ ID NO: 72500 - DNA, 25 bp, SARS Virus
tgacctgaaaaagtcctgacatcat

SEQ ID NO: 72501 - DNA, 25 bp, SARS Virus
gacctgaaaaatgcctgacatcatt

SEQ ID NO: 72502 - DNA, 25 bp, SARS Virus
acctgaaaaattgctgacatcattc

SEQ ID NO: 72503 - DNA, 25 bp, SARS Virus
cctgaaaaattcgtgacatcattct

SEQ ID NO: 72504 - DNA, 25 bp, SARS Virus
ctgaaaaattccggacatcattcta

SEQ ID NO: 72505 - DNA, 25 bp, SARS Virus
tgaaaaattcctgacatcattctag

SEQ ID NO: 72506 - DNA, 25 bp, SARS Virus
gaaaaattcctggcatcattctagt

SEQ ID NO: 72507 - DNA, 25 bp, SARS Virus
aaaaattcctgagatcattctagta

SEQ ID NO: 72508 - DNA, 25 bp, SARS Virus
aaaattcctgacgtcattctagtaa

SEQ ID NO: 72509 - DNA, 25 bp, SARS Virus
aaattcctgacagcattctagtaat

SEQ ID NO: 72510 - DNA, 25 bp, SARS Virus
aattcctgacatgattctagtaatg

SEQ ID NO: 72511 - DNA, 25 bp, SARS Virus
attcctgacatcgttctagtaatga

SEQ ID NO: 72512 - DNA, 25 bp, SARS Virus
ttcctgacatcagtctagtaatgac

SEQ ID NO: 72513 - DNA, 25 bp, SARS Virus
tcctgacatcatgctagtaatgacc

SEQ ID NO: 72514 - DNA, 25 bp, SARS Virus
cctgacatcattgtagtaatgacca

SEQ ID NO: 72515 - DNA, 25 bp, SARS Virus
ctgacatcattcgagtaatgaccag

SEQ ID NO: 72516 - DNA, 25 bp, SARS Virus
tgacatcattctggtaatgaccaga

SEQ ID NO: 72517 - DNA, 25 bp, SARS Virus
gacatcattctagtaatgaccagaa

SEQ ID NO: 72518 - DNA, 25 bp, SARS Virus
acatcattctaggaatgaccagaag

SEQ ID NO: 72519 - DNA, 25 bp, SARS Virus
catcattctagtgatgaccagaagt

SEQ ID NO: 72520 - DNA, 25 bp, SARS Virus
atcattctagtagtgaccagaagta

SEQ ID NO: 72521 - DNA, 25 bp, SARS Virus
tcattctagtaaggaccagaagtag

SEQ ID NO: 72522 - DNA, 25 bp, SARS Virus
cattctagtaatgaccagaagtagg

SEQ ID NO: 72523 - DNA, 25 bp, SARS Virus
attctagtaatggccagaagtagga

SEQ ID NO: 72524 - DNA, 25 bp, SARS Virus
ttctagtaatgagcagaagtaggat

SEQ ID NO: 72525 - DNA, 25 bp, SARS Virus
tctagtaatgacgagaagtaggatg

SEQ ID NO: 72526 - DNA, 25 bp, SARS Virus
ctagtaatgaccggaagtaggatgt

SEQ ID NO: 72527 - DNA, 25 bp, SARS Virus
tagtaatgaccagaagtaggatgtg

SEQ ID NO: 72528 - DNA, 25 bp, SARS Virus
agtaatgaccaggagtaggatgtgt

SEQ ID NO: 72529 - DNA, 25 bp, SARS Virus
gtaatgaccagaggtaggatgtgtc

SEQ ID NO: 72530 - DNA, 25 bp, SARS Virus
taatgaccagaagtaggatgtgtcc

SEQ ID NO: 72531 - DNA, 25 bp, SARS Virus
aatgaccagaaggaggatgtgtccg

SEQ ID NO: 72532 - DNA, 25 bp, SARS Virus
atgaccagaagtgggatgtgtccgt

SEQ ID NO: 72533 - DNA, 25 bp, SARS Virus
tgaccagaagtaggatgtgtccgtg

SEQ ID NO: 72534 - DNA, 25 bp, SARS Virus
gaccagaagtaggatgtgtccgtgg

SEQ ID NO: 72535 - DNA, 25 bp, SARS Virus
accagaagtagggtgtgtccgtgga

SEQ ID NO: 72536 - DNA, 25 bp, SARS Virus
ccagaagtaggaggtgtccgtggat

SEQ ID NO: 72537 - DNA, 25 bp, SARS Virus
cagaagtaggatgtgtccgtggatg

SEQ ID NO: 72538 - DNA, 25 bp, SARS Virus
agaagtaggatgggtccgtggatgt

SEQ ID NO: 72539 - DNA, 25 bp, SARS Virus
gaagtaggatgtgtccgtggatgtg

SEQ ID NO: 72540 - DNA, 25 bp, SARS Virus
aagtaggatgtggccgtggatgtgt

SEQ ID NO: 72541 - DNA, 25 bp, SARS Virus
agtaggatgtgtgcgtggatgtgtg

SEQ ID NO: 72542 - DNA, 25 bp, SARS Virus
gtaggatgtgtcggtggatgtgtgg

SEQ ID NO: 72543 - DNA, 25 bp, SARS Virus
taggatgtgtccgtggatgtgtgga

SEQ ID NO: 72544 - DNA, 25 bp, SARS Virus
aggatgtgtccggggatgtgtggag

SEQ ID NO: 72545 - DNA, 25 bp, SARS Virus
ggatgtgtccgtggatgtgtggagt

SEQ ID NO: 72546 - DNA, 25 bp, SARS Virus
gatgtgtccgtggatgtgtggagtc

SEQ ID NO: 72547 - DNA, 25 bp, SARS Virus
atgtgtccgtgggtgtgtggagtcg

SEQ ID NO: 72548 - DNA, 25 bp, SARS Virus
tgtgtccgtggaggtgtggagtcgc

SEQ ID NO: 72549 - DNA, 25 bp, SARS Virus
gtgtccgtggatgtgtggagtcgca

SEQ ID NO: 72550 - DNA, 25 bp, SARS Virus
tgtccgtggatgggtggagtcgcaa

SEQ ID NO: 72551 - DNA, 25 bp, SARS Virus
gtccgtggatgtgtggagtcgcaac

SEQ ID NO: 72552 - DNA, 25 bp, SARS Virus
tccgtggatgtggggagtcgcaact

SEQ ID NO: 72553 - DNA, 25 bp, SARS Virus
ccgtggatgtgtggagtcgcaacta

SEQ ID NO: 72554 - DNA, 25 bp, SARS Virus
cgtggatgtgtggagtcgcaactat

SEQ ID NO: 72555 - DNA, 25 bp, SARS Virus
gtggatgtgtggggtcgcaactata

SEQ ID NO: 72556 - DNA, 25 bp, SARS Virus
tggatgtgtggagtcgcaactatat

SEQ ID NO: 72557 - DNA, 25 bp, SARS Virus
ggatgtgtggaggcgcaactatatt

SEQ ID NO: 72558 - DNA, 25 bp, SARS Virus
gatgtgtggagtggcaactatattt

SEQ ID NO: 72559 - DNA, 25 bp, SARS Virus
atgtgtggagtcgcaactatatttc

SEQ ID NO: 72560 - DNA, 25 bp, SARS Virus
tgtgtggagtcggaactatatttca

SEQ ID NO: 72561 - DNA, 25 bp, SARS Virus
gtgtggagtcgcgactatatttcaa

SEQ ID NO: 72562 - DNA, 25 bp, SARS Virus
tgtggagtcgcagctatatttcaag

SEQ ID NO: 72563 - DNA, 25 bp, SARS Virus
gtggagtcgcaagtatatttcaagt

SEQ ID NO: 72564 - DNA, 25 bp, SARS Virus
tggagtcgcaacgatatttcaagtt

SEQ ID NO: 72565 - DNA, 25 bp, SARS Virus
ggagtcgcaactgtatttcaagttc

SEQ ID NO: 72566 - DNA, 25 bp, SARS Virus
gagtcgcaactagatttcaagttct

SEQ ID NO: 72567 - DNA, 25 bp, SARS Virus
agtcgcaactatgtttcaagttctg

SEQ ID NO: 72568 - DNA, 25 bp, SARS Virus
gtcgcaactatagttcaagttctga

SEQ ID NO: 72569 - DNA, 25 bp, SARS Virus
tcgcaactatatgtcaagttctgac

SEQ ID NO: 72570 - DNA, 25 bp, SARS Virus
cgcaactatattgcaagttctgact

SEQ ID NO: 72571 - DNA, 25 bp, SARS Virus
gcaactatatttgaagttctgactt

SEQ ID NO: 72572 - DNA, 25 bp, SARS Virus
caactatatttcgagttctgacttc

SEQ ID NO: 72573 - DNA, 25 bp, SARS Virus
aactatatttcaggttctgacttcc

SEQ ID NO: 72574 - DNA, 25 bp, SARS Virus
actatatttcaagttctgacttcct

SEQ ID NO: 72575 - DNA, 25 bp, SARS Virus
ctatatttcaaggtctgacttccta

SEQ ID NO: 72576 - DNA, 25 bp, SARS Virus
tatatttcaagtgctgacttcctaa

SEQ ID NO: 72577 - DNA, 25 bp, SARS Virus
atatttcaagttgtgacttcctaat

SEQ ID NO: 72578 - DNA, 25 bp, SARS Virus
tatttcaagttcggacttcctaata

SEQ ID NO: 72579 - DNA, 25 bp, SARS Virus
atttcaagttctgacttcctaatac

SEQ ID NO: 72580 - DNA, 25 bp, SARS Virus
tttcaagttctggcttcctaataca

SEQ ID NO: 72581 - DNA, 25 bp, SARS Virus
ttcaagttctgagttcctaatacac

SEQ ID NO: 72582 - DNA, 25 bp, SARS Virus
tcaagttctgacgtcctaatacaca

SEQ ID NO: 72583 - DNA, 25 bp, SARS Virus
caagttctgactgcctaatacacaa

SEQ ID NO: 72584 - DNA, 25 bp, SARS Virus
aagttctgacttgctaatacacaac

SEQ ID NO: 72585 - DNA, 25 bp, SARS Virus
agttctgacttcgtaatacacaact

SEQ ID NO: 72586 - DNA, 25 bp, SARS Virus
gttctgacttccgaatacacaactg

SEQ ID NO: 72587 - DNA, 25 bp, SARS Virus
ttctgacttcctgatacacaactgt

SEQ ID NO: 72588 - DNA, 25 bp, SARS Virus
tctgacttcctagtacacaactgta

SEQ ID NO: 72589 - DNA, 25 bp, SARS Virus
ctgacttcctaagacacaactgtat

SEQ ID NO: 72590 - DNA, 25 bp, SARS Virus
tgacttcctaatgcacaactgtatg

SEQ ID NO: 72591 - DNA, 25 bp, SARS Virus
gacttcctaatagacaactgtatgg

SEQ ID NO: 72592 - DNA, 25 bp, SARS Virus
acttcctaatacgcaactgtatggt

SEQ ID NO: 72593 - DNA, 25 bp, SARS Virus
cttcctaatacagaactgtatggtc

SEQ ID NO: 72594 - DNA, 25 bp, SARS Virus
ttcctaatacacgactgtatggtcc

SEQ ID NO: 72595 - DNA, 25 bp, SARS Virus
tcctaatacacagctgtatggtccg

SEQ ID NO: 72596 - DNA, 25 bp, SARS Virus
cctaatacacaagtgtatggtccgt

SEQ ID NO: 72597 - DNA, 25 bp, SARS Virus
ctaatacacaacggtatggtccgta

SEQ ID NO: 72598 - DNA, 25 bp, SARS Virus
taatacacaactgtatggtccgtat

SEQ ID NO: 72599 - DNA, 25 bp, SARS Virus
aatacacaactggatggtccgtatg

SEQ ID NO: 72600 - DNA, 25 bp, SARS Virus
atacacaactgtgtggtccgtatgg

SEQ ID NO: 72601 - DNA, 25 bp, SARS Virus
tacacaactgtagggtccgtatggt

SEQ ID NO: 72602 - DNA, 25 bp, SARS Virus
acacaactgtatggtccgtatggtt

SEQ ID NO: 72603 - DNA, 25 bp, SARS Virus
cacaactgtatggtccgtatggttt

SEQ ID NO: 72604 - DNA, 25 bp, SARS Virus
acaactgtatgggccgtatggtttc

SEQ ID NO: 72605 - DNA, 25 bp, SARS Virus
caactgtatggtgcgtatggtttcc

SEQ ID NO: 72606 - DNA, 25 bp, SARS Virus
aactgtatggtcggtatggtttcct

SEQ ID NO: 72607 - DNA, 25 bp, SARS Virus
actgtatggtccgtatggtttcctg

SEQ ID NO: 72608 - DNA, 25 bp, SARS Virus
ctgtatggtccggatggtttcctgt

SEQ ID NO: 72609 - DNA, 25 bp, SARS Virus
tgtatggtccgtgtggtttcctgta

SEQ ID NO: 72610 - DNA, 25 bp, SARS Virus
gtatggtccgtagggtttcctgtac

SEQ ID NO: 72611 - DNA, 25 bp, SARS Virus
tatggtccgtatggtttcctgtact

SEQ ID NO: 72612 - DNA, 25 bp, SARS Virus
atggtccgtatggtttcctgtactg

SEQ ID NO: 72613 - DNA, 25 bp, SARS Virus
tggtccgtatgggttcctgtactgg

SEQ ID NO: 72614 - DNA, 25 bp, SARS Virus
ggtccgtatggtgtcctgtactgga

SEQ ID NO: 72615 - DNA, 25 bp, SARS Virus
gtccgtatggttgcctgtactggat

SEQ ID NO: 72616 - DNA, 25 bp, SARS Virus
tccgtatggtttgctgtactggatg

SEQ ID NO: 72617 - DNA, 25 bp, SARS Virus
ccgtatggtttcgtgtactggatgg

SEQ ID NO: 72618 - DNA, 25 bp, SARS Virus
cgtatggtttccggtactggatggc

SEQ ID NO: 72619 - DNA, 25 bp, SARS Virus
gtatggtttcctgtactggatggca

SEQ ID NO: 72620 - DNA, 25 bp, SARS Virus
tatggtttcctggactggatggcat

SEQ ID NO: 72621 - DNA, 25 bp, SARS Virus
atggtttcctgtgctggatggcatc

SEQ ID NO: 72622 - DNA, 25 bp, SARS Virus
tggtttcctgtagtggatggcatct

SEQ ID NO: 72623 - DNA, 25 bp, SARS Virus
ggtttcctgtacgggatggcatctg

SEQ ID NO: 72624 - DNA, 25 bp, SARS Virus
gtttcctgtactggatggcatctga

SEQ ID NO: 72625 - DNA, 25 bp, SARS Virus
tttcctgtactggatggcatctgag

SEQ ID NO: 72626 - DNA, 25 bp, SARS Virus
ttcctgtactgggtggcatctgagt

SEQ ID NO: 72627 - DNA, 25 bp, SARS Virus
tcctgtactggagggcatctgagta

SEQ ID NO: 72628 - DNA, 25 bp, SARS Virus
cctgtactggatggcatctgagtag

SEQ ID NO: 72629 - DNA, 25 bp, SARS Virus
ctgtactggatggcatctgagtaga

SEQ ID NO: 72630 - DNA, 25 bp, SARS Virus
tgtactggatgggatctgagtagag

SEQ ID NO: 72631 - DNA, 25 bp, SARS Virus
gtactggatggcgtctgagtagaga

SEQ ID NO: 72632 - DNA, 25 bp, SARS Virus
tactggatggcagctgagtagagat

SEQ ID NO: 72633 - DNA, 25 bp, SARS Virus
actggatggcatgtgagtagagata

SEQ ID NO: 72634 - DNA, 25 bp, SARS Virus
ctggatggcatcggagtagagatac

SEQ ID NO: 72635 - DNA, 25 bp, SARS Virus
tggatggcatctgagtagagatact

SEQ ID NO: 72636 - DNA, 25 bp, SARS Virus
ggatggcatctgggtagagatacta

SEQ ID NO: 72637 - DNA, 25 bp, SARS Virus
gatggcatctgagtagagatactac

SEQ ID NO: 72638 - DNA, 25 bp, SARS Virus
atggcatctgaggagagatactacc

SEQ ID NO: 72639 - DNA, 25 bp, SARS Virus
tggcatctgagtggagatactaccc

SEQ ID NO: 72640 - DNA, 25 bp, SARS Virus
ggcatctgagtagagatactaccca

SEQ ID NO: 72641 - DNA, 25 bp, SARS Virus
gcatctgagtagggatactacccaa

SEQ ID NO: 72642 - DNA, 25 bp, SARS Virus
catctgagtagagatactacccaaa

SEQ ID NO: 72643 - DNA, 25 bp, SARS Virus
atctgagtagaggtactacccaaag

SEQ ID NO: 72644 - DNA, 25 bp, SARS Virus
tctgagtagagagactacccaaagt

SEQ ID NO: 72645 - DNA, 25 bp, SARS Virus
ctgagtagagatgctacccaaagtt

SEQ ID NO: 72646 - DNA, 25 bp, SARS Virus
tgagtagagatagtacccaaagttt

SEQ ID NO: 72647 - DNA, 25 bp, SARS Virus
gagtagagatacgacccaaagtttt

SEQ ID NO: 72648 - DNA, 25 bp, SARS Virus
agtagagatactgcccaaagtttta

SEQ ID NO: 72649 - DNA, 25 bp, SARS Virus
gtagagatactagccaaagttttac

SEQ ID NO: 72650 - DNA, 25 bp, SARS Virus
tagagatactacgcaaagttttact

SEQ ID NO: 72651 - DNA, 25 bp, SARS Virus
agagatactaccgaaagttttactt

SEQ ID NO: 72652 - DNA, 25 bp, SARS Virus
gagatactacccgaagttttactta

SEQ ID NO: 72653 - DNA, 25 bp, SARS Virus
agatactacccagagttttacttaa

SEQ ID NO: 72654 - DNA, 25 bp, SARS Virus
gatactacccaaggttttacttaat

SEQ ID NO: 72655 - DNA, 25 bp, SARS Virus
atactacccaaagttttacttaatg

SEQ ID NO: 72656 - DNA, 25 bp, SARS Virus
tactacccaaaggtttacttaatgg

SEQ ID NO: 72657 - DNA, 25 bp, SARS Virus
actacccaaagtgttacttaatggt

SEQ ID NO: 72658 - DNA, 25 bp, SARS Virus
ctacccaaagttgtacttaatggtt

SEQ ID NO: 72659 - DNA, 25 bp, SARS Virus
tacccaaagtttgacttaatggttc

SEQ ID NO: 72660 - DNA, 25 bp, SARS Virus
acccaaagttttgcttaatggttca

SEQ ID NO: 72661 - DNA, 25 bp, SARS Virus
cccaaagttttagttaatggttcag

SEQ ID NO: 72662 - DNA, 25 bp, SARS Virus
ccaaagttttacgtaatggttcagt

SEQ ID NO: 72663 - DNA, 25 bp, SARS Virus
caaagttttactgaatggttcagtt

SEQ ID NO: 72664 - DNA, 25 bp, SARS Virus
aaagttttacttgatggttcagtta

SEQ ID NO: 72665 - DNA, 25 bp, SARS Virus
aagttttacttagtggttcagttac

SEQ ID NO: 72666 - DNA, 25 bp, SARS Virus
agttttacttaagggttcagttacc

SEQ ID NO: 72667 - DNA, 25 bp, SARS Virus
gttttacttaatggttcagttacca

SEQ ID NO: 72668 - DNA, 25 bp, SARS Virus
ttttacttaatggttcagttaccaa

SEQ ID NO: 72669 - DNA, 25 bp, SARS Virus
tttacttaatgggtcagttaccaat

SEQ ID NO: 72670 - DNA, 25 bp, SARS Virus
ttacttaatggtgcagttaccaatg

SEQ ID NO: 72671 - DNA, 25 bp, SARS Virus
tacttaatggttgagttaccaatgg

SEQ ID NO: 72672 - DNA, 25 bp, SARS Virus
acttaatggttcggttaccaatggg

SEQ ID NO: 72673 - DNA, 25 bp, SARS Virus
cttaatggttcagttaccaatggga

SEQ ID NO: 72674 - DNA, 25 bp, SARS Virus
ttaatggttcaggtaccaatgggat

SEQ ID NO: 72675 - DNA, 25 bp, SARS Virus
taatggttcagtgaccaatgggatt

SEQ ID NO: 72676 - DNA, 25 bp, SARS Virus
aatggttcagttgccaatgggatta

SEQ ID NO: 72677 - DNA, 25 bp, SARS Virus
atggttcagttagcaatgggattat

SEQ ID NO: 72678 - DNA, 25 bp, SARS Virus
tggttcagttacgaatgggattata

SEQ ID NO: 72679 - DNA, 25 bp, SARS Virus
ggttcagttaccgatgggattatac

SEQ ID NO: 72680 - DNA, 25 bp, SARS Virus
gttcagttaccagtgggattataca

SEQ ID NO: 72681 - DNA, 25 bp, SARS Virus
ttcagttaccaaggggattatacaa

SEQ ID NO: 72682 - DNA, 25 bp, SARS Virus
tcagttaccaatgggattatacaaa

SEQ ID NO: 72683 - DNA, 25 bp, SARS Virus
cagttaccaatgggattatacaaat

SEQ ID NO: 72684 - DNA, 25 bp, SARS Virus
agttaccaatgggattatacaaata

SEQ ID NO: 72685 - DNA, 25 bp, SARS Virus
gttaccaatggggttatacaaatag

SEQ ID NO: 72686 - DNA, 25 bp, SARS Virus
ttaccaatgggagtatacaaatagt

SEQ ID NO: 72687 - DNA, 25 bp, SARS Virus
taccaatgggatgatacaaatagtg

SEQ ID NO: 72688 - DNA, 25 bp, SARS Virus
accaatgggattgtacaaatagtgg

SEQ ID NO: 72689 - DNA, 25 bp, SARS Virus
ccaatgggattagacaaatagtggg

SEQ ID NO: 72690 - DNA, 25 bp, SARS Virus
caatgggattatgcaaatagtgggc

SEQ ID NO: 72691 - DNA, 25 bp, SARS Virus
aatgggattatagaaatagtgggcg

SEQ ID NO: 72692 - DNA, 25 bp, SARS Virus
atgggattatacgaatagtgggcgc

SEQ ID NO: 72693 - DNA, 25 bp, SARS Virus
tgggattatacagatagtgggcgct

SEQ ID NO: 72694 - DNA, 25 bp, SARS Virus
gggattatacaagtagtgggcgctt

SEQ ID NO: 72695 - DNA, 25 bp, SARS Virus
ggattatacaaagagtgggcgcttc

SEQ ID NO: 72696 - DNA, 25 bp, SARS Virus
gattatacaaatggtgggcgcttct

SEQ ID NO: 72697 - DNA, 25 bp, SARS Virus
attatacaaatagtgggcgcttctt

SEQ ID NO: 72698 - DNA, 25 bp, SARS Virus
ttatacaaatagggggcgcttcttc

SEQ ID NO: 72699 - DNA, 25 bp, SARS Virus
tatacaaatagtgggcgcttcttcg

SEQ ID NO: 72700 - DNA, 25 bp, SARS Virus
atacaaatagtgggcgcttcttcga

SEQ ID NO: 72701 - DNA, 25 bp, SARS Virus
tacaaatagtgggcgcttcttcgat

SEQ ID NO: 72702 - DNA, 25 bp, SARS Virus
acaaatagtgggggcttcttcgata

SEQ ID NO: 72703 - DNA, 25 bp, SARS Virus
caaatagtgggcgcttcttcgataa

SEQ ID NO: 72704 - DNA, 25 bp, SARS Virus
aaatagtgggcggttcttcgataag

SEQ ID NO: 72705 - DNA, 25 bp, SARS Virus
aatagtgggcgcgtcttcgataagc

SEQ ID NO: 72706 - DNA, 25 bp, SARS Virus
atagtgggcgctgcttcgataagca

SEQ ID NO: 72707 - DNA, 25 bp, SARS Virus
tagtgggcgcttgttcgataagcag

SEQ ID NO: 72708 - DNA, 25 bp, SARS Virus
agtgggcgcttcgtcgataagcagt

SEQ ID NO: 72709 - DNA, 25 bp, SARS Virus
gtgggcgcttctgcgataagcagtg

SEQ ID NO: 72710 - DNA, 25 bp, SARS Virus
tgggcgcttcttggataagcagtgc

SEQ ID NO: 72711 - DNA, 25 bp, SARS Virus
gggcgcttcttcgataagcagtgca

SEQ ID NO: 72712 - DNA, 25 bp, SARS Virus
ggcgcttcttcggtaagcagtgcaa

SEQ ID NO: 72713 - DNA, 25 bp, SARS Virus
gcgcttcttcgagaagcagtgcaag

SEQ ID NO: 72714 - DNA, 25 bp, SARS Virus
cgcttcttcgatgagcagtgcaagc

SEQ ID NO: 72715 - DNA, 25 bp, SARS Virus
gcttcttcgataggcagtgcaagca

SEQ ID NO: 72716 - DNA, 25 bp, SARS Virus
cttcttcgataagcagtgcaagcac

SEQ ID NO: 72717 - DNA, 25 bp, SARS Virus
ttcttcgataaggagtgcaagcacg

SEQ ID NO: 72718 - DNA, 25 bp, SARS Virus
tcttcgataagcggtgcaagcacgc

SEQ ID NO: 72719 - DNA, 25 bp, SARS Virus
cttcgataagcagtgcaagcacgca

SEQ ID NO: 72720 - DNA, 25 bp, SARS Virus
ttcgataagcagggcaagcacgcac

SEQ ID NO: 72721 - DNA, 25 bp, SARS Virus
tcgataagcagtgcaagcacgcacc

SEQ ID NO: 72722 - DNA, 25 bp, SARS Virus
cgataagcagtggaagcacgcacct

SEQ ID NO: 72723 - DNA, 25 bp, SARS Virus
gataagcagtgcgagcacgcaccta

SEQ ID NO: 72724 - DNA, 25 bp, SARS Virus
ataagcagtgcaggcacgcacctaa

SEQ ID NO: 72725 - DNA, 25 bp, SARS Virus
taagcagtgcaagcacgcacctaac

SEQ ID NO: 72726 - DNA, 25 bp, SARS Virus
aagcagtgcaaggacgcacctaacc

SEQ ID NO: 72727 - DNA, 25 bp, SARS Virus
agcagtgcaagcgcgcacctaaccg

SEQ ID NO: 72728 - DNA, 25 bp, SARS Virus
gcagtgcaagcaggcacctaaccga

SEQ ID NO: 72729 - DNA, 25 bp, SARS Virus
cagtgcaagcacgcacctaaccgaa

SEQ ID NO: 72730 - DNA, 25 bp, SARS Virus
agtgcaagcacggacctaaccgaaa

SEQ ID NO: 72731 - DNA, 25 bp, SARS Virus
gtgcaagcacgcgcctaaccgaaac

SEQ ID NO: 72732 - DNA, 25 bp, SARS Virus
tgcaagcacgcagctaaccgaaact

SEQ ID NO: 72733 - DNA, 25 bp, SARS Virus
gcaagcacgcacgtaaccgaaacta

SEQ ID NO: 72734 - DNA, 25 bp, SARS Virus
caagcacgcaccgaaccgaaactac

SEQ ID NO: 72735 - DNA, 25 bp, SARS Virus
aagcacgcacctgaccgaaactaca

SEQ ID NO: 72736 - DNA, 25 bp, SARS Virus
agcacgcacctagccgaaactacat

SEQ ID NO: 72737 - DNA, 25 bp, SARS Virus
gcacgcacctaagcgaaactacatc

SEQ ID NO: 72738 - DNA, 25 bp, SARS Virus
cacgcacctaacggaaactacatct

SEQ ID NO: 72739 - DNA, 25 bp, SARS Virus
acgcacctaaccgaaactacatctc

SEQ ID NO: 72740 - DNA, 25 bp, SARS Virus
cgcacctaaccggaactacatctcc

SEQ ID NO: 72741 - DNA, 25 bp, SARS Virus
gcacctaaccgagactacatctccc

SEQ ID NO: 72742 - DNA, 25 bp, SARS Virus
cacctaaccgaagctacatctcccg

SEQ ID NO: 72743 - DNA, 25 bp, SARS Virus
acctaaccgaaagtacatctcccga

SEQ ID NO: 72744 - DNA, 25 bp, SARS Virus
cctaaccgaaacgacatctcccgac

SEQ ID NO: 72745 - DNA, 25 bp, SARS Virus
ctaaccgaaactgcatctcccgaca

SEQ ID NO: 72746 - DNA, 25 bp, SARS Virus
taaccgaaactagatctcccgacag

SEQ ID NO: 72747 - DNA, 25 bp, SARS Virus
aaccgaaactacgtctcccgacagt

SEQ ID NO: 72748 - DNA, 25 bp, SARS Virus
accgaaactacagctcccgacagta

SEQ ID NO: 72749 - DNA, 25 bp, SARS Virus
ccgaaactacatgtcccgacagtac

SEQ ID NO: 72750 - DNA, 25 bp, SARS Virus
cgaaactacatcgcccgacagtacg

SEQ ID NO: 72751 - DNA, 25 bp, SARS Virus
gaaactacatctgccgacagtacgt

SEQ ID NO: 72752 - DNA, 25 bp, SARS Virus
aaactacatctcgcgacagtacgtt

SEQ ID NO: 72753 - DNA, 25 bp, SARS Virus
aactacatctccggacagtacgttg

SEQ ID NO: 72754 - DNA, 25 bp, SARS Virus
actacatctcccgacagtacgttga

SEQ ID NO: 72755 - DNA, 25 bp, SARS Virus
ctacatctcccggcagtacgttgat

SEQ ID NO: 72756 - DNA, 25 bp, SARS Virus
tacatctcccgagagtacgttgatc

SEQ ID NO: 72757 - DNA, 25 bp, SARS Virus
acatctcccgacggtacgttgatct

SEQ ID NO: 72758 - DNA, 25 bp, SARS Virus
catctcccgacagtacgttgatctc

SEQ ID NO: 72759 - DNA, 25 bp, SARS Virus
atctcccgacaggacgttgatctct

SEQ ID NO: 72760 - DNA, 25 bp, SARS Virus
tctcccgacagtgcgttgatctcta

SEQ ID NO: 72761 - DNA, 25 bp, SARS Virus
ctcccgacagtaggttgatctctac

SEQ ID NO: 72762 - DNA, 25 bp, SARS Virus
tcccgacagtacgttgatctctacg

SEQ ID NO: 72763 - DNA, 25 bp, SARS Virus
cccgacagtacggtgatctctacga

SEQ ID NO: 72764 - DNA, 25 bp, SARS Virus
ccgacagtacgtggatctctacgac

SEQ ID NO: 72765 - DNA, 25 bp, SARS Virus
cgacagtacgttgatctctacgaca

SEQ ID NO: 72766 - DNA, 25 bp, SARS Virus
gacagtacgttggtctctacgacac

SEQ ID NO: 72767 - DNA, 25 bp, SARS Virus
acagtacgttgagctctacgacacc

SEQ ID NO: 72768 - DNA, 25 bp, SARS Virus
cagtacgttgatgtctacgacaccc

SEQ ID NO: 72769 - DNA, 25 bp, SARS Virus
agtacgttgatcgctacgacaccca

SEQ ID NO: 72770 - DNA, 25 bp, SARS Virus
gtacgttgatctgtacgacacccat

SEQ ID NO: 72771 - DNA, 25 bp, SARS Virus
tacgttgatctcgacgacacccatg

SEQ ID NO: 72772 - DNA, 25 bp, SARS Virus
acgttgatctctgcgacacccatga

SEQ ID NO: 72773 - DNA, 25 bp, SARS Virus
cgttgatctctaggacacccatgat

SEQ ID NO: 72774 - DNA, 25 bp, SARS Virus
gttgatctctacgacacccatgatt

SEQ ID NO: 72775 - DNA, 25 bp, SARS Virus
ttgatctctacggcacccatgattg

SEQ ID NO: 72776 - DNA, 25 bp, SARS Virus
tgatctctacgagacccatgattgg

SEQ ID NO: 72777 - DNA, 25 bp, SARS Virus
gatctctacgacgcccatgattgga

SEQ ID NO: 72778 - DNA, 25 bp, SARS Virus
atctctacgacagccatgattggat

SEQ ID NO: 72779 - DNA, 25 bp, SARS Virus
tctctacgacacgcatgattggatg

SEQ ID NO: 72780 - DNA, 25 bp, SARS Virus
ctctacgacaccgatgattggatgg

SEQ ID NO: 72781 - DNA, 25 bp, SARS Virus
tctacgacacccgtgattggatgga

SEQ ID NO: 72782 - DNA, 25 bp, SARS Virus
ctacgacacccaggattggatggag

SEQ ID NO: 72783 - DNA, 25 bp, SARS Virus
tacgacacccatgattggatggaga

SEQ ID NO: 72784 - DNA, 25 bp, SARS Virus
acgacacccatggttggatggagag

SEQ ID NO: 72785 - DNA, 25 bp, SARS Virus
cgacacccatgagtggatggagagg

SEQ ID NO: 72786 - DNA, 25 bp, SARS Virus
gacacccatgatgggatggagaggt

SEQ ID NO: 72787 - DNA, 25 bp, SARS Virus
acacccatgattggatggagaggtc

SEQ ID NO: 72788 - DNA, 25 bp, SARS Virus
cacccatgattggatggagaggtcg

SEQ ID NO: 72789 - DNA, 25 bp, SARS Virus
acccatgattgggtggagaggtcga

SEQ ID NO: 72790 - DNA, 25 bp, SARS Virus
cccatgattggagggagaggtcgat

SEQ ID NO: 72791 - DNA, 25 bp, SARS Virus
ccatgattggatggagaggtcgatc

SEQ ID NO: 72792 - DNA, 25 bp, SARS Virus
catgattggatggagaggtcgatcc

SEQ ID NO: 72793 - DNA, 25 bp, SARS Virus
atgattggatggggaggtcgatcct

SEQ ID NO: 72794 - DNA, 25 bp, SARS Virus
tgattggatggagaggtcgatccta

SEQ ID NO: 72795 - DNA, 25 bp, SARS Virus
gattggatggaggggtcgatcctaa

SEQ ID NO: 72796 - DNA, 25 bp, SARS Virus
attggatggagaggtcgatcctaaa

SEQ ID NO: 72797 - DNA, 25 bp, SARS Virus
ttggatggagaggtcgatcctaaaa

SEQ ID NO: 72798 - DNA, 25 bp, SARS Virus
tggatggagagggcgatcctaaaag

SEQ ID NO: 72799 - DNA, 25 bp, SARS Virus
ggatggagaggtggatcctaaaaga

SEQ ID NO: 72800 - DNA, 25 bp, SARS Virus
gatggagaggtcgatcctaaaagat

SEQ ID NO: 72801 - DNA, 25 bp, SARS Virus
atggagaggtcggtcctaaaagatg

SEQ ID NO: 72802 - DNA, 25 bp, SARS Virus
tggagaggtcgagcctaaaagatgt

SEQ ID NO: 72803 - DNA, 25 bp, SARS Virus
ggagaggtcgatgctaaaagatgtc

SEQ ID NO: 72804 - DNA, 25 bp, SARS Virus
gagaggtcgatcgtaaaagatgtcc

SEQ ID NO: 72805 - DNA, 25 bp, SARS Virus
agaggtcgatccgaaaagatgtcca

SEQ ID NO: 72806 - DNA, 25 bp, SARS Virus
gaggtcgatcctgaaagatgtccac

SEQ ID NO: 72807 - DNA, 25 bp, SARS Virus
aggtcgatcctagaagatgtccaca

SEQ ID NO: 72808 - DNA, 25 bp, SARS Virus
ggtcgatcctaagagatgtccacaa

SEQ ID NO: 72809 - DNA, 25 bp, SARS Virus
gtcgatcctaaaggatgtccacaat

SEQ ID NO: 72810 - DNA, 25 bp, SARS Virus
tcgatcctaaaagatgtccacaatt

SEQ ID NO: 72811 - DNA, 25 bp, SARS Virus
cgatcctaaaaggtgtccacaattg

SEQ ID NO: 72812 - DNA, 25 bp, SARS Virus
gatcctaaaagaggtccacaattga

SEQ ID NO: 72813 - DNA, 25 bp, SARS Virus
atcctaaaagatgtccacaattgaa

SEQ ID NO: 72814 - DNA, 25 bp, SARS Virus
tcctaaaagatggccacaattgaat

SEQ ID NO: 72815 - DNA, 25 bp, SARS Virus
cctaaaagatgtgcacaattgaatc

SEQ ID NO: 72816 - DNA, 25 bp, SARS Virus
ctaaaagatgtcgacaattgaatca

SEQ ID NO: 72817 - DNA, 25 bp, SARS Virus
taaaagatgtccgcaattgaatcat

SEQ ID NO: 72818 - DNA, 25 bp, SARS Virus
aaaagatgtccagaattgaatcatc

SEQ ID NO: 72819 - DNA, 25 bp, SARS Virus
aaagatgtccacgattgaatcatcg

SEQ ID NO: 72820 - DNA, 25 bp, SARS Virus
aagatgtccacagttgaatcatcga

SEQ ID NO: 72821 - DNA, 25 bp, SARS Virus
agatgtccacaagtgaatcatcgac

SEQ ID NO: 72822 - DNA, 25 bp, SARS Virus
gatgtccacaatggaatcatcgaca

SEQ ID NO: 72823 - DNA, 25 bp, SARS Virus
atgtccacaattgaatcatcgacat

SEQ ID NO: 72824 - DNA, 25 bp, SARS Virus
tgtccacaattggatcatcgacatg

SEQ ID NO: 72825 - DNA, 25 bp, SARS Virus
gtccacaattgagtcatcgacatgg

SEQ ID NO: 72826 - DNA, 25 bp, SARS Virus
tccacaattgaagcatcgacatggc

SEQ ID NO: 72827 - DNA, 25 bp, SARS Virus
ccacaattgaatgatcgacatggct

SEQ ID NO: 72828 - DNA, 25 bp, SARS Virus
cacaattgaatcgtcgacatggctg

SEQ ID NO: 72829 - DNA, 25 bp, SARS Virus
acaattgaatcagcgacatggctga

SEQ ID NO: 72830 - DNA, 25 bp, SARS Virus
caattgaatcatggacatggctgac

SEQ ID NO: 72831 - DNA, 25 bp, SARS Virus
aattgaatcatcgacatggctgacc

SEQ ID NO: 72832 - DNA, 25 bp, SARS Virus
attgaatcatcggcatggctgacca

SEQ ID NO: 72833 - DNA, 25 bp, SARS Virus
ttgaatcatcgagatggctgaccaa

SEQ ID NO: 72834 - DNA, 25 bp, SARS Virus
tgaatcatcgacgtggctgaccaat

SEQ ID NO: 72835 - DNA, 25 bp, SARS Virus
gaatcatcgacagggctgaccaata

SEQ ID NO: 72836 - DNA, 25 bp, SARS Virus
aatcatcgacatggctgaccaatac

SEQ ID NO: 72837 - DNA, 25 bp, SARS Virus
atcatcgacatggctgaccaataca

SEQ ID NO: 72838 - DNA, 25 bp, SARS Virus
tcatcgacatgggtgaccaatacaa

SEQ ID NO: 72839 - DNA, 25 bp, SARS Virus
catcgacatggcggaccaatacaac

SEQ ID NO: 72840 - DNA, 25 bp, SARS Virus
atcgacatggctgaccaatacaact

SEQ ID NO: 72841 - DNA, 25 bp, SARS Virus
ttacagttggcgtagttacaccgat

SEQ ID NO: 72842 - DNA, 25 bp, SARS Virus
tacagttggcgatgttacaccgata

SEQ ID NO: 72843 - DNA, 25 bp, SARS Virus
acagttggcgaatttacaccgatag

SEQ ID NO: 72844 - DNA, 25 bp, SARS Virus
cagttggcgaagttacaccgatagt

SEQ ID NO: 72845 - DNA, 25 bp, SARS Virus
agttggcgaagttacaccgatagtg

SEQ ID NO: 72846 - DNA, 25 bp, SARS Virus
gttggcgaagtttcaccgatagtgt

SEQ ID NO: 72847 - DNA, 25 bp, SARS Virus
ttggcgaagttataccgatagtgtt

SEQ ID NO: 72848 - DNA, 25 bp, SARS Virus
tggcgaagttactccgatagtgttc

SEQ ID NO: 72849 - DNA, 25 bp, SARS Virus
ggcgaagttacatcgatagtgttcc

SEQ ID NO: 72850 - DNA, 25 bp, SARS Virus
gcgaagttacactgatagtgttccc

SEQ ID NO: 72851 - DNA, 25 bp, SARS Virus
cgaagttacacctatagtgttcccg

SEQ ID NO: 72852 - DNA, 25 bp, SARS Virus
gaagttacaccgttagtgttcccgt

SEQ ID NO: 72853 - DNA, 25 bp, SARS Virus
aagttacaccgatagtgttcccgtt

SEQ ID NO: 72854 - DNA, 25 bp, SARS Virus
agttacaccgattgtgttcccgttt

SEQ ID NO: 72855 - DNA, 25 bp, SARS Virus
gttacaccgatattgttcccgtttt

SEQ ID NO: 72856 - DNA, 25 bp, SARS Virus
ttacaccgatagtgttcccgttttt

SEQ ID NO: 72857 - DNA, 25 bp, SARS Virus
tacaccgatagttttcccgttttta

SEQ ID NO: 72858 - DNA, 25 bp, SARS Virus
acaccgatagtgttcccgtttttaa

SEQ ID NO: 72859 - DNA, 25 bp, SARS Virus
caccgatagtgttcccgtttttaac

SEQ ID NO: 72860 - DNA, 25 bp, SARS Virus
accgatagtgtttccgtttttaacc

SEQ ID NO: 72861 - DNA, 25 bp, SARS Virus
ccgatagtgttctcgtttttaaccg

SEQ ID NO: 72862 - DNA, 25 bp, SARS Virus
cgatagtgttcctgtttttaaccgt

SEQ ID NO: 72863 - DNA, 25 bp, SARS Virus
gatagtgttcccttttttaaccgta

SEQ ID NO: 72864 - DNA, 25 bp, SARS Virus
atagtgttcccgtttttaaccgtaa

SEQ ID NO: 72865 - DNA, 25 bp, SARS Virus
tagtgttcccgtttttaaccgtaaa

SEQ ID NO: 72866 - DNA, 25 bp, SARS Virus
agtgttcccgtttttaaccgtaaaa

SEQ ID NO: 72867 - DNA, 25 bp, SARS Virus
gtgttcccgtttttaaccgtaaaac

SEQ ID NO: 72868 - DNA, 25 bp, SARS Virus
tgttcccgtttttaaccgtaaaaca

SEQ ID NO: 72869 - DNA, 25 bp, SARS Virus
gttcccgttttttaccgtaaaacac

SEQ ID NO: 72870 - DNA, 25 bp, SARS Virus
ttcccgtttttatccgtaaaacacg

SEQ ID NO: 72871 - DNA, 25 bp, SARS Virus
tcccgtttttaatcgtaaaacacgt

SEQ ID NO: 72872 - DNA, 25 bp, SARS Virus
cccgtttttaactgtaaaacacgta

SEQ ID NO: 72873 - DNA, 25 bp, SARS Virus
ccgtttttaaccttaaaacacgtat

SEQ ID NO: 72874 - DNA, 25 bp, SARS Virus
cgtttttaaccgtaaaacacgtatt

SEQ ID NO: 72875 - DNA, 25 bp, SARS Virus
gtttttaaccgttaaacacgtatta

SEQ ID NO: 72876 - DNA, 25 bp, SARS Virus
tttttaaccgtataacacgtattac

SEQ ID NO: 72877 - DNA, 25 bp, SARS Virus
ttttaaccgtaatacacgtattaca

SEQ ID NO: 72878 - DNA, 25 bp, SARS Virus
tttaaccgtaaatcacgtattacag

SEQ ID NO: 72879 - DNA, 25 bp, SARS Virus
ttaaccgtaaaatacgtattacaga

SEQ ID NO: 72880 - DNA, 25 bp, SARS Virus
taaccgtaaaactcgtattacagac

SEQ ID NO: 72881 - DNA, 25 bp, SARS Virus
aaccgtaaaacatgtattacagact

SEQ ID NO: 72882 - DNA, 25 bp, SARS Virus
accgtaaaacacttattacagacta

SEQ ID NO: 72883 - DNA, 25 bp, SARS Virus
ccgtaaaacacgtattacagactat

SEQ ID NO: 72884 - DNA, 25 bp, SARS Virus
cgtaaaacacgttttacagactatc

SEQ ID NO: 72885 - DNA, 25 bp, SARS Virus
gtaaaacacgtattacagactatct

SEQ ID NO: 72886 - DNA, 25 bp, SARS Virus
taaaacacgtattacagactatctc

SEQ ID NO: 72887 - DNA, 25 bp, SARS Virus
aaaacacgtatttcagactatctct

SEQ ID NO: 72888 - DNA, 25 bp, SARS Virus
aaacacgtattatagactatctcta

SEQ ID NO: 72889 - DNA, 25 bp, SARS Virus
aacacgtattactgactatctctag

SEQ ID NO: 72890 - DNA, 25 bp, SARS Virus
acacgtattacatactatctctaga

SEQ ID NO: 72891 - DNA, 25 bp, SARS Virus
cacgtattacagtctatctctagaa

SEQ ID NO: 72892 - DNA, 25 bp, SARS Virus
acgtattacagattatctctagaaa

SEQ ID NO: 72893 - DNA, 25 bp, SARS Virus
cgtattacagactatctctagaaat

SEQ ID NO: 72894 - DNA, 25 bp, SARS Virus
gtattacagactttctctagaaata

SEQ ID NO: 72895 - DNA, 25 bp, SARS Virus
tattacagactatctctagaaatac

SEQ ID NO: 72896 - DNA, 25 bp, SARS Virus
attacagactatttctagaaatact

SEQ ID NO: 72897 - DNA, 25 bp, SARS Virus
ttacagactatctctagaaatactg

SEQ ID NO: 72898 - DNA, 25 bp, SARS Virus
tacagactatctttagaaatactgt

SEQ ID NO: 72899 - DNA, 25 bp, SARS Virus
acagactatctctagaaatactgtt

SEQ ID NO: 72900 - DNA, 25 bp, SARS Virus
cagactatctcttgaaatactgttt

SEQ ID NO: 72901 - DNA, 25 bp, SARS Virus
agactatctctataaatactgtttg

SEQ ID NO: 72902 - DNA, 25 bp, SARS Virus
gactatctctagtaatactgtttga

SEQ ID NO: 72903 - DNA, 25 bp, SARS Virus
actatctctagatatactgtttgac

SEQ ID NO: 72904 - DNA, 25 bp, SARS Virus
ctatctctagaattactgtttgacg

SEQ ID NO: 72905 - DNA, 25 bp, SARS Virus
tatctctagaaatactgtttgacgt

SEQ ID NO: 72906 - DNA, 25 bp, SARS Virus
atctctagaaattctgtttgacgtt

SEQ ID NO: 72907 - DNA, 25 bp, SARS Virus
tctctagaaatattgtttgacgtta

SEQ ID NO: 72908 - DNA, 25 bp, SARS Virus
ctctagaaatactgtttgacgttaa

SEQ ID NO: 72909 - DNA, 25 bp, SARS Virus
tctagaaatactttttgacgttaaa

SEQ ID NO: 72910 - DNA, 25 bp, SARS Virus
ctagaaatactgtttgacgttaaat

SEQ ID NO: 72911 - DNA, 25 bp, SARS Virus
tagaaatactgtttgacgttaaatg

SEQ ID NO: 72912 - DNA, 25 bp, SARS Virus
agaaatactgtttgacgttaaatgt

SEQ ID NO: 72913 - DNA, 25 bp, SARS Virus
gaaatactgttttacgttaaatgtt

SEQ ID NO: 72914 - DNA, 25 bp, SARS Virus
aaatactgtttgtcgttaaatgttc

SEQ ID NO: 72915 - DNA, 25 bp, SARS Virus
aatactgtttgatgttaaatgttca

SEQ ID NO: 72916 - DNA, 25 bp, SARS Virus
atactgtttgactttaaatgttcag

SEQ ID NO: 72917 - DNA, 25 bp, SARS Virus
tactgtttgacgttaaatgttcaga

SEQ ID NO: 72918 - DNA, 25 bp, SARS Virus
actgtttgacgttaaatgttcagat

SEQ ID NO: 72919 - DNA, 25 bp, SARS Virus
ctgtttgacgtttaatgttcagatc

SEQ ID NO: 72920 - DNA, 25 bp, SARS Virus
tgtttgacgttatatgttcagatct

SEQ ID NO: 72921 - DNA, 25 bp, SARS Virus
gtttgacgttaattgttcagatctt

SEQ ID NO: 72922 - DNA, 25 bp, SARS Virus
tttgacgttaaatgttcagatcttt

SEQ ID NO: 72923 - DNA, 25 bp, SARS Virus
ttgacgttaaattttcagatcttta

SEQ ID NO: 72924 - DNA, 25 bp, SARS Virus
tgacgttaaatgttcagatctttat

SEQ ID NO: 72925 - DNA, 25 bp, SARS Virus
gacgttaaatgttcagatctttatg

SEQ ID NO: 72926 - DNA, 25 bp, SARS Virus
acgttaaatgtttagatctttatgg

SEQ ID NO: 72927 - DNA, 25 bp, SARS Virus
cgttaaatgttctgatctttatggt

SEQ ID NO: 72928 - DNA, 25 bp, SARS Virus
gttaaatgttcatatctttatggtg

SEQ ID NO: 72929 - DNA, 25 bp, SARS Virus
ttaaatgttcagttctttatggtgc

SEQ ID NO: 72930 - DNA, 25 bp, SARS Virus
taaatgttcagatctttatggtgca

SEQ ID NO: 72931 - DNA, 25 bp, SARS Virus
aaatgttcagatttttatggtgcag

SEQ ID NO: 72932 - DNA, 25 bp, SARS Virus
aatgttcagatctttatggtgcagc

SEQ ID NO: 72933 - DNA, 25 bp, SARS Virus
atgttcagatctttatggtgcagcg

SEQ ID NO: 72934 - DNA, 25 bp, SARS Virus
tgttcagatctttatggtgcagcgt

SEQ ID NO: 72935 - DNA, 25 bp, SARS Virus
gttcagatctttttggtgcagcgtt

SEQ ID NO: 72936 - DNA, 25 bp, SARS Virus
ttcagatctttatggtgcagcgtta

SEQ ID NO: 72937 - DNA, 25 bp, SARS Virus
tcagatctttattgtgcagcgttac

SEQ ID NO: 72938 - DNA, 25 bp, SARS Virus
cagatctttatgttgcagcgttaca

SEQ ID NO: 72939 - DNA, 25 bp, SARS Virus
agatctttatggtgcagcgttacac

SEQ ID NO: 72940 - DNA, 25 bp, SARS Virus
gatctttatggttcagcgttacacc

SEQ ID NO: 72941 - DNA, 25 bp, SARS Virus
atctttatggtgtagcgttacaccg

SEQ ID NO: 72942 - DNA, 25 bp, SARS Virus
tctttatggtgctgcgttacaccga

SEQ ID NO: 72943 - DNA, 25 bp, SARS Virus
ctttatggtgcatcgttacaccgat

SEQ ID NO: 72944 - DNA, 25 bp, SARS Virus
tttatggtgcagtgttacaccgatg

SEQ ID NO: 72945 - DNA, 25 bp, SARS Virus
ttatggtgcagctttacaccgatgt

SEQ ID NO: 72946 - DNA, 25 bp, SARS Virus
tatggtgcagcgttacaccgatgta

SEQ ID NO: 72947 - DNA, 25 bp, SARS Virus
atggtgcagcgttacaccgatgtaa

SEQ ID NO: 72948 - DNA, 25 bp, SARS Virus
tggtgcagcgtttcaccgatgtaat

SEQ ID NO: 72949 - DNA, 25 bp, SARS Virus
ggtgcagcgttataccgatgtaatg

SEQ ID NO: 72950 - DNA, 25 bp, SARS Virus
gtgcagcgttactccgatgtaatgt

SEQ ID NO: 72951 - DNA, 25 bp, SARS Virus
tgcagcgttacatcgatgtaatgtt

SEQ ID NO: 72952 - DNA, 25 bp, SARS Virus
gcagcgttacactgatgtaatgttc

SEQ ID NO: 72953 - DNA, 25 bp, SARS Virus
cagcgttacacctatgtaatgttcg

SEQ ID NO: 72954 - DNA, 25 bp, SARS Virus
agcgttacaccgttgtaatgttcgt

SEQ ID NO: 72955 - DNA, 25 bp, SARS Virus
gcgttacaccgatgtaatgttcgtc

SEQ ID NO: 72956 - DNA, 25 bp, SARS Virus
cgttacaccgatttaatgttcgtct

SEQ ID NO: 72957 - DNA, 25 bp, SARS Virus
gttacaccgatgtaatgttcgtctt

SEQ ID NO: 72958 - DNA, 25 bp, SARS Virus
ttacaccgatgttatgttcgtcttt

SEQ ID NO: 72959 - DNA, 25 bp, SARS Virus
tacaccgatgtattgttcgtctttt

SEQ ID NO: 72960 - DNA, 25 bp, SARS Virus
acaccgatgtaatgttcgtctttta

SEQ ID NO: 72961 - DNA, 25 bp, SARS Virus
caccgatgtaattttcgtcttttac

SEQ ID NO: 72962 - DNA, 25 bp, SARS Virus
accgatgtaatgttcgtcttttaca

SEQ ID NO: 72963 - DNA, 25 bp, SARS Virus
ccgatgtaatgttcgtcttttacat

SEQ ID NO: 72964 - DNA, 25 bp, SARS Virus
cgatgtaatgtttgtcttttacatt

SEQ ID NO: 72965 - DNA, 25 bp, SARS Virus
gatgtaatgttcttcttttacattg

SEQ ID NO: 72966 - DNA, 25 bp, SARS Virus
atgtaatgttcgtcttttacattga

SEQ ID NO: 72967 - DNA, 25 bp, SARS Virus
tgtaatgttcgttttttacattgac

SEQ ID NO: 72968 - DNA, 25 bp, SARS Virus
gtaatgttcgtcttttacattgacc

SEQ ID NO: 72969 - DNA, 25 bp, SARS Virus
taatgttcgtcttttacattgacct

SEQ ID NO: 72970 - DNA, 25 bp, SARS Virus
aatgttcgtcttttacattgacctg

SEQ ID NO: 72971 - DNA, 25 bp, SARS Virus
atgttcgtcttttacattgacctga

SEQ ID NO: 72972 - DNA, 25 bp, SARS Virus
tgttcgtctttttcattgacctgaa

SEQ ID NO: 72973 - DNA, 25 bp, SARS Virus
gttcgtcttttatattgacctgaaa

SEQ ID NO: 72974 - DNA, 25 bp, SARS Virus
ttcgtcttttactttgacctgaaaa

SEQ ID NO: 72975 - DNA, 25 bp, SARS Virus
tcgtcttttacattgacctgaaaaa

SEQ ID NO: 72976 - DNA, 25 bp, SARS Virus
cgtcttttacattgacctgaaaaat

SEQ ID NO: 72977 - DNA, 25 bp, SARS Virus
gtcttttacatttacctgaaaaatt

SEQ ID NO: 72978 - DNA, 25 bp, SARS Virus
tcttttacattgtcctgaaaaattc

SEQ ID NO: 72979 - DNA, 25 bp, SARS Virus
cttttacattgatctgaaaaattcc

SEQ ID NO: 72980 - DNA, 25 bp, SARS Virus
ttttacattgacttgaaaaattcct

SEQ ID NO: 72981 - DNA, 25 bp, SARS Virus
tttacattgacctgaaaaattcctg

SEQ ID NO: 72982 - DNA, 25 bp, SARS Virus
ttacattgaccttaaaaattcctga

SEQ ID NO: 72983 - DNA, 25 bp, SARS Virus
tacattgacctgtaaaattcctgac

SEQ ID NO: 72984 - DNA, 25 bp, SARS Virus
acattgacctgataaattcctgaca

SEQ ID NO: 72985 - DNA, 25 bp, SARS Virus
cattgacctgaataattcctgacat

SEQ ID NO: 72986 - DNA, 25 bp, SARS Virus
attgacctgaaatattcctgacatc

SEQ ID NO: 72987 - DNA, 25 bp, SARS Virus
ttgacctgaaaatttcctgacatca

SEQ ID NO: 72988 - DNA, 25 bp, SARS Virus
tgacctgaaaaattcctgacatcat

SEQ ID NO: 72989 - DNA, 25 bp, SARS Virus
gacctgaaaaattcctgacatcatt

SEQ ID NO: 72990 - DNA, 25 bp, SARS Virus
acctgaaaaatttctgacatcattc

SEQ ID NO: 72991 - DNA, 25 bp, SARS Virus
cctgaaaaattcttgacatcattct

SEQ ID NO: 72992 - DNA, 25 bp, SARS Virus
ctgaaaaattcctgacatcattcta

SEQ ID NO: 72993 - DNA, 25 bp, SARS Virus
tgaaaaattccttacatcattctag

SEQ ID NO: 72994 - DNA, 25 bp, SARS Virus
gaaaaattcctgtcatcattctagt

SEQ ID NO: 72995 - DNA, 25 bp, SARS Virus
aaaaattcctgatatcattctagta

SEQ ID NO: 72996 - DNA, 25 bp, SARS Virus
aaaattcctgacttcattctagtaa

SEQ ID NO: 72997 - DNA, 25 bp, SARS Virus
aaattcctgacatcattctagtaat

SEQ ID NO: 72998 - DNA, 25 bp, SARS Virus
aattcctgacattattctagtaatg

SEQ ID NO: 72999 - DNA, 25 bp, SARS Virus
attcctgacatctttctagtaatga

SEQ ID NO: 73000 - DNA, 25 bp, SARS Virus
ttcctgacatcattctagtaatgac

SEQ ID NO: 73001 - DNA, 25 bp, SARS Virus
tcctgacatcattctagtaatgacc

SEQ ID NO: 73002 - DNA, 25 bp, SARS Virus
cctgacatcattttagtaatgacca

SEQ ID NO: 73003 - DNA, 25 bp, SARS Virus
ctgacatcattctagtaatgaccag

SEQ ID NO: 73004 - DNA, 25 bp, SARS Virus
tgacatcattcttgtaatgaccaga

SEQ ID NO: 73005 - DNA, 25 bp, SARS Virus
gacatcattctattaatgaccagaa

SEQ ID NO: 73006 - DNA, 25 bp, SARS Virus
acatcattctagtaatgaccagaag

SEQ ID NO: 73007 - DNA, 25 bp, SARS Virus
catcattctagttatgaccagaagt

SEQ ID NO: 73008 - DNA, 25 bp, SARS Virus
atcattctagtattgaccagaagta

SEQ ID NO: 73009 - DNA, 25 bp, SARS Virus
tcattctagtaatgaccagaagtag

SEQ ID NO: 73010 - DNA, 25 bp, SARS Virus
cattctagtaattaccagaagtagg

SEQ ID NO: 73011 - DNA, 25 bp, SARS Virus
attctagtaatgtccagaagtagga

SEQ ID NO: 73012 - DNA, 25 bp, SARS Virus
ttctagtaatgatcagaagtaggat

SEQ ID NO: 73013 - DNA, 25 bp, SARS Virus
tctagtaatgactagaagtaggatg

SEQ ID NO: 73014 - DNA, 25 bp, SARS Virus
ctagtaatgacctgaagtaggatgt

SEQ ID NO: 73015 - DNA, 25 bp, SARS Virus
tagtaatgaccataagtaggatgtg

SEQ ID NO: 73016 - DNA, 25 bp, SARS Virus
agtaatgaccagtagtaggatgtgt

SEQ ID NO: 73017 - DNA, 25 bp, SARS Virus
gtaatgaccagatgtaggatgtgtc

SEQ ID NO: 73018 - DNA, 25 bp, SARS Virus
taatgaccagaattaggatgtgtcc

SEQ ID NO: 73019 - DNA, 25 bp, SARS Virus
aatgaccagaagtaggatgtgtccg

SEQ ID NO: 73020 - DNA, 25 bp, SARS Virus
atgaccagaagttggatgtgtccgt

SEQ ID NO: 73021 - DNA, 25 bp, SARS Virus
tgaccagaagtatgatgtgtccgtg

SEQ ID NO: 73022 - DNA, 25 bp, SARS Virus
gaccagaagtagtatgtgtccgtgg

SEQ ID NO: 73023 - DNA, 25 bp, SARS Virus
accagaagtaggttgtgtccgtgga

SEQ ID NO: 73024 - DNA, 25 bp, SARS Virus
ccagaagtaggatgtgtccgtggat

SEQ ID NO: 73025 - DNA, 25 bp, SARS Virus
cagaagtaggatttgtccgtggatg

SEQ ID NO: 73026 - DNA, 25 bp, SARS Virus
agaagtaggatgtgtccgtggatgt

SEQ ID NO: 73027 - DNA, 25 bp, SARS Virus
gaagtaggatgtttccgtggatgtg

SEQ ID NO: 73028 - DNA, 25 bp, SARS Virus
aagtaggatgtgtccgtggatgtgt

SEQ ID NO: 73029 - DNA, 25 bp, SARS Virus
agtaggatgtgttcgtggatgtgtg

SEQ ID NO: 73030 - DNA, 25 bp, SARS Virus
gtaggatgtgtctgtggatgtgtgg

SEQ ID NO: 73031 - DNA, 25 bp, SARS Virus
taggatgtgtccttggatgtgtgga

SEQ ID NO: 73032 - DNA, 25 bp, SARS Virus
aggatgtgtccgtggatgtgtggag

SEQ ID NO: 73033 - DNA, 25 bp, SARS Virus
ggatgtgtccgttgatgtgtggagt

SEQ ID NO: 73034 - DNA, 25 bp, SARS Virus
gatgtgtccgtgtatgtgtggagtc

SEQ ID NO: 73035 - DNA, 25 bp, SARS Virus
atgtgtccgtggttgtgtggagtcg

SEQ ID NO: 73036 - DNA, 25 bp, SARS Virus
tgtgtccgtggatgtgtggagtcgc

SEQ ID NO: 73037 - DNA, 25 bp, SARS Virus
gtgtccgtggatttgtggagtcgca

SEQ ID NO: 73038 - DNA, 25 bp, SARS Virus
tgtccgtggatgtgtggagtcgcaa

SEQ ID NO: 73039 - DNA, 25 bp, SARS Virus
gtccgtggatgtttggagtcgcaac

SEQ ID NO: 73040 - DNA, 25 bp, SARS Virus
tccgtggatgtgtggagtcgcaact

SEQ ID NO: 73041 - DNA, 25 bp, SARS Virus
ccgtggatgtgttgagtcgcaacta

SEQ ID NO: 73042 - DNA, 25 bp, SARS Virus
cgtggatgtgtgtagtcgcaactat

SEQ ID NO: 73043 - DNA, 25 bp, SARS Virus
gtggatgtgtggtgtcgcaactata

SEQ ID NO: 73044 - DNA, 25 bp, SARS Virus
tggatgtgtggattcgcaactatat

SEQ ID NO: 73045 - DNA, 25 bp, SARS Virus
ggatgtgtggagtcgcaactatatt

SEQ ID NO: 73046 - DNA, 25 bp, SARS Virus
gatgtgtggagttgcaactatattt

SEQ ID NO: 73047 - DNA, 25 bp, SARS Virus
atgtgtggagtctcaactatatttc

SEQ ID NO: 73048 - DNA, 25 bp, SARS Virus
tgtgtggagtcgtaactatatttca

SEQ ID NO: 73049 - DNA, 25 bp, SARS Virus
gtgtggagtcgctactatatttcaa

SEQ ID NO: 73050 - DNA, 25 bp, SARS Virus
tgtggagtcgcatctatatttcaag

SEQ ID NO: 73051 - DNA, 25 bp, SARS Virus
gtggagtcgcaattatatttcaagt

SEQ ID NO: 73052 - DNA, 25 bp, SARS Virus
tggagtcgcaactatatttcaagtt

SEQ ID NO: 73053 - DNA, 25 bp, SARS Virus
ggagtcgcaactttatttcaagttc

SEQ ID NO: 73054 - DNA, 25 bp, SARS Virus
gagtcgcaactatatttcaagttct

SEQ ID NO: 73055 - DNA, 25 bp, SARS Virus
agtcgcaactatttttcaagttctg

SEQ ID NO: 73056 - DNA, 25 bp, SARS Virus
gtcgcaactatatttcaagttctga

SEQ ID NO: 73057 - DNA, 25 bp, SARS Virus
tcgcaactatatttcaagttctgac

SEQ ID NO: 73058 - DNA, 25 bp, SARS Virus
cgcaactatatttcaagttctgact

SEQ ID NO: 73059 - DNA, 25 bp, SARS Virus
gcaactatattttaagttctgactt

SEQ ID NO: 73060 - DNA, 25 bp, SARS Virus
caactatatttctagttctgacttc

SEQ ID NO: 73061 - DNA, 25 bp, SARS Virus
aactatatttcatgttctgacttcc

SEQ ID NO: 73062 - DNA, 25 bp, SARS Virus
actatatttcaatttctgacttcct

SEQ ID NO: 73063 - DNA, 25 bp, SARS Virus
ctatatttcaagttctgacttccta

SEQ ID NO: 73064 - DNA, 25 bp, SARS Virus
tatatttcaagttctgacttcctaa

SEQ ID NO: 73065 - DNA, 25 bp, SARS Virus
atatttcaagttttgacttcctaat

SEQ ID NO: 73066 - DNA, 25 bp, SARS Virus
tatttcaagttctgacttcctaata

SEQ ID NO: 73067 - DNA, 25 bp, SARS Virus
atttcaagttcttacttcctaatac

SEQ ID NO: 73068 - DNA, 25 bp, SARS Virus
tttcaagttctgtcttcctaataca

SEQ ID NO: 73069 - DNA, 25 bp, SARS Virus
ttcaagttctgatttcctaatacac

SEQ ID NO: 73070 - DNA, 25 bp, SARS Virus
tcaagttctgacttcctaatacaca

SEQ ID NO: 73071 - DNA, 25 bp, SARS Virus
caagttctgacttcctaatacacaa

SEQ ID NO: 73072 - DNA, 25 bp, SARS Virus
aagttctgactttctaatacacaac

SEQ ID NO: 73073 - DNA, 25 bp, SARS Virus
agttctgacttcttaatacacaact

SEQ ID NO: 73074 - DNA, 25 bp, SARS Virus
gttctgacttcctaatacacaactg

SEQ ID NO: 73075 - DNA, 25 bp, SARS Virus
ttctgacttccttatacacaactgt

SEQ ID NO: 73076 - DNA, 25 bp, SARS Virus
tctgacttcctattacacaactgta

SEQ ID NO: 73077 - DNA, 25 bp, SARS Virus
ctgacttcctaatacacaactgtat

SEQ ID NO: 73078 - DNA, 25 bp, SARS Virus
tgacttcctaattcacaactgtatg

SEQ ID NO: 73079 - DNA, 25 bp, SARS Virus
gacttcctaatatacaactgtatgg

SEQ ID NO: 73080 - DNA, 25 bp, SARS Virus
acttcctaatactcaactgtatggt

SEQ ID NO: 73081 - DNA, 25 bp, SARS Virus
cttcctaatacataactgtatggtc

SEQ ID NO: 73082 - DNA, 25 bp, SARS Virus
ttcctaatacactactgtatggtcc

SEQ ID NO: 73083 - DNA, 25 bp, SARS Virus
tcctaatacacatctgtatggtccg

SEQ ID NO: 73084 - DNA, 25 bp, SARS Virus
cctaatacacaattgtatggtccgt

SEQ ID NO: 73085 - DNA, 25 bp, SARS Virus
ctaatacacaactgtatggtccgta

SEQ ID NO: 73086 - DNA, 25 bp, SARS Virus
taatacacaactttatggtccgtat

SEQ ID NO: 73087 - DNA, 25 bp, SARS Virus
aatacacaactgtatggtccgtatg

SEQ ID NO: 73088 - DNA, 25 bp, SARS Virus
atacacaactgtttggtccgtatgg

SEQ ID NO: 73089 - DNA, 25 bp, SARS Virus
tacacaactgtatggtccgtatggt

SEQ ID NO: 73090 - DNA, 25 bp, SARS Virus
acacaactgtattgtccgtatggtt

SEQ ID NO: 73091 - DNA, 25 bp, SARS Virus
cacaactgtatgttccgtatggttt

SEQ ID NO: 73092 - DNA, 25 bp, SARS Virus
acaactgtatggtccgtatggtttc

SEQ ID NO: 73093 - DNA, 25 bp, SARS Virus
caactgtatggttcgtatggtttcc

SEQ ID NO: 73094 - DNA, 25 bp, SARS Virus
aactgtatggtctgtatggtttcct

SEQ ID NO: 73095 - DNA, 25 bp, SARS Virus
actgtatggtccttatggtttcctg

SEQ ID NO: 73096 - DNA, 25 bp, SARS Virus
ctgtatggtccgtatggtttcctgt

SEQ ID NO: 73097 - DNA, 25 bp, SARS Virus
tgtatggtccgtttggtttcctgta

SEQ ID NO: 73098 - DNA, 25 bp, SARS Virus
gtatggtccgtatggtttcctgtac

SEQ ID NO: 73099 - DNA, 25 bp, SARS Virus
tatggtccgtattgtttcctgtact

SEQ ID NO: 73100 - DNA, 25 bp, SARS Virus
atggtccgtatgttttcctgtactg

SEQ ID NO: 73101 - DNA, 25 bp, SARS Virus
tggtccgtatggtttcctgtactgg

SEQ ID NO: 73102 - DNA, 25 bp, SARS Virus
ggtccgtatggtttcctgtactgga

SEQ ID NO: 73103 - DNA, 25 bp, SARS Virus
gtccgtatggtttcctgtactggat

SEQ ID NO: 73104 - DNA, 25 bp, SARS Virus
tccgtatggttttctgtactggatg

SEQ ID NO: 73105 - DNA, 25 bp, SARS Virus
ccgtatggtttcttgtactggatgg

SEQ ID NO: 73106 - DNA, 25 bp, SARS Virus
cgtatggtttcctgtactggatggc

SEQ ID NO: 73107 - DNA, 25 bp, SARS Virus
gtatggtttcctttactggatggca

SEQ ID NO: 73108 - DNA, 25 bp, SARS Virus
tatggtttcctgtactggatggcat

SEQ ID NO: 73109 - DNA, 25 bp, SARS Virus
atggtttcctgttctggatggcatc

SEQ ID NO: 73110 - DNA, 25 bp, SARS Virus
tggtttcctgtattggatggcatct

SEQ ID NO: 73111 - DNA, 25 bp, SARS Virus
ggtttcctgtactggatggcatctg

SEQ ID NO: 73112 - DNA, 25 bp, SARS Virus
gtttcctgtacttgatggcatctga

SEQ ID NO: 73113 - DNA, 25 bp, SARS Virus
tttcctgtactgtatggcatctgag

SEQ ID NO: 73114 - DNA, 25 bp, SARS Virus
ttcctgtactggttggcatctgagt

SEQ ID NO: 73115 - DNA, 25 bp, SARS Virus
tcctgtactggatggcatctgagta

SEQ ID NO: 73116 - DNA, 25 bp, SARS Virus
cctgtactggattgcatctgagtag

SEQ ID NO: 73117 - DNA, 25 bp, SARS Virus
ctgtactggatgtcatctgagtaga

SEQ ID NO: 73118 - DNA, 25 bp, SARS Virus
tgtactggatggtatctgagtagag

SEQ ID NO: 73119 - DNA, 25 bp, SARS Virus
gtactggatggcttctgagtagaga

SEQ ID NO: 73120 - DNA, 25 bp, SARS Virus
tactggatggcatctgagtagagat

SEQ ID NO: 73121 - DNA, 25 bp, SARS Virus
actggatggcatttgagtagagata

SEQ ID NO: 73122 - DNA, 25 bp, SARS Virus
ctggatggcatctgagtagagatac

SEQ ID NO: 73123 - DNA, 25 bp, SARS Virus
tggatggcatcttagtagagatact

SEQ ID NO: 73124 - DNA, 25 bp, SARS Virus
ggatggcatctgtgtagagatacta

SEQ ID NO: 73125 - DNA, 25 bp, SARS Virus
gatggcatctgattagagatactac

SEQ ID NO: 73126 - DNA, 25 bp, SARS Virus
atggcatctgagtagagatactacc

SEQ ID NO: 73127 - DNA, 25 bp, SARS Virus
tggcatctgagttgagatactaccc

SEQ ID NO: 73128 - DNA, 25 bp, SARS Virus
ggcatctgagtatagatactaccca

SEQ ID NO: 73129 - DNA, 25 bp, SARS Virus
gcatctgagtagtgatactacccaa

SEQ ID NO: 73130 - DNA, 25 bp, SARS Virus
catctgagtagatatactacccaaa

SEQ ID NO: 73131 - DNA, 25 bp, SARS Virus
atctgagtagagttactacccaaag

SEQ ID NO: 73132 - DNA, 25 bp, SARS Virus
tctgagtagagatactacccaaagt

SEQ ID NO: 73133 - DNA, 25 bp, SARS Virus
ctgagtagagattctacccaaagtt

SEQ ID NO: 73134 - DNA, 25 bp, SARS Virus
tgagtagagatattacccaaagttt

SEQ ID NO: 73135 - DNA, 25 bp, SARS Virus
gagtagagatactacccaaagtttt

SEQ ID NO: 73136 - DNA, 25 bp, SARS Virus
agtagagatacttcccaaagtttta

SEQ ID NO: 73137 - DNA, 25 bp, SARS Virus
gtagagatactatccaaagttttac

SEQ ID NO: 73138 - DNA, 25 bp, SARS Virus
tagagatactactcaaagttttact

SEQ ID NO: 73139 - DNA, 25 bp, SARS Virus
agagatactacctaaagttttactt

SEQ ID NO: 73140 - DNA, 25 bp, SARS Virus
gagatactaccctaagttttactta

SEQ ID NO: 73141 - DNA, 25 bp, SARS Virus
agatactacccatagttttacttaa

SEQ ID NO: 73142 - DNA, 25 bp, SARS Virus
gatactacccaatgttttacttaat

SEQ ID NO: 73143 - DNA, 25 bp, SARS Virus
atactacccaaatttttacttaatg

SEQ ID NO: 73144 - DNA, 25 bp, SARS Virus
tactacccaaagttttacttaatgg

SEQ ID NO: 73145 - DNA, 25 bp, SARS Virus
actacccaaagttttacttaatggt

SEQ ID NO: 73146 - DNA, 25 bp, SARS Virus
ctacccaaagttttacttaatggtt

SEQ ID NO: 73147 - DNA, 25 bp, SARS Virus
tacccaaagttttacttaatggttc

SEQ ID NO: 73148 - DNA, 25 bp, SARS Virus
acccaaagtttttcttaatggttca

SEQ ID NO: 73149 - DNA, 25 bp, SARS Virus
cccaaagttttatttaatggttcag

SEQ ID NO: 73150 - DNA, 25 bp, SARS Virus
ccaaagttttacttaatggttcagt

SEQ ID NO: 73151 - DNA, 25 bp, SARS Virus
caaagttttacttaatggttcagtt

SEQ ID NO: 73152 - DNA, 25 bp, SARS Virus
aaagttttactttatggttcagtta

SEQ ID NO: 73153 - DNA, 25 bp, SARS Virus
aagttttacttattggttcagttac

SEQ ID NO: 73154 - DNA, 25 bp, SARS Virus
agttttacttaatggttcagttacc

SEQ ID NO: 73155 - DNA, 25 bp, SARS Virus
gttttacttaattgttcagttacca

SEQ ID NO: 73156 - DNA, 25 bp, SARS Virus
ttttacttaatgtttcagttaccaa

SEQ ID NO: 73157 - DNA, 25 bp, SARS Virus
tttacttaatggttcagttaccaat

SEQ ID NO: 73158 - DNA, 25 bp, SARS Virus
ttacttaatggttcagttaccaatg

SEQ ID NO: 73159 - DNA, 25 bp, SARS Virus
tacttaatggtttagttaccaatgg

SEQ ID NO: 73160 - DNA, 25 bp, SARS Virus
acttaatggttctgttaccaatggg

SEQ ID NO: 73161 - DNA, 25 bp, SARS Virus
cttaatggttcatttaccaatggga

SEQ ID NO: 73162 - DNA, 25 bp, SARS Virus
ttaatggttcagttaccaatgggat

SEQ ID NO: 73163 - DNA, 25 bp, SARS Virus
taatggttcagttaccaatgggatt

SEQ ID NO: 73164 - DNA, 25 bp, SARS Virus
aatggttcagtttccaatgggatta

SEQ ID NO: 73165 - DNA, 25 bp, SARS Virus
atggttcagttatcaatgggattat

SEQ ID NO: 73166 - DNA, 25 bp, SARS Virus
tggttcagttactaatgggattata

SEQ ID NO: 73167 - DNA, 25 bp, SARS Virus
ggttcagttacctatgggattatac

SEQ ID NO: 73168 - DNA, 25 bp, SARS Virus
gttcagttaccattgggattataca

SEQ ID NO: 73169 - DNA, 25 bp, SARS Virus
ttcagttaccaatgggattatacaa

SEQ ID NO: 73170 - DNA, 25 bp, SARS Virus
tcagttaccaattggattatacaaa

SEQ ID NO: 73171 - DNA, 25 bp, SARS Virus
cagttaccaatgtgattatacaaat

SEQ ID NO: 73172 - DNA, 25 bp, SARS Virus
agttaccaatggtattatacaaata

SEQ ID NO: 73173 - DNA, 25 bp, SARS Virus
gttaccaatgggtttatacaaatag

SEQ ID NO: 73174 - DNA, 25 bp, SARS Virus
ttaccaatgggattatacaaatagt

SEQ ID NO: 73175 - DNA, 25 bp, SARS Virus
taccaatgggattatacaaatagtg

SEQ ID NO: 73176 - DNA, 25 bp, SARS Virus
accaatgggattttacaaatagtgg

SEQ ID NO: 73177 - DNA, 25 bp, SARS Virus
ccaatgggattatacaaatagtggg

SEQ ID NO: 73178 - DNA, 25 bp, SARS Virus
caatgggattattcaaatagtgggc

SEQ ID NO: 73179 - DNA, 25 bp, SARS Virus
aatgggattatataaatagtgggcg

SEQ ID NO: 73180 - DNA, 25 bp, SARS Virus
atgggattatactaatagtgggcgc

SEQ ID NO: 73181 - DNA, 25 bp, SARS Virus
tgggattatacatatagtgggcgct

SEQ ID NO: 73182 - DNA, 25 bp, SARS Virus
gggattatacaattagtgggcgctt

SEQ ID NO: 73183 - DNA, 25 bp, SARS Virus
ggattatacaaatagtgggcgcttc

SEQ ID NO: 73184 - DNA, 25 bp, SARS Virus
gattatacaaattgtgggcgcttct

SEQ ID NO: 73185 - DNA, 25 bp, SARS Virus
attatacaaatattgggcgcttctt

SEQ ID NO: 73186 - DNA, 25 bp, SARS Virus
ttatacaaatagtgggcgcttcttc

SEQ ID NO: 73187 - DNA, 25 bp, SARS Virus
tatacaaatagttggcgcttcttcg

SEQ ID NO: 73188 - DNA, 25 bp, SARS Virus
atacaaatagtgtgcgcttcttcga

SEQ ID NO: 73189 - DNA, 25 bp, SARS Virus
tacaaatagtggtcgcttcttcgat

SEQ ID NO: 73190 - DNA, 25 bp, SARS Virus
acaaatagtgggtgcttcttcgata

SEQ ID NO: 73191 - DNA, 25 bp, SARS Virus
caaatagtgggctcttcttcgataa

SEQ ID NO: 73192 - DNA, 25 bp, SARS Virus
aaatagtgggcgtttcttcgataag

SEQ ID NO: 73193 - DNA, 25 bp, SARS Virus
aatagtgggcgcttcttcgataagc

SEQ ID NO: 73194 - DNA, 25 bp, SARS Virus
atagtgggcgcttcttcgataagca

SEQ ID NO: 73195 - DNA, 25 bp, SARS Virus
tagtgggcgctttttcgataagcag

SEQ ID NO: 73196 - DNA, 25 bp, SARS Virus
agtgggcgcttcttcgataagcagt

SEQ ID NO: 73197 - DNA, 25 bp, SARS Virus
gtgggcgcttcttcgataagcagtg

SEQ ID NO: 73198 - DNA, 25 bp, SARS Virus
tgggcgcttctttgataagcagtgc

SEQ ID NO: 73199 - DNA, 25 bp, SARS Virus
gggcgcttcttctataagcagtgca

SEQ ID NO: 73200 - DNA, 25 bp, SARS Virus
ggcgcttcttcgttaagcagtgcaa

SEQ ID NO: 73201 - DNA, 25 bp, SARS Virus
gcgcttcttcgataagcagtgcaag

SEQ ID NO: 73202 - DNA, 25 bp, SARS Virus
cgcttcttcgattagcagtgcaagc

SEQ ID NO: 73203 - DNA, 25 bp, SARS Virus
gcttcttcgatatgcagtgcaagca

SEQ ID NO: 73204 - DNA, 25 bp, SARS Virus
cttcttcgataatcagtgcaagcac

SEQ ID NO: 73205 - DNA, 25 bp, SARS Virus
ttcttcgataagtagtgcaagcacg

SEQ ID NO: 73206 - DNA, 25 bp, SARS Virus
tcttcgataagctgtgcaagcacgc

SEQ ID NO: 73207 - DNA, 25 bp, SARS Virus
cttcgataagcattgcaagcacgca

SEQ ID NO: 73208 - DNA, 25 bp, SARS Virus
ttcgataagcagtgcaagcacgcac

SEQ ID NO: 73209 - DNA, 25 bp, SARS Virus
tcgataagcagttcaagcacgcacc

SEQ ID NO: 73210 - DNA, 25 bp, SARS Virus
cgataagcagtgtaagcacgcacct

SEQ ID NO: 73211 - DNA, 25 bp, SARS Virus
gataagcagtgctagcacgcaccta

SEQ ID NO: 73212 - DNA, 25 bp, SARS Virus
ataagcagtgcatgcacgcacctaa

SEQ ID NO: 73213 - DNA, 25 bp, SARS Virus
taagcagtgcaatcacgcacctaac

SEQ ID NO: 73214 - DNA, 25 bp, SARS Virus
aagcagtgcaagtacgcacctaacc

SEQ ID NO: 73215 - DNA, 25 bp, SARS Virus
agcagtgcaagctcgcacctaaccg

SEQ ID NO: 73216 - DNA, 25 bp, SARS Virus
gcagtgcaagcatgcacctaaccga

SEQ ID NO: 73217 - DNA, 25 bp, SARS Virus
cagtgcaagcactcacctaaccgaa

SEQ ID NO: 73218 - DNA, 25 bp, SARS Virus
agtgcaagcacgtacctaaccgaaa

SEQ ID NO: 73219 - DNA, 25 bp, SARS Virus
gtgcaagcacgctcctaaccgaaac

SEQ ID NO: 73220 - DNA, 25 bp, SARS Virus
tgcaagcacgcatctaaccgaaact

SEQ ID NO: 73221 - DNA, 25 bp, SARS Virus
gcaagcacgcacttaaccgaaacta

SEQ ID NO: 73222 - DNA, 25 bp, SARS Virus
caagcacgcacctaaccgaaactac

SEQ ID NO: 73223 - DNA, 25 bp, SARS Virus
aagcacgcaccttaccgaaactaca

SEQ ID NO: 73224 - DNA, 25 bp, SARS Virus
agcacgcacctatccgaaactacat

SEQ ID NO: 73225 - DNA, 25 bp, SARS Virus
gcacgcacctaatcgaaactacatc

SEQ ID NO: 73226 - DNA, 25 bp, SARS Virus
cacgcacctaactgaaactacatct

SEQ ID NO: 73227 - DNA, 25 bp, SARS Virus
acgcacctaacctaaactacatctc

SEQ ID NO: 73228 - DNA, 25 bp, SARS Virus
cgcacctaaccgtaactacatctcc

SEQ ID NO: 73229 - DNA, 25 bp, SARS Virus
gcacctaaccgatactacatctccc

SEQ ID NO: 73230 - DNA, 25 bp, SARS Virus
cacctaaccgaatctacatctcccg

SEQ ID NO: 73231 - DNA, 25 bp, SARS Virus
acctaaccgaaattacatctcccga

SEQ ID NO: 73232 - DNA, 25 bp, SARS Virus
cctaaccgaaactacatctcccgac

SEQ ID NO: 73233 - DNA, 25 bp, SARS Virus
ctaaccgaaacttcatctcccgaca

SEQ ID NO: 73234 - DNA, 25 bp, SARS Virus
taaccgaaactatatctcccgacag

SEQ ID NO: 73235 - DNA, 25 bp, SARS Virus
aaccgaaactacttctcccgacagt

SEQ ID NO: 73236 - DNA, 25 bp, SARS Virus
accgaaactacatctcccgacagta

SEQ ID NO: 73237 - DNA, 25 bp, SARS Virus
ccgaaactacatttcccgacagtac

SEQ ID NO: 73238 - DNA, 25 bp, SARS Virus
cgaaactacatctcccgacagtacg

SEQ ID NO: 73239 - DNA, 25 bp, SARS Virus
gaaactacatcttccgacagtacgt

SEQ ID NO: 73240 - DNA, 25 bp, SARS Virus
aaactacatctctcgacagtacgtt

SEQ ID NO: 73241 - DNA, 25 bp, SARS Virus
aactacatctcctgacagtacgttg

SEQ ID NO: 73242 - DNA, 25 bp, SARS Virus
actacatctccctacagtacgttga

SEQ ID NO: 73243 - DNA, 25 bp, SARS Virus
ctacatctcccgtcagtacgttgat

SEQ ID NO: 73244 - DNA, 25 bp, SARS Virus
tacatctcccgatagtacgttgatc

SEQ ID NO: 73245 - DNA, 25 bp, SARS Virus
acatctcccgactgtacgttgatct

SEQ ID NO: 73246 - DNA, 25 bp, SARS Virus
catctcccgacattacgttgatctc

SEQ ID NO: 73247 - DNA, 25 bp, SARS Virus
atctcccgacagtacgttgatctct

SEQ ID NO: 73248 - DNA, 25 bp, SARS Virus
tctcccgacagttcgttgatctcta

SEQ ID NO: 73249 - DNA, 25 bp, SARS Virus
ctcccgacagtatgttgatctctac

SEQ ID NO: 73250 - DNA, 25 bp, SARS Virus
tcccgacagtactttgatctctacg

SEQ ID NO: 73251 - DNA, 25 bp, SARS Virus
cccgacagtacgttgatctctacga

SEQ ID NO: 73252 - DNA, 25 bp, SARS Virus
ccgacagtacgttgatctctacgac

SEQ ID NO: 73253 - DNA, 25 bp, SARS Virus
cgacagtacgtttatctctacgaca

SEQ ID NO: 73254 - DNA, 25 bp, SARS Virus
gacagtacgttgttctctacgacac

SEQ ID NO: 73255 - DNA, 25 bp, SARS Virus
acagtacgttgatctctacgacacc

SEQ ID NO: 73256 - DNA, 25 bp, SARS Virus
cagtacgttgatttctacgacaccc

SEQ ID NO: 73257 - DNA, 25 bp, SARS Virus
agtacgttgatctctacgacaccca

SEQ ID NO: 73258 - DNA, 25 bp, SARS Virus
gtacgttgatctttacgacacccat

SEQ ID NO: 73259 - DNA, 25 bp, SARS Virus
tacgttgatctctacgacacccatg

SEQ ID NO: 73260 - DNA, 25 bp, SARS Virus
acgttgatctcttcgacacccatga

SEQ ID NO: 73261 - DNA, 25 bp, SARS Virus
cgttgatctctatgacacccatgat

SEQ ID NO: 73262 - DNA, 25 bp, SARS Virus
gttgatctctactacacccatgatt

SEQ ID NO: 73263 - DNA, 25 bp, SARS Virus
ttgatctctacgtcacccatgattg

SEQ ID NO: 73264 - DNA, 25 bp, SARS Virus
tgatctctacgatacccatgattgg

SEQ ID NO: 73265 - DNA, 25 bp, SARS Virus
gatctctacgactcccatgattgga

SEQ ID NO: 73266 - DNA, 25 bp, SARS Virus
atctctacgacatccatgattggat

SEQ ID NO: 73267 - DNA, 25 bp, SARS Virus
tctctacgacactcatgattggatg

SEQ ID NO: 73268 - DNA, 25 bp, SARS Virus
ctctacgacacctatgattggatgg

SEQ ID NO: 73269 - DNA, 25 bp, SARS Virus
tctacgacacccttgattggatgga

SEQ ID NO: 73270 - DNA, 25 bp, SARS Virus
ctacgacacccatgattggatggag

SEQ ID NO: 73271 - DNA, 25 bp, SARS Virus
tacgacacccattattggatggaga

SEQ ID NO: 73272 - DNA, 25 bp, SARS Virus
acgacacccatgtttggatggagag

SEQ ID NO: 73273 - DNA, 25 bp, SARS Virus
cgacacccatgattggatggagagg

SEQ ID NO: 73274 - DNA, 25 bp, SARS Virus
gacacccatgattggatggagaggt

SEQ ID NO: 73275 - DNA, 25 bp, SARS Virus
acacccatgatttgatggagaggtc

SEQ ID NO: 73276 - DNA, 25 bp, SARS Virus
cacccatgattgtatggagaggtcg

SEQ ID NO: 73277 - DNA, 25 bp, SARS Virus
acccatgattggttggagaggtcga

SEQ ID NO: 73278 - DNA, 25 bp, SARS Virus
cccatgattggatggagaggtcgat

SEQ ID NO: 73279 - DNA, 25 bp, SARS Virus
ccatgattggattgagaggtcgatc

SEQ ID NO: 73280 - DNA, 25 bp, SARS Virus
catgattggatgtagaggtcgatcc

SEQ ID NO: 73281 - DNA, 25 bp, SARS Virus
atgattggatggtgaggtcgatcct

SEQ ID NO: 73282 - DNA, 25 bp, SARS Virus
tgattggatggataggtcgatccta

SEQ ID NO: 73283 - DNA, 25 bp, SARS Virus
gattggatggagtggtcgatcctaa

SEQ ID NO: 73284 - DNA, 25 bp, SARS Virus
attggatggagatgtcgatcctaaa

SEQ ID NO: 73285 - DNA, 25 bp, SARS Virus
ttggatggagagttcgatcctaaaa

SEQ ID NO: 73286 - DNA, 25 bp, SARS Virus
tggatggagaggtcgatcctaaaag

SEQ ID NO: 73287 - DNA, 25 bp, SARS Virus
ggatggagaggttgatcctaaaaga

SEQ ID NO: 73288 - DNA, 25 bp, SARS Virus
gatggagaggtctatcctaaaagat

SEQ ID NO: 73289 - DNA, 25 bp, SARS Virus
atggagaggtcgttcctaaaagatg

SEQ ID NO: 73290 - DNA, 25 bp, SARS Virus
tggagaggtcgatcctaaaagatgt

SEQ ID NO: 73291 - DNA, 25 bp, SARS Virus
ggagaggtcgattctaaaagatgtc

SEQ ID NO: 73292 - DNA, 25 bp, SARS Virus
gagaggtcgatcttaaaagatgtcc

SEQ ID NO: 73293 - DNA, 25 bp, SARS Virus
agaggtcgatcctaaaagatgtcca

SEQ ID NO: 73294 - DNA, 25 bp, SARS Virus
gaggtcgatccttaaagatgtccac

SEQ ID NO: 73295 - DNA, 25 bp, SARS Virus
aggtcgatcctataagatgtccaca

SEQ ID NO: 73296 - DNA, 25 bp, SARS Virus
ggtcgatcctaatagatgtccacaa

SEQ ID NO: 73297 - DNA, 25 bp, SARS Virus
gtcgatcctaaatgatgtccacaat

SEQ ID NO: 73298 - DNA, 25 bp, SARS Virus
tcgatcctaaaatatgtccacaatt

SEQ ID NO: 73299 - DNA, 25 bp, SARS Virus
cgatcctaaaagttgtccacaattg

SEQ ID NO: 73300 - DNA, 25 bp, SARS Virus
gatcctaaaagatgtccacaattga

SEQ ID NO: 73301 - DNA, 25 bp, SARS Virus
atcctaaaagatttccacaattgaa

SEQ ID NO: 73302 - DNA, 25 bp, SARS Virus
tcctaaaagatgtccacaattgaat

SEQ ID NO: 73303 - DNA, 25 bp, SARS Virus
cctaaaagatgttcacaattgaatc

SEQ ID NO: 73304 - DNA, 25 bp, SARS Virus
ctaaaagatgtctacaattgaatca

SEQ ID NO: 73305 - DNA, 25 bp, SARS Virus
taaaagatgtcctcaattgaatcat

SEQ ID NO: 73306 - DNA, 25 bp, SARS Virus
aaaagatgtccataattgaatcatc

SEQ ID NO: 73307 - DNA, 25 bp, SARS Virus
aaagatgtccactattgaatcatcg

SEQ ID NO: 73308 - DNA, 25 bp, SARS Virus
aagatgtccacatttgaatcatcga

SEQ ID NO: 73309 - DNA, 25 bp, SARS Virus
agatgtccacaattgaatcatcgac

SEQ ID NO: 73310 - DNA, 25 bp, SARS Virus
gatgtccacaattgaatcatcgaca

SEQ ID NO: 73311 - DNA, 25 bp, SARS Virus
atgtccacaatttaatcatcgacat

SEQ ID NO: 73312 - DNA, 25 bp, SARS Virus
tgtccacaattgtatcatcgacatg

SEQ ID NO: 73313 - DNA, 25 bp, SARS Virus
gtccacaattgattcatcgacatgg

SEQ ID NO: 73314 - DNA, 25 bp, SARS Virus
tccacaattgaatcatcgacatggc

SEQ ID NO: 73315 - DNA, 25 bp, SARS Virus
ccacaattgaattatcgacatggct

SEQ ID NO: 73316 - DNA, 25 bp, SARS Virus
cacaattgaatcttcgacatggctg

SEQ ID NO: 73317 - DNA, 25 bp, SARS Virus
acaattgaatcatcgacatggctga

SEQ ID NO: 73318 - DNA, 25 bp, SARS Virus
caattgaatcattgacatggctgac

SEQ ID NO: 73319 - DNA, 25 bp, SARS Virus
aattgaatcatctacatggctgacc

SEQ ID NO: 73320 - DNA, 25 bp, SARS Virus
attgaatcatcgtcatggctgacca

SEQ ID NO: 73321 - DNA, 25 bp, SARS Virus
ttgaatcatcgatatggctgaccaa

SEQ ID NO: 73322 - DNA, 25 bp, SARS Virus
tgaatcatcgacttggctgaccaat

SEQ ID NO: 73323 - DNA, 25 bp, SARS Virus
gaatcatcgacatggctgaccaata

SEQ ID NO: 73324 - DNA, 25 bp, SARS Virus
aatcatcgacattgctgaccaatac

SEQ ID NO: 73325 - DNA, 25 bp, SARS Virus
atcatcgacatgtctgaccaataca

SEQ ID NO: 73326 - DNA, 25 bp, SARS Virus
tcatcgacatggttgaccaatacaa

SEQ ID NO: 73327 - DNA, 25 bp, SARS Virus
catcgacatggctgaccaatacaac

SEQ ID NO: 73328 - DNA, 25 bp, SARS Virus
atcgacatggcttaccaatacaact

SEQ ID NO: 73329 - DNA, 25 bp, SARS Virus
tcgacatggctgaccaatacaactg

SEQ ID NO: 73330 - DNA, 25 bp, SARS Virus
cgacatggctgaacaatacaactgt

SEQ ID NO: 73331 - DNA, 25 bp, SARS Virus
gacatggctgacaaatacaactgtg

SEQ ID NO: 73332 - DNA, 25 bp, SARS Virus
acatggctgaccaatacaactgtga

SEQ ID NO: 73333 - DNA, 25 bp, SARS Virus
catggctgaccaatacaactgtgac

SEQ ID NO: 73334 - DNA, 25 bp, SARS Virus
atggctgaccaaaacaactgtgact

SEQ ID NO: 73335 - DNA, 25 bp, SARS Virus
tggctgaccaatacaactgtgactt

SEQ ID NO: 73336 - DNA, 25 bp, SARS Virus
ggctgaccaataaaactgtgacttt

SEQ ID NO: 73337 - DNA, 25 bp, SARS Virus
gctgaccaatacaactgtgactttt

SEQ ID NO: 73338 - DNA, 25 bp, SARS Virus
ctgaccaatacaactgtgactttta

SEQ ID NO: 73339 - DNA, 25 bp, SARS Virus
tgaccaatacaaatgtgacttttat

SEQ ID NO: 73340 - DNA, 25 bp, SARS Virus
gaccaatacaacagtgacttttatt

SEQ ID NO: 73341 - DNA, 25 bp, SARS Virus
accaatacaactatgacttttattg

SEQ ID NO: 73342 - DNA, 25 bp, SARS Virus
ccaatacaactgagacttttattgt

SEQ ID NO: 73343 - DNA, 25 bp, SARS Virus
caatacaactgtaacttttattgtg

SEQ ID NO: 73344 - DNA, 25 bp, SARS Virus
aatacaactgtgacttttattgtgt

SEQ ID NO: 73345 - DNA, 25 bp, SARS Virus
atacaactgtgaattttattgtgtc

SEQ ID NO: 73346 - DNA, 25 bp, SARS Virus
tacaactgtgacatttattgtgtct

SEQ ID NO: 73347 - DNA, 25 bp, SARS Virus
acaactgtgactattattgtgtctt

SEQ ID NO: 73348 - DNA, 25 bp, SARS Virus
caactgtgacttatattgtgtctta

SEQ ID NO: 73349 - DNA, 25 bp, SARS Virus
aactgtgactttaattgtgtcttaa

SEQ ID NO: 73350 - DNA, 25 bp, SARS Virus
actgtgacttttattgtgtcttaag

SEQ ID NO: 73351 - DNA, 25 bp, SARS Virus
ctgtgacttttaatgtgtcttaagt

SEQ ID NO: 73352 - DNA, 25 bp, SARS Virus
tgtgacttttatagtgtcttaagtg

SEQ ID NO: 73353 - DNA, 25 bp, SARS Virus
gtgacttttattatgtcttaagtgg

SEQ ID NO: 73354 - DNA, 25 bp, SARS Virus
tgacttttattgagtcttaagtggt

SEQ ID NO: 73355 - DNA, 25 bp, SARS Virus
gacttttattgtatcttaagtggtc

SEQ ID NO: 73356 - DNA, 25 bp, SARS Virus
acttttattgtgacttaagtggtct

SEQ ID NO: 73357 - DNA, 25 bp, SARS Virus
cttttattgtgtattaagtggtctc

SEQ ID NO: 73358 - DNA, 25 bp, SARS Virus
ttttattgtgtcataagtggtctca

SEQ ID NO: 73359 - DNA, 25 bp, SARS Virus
tttattgtgtctaaagtggtctcaa

SEQ ID NO: 73360 - DNA, 25 bp, SARS Virus
ttattgtgtcttaagtggtctcaat

SEQ ID NO: 73361 - DNA, 25 bp, SARS Virus
tattgtgtcttaagtggtctcaatt

SEQ ID NO: 73362 - DNA, 25 bp, SARS Virus
attgtgtcttaaatggtctcaatta

SEQ ID NO: 73363 - DNA, 25 bp, SARS Virus
ttgtgtcttaagaggtctcaattac

SEQ ID NO: 73364 - DNA, 25 bp, SARS Virus
tgtgtcttaagtagtctcaattacg

SEQ ID NO: 73365 - DNA, 25 bp, SARS Virus
gtgtcttaagtgatctcaattacgt

SEQ ID NO: 73366 - DNA, 25 bp, SARS Virus
tgtcttaagtggactcaattacgtt

SEQ ID NO: 73367 - DNA, 25 bp, SARS Virus
gtcttaagtggtatcaattacgttt

SEQ ID NO: 73368 - DNA, 25 bp, SARS Virus
tcttaagtggtcacaattacgtttt

SEQ ID NO: 73369 - DNA, 25 bp, SARS Virus
cttaagtggtctaaattacgttttg

SEQ ID NO: 73370 - DNA, 25 bp, SARS Virus
ttaagtggtctcaattacgttttgg

SEQ ID NO: 73371 - DNA, 25 bp, SARS Virus
taagtggtctcaattacgttttgga

SEQ ID NO: 73372 - DNA, 25 bp, SARS Virus
aagtggtctcaaatacgttttggag

SEQ ID NO: 73373 - DNA, 25 bp, SARS Virus
agtggtctcaataacgttttggagg

SEQ ID NO: 73374 - DNA, 25 bp, SARS Virus
gtggtctcaattacgttttggaggt

SEQ ID NO: 73375 - DNA, 25 bp, SARS Virus
tggtctcaattaagttttggaggtg

SEQ ID NO: 73376 - DNA, 25 bp, SARS Virus
ggtctcaattacattttggaggtgg

SEQ ID NO: 73377 - DNA, 25 bp, SARS Virus
gtctcaattacgatttggaggtggt

SEQ ID NO: 73378 - DNA, 25 bp, SARS Virus
tctcaattacgtattggaggtggtc

SEQ ID NO: 73379 - DNA, 25 bp, SARS Virus
ctcaattacgttatggaggtggtcc

SEQ ID NO: 73380 - DNA, 25 bp, SARS Virus
tcaattacgtttaggaggtggtcca

SEQ ID NO: 73381 - DNA, 25 bp, SARS Virus
caattacgttttagaggtggtccac

SEQ ID NO: 73382 - DNA, 25 bp, SARS Virus
aattacgttttgaaggtggtccact

SEQ ID NO: 73383 - DNA, 25 bp, SARS Virus
attacgttttggaggtggtccactg

SEQ ID NO: 73384 - DNA, 25 bp, SARS Virus
ttacgttttggaagtggtccactgg

SEQ ID NO: 73385 - DNA, 25 bp, SARS Virus
tacgttttggagatggtccactggt

SEQ ID NO: 73386 - DNA, 25 bp, SARS Virus
acgttttggaggaggtccactggtc

SEQ ID NO: 73387 - DNA, 25 bp, SARS Virus
cgttttggaggtagtccactggtca

SEQ ID NO: 73388 - DNA, 25 bp, SARS Virus
gttttggaggtgatccactggtcaa

SEQ ID NO: 73389 - DNA, 25 bp, SARS Virus
ttttggaggtggaccactggtcaaa

SEQ ID NO: 73390 - DNA, 25 bp, SARS Virus
tttggaggtggtacactggtcaaat

SEQ ID NO: 73391 - DNA, 25 bp, SARS Virus
ttggaggtggtcaactggtcaaatt

SEQ ID NO: 73392 - DNA, 25 bp, SARS Virus
tggaggtggtccactggtcaaattt

SEQ ID NO: 73393 - DNA, 25 bp, SARS Virus
ggaggtggtccaatggtcaaatttg

SEQ ID NO: 73394 - DNA, 25 bp, SARS Virus
gaggtggtccacaggtcaaatttgt

SEQ ID NO: 73395 - DNA, 25 bp, SARS Virus
aggtggtccactagtcaaatttgta

SEQ ID NO: 73396 - DNA, 25 bp, SARS Virus
ggtggtccactgatcaaatttgtag

SEQ ID NO: 73397 - DNA, 25 bp, SARS Virus
gtggtccactggacaaatttgtaga

SEQ ID NO: 73398 - DNA, 25 bp, SARS Virus
tggtccactggtaaaatttgtagaa

SEQ ID NO: 73399 - DNA, 25 bp, SARS Virus
ggtccactggtcaaatttgtagaat

SEQ ID NO: 73400 - DNA, 25 bp, SARS Virus
gtccactggtcaaatttgtagaata

SEQ ID NO: 73401 - DNA, 25 bp, SARS Virus
tccactggtcaaatttgtagaatat

SEQ ID NO: 73402 - DNA, 25 bp, SARS Virus
ccactggtcaaaattgtagaatatg

SEQ ID NO: 73403 - DNA, 25 bp, SARS Virus
cactggtcaaatatgtagaatatgg

SEQ ID NO: 73404 - DNA, 25 bp, SARS Virus
actggtcaaattagtagaatatggt

SEQ ID NO: 73405 - DNA, 25 bp, SARS Virus
ctggtcaaatttatagaatatggtg

SEQ ID NO: 73406 - DNA, 25 bp, SARS Virus
tggtcaaatttgaagaatatggtga

SEQ ID NO: 73407 - DNA, 25 bp, SARS Virus
ggtcaaatttgtagaatatggtgag

SEQ ID NO: 73408 - DNA, 25 bp, SARS Virus
gtcaaatttgtaaaatatggtgagt

SEQ ID NO: 73409 - DNA, 25 bp, SARS Virus
tcaaatttgtagaatatggtgagta

SEQ ID NO: 73410 - DNA, 25 bp, SARS Virus
caaatttgtagaatatggtgagtac

SEQ ID NO: 73411 - DNA, 25 bp, SARS Virus
aaatttgtagaaaatggtgagtaca

SEQ ID NO: 73412 - DNA, 25 bp, SARS Virus
aatttgtagaatatggtgagtacat

SEQ ID NO: 73413 - DNA, 25 bp, SARS Virus
atttgtagaataaggtgagtacata

SEQ ID NO: 73414 - DNA, 25 bp, SARS Virus
tttgtagaatatagtgagtacatat

SEQ ID NO: 73415 - DNA, 25 bp, SARS Virus
ttgtagaatatgatgagtacatatt

SEQ ID NO: 73416 - DNA, 25 bp, SARS Virus
tgtagaatatggagagtacatattt

SEQ ID NO: 73417 - DNA, 25 bp, SARS Virus
gtagaatatggtaagtacatatttc

SEQ ID NO: 73418 - DNA, 25 bp, SARS Virus
tagaatatggtgagtacatatttcc

SEQ ID NO: 73419 - DNA, 25 bp, SARS Virus
agaatatggtgaatacatatttccg

SEQ ID NO: 73420 - DNA, 25 bp, SARS Virus
gaatatggtgagaacatatttccga

SEQ ID NO: 73421 - DNA, 25 bp, SARS Virus
aatatggtgagtacatatttccgaa

SEQ ID NO: 73422 - DNA, 25 bp, SARS Virus
atatggtgagtaaatatttccgaac

SEQ ID NO: 73423 - DNA, 25 bp, SARS Virus
tatggtgagtacatatttccgaacg

SEQ ID NO: 73424 - DNA, 25 bp, SARS Virus
atggtgagtacaaatttccgaacgg

SEQ ID NO: 73425 - DNA, 25 bp, SARS Virus
tggtgagtacatatttccgaacggg

SEQ ID NO: 73426 - DNA, 25 bp, SARS Virus
ggtgagtacataattccgaacggga

SEQ ID NO: 73427 - DNA, 25 bp, SARS Virus
gtgagtacatatatccgaacgggac

SEQ ID NO: 73428 - DNA, 25 bp, SARS Virus
tgagtacatattaccgaacgggacc

SEQ ID NO: 73429 - DNA, 25 bp, SARS Virus
gagtacatatttacgaacgggacct

SEQ ID NO: 73430 - DNA, 25 bp, SARS Virus
agtacatatttcagaacgggacctt

SEQ ID NO: 73431 - DNA, 25 bp, SARS Virus
gtacatatttccaaacgggacctta

SEQ ID NO: 73432 - DNA, 25 bp, SARS Virus
tacatatttccgaacgggaccttac

SEQ ID NO: 73433 - DNA, 25 bp, SARS Virus
acatatttccgaacgggaccttaca

SEQ ID NO: 73434 - DNA, 25 bp, SARS Virus
catatttccgaaagggaccttacat

SEQ ID NO: 73435 - DNA, 25 bp, SARS Virus
atatttccgaacaggaccttacatc

SEQ ID NO: 73436 - DNA, 25 bp, SARS Virus
tatttccgaacgagaccttacatca

SEQ ID NO: 73437 - DNA, 25 bp, SARS Virus
atttccgaacggaaccttacatcac

SEQ ID NO: 73438 - DNA, 25 bp, SARS Virus
tttccgaacgggaccttacatcacg

SEQ ID NO: 73439 - DNA, 25 bp, SARS Virus
ttccgaacgggaacttacatcacgc

SEQ ID NO: 73440 - DNA, 25 bp, SARS Virus
tccgaacgggacattacatcacgca

SEQ ID NO: 73441 - DNA, 25 bp, SARS Virus
ccgaacgggaccatacatcacgcat

SEQ ID NO: 73442 - DNA, 25 bp, SARS Virus
cgaacgggacctaacatcacgcata

SEQ ID NO: 73443 - DNA, 25 bp, SARS Virus
gaacgggaccttacatcacgcataa

SEQ ID NO: 73444 - DNA, 25 bp, SARS Virus
aacgggaccttaaatcacgcataat

SEQ ID NO: 73445 - DNA, 25 bp, SARS Virus
acgggaccttacatcacgcataatt

SEQ ID NO: 73446 - DNA, 25 bp, SARS Virus
cgggaccttacaacacgcataattc

SEQ ID NO: 73447 - DNA, 25 bp, SARS Virus
gggaccttacataacgcataattct

SEQ ID NO: 73448 - DNA, 25 bp, SARS Virus
ggaccttacatcacgcataattcta

SEQ ID NO: 73449 - DNA, 25 bp, SARS Virus
gaccttacatcaagcataattctat

SEQ ID NO: 73450 - DNA, 25 bp, SARS Virus
accttacatcacacataattctatc

SEQ ID NO: 73451 - DNA, 25 bp, SARS Virus
ccttacatcacgaataattctatca

SEQ ID NO: 73452 - DNA, 25 bp, SARS Virus
cttacatcacgcataattctatcat

SEQ ID NO: 73453 - DNA, 25 bp, SARS Virus
ttacatcacgcaaaattctatcatg

SEQ ID NO: 73454 - DNA, 25 bp, SARS Virus
tacatcacgcataattctatcatgt

SEQ ID NO: 73455 - DNA, 25 bp, SARS Virus
acatcacgcataattctatcatgtt

SEQ ID NO: 73456 - DNA, 25 bp, SARS Virus
catcacgcataaatctatcatgttt

SEQ ID NO: 73457 - DNA, 25 bp, SARS Virus
atcacgcataatactatcatgttta

SEQ ID NO: 73458 - DNA, 25 bp, SARS Virus
tcacgcataattatatcatgtttac

SEQ ID NO: 73459 - DNA, 25 bp, SARS Virus
cacgcataattcaatcatgtttacg

SEQ ID NO: 73460 - DNA, 25 bp, SARS Virus
acgcataattctatcatgtttacga

SEQ ID NO: 73461 - DNA, 25 bp, SARS Virus
cgcataattctaacatgtttacgag

SEQ ID NO: 73462 - DNA, 25 bp, SARS Virus
gcataattctataatgtttacgagt

SEQ ID NO: 73463 - DNA, 25 bp, SARS Virus
cataattctatcatgtttacgagtc

SEQ ID NO: 73464 - DNA, 25 bp, SARS Virus
ataattctatcaagtttacgagtca

SEQ ID NO: 73465 - DNA, 25 bp, SARS Virus
taattctatcatatttacgagtcac

SEQ ID NO: 73466 - DNA, 25 bp, SARS Virus
aattctatcatgattacgagtcact

SEQ ID NO: 73467 - DNA, 25 bp, SARS Virus
attctatcatgtatacgagtcacta

SEQ ID NO: 73468 - DNA, 25 bp, SARS Virus
ttctatcatgttaacgagtcactat

SEQ ID NO: 73469 - DNA, 25 bp, SARS Virus
tctatcatgtttacgagtcactatg

SEQ ID NO: 73470 - DNA, 25 bp, SARS Virus
ctatcatgtttaagagtcactatgt

SEQ ID NO: 73471 - DNA, 25 bp, SARS Virus
tatcatgtttacaagtcactatgtg

SEQ ID NO: 73472 - DNA, 25 bp, SARS Virus
atcatgtttacgagtcactatgtga

SEQ ID NO: 73473 - DNA, 25 bp, SARS Virus
tcatgtttacgaatcactatgtgac

SEQ ID NO: 73474 - DNA, 25 bp, SARS Virus
catgtttacgagacactatgtgact

SEQ ID NO: 73475 - DNA, 25 bp, SARS Virus
atgtttacgagtaactatgtgactt

SEQ ID NO: 73476 - DNA, 25 bp, SARS Virus
tgtttacgagtcactatgtgacttt

SEQ ID NO: 73477 - DNA, 25 bp, SARS Virus
gtttacgagtcaatatgtgactttc

SEQ ID NO: 73478 - DNA, 25 bp, SARS Virus
tttacgagtcacaatgtgactttcc

SEQ ID NO: 73479 - DNA, 25 bp, SARS Virus
ttacgagtcactatgtgactttcct

SEQ ID NO: 73480 - DNA, 25 bp, SARS Virus
tacgagtcactaagtgactttccta

SEQ ID NO: 73481 - DNA, 25 bp, SARS Virus
acgagtcactatatgactttcctaa

SEQ ID NO: 73482 - DNA, 25 bp, SARS Virus
cgagtcactatgagactttcctaac

SEQ ID NO: 73483 - DNA, 25 bp, SARS Virus
gagtcactatgtaactttcctaaca

SEQ ID NO: 73484 - DNA, 25 bp, SARS Virus
agtcactatgtgactttcctaacag

SEQ ID NO: 73485 - DNA, 25 bp, SARS Virus
gtcactatgtgaatttcctaacagt

SEQ ID NO: 73486 - DNA, 25 bp, SARS Virus
tcactatgtgacattcctaacagtc

SEQ ID NO: 73487 - DNA, 25 bp, SARS Virus
cactatgtgactatcctaacagtct

SEQ ID NO: 73488 - DNA, 25 bp, SARS Virus
actatgtgacttacctaacagtctg

SEQ ID NO: 73489 - DNA, 25 bp, SARS Virus
ctatgtgactttactaacagtctgt

SEQ ID NO: 73490 - DNA, 25 bp, SARS Virus
tatgtgactttcataacagtctgtc

SEQ ID NO: 73491 - DNA, 25 bp, SARS Virus
atgtgactttccaaacagtctgtct

SEQ ID NO: 73492 - DNA, 25 bp, SARS Virus
tgtgactttcctaacagtctgtctc

SEQ ID NO: 73493 - DNA, 25 bp, SARS Virus
gtgactttcctaacagtctgtctca

SEQ ID NO: 73494 - DNA, 25 bp, SARS Virus
tgactttcctaaaagtctgtctcag

SEQ ID NO: 73495 - DNA, 25 bp, SARS Virus
gactttcctaacagtctgtctcagc

SEQ ID NO: 73496 - DNA, 25 bp, SARS Virus
actttcctaacaatctgtctcagca

SEQ ID NO: 73497 - DNA, 25 bp, SARS Virus
ctttcctaacagactgtctcagcac

SEQ ID NO: 73498 - DNA, 25 bp, SARS Virus
tttcctaacagtatgtctcagcaca

SEQ ID NO: 73499 - DNA, 25 bp, SARS Virus
ttcctaacagtcagtctcagcacaa

SEQ ID NO: 73500 - DNA, 25 bp, SARS Virus
tcctaacagtctatctcagcacaag

SEQ ID NO: 73501 - DNA, 25 bp, SARS Virus
cctaacagtctgactcagcacaagc

SEQ ID NO: 73502 - DNA, 25 bp, SARS Virus
ctaacagtctgtatcagcacaagca

SEQ ID NO: 73503 - DNA, 25 bp, SARS Virus
taacagtctgtcacagcacaagcag

SEQ ID NO: 73504 - DNA, 25 bp, SARS Virus
aacagtctgtctaagcacaagcagg

SEQ ID NO: 73505 - DNA, 25 bp, SARS Virus
acagtctgtctcagcacaagcagga

SEQ ID NO: 73506 - DNA, 25 bp, SARS Virus
cagtctgtctcaacacaagcaggaa

SEQ ID NO: 73507 - DNA, 25 bp, SARS Virus
agtctgtctcagaacaagcaggaaa

SEQ ID NO: 73508 - DNA, 25 bp, SARS Virus
gtctgtctcagcacaagcaggaaac

SEQ ID NO: 73509 - DNA, 25 bp, SARS Virus
tctgtctcagcaaaagcaggaaacc

SEQ ID NO: 73510 - DNA, 25 bp, SARS Virus
ctgtctcagcacaagcaggaaaccc

SEQ ID NO: 73511 - DNA, 25 bp, SARS Virus
tgtctcagcacaagcaggaaacccg

SEQ ID NO: 73512 - DNA, 25 bp, SARS Virus
gtctcagcacaaacaggaaacccgc

SEQ ID NO: 73513 - DNA, 25 bp, SARS Virus
tctcagcacaagaaggaaacccgcg

SEQ ID NO: 73514 - DNA, 25 bp, SARS Virus
ctcagcacaagcaggaaacccgcgt

SEQ ID NO: 73515 - DNA, 25 bp, SARS Virus
tcagcacaagcaagaaacccgcgta

SEQ ID NO: 73516 - DNA, 25 bp, SARS Virus
cagcacaagcagaaaacccgcgtac

SEQ ID NO: 73517 - DNA, 25 bp, SARS Virus
agcacaagcaggaaacccgcgtacc

SEQ ID NO: 73518 - DNA, 25 bp, SARS Virus
gcacaagcaggaaacccgcgtaccg

SEQ ID NO: 73519 - DNA, 25 bp, SARS Virus
cacaagcaggaaacccgcgtaccga

SEQ ID NO: 73520 - DNA, 25 bp, SARS Virus
acaagcaggaaaaccgcgtaccgaa

SEQ ID NO: 73521 - DNA, 25 bp, SARS Virus
caagcaggaaacacgcgtaccgaaa

SEQ ID NO: 73522 - DNA, 25 bp, SARS Virus
aagcaggaaaccagcgtaccgaaac

SEQ ID NO: 73523 - DNA, 25 bp, SARS Virus
agcaggaaacccacgtaccgaaact

SEQ ID NO: 73524 - DNA, 25 bp, SARS Virus
gcaggaaacccgagtaccgaaactc

SEQ ID NO: 73525 - DNA, 25 bp, SARS Virus
caggaaacccgcataccgaaactcg

SEQ ID NO: 73526 - DNA, 25 bp, SARS Virus
aggaaacccgcgaaccgaaactcga

SEQ ID NO: 73527 - DNA, 25 bp, SARS Virus
ggaaacccgcgtaccgaaactcgaa

SEQ ID NO: 73528 - DNA, 25 bp, SARS Virus
gaaacccgcgtaacgaaactcgaat

SEQ ID NO: 73529 - DNA, 25 bp, SARS Virus
aaacccgcgtacagaaactcgaatg

SEQ ID NO: 73530 - DNA, 25 bp, SARS Virus
aacccgcgtaccaaaactcgaatgt

SEQ ID NO: 73531 - DNA, 25 bp, SARS Virus
acccgcgtaccgaaactcgaatgta

SEQ ID NO: 73532 - DNA, 25 bp, SARS Virus
cccgcgtaccgaaactcgaatgtag

SEQ ID NO: 73533 - DNA, 25 bp, SARS Virus
ccgcgtaccgaaactcgaatgtagt

SEQ ID NO: 73534 - DNA, 25 bp, SARS Virus
cgcgtaccgaaaatcgaatgtagtt

SEQ ID NO: 73535 - DNA, 25 bp, SARS Virus
gcgtaccgaaacacgaatgtagtta

SEQ ID NO: 73536 - DNA, 25 bp, SARS Virus
cgtaccgaaactagaatgtagttac

SEQ ID NO: 73537 - DNA, 25 bp, SARS Virus
gtaccgaaactcaaatgtagttact

SEQ ID NO: 73538 - DNA, 25 bp, SARS Virus
taccgaaactcgaatgtagttactt

SEQ ID NO: 73539 - DNA, 25 bp, SARS Virus
accgaaactcgaatgtagttacttc

SEQ ID NO: 73540 - DNA, 25 bp, SARS Virus
ccgaaactcgaaagtagttacttca

SEQ ID NO: 73541 - DNA, 25 bp, SARS Virus
cgaaactcgaatatagttacttcat

SEQ ID NO: 73542 - DNA, 25 bp, SARS Virus
gaaactcgaatgaagttacttcatg

SEQ ID NO: 73543 - DNA, 25 bp, SARS Virus
aaactcgaatgtagttacttcatga

SEQ ID NO: 73544 - DNA, 25 bp, SARS Virus
aactcgaatgtaattacttcatgaa

SEQ ID NO: 73545 - DNA, 25 bp, SARS Virus
actcgaatgtagatacttcatgaaa

SEQ ID NO: 73546 - DNA, 25 bp, SARS Virus
ctcgaatgtagtaacttcatgaaac

SEQ ID NO: 73547 - DNA, 25 bp, SARS Virus
tcgaatgtagttacttcatgaaaca

SEQ ID NO: 73548 - DNA, 25 bp, SARS Virus
cgaatgtagttaattcatgaaacag

SEQ ID NO: 73549 - DNA, 25 bp, SARS Virus
gaatgtagttacatcatgaaacagt

SEQ ID NO: 73550 - DNA, 25 bp, SARS Virus
aatgtagttactacatgaaacagtt

SEQ ID NO: 73551 - DNA, 25 bp, SARS Virus
atgtagttacttaatgaaacagttc

SEQ ID NO: 73552 - DNA, 25 bp, SARS Virus
tgtagttacttcatgaaacagttct

SEQ ID NO: 73553 - DNA, 25 bp, SARS Virus
gtagttacttcaagaaacagttcta

SEQ ID NO: 73554 - DNA, 25 bp, SARS Virus
tagttacttcataaaacagttctaa

SEQ ID NO: 73555 - DNA, 25 bp, SARS Virus
agttacttcatgaaacagttctaac

SEQ ID NO: 73556 - DNA, 25 bp, SARS Virus
gttacttcatgaaacagttctaacc

SEQ ID NO: 73557 - DNA, 25 bp, SARS Virus
ttacttcatgaaacagttctaacct

SEQ ID NO: 73558 - DNA, 25 bp, SARS Virus
tacttcatgaaaaagttctaacctg

SEQ ID NO: 73559 - DNA, 25 bp, SARS Virus
acttcatgaaacagttctaacctgg

SEQ ID NO: 73560 - DNA, 25 bp, SARS Virus
cttcatgaaacaattctaacctgga

SEQ ID NO: 73561 - DNA, 25 bp, SARS Virus
ttcatgaaacagatctaacctggac

SEQ ID NO: 73562 - DNA, 25 bp, SARS Virus
tcatgaaacagtactaacctggact

SEQ ID NO: 73563 - DNA, 25 bp, SARS Virus
catgaaacagttataacctggactt

SEQ ID NO: 73564 - DNA, 25 bp, SARS Virus
atgaaacagttcaaacctggacttt

SEQ ID NO: 73565 - DNA, 25 bp, SARS Virus
tgaaacagttctaacctggactttc

SEQ ID NO: 73566 - DNA, 25 bp, SARS Virus
gaaacagttctaacctggactttct

SEQ ID NO: 73567 - DNA, 25 bp, SARS Virus
aaacagttctaaactggactttctt

SEQ ID NO: 73568 - DNA, 25 bp, SARS Virus
aacagttctaacatggactttcttg

SEQ ID NO: 73569 - DNA, 25 bp, SARS Virus
acagttctaaccaggactttcttgc

SEQ ID NO: 73570 - DNA, 25 bp, SARS Virus
cagttctaacctagactttcttgca

SEQ ID NO: 73571 - DNA, 25 bp, SARS Virus
agttctaacctgaactttcttgcac

SEQ ID NO: 73572 - DNA, 25 bp, SARS Virus
gttctaacctggactttcttgcaca

SEQ ID NO: 73573 - DNA, 25 bp, SARS Virus
ttctaacctggaatttcttgcacaa

SEQ ID NO: 73574 - DNA, 25 bp, SARS Virus
tctaacctggacattcttgcacaac

SEQ ID NO: 73575 - DNA, 25 bp, SARS Virus
ctaacctggactatcttgcacaaca

SEQ ID NO: 73576 - DNA, 25 bp, SARS Virus
taacctggacttacttgcacaacag

SEQ ID NO: 73577 - DNA, 25 bp, SARS Virus
aacctggactttattgcacaacaga

SEQ ID NO: 73578 - DNA, 25 bp, SARS Virus
acctggactttcatgcacaacagac

SEQ ID NO: 73579 - DNA, 25 bp, SARS Virus
cctggactttctagcacaacagaca

SEQ ID NO: 73580 - DNA, 25 bp, SARS Virus
ctggactttcttacacaacagacac

SEQ ID NO: 73581 - DNA, 25 bp, SARS Virus
tggactttcttgaacaacagacaca

SEQ ID NO: 73582 - DNA, 25 bp, SARS Virus
ggactttcttgcacaacagacacac

SEQ ID NO: 73583 - DNA, 25 bp, SARS Virus
gactttcttgcaaaacagacacact

SEQ ID NO: 73584 - DNA, 25 bp, SARS Virus
actttcttgcacaacagacacactg

SEQ ID NO: 73585 - DNA, 25 bp, SARS Virus
ctttcttgcacaacagacacactgt

SEQ ID NO: 73586 - DNA, 25 bp, SARS Virus
tttcttgcacaaaagacacactgtt

SEQ ID NO: 73587 - DNA, 25 bp, SARS Virus
ttcttgcacaacagacacactgttt

SEQ ID NO: 73588 - DNA, 25 bp, SARS Virus
tcttgcacaacaaacacactgtttg

SEQ ID NO: 73589 - DNA, 25 bp, SARS Virus
cttgcacaacagacacactgtttgc

SEQ ID NO: 73590 - DNA, 25 bp, SARS Virus
ttgcacaacagaaacactgtttgca

SEQ ID NO: 73591 - DNA, 25 bp, SARS Virus
tgcacaacagacacactgtttgcac

SEQ ID NO: 73592 - DNA, 25 bp, SARS Virus
gcacaacagacaaactgtttgcacg

SEQ ID NO: 73593 - DNA, 25 bp, SARS Virus
cacaacagacacactgtttgcacgt

SEQ ID NO: 73594 - DNA, 25 bp, SARS Virus
acaacagacacaatgtttgcacgtt

SEQ ID NO: 73595 - DNA, 25 bp, SARS Virus
caacagacacacagtttgcacgttg

SEQ ID NO: 73596 - DNA, 25 bp, SARS Virus
aacagacacactatttgcacgttga

SEQ ID NO: 73597 - DNA, 25 bp, SARS Virus
acagacacactgattgcacgttgaa

SEQ ID NO: 73598 - DNA, 25 bp, SARS Virus
cagacacactgtatgcacgttgaac

SEQ ID NO: 73599 - DNA, 25 bp, SARS Virus
agacacactgttagcacgttgaacg

SEQ ID NO: 73600 - DNA, 25 bp, SARS Virus
gacacactgtttacacgttgaacga

SEQ ID NO: 73601 - DNA, 25 bp, SARS Virus
acacactgtttgaacgttgaacgaa

SEQ ID NO: 73602 - DNA, 25 bp, SARS Virus
cacactgtttgcacgttgaacgaaa

SEQ ID NO: 73603 - DNA, 25 bp, SARS Virus
acactgtttgcaagttgaacgaaaa

SEQ ID NO: 73604 - DNA, 25 bp, SARS Virus
cactgtttgcacattgaacgaaaag

SEQ ID NO: 73605 - DNA, 25 bp, SARS Virus
actgtttgcacgatgaacgaaaaga

SEQ ID NO: 73606 - DNA, 25 bp, SARS Virus
ctgtttgcacgtagaacgaaaagat

SEQ ID NO: 73607 - DNA, 25 bp, SARS Virus
tgtttgcacgttaaacgaaaagatg

SEQ ID NO: 73608 - DNA, 25 bp, SARS Virus
gtttgcacgttgaacgaaaagatga

SEQ ID NO: 73609 - DNA, 25 bp, SARS Virus
tttgcacgttgaacgaaaagatgaa

SEQ ID NO: 73610 - DNA, 25 bp, SARS Virus
ttgcacgttgaaagaaaagatgaag

SEQ ID NO: 73611 - DNA, 25 bp, SARS Virus
tgcacgttgaacaaaaagatgaagt

SEQ ID NO: 73612 - DNA, 25 bp, SARS Virus
gcacgttgaacgaaaagatgaagta

SEQ ID NO: 73613 - DNA, 25 bp, SARS Virus
cacgttgaacgaaaagatgaagtag

SEQ ID NO: 73614 - DNA, 25 bp, SARS Virus
acgttgaacgaaaagatgaagtagt

SEQ ID NO: 73615 - DNA, 25 bp, SARS Virus
cgttgaacgaaaagatgaagtagtc

SEQ ID NO: 73616 - DNA, 25 bp, SARS Virus
gttgaacgaaaaaatgaagtagtct

SEQ ID NO: 73617 - DNA, 25 bp, SARS Virus
ttgaacgaaaagatgaagtagtcta

SEQ ID NO: 73618 - DNA, 25 bp, SARS Virus
tgaacgaaaagaagaagtagtctat

SEQ ID NO: 73619 - DNA, 25 bp, SARS Virus
gaacgaaaagataaagtagtctatg

SEQ ID NO: 73620 - DNA, 25 bp, SARS Virus
aacgaaaagatgaagtagtctatga

SEQ ID NO: 73621 - DNA, 25 bp, SARS Virus
acgaaaagatgaagtagtctatgaa

SEQ ID NO: 73622 - DNA, 25 bp, SARS Virus
cgaaaagatgaaatagtctatgaat

SEQ ID NO: 73623 - DNA, 25 bp, SARS Virus
gaaaagatgaagaagtctatgaata

SEQ ID NO: 73624 - DNA, 25 bp, SARS Virus
aaaagatgaagtagtctatgaatac

SEQ ID NO: 73625 - DNA, 25 bp, SARS Virus
aaagatgaagtaatctatgaatacg

SEQ ID NO: 73626 - DNA, 25 bp, SARS Virus
aagatgaagtagactatgaatacgg

SEQ ID NO: 73627 - DNA, 25 bp, SARS Virus
agatgaagtagtatatgaatacgga

SEQ ID NO: 73628 - DNA, 25 bp, SARS Virus
gatgaagtagtcaatgaatacggac

SEQ ID NO: 73629 - DNA, 25 bp, SARS Virus
atgaagtagtctatgaatacggacg

SEQ ID NO: 73630 - DNA, 25 bp, SARS Virus
tgaagtagtctaagaatacggacga

SEQ ID NO: 73631 - DNA, 25 bp, SARS Virus
gaagtagtctataaatacggacgac

SEQ ID NO: 73632 - DNA, 25 bp, SARS Virus
aagtagtctatgaatacggacgacc

SEQ ID NO: 73633 - DNA, 25 bp, SARS Virus
agtagtctatgaatacggacgacct

SEQ ID NO: 73634 - DNA, 25 bp, SARS Virus
gtagtctatgaaaacggacgacctt

SEQ ID NO: 73635 - DNA, 25 bp, SARS Virus
tagtctatgaatacggacgacctta

SEQ ID NO: 73636 - DNA, 25 bp, SARS Virus
agtctatgaataaggacgaccttag

SEQ ID NO: 73637 - DNA, 25 bp, SARS Virus
gtctatgaatacagacgaccttagt

SEQ ID NO: 73638 - DNA, 25 bp, SARS Virus
tctatgaatacgaacgaccttagta

SEQ ID NO: 73639 - DNA, 25 bp, SARS Virus
ctatgaatacggacgaccttagtaa

SEQ ID NO: 73640 - DNA, 25 bp, SARS Virus
tatgaatacggaagaccttagtaag

SEQ ID NO: 73641 - DNA, 25 bp, SARS Virus
atgaatacggacaaccttagtaaga

SEQ ID NO: 73642 - DNA, 25 bp, SARS Virus
tgaatacggacgaccttagtaagac

SEQ ID NO: 73643 - DNA, 25 bp, SARS Virus
gaatacggacgaacttagtaagaca

SEQ ID NO: 73644 - DNA, 25 bp, SARS Virus
aatacggacgacattagtaagacac

SEQ ID NO: 73645 - DNA, 25 bp, SARS Virus
atacggacgaccatagtaagacacc

SEQ ID NO: 73646 - DNA, 25 bp, SARS Virus
tacggacgacctaagtaagacaccc

SEQ ID NO: 73647 - DNA, 25 bp, SARS Virus
acggacgaccttagtaagacaccca

SEQ ID NO: 73648 - DNA, 25 bp, SARS Virus
cggacgaccttaataagacacccaa

SEQ ID NO: 73649 - DNA, 25 bp, SARS Virus
ggacgaccttagaaagacacccaaa

SEQ ID NO: 73650 - DNA, 25 bp, SARS Virus
gacgaccttagtaagacacccaaaa

SEQ ID NO: 73651 - DNA, 25 bp, SARS Virus
acgaccttagtaagacacccaaaac

SEQ ID NO: 73652 - DNA, 25 bp, SARS Virus
cgaccttagtaaaacacccaaaact

SEQ ID NO: 73653 - DNA, 25 bp, SARS Virus
gaccttagtaagacacccaaaactg

SEQ ID NO: 73654 - DNA, 25 bp, SARS Virus
accttagtaagaaacccaaaactga

SEQ ID NO: 73655 - DNA, 25 bp, SARS Virus
ccttagtaagacacccaaaactgat

SEQ ID NO: 73656 - DNA, 25 bp, SARS Virus
cttagtaagacaaccaaaactgata

SEQ ID NO: 73657 - DNA, 25 bp, SARS Virus
ttagtaagacacacaaaactgatac

SEQ ID NO: 73658 - DNA, 25 bp, SARS Virus
tagtaagacaccaaaaactgataca

SEQ ID NO: 73659 - DNA, 25 bp, SARS Virus
agtaagacacccaaaactgatacag

SEQ ID NO: 73660 - DNA, 25 bp, SARS Virus
gtaagacacccaaaactgatacaga

SEQ ID NO: 73661 - DNA, 25 bp, SARS Virus
taagacacccaaaactgatacagat

SEQ ID NO: 73662 - DNA, 25 bp, SARS Virus
aagacacccaaaactgatacagata

SEQ ID NO: 73663 - DNA, 25 bp, SARS Virus
agacacccaaaaatgatacagatat

SEQ ID NO: 73664 - DNA, 25 bp, SARS Virus
gacacccaaaacagatacagatatt

SEQ ID NO: 73665 - DNA, 25 bp, SARS Virus
acacccaaaactaatacagatattg

SEQ ID NO: 73666 - DNA, 25 bp, SARS Virus
cacccaaaactgatacagatattgg

SEQ ID NO: 73667 - DNA, 25 bp, SARS Virus
acccaaaactgaaacagatattggg

SEQ ID NO: 73668 - DNA, 25 bp, SARS Virus
cccaaaactgatacagatattgggt

SEQ ID NO: 73669 - DNA, 25 bp, SARS Virus
ccaaaactgataaagatattgggta

SEQ ID NO: 73670 - DNA, 25 bp, SARS Virus
caaaactgatacagatattgggtaa

SEQ ID NO: 73671 - DNA, 25 bp, SARS Virus
aaaactgatacaaatattgggtaaa

SEQ ID NO: 73672 - DNA, 25 bp, SARS Virus
aaactgatacagatattgggtaaat

SEQ ID NO: 73673 - DNA, 25 bp, SARS Virus
aactgatacagaaattgggtaaata

SEQ ID NO: 73674 - DNA, 25 bp, SARS Virus
actgatacagatattgggtaaatac

SEQ ID NO: 73675 - DNA, 25 bp, SARS Virus
ctgatacagataatgggtaaatact

SEQ ID NO: 73676 - DNA, 25 bp, SARS Virus
tgatacagatatagggtaaatacta

SEQ ID NO: 73677 - DNA, 25 bp, SARS Virus
gatacagatattaggtaaatactaa

SEQ ID NO: 73678 - DNA, 25 bp, SARS Virus
atacagatattgagtaaatactaac

SEQ ID NO: 73679 - DNA, 25 bp, SARS Virus
tacagatattggataaatactaact

SEQ ID NO: 73680 - DNA, 25 bp, SARS Virus
acagatattgggaaaatactaacta

SEQ ID NO: 73681 - DNA, 25 bp, SARS Virus
cagatattgggtaaatactaactac

SEQ ID NO: 73682 - DNA, 25 bp, SARS Virus
agatattgggtaaatactaactaca

SEQ ID NO: 73683 - DNA, 25 bp, SARS Virus
gatattgggtaaatactaactacaa

SEQ ID NO: 73684 - DNA, 25 bp, SARS Virus
atattgggtaaaaactaactacaag

SEQ ID NO: 73685 - DNA, 25 bp, SARS Virus
tattgggtaaatactaactacaagt

SEQ ID NO: 73686 - DNA, 25 bp, SARS Virus
attgggtaaataataactacaagtc

SEQ ID NO: 73687 - DNA, 25 bp, SARS Virus
ttgggtaaatacaaactacaagtcg

SEQ ID NO: 73688 - DNA, 25 bp, SARS Virus
tgggtaaatactaactacaagtcgt

SEQ ID NO: 73689 - DNA, 25 bp, SARS Virus
gggtaaatactaactacaagtcgtc

SEQ ID NO: 73690 - DNA, 25 bp, SARS Virus
ggtaaatactaaatacaagtcgtca

SEQ ID NO: 73691 - DNA, 25 bp, SARS Virus
gtaaatactaacaacaagtcgtcac

SEQ ID NO: 73692 - DNA, 25 bp, SARS Virus
taaatactaactacaagtcgtcacc

SEQ ID NO: 73693 - DNA, 25 bp, SARS Virus
aaatactaactaaaagtcgtcaccc

SEQ ID NO: 73694 - DNA, 25 bp, SARS Virus
aatactaactacaagtcgtcacccc

SEQ ID NO: 73695 - DNA, 25 bp, SARS Virus
atactaactacaagtcgtcaccccg

SEQ ID NO: 73696 - DNA, 25 bp, SARS Virus
tactaactacaaatcgtcaccccga

SEQ ID NO: 73697 - DNA, 25 bp, SARS Virus
actaactacaagacgtcaccccgaa

SEQ ID NO: 73698 - DNA, 25 bp, SARS Virus
ctaactacaagtagtcaccccgaaa

SEQ ID NO: 73699 - DNA, 25 bp, SARS Virus
taactacaagtcatcaccccgaaat

SEQ ID NO: 73700 - DNA, 25 bp, SARS Virus
aactacaagtcgacaccccgaaatg

SEQ ID NO: 73701 - DNA, 25 bp, SARS Virus
actacaagtcgtaaccccgaaatgc

SEQ ID NO: 73702 - DNA, 25 bp, SARS Virus
ctacaagtcgtcaccccgaaatgcc

SEQ ID NO: 73703 - DNA, 25 bp, SARS Virus
tacaagtcgtcaacccgaaatgccc

SEQ ID NO: 73704 - DNA, 25 bp, SARS Virus
acaagtcgtcacaccgaaatgccca

SEQ ID NO: 73705 - DNA, 25 bp, SARS Virus
caagtcgtcaccacgaaatgcccat

SEQ ID NO: 73706 - DNA, 25 bp, SARS Virus
aagtcgtcacccagaaatgcccatt

SEQ ID NO: 73707 - DNA, 25 bp, SARS Virus
agtcgtcaccccaaaatgcccattg

SEQ ID NO: 73708 - DNA, 25 bp, SARS Virus
gtcgtcaccccgaaatgcccattgg

SEQ ID NO: 73709 - DNA, 25 bp, SARS Virus
tcgtcaccccgaaatgcccattgga

SEQ ID NO: 73710 - DNA, 25 bp, SARS Virus
cgtcaccccgaaatgcccattggaa

SEQ ID NO: 73711 - DNA, 25 bp, SARS Virus
gtcaccccgaaaagcccattggaag

SEQ ID NO: 73712 - DNA, 25 bp, SARS Virus
tcaccccgaaatacccattggaagt

SEQ ID NO: 73713 - DNA, 25 bp, SARS Virus
caccccgaaatgaccattggaagtc

SEQ ID NO: 73714 - DNA, 25 bp, SARS Virus
accccgaaatgcacattggaagtct

SEQ ID NO: 73715 - DNA, 25 bp, SARS Virus
ccccgaaatgccaattggaagtctc

SEQ ID NO: 73716 - DNA, 25 bp, SARS Virus
cccgaaatgcccattggaagtctca

SEQ ID NO: 73717 - DNA, 25 bp, SARS Virus
ccgaaatgcccaatggaagtctcat

SEQ ID NO: 73718 - DNA, 25 bp, SARS Virus
cgaaatgcccataggaagtctcatt

SEQ ID NO: 73719 - DNA, 25 bp, SARS Virus
gaaatgcccattagaagtctcattg

SEQ ID NO: 73720 - DNA, 25 bp, SARS Virus
aaatgcccattgaaagtctcattgg

SEQ ID NO: 73721 - DNA, 25 bp, SARS Virus
aatgcccattggaagtctcattggt

SEQ ID NO: 73722 - DNA, 25 bp, SARS Virus
atgcccattggaagtctcattggta

SEQ ID NO: 73723 - DNA, 25 bp, SARS Virus
tgcccattggaaatctcattggtac

SEQ ID NO: 73724 - DNA, 25 bp, SARS Virus
gcccattggaagactcattggtact

SEQ ID NO: 73725 - DNA, 25 bp, SARS Virus
cccattggaagtatcattggtactg

SEQ ID NO: 73726 - DNA, 25 bp, SARS Virus
ccattggaagtcacattggtactgg

SEQ ID NO: 73727 - DNA, 25 bp, SARS Virus
cattggaagtctaattggtactggt

SEQ ID NO: 73728 - DNA, 25 bp, SARS Virus
attggaagtctcattggtactggtt

SEQ ID NO: 73729 - DNA, 25 bp, SARS Virus
ttggaagtctcaatggtactggttg

SEQ ID NO: 73730 - DNA, 25 bp, SARS Virus
tggaagtctcataggtactggttgt

SEQ ID NO: 73731 - DNA, 25 bp, SARS Virus
ggaagtctcattagtactggttgta

SEQ ID NO: 73732 - DNA, 25 bp, SARS Virus
gaagtctcattgatactggttgtaa

SEQ ID NO: 73733 - DNA, 25 bp, SARS Virus
aagtctcattggaactggttgtaac

SEQ ID NO: 73734 - DNA, 25 bp, SARS Virus
agtctcattggtactggttgtaacg

SEQ ID NO: 73735 - DNA, 25 bp, SARS Virus
gtctcattggtaatggttgtaacgg

SEQ ID NO: 73736 - DNA, 25 bp, SARS Virus
tctcattggtacaggttgtaacggt

SEQ ID NO: 73737 - DNA, 25 bp, SARS Virus
ctcattggtactagttgtaacggtc

SEQ ID NO: 73738 - DNA, 25 bp, SARS Virus
tcattggtactgattgtaacggtcc

SEQ ID NO: 73739 - DNA, 25 bp, SARS Virus
cattggtactggatgtaacggtcca

SEQ ID NO: 73740 - DNA, 25 bp, SARS Virus
attggtactggtagtaacggtccat

SEQ ID NO: 73741 - DNA, 25 bp, SARS Virus
ttggtactggttataacggtccatg

SEQ ID NO: 73742 - DNA, 25 bp, SARS Virus
tggtactggttgaaacggtccatgt

SEQ ID NO: 73743 - DNA, 25 bp, SARS Virus
ggtactggttgtaacggtccatgta

SEQ ID NO: 73744 - DNA, 25 bp, SARS Virus
gtactggttgtaacggtccatgtac

SEQ ID NO: 73745 - DNA, 25 bp, SARS Virus
tactggttgtaaaggtccatgtacc

SEQ ID NO: 73746 - DNA, 25 bp, SARS Virus
actggttgtaacagtccatgtacct

SEQ ID NO: 73747 - DNA, 25 bp, SARS Virus
ctggttgtaacgatccatgtacctt

SEQ ID NO: 73748 - DNA, 25 bp, SARS Virus
tggttgtaacggaccatgtaccttt

SEQ ID NO: 73749 - DNA, 25 bp, SARS Virus
ggttgtaacggtacatgtaccttta

SEQ ID NO: 73750 - DNA, 25 bp, SARS Virus
gttgtaacggtcaatgtacctttac

SEQ ID NO: 73751 - DNA, 25 bp, SARS Virus
ttgtaacggtccatgtacctttacg

SEQ ID NO: 73752 - DNA, 25 bp, SARS Virus
tgtaacggtccaagtacctttacgt

SEQ ID NO: 73753 - DNA, 25 bp, SARS Virus
gtaacggtccatatacctttacgtg

SEQ ID NO: 73754 - DNA, 25 bp, SARS Virus
taacggtccatgaacctttacgtgt

SEQ ID NO: 73755 - DNA, 25 bp, SARS Virus
aacggtccatgtacctttacgtgta

SEQ ID NO: 73756 - DNA, 25 bp, SARS Virus
acggtccatgtaactttacgtgtac

SEQ ID NO: 73757 - DNA, 25 bp, SARS Virus
cggtccatgtacatttacgtgtaca

SEQ ID NO: 73758 - DNA, 25 bp, SARS Virus
ggtccatgtaccattacgtgtacac

SEQ ID NO: 73759 - DNA, 25 bp, SARS Virus
gtccatgtacctatacgtgtacacc

SEQ ID NO: 73760 - DNA, 25 bp, SARS Virus
tccatgtaccttaacgtgtacaccg

SEQ ID NO: 73761 - DNA, 25 bp, SARS Virus
ccatgtacctttacgtgtacaccga

SEQ ID NO: 73762 - DNA, 25 bp, SARS Virus
catgtacctttaagtgtacaccgat

SEQ ID NO: 73763 - DNA, 25 bp, SARS Virus
atgtacctttacatgtacaccgatc

SEQ ID NO: 73764 - DNA, 25 bp, SARS Virus
tgtacctttacgagtacaccgatca

SEQ ID NO: 73765 - DNA, 25 bp, SARS Virus
gtacctttacgtatacaccgatcaa

SEQ ID NO: 73766 - DNA, 25 bp, SARS Virus
tacctttacgtgaacaccgatcaac

SEQ ID NO: 73767 - DNA, 25 bp, SARS Virus
acctttacgtgtacaccgatcaaca

SEQ ID NO: 73768 - DNA, 25 bp, SARS Virus
cctttacgtgtaaaccgatcaacac

SEQ ID NO: 73769 - DNA, 25 bp, SARS Virus
ctttacgtgtacaccgatcaacact

SEQ ID NO: 73770 - DNA, 25 bp, SARS Virus
tttacgtgtacaacgatcaacacta

SEQ ID NO: 73771 - DNA, 25 bp, SARS Virus
ttacgtgtacacagatcaacactac

SEQ ID NO: 73772 - DNA, 25 bp, SARS Virus
tacgtgtacaccaatcaacactacg

SEQ ID NO: 73773 - DNA, 25 bp, SARS Virus
acgtgtacaccgatcaacactacga

SEQ ID NO: 73774 - DNA, 25 bp, SARS Virus
cgtgtacaccgaacaacactacgat

SEQ ID NO: 73775 - DNA, 25 bp, SARS Virus
gtgtacaccgataaacactacgata

SEQ ID NO: 73776 - DNA, 25 bp, SARS Virus
tgtacaccgatcaacactacgatag

SEQ ID NO: 73777 - DNA, 25 bp, SARS Virus
gtacaccgatcaacactacgatagt

SEQ ID NO: 73778 - DNA, 25 bp, SARS Virus
tacaccgatcaaaactacgatagta

SEQ ID NO: 73779 - DNA, 25 bp, SARS Virus
acaccgatcaacactacgatagtac

SEQ ID NO: 73780 - DNA, 25 bp, SARS Virus
caccgatcaacaatacgatagtact

SEQ ID NO: 73781 - DNA, 25 bp, SARS Virus
accgatcaacacaacgatagtactg

SEQ ID NO: 73782 - DNA, 25 bp, SARS Virus
ccgatcaacactacgatagtactga

SEQ ID NO: 73783 - DNA, 25 bp, SARS Virus
cgatcaacactaagatagtactgat

SEQ ID NO: 73784 - DNA, 25 bp, SARS Virus
gatcaacactacaatagtactgatc

SEQ ID NO: 73785 - DNA, 25 bp, SARS Virus
atcaacactacgatagtactgatct

SEQ ID NO: 73786 - DNA, 25 bp, SARS Virus
tcaacactacgaaagtactgatcta

SEQ ID NO: 73787 - DNA, 25 bp, SARS Virus
caacactacgatagtactgatctac

SEQ ID NO: 73788 - DNA, 25 bp, SARS Virus
aacactacgataatactgatctaca

SEQ ID NO: 73789 - DNA, 25 bp, SARS Virus
acactacgatagaactgatctacaa

SEQ ID NO: 73790 - DNA, 25 bp, SARS Virus
cactacgatagtactgatctacaaa

SEQ ID NO: 73791 - DNA, 25 bp, SARS Virus
actacgatagtaatgatctacaaat

SEQ ID NO: 73792 - DNA, 25 bp, SARS Virus
ctacgatagtacagatctacaaatc

SEQ ID NO: 73793 - DNA, 25 bp, SARS Virus
tacgatagtactaatctacaaatcg

SEQ ID NO: 73794 - DNA, 25 bp, SARS Virus
acgatagtactgatctacaaatcgt

SEQ ID NO: 73795 - DNA, 25 bp, SARS Virus
cgatagtactgaactacaaatcgtc

SEQ ID NO: 73796 - DNA, 25 bp, SARS Virus
gatagtactgatatacaaatcgtca

SEQ ID NO: 73797 - DNA, 25 bp, SARS Virus
atagtactgatcaacaaatcgtcag

SEQ ID NO: 73798 - DNA, 25 bp, SARS Virus
tagtactgatctacaaatcgtcagg

SEQ ID NO: 73799 - DNA, 25 bp, SARS Virus
agtactgatctaaaaatcgtcaggt

SEQ ID NO: 73800 - DNA, 25 bp, SARS Virus
gtactgatctacaaatcgtcaggta

SEQ ID NO: 73801 - DNA, 25 bp, SARS Virus
tactgatctacaaatcgtcaggtac

SEQ ID NO: 73802 - DNA, 25 bp, SARS Virus
actgatctacaaatcgtcaggtact

SEQ ID NO: 73803 - DNA, 25 bp, SARS Virus
ctgatctacaaaacgtcaggtactc

SEQ ID NO: 73804 - DNA, 25 bp, SARS Virus
tgatctacaaatagtcaggtactca

SEQ ID NO: 73805 - DNA, 25 bp, SARS Virus
gatctacaaatcatcaggtactcac

SEQ ID NO: 73806 - DNA, 25 bp, SARS Virus
atctacaaatcgacaggtactcacg

SEQ ID NO: 73807 - DNA, 25 bp, SARS Virus
tctacaaatcgtaaggtactcacga

SEQ ID NO: 73808 - DNA, 25 bp, SARS Virus
ctacaaatcgtcaggtactcacgaa

SEQ ID NO: 73809 - DNA, 25 bp, SARS Virus
tacaaatcgtcaagtactcacgaaa

SEQ ID NO: 73810 - DNA, 25 bp, SARS Virus
acaaatcgtcagatactcacgaaac

SEQ ID NO: 73811 - DNA, 25 bp, SARS Virus
caaatcgtcaggaactcacgaaaca

SEQ ID NO: 73812 - DNA, 25 bp, SARS Virus
aaatcgtcaggtactcacgaaacaa

SEQ ID NO: 73813 - DNA, 25 bp, SARS Virus
aatcgtcaggtaatcacgaaacaat

SEQ ID NO: 73814 - DNA, 25 bp, SARS Virus
atcgtcaggtacacacgaaacaatt

SEQ ID NO: 73815 - DNA, 25 bp, SARS Virus
tcgtcaggtactaacgaaacaattc

SEQ ID NO: 73816 - DNA, 25 bp, SARS Virus
cgtcaggtactcacgaaacaattcg

SEQ ID NO: 73817 - DNA, 25 bp, SARS Virus
tcgacatggctgcccaatacaactg

SEQ ID NO: 73818 - DNA, 25 bp, SARS Virus
cgacatggctgaccaatacaactgt

SEQ ID NO: 73819 - DNA, 25 bp, SARS Virus
gacatggctgaccaatacaactgtg

SEQ ID NO: 73820 - DNA, 25 bp, SARS Virus
acatggctgacccatacaactgtga

SEQ ID NO: 73821 - DNA, 25 bp, SARS Virus
catggctgaccactacaactgtgac

SEQ ID NO: 73822 - DNA, 25 bp, SARS Virus
atggctgaccaacacaactgtgact

SEQ ID NO: 73823 - DNA, 25 bp, SARS Virus
tggctgaccaatccaactgtgactt

SEQ ID NO: 73824 - DNA, 25 bp, SARS Virus
ggctgaccaatacaactgtgacttt

SEQ ID NO: 73825 - DNA, 25 bp, SARS Virus
gctgaccaataccactgtgactttt

SEQ ID NO: 73826 - DNA, 25 bp, SARS Virus
ctgaccaatacacctgtgactttta

SEQ ID NO: 73827 - DNA, 25 bp, SARS Virus
tgaccaatacaactgtgacttttat

SEQ ID NO: 73828 - DNA, 25 bp, SARS Virus
gaccaatacaaccgtgacttttatt

SEQ ID NO: 73829 - DNA, 25 bp, SARS Virus
accaatacaactctgacttttattg

SEQ ID NO: 73830 - DNA, 25 bp, SARS Virus
ccaatacaactgcgacttttattgt

SEQ ID NO: 73831 - DNA, 25 bp, SARS Virus
caatacaactgtcacttttattgtg

SEQ ID NO: 73832 - DNA, 25 bp, SARS Virus
aatacaactgtgccttttattgtgt

SEQ ID NO: 73833 - DNA, 25 bp, SARS Virus
atacaactgtgacttttattgtgtc

SEQ ID NO: 73834 - DNA, 25 bp, SARS Virus
tacaactgtgacctttattgtgtct

SEQ ID NO: 73835 - DNA, 25 bp, SARS Virus
acaactgtgactcttattgtgtctt

SEQ ID NO: 73836 - DNA, 25 bp, SARS Virus
caactgtgacttctattgtgtctta

SEQ ID NO: 73837 - DNA, 25 bp, SARS Virus
aactgtgactttcattgtgtcttaa

SEQ ID NO: 73838 - DNA, 25 bp, SARS Virus
actgtgacttttcttgtgtcttaag

SEQ ID NO: 73839 - DNA, 25 bp, SARS Virus
ctgtgacttttactgtgtcttaagt

SEQ ID NO: 73840 - DNA, 25 bp, SARS Virus
tgtgacttttatcgtgtcttaagtg

SEQ ID NO: 73841 - DNA, 25 bp, SARS Virus
gtgacttttattctgtcttaagtgg

SEQ ID NO: 73842 - DNA, 25 bp, SARS Virus
tgacttttattgcgtcttaagtggt

SEQ ID NO: 73843 - DNA, 25 bp, SARS Virus
gacttttattgtctcttaagtggtc

SEQ ID NO: 73844 - DNA, 25 bp, SARS Virus
acttttattgtgccttaagtggtct

SEQ ID NO: 73845 - DNA, 25 bp, SARS Virus
cttttattgtgtcttaagtggtctc

SEQ ID NO: 73846 - DNA, 25 bp, SARS Virus
ttttattgtgtcctaagtggtctca

SEQ ID NO: 73847 - DNA, 25 bp, SARS Virus
tttattgtgtctcaagtggtctcaa

SEQ ID NO: 73848 - DNA, 25 bp, SARS Virus
ttattgtgtcttcagtggtctcaat

SEQ ID NO: 73849 - DNA, 25 bp, SARS Virus
tattgtgtcttacgtggtctcaatt

SEQ ID NO: 73850 - DNA, 25 bp, SARS Virus
attgtgtcttaactggtctcaatta

SEQ ID NO: 73851 - DNA, 25 bp, SARS Virus
ttgtgtcttaagcggtctcaattac

SEQ ID NO: 73852 - DNA, 25 bp, SARS Virus
tgtgtcttaagtcgtctcaattacg

SEQ ID NO: 73853 - DNA, 25 bp, SARS Virus
gtgtcttaagtgctctcaattacgt

SEQ ID NO: 73854 - DNA, 25 bp, SARS Virus
tgtcttaagtggcctcaattacgtt

SEQ ID NO: 73855 - DNA, 25 bp, SARS Virus
gtcttaagtggtctcaattacgttt

SEQ ID NO: 73856 - DNA, 25 bp, SARS Virus
tcttaagtggtcccaattacgtttt

SEQ ID NO: 73857 - DNA, 25 bp, SARS Virus
cttaagtggtctcaattacgttttg

SEQ ID NO: 73858 - DNA, 25 bp, SARS Virus
ttaagtggtctccattacgttttgg

SEQ ID NO: 73859 - DNA, 25 bp, SARS Virus
taagtggtctcacttacgttttgga

SEQ ID NO: 73860 - DNA, 25 bp, SARS Virus
aagtggtctcaactacgttttggag

SEQ ID NO: 73861 - DNA, 25 bp, SARS Virus
agtggtctcaatcacgttttggagg

SEQ ID NO: 73862 - DNA, 25 bp, SARS Virus
gtggtctcaattccgttttggaggt

SEQ ID NO: 73863 - DNA, 25 bp, SARS Virus
tggtctcaattacgttttggaggtg

SEQ ID NO: 73864 - DNA, 25 bp, SARS Virus
ggtctcaattaccttttggaggtgg

SEQ ID NO: 73865 - DNA, 25 bp, SARS Virus
gtctcaattacgctttggaggtggt

SEQ ID NO: 73866 - DNA, 25 bp, SARS Virus
tctcaattacgtcttggaggtggtc

SEQ ID NO: 73867 - DNA, 25 bp, SARS Virus
ctcaattacgttctggaggtggtcc

SEQ ID NO: 73868 - DNA, 25 bp, SARS Virus
tcaattacgtttcggaggtggtcca

SEQ ID NO: 73869 - DNA, 25 bp, SARS Virus
caattacgttttcgaggtggtccac

SEQ ID NO: 73870 - DNA, 25 bp, SARS Virus
aattacgttttgcaggtggtccact

SEQ ID NO: 73871 - DNA, 25 bp, SARS Virus
attacgttttggcggtggtccactg

SEQ ID NO: 73872 - DNA, 25 bp, SARS Virus
ttacgttttggacgtggtccactgg

SEQ ID NO: 73873 - DNA, 25 bp, SARS Virus
tacgttttggagctggtccactggt

SEQ ID NO: 73874 - DNA, 25 bp, SARS Virus
acgttttggaggcggtccactggtc

SEQ ID NO: 73875 - DNA, 25 bp, SARS Virus
cgttttggaggtcgtccactggtca

SEQ ID NO: 73876 - DNA, 25 bp, SARS Virus
gttttggaggtgctccactggtcaa

SEQ ID NO: 73877 - DNA, 25 bp, SARS Virus
ttttggaggtggcccactggtcaaa

SEQ ID NO: 73878 - DNA, 25 bp, SARS Virus
tttggaggtggtccactggtcaaat

SEQ ID NO: 73879 - DNA, 25 bp, SARS Virus
ttggaggtggtccactggtcaaatt

SEQ ID NO: 73880 - DNA, 25 bp, SARS Virus
tggaggtggtcccctggtcaaattt

SEQ ID NO: 73881 - DNA, 25 bp, SARS Virus
ggaggtggtccactggtcaaatttg

SEQ ID NO: 73882 - DNA, 25 bp, SARS Virus
gaggtggtccaccggtcaaatttgt

SEQ ID NO: 73883 - DNA, 25 bp, SARS Virus
aggtggtccactcgtcaaatttgta

SEQ ID NO: 73884 - DNA, 25 bp, SARS Virus
ggtggtccactgctcaaatttgtag

SEQ ID NO: 73885 - DNA, 25 bp, SARS Virus
gtggtccactggccaaatttgtaga

SEQ ID NO: 73886 - DNA, 25 bp, SARS Virus
tggtccactggtcaaatttgtagaa

SEQ ID NO: 73887 - DNA, 25 bp, SARS Virus
ggtccactggtccaatttgtagaat

SEQ ID NO: 73888 - DNA, 25 bp, SARS Virus
gtccactggtcacatttgtagaata

SEQ ID NO: 73889 - DNA, 25 bp, SARS Virus
tccactggtcaactttgtagaatat

SEQ ID NO: 73890 - DNA, 25 bp, SARS Virus
ccactggtcaaacttgtagaatatg

SEQ ID NO: 73891 - DNA, 25 bp, SARS Virus
cactggtcaaatctgtagaatatgg

SEQ ID NO: 73892 - DNA, 25 bp, SARS Virus
actggtcaaattcgtagaatatggt

SEQ ID NO: 73893 - DNA, 25 bp, SARS Virus
ctggtcaaatttctagaatatggtg

SEQ ID NO: 73894 - DNA, 25 bp, SARS Virus
tggtcaaatttgcagaatatggtga

SEQ ID NO: 73895 - DNA, 25 bp, SARS Virus
ggtcaaatttgtcgaatatggtgag

SEQ ID NO: 73896 - DNA, 25 bp, SARS Virus
gtcaaatttgtacaatatggtgagt

SEQ ID NO: 73897 - DNA, 25 bp, SARS Virus
tcaaatttgtagcatatggtgagta

SEQ ID NO: 73898 - DNA, 25 bp, SARS Virus
caaatttgtagactatggtgagtac

SEQ ID NO: 73899 - DNA, 25 bp, SARS Virus
aaatttgtagaacatggtgagtaca

SEQ ID NO: 73900 - DNA, 25 bp, SARS Virus
aatttgtagaatctggtgagtacat

SEQ ID NO: 73901 - DNA, 25 bp, SARS Virus
atttgtagaatacggtgagtacata

SEQ ID NO: 73902 - DNA, 25 bp, SARS Virus
tttgtagaatatcgtgagtacatat

SEQ ID NO: 73903 - DNA, 25 bp, SARS Virus
ttgtagaatatgctgagtacatatt

SEQ ID NO: 73904 - DNA, 25 bp, SARS Virus
tgtagaatatggcgagtacatattt

SEQ ID NO: 73905 - DNA, 25 bp, SARS Virus
gtagaatatggtcagtacatatttc

SEQ ID NO: 73906 - DNA, 25 bp, SARS Virus
tagaatatggtgcgtacatatttcc

SEQ ID NO: 73907 - DNA, 25 bp, SARS Virus
agaatatggtgactacatatttccg

SEQ ID NO: 73908 - DNA, 25 bp, SARS Virus
gaatatggtgagcacatatttccga

SEQ ID NO: 73909 - DNA, 25 bp, SARS Virus
aatatggtgagtccatatttccgaa

SEQ ID NO: 73910 - DNA, 25 bp, SARS Virus
atatggtgagtacatatttccgaac

SEQ ID NO: 73911 - DNA, 25 bp, SARS Virus
tatggtgagtacctatttccgaacg

SEQ ID NO: 73912 - DNA, 25 bp, SARS Virus
atggtgagtacacatttccgaacgg

SEQ ID NO: 73913 - DNA, 25 bp, SARS Virus
tggtgagtacatctttccgaacggg

SEQ ID NO: 73914 - DNA, 25 bp, SARS Virus
ggtgagtacatacttccgaacggga

SEQ ID NO: 73915 - DNA, 25 bp, SARS Virus
gtgagtacatatctccgaacgggac

SEQ ID NO: 73916 - DNA, 25 bp, SARS Virus
tgagtacatattcccgaacgggacc

SEQ ID NO: 73917 - DNA, 25 bp, SARS Virus
gagtacatatttccgaacgggacct

SEQ ID NO: 73918 - DNA, 25 bp, SARS Virus
agtacatatttccgaacgggacctt

SEQ ID NO: 73919 - DNA, 25 bp, SARS Virus
gtacatatttcccaacgggacctta

SEQ ID NO: 73920 - DNA, 25 bp, SARS Virus
tacatatttccgcacgggaccttac

SEQ ID NO: 73921 - DNA, 25 bp, SARS Virus
acatatttccgaccgggaccttaca

SEQ ID NO: 73922 - DNA, 25 bp, SARS Virus
catatttccgaacgggaccttacat

SEQ ID NO: 73923 - DNA, 25 bp, SARS Virus
atatttccgaaccggaccttacatc

SEQ ID NO: 73924 - DNA, 25 bp, SARS Virus
tatttccgaacgcgaccttacatca

SEQ ID NO: 73925 - DNA, 25 bp, SARS Virus
atttccgaacggcaccttacatcac

SEQ ID NO: 73926 - DNA, 25 bp, SARS Virus
tttccgaacgggcccttacatcacg

SEQ ID NO: 73927 - DNA, 25 bp, SARS Virus
ttccgaacgggaccttacatcacgc

SEQ ID NO: 73928 - DNA, 25 bp, SARS Virus
tccgaacgggaccttacatcacgca

SEQ ID NO: 73929 - DNA, 25 bp, SARS Virus
ccgaacgggaccctacatcacgcat

SEQ ID NO: 73930 - DNA, 25 bp, SARS Virus
cgaacgggacctcacatcacgcata

SEQ ID NO: 73931 - DNA, 25 bp, SARS Virus
gaacgggaccttccatcacgcataa

SEQ ID NO: 73932 - DNA, 25 bp, SARS Virus
aacgggaccttacatcacgcataat

SEQ ID NO: 73933 - DNA, 25 bp, SARS Virus
acgggaccttacctcacgcataatt

SEQ ID NO: 73934 - DNA, 25 bp, SARS Virus
cgggaccttacaccacgcataattc

SEQ ID NO: 73935 - DNA, 25 bp, SARS Virus
gggaccttacatcacgcataattct

SEQ ID NO: 73936 - DNA, 25 bp, SARS Virus
ggaccttacatcccgcataattcta

SEQ ID NO: 73937 - DNA, 25 bp, SARS Virus
gaccttacatcacgcataattctat

SEQ ID NO: 73938 - DNA, 25 bp, SARS Virus
accttacatcacccataattctatc

SEQ ID NO: 73939 - DNA, 25 bp, SARS Virus
ccttacatcacgcataattctatca

SEQ ID NO: 73940 - DNA, 25 bp, SARS Virus
cttacatcacgcctaattctatcat

SEQ ID NO: 73941 - DNA, 25 bp, SARS Virus
ttacatcacgcacaattctatcatg

SEQ ID NO: 73942 - DNA, 25 bp, SARS Virus
tacatcacgcatcattctatcatgt

SEQ ID NO: 73943 - DNA, 25 bp, SARS Virus
acatcacgcatacttctatcatgtt

SEQ ID NO: 73944 - DNA, 25 bp, SARS Virus
catcacgcataactctatcatgttt

SEQ ID NO: 73945 - DNA, 25 bp, SARS Virus
atcacgcataatcctatcatgttta

SEQ ID NO: 73946 - DNA, 25 bp, SARS Virus
tcacgcataattctatcatgtttac

SEQ ID NO: 73947 - DNA, 25 bp, SARS Virus
cacgcataattccatcatgtttacg

SEQ ID NO: 73948 - DNA, 25 bp, SARS Virus
acgcataattctctcatgtttacga

SEQ ID NO: 73949 - DNA, 25 bp, SARS Virus
cgcataattctaccatgtttacgag

SEQ ID NO: 73950 - DNA, 25 bp, SARS Virus
gcataattctatcatgtttacgagt

SEQ ID NO: 73951 - DNA, 25 bp, SARS Virus
cataattctatcctgtttacgagtc

SEQ ID NO: 73952 - DNA, 25 bp, SARS Virus
ataattctatcacgtttacgagtca

SEQ ID NO: 73953 - DNA, 25 bp, SARS Virus
taattctatcatctttacgagtcac

SEQ ID NO: 73954 - DNA, 25 bp, SARS Virus
aattctatcatgcttacgagtcact

SEQ ID NO: 73955 - DNA, 25 bp, SARS Virus
attctatcatgtctacgagtcacta

SEQ ID NO: 73956 - DNA, 25 bp, SARS Virus
ttctatcatgttcacgagtcactat

SEQ ID NO: 73957 - DNA, 25 bp, SARS Virus
tctatcatgtttccgagtcactatg

SEQ ID NO: 73958 - DNA, 25 bp, SARS Virus
ctatcatgtttacgagtcactatgt

SEQ ID NO: 73959 - DNA, 25 bp, SARS Virus
tatcatgtttaccagtcactatgtg

SEQ ID NO: 73960 - DNA, 25 bp, SARS Virus
atcatgtttacgcgtcactatgtga

SEQ ID NO: 73961 - DNA, 25 bp, SARS Virus
tcatgtttacgactcactatgtgac

SEQ ID NO: 73962 - DNA, 25 bp, SARS Virus
catgtttacgagccactatgtgact

SEQ ID NO: 73963 - DNA, 25 bp, SARS Virus
atgtttacgagtcactatgtgactt

SEQ ID NO: 73964 - DNA, 25 bp, SARS Virus
tgtttacgagtccctatgtgacttt

SEQ ID NO: 73965 - DNA, 25 bp, SARS Virus
gtttacgagtcactatgtgactttc

SEQ ID NO: 73966 - DNA, 25 bp, SARS Virus
tttacgagtcaccatgtgactttcc

SEQ ID NO: 73967 - DNA, 25 bp, SARS Virus
ttacgagtcactctgtgactttcct

SEQ ID NO: 73968 - DNA, 25 bp, SARS Virus
tacgagtcactacgtgactttccta

SEQ ID NO: 73969 - DNA, 25 bp, SARS Virus
acgagtcactatctgactttcctaa

SEQ ID NO: 73970 - DNA, 25 bp, SARS Virus
cgagtcactatgcgactttcctaac

SEQ ID NO: 73971 - DNA, 25 bp, SARS Virus
gagtcactatgtcactttcctaaca

SEQ ID NO: 73972 - DNA, 25 bp, SARS Virus
agtcactatgtgcctttcctaacag

SEQ ID NO: 73973 - DNA, 25 bp, SARS Virus
gtcactatgtgactttcctaacagt

SEQ ID NO: 73974 - DNA, 25 bp, SARS Virus
tcactatgtgaccttcctaacagtc

SEQ ID NO: 73975 - DNA, 25 bp, SARS Virus
cactatgtgactctcctaacagtct

SEQ ID NO: 73976 - DNA, 25 bp, SARS Virus
actatgtgacttccctaacagtctg

SEQ ID NO: 73977 - DNA, 25 bp, SARS Virus
ctatgtgactttcctaacagtctgt

SEQ ID NO: 73978 - DNA, 25 bp, SARS Virus
tatgtgactttcctaacagtctgtc

SEQ ID NO: 73979 - DNA, 25 bp, SARS Virus
atgtgactttcccaacagtctgtct

SEQ ID NO: 73980 - DNA, 25 bp, SARS Virus
tgtgactttcctcacagtctgtctc

SEQ ID NO: 73981 - DNA, 25 bp, SARS Virus
gtgactttcctaccagtctgtctca

SEQ ID NO: 73982 - DNA, 25 bp, SARS Virus
tgactttcctaacagtctgtctcag

SEQ ID NO: 73983 - DNA, 25 bp, SARS Virus
gactttcctaaccgtctgtctcagc

SEQ ID NO: 73984 - DNA, 25 bp, SARS Virus
actttcctaacactctgtctcagca

SEQ ID NO: 73985 - DNA, 25 bp, SARS Virus
ctttcctaacagcctgtctcagcac

SEQ ID NO: 73986 - DNA, 25 bp, SARS Virus
tttcctaacagtctgtctcagcaca

SEQ ID NO: 73987 - DNA, 25 bp, SARS Virus
ttcctaacagtccgtctcagcacaa

SEQ ID NO: 73988 - DNA, 25 bp, SARS Virus
tcctaacagtctctctcagcacaag

SEQ ID NO: 73989 - DNA, 25 bp, SARS Virus
cctaacagtctgcctcagcacaagc

SEQ ID NO: 73990 - DNA, 25 bp, SARS Virus
ctaacagtctgtctcagcacaagca

SEQ ID NO: 73991 - DNA, 25 bp, SARS Virus
taacagtctgtcccagcacaagcag

SEQ ID NO: 73992 - DNA, 25 bp, SARS Virus
aacagtctgtctcagcacaagcagg

SEQ ID NO: 73993 - DNA, 25 bp, SARS Virus
acagtctgtctccgcacaagcagga

SEQ ID NO: 73994 - DNA, 25 bp, SARS Virus
cagtctgtctcaccacaagcaggaa

SEQ ID NO: 73995 - DNA, 25 bp, SARS Virus
agtctgtctcagcacaagcaggaaa

SEQ ID NO: 73996 - DNA, 25 bp, SARS Virus
gtctgtctcagcccaagcaggaaac

SEQ ID NO: 73997 - DNA, 25 bp, SARS Virus
tctgtctcagcacaagcaggaaacc

SEQ ID NO: 73998 - DNA, 25 bp, SARS Virus
ctgtctcagcaccagcaggaaaccc

SEQ ID NO: 73999 - DNA, 25 bp, SARS Virus
tgtctcagcacacgcaggaaacccg

SEQ ID NO: 74000 - DNA, 25 bp, SARS Virus
gtctcagcacaaccaggaaacccgc

SEQ ID NO: 74001 - DNA, 25 bp, SARS Virus
tctcagcacaagcaggaaacccgcg

SEQ ID NO: 74002 - DNA, 25 bp, SARS Virus
ctcagcacaagccggaaacccgcgt

SEQ ID NO: 74003 - DNA, 25 bp, SARS Virus
tcagcacaagcacgaaacccgcgta

SEQ ID NO: 74004 - DNA, 25 bp, SARS Virus
cagcacaagcagcaaacccgcgtac

SEQ ID NO: 74005 - DNA, 25 bp, SARS Virus
agcacaagcaggcaacccgcgtacc

SEQ ID NO: 74006 - DNA, 25 bp, SARS Virus
gcacaagcaggacacccgcgtaccg

SEQ ID NO: 74007 - DNA, 25 bp, SARS Virus
cacaagcaggaaccccgcgtaccga

SEQ ID NO: 74008 - DNA, 25 bp, SARS Virus
acaagcaggaaacccgcgtaccgaa

SEQ ID NO: 74009 - DNA, 25 bp, SARS Virus
caagcaggaaacccgcgtaccgaaa

SEQ ID NO: 74010 - DNA, 25 bp, SARS Virus
aagcaggaaacccgcgtaccgaaac

SEQ ID NO: 74011 - DNA, 25 bp, SARS Virus
agcaggaaacccccgtaccgaaact

SEQ ID NO: 74012 - DNA, 25 bp, SARS Virus
gcaggaaacccgcgtaccgaaactc

SEQ ID NO: 74013 - DNA, 25 bp, SARS Virus
caggaaacccgcctaccgaaactcg

SEQ ID NO: 74014 - DNA, 25 bp, SARS Virus
aggaaacccgcgcaccgaaactcga

SEQ ID NO: 74015 - DNA, 25 bp, SARS Virus
ggaaacccgcgtcccgaaactcgaa

SEQ ID NO: 74016 - DNA, 25 bp, SARS Virus
gaaacccgcgtaccgaaactcgaat

SEQ ID NO: 74017 - DNA, 25 bp, SARS Virus
aaacccgcgtaccgaaactcgaatg

SEQ ID NO: 74018 - DNA, 25 bp, SARS Virus
aacccgcgtacccaaactcgaatgt

SEQ ID NO: 74019 - DNA, 25 bp, SARS Virus
acccgcgtaccgcaactcgaatgta

SEQ ID NO: 74020 - DNA, 25 bp, SARS Virus
cccgcgtaccgacactcgaatgtag

SEQ ID NO: 74021 - DNA, 25 bp, SARS Virus
ccgcgtaccgaacctcgaatgtagt

SEQ ID NO: 74022 - DNA, 25 bp, SARS Virus
cgcgtaccgaaactcgaatgtagtt

SEQ ID NO: 74023 - DNA, 25 bp, SARS Virus
gcgtaccgaaacccgaatgtagtta

SEQ ID NO: 74024 - DNA, 25 bp, SARS Virus
cgtaccgaaactcgaatgtagttac

SEQ ID NO: 74025 - DNA, 25 bp, SARS Virus
gtaccgaaactccaatgtagttact

SEQ ID NO: 74026 - DNA, 25 bp, SARS Virus
taccgaaactcgcatgtagttactt

SEQ ID NO: 74027 - DNA, 25 bp, SARS Virus
accgaaactcgactgtagttacttc

SEQ ID NO: 74028 - DNA, 25 bp, SARS Virus
ccgaaactcgaacgtagttacttca

SEQ ID NO: 74029 - DNA, 25 bp, SARS Virus
cgaaactcgaatctagttacttcat

SEQ ID NO: 74030 - DNA, 25 bp, SARS Virus
gaaactcgaatgcagttacttcatg

SEQ ID NO: 74031 - DNA, 25 bp, SARS Virus
aaactcgaatgtcgttacttcatga

SEQ ID NO: 74032 - DNA, 25 bp, SARS Virus
aactcgaatgtacttacttcatgaa

SEQ ID NO: 74033 - DNA, 25 bp, SARS Virus
actcgaatgtagctacttcatgaaa

SEQ ID NO: 74034 - DNA, 25 bp, SARS Virus
ctcgaatgtagtcacttcatgaaac

SEQ ID NO: 74035 - DNA, 25 bp, SARS Virus
tcgaatgtagttccttcatgaaaca

SEQ ID NO: 74036 - DNA, 25 bp, SARS Virus
cgaatgtagttacttcatgaaacag

SEQ ID NO: 74037 - DNA, 25 bp, SARS Virus
gaatgtagttacctcatgaaacagt

SEQ ID NO: 74038 - DNA, 25 bp, SARS Virus
aatgtagttactccatgaaacagtt

SEQ ID NO: 74039 - DNA, 25 bp, SARS Virus
atgtagttacttcatgaaacagttc

SEQ ID NO: 74040 - DNA, 25 bp, SARS Virus
tgtagttacttcctgaaacagttct

SEQ ID NO: 74041 - DNA, 25 bp, SARS Virus
gtagttacttcacgaaacagttcta

SEQ ID NO: 74042 - DNA, 25 bp, SARS Virus
tagttacttcatcaaacagttctaa

SEQ ID NO: 74043 - DNA, 25 bp, SARS Virus
agttacttcatgcaacagttctaac

SEQ ID NO: 74044 - DNA, 25 bp, SARS Virus
gttacttcatgacacagttctaacc

SEQ ID NO: 74045 - DNA, 25 bp, SARS Virus
ttacttcatgaaccagttctaacct

SEQ ID NO: 74046 - DNA, 25 bp, SARS Virus
tacttcatgaaacagttctaacctg

SEQ ID NO: 74047 - DNA, 25 bp, SARS Virus
acttcatgaaaccgttctaacctgg

SEQ ID NO: 74048 - DNA, 25 bp, SARS Virus
cttcatgaaacacttctaacctgga

SEQ ID NO: 74049 - DNA, 25 bp, SARS Virus
ttcatgaaacagctctaacctggac

SEQ ID NO: 74050 - DNA, 25 bp, SARS Virus
tcatgaaacagtcctaacctggact

SEQ ID NO: 74051 - DNA, 25 bp, SARS Virus
catgaaacagttctaacctggactt

SEQ ID NO: 74052 - DNA, 25 bp, SARS Virus
atgaaacagttccaacctggacttt

SEQ ID NO: 74053 - DNA, 25 bp, SARS Virus
tgaaacagttctcacctggactttc

SEQ ID NO: 74054 - DNA, 25 bp, SARS Virus
gaaacagttctaccctggactttct

SEQ ID NO: 74055 - DNA, 25 bp, SARS Virus
aaacagttctaacctggactttctt

SEQ ID NO: 74056 - DNA, 25 bp, SARS Virus
aacagttctaacctggactttcttg

SEQ ID NO: 74057 - DNA, 25 bp, SARS Virus
acagttctaacccggactttcttgc

SEQ ID NO: 74058 - DNA, 25 bp, SARS Virus
cagttctaacctcgactttcttgca

SEQ ID NO: 74059 - DNA, 25 bp, SARS Virus
agttctaacctgcactttcttgcac

SEQ ID NO: 74060 - DNA, 25 bp, SARS Virus
gttctaacctggcctttcttgcaca

SEQ ID NO: 74061 - DNA, 25 bp, SARS Virus
ttctaacctggactttcttgcacaa

SEQ ID NO: 74062 - DNA, 25 bp, SARS Virus
tctaacctggaccttcttgcacaac

SEQ ID NO: 74063 - DNA, 25 bp, SARS Virus
ctaacctggactctcttgcacaaca

SEQ ID NO: 74064 - DNA, 25 bp, SARS Virus
taacctggacttccttgcacaacag

SEQ ID NO: 74065 - DNA, 25 bp, SARS Virus
aacctggactttcttgcacaacaga

SEQ ID NO: 74066 - DNA, 25 bp, SARS Virus
acctggactttcctgcacaacagac

SEQ ID NO: 74067 - DNA, 25 bp, SARS Virus
cctggactttctcgcacaacagaca

SEQ ID NO: 74068 - DNA, 25 bp, SARS Virus
ctggactttcttccacaacagacac

SEQ ID NO: 74069 - DNA, 25 bp, SARS Virus
tggactttcttgcacaacagacaca

SEQ ID NO: 74070 - DNA, 25 bp, SARS Virus
ggactttcttgcccaacagacacac

SEQ ID NO: 74071 - DNA, 25 bp, SARS Virus
gactttcttgcacaacagacacact

SEQ ID NO: 74072 - DNA, 25 bp, SARS Virus
actttcttgcaccacagacacactg

SEQ ID NO: 74073 - DNA, 25 bp, SARS Virus
ctttcttgcacaccagacacactgt

SEQ ID NO: 74074 - DNA, 25 bp, SARS Virus
tttcttgcacaacagacacactgtt

SEQ ID NO: 74075 - DNA, 25 bp, SARS Virus
ttcttgcacaaccgacacactgttt

SEQ ID NO: 74076 - DNA, 25 bp, SARS Virus
tcttgcacaacacacacactgtttg

SEQ ID NO: 74077 - DNA, 25 bp, SARS Virus
cttgcacaacagccacactgtttgc

SEQ ID NO: 74078 - DNA, 25 bp, SARS Virus
ttgcacaacagacacactgtttgca

SEQ ID NO: 74079 - DNA, 25 bp, SARS Virus
tgcacaacagacccactgtttgcac

SEQ ID NO: 74080 - DNA, 25 bp, SARS Virus
gcacaacagacacactgtttgcacg

SEQ ID NO: 74081 - DNA, 25 bp, SARS Virus
cacaacagacaccctgtttgcacgt

SEQ ID NO: 74082 - DNA, 25 bp, SARS Virus
acaacagacacactgtttgcacgtt

SEQ ID NO: 74083 - DNA, 25 bp, SARS Virus
caacagacacaccgtttgcacgttg

SEQ ID NO: 74084 - DNA, 25 bp, SARS Virus
aacagacacactctttgcacgttga

SEQ ID NO: 74085 - DNA, 25 bp, SARS Virus
acagacacactgcttgcacgttgaa

SEQ ID NO: 74086 - DNA, 25 bp, SARS Virus
cagacacactgtctgcacgttgaac

SEQ ID NO: 74087 - DNA, 25 bp, SARS Virus
agacacactgttcgcacgttgaacg

SEQ ID NO: 74088 - DNA, 25 bp, SARS Virus
gacacactgtttccacgttgaacga

SEQ ID NO: 74089 - DNA, 25 bp, SARS Virus
acacactgtttgcacgttgaacgaa

SEQ ID NO: 74090 - DNA, 25 bp, SARS Virus
cacactgtttgcccgttgaacgaaa

SEQ ID NO: 74091 - DNA, 25 bp, SARS Virus
acactgtttgcacgttgaacgaaaa

SEQ ID NO: 74092 - DNA, 25 bp, SARS Virus
cactgtttgcaccttgaacgaaaag

SEQ ID NO: 74093 - DNA, 25 bp, SARS Virus
actgtttgcacgctgaacgaaaaga

SEQ ID NO: 74094 - DNA, 25 bp, SARS Virus
ctgtttgcacgtcgaacgaaaagat

SEQ ID NO: 74095 - DNA, 25 bp, SARS Virus
tgtttgcacgttcaacgaaaagatg

SEQ ID NO: 74096 - DNA, 25 bp, SARS Virus
gtttgcacgttgcacgaaaagatga

SEQ ID NO: 74097 - DNA, 25 bp, SARS Virus
tttgcacgttgaccgaaaagatgaa

SEQ ID NO: 74098 - DNA, 25 bp, SARS Virus
ttgcacgttgaacgaaaagatgaag

SEQ ID NO: 74099 - DNA, 25 bp, SARS Virus
tgcacgttgaaccaaaagatgaagt

SEQ ID NO: 74100 - DNA, 25 bp, SARS Virus
gcacgttgaacgcaaagatgaagta

SEQ ID NO: 74101 - DNA, 25 bp, SARS Virus
cacgttgaacgacaagatgaagtag

SEQ ID NO: 74102 - DNA, 25 bp, SARS Virus
acgttgaacgaacagatgaagtagt

SEQ ID NO: 74103 - DNA, 25 bp, SARS Virus
cgttgaacgaaacgatgaagtagtc

SEQ ID NO: 74104 - DNA, 25 bp, SARS Virus
gttgaacgaaaacatgaagtagtct

SEQ ID NO: 74105 - DNA, 25 bp, SARS Virus
ttgaacgaaaagctgaagtagtcta

SEQ ID NO: 74106 - DNA, 25 bp, SARS Virus
tgaacgaaaagacgaagtagtctat

SEQ ID NO: 74107 - DNA, 25 bp, SARS Virus
gaacgaaaagatcaagtagtctatg

SEQ ID NO: 74108 - DNA, 25 bp, SARS Virus
aacgaaaagatgcagtagtctatga

SEQ ID NO: 74109 - DNA, 25 bp, SARS Virus
acgaaaagatgacgtagtctatgaa

SEQ ID NO: 74110 - DNA, 25 bp, SARS Virus
cgaaaagatgaactagtctatgaat

SEQ ID NO: 74111 - DNA, 25 bp, SARS Virus
gaaaagatgaagcagtctatgaata

SEQ ID NO: 74112 - DNA, 25 bp, SARS Virus
aaaagatgaagtcgtctatgaatac

SEQ ID NO: 74113 - DNA, 25 bp, SARS Virus
aaagatgaagtactctatgaatacg

SEQ ID NO: 74114 - DNA, 25 bp, SARS Virus
aagatgaagtagcctatgaatacgg

SEQ ID NO: 74115 - DNA, 25 bp, SARS Virus
agatgaagtagtctatgaatacgga

SEQ ID NO: 74116 - DNA, 25 bp, SARS Virus
gatgaagtagtccatgaatacggac

SEQ ID NO: 74117 - DNA, 25 bp, SARS Virus
atgaagtagtctctgaatacggacg

SEQ ID NO: 74118 - DNA, 25 bp, SARS Virus
tgaagtagtctacgaatacggacga

SEQ ID NO: 74119 - DNA, 25 bp, SARS Virus
gaagtagtctatcaatacggacgac

SEQ ID NO: 74120 - DNA, 25 bp, SARS Virus
aagtagtctatgcatacggacgacc

SEQ ID NO: 74121 - DNA, 25 bp, SARS Virus
agtagtctatgactacggacgacct

SEQ ID NO: 74122 - DNA, 25 bp, SARS Virus
gtagtctatgaacacggacgacctt

SEQ ID NO: 74123 - DNA, 25 bp, SARS Virus
tagtctatgaatccggacgacctta

SEQ ID NO: 74124 - DNA, 25 bp, SARS Virus
agtctatgaatacggacgaccttag

SEQ ID NO: 74125 - DNA, 25 bp, SARS Virus
gtctatgaataccgacgaccttagt

SEQ ID NO: 74126 - DNA, 25 bp, SARS Virus
tctatgaatacgcacgaccttagta

SEQ ID NO: 74127 - DNA, 25 bp, SARS Virus
ctatgaatacggccgaccttagtaa

SEQ ID NO: 74128 - DNA, 25 bp, SARS Virus
tatgaatacggacgaccttagtaag

SEQ ID NO: 74129 - DNA, 25 bp, SARS Virus
atgaatacggaccaccttagtaaga

SEQ ID NO: 74130 - DNA, 25 bp, SARS Virus
tgaatacggacgcccttagtaagac

SEQ ID NO: 74131 - DNA, 25 bp, SARS Virus
gaatacggacgaccttagtaagaca

SEQ ID NO: 74132 - DNA, 25 bp, SARS Virus
aatacggacgaccttagtaagacac

SEQ ID NO: 74133 - DNA, 25 bp, SARS Virus
atacggacgaccctagtaagacacc

SEQ ID NO: 74134 - DNA, 25 bp, SARS Virus
tacggacgacctcagtaagacaccc

SEQ ID NO: 74135 - DNA, 25 bp, SARS Virus
acggacgaccttcgtaagacaccca

SEQ ID NO: 74136 - DNA, 25 bp, SARS Virus
cggacgaccttactaagacacccaa

SEQ ID NO: 74137 - DNA, 25 bp, SARS Virus
ggacgaccttagcaagacacccaaa

SEQ ID NO: 74138 - DNA, 25 bp, SARS Virus
gacgaccttagtcagacacccaaaa

SEQ ID NO: 74139 - DNA, 25 bp, SARS Virus
acgaccttagtacgacacccaaaac

SEQ ID NO: 74140 - DNA, 25 bp, SARS Virus
cgaccttagtaacacacccaaaact

SEQ ID NO: 74141 - DNA, 25 bp, SARS Virus
gaccttagtaagccacccaaaactg

SEQ ID NO: 74142 - DNA, 25 bp, SARS Virus
accttagtaagacacccaaaactga

SEQ ID NO: 74143 - DNA, 25 bp, SARS Virus
ccttagtaagacccccaaaactgat

SEQ ID NO: 74144 - DNA, 25 bp, SARS Virus
cttagtaagacacccaaaactgata

SEQ ID NO: 74145 - DNA, 25 bp, SARS Virus
ttagtaagacacccaaaactgatac

SEQ ID NO: 74146 - DNA, 25 bp, SARS Virus
tagtaagacacccaaaactgataca

SEQ ID NO: 74147 - DNA, 25 bp, SARS Virus
agtaagacaccccaaactgatacag

SEQ ID NO: 74148 - DNA, 25 bp, SARS Virus
gtaagacacccacaactgatacaga

SEQ ID NO: 74149 - DNA, 25 bp, SARS Virus
taagacacccaacactgatacagat

SEQ ID NO: 74150 - DNA, 25 bp, SARS Virus
aagacacccaaacctgatacagata

SEQ ID NO: 74151 - DNA, 25 bp, SARS Virus
agacacccaaaactgatacagatat

SEQ ID NO: 74152 - DNA, 25 bp, SARS Virus
gacacccaaaaccgatacagatatt

SEQ ID NO: 74153 - DNA, 25 bp, SARS Virus
acacccaaaactcatacagatattg

SEQ ID NO: 74154 - DNA, 25 bp, SARS Virus
cacccaaaactgctacagatattgg

SEQ ID NO: 74155 - DNA, 25 bp, SARS Virus
acccaaaactgacacagatattggg

SEQ ID NO: 74156 - DNA, 25 bp, SARS Virus
cccaaaactgatccagatattgggt

SEQ ID NO: 74157 - DNA, 25 bp, SARS Virus
ccaaaactgatacagatattgggta

SEQ ID NO: 74158 - DNA, 25 bp, SARS Virus
caaaactgataccgatattgggtaa

SEQ ID NO: 74159 - DNA, 25 bp, SARS Virus
aaaactgatacacatattgggtaaa

SEQ ID NO: 74160 - DNA, 25 bp, SARS Virus
aaactgatacagctattgggtaaat

SEQ ID NO: 74161 - DNA, 25 bp, SARS Virus
aactgatacagacattgggtaaata

SEQ ID NO: 74162 - DNA, 25 bp, SARS Virus
actgatacagatcttgggtaaatac

SEQ ID NO: 74163 - DNA, 25 bp, SARS Virus
ctgatacagatactgggtaaatact

SEQ ID NO: 74164 - DNA, 25 bp, SARS Virus
tgatacagatatcgggtaaatacta

SEQ ID NO: 74165 - DNA, 25 bp, SARS Virus
gatacagatattcggtaaatactaa

SEQ ID NO: 74166 - DNA, 25 bp, SARS Virus
atacagatattgcgtaaatactaac

SEQ ID NO: 74167 - DNA, 25 bp, SARS Virus
tacagatattggctaaatactaact

SEQ ID NO: 74168 - DNA, 25 bp, SARS Virus
acagatattgggcaaatactaacta

SEQ ID NO: 74169 - DNA, 25 bp, SARS Virus
cagatattgggtcaatactaactac

SEQ ID NO: 74170 - DNA, 25 bp, SARS Virus
agatattgggtacatactaactaca

SEQ ID NO: 74171 - DNA, 25 bp, SARS Virus
gatattgggtaactactaactacaa

SEQ ID NO: 74172 - DNA, 25 bp, SARS Virus
atattgggtaaacactaactacaag

SEQ ID NO: 74173 - DNA, 25 bp, SARS Virus
tattgggtaaatcctaactacaagt

SEQ ID NO: 74174 - DNA, 25 bp, SARS Virus
attgggtaaatactaactacaagtc

SEQ ID NO: 74175 - DNA, 25 bp, SARS Virus
ttgggtaaataccaactacaagtcg

SEQ ID NO: 74176 - DNA, 25 bp, SARS Virus
tgggtaaatactcactacaagtcgt

SEQ ID NO: 74177 - DNA, 25 bp, SARS Virus
gggtaaatactacctacaagtcgtc

SEQ ID NO: 74178 - DNA, 25 bp, SARS Virus
ggtaaatactaactacaagtcgtca

SEQ ID NO: 74179 - DNA, 25 bp, SARS Virus
gtaaatactaaccacaagtcgtcac

SEQ ID NO: 74180 - DNA, 25 bp, SARS Virus
taaatactaactccaagtcgtcacc

SEQ ID NO: 74181 - DNA, 25 bp, SARS Virus
aaatactaactacaagtcgtcaccc

SEQ ID NO: 74182 - DNA, 25 bp, SARS Virus
aatactaactaccagtcgtcacccc

SEQ ID NO: 74183 - DNA, 25 bp, SARS Virus
atactaactacacgtcgtcaccccg

SEQ ID NO: 74184 - DNA, 25 bp, SARS Virus
tactaactacaactcgtcaccccga

SEQ ID NO: 74185 - DNA, 25 bp, SARS Virus
actaactacaagccgtcaccccgaa

SEQ ID NO: 74186 - DNA, 25 bp, SARS Virus
ctaactacaagtcgtcaccccgaaa

SEQ ID NO: 74187 - DNA, 25 bp, SARS Virus
taactacaagtcctcaccccgaaat

SEQ ID NO: 74188 - DNA, 25 bp, SARS Virus
aactacaagtcgccaccccgaaatg

SEQ ID NO: 74189 - DNA, 25 bp, SARS Virus
actacaagtcgtcaccccgaaatgc

SEQ ID NO: 74190 - DNA, 25 bp, SARS Virus
ctacaagtcgtccccccgaaatgcc

SEQ ID NO: 74191 - DNA, 25 bp, SARS Virus
tacaagtcgtcaccccgaaatgccc

SEQ ID NO: 74192 - DNA, 25 bp, SARS Virus
acaagtcgtcaccccgaaatgccca

SEQ ID NO: 74193 - DNA, 25 bp, SARS Virus
caagtcgtcaccccgaaatgcccat

SEQ ID NO: 74194 - DNA, 25 bp, SARS Virus
aagtcgtcaccccgaaatgcccatt

SEQ ID NO: 74195 - DNA, 25 bp, SARS Virus
agtcgtcacccccaaatgcccattg

SEQ ID NO: 74196 - DNA, 25 bp, SARS Virus
gtcgtcaccccgcaatgcccattgg

SEQ ID NO: 74197 - DNA, 25 bp, SARS Virus
tcgtcaccccgacatgcccattgga

SEQ ID NO: 74198 - DNA, 25 bp, SARS Virus
cgtcaccccgaactgcccattggaa

SEQ ID NO: 74199 - DNA, 25 bp, SARS Virus
gtcaccccgaaacgcccattggaag

SEQ ID NO: 74200 - DNA, 25 bp, SARS Virus
tcaccccgaaatccccattggaagt

SEQ ID NO: 74201 - DNA, 25 bp, SARS Virus
caccccgaaatgcccattggaagtc

SEQ ID NO: 74202 - DNA, 25 bp, SARS Virus
accccgaaatgcccattggaagtct

SEQ ID NO: 74203 - DNA, 25 bp, SARS Virus
ccccgaaatgcccattggaagtctc

SEQ ID NO: 74204 - DNA, 25 bp, SARS Virus
cccgaaatgccccttggaagtctca

SEQ ID NO: 74205 - DNA, 25 bp, SARS Virus
ccgaaatgcccactggaagtctcat

SEQ ID NO: 74206 - DNA, 25 bp, SARS Virus
cgaaatgcccatcggaagtctcatt

SEQ ID NO: 74207 - DNA, 25 bp, SARS Virus
gaaatgcccattcgaagtctcattg

SEQ ID NO: 74208 - DNA, 25 bp, SARS Virus
aaatgcccattgcaagtctcattgg

SEQ ID NO: 74209 - DNA, 25 bp, SARS Virus
aatgcccattggcagtctcattggt

SEQ ID NO: 74210 - DNA, 25 bp, SARS Virus
atgcccattggacgtctcattggta

SEQ ID NO: 74211 - DNA, 25 bp, SARS Virus
tgcccattggaactctcattggtac

SEQ ID NO: 74212 - DNA, 25 bp, SARS Virus
gcccattggaagcctcattggtact

SEQ ID NO: 74213 - DNA, 25 bp, SARS Virus
cccattggaagtctcattggtactg

SEQ ID NO: 74214 - DNA, 25 bp, SARS Virus
ccattggaagtcccattggtactgg

SEQ ID NO: 74215 - DNA, 25 bp, SARS Virus
cattggaagtctcattggtactggt

SEQ ID NO: 74216 - DNA, 25 bp, SARS Virus
attggaagtctccttggtactggtt

SEQ ID NO: 74217 - DNA, 25 bp, SARS Virus
ttggaagtctcactggtactggttg

SEQ ID NO: 74218 - DNA, 25 bp, SARS Virus
tggaagtctcatcggtactggttgt

SEQ ID NO: 74219 - DNA, 25 bp, SARS Virus
ggaagtctcattcgtactggttgta

SEQ ID NO: 74220 - DNA, 25 bp, SARS Virus
gaagtctcattgctactggttgtaa

SEQ ID NO: 74221 - DNA, 25 bp, SARS Virus
aagtctcattggcactggttgtaac

SEQ ID NO: 74222 - DNA, 25 bp, SARS Virus
agtctcattggtcctggttgtaacg

SEQ ID NO: 74223 - DNA, 25 bp, SARS Virus
gtctcattggtactggttgtaacgg

SEQ ID NO: 74224 - DNA, 25 bp, SARS Virus
tctcattggtaccggttgtaacggt

SEQ ID NO: 74225 - DNA, 25 bp, SARS Virus
ctcattggtactcgttgtaacggtc

SEQ ID NO: 74226 - DNA, 25 bp, SARS Virus
tcattggtactgcttgtaacggtcc

SEQ ID NO: 74227 - DNA, 25 bp, SARS Virus
cattggtactggctgtaacggtcca

SEQ ID NO: 74228 - DNA, 25 bp, SARS Virus
attggtactggtcgtaacggtccat

SEQ ID NO: 74229 - DNA, 25 bp, SARS Virus
ttggtactggttctaacggtccatg

SEQ ID NO: 74230 - DNA, 25 bp, SARS Virus
tggtactggttgcaacggtccatgt

SEQ ID NO: 74231 - DNA, 25 bp, SARS Virus
ggtactggttgtcacggtccatgta

SEQ ID NO: 74232 - DNA, 25 bp, SARS Virus
gtactggttgtaccggtccatgtac

SEQ ID NO: 74233 - DNA, 25 bp, SARS Virus
tactggttgtaacggtccatgtacc

SEQ ID NO: 74234 - DNA, 25 bp, SARS Virus
actggttgtaaccgtccatgtacct

SEQ ID NO: 74235 - DNA, 25 bp, SARS Virus
ctggttgtaacgctccatgtacctt

SEQ ID NO: 74236 - DNA, 25 bp, SARS Virus
tggttgtaacggcccatgtaccttt

SEQ ID NO: 74237 - DNA, 25 bp, SARS Virus
ggttgtaacggtccatgtaccttta

SEQ ID NO: 74238 - DNA, 25 bp, SARS Virus
gttgtaacggtccatgtacctttac

SEQ ID NO: 74239 - DNA, 25 bp, SARS Virus
ttgtaacggtccctgtacctttacg

SEQ ID NO: 74240 - DNA, 25 bp, SARS Virus
tgtaacggtccacgtacctttacgt

SEQ ID NO: 74241 - DNA, 25 bp, SARS Virus
gtaacggtccatctacctttacgtg

SEQ ID NO: 74242 - DNA, 25 bp, SARS Virus
taacggtccatgcacctttacgtgt

SEQ ID NO: 74243 - DNA, 25 bp, SARS Virus
aacggtccatgtccctttacgtgta

SEQ ID NO: 74244 - DNA, 25 bp, SARS Virus
acggtccatgtacctttacgtgtac

SEQ ID NO: 74245 - DNA, 25 bp, SARS Virus
cggtccatgtacctttacgtgtaca

SEQ ID NO: 74246 - DNA, 25 bp, SARS Virus
ggtccatgtacccttacgtgtacac

SEQ ID NO: 74247 - DNA, 25 bp, SARS Virus
gtccatgtacctctacgtgtacacc

SEQ ID NO: 74248 - DNA, 25 bp, SARS Virus
tccatgtaccttcacgtgtacaccg

SEQ ID NO: 74249 - DNA, 25 bp, SARS Virus
ccatgtacctttccgtgtacaccga

SEQ ID NO: 74250 - DNA, 25 bp, SARS Virus
catgtacctttacgtgtacaccgat

SEQ ID NO: 74251 - DNA, 25 bp, SARS Virus
atgtacctttacctgtacaccgatc

SEQ ID NO: 74252 - DNA, 25 bp, SARS Virus
tgtacctttacgcgtacaccgatca

SEQ ID NO: 74253 - DNA, 25 bp, SARS Virus
gtacctttacgtctacaccgatcaa

SEQ ID NO: 74254 - DNA, 25 bp, SARS Virus
tacctttacgtgcacaccgatcaac

SEQ ID NO: 74255 - DNA, 25 bp, SARS Virus
acctttacgtgtccaccgatcaaca

SEQ ID NO: 74256 - DNA, 25 bp, SARS Virus
cctttacgtgtacaccgatcaacac

SEQ ID NO: 74257 - DNA, 25 bp, SARS Virus
ctttacgtgtaccccgatcaacact

SEQ ID NO: 74258 - DNA, 25 bp, SARS Virus
tttacgtgtacaccgatcaacacta

SEQ ID NO: 74259 - DNA, 25 bp, SARS Virus
ttacgtgtacaccgatcaacactac

SEQ ID NO: 74260 - DNA, 25 bp, SARS Virus
tacgtgtacacccatcaacactacg

SEQ ID NO: 74261 - DNA, 25 bp, SARS Virus
acgtgtacaccgctcaacactacga

SEQ ID NO: 74262 - DNA, 25 bp, SARS Virus
cgtgtacaccgaccaacactacgat

SEQ ID NO: 74263 - DNA, 25 bp, SARS Virus
gtgtacaccgatcaacactacgata

SEQ ID NO: 74264 - DNA, 25 bp, SARS Virus
tgtacaccgatccacactacgatag

SEQ ID NO: 74265 - DNA, 25 bp, SARS Virus
gtacaccgatcaccactacgatagt

SEQ ID NO: 74266 - DNA, 25 bp, SARS Virus
tacaccgatcaacactacgatagta

SEQ ID NO: 74267 - DNA, 25 bp, SARS Virus
acaccgatcaaccctacgatagtac

SEQ ID NO: 74268 - DNA, 25 bp, SARS Virus
caccgatcaacactacgatagtact

SEQ ID NO: 74269 - DNA, 25 bp, SARS Virus
accgatcaacaccacgatagtactg

SEQ ID NO: 74270 - DNA, 25 bp, SARS Virus
ccgatcaacactccgatagtactga

SEQ ID NO: 74271 - DNA, 25 bp, SARS Virus
cgatcaacactacgatagtactgat

SEQ ID NO: 74272 - DNA, 25 bp, SARS Virus
gatcaacactaccatagtactgatc

SEQ ID NO: 74273 - DNA, 25 bp, SARS Virus
atcaacactacgctagtactgatct

SEQ ID NO: 74274 - DNA, 25 bp, SARS Virus
tcaacactacgacagtactgatcta

SEQ ID NO: 74275 - DNA, 25 bp, SARS Virus
caacactacgatcgtactgatctac

SEQ ID NO: 74276 - DNA, 25 bp, SARS Virus
aacactacgatactactgatctaca

SEQ ID NO: 74277 - DNA, 25 bp, SARS Virus
acactacgatagcactgatctacaa

SEQ ID NO: 74278 - DNA, 25 bp, SARS Virus
cactacgatagtcctgatctacaaa

SEQ ID NO: 74279 - DNA, 25 bp, SARS Virus
actacgatagtactgatctacaaat

SEQ ID NO: 74280 - DNA, 25 bp, SARS Virus
ctacgatagtaccgatctacaaatc

SEQ ID NO: 74281 - DNA, 25 bp, SARS Virus
tacgatagtactcatctacaaatcg

SEQ ID NO: 74282 - DNA, 25 bp, SARS Virus
acgatagtactgctctacaaatcgt

SEQ ID NO: 74283 - DNA, 25 bp, SARS Virus
cgatagtactgacctacaaatcgtc

SEQ ID NO: 74284 - DNA, 25 bp, SARS Virus
gatagtactgatctacaaatcgtca

SEQ ID NO: 74285 - DNA, 25 bp, SARS Virus
atagtactgatccacaaatcgtcag

SEQ ID NO: 74286 - DNA, 25 bp, SARS Virus
tagtactgatctccaaatcgtcagg

SEQ ID NO: 74287 - DNA, 25 bp, SARS Virus
agtactgatctacaaatcgtcaggt

SEQ ID NO: 74288 - DNA, 25 bp, SARS Virus
gtactgatctaccaatcgtcaggta

SEQ ID NO: 74289 - DNA, 25 bp, SARS Virus
tactgatctacacatcgtcaggtac

SEQ ID NO: 74290 - DNA, 25 bp, SARS Virus
actgatctacaactcgtcaggtact

SEQ ID NO: 74291 - DNA, 25 bp, SARS Virus
ctgatctacaaaccgtcaggtactc

SEQ ID NO: 74292 - DNA, 25 bp, SARS Virus
tgatctacaaatcgtcaggtactca

SEQ ID NO: 74293 - DNA, 25 bp, SARS Virus
gatctacaaatcctcaggtactcac

SEQ ID NO: 74294 - DNA, 25 bp, SARS Virus
atctacaaatcgccaggtactcacg

SEQ ID NO: 74295 - DNA, 25 bp, SARS Virus
tctacaaatcgtcaggtactcacga

SEQ ID NO: 74296 - DNA, 25 bp, SARS Virus
ctacaaatcgtccggtactcacgaa

SEQ ID NO: 74297 - DNA, 25 bp, SARS Virus
tacaaatcgtcacgtactcacgaaa

SEQ ID NO: 74298 - DNA, 25 bp, SARS Virus
acaaatcgtcagctactcacgaaac

SEQ ID NO: 74299 - DNA, 25 bp, SARS Virus
caaatcgtcaggcactcacgaaaca

SEQ ID NO: 74300 - DNA, 25 bp, SARS Virus
aaatcgtcaggtcctcacgaaacaa

SEQ ID NO: 74301 - DNA, 25 bp, SARS Virus
aatcgtcaggtactcacgaaacaat

SEQ ID NO: 74302 - DNA, 25 bp, SARS Virus
atcgtcaggtacccacgaaacaatt

SEQ ID NO: 74303 - DNA, 25 bp, SARS Virus
tcgtcaggtactcacgaaacaattc

SEQ ID NO: 74304 - DNA, 25 bp, SARS Virus
cgtcaggtactcccgaaacaattcg

SEQ ID NO: 74305 - DNA, 25 bp, SARS Virus
tcgacatggctggccaatacaactg

SEQ ID NO: 74306 - DNA, 25 bp, SARS Virus
cgacatggctgagcaatacaactgt

SEQ ID NO: 74307 - DNA, 25 bp, SARS Virus
gacatggctgacgaatacaactgtg

SEQ ID NO: 74308 - DNA, 25 bp, SARS Virus
acatggctgaccgatacaactgtga

SEQ ID NO: 74309 - DNA, 25 bp, SARS Virus
catggctgaccagtacaactgtgac

SEQ ID NO: 74310 - DNA, 25 bp, SARS Virus
atggctgaccaagacaactgtgact

SEQ ID NO: 74311 - DNA, 25 bp, SARS Virus
tggctgaccaatgcaactgtgactt

SEQ ID NO: 74312 - DNA, 25 bp, SARS Virus
ggctgaccaatagaactgtgacttt

SEQ ID NO: 74313 - DNA, 25 bp, SARS Virus
gctgaccaatacgactgtgactttt

SEQ ID NO: 74314 - DNA, 25 bp, SARS Virus
ctgaccaatacagctgtgactttta

SEQ ID NO: 74315 - DNA, 25 bp, SARS Virus
tgaccaatacaagtgtgacttttat

SEQ ID NO: 74316 - DNA, 25 bp, SARS Virus
gaccaatacaacggtgacttttatt

SEQ ID NO: 74317 - DNA, 25 bp, SARS Virus
accaatacaactgtgacttttattg

SEQ ID NO: 74318 - DNA, 25 bp, SARS Virus
ccaatacaactgggacttttattgt

SEQ ID NO: 74319 - DNA, 25 bp, SARS Virus
caatacaactgtgacttttattgtg

SEQ ID NO: 74320 - DNA, 25 bp, SARS Virus
aatacaactgtggcttttattgtgt

SEQ ID NO: 74321 - DNA, 25 bp, SARS Virus
atacaactgtgagttttattgtgtc

SEQ ID NO: 74322 - DNA, 25 bp, SARS Virus
tacaactgtgacgtttattgtgtct

SEQ ID NO: 74323 - DNA, 25 bp, SARS Virus
acaactgtgactgttattgtgtctt

SEQ ID NO: 74324 - DNA, 25 bp, SARS Virus
caactgtgacttgtattgtgtctta

SEQ ID NO: 74325 - DNA, 25 bp, SARS Virus
aactgtgactttgattgtgtcttaa

SEQ ID NO: 74326 - DNA, 25 bp, SARS Virus
actgtgacttttgttgtgtcttaag

SEQ ID NO: 74327 - DNA, 25 bp, SARS Virus
ctgtgacttttagtgtgtcttaagt

SEQ ID NO: 74328 - DNA, 25 bp, SARS Virus
tgtgacttttatggtgtcttaagtg

SEQ ID NO: 74329 - DNA, 25 bp, SARS Virus
gtgacttttattgtgtcttaagtgg

SEQ ID NO: 74330 - DNA, 25 bp, SARS Virus
tgacttttattgggtcttaagtggt

SEQ ID NO: 74331 - DNA, 25 bp, SARS Virus
gacttttattgtgtcttaagtggtc

SEQ ID NO: 74332 - DNA, 25 bp, SARS Virus
acttttattgtggcttaagtggtct

SEQ ID NO: 74333 - DNA, 25 bp, SARS Virus
cttttattgtgtgttaagtggtctc

SEQ ID NO: 74334 - DNA, 25 bp, SARS Virus
ttttattgtgtcgtaagtggtctca

SEQ ID NO: 74335 - DNA, 25 bp, SARS Virus
tttattgtgtctgaagtggtctcaa

SEQ ID NO: 74336 - DNA, 25 bp, SARS Virus
ttattgtgtcttgagtggtctcaat

SEQ ID NO: 74337 - DNA, 25 bp, SARS Virus
tattgtgtcttaggtggtctcaatt

SEQ ID NO: 74338 - DNA, 25 bp, SARS Virus
attgtgtcttaagtggtctcaatta

SEQ ID NO: 74339 - DNA, 25 bp, SARS Virus
ttgtgtcttaaggggtctcaattac

SEQ ID NO: 74340 - DNA, 25 bp, SARS Virus
tgtgtcttaagtggtctcaattacg

SEQ ID NO: 74341 - DNA, 25 bp, SARS Virus
gtgtcttaagtggtctcaattacgt

SEQ ID NO: 74342 - DNA, 25 bp, SARS Virus
tgtcttaagtgggctcaattacgtt

SEQ ID NO: 74343 - DNA, 25 bp, SARS Virus
gtcttaagtggtgtcaattacgttt

SEQ ID NO: 74344 - DNA, 25 bp, SARS Virus
tcttaagtggtcgcaattacgtttt

SEQ ID NO: 74345 - DNA, 25 bp, SARS Virus
cttaagtggtctgaattacgttttg

SEQ ID NO: 74346 - DNA, 25 bp, SARS Virus
ttaagtggtctcgattacgttttgg

SEQ ID NO: 74347 - DNA, 25 bp, SARS Virus
taagtggtctcagttacgttttgga

SEQ ID NO: 74348 - DNA, 25 bp, SARS Virus
aagtggtctcaagtacgttttggag

SEQ ID NO: 74349 - DNA, 25 bp, SARS Virus
agtggtctcaatgacgttttggagg

SEQ ID NO: 74350 - DNA, 25 bp, SARS Virus
gtggtctcaattgcgttttggaggt

SEQ ID NO: 74351 - DNA, 25 bp, SARS Virus
tggtctcaattaggttttggaggtg

SEQ ID NO: 74352 - DNA, 25 bp, SARS Virus
ggtctcaattacgttttggaggtgg

SEQ ID NO: 74353 - DNA, 25 bp, SARS Virus
gtctcaattacggtttggaggtggt

SEQ ID NO: 74354 - DNA, 25 bp, SARS Virus
tctcaattacgtgttggaggtggtc

SEQ ID NO: 74355 - DNA, 25 bp, SARS Virus
ctcaattacgttgtggaggtggtcc

SEQ ID NO: 74356 - DNA, 25 bp, SARS Virus
tcaattacgtttgggaggtggtcca

SEQ ID NO: 74357 - DNA, 25 bp, SARS Virus
caattacgttttggaggtggtccac

SEQ ID NO: 74358 - DNA, 25 bp, SARS Virus
aattacgttttggaggtggtccact

SEQ ID NO: 74359 - DNA, 25 bp, SARS Virus
attacgttttgggggtggtccactg

SEQ ID NO: 74360 - DNA, 25 bp, SARS Virus
ttacgttttggaggtggtccactgg

SEQ ID NO: 74361 - DNA, 25 bp, SARS Virus
tacgttttggaggtggtccactggt

SEQ ID NO: 74362 - DNA, 25 bp, SARS Virus
acgttttggagggggtccactggtc

SEQ ID NO: 74363 - DNA, 25 bp, SARS Virus
cgttttggaggtggtccactggtca

SEQ ID NO: 74364 - DNA, 25 bp, SARS Virus
gttttggaggtggtccactggtcaa

SEQ ID NO: 74365 - DNA, 25 bp, SARS Virus
ttttggaggtgggccactggtcaaa

SEQ ID NO: 74366 - DNA, 25 bp, SARS Virus
tttggaggtggtgcactggtcaaat

SEQ ID NO: 74367 - DNA, 25 bp, SARS Virus
ttggaggtggtcgactggtcaaatt

SEQ ID NO: 74368 - DNA, 25 bp, SARS Virus
tggaggtggtccgctggtcaaattt

SEQ ID NO: 74369 - DNA, 25 bp, SARS Virus
ggaggtggtccagtggtcaaatttg

SEQ ID NO: 74370 - DNA, 25 bp, SARS Virus
gaggtggtccacgggtcaaatttgt

SEQ ID NO: 74371 - DNA, 25 bp, SARS Virus
aggtggtccactggtcaaatttgta

SEQ ID NO: 74372 - DNA, 25 bp, SARS Virus
ggtggtccactggtcaaatttgtag

SEQ ID NO: 74373 - DNA, 25 bp, SARS Virus
gtggtccactgggcaaatttgtaga

SEQ ID NO: 74374 - DNA, 25 bp, SARS Virus
tggtccactggtgaaatttgtagaa

SEQ ID NO: 74375 - DNA, 25 bp, SARS Virus
ggtccactggtcgaatttgtagaat

SEQ ID NO: 74376 - DNA, 25 bp, SARS Virus
gtccactggtcagatttgtagaata

SEQ ID NO: 74377 - DNA, 25 bp, SARS Virus
tccactggtcaagtttgtagaatat

SEQ ID NO: 74378 - DNA, 25 bp, SARS Virus
ccactggtcaaagttgtagaatatg

SEQ ID NO: 74379 - DNA, 25 bp, SARS Virus
cactggtcaaatgtgtagaatatgg

SEQ ID NO: 74380 - DNA, 25 bp, SARS Virus
actggtcaaattggtagaatatggt

SEQ ID NO: 74381 - DNA, 25 bp, SARS Virus
ctggtcaaatttgtagaatatggtg

SEQ ID NO: 74382 - DNA, 25 bp, SARS Virus
tggtcaaatttggagaatatggtga

SEQ ID NO: 74383 - DNA, 25 bp, SARS Virus
ggtcaaatttgtggaatatggtgag

SEQ ID NO: 74384 - DNA, 25 bp, SARS Virus
gtcaaatttgtagaatatggtgagt

SEQ ID NO: 74385 - DNA, 25 bp, SARS Virus
tcaaatttgtaggatatggtgagta

SEQ ID NO: 74386 - DNA, 25 bp, SARS Virus
caaatttgtagagtatggtgagtac

SEQ ID NO: 74387 - DNA, 25 bp, SARS Virus
aaatttgtagaagatggtgagtaca

SEQ ID NO: 74388 - DNA, 25 bp, SARS Virus
aatttgtagaatgtggtgagtacat

SEQ ID NO: 74389 - DNA, 25 bp, SARS Virus
atttgtagaatagggtgagtacata

SEQ ID NO: 74390 - DNA, 25 bp, SARS Virus
tttgtagaatatggtgagtacatat

SEQ ID NO: 74391 - DNA, 25 bp, SARS Virus
ttgtagaatatggtgagtacatatt

SEQ ID NO: 74392 - DNA, 25 bp, SARS Virus
tgtagaatatggggagtacatattt

SEQ ID NO: 74393 - DNA, 25 bp, SARS Virus
gtagaatatggtgagtacatatttc

SEQ ID NO: 74394 - DNA, 25 bp, SARS Virus
tagaatatggtgggtacatatttcc

SEQ ID NO: 74395 - DNA, 25 bp, SARS Virus
agaatatggtgagtacatatttccg

SEQ ID NO: 74396 - DNA, 25 bp, SARS Virus
gaatatggtgaggacatatttccga

SEQ ID NO: 74397 - DNA, 25 bp, SARS Virus
aatatggtgagtgcatatttccgaa

SEQ ID NO: 74398 - DNA, 25 bp, SARS Virus
atatggtgagtagatatttccgaac

SEQ ID NO: 74399 - DNA, 25 bp, SARS Virus
tatggtgagtacgtatttccgaacg

SEQ ID NO: 74400 - DNA, 25 bp, SARS Virus
atggtgagtacagatttccgaacgg

SEQ ID NO: 74401 - DNA, 25 bp, SARS Virus
tggtgagtacatgtttccgaacggg

SEQ ID NO: 74402 - DNA, 25 bp, SARS Virus
ggtgagtacatagttccgaacggga

SEQ ID NO: 74403 - DNA, 25 bp, SARS Virus
gtgagtacatatgtccgaacgggac

SEQ ID NO: 74404 - DNA, 25 bp, SARS Virus
tgagtacatattgccgaacgggacc

SEQ ID NO: 74405 - DNA, 25 bp, SARS Virus
gagtacatatttgcgaacgggacct

SEQ ID NO: 74406 - DNA, 25 bp, SARS Virus
agtacatatttcggaacgggacctt

SEQ ID NO: 74407 - DNA, 25 bp, SARS Virus
gtacatatttccgaacgggacctta

SEQ ID NO: 74408 - DNA, 25 bp, SARS Virus
tacatatttccggacgggaccttac

SEQ ID NO: 74409 - DNA, 25 bp, SARS Virus
acatatttccgagcgggaccttaca

SEQ ID NO: 74410 - DNA, 25 bp, SARS Virus
catatttccgaaggggaccttacat

SEQ ID NO: 74411 - DNA, 25 bp, SARS Virus
atatttccgaacgggaccttacatc

SEQ ID NO: 74412 - DNA, 25 bp, SARS Virus
tatttccgaacgggaccttacatca

SEQ ID NO: 74413 - DNA, 25 bp, SARS Virus
atttccgaacgggaccttacatcac

SEQ ID NO: 74414 - DNA, 25 bp, SARS Virus
tttccgaacggggccttacatcacg

SEQ ID NO: 74415 - DNA, 25 bp, SARS Virus
ttccgaacgggagcttacatcacgc

SEQ ID NO: 74416 - DNA, 25 bp, SARS Virus
tccgaacgggacgttacatcacgca

SEQ ID NO: 74417 - DNA, 25 bp, SARS Virus
ccgaacgggaccgtacatcacgcat

SEQ ID NO: 74418 - DNA, 25 bp, SARS Virus
cgaacgggacctgacatcacgcata

SEQ ID NO: 74419 - DNA, 25 bp, SARS Virus
gaacgggaccttgcatcacgcataa

SEQ ID NO: 74420 - DNA, 25 bp, SARS Virus
aacgggaccttagatcacgcataat

SEQ ID NO: 74421 - DNA, 25 bp, SARS Virus
acgggaccttacgtcacgcataatt

SEQ ID NO: 74422 - DNA, 25 bp, SARS Virus
cgggaccttacagcacgcataattc

SEQ ID NO: 74423 - DNA, 25 bp, SARS Virus
gggaccttacatgacgcataattct

SEQ ID NO: 74424 - DNA, 25 bp, SARS Virus
ggaccttacatcgcgcataattcta

SEQ ID NO: 74425 - DNA, 25 bp, SARS Virus
gaccttacatcaggcataattctat

SEQ ID NO: 74426 - DNA, 25 bp, SARS Virus
accttacatcacgcataattctatc

SEQ ID NO: 74427 - DNA, 25 bp, SARS Virus
ccttacatcacggataattctatca

SEQ ID NO: 74428 - DNA, 25 bp, SARS Virus
cttacatcacgcgtaattctatcat

SEQ ID NO: 74429 - DNA, 25 bp, SARS Virus
ttacatcacgcagaattctatcatg

SEQ ID NO: 74430 - DNA, 25 bp, SARS Virus
tacatcacgcatgattctatcatgt

SEQ ID NO: 74431 - DNA, 25 bp, SARS Virus
acatcacgcatagttctatcatgtt

SEQ ID NO: 74432 - DNA, 25 bp, SARS Virus
catcacgcataagtctatcatgttt

SEQ ID NO: 74433 - DNA, 25 bp, SARS Virus
atcacgcataatgctatcatgttta

SEQ ID NO: 74434 - DNA, 25 bp, SARS Virus
tcacgcataattgtatcatgtttac

SEQ ID NO: 74435 - DNA, 25 bp, SARS Virus
cacgcataattcgatcatgtttacg

SEQ ID NO: 74436 - DNA, 25 bp, SARS Virus
acgcataattctgtcatgtttacga

SEQ ID NO: 74437 - DNA, 25 bp, SARS Virus
cgcataattctagcatgtttacgag

SEQ ID NO: 74438 - DNA, 25 bp, SARS Virus
gcataattctatgatgtttacgagt

SEQ ID NO: 74439 - DNA, 25 bp, SARS Virus
cataattctatcgtgtttacgagtc

SEQ ID NO: 74440 - DNA, 25 bp, SARS Virus
ataattctatcaggtttacgagtca

SEQ ID NO: 74441 - DNA, 25 bp, SARS Virus
taattctatcatgtttacgagtcac

SEQ ID NO: 74442 - DNA, 25 bp, SARS Virus
aattctatcatggttacgagtcact

SEQ ID NO: 74443 - DNA, 25 bp, SARS Virus
attctatcatgtgtacgagtcacta

SEQ ID NO: 74444 - DNA, 25 bp, SARS Virus
ttctatcatgttgacgagtcactat

SEQ ID NO: 74445 - DNA, 25 bp, SARS Virus
tctatcatgtttgcgagtcactatg

SEQ ID NO: 74446 - DNA, 25 bp, SARS Virus
ctatcatgtttaggagtcactatgt

SEQ ID NO: 74447 - DNA, 25 bp, SARS Virus
tatcatgtttacgagtcactatgtg

SEQ ID NO: 74448 - DNA, 25 bp, SARS Virus
atcatgtttacgggtcactatgtga

SEQ ID NO: 74449 - DNA, 25 bp, SARS Virus
tcatgtttacgagtcactatgtgac

SEQ ID NO: 74450 - DNA, 25 bp, SARS Virus
catgtttacgaggcactatgtgact

SEQ ID NO: 74451 - DNA, 25 bp, SARS Virus
atgtttacgagtgactatgtgactt

SEQ ID NO: 74452 - DNA, 25 bp, SARS Virus
tgtttacgagtcgctatgtgacttt

SEQ ID NO: 74453 - DNA, 25 bp, SARS Virus
gtttacgagtcagtatgtgactttc

SEQ ID NO: 74454 - DNA, 25 bp, SARS Virus
tttacgagtcacgatgtgactttcc

SEQ ID NO: 74455 - DNA, 25 bp, SARS Virus
ttacgagtcactgtgtgactttcct

SEQ ID NO: 74456 - DNA, 25 bp, SARS Virus
tacgagtcactaggtgactttccta

SEQ ID NO: 74457 - DNA, 25 bp, SARS Virus
acgagtcactatgtgactttcctaa

SEQ ID NO: 74458 - DNA, 25 bp, SARS Virus
cgagtcactatgggactttcctaac

SEQ ID NO: 74459 - DNA, 25 bp, SARS Virus
gagtcactatgtgactttcctaaca

SEQ ID NO: 74460 - DNA, 25 bp, SARS Virus
agtcactatgtggctttcctaacag

SEQ ID NO: 74461 - DNA, 25 bp, SARS Virus
gtcactatgtgagtttcctaacagt

SEQ ID NO: 74462 - DNA, 25 bp, SARS Virus
tcactatgtgacgttcctaacagtc

SEQ ID NO: 74463 - DNA, 25 bp, SARS Virus
cactatgtgactgtcctaacagtct

SEQ ID NO: 74464 - DNA, 25 bp, SARS Virus
actatgtgacttgcctaacagtctg

SEQ ID NO: 74465 - DNA, 25 bp, SARS Virus
ctatgtgactttgctaacagtctgt

SEQ ID NO: 74466 - DNA, 25 bp, SARS Virus
tatgtgactttcgtaacagtctgtc

SEQ ID NO: 74467 - DNA, 25 bp, SARS Virus
atgtgactttccgaacagtctgtct

SEQ ID NO: 74468 - DNA, 25 bp, SARS Virus
tgtgactttcctgacagtctgtctc

SEQ ID NO: 74469 - DNA, 25 bp, SARS Virus
gtgactttcctagcagtctgtctca

SEQ ID NO: 74470 - DNA, 25 bp, SARS Virus
tgactttcctaagagtctgtctcag

SEQ ID NO: 74471 - DNA, 25 bp, SARS Virus
gactttcctaacggtctgtctcagc

SEQ ID NO: 74472 - DNA, 25 bp, SARS Virus
actttcctaacagtctgtctcagca

SEQ ID NO: 74473 - DNA, 25 bp, SARS Virus
ctttcctaacaggctgtctcagcac

SEQ ID NO: 74474 - DNA, 25 bp, SARS Virus
tttcctaacagtgtgtctcagcaca

SEQ ID NO: 74475 - DNA, 25 bp, SARS Virus
ttcctaacagtcggtctcagcacaa

SEQ ID NO: 74476 - DNA, 25 bp, SARS Virus
tcctaacagtctgtctcagcacaag

SEQ ID NO: 74477 - DNA, 25 bp, SARS Virus
cctaacagtctggctcagcacaagc

SEQ ID NO: 74478 - DNA, 25 bp, SARS Virus
ctaacagtctgtgtcagcacaagca

SEQ ID NO: 74479 - DNA, 25 bp, SARS Virus
taacagtctgtcgcagcacaagcag

SEQ ID NO: 74480 - DNA, 25 bp, SARS Virus
aacagtctgtctgagcacaagcagg

SEQ ID NO: 74481 - DNA, 25 bp, SARS Virus
acagtctgtctcggcacaagcagga

SEQ ID NO: 74482 - DNA, 25 bp, SARS Virus
cagtctgtctcagcacaagcaggaa

SEQ ID NO: 74483 - DNA, 25 bp, SARS Virus
agtctgtctcaggacaagcaggaaa

SEQ ID NO: 74484 - DNA, 25 bp, SARS Virus
gtctgtctcagcgcaagcaggaaac

SEQ ID NO: 74485 - DNA, 25 bp, SARS Virus
tctgtctcagcagaagcaggaaacc

SEQ ID NO: 74486 - DNA, 25 bp, SARS Virus
ctgtctcagcacgagcaggaaaccc

SEQ ID NO: 74487 - DNA, 25 bp, SARS Virus
tgtctcagcacaggcaggaaacccg

SEQ ID NO: 74488 - DNA, 25 bp, SARS Virus
gtctcagcacaagcaggaaacccgc

SEQ ID NO: 74489 - DNA, 25 bp, SARS Virus
tctcagcacaaggaggaaacccgcg

SEQ ID NO: 74490 - DNA, 25 bp, SARS Virus
ctcagcacaagcgggaaacccgcgt

SEQ ID NO: 74491 - DNA, 25 bp, SARS Virus
tcagcacaagcaggaaacccgcgta

SEQ ID NO: 74492 - DNA, 25 bp, SARS Virus
cagcacaagcaggaaacccgcgtac

SEQ ID NO: 74493 - DNA, 25 bp, SARS Virus
agcacaagcagggaacccgcgtacc

SEQ ID NO: 74494 - DNA, 25 bp, SARS Virus
gcacaagcaggagacccgcgtaccg

SEQ ID NO: 74495 - DNA, 25 bp, SARS Virus
cacaagcaggaagcccgcgtaccga

SEQ ID NO: 74496 - DNA, 25 bp, SARS Virus
acaagcaggaaagccgcgtaccgaa

SEQ ID NO: 74497 - DNA, 25 bp, SARS Virus
caagcaggaaacgcgcgtaccgaaa

SEQ ID NO: 74498 - DNA, 25 bp, SARS Virus
aagcaggaaaccggcgtaccgaaac

SEQ ID NO: 74499 - DNA, 25 bp, SARS Virus
agcaggaaacccgcgtaccgaaact

SEQ ID NO: 74500 - DNA, 25 bp, SARS Virus
gcaggaaacccgggtaccgaaactc

SEQ ID NO: 74501 - DNA, 25 bp, SARS Virus
caggaaacccgcgtaccgaaactcg

SEQ ID NO: 74502 - DNA, 25 bp, SARS Virus
aggaaacccgcggaccgaaactcga

SEQ ID NO: 74503 - DNA, 25 bp, SARS Virus
ggaaacccgcgtgccgaaactcgaa

SEQ ID NO: 74504 - DNA, 25 bp, SARS Virus
gaaacccgcgtagcgaaactcgaat

SEQ ID NO: 74505 - DNA, 25 bp, SARS Virus
aaacccgcgtacggaaactcgaatg

SEQ ID NO: 74506 - DNA, 25 bp, SARS Virus
aacccgcgtaccgaaactcgaatgt

SEQ ID NO: 74507 - DNA, 25 bp, SARS Virus
acccgcgtaccggaactcgaatgta

SEQ ID NO: 74508 - DNA, 25 bp, SARS Virus
cccgcgtaccgagactcgaatgtag

SEQ ID NO: 74509 - DNA, 25 bp, SARS Virus
ccgcgtaccgaagctcgaatgtagt

SEQ ID NO: 74510 - DNA, 25 bp, SARS Virus
cgcgtaccgaaagtcgaatgtagtt

SEQ ID NO: 74511 - DNA, 25 bp, SARS Virus
gcgtaccgaaacgcgaatgtagtta

SEQ ID NO: 74512 - DNA, 25 bp, SARS Virus
cgtaccgaaactggaatgtagttac

SEQ ID NO: 74513 - DNA, 25 bp, SARS Virus
gtaccgaaactcgaatgtagttact

SEQ ID NO: 74514 - DNA, 25 bp, SARS Virus
taccgaaactcggatgtagttactt

SEQ ID NO: 74515 - DNA, 25 bp, SARS Virus
accgaaactcgagtgtagttacttc

SEQ ID NO: 74516 - DNA, 25 bp, SARS Virus
ccgaaactcgaaggtagttacttca

SEQ ID NO: 74517 - DNA, 25 bp, SARS Virus
cgaaactcgaatgtagttacttcat

SEQ ID NO: 74518 - DNA, 25 bp, SARS Virus
gaaactcgaatggagttacttcatg

SEQ ID NO: 74519 - DNA, 25 bp, SARS Virus
aaactcgaatgtggttacttcatga

SEQ ID NO: 74520 - DNA, 25 bp, SARS Virus
aactcgaatgtagttacttcatgaa

SEQ ID NO: 74521 - DNA, 25 bp, SARS Virus
actcgaatgtaggtacttcatgaaa

SEQ ID NO: 74522 - DNA, 25 bp, SARS Virus
ctcgaatgtagtgacttcatgaaac

SEQ ID NO: 74523 - DNA, 25 bp, SARS Virus
tcgaatgtagttgcttcatgaaaca

SEQ ID NO: 74524 - DNA, 25 bp, SARS Virus
cgaatgtagttagttcatgaaacag

SEQ ID NO: 74525 - DNA, 25 bp, SARS Virus
gaatgtagttacgtcatgaaacagt

SEQ ID NO: 74526 - DNA, 25 bp, SARS Virus
aatgtagttactgcatgaaacagtt

SEQ ID NO: 74527 - DNA, 25 bp, SARS Virus
atgtagttacttgatgaaacagttc

SEQ ID NO: 74528 - DNA, 25 bp, SARS Virus
tgtagttacttcgtgaaacagttct

SEQ ID NO: 74529 - DNA, 25 bp, SARS Virus
gtagttacttcaggaaacagttcta

SEQ ID NO: 74530 - DNA, 25 bp, SARS Virus
tagttacttcatgaaacagttctaa

SEQ ID NO: 74531 - DNA, 25 bp, SARS Virus
agttacttcatggaacagttctaac

SEQ ID NO: 74532 - DNA, 25 bp, SARS Virus
gttacttcatgagacagttctaacc

SEQ ID NO: 74533 - DNA, 25 bp, SARS Virus
ttacttcatgaagcagttctaacct

SEQ ID NO: 74534 - DNA, 25 bp, SARS Virus
tacttcatgaaagagttctaacctg

SEQ ID NO: 74535 - DNA, 25 bp, SARS Virus
acttcatgaaacggttctaacctgg

SEQ ID NO: 74536 - DNA, 25 bp, SARS Virus
cttcatgaaacagttctaacctgga

SEQ ID NO: 74537 - DNA, 25 bp, SARS Virus
ttcatgaaacaggtctaacctggac

SEQ ID NO: 74538 - DNA, 25 bp, SARS Virus
tcatgaaacagtgctaacctggact

SEQ ID NO: 74539 - DNA, 25 bp, SARS Virus
catgaaacagttgtaacctggactt

SEQ ID NO: 74540 - DNA, 25 bp, SARS Virus
atgaaacagttcgaacctggacttt

SEQ ID NO: 74541 - DNA, 25 bp, SARS Virus
tgaaacagttctgacctggactttc

SEQ ID NO: 74542 - DNA, 25 bp, SARS Virus
gaaacagttctagcctggactttct

SEQ ID NO: 74543 - DNA, 25 bp, SARS Virus
aaacagttctaagctggactttctt

SEQ ID NO: 74544 - DNA, 25 bp, SARS Virus
aacagttctaacgtggactttcttg

SEQ ID NO: 74545 - DNA, 25 bp, SARS Virus
acagttctaaccgggactttcttgc

SEQ ID NO: 74546 - DNA, 25 bp, SARS Virus
cagttctaacctggactttcttgca

SEQ ID NO: 74547 - DNA, 25 bp, SARS Virus
agttctaacctggactttcttgcac

SEQ ID NO: 74548 - DNA, 25 bp, SARS Virus
gttctaacctgggctttcttgcaca

SEQ ID NO: 74549 - DNA, 25 bp, SARS Virus
ttctaacctggagtttcttgcacaa

SEQ ID NO: 74550 - DNA, 25 bp, SARS Virus
tctaacctggacgttcttgcacaac

SEQ ID NO: 74551 - DNA, 25 bp, SARS Virus
ctaacctggactgtcttgcacaaca

SEQ ID NO: 74552 - DNA, 25 bp, SARS Virus
taacctggacttgcttgcacaacag

SEQ ID NO: 74553 - DNA, 25 bp, SARS Virus
aacctggactttgttgcacaacaga

SEQ ID NO: 74554 - DNA, 25 bp, SARS Virus
acctggactttcgtgcacaacagac

SEQ ID NO: 74555 - DNA, 25 bp, SARS Virus
cctggactttctggcacaacagaca

SEQ ID NO: 74556 - DNA, 25 bp, SARS Virus
ctggactttcttgcacaacagacac

SEQ ID NO: 74557 - DNA, 25 bp, SARS Virus
tggactttcttggacaacagacaca

SEQ ID NO: 74558 - DNA, 25 bp, SARS Virus
ggactttcttgcgcaacagacacac

SEQ ID NO: 74559 - DNA, 25 bp, SARS Virus
gactttcttgcagaacagacacact

SEQ ID NO: 74560 - DNA, 25 bp, SARS Virus
actttcttgcacgacagacacactg

SEQ ID NO: 74561 - DNA, 25 bp, SARS Virus
ctttcttgcacagcagacacactgt

SEQ ID NO: 74562 - DNA, 25 bp, SARS Virus
tttcttgcacaagagacacactgtt

SEQ ID NO: 74563 - DNA, 25 bp, SARS Virus
ttcttgcacaacggacacactgttt

SEQ ID NO: 74564 - DNA, 25 bp, SARS Virus
tcttgcacaacagacacactgtttg

SEQ ID NO: 74565 - DNA, 25 bp, SARS Virus
cttgcacaacaggcacactgtttgc

SEQ ID NO: 74566 - DNA, 25 bp, SARS Virus
ttgcacaacagagacactgtttgca

SEQ ID NO: 74567 - DNA, 25 bp, SARS Virus
tgcacaacagacgcactgtttgcac

SEQ ID NO: 74568 - DNA, 25 bp, SARS Virus
gcacaacagacagactgtttgcacg

SEQ ID NO: 74569 - DNA, 25 bp, SARS Virus
cacaacagacacgctgtttgcacgt

SEQ ID NO: 74570 - DNA, 25 bp, SARS Virus
acaacagacacagtgtttgcacgtt

SEQ ID NO: 74571 - DNA, 25 bp, SARS Virus
caacagacacacggtttgcacgttg

SEQ ID NO: 74572 - DNA, 25 bp, SARS Virus
aacagacacactgtttgcacgttga

SEQ ID NO: 74573 - DNA, 25 bp, SARS Virus
acagacacactggttgcacgttgaa

SEQ ID NO: 74574 - DNA, 25 bp, SARS Virus
cagacacactgtgtgcacgttgaac

SEQ ID NO: 74575 - DNA, 25 bp, SARS Virus
agacacactgttggcacgttgaacg

SEQ ID NO: 74576 - DNA, 25 bp, SARS Virus
gacacactgtttgcacgttgaacga

SEQ ID NO: 74577 - DNA, 25 bp, SARS Virus
acacactgtttggacgttgaacgaa

SEQ ID NO: 74578 - DNA, 25 bp, SARS Virus
cacactgtttgcgcgttgaacgaaa

SEQ ID NO: 74579 - DNA, 25 bp, SARS Virus
acactgtttgcaggttgaacgaaaa

SEQ ID NO: 74580 - DNA, 25 bp, SARS Virus
cactgtttgcacgttgaacgaaaag

SEQ ID NO: 74581 - DNA, 25 bp, SARS Virus
actgtttgcacggtgaacgaaaaga

SEQ ID NO: 74582 - DNA, 25 bp, SARS Virus
ctgtttgcacgtggaacgaaaagat

SEQ ID NO: 74583 - DNA, 25 bp, SARS Virus
tgtttgcacgttgaacgaaaagatg

SEQ ID NO: 74584 - DNA, 25 bp, SARS Virus
gtttgcacgttggacgaaaagatga

SEQ ID NO: 74585 - DNA, 25 bp, SARS Virus
tttgcacgttgagcgaaaagatgaa

SEQ ID NO: 74586 - DNA, 25 bp, SARS Virus
ttgcacgttgaaggaaaagatgaag

SEQ ID NO: 74587 - DNA, 25 bp, SARS Virus
tgcacgttgaacgaaaagatgaagt

SEQ ID NO: 74588 - DNA, 25 bp, SARS Virus
gcacgttgaacggaaagatgaagta

SEQ ID NO: 74589 - DNA, 25 bp, SARS Virus
cacgttgaacgagaagatgaagtag

SEQ ID NO: 74590 - DNA, 25 bp, SARS Virus
acgttgaacgaagagatgaagtagt

SEQ ID NO: 74591 - DNA, 25 bp, SARS Virus
cgttgaacgaaaggatgaagtagtc

SEQ ID NO: 74592 - DNA, 25 bp, SARS Virus
gttgaacgaaaagatgaagtagtct

SEQ ID NO: 74593 - DNA, 25 bp, SARS Virus
ttgaacgaaaaggtgaagtagtcta

SEQ ID NO: 74594 - DNA, 25 bp, SARS Virus
tgaacgaaaagaggaagtagtctat

SEQ ID NO: 74595 - DNA, 25 bp, SARS Virus
gaacgaaaagatgaagtagtctatg

SEQ ID NO: 74596 - DNA, 25 bp, SARS Virus
aacgaaaagatggagtagtctatga

SEQ ID NO: 74597 - DNA, 25 bp, SARS Virus
acgaaaagatgaggtagtctatgaa

SEQ ID NO: 74598 - DNA, 25 bp, SARS Virus
cgaaaagatgaagtagtctatgaat

SEQ ID NO: 74599 - DNA, 25 bp, SARS Virus
gaaaagatgaaggagtctatgaata

SEQ ID NO: 74600 - DNA, 25 bp, SARS Virus
aaaagatgaagtggtctatgaatac

SEQ ID NO: 74601 - DNA, 25 bp, SARS Virus
aaagatgaagtagtctatgaatacg

SEQ ID NO: 74602 - DNA, 25 bp, SARS Virus
aagatgaagtaggctatgaatacgg

SEQ ID NO: 74603 - DNA, 25 bp, SARS Virus
agatgaagtagtgtatgaatacgga

SEQ ID NO: 74604 - DNA, 25 bp, SARS Virus
gatgaagtagtcgatgaatacggac

SEQ ID NO: 74605 - DNA, 25 bp, SARS Virus
atgaagtagtctgtgaatacggacg

SEQ ID NO: 74606 - DNA, 25 bp, SARS Virus
tgaagtagtctaggaatacggacga

SEQ ID NO: 74607 - DNA, 25 bp, SARS Virus
gaagtagtctatgaatacggacgac

SEQ ID NO: 74608 - DNA, 25 bp, SARS Virus
aagtagtctatggatacggacgacc

SEQ ID NO: 74609 - DNA, 25 bp, SARS Virus
agtagtctatgagtacggacgacct

SEQ ID NO: 74610 - DNA, 25 bp, SARS Virus
gtagtctatgaagacggacgacctt

SEQ ID NO: 74611 - DNA, 25 bp, SARS Virus
tagtctatgaatgcggacgacctta

SEQ ID NO: 74612 - DNA, 25 bp, SARS Virus
agtctatgaatagggacgaccttag

SEQ ID NO: 74613 - DNA, 25 bp, SARS Virus
gtctatgaatacggacgaccttagt

SEQ ID NO: 74614 - DNA, 25 bp, SARS Virus
tctatgaatacggacgaccttagta

SEQ ID NO: 74615 - DNA, 25 bp, SARS Virus
ctatgaatacgggcgaccttagtaa

SEQ ID NO: 74616 - DNA, 25 bp, SARS Virus
tatgaatacggaggaccttagtaag

SEQ ID NO: 74617 - DNA, 25 bp, SARS Virus
atgaatacggacgaccttagtaaga

SEQ ID NO: 74618 - DNA, 25 bp, SARS Virus
tgaatacggacggccttagtaagac

SEQ ID NO: 74619 - DNA, 25 bp, SARS Virus
gaatacggacgagcttagtaagaca

SEQ ID NO: 74620 - DNA, 25 bp, SARS Virus
aatacggacgacgttagtaagacac

SEQ ID NO: 74621 - DNA, 25 bp, SARS Virus
atacggacgaccgtagtaagacacc

SEQ ID NO: 74622 - DNA, 25 bp, SARS Virus
tacggacgacctgagtaagacaccc

SEQ ID NO: 74623 - DNA, 25 bp, SARS Virus
acggacgaccttggtaagacaccca

SEQ ID NO: 74624 - DNA, 25 bp, SARS Virus
cggacgaccttagtaagacacccaa

SEQ ID NO: 74625 - DNA, 25 bp, SARS Virus
ggacgaccttaggaagacacccaaa

SEQ ID NO: 74626 - DNA, 25 bp, SARS Virus
gacgaccttagtgagacacccaaaa

SEQ ID NO: 74627 - DNA, 25 bp, SARS Virus
acgaccttagtaggacacccaaaac

SEQ ID NO: 74628 - DNA, 25 bp, SARS Virus
cgaccttagtaagacacccaaaact

SEQ ID NO: 74629 - DNA, 25 bp, SARS Virus
gaccttagtaaggcacccaaaactg

SEQ ID NO: 74630 - DNA, 25 bp, SARS Virus
accttagtaagagacccaaaactga

SEQ ID NO: 74631 - DNA, 25 bp, SARS Virus
ccttagtaagacgcccaaaactgat

SEQ ID NO: 74632 - DNA, 25 bp, SARS Virus
cttagtaagacagccaaaactgata

SEQ ID NO: 74633 - DNA, 25 bp, SARS Virus
ttagtaagacacgcaaaactgatac

SEQ ID NO: 74634 - DNA, 25 bp, SARS Virus
tagtaagacaccgaaaactgataca

SEQ ID NO: 74635 - DNA, 25 bp, SARS Virus
agtaagacacccgaaactgatacag

SEQ ID NO: 74636 - DNA, 25 bp, SARS Virus
gtaagacacccagaactgatacaga

SEQ ID NO: 74637 - DNA, 25 bp, SARS Virus
taagacacccaagactgatacagat

SEQ ID NO: 74638 - DNA, 25 bp, SARS Virus
aagacacccaaagctgatacagata

SEQ ID NO: 74639 - DNA, 25 bp, SARS Virus
agacacccaaaagtgatacagatat

SEQ ID NO: 74640 - DNA, 25 bp, SARS Virus
gacacccaaaacggatacagatatt

SEQ ID NO: 74641 - DNA, 25 bp, SARS Virus
acacccaaaactgatacagatattg

SEQ ID NO: 74642 - DNA, 25 bp, SARS Virus
cacccaaaactggtacagatattgg

SEQ ID NO: 74643 - DNA, 25 bp, SARS Virus
acccaaaactgagacagatattggg

SEQ ID NO: 74644 - DNA, 25 bp, SARS Virus
cccaaaactgatgcagatattgggt

SEQ ID NO: 74645 - DNA, 25 bp, SARS Virus
ccaaaactgatagagatattgggta

SEQ ID NO: 74646 - DNA, 25 bp, SARS Virus
caaaactgatacggatattgggtaa

SEQ ID NO: 74647 - DNA, 25 bp, SARS Virus
aaaactgatacagatattgggtaaa

SEQ ID NO: 74648 - DNA, 25 bp, SARS Virus
aaactgatacaggtattgggtaaat

SEQ ID NO: 74649 - DNA, 25 bp, SARS Virus
aactgatacagagattgggtaaata

SEQ ID NO: 74650 - DNA, 25 bp, SARS Virus
actgatacagatgttgggtaaatac

SEQ ID NO: 74651 - DNA, 25 bp, SARS Virus
ctgatacagatagtgggtaaatact

SEQ ID NO: 74652 - DNA, 25 bp, SARS Virus
tgatacagatatggggtaaatacta

SEQ ID NO: 74653 - DNA, 25 bp, SARS Virus
gatacagatattgggtaaatactaa

SEQ ID NO: 74654 - DNA, 25 bp, SARS Virus
atacagatattgggtaaatactaac

SEQ ID NO: 74655 - DNA, 25 bp, SARS Virus
tacagatattgggtaaatactaact

SEQ ID NO: 74656 - DNA, 25 bp, SARS Virus
acagatattggggaaatactaacta

SEQ ID NO: 74657 - DNA, 25 bp, SARS Virus
cagatattgggtgaatactaactac

SEQ ID NO: 74658 - DNA, 25 bp, SARS Virus
agatattgggtagatactaactaca

SEQ ID NO: 74659 - DNA, 25 bp, SARS Virus
gatattgggtaagtactaactacaa

SEQ ID NO: 74660 - DNA, 25 bp, SARS Virus
atattgggtaaagactaactacaag

SEQ ID NO: 74661 - DNA, 25 bp, SARS Virus
tattgggtaaatgctaactacaagt

SEQ ID NO: 74662 - DNA, 25 bp, SARS Virus
attgggtaaatagtaactacaagtc

SEQ ID NO: 74663 - DNA, 25 bp, SARS Virus
ttgggtaaatacgaactacaagtcg

SEQ ID NO: 74664 - DNA, 25 bp, SARS Virus
tgggtaaatactgactacaagtcgt

SEQ ID NO: 74665 - DNA, 25 bp, SARS Virus
gggtaaatactagctacaagtcgtc

SEQ ID NO: 74666 - DNA, 25 bp, SARS Virus
ggtaaatactaagtacaagtcgtca

SEQ ID NO: 74667 - DNA, 25 bp, SARS Virus
gtaaatactaacgacaagtcgtcac

SEQ ID NO: 74668 - DNA, 25 bp, SARS Virus
taaatactaactgcaagtcgtcacc

SEQ ID NO: 74669 - DNA, 25 bp, SARS Virus
aaatactaactagaagtcgtcaccc

SEQ ID NO: 74670 - DNA, 25 bp, SARS Virus
aatactaactacgagtcgtcacccc

SEQ ID NO: 74671 - DNA, 25 bp, SARS Virus
atactaactacaggtcgtcaccccg

SEQ ID NO: 74672 - DNA, 25 bp, SARS Virus
tactaactacaagtcgtcaccccga

SEQ ID NO: 74673 - DNA, 25 bp, SARS Virus
actaactacaaggcgtcaccccgaa

SEQ ID NO: 74674 - DNA, 25 bp, SARS Virus
ctaactacaagtggtcaccccgaaa

SEQ ID NO: 74675 - DNA, 25 bp, SARS Virus
taactacaagtcgtcaccccgaaat

SEQ ID NO: 74676 - DNA, 25 bp, SARS Virus
aactacaagtcggcaccccgaaatg

SEQ ID NO: 74677 - DNA, 25 bp, SARS Virus
actacaagtcgtgaccccgaaatgc

SEQ ID NO: 74678 - DNA, 25 bp, SARS Virus
ctacaagtcgtcgccccgaaatgcc

SEQ ID NO: 74679 - DNA, 25 bp, SARS Virus
tacaagtcgtcagcccgaaatgccc

SEQ ID NO: 74680 - DNA, 25 bp, SARS Virus
acaagtcgtcacgccgaaatgccca

SEQ ID NO: 74681 - DNA, 25 bp, SARS Virus
caagtcgtcaccgcgaaatgcccat

SEQ ID NO: 74682 - DNA, 25 bp, SARS Virus
aagtcgtcacccggaaatgcccatt

SEQ ID NO: 74683 - DNA, 25 bp, SARS Virus
agtcgtcaccccgaaatgcccattg

SEQ ID NO: 74684 - DNA, 25 bp, SARS Virus
gtcgtcaccccggaatgcccattgg

SEQ ID NO: 74685 - DNA, 25 bp, SARS Virus
tcgtcaccccgagatgcccattgga

SEQ ID NO: 74686 - DNA, 25 bp, SARS Virus
cgtcaccccgaagtgcccattggaa

SEQ ID NO: 74687 - DNA, 25 bp, SARS Virus
gtcaccccgaaaggcccattggaag

SEQ ID NO: 74688 - DNA, 25 bp, SARS Virus
tcaccccgaaatgcccattggaagt

SEQ ID NO: 74689 - DNA, 25 bp, SARS Virus
caccccgaaatggccattggaagtc

SEQ ID NO: 74690 - DNA, 25 bp, SARS Virus
accccgaaatgcgcattggaagtct

SEQ ID NO: 74691 - DNA, 25 bp, SARS Virus
ccccgaaatgccgattggaagtctc

SEQ ID NO: 74692 - DNA, 25 bp, SARS Virus
cccgaaatgcccgttggaagtctca

SEQ ID NO: 74693 - DNA, 25 bp, SARS Virus
ccgaaatgcccagtggaagtctcat

SEQ ID NO: 74694 - DNA, 25 bp, SARS Virus
cgaaatgcccatgggaagtctcatt

SEQ ID NO: 74695 - DNA, 25 bp, SARS Virus
gaaatgcccattggaagtctcattg

SEQ ID NO: 74696 - DNA, 25 bp, SARS Virus
aaatgcccattggaagtctcattgg

SEQ ID NO: 74697 - DNA, 25 bp, SARS Virus
aatgcccattgggagtctcattggt

SEQ ID NO: 74698 - DNA, 25 bp, SARS Virus
atgcccattggaggtctcattggta

SEQ ID NO: 74699 - DNA, 25 bp, SARS Virus
tgcccattggaagtctcattggtac

SEQ ID NO: 74700 - DNA, 25 bp, SARS Virus
gcccattggaaggctcattggtact

SEQ ID NO: 74701 - DNA, 25 bp, SARS Virus
cccattggaagtgtcattggtactg

SEQ ID NO: 74702 - DNA, 25 bp, SARS Virus
ccattggaagtcgcattggtactgg

SEQ ID NO: 74703 - DNA, 25 bp, SARS Virus
cattggaagtctgattggtactggt

SEQ ID NO: 74704 - DNA, 25 bp, SARS Virus
attggaagtctcgttggtactggtt

SEQ ID NO: 74705 - DNA, 25 bp, SARS Virus
ttggaagtctcagtggtactggttg

SEQ ID NO: 74706 - DNA, 25 bp, SARS Virus
tggaagtctcatgggtactggttgt

SEQ ID NO: 74707 - DNA, 25 bp, SARS Virus
ggaagtctcattggtactggttgta

SEQ ID NO: 74708 - DNA, 25 bp, SARS Virus
gaagtctcattggtactggttgtaa

SEQ ID NO: 74709 - DNA, 25 bp, SARS Virus
aagtctcattgggactggttgtaac

SEQ ID NO: 74710 - DNA, 25 bp, SARS Virus
agtctcattggtgctggttgtaacg

SEQ ID NO: 74711 - DNA, 25 bp, SARS Virus
gtctcattggtagtggttgtaacgg

SEQ ID NO: 74712 - DNA, 25 bp, SARS Virus
tctcattggtacgggttgtaacggt

SEQ ID NO: 74713 - DNA, 25 bp, SARS Virus
ctcattggtactggttgtaacggtc

SEQ ID NO: 74714 - DNA, 25 bp, SARS Virus
tcattggtactggttgtaacggtcc

SEQ ID NO: 74715 - DNA, 25 bp, SARS Virus
cattggtactgggtgtaacggtcca

SEQ ID NO: 74716 - DNA, 25 bp, SARS Virus
attggtactggtggtaacggtccat

SEQ ID NO: 74717 - DNA, 25 bp, SARS Virus
ttggtactggttgtaacggtccatg

SEQ ID NO: 74718 - DNA, 25 bp, SARS Virus
tggtactggttggaacggtccatgt

SEQ ID NO: 74719 - DNA, 25 bp, SARS Virus
ggtactggttgtgacggtccatgta

SEQ ID NO: 74720 - DNA, 25 bp, SARS Virus
gtactggttgtagcggtccatgtac

SEQ ID NO: 74721 - DNA, 25 bp, SARS Virus
tactggttgtaagggtccatgtacc

SEQ ID NO: 74722 - DNA, 25 bp, SARS Virus
actggttgtaacggtccatgtacct

SEQ ID NO: 74723 - DNA, 25 bp, SARS Virus
ctggttgtaacggtccatgtacctt

SEQ ID NO: 74724 - DNA, 25 bp, SARS Virus
tggttgtaacgggccatgtaccttt

SEQ ID NO: 74725 - DNA, 25 bp, SARS Virus
ggttgtaacggtgcatgtaccttta

SEQ ID NO: 74726 - DNA, 25 bp, SARS Virus
gttgtaacggtcgatgtacctttac

SEQ ID NO: 74727 - DNA, 25 bp, SARS Virus
ttgtaacggtccgtgtacctttacg

SEQ ID NO: 74728 - DNA, 25 bp, SARS Virus
tgtaacggtccaggtacctttacgt

SEQ ID NO: 74729 - DNA, 25 bp, SARS Virus
gtaacggtccatgtacctttacgtg

SEQ ID NO: 74730 - DNA, 25 bp, SARS Virus
taacggtccatggacctttacgtgt

SEQ ID NO: 74731 - DNA, 25 bp, SARS Virus
aacggtccatgtgcctttacgtgta

SEQ ID NO: 74732 - DNA, 25 bp, SARS Virus
acggtccatgtagctttacgtgtac

SEQ ID NO: 74733 - DNA, 25 bp, SARS Virus
cggtccatgtacgtttacgtgtaca

SEQ ID NO: 74734 - DNA, 25 bp, SARS Virus
ggtccatgtaccgttacgtgtacac

SEQ ID NO: 74735 - DNA, 25 bp, SARS Virus
gtccatgtacctgtacgtgtacacc

SEQ ID NO: 74736 - DNA, 25 bp, SARS Virus
tccatgtaccttgacgtgtacaccg

SEQ ID NO: 74737 - DNA, 25 bp, SARS Virus
ccatgtacctttgcgtgtacaccga

SEQ ID NO: 74738 - DNA, 25 bp, SARS Virus
catgtacctttaggtgtacaccgat

SEQ ID NO: 74739 - DNA, 25 bp, SARS Virus
atgtacctttacgtgtacaccgatc

SEQ ID NO: 74740 - DNA, 25 bp, SARS Virus
tgtacctttacgggtacaccgatca

SEQ ID NO: 74741 - DNA, 25 bp, SARS Virus
gtacctttacgtgtacaccgatcaa

SEQ ID NO: 74742 - DNA, 25 bp, SARS Virus
tacctttacgtggacaccgatcaac

SEQ ID NO: 74743 - DNA, 25 bp, SARS Virus
acctttacgtgtgcaccgatcaaca

SEQ ID NO: 74744 - DNA, 25 bp, SARS Virus
cctttacgtgtagaccgatcaacac

SEQ ID NO: 74745 - DNA, 25 bp, SARS Virus
ctttacgtgtacgccgatcaacact

SEQ ID NO: 74746 - DNA, 25 bp, SARS Virus
tttacgtgtacagcgatcaacacta

SEQ ID NO: 74747 - DNA, 25 bp, SARS Virus
ttacgtgtacacggatcaacactac

SEQ ID NO: 74748 - DNA, 25 bp, SARS Virus
tacgtgtacaccgatcaacactacg

SEQ ID NO: 74749 - DNA, 25 bp, SARS Virus
acgtgtacaccggtcaacactacga

SEQ ID NO: 74750 - DNA, 25 bp, SARS Virus
cgtgtacaccgagcaacactacgat

SEQ ID NO: 74751 - DNA, 25 bp, SARS Virus
gtgtacaccgatgaacactacgata

SEQ ID NO: 74752 - DNA, 25 bp, SARS Virus
tgtacaccgatcgacactacgatag

SEQ ID NO: 74753 - DNA, 25 bp, SARS Virus
gtacaccgatcagcactacgatagt

SEQ ID NO: 74754 - DNA, 25 bp, SARS Virus
tacaccgatcaagactacgatagta

SEQ ID NO: 74755 - DNA, 25 bp, SARS Virus
acaccgatcaacgctacgatagtac

SEQ ID NO: 74756 - DNA, 25 bp, SARS Virus
caccgatcaacagtacgatagtact

SEQ ID NO: 74757 - DNA, 25 bp, SARS Virus
accgatcaacacgacgatagtactg

SEQ ID NO: 74758 - DNA, 25 bp, SARS Virus
ccgatcaacactgcgatagtactga

SEQ ID NO: 74759 - DNA, 25 bp, SARS Virus
cgatcaacactaggatagtactgat

SEQ ID NO: 74760 - DNA, 25 bp, SARS Virus
gatcaacactacgatagtactgatc

SEQ ID NO: 74761 - DNA, 25 bp, SARS Virus
atcaacactacggtagtactgatct

SEQ ID NO: 74762 - DNA, 25 bp, SARS Virus
tcaacactacgagagtactgatcta

SEQ ID NO: 74763 - DNA, 25 bp, SARS Virus
caacactacgatggtactgatctac

SEQ ID NO: 74764 - DNA, 25 bp, SARS Virus
aacactacgatagtactgatctaca

SEQ ID NO: 74765 - DNA, 25 bp, SARS Virus
acactacgataggactgatctacaa

SEQ ID NO: 74766 - DNA, 25 bp, SARS Virus
cactacgatagtgctgatctacaaa

SEQ ID NO: 74767 - DNA, 25 bp, SARS Virus
actacgatagtagtgatctacaaat

SEQ ID NO: 74768 - DNA, 25 bp, SARS Virus
ctacgatagtacggatctacaaatc

SEQ ID NO: 74769 - DNA, 25 bp, SARS Virus
tacgatagtactgatctacaaatcg

SEQ ID NO: 74770 - DNA, 25 bp, SARS Virus
acgatagtactggtctacaaatcgt

SEQ ID NO: 74771 - DNA, 25 bp, SARS Virus
cgatagtactgagctacaaatcgtc

SEQ ID NO: 74772 - DNA, 25 bp, SARS Virus
gatagtactgatgtacaaatcgtca

SEQ ID NO: 74773 - DNA, 25 bp, SARS Virus
atagtactgatcgacaaatcgtcag

SEQ ID NO: 74774 - DNA, 25 bp, SARS Virus
tagtactgatctgcaaatcgtcagg

SEQ ID NO: 74775 - DNA, 25 bp, SARS Virus
agtactgatctagaaatcgtcaggt

SEQ ID NO: 74776 - DNA, 25 bp, SARS Virus
gtactgatctacgaatcgtcaggta

SEQ ID NO: 74777 - DNA, 25 bp, SARS Virus
tactgatctacagatcgtcaggtac

SEQ ID NO: 74778 - DNA, 25 bp, SARS Virus
actgatctacaagtcgtcaggtact

SEQ ID NO: 74779 - DNA, 25 bp, SARS Virus
ctgatctacaaagcgtcaggtactc

SEQ ID NO: 74780 - DNA, 25 bp, SARS Virus
tgatctacaaatggtcaggtactca

SEQ ID NO: 74781 - DNA, 25 bp, SARS Virus
gatctacaaatcgtcaggtactcac

SEQ ID NO: 74782 - DNA, 25 bp, SARS Virus
atctacaaatcggcaggtactcacg

SEQ ID NO: 74783 - DNA, 25 bp, SARS Virus
tctacaaatcgtgaggtactcacga

SEQ ID NO: 74784 - DNA, 25 bp, SARS Virus
ctacaaatcgtcgggtactcacgaa

SEQ ID NO: 74785 - DNA, 25 bp, SARS Virus
tacaaatcgtcaggtactcacgaaa

SEQ ID NO: 74786 - DNA, 25 bp, SARS Virus
acaaatcgtcaggtactcacgaaac

SEQ ID NO: 74787 - DNA, 25 bp, SARS Virus
caaatcgtcagggactcacgaaaca

SEQ ID NO: 74788 - DNA, 25 bp, SARS Virus
aaatcgtcaggtgctcacgaaacaa

SEQ ID NO: 74789 - DNA, 25 bp, SARS Virus
aatcgtcaggtagtcacgaaacaat

SEQ ID NO: 74790 - DNA, 25 bp, SARS Virus
atcgtcaggtacgcacgaaacaatt

SEQ ID NO: 74791 - DNA, 25 bp, SARS Virus
tcgtcaggtactgacgaaacaattc

SEQ ID NO: 74792 - DNA, 25 bp, SARS Virus
cgtcaggtactcgcgaaacaattcg

SEQ ID NO: 74793 - DNA, 25 bp, SARS Virus
tcgacatggctgtccaatacaactg

SEQ ID NO: 74794 - DNA, 25 bp, SARS Virus
cgacatggctgatcaatacaactgt

SEQ ID NO: 74795 - DNA, 25 bp, SARS Virus
gacatggctgactaatacaactgtg

SEQ ID NO: 74796 - DNA, 25 bp, SARS Virus
acatggctgacctatacaactgtga

SEQ ID NO: 74797 - DNA, 25 bp, SARS Virus
catggctgaccattacaactgtgac

SEQ ID NO: 74798 - DNA, 25 bp, SARS Virus
atggctgaccaatacaactgtgact

SEQ ID NO: 74799 - DNA, 25 bp, SARS Virus
tggctgaccaattcaactgtgactt

SEQ ID NO: 74800 - DNA, 25 bp, SARS Virus
ggctgaccaatataactgtgacttt

SEQ ID NO: 74801 - DNA, 25 bp, SARS Virus
gctgaccaatactactgtgactttt

SEQ ID NO: 74802 - DNA, 25 bp, SARS Virus
ctgaccaatacatctgtgactttta

SEQ ID NO: 74803 - DNA, 25 bp, SARS Virus
tgaccaatacaattgtgacttttat

SEQ ID NO: 74804 - DNA, 25 bp, SARS Virus
gaccaatacaactgtgacttttatt

SEQ ID NO: 74805 - DNA, 25 bp, SARS Virus
accaatacaactttgacttttattg

SEQ ID NO: 74806 - DNA, 25 bp, SARS Virus
ccaatacaactgtgacttttattgt

SEQ ID NO: 74807 - DNA, 25 bp, SARS Virus
caatacaactgttacttttattgtg

SEQ ID NO: 74808 - DNA, 25 bp, SARS Virus
aatacaactgtgtcttttattgtgt

SEQ ID NO: 74809 - DNA, 25 bp, SARS Virus
atacaactgtgatttttattgtgtc

SEQ ID NO: 74810 - DNA, 25 bp, SARS Virus
tacaactgtgacttttattgtgtct

SEQ ID NO: 74811 - DNA, 25 bp, SARS Virus
acaactgtgacttttattgtgtctt

SEQ ID NO: 74812 - DNA, 25 bp, SARS Virus
caactgtgacttttattgtgtctta

SEQ ID NO: 74813 - DNA, 25 bp, SARS Virus
aactgtgacttttattgtgtcttaa

SEQ ID NO: 74814 - DNA, 25 bp, SARS Virus
actgtgactttttttgtgtcttaag

SEQ ID NO: 74815 - DNA, 25 bp, SARS Virus
ctgtgacttttattgtgtcttaagt

SEQ ID NO: 74816 - DNA, 25 bp, SARS Virus
tgtgacttttattgtgtcttaagtg

SEQ ID NO: 74817 - DNA, 25 bp, SARS Virus
gtgacttttattttgtcttaagtgg

SEQ ID NO: 74818 - DNA, 25 bp, SARS Virus
tgacttttattgtgtcttaagtggt

SEQ ID NO: 74819 - DNA, 25 bp, SARS Virus
gacttttattgtttcttaagtggtc

SEQ ID NO: 74820 - DNA, 25 bp, SARS Virus
acttttattgtgtcttaagtggtct

SEQ ID NO: 74821 - DNA, 25 bp, SARS Virus
cttttattgtgttttaagtggtctc

SEQ ID NO: 74822 - DNA, 25 bp, SARS Virus
ttttattgtgtcttaagtggtctca

SEQ ID NO: 74823 - DNA, 25 bp, SARS Virus
tttattgtgtcttaagtggtctcaa

SEQ ID NO: 74824 - DNA, 25 bp, SARS Virus
ttattgtgtctttagtggtctcaat

SEQ ID NO: 74825 - DNA, 25 bp, SARS Virus
tattgtgtcttatgtggtctcaatt

SEQ ID NO: 74826 - DNA, 25 bp, SARS Virus
attgtgtcttaattggtctcaatta

SEQ ID NO: 74827 - DNA, 25 bp, SARS Virus
ttgtgtcttaagtggtctcaattac

SEQ ID NO: 74828 - DNA, 25 bp, SARS Virus
tgtgtcttaagttgtctcaattacg

SEQ ID NO: 74829 - DNA, 25 bp, SARS Virus
gtgtcttaagtgttctcaattacgt

SEQ ID NO: 74830 - DNA, 25 bp, SARS Virus
tgtcttaagtggtctcaattacgtt

SEQ ID NO: 74831 - DNA, 25 bp, SARS Virus
gtcttaagtggtttcaattacgttt

SEQ ID NO: 74832 - DNA, 25 bp, SARS Virus
tcttaagtggtctcaattacgtttt

SEQ ID NO: 74833 - DNA, 25 bp, SARS Virus
cttaagtggtcttaattacgttttg

SEQ ID NO: 74834 - DNA, 25 bp, SARS Virus
ttaagtggtctctattacgttttgg

SEQ ID NO: 74835 - DNA, 25 bp, SARS Virus
taagtggtctcatttacgttttgga

SEQ ID NO: 74836 - DNA, 25 bp, SARS Virus
aagtggtctcaattacgttttggag

SEQ ID NO: 74837 - DNA, 25 bp, SARS Virus
agtggtctcaattacgttttggagg

SEQ ID NO: 74838 - DNA, 25 bp, SARS Virus
gtggtctcaatttcgttttggaggt

SEQ ID NO: 74839 - DNA, 25 bp, SARS Virus
tggtctcaattatgttttggaggtg

SEQ ID NO: 74840 - DNA, 25 bp, SARS Virus
ggtctcaattactttttggaggtgg

SEQ ID NO: 74841 - DNA, 25 bp, SARS Virus
gtctcaattacgttttggaggtggt

SEQ ID NO: 74842 - DNA, 25 bp, SARS Virus
tctcaattacgttttggaggtggtc

SEQ ID NO: 74843 - DNA, 25 bp, SARS Virus
ctcaattacgttttggaggtggtcc

SEQ ID NO: 74844 - DNA, 25 bp, SARS Virus
tcaattacgttttggaggtggtcca

SEQ ID NO: 74845 - DNA, 25 bp, SARS Virus
caattacgtttttgaggtggtccac

SEQ ID NO: 74846 - DNA, 25 bp, SARS Virus
aattacgttttgtaggtggtccact

SEQ ID NO: 74847 - DNA, 25 bp, SARS Virus
attacgttttggtggtggtccactg

SEQ ID NO: 74848 - DNA, 25 bp, SARS Virus
ttacgttttggatgtggtccactgg

SEQ ID NO: 74849 - DNA, 25 bp, SARS Virus
tacgttttggagttggtccactggt

SEQ ID NO: 74850 - DNA, 25 bp, SARS Virus
acgttttggaggtggtccactggtc

SEQ ID NO: 74851 - DNA, 25 bp, SARS Virus
cgttttggaggttgtccactggtca

SEQ ID NO: 74852 - DNA, 25 bp, SARS Virus
gttttggaggtgttccactggtcaa

SEQ ID NO: 74853 - DNA, 25 bp, SARS Virus
ttttggaggtggtccactggtcaaa

SEQ ID NO: 74854 - DNA, 25 bp, SARS Virus
tttggaggtggttcactggtcaaat

SEQ ID NO: 74855 - DNA, 25 bp, SARS Virus
ttggaggtggtctactggtcaaatt

SEQ ID NO: 74856 - DNA, 25 bp, SARS Virus
tggaggtggtcctctggtcaaattt

SEQ ID NO: 74857 - DNA, 25 bp, SARS Virus
ggaggtggtccattggtcaaatttg

SEQ ID NO: 74858 - DNA, 25 bp, SARS Virus
gaggtggtccactggtcaaatttgt

SEQ ID NO: 74859 - DNA, 25 bp, SARS Virus
aggtggtccacttgtcaaatttgta

SEQ ID NO: 74860 - DNA, 25 bp, SARS Virus
ggtggtccactgttcaaatttgtag

SEQ ID NO: 74861 - DNA, 25 bp, SARS Virus
gtggtccactggtcaaatttgtaga

SEQ ID NO: 74862 - DNA, 25 bp, SARS Virus
tggtccactggttaaatttgtagaa

SEQ ID NO: 74863 - DNA, 25 bp, SARS Virus
ggtccactggtctaatttgtagaat

SEQ ID NO: 74864 - DNA, 25 bp, SARS Virus
gtccactggtcatatttgtagaata

SEQ ID NO: 74865 - DNA, 25 bp, SARS Virus
tccactggtcaattttgtagaatat

SEQ ID NO: 74866 - DNA, 25 bp, SARS Virus
ccactggtcaaatttgtagaatatg

SEQ ID NO: 74867 - DNA, 25 bp, SARS Virus
cactggtcaaatttgtagaatatgg

SEQ ID NO: 74868 - DNA, 25 bp, SARS Virus
actggtcaaatttgtagaatatggt

SEQ ID NO: 74869 - DNA, 25 bp, SARS Virus
ctggtcaaatttttagaatatggtg

SEQ ID NO: 74870 - DNA, 25 bp, SARS Virus
tggtcaaatttgtagaatatggtga

SEQ ID NO: 74871 - DNA, 25 bp, SARS Virus
ggtcaaatttgttgaatatggtgag

SEQ ID NO: 74872 - DNA, 25 bp, SARS Virus
gtcaaatttgtataatatggtgagt

SEQ ID NO: 74873 - DNA, 25 bp, SARS Virus
tcaaatttgtagtatatggtgagta

SEQ ID NO: 74874 - DNA, 25 bp, SARS Virus
caaatttgtagattatggtgagtac

SEQ ID NO: 74875 - DNA, 25 bp, SARS Virus
aaatttgtagaatatggtgagtaca

SEQ ID NO: 74876 - DNA, 25 bp, SARS Virus
aatttgtagaatttggtgagtacat

SEQ ID NO: 74877 - DNA, 25 bp, SARS Virus
atttgtagaatatggtgagtacata

SEQ ID NO: 74878 - DNA, 25 bp, SARS Virus
tttgtagaatattgtgagtacatat

SEQ ID NO: 74879 - DNA, 25 bp, SARS Virus
ttgtagaatatgttgagtacatatt

SEQ ID NO: 74880 - DNA, 25 bp, SARS Virus
tgtagaatatggtgagtacatattt

SEQ ID NO: 74881 - DNA, 25 bp, SARS Virus
gtagaatatggttagtacatatttc

SEQ ID NO: 74882 - DNA, 25 bp, SARS Virus
tagaatatggtgtgtacatatttcc

SEQ ID NO: 74883 - DNA, 25 bp, SARS Virus
agaatatggtgattacatatttccg

SEQ ID NO: 74884 - DNA, 25 bp, SARS Virus
gaatatggtgagtacatatttccga

SEQ ID NO: 74885 - DNA, 25 bp, SARS Virus
aatatggtgagttcatatttccgaa

SEQ ID NO: 74886 - DNA, 25 bp, SARS Virus
atatggtgagtatatatttccgaac

SEQ ID NO: 74887 - DNA, 25 bp, SARS Virus
tatggtgagtacttatttccgaacg

SEQ ID NO: 74888 - DNA, 25 bp, SARS Virus
atggtgagtacatatttccgaacgg

SEQ ID NO: 74889 - DNA, 25 bp, SARS Virus
tggtgagtacatttttccgaacggg

SEQ ID NO: 74890 - DNA, 25 bp, SARS Virus
ggtgagtacatatttccgaacggga

SEQ ID NO: 74891 - DNA, 25 bp, SARS Virus
gtgagtacatatttccgaacgggac

SEQ ID NO: 74892 - DNA, 25 bp, SARS Virus
tgagtacatatttccgaacgggacc

SEQ ID NO: 74893 - DNA, 25 bp, SARS Virus
gagtacatattttcgaacgggacct

SEQ ID NO: 74894 - DNA, 25 bp, SARS Virus
agtacatatttctgaacgggacctt

SEQ ID NO: 74895 - DNA, 25 bp, SARS Virus
gtacatatttcctaacgggacctta

SEQ ID NO: 74896 - DNA, 25 bp, SARS Virus
tacatatttccgtacgggaccttac

SEQ ID NO: 74897 - DNA, 25 bp, SARS Virus
acatatttccgatcgggaccttaca

SEQ ID NO: 74898 - DNA, 25 bp, SARS Virus
catatttccgaatgggaccttacat

SEQ ID NO: 74899 - DNA, 25 bp, SARS Virus
atatttccgaactggaccttacatc

SEQ ID NO: 74900 - DNA, 25 bp, SARS Virus
tatttccgaacgtgaccttacatca

SEQ ID NO: 74901 - DNA, 25 bp, SARS Virus
atttccgaacggtaccttacatcac

SEQ ID NO: 74902 - DNA, 25 bp, SARS Virus
tttccgaacgggtccttacatcacg

SEQ ID NO: 74903 - DNA, 25 bp, SARS Virus
ttccgaacgggatcttacatcacgc

SEQ ID NO: 74904 - DNA, 25 bp, SARS Virus
tccgaacgggactttacatcacgca

SEQ ID NO: 74905 - DNA, 25 bp, SARS Virus
ccgaacgggaccttacatcacgcat

SEQ ID NO: 74906 - DNA, 25 bp, SARS Virus
cgaacgggaccttacatcacgcata

SEQ ID NO: 74907 - DNA, 25 bp, SARS Virus
gaacgggacctttcatcacgcataa

SEQ ID NO: 74908 - DNA, 25 bp, SARS Virus
aacgggaccttatatcacgcataat

SEQ ID NO: 74909 - DNA, 25 bp, SARS Virus
acgggaccttacttcacgcataatt

SEQ ID NO: 74910 - DNA, 25 bp, SARS Virus
cgggaccttacatcacgcataattc

SEQ ID NO: 74911 - DNA, 25 bp, SARS Virus
gggaccttacattacgcataattct

SEQ ID NO: 74912 - DNA, 25 bp, SARS Virus
ggaccttacatctcgcataattcta

SEQ ID NO: 74913 - DNA, 25 bp, SARS Virus
gaccttacatcatgcataattctat

SEQ ID NO: 74914 - DNA, 25 bp, SARS Virus
accttacatcactcataattctatc

SEQ ID NO: 74915 - DNA, 25 bp, SARS Virus
ccttacatcacgtataattctatca

SEQ ID NO: 74916 - DNA, 25 bp, SARS Virus
cttacatcacgcttaattctatcat

SEQ ID NO: 74917 - DNA, 25 bp, SARS Virus
ttacatcacgcataattctatcatg

SEQ ID NO: 74918 - DNA, 25 bp, SARS Virus
tacatcacgcattattctatcatgt

SEQ ID NO: 74919 - DNA, 25 bp, SARS Virus
acatcacgcatatttctatcatgtt

SEQ ID NO: 74920 - DNA, 25 bp, SARS Virus
catcacgcataattctatcatgttt

SEQ ID NO: 74921 - DNA, 25 bp, SARS Virus
atcacgcataattctatcatgttta

SEQ ID NO: 74922 - DNA, 25 bp, SARS Virus
tcacgcataattttatcatgtttac

SEQ ID NO: 74923 - DNA, 25 bp, SARS Virus
cacgcataattctatcatgtttacg

SEQ ID NO: 74924 - DNA, 25 bp, SARS Virus
acgcataattctttcatgtttacga

SEQ ID NO: 74925 - DNA, 25 bp, SARS Virus
cgcataattctatcatgtttacgag

SEQ ID NO: 74926 - DNA, 25 bp, SARS Virus
gcataattctattatgtttacgagt

SEQ ID NO: 74927 - DNA, 25 bp, SARS Virus
cataattctatcttgtttacgagtc

SEQ ID NO: 74928 - DNA, 25 bp, SARS Virus
ataattctatcatgtttacgagtca

SEQ ID NO: 74929 - DNA, 25 bp, SARS Virus
taattctatcatttttacgagtcac

SEQ ID NO: 74930 - DNA, 25 bp, SARS Virus
aattctatcatgtttacgagtcact

SEQ ID NO: 74931 - DNA, 25 bp, SARS Virus
attctatcatgtttacgagtcacta

SEQ ID NO: 74932 - DNA, 25 bp, SARS Virus
ttctatcatgtttacgagtcactat

SEQ ID NO: 74933 - DNA, 25 bp, SARS Virus
tctatcatgttttcgagtcactatg

SEQ ID NO: 74934 - DNA, 25 bp, SARS Virus
ctatcatgtttatgagtcactatgt

SEQ ID NO: 74935 - DNA, 25 bp, SARS Virus
tatcatgtttactagtcactatgtg

SEQ ID NO: 74936 - DNA, 25 bp, SARS Virus
atcatgtttacgtgtcactatgtga

SEQ ID NO: 74937 - DNA, 25 bp, SARS Virus
tcatgtttacgattcactatgtgac

SEQ ID NO: 74938 - DNA, 25 bp, SARS Virus
catgtttacgagtcactatgtgact

SEQ ID NO: 74939 - DNA, 25 bp, SARS Virus
atgtttacgagttactatgtgactt

SEQ ID NO: 74940 - DNA, 25 bp, SARS Virus
tgtttacgagtctctatgtgacttt

SEQ ID NO: 74941 - DNA, 25 bp, SARS Virus
gtttacgagtcattatgtgactttc

SEQ ID NO: 74942 - DNA, 25 bp, SARS Virus
tttacgagtcactatgtgactttcc

SEQ ID NO: 74943 - DNA, 25 bp, SARS Virus
ttacgagtcactttgtgactttcct

SEQ ID NO: 74944 - DNA, 25 bp, SARS Virus
tacgagtcactatgtgactttccta

SEQ ID NO: 74945 - DNA, 25 bp, SARS Virus
acgagtcactatttgactttcctaa

SEQ ID NO: 74946 - DNA, 25 bp, SARS Virus
cgagtcactatgtgactttcctaac

SEQ ID NO: 74947 - DNA, 25 bp, SARS Virus
gagtcactatgttactttcctaaca

SEQ ID NO: 74948 - DNA, 25 bp, SARS Virus
agtcactatgtgtctttcctaacag

SEQ ID NO: 74949 - DNA, 25 bp, SARS Virus
gtcactatgtgattttcctaacagt

SEQ ID NO: 74950 - DNA, 25 bp, SARS Virus
tcactatgtgactttcctaacagtc

SEQ ID NO: 74951 - DNA, 25 bp, SARS Virus
cactatgtgactttcctaacagtct

SEQ ID NO: 74952 - DNA, 25 bp, SARS Virus
actatgtgactttcctaacagtctg

SEQ ID NO: 74953 - DNA, 25 bp, SARS Virus
ctatgtgacttttctaacagtctgt

SEQ ID NO: 74954 - DNA, 25 bp, SARS Virus
tatgtgactttcttaacagtctgtc

SEQ ID NO: 74955 - DNA, 25 bp, SARS Virus
atgtgactttcctaacagtctgtct

SEQ ID NO: 74956 - DNA, 25 bp, SARS Virus
tgtgactttccttacagtctgtctc

SEQ ID NO: 74957 - DNA, 25 bp, SARS Virus
gtgactttcctatcagtctgtctca

SEQ ID NO: 74958 - DNA, 25 bp, SARS Virus
tgactttcctaatagtctgtctcag

SEQ ID NO: 74959 - DNA, 25 bp, SARS Virus
gactttcctaactgtctgtctcagc

SEQ ID NO: 74960 - DNA, 25 bp, SARS Virus
actttcctaacattctgtctcagca

SEQ ID NO: 74961 - DNA, 25 bp, SARS Virus
ctttcctaacagtctgtctcagcac

SEQ ID NO: 74962 - DNA, 25 bp, SARS Virus
tttcctaacagtttgtctcagcaca

SEQ ID NO: 74963 - DNA, 25 bp, SARS Virus
ttcctaacagtctgtctcagcacaa

SEQ ID NO: 74964 - DNA, 25 bp, SARS Virus
tcctaacagtctttctcagcacaag

SEQ ID NO: 74965 - DNA, 25 bp, SARS Virus
cctaacagtctgtctcagcacaagc

SEQ ID NO: 74966 - DNA, 25 bp, SARS Virus
ctaacagtctgtttcagcacaagca

SEQ ID NO: 74967 - DNA, 25 bp, SARS Virus
taacagtctgtctcagcacaagcag

SEQ ID NO: 74968 - DNA, 25 bp, SARS Virus
aacagtctgtcttagcacaagcagg

SEQ ID NO: 74969 - DNA, 25 bp, SARS Virus
acagtctgtctctgcacaagcagga

SEQ ID NO: 74970 - DNA, 25 bp, SARS Virus
cagtctgtctcatcacaagcaggaa

SEQ ID NO: 74971 - DNA, 25 bp, SARS Virus
agtctgtctcagtacaagcaggaaa

SEQ ID NO: 74972 - DNA, 25 bp, SARS Virus
gtctgtctcagctcaagcaggaaac

SEQ ID NO: 74973 - DNA, 25 bp, SARS Virus
tctgtctcagcataagcaggaaacc

SEQ ID NO: 74974 - DNA, 25 bp, SARS Virus
ctgtctcagcactagcaggaaaccc

SEQ ID NO: 74975 - DNA, 25 bp, SARS Virus
tgtctcagcacatgcaggaaacccg

SEQ ID NO: 74976 - DNA, 25 bp, SARS Virus
gtctcagcacaatcaggaaacccgc

SEQ ID NO: 74977 - DNA, 25 bp, SARS Virus
tctcagcacaagtaggaaacccgcg

SEQ ID NO: 74978 - DNA, 25 bp, SARS Virus
ctcagcacaagctggaaacccgcgt

SEQ ID NO: 74979 - DNA, 25 bp, SARS Virus
tcagcacaagcatgaaacccgcgta

SEQ ID NO: 74980 - DNA, 25 bp, SARS Virus
cagcacaagcagtaaacccgcgtac

SEQ ID NO: 74981 - DNA, 25 bp, SARS Virus
agcacaagcaggtaacccgcgtacc

SEQ ID NO: 74982 - DNA, 25 bp, SARS Virus
gcacaagcaggatacccgcgtaccg

SEQ ID NO: 74983 - DNA, 25 bp, SARS Virus
cacaagcaggaatcccgcgtaccga

SEQ ID NO: 74984 - DNA, 25 bp, SARS Virus
acaagcaggaaatccgcgtaccgaa

SEQ ID NO: 74985 - DNA, 25 bp, SARS Virus
caagcaggaaactcgcgtaccgaaa

SEQ ID NO: 74986 - DNA, 25 bp, SARS Virus
aagcaggaaacctgcgtaccgaaac

SEQ ID NO: 74987 - DNA, 25 bp, SARS Virus
agcaggaaaccctcgtaccgaaact

SEQ ID NO: 74988 - DNA, 25 bp, SARS Virus
gcaggaaacccgtgtaccgaaactc

SEQ ID NO: 74989 - DNA, 25 bp, SARS Virus
caggaaacccgcttaccgaaactcg

SEQ ID NO: 74990 - DNA, 25 bp, SARS Virus
aggaaacccgcgtaccgaaactcga

SEQ ID NO: 74991 - DNA, 25 bp, SARS Virus
ggaaacccgcgttccgaaactcgaa

SEQ ID NO: 74992 - DNA, 25 bp, SARS Virus
gaaacccgcgtatcgaaactcgaat

SEQ ID NO: 74993 - DNA, 25 bp, SARS Virus
aaacccgcgtactgaaactcgaatg

SEQ ID NO: 74994 - DNA, 25 bp, SARS Virus
aacccgcgtacctaaactcgaatgt

SEQ ID NO: 74995 - DNA, 25 bp, SARS Virus
acccgcgtaccgtaactcgaatgta

SEQ ID NO: 74996 - DNA, 25 bp, SARS Virus
cccgcgtaccgatactcgaatgtag

SEQ ID NO: 74997 - DNA, 25 bp, SARS Virus
ccgcgtaccgaatctcgaatgtagt

SEQ ID NO: 74998 - DNA, 25 bp, SARS Virus
cgcgtaccgaaattcgaatgtagtt

SEQ ID NO: 74999 - DNA, 25 bp, SARS Virus
gcgtaccgaaactcgaatgtagtta

SEQ ID NO: 75000 - DNA, 25 bp, SARS Virus
cgtaccgaaacttgaatgtagttac

SEQ ID NO: 75001 - DNA, 25 bp, SARS Virus
gtaccgaaactctaatgtagttact

SEQ ID NO: 75002 - DNA, 25 bp, SARS Virus
taccgaaactcgtatgtagttactt

SEQ ID NO: 75003 - DNA, 25 bp, SARS Virus
accgaaactcgattgtagttacttc

SEQ ID NO: 75004 - DNA, 25 bp, SARS Virus
ccgaaactcgaatgtagttacttca

SEQ ID NO: 75005 - DNA, 25 bp, SARS Virus
cgaaactcgaatttagttacttcat

SEQ ID NO: 75006 - DNA, 25 bp, SARS Virus
gaaactcgaatgtagttacttcatg

SEQ ID NO: 75007 - DNA, 25 bp, SARS Virus
aaactcgaatgttgttacttcatga

SEQ ID NO: 75008 - DNA, 25 bp, SARS Virus
aactcgaatgtatttacttcatgaa

SEQ ID NO: 75009 - DNA, 25 bp, SARS Virus
actcgaatgtagttacttcatgaaa

SEQ ID NO: 75010 - DNA, 25 bp, SARS Virus
ctcgaatgtagttacttcatgaaac

SEQ ID NO: 75011 - DNA, 25 bp, SARS Virus
tcgaatgtagtttcttcatgaaaca

SEQ ID NO: 75012 - DNA, 25 bp, SARS Virus
cgaatgtagttatttcatgaaacag

SEQ ID NO: 75013 - DNA, 25 bp, SARS Virus
gaatgtagttacttcatgaaacagt

SEQ ID NO: 75014 - DNA, 25 bp, SARS Virus
aatgtagttacttcatgaaacagtt

SEQ ID NO: 75015 - DNA, 25 bp, SARS Virus
atgtagttactttatgaaacagttc

SEQ ID NO: 75016 - DNA, 25 bp, SARS Virus
tgtagttacttcttgaaacagttct

SEQ ID NO: 75017 - DNA, 25 bp, SARS Virus
gtagttacttcatgaaacagttcta

SEQ ID NO: 75018 - DNA, 25 bp, SARS Virus
tagttacttcattaaacagttctaa

SEQ ID NO: 75019 - DNA, 25 bp, SARS Virus
agttacttcatgtaacagttctaac

SEQ ID NO: 75020 - DNA, 25 bp, SARS Virus
gttacttcatgatacagttctaacc

SEQ ID NO: 75021 - DNA, 25 bp, SARS Virus
ttacttcatgaatcagttctaacct

SEQ ID NO: 75022 - DNA, 25 bp, SARS Virus
tacttcatgaaatagttctaacctg

SEQ ID NO: 75023 - DNA, 25 bp, SARS Virus
acttcatgaaactgttctaacctgg

SEQ ID NO: 75024 - DNA, 25 bp, SARS Virus
cttcatgaaacatttctaacctgga

SEQ ID NO: 75025 - DNA, 25 bp, SARS Virus
ttcatgaaacagttctaacctggac

SEQ ID NO: 75026 - DNA, 25 bp, SARS Virus
tcatgaaacagttctaacctggact

SEQ ID NO: 75027 - DNA, 25 bp, SARS Virus
catgaaacagttttaacctggactt

SEQ ID NO: 75028 - DNA, 25 bp, SARS Virus
atgaaacagttctaacctggacttt

SEQ ID NO: 75029 - DNA, 25 bp, SARS Virus
tgaaacagttcttacctggactttc

SEQ ID NO: 75030 - DNA, 25 bp, SARS Virus
gaaacagttctatcctggactttct

SEQ ID NO: 75031 - DNA, 25 bp, SARS Virus
aaacagttctaatctggactttctt

SEQ ID NO: 75032 - DNA, 25 bp, SARS Virus
aacagttctaacttggactttcttg

SEQ ID NO: 75033 - DNA, 25 bp, SARS Virus
acagttctaacctggactttcttgc

SEQ ID NO: 75034 - DNA, 25 bp, SARS Virus
cagttctaaccttgactttcttgca

SEQ ID NO: 75035 - DNA, 25 bp, SARS Virus
agttctaacctgtactttcttgcac

SEQ ID NO: 75036 - DNA, 25 bp, SARS Virus
gttctaacctggtctttcttgcaca

SEQ ID NO: 75037 - DNA, 25 bp, SARS Virus
ttctaacctggattttcttgcacaa

SEQ ID NO: 75038 - DNA, 25 bp, SARS Virus
tctaacctggactttcttgcacaac

SEQ ID NO: 75039 - DNA, 25 bp, SARS Virus
ctaacctggactttcttgcacaaca

SEQ ID NO: 75040 - DNA, 25 bp, SARS Virus
taacctggactttcttgcacaacag

SEQ ID NO: 75041 - DNA, 25 bp, SARS Virus
aacctggacttttttgcacaacaga

SEQ ID NO: 75042 - DNA, 25 bp, SARS Virus
acctggactttcttgcacaacagac

SEQ ID NO: 75043 - DNA, 25 bp, SARS Virus
cctggactttcttgcacaacagaca

SEQ ID NO: 75044 - DNA, 25 bp, SARS Virus
ctggactttctttcacaacagacac

SEQ ID NO: 75045 - DNA, 25 bp, SARS Virus
tggactttcttgtacaacagacaca

SEQ ID NO: 75046 - DNA, 25 bp, SARS Virus
ggactttcttgctcaacagacacac

SEQ ID NO: 75047 - DNA, 25 bp, SARS Virus
gactttcttgcataacagacacact

SEQ ID NO: 75048 - DNA, 25 bp, SARS Virus
actttcttgcactacagacacactg

SEQ ID NO: 75049 - DNA, 25 bp, SARS Virus
ctttcttgcacatcagacacactgt

SEQ ID NO: 75050 - DNA, 25 bp, SARS Virus
tttcttgcacaatagacacactgtt

SEQ ID NO: 75051 - DNA, 25 bp, SARS Virus
ttcttgcacaactgacacactgttt

SEQ ID NO: 75052 - DNA, 25 bp, SARS Virus
tcttgcacaacatacacactgtttg

SEQ ID NO: 75053 - DNA, 25 bp, SARS Virus
cttgcacaacagtcacactgtttgc

SEQ ID NO: 75054 - DNA, 25 bp, SARS Virus
ttgcacaacagatacactgtttgca

SEQ ID NO: 75055 - DNA, 25 bp, SARS Virus
tgcacaacagactcactgtttgcac

SEQ ID NO: 75056 - DNA, 25 bp, SARS Virus
gcacaacagacatactgtttgcacg

SEQ ID NO: 75057 - DNA, 25 bp, SARS Virus
cacaacagacactctgtttgcacgt

SEQ ID NO: 75058 - DNA, 25 bp, SARS Virus
acaacagacacattgtttgcacgtt

SEQ ID NO: 75059 - DNA, 25 bp, SARS Virus
caacagacacactgtttgcacgttg

SEQ ID NO: 75060 - DNA, 25 bp, SARS Virus
aacagacacactttttgcacgttga

SEQ ID NO: 75061 - DNA, 25 bp, SARS Virus
acagacacactgtttgcacgttgaa

SEQ ID NO: 75062 - DNA, 25 bp, SARS Virus
cagacacactgtttgcacgttgaac

SEQ ID NO: 75063 - DNA, 25 bp, SARS Virus
agacacactgtttgcacgttgaacg

SEQ ID NO: 75064 - DNA, 25 bp, SARS Virus
gacacactgttttcacgttgaacga

SEQ ID NO: 75065 - DNA, 25 bp, SARS Virus
acacactgtttgtacgttgaacgaa

SEQ ID NO: 75066 - DNA, 25 bp, SARS Virus
cacactgtttgctcgttgaacgaaa

SEQ ID NO: 75067 - DNA, 25 bp, SARS Virus
acactgtttgcatgttgaacgaaaa

SEQ ID NO: 75068 - DNA, 25 bp, SARS Virus
cactgtttgcactttgaacgaaaag

SEQ ID NO: 75069 - DNA, 25 bp, SARS Virus
actgtttgcacgttgaacgaaaaga

SEQ ID NO: 75070 - DNA, 25 bp, SARS Virus
ctgtttgcacgttgaacgaaaagat

SEQ ID NO: 75071 - DNA, 25 bp, SARS Virus
tgtttgcacgtttaacgaaaagatg

SEQ ID NO: 75072 - DNA, 25 bp, SARS Virus
gtttgcacgttgtacgaaaagatga

SEQ ID NO: 75073 - DNA, 25 bp, SARS Virus
tttgcacgttgatcgaaaagatgaa

SEQ ID NO: 75074 - DNA, 25 bp, SARS Virus
ttgcacgttgaatgaaaagatgaag

SEQ ID NO: 75075 - DNA, 25 bp, SARS Virus
tgcacgttgaactaaaagatgaagt

SEQ ID NO: 75076 - DNA, 25 bp, SARS Virus
gcacgttgaacgtaaagatgaagta

SEQ ID NO: 75077 - DNA, 25 bp, SARS Virus
cacgttgaacgataagatgaagtag

SEQ ID NO: 75078 - DNA, 25 bp, SARS Virus
acgttgaacgaatagatgaagtagt

SEQ ID NO: 75079 - DNA, 25 bp, SARS Virus
cgttgaacgaaatgatgaagtagtc

SEQ ID NO: 75080 - DNA, 25 bp, SARS Virus
gttgaacgaaaatatgaagtagtct

SEQ ID NO: 75081 - DNA, 25 bp, SARS Virus
ttgaacgaaaagttgaagtagtcta

SEQ ID NO: 75082 - DNA, 25 bp, SARS Virus
tgaacgaaaagatgaagtagtctat

SEQ ID NO: 75083 - DNA, 25 bp, SARS Virus
gaacgaaaagattaagtagtctatg

SEQ ID NO: 75084 - DNA, 25 bp, SARS Virus
aacgaaaagatgtagtagtctatga

SEQ ID NO: 75085 - DNA, 25 bp, SARS Virus
acgaaaagatgatgtagtctatgaa

SEQ ID NO: 75086 - DNA, 25 bp, SARS Virus
cgaaaagatgaattagtctatgaat

SEQ ID NO: 75087 - DNA, 25 bp, SARS Virus
gaaaagatgaagtagtctatgaata

SEQ ID NO: 75088 - DNA, 25 bp, SARS Virus
aaaagatgaagttgtctatgaatac

SEQ ID NO: 75089 - DNA, 25 bp, SARS Virus
aaagatgaagtattctatgaatacg

SEQ ID NO: 75090 - DNA, 25 bp, SARS Virus
aagatgaagtagtctatgaatacgg

SEQ ID NO: 75091 - DNA, 25 bp, SARS Virus
agatgaagtagtttatgaatacgga

SEQ ID NO: 75092 - DNA, 25 bp, SARS Virus
gatgaagtagtctatgaatacggac

SEQ ID NO: 75093 - DNA, 25 bp, SARS Virus
atgaagtagtctttgaatacggacg

SEQ ID NO: 75094 - DNA, 25 bp, SARS Virus
tgaagtagtctatgaatacggacga

SEQ ID NO: 75095 - DNA, 25 bp, SARS Virus
gaagtagtctattaatacggacgac

SEQ ID NO: 75096 - DNA, 25 bp, SARS Virus
aagtagtctatgtatacggacgacc

SEQ ID NO: 75097 - DNA, 25 bp, SARS Virus
agtagtctatgattacggacgacct

SEQ ID NO: 75098 - DNA, 25 bp, SARS Virus
gtagtctatgaatacggacgacctt

SEQ ID NO: 75099 - DNA, 25 bp, SARS Virus
tagtctatgaattcggacgacctta

SEQ ID NO: 75100 - DNA, 25 bp, SARS Virus
agtctatgaatatggacgaccttag

SEQ ID NO: 75101 - DNA, 25 bp, SARS Virus
gtctatgaatactgacgaccttagt

SEQ ID NO: 75102 - DNA, 25 bp, SARS Virus
tctatgaatacgtacgaccttagta

SEQ ID NO: 75103 - DNA, 25 bp, SARS Virus
ctatgaatacggtcgaccttagtaa

SEQ ID NO: 75104 - DNA, 25 bp, SARS Virus
tatgaatacggatgaccttagtaag

SEQ ID NO: 75105 - DNA, 25 bp, SARS Virus
atgaatacggactaccttagtaaga

SEQ ID NO: 75106 - DNA, 25 bp, SARS Virus
tgaatacggacgtccttagtaagac

SEQ ID NO: 75107 - DNA, 25 bp, SARS Virus
gaatacggacgatcttagtaagaca

SEQ ID NO: 75108 - DNA, 25 bp, SARS Virus
aatacggacgactttagtaagacac

SEQ ID NO: 75109 - DNA, 25 bp, SARS Virus
atacggacgaccttagtaagacacc

SEQ ID NO: 75110 - DNA, 25 bp, SARS Virus
tacggacgaccttagtaagacaccc

SEQ ID NO: 75111 - DNA, 25 bp, SARS Virus
acggacgacctttgtaagacaccca

SEQ ID NO: 75112 - DNA, 25 bp, SARS Virus
cggacgaccttattaagacacccaa

SEQ ID NO: 75113 - DNA, 25 bp, SARS Virus
ggacgaccttagtaagacacccaaa

SEQ ID NO: 75114 - DNA, 25 bp, SARS Virus
gacgaccttagttagacacccaaaa

SEQ ID NO: 75115 - DNA, 25 bp, SARS Virus
acgaccttagtatgacacccaaaac

SEQ ID NO: 75116 - DNA, 25 bp, SARS Virus
cgaccttagtaatacacccaaaact

SEQ ID NO: 75117 - DNA, 25 bp, SARS Virus
gaccttagtaagtcacccaaaactg

SEQ ID NO: 75118 - DNA, 25 bp, SARS Virus
accttagtaagatacccaaaactga

SEQ ID NO: 75119 - DNA, 25 bp, SARS Virus
ccttagtaagactcccaaaactgat

SEQ ID NO: 75120 - DNA, 25 bp, SARS Virus
cttagtaagacatccaaaactgata

SEQ ID NO: 75121 - DNA, 25 bp, SARS Virus
ttagtaagacactcaaaactgatac

SEQ ID NO: 75122 - DNA, 25 bp, SARS Virus
tagtaagacacctaaaactgataca

SEQ ID NO: 75123 - DNA, 25 bp, SARS Virus
agtaagacaccctaaactgatacag

SEQ ID NO: 75124 - DNA, 25 bp, SARS Virus
gtaagacacccataactgatacaga

SEQ ID NO: 75125 - DNA, 25 bp, SARS Virus
taagacacccaatactgatacagat

SEQ ID NO: 75126 - DNA, 25 bp, SARS Virus
aagacacccaaatctgatacagata

SEQ ID NO: 75127 - DNA, 25 bp, SARS Virus
agacacccaaaattgatacagatat

SEQ ID NO: 75128 - DNA, 25 bp, SARS Virus
gacacccaaaactgatacagatatt

SEQ ID NO: 75129 - DNA, 25 bp, SARS Virus
acacccaaaacttatacagatattg

SEQ ID NO: 75130 - DNA, 25 bp, SARS Virus
cacccaaaactgttacagatattgg

SEQ ID NO: 75131 - DNA, 25 bp, SARS Virus
acccaaaactgatacagatattggg

SEQ ID NO: 75132 - DNA, 25 bp, SARS Virus
cccaaaactgattcagatattgggt

SEQ ID NO: 75133 - DNA, 25 bp, SARS Virus
ccaaaactgatatagatattgggta

SEQ ID NO: 75134 - DNA, 25 bp, SARS Virus
caaaactgatactgatattgggtaa

SEQ ID NO: 75135 - DNA, 25 bp, SARS Virus
aaaactgatacatatattgggtaaa

SEQ ID NO: 75136 - DNA, 25 bp, SARS Virus
aaactgatacagttattgggtaaat

SEQ ID NO: 75137 - DNA, 25 bp, SARS Virus
aactgatacagatattgggtaaata

SEQ ID NO: 75138 - DNA, 25 bp, SARS Virus
actgatacagattttgggtaaatac

SEQ ID NO: 75139 - DNA, 25 bp, SARS Virus
ctgatacagatattgggtaaatact

SEQ ID NO: 75140 - DNA, 25 bp, SARS Virus
tgatacagatattgggtaaatacta

SEQ ID NO: 75141 - DNA, 25 bp, SARS Virus
gatacagatatttggtaaatactaa

SEQ ID NO: 75142 - DNA, 25 bp, SARS Virus
atacagatattgtgtaaatactaac

SEQ ID NO: 75143 - DNA, 25 bp, SARS Virus
tacagatattggttaaatactaact

SEQ ID NO: 75144 - DNA, 25 bp, SARS Virus
acagatattgggtaaatactaacta

SEQ ID NO: 75145 - DNA, 25 bp, SARS Virus
cagatattgggttaatactaactac

SEQ ID NO: 75146 - DNA, 25 bp, SARS Virus
agatattgggtatatactaactaca

SEQ ID NO: 75147 - DNA, 25 bp, SARS Virus
gatattgggtaattactaactacaa

SEQ ID NO: 75148 - DNA, 25 bp, SARS Virus
atattgggtaaatactaactacaag

SEQ ID NO: 75149 - DNA, 25 bp, SARS Virus
tattgggtaaattctaactacaagt

SEQ ID NO: 75150 - DNA, 25 bp, SARS Virus
attgggtaaatattaactacaagtc

SEQ ID NO: 75151 - DNA, 25 bp, SARS Virus
ttgggtaaatactaactacaagtcg

SEQ ID NO: 75152 - DNA, 25 bp, SARS Virus
tgggtaaatacttactacaagtcgt

SEQ ID NO: 75153 - DNA, 25 bp, SARS Virus
gggtaaatactatctacaagtcgtc

SEQ ID NO: 75154 - DNA, 25 bp, SARS Virus
ggtaaatactaattacaagtcgtca

SEQ ID NO: 75155 - DNA, 25 bp, SARS Virus
gtaaatactaactacaagtcgtcac

SEQ ID NO: 75156 - DNA, 25 bp, SARS Virus
taaatactaacttcaagtcgtcacc

SEQ ID NO: 75157 - DNA, 25 bp, SARS Virus
aaatactaactataagtcgtcaccc

SEQ ID NO: 75158 - DNA, 25 bp, SARS Virus
aatactaactactagtcgtcacccc

SEQ ID NO: 75159 - DNA, 25 bp, SARS Virus
atactaactacatgtcgtcaccccg

SEQ ID NO: 75160 - DNA, 25 bp, SARS Virus
tactaactacaattcgtcaccccga

SEQ ID NO: 75161 - DNA, 25 bp, SARS Virus
actaactacaagtcgtcaccccgaa

SEQ ID NO: 75162 - DNA, 25 bp, SARS Virus
ctaactacaagttgtcaccccgaaa

SEQ ID NO: 75163 - DNA, 25 bp, SARS Virus
taactacaagtcttcaccccgaaat

SEQ ID NO: 75164 - DNA, 25 bp, SARS Virus
aactacaagtcgtcaccccgaaatg

SEQ ID NO: 75165 - DNA, 25 bp, SARS Virus
actacaagtcgttaccccgaaatgc

SEQ ID NO: 75166 - DNA, 25 bp, SARS Virus
ctacaagtcgtctccccgaaatgcc

SEQ ID NO: 75167 - DNA, 25 bp, SARS Virus
tacaagtcgtcatcccgaaatgccc

SEQ ID NO: 75168 - DNA, 25 bp, SARS Virus
acaagtcgtcactccgaaatgccca

SEQ ID NO: 75169 - DNA, 25 bp, SARS Virus
caagtcgtcacctcgaaatgcccat

SEQ ID NO: 75170 - DNA, 25 bp, SARS Virus
aagtcgtcaccctgaaatgcccatt

SEQ ID NO: 75171 - DNA, 25 bp, SARS Virus
agtcgtcacccctaaatgcccattg

SEQ ID NO: 75172 - DNA, 25 bp, SARS Virus
gtcgtcaccccgtaatgcccattgg

SEQ ID NO: 75173 - DNA, 25 bp, SARS Virus
tcgtcaccccgatatgcccattgga

SEQ ID NO: 75174 - DNA, 25 bp, SARS Virus
cgtcaccccgaattgcccattggaa

SEQ ID NO: 75175 - DNA, 25 bp, SARS Virus
gtcaccccgaaatgcccattggaag

SEQ ID NO: 75176 - DNA, 25 bp, SARS Virus
tcaccccgaaattcccattggaagt

SEQ ID NO: 75177 - DNA, 25 bp, SARS Virus
caccccgaaatgtccattggaagtc

SEQ ID NO: 75178 - DNA, 25 bp, SARS Virus
accccgaaatgctcattggaagtct

SEQ ID NO: 75179 - DNA, 25 bp, SARS Virus
ccccgaaatgcctattggaagtctc

SEQ ID NO: 75180 - DNA, 25 bp, SARS Virus
cccgaaatgccctttggaagtctca

SEQ ID NO: 75181 - DNA, 25 bp, SARS Virus
ccgaaatgcccattggaagtctcat

SEQ ID NO: 75182 - DNA, 25 bp, SARS Virus
cgaaatgcccattggaagtctcatt

SEQ ID NO: 75183 - DNA, 25 bp, SARS Virus
gaaatgcccatttgaagtctcattg

SEQ ID NO: 75184 - DNA, 25 bp, SARS Virus
aaatgcccattgtaagtctcattgg

SEQ ID NO: 75185 - DNA, 25 bp, SARS Virus
aatgcccattggtagtctcattggt

SEQ ID NO: 75186 - DNA, 25 bp, SARS Virus
atgcccattggatgtctcattggta

SEQ ID NO: 75187 - DNA, 25 bp, SARS Virus
tgcccattggaattctcattggtac

SEQ ID NO: 75188 - DNA, 25 bp, SARS Virus
gcccattggaagtctcattggtact

SEQ ID NO: 75189 - DNA, 25 bp, SARS Virus
cccattggaagtttcattggtactg

SEQ ID NO: 75190 - DNA, 25 bp, SARS Virus
ccattggaagtctcattggtactgg

SEQ ID NO: 75191 - DNA, 25 bp, SARS Virus
cattggaagtcttattggtactggt

SEQ ID NO: 75192 - DNA, 25 bp, SARS Virus
attggaagtctctttggtactggtt

SEQ ID NO: 75193 - DNA, 25 bp, SARS Virus
ttggaagtctcattggtactggttg

SEQ ID NO: 75194 - DNA, 25 bp, SARS Virus
tggaagtctcattggtactggttgt

SEQ ID NO: 75195 - DNA, 25 bp, SARS Virus
ggaagtctcatttgtactggttgta

SEQ ID NO: 75196 - DNA, 25 bp, SARS Virus
gaagtctcattgttactggttgtaa

SEQ ID NO: 75197 - DNA, 25 bp, SARS Virus
aagtctcattggtactggttgtaac

SEQ ID NO: 75198 - DNA, 25 bp, SARS Virus
agtctcattggttctggttgtaacg

SEQ ID NO: 75199 - DNA, 25 bp, SARS Virus
gtctcattggtattggttgtaacgg

SEQ ID NO: 75200 - DNA, 25 bp, SARS Virus
tctcattggtactggttgtaacggt

SEQ ID NO: 75201 - DNA, 25 bp, SARS Virus
ctcattggtacttgttgtaacggtc

SEQ ID NO: 75202 - DNA, 25 bp, SARS Virus
tcattggtactgtttgtaacggtcc

SEQ ID NO: 75203 - DNA, 25 bp, SARS Virus
cattggtactggttgtaacggtcca

SEQ ID NO: 75204 - DNA, 25 bp, SARS Virus
attggtactggttgtaacggtccat

SEQ ID NO: 75205 - DNA, 25 bp, SARS Virus
ttggtactggttttaacggtccatg

SEQ ID NO: 75206 - DNA, 25 bp, SARS Virus
tggtactggttgtaacggtccatgt

SEQ ID NO: 75207 - DNA, 25 bp, SARS Virus
ggtactggttgttacggtccatgta

SEQ ID NO: 75208 - DNA, 25 bp, SARS Virus
gtactggttgtatcggtccatgtac

SEQ ID NO: 75209 - DNA, 25 bp, SARS Virus
tactggttgtaatggtccatgtacc

SEQ ID NO: 75210 - DNA, 25 bp, SARS Virus
actggttgtaactgtccatgtacct

SEQ ID NO: 75211 - DNA, 25 bp, SARS Virus
ctggttgtaacgttccatgtacctt

SEQ ID NO: 75212 - DNA, 25 bp, SARS Virus
tggttgtaacggtccatgtaccttt

SEQ ID NO: 75213 - DNA, 25 bp, SARS Virus
ggttgtaacggttcatgtaccttta

SEQ ID NO: 75214 - DNA, 25 bp, SARS Virus
gttgtaacggtctatgtacctttac

SEQ ID NO: 75215 - DNA, 25 bp, SARS Virus
ttgtaacggtccttgtacctttacg

SEQ ID NO: 75216 - DNA, 25 bp, SARS Virus
tgtaacggtccatgtacctttacgt

SEQ ID NO: 75217 - DNA, 25 bp, SARS Virus
gtaacggtccatttacctttacgtg

SEQ ID NO: 75218 - DNA, 25 bp, SARS Virus
taacggtccatgtacctttacgtgt

SEQ ID NO: 75219 - DNA, 25 bp, SARS Virus
aacggtccatgttcctttacgtgta

SEQ ID NO: 75220 - DNA, 25 bp, SARS Virus
acggtccatgtatctttacgtgtac

SEQ ID NO: 75221 - DNA, 25 bp, SARS Virus
cggtccatgtacttttacgtgtaca

SEQ ID NO: 75222 - DNA, 25 bp, SARS Virus
ggtccatgtacctttacgtgtacac

SEQ ID NO: 75223 - DNA, 25 bp, SARS Virus
gtccatgtacctttacgtgtacacc

SEQ ID NO: 75224 - DNA, 25 bp, SARS Virus
tccatgtacctttacgtgtacaccg

SEQ ID NO: 75225 - DNA, 25 bp, SARS Virus
ccatgtaccttttcgtgtacaccga

SEQ ID NO: 75226 - DNA, 25 bp, SARS Virus
catgtacctttatgtgtacaccgat

SEQ ID NO: 75227 - DNA, 25 bp, SARS Virus
atgtacctttacttgtacaccgatc

SEQ ID NO: 75228 - DNA, 25 bp, SARS Virus
tgtacctttacgtgtacaccgatca

SEQ ID NO: 75229 - DNA, 25 bp, SARS Virus
gtacctttacgtttacaccgatcaa

SEQ ID NO: 75230 - DNA, 25 bp, SARS Virus
tacctttacgtgtacaccgatcaac

SEQ ID NO: 75231 - DNA, 25 bp, SARS Virus
acctttacgtgttcaccgatcaaca

SEQ ID NO: 75232 - DNA, 25 bp, SARS Virus
cctttacgtgtataccgatcaacac

SEQ ID NO: 75233 - DNA, 25 bp, SARS Virus
ctttacgtgtactccgatcaacact

SEQ ID NO: 75234 - DNA, 25 bp, SARS Virus
tttacgtgtacatcgatcaacacta

SEQ ID NO: 75235 - DNA, 25 bp, SARS Virus
ttacgtgtacactgatcaacactac

SEQ ID NO: 75236 - DNA, 25 bp, SARS Virus
tacgtgtacacctatcaacactacg

SEQ ID NO: 75237 - DNA, 25 bp, SARS Virus
acgtgtacaccgttcaacactacga

SEQ ID NO: 75238 - DNA, 25 bp, SARS Virus
cgtgtacaccgatcaacactacgat

SEQ ID NO: 75239 - DNA, 25 bp, SARS Virus
gtgtacaccgattaacactacgata

SEQ ID NO: 75240 - DNA, 25 bp, SARS Virus
tgtacaccgatctacactacgatag

SEQ ID NO: 75241 - DNA, 25 bp, SARS Virus
gtacaccgatcatcactacgatagt

SEQ ID NO: 75242 - DNA, 25 bp, SARS Virus
tacaccgatcaatactacgatagta

SEQ ID NO: 75243 - DNA, 25 bp, SARS Virus
acaccgatcaactctacgatagtac

SEQ ID NO: 75244 - DNA, 25 bp, SARS Virus
caccgatcaacattacgatagtact

SEQ ID NO: 75245 - DNA, 25 bp, SARS Virus
accgatcaacactacgatagtactg

SEQ ID NO: 75246 - DNA, 25 bp, SARS Virus
ccgatcaacacttcgatagtactga

SEQ ID NO: 75247 - DNA, 25 bp, SARS Virus
cgatcaacactatgatagtactgat

SEQ ID NO: 75248 - DNA, 25 bp, SARS Virus
gatcaacactactatagtactgatc

SEQ ID NO: 75249 - DNA, 25 bp, SARS Virus
atcaacactacgttagtactgatct

SEQ ID NO: 75250 - DNA, 25 bp, SARS Virus
tcaacactacgatagtactgatcta

SEQ ID NO: 75251 - DNA, 25 bp, SARS Virus
caacactacgattgtactgatctac

SEQ ID NO: 75252 - DNA, 25 bp, SARS Virus
aacactacgatattactgatctaca

SEQ ID NO: 75253 - DNA, 25 bp, SARS Virus
acactacgatagtactgatctacaa

SEQ ID NO: 75254 - DNA, 25 bp, SARS Virus
cactacgatagttctgatctacaaa

SEQ ID NO: 75255 - DNA, 25 bp, SARS Virus
actacgatagtattgatctacaaat

SEQ ID NO: 75256 - DNA, 25 bp, SARS Virus
ctacgatagtactgatctacaaatc

SEQ ID NO: 75257 - DNA, 25 bp, SARS Virus
tacgatagtacttatctacaaatcg

SEQ ID NO: 75258 - DNA, 25 bp, SARS Virus
acgatagtactgttctacaaatcgt

SEQ ID NO: 75259 - DNA, 25 bp, SARS Virus
cgatagtactgatctacaaatcgtc

SEQ ID NO: 75260 - DNA, 25 bp, SARS Virus
gatagtactgatttacaaatcgtca

SEQ ID NO: 75261 - DNA, 25 bp, SARS Virus
atagtactgatctacaaatcgtcag

SEQ ID NO: 75262 - DNA, 25 bp, SARS Virus
tagtactgatcttcaaatcgtcagg

SEQ ID NO: 75263 - DNA, 25 bp, SARS Virus
agtactgatctataaatcgtcaggt

SEQ ID NO: 75264 - DNA, 25 bp, SARS Virus
gtactgatctactaatcgtcaggta

SEQ ID NO: 75265 - DNA, 25 bp, SARS Virus
tactgatctacatatcgtcaggtac

SEQ ID NO: 75266 - DNA, 25 bp, SARS Virus
actgatctacaattcgtcaggtact

SEQ ID NO: 75267 - DNA, 25 bp, SARS Virus
ctgatctacaaatcgtcaggtactc

SEQ ID NO: 75268 - DNA, 25 bp, SARS Virus
tgatctacaaattgtcaggtactca

SEQ ID NO: 75269 - DNA, 25 bp, SARS Virus
gatctacaaatcttcaggtactcac

SEQ ID NO: 75270 - DNA, 25 bp, SARS Virus
atctacaaatcgtcaggtactcacg

SEQ ID NO: 75271 - DNA, 25 bp, SARS Virus
tctacaaatcgttaggtactcacga

SEQ ID NO: 75272 - DNA, 25 bp, SARS Virus
ctacaaatcgtctggtactcacgaa

SEQ ID NO: 75273 - DNA, 25 bp, SARS Virus
tacaaatcgtcatgtactcacgaaa

SEQ ID NO: 75274 - DNA, 25 bp, SARS Virus
acaaatcgtcagttactcacgaaac

SEQ ID NO: 75275 - DNA, 25 bp, SARS Virus
caaatcgtcaggtactcacgaaaca

SEQ ID NO: 75276 - DNA, 25 bp, SARS Virus
aaatcgtcaggttctcacgaaacaa

SEQ ID NO: 75277 - DNA, 25 bp, SARS Virus
aatcgtcaggtattcacgaaacaat

SEQ ID NO: 75278 - DNA, 25 bp, SARS Virus
atcgtcaggtactcacgaaacaatt

SEQ ID NO: 75279 - DNA, 25 bp, SARS Virus
tcgtcaggtacttacgaaacaattc

SEQ ID NO: 75280 - DNA, 25 bp, SARS Virus
cgtcaggtactctcgaaacaattcg

SEQ ID NO: 75281 - DNA, 25 bp, SARS Virus
gtcaggtactcaagaaacaattcgc

SEQ ID NO: 75282 - DNA, 25 bp, SARS Virus
tcaggtactcacaaaacaattcgcg

SEQ ID NO: 75283 - DNA, 25 bp, SARS Virus
caggtactcacgaaacaattcgcgc

SEQ ID NO: 75284 - DNA, 25 bp, SARS Virus
aggtactcacgaaacaattcgcgca

SEQ ID NO: 75285 - DNA, 25 bp, SARS Virus
ggtactcacgaaacaattcgcgcaa

SEQ ID NO: 75286 - DNA, 25 bp, SARS Virus
gtactcacgaaaaaattcgcgcaac

SEQ ID NO: 75287 - DNA, 25 bp, SARS Virus
tactcacgaaacaattcgcgcaact

SEQ ID NO: 75288 - DNA, 25 bp, SARS Virus
actcacgaaacaattcgcgcaacta

SEQ ID NO: 75289 - DNA, 25 bp, SARS Virus
ctcacgaaacaaatcgcgcaactaa

SEQ ID NO: 75290 - DNA, 25 bp, SARS Virus
tcacgaaacaatacgcgcaactaac

SEQ ID NO: 75291 - DNA, 25 bp, SARS Virus
cacgaaacaattagcgcaactaacc

SEQ ID NO: 75292 - DNA, 25 bp, SARS Virus
acgaaacaattcacgcaactaacca

SEQ ID NO: 75293 - DNA, 25 bp, SARS Virus
cgaaacaattcgagcaactaaccag

SEQ ID NO: 75294 - DNA, 25 bp, SARS Virus
gaaacaattcgcacaactaaccaga

SEQ ID NO: 75295 - DNA, 25 bp, SARS Virus
aaacaattcgcgaaactaaccagac

SEQ ID NO: 75296 - DNA, 25 bp, SARS Virus
aacaattcgcgcaactaaccagaca

SEQ ID NO: 75297 - DNA, 25 bp, SARS Virus
acaattcgcgcaactaaccagacaa

SEQ ID NO: 75298 - DNA, 25 bp, SARS Virus
caattcgcgcaaataaccagacaac

SEQ ID NO: 75299 - DNA, 25 bp, SARS Virus
aattcgcgcaacaaaccagacaact

SEQ ID NO: 75300 - DNA, 25 bp, SARS Virus
attcgcgcaactaaccagacaactt

SEQ ID NO: 75301 - DNA, 25 bp, SARS Virus
ttcgcgcaactaaccagacaactta

SEQ ID NO: 75302 - DNA, 25 bp, SARS Virus
tcgcgcaactaaacagacaacttat

SEQ ID NO: 75303 - DNA, 25 bp, SARS Virus
cgcgcaactaacaagacaacttatg

SEQ ID NO: 75304 - DNA, 25 bp, SARS Virus
gcgcaactaaccagacaacttatgg

SEQ ID NO: 75305 - DNA, 25 bp, SARS Virus
cgcaactaaccaaacaacttatggg

SEQ ID NO: 75306 - DNA, 25 bp, SARS Virus
gcaactaaccagacaacttatggga

SEQ ID NO: 75307 - DNA, 25 bp, SARS Virus
caactaaccagaaaacttatgggat

SEQ ID NO: 75308 - DNA, 25 bp, SARS Virus
aactaaccagacaacttatgggata

SEQ ID NO: 75309 - DNA, 25 bp, SARS Virus
actaaccagacaacttatgggataa

SEQ ID NO: 75310 - DNA, 25 bp, SARS Virus
ctaaccagacaaattatgggataat

SEQ ID NO: 75311 - DNA, 25 bp, SARS Virus
taaccagacaacatatgggataata

SEQ ID NO: 75312 - DNA, 25 bp, SARS Virus
aaccagacaactaatgggataatat

SEQ ID NO: 75313 - DNA, 25 bp, SARS Virus
accagacaacttatgggataatatc

SEQ ID NO: 75314 - DNA, 25 bp, SARS Virus
ccagacaacttaagggataatatcc

SEQ ID NO: 75315 - DNA, 25 bp, SARS Virus
cagacaacttataggataatatcct

SEQ ID NO: 75316 - DNA, 25 bp, SARS Virus
agacaacttatgagataatatcctc

SEQ ID NO: 75317 - DNA, 25 bp, SARS Virus
gacaacttatggaataatatcctct

SEQ ID NO: 75318 - DNA, 25 bp, SARS Virus
acaacttatgggataatatcctcta

SEQ ID NO: 75319 - DNA, 25 bp, SARS Virus
caacttatgggaaaatatcctctac

SEQ ID NO: 75320 - DNA, 25 bp, SARS Virus
aacttatgggataatatcctctact

SEQ ID NO: 75321 - DNA, 25 bp, SARS Virus
acttatgggataatatcctctactt

SEQ ID NO: 75322 - DNA, 25 bp, SARS Virus
cttatgggataaaatcctctacttg

SEQ ID NO: 75323 - DNA, 25 bp, SARS Virus
ttatgggataatatcctctacttga

SEQ ID NO: 75324 - DNA, 25 bp, SARS Virus
tatgggataataacctctacttgac

SEQ ID NO: 75325 - DNA, 25 bp, SARS Virus
atgggataatatactctacttgact

SEQ ID NO: 75326 - DNA, 25 bp, SARS Virus
tgggataatatcatctacttgactc

SEQ ID NO: 75327 - DNA, 25 bp, SARS Virus
gggataatatccactacttgactcc

SEQ ID NO: 75328 - DNA, 25 bp, SARS Virus
ggataatatcctatacttgactccc

SEQ ID NO: 75329 - DNA, 25 bp, SARS Virus
gataatatcctcaacttgactccca

SEQ ID NO: 75330 - DNA, 25 bp, SARS Virus
ataatatcctctacttgactcccaa

SEQ ID NO: 75331 - DNA, 25 bp, SARS Virus
taatatcctctaattgactcccaat

SEQ ID NO: 75332 - DNA, 25 bp, SARS Virus
aatatcctctacatgactcccaatt

SEQ ID NO: 75333 - DNA, 25 bp, SARS Virus
atatcctctactagactcccaatta

SEQ ID NO: 75334 - DNA, 25 bp, SARS Virus
tatcctctacttaactcccaattaa

SEQ ID NO: 75335 - DNA, 25 bp, SARS Virus
atcctctacttgactcccaattaag

SEQ ID NO: 75336 - DNA, 25 bp, SARS Virus
tcctctacttgaatcccaattaaga

SEQ ID NO: 75337 - DNA, 25 bp, SARS Virus
cctctacttgacacccaattaagac

SEQ ID NO: 75338 - DNA, 25 bp, SARS Virus
ctctacttgactaccaattaagacg

SEQ ID NO: 75339 - DNA, 25 bp, SARS Virus
tctacttgactcacaattaagacga

SEQ ID NO: 75340 - DNA, 25 bp, SARS Virus
ctacttgactccaaattaagacgaa

SEQ ID NO: 75341 - DNA, 25 bp, SARS Virus
tacttgactcccaattaagacgaac

SEQ ID NO: 75342 - DNA, 25 bp, SARS Virus
acttgactcccaattaagacgaacg

SEQ ID NO: 75343 - DNA, 25 bp, SARS Virus
cttgactcccaaataagacgaacgt

SEQ ID NO: 75344 - DNA, 25 bp, SARS Virus
ttgactcccaataaagacgaacgtc

SEQ ID NO: 75345 - DNA, 25 bp, SARS Virus
tgactcccaattaagacgaacgtct

SEQ ID NO: 75346 - DNA, 25 bp, SARS Virus
gactcccaattaagacgaacgtctt

SEQ ID NO: 75347 - DNA, 25 bp, SARS Virus
actcccaattaaaacgaacgtcttt

SEQ ID NO: 75348 - DNA, 25 bp, SARS Virus
ctcccaattaagacgaacgtctttt

SEQ ID NO: 75349 - DNA, 25 bp, SARS Virus
tcccaattaagaagaacgtcttttc

SEQ ID NO: 75350 - DNA, 25 bp, SARS Virus
cccaattaagacaaacgtcttttca

SEQ ID NO: 75351 - DNA, 25 bp, SARS Virus
ccaattaagacgaacgtcttttcat

SEQ ID NO: 75352 - DNA, 25 bp, SARS Virus
caattaagacgaacgtcttttcatg

SEQ ID NO: 75353 - DNA, 25 bp, SARS Virus
aattaagacgaaagtcttttcatgt

SEQ ID NO: 75354 - DNA, 25 bp, SARS Virus
attaagacgaacatcttttcatgtt

SEQ ID NO: 75355 - DNA, 25 bp, SARS Virus
ttaagacgaacgacttttcatgttg

SEQ ID NO: 75356 - DNA, 25 bp, SARS Virus
taagacgaacgtattttcatgttgt

SEQ ID NO: 75357 - DNA, 25 bp, SARS Virus
aagacgaacgtcatttcatgttgtg

SEQ ID NO: 75358 - DNA, 25 bp, SARS Virus
agacgaacgtctattcatgttgtgt

SEQ ID NO: 75359 - DNA, 25 bp, SARS Virus
gacgaacgtcttatcatgttgtgta

SEQ ID NO: 75360 - DNA, 25 bp, SARS Virus
acgaacgtctttacatgttgtgtac

SEQ ID NO: 75361 - DNA, 25 bp, SARS Virus
cgaacgtcttttaatgttgtgtacc

SEQ ID NO: 75362 - DNA, 25 bp, SARS Virus
gaacgtcttttcatgttgtgtacca

SEQ ID NO: 75363 - DNA, 25 bp, SARS Virus
aacgtcttttcaagttgtgtaccaa

SEQ ID NO: 75364 - DNA, 25 bp, SARS Virus
acgtcttttcatattgtgtaccaac

SEQ ID NO: 75365 - DNA, 25 bp, SARS Virus
cgtcttttcatgatgtgtaccaaca

SEQ ID NO: 75366 - DNA, 25 bp, SARS Virus
gtcttttcatgtagtgtaccaacac

SEQ ID NO: 75367 - DNA, 25 bp, SARS Virus
tcttttcatgttatgtaccaacact

SEQ ID NO: 75368 - DNA, 25 bp, SARS Virus
cttttcatgttgagtaccaacactt

SEQ ID NO: 75369 - DNA, 25 bp, SARS Virus
ttttcatgttgtataccaacacttc

SEQ ID NO: 75370 - DNA, 25 bp, SARS Virus
tttcatgttgtgaaccaacacttca

SEQ ID NO: 75371 - DNA, 25 bp, SARS Virus
ttcatgttgtgtaccaacacttcag

SEQ ID NO: 75372 - DNA, 25 bp, SARS Virus
tcatgttgtgtaacaacacttcaga

SEQ ID NO: 75373 - DNA, 25 bp, SARS Virus
catgttgtgtacaaacacttcagac

SEQ ID NO: 75374 - DNA, 25 bp, SARS Virus
atgttgtgtaccaacacttcagacg

SEQ ID NO: 75375 - DNA, 25 bp, SARS Virus
tgttgtgtaccaacacttcagacgt

SEQ ID NO: 75376 - DNA, 25 bp, SARS Virus
gttgtgtaccaaaacttcagacgta

SEQ ID NO: 75377 - DNA, 25 bp, SARS Virus
ttgtgtaccaacacttcagacgtaa

SEQ ID NO: 75378 - DNA, 25 bp, SARS Virus
tgtgtaccaacaattcagacgtaac

SEQ ID NO: 75379 - DNA, 25 bp, SARS Virus
gtgtaccaacacatcagacgtaacg

SEQ ID NO: 75380 - DNA, 25 bp, SARS Virus
tgtaccaacactacagacgtaacga

SEQ ID NO: 75381 - DNA, 25 bp, SARS Virus
gtaccaacacttaagacgtaacgaa

SEQ ID NO: 75382 - DNA, 25 bp, SARS Virus
taccaacacttcagacgtaacgaac

SEQ ID NO: 75383 - DNA, 25 bp, SARS Virus
accaacacttcaaacgtaacgaacg

SEQ ID NO: 75384 - DNA, 25 bp, SARS Virus
ccaacacttcagacgtaacgaacga

SEQ ID NO: 75385 - DNA, 25 bp, SARS Virus
caacacttcagaagtaacgaacgac

SEQ ID NO: 75386 - DNA, 25 bp, SARS Virus
aacacttcagacataacgaacgact

SEQ ID NO: 75387 - DNA, 25 bp, SARS Virus
acacttcagacgaaacgaacgacta

SEQ ID NO: 75388 - DNA, 25 bp, SARS Virus
cacttcagacgtaacgaacgactat

SEQ ID NO: 75389 - DNA, 25 bp, SARS Virus
acttcagacgtaacgaacgactatt

SEQ ID NO: 75390 - DNA, 25 bp, SARS Virus
cttcagacgtaaagaacgactattc

SEQ ID NO: 75391 - DNA, 25 bp, SARS Virus
ttcagacgtaacaaacgactattca

SEQ ID NO: 75392 - DNA, 25 bp, SARS Virus
tcagacgtaacgaacgactattcaa

SEQ ID NO: 75393 - DNA, 25 bp, SARS Virus
cagacgtaacgaacgactattcaaa

SEQ ID NO: 75394 - DNA, 25 bp, SARS Virus
agacgtaacgaaagactattcaaag

SEQ ID NO: 75395 - DNA, 25 bp, SARS Virus
gacgtaacgaacaactattcaaagg

SEQ ID NO: 75396 - DNA, 25 bp, SARS Virus
acgtaacgaacgactattcaaaggt

SEQ ID NO: 75397 - DNA, 25 bp, SARS Virus
cgtaacgaacgaatattcaaaggtc

SEQ ID NO: 75398 - DNA, 25 bp, SARS Virus
gtaacgaacgacaattcaaaggtca

SEQ ID NO: 75399 - DNA, 25 bp, SARS Virus
taacgaacgactattcaaaggtcaa

SEQ ID NO: 75400 - DNA, 25 bp, SARS Virus
aacgaacgactaatcaaaggtcaag

SEQ ID NO: 75401 - DNA, 25 bp, SARS Virus
acgaacgactatacaaaggtcaaga

SEQ ID NO: 75402 - DNA, 25 bp, SARS Virus
cgaacgactattaaaaggtcaagaa

SEQ ID NO: 75403 - DNA, 25 bp, SARS Virus
gaacgactattcaaaggtcaagaag

SEQ ID NO: 75404 - DNA, 25 bp, SARS Virus
aacgactattcaaaggtcaagaagt

SEQ ID NO: 75405 - DNA, 25 bp, SARS Virus
acgactattcaaaggtcaagaagta

SEQ ID NO: 75406 - DNA, 25 bp, SARS Virus
cgactattcaaaagtcaagaagtac

SEQ ID NO: 75407 - DNA, 25 bp, SARS Virus
gactattcaaagatcaagaagtact

SEQ ID NO: 75408 - DNA, 25 bp, SARS Virus
actattcaaaggacaagaagtactg

SEQ ID NO: 75409 - DNA, 25 bp, SARS Virus
ctattcaaaggtaaagaagtactgt

SEQ ID NO: 75410 - DNA, 25 bp, SARS Virus
tattcaaaggtcaagaagtactgta

SEQ ID NO: 75411 - DNA, 25 bp, SARS Virus
attcaaaggtcaagaagtactgtaa

SEQ ID NO: 75412 - DNA, 25 bp, SARS Virus
ttcaaaggtcaaaaagtactgtaac

SEQ ID NO: 75413 - DNA, 25 bp, SARS Virus
tcaaaggtcaagaagtactgtaacc

SEQ ID NO: 75414 - DNA, 25 bp, SARS Virus
caaaggtcaagaagtactgtaacct

SEQ ID NO: 75415 - DNA, 25 bp, SARS Virus
aaaggtcaagaaatactgtaacctt

SEQ ID NO: 75416 - DNA, 25 bp, SARS Virus
aaggtcaagaagaactgtaaccttt

SEQ ID NO: 75417 - DNA, 25 bp, SARS Virus
aggtcaagaagtactgtaaccttta

SEQ ID NO: 75418 - DNA, 25 bp, SARS Virus
ggtcaagaagtaatgtaacctttag

SEQ ID NO: 75419 - DNA, 25 bp, SARS Virus
gtcaagaagtacagtaacctttagg

SEQ ID NO: 75420 - DNA, 25 bp, SARS Virus
tcaagaagtactataacctttaggt

SEQ ID NO: 75421 - DNA, 25 bp, SARS Virus
caagaagtactgaaacctttaggtt

SEQ ID NO: 75422 - DNA, 25 bp, SARS Virus
aagaagtactgtaacctttaggttt

SEQ ID NO: 75423 - DNA, 25 bp, SARS Virus
agaagtactgtaacctttaggtttc

SEQ ID NO: 75424 - DNA, 25 bp, SARS Virus
gaagtactgtaaactttaggtttcc

SEQ ID NO: 75425 - DNA, 25 bp, SARS Virus
aagtactgtaacatttaggtttccg

SEQ ID NO: 75426 - DNA, 25 bp, SARS Virus
agtactgtaaccattaggtttccga

SEQ ID NO: 75427 - DNA, 25 bp, SARS Virus
gtactgtaacctataggtttccgat

SEQ ID NO: 75428 - DNA, 25 bp, SARS Virus
tactgtaaccttaaggtttccgata

SEQ ID NO: 75429 - DNA, 25 bp, SARS Virus
actgtaacctttaggtttccgatag

SEQ ID NO: 75430 - DNA, 25 bp, SARS Virus
ctgtaacctttaagtttccgatagt

SEQ ID NO: 75431 - DNA, 25 bp, SARS Virus
tgtaacctttagatttccgatagtt

SEQ ID NO: 75432 - DNA, 25 bp, SARS Virus
gtaacctttaggattccgatagttc

SEQ ID NO: 75433 - DNA, 25 bp, SARS Virus
taacctttaggtatccgatagttca

SEQ ID NO: 75434 - DNA, 25 bp, SARS Virus
aacctttaggttaccgatagttcac

SEQ ID NO: 75435 - DNA, 25 bp, SARS Virus
acctttaggtttacgatagttcaca

SEQ ID NO: 75436 - DNA, 25 bp, SARS Virus
cctttaggtttcagatagttcacac

SEQ ID NO: 75437 - DNA, 25 bp, SARS Virus
ctttaggtttccaatagttcacaca

SEQ ID NO: 75438 - DNA, 25 bp, SARS Virus
tttaggtttccgatagttcacacac

SEQ ID NO: 75439 - DNA, 25 bp, SARS Virus
ttaggtttccgaaagttcacacacg

SEQ ID NO: 75440 - DNA, 25 bp, SARS Virus
taggtttccgatagttcacacacgg

SEQ ID NO: 75441 - DNA, 25 bp, SARS Virus
aggtttccgataattcacacacgga

SEQ ID NO: 75442 - DNA, 25 bp, SARS Virus
ggtttccgatagatcacacacggag

SEQ ID NO: 75443 - DNA, 25 bp, SARS Virus
gtttccgatagtacacacacggagt

SEQ ID NO: 75444 - DNA, 25 bp, SARS Virus
tttccgatagttaacacacggagtc

SEQ ID NO: 75445 - DNA, 25 bp, SARS Virus
ttccgatagttcacacacggagtcc

SEQ ID NO: 75446 - DNA, 25 bp, SARS Virus
tccgatagttcaaacacggagtccg

SEQ ID NO: 75447 - DNA, 25 bp, SARS Virus
ccgatagttcacacacggagtccga

SEQ ID NO: 75448 - DNA, 25 bp, SARS Virus
cgatagttcacaaacggagtccgac

SEQ ID NO: 75449 - DNA, 25 bp, SARS Virus
gatagttcacacacggagtccgact

SEQ ID NO: 75450 - DNA, 25 bp, SARS Virus
atagttcacacaaggagtccgactt

SEQ ID NO: 75451 - DNA, 25 bp, SARS Virus
tagttcacacacagagtccgacttc

SEQ ID NO: 75452 - DNA, 25 bp, SARS Virus
agttcacacacgaagtccgacttca

SEQ ID NO: 75453 - DNA, 25 bp, SARS Virus
gttcacacacggagtccgacttcat

SEQ ID NO: 75454 - DNA, 25 bp, SARS Virus
ttcacacacggaatccgacttcatc

SEQ ID NO: 75455 - DNA, 25 bp, SARS Virus
tcacacacggagaccgacttcatct

SEQ ID NO: 75456 - DNA, 25 bp, SARS Virus
cacacacggagtacgacttcatctt

SEQ ID NO: 75457 - DNA, 25 bp, SARS Virus
acacacggagtcagacttcatctta

SEQ ID NO: 75458 - DNA, 25 bp, SARS Virus
cacacggagtccaacttcatcttac

SEQ ID NO: 75459 - DNA, 25 bp, SARS Virus
acacggagtccgacttcatcttacc

SEQ ID NO: 75460 - DNA, 25 bp, SARS Virus
cacggagtccgaattcatcttacct

SEQ ID NO: 75461 - DNA, 25 bp, SARS Virus
acggagtccgacatcatcttacctt

SEQ ID NO: 75462 - DNA, 25 bp, SARS Virus
cggagtccgactacatcttaccttc

SEQ ID NO: 75463 - DNA, 25 bp, SARS Virus
ggagtccgacttaatcttaccttca

SEQ ID NO: 75464 - DNA, 25 bp, SARS Virus
gagtccgacttcatcttaccttcaa

SEQ ID NO: 75465 - DNA, 25 bp, SARS Virus
agtccgacttcaacttaccttcaag

SEQ ID NO: 75466 - DNA, 25 bp, SARS Virus
gtccgacttcatattaccttcaaga

SEQ ID NO: 75467 - DNA, 25 bp, SARS Virus
tccgacttcatcataccttcaagat

SEQ ID NO: 75468 - DNA, 25 bp, SARS Virus
ccgacttcatctaaccttcaagatg

SEQ ID NO: 75469 - DNA, 25 bp, SARS Virus
cgacttcatcttaccttcaagatgc

SEQ ID NO: 75470 - DNA, 25 bp, SARS Virus
gacttcatcttaacttcaagatgct

SEQ ID NO: 75471 - DNA, 25 bp, SARS Virus
acttcatcttacattcaagatgcta

SEQ ID NO: 75472 - DNA, 25 bp, SARS Virus
cttcatcttaccatcaagatgctac

SEQ ID NO: 75473 - DNA, 25 bp, SARS Virus
ttcatcttacctacaagatgctacg

SEQ ID NO: 75474 - DNA, 25 bp, SARS Virus
tcatcttaccttaaagatgctacga

SEQ ID NO: 75475 - DNA, 25 bp, SARS Virus
catcttaccttcaagatgctacgag

SEQ ID NO: 75476 - DNA, 25 bp, SARS Virus
atcttaccttcaagatgctacgagt

SEQ ID NO: 75477 - DNA, 25 bp, SARS Virus
tcttaccttcaaaatgctacgagtc

SEQ ID NO: 75478 - DNA, 25 bp, SARS Virus
cttaccttcaagatgctacgagtcg

SEQ ID NO: 75479 - DNA, 25 bp, SARS Virus
ttaccttcaagaagctacgagtcgg

SEQ ID NO: 75480 - DNA, 25 bp, SARS Virus
taccttcaagatactacgagtcggt

SEQ ID NO: 75481 - DNA, 25 bp, SARS Virus
accttcaagatgatacgagtcggta

SEQ ID NO: 75482 - DNA, 25 bp, SARS Virus
ccttcaagatgcaacgagtcggtac

SEQ ID NO: 75483 - DNA, 25 bp, SARS Virus
cttcaagatgctacgagtcggtaca

SEQ ID NO: 75484 - DNA, 25 bp, SARS Virus
ttcaagatgctaagagtcggtacat

SEQ ID NO: 75485 - DNA, 25 bp, SARS Virus
tcaagatgctacaagtcggtacatc

SEQ ID NO: 75486 - DNA, 25 bp, SARS Virus
caagatgctacgagtcggtacatca

SEQ ID NO: 75487 - DNA, 25 bp, SARS Virus
aagatgctacgaatcggtacatcac

SEQ ID NO: 75488 - DNA, 25 bp, SARS Virus
agatgctacgagacggtacatcact

SEQ ID NO: 75489 - DNA, 25 bp, SARS Virus
gatgctacgagtaggtacatcactg

SEQ ID NO: 75490 - DNA, 25 bp, SARS Virus
atgctacgagtcagtacatcactgt

SEQ ID NO: 75491 - DNA, 25 bp, SARS Virus
tgctacgagtcgatacatcactgtt

SEQ ID NO: 75492 - DNA, 25 bp, SARS Virus
gctacgagtcggaacatcactgttt

SEQ ID NO: 75493 - DNA, 25 bp, SARS Virus
ctacgagtcggtacatcactgtttc

SEQ ID NO: 75494 - DNA, 25 bp, SARS Virus
tacgagtcggtaaatcactgtttcg

SEQ ID NO: 75495 - DNA, 25 bp, SARS Virus
acgagtcggtacatcactgtttcga

SEQ ID NO: 75496 - DNA, 25 bp, SARS Virus
cgagtcggtacaacactgtttcgaa

SEQ ID NO: 75497 - DNA, 25 bp, SARS Virus
gagtcggtacataactgtttcgaat

SEQ ID NO: 75498 - DNA, 25 bp, SARS Virus
agtcggtacatcactgtttcgaatg

SEQ ID NO: 75499 - DNA, 25 bp, SARS Virus
gtcggtacatcaatgtttcgaatgt

SEQ ID NO: 75500 - DNA, 25 bp, SARS Virus
tcggtacatcacagtttcgaatgtt

SEQ ID NO: 75501 - DNA, 25 bp, SARS Virus
cggtacatcactatttcgaatgttt

SEQ ID NO: 75502 - DNA, 25 bp, SARS Virus
ggtacatcactgattcgaatgtttt

SEQ ID NO: 75503 - DNA, 25 bp, SARS Virus
gtacatcactgtatcgaatgtttta

SEQ ID NO: 75504 - DNA, 25 bp, SARS Virus
tacatcactgttacgaatgttttat

SEQ ID NO: 75505 - DNA, 25 bp, SARS Virus
acatcactgtttagaatgttttatc

SEQ ID NO: 75506 - DNA, 25 bp, SARS Virus
catcactgtttcaaatgttttatct

SEQ ID NO: 75507 - DNA, 25 bp, SARS Virus
atcactgtttcgaatgttttatctc

SEQ ID NO: 75508 - DNA, 25 bp, SARS Virus
tcactgtttcgaatgttttatctcc

SEQ ID NO: 75509 - DNA, 25 bp, SARS Virus
cactgtttcgaaagttttatctcct

SEQ ID NO: 75510 - DNA, 25 bp, SARS Virus
actgtttcgaatattttatctcctt

SEQ ID NO: 75511 - DNA, 25 bp, SARS Virus
ctgtttcgaatgatttatctccttg

SEQ ID NO: 75512 - DNA, 25 bp, SARS Virus
tgtttcgaatgtattatctccttga

SEQ ID NO: 75513 - DNA, 25 bp, SARS Virus
gtttcgaatgttatatctccttgag

SEQ ID NO: 75514 - DNA, 25 bp, SARS Virus
tttcgaatgtttaatctccttgaga

SEQ ID NO: 75515 - DNA, 25 bp, SARS Virus
ttcgaatgttttatctccttgagaa

SEQ ID NO: 75516 - DNA, 25 bp, SARS Virus
tcgaatgttttaactccttgagaag

SEQ ID NO: 75517 - DNA, 25 bp, SARS Virus
cgaatgttttatatccttgagaaga

SEQ ID NO: 75518 - DNA, 25 bp, SARS Virus
gaatgttttatcaccttgagaagat

SEQ ID NO: 75519 - DNA, 25 bp, SARS Virus
aatgttttatctacttgagaagata

SEQ ID NO: 75520 - DNA, 25 bp, SARS Virus
atgttttatctcattgagaagataa

SEQ ID NO: 75521 - DNA, 25 bp, SARS Virus
tgttttatctccatgagaagataag

SEQ ID NO: 75522 - DNA, 25 bp, SARS Virus
gttttatctcctagagaagataaga

SEQ ID NO: 75523 - DNA, 25 bp, SARS Virus
ttttatctccttaagaagataagaa

SEQ ID NO: 75524 - DNA, 25 bp, SARS Virus
tttatctccttgagaagataagaat

SEQ ID NO: 75525 - DNA, 25 bp, SARS Virus
ttatctccttgaaaagataagaata

SEQ ID NO: 75526 - DNA, 25 bp, SARS Virus
tatctccttgagaagataagaatac

SEQ ID NO: 75527 - DNA, 25 bp, SARS Virus
atctccttgagaagataagaatacg

SEQ ID NO: 75528 - DNA, 25 bp, SARS Virus
tctccttgagaaaataagaatacga

SEQ ID NO: 75529 - DNA, 25 bp, SARS Virus
ctccttgagaagataagaatacgat

SEQ ID NO: 75530 - DNA, 25 bp, SARS Virus
tccttgagaagaaaagaatacgatg

SEQ ID NO: 75531 - DNA, 25 bp, SARS Virus
ccttgagaagataagaatacgatgt

SEQ ID NO: 75532 - DNA, 25 bp, SARS Virus
cttgagaagataagaatacgatgtg

SEQ ID NO: 75533 - DNA, 25 bp, SARS Virus
ttgagaagataaaaatacgatgtgt

SEQ ID NO: 75534 - DNA, 25 bp, SARS Virus
tgagaagataagaatacgatgtgta

SEQ ID NO: 75535 - DNA, 25 bp, SARS Virus
gagaagataagaatacgatgtgtag

SEQ ID NO: 75536 - DNA, 25 bp, SARS Virus
agaagataagaaaacgatgtgtagt

SEQ ID NO: 75537 - DNA, 25 bp, SARS Virus
gaagataagaatacgatgtgtagtg

SEQ ID NO: 75538 - DNA, 25 bp, SARS Virus
aagataagaataagatgtgtagtgc

SEQ ID NO: 75539 - DNA, 25 bp, SARS Virus
agataagaatacaatgtgtagtgct

SEQ ID NO: 75540 - DNA, 25 bp, SARS Virus
gataagaatacgatgtgtagtgcta

SEQ ID NO: 75541 - DNA, 25 bp, SARS Virus
ataagaatacgaagtgtagtgctat

SEQ ID NO: 75542 - DNA, 25 bp, SARS Virus
taagaatacgatatgtagtgctatt

SEQ ID NO: 75543 - DNA, 25 bp, SARS Virus
aagaatacgatgagtagtgctattt

SEQ ID NO: 75544 - DNA, 25 bp, SARS Virus
agaatacgatgtatagtgctattta

SEQ ID NO: 75545 - DNA, 25 bp, SARS Virus
gaatacgatgtgaagtgctatttaa

SEQ ID NO: 75546 - DNA, 25 bp, SARS Virus
aatacgatgtgtagtgctatttaag

SEQ ID NO: 75547 - DNA, 25 bp, SARS Virus
atacgatgtgtaatgctatttaagt

SEQ ID NO: 75548 - DNA, 25 bp, SARS Virus
tacgatgtgtagagctatttaagtg

SEQ ID NO: 75549 - DNA, 25 bp, SARS Virus
acgatgtgtagtactatttaagtga

SEQ ID NO: 75550 - DNA, 25 bp, SARS Virus
cgatgtgtagtgatatttaagtgac

SEQ ID NO: 75551 - DNA, 25 bp, SARS Virus
gatgtgtagtgcaatttaagtgact

SEQ ID NO: 75552 - DNA, 25 bp, SARS Virus
atgtgtagtgctatttaagtgacta

SEQ ID NO: 75553 - DNA, 25 bp, SARS Virus
tgtgtagtgctaattaagtgactac

SEQ ID NO: 75554 - DNA, 25 bp, SARS Virus
gtgtagtgctatataagtgactacc

SEQ ID NO: 75555 - DNA, 25 bp, SARS Virus
tgtagtgctattaaagtgactacca

SEQ ID NO: 75556 - DNA, 25 bp, SARS Virus
gtagtgctatttaagtgactaccac

SEQ ID NO: 75557 - DNA, 25 bp, SARS Virus
tagtgctatttaagtgactaccaca

SEQ ID NO: 75558 - DNA, 25 bp, SARS Virus
agtgctatttaaatgactaccacaa

SEQ ID NO: 75559 - DNA, 25 bp, SARS Virus
gtgctatttaagagactaccacaaa

SEQ ID NO: 75560 - DNA, 25 bp, SARS Virus
tgctatttaagtaactaccacaaac

SEQ ID NO: 75561 - DNA, 25 bp, SARS Virus
gctatttaagtgactaccacaaaca

SEQ ID NO: 75562 - DNA, 25 bp, SARS Virus
ctatttaagtgaataccacaaacaa

SEQ ID NO: 75563 - DNA, 25 bp, SARS Virus
tatttaagtgacaaccacaaacaaa

SEQ ID NO: 75564 - DNA, 25 bp, SARS Virus
atttaagtgactaccacaaacaaac

SEQ ID NO: 75565 - DNA, 25 bp, SARS Virus
tttaagtgactaacacaaacaaaca

SEQ ID NO: 75566 - DNA, 25 bp, SARS Virus
ttaagtgactacaacaaacaaacaa

SEQ ID NO: 75567 - DNA, 25 bp, SARS Virus
taagtgactaccacaaacaaacaaa

SEQ ID NO: 75568 - DNA, 25 bp, SARS Virus
aagtgactaccaaaaacaaacaaaa

SEQ ID NO: 75569 - DNA, 25 bp, SARS Virus
agtgactaccacaaacaaacaaaac

SEQ ID NO: 75570 - DNA, 25 bp, SARS Virus
gtgactaccacaaacaaacaaaacc

SEQ ID NO: 75571 - DNA, 25 bp, SARS Virus
tgactaccacaaacaaacaaaacct

SEQ ID NO: 75572 - DNA, 25 bp, SARS Virus
gactaccacaaaaaaacaaaacctt

SEQ ID NO: 75573 - DNA, 25 bp, SARS Virus
actaccacaaacaaacaaaacctta

SEQ ID NO: 75574 - DNA, 25 bp, SARS Virus
ctaccacaaacaaacaaaaccttaa

SEQ ID NO: 75575 - DNA, 25 bp, SARS Virus
taccacaaacaaacaaaaccttaac

SEQ ID NO: 75576 - DNA, 25 bp, SARS Virus
accacaaacaaaaaaaaccttaaca

SEQ ID NO: 75577 - DNA, 25 bp, SARS Virus
ccacaaacaaacaaaaccttaacat

SEQ ID NO: 75578 - DNA, 25 bp, SARS Virus
cacaaacaaacaaaaccttaacatt

SEQ ID NO: 75579 - DNA, 25 bp, SARS Virus
acaaacaaacaaaaccttaacattg

SEQ ID NO: 75580 - DNA, 25 bp, SARS Virus
caaacaaacaaaaccttaacattgc

SEQ ID NO: 75581 - DNA, 25 bp, SARS Virus
aaacaaacaaaaacttaacattgca

SEQ ID NO: 75582 - DNA, 25 bp, SARS Virus
aacaaacaaaacattaacattgcaa

SEQ ID NO: 75583 - DNA, 25 bp, SARS Virus
acaaacaaaaccataacattgcaac

SEQ ID NO: 75584 - DNA, 25 bp, SARS Virus
caaacaaaacctaaacattgcaact

SEQ ID NO: 75585 - DNA, 25 bp, SARS Virus
aaacaaaaccttaacattgcaacta

SEQ ID NO: 75586 - DNA, 25 bp, SARS Virus
aacaaaaccttaacattgcaactag

SEQ ID NO: 75587 - DNA, 25 bp, SARS Virus
acaaaaccttaaaattgcaactagc

SEQ ID NO: 75588 - DNA, 25 bp, SARS Virus
caaaaccttaacattgcaactagca

SEQ ID NO: 75589 - DNA, 25 bp, SARS Virus
aaaaccttaacaatgcaactagcaa

SEQ ID NO: 75590 - DNA, 25 bp, SARS Virus
aaaccttaacatagcaactagcaat

SEQ ID NO: 75591 - DNA, 25 bp, SARS Virus
aaccttaacattacaactagcaatg

SEQ ID NO: 75592 - DNA, 25 bp, SARS Virus
accttaacattgaaactagcaatgg

SEQ ID NO: 75593 - DNA, 25 bp, SARS Virus
ccttaacattgcaactagcaatggg

SEQ ID NO: 75594 - DNA, 25 bp, SARS Virus
cttaacattgcaactagcaatgggt

SEQ ID NO: 75595 - DNA, 25 bp, SARS Virus
ttaacattgcaaatagcaatgggtc

SEQ ID NO: 75596 - DNA, 25 bp, SARS Virus
taacattgcaacaagcaatgggtcg

SEQ ID NO: 75597 - DNA, 25 bp, SARS Virus
aacattgcaactagcaatgggtcgg

SEQ ID NO: 75598 - DNA, 25 bp, SARS Virus
acattgcaactaacaatgggtcggt

SEQ ID NO: 75599 - DNA, 25 bp, SARS Virus
cattgcaactagaaatgggtcggtt

SEQ ID NO: 75600 - DNA, 25 bp, SARS Virus
attgcaactagcaatgggtcggtta

SEQ ID NO: 75601 - DNA, 25 bp, SARS Virus
ttgcaactagcaatgggtcggttac

SEQ ID NO: 75602 - DNA, 25 bp, SARS Virus
tgcaactagcaaagggtcggttacg

SEQ ID NO: 75603 - DNA, 25 bp, SARS Virus
gcaactagcaataggtcggttacgt

SEQ ID NO: 75604 - DNA, 25 bp, SARS Virus
caactagcaatgagtcggttacgtt

SEQ ID NO: 75605 - DNA, 25 bp, SARS Virus
aactagcaatggatcggttacgtta

SEQ ID NO: 75606 - DNA, 25 bp, SARS Virus
actagcaatgggacggttacgttaa

SEQ ID NO: 75607 - DNA, 25 bp, SARS Virus
ctagcaatgggtaggttacgttaac

SEQ ID NO: 75608 - DNA, 25 bp, SARS Virus
tagcaatgggtcagttacgttaaca

SEQ ID NO: 75609 - DNA, 25 bp, SARS Virus
agcaatgggtcgattacgttaacac

SEQ ID NO: 75610 - DNA, 25 bp, SARS Virus
gcaatgggtcggatacgttaacaca

SEQ ID NO: 75611 - DNA, 25 bp, SARS Virus
caatgggtcggtaacgttaacacac

SEQ ID NO: 75612 - DNA, 25 bp, SARS Virus
aatgggtcggttacgttaacacaca

SEQ ID NO: 75613 - DNA, 25 bp, SARS Virus
atgggtcggttaagttaacacacat

SEQ ID NO: 75614 - DNA, 25 bp, SARS Virus
tgggtcggttacattaacacacatc

SEQ ID NO: 75615 - DNA, 25 bp, SARS Virus
gggtcggttacgataacacacatcc

SEQ ID NO: 75616 - DNA, 25 bp, SARS Virus
ggtcggttacgtaaacacacatcca

SEQ ID NO: 75617 - DNA, 25 bp, SARS Virus
gtcggttacgttaacacacatccaa

SEQ ID NO: 75618 - DNA, 25 bp, SARS Virus
tcggttacgttaacacacatccaaa

SEQ ID NO: 75619 - DNA, 25 bp, SARS Virus
cggttacgttaaaacacatccaaac

SEQ ID NO: 75620 - DNA, 25 bp, SARS Virus
ggttacgttaacacacatccaaact

SEQ ID NO: 75621 - DNA, 25 bp, SARS Virus
gttacgttaacaaacatccaaactg

SEQ ID NO: 75622 - DNA, 25 bp, SARS Virus
ttacgttaacacacatccaaactgt

SEQ ID NO: 75623 - DNA, 25 bp, SARS Virus
tacgttaacacaaatccaaactgtg

SEQ ID NO: 75624 - DNA, 25 bp, SARS Virus
acgttaacacacatccaaactgtgt

SEQ ID NO: 75625 - DNA, 25 bp, SARS Virus
cgttaacacacaaccaaactgtgtt

SEQ ID NO: 75626 - DNA, 25 bp, SARS Virus
gttaacacacatacaaactgtgttc

SEQ ID NO: 75627 - DNA, 25 bp, SARS Virus
ttaacacacatcaaaactgtgttct

SEQ ID NO: 75628 - DNA, 25 bp, SARS Virus
taacacacatccaaactgtgttctc

SEQ ID NO: 75629 - DNA, 25 bp, SARS Virus
aacacacatccaaactgtgttctca

SEQ ID NO: 75630 - DNA, 25 bp, SARS Virus
acacacatccaaactgtgttctcag

SEQ ID NO: 75631 - DNA, 25 bp, SARS Virus
cacacatccaaaatgtgttctcaga

SEQ ID NO: 75632 - DNA, 25 bp, SARS Virus
acacatccaaacagtgttctcagaa

SEQ ID NO: 75633 - DNA, 25 bp, SARS Virus
cacatccaaactatgttctcagaac

SEQ ID NO: 75634 - DNA, 25 bp, SARS Virus
acatccaaactgagttctcagaaca

SEQ ID NO: 75635 - DNA, 25 bp, SARS Virus
catccaaactgtattctcagaacag

SEQ ID NO: 75636 - DNA, 25 bp, SARS Virus
atccaaactgtgatctcagaacagt

SEQ ID NO: 75637 - DNA, 25 bp, SARS Virus
tccaaactgtgtactcagaacagtt

SEQ ID NO: 75638 - DNA, 25 bp, SARS Virus
ccaaactgtgttatcagaacagttt

SEQ ID NO: 75639 - DNA, 25 bp, SARS Virus
caaactgtgttcacagaacagtttg

SEQ ID NO: 75640 - DNA, 25 bp, SARS Virus
aaactgtgttctaagaacagtttga

SEQ ID NO: 75641 - DNA, 25 bp, SARS Virus
aactgtgttctcagaacagtttgaa

SEQ ID NO: 75642 - DNA, 25 bp, SARS Virus
actgtgttctcaaaacagtttgaac

SEQ ID NO: 75643 - DNA, 25 bp, SARS Virus
ctgtgttctcagaacagtttgaact

SEQ ID NO: 75644 - DNA, 25 bp, SARS Virus
tgtgttctcagaacagtttgaactt

SEQ ID NO: 75645 - DNA, 25 bp, SARS Virus
gtgttctcagaaaagtttgaacttg

SEQ ID NO: 75646 - DNA, 25 bp, SARS Virus
tgttctcagaacagtttgaacttga

SEQ ID NO: 75647 - DNA, 25 bp, SARS Virus
gttctcagaacaatttgaacttgaa

SEQ ID NO: 75648 - DNA, 25 bp, SARS Virus
ttctcagaacagattgaacttgaat

SEQ ID NO: 75649 - DNA, 25 bp, SARS Virus
tctcagaacagtatgaacttgaatg

SEQ ID NO: 75650 - DNA, 25 bp, SARS Virus
ctcagaacagttagaacttgaatgg

SEQ ID NO: 75651 - DNA, 25 bp, SARS Virus
tcagaacagtttaaacttgaatggt

SEQ ID NO: 75652 - DNA, 25 bp, SARS Virus
cagaacagtttgaacttgaatggtc

SEQ ID NO: 75653 - DNA, 25 bp, SARS Virus
agaacagtttgaacttgaatggtcc

SEQ ID NO: 75654 - DNA, 25 bp, SARS Virus
gaacagtttgaaattgaatggtccg

SEQ ID NO: 75655 - DNA, 25 bp, SARS Virus
aacagtttgaacatgaatggtccga

SEQ ID NO: 75656 - DNA, 25 bp, SARS Virus
acagtttgaactagaatggtccgac

SEQ ID NO: 75657 - DNA, 25 bp, SARS Virus
cagtttgaacttaaatggtccgaca

SEQ ID NO: 75658 - DNA, 25 bp, SARS Virus
agtttgaacttgaatggtccgacac

SEQ ID NO: 75659 - DNA, 25 bp, SARS Virus
gtttgaacttgaatggtccgacact

SEQ ID NO: 75660 - DNA, 25 bp, SARS Virus
tttgaacttgaaaggtccgacacta

SEQ ID NO: 75661 - DNA, 25 bp, SARS Virus
ttgaacttgaatagtccgacactac

SEQ ID NO: 75662 - DNA, 25 bp, SARS Virus
tgaacttgaatgatccgacactacc

SEQ ID NO: 75663 - DNA, 25 bp, SARS Virus
gaacttgaatggaccgacactacca

SEQ ID NO: 75664 - DNA, 25 bp, SARS Virus
aacttgaatggtacgacactaccac

SEQ ID NO: 75665 - DNA, 25 bp, SARS Virus
acttgaatggtcagacactaccacc

SEQ ID NO: 75666 - DNA, 25 bp, SARS Virus
cttgaatggtccaacactaccacca

SEQ ID NO: 75667 - DNA, 25 bp, SARS Virus
ttgaatggtccgacactaccaccat

SEQ ID NO: 75668 - DNA, 25 bp, SARS Virus
tgaatggtccgaaactaccaccatc

SEQ ID NO: 75669 - DNA, 25 bp, SARS Virus
gaatggtccgacactaccaccatca

SEQ ID NO: 75670 - DNA, 25 bp, SARS Virus
aatggtccgacaataccaccatcaa

SEQ ID NO: 75671 - DNA, 25 bp, SARS Virus
atggtccgacacaaccaccatcaaa

SEQ ID NO: 75672 - DNA, 25 bp, SARS Virus
tggtccgacactaccaccatcaaac

SEQ ID NO: 75673 - DNA, 25 bp, SARS Virus
ggtccgacactaacaccatcaaaca

SEQ ID NO: 75674 - DNA, 25 bp, SARS Virus
gtccgacactacaaccatcaaacat

SEQ ID NO: 75675 - DNA, 25 bp, SARS Virus
tccgacactaccaccatcaaacata

SEQ ID NO: 75676 - DNA, 25 bp, SARS Virus
ccgacactaccaacatcaaacatac

SEQ ID NO: 75677 - DNA, 25 bp, SARS Virus
cgacactaccacaatcaaacataca

SEQ ID NO: 75678 - DNA, 25 bp, SARS Virus
gacactaccaccatcaaacatacac

SEQ ID NO: 75679 - DNA, 25 bp, SARS Virus
acactaccaccaacaaacatacact

SEQ ID NO: 75680 - DNA, 25 bp, SARS Virus
cactaccaccataaaacatacactt

SEQ ID NO: 75681 - DNA, 25 bp, SARS Virus
actaccaccatcaaacatacactta

SEQ ID NO: 75682 - DNA, 25 bp, SARS Virus
ctaccaccatcaaacatacacttat

SEQ ID NO: 75683 - DNA, 25 bp, SARS Virus
taccaccatcaaacatacacttatt

SEQ ID NO: 75684 - DNA, 25 bp, SARS Virus
accaccatcaaaaatacacttattc

SEQ ID NO: 75685 - DNA, 25 bp, SARS Virus
ccaccatcaaacatacacttattcg

SEQ ID NO: 75686 - DNA, 25 bp, SARS Virus
caccatcaaacaaacacttattcgt

SEQ ID NO: 75687 - DNA, 25 bp, SARS Virus
accatcaaacatacacttattcgta

SEQ ID NO: 75688 - DNA, 25 bp, SARS Virus
ccatcaaacataaacttattcgtac

SEQ ID NO: 75689 - DNA, 25 bp, SARS Virus
catcaaacatacacttattcgtacg

SEQ ID NO: 75690 - DNA, 25 bp, SARS Virus
atcaaacatacaattattcgtacgt

SEQ ID NO: 75691 - DNA, 25 bp, SARS Virus
tcaaacatacacatattcgtacgta

SEQ ID NO: 75692 - DNA, 25 bp, SARS Virus
caaacatacactaattcgtacgtaa

SEQ ID NO: 75693 - DNA, 25 bp, SARS Virus
aaacatacacttattcgtacgtaag

SEQ ID NO: 75694 - DNA, 25 bp, SARS Virus
aacatacacttaatcgtacgtaagg

SEQ ID NO: 75695 - DNA, 25 bp, SARS Virus
acatacacttatacgtacgtaaggt

SEQ ID NO: 75696 - DNA, 25 bp, SARS Virus
catacacttattagtacgtaaggtg

SEQ ID NO: 75697 - DNA, 25 bp, SARS Virus
atacacttattcatacgtaaggtgt

SEQ ID NO: 75698 - DNA, 25 bp, SARS Virus
tacacttattcgaacgtaaggtgtg

SEQ ID NO: 75699 - DNA, 25 bp, SARS Virus
acacttattcgtacgtaaggtgtga

SEQ ID NO: 75700 - DNA, 25 bp, SARS Virus
cacttattcgtaagtaaggtgtgag

SEQ ID NO: 75701 - DNA, 25 bp, SARS Virus
acttattcgtacataaggtgtgagg

SEQ ID NO: 75702 - DNA, 25 bp, SARS Virus
cttattcgtacgaaaggtgtgaggt

SEQ ID NO: 75703 - DNA, 25 bp, SARS Virus
ttattcgtacgtaaggtgtgaggtc

SEQ ID NO: 75704 - DNA, 25 bp, SARS Virus
tattcgtacgtaaggtgtgaggtcg

SEQ ID NO: 75705 - DNA, 25 bp, SARS Virus
attcgtacgtaaagtgtgaggtcga

SEQ ID NO: 75706 - DNA, 25 bp, SARS Virus
ttcgtacgtaagatgtgaggtcgaa

SEQ ID NO: 75707 - DNA, 25 bp, SARS Virus
tcgtacgtaaggagtgaggtcgaaa

SEQ ID NO: 75708 - DNA, 25 bp, SARS Virus
cgtacgtaaggtatgaggtcgaaag

SEQ ID NO: 75709 - DNA, 25 bp, SARS Virus
gtacgtaaggtgagaggtcgaaagc

SEQ ID NO: 75710 - DNA, 25 bp, SARS Virus
tacgtaaggtgtaaggtcgaaagct

SEQ ID NO: 75711 - DNA, 25 bp, SARS Virus
acgtaaggtgtgaggtcgaaagcta

SEQ ID NO: 75712 - DNA, 25 bp, SARS Virus
cgtaaggtgtgaagtcgaaagctat

SEQ ID NO: 75713 - DNA, 25 bp, SARS Virus
gtaaggtgtgagatcgaaagctatt

SEQ ID NO: 75714 - DNA, 25 bp, SARS Virus
taaggtgtgaggacgaaagctattt

SEQ ID NO: 75715 - DNA, 25 bp, SARS Virus
aaggtgtgaggtagaaagctatttt

SEQ ID NO: 75716 - DNA, 25 bp, SARS Virus
aggtgtgaggtcaaaagctattttc

SEQ ID NO: 75717 - DNA, 25 bp, SARS Virus
ggtgtgaggtcgaaagctattttca

SEQ ID NO: 75718 - DNA, 25 bp, SARS Virus
gtgtgaggtcgaaagctattttcac

SEQ ID NO: 75719 - DNA, 25 bp, SARS Virus
tgtgaggtcgaaagctattttcacg

SEQ ID NO: 75720 - DNA, 25 bp, SARS Virus
gtgaggtcgaaaactattttcacgt

SEQ ID NO: 75721 - DNA, 25 bp, SARS Virus
tgaggtcgaaagatattttcacgta

SEQ ID NO: 75722 - DNA, 25 bp, SARS Virus
gaggtcgaaagcaattttcacgtaa

SEQ ID NO: 75723 - DNA, 25 bp, SARS Virus
aggtcgaaagctattttcacgtaaa

SEQ ID NO: 75724 - DNA, 25 bp, SARS Virus
ggtcgaaagctaatttcacgtaaat

SEQ ID NO: 75725 - DNA, 25 bp, SARS Virus
gtcgaaagctatattcacgtaaatg

SEQ ID NO: 75726 - DNA, 25 bp, SARS Virus
tcgaaagctattatcacgtaaatga

SEQ ID NO: 75727 - DNA, 25 bp, SARS Virus
cgaaagctatttacacgtaaatgat

SEQ ID NO: 75728 - DNA, 25 bp, SARS Virus
gaaagctattttaacgtaaatgatt

SEQ ID NO: 75729 - DNA, 25 bp, SARS Virus
aaagctattttcacgtaaatgatta

SEQ ID NO: 75730 - DNA, 25 bp, SARS Virus
aagctattttcaagtaaatgattaa

SEQ ID NO: 75731 - DNA, 25 bp, SARS Virus
agctattttcacataaatgattaaa

SEQ ID NO: 75732 - DNA, 25 bp, SARS Virus
gctattttcacgaaaatgattaaat

SEQ ID NO: 75733 - DNA, 25 bp, SARS Virus
ctattttcacgtaaatgattaaatt

SEQ ID NO: 75734 - DNA, 25 bp, SARS Virus
tattttcacgtaaatgattaaattt

SEQ ID NO: 75735 - DNA, 25 bp, SARS Virus
attttcacgtaaatgattaaatttc

SEQ ID NO: 75736 - DNA, 25 bp, SARS Virus
ttttcacgtaaaagattaaatttcg

SEQ ID NO: 75737 - DNA, 25 bp, SARS Virus
tttcacgtaaataattaaatttcgt

SEQ ID NO: 75738 - DNA, 25 bp, SARS Virus
ttcacgtaaatgattaaatttcgtt

SEQ ID NO: 75739 - DNA, 25 bp, SARS Virus
tcacgtaaatgaataaatttcgtta

SEQ ID NO: 75740 - DNA, 25 bp, SARS Virus
cacgtaaatgataaaatttcgttaa

SEQ ID NO: 75741 - DNA, 25 bp, SARS Virus
acgtaaatgattaaatttcgttaac

SEQ ID NO: 75742 - DNA, 25 bp, SARS Virus
cgtaaatgattaaatttcgttaacg

SEQ ID NO: 75743 - DNA, 25 bp, SARS Virus
gtaaatgattaaatttcgttaacgg

SEQ ID NO: 75744 - DNA, 25 bp, SARS Virus
taaatgattaaaattcgttaacgga

SEQ ID NO: 75745 - DNA, 25 bp, SARS Virus
aaatgattaaatatcgttaacggaa

SEQ ID NO: 75746 - DNA, 25 bp, SARS Virus
aatgattaaattacgttaacggaaa

SEQ ID NO: 75747 - DNA, 25 bp, SARS Virus
atgattaaatttagttaacggaaag

SEQ ID NO: 75748 - DNA, 25 bp, SARS Virus
tgattaaatttcattaacggaaaga

SEQ ID NO: 75749 - DNA, 25 bp, SARS Virus
gattaaatttcgataacggaaagaa

SEQ ID NO: 75750 - DNA, 25 bp, SARS Virus
attaaatttcgtaaacggaaagaaa

SEQ ID NO: 75751 - DNA, 25 bp, SARS Virus
ttaaatttcgttaacggaaagaaaa

SEQ ID NO: 75752 - DNA, 25 bp, SARS Virus
taaatttcgttaacggaaagaaaat

SEQ ID NO: 75753 - DNA, 25 bp, SARS Virus
aaatttcgttaaaggaaagaaaatg

SEQ ID NO: 75754 - DNA, 25 bp, SARS Virus
aatttcgttaacagaaagaaaatga

SEQ ID NO: 75755 - DNA, 25 bp, SARS Virus
atttcgttaacgaaaagaaaatgat

SEQ ID NO: 75756 - DNA, 25 bp, SARS Virus
tttcgttaacggaaagaaaatgata

SEQ ID NO: 75757 - DNA, 25 bp, SARS Virus
ttcgttaacggaaagaaaatgataa

SEQ ID NO: 75758 - DNA, 25 bp, SARS Virus
tcgttaacggaaagaaaatgataag

SEQ ID NO: 75759 - DNA, 25 bp, SARS Virus
cgttaacggaaaaaaaatgataaga

SEQ ID NO: 75760 - DNA, 25 bp, SARS Virus
gttaacggaaagaaaatgataagac

SEQ ID NO: 75761 - DNA, 25 bp, SARS Virus
ttaacggaaagaaaatgataagact

SEQ ID NO: 75762 - DNA, 25 bp, SARS Virus
taacggaaagaaaatgataagacta

SEQ ID NO: 75763 - DNA, 25 bp, SARS Virus
aacggaaagaaaatgataagactat

SEQ ID NO: 75764 - DNA, 25 bp, SARS Virus
acggaaagaaaaagataagactatc

SEQ ID NO: 75765 - DNA, 25 bp, SARS Virus
cggaaagaaaataataagactatca

SEQ ID NO: 75766 - DNA, 25 bp, SARS Virus
ggaaagaaaatgataagactatcag

SEQ ID NO: 75767 - DNA, 25 bp, SARS Virus
gaaagaaaatgaaaagactatcagg

SEQ ID NO: 75768 - DNA, 25 bp, SARS Virus
aaagaaaatgataagactatcagga

SEQ ID NO: 75769 - DNA, 25 bp, SARS Virus
gtcaggtactcacgaaacaattcgc

SEQ ID NO: 75770 - DNA, 25 bp, SARS Virus
tcaggtactcaccaaacaattcgcg

SEQ ID NO: 75771 - DNA, 25 bp, SARS Virus
caggtactcacgcaacaattcgcgc

SEQ ID NO: 75772 - DNA, 25 bp, SARS Virus
aggtactcacgacacaattcgcgca

SEQ ID NO: 75773 - DNA, 25 bp, SARS Virus
ggtactcacgaaccaattcgcgcaa

SEQ ID NO: 75774 - DNA, 25 bp, SARS Virus
gtactcacgaaacaattcgcgcaac

SEQ ID NO: 75775 - DNA, 25 bp, SARS Virus
tactcacgaaaccattcgcgcaact

SEQ ID NO: 75776 - DNA, 25 bp, SARS Virus
actcacgaaacacttcgcgcaacta

SEQ ID NO: 75777 - DNA, 25 bp, SARS Virus
ctcacgaaacaactcgcgcaactaa

SEQ ID NO: 75778 - DNA, 25 bp, SARS Virus
tcacgaaacaatccgcgcaactaac

SEQ ID NO: 75779 - DNA, 25 bp, SARS Virus
cacgaaacaattcgcgcaactaacc

SEQ ID NO: 75780 - DNA, 25 bp, SARS Virus
acgaaacaattcccgcaactaacca

SEQ ID NO: 75781 - DNA, 25 bp, SARS Virus
cgaaacaattcgcgcaactaaccag

SEQ ID NO: 75782 - DNA, 25 bp, SARS Virus
gaaacaattcgcccaactaaccaga

SEQ ID NO: 75783 - DNA, 25 bp, SARS Virus
aaacaattcgcgcaactaaccagac

SEQ ID NO: 75784 - DNA, 25 bp, SARS Virus
aacaattcgcgccactaaccagaca

SEQ ID NO: 75785 - DNA, 25 bp, SARS Virus
acaattcgcgcacctaaccagacaa

SEQ ID NO: 75786 - DNA, 25 bp, SARS Virus
caattcgcgcaactaaccagacaac

SEQ ID NO: 75787 - DNA, 25 bp, SARS Virus
aattcgcgcaaccaaccagacaact

SEQ ID NO: 75788 - DNA, 25 bp, SARS Virus
attcgcgcaactcaccagacaactt

SEQ ID NO: 75789 - DNA, 25 bp, SARS Virus
ttcgcgcaactacccagacaactta

SEQ ID NO: 75790 - DNA, 25 bp, SARS Virus
tcgcgcaactaaccagacaacttat

SEQ ID NO: 75791 - DNA, 25 bp, SARS Virus
cgcgcaactaaccagacaacttatg

SEQ ID NO: 75792 - DNA, 25 bp, SARS Virus
gcgcaactaacccgacaacttatgg

SEQ ID NO: 75793 - DNA, 25 bp, SARS Virus
cgcaactaaccacacaacttatggg

SEQ ID NO: 75794 - DNA, 25 bp, SARS Virus
gcaactaaccagccaacttatggga

SEQ ID NO: 75795 - DNA, 25 bp, SARS Virus
caactaaccagacaacttatgggat

SEQ ID NO: 75796 - DNA, 25 bp, SARS Virus
aactaaccagaccacttatgggata

SEQ ID NO: 75797 - DNA, 25 bp, SARS Virus
actaaccagacaccttatgggataa

SEQ ID NO: 75798 - DNA, 25 bp, SARS Virus
ctaaccagacaacttatgggataat

SEQ ID NO: 75799 - DNA, 25 bp, SARS Virus
taaccagacaacctatgggataata

SEQ ID NO: 75800 - DNA, 25 bp, SARS Virus
aaccagacaactcatgggataatat

SEQ ID NO: 75801 - DNA, 25 bp, SARS Virus
accagacaacttctgggataatatc

SEQ ID NO: 75802 - DNA, 25 bp, SARS Virus
ccagacaacttacgggataatatcc

SEQ ID NO: 75803 - DNA, 25 bp, SARS Virus
cagacaacttatcggataatatcct

SEQ ID NO: 75804 - DNA, 25 bp, SARS Virus
agacaacttatgcgataatatcctc

SEQ ID NO: 75805 - DNA, 25 bp, SARS Virus
gacaacttatggcataatatcctct

SEQ ID NO: 75806 - DNA, 25 bp, SARS Virus
acaacttatgggctaatatcctcta

SEQ ID NO: 75807 - DNA, 25 bp, SARS Virus
caacttatgggacaatatcctctac

SEQ ID NO: 75808 - DNA, 25 bp, SARS Virus
aacttatgggatcatatcctctact

SEQ ID NO: 75809 - DNA, 25 bp, SARS Virus
acttatgggatactatcctctactt

SEQ ID NO: 75810 - DNA, 25 bp, SARS Virus
cttatgggataacatcctctacttg

SEQ ID NO: 75811 - DNA, 25 bp, SARS Virus
ttatgggataatctcctctacttga

SEQ ID NO: 75812 - DNA, 25 bp, SARS Virus
tatgggataataccctctacttgac

SEQ ID NO: 75813 - DNA, 25 bp, SARS Virus
atgggataatatcctctacttgact

SEQ ID NO: 75814 - DNA, 25 bp, SARS Virus
tgggataatatcctctacttgactc

SEQ ID NO: 75815 - DNA, 25 bp, SARS Virus
gggataatatcccctacttgactcc

SEQ ID NO: 75816 - DNA, 25 bp, SARS Virus
ggataatatcctctacttgactccc

SEQ ID NO: 75817 - DNA, 25 bp, SARS Virus
gataatatcctccacttgactccca

SEQ ID NO: 75818 - DNA, 25 bp, SARS Virus
ataatatcctctccttgactcccaa

SEQ ID NO: 75819 - DNA, 25 bp, SARS Virus
taatatcctctacttgactcccaat

SEQ ID NO: 75820 - DNA, 25 bp, SARS Virus
aatatcctctacctgactcccaatt

SEQ ID NO: 75821 - DNA, 25 bp, SARS Virus
atatcctctactcgactcccaatta

SEQ ID NO: 75822 - DNA, 25 bp, SARS Virus
tatcctctacttcactcccaattaa

SEQ ID NO: 75823 - DNA, 25 bp, SARS Virus
atcctctacttgcctcccaattaag

SEQ ID NO: 75824 - DNA, 25 bp, SARS Virus
tcctctacttgactcccaattaaga

SEQ ID NO: 75825 - DNA, 25 bp, SARS Virus
cctctacttgacccccaattaagac

SEQ ID NO: 75826 - DNA, 25 bp, SARS Virus
ctctacttgactcccaattaagacg

SEQ ID NO: 75827 - DNA, 25 bp, SARS Virus
tctacttgactcccaattaagacga

SEQ ID NO: 75828 - DNA, 25 bp, SARS Virus
ctacttgactcccaattaagacgaa

SEQ ID NO: 75829 - DNA, 25 bp, SARS Virus
tacttgactccccattaagacgaac

SEQ ID NO: 75830 - DNA, 25 bp, SARS Virus
acttgactcccacttaagacgaacg

SEQ ID NO: 75831 - DNA, 25 bp, SARS Virus
cttgactcccaactaagacgaacgt

SEQ ID NO: 75832 - DNA, 25 bp, SARS Virus
ttgactcccaatcaagacgaacgtc

SEQ ID NO: 75833 - DNA, 25 bp, SARS Virus
tgactcccaattcagacgaacgtct

SEQ ID NO: 75834 - DNA, 25 bp, SARS Virus
gactcccaattacgacgaacgtctt

SEQ ID NO: 75835 - DNA, 25 bp, SARS Virus
actcccaattaacacgaacgtcttt

SEQ ID NO: 75836 - DNA, 25 bp, SARS Virus
ctcccaattaagccgaacgtctttt

SEQ ID NO: 75837 - DNA, 25 bp, SARS Virus
tcccaattaagacgaacgtcttttc

SEQ ID NO: 75838 - DNA, 25 bp, SARS Virus
cccaattaagaccaacgtcttttca

SEQ ID NO: 75839 - DNA, 25 bp, SARS Virus
ccaattaagacgcacgtcttttcat

SEQ ID NO: 75840 - DNA, 25 bp, SARS Virus
caattaagacgaccgtcttttcatg

SEQ ID NO: 75841 - DNA, 25 bp, SARS Virus
aattaagacgaacgtcttttcatgt

SEQ ID NO: 75842 - DNA, 25 bp, SARS Virus
attaagacgaacctcttttcatgtt

SEQ ID NO: 75843 - DNA, 25 bp, SARS Virus
ttaagacgaacgccttttcatgttg

SEQ ID NO: 75844 - DNA, 25 bp, SARS Virus
taagacgaacgtcttttcatgttgt

SEQ ID NO: 75845 - DNA, 25 bp, SARS Virus
aagacgaacgtcctttcatgttgtg

SEQ ID NO: 75846 - DNA, 25 bp, SARS Virus
agacgaacgtctcttcatgttgtgt

SEQ ID NO: 75847 - DNA, 25 bp, SARS Virus
gacgaacgtcttctcatgttgtgta

SEQ ID NO: 75848 - DNA, 25 bp, SARS Virus
acgaacgtctttccatgttgtgtac

SEQ ID NO: 75849 - DNA, 25 bp, SARS Virus
cgaacgtcttttcatgttgtgtacc

SEQ ID NO: 75850 - DNA, 25 bp, SARS Virus
gaacgtcttttcctgttgtgtacca

SEQ ID NO: 75851 - DNA, 25 bp, SARS Virus
aacgtcttttcacgttgtgtaccaa

SEQ ID NO: 75852 - DNA, 25 bp, SARS Virus
acgtcttttcatcttgtgtaccaac

SEQ ID NO: 75853 - DNA, 25 bp, SARS Virus
cgtcttttcatgctgtgtaccaaca

SEQ ID NO: 75854 - DNA, 25 bp, SARS Virus
gtcttttcatgtcgtgtaccaacac

SEQ ID NO: 75855 - DNA, 25 bp, SARS Virus
tcttttcatgttctgtaccaacact

SEQ ID NO: 75856 - DNA, 25 bp, SARS Virus
cttttcatgttgcgtaccaacactt

SEQ ID NO: 75857 - DNA, 25 bp, SARS Virus
ttttcatgttgtctaccaacacttc

SEQ ID NO: 75858 - DNA, 25 bp, SARS Virus
tttcatgttgtgcaccaacacttca

SEQ ID NO: 75859 - DNA, 25 bp, SARS Virus
ttcatgttgtgtcccaacacttcag

SEQ ID NO: 75860 - DNA, 25 bp, SARS Virus
tcatgttgtgtaccaacacttcaga

SEQ ID NO: 75861 - DNA, 25 bp, SARS Virus
catgttgtgtaccaacacttcagac

SEQ ID NO: 75862 - DNA, 25 bp, SARS Virus
atgttgtgtacccacacttcagacg

SEQ ID NO: 75863 - DNA, 25 bp, SARS Virus
tgttgtgtaccaccacttcagacgt

SEQ ID NO: 75864 - DNA, 25 bp, SARS Virus
gttgtgtaccaacacttcagacgta

SEQ ID NO: 75865 - DNA, 25 bp, SARS Virus
ttgtgtaccaacccttcagacgtaa

SEQ ID NO: 75866 - DNA, 25 bp, SARS Virus
tgtgtaccaacacttcagacgtaac

SEQ ID NO: 75867 - DNA, 25 bp, SARS Virus
gtgtaccaacacctcagacgtaacg

SEQ ID NO: 75868 - DNA, 25 bp, SARS Virus
tgtaccaacactccagacgtaacga

SEQ ID NO: 75869 - DNA, 25 bp, SARS Virus
gtaccaacacttcagacgtaacgaa

SEQ ID NO: 75870 - DNA, 25 bp, SARS Virus
taccaacacttccgacgtaacgaac

SEQ ID NO: 75871 - DNA, 25 bp, SARS Virus
accaacacttcacacgtaacgaacg

SEQ ID NO: 75872 - DNA, 25 bp, SARS Virus
ccaacacttcagccgtaacgaacga

SEQ ID NO: 75873 - DNA, 25 bp, SARS Virus
caacacttcagacgtaacgaacgac

SEQ ID NO: 75874 - DNA, 25 bp, SARS Virus
aacacttcagacctaacgaacgact

SEQ ID NO: 75875 - DNA, 25 bp, SARS Virus
acacttcagacgcaacgaacgacta

SEQ ID NO: 75876 - DNA, 25 bp, SARS Virus
cacttcagacgtcacgaacgactat

SEQ ID NO: 75877 - DNA, 25 bp, SARS Virus
acttcagacgtaccgaacgactatt

SEQ ID NO: 75878 - DNA, 25 bp, SARS Virus
cttcagacgtaacgaacgactattc

SEQ ID NO: 75879 - DNA, 25 bp, SARS Virus
ttcagacgtaaccaacgactattca

SEQ ID NO: 75880 - DNA, 25 bp, SARS Virus
tcagacgtaacgcacgactattcaa

SEQ ID NO: 75881 - DNA, 25 bp, SARS Virus
cagacgtaacgaccgactattcaaa

SEQ ID NO: 75882 - DNA, 25 bp, SARS Virus
agacgtaacgaacgactattcaaag

SEQ ID NO: 75883 - DNA, 25 bp, SARS Virus
gacgtaacgaaccactattcaaagg

SEQ ID NO: 75884 - DNA, 25 bp, SARS Virus
acgtaacgaacgcctattcaaaggt

SEQ ID NO: 75885 - DNA, 25 bp, SARS Virus
cgtaacgaacgactattcaaaggtc

SEQ ID NO: 75886 - DNA, 25 bp, SARS Virus
gtaacgaacgaccattcaaaggtca

SEQ ID NO: 75887 - DNA, 25 bp, SARS Virus
taacgaacgactcttcaaaggtcaa

SEQ ID NO: 75888 - DNA, 25 bp, SARS Virus
aacgaacgactactcaaaggtcaag

SEQ ID NO: 75889 - DNA, 25 bp, SARS Virus
acgaacgactatccaaaggtcaaga

SEQ ID NO: 75890 - DNA, 25 bp, SARS Virus
cgaacgactattcaaaggtcaagaa

SEQ ID NO: 75891 - DNA, 25 bp, SARS Virus
gaacgactattccaaggtcaagaag

SEQ ID NO: 75892 - DNA, 25 bp, SARS Virus
aacgactattcacaggtcaagaagt

SEQ ID NO: 75893 - DNA, 25 bp, SARS Virus
acgactattcaacggtcaagaagta

SEQ ID NO: 75894 - DNA, 25 bp, SARS Virus
cgactattcaaacgtcaagaagtac

SEQ ID NO: 75895 - DNA, 25 bp, SARS Virus
gactattcaaagctcaagaagtact

SEQ ID NO: 75896 - DNA, 25 bp, SARS Virus
actattcaaaggccaagaagtactg

SEQ ID NO: 75897 - DNA, 25 bp, SARS Virus
ctattcaaaggtcaagaagtactgt

SEQ ID NO: 75898 - DNA, 25 bp, SARS Virus
tattcaaaggtccagaagtactgta

SEQ ID NO: 75899 - DNA, 25 bp, SARS Virus
attcaaaggtcacgaagtactgtaa

SEQ ID NO: 75900 - DNA, 25 bp, SARS Virus
ttcaaaggtcaacaagtactgtaac

SEQ ID NO: 75901 - DNA, 25 bp, SARS Virus
tcaaaggtcaagcagtactgtaacc

SEQ ID NO: 75902 - DNA, 25 bp, SARS Virus
caaaggtcaagacgtactgtaacct

SEQ ID NO: 75903 - DNA, 25 bp, SARS Virus
aaaggtcaagaactactgtaacctt

SEQ ID NO: 75904 - DNA, 25 bp, SARS Virus
aaggtcaagaagcactgtaaccttt

SEQ ID NO: 75905 - DNA, 25 bp, SARS Virus
aggtcaagaagtcctgtaaccttta

SEQ ID NO: 75906 - DNA, 25 bp, SARS Virus
ggtcaagaagtactgtaacctttag

SEQ ID NO: 75907 - DNA, 25 bp, SARS Virus
gtcaagaagtaccgtaacctttagg

SEQ ID NO: 75908 - DNA, 25 bp, SARS Virus
tcaagaagtactctaacctttaggt

SEQ ID NO: 75909 - DNA, 25 bp, SARS Virus
caagaagtactgcaacctttaggtt

SEQ ID NO: 75910 - DNA, 25 bp, SARS Virus
aagaagtactgtcacctttaggttt

SEQ ID NO: 75911 - DNA, 25 bp, SARS Virus
agaagtactgtaccctttaggtttc

SEQ ID NO: 75912 - DNA, 25 bp, SARS Virus
gaagtactgtaacctttaggtttcc

SEQ ID NO: 75913 - DNA, 25 bp, SARS Virus
aagtactgtaacctttaggtttccg

SEQ ID NO: 75914 - DNA, 25 bp, SARS Virus
agtactgtaacccttaggtttccga

SEQ ID NO: 75915 - DNA, 25 bp, SARS Virus
gtactgtaacctctaggtttccgat

SEQ ID NO: 75916 - DNA, 25 bp, SARS Virus
tactgtaaccttcaggtttccgata

SEQ ID NO: 75917 - DNA, 25 bp, SARS Virus
actgtaacctttcggtttccgatag

SEQ ID NO: 75918 - DNA, 25 bp, SARS Virus
ctgtaacctttacgtttccgatagt

SEQ ID NO: 75919 - DNA, 25 bp, SARS Virus
tgtaacctttagctttccgatagtt

SEQ ID NO: 75920 - DNA, 25 bp, SARS Virus
gtaacctttaggcttccgatagttc

SEQ ID NO: 75921 - DNA, 25 bp, SARS Virus
taacctttaggtctccgatagttca

SEQ ID NO: 75922 - DNA, 25 bp, SARS Virus
aacctttaggttcccgatagttcac

SEQ ID NO: 75923 - DNA, 25 bp, SARS Virus
acctttaggtttccgatagttcaca

SEQ ID NO: 75924 - DNA, 25 bp, SARS Virus
cctttaggtttccgatagttcacac

SEQ ID NO: 75925 - DNA, 25 bp, SARS Virus
ctttaggtttcccatagttcacaca

SEQ ID NO: 75926 - DNA, 25 bp, SARS Virus
tttaggtttccgctagttcacacac

SEQ ID NO: 75927 - DNA, 25 bp, SARS Virus
ttaggtttccgacagttcacacacg

SEQ ID NO: 75928 - DNA, 25 bp, SARS Virus
taggtttccgatcgttcacacacgg

SEQ ID NO: 75929 - DNA, 25 bp, SARS Virus
aggtttccgatacttcacacacgga

SEQ ID NO: 75930 - DNA, 25 bp, SARS Virus
ggtttccgatagctcacacacggag

SEQ ID NO: 75931 - DNA, 25 bp, SARS Virus
gtttccgatagtccacacacggagt

SEQ ID NO: 75932 - DNA, 25 bp, SARS Virus
tttccgatagttcacacacggagtc

SEQ ID NO: 75933 - DNA, 25 bp, SARS Virus
ttccgatagttcccacacggagtcc

SEQ ID NO: 75934 - DNA, 25 bp, SARS Virus
tccgatagttcacacacggagtccg

SEQ ID NO: 75935 - DNA, 25 bp, SARS Virus
ccgatagttcacccacggagtccga

SEQ ID NO: 75936 - DNA, 25 bp, SARS Virus
cgatagttcacacacggagtccgac

SEQ ID NO: 75937 - DNA, 25 bp, SARS Virus
gatagttcacacccggagtccgact

SEQ ID NO: 75938 - DNA, 25 bp, SARS Virus
atagttcacacacggagtccgactt

SEQ ID NO: 75939 - DNA, 25 bp, SARS Virus
tagttcacacaccgagtccgacttc

SEQ ID NO: 75940 - DNA, 25 bp, SARS Virus
agttcacacacgcagtccgacttca

SEQ ID NO: 75941 - DNA, 25 bp, SARS Virus
gttcacacacggcgtccgacttcat

SEQ ID NO: 75942 - DNA, 25 bp, SARS Virus
ttcacacacggactccgacttcatc

SEQ ID NO: 75943 - DNA, 25 bp, SARS Virus
tcacacacggagcccgacttcatct

SEQ ID NO: 75944 - DNA, 25 bp, SARS Virus
cacacacggagtccgacttcatctt

SEQ ID NO: 75945 - DNA, 25 bp, SARS Virus
acacacggagtccgacttcatctta

SEQ ID NO: 75946 - DNA, 25 bp, SARS Virus
cacacggagtcccacttcatcttac

SEQ ID NO: 75947 - DNA, 25 bp, SARS Virus
acacggagtccgccttcatcttacc

SEQ ID NO: 75948 - DNA, 25 bp, SARS Virus
cacggagtccgacttcatcttacct

SEQ ID NO: 75949 - DNA, 25 bp, SARS Virus
acggagtccgacctcatcttacctt

SEQ ID NO: 75950 - DNA, 25 bp, SARS Virus
cggagtccgactccatcttaccttc

SEQ ID NO: 75951 - DNA, 25 bp, SARS Virus
ggagtccgacttcatcttaccttca

SEQ ID NO: 75952 - DNA, 25 bp, SARS Virus
gagtccgacttcctcttaccttcaa

SEQ ID NO: 75953 - DNA, 25 bp, SARS Virus
agtccgacttcaccttaccttcaag

SEQ ID NO: 75954 - DNA, 25 bp, SARS Virus
gtccgacttcatcttaccttcaaga

SEQ ID NO: 75955 - DNA, 25 bp, SARS Virus
tccgacttcatcctaccttcaagat

SEQ ID NO: 75956 - DNA, 25 bp, SARS Virus
ccgacttcatctcaccttcaagatg

SEQ ID NO: 75957 - DNA, 25 bp, SARS Virus
cgacttcatcttcccttcaagatgc

SEQ ID NO: 75958 - DNA, 25 bp, SARS Virus
gacttcatcttaccttcaagatgct

SEQ ID NO: 75959 - DNA, 25 bp, SARS Virus
acttcatcttaccttcaagatgcta

SEQ ID NO: 75960 - DNA, 25 bp, SARS Virus
cttcatcttaccctcaagatgctac

SEQ ID NO: 75961 - DNA, 25 bp, SARS Virus
ttcatcttacctccaagatgctacg

SEQ ID NO: 75962 - DNA, 25 bp, SARS Virus
tcatcttaccttcaagatgctacga

SEQ ID NO: 75963 - DNA, 25 bp, SARS Virus
catcttaccttccagatgctacgag

SEQ ID NO: 75964 - DNA, 25 bp, SARS Virus
atcttaccttcacgatgctacgagt

SEQ ID NO: 75965 - DNA, 25 bp, SARS Virus
tcttaccttcaacatgctacgagtc

SEQ ID NO: 75966 - DNA, 25 bp, SARS Virus
cttaccttcaagctgctacgagtcg

SEQ ID NO: 75967 - DNA, 25 bp, SARS Virus
ttaccttcaagacgctacgagtcgg

SEQ ID NO: 75968 - DNA, 25 bp, SARS Virus
taccttcaagatcctacgagtcggt

SEQ ID NO: 75969 - DNA, 25 bp, SARS Virus
accttcaagatgctacgagtcggta

SEQ ID NO: 75970 - DNA, 25 bp, SARS Virus
ccttcaagatgccacgagtcggtac

SEQ ID NO: 75971 - DNA, 25 bp, SARS Virus
cttcaagatgctccgagtcggtaca

SEQ ID NO: 75972 - DNA, 25 bp, SARS Virus
ttcaagatgctacgagtcggtacat

SEQ ID NO: 75973 - DNA, 25 bp, SARS Virus
tcaagatgctaccagtcggtacatc

SEQ ID NO: 75974 - DNA, 25 bp, SARS Virus
caagatgctacgcgtcggtacatca

SEQ ID NO: 75975 - DNA, 25 bp, SARS Virus
aagatgctacgactcggtacatcac

SEQ ID NO: 75976 - DNA, 25 bp, SARS Virus
agatgctacgagccggtacatcact

SEQ ID NO: 75977 - DNA, 25 bp, SARS Virus
gatgctacgagtcggtacatcactg

SEQ ID NO: 75978 - DNA, 25 bp, SARS Virus
atgctacgagtccgtacatcactgt

SEQ ID NO: 75979 - DNA, 25 bp, SARS Virus
tgctacgagtcgctacatcactgtt

SEQ ID NO: 75980 - DNA, 25 bp, SARS Virus
gctacgagtcggcacatcactgttt

SEQ ID NO: 75981 - DNA, 25 bp, SARS Virus
ctacgagtcggtccatcactgtttc

SEQ ID NO: 75982 - DNA, 25 bp, SARS Virus
tacgagtcggtacatcactgtttcg

SEQ ID NO: 75983 - DNA, 25 bp, SARS Virus
acgagtcggtacctcactgtttcga

SEQ ID NO: 75984 - DNA, 25 bp, SARS Virus
cgagtcggtacaccactgtttcgaa

SEQ ID NO: 75985 - DNA, 25 bp, SARS Virus
gagtcggtacatcactgtttcgaat

SEQ ID NO: 75986 - DNA, 25 bp, SARS Virus
agtcggtacatccctgtttcgaatg

SEQ ID NO: 75987 - DNA, 25 bp, SARS Virus
gtcggtacatcactgtttcgaatgt

SEQ ID NO: 75988 - DNA, 25 bp, SARS Virus
tcggtacatcaccgtttcgaatgtt

SEQ ID NO: 75989 - DNA, 25 bp, SARS Virus
cggtacatcactctttcgaatgttt

SEQ ID NO: 75990 - DNA, 25 bp, SARS Virus
ggtacatcactgcttcgaatgtttt

SEQ ID NO: 75991 - DNA, 25 bp, SARS Virus
gtacatcactgtctcgaatgtttta

SEQ ID NO: 75992 - DNA, 25 bp, SARS Virus
tacatcactgttccgaatgttttat

SEQ ID NO: 75993 - DNA, 25 bp, SARS Virus
acatcactgtttcgaatgttttatc

SEQ ID NO: 75994 - DNA, 25 bp, SARS Virus
catcactgtttccaatgttttatct

SEQ ID NO: 75995 - DNA, 25 bp, SARS Virus
atcactgtttcgcatgttttatctc

SEQ ID NO: 75996 - DNA, 25 bp, SARS Virus
tcactgtttcgactgttttatctcc

SEQ ID NO: 75997 - DNA, 25 bp, SARS Virus
cactgtttcgaacgttttatctcct

SEQ ID NO: 75998 - DNA, 25 bp, SARS Virus
actgtttcgaatcttttatctcctt

SEQ ID NO: 75999 - DNA, 25 bp, SARS Virus
ctgtttcgaatgctttatctccttg

SEQ ID NO: 76000 - DNA, 25 bp, SARS Virus
tgtttcgaatgtcttatctccttga

SEQ ID NO: 76001 - DNA, 25 bp, SARS Virus
gtttcgaatgttctatctccttgag

SEQ ID NO: 76002 - DNA, 25 bp, SARS Virus
tttcgaatgtttcatctccttgaga

SEQ ID NO: 76003 - DNA, 25 bp, SARS Virus
ttcgaatgttttctctccttgagaa

SEQ ID NO: 76004 - DNA, 25 bp, SARS Virus
tcgaatgttttacctccttgagaag

SEQ ID NO: 76005 - DNA, 25 bp, SARS Virus
cgaatgttttatctccttgagaaga

SEQ ID NO: 76006 - DNA, 25 bp, SARS Virus
gaatgttttatccccttgagaagat

SEQ ID NO: 76007 - DNA, 25 bp, SARS Virus
aatgttttatctccttgagaagata

SEQ ID NO: 76008 - DNA, 25 bp, SARS Virus
atgttttatctccttgagaagataa

SEQ ID NO: 76009 - DNA, 25 bp, SARS Virus
tgttttatctccctgagaagataag

SEQ ID NO: 76010 - DNA, 25 bp, SARS Virus
gttttatctcctcgagaagataaga

SEQ ID NO: 76011 - DNA, 25 bp, SARS Virus
ttttatctccttcagaagataagaa

SEQ ID NO: 76012 - DNA, 25 bp, SARS Virus
tttatctccttgcgaagataagaat

SEQ ID NO: 76013 - DNA, 25 bp, SARS Virus
ttatctccttgacaagataagaata

SEQ ID NO: 76014 - DNA, 25 bp, SARS Virus
tatctccttgagcagataagaatac

SEQ ID NO: 76015 - DNA, 25 bp, SARS Virus
atctccttgagacgataagaatacg

SEQ ID NO: 76016 - DNA, 25 bp, SARS Virus
tctccttgagaacataagaatacga

SEQ ID NO: 76017 - DNA, 25 bp, SARS Virus
ctccttgagaagctaagaatacgat

SEQ ID NO: 76018 - DNA, 25 bp, SARS Virus
tccttgagaagacaagaatacgatg

SEQ ID NO: 76019 - DNA, 25 bp, SARS Virus
ccttgagaagatcagaatacgatgt

SEQ ID NO: 76020 - DNA, 25 bp, SARS Virus
cttgagaagatacgaatacgatgtg

SEQ ID NO: 76021 - DNA, 25 bp, SARS Virus
ttgagaagataacaatacgatgtgt

SEQ ID NO: 76022 - DNA, 25 bp, SARS Virus
tgagaagataagcatacgatgtgta

SEQ ID NO: 76023 - DNA, 25 bp, SARS Virus
gagaagataagactacgatgtgtag

SEQ ID NO: 76024 - DNA, 25 bp, SARS Virus
agaagataagaacacgatgtgtagt

SEQ ID NO: 76025 - DNA, 25 bp, SARS Virus
gaagataagaatccgatgtgtagtg

SEQ ID NO: 76026 - DNA, 25 bp, SARS Virus
aagataagaatacgatgtgtagtgc

SEQ ID NO: 76027 - DNA, 25 bp, SARS Virus
agataagaataccatgtgtagtgct

SEQ ID NO: 76028 - DNA, 25 bp, SARS Virus
gataagaatacgctgtgtagtgcta

SEQ ID NO: 76029 - DNA, 25 bp, SARS Virus
ataagaatacgacgtgtagtgctat

SEQ ID NO: 76030 - DNA, 25 bp, SARS Virus
taagaatacgatctgtagtgctatt

SEQ ID NO: 76031 - DNA, 25 bp, SARS Virus
aagaatacgatgcgtagtgctattt

SEQ ID NO: 76032 - DNA, 25 bp, SARS Virus
agaatacgatgtctagtgctattta

SEQ ID NO: 76033 - DNA, 25 bp, SARS Virus
gaatacgatgtgcagtgctatttaa

SEQ ID NO: 76034 - DNA, 25 bp, SARS Virus
aatacgatgtgtcgtgctatttaag

SEQ ID NO: 76035 - DNA, 25 bp, SARS Virus
atacgatgtgtactgctatttaagt

SEQ ID NO: 76036 - DNA, 25 bp, SARS Virus
tacgatgtgtagcgctatttaagtg

SEQ ID NO: 76037 - DNA, 25 bp, SARS Virus
acgatgtgtagtcctatttaagtga

SEQ ID NO: 76038 - DNA, 25 bp, SARS Virus
cgatgtgtagtgctatttaagtgac

SEQ ID NO: 76039 - DNA, 25 bp, SARS Virus
gatgtgtagtgccatttaagtgact

SEQ ID NO: 76040 - DNA, 25 bp, SARS Virus
atgtgtagtgctctttaagtgacta

SEQ ID NO: 76041 - DNA, 25 bp, SARS Virus
tgtgtagtgctacttaagtgactac

SEQ ID NO: 76042 - DNA, 25 bp, SARS Virus
gtgtagtgctatctaagtgactacc

SEQ ID NO: 76043 - DNA, 25 bp, SARS Virus
tgtagtgctattcaagtgactacca

SEQ ID NO: 76044 - DNA, 25 bp, SARS Virus
gtagtgctatttcagtgactaccac

SEQ ID NO: 76045 - DNA, 25 bp, SARS Virus
tagtgctatttacgtgactaccaca

SEQ ID NO: 76046 - DNA, 25 bp, SARS Virus
agtgctatttaactgactaccacaa

SEQ ID NO: 76047 - DNA, 25 bp, SARS Virus
gtgctatttaagcgactaccacaaa

SEQ ID NO: 76048 - DNA, 25 bp, SARS Virus
tgctatttaagtcactaccacaaac

SEQ ID NO: 76049 - DNA, 25 bp, SARS Virus
gctatttaagtgcctaccacaaaca

SEQ ID NO: 76050 - DNA, 25 bp, SARS Virus
ctatttaagtgactaccacaaacaa

SEQ ID NO: 76051 - DNA, 25 bp, SARS Virus
tatttaagtgaccaccacaaacaaa

SEQ ID NO: 76052 - DNA, 25 bp, SARS Virus
atttaagtgactcccacaaacaaac

SEQ ID NO: 76053 - DNA, 25 bp, SARS Virus
tttaagtgactaccacaaacaaaca

SEQ ID NO: 76054 - DNA, 25 bp, SARS Virus
ttaagtgactaccacaaacaaacaa

SEQ ID NO: 76055 - DNA, 25 bp, SARS Virus
taagtgactaccccaaacaaacaaa

SEQ ID NO: 76056 - DNA, 25 bp, SARS Virus
aagtgactaccacaaacaaacaaaa

SEQ ID NO: 76057 - DNA, 25 bp, SARS Virus
agtgactaccaccaacaaacaaaac

SEQ ID NO: 76058 - DNA, 25 bp, SARS Virus
gtgactaccacacacaaacaaaacc

SEQ ID NO: 76059 - DNA, 25 bp, SARS Virus
tgactaccacaaccaaacaaaacct

SEQ ID NO: 76060 - DNA, 25 bp, SARS Virus
gactaccacaaacaaacaaaacctt

SEQ ID NO: 76061 - DNA, 25 bp, SARS Virus
actaccacaaaccaacaaaacctta

SEQ ID NO: 76062 - DNA, 25 bp, SARS Virus
ctaccacaaacacacaaaaccttaa

SEQ ID NO: 76063 - DNA, 25 bp, SARS Virus
taccacaaacaaccaaaaccttaac

SEQ ID NO: 76064 - DNA, 25 bp, SARS Virus
accacaaacaaacaaaaccttaaca

SEQ ID NO: 76065 - DNA, 25 bp, SARS Virus
ccacaaacaaaccaaaccttaacat

SEQ ID NO: 76066 - DNA, 25 bp, SARS Virus
cacaaacaaacacaaccttaacatt

SEQ ID NO: 76067 - DNA, 25 bp, SARS Virus
acaaacaaacaacaccttaacattg

SEQ ID NO: 76068 - DNA, 25 bp, SARS Virus
caaacaaacaaacccttaacattgc

SEQ ID NO: 76069 - DNA, 25 bp, SARS Virus
aaacaaacaaaaccttaacattgca

SEQ ID NO: 76070 - DNA, 25 bp, SARS Virus
aacaaacaaaaccttaacattgcaa

SEQ ID NO: 76071 - DNA, 25 bp, SARS Virus
acaaacaaaaccctaacattgcaac

SEQ ID NO: 76072 - DNA, 25 bp, SARS Virus
caaacaaaacctcaacattgcaact

SEQ ID NO: 76073 - DNA, 25 bp, SARS Virus
aaacaaaaccttcacattgcaacta

SEQ ID NO: 76074 - DNA, 25 bp, SARS Virus
aacaaaaccttaccattgcaactag

SEQ ID NO: 76075 - DNA, 25 bp, SARS Virus
acaaaaccttaacattgcaactagc

SEQ ID NO: 76076 - DNA, 25 bp, SARS Virus
caaaaccttaaccttgcaactagca

SEQ ID NO: 76077 - DNA, 25 bp, SARS Virus
aaaaccttaacactgcaactagcaa

SEQ ID NO: 76078 - DNA, 25 bp, SARS Virus
aaaccttaacatcgcaactagcaat

SEQ ID NO: 76079 - DNA, 25 bp, SARS Virus
aaccttaacattccaactagcaatg

SEQ ID NO: 76080 - DNA, 25 bp, SARS Virus
accttaacattgcaactagcaatgg

SEQ ID NO: 76081 - DNA, 25 bp, SARS Virus
ccttaacattgccactagcaatggg

SEQ ID NO: 76082 - DNA, 25 bp, SARS Virus
cttaacattgcacctagcaatgggt

SEQ ID NO: 76083 - DNA, 25 bp, SARS Virus
ttaacattgcaactagcaatgggtc

SEQ ID NO: 76084 - DNA, 25 bp, SARS Virus
taacattgcaaccagcaatgggtcg

SEQ ID NO: 76085 - DNA, 25 bp, SARS Virus
aacattgcaactcgcaatgggtcgg

SEQ ID NO: 76086 - DNA, 25 bp, SARS Virus
acattgcaactaccaatgggtcggt

SEQ ID NO: 76087 - DNA, 25 bp, SARS Virus
cattgcaactagcaatgggtcggtt

SEQ ID NO: 76088 - DNA, 25 bp, SARS Virus
attgcaactagccatgggtcggtta

SEQ ID NO: 76089 - DNA, 25 bp, SARS Virus
ttgcaactagcactgggtcggttac

SEQ ID NO: 76090 - DNA, 25 bp, SARS Virus
tgcaactagcaacgggtcggttacg

SEQ ID NO: 76091 - DNA, 25 bp, SARS Virus
gcaactagcaatcggtcggttacgt

SEQ ID NO: 76092 - DNA, 25 bp, SARS Virus
caactagcaatgcgtcggttacgtt

SEQ ID NO: 76093 - DNA, 25 bp, SARS Virus
aactagcaatggctcggttacgtta

SEQ ID NO: 76094 - DNA, 25 bp, SARS Virus
actagcaatgggccggttacgttaa

SEQ ID NO: 76095 - DNA, 25 bp, SARS Virus
ctagcaatgggtcggttacgttaac

SEQ ID NO: 76096 - DNA, 25 bp, SARS Virus
tagcaatgggtccgttacgttaaca

SEQ ID NO: 76097 - DNA, 25 bp, SARS Virus
agcaatgggtcgcttacgttaacac

SEQ ID NO: 76098 - DNA, 25 bp, SARS Virus
gcaatgggtcggctacgttaacaca

SEQ ID NO: 76099 - DNA, 25 bp, SARS Virus
caatgggtcggtcacgttaacacac

SEQ ID NO: 76100 - DNA, 25 bp, SARS Virus
aatgggtcggttccgttaacacaca

SEQ ID NO: 76101 - DNA, 25 bp, SARS Virus
atgggtcggttacgttaacacacat

SEQ ID NO: 76102 - DNA, 25 bp, SARS Virus
tgggtcggttaccttaacacacatc

SEQ ID NO: 76103 - DNA, 25 bp, SARS Virus
gggtcggttacgctaacacacatcc

SEQ ID NO: 76104 - DNA, 25 bp, SARS Virus
ggtcggttacgtcaacacacatcca

SEQ ID NO: 76105 - DNA, 25 bp, SARS Virus
gtcggttacgttcacacacatccaa

SEQ ID NO: 76106 - DNA, 25 bp, SARS Virus
tcggttacgttaccacacatccaaa

SEQ ID NO: 76107 - DNA, 25 bp, SARS Virus
cggttacgttaacacacatccaaac

SEQ ID NO: 76108 - DNA, 25 bp, SARS Virus
ggttacgttaacccacatccaaact

SEQ ID NO: 76109 - DNA, 25 bp, SARS Virus
gttacgttaacacacatccaaactg

SEQ ID NO: 76110 - DNA, 25 bp, SARS Virus
ttacgttaacacccatccaaactgt

SEQ ID NO: 76111 - DNA, 25 bp, SARS Virus
tacgttaacacacatccaaactgtg

SEQ ID NO: 76112 - DNA, 25 bp, SARS Virus
acgttaacacacctccaaactgtgt

SEQ ID NO: 76113 - DNA, 25 bp, SARS Virus
cgttaacacacacccaaactgtgtt

SEQ ID NO: 76114 - DNA, 25 bp, SARS Virus
gttaacacacatccaaactgtgttc

SEQ ID NO: 76115 - DNA, 25 bp, SARS Virus
ttaacacacatccaaactgtgttct

SEQ ID NO: 76116 - DNA, 25 bp, SARS Virus
taacacacatcccaactgtgttctc

SEQ ID NO: 76117 - DNA, 25 bp, SARS Virus
aacacacatccacactgtgttctca

SEQ ID NO: 76118 - DNA, 25 bp, SARS Virus
acacacatccaacctgtgttctcag

SEQ ID NO: 76119 - DNA, 25 bp, SARS Virus
cacacatccaaactgtgttctcaga

SEQ ID NO: 76120 - DNA, 25 bp, SARS Virus
acacatccaaaccgtgttctcagaa

SEQ ID NO: 76121 - DNA, 25 bp, SARS Virus
cacatccaaactctgttctcagaac

SEQ ID NO: 76122 - DNA, 25 bp, SARS Virus
acatccaaactgcgttctcagaaca

SEQ ID NO: 76123 - DNA, 25 bp, SARS Virus
catccaaactgtcttctcagaacag

SEQ ID NO: 76124 - DNA, 25 bp, SARS Virus
atccaaactgtgctctcagaacagt

SEQ ID NO: 76125 - DNA, 25 bp, SARS Virus
tccaaactgtgtcctcagaacagtt

SEQ ID NO: 76126 - DNA, 25 bp, SARS Virus
ccaaactgtgttctcagaacagttt

SEQ ID NO: 76127 - DNA, 25 bp, SARS Virus
caaactgtgttcccagaacagtttg

SEQ ID NO: 76128 - DNA, 25 bp, SARS Virus
aaactgtgttctcagaacagtttga

SEQ ID NO: 76129 - DNA, 25 bp, SARS Virus
aactgtgttctccgaacagtttgaa

SEQ ID NO: 76130 - DNA, 25 bp, SARS Virus
actgtgttctcacaacagtttgaac

SEQ ID NO: 76131 - DNA, 25 bp, SARS Virus
ctgtgttctcagcacagtttgaact

SEQ ID NO: 76132 - DNA, 25 bp, SARS Virus
tgtgttctcagaccagtttgaactt

SEQ ID NO: 76133 - DNA, 25 bp, SARS Virus
gtgttctcagaacagtttgaacttg

SEQ ID NO: 76134 - DNA, 25 bp, SARS Virus
tgttctcagaaccgtttgaacttga

SEQ ID NO: 76135 - DNA, 25 bp, SARS Virus
gttctcagaacactttgaacttgaa

SEQ ID NO: 76136 - DNA, 25 bp, SARS Virus
ttctcagaacagcttgaacttgaat

SEQ ID NO: 76137 - DNA, 25 bp, SARS Virus
tctcagaacagtctgaacttgaatg

SEQ ID NO: 76138 - DNA, 25 bp, SARS Virus
ctcagaacagttcgaacttgaatgg

SEQ ID NO: 76139 - DNA, 25 bp, SARS Virus
tcagaacagtttcaacttgaatggt

SEQ ID NO: 76140 - DNA, 25 bp, SARS Virus
cagaacagtttgcacttgaatggtc

SEQ ID NO: 76141 - DNA, 25 bp, SARS Virus
agaacagtttgaccttgaatggtcc

SEQ ID NO: 76142 - DNA, 25 bp, SARS Virus
gaacagtttgaacttgaatggtccg

SEQ ID NO: 76143 - DNA, 25 bp, SARS Virus
aacagtttgaacctgaatggtccga

SEQ ID NO: 76144 - DNA, 25 bp, SARS Virus
acagtttgaactcgaatggtccgac

SEQ ID NO: 76145 - DNA, 25 bp, SARS Virus
cagtttgaacttcaatggtccgaca

SEQ ID NO: 76146 - DNA, 25 bp, SARS Virus
agtttgaacttgcatggtccgacac

SEQ ID NO: 76147 - DNA, 25 bp, SARS Virus
gtttgaacttgactggtccgacact

SEQ ID NO: 76148 - DNA, 25 bp, SARS Virus
tttgaacttgaacggtccgacacta

SEQ ID NO: 76149 - DNA, 25 bp, SARS Virus
ttgaacttgaatcgtccgacactac

SEQ ID NO: 76150 - DNA, 25 bp, SARS Virus
tgaacttgaatgctccgacactacc

SEQ ID NO: 76151 - DNA, 25 bp, SARS Virus
gaacttgaatggcccgacactacca

SEQ ID NO: 76152 - DNA, 25 bp, SARS Virus
aacttgaatggtccgacactaccac

SEQ ID NO: 76153 - DNA, 25 bp, SARS Virus
acttgaatggtccgacactaccacc

SEQ ID NO: 76154 - DNA, 25 bp, SARS Virus
cttgaatggtcccacactaccacca

SEQ ID NO: 76155 - DNA, 25 bp, SARS Virus
ttgaatggtccgccactaccaccat

SEQ ID NO: 76156 - DNA, 25 bp, SARS Virus
tgaatggtccgacactaccaccatc

SEQ ID NO: 76157 - DNA, 25 bp, SARS Virus
gaatggtccgaccctaccaccatca

SEQ ID NO: 76158 - DNA, 25 bp, SARS Virus
aatggtccgacactaccaccatcaa

SEQ ID NO: 76159 - DNA, 25 bp, SARS Virus
atggtccgacaccaccaccatcaaa

SEQ ID NO: 76160 - DNA, 25 bp, SARS Virus
tggtccgacactcccaccatcaaac

SEQ ID NO: 76161 - DNA, 25 bp, SARS Virus
ggtccgacactaccaccatcaaaca

SEQ ID NO: 76162 - DNA, 25 bp, SARS Virus
gtccgacactaccaccatcaaacat

SEQ ID NO: 76163 - DNA, 25 bp, SARS Virus
tccgacactacccccatcaaacata

SEQ ID NO: 76164 - DNA, 25 bp, SARS Virus
ccgacactaccaccatcaaacatac

SEQ ID NO: 76165 - DNA, 25 bp, SARS Virus
cgacactaccaccatcaaacataca

SEQ ID NO: 76166 - DNA, 25 bp, SARS Virus
gacactaccaccctcaaacatacac

SEQ ID NO: 76167 - DNA, 25 bp, SARS Virus
acactaccaccaccaaacatacact

SEQ ID NO: 76168 - DNA, 25 bp, SARS Virus
cactaccaccatcaaacatacactt

SEQ ID NO: 76169 - DNA, 25 bp, SARS Virus
actaccaccatccaacatacactta

SEQ ID NO: 76170 - DNA, 25 bp, SARS Virus
ctaccaccatcacacatacacttat

SEQ ID NO: 76171 - DNA, 25 bp, SARS Virus
taccaccatcaaccatacacttatt

SEQ ID NO: 76172 - DNA, 25 bp, SARS Virus
accaccatcaaacatacacttattc

SEQ ID NO: 76173 - DNA, 25 bp, SARS Virus
ccaccatcaaacctacacttattcg

SEQ ID NO: 76174 - DNA, 25 bp, SARS Virus
caccatcaaacacacacttattcgt

SEQ ID NO: 76175 - DNA, 25 bp, SARS Virus
accatcaaacatccacttattcgta

SEQ ID NO: 76176 - DNA, 25 bp, SARS Virus
ccatcaaacatacacttattcgtac

SEQ ID NO: 76177 - DNA, 25 bp, SARS Virus
catcaaacatacccttattcgtacg

SEQ ID NO: 76178 - DNA, 25 bp, SARS Virus
atcaaacatacacttattcgtacgt

SEQ ID NO: 76179 - DNA, 25 bp, SARS Virus
tcaaacatacacctattcgtacgta

SEQ ID NO: 76180 - DNA, 25 bp, SARS Virus
caaacatacactcattcgtacgtaa

SEQ ID NO: 76181 - DNA, 25 bp, SARS Virus
aaacatacacttcttcgtacgtaag

SEQ ID NO: 76182 - DNA, 25 bp, SARS Virus
aacatacacttactcgtacgtaagg

SEQ ID NO: 76183 - DNA, 25 bp, SARS Virus
acatacacttatccgtacgtaaggt

SEQ ID NO: 76184 - DNA, 25 bp, SARS Virus
catacacttattcgtacgtaaggtg

SEQ ID NO: 76185 - DNA, 25 bp, SARS Virus
atacacttattcctacgtaaggtgt

SEQ ID NO: 76186 - DNA, 25 bp, SARS Virus
tacacttattcgcacgtaaggtgtg

SEQ ID NO: 76187 - DNA, 25 bp, SARS Virus
acacttattcgtccgtaaggtgtga

SEQ ID NO: 76188 - DNA, 25 bp, SARS Virus
cacttattcgtacgtaaggtgtgag

SEQ ID NO: 76189 - DNA, 25 bp, SARS Virus
acttattcgtacctaaggtgtgagg

SEQ ID NO: 76190 - DNA, 25 bp, SARS Virus
cttattcgtacgcaaggtgtgaggt

SEQ ID NO: 76191 - DNA, 25 bp, SARS Virus
ttattcgtacgtcaggtgtgaggtc

SEQ ID NO: 76192 - DNA, 25 bp, SARS Virus
tattcgtacgtacggtgtgaggtcg

SEQ ID NO: 76193 - DNA, 25 bp, SARS Virus
attcgtacgtaacgtgtgaggtcga

SEQ ID NO: 76194 - DNA, 25 bp, SARS Virus
ttcgtacgtaagctgtgaggtcgaa

SEQ ID NO: 76195 - DNA, 25 bp, SARS Virus
tcgtacgtaaggcgtgaggtcgaaa

SEQ ID NO: 76196 - DNA, 25 bp, SARS Virus
cgtacgtaaggtctgaggtcgaaag

SEQ ID NO: 76197 - DNA, 25 bp, SARS Virus
gtacgtaaggtgcgaggtcgaaagc

SEQ ID NO: 76198 - DNA, 25 bp, SARS Virus
tacgtaaggtgtcaggtcgaaagct

SEQ ID NO: 76199 - DNA, 25 bp, SARS Virus
acgtaaggtgtgcggtcgaaagcta

SEQ ID NO: 76200 - DNA, 25 bp, SARS Virus
cgtaaggtgtgacgtcgaaagctat

SEQ ID NO: 76201 - DNA, 25 bp, SARS Virus
gtaaggtgtgagctcgaaagctatt

SEQ ID NO: 76202 - DNA, 25 bp, SARS Virus
taaggtgtgaggccgaaagctattt

SEQ ID NO: 76203 - DNA, 25 bp, SARS Virus
aaggtgtgaggtcgaaagctatttt

SEQ ID NO: 76204 - DNA, 25 bp, SARS Virus
aggtgtgaggtccaaagctattttc

SEQ ID NO: 76205 - DNA, 25 bp, SARS Virus
ggtgtgaggtcgcaagctattttca

SEQ ID NO: 76206 - DNA, 25 bp, SARS Virus
gtgtgaggtcgacagctattttcac

SEQ ID NO: 76207 - DNA, 25 bp, SARS Virus
tgtgaggtcgaacgctattttcacg

SEQ ID NO: 76208 - DNA, 25 bp, SARS Virus
gtgaggtcgaaacctattttcacgt

SEQ ID NO: 76209 - DNA, 25 bp, SARS Virus
tgaggtcgaaagctattttcacgta

SEQ ID NO: 76210 - DNA, 25 bp, SARS Virus
gaggtcgaaagccattttcacgtaa

SEQ ID NO: 76211 - DNA, 25 bp, SARS Virus
aggtcgaaagctcttttcacgtaaa

SEQ ID NO: 76212 - DNA, 25 bp, SARS Virus
ggtcgaaagctactttcacgtaaat

SEQ ID NO: 76213 - DNA, 25 bp, SARS Virus
gtcgaaagctatcttcacgtaaatg

SEQ ID NO: 76214 - DNA, 25 bp, SARS Virus
tcgaaagctattctcacgtaaatga

SEQ ID NO: 76215 - DNA, 25 bp, SARS Virus
cgaaagctatttccacgtaaatgat

SEQ ID NO: 76216 - DNA, 25 bp, SARS Virus
gaaagctattttcacgtaaatgatt

SEQ ID NO: 76217 - DNA, 25 bp, SARS Virus
aaagctattttcccgtaaatgatta

SEQ ID NO: 76218 - DNA, 25 bp, SARS Virus
aagctattttcacgtaaatgattaa

SEQ ID NO: 76219 - DNA, 25 bp, SARS Virus
agctattttcacctaaatgattaaa

SEQ ID NO: 76220 - DNA, 25 bp, SARS Virus
gctattttcacgcaaatgattaaat

SEQ ID NO: 76221 - DNA, 25 bp, SARS Virus
ctattttcacgtcaatgattaaatt

SEQ ID NO: 76222 - DNA, 25 bp, SARS Virus
tattttcacgtacatgattaaattt

SEQ ID NO: 76223 - DNA, 25 bp, SARS Virus
attttcacgtaactgattaaatttc

SEQ ID NO: 76224 - DNA, 25 bp, SARS Virus
ttttcacgtaaacgattaaatttcg

SEQ ID NO: 76225 - DNA, 25 bp, SARS Virus
tttcacgtaaatcattaaatttcgt

SEQ ID NO: 76226 - DNA, 25 bp, SARS Virus
ttcacgtaaatgcttaaatttcgtt

SEQ ID NO: 76227 - DNA, 25 bp, SARS Virus
tcacgtaaatgactaaatttcgtta

SEQ ID NO: 76228 - DNA, 25 bp, SARS Virus
cacgtaaatgatcaaatttcgttaa

SEQ ID NO: 76229 - DNA, 25 bp, SARS Virus
acgtaaatgattcaatttcgttaac

SEQ ID NO: 76230 - DNA, 25 bp, SARS Virus
cgtaaatgattacatttcgttaacg

SEQ ID NO: 76231 - DNA, 25 bp, SARS Virus
gtaaatgattaactttcgttaacgg

SEQ ID NO: 76232 - DNA, 25 bp, SARS Virus
taaatgattaaacttcgttaacgga

SEQ ID NO: 76233 - DNA, 25 bp, SARS Virus
aaatgattaaatctcgttaacggaa

SEQ ID NO: 76234 - DNA, 25 bp, SARS Virus
aatgattaaattccgttaacggaaa

SEQ ID NO: 76235 - DNA, 25 bp, SARS Virus
atgattaaatttcgttaacggaaag

SEQ ID NO: 76236 - DNA, 25 bp, SARS Virus
tgattaaatttccttaacggaaaga

SEQ ID NO: 76237 - DNA, 25 bp, SARS Virus
gattaaatttcgctaacggaaagaa

SEQ ID NO: 76238 - DNA, 25 bp, SARS Virus
attaaatttcgtcaacggaaagaaa

SEQ ID NO: 76239 - DNA, 25 bp, SARS Virus
ttaaatttcgttcacggaaagaaaa

SEQ ID NO: 76240 - DNA, 25 bp, SARS Virus
taaatttcgttaccggaaagaaaat

SEQ ID NO: 76241 - DNA, 25 bp, SARS Virus
aaatttcgttaacggaaagaaaatg

SEQ ID NO: 76242 - DNA, 25 bp, SARS Virus
aatttcgttaaccgaaagaaaatga

SEQ ID NO: 76243 - DNA, 25 bp, SARS Virus
atttcgttaacgcaaagaaaatgat

SEQ ID NO: 76244 - DNA, 25 bp, SARS Virus
tttcgttaacggcaagaaaatgata

SEQ ID NO: 76245 - DNA, 25 bp, SARS Virus
ttcgttaacggacagaaaatgataa

SEQ ID NO: 76246 - DNA, 25 bp, SARS Virus
tcgttaacggaacgaaaatgataag

SEQ ID NO: 76247 - DNA, 25 bp, SARS Virus
cgttaacggaaacaaaatgataaga

SEQ ID NO: 76248 - DNA, 25 bp, SARS Virus
gttaacggaaagcaaatgataagac

SEQ ID NO: 76249 - DNA, 25 bp, SARS Virus
ttaacggaaagacaatgataagact

SEQ ID NO: 76250 - DNA, 25 bp, SARS Virus
taacggaaagaacatgataagacta

SEQ ID NO: 76251 - DNA, 25 bp, SARS Virus
aacggaaagaaactgataagactat

SEQ ID NO: 76252 - DNA, 25 bp, SARS Virus
acggaaagaaaacgataagactatc

SEQ ID NO: 76253 - DNA, 25 bp, SARS Virus
cggaaagaaaatcataagactatca

SEQ ID NO: 76254 - DNA, 25 bp, SARS Virus
ggaaagaaaatgctaagactatcag

SEQ ID NO: 76255 - DNA, 25 bp, SARS Virus
gaaagaaaatgacaagactatcagg

SEQ ID NO: 76256 - DNA, 25 bp, SARS Virus
aaagaaaatgatcagactatcagga

SEQ ID NO: 76257 - DNA, 25 bp, SARS Virus
gtcaggtactcaggaaacaattcgc

SEQ ID NO: 76258 - DNA, 25 bp, SARS Virus
tcaggtactcacgaaacaattcgcg

SEQ ID NO: 76259 - DNA, 25 bp, SARS Virus
caggtactcacggaacaattcgcgc

SEQ ID NO: 76260 - DNA, 25 bp, SARS Virus
aggtactcacgagacaattcgcgca

SEQ ID NO: 76261 - DNA, 25 bp, SARS Virus
ggtactcacgaagcaattcgcgcaa

SEQ ID NO: 76262 - DNA, 25 bp, SARS Virus
gtactcacgaaagaattcgcgcaac

SEQ ID NO: 76263 - DNA, 25 bp, SARS Virus
tactcacgaaacgattcgcgcaact

SEQ ID NO: 76264 - DNA, 25 bp, SARS Virus
actcacgaaacagttcgcgcaacta

SEQ ID NO: 76265 - DNA, 25 bp, SARS Virus
ctcacgaaacaagtcgcgcaactaa

SEQ ID NO: 76266 - DNA, 25 bp, SARS Virus
tcacgaaacaatgcgcgcaactaac

SEQ ID NO: 76267 - DNA, 25 bp, SARS Virus
cacgaaacaattggcgcaactaacc

SEQ ID NO: 76268 - DNA, 25 bp, SARS Virus
acgaaacaattcgcgcaactaacca

SEQ ID NO: 76269 - DNA, 25 bp, SARS Virus
cgaaacaattcgggcaactaaccag

SEQ ID NO: 76270 - DNA, 25 bp, SARS Virus
gaaacaattcgcgcaactaaccaga

SEQ ID NO: 76271 - DNA, 25 bp, SARS Virus
aaacaattcgcggaactaaccagac

SEQ ID NO: 76272 - DNA, 25 bp, SARS Virus
aacaattcgcgcgactaaccagaca

SEQ ID NO: 76273 - DNA, 25 bp, SARS Virus
acaattcgcgcagctaaccagacaa

SEQ ID NO: 76274 - DNA, 25 bp, SARS Virus
caattcgcgcaagtaaccagacaac

SEQ ID NO: 76275 - DNA, 25 bp, SARS Virus
aattcgcgcaacgaaccagacaact

SEQ ID NO: 76276 - DNA, 25 bp, SARS Virus
attcgcgcaactgaccagacaactt

SEQ ID NO: 76277 - DNA, 25 bp, SARS Virus
ttcgcgcaactagccagacaactta

SEQ ID NO: 76278 - DNA, 25 bp, SARS Virus
tcgcgcaactaagcagacaacttat

SEQ ID NO: 76279 - DNA, 25 bp, SARS Virus
cgcgcaactaacgagacaacttatg

SEQ ID NO: 76280 - DNA, 25 bp, SARS Virus
gcgcaactaaccggacaacttatgg

SEQ ID NO: 76281 - DNA, 25 bp, SARS Virus
cgcaactaaccagacaacttatggg

SEQ ID NO: 76282 - DNA, 25 bp, SARS Virus
gcaactaaccaggcaacttatggga

SEQ ID NO: 76283 - DNA, 25 bp, SARS Virus
caactaaccagagaacttatgggat

SEQ ID NO: 76284 - DNA, 25 bp, SARS Virus
aactaaccagacgacttatgggata

SEQ ID NO: 76285 - DNA, 25 bp, SARS Virus
actaaccagacagcttatgggataa

SEQ ID NO: 76286 - DNA, 25 bp, SARS Virus
ctaaccagacaagttatgggataat

SEQ ID NO: 76287 - DNA, 25 bp, SARS Virus
taaccagacaacgtatgggataata

SEQ ID NO: 76288 - DNA, 25 bp, SARS Virus
aaccagacaactgatgggataatat

SEQ ID NO: 76289 - DNA, 25 bp, SARS Virus
accagacaacttgtgggataatatc

SEQ ID NO: 76290 - DNA, 25 bp, SARS Virus
ccagacaacttaggggataatatcc

SEQ ID NO: 76291 - DNA, 25 bp, SARS Virus
cagacaacttatgggataatatcct

SEQ ID NO: 76292 - DNA, 25 bp, SARS Virus
agacaacttatgggataatatcctc

SEQ ID NO: 76293 - DNA, 25 bp, SARS Virus
gacaacttatgggataatatcctct

SEQ ID NO: 76294 - DNA, 25 bp, SARS Virus
acaacttatggggtaatatcctcta

SEQ ID NO: 76295 - DNA, 25 bp, SARS Virus
caacttatgggagaatatcctctac

SEQ ID NO: 76296 - DNA, 25 bp, SARS Virus
aacttatgggatgatatcctctact

SEQ ID NO: 76297 - DNA, 25 bp, SARS Virus
acttatgggatagtatcctctactt

SEQ ID NO: 76298 - DNA, 25 bp, SARS Virus
cttatgggataagatcctctacttg

SEQ ID NO: 76299 - DNA, 25 bp, SARS Virus
ttatgggataatgtcctctacttga

SEQ ID NO: 76300 - DNA, 25 bp, SARS Virus
tatgggataatagcctctacttgac

SEQ ID NO: 76301 - DNA, 25 bp, SARS Virus
atgggataatatgctctacttgact

SEQ ID NO: 76302 - DNA, 25 bp, SARS Virus
tgggataatatcgtctacttgactc

SEQ ID NO: 76303 - DNA, 25 bp, SARS Virus
gggataatatccgctacttgactcc

SEQ ID NO: 76304 - DNA, 25 bp, SARS Virus
ggataatatcctgtacttgactccc

SEQ ID NO: 76305 - DNA, 25 bp, SARS Virus
gataatatcctcgacttgactccca

SEQ ID NO: 76306 - DNA, 25 bp, SARS Virus
ataatatcctctgcttgactcccaa

SEQ ID NO: 76307 - DNA, 25 bp, SARS Virus
taatatcctctagttgactcccaat

SEQ ID NO: 76308 - DNA, 25 bp, SARS Virus
aatatcctctacgtgactcccaatt

SEQ ID NO: 76309 - DNA, 25 bp, SARS Virus
atatcctctactggactcccaatta

SEQ ID NO: 76310 - DNA, 25 bp, SARS Virus
tatcctctacttgactcccaattaa

SEQ ID NO: 76311 - DNA, 25 bp, SARS Virus
atcctctacttggctcccaattaag

SEQ ID NO: 76312 - DNA, 25 bp, SARS Virus
tcctctacttgagtcccaattaaga

SEQ ID NO: 76313 - DNA, 25 bp, SARS Virus
cctctacttgacgcccaattaagac

SEQ ID NO: 76314 - DNA, 25 bp, SARS Virus
ctctacttgactgccaattaagacg

SEQ ID NO: 76315 - DNA, 25 bp, SARS Virus
tctacttgactcgcaattaagacga

SEQ ID NO: 76316 - DNA, 25 bp, SARS Virus
ctacttgactccgaattaagacgaa

SEQ ID NO: 76317 - DNA, 25 bp, SARS Virus
tacttgactcccgattaagacgaac

SEQ ID NO: 76318 - DNA, 25 bp, SARS Virus
acttgactcccagttaagacgaacg

SEQ ID NO: 76319 - DNA, 25 bp, SARS Virus
cttgactcccaagtaagacgaacgt

SEQ ID NO: 76320 - DNA, 25 bp, SARS Virus
ttgactcccaatgaagacgaacgtc

SEQ ID NO: 76321 - DNA, 25 bp, SARS Virus
tgactcccaattgagacgaacgtct

SEQ ID NO: 76322 - DNA, 25 bp, SARS Virus
gactcccaattaggacgaacgtctt

SEQ ID NO: 76323 - DNA, 25 bp, SARS Virus
actcccaattaagacgaacgtcttt

SEQ ID NO: 76324 - DNA, 25 bp, SARS Virus
ctcccaattaaggcgaacgtctttt

SEQ ID NO: 76325 - DNA, 25 bp, SARS Virus
tcccaattaagaggaacgtcttttc

SEQ ID NO: 76326 - DNA, 25 bp, SARS Virus
cccaattaagacgaacgtcttttca

SEQ ID NO: 76327 - DNA, 25 bp, SARS Virus
ccaattaagacggacgtcttttcat

SEQ ID NO: 76328 - DNA, 25 bp, SARS Virus
caattaagacgagcgtcttttcatg

SEQ ID NO: 76329 - DNA, 25 bp, SARS Virus
aattaagacgaaggtcttttcatgt

SEQ ID NO: 76330 - DNA, 25 bp, SARS Virus
attaagacgaacgtcttttcatgtt

SEQ ID NO: 76331 - DNA, 25 bp, SARS Virus
ttaagacgaacggcttttcatgttg

SEQ ID NO: 76332 - DNA, 25 bp, SARS Virus
taagacgaacgtgttttcatgttgt

SEQ ID NO: 76333 - DNA, 25 bp, SARS Virus
aagacgaacgtcgtttcatgttgtg

SEQ ID NO: 76334 - DNA, 25 bp, SARS Virus
agacgaacgtctgttcatgttgtgt

SEQ ID NO: 76335 - DNA, 25 bp, SARS Virus
gacgaacgtcttgtcatgttgtgta

SEQ ID NO: 76336 - DNA, 25 bp, SARS Virus
acgaacgtctttgcatgttgtgtac

SEQ ID NO: 76337 - DNA, 25 bp, SARS Virus
cgaacgtcttttgatgttgtgtacc

SEQ ID NO: 76338 - DNA, 25 bp, SARS Virus
gaacgtcttttcgtgttgtgtacca

SEQ ID NO: 76339 - DNA, 25 bp, SARS Virus
aacgtcttttcaggttgtgtaccaa

SEQ ID NO: 76340 - DNA, 25 bp, SARS Virus
acgtcttttcatgttgtgtaccaac

SEQ ID NO: 76341 - DNA, 25 bp, SARS Virus
cgtcttttcatggtgtgtaccaaca

SEQ ID NO: 76342 - DNA, 25 bp, SARS Virus
gtcttttcatgtggtgtaccaacac

SEQ ID NO: 76343 - DNA, 25 bp, SARS Virus
tcttttcatgttgtgtaccaacact

SEQ ID NO: 76344 - DNA, 25 bp, SARS Virus
cttttcatgttgggtaccaacactt

SEQ ID NO: 76345 - DNA, 25 bp, SARS Virus
ttttcatgttgtgtaccaacacttc

SEQ ID NO: 76346 - DNA, 25 bp, SARS Virus
tttcatgttgtggaccaacacttca

SEQ ID NO: 76347 - DNA, 25 bp, SARS Virus
ttcatgttgtgtgccaacacttcag

SEQ ID NO: 76348 - DNA, 25 bp, SARS Virus
tcatgttgtgtagcaacacttcaga

SEQ ID NO: 76349 - DNA, 25 bp, SARS Virus
catgttgtgtacgaacacttcagac

SEQ ID NO: 76350 - DNA, 25 bp, SARS Virus
atgttgtgtaccgacacttcagacg

SEQ ID NO: 76351 - DNA, 25 bp, SARS Virus
tgttgtgtaccagcacttcagacgt

SEQ ID NO: 76352 - DNA, 25 bp, SARS Virus
gttgtgtaccaagacttcagacgta

SEQ ID NO: 76353 - DNA, 25 bp, SARS Virus
ttgtgtaccaacgcttcagacgtaa

SEQ ID NO: 76354 - DNA, 25 bp, SARS Virus
tgtgtaccaacagttcagacgtaac

SEQ ID NO: 76355 - DNA, 25 bp, SARS Virus
gtgtaccaacacgtcagacgtaacg

SEQ ID NO: 76356 - DNA, 25 bp, SARS Virus
tgtaccaacactgcagacgtaacga

SEQ ID NO: 76357 - DNA, 25 bp, SARS Virus
gtaccaacacttgagacgtaacgaa

SEQ ID NO: 76358 - DNA, 25 bp, SARS Virus
taccaacacttcggacgtaacgaac

SEQ ID NO: 76359 - DNA, 25 bp, SARS Virus
accaacacttcagacgtaacgaacg

SEQ ID NO: 76360 - DNA, 25 bp, SARS Virus
ccaacacttcaggcgtaacgaacga

SEQ ID NO: 76361 - DNA, 25 bp, SARS Virus
caacacttcagaggtaacgaacgac

SEQ ID NO: 76362 - DNA, 25 bp, SARS Virus
aacacttcagacgtaacgaacgact

SEQ ID NO: 76363 - DNA, 25 bp, SARS Virus
acacttcagacggaacgaacgacta

SEQ ID NO: 76364 - DNA, 25 bp, SARS Virus
cacttcagacgtgacgaacgactat

SEQ ID NO: 76365 - DNA, 25 bp, SARS Virus
acttcagacgtagcgaacgactatt

SEQ ID NO: 76366 - DNA, 25 bp, SARS Virus
cttcagacgtaaggaacgactattc

SEQ ID NO: 76367 - DNA, 25 bp, SARS Virus
ttcagacgtaacgaacgactattca

SEQ ID NO: 76368 - DNA, 25 bp, SARS Virus
tcagacgtaacggacgactattcaa

SEQ ID NO: 76369 - DNA, 25 bp, SARS Virus
cagacgtaacgagcgactattcaaa

SEQ ID NO: 76370 - DNA, 25 bp, SARS Virus
agacgtaacgaaggactattcaaag

SEQ ID NO: 76371 - DNA, 25 bp, SARS Virus
gacgtaacgaacgactattcaaagg

SEQ ID NO: 76372 - DNA, 25 bp, SARS Virus
acgtaacgaacggctattcaaaggt

SEQ ID NO: 76373 - DNA, 25 bp, SARS Virus
cgtaacgaacgagtattcaaaggtc

SEQ ID NO: 76374 - DNA, 25 bp, SARS Virus
gtaacgaacgacgattcaaaggtca

SEQ ID NO: 76375 - DNA, 25 bp, SARS Virus
taacgaacgactgttcaaaggtcaa

SEQ ID NO: 76376 - DNA, 25 bp, SARS Virus
aacgaacgactagtcaaaggtcaag

SEQ ID NO: 76377 - DNA, 25 bp, SARS Virus
acgaacgactatgcaaaggtcaaga

SEQ ID NO: 76378 - DNA, 25 bp, SARS Virus
cgaacgactattgaaaggtcaagaa

SEQ ID NO: 76379 - DNA, 25 bp, SARS Virus
gaacgactattcgaaggtcaagaag

SEQ ID NO: 76380 - DNA, 25 bp, SARS Virus
aacgactattcagaggtcaagaagt

SEQ ID NO: 76381 - DNA, 25 bp, SARS Virus
acgactattcaagggtcaagaagta

SEQ ID NO: 76382 - DNA, 25 bp, SARS Virus
cgactattcaaaggtcaagaagtac

SEQ ID NO: 76383 - DNA, 25 bp, SARS Virus
gactattcaaaggtcaagaagtact

SEQ ID NO: 76384 - DNA, 25 bp, SARS Virus
actattcaaagggcaagaagtactg

SEQ ID NO: 76385 - DNA, 25 bp, SARS Virus
ctattcaaaggtgaagaagtactgt

SEQ ID NO: 76386 - DNA, 25 bp, SARS Virus
tattcaaaggtcgagaagtactgta

SEQ ID NO: 76387 - DNA, 25 bp, SARS Virus
attcaaaggtcaggaagtactgtaa

SEQ ID NO: 76388 - DNA, 25 bp, SARS Virus
ttcaaaggtcaagaagtactgtaac

SEQ ID NO: 76389 - DNA, 25 bp, SARS Virus
tcaaaggtcaaggagtactgtaacc

SEQ ID NO: 76390 - DNA, 25 bp, SARS Virus
caaaggtcaagaggtactgtaacct

SEQ ID NO: 76391 - DNA, 25 bp, SARS Virus
aaaggtcaagaagtactgtaacctt

SEQ ID NO: 76392 - DNA, 25 bp, SARS Virus
aaggtcaagaaggactgtaaccttt

SEQ ID NO: 76393 - DNA, 25 bp, SARS Virus
aggtcaagaagtgctgtaaccttta

SEQ ID NO: 76394 - DNA, 25 bp, SARS Virus
ggtcaagaagtagtgtaacctttag

SEQ ID NO: 76395 - DNA, 25 bp, SARS Virus
gtcaagaagtacggtaacctttagg

SEQ ID NO: 76396 - DNA, 25 bp, SARS Virus
tcaagaagtactgtaacctttaggt

SEQ ID NO: 76397 - DNA, 25 bp, SARS Virus
caagaagtactggaacctttaggtt

SEQ ID NO: 76398 - DNA, 25 bp, SARS Virus
aagaagtactgtgacctttaggttt

SEQ ID NO: 76399 - DNA, 25 bp, SARS Virus
agaagtactgtagcctttaggtttc

SEQ ID NO: 76400 - DNA, 25 bp, SARS Virus
gaagtactgtaagctttaggtttcc

SEQ ID NO: 76401 - DNA, 25 bp, SARS Virus
aagtactgtaacgtttaggtttccg

SEQ ID NO: 76402 - DNA, 25 bp, SARS Virus
agtactgtaaccgttaggtttccga

SEQ ID NO: 76403 - DNA, 25 bp, SARS Virus
gtactgtaacctgtaggtttccgat

SEQ ID NO: 76404 - DNA, 25 bp, SARS Virus
tactgtaaccttgaggtttccgata

SEQ ID NO: 76405 - DNA, 25 bp, SARS Virus
actgtaacctttgggtttccgatag

SEQ ID NO: 76406 - DNA, 25 bp, SARS Virus
ctgtaacctttaggtttccgatagt

SEQ ID NO: 76407 - DNA, 25 bp, SARS Virus
tgtaacctttaggtttccgatagtt

SEQ ID NO: 76408 - DNA, 25 bp, SARS Virus
gtaacctttagggttccgatagttc

SEQ ID NO: 76409 - DNA, 25 bp, SARS Virus
taacctttaggtgtccgatagttca

SEQ ID NO: 76410 - DNA, 25 bp, SARS Virus
aacctttaggttgccgatagttcac

SEQ ID NO: 76411 - DNA, 25 bp, SARS Virus
acctttaggtttgcgatagttcaca

SEQ ID NO: 76412 - DNA, 25 bp, SARS Virus
cctttaggtttcggatagttcacac

SEQ ID NO: 76413 - DNA, 25 bp, SARS Virus
ctttaggtttccgatagttcacaca

SEQ ID NO: 76414 - DNA, 25 bp, SARS Virus
tttaggtttccggtagttcacacac

SEQ ID NO: 76415 - DNA, 25 bp, SARS Virus
ttaggtttccgagagttcacacacg

SEQ ID NO: 76416 - DNA, 25 bp, SARS Virus
taggtttccgatggttcacacacgg

SEQ ID NO: 76417 - DNA, 25 bp, SARS Virus
aggtttccgatagttcacacacgga

SEQ ID NO: 76418 - DNA, 25 bp, SARS Virus
ggtttccgataggtcacacacggag

SEQ ID NO: 76419 - DNA, 25 bp, SARS Virus
gtttccgatagtgcacacacggagt

SEQ ID NO: 76420 - DNA, 25 bp, SARS Virus
tttccgatagttgacacacggagtc

SEQ ID NO: 76421 - DNA, 25 bp, SARS Virus
ttccgatagttcgcacacggagtcc

SEQ ID NO: 76422 - DNA, 25 bp, SARS Virus
tccgatagttcagacacggagtccg

SEQ ID NO: 76423 - DNA, 25 bp, SARS Virus
ccgatagttcacgcacggagtccga

SEQ ID NO: 76424 - DNA, 25 bp, SARS Virus
cgatagttcacagacggagtccgac

SEQ ID NO: 76425 - DNA, 25 bp, SARS Virus
gatagttcacacgcggagtccgact

SEQ ID NO: 76426 - DNA, 25 bp, SARS Virus
atagttcacacagggagtccgactt

SEQ ID NO: 76427 - DNA, 25 bp, SARS Virus
tagttcacacacggagtccgacttc

SEQ ID NO: 76428 - DNA, 25 bp, SARS Virus
agttcacacacggagtccgacttca

SEQ ID NO: 76429 - DNA, 25 bp, SARS Virus
gttcacacacggggtccgacttcat

SEQ ID NO: 76430 - DNA, 25 bp, SARS Virus
ttcacacacggagtccgacttcatc

SEQ ID NO: 76431 - DNA, 25 bp, SARS Virus
tcacacacggaggccgacttcatct

SEQ ID NO: 76432 - DNA, 25 bp, SARS Virus
cacacacggagtgcgacttcatctt

SEQ ID NO: 76433 - DNA, 25 bp, SARS Virus
acacacggagtcggacttcatctta

SEQ ID NO: 76434 - DNA, 25 bp, SARS Virus
cacacggagtccgacttcatcttac

SEQ ID NO: 76435 - DNA, 25 bp, SARS Virus
acacggagtccggcttcatcttacc

SEQ ID NO: 76436 - DNA, 25 bp, SARS Virus
cacggagtccgagttcatcttacct

SEQ ID NO: 76437 - DNA, 25 bp, SARS Virus
acggagtccgacgtcatcttacctt

SEQ ID NO: 76438 - DNA, 25 bp, SARS Virus
cggagtccgactgcatcttaccttc

SEQ ID NO: 76439 - DNA, 25 bp, SARS Virus
ggagtccgacttgatcttaccttca

SEQ ID NO: 76440 - DNA, 25 bp, SARS Virus
gagtccgacttcgtcttaccttcaa

SEQ ID NO: 76441 - DNA, 25 bp, SARS Virus
agtccgacttcagcttaccttcaag

SEQ ID NO: 76442 - DNA, 25 bp, SARS Virus
gtccgacttcatgttaccttcaaga

SEQ ID NO: 76443 - DNA, 25 bp, SARS Virus
tccgacttcatcgtaccttcaagat

SEQ ID NO: 76444 - DNA, 25 bp, SARS Virus
ccgacttcatctgaccttcaagatg

SEQ ID NO: 76445 - DNA, 25 bp, SARS Virus
cgacttcatcttgccttcaagatgc

SEQ ID NO: 76446 - DNA, 25 bp, SARS Virus
gacttcatcttagcttcaagatgct

SEQ ID NO: 76447 - DNA, 25 bp, SARS Virus
acttcatcttacgttcaagatgcta

SEQ ID NO: 76448 - DNA, 25 bp, SARS Virus
cttcatcttaccgtcaagatgctac

SEQ ID NO: 76449 - DNA, 25 bp, SARS Virus
ttcatcttacctgcaagatgctacg

SEQ ID NO: 76450 - DNA, 25 bp, SARS Virus
tcatcttaccttgaagatgctacga

SEQ ID NO: 76451 - DNA, 25 bp, SARS Virus
catcttaccttcgagatgctacgag

SEQ ID NO: 76452 - DNA, 25 bp, SARS Virus
atcttaccttcaggatgctacgagt

SEQ ID NO: 76453 - DNA, 25 bp, SARS Virus
tcttaccttcaagatgctacgagtc

SEQ ID NO: 76454 - DNA, 25 bp, SARS Virus
cttaccttcaaggtgctacgagtcg

SEQ ID NO: 76455 - DNA, 25 bp, SARS Virus
ttaccttcaagaggctacgagtcgg

SEQ ID NO: 76456 - DNA, 25 bp, SARS Virus
taccttcaagatgctacgagtcggt

SEQ ID NO: 76457 - DNA, 25 bp, SARS Virus
accttcaagatggtacgagtcggta

SEQ ID NO: 76458 - DNA, 25 bp, SARS Virus
ccttcaagatgcgacgagtcggtac

SEQ ID NO: 76459 - DNA, 25 bp, SARS Virus
cttcaagatgctgcgagtcggtaca

SEQ ID NO: 76460 - DNA, 25 bp, SARS Virus
ttcaagatgctaggagtcggtacat

SEQ ID NO: 76461 - DNA, 25 bp, SARS Virus
tcaagatgctacgagtcggtacatc

SEQ ID NO: 76462 - DNA, 25 bp, SARS Virus
caagatgctacgggtcggtacatca

SEQ ID NO: 76463 - DNA, 25 bp, SARS Virus
aagatgctacgagtcggtacatcac

SEQ ID NO: 76464 - DNA, 25 bp, SARS Virus
agatgctacgaggcggtacatcact

SEQ ID NO: 76465 - DNA, 25 bp, SARS Virus
gatgctacgagtgggtacatcactg

SEQ ID NO: 76466 - DNA, 25 bp, SARS Virus
atgctacgagtcggtacatcactgt

SEQ ID NO: 76467 - DNA, 25 bp, SARS Virus
tgctacgagtcggtacatcactgtt

SEQ ID NO: 76468 - DNA, 25 bp, SARS Virus
gctacgagtcgggacatcactgttt

SEQ ID NO: 76469 - DNA, 25 bp, SARS Virus
ctacgagtcggtgcatcactgtttc

SEQ ID NO: 76470 - DNA, 25 bp, SARS Virus
tacgagtcggtagatcactgtttcg

SEQ ID NO: 76471 - DNA, 25 bp, SARS Virus
acgagtcggtacgtcactgtttcga

SEQ ID NO: 76472 - DNA, 25 bp, SARS Virus
cgagtcggtacagcactgtttcgaa

SEQ ID NO: 76473 - DNA, 25 bp, SARS Virus
gagtcggtacatgactgtttcgaat

SEQ ID NO: 76474 - DNA, 25 bp, SARS Virus
agtcggtacatcgctgtttcgaatg

SEQ ID NO: 76475 - DNA, 25 bp, SARS Virus
gtcggtacatcagtgtttcgaatgt

SEQ ID NO: 76476 - DNA, 25 bp, SARS Virus
tcggtacatcacggtttcgaatgtt

SEQ ID NO: 76477 - DNA, 25 bp, SARS Virus
cggtacatcactgtttcgaatgttt

SEQ ID NO: 76478 - DNA, 25 bp, SARS Virus
ggtacatcactggttcgaatgtttt

SEQ ID NO: 76479 - DNA, 25 bp, SARS Virus
gtacatcactgtgtcgaatgtttta

SEQ ID NO: 76480 - DNA, 25 bp, SARS Virus
tacatcactgttgcgaatgttttat

SEQ ID NO: 76481 - DNA, 25 bp, SARS Virus
acatcactgtttggaatgttttatc

SEQ ID NO: 76482 - DNA, 25 bp, SARS Virus
catcactgtttcgaatgttttatct

SEQ ID NO: 76483 - DNA, 25 bp, SARS Virus
atcactgtttcggatgttttatctc

SEQ ID NO: 76484 - DNA, 25 bp, SARS Virus
tcactgtttcgagtgttttatctcc

SEQ ID NO: 76485 - DNA, 25 bp, SARS Virus
cactgtttcgaaggttttatctcct

SEQ ID NO: 76486 - DNA, 25 bp, SARS Virus
actgtttcgaatgttttatctcctt

SEQ ID NO: 76487 - DNA, 25 bp, SARS Virus
ctgtttcgaatggtttatctccttg

SEQ ID NO: 76488 - DNA, 25 bp, SARS Virus
tgtttcgaatgtgttatctccttga

SEQ ID NO: 76489 - DNA, 25 bp, SARS Virus
gtttcgaatgttgtatctccttgag

SEQ ID NO: 76490 - DNA, 25 bp, SARS Virus
tttcgaatgtttgatctccttgaga

SEQ ID NO: 76491 - DNA, 25 bp, SARS Virus
ttcgaatgttttgtctccttgagaa

SEQ ID NO: 76492 - DNA, 25 bp, SARS Virus
tcgaatgttttagctccttgagaag

SEQ ID NO: 76493 - DNA, 25 bp, SARS Virus
cgaatgttttatgtccttgagaaga

SEQ ID NO: 76494 - DNA, 25 bp, SARS Virus
gaatgttttatcgccttgagaagat

SEQ ID NO: 76495 - DNA, 25 bp, SARS Virus
aatgttttatctgcttgagaagata

SEQ ID NO: 76496 - DNA, 25 bp, SARS Virus
atgttttatctcgttgagaagataa

SEQ ID NO: 76497 - DNA, 25 bp, SARS Virus
tgttttatctccgtgagaagataag

SEQ ID NO: 76498 - DNA, 25 bp, SARS Virus
gttttatctcctggagaagataaga

SEQ ID NO: 76499 - DNA, 25 bp, SARS Virus
ttttatctccttgagaagataagaa

SEQ ID NO: 76500 - DNA, 25 bp, SARS Virus
tttatctccttgggaagataagaat

SEQ ID NO: 76501 - DNA, 25 bp, SARS Virus
ttatctccttgagaagataagaata

SEQ ID NO: 76502 - DNA, 25 bp, SARS Virus
tatctccttgaggagataagaatac

SEQ ID NO: 76503 - DNA, 25 bp, SARS Virus
atctccttgagaggataagaatacg

SEQ ID NO: 76504 - DNA, 25 bp, SARS Virus
tctccttgagaagataagaatacga

SEQ ID NO: 76505 - DNA, 25 bp, SARS Virus
ctccttgagaaggtaagaatacgat

SEQ ID NO: 76506 - DNA, 25 bp, SARS Virus
tccttgagaagagaagaatacgatg

SEQ ID NO: 76507 - DNA, 25 bp, SARS Virus
ccttgagaagatgagaatacgatgt

SEQ ID NO: 76508 - DNA, 25 bp, SARS Virus
cttgagaagataggaatacgatgtg

SEQ ID NO: 76509 - DNA, 25 bp, SARS Virus
ttgagaagataagaatacgatgtgt

SEQ ID NO: 76510 - DNA, 25 bp, SARS Virus
tgagaagataaggatacgatgtgta

SEQ ID NO: 76511 - DNA, 25 bp, SARS Virus
gagaagataagagtacgatgtgtag

SEQ ID NO: 76512 - DNA, 25 bp, SARS Virus
agaagataagaagacgatgtgtagt

SEQ ID NO: 76513 - DNA, 25 bp, SARS Virus
gaagataagaatgcgatgtgtagtg

SEQ ID NO: 76514 - DNA, 25 bp, SARS Virus
aagataagaataggatgtgtagtgc

SEQ ID NO: 76515 - DNA, 25 bp, SARS Virus
agataagaatacgatgtgtagtgct

SEQ ID NO: 76516 - DNA, 25 bp, SARS Virus
gataagaatacggtgtgtagtgcta

SEQ ID NO: 76517 - DNA, 25 bp, SARS Virus
ataagaatacgaggtgtagtgctat

SEQ ID NO: 76518 - DNA, 25 bp, SARS Virus
taagaatacgatgtgtagtgctatt

SEQ ID NO: 76519 - DNA, 25 bp, SARS Virus
aagaatacgatgggtagtgctattt

SEQ ID NO: 76520 - DNA, 25 bp, SARS Virus
agaatacgatgtgtagtgctattta

SEQ ID NO: 76521 - DNA, 25 bp, SARS Virus
gaatacgatgtggagtgctatttaa

SEQ ID NO: 76522 - DNA, 25 bp, SARS Virus
aatacgatgtgtggtgctatttaag

SEQ ID NO: 76523 - DNA, 25 bp, SARS Virus
atacgatgtgtagtgctatttaagt

SEQ ID NO: 76524 - DNA, 25 bp, SARS Virus
tacgatgtgtagggctatttaagtg

SEQ ID NO: 76525 - DNA, 25 bp, SARS Virus
acgatgtgtagtgctatttaagtga

SEQ ID NO: 76526 - DNA, 25 bp, SARS Virus
cgatgtgtagtggtatttaagtgac

SEQ ID NO: 76527 - DNA, 25 bp, SARS Virus
gatgtgtagtgcgatttaagtgact

SEQ ID NO: 76528 - DNA, 25 bp, SARS Virus
atgtgtagtgctgtttaagtgacta

SEQ ID NO: 76529 - DNA, 25 bp, SARS Virus
tgtgtagtgctagttaagtgactac

SEQ ID NO: 76530 - DNA, 25 bp, SARS Virus
gtgtagtgctatgtaagtgactacc

SEQ ID NO: 76531 - DNA, 25 bp, SARS Virus
tgtagtgctattgaagtgactacca

SEQ ID NO: 76532 - DNA, 25 bp, SARS Virus
gtagtgctatttgagtgactaccac

SEQ ID NO: 76533 - DNA, 25 bp, SARS Virus
tagtgctatttaggtgactaccaca

SEQ ID NO: 76534 - DNA, 25 bp, SARS Virus
agtgctatttaagtgactaccacaa

SEQ ID NO: 76535 - DNA, 25 bp, SARS Virus
gtgctatttaagggactaccacaaa

SEQ ID NO: 76536 - DNA, 25 bp, SARS Virus
tgctatttaagtgactaccacaaac

SEQ ID NO: 76537 - DNA, 25 bp, SARS Virus
gctatttaagtggctaccacaaaca

SEQ ID NO: 76538 - DNA, 25 bp, SARS Virus
ctatttaagtgagtaccacaaacaa

SEQ ID NO: 76539 - DNA, 25 bp, SARS Virus
tatttaagtgacgaccacaaacaaa

SEQ ID NO: 76540 - DNA, 25 bp, SARS Virus
atttaagtgactgccacaaacaaac

SEQ ID NO: 76541 - DNA, 25 bp, SARS Virus
tttaagtgactagcacaaacaaaca

SEQ ID NO: 76542 - DNA, 25 bp, SARS Virus
ttaagtgactacgacaaacaaacaa

SEQ ID NO: 76543 - DNA, 25 bp, SARS Virus
taagtgactaccgcaaacaaacaaa

SEQ ID NO: 76544 - DNA, 25 bp, SARS Virus
aagtgactaccagaaacaaacaaaa

SEQ ID NO: 76545 - DNA, 25 bp, SARS Virus
agtgactaccacgaacaaacaaaac

SEQ ID NO: 76546 - DNA, 25 bp, SARS Virus
gtgactaccacagacaaacaaaacc

SEQ ID NO: 76547 - DNA, 25 bp, SARS Virus
tgactaccacaagcaaacaaaacct

SEQ ID NO: 76548 - DNA, 25 bp, SARS Virus
gactaccacaaagaaacaaaacctt

SEQ ID NO: 76549 - DNA, 25 bp, SARS Virus
actaccacaaacgaacaaaacctta

SEQ ID NO: 76550 - DNA, 25 bp, SARS Virus
ctaccacaaacagacaaaaccttaa

SEQ ID NO: 76551 - DNA, 25 bp, SARS Virus
taccacaaacaagcaaaaccttaac

SEQ ID NO: 76552 - DNA, 25 bp, SARS Virus
accacaaacaaagaaaaccttaaca

SEQ ID NO: 76553 - DNA, 25 bp, SARS Virus
ccacaaacaaacgaaaccttaacat

SEQ ID NO: 76554 - DNA, 25 bp, SARS Virus
cacaaacaaacagaaccttaacatt

SEQ ID NO: 76555 - DNA, 25 bp, SARS Virus
acaaacaaacaagaccttaacattg

SEQ ID NO: 76556 - DNA, 25 bp, SARS Virus
caaacaaacaaagccttaacattgc

SEQ ID NO: 76557 - DNA, 25 bp, SARS Virus
aaacaaacaaaagcttaacattgca

SEQ ID NO: 76558 - DNA, 25 bp, SARS Virus
aacaaacaaaacgttaacattgcaa

SEQ ID NO: 76559 - DNA, 25 bp, SARS Virus
acaaacaaaaccgtaacattgcaac

SEQ ID NO: 76560 - DNA, 25 bp, SARS Virus
caaacaaaacctgaacattgcaact

SEQ ID NO: 76561 - DNA, 25 bp, SARS Virus
aaacaaaaccttgacattgcaacta

SEQ ID NO: 76562 - DNA, 25 bp, SARS Virus
aacaaaaccttagcattgcaactag

SEQ ID NO: 76563 - DNA, 25 bp, SARS Virus
acaaaaccttaagattgcaactagc

SEQ ID NO: 76564 - DNA, 25 bp, SARS Virus
caaaaccttaacgttgcaactagca

SEQ ID NO: 76565 - DNA, 25 bp, SARS Virus
aaaaccttaacagtgcaactagcaa

SEQ ID NO: 76566 - DNA, 25 bp, SARS Virus
aaaccttaacatggcaactagcaat

SEQ ID NO: 76567 - DNA, 25 bp, SARS Virus
aaccttaacattgcaactagcaatg

SEQ ID NO: 76568 - DNA, 25 bp, SARS Virus
accttaacattggaactagcaatgg

SEQ ID NO: 76569 - DNA, 25 bp, SARS Virus
ccttaacattgcgactagcaatggg

SEQ ID NO: 76570 - DNA, 25 bp, SARS Virus
cttaacattgcagctagcaatgggt

SEQ ID NO: 76571 - DNA, 25 bp, SARS Virus
ttaacattgcaagtagcaatgggtc

SEQ ID NO: 76572 - DNA, 25 bp, SARS Virus
taacattgcaacgagcaatgggtcg

SEQ ID NO: 76573 - DNA, 25 bp, SARS Virus
aacattgcaactggcaatgggtcgg

SEQ ID NO: 76574 - DNA, 25 bp, SARS Virus
acattgcaactagcaatgggtcggt

SEQ ID NO: 76575 - DNA, 25 bp, SARS Virus
cattgcaactaggaatgggtcggtt

SEQ ID NO: 76576 - DNA, 25 bp, SARS Virus
attgcaactagcgatgggtcggtta

SEQ ID NO: 76577 - DNA, 25 bp, SARS Virus
ttgcaactagcagtgggtcggttac

SEQ ID NO: 76578 - DNA, 25 bp, SARS Virus
tgcaactagcaaggggtcggttacg

SEQ ID NO: 76579 - DNA, 25 bp, SARS Virus
gcaactagcaatgggtcggttacgt

SEQ ID NO: 76580 - DNA, 25 bp, SARS Virus
caactagcaatgggtcggttacgtt

SEQ ID NO: 76581 - DNA, 25 bp, SARS Virus
aactagcaatgggtcggttacgtta

SEQ ID NO: 76582 - DNA, 25 bp, SARS Virus
actagcaatggggcggttacgttaa

SEQ ID NO: 76583 - DNA, 25 bp, SARS Virus
ctagcaatgggtgggttacgttaac

SEQ ID NO: 76584 - DNA, 25 bp, SARS Virus
tagcaatgggtcggttacgttaaca

SEQ ID NO: 76585 - DNA, 25 bp, SARS Virus
agcaatgggtcggttacgttaacac

SEQ ID NO: 76586 - DNA, 25 bp, SARS Virus
gcaatgggtcgggtacgttaacaca

SEQ ID NO: 76587 - DNA, 25 bp, SARS Virus
caatgggtcggtgacgttaacacac

SEQ ID NO: 76588 - DNA, 25 bp, SARS Virus
aatgggtcggttgcgttaacacaca

SEQ ID NO: 76589 - DNA, 25 bp, SARS Virus
atgggtcggttaggttaacacacat

SEQ ID NO: 76590 - DNA, 25 bp, SARS Virus
tgggtcggttacgttaacacacatc

SEQ ID NO: 76591 - DNA, 25 bp, SARS Virus
gggtcggttacggtaacacacatcc

SEQ ID NO: 76592 - DNA, 25 bp, SARS Virus
ggtcggttacgtgaacacacatcca

SEQ ID NO: 76593 - DNA, 25 bp, SARS Virus
gtcggttacgttgacacacatccaa

SEQ ID NO: 76594 - DNA, 25 bp, SARS Virus
tcggttacgttagcacacatccaaa

SEQ ID NO: 76595 - DNA, 25 bp, SARS Virus
cggttacgttaagacacatccaaac

SEQ ID NO: 76596 - DNA, 25 bp, SARS Virus
ggttacgttaacgcacatccaaact

SEQ ID NO: 76597 - DNA, 25 bp, SARS Virus
gttacgttaacagacatccaaactg

SEQ ID NO: 76598 - DNA, 25 bp, SARS Virus
ttacgttaacacgcatccaaactgt

SEQ ID NO: 76599 - DNA, 25 bp, SARS Virus
tacgttaacacagatccaaactgtg

SEQ ID NO: 76600 - DNA, 25 bp, SARS Virus
acgttaacacacgtccaaactgtgt

SEQ ID NO: 76601 - DNA, 25 bp, SARS Virus
cgttaacacacagccaaactgtgtt

SEQ ID NO: 76602 - DNA, 25 bp, SARS Virus
gttaacacacatgcaaactgtgttc

SEQ ID NO: 76603 - DNA, 25 bp, SARS Virus
ttaacacacatcgaaactgtgttct

SEQ ID NO: 76604 - DNA, 25 bp, SARS Virus
taacacacatccgaactgtgttctc

SEQ ID NO: 76605 - DNA, 25 bp, SARS Virus
aacacacatccagactgtgttctca

SEQ ID NO: 76606 - DNA, 25 bp, SARS Virus
acacacatccaagctgtgttctcag

SEQ ID NO: 76607 - DNA, 25 bp, SARS Virus
cacacatccaaagtgtgttctcaga

SEQ ID NO: 76608 - DNA, 25 bp, SARS Virus
acacatccaaacggtgttctcagaa

SEQ ID NO: 76609 - DNA, 25 bp, SARS Virus
cacatccaaactgtgttctcagaac

SEQ ID NO: 76610 - DNA, 25 bp, SARS Virus
acatccaaactgggttctcagaaca

SEQ ID NO: 76611 - DNA, 25 bp, SARS Virus
catccaaactgtgttctcagaacag

SEQ ID NO: 76612 - DNA, 25 bp, SARS Virus
atccaaactgtggtctcagaacagt

SEQ ID NO: 76613 - DNA, 25 bp, SARS Virus
tccaaactgtgtgctcagaacagtt

SEQ ID NO: 76614 - DNA, 25 bp, SARS Virus
ccaaactgtgttgtcagaacagttt

SEQ ID NO: 76615 - DNA, 25 bp, SARS Virus
caaactgtgttcgcagaacagtttg

SEQ ID NO: 76616 - DNA, 25 bp, SARS Virus
aaactgtgttctgagaacagtttga

SEQ ID NO: 76617 - DNA, 25 bp, SARS Virus
aactgtgttctcggaacagtttgaa

SEQ ID NO: 76618 - DNA, 25 bp, SARS Virus
actgtgttctcagaacagtttgaac

SEQ ID NO: 76619 - DNA, 25 bp, SARS Virus
ctgtgttctcaggacagtttgaact

SEQ ID NO: 76620 - DNA, 25 bp, SARS Virus
tgtgttctcagagcagtttgaactt

SEQ ID NO: 76621 - DNA, 25 bp, SARS Virus
gtgttctcagaagagtttgaacttg

SEQ ID NO: 76622 - DNA, 25 bp, SARS Virus
tgttctcagaacggtttgaacttga

SEQ ID NO: 76623 - DNA, 25 bp, SARS Virus
gttctcagaacagtttgaacttgaa

SEQ ID NO: 76624 - DNA, 25 bp, SARS Virus
ttctcagaacaggttgaacttgaat

SEQ ID NO: 76625 - DNA, 25 bp, SARS Virus
tctcagaacagtgtgaacttgaatg

SEQ ID NO: 76626 - DNA, 25 bp, SARS Virus
ctcagaacagttggaacttgaatgg

SEQ ID NO: 76627 - DNA, 25 bp, SARS Virus
tcagaacagtttgaacttgaatggt

SEQ ID NO: 76628 - DNA, 25 bp, SARS Virus
cagaacagtttggacttgaatggtc

SEQ ID NO: 76629 - DNA, 25 bp, SARS Virus
agaacagtttgagcttgaatggtcc

SEQ ID NO: 76630 - DNA, 25 bp, SARS Virus
gaacagtttgaagttgaatggtccg

SEQ ID NO: 76631 - DNA, 25 bp, SARS Virus
aacagtttgaacgtgaatggtccga

SEQ ID NO: 76632 - DNA, 25 bp, SARS Virus
acagtttgaactggaatggtccgac

SEQ ID NO: 76633 - DNA, 25 bp, SARS Virus
cagtttgaacttgaatggtccgaca

SEQ ID NO: 76634 - DNA, 25 bp, SARS Virus
agtttgaacttggatggtccgacac

SEQ ID NO: 76635 - DNA, 25 bp, SARS Virus
gtttgaacttgagtggtccgacact

SEQ ID NO: 76636 - DNA, 25 bp, SARS Virus
tttgaacttgaagggtccgacacta

SEQ ID NO: 76637 - DNA, 25 bp, SARS Virus
ttgaacttgaatggtccgacactac

SEQ ID NO: 76638 - DNA, 25 bp, SARS Virus
tgaacttgaatggtccgacactacc

SEQ ID NO: 76639 - DNA, 25 bp, SARS Virus
gaacttgaatgggccgacactacca

SEQ ID NO: 76640 - DNA, 25 bp, SARS Virus
aacttgaatggtgcgacactaccac

SEQ ID NO: 76641 - DNA, 25 bp, SARS Virus
acttgaatggtcggacactaccacc

SEQ ID NO: 76642 - DNA, 25 bp, SARS Virus
cttgaatggtccgacactaccacca

SEQ ID NO: 76643 - DNA, 25 bp, SARS Virus
ttgaatggtccggcactaccaccat

SEQ ID NO: 76644 - DNA, 25 bp, SARS Virus
tgaatggtccgagactaccaccatc

SEQ ID NO: 76645 - DNA, 25 bp, SARS Virus
gaatggtccgacgctaccaccatca

SEQ ID NO: 76646 - DNA, 25 bp, SARS Virus
aatggtccgacagtaccaccatcaa

SEQ ID NO: 76647 - DNA, 25 bp, SARS Virus
atggtccgacacgaccaccatcaaa

SEQ ID NO: 76648 - DNA, 25 bp, SARS Virus
tggtccgacactgccaccatcaaac

SEQ ID NO: 76649 - DNA, 25 bp, SARS Virus
ggtccgacactagcaccatcaaaca

SEQ ID NO: 76650 - DNA, 25 bp, SARS Virus
gtccgacactacgaccatcaaacat

SEQ ID NO: 76651 - DNA, 25 bp, SARS Virus
tccgacactaccgccatcaaacata

SEQ ID NO: 76652 - DNA, 25 bp, SARS Virus
ccgacactaccagcatcaaacatac

SEQ ID NO: 76653 - DNA, 25 bp, SARS Virus
cgacactaccacgatcaaacataca

SEQ ID NO: 76654 - DNA, 25 bp, SARS Virus
gacactaccaccgtcaaacatacac

SEQ ID NO: 76655 - DNA, 25 bp, SARS Virus
acactaccaccagcaaacatacact

SEQ ID NO: 76656 - DNA, 25 bp, SARS Virus
cactaccaccatgaaacatacactt

SEQ ID NO: 76657 - DNA, 25 bp, SARS Virus
actaccaccatcgaacatacactta

SEQ ID NO: 76658 - DNA, 25 bp, SARS Virus
ctaccaccatcagacatacacttat

SEQ ID NO: 76659 - DNA, 25 bp, SARS Virus
taccaccatcaagcatacacttatt

SEQ ID NO: 76660 - DNA, 25 bp, SARS Virus
accaccatcaaagatacacttattc

SEQ ID NO: 76661 - DNA, 25 bp, SARS Virus
ccaccatcaaacgtacacttattcg

SEQ ID NO: 76662 - DNA, 25 bp, SARS Virus
caccatcaaacagacacttattcgt

SEQ ID NO: 76663 - DNA, 25 bp, SARS Virus
accatcaaacatgcacttattcgta

SEQ ID NO: 76664 - DNA, 25 bp, SARS Virus
ccatcaaacatagacttattcgtac

SEQ ID NO: 76665 - DNA, 25 bp, SARS Virus
catcaaacatacgcttattcgtacg

SEQ ID NO: 76666 - DNA, 25 bp, SARS Virus
atcaaacatacagttattcgtacgt

SEQ ID NO: 76667 - DNA, 25 bp, SARS Virus
tcaaacatacacgtattcgtacgta

SEQ ID NO: 76668 - DNA, 25 bp, SARS Virus
caaacatacactgattcgtacgtaa

SEQ ID NO: 76669 - DNA, 25 bp, SARS Virus
aaacatacacttgttcgtacgtaag

SEQ ID NO: 76670 - DNA, 25 bp, SARS Virus
aacatacacttagtcgtacgtaagg

SEQ ID NO: 76671 - DNA, 25 bp, SARS Virus
acatacacttatgcgtacgtaaggt

SEQ ID NO: 76672 - DNA, 25 bp, SARS Virus
catacacttattggtacgtaaggtg

SEQ ID NO: 76673 - DNA, 25 bp, SARS Virus
atacacttattcgtacgtaaggtgt

SEQ ID NO: 76674 - DNA, 25 bp, SARS Virus
tacacttattcggacgtaaggtgtg

SEQ ID NO: 76675 - DNA, 25 bp, SARS Virus
acacttattcgtgcgtaaggtgtga

SEQ ID NO: 76676 - DNA, 25 bp, SARS Virus
cacttattcgtaggtaaggtgtgag

SEQ ID NO: 76677 - DNA, 25 bp, SARS Virus
acttattcgtacgtaaggtgtgagg

SEQ ID NO: 76678 - DNA, 25 bp, SARS Virus
cttattcgtacggaaggtgtgaggt

SEQ ID NO: 76679 - DNA, 25 bp, SARS Virus
ttattcgtacgtgaggtgtgaggtc

SEQ ID NO: 76680 - DNA, 25 bp, SARS Virus
tattcgtacgtagggtgtgaggtcg

SEQ ID NO: 76681 - DNA, 25 bp, SARS Virus
attcgtacgtaaggtgtgaggtcga

SEQ ID NO: 76682 - DNA, 25 bp, SARS Virus
ttcgtacgtaaggtgtgaggtcgaa

SEQ ID NO: 76683 - DNA, 25 bp, SARS Virus
tcgtacgtaaggggtgaggtcgaaa

SEQ ID NO: 76684 - DNA, 25 bp, SARS Virus
cgtacgtaaggtgtgaggtcgaaag

SEQ ID NO: 76685 - DNA, 25 bp, SARS Virus
gtacgtaaggtgggaggtcgaaagc

SEQ ID NO: 76686 - DNA, 25 bp, SARS Virus
tacgtaaggtgtgaggtcgaaagct

SEQ ID NO: 76687 - DNA, 25 bp, SARS Virus
acgtaaggtgtggggtcgaaagcta

SEQ ID NO: 76688 - DNA, 25 bp, SARS Virus
cgtaaggtgtgaggtcgaaagctat

SEQ ID NO: 76689 - DNA, 25 bp, SARS Virus
gtaaggtgtgaggtcgaaagctatt

SEQ ID NO: 76690 - DNA, 25 bp, SARS Virus
taaggtgtgagggcgaaagctattt

SEQ ID NO: 76691 - DNA, 25 bp, SARS Virus
aaggtgtgaggtggaaagctatttt

SEQ ID NO: 76692 - DNA, 25 bp, SARS Virus
aggtgtgaggtcgaaagctattttc

SEQ ID NO: 76693 - DNA, 25 bp, SARS Virus
ggtgtgaggtcggaagctattttca

SEQ ID NO: 76694 - DNA, 25 bp, SARS Virus
gtgtgaggtcgagagctattttcac

SEQ ID NO: 76695 - DNA, 25 bp, SARS Virus
tgtgaggtcgaaggctattttcacg

SEQ ID NO: 76696 - DNA, 25 bp, SARS Virus
gtgaggtcgaaagctattttcacgt

SEQ ID NO: 76697 - DNA, 25 bp, SARS Virus
tgaggtcgaaaggtattttcacgta

SEQ ID NO: 76698 - DNA, 25 bp, SARS Virus
gaggtcgaaagcgattttcacgtaa

SEQ ID NO: 76699 - DNA, 25 bp, SARS Virus
aggtcgaaagctgttttcacgtaaa

SEQ ID NO: 76700 - DNA, 25 bp, SARS Virus
ggtcgaaagctagtttcacgtaaat

SEQ ID NO: 76701 - DNA, 25 bp, SARS Virus
gtcgaaagctatgttcacgtaaatg

SEQ ID NO: 76702 - DNA, 25 bp, SARS Virus
tcgaaagctattgtcacgtaaatga

SEQ ID NO: 76703 - DNA, 25 bp, SARS Virus
cgaaagctatttgcacgtaaatgat

SEQ ID NO: 76704 - DNA, 25 bp, SARS Virus
gaaagctattttgacgtaaatgatt

SEQ ID NO: 76705 - DNA, 25 bp, SARS Virus
aaagctattttcgcgtaaatgatta

SEQ ID NO: 76706 - DNA, 25 bp, SARS Virus
aagctattttcaggtaaatgattaa

SEQ ID NO: 76707 - DNA, 25 bp, SARS Virus
agctattttcacgtaaatgattaaa

SEQ ID NO: 76708 - DNA, 25 bp, SARS Virus
gctattttcacggaaatgattaaat

SEQ ID NO: 76709 - DNA, 25 bp, SARS Virus
ctattttcacgtgaatgattaaatt

SEQ ID NO: 76710 - DNA, 25 bp, SARS Virus
tattttcacgtagatgattaaattt

SEQ ID NO: 76711 - DNA, 25 bp, SARS Virus
attttcacgtaagtgattaaatttc

SEQ ID NO: 76712 - DNA, 25 bp, SARS Virus
ttttcacgtaaaggattaaatttcg

SEQ ID NO: 76713 - DNA, 25 bp, SARS Virus
tttcacgtaaatgattaaatttcgt

SEQ ID NO: 76714 - DNA, 25 bp, SARS Virus
ttcacgtaaatggttaaatttcgtt

SEQ ID NO: 76715 - DNA, 25 bp, SARS Virus
tcacgtaaatgagtaaatttcgtta

SEQ ID NO: 76716 - DNA, 25 bp, SARS Virus
cacgtaaatgatgaaatttcgttaa

SEQ ID NO: 76717 - DNA, 25 bp, SARS Virus
acgtaaatgattgaatttcgttaac

SEQ ID NO: 76718 - DNA, 25 bp, SARS Virus
cgtaaatgattagatttcgttaacg

SEQ ID NO: 76719 - DNA, 25 bp, SARS Virus
gtaaatgattaagtttcgttaacgg

SEQ ID NO: 76720 - DNA, 25 bp, SARS Virus
taaatgattaaagttcgttaacgga

SEQ ID NO: 76721 - DNA, 25 bp, SARS Virus
aaatgattaaatgtcgttaacggaa

SEQ ID NO: 76722 - DNA, 25 bp, SARS Virus
aatgattaaattgcgttaacggaaa

SEQ ID NO: 76723 - DNA, 25 bp, SARS Virus
atgattaaatttggttaacggaaag

SEQ ID NO: 76724 - DNA, 25 bp, SARS Virus
tgattaaatttcgttaacggaaaga

SEQ ID NO: 76725 - DNA, 25 bp, SARS Virus
gattaaatttcggtaacggaaagaa

SEQ ID NO: 76726 - DNA, 25 bp, SARS Virus
attaaatttcgtgaacggaaagaaa

SEQ ID NO: 76727 - DNA, 25 bp, SARS Virus
ttaaatttcgttgacggaaagaaaa

SEQ ID NO: 76728 - DNA, 25 bp, SARS Virus
taaatttcgttagcggaaagaaaat

SEQ ID NO: 76729 - DNA, 25 bp, SARS Virus
aaatttcgttaagggaaagaaaatg

SEQ ID NO: 76730 - DNA, 25 bp, SARS Virus
aatttcgttaacggaaagaaaatga

SEQ ID NO: 76731 - DNA, 25 bp, SARS Virus
atttcgttaacggaaagaaaatgat

SEQ ID NO: 76732 - DNA, 25 bp, SARS Virus
tttcgttaacgggaagaaaatgata

SEQ ID NO: 76733 - DNA, 25 bp, SARS Virus
ttcgttaacggagagaaaatgataa

SEQ ID NO: 76734 - DNA, 25 bp, SARS Virus
tcgttaacggaaggaaaatgataag

SEQ ID NO: 76735 - DNA, 25 bp, SARS Virus
cgttaacggaaagaaaatgataaga

SEQ ID NO: 76736 - DNA, 25 bp, SARS Virus
gttaacggaaaggaaatgataagac

SEQ ID NO: 76737 - DNA, 25 bp, SARS Virus
ttaacggaaagagaatgataagact

SEQ ID NO: 76738 - DNA, 25 bp, SARS Virus
taacggaaagaagatgataagacta

SEQ ID NO: 76739 - DNA, 25 bp, SARS Virus
aacggaaagaaagtgataagactat

SEQ ID NO: 76740 - DNA, 25 bp, SARS Virus
acggaaagaaaaggataagactatc

SEQ ID NO: 76741 - DNA, 25 bp, SARS Virus
cggaaagaaaatgataagactatca

SEQ ID NO: 76742 - DNA, 25 bp, SARS Virus
ggaaagaaaatggtaagactatcag

SEQ ID NO: 76743 - DNA, 25 bp, SARS Virus
gaaagaaaatgagaagactatcagg

SEQ ID NO: 76744 - DNA, 25 bp, SARS Virus
aaagaaaatgatgagactatcagga

SEQ ID NO: 76745 - DNA, 25 bp, SARS Virus
gtcaggtactcatgaaacaattcgc

SEQ ID NO: 76746 - DNA, 25 bp, SARS Virus
tcaggtactcactaaacaattcgcg

SEQ ID NO: 76747 - DNA, 25 bp, SARS Virus
caggtactcacgtaacaattcgcgc

SEQ ID NO: 76748 - DNA, 25 bp, SARS Virus
aggtactcacgatacaattcgcgca

SEQ ID NO: 76749 - DNA, 25 bp, SARS Virus
ggtactcacgaatcaattcgcgcaa

SEQ ID NO: 76750 - DNA, 25 bp, SARS Virus
gtactcacgaaataattcgcgcaac

SEQ ID NO: 76751 - DNA, 25 bp, SARS Virus
tactcacgaaactattcgcgcaact

SEQ ID NO: 76752 - DNA, 25 bp, SARS Virus
actcacgaaacatttcgcgcaacta

SEQ ID NO: 76753 - DNA, 25 bp, SARS Virus
ctcacgaaacaattcgcgcaactaa

SEQ ID NO: 76754 - DNA, 25 bp, SARS Virus
tcacgaaacaattcgcgcaactaac

SEQ ID NO: 76755 - DNA, 25 bp, SARS Virus
cacgaaacaatttgcgcaactaacc

SEQ ID NO: 76756 - DNA, 25 bp, SARS Virus
acgaaacaattctcgcaactaacca

SEQ ID NO: 76757 - DNA, 25 bp, SARS Virus
cgaaacaattcgtgcaactaaccag

SEQ ID NO: 76758 - DNA, 25 bp, SARS Virus
gaaacaattcgctcaactaaccaga

SEQ ID NO: 76759 - DNA, 25 bp, SARS Virus
aaacaattcgcgtaactaaccagac

SEQ ID NO: 76760 - DNA, 25 bp, SARS Virus
aacaattcgcgctactaaccagaca

SEQ ID NO: 76761 - DNA, 25 bp, SARS Virus
acaattcgcgcatctaaccagacaa

SEQ ID NO: 76762 - DNA, 25 bp, SARS Virus
caattcgcgcaattaaccagacaac

SEQ ID NO: 76763 - DNA, 25 bp, SARS Virus
aattcgcgcaactaaccagacaact

SEQ ID NO: 76764 - DNA, 25 bp, SARS Virus
attcgcgcaacttaccagacaactt

SEQ ID NO: 76765 - DNA, 25 bp, SARS Virus
ttcgcgcaactatccagacaactta

SEQ ID NO: 76766 - DNA, 25 bp, SARS Virus
tcgcgcaactaatcagacaacttat

SEQ ID NO: 76767 - DNA, 25 bp, SARS Virus
cgcgcaactaactagacaacttatg

SEQ ID NO: 76768 - DNA, 25 bp, SARS Virus
gcgcaactaacctgacaacttatgg

SEQ ID NO: 76769 - DNA, 25 bp, SARS Virus
cgcaactaaccatacaacttatggg

SEQ ID NO: 76770 - DNA, 25 bp, SARS Virus
gcaactaaccagtcaacttatggga

SEQ ID NO: 76771 - DNA, 25 bp, SARS Virus
caactaaccagataacttatgggat

SEQ ID NO: 76772 - DNA, 25 bp, SARS Virus
aactaaccagactacttatgggata

SEQ ID NO: 76773 - DNA, 25 bp, SARS Virus
actaaccagacatcttatgggataa

SEQ ID NO: 76774 - DNA, 25 bp, SARS Virus
ctaaccagacaatttatgggataat

SEQ ID NO: 76775 - DNA, 25 bp, SARS Virus
taaccagacaacttatgggataata

SEQ ID NO: 76776 - DNA, 25 bp, SARS Virus
aaccagacaacttatgggataatat

SEQ ID NO: 76777 - DNA, 25 bp, SARS Virus
accagacaacttttgggataatatc

SEQ ID NO: 76778 - DNA, 25 bp, SARS Virus
ccagacaacttatgggataatatcc

SEQ ID NO: 76779 - DNA, 25 bp, SARS Virus
cagacaacttattggataatatcct

SEQ ID NO: 76780 - DNA, 25 bp, SARS Virus
agacaacttatgtgataatatcctc

SEQ ID NO: 76781 - DNA, 25 bp, SARS Virus
gacaacttatggtataatatcctct

SEQ ID NO: 76782 - DNA, 25 bp, SARS Virus
acaacttatgggttaatatcctcta

SEQ ID NO: 76783 - DNA, 25 bp, SARS Virus
caacttatgggataatatcctctac

SEQ ID NO: 76784 - DNA, 25 bp, SARS Virus
aacttatgggattatatcctctact

SEQ ID NO: 76785 - DNA, 25 bp, SARS Virus
acttatgggatattatcctctactt

SEQ ID NO: 76786 - DNA, 25 bp, SARS Virus
cttatgggataatatcctctacttg

SEQ ID NO: 76787 - DNA, 25 bp, SARS Virus
ttatgggataatttcctctacttga

SEQ ID NO: 76788 - DNA, 25 bp, SARS Virus
tatgggataatatcctctacttgac

SEQ ID NO: 76789 - DNA, 25 bp, SARS Virus
atgggataatattctctacttgact

SEQ ID NO: 76790 - DNA, 25 bp, SARS Virus
tgggataatatcttctacttgactc

SEQ ID NO: 76791 - DNA, 25 bp, SARS Virus
gggataatatcctctacttgactcc

SEQ ID NO: 76792 - DNA, 25 bp, SARS Virus
ggataatatcctttacttgactccc

SEQ ID NO: 76793 - DNA, 25 bp, SARS Virus
gataatatcctctacttgactccca

SEQ ID NO: 76794 - DNA, 25 bp, SARS Virus
ataatatcctcttcttgactcccaa

SEQ ID NO: 76795 - DNA, 25 bp, SARS Virus
taatatcctctatttgactcccaat

SEQ ID NO: 76796 - DNA, 25 bp, SARS Virus
aatatcctctacttgactcccaatt

SEQ ID NO: 76797 - DNA, 25 bp, SARS Virus
atatcctctacttgactcccaatta

SEQ ID NO: 76798 - DNA, 25 bp, SARS Virus
tatcctctactttactcccaattaa

SEQ ID NO: 76799 - DNA, 25 bp, SARS Virus
atcctctacttgtctcccaattaag

SEQ ID NO: 76800 - DNA, 25 bp, SARS Virus
tcctctacttgattcccaattaaga

SEQ ID NO: 76801 - DNA, 25 bp, SARS Virus
cctctacttgactcccaattaagac

SEQ ID NO: 76802 - DNA, 25 bp, SARS Virus
ctctacttgacttccaattaagacg

SEQ ID NO: 76803 - DNA, 25 bp, SARS Virus
tctacttgactctcaattaagacga

SEQ ID NO: 76804 - DNA, 25 bp, SARS Virus
ctacttgactcctaattaagacgaa

SEQ ID NO: 76805 - DNA, 25 bp, SARS Virus
tacttgactccctattaagacgaac

SEQ ID NO: 76806 - DNA, 25 bp, SARS Virus
acttgactcccatttaagacgaacg

SEQ ID NO: 76807 - DNA, 25 bp, SARS Virus
cttgactcccaattaagacgaacgt

SEQ ID NO: 76808 - DNA, 25 bp, SARS Virus
ttgactcccaattaagacgaacgtc

SEQ ID NO: 76809 - DNA, 25 bp, SARS Virus
tgactcccaatttagacgaacgtct

SEQ ID NO: 76810 - DNA, 25 bp, SARS Virus
gactcccaattatgacgaacgtctt

SEQ ID NO: 76811 - DNA, 25 bp, SARS Virus
actcccaattaatacgaacgtcttt

SEQ ID NO: 76812 - DNA, 25 bp, SARS Virus
ctcccaattaagtcgaacgtctttt

SEQ ID NO: 76813 - DNA, 25 bp, SARS Virus
tcccaattaagatgaacgtcttttc

SEQ ID NO: 76814 - DNA, 25 bp, SARS Virus
cccaattaagactaacgtcttttca

SEQ ID NO: 76815 - DNA, 25 bp, SARS Virus
ccaattaagacgtacgtcttttcat

SEQ ID NO: 76816 - DNA, 25 bp, SARS Virus
caattaagacgatcgtcttttcatg

SEQ ID NO: 76817 - DNA, 25 bp, SARS Virus
aattaagacgaatgtcttttcatgt

SEQ ID NO: 76818 - DNA, 25 bp, SARS Virus
attaagacgaacttcttttcatgtt

SEQ ID NO: 76819 - DNA, 25 bp, SARS Virus
ttaagacgaacgtcttttcatgttg

SEQ ID NO: 76820 - DNA, 25 bp, SARS Virus
taagacgaacgttttttcatgttgt

SEQ ID NO: 76821 - DNA, 25 bp, SARS Virus
aagacgaacgtcttttcatgttgtg

SEQ ID NO: 76822 - DNA, 25 bp, SARS Virus
agacgaacgtcttttcatgttgtgt

SEQ ID NO: 76823 - DNA, 25 bp, SARS Virus
gacgaacgtcttttcatgttgtgta

SEQ ID NO: 76824 - DNA, 25 bp, SARS Virus
acgaacgtcttttcatgttgtgtac

SEQ ID NO: 76825 - DNA, 25 bp, SARS Virus
cgaacgtctttttatgttgtgtacc

SEQ ID NO: 76826 - DNA, 25 bp, SARS Virus
gaacgtcttttcttgttgtgtacca

SEQ ID NO: 76827 - DNA, 25 bp, SARS Virus
aacgtcttttcatgttgtgtaccaa

SEQ ID NO: 76828 - DNA, 25 bp, SARS Virus
acgtcttttcattttgtgtaccaac

SEQ ID NO: 76829 - DNA, 25 bp, SARS Virus
cgtcttttcatgttgtgtaccaaca

SEQ ID NO: 76830 - DNA, 25 bp, SARS Virus
gtcttttcatgttgtgtaccaacac

SEQ ID NO: 76831 - DNA, 25 bp, SARS Virus
tcttttcatgttttgtaccaacact

SEQ ID NO: 76832 - DNA, 25 bp, SARS Virus
cttttcatgttgtgtaccaacactt

SEQ ID NO: 76833 - DNA, 25 bp, SARS Virus
ttttcatgttgtttaccaacacttc

SEQ ID NO: 76834 - DNA, 25 bp, SARS Virus
tttcatgttgtgtaccaacacttca

SEQ ID NO: 76835 - DNA, 25 bp, SARS Virus
ttcatgttgtgttccaacacttcag

SEQ ID NO: 76836 - DNA, 25 bp, SARS Virus
tcatgttgtgtatcaacacttcaga

SEQ ID NO: 76837 - DNA, 25 bp, SARS Virus
catgttgtgtactaacacttcagac

SEQ ID NO: 76838 - DNA, 25 bp, SARS Virus
atgttgtgtacctacacttcagacg

SEQ ID NO: 76839 - DNA, 25 bp, SARS Virus
tgttgtgtaccatcacttcagacgt

SEQ ID NO: 76840 - DNA, 25 bp, SARS Virus
gttgtgtaccaatacttcagacgta

SEQ ID NO: 76841 - DNA, 25 bp, SARS Virus
ttgtgtaccaactcttcagacgtaa

SEQ ID NO: 76842 - DNA, 25 bp, SARS Virus
tgtgtaccaacatttcagacgtaac

SEQ ID NO: 76843 - DNA, 25 bp, SARS Virus
gtgtaccaacacttcagacgtaacg

SEQ ID NO: 76844 - DNA, 25 bp, SARS Virus
tgtaccaacacttcagacgtaacga

SEQ ID NO: 76845 - DNA, 25 bp, SARS Virus
gtaccaacactttagacgtaacgaa

SEQ ID NO: 76846 - DNA, 25 bp, SARS Virus
taccaacacttctgacgtaacgaac

SEQ ID NO: 76847 - DNA, 25 bp, SARS Virus
accaacacttcatacgtaacgaacg

SEQ ID NO: 76848 - DNA, 25 bp, SARS Virus
ccaacacttcagtcgtaacgaacga

SEQ ID NO: 76849 - DNA, 25 bp, SARS Virus
caacacttcagatgtaacgaacgac

SEQ ID NO: 76850 - DNA, 25 bp, SARS Virus
aacacttcagacttaacgaacgact

SEQ ID NO: 76851 - DNA, 25 bp, SARS Virus
acacttcagacgtaacgaacgacta

SEQ ID NO: 76852 - DNA, 25 bp, SARS Virus
cacttcagacgttacgaacgactat

SEQ ID NO: 76853 - DNA, 25 bp, SARS Virus
acttcagacgtatcgaacgactatt

SEQ ID NO: 76854 - DNA, 25 bp, SARS Virus
cttcagacgtaatgaacgactattc

SEQ ID NO: 76855 - DNA, 25 bp, SARS Virus
ttcagacgtaactaacgactattca

SEQ ID NO: 76856 - DNA, 25 bp, SARS Virus
tcagacgtaacgtacgactattcaa

SEQ ID NO: 76857 - DNA, 25 bp, SARS Virus
cagacgtaacgatcgactattcaaa

SEQ ID NO: 76858 - DNA, 25 bp, SARS Virus
agacgtaacgaatgactattcaaag

SEQ ID NO: 76859 - DNA, 25 bp, SARS Virus
gacgtaacgaactactattcaaagg

SEQ ID NO: 76860 - DNA, 25 bp, SARS Virus
acgtaacgaacgtctattcaaaggt

SEQ ID NO: 76861 - DNA, 25 bp, SARS Virus
cgtaacgaacgattattcaaaggtc

SEQ ID NO: 76862 - DNA, 25 bp, SARS Virus
gtaacgaacgactattcaaaggtca

SEQ ID NO: 76863 - DNA, 25 bp, SARS Virus
taacgaacgacttttcaaaggtcaa

SEQ ID NO: 76864 - DNA, 25 bp, SARS Virus
aacgaacgactattcaaaggtcaag

SEQ ID NO: 76865 - DNA, 25 bp, SARS Virus
acgaacgactattcaaaggtcaaga

SEQ ID NO: 76866 - DNA, 25 bp, SARS Virus
cgaacgactatttaaaggtcaagaa

SEQ ID NO: 76867 - DNA, 25 bp, SARS Virus
gaacgactattctaaggtcaagaag

SEQ ID NO: 76868 - DNA, 25 bp, SARS Virus
aacgactattcataggtcaagaagt

SEQ ID NO: 76869 - DNA, 25 bp, SARS Virus
acgactattcaatggtcaagaagta

SEQ ID NO: 76870 - DNA, 25 bp, SARS Virus
cgactattcaaatgtcaagaagtac

SEQ ID NO: 76871 - DNA, 25 bp, SARS Virus
gactattcaaagttcaagaagtact

SEQ ID NO: 76872 - DNA, 25 bp, SARS Virus
actattcaaaggtcaagaagtactg

SEQ ID NO: 76873 - DNA, 25 bp, SARS Virus
ctattcaaaggttaagaagtactgt

SEQ ID NO: 76874 - DNA, 25 bp, SARS Virus
tattcaaaggtctagaagtactgta

SEQ ID NO: 76875 - DNA, 25 bp, SARS Virus
attcaaaggtcatgaagtactgtaa

SEQ ID NO: 76876 - DNA, 25 bp, SARS Virus
ttcaaaggtcaataagtactgtaac

SEQ ID NO: 76877 - DNA, 25 bp, SARS Virus
tcaaaggtcaagtagtactgtaacc

SEQ ID NO: 76878 - DNA, 25 bp, SARS Virus
caaaggtcaagatgtactgtaacct

SEQ ID NO: 76879 - DNA, 25 bp, SARS Virus
aaaggtcaagaattactgtaacctt

SEQ ID NO: 76880 - DNA, 25 bp, SARS Virus
aaggtcaagaagtactgtaaccttt

SEQ ID NO: 76881 - DNA, 25 bp, SARS Virus
aggtcaagaagttctgtaaccttta

SEQ ID NO: 76882 - DNA, 25 bp, SARS Virus
ggtcaagaagtattgtaacctttag

SEQ ID NO: 76883 - DNA, 25 bp, SARS Virus
gtcaagaagtactgtaacctttagg

SEQ ID NO: 76884 - DNA, 25 bp, SARS Virus
tcaagaagtactttaacctttaggt

SEQ ID NO: 76885 - DNA, 25 bp, SARS Virus
caagaagtactgtaacctttaggtt

SEQ ID NO: 76886 - DNA, 25 bp, SARS Virus
aagaagtactgttacctttaggttt

SEQ ID NO: 76887 - DNA, 25 bp, SARS Virus
agaagtactgtatcctttaggtttc

SEQ ID NO: 76888 - DNA, 25 bp, SARS Virus
gaagtactgtaatctttaggtttcc

SEQ ID NO: 76889 - DNA, 25 bp, SARS Virus
aagtactgtaacttttaggtttccg

SEQ ID NO: 76890 - DNA, 25 bp, SARS Virus
agtactgtaacctttaggtttccga

SEQ ID NO: 76891 - DNA, 25 bp, SARS Virus
gtactgtaacctttaggtttccgat

SEQ ID NO: 76892 - DNA, 25 bp, SARS Virus
tactgtaacctttaggtttccgata

SEQ ID NO: 76893 - DNA, 25 bp, SARS Virus
actgtaaccttttggtttccgatag

SEQ ID NO: 76894 - DNA, 25 bp, SARS Virus
ctgtaacctttatgtttccgatagt

SEQ ID NO: 76895 - DNA, 25 bp, SARS Virus
tgtaacctttagttttccgatagtt

SEQ ID NO: 76896 - DNA, 25 bp, SARS Virus
gtaacctttaggtttccgatagttc

SEQ ID NO: 76897 - DNA, 25 bp, SARS Virus
taacctttaggtttccgatagttca

SEQ ID NO: 76898 - DNA, 25 bp, SARS Virus
aacctttaggtttccgatagttcac

SEQ ID NO: 76899 - DNA, 25 bp, SARS Virus
acctttaggttttcgatagttcaca

SEQ ID NO: 76900 - DNA, 25 bp, SARS Virus
cctttaggtttctgatagttcacac

SEQ ID NO: 76901 - DNA, 25 bp, SARS Virus
ctttaggtttcctatagttcacaca

SEQ ID NO: 76902 - DNA, 25 bp, SARS Virus
tttaggtttccgttagttcacacac

SEQ ID NO: 76903 - DNA, 25 bp, SARS Virus
ttaggtttccgatagttcacacacg

SEQ ID NO: 76904 - DNA, 25 bp, SARS Virus
taggtttccgattgttcacacacgg

SEQ ID NO: 76905 - DNA, 25 bp, SARS Virus
aggtttccgatatttcacacacgga

SEQ ID NO: 76906 - DNA, 25 bp, SARS Virus
ggtttccgatagttcacacacggag

SEQ ID NO: 76907 - DNA, 25 bp, SARS Virus
gtttccgatagttcacacacggagt

SEQ ID NO: 76908 - DNA, 25 bp, SARS Virus
tttccgatagtttacacacggagtc

SEQ ID NO: 76909 - DNA, 25 bp, SARS Virus
ttccgatagttctcacacggagtcc

SEQ ID NO: 76910 - DNA, 25 bp, SARS Virus
tccgatagttcatacacggagtccg

SEQ ID NO: 76911 - DNA, 25 bp, SARS Virus
ccgatagttcactcacggagtccga

SEQ ID NO: 76912 - DNA, 25 bp, SARS Virus
cgatagttcacatacggagtccgac

SEQ ID NO: 76913 - DNA, 25 bp, SARS Virus
gatagttcacactcggagtccgact

SEQ ID NO: 76914 - DNA, 25 bp, SARS Virus
atagttcacacatggagtccgactt

SEQ ID NO: 76915 - DNA, 25 bp, SARS Virus
tagttcacacactgagtccgacttc

SEQ ID NO: 76916 - DNA, 25 bp, SARS Virus
agttcacacacgtagtccgacttca

SEQ ID NO: 76917 - DNA, 25 bp, SARS Virus
gttcacacacggtgtccgacttcat

SEQ ID NO: 76918 - DNA, 25 bp, SARS Virus
ttcacacacggattccgacttcatc

SEQ ID NO: 76919 - DNA, 25 bp, SARS Virus
tcacacacggagtccgacttcatct

SEQ ID NO: 76920 - DNA, 25 bp, SARS Virus
cacacacggagttcgacttcatctt

SEQ ID NO: 76921 - DNA, 25 bp, SARS Virus
acacacggagtctgacttcatctta

SEQ ID NO: 76922 - DNA, 25 bp, SARS Virus
cacacggagtcctacttcatcttac

SEQ ID NO: 76923 - DNA, 25 bp, SARS Virus
acacggagtccgtcttcatcttacc

SEQ ID NO: 76924 - DNA, 25 bp, SARS Virus
cacggagtccgatttcatcttacct

SEQ ID NO: 76925 - DNA, 25 bp, SARS Virus
acggagtccgacttcatcttacctt

SEQ ID NO: 76926 - DNA, 25 bp, SARS Virus
cggagtccgacttcatcttaccttc

SEQ ID NO: 76927 - DNA, 25 bp, SARS Virus
ggagtccgactttatcttaccttca

SEQ ID NO: 76928 - DNA, 25 bp, SARS Virus
gagtccgacttcttcttaccttcaa

SEQ ID NO: 76929 - DNA, 25 bp, SARS Virus
agtccgacttcatcttaccttcaag

SEQ ID NO: 76930 - DNA, 25 bp, SARS Virus
gtccgacttcattttaccttcaaga

SEQ ID NO: 76931 - DNA, 25 bp, SARS Virus
tccgacttcatcttaccttcaagat

SEQ ID NO: 76932 - DNA, 25 bp, SARS Virus
ccgacttcatcttaccttcaagatg

SEQ ID NO: 76933 - DNA, 25 bp, SARS Virus
cgacttcatctttccttcaagatgc

SEQ ID NO: 76934 - DNA, 25 bp, SARS Virus
gacttcatcttatcttcaagatgct

SEQ ID NO: 76935 - DNA, 25 bp, SARS Virus
acttcatcttactttcaagatgcta

SEQ ID NO: 76936 - DNA, 25 bp, SARS Virus
cttcatcttaccttcaagatgctac

SEQ ID NO: 76937 - DNA, 25 bp, SARS Virus
ttcatcttaccttcaagatgctacg

SEQ ID NO: 76938 - DNA, 25 bp, SARS Virus
tcatcttacctttaagatgctacga

SEQ ID NO: 76939 - DNA, 25 bp, SARS Virus
catcttaccttctagatgctacgag

SEQ ID NO: 76940 - DNA, 25 bp, SARS Virus
atcttaccttcatgatgctacgagt

SEQ ID NO: 76941 - DNA, 25 bp, SARS Virus
tcttaccttcaatatgctacgagtc

SEQ ID NO: 76942 - DNA, 25 bp, SARS Virus
cttaccttcaagttgctacgagtcg

SEQ ID NO: 76943 - DNA, 25 bp, SARS Virus
ttaccttcaagatgctacgagtcgg

SEQ ID NO: 76944 - DNA, 25 bp, SARS Virus
taccttcaagattctacgagtcggt

SEQ ID NO: 76945 - DNA, 25 bp, SARS Virus
accttcaagatgttacgagtcggta

SEQ ID NO: 76946 - DNA, 25 bp, SARS Virus
ccttcaagatgctacgagtcggtac

SEQ ID NO: 76947 - DNA, 25 bp, SARS Virus
cttcaagatgcttcgagtcggtaca

SEQ ID NO: 76948 - DNA, 25 bp, SARS Virus
ttcaagatgctatgagtcggtacat

SEQ ID NO: 76949 - DNA, 25 bp, SARS Virus
tcaagatgctactagtcggtacatc

SEQ ID NO: 76950 - DNA, 25 bp, SARS Virus
caagatgctacgtgtcggtacatca

SEQ ID NO: 76951 - DNA, 25 bp, SARS Virus
aagatgctacgattcggtacatcac

SEQ ID NO: 76952 - DNA, 25 bp, SARS Virus
agatgctacgagtcggtacatcact

SEQ ID NO: 76953 - DNA, 25 bp, SARS Virus
gatgctacgagttggtacatcactg

SEQ ID NO: 76954 - DNA, 25 bp, SARS Virus
atgctacgagtctgtacatcactgt

SEQ ID NO: 76955 - DNA, 25 bp, SARS Virus
tgctacgagtcgttacatcactgtt

SEQ ID NO: 76956 - DNA, 25 bp, SARS Virus
gctacgagtcggtacatcactgttt

SEQ ID NO: 76957 - DNA, 25 bp, SARS Virus
ctacgagtcggttcatcactgtttc

SEQ ID NO: 76958 - DNA, 25 bp, SARS Virus
tacgagtcggtatatcactgtttcg

SEQ ID NO: 76959 - DNA, 25 bp, SARS Virus
acgagtcggtacttcactgtttcga

SEQ ID NO: 76960 - DNA, 25 bp, SARS Virus
cgagtcggtacatcactgtttcgaa

SEQ ID NO: 76961 - DNA, 25 bp, SARS Virus
gagtcggtacattactgtttcgaat

SEQ ID NO: 76962 - DNA, 25 bp, SARS Virus
agtcggtacatctctgtttcgaatg

SEQ ID NO: 76963 - DNA, 25 bp, SARS Virus
gtcggtacatcattgtttcgaatgt

SEQ ID NO: 76964 - DNA, 25 bp, SARS Virus
tcggtacatcactgtttcgaatgtt

SEQ ID NO: 76965 - DNA, 25 bp, SARS Virus
cggtacatcactttttcgaatgttt

SEQ ID NO: 76966 - DNA, 25 bp, SARS Virus
ggtacatcactgtttcgaatgtttt

SEQ ID NO: 76967 - DNA, 25 bp, SARS Virus
gtacatcactgtttcgaatgtttta

SEQ ID NO: 76968 - DNA, 25 bp, SARS Virus
tacatcactgtttcgaatgttttat

SEQ ID NO: 76969 - DNA, 25 bp, SARS Virus
acatcactgttttgaatgttttatc

SEQ ID NO: 76970 - DNA, 25 bp, SARS Virus
catcactgtttctaatgttttatct

SEQ ID NO: 76971 - DNA, 25 bp, SARS Virus
atcactgtttcgtatgttttatctc

SEQ ID NO: 76972 - DNA, 25 bp, SARS Virus
tcactgtttcgattgttttatctcc

SEQ ID NO: 76973 - DNA, 25 bp, SARS Virus
cactgtttcgaatgttttatctcct

SEQ ID NO: 76974 - DNA, 25 bp, SARS Virus
actgtttcgaattttttatctcctt

SEQ ID NO: 76975 - DNA, 25 bp, SARS Virus
ctgtttcgaatgttttatctccttg

SEQ ID NO: 76976 - DNA, 25 bp, SARS Virus
tgtttcgaatgttttatctccttga

SEQ ID NO: 76977 - DNA, 25 bp, SARS Virus
gtttcgaatgttttatctccttgag

SEQ ID NO: 76978 - DNA, 25 bp, SARS Virus
tttcgaatgttttatctccttgaga

SEQ ID NO: 76979 - DNA, 25 bp, SARS Virus
ttcgaatgttttttctccttgagaa

SEQ ID NO: 76980 - DNA, 25 bp, SARS Virus
tcgaatgttttatctccttgagaag

SEQ ID NO: 76981 - DNA, 25 bp, SARS Virus
cgaatgttttatttccttgagaaga

SEQ ID NO: 76982 - DNA, 25 bp, SARS Virus
gaatgttttatctccttgagaagat

SEQ ID NO: 76983 - DNA, 25 bp, SARS Virus
aatgttttatcttcttgagaagata

SEQ ID NO: 76984 - DNA, 25 bp, SARS Virus
atgttttatctctttgagaagataa

SEQ ID NO: 76985 - DNA, 25 bp, SARS Virus
tgttttatctccttgagaagataag

SEQ ID NO: 76986 - DNA, 25 bp, SARS Virus
gttttatctccttgagaagataaga

SEQ ID NO: 76987 - DNA, 25 bp, SARS Virus
ttttatctcctttagaagataagaa

SEQ ID NO: 76988 - DNA, 25 bp, SARS Virus
tttatctccttgtgaagataagaat

SEQ ID NO: 76989 - DNA, 25 bp, SARS Virus
ttatctccttgataagataagaata

SEQ ID NO: 76990 - DNA, 25 bp, SARS Virus
tatctccttgagtagataagaatac

SEQ ID NO: 76991 - DNA, 25 bp, SARS Virus
atctccttgagatgataagaatacg

SEQ ID NO: 76992 - DNA, 25 bp, SARS Virus
tctccttgagaatataagaatacga

SEQ ID NO: 76993 - DNA, 25 bp, SARS Virus
ctccttgagaagttaagaatacgat

SEQ ID NO: 76994 - DNA, 25 bp, SARS Virus
tccttgagaagataagaatacgatg

SEQ ID NO: 76995 - DNA, 25 bp, SARS Virus
ccttgagaagattagaatacgatgt

SEQ ID NO: 76996 - DNA, 25 bp, SARS Virus
cttgagaagatatgaatacgatgtg

SEQ ID NO: 76997 - DNA, 25 bp, SARS Virus
ttgagaagataataatacgatgtgt

SEQ ID NO: 76998 - DNA, 25 bp, SARS Virus
tgagaagataagtatacgatgtgta

SEQ ID NO: 76999 - DNA, 25 bp, SARS Virus
gagaagataagattacgatgtgtag

SEQ ID NO: 77000 - DNA, 25 bp, SARS Virus
agaagataagaatacgatgtgtagt

SEQ ID NO: 77001 - DNA, 25 bp, SARS Virus
gaagataagaattcgatgtgtagtg

SEQ ID NO: 77002 - DNA, 25 bp, SARS Virus
aagataagaatatgatgtgtagtgc

SEQ ID NO: 77003 - DNA, 25 bp, SARS Virus
agataagaatactatgtgtagtgct

SEQ ID NO: 77004 - DNA, 25 bp, SARS Virus
gataagaatacgttgtgtagtgcta

SEQ ID NO: 77005 - DNA, 25 bp, SARS Virus
ataagaatacgatgtgtagtgctat

SEQ ID NO: 77006 - DNA, 25 bp, SARS Virus
taagaatacgatttgtagtgctatt

SEQ ID NO: 77007 - DNA, 25 bp, SARS Virus
aagaatacgatgtgtagtgctattt

SEQ ID NO: 77008 - DNA, 25 bp, SARS Virus
agaatacgatgtttagtgctattta

SEQ ID NO: 77009 - DNA, 25 bp, SARS Virus
gaatacgatgtgtagtgctatttaa

SEQ ID NO: 77010 - DNA, 25 bp, SARS Virus
aatacgatgtgttgtgctatttaag

SEQ ID NO: 77011 - DNA, 25 bp, SARS Virus
atacgatgtgtattgctatttaagt

SEQ ID NO: 77012 - DNA, 25 bp, SARS Virus
tacgatgtgtagtgctatttaagtg

SEQ ID NO: 77013 - DNA, 25 bp, SARS Virus
acgatgtgtagttctatttaagtga

SEQ ID NO: 77014 - DNA, 25 bp, SARS Virus
cgatgtgtagtgttatttaagtgac

SEQ ID NO: 77015 - DNA, 25 bp, SARS Virus
gatgtgtagtgctatttaagtgact

SEQ ID NO: 77016 - DNA, 25 bp, SARS Virus
atgtgtagtgctttttaagtgacta

SEQ ID NO: 77017 - DNA, 25 bp, SARS Virus
tgtgtagtgctatttaagtgactac

SEQ ID NO: 77018 - DNA, 25 bp, SARS Virus
gtgtagtgctatttaagtgactacc

SEQ ID NO: 77019 - DNA, 25 bp, SARS Virus
tgtagtgctatttaagtgactacca

SEQ ID NO: 77020 - DNA, 25 bp, SARS Virus
gtagtgctattttagtgactaccac

SEQ ID NO: 77021 - DNA, 25 bp, SARS Virus
tagtgctatttatgtgactaccaca

SEQ ID NO: 77022 - DNA, 25 bp, SARS Virus
agtgctatttaattgactaccacaa

SEQ ID NO: 77023 - DNA, 25 bp, SARS Virus
gtgctatttaagtgactaccacaaa

SEQ ID NO: 77024 - DNA, 25 bp, SARS Virus
tgctatttaagttactaccacaaac

SEQ ID NO: 77025 - DNA, 25 bp, SARS Virus
gctatttaagtgtctaccacaaaca

SEQ ID NO: 77026 - DNA, 25 bp, SARS Virus
ctatttaagtgattaccacaaacaa

SEQ ID NO: 77027 - DNA, 25 bp, SARS Virus
tatttaagtgactaccacaaacaaa

SEQ ID NO: 77028 - DNA, 25 bp, SARS Virus
atttaagtgacttccacaaacaaac

SEQ ID NO: 77029 - DNA, 25 bp, SARS Virus
tttaagtgactatcacaaacaaaca

SEQ ID NO: 77030 - DNA, 25 bp, SARS Virus
ttaagtgactactacaaacaaacaa

SEQ ID NO: 77031 - DNA, 25 bp, SARS Virus
taagtgactacctcaaacaaacaaa

SEQ ID NO: 77032 - DNA, 25 bp, SARS Virus
aagtgactaccataaacaaacaaaa

SEQ ID NO: 77033 - DNA, 25 bp, SARS Virus
agtgactaccactaacaaacaaaac

SEQ ID NO: 77034 - DNA, 25 bp, SARS Virus
gtgactaccacatacaaacaaaacc

SEQ ID NO: 77035 - DNA, 25 bp, SARS Virus
tgactaccacaatcaaacaaaacct

SEQ ID NO: 77036 - DNA, 25 bp, SARS Virus
gactaccacaaataaacaaaacctt

SEQ ID NO: 77037 - DNA, 25 bp, SARS Virus
actaccacaaactaacaaaacctta

SEQ ID NO: 77038 - DNA, 25 bp, SARS Virus
ctaccacaaacatacaaaaccttaa

SEQ ID NO: 77039 - DNA, 25 bp, SARS Virus
taccacaaacaatcaaaaccttaac

SEQ ID NO: 77040 - DNA, 25 bp, SARS Virus
accacaaacaaataaaaccttaaca

SEQ ID NO: 77041 - DNA, 25 bp, SARS Virus
ccacaaacaaactaaaccttaacat

SEQ ID NO: 77042 - DNA, 25 bp, SARS Virus
cacaaacaaacataaccttaacatt

SEQ ID NO: 77043 - DNA, 25 bp, SARS Virus
acaaacaaacaataccttaacattg

SEQ ID NO: 77044 - DNA, 25 bp, SARS Virus
caaacaaacaaatccttaacattgc

SEQ ID NO: 77045 - DNA, 25 bp, SARS Virus
aaacaaacaaaatcttaacattgca

SEQ ID NO: 77046 - DNA, 25 bp, SARS Virus
aacaaacaaaactttaacattgcaa

SEQ ID NO: 77047 - DNA, 25 bp, SARS Virus
acaaacaaaaccttaacattgcaac

SEQ ID NO: 77048 - DNA, 25 bp, SARS Virus
caaacaaaaccttaacattgcaact

SEQ ID NO: 77049 - DNA, 25 bp, SARS Virus
aaacaaaacctttacattgcaacta

SEQ ID NO: 77050 - DNA, 25 bp, SARS Virus
aacaaaaccttatcattgcaactag

SEQ ID NO: 77051 - DNA, 25 bp, SARS Virus
acaaaaccttaatattgcaactagc

SEQ ID NO: 77052 - DNA, 25 bp, SARS Virus
caaaaccttaactttgcaactagca

SEQ ID NO: 77053 - DNA, 25 bp, SARS Virus
aaaaccttaacattgcaactagcaa

SEQ ID NO: 77054 - DNA, 25 bp, SARS Virus
aaaccttaacattgcaactagcaat

SEQ ID NO: 77055 - DNA, 25 bp, SARS Virus
aaccttaacatttcaactagcaatg

SEQ ID NO: 77056 - DNA, 25 bp, SARS Virus
accttaacattgtaactagcaatgg

SEQ ID NO: 77057 - DNA, 25 bp, SARS Virus
ccttaacattgctactagcaatggg

SEQ ID NO: 77058 - DNA, 25 bp, SARS Virus
cttaacattgcatctagcaatgggt

SEQ ID NO: 77059 - DNA, 25 bp, SARS Virus
ttaacattgcaattagcaatgggtc

SEQ ID NO: 77060 - DNA, 25 bp, SARS Virus
taacattgcaactagcaatgggtcg

SEQ ID NO: 77061 - DNA, 25 bp, SARS Virus
aacattgcaacttgcaatgggtcgg

SEQ ID NO: 77062 - DNA, 25 bp, SARS Virus
acattgcaactatcaatgggtcggt

SEQ ID NO: 77063 - DNA, 25 bp, SARS Virus
cattgcaactagtaatgggtcggtt

SEQ ID NO: 77064 - DNA, 25 bp, SARS Virus
attgcaactagctatgggtcggtta

SEQ ID NO: 77065 - DNA, 25 bp, SARS Virus
ttgcaactagcattgggtcggttac

SEQ ID NO: 77066 - DNA, 25 bp, SARS Virus
tgcaactagcaatgggtcggttacg

SEQ ID NO: 77067 - DNA, 25 bp, SARS Virus
gcaactagcaattggtcggttacgt

SEQ ID NO: 77068 - DNA, 25 bp, SARS Virus
caactagcaatgtgtcggttacgtt

SEQ ID NO: 77069 - DNA, 25 bp, SARS Virus
aactagcaatggttcggttacgtta

SEQ ID NO: 77070 - DNA, 25 bp, SARS Virus
actagcaatgggtcggttacgttaa

SEQ ID NO: 77071 - DNA, 25 bp, SARS Virus
ctagcaatgggttggttacgttaac

SEQ ID NO: 77072 - DNA, 25 bp, SARS Virus
tagcaatgggtctgttacgttaaca

SEQ ID NO: 77073 - DNA, 25 bp, SARS Virus
agcaatgggtcgtttacgttaacac

SEQ ID NO: 77074 - DNA, 25 bp, SARS Virus
gcaatgggtcggttacgttaacaca

SEQ ID NO: 77075 - DNA, 25 bp, SARS Virus
caatgggtcggttacgttaacacac

SEQ ID NO: 77076 - DNA, 25 bp, SARS Virus
aatgggtcggtttcgttaacacaca

SEQ ID NO: 77077 - DNA, 25 bp, SARS Virus
atgggtcggttatgttaacacacat

SEQ ID NO: 77078 - DNA, 25 bp, SARS Virus
tgggtcggttactttaacacacatc

SEQ ID NO: 77079 - DNA, 25 bp, SARS Virus
gggtcggttacgttaacacacatcc

SEQ ID NO: 77080 - DNA, 25 bp, SARS Virus
ggtcggttacgttaacacacatcca

SEQ ID NO: 77081 - DNA, 25 bp, SARS Virus
gtcggttacgtttacacacatccaa

SEQ ID NO: 77082 - DNA, 25 bp, SARS Virus
tcggttacgttatcacacatccaaa

SEQ ID NO: 77083 - DNA, 25 bp, SARS Virus
cggttacgttaatacacatccaaac

SEQ ID NO: 77084 - DNA, 25 bp, SARS Virus
ggttacgttaactcacatccaaact

SEQ ID NO: 77085 - DNA, 25 bp, SARS Virus
gttacgttaacatacatccaaactg

SEQ ID NO: 77086 - DNA, 25 bp, SARS Virus
ttacgttaacactcatccaaactgt

SEQ ID NO: 77087 - DNA, 25 bp, SARS Virus
tacgttaacacatatccaaactgtg

SEQ ID NO: 77088 - DNA, 25 bp, SARS Virus
acgttaacacacttccaaactgtgt

SEQ ID NO: 77089 - DNA, 25 bp, SARS Virus
cgttaacacacatccaaactgtgtt

SEQ ID NO: 77090 - DNA, 25 bp, SARS Virus
gttaacacacattcaaactgtgttc

SEQ ID NO: 77091 - DNA, 25 bp, SARS Virus
ttaacacacatctaaactgtgttct

SEQ ID NO: 77092 - DNA, 25 bp, SARS Virus
taacacacatcctaactgtgttctc

SEQ ID NO: 77093 - DNA, 25 bp, SARS Virus
aacacacatccatactgtgttctca

SEQ ID NO: 77094 - DNA, 25 bp, SARS Virus
acacacatccaatctgtgttctcag

SEQ ID NO: 77095 - DNA, 25 bp, SARS Virus
cacacatccaaattgtgttctcaga

SEQ ID NO: 77096 - DNA, 25 bp, SARS Virus
acacatccaaactgtgttctcagaa

SEQ ID NO: 77097 - DNA, 25 bp, SARS Virus
cacatccaaactttgttctcagaac

SEQ ID NO: 77098 - DNA, 25 bp, SARS Virus
acatccaaactgtgttctcagaaca

SEQ ID NO: 77099 - DNA, 25 bp, SARS Virus
catccaaactgttttctcagaacag

SEQ ID NO: 77100 - DNA, 25 bp, SARS Virus
atccaaactgtgttctcagaacagt

SEQ ID NO: 77101 - DNA, 25 bp, SARS Virus
tccaaactgtgttctcagaacagtt

SEQ ID NO: 77102 - DNA, 25 bp, SARS Virus
ccaaactgtgttttcagaacagttt

SEQ ID NO: 77103 - DNA, 25 bp, SARS Virus
caaactgtgttctcagaacagtttg

SEQ ID NO: 77104 - DNA, 25 bp, SARS Virus
aaactgtgttcttagaacagtttga

SEQ ID NO: 77105 - DNA, 25 bp, SARS Virus
aactgtgttctctgaacagtttgaa

SEQ ID NO: 77106 - DNA, 25 bp, SARS Virus
actgtgttctcataacagtttgaac

SEQ ID NO: 77107 - DNA, 25 bp, SARS Virus
ctgtgttctcagtacagtttgaact

SEQ ID NO: 77108 - DNA, 25 bp, SARS Virus
tgtgttctcagatcagtttgaactt

SEQ ID NO: 77109 - DNA, 25 bp, SARS Virus
gtgttctcagaatagtttgaacttg

SEQ ID NO: 77110 - DNA, 25 bp, SARS Virus
tgttctcagaactgtttgaacttga

SEQ ID NO: 77111 - DNA, 25 bp, SARS Virus
gttctcagaacattttgaacttgaa

SEQ ID NO: 77112 - DNA, 25 bp, SARS Virus
ttctcagaacagtttgaacttgaat

SEQ ID NO: 77113 - DNA, 25 bp, SARS Virus
tctcagaacagtttgaacttgaatg

SEQ ID NO: 77114 - DNA, 25 bp, SARS Virus
ctcagaacagtttgaacttgaatgg

SEQ ID NO: 77115 - DNA, 25 bp, SARS Virus
tcagaacagttttaacttgaatggt

SEQ ID NO: 77116 - DNA, 25 bp, SARS Virus
cagaacagtttgtacttgaatggtc

SEQ ID NO: 77117 - DNA, 25 bp, SARS Virus
agaacagtttgatcttgaatggtcc

SEQ ID NO: 77118 - DNA, 25 bp, SARS Virus
gaacagtttgaatttgaatggtccg

SEQ ID NO: 77119 - DNA, 25 bp, SARS Virus
aacagtttgaacttgaatggtccga

SEQ ID NO: 77120 - DNA, 25 bp, SARS Virus
acagtttgaacttgaatggtccgac

SEQ ID NO: 77121 - DNA, 25 bp, SARS Virus
cagtttgaactttaatggtccgaca

SEQ ID NO: 77122 - DNA, 25 bp, SARS Virus
agtttgaacttgtatggtccgacac

SEQ ID NO: 77123 - DNA, 25 bp, SARS Virus
gtttgaacttgattggtccgacact

SEQ ID NO: 77124 - DNA, 25 bp, SARS Virus
tttgaacttgaatggtccgacacta

SEQ ID NO: 77125 - DNA, 25 bp, SARS Virus
ttgaacttgaattgtccgacactac

SEQ ID NO: 77126 - DNA, 25 bp, SARS Virus
tgaacttgaatgttccgacactacc

SEQ ID NO: 77127 - DNA, 25 bp, SARS Virus
gaacttgaatggtccgacactacca

SEQ ID NO: 77128 - DNA, 25 bp, SARS Virus
aacttgaatggttcgacactaccac

SEQ ID NO: 77129 - DNA, 25 bp, SARS Virus
acttgaatggtctgacactaccacc

SEQ ID NO: 77130 - DNA, 25 bp, SARS Virus
cttgaatggtcctacactaccacca

SEQ ID NO: 77131 - DNA, 25 bp, SARS Virus
ttgaatggtccgtcactaccaccat

SEQ ID NO: 77132 - DNA, 25 bp, SARS Virus
tgaatggtccgatactaccaccatc

SEQ ID NO: 77133 - DNA, 25 bp, SARS Virus
gaatggtccgactctaccaccatca

SEQ ID NO: 77134 - DNA, 25 bp, SARS Virus
aatggtccgacattaccaccatcaa

SEQ ID NO: 77135 - DNA, 25 bp, SARS Virus
atggtccgacactaccaccatcaaa

SEQ ID NO: 77136 - DNA, 25 bp, SARS Virus
tggtccgacacttccaccatcaaac

SEQ ID NO: 77137 - DNA, 25 bp, SARS Virus
ggtccgacactatcaccatcaaaca

SEQ ID NO: 77138 - DNA, 25 bp, SARS Virus
gtccgacactactaccatcaaacat

SEQ ID NO: 77139 - DNA, 25 bp, SARS Virus
tccgacactacctccatcaaacata

SEQ ID NO: 77140 - DNA, 25 bp, SARS Virus
ccgacactaccatcatcaaacatac

SEQ ID NO: 77141 - DNA, 25 bp, SARS Virus
cgacactaccactatcaaacataca

SEQ ID NO: 77142 - DNA, 25 bp, SARS Virus
gacactaccaccttcaaacatacac

SEQ ID NO: 77143 - DNA, 25 bp, SARS Virus
acactaccaccatcaaacatacact

SEQ ID NO: 77144 - DNA, 25 bp, SARS Virus
cactaccaccattaaacatacactt

SEQ ID NO: 77145 - DNA, 25 bp, SARS Virus
actaccaccatctaacatacactta

SEQ ID NO: 77146 - DNA, 25 bp, SARS Virus
ctaccaccatcatacatacacttat

SEQ ID NO: 77147 - DNA, 25 bp, SARS Virus
taccaccatcaatcatacacttatt

SEQ ID NO: 77148 - DNA, 25 bp, SARS Virus
accaccatcaaatatacacttattc

SEQ ID NO: 77149 - DNA, 25 bp, SARS Virus
ccaccatcaaacttacacttattcg

SEQ ID NO: 77150 - DNA, 25 bp, SARS Virus
caccatcaaacatacacttattcgt

SEQ ID NO: 77151 - DNA, 25 bp, SARS Virus
accatcaaacattcacttattcgta

SEQ ID NO: 77152 - DNA, 25 bp, SARS Virus
ccatcaaacatatacttattcgtac

SEQ ID NO: 77153 - DNA, 25 bp, SARS Virus
catcaaacatactcttattcgtacg

SEQ ID NO: 77154 - DNA, 25 bp, SARS Virus
atcaaacatacatttattcgtacgt

SEQ ID NO: 77155 - DNA, 25 bp, SARS Virus
tcaaacatacacttattcgtacgta

SEQ ID NO: 77156 - DNA, 25 bp, SARS Virus
caaacatacacttattcgtacgtaa

SEQ ID NO: 77157 - DNA, 25 bp, SARS Virus
aaacatacactttttcgtacgtaag

SEQ ID NO: 77158 - DNA, 25 bp, SARS Virus
aacatacacttattcgtacgtaagg

SEQ ID NO: 77159 - DNA, 25 bp, SARS Virus
acatacacttattcgtacgtaaggt

SEQ ID NO: 77160 - DNA, 25 bp, SARS Virus
catacacttatttgtacgtaaggtg

SEQ ID NO: 77161 - DNA, 25 bp, SARS Virus
atacacttattcttacgtaaggtgt

SEQ ID NO: 77162 - DNA, 25 bp, SARS Virus
tacacttattcgtacgtaaggtgtg

SEQ ID NO: 77163 - DNA, 25 bp, SARS Virus
acacttattcgttcgtaaggtgtga

SEQ ID NO: 77164 - DNA, 25 bp, SARS Virus
cacttattcgtatgtaaggtgtgag

SEQ ID NO: 77165 - DNA, 25 bp, SARS Virus
acttattcgtacttaaggtgtgagg

SEQ ID NO: 77166 - DNA, 25 bp, SARS Virus
cttattcgtacgtaaggtgtgaggt

SEQ ID NO: 77167 - DNA, 25 bp, SARS Virus
ttattcgtacgttaggtgtgaggtc

SEQ ID NO: 77168 - DNA, 25 bp, SARS Virus
tattcgtacgtatggtgtgaggtcg

SEQ ID NO: 77169 - DNA, 25 bp, SARS Virus
attcgtacgtaatgtgtgaggtcga

SEQ ID NO: 77170 - DNA, 25 bp, SARS Virus
ttcgtacgtaagttgtgaggtcgaa

SEQ ID NO: 77171 - DNA, 25 bp, SARS Virus
tcgtacgtaaggtgtgaggtcgaaa

SEQ ID NO: 77172 - DNA, 25 bp, SARS Virus
cgtacgtaaggtttgaggtcgaaag

SEQ ID NO: 77173 - DNA, 25 bp, SARS Virus
gtacgtaaggtgtgaggtcgaaagc

SEQ ID NO: 77174 - DNA, 25 bp, SARS Virus
tacgtaaggtgttaggtcgaaagct

SEQ ID NO: 77175 - DNA, 25 bp, SARS Virus
acgtaaggtgtgtggtcgaaagcta

SEQ ID NO: 77176 - DNA, 25 bp, SARS Virus
cgtaaggtgtgatgtcgaaagctat

SEQ ID NO: 77177 - DNA, 25 bp, SARS Virus
gtaaggtgtgagttcgaaagctatt

SEQ ID NO: 77178 - DNA, 25 bp, SARS Virus
taaggtgtgaggtcgaaagctattt

SEQ ID NO: 77179 - DNA, 25 bp, SARS Virus
aaggtgtgaggttgaaagctatttt

SEQ ID NO: 77180 - DNA, 25 bp, SARS Virus
aggtgtgaggtctaaagctattttc

SEQ ID NO: 77181 - DNA, 25 bp, SARS Virus
ggtgtgaggtcgtaagctattttca

SEQ ID NO: 77182 - DNA, 25 bp, SARS Virus
gtgtgaggtcgatagctattttcac

SEQ ID NO: 77183 - DNA, 25 bp, SARS Virus
tgtgaggtcgaatgctattttcacg

SEQ ID NO: 77184 - DNA, 25 bp, SARS Virus
gtgaggtcgaaatctattttcacgt

SEQ ID NO: 77185 - DNA, 25 bp, SARS Virus
tgaggtcgaaagttattttcacgta

SEQ ID NO: 77186 - DNA, 25 bp, SARS Virus
gaggtcgaaagctattttcacgtaa

SEQ ID NO: 77187 - DNA, 25 bp, SARS Virus
aggtcgaaagcttttttcacgtaaa

SEQ ID NO: 77188 - DNA, 25 bp, SARS Virus
ggtcgaaagctattttcacgtaaat

SEQ ID NO: 77189 - DNA, 25 bp, SARS Virus
gtcgaaagctattttcacgtaaatg

SEQ ID NO: 77190 - DNA, 25 bp, SARS Virus
tcgaaagctattttcacgtaaatga

SEQ ID NO: 77191 - DNA, 25 bp, SARS Virus
cgaaagctattttcacgtaaatgat

SEQ ID NO: 77192 - DNA, 25 bp, SARS Virus
gaaagctatttttacgtaaatgatt

SEQ ID NO: 77193 - DNA, 25 bp, SARS Virus
aaagctattttctcgtaaatgatta

SEQ ID NO: 77194 - DNA, 25 bp, SARS Virus
aagctattttcatgtaaatgattaa

SEQ ID NO: 77195 - DNA, 25 bp, SARS Virus
agctattttcacttaaatgattaaa

SEQ ID NO: 77196 - DNA, 25 bp, SARS Virus
gctattttcacgtaaatgattaaat

SEQ ID NO: 77197 - DNA, 25 bp, SARS Virus
ctattttcacgttaatgattaaatt

SEQ ID NO: 77198 - DNA, 25 bp, SARS Virus
tattttcacgtatatgattaaattt

SEQ ID NO: 77199 - DNA, 25 bp, SARS Virus
attttcacgtaattgattaaatttc

SEQ ID NO: 77200 - DNA, 25 bp, SARS Virus
ttttcacgtaaatgattaaatttcg

SEQ ID NO: 77201 - DNA, 25 bp, SARS Virus
tttcacgtaaattattaaatttcgt

SEQ ID NO: 77202 - DNA, 25 bp, SARS Virus
ttcacgtaaatgtttaaatttcgtt

SEQ ID NO: 77203 - DNA, 25 bp, SARS Virus
tcacgtaaatgattaaatttcgtta

SEQ ID NO: 77204 - DNA, 25 bp, SARS Virus
cacgtaaatgattaaatttcgttaa

SEQ ID NO: 77205 - DNA, 25 bp, SARS Virus
acgtaaatgatttaatttcgttaac

SEQ ID NO: 77206 - DNA, 25 bp, SARS Virus
cgtaaatgattatatttcgttaacg

SEQ ID NO: 77207 - DNA, 25 bp, SARS Virus
gtaaatgattaattttcgttaacgg

SEQ ID NO: 77208 - DNA, 25 bp, SARS Virus
taaatgattaaatttcgttaacgga

SEQ ID NO: 77209 - DNA, 25 bp, SARS Virus
aaatgattaaatttcgttaacggaa

SEQ ID NO: 77210 - DNA, 25 bp, SARS Virus
aatgattaaatttcgttaacggaaa

SEQ ID NO: 77211 - DNA, 25 bp, SARS Virus
atgattaaattttgttaacggaaag

SEQ ID NO: 77212 - DNA, 25 bp, SARS Virus
tgattaaatttctttaacggaaaga

SEQ ID NO: 77213 - DNA, 25 bp, SARS Virus
gattaaatttcgttaacggaaagaa

SEQ ID NO: 77214 - DNA, 25 bp, SARS Virus
attaaatttcgttaacggaaagaaa

SEQ ID NO: 77215 - DNA, 25 bp, SARS Virus
ttaaatttcgtttacggaaagaaaa

SEQ ID NO: 77216 - DNA, 25 bp, SARS Virus
taaatttcgttatcggaaagaaaat

SEQ ID NO: 77217 - DNA, 25 bp, SARS Virus
aaatttcgttaatggaaagaaaatg

SEQ ID NO: 77218 - DNA, 25 bp, SARS Virus
aatttcgttaactgaaagaaaatga

SEQ ID NO: 77219 - DNA, 25 bp, SARS Virus
atttcgttaacgtaaagaaaatgat

SEQ ID NO: 77220 - DNA, 25 bp, SARS Virus
tttcgttaacggtaagaaaatgata

SEQ ID NO: 77221 - DNA, 25 bp, SARS Virus
ttcgttaacggatagaaaatgataa

SEQ ID NO: 77222 - DNA, 25 bp, SARS Virus
tcgttaacggaatgaaaatgataag

SEQ ID NO: 77223 - DNA, 25 bp, SARS Virus
cgttaacggaaataaaatgataaga

SEQ ID NO: 77224 - DNA, 25 bp, SARS Virus
gttaacggaaagtaaatgataagac

SEQ ID NO: 77225 - DNA, 25 bp, SARS Virus
ttaacggaaagataatgataagact

SEQ ID NO: 77226 - DNA, 25 bp, SARS Virus
taacggaaagaatatgataagacta

SEQ ID NO: 77227 - DNA, 25 bp, SARS Virus
aacggaaagaaattgataagactat

SEQ ID NO: 77228 - DNA, 25 bp, SARS Virus
acggaaagaaaatgataagactatc

SEQ ID NO: 77229 - DNA, 25 bp, SARS Virus
cggaaagaaaattataagactatca

SEQ ID NO: 77230 - DNA, 25 bp, SARS Virus
ggaaagaaaatgttaagactatcag

SEQ ID NO: 77231 - DNA, 25 bp, SARS Virus
gaaagaaaatgataagactatcagg

SEQ ID NO: 77232 - DNA, 25 bp, SARS Virus
aaagaaaatgattagactatcagga

SEQ ID NO: 77233 - DNA, 25 bp, SARS Virus
aagaaaatgataagactatcaggaa

SEQ ID NO: 77234 - DNA, 25 bp, SARS Virus
agaaaatgataaaactatcaggaac

SEQ ID NO: 77235 - DNA, 25 bp, SARS Virus
gaaaatgataagactatcaggaaca

SEQ ID NO: 77236 - DNA, 25 bp, SARS Virus
aaaatgataagaatatcaggaacac

SEQ ID NO: 77237 - DNA, 25 bp, SARS Virus
aaatgataagacaatcaggaacact

SEQ ID NO: 77238 - DNA, 25 bp, SARS Virus
aatgataagactatcaggaacactc

SEQ ID NO: 77239 - DNA, 25 bp, SARS Virus
atgataagactaacaggaacactca

SEQ ID NO: 77240 - DNA, 25 bp, SARS Virus
tgataagactataaggaacactcag

SEQ ID NO: 77241 - DNA, 25 bp, SARS Virus
gataagactatcaggaacactcaga

SEQ ID NO: 77242 - DNA, 25 bp, SARS Virus
ataagactatcaagaacactcagag

SEQ ID NO: 77243 - DNA, 25 bp, SARS Virus
taagactatcagaaacactcagagt

SEQ ID NO: 77244 - DNA, 25 bp, SARS Virus
aagactatcaggaacactcagagta

SEQ ID NO: 77245 - DNA, 25 bp, SARS Virus
agactatcaggaacactcagagtac

SEQ ID NO: 77246 - DNA, 25 bp, SARS Virus
gactatcaggaaaactcagagtacc

SEQ ID NO: 77247 - DNA, 25 bp, SARS Virus
actatcaggaacactcagagtaccg

SEQ ID NO: 77248 - DNA, 25 bp, SARS Virus
ctatcaggaacaatcagagtaccgt

SEQ ID NO: 77249 - DNA, 25 bp, SARS Virus
tatcaggaacacacagagtaccgtt

SEQ ID NO: 77250 - DNA, 25 bp, SARS Virus
atcaggaacactaagagtaccgttt

SEQ ID NO: 77251 - DNA, 25 bp, SARS Virus
tcaggaacactcagagtaccgtttg

SEQ ID NO: 77252 - DNA, 25 bp, SARS Virus
caggaacactcaaagtaccgtttgt

SEQ ID NO: 77253 - DNA, 25 bp, SARS Virus
aggaacactcagagtaccgtttgtt

SEQ ID NO: 77254 - DNA, 25 bp, SARS Virus
ggaacactcagaataccgtttgttc

SEQ ID NO: 77255 - DNA, 25 bp, SARS Virus
gaacactcagagaaccgtttgttca

SEQ ID NO: 77256 - DNA, 25 bp, SARS Virus
aacactcagagtaccgtttgttcat

SEQ ID NO: 77257 - DNA, 25 bp, SARS Virus
acactcagagtaacgtttgttcatc

SEQ ID NO: 77258 - DNA, 25 bp, SARS Virus
cactcagagtacagtttgttcatca

SEQ ID NO: 77259 - DNA, 25 bp, SARS Virus
actcagagtaccatttgttcatcac

SEQ ID NO: 77260 - DNA, 25 bp, SARS Virus
ctcagagtaccgattgttcatcaca

SEQ ID NO: 77261 - DNA, 25 bp, SARS Virus
tcagagtaccgtatgttcatcacag

SEQ ID NO: 77262 - DNA, 25 bp, SARS Virus
cagagtaccgttagttcatcacagc

SEQ ID NO: 77263 - DNA, 25 bp, SARS Virus
agagtaccgtttattcatcacagcc

SEQ ID NO: 77264 - DNA, 25 bp, SARS Virus
gagtaccgtttgatcatcacagcct

SEQ ID NO: 77265 - DNA, 25 bp, SARS Virus
agtaccgtttgtacatcacagccta

SEQ ID NO: 77266 - DNA, 25 bp, SARS Virus
gtaccgtttgttaatcacagcctat

SEQ ID NO: 77267 - DNA, 25 bp, SARS Virus
taccgtttgttcatcacagcctata

SEQ ID NO: 77268 - DNA, 25 bp, SARS Virus
accgtttgttcaacacagcctataa

SEQ ID NO: 77269 - DNA, 25 bp, SARS Virus
ccgtttgttcataacagcctataac

SEQ ID NO: 77270 - DNA, 25 bp, SARS Virus
cgtttgttcatcacagcctataact

SEQ ID NO: 77271 - DNA, 25 bp, SARS Virus
gtttgttcatcaaagcctataacta

SEQ ID NO: 77272 - DNA, 25 bp, SARS Virus
tttgttcatcacagcctataactaa

SEQ ID NO: 77273 - DNA, 25 bp, SARS Virus
ttgttcatcacaacctataactaat

SEQ ID NO: 77274 - DNA, 25 bp, SARS Virus
tgttcatcacagactataactaata

SEQ ID NO: 77275 - DNA, 25 bp, SARS Virus
gttcatcacagcatataactaatac

SEQ ID NO: 77276 - DNA, 25 bp, SARS Virus
ttcatcacagccaataactaataca

SEQ ID NO: 77277 - DNA, 25 bp, SARS Virus
tcatcacagcctataactaatacaa

SEQ ID NO: 77278 - DNA, 25 bp, SARS Virus
catcacagcctaaaactaatacaag

SEQ ID NO: 77279 - DNA, 25 bp, SARS Virus
atcacagcctataactaatacaagg

SEQ ID NO: 77280 - DNA, 25 bp, SARS Virus
tcacagcctataactaatacaaggt

SEQ ID NO: 77281 - DNA, 25 bp, SARS Virus
cacagcctataaataatacaaggtg

SEQ ID NO: 77282 - DNA, 25 bp, SARS Virus
acagcctataacaaatacaaggtga

SEQ ID NO: 77283 - DNA, 25 bp, SARS Virus
cagcctataactaatacaaggtgag

SEQ ID NO: 77284 - DNA, 25 bp, SARS Virus
agcctataactaatacaaggtgagt

SEQ ID NO: 77285 - DNA, 25 bp, SARS Virus
gcctataactaaaacaaggtgagtt

SEQ ID NO: 77286 - DNA, 25 bp, SARS Virus
cctataactaatacaaggtgagttt

SEQ ID NO: 77287 - DNA, 25 bp, SARS Virus
ctataactaataaaaggtgagttta

SEQ ID NO: 77288 - DNA, 25 bp, SARS Virus
tataactaatacaaggtgagtttag

SEQ ID NO: 77289 - DNA, 25 bp, SARS Virus
ataactaatacaaggtgagtttaga

SEQ ID NO: 77290 - DNA, 25 bp, SARS Virus
taactaatacaaagtgagtttagac

SEQ ID NO: 77291 - DNA, 25 bp, SARS Virus
aactaatacaagatgagtttagacg

SEQ ID NO: 77292 - DNA, 25 bp, SARS Virus
actaatacaaggagagtttagacga

SEQ ID NO: 77293 - DNA, 25 bp, SARS Virus
ctaatacaaggtaagtttagacgat

SEQ ID NO: 77294 - DNA, 25 bp, SARS Virus
taatacaaggtgagtttagacgatg

SEQ ID NO: 77295 - DNA, 25 bp, SARS Virus
aatacaaggtgaatttagacgatgc

SEQ ID NO: 77296 - DNA, 25 bp, SARS Virus
atacaaggtgagattagacgatgca

SEQ ID NO: 77297 - DNA, 25 bp, SARS Virus
tacaaggtgagtatagacgatgcac

SEQ ID NO: 77298 - DNA, 25 bp, SARS Virus
acaaggtgagttaagacgatgcaca

SEQ ID NO: 77299 - DNA, 25 bp, SARS Virus
caaggtgagtttagacgatgcacat

SEQ ID NO: 77300 - DNA, 25 bp, SARS Virus
aaggtgagtttaaacgatgcacata

SEQ ID NO: 77301 - DNA, 25 bp, SARS Virus
aggtgagtttagacgatgcacataa

SEQ ID NO: 77302 - DNA, 25 bp, SARS Virus
ggtgagtttagaagatgcacataat

SEQ ID NO: 77303 - DNA, 25 bp, SARS Virus
gtgagtttagacaatgcacataatg

SEQ ID NO: 77304 - DNA, 25 bp, SARS Virus
tgagtttagacgatgcacataatgt

SEQ ID NO: 77305 - DNA, 25 bp, SARS Virus
gagtttagacgaagcacataatgtg

SEQ ID NO: 77306 - DNA, 25 bp, SARS Virus
agtttagacgatacacataatgtgc

SEQ ID NO: 77307 - DNA, 25 bp, SARS Virus
gtttagacgatgaacataatgtgct

SEQ ID NO: 77308 - DNA, 25 bp, SARS Virus
tttagacgatgcacataatgtgcta

SEQ ID NO: 77309 - DNA, 25 bp, SARS Virus
ttagacgatgcaaataatgtgctac

SEQ ID NO: 77310 - DNA, 25 bp, SARS Virus
tagacgatgcacataatgtgctacg

SEQ ID NO: 77311 - DNA, 25 bp, SARS Virus
agacgatgcacaaaatgtgctacgt

SEQ ID NO: 77312 - DNA, 25 bp, SARS Virus
gacgatgcacataatgtgctacgtt

SEQ ID NO: 77313 - DNA, 25 bp, SARS Virus
acgatgcacataatgtgctacgtta

SEQ ID NO: 77314 - DNA, 25 bp, SARS Virus
cgatgcacataaagtgctacgttaa

SEQ ID NO: 77315 - DNA, 25 bp, SARS Virus
gatgcacataatatgctacgttaaa

SEQ ID NO: 77316 - DNA, 25 bp, SARS Virus
atgcacataatgagctacgttaaat

SEQ ID NO: 77317 - DNA, 25 bp, SARS Virus
tgcacataatgtactacgttaaatc

SEQ ID NO: 77318 - DNA, 25 bp, SARS Virus
gcacataatgtgatacgttaaatcc

SEQ ID NO: 77319 - DNA, 25 bp, SARS Virus
cacataatgtgcaacgttaaatcca

SEQ ID NO: 77320 - DNA, 25 bp, SARS Virus
acataatgtgctacgttaaatccac

SEQ ID NO: 77321 - DNA, 25 bp, SARS Virus
cataatgtgctaagttaaatccacc

SEQ ID NO: 77322 - DNA, 25 bp, SARS Virus
ataatgtgctacattaaatccacca

SEQ ID NO: 77323 - DNA, 25 bp, SARS Virus
taatgtgctacgataaatccaccac

SEQ ID NO: 77324 - DNA, 25 bp, SARS Virus
aatgtgctacgtaaaatccaccacg

SEQ ID NO: 77325 - DNA, 25 bp, SARS Virus
atgtgctacgttaaatccaccacga

SEQ ID NO: 77326 - DNA, 25 bp, SARS Virus
tgtgctacgttaaatccaccacgac

SEQ ID NO: 77327 - DNA, 25 bp, SARS Virus
gtgctacgttaaatccaccacgaca

SEQ ID NO: 77328 - DNA, 25 bp, SARS Virus
tgctacgttaaaaccaccacgacaa

SEQ ID NO: 77329 - DNA, 25 bp, SARS Virus
gctacgttaaatacaccacgacaaa

SEQ ID NO: 77330 - DNA, 25 bp, SARS Virus
ctacgttaaatcaaccacgacaaac

SEQ ID NO: 77331 - DNA, 25 bp, SARS Virus
tacgttaaatccaccacgacaaacg

SEQ ID NO: 77332 - DNA, 25 bp, SARS Virus
acgttaaatccaacacgacaaacgt

SEQ ID NO: 77333 - DNA, 25 bp, SARS Virus
cgttaaatccacaacgacaaacgtc

SEQ ID NO: 77334 - DNA, 25 bp, SARS Virus
gttaaatccaccacgacaaacgtct

SEQ ID NO: 77335 - DNA, 25 bp, SARS Virus
ttaaatccaccaagacaaacgtctg

SEQ ID NO: 77336 - DNA, 25 bp, SARS Virus
taaatccaccacaacaaacgtctgt

SEQ ID NO: 77337 - DNA, 25 bp, SARS Virus
aaatccaccacgacaaacgtctgtg

SEQ ID NO: 77338 - DNA, 25 bp, SARS Virus
aatccaccacgaaaaacgtctgtgg

SEQ ID NO: 77339 - DNA, 25 bp, SARS Virus
atccaccacgacaaacgtctgtggt

SEQ ID NO: 77340 - DNA, 25 bp, SARS Virus
tccaccacgacaaacgtctgtggta

SEQ ID NO: 77341 - DNA, 25 bp, SARS Virus
ccaccacgacaaacgtctgtggtac

SEQ ID NO: 77342 - DNA, 25 bp, SARS Virus
caccacgacaaaagtctgtggtacg

SEQ ID NO: 77343 - DNA, 25 bp, SARS Virus
accacgacaaacatctgtggtacgt

SEQ ID NO: 77344 - DNA, 25 bp, SARS Virus
ccacgacaaacgactgtggtacgtt

SEQ ID NO: 77345 - DNA, 25 bp, SARS Virus
cacgacaaacgtatgtggtacgttt

SEQ ID NO: 77346 - DNA, 25 bp, SARS Virus
acgacaaacgtcagtggtacgttta

SEQ ID NO: 77347 - DNA, 25 bp, SARS Virus
cgacaaacgtctatggtacgtttac

SEQ ID NO: 77348 - DNA, 25 bp, SARS Virus
gacaaacgtctgaggtacgtttact

SEQ ID NO: 77349 - DNA, 25 bp, SARS Virus
acaaacgtctgtagtacgtttactc

SEQ ID NO: 77350 - DNA, 25 bp, SARS Virus
caaacgtctgtgatacgtttactca

SEQ ID NO: 77351 - DNA, 25 bp, SARS Virus
aaacgtctgtggaacgtttactcat

SEQ ID NO: 77352 - DNA, 25 bp, SARS Virus
aacgtctgtggtacgtttactcatg

SEQ ID NO: 77353 - DNA, 25 bp, SARS Virus
acgtctgtggtaagtttactcatgg

SEQ ID NO: 77354 - DNA, 25 bp, SARS Virus
cgtctgtggtacatttactcatggc

SEQ ID NO: 77355 - DNA, 25 bp, SARS Virus
gtctgtggtacgattactcatggct

SEQ ID NO: 77356 - DNA, 25 bp, SARS Virus
tctgtggtacgtatactcatggctg

SEQ ID NO: 77357 - DNA, 25 bp, SARS Virus
ctgtggtacgttaactcatggctgt

SEQ ID NO: 77358 - DNA, 25 bp, SARS Virus
tgtggtacgtttactcatggctgtc

SEQ ID NO: 77359 - DNA, 25 bp, SARS Virus
gtggtacgtttaatcatggctgtca

SEQ ID NO: 77360 - DNA, 25 bp, SARS Virus
tggtacgtttacacatggctgtcat

SEQ ID NO: 77361 - DNA, 25 bp, SARS Virus
ggtacgtttactaatggctgtcatg

SEQ ID NO: 77362 - DNA, 25 bp, SARS Virus
gtacgtttactcatggctgtcatga

SEQ ID NO: 77363 - DNA, 25 bp, SARS Virus
tacgtttactcaaggctgtcatgaa

SEQ ID NO: 77364 - DNA, 25 bp, SARS Virus
acgtttactcatagctgtcatgaac

SEQ ID NO: 77365 - DNA, 25 bp, SARS Virus
cgtttactcatgactgtcatgaacc

SEQ ID NO: 77366 - DNA, 25 bp, SARS Virus
gtttactcatggatgtcatgaacct

SEQ ID NO: 77367 - DNA, 25 bp, SARS Virus
tttactcatggcagtcatgaaccta

SEQ ID NO: 77368 - DNA, 25 bp, SARS Virus
ttactcatggctatcatgaacctac

SEQ ID NO: 77369 - DNA, 25 bp, SARS Virus
tactcatggctgacatgaacctacg

SEQ ID NO: 77370 - DNA, 25 bp, SARS Virus
actcatggctgtaatgaacctacgt

SEQ ID NO: 77371 - DNA, 25 bp, SARS Virus
ctcatggctgtcatgaacctacgta

SEQ ID NO: 77372 - DNA, 25 bp, SARS Virus
tcatggctgtcaagaacctacgtat

SEQ ID NO: 77373 - DNA, 25 bp, SARS Virus
catggctgtcataaacctacgtata

SEQ ID NO: 77374 - DNA, 25 bp, SARS Virus
atggctgtcatgaacctacgtatat

SEQ ID NO: 77375 - DNA, 25 bp, SARS Virus
tggctgtcatgaacctacgtatatt

SEQ ID NO: 77376 - DNA, 25 bp, SARS Virus
ggctgtcatgaaactacgtatatta

SEQ ID NO: 77377 - DNA, 25 bp, SARS Virus
gctgtcatgaacatacgtatattat

SEQ ID NO: 77378 - DNA, 25 bp, SARS Virus
ctgtcatgaaccaacgtatattata

SEQ ID NO: 77379 - DNA, 25 bp, SARS Virus
tgtcatgaacctacgtatattatac

SEQ ID NO: 77380 - DNA, 25 bp, SARS Virus
gtcatgaacctaagtatattatact

SEQ ID NO: 77381 - DNA, 25 bp, SARS Virus
tcatgaacctacatatattatacta

SEQ ID NO: 77382 - DNA, 25 bp, SARS Virus
catgaacctacgaatattatactac

SEQ ID NO: 77383 - DNA, 25 bp, SARS Virus
atgaacctacgtatattatactact

SEQ ID NO: 77384 - DNA, 25 bp, SARS Virus
tgaacctacgtaaattatactacta

SEQ ID NO: 77385 - DNA, 25 bp, SARS Virus
gaacctacgtatattatactactaa

SEQ ID NO: 77386 - DNA, 25 bp, SARS Virus
aacctacgtataatatactactaaa

SEQ ID NO: 77387 - DNA, 25 bp, SARS Virus
acctacgtatataatactactaaag

SEQ ID NO: 77388 - DNA, 25 bp, SARS Virus
cctacgtatattatactactaaaga

SEQ ID NO: 77389 - DNA, 25 bp, SARS Virus
ctacgtatattaaactactaaagac

SEQ ID NO: 77390 - DNA, 25 bp, SARS Virus
tacgtatattatactactaaagacg

SEQ ID NO: 77391 - DNA, 25 bp, SARS Virus
acgtatattataatactaaagacga

SEQ ID NO: 77392 - DNA, 25 bp, SARS Virus
cgtatattatacaactaaagacgac

SEQ ID NO: 77393 - DNA, 25 bp, SARS Virus
gtatattatactactaaagacgacc

SEQ ID NO: 77394 - DNA, 25 bp, SARS Virus
tatattatactaataaagacgacct

SEQ ID NO: 77395 - DNA, 25 bp, SARS Virus
atattatactacaaaagacgaccta

SEQ ID NO: 77396 - DNA, 25 bp, SARS Virus
tattatactactaaagacgacctaa

SEQ ID NO: 77397 - DNA, 25 bp, SARS Virus
attatactactaaagacgacctaaa

SEQ ID NO: 77398 - DNA, 25 bp, SARS Virus
ttatactactaaagacgacctaaat

SEQ ID NO: 77399 - DNA, 25 bp, SARS Virus
tatactactaaaaacgacctaaatc

SEQ ID NO: 77400 - DNA, 25 bp, SARS Virus
atactactaaagacgacctaaatcg

SEQ ID NO: 77401 - DNA, 25 bp, SARS Virus
tactactaaagaagacctaaatcgg

SEQ ID NO: 77402 - DNA, 25 bp, SARS Virus
actactaaagacaacctaaatcgga

SEQ ID NO: 77403 - DNA, 25 bp, SARS Virus
ctactaaagacgacctaaatcggat

SEQ ID NO: 77404 - DNA, 25 bp, SARS Virus
tactaaagacgaactaaatcggata

SEQ ID NO: 77405 - DNA, 25 bp, SARS Virus
actaaagacgacataaatcggatac

SEQ ID NO: 77406 - DNA, 25 bp, SARS Virus
ctaaagacgaccaaaatcggatacc

SEQ ID NO: 77407 - DNA, 25 bp, SARS Virus
taaagacgacctaaatcggatacct

SEQ ID NO: 77408 - DNA, 25 bp, SARS Virus
aaagacgacctaaatcggataccta

SEQ ID NO: 77409 - DNA, 25 bp, SARS Virus
aagacgacctaaatcggatacctaa

SEQ ID NO: 77410 - DNA, 25 bp, SARS Virus
agacgacctaaaacggatacctaaa

SEQ ID NO: 77411 - DNA, 25 bp, SARS Virus
gacgacctaaataggatacctaaat

SEQ ID NO: 77412 - DNA, 25 bp, SARS Virus
acgacctaaatcagatacctaaatg

SEQ ID NO: 77413 - DNA, 25 bp, SARS Virus
cgacctaaatcgaatacctaaatgt

SEQ ID NO: 77414 - DNA, 25 bp, SARS Virus
gacctaaatcggatacctaaatgtt

SEQ ID NO: 77415 - DNA, 25 bp, SARS Virus
acctaaatcggaaacctaaatgttt

SEQ ID NO: 77416 - DNA, 25 bp, SARS Virus
cctaaatcggatacctaaatgtttg

SEQ ID NO: 77417 - DNA, 25 bp, SARS Virus
ctaaatcggataactaaatgtttgt

SEQ ID NO: 77418 - DNA, 25 bp, SARS Virus
taaatcggatacataaatgtttgtt

SEQ ID NO: 77419 - DNA, 25 bp, SARS Virus
aaatcggataccaaaatgtttgtta

SEQ ID NO: 77420 - DNA, 25 bp, SARS Virus
aatcggatacctaaatgtttgttaa

SEQ ID NO: 77421 - DNA, 25 bp, SARS Virus
atcggatacctaaatgtttgttaaa

SEQ ID NO: 77422 - DNA, 25 bp, SARS Virus
tcggatacctaaatgtttgttaaac

SEQ ID NO: 77423 - DNA, 25 bp, SARS Virus
cggatacctaaaagtttgttaaact

SEQ ID NO: 77424 - DNA, 25 bp, SARS Virus
ggatacctaaatatttgttaaacta

SEQ ID NO: 77425 - DNA, 25 bp, SARS Virus
gatacctaaatgattgttaaactat

SEQ ID NO: 77426 - DNA, 25 bp, SARS Virus
atacctaaatgtatgttaaactatg

SEQ ID NO: 77427 - DNA, 25 bp, SARS Virus
tacctaaatgttagttaaactatga

SEQ ID NO: 77428 - DNA, 25 bp, SARS Virus
acctaaatgtttattaaactatgaa

SEQ ID NO: 77429 - DNA, 25 bp, SARS Virus
cctaaatgtttgataaactatgaat

SEQ ID NO: 77430 - DNA, 25 bp, SARS Virus
ctaaatgtttgtaaaactatgaata

SEQ ID NO: 77431 - DNA, 25 bp, SARS Virus
taaatgtttgttaaactatgaatat

SEQ ID NO: 77432 - DNA, 25 bp, SARS Virus
aaatgtttgttaaactatgaatatt

SEQ ID NO: 77433 - DNA, 25 bp, SARS Virus
aatgtttgttaaactatgaatattg

SEQ ID NO: 77434 - DNA, 25 bp, SARS Virus
atgtttgttaaaatatgaatattgg

SEQ ID NO: 77435 - DNA, 25 bp, SARS Virus
tgtttgttaaacaatgaatattgga

SEQ ID NO: 77436 - DNA, 25 bp, SARS Virus
gtttgttaaactatgaatattggac

SEQ ID NO: 77437 - DNA, 25 bp, SARS Virus
tttgttaaactaagaatattggaca

SEQ ID NO: 77438 - DNA, 25 bp, SARS Virus
ttgttaaactataaatattggacac

SEQ ID NO: 77439 - DNA, 25 bp, SARS Virus
tgttaaactatgaatattggacacc

SEQ ID NO: 77440 - DNA, 25 bp, SARS Virus
gttaaactatgaatattggacacct

SEQ ID NO: 77441 - DNA, 25 bp, SARS Virus
ttaaactatgaaaattggacacctt

SEQ ID NO: 77442 - DNA, 25 bp, SARS Virus
taaactatgaatattggacacctta

SEQ ID NO: 77443 - DNA, 25 bp, SARS Virus
aaactatgaataatggacaccttat

SEQ ID NO: 77444 - DNA, 25 bp, SARS Virus
aactatgaatataggacaccttatg

SEQ ID NO: 77445 - DNA, 25 bp, SARS Virus
actatgaatattagacaccttatgt

SEQ ID NO: 77446 - DNA, 25 bp, SARS Virus
ctatgaatattgaacaccttatgta

SEQ ID NO: 77447 - DNA, 25 bp, SARS Virus
tatgaatattggacaccttatgtaa

SEQ ID NO: 77448 - DNA, 25 bp, SARS Virus
atgaatattggaaaccttatgtaaa

SEQ ID NO: 77449 - DNA, 25 bp, SARS Virus
tgaatattggacaccttatgtaaat

SEQ ID NO: 77450 - DNA, 25 bp, SARS Virus
gaatattggacaacttatgtaaatg

SEQ ID NO: 77451 - DNA, 25 bp, SARS Virus
aatattggacacattatgtaaatgg

SEQ ID NO: 77452 - DNA, 25 bp, SARS Virus
atattggacaccatatgtaaatggt

SEQ ID NO: 77453 - DNA, 25 bp, SARS Virus
tattggacacctaatgtaaatggtc

SEQ ID NO: 77454 - DNA, 25 bp, SARS Virus
attggacaccttatgtaaatggtcc

SEQ ID NO: 77455 - DNA, 25 bp, SARS Virus
ttggacaccttaagtaaatggtcca

SEQ ID NO: 77456 - DNA, 25 bp, SARS Virus
tggacaccttatataaatggtccaa

SEQ ID NO: 77457 - DNA, 25 bp, SARS Virus
ggacaccttatgaaaatggtccaat

SEQ ID NO: 77458 - DNA, 25 bp, SARS Virus
gacaccttatgtaaatggtccaatg

SEQ ID NO: 77459 - DNA, 25 bp, SARS Virus
acaccttatgtaaatggtccaatgt

SEQ ID NO: 77460 - DNA, 25 bp, SARS Virus
caccttatgtaaatggtccaatgtc

SEQ ID NO: 77461 - DNA, 25 bp, SARS Virus
accttatgtaaaaggtccaatgtct

SEQ ID NO: 77462 - DNA, 25 bp, SARS Virus
ccttatgtaaatagtccaatgtctc

SEQ ID NO: 77463 - DNA, 25 bp, SARS Virus
cttatgtaaatgatccaatgtctca

SEQ ID NO: 77464 - DNA, 25 bp, SARS Virus
ttatgtaaatggaccaatgtctcaa

SEQ ID NO: 77465 - DNA, 25 bp, SARS Virus
tatgtaaatggtacaatgtctcaaa

SEQ ID NO: 77466 - DNA, 25 bp, SARS Virus
atgtaaatggtcaaatgtctcaaat

SEQ ID NO: 77467 - DNA, 25 bp, SARS Virus
tgtaaatggtccaatgtctcaaatc

SEQ ID NO: 77468 - DNA, 25 bp, SARS Virus
gtaaatggtccaatgtctcaaatct

SEQ ID NO: 77469 - DNA, 25 bp, SARS Virus
taaatggtccaaagtctcaaatctt

SEQ ID NO: 77470 - DNA, 25 bp, SARS Virus
aaatggtccaatatctcaaatcttt

SEQ ID NO: 77471 - DNA, 25 bp, SARS Virus
aatggtccaatgactcaaatctttt

SEQ ID NO: 77472 - DNA, 25 bp, SARS Virus
atggtccaatgtatcaaatctttta

SEQ ID NO: 77473 - DNA, 25 bp, SARS Virus
tggtccaatgtcacaaatcttttac

SEQ ID NO: 77474 - DNA, 25 bp, SARS Virus
ggtccaatgtctaaaatcttttaca

SEQ ID NO: 77475 - DNA, 25 bp, SARS Virus
gtccaatgtctcaaatcttttacac

SEQ ID NO: 77476 - DNA, 25 bp, SARS Virus
tccaatgtctcaaatcttttacacc

SEQ ID NO: 77477 - DNA, 25 bp, SARS Virus
ccaatgtctcaaatcttttacaccg

SEQ ID NO: 77478 - DNA, 25 bp, SARS Virus
caatgtctcaaaacttttacaccga

SEQ ID NO: 77479 - DNA, 25 bp, SARS Virus
aatgtctcaaatattttacaccgaa

SEQ ID NO: 77480 - DNA, 25 bp, SARS Virus
atgtctcaaatcatttacaccgaat

SEQ ID NO: 77481 - DNA, 25 bp, SARS Virus
tgtctcaaatctattacaccgaata

SEQ ID NO: 77482 - DNA, 25 bp, SARS Virus
gtctcaaatcttatacaccgaatat

SEQ ID NO: 77483 - DNA, 25 bp, SARS Virus
tctcaaatctttaacaccgaatatt

SEQ ID NO: 77484 - DNA, 25 bp, SARS Virus
ctcaaatcttttacaccgaatatta

SEQ ID NO: 77485 - DNA, 25 bp, SARS Virus
tcaaatcttttaaaccgaatattac

SEQ ID NO: 77486 - DNA, 25 bp, SARS Virus
caaatcttttacaccgaatattaca

SEQ ID NO: 77487 - DNA, 25 bp, SARS Virus
aaatcttttacaacgaatattacaa

SEQ ID NO: 77488 - DNA, 25 bp, SARS Virus
aatcttttacacagaatattacaac

SEQ ID NO: 77489 - DNA, 25 bp, SARS Virus
atcttttacaccaaatattacaaca

SEQ ID NO: 77490 - DNA, 25 bp, SARS Virus
tcttttacaccgaatattacaacaa

SEQ ID NO: 77491 - DNA, 25 bp, SARS Virus
cttttacaccgaatattacaacaat

SEQ ID NO: 77492 - DNA, 25 bp, SARS Virus
ttttacaccgaaaattacaacaatt

SEQ ID NO: 77493 - DNA, 25 bp, SARS Virus
tttacaccgaatattacaacaatta

SEQ ID NO: 77494 - DNA, 25 bp, SARS Virus
ttacaccgaataatacaacaattat

SEQ ID NO: 77495 - DNA, 25 bp, SARS Virus
tacaccgaatataacaacaattatt

SEQ ID NO: 77496 - DNA, 25 bp, SARS Virus
acaccgaatattacaacaattattt

SEQ ID NO: 77497 - DNA, 25 bp, SARS Virus
caccgaatattaaaacaattatttc

SEQ ID NO: 77498 - DNA, 25 bp, SARS Virus
accgaatattacaacaattatttcc

SEQ ID NO: 77499 - DNA, 25 bp, SARS Virus
ccgaatattacaacaattatttcct

SEQ ID NO: 77500 - DNA, 25 bp, SARS Virus
cgaatattacaaaaattatttcctg

SEQ ID NO: 77501 - DNA, 25 bp, SARS Virus
gaatattacaacaattatttcctgt

SEQ ID NO: 77502 - DNA, 25 bp, SARS Virus
aatattacaacaattatttcctgtg

SEQ ID NO: 77503 - DNA, 25 bp, SARS Virus
atattacaacaaatatttcctgtga

SEQ ID NO: 77504 - DNA, 25 bp, SARS Virus
tattacaacaataatttcctgtgaa

SEQ ID NO: 77505 - DNA, 25 bp, SARS Virus
attacaacaattatttcctgtgaaa

SEQ ID NO: 77506 - DNA, 25 bp, SARS Virus
ttacaacaattaattcctgtgaaac

SEQ ID NO: 77507 - DNA, 25 bp, SARS Virus
tacaacaattatatcctgtgaaact

SEQ ID NO: 77508 - DNA, 25 bp, SARS Virus
acaacaattattacctgtgaaacta

SEQ ID NO: 77509 - DNA, 25 bp, SARS Virus
caacaattatttactgtgaaactac

SEQ ID NO: 77510 - DNA, 25 bp, SARS Virus
aacaattatttcatgtgaaactacc

SEQ ID NO: 77511 - DNA, 25 bp, SARS Virus
acaattatttccagtgaaactacct

SEQ ID NO: 77512 - DNA, 25 bp, SARS Virus
caattatttcctatgaaactacctg

SEQ ID NO: 77513 - DNA, 25 bp, SARS Virus
aattatttcctgagaaactacctgt

SEQ ID NO: 77514 - DNA, 25 bp, SARS Virus
attatttcctgtaaaactacctgtg

SEQ ID NO: 77515 - DNA, 25 bp, SARS Virus
ttatttcctgtgaaactacctgtgc

SEQ ID NO: 77516 - DNA, 25 bp, SARS Virus
tatttcctgtgaaactacctgtgcg

SEQ ID NO: 77517 - DNA, 25 bp, SARS Virus
atttcctgtgaaactacctgtgcgg

SEQ ID NO: 77518 - DNA, 25 bp, SARS Virus
tttcctgtgaaaatacctgtgcggc

SEQ ID NO: 77519 - DNA, 25 bp, SARS Virus
ttcctgtgaaacaacctgtgcggcc

SEQ ID NO: 77520 - DNA, 25 bp, SARS Virus
tcctgtgaaactacctgtgcggccg

SEQ ID NO: 77521 - DNA, 25 bp, SARS Virus
cctgtgaaactaactgtgcggccgc

SEQ ID NO: 77522 - DNA, 25 bp, SARS Virus
ctgtgaaactacatgtgcggccgct

SEQ ID NO: 77523 - DNA, 25 bp, SARS Virus
tgtgaaactaccagtgcggccgctt

SEQ ID NO: 77524 - DNA, 25 bp, SARS Virus
gtgaaactacctatgcggccgcttc

SEQ ID NO: 77525 - DNA, 25 bp, SARS Virus
tgaaactacctgagcggccgcttcg

SEQ ID NO: 77526 - DNA, 25 bp, SARS Virus
gaaactacctgtacggccgcttcgt

SEQ ID NO: 77527 - DNA, 25 bp, SARS Virus
aaactacctgtgaggccgcttcgtg

SEQ ID NO: 77528 - DNA, 25 bp, SARS Virus
aactacctgtgcagccgcttcgtgg

SEQ ID NO: 77529 - DNA, 25 bp, SARS Virus
actacctgtgcgaccgcttcgtgga

SEQ ID NO: 77530 - DNA, 25 bp, SARS Virus
ctacctgtgcggacgcttcgtggac

SEQ ID NO: 77531 - DNA, 25 bp, SARS Virus
tacctgtgcggcagcttcgtggaca

SEQ ID NO: 77532 - DNA, 25 bp, SARS Virus
acctgtgcggccacttcgtggacaa

SEQ ID NO: 77533 - DNA, 25 bp, SARS Virus
cctgtgcggccgattcgtggacaaa

SEQ ID NO: 77534 - DNA, 25 bp, SARS Virus
ctgtgcggccgcatcgtggacaaag

SEQ ID NO: 77535 - DNA, 25 bp, SARS Virus
tgtgcggccgctacgtggacaaagg

SEQ ID NO: 77536 - DNA, 25 bp, SARS Virus
gtgcggccgcttagtggacaaaggt

SEQ ID NO: 77537 - DNA, 25 bp, SARS Virus
tgcggccgcttcatggacaaaggta

SEQ ID NO: 77538 - DNA, 25 bp, SARS Virus
gcggccgcttcgaggacaaaggtag

SEQ ID NO: 77539 - DNA, 25 bp, SARS Virus
cggccgcttcgtagacaaaggtagt

SEQ ID NO: 77540 - DNA, 25 bp, SARS Virus
ggccgcttcgtgaacaaaggtagta

SEQ ID NO: 77541 - DNA, 25 bp, SARS Virus
gccgcttcgtggacaaaggtagtaa

SEQ ID NO: 77542 - DNA, 25 bp, SARS Virus
ccgcttcgtggaaaaaggtagtaat

SEQ ID NO: 77543 - DNA, 25 bp, SARS Virus
cgcttcgtggacaaaggtagtaatt

SEQ ID NO: 77544 - DNA, 25 bp, SARS Virus
gcttcgtggacaaaggtagtaatta

SEQ ID NO: 77545 - DNA, 25 bp, SARS Virus
cttcgtggacaaaggtagtaattat

SEQ ID NO: 77546 - DNA, 25 bp, SARS Virus
ttcgtggacaaaagtagtaattatt

SEQ ID NO: 77547 - DNA, 25 bp, SARS Virus
tcgtggacaaagatagtaattatta

SEQ ID NO: 77548 - DNA, 25 bp, SARS Virus
cgtggacaaaggaagtaattattac

SEQ ID NO: 77549 - DNA, 25 bp, SARS Virus
gtggacaaaggtagtaattattacg

SEQ ID NO: 77550 - DNA, 25 bp, SARS Virus
tggacaaaggtaataattattacga

SEQ ID NO: 77551 - DNA, 25 bp, SARS Virus
ggacaaaggtagaaattattacgac

SEQ ID NO: 77552 - DNA, 25 bp, SARS Virus
gacaaaggtagtaattattacgaca

SEQ ID NO: 77553 - DNA, 25 bp, SARS Virus
acaaaggtagtaattattacgacaa

SEQ ID NO: 77554 - DNA, 25 bp, SARS Virus
caaaggtagtaaatattacgacaaa

SEQ ID NO: 77555 - DNA, 25 bp, SARS Virus
aaaggtagtaataattacgacaaat

SEQ ID NO: 77556 - DNA, 25 bp, SARS Virus
aaggtagtaattattacgacaaatg

SEQ ID NO: 77557 - DNA, 25 bp, SARS Virus
aggtagtaattaatacgacaaatgt

SEQ ID NO: 77558 - DNA, 25 bp, SARS Virus
ggtagtaattataacgacaaatgtg

SEQ ID NO: 77559 - DNA, 25 bp, SARS Virus
gtagtaattattacgacaaatgtgt

SEQ ID NO: 77560 - DNA, 25 bp, SARS Virus
tagtaattattaagacaaatgtgtt

SEQ ID NO: 77561 - DNA, 25 bp, SARS Virus
agtaattattacaacaaatgtgttt

SEQ ID NO: 77562 - DNA, 25 bp, SARS Virus
gtaattattacgacaaatgtgtttc

SEQ ID NO: 77563 - DNA, 25 bp, SARS Virus
taattattacgaaaaatgtgtttcc

SEQ ID NO: 77564 - DNA, 25 bp, SARS Virus
aattattacgacaaatgtgtttcca

SEQ ID NO: 77565 - DNA, 25 bp, SARS Virus
attattacgacaaatgtgtttccat

SEQ ID NO: 77566 - DNA, 25 bp, SARS Virus
ttattacgacaaatgtgtttccatc

SEQ ID NO: 77567 - DNA, 25 bp, SARS Virus
tattacgacaaaagtgtttccatct

SEQ ID NO: 77568 - DNA, 25 bp, SARS Virus
attacgacaaatatgtttccatcta

SEQ ID NO: 77569 - DNA, 25 bp, SARS Virus
ttacgacaaatgagtttccatctac

SEQ ID NO: 77570 - DNA, 25 bp, SARS Virus
tacgacaaatgtatttccatctacc

SEQ ID NO: 77571 - DNA, 25 bp, SARS Virus
acgacaaatgtgattccatctacca

SEQ ID NO: 77572 - DNA, 25 bp, SARS Virus
cgacaaatgtgtatccatctaccat

SEQ ID NO: 77573 - DNA, 25 bp, SARS Virus
gacaaatgtgttaccatctaccata

SEQ ID NO: 77574 - DNA, 25 bp, SARS Virus
acaaatgtgtttacatctaccataa

SEQ ID NO: 77575 - DNA, 25 bp, SARS Virus
caaatgtgtttcaatctaccataac

SEQ ID NO: 77576 - DNA, 25 bp, SARS Virus
aaatgtgtttccatctaccataact

SEQ ID NO: 77577 - DNA, 25 bp, SARS Virus
aatgtgtttccaactaccataacta

SEQ ID NO: 77578 - DNA, 25 bp, SARS Virus
atgtgtttccatataccataactac

SEQ ID NO: 77579 - DNA, 25 bp, SARS Virus
tgtgtttccatcaaccataactaca

SEQ ID NO: 77580 - DNA, 25 bp, SARS Virus
gtgtttccatctaccataactacac

SEQ ID NO: 77581 - DNA, 25 bp, SARS Virus
tgtttccatctaacataactacacc

SEQ ID NO: 77582 - DNA, 25 bp, SARS Virus
gtttccatctacaataactacacct

SEQ ID NO: 77583 - DNA, 25 bp, SARS Virus
tttccatctaccataactacacctc

SEQ ID NO: 77584 - DNA, 25 bp, SARS Virus
ttccatctaccaaaactacacctct

SEQ ID NO: 77585 - DNA, 25 bp, SARS Virus
tccatctaccataactacacctcta

SEQ ID NO: 77586 - DNA, 25 bp, SARS Virus
ccatctaccataactacacctctag

SEQ ID NO: 77587 - DNA, 25 bp, SARS Virus
catctaccataaatacacctctaga

SEQ ID NO: 77588 - DNA, 25 bp, SARS Virus
atctaccataacaacacctctagaa

SEQ ID NO: 77589 - DNA, 25 bp, SARS Virus
tctaccataactacacctctagaaa

SEQ ID NO: 77590 - DNA, 25 bp, SARS Virus
ctaccataactaaacctctagaaac

SEQ ID NO: 77591 - DNA, 25 bp, SARS Virus
taccataactacacctctagaaact

SEQ ID NO: 77592 - DNA, 25 bp, SARS Virus
accataactacaactctagaaactt

SEQ ID NO: 77593 - DNA, 25 bp, SARS Virus
ccataactacacatctagaaacttt

SEQ ID NO: 77594 - DNA, 25 bp, SARS Virus
cataactacaccactagaaactttt

SEQ ID NO: 77595 - DNA, 25 bp, SARS Virus
ataactacacctatagaaactttta

SEQ ID NO: 77596 - DNA, 25 bp, SARS Virus
taactacacctcaagaaacttttat

SEQ ID NO: 77597 - DNA, 25 bp, SARS Virus
aactacacctctagaaacttttatt

SEQ ID NO: 77598 - DNA, 25 bp, SARS Virus
actacacctctaaaaacttttattc

SEQ ID NO: 77599 - DNA, 25 bp, SARS Virus
ctacacctctagaaacttttattct

SEQ ID NO: 77600 - DNA, 25 bp, SARS Virus
tacacctctagaaacttttattctg

SEQ ID NO: 77601 - DNA, 25 bp, SARS Virus
acacctctagaaacttttattctgt

SEQ ID NO: 77602 - DNA, 25 bp, SARS Virus
cacctctagaaaattttattctgtt

SEQ ID NO: 77603 - DNA, 25 bp, SARS Virus
acctctagaaacatttattctgttg

SEQ ID NO: 77604 - DNA, 25 bp, SARS Virus
cctctagaaactattattctgttgt

SEQ ID NO: 77605 - DNA, 25 bp, SARS Virus
ctctagaaacttatattctgttgtg

SEQ ID NO: 77606 - DNA, 25 bp, SARS Virus
tctagaaactttaattctgttgtga

SEQ ID NO: 77607 - DNA, 25 bp, SARS Virus
ctagaaacttttattctgttgtgaa

SEQ ID NO: 77608 - DNA, 25 bp, SARS Virus
tagaaacttttaatctgttgtgaag

SEQ ID NO: 77609 - DNA, 25 bp, SARS Virus
agaaacttttatactgttgtgaagg

SEQ ID NO: 77610 - DNA, 25 bp, SARS Virus
gaaacttttattatgttgtgaagga

SEQ ID NO: 77611 - DNA, 25 bp, SARS Virus
aaacttttattcagttgtgaaggac

SEQ ID NO: 77612 - DNA, 25 bp, SARS Virus
aacttttattctattgtgaaggaca

SEQ ID NO: 77613 - DNA, 25 bp, SARS Virus
acttttattctgatgtgaaggacaa

SEQ ID NO: 77614 - DNA, 25 bp, SARS Virus
cttttattctgtagtgaaggacaat

SEQ ID NO: 77615 - DNA, 25 bp, SARS Virus
ttttattctgttatgaaggacaatt

SEQ ID NO: 77616 - DNA, 25 bp, SARS Virus
tttattctgttgagaaggacaatta

SEQ ID NO: 77617 - DNA, 25 bp, SARS Virus
ttattctgttgtaaaggacaattac

SEQ ID NO: 77618 - DNA, 25 bp, SARS Virus
tattctgttgtgaaggacaattaca

SEQ ID NO: 77619 - DNA, 25 bp, SARS Virus
attctgttgtgaaggacaattacaa

SEQ ID NO: 77620 - DNA, 25 bp, SARS Virus
ttctgttgtgaaagacaattacaac

SEQ ID NO: 77621 - DNA, 25 bp, SARS Virus
tctgttgtgaagaacaattacaacg

SEQ ID NO: 77622 - DNA, 25 bp, SARS Virus
ctgttgtgaaggacaattacaacgt

SEQ ID NO: 77623 - DNA, 25 bp, SARS Virus
tgttgtgaaggaaaattacaacgta

SEQ ID NO: 77624 - DNA, 25 bp, SARS Virus
gttgtgaaggacaattacaacgtaa

SEQ ID NO: 77625 - DNA, 25 bp, SARS Virus
ttgtgaaggacaattacaacgtaaa

SEQ ID NO: 77626 - DNA, 25 bp, SARS Virus
tgtgaaggacaaatacaacgtaaac

SEQ ID NO: 77627 - DNA, 25 bp, SARS Virus
gtgaaggacaataacaacgtaaact

SEQ ID NO: 77628 - DNA, 25 bp, SARS Virus
tgaaggacaattacaacgtaaactc

SEQ ID NO: 77629 - DNA, 25 bp, SARS Virus
gaaggacaattaaaacgtaaactcg

SEQ ID NO: 77630 - DNA, 25 bp, SARS Virus
aaggacaattacaacgtaaactcga

SEQ ID NO: 77631 - DNA, 25 bp, SARS Virus
aggacaattacaacgtaaactcgaa

SEQ ID NO: 77632 - DNA, 25 bp, SARS Virus
ggacaattacaaagtaaactcgaaa

SEQ ID NO: 77633 - DNA, 25 bp, SARS Virus
gacaattacaacataaactcgaaac

SEQ ID NO: 77634 - DNA, 25 bp, SARS Virus
acaattacaacgaaaactcgaaacc

SEQ ID NO: 77635 - DNA, 25 bp, SARS Virus
caattacaacgtaaactcgaaaccc

SEQ ID NO: 77636 - DNA, 25 bp, SARS Virus
aattacaacgtaaactcgaaacccg

SEQ ID NO: 77637 - DNA, 25 bp, SARS Virus
attacaacgtaaactcgaaacccga

SEQ ID NO: 77638 - DNA, 25 bp, SARS Virus
ttacaacgtaaaatcgaaacccgat

SEQ ID NO: 77639 - DNA, 25 bp, SARS Virus
tacaacgtaaacacgaaacccgatt

SEQ ID NO: 77640 - DNA, 25 bp, SARS Virus
acaacgtaaactagaaacccgattc

SEQ ID NO: 77641 - DNA, 25 bp, SARS Virus
caacgtaaactcaaaacccgattcg

SEQ ID NO: 77642 - DNA, 25 bp, SARS Virus
aacgtaaactcgaaacccgattcgc

SEQ ID NO: 77643 - DNA, 25 bp, SARS Virus
acgtaaactcgaaacccgattcgca

SEQ ID NO: 77644 - DNA, 25 bp, SARS Virus
cgtaaactcgaaacccgattcgcat

SEQ ID NO: 77645 - DNA, 25 bp, SARS Virus
gtaaactcgaaaaccgattcgcatt

SEQ ID NO: 77646 - DNA, 25 bp, SARS Virus
taaactcgaaacacgattcgcattg

SEQ ID NO: 77647 - DNA, 25 bp, SARS Virus
aaactcgaaaccagattcgcattgt

SEQ ID NO: 77648 - DNA, 25 bp, SARS Virus
aactcgaaacccaattcgcattgta

SEQ ID NO: 77649 - DNA, 25 bp, SARS Virus
actcgaaacccgattcgcattgtaa

SEQ ID NO: 77650 - DNA, 25 bp, SARS Virus
ctcgaaacccgaatcgcattgtaat

SEQ ID NO: 77651 - DNA, 25 bp, SARS Virus
tcgaaacccgatacgcattgtaatt

SEQ ID NO: 77652 - DNA, 25 bp, SARS Virus
cgaaacccgattagcattgtaattt

SEQ ID NO: 77653 - DNA, 25 bp, SARS Virus
gaaacccgattcacattgtaatttg

SEQ ID NO: 77654 - DNA, 25 bp, SARS Virus
aaacccgattcgaattgtaatttgg

SEQ ID NO: 77655 - DNA, 25 bp, SARS Virus
aacccgattcgcattgtaatttggt

SEQ ID NO: 77656 - DNA, 25 bp, SARS Virus
acccgattcgcaatgtaatttggtc

SEQ ID NO: 77657 - DNA, 25 bp, SARS Virus
cccgattcgcatagtaatttggtca

SEQ ID NO: 77658 - DNA, 25 bp, SARS Virus
ccgattcgcattataatttggtcac

SEQ ID NO: 77659 - DNA, 25 bp, SARS Virus
cgattcgcattgaaatttggtcacg

SEQ ID NO: 77660 - DNA, 25 bp, SARS Virus
gattcgcattgtaatttggtcacgg

SEQ ID NO: 77661 - DNA, 25 bp, SARS Virus
attcgcattgtaatttggtcacggt

SEQ ID NO: 77662 - DNA, 25 bp, SARS Virus
ttcgcattgtaaattggtcacggtc

SEQ ID NO: 77663 - DNA, 25 bp, SARS Virus
tcgcattgtaatatggtcacggtct

SEQ ID NO: 77664 - DNA, 25 bp, SARS Virus
cgcattgtaattaggtcacggtctc

SEQ ID NO: 77665 - DNA, 25 bp, SARS Virus
gcattgtaatttagtcacggtctct

SEQ ID NO: 77666 - DNA, 25 bp, SARS Virus
cattgtaatttgatcacggtctcta

SEQ ID NO: 77667 - DNA, 25 bp, SARS Virus
attgtaatttggacacggtctctaa

SEQ ID NO: 77668 - DNA, 25 bp, SARS Virus
ttgtaatttggtaacggtctctaat

SEQ ID NO: 77669 - DNA, 25 bp, SARS Virus
tgtaatttggtcacggtctctaatt

SEQ ID NO: 77670 - DNA, 25 bp, SARS Virus
gtaatttggtcaaggtctctaattc

SEQ ID NO: 77671 - DNA, 25 bp, SARS Virus
taatttggtcacagtctctaattct

SEQ ID NO: 77672 - DNA, 25 bp, SARS Virus
aatttggtcacgatctctaattcta

SEQ ID NO: 77673 - DNA, 25 bp, SARS Virus
atttggtcacggactctaattctat

SEQ ID NO: 77674 - DNA, 25 bp, SARS Virus
tttggtcacggtatctaattctatg

SEQ ID NO: 77675 - DNA, 25 bp, SARS Virus
ttggtcacggtcactaattctatga

SEQ ID NO: 77676 - DNA, 25 bp, SARS Virus
tggtcacggtctataattctatgag

SEQ ID NO: 77677 - DNA, 25 bp, SARS Virus
ggtcacggtctcaaattctatgagt

SEQ ID NO: 77678 - DNA, 25 bp, SARS Virus
gtcacggtctctaattctatgagtt

SEQ ID NO: 77679 - DNA, 25 bp, SARS Virus
tcacggtctctaattctatgagtta

SEQ ID NO: 77680 - DNA, 25 bp, SARS Virus
cacggtctctaaatctatgagttat

SEQ ID NO: 77681 - DNA, 25 bp, SARS Virus
acggtctctaatactatgagttatt

SEQ ID NO: 77682 - DNA, 25 bp, SARS Virus
cggtctctaattatatgagttatta

SEQ ID NO: 77683 - DNA, 25 bp, SARS Virus
ggtctctaattcaatgagttattaa

SEQ ID NO: 77684 - DNA, 25 bp, SARS Virus
gtctctaattctatgagttattaaa

SEQ ID NO: 77685 - DNA, 25 bp, SARS Virus
tctctaattctaagagttattaaac

SEQ ID NO: 77686 - DNA, 25 bp, SARS Virus
ctctaattctataagttattaaacc

SEQ ID NO: 77687 - DNA, 25 bp, SARS Virus
tctaattctatgagttattaaaccc

SEQ ID NO: 77688 - DNA, 25 bp, SARS Virus
ctaattctatgaattattaaaccca

SEQ ID NO: 77689 - DNA, 25 bp, SARS Virus
taattctatgagatattaaacccac

SEQ ID NO: 77690 - DNA, 25 bp, SARS Virus
aattctatgagtaattaaacccaca

SEQ ID NO: 77691 - DNA, 25 bp, SARS Virus
attctatgagttattaaacccacaa

SEQ ID NO: 77692 - DNA, 25 bp, SARS Virus
ttctatgagttaataaacccacaac

SEQ ID NO: 77693 - DNA, 25 bp, SARS Virus
tctatgagttataaaacccacaact

SEQ ID NO: 77694 - DNA, 25 bp, SARS Virus
ctatgagttattaaacccacaacta

SEQ ID NO: 77695 - DNA, 25 bp, SARS Virus
tatgagttattaaacccacaactat

SEQ ID NO: 77696 - DNA, 25 bp, SARS Virus
atgagttattaaacccacaactata

SEQ ID NO: 77697 - DNA, 25 bp, SARS Virus
tgagttattaaaaccacaactatag

SEQ ID NO: 77698 - DNA, 25 bp, SARS Virus
gagttattaaacacacaactatagc

SEQ ID NO: 77699 - DNA, 25 bp, SARS Virus
agttattaaaccaacaactatagcg

SEQ ID NO: 77700 - DNA, 25 bp, SARS Virus
gttattaaacccacaactatagcga

SEQ ID NO: 77701 - DNA, 25 bp, SARS Virus
ttattaaacccaaaactatagcgac

SEQ ID NO: 77702 - DNA, 25 bp, SARS Virus
tattaaacccacaactatagcgacg

SEQ ID NO: 77703 - DNA, 25 bp, SARS Virus
attaaacccacaactatagcgacga

SEQ ID NO: 77704 - DNA, 25 bp, SARS Virus
ttaaacccacaaatatagcgacgat

SEQ ID NO: 77705 - DNA, 25 bp, SARS Virus
taaacccacaacaatagcgacgatt

SEQ ID NO: 77706 - DNA, 25 bp, SARS Virus
aaacccacaactatagcgacgatta

SEQ ID NO: 77707 - DNA, 25 bp, SARS Virus
aacccacaactaaagcgacgattat

SEQ ID NO: 77708 - DNA, 25 bp, SARS Virus
acccacaactatagcgacgattatg

SEQ ID NO: 77709 - DNA, 25 bp, SARS Virus
cccacaactataacgacgattatga

SEQ ID NO: 77710 - DNA, 25 bp, SARS Virus
ccacaactatagagacgattatgac

SEQ ID NO: 77711 - DNA, 25 bp, SARS Virus
cacaactatagcaacgattatgaca

SEQ ID NO: 77712 - DNA, 25 bp, SARS Virus
acaactatagcgacgattatgacat

SEQ ID NO: 77713 - DNA, 25 bp, SARS Virus
caactatagcgaagattatgacatt

SEQ ID NO: 77714 - DNA, 25 bp, SARS Virus
aactatagcgacaattatgacatta

SEQ ID NO: 77715 - DNA, 25 bp, SARS Virus
actatagcgacgattatgacattag

SEQ ID NO: 77716 - DNA, 25 bp, SARS Virus
ctatagcgacgaatatgacattaga

SEQ ID NO: 77717 - DNA, 25 bp, SARS Virus
tatagcgacgataatgacattagac

SEQ ID NO: 77718 - DNA, 25 bp, SARS Virus
atagcgacgattatgacattagacc

SEQ ID NO: 77719 - DNA, 25 bp, SARS Virus
tagcgacgattaagacattagaccc

SEQ ID NO: 77720 - DNA, 25 bp, SARS Virus
agcgacgattataacattagaccct

SEQ ID NO: 77721 - DNA, 25 bp, SARS Virus
aagaaaatgatacgactatcaggaa

SEQ ID NO: 77722 - DNA, 25 bp, SARS Virus
agaaaatgataacactatcaggaac

SEQ ID NO: 77723 - DNA, 25 bp, SARS Virus
gaaaatgataagcctatcaggaaca

SEQ ID NO: 77724 - DNA, 25 bp, SARS Virus
aaaatgataagactatcaggaacac

SEQ ID NO: 77725 - DNA, 25 bp, SARS Virus
aaatgataagaccatcaggaacact

SEQ ID NO: 77726 - DNA, 25 bp, SARS Virus
aatgataagactctcaggaacactc

SEQ ID NO: 77727 - DNA, 25 bp, SARS Virus
atgataagactaccaggaacactca

SEQ ID NO: 77728 - DNA, 25 bp, SARS Virus
tgataagactatcaggaacactcag

SEQ ID NO: 77729 - DNA, 25 bp, SARS Virus
gataagactatccggaacactcaga

SEQ ID NO: 77730 - DNA, 25 bp, SARS Virus
ataagactatcacgaacactcagag

SEQ ID NO: 77731 - DNA, 25 bp, SARS Virus
taagactatcagcaacactcagagt

SEQ ID NO: 77732 - DNA, 25 bp, SARS Virus
aagactatcaggcacactcagagta

SEQ ID NO: 77733 - DNA, 25 bp, SARS Virus
agactatcaggaccactcagagtac

SEQ ID NO: 77734 - DNA, 25 bp, SARS Virus
gactatcaggaacactcagagtacc

SEQ ID NO: 77735 - DNA, 25 bp, SARS Virus
actatcaggaaccctcagagtaccg

SEQ ID NO: 77736 - DNA, 25 bp, SARS Virus
ctatcaggaacactcagagtaccgt

SEQ ID NO: 77737 - DNA, 25 bp, SARS Virus
tatcaggaacacccagagtaccgtt

SEQ ID NO: 77738 - DNA, 25 bp, SARS Virus
atcaggaacactcagagtaccgttt

SEQ ID NO: 77739 - DNA, 25 bp, SARS Virus
tcaggaacactccgagtaccgtttg

SEQ ID NO: 77740 - DNA, 25 bp, SARS Virus
caggaacactcacagtaccgtttgt

SEQ ID NO: 77741 - DNA, 25 bp, SARS Virus
aggaacactcagcgtaccgtttgtt

SEQ ID NO: 77742 - DNA, 25 bp, SARS Virus
ggaacactcagactaccgtttgttc

SEQ ID NO: 77743 - DNA, 25 bp, SARS Virus
gaacactcagagcaccgtttgttca

SEQ ID NO: 77744 - DNA, 25 bp, SARS Virus
aacactcagagtcccgtttgttcat

SEQ ID NO: 77745 - DNA, 25 bp, SARS Virus
acactcagagtaccgtttgttcatc

SEQ ID NO: 77746 - DNA, 25 bp, SARS Virus
cactcagagtaccgtttgttcatca

SEQ ID NO: 77747 - DNA, 25 bp, SARS Virus
actcagagtaccctttgttcatcac

SEQ ID NO: 77748 - DNA, 25 bp, SARS Virus
ctcagagtaccgcttgttcatcaca

SEQ ID NO: 77749 - DNA, 25 bp, SARS Virus
tcagagtaccgtctgttcatcacag

SEQ ID NO: 77750 - DNA, 25 bp, SARS Virus
cagagtaccgttcgttcatcacagc

SEQ ID NO: 77751 - DNA, 25 bp, SARS Virus
agagtaccgtttcttcatcacagcc

SEQ ID NO: 77752 - DNA, 25 bp, SARS Virus
gagtaccgtttgctcatcacagcct

SEQ ID NO: 77753 - DNA, 25 bp, SARS Virus
agtaccgtttgtccatcacagccta

SEQ ID NO: 77754 - DNA, 25 bp, SARS Virus
gtaccgtttgttcatcacagcctat

SEQ ID NO: 77755 - DNA, 25 bp, SARS Virus
taccgtttgttcctcacagcctata

SEQ ID NO: 77756 - DNA, 25 bp, SARS Virus
accgtttgttcaccacagcctataa

SEQ ID NO: 77757 - DNA, 25 bp, SARS Virus
ccgtttgttcatcacagcctataac

SEQ ID NO: 77758 - DNA, 25 bp, SARS Virus
cgtttgttcatcccagcctataact

SEQ ID NO: 77759 - DNA, 25 bp, SARS Virus
gtttgttcatcacagcctataacta

SEQ ID NO: 77760 - DNA, 25 bp, SARS Virus
tttgttcatcaccgcctataactaa

SEQ ID NO: 77761 - DNA, 25 bp, SARS Virus
ttgttcatcacaccctataactaat

SEQ ID NO: 77762 - DNA, 25 bp, SARS Virus
tgttcatcacagcctataactaata

SEQ ID NO: 77763 - DNA, 25 bp, SARS Virus
gttcatcacagcctataactaatac

SEQ ID NO: 77764 - DNA, 25 bp, SARS Virus
ttcatcacagcccataactaataca

SEQ ID NO: 77765 - DNA, 25 bp, SARS Virus
tcatcacagcctctaactaatacaa

SEQ ID NO: 77766 - DNA, 25 bp, SARS Virus
catcacagcctacaactaatacaag

SEQ ID NO: 77767 - DNA, 25 bp, SARS Virus
atcacagcctatcactaatacaagg

SEQ ID NO: 77768 - DNA, 25 bp, SARS Virus
tcacagcctatacctaatacaaggt

SEQ ID NO: 77769 - DNA, 25 bp, SARS Virus
cacagcctataactaatacaaggtg

SEQ ID NO: 77770 - DNA, 25 bp, SARS Virus
acagcctataaccaatacaaggtga

SEQ ID NO: 77771 - DNA, 25 bp, SARS Virus
cagcctataactcatacaaggtgag

SEQ ID NO: 77772 - DNA, 25 bp, SARS Virus
agcctataactactacaaggtgagt

SEQ ID NO: 77773 - DNA, 25 bp, SARS Virus
gcctataactaacacaaggtgagtt

SEQ ID NO: 77774 - DNA, 25 bp, SARS Virus
cctataactaatccaaggtgagttt

SEQ ID NO: 77775 - DNA, 25 bp, SARS Virus
ctataactaatacaaggtgagttta

SEQ ID NO: 77776 - DNA, 25 bp, SARS Virus
tataactaataccaggtgagtttag

SEQ ID NO: 77777 - DNA, 25 bp, SARS Virus
ataactaatacacggtgagtttaga

SEQ ID NO: 77778 - DNA, 25 bp, SARS Virus
taactaatacaacgtgagtttagac

SEQ ID NO: 77779 - DNA, 25 bp, SARS Virus
aactaatacaagctgagtttagacg

SEQ ID NO: 77780 - DNA, 25 bp, SARS Virus
actaatacaaggcgagtttagacga

SEQ ID NO: 77781 - DNA, 25 bp, SARS Virus
ctaatacaaggtcagtttagacgat

SEQ ID NO: 77782 - DNA, 25 bp, SARS Virus
taatacaaggtgcgtttagacgatg

SEQ ID NO: 77783 - DNA, 25 bp, SARS Virus
aatacaaggtgactttagacgatgc

SEQ ID NO: 77784 - DNA, 25 bp, SARS Virus
atacaaggtgagcttagacgatgca

SEQ ID NO: 77785 - DNA, 25 bp, SARS Virus
tacaaggtgagtctagacgatgcac

SEQ ID NO: 77786 - DNA, 25 bp, SARS Virus
acaaggtgagttcagacgatgcaca

SEQ ID NO: 77787 - DNA, 25 bp, SARS Virus
caaggtgagtttcgacgatgcacat

SEQ ID NO: 77788 - DNA, 25 bp, SARS Virus
aaggtgagtttacacgatgcacata

SEQ ID NO: 77789 - DNA, 25 bp, SARS Virus
aggtgagtttagccgatgcacataa

SEQ ID NO: 77790 - DNA, 25 bp, SARS Virus
ggtgagtttagacgatgcacataat

SEQ ID NO: 77791 - DNA, 25 bp, SARS Virus
gtgagtttagaccatgcacataatg

SEQ ID NO: 77792 - DNA, 25 bp, SARS Virus
tgagtttagacgctgcacataatgt

SEQ ID NO: 77793 - DNA, 25 bp, SARS Virus
gagtttagacgacgcacataatgtg

SEQ ID NO: 77794 - DNA, 25 bp, SARS Virus
agtttagacgatccacataatgtgc

SEQ ID NO: 77795 - DNA, 25 bp, SARS Virus
gtttagacgatgcacataatgtgct

SEQ ID NO: 77796 - DNA, 25 bp, SARS Virus
tttagacgatgcccataatgtgcta

SEQ ID NO: 77797 - DNA, 25 bp, SARS Virus
ttagacgatgcacataatgtgctac

SEQ ID NO: 77798 - DNA, 25 bp, SARS Virus
tagacgatgcacctaatgtgctacg

SEQ ID NO: 77799 - DNA, 25 bp, SARS Virus
agacgatgcacacaatgtgctacgt

SEQ ID NO: 77800 - DNA, 25 bp, SARS Virus
gacgatgcacatcatgtgctacgtt

SEQ ID NO: 77801 - DNA, 25 bp, SARS Virus
acgatgcacatactgtgctacgtta

SEQ ID NO: 77802 - DNA, 25 bp, SARS Virus
cgatgcacataacgtgctacgttaa

SEQ ID NO: 77803 - DNA, 25 bp, SARS Virus
gatgcacataatctgctacgttaaa

SEQ ID NO: 77804 - DNA, 25 bp, SARS Virus
atgcacataatgcgctacgttaaat

SEQ ID NO: 77805 - DNA, 25 bp, SARS Virus
tgcacataatgtcctacgttaaatc

SEQ ID NO: 77806 - DNA, 25 bp, SARS Virus
gcacataatgtgctacgttaaatcc

SEQ ID NO: 77807 - DNA, 25 bp, SARS Virus
cacataatgtgccacgttaaatcca

SEQ ID NO: 77808 - DNA, 25 bp, SARS Virus
acataatgtgctccgttaaatccac

SEQ ID NO: 77809 - DNA, 25 bp, SARS Virus
cataatgtgctacgttaaatccacc

SEQ ID NO: 77810 - DNA, 25 bp, SARS Virus
ataatgtgctaccttaaatccacca

SEQ ID NO: 77811 - DNA, 25 bp, SARS Virus
taatgtgctacgctaaatccaccac

SEQ ID NO: 77812 - DNA, 25 bp, SARS Virus
aatgtgctacgtcaaatccaccacg

SEQ ID NO: 77813 - DNA, 25 bp, SARS Virus
atgtgctacgttcaatccaccacga

SEQ ID NO: 77814 - DNA, 25 bp, SARS Virus
tgtgctacgttacatccaccacgac

SEQ ID NO: 77815 - DNA, 25 bp, SARS Virus
gtgctacgttaactccaccacgaca

SEQ ID NO: 77816 - DNA, 25 bp, SARS Virus
tgctacgttaaacccaccacgacaa

SEQ ID NO: 77817 - DNA, 25 bp, SARS Virus
gctacgttaaatccaccacgacaaa

SEQ ID NO: 77818 - DNA, 25 bp, SARS Virus
ctacgttaaatccaccacgacaaac

SEQ ID NO: 77819 - DNA, 25 bp, SARS Virus
tacgttaaatcccccacgacaaacg

SEQ ID NO: 77820 - DNA, 25 bp, SARS Virus
acgttaaatccaccacgacaaacgt

SEQ ID NO: 77821 - DNA, 25 bp, SARS Virus
cgttaaatccaccacgacaaacgtc

SEQ ID NO: 77822 - DNA, 25 bp, SARS Virus
gttaaatccaccccgacaaacgtct

SEQ ID NO: 77823 - DNA, 25 bp, SARS Virus
ttaaatccaccacgacaaacgtctg

SEQ ID NO: 77824 - DNA, 25 bp, SARS Virus
taaatccaccaccacaaacgtctgt

SEQ ID NO: 77825 - DNA, 25 bp, SARS Virus
aaatccaccacgccaaacgtctgtg

SEQ ID NO: 77826 - DNA, 25 bp, SARS Virus
aatccaccacgacaaacgtctgtgg

SEQ ID NO: 77827 - DNA, 25 bp, SARS Virus
atccaccacgaccaacgtctgtggt

SEQ ID NO: 77828 - DNA, 25 bp, SARS Virus
tccaccacgacacacgtctgtggta

SEQ ID NO: 77829 - DNA, 25 bp, SARS Virus
ccaccacgacaaccgtctgtggtac

SEQ ID NO: 77830 - DNA, 25 bp, SARS Virus
caccacgacaaacgtctgtggtacg

SEQ ID NO: 77831 - DNA, 25 bp, SARS Virus
accacgacaaacctctgtggtacgt

SEQ ID NO: 77832 - DNA, 25 bp, SARS Virus
ccacgacaaacgcctgtggtacgtt

SEQ ID NO: 77833 - DNA, 25 bp, SARS Virus
cacgacaaacgtctgtggtacgttt

SEQ ID NO: 77834 - DNA, 25 bp, SARS Virus
acgacaaacgtccgtggtacgttta

SEQ ID NO: 77835 - DNA, 25 bp, SARS Virus
cgacaaacgtctctggtacgtttac

SEQ ID NO: 77836 - DNA, 25 bp, SARS Virus
gacaaacgtctgcggtacgtttact

SEQ ID NO: 77837 - DNA, 25 bp, SARS Virus
acaaacgtctgtcgtacgtttactc

SEQ ID NO: 77838 - DNA, 25 bp, SARS Virus
caaacgtctgtgctacgtttactca

SEQ ID NO: 77839 - DNA, 25 bp, SARS Virus
aaacgtctgtggcacgtttactcat

SEQ ID NO: 77840 - DNA, 25 bp, SARS Virus
aacgtctgtggtccgtttactcatg

SEQ ID NO: 77841 - DNA, 25 bp, SARS Virus
acgtctgtggtacgtttactcatgg

SEQ ID NO: 77842 - DNA, 25 bp, SARS Virus
cgtctgtggtacctttactcatggc

SEQ ID NO: 77843 - DNA, 25 bp, SARS Virus
gtctgtggtacgcttactcatggct

SEQ ID NO: 77844 - DNA, 25 bp, SARS Virus
tctgtggtacgtctactcatggctg

SEQ ID NO: 77845 - DNA, 25 bp, SARS Virus
ctgtggtacgttcactcatggctgt

SEQ ID NO: 77846 - DNA, 25 bp, SARS Virus
tgtggtacgtttcctcatggctgtc

SEQ ID NO: 77847 - DNA, 25 bp, SARS Virus
gtggtacgtttactcatggctgtca

SEQ ID NO: 77848 - DNA, 25 bp, SARS Virus
tggtacgtttacccatggctgtcat

SEQ ID NO: 77849 - DNA, 25 bp, SARS Virus
ggtacgtttactcatggctgtcatg

SEQ ID NO: 77850 - DNA, 25 bp, SARS Virus
gtacgtttactcctggctgtcatga

SEQ ID NO: 77851 - DNA, 25 bp, SARS Virus
tacgtttactcacggctgtcatgaa

SEQ ID NO: 77852 - DNA, 25 bp, SARS Virus
acgtttactcatcgctgtcatgaac

SEQ ID NO: 77853 - DNA, 25 bp, SARS Virus
cgtttactcatgcctgtcatgaacc

SEQ ID NO: 77854 - DNA, 25 bp, SARS Virus
gtttactcatggctgtcatgaacct

SEQ ID NO: 77855 - DNA, 25 bp, SARS Virus
tttactcatggccgtcatgaaccta

SEQ ID NO: 77856 - DNA, 25 bp, SARS Virus
ttactcatggctctcatgaacctac

SEQ ID NO: 77857 - DNA, 25 bp, SARS Virus
tactcatggctgccatgaacctacg

SEQ ID NO: 77858 - DNA, 25 bp, SARS Virus
actcatggctgtcatgaacctacgt

SEQ ID NO: 77859 - DNA, 25 bp, SARS Virus
ctcatggctgtcctgaacctacgta

SEQ ID NO: 77860 - DNA, 25 bp, SARS Virus
tcatggctgtcacgaacctacgtat

SEQ ID NO: 77861 - DNA, 25 bp, SARS Virus
catggctgtcatcaacctacgtata

SEQ ID NO: 77862 - DNA, 25 bp, SARS Virus
atggctgtcatgcacctacgtatat

SEQ ID NO: 77863 - DNA, 25 bp, SARS Virus
tggctgtcatgaccctacgtatatt

SEQ ID NO: 77864 - DNA, 25 bp, SARS Virus
ggctgtcatgaacctacgtatatta

SEQ ID NO: 77865 - DNA, 25 bp, SARS Virus
gctgtcatgaacctacgtatattat

SEQ ID NO: 77866 - DNA, 25 bp, SARS Virus
ctgtcatgaacccacgtatattata

SEQ ID NO: 77867 - DNA, 25 bp, SARS Virus
tgtcatgaacctccgtatattatac

SEQ ID NO: 77868 - DNA, 25 bp, SARS Virus
gtcatgaacctacgtatattatact

SEQ ID NO: 77869 - DNA, 25 bp, SARS Virus
tcatgaacctacctatattatacta

SEQ ID NO: 77870 - DNA, 25 bp, SARS Virus
catgaacctacgcatattatactac

SEQ ID NO: 77871 - DNA, 25 bp, SARS Virus
atgaacctacgtctattatactact

SEQ ID NO: 77872 - DNA, 25 bp, SARS Virus
tgaacctacgtacattatactacta

SEQ ID NO: 77873 - DNA, 25 bp, SARS Virus
gaacctacgtatcttatactactaa

SEQ ID NO: 77874 - DNA, 25 bp, SARS Virus
aacctacgtatactatactactaaa

SEQ ID NO: 77875 - DNA, 25 bp, SARS Virus
acctacgtatatcatactactaaag

SEQ ID NO: 77876 - DNA, 25 bp, SARS Virus
cctacgtatattctactactaaaga

SEQ ID NO: 77877 - DNA, 25 bp, SARS Virus
ctacgtatattacactactaaagac

SEQ ID NO: 77878 - DNA, 25 bp, SARS Virus
tacgtatattatcctactaaagacg

SEQ ID NO: 77879 - DNA, 25 bp, SARS Virus
acgtatattatactactaaagacga

SEQ ID NO: 77880 - DNA, 25 bp, SARS Virus
cgtatattataccactaaagacgac

SEQ ID NO: 77881 - DNA, 25 bp, SARS Virus
gtatattatactcctaaagacgacc

SEQ ID NO: 77882 - DNA, 25 bp, SARS Virus
tatattatactactaaagacgacct

SEQ ID NO: 77883 - DNA, 25 bp, SARS Virus
atattatactaccaaagacgaccta

SEQ ID NO: 77884 - DNA, 25 bp, SARS Virus
tattatactactcaagacgacctaa

SEQ ID NO: 77885 - DNA, 25 bp, SARS Virus
attatactactacagacgacctaaa

SEQ ID NO: 77886 - DNA, 25 bp, SARS Virus
ttatactactaacgacgacctaaat

SEQ ID NO: 77887 - DNA, 25 bp, SARS Virus
tatactactaaacacgacctaaatc

SEQ ID NO: 77888 - DNA, 25 bp, SARS Virus
atactactaaagccgacctaaatcg

SEQ ID NO: 77889 - DNA, 25 bp, SARS Virus
tactactaaagacgacctaaatcgg

SEQ ID NO: 77890 - DNA, 25 bp, SARS Virus
actactaaagaccacctaaatcgga

SEQ ID NO: 77891 - DNA, 25 bp, SARS Virus
ctactaaagacgccctaaatcggat

SEQ ID NO: 77892 - DNA, 25 bp, SARS Virus
tactaaagacgacctaaatcggata

SEQ ID NO: 77893 - DNA, 25 bp, SARS Virus
actaaagacgacctaaatcggatac

SEQ ID NO: 77894 - DNA, 25 bp, SARS Virus
ctaaagacgacccaaatcggatacc

SEQ ID NO: 77895 - DNA, 25 bp, SARS Virus
taaagacgacctcaatcggatacct

SEQ ID NO: 77896 - DNA, 25 bp, SARS Virus
aaagacgacctacatcggataccta

SEQ ID NO: 77897 - DNA, 25 bp, SARS Virus
aagacgacctaactcggatacctaa

SEQ ID NO: 77898 - DNA, 25 bp, SARS Virus
agacgacctaaaccggatacctaaa

SEQ ID NO: 77899 - DNA, 25 bp, SARS Virus
gacgacctaaatcggatacctaaat

SEQ ID NO: 77900 - DNA, 25 bp, SARS Virus
acgacctaaatccgatacctaaatg

SEQ ID NO: 77901 - DNA, 25 bp, SARS Virus
cgacctaaatcgcatacctaaatgt

SEQ ID NO: 77902 - DNA, 25 bp, SARS Virus
gacctaaatcggctacctaaatgtt

SEQ ID NO: 77903 - DNA, 25 bp, SARS Virus
acctaaatcggacacctaaatgttt

SEQ ID NO: 77904 - DNA, 25 bp, SARS Virus
cctaaatcggatccctaaatgtttg

SEQ ID NO: 77905 - DNA, 25 bp, SARS Virus
ctaaatcggatacctaaatgtttgt

SEQ ID NO: 77906 - DNA, 25 bp, SARS Virus
taaatcggatacctaaatgtttgtt

SEQ ID NO: 77907 - DNA, 25 bp, SARS Virus
aaatcggatacccaaatgtttgtta

SEQ ID NO: 77908 - DNA, 25 bp, SARS Virus
aatcggatacctcaatgtttgttaa

SEQ ID NO: 77909 - DNA, 25 bp, SARS Virus
atcggatacctacatgtttgttaaa

SEQ ID NO: 77910 - DNA, 25 bp, SARS Virus
tcggatacctaactgtttgttaaac

SEQ ID NO: 77911 - DNA, 25 bp, SARS Virus
cggatacctaaacgtttgttaaact

SEQ ID NO: 77912 - DNA, 25 bp, SARS Virus
ggatacctaaatctttgttaaacta

SEQ ID NO: 77913 - DNA, 25 bp, SARS Virus
gatacctaaatgcttgttaaactat

SEQ ID NO: 77914 - DNA, 25 bp, SARS Virus
atacctaaatgtctgttaaactatg

SEQ ID NO: 77915 - DNA, 25 bp, SARS Virus
tacctaaatgttcgttaaactatga

SEQ ID NO: 77916 - DNA, 25 bp, SARS Virus
acctaaatgtttcttaaactatgaa

SEQ ID NO: 77917 - DNA, 25 bp, SARS Virus
cctaaatgtttgctaaactatgaat

SEQ ID NO: 77918 - DNA, 25 bp, SARS Virus
ctaaatgtttgtcaaactatgaata

SEQ ID NO: 77919 - DNA, 25 bp, SARS Virus
taaatgtttgttcaactatgaatat

SEQ ID NO: 77920 - DNA, 25 bp, SARS Virus
aaatgtttgttacactatgaatatt

SEQ ID NO: 77921 - DNA, 25 bp, SARS Virus
aatgtttgttaacctatgaatattg

SEQ ID NO: 77922 - DNA, 25 bp, SARS Virus
atgtttgttaaactatgaatattgg

SEQ ID NO: 77923 - DNA, 25 bp, SARS Virus
tgtttgttaaaccatgaatattgga

SEQ ID NO: 77924 - DNA, 25 bp, SARS Virus
gtttgttaaactctgaatattggac

SEQ ID NO: 77925 - DNA, 25 bp, SARS Virus
tttgttaaactacgaatattggaca

SEQ ID NO: 77926 - DNA, 25 bp, SARS Virus
ttgttaaactatcaatattggacac

SEQ ID NO: 77927 - DNA, 25 bp, SARS Virus
tgttaaactatgcatattggacacc

SEQ ID NO: 77928 - DNA, 25 bp, SARS Virus
gttaaactatgactattggacacct

SEQ ID NO: 77929 - DNA, 25 bp, SARS Virus
ttaaactatgaacattggacacctt

SEQ ID NO: 77930 - DNA, 25 bp, SARS Virus
taaactatgaatcttggacacctta

SEQ ID NO: 77931 - DNA, 25 bp, SARS Virus
aaactatgaatactggacaccttat

SEQ ID NO: 77932 - DNA, 25 bp, SARS Virus
aactatgaatatcggacaccttatg

SEQ ID NO: 77933 - DNA, 25 bp, SARS Virus
actatgaatattcgacaccttatgt

SEQ ID NO: 77934 - DNA, 25 bp, SARS Virus
ctatgaatattgcacaccttatgta

SEQ ID NO: 77935 - DNA, 25 bp, SARS Virus
tatgaatattggccaccttatgtaa

SEQ ID NO: 77936 - DNA, 25 bp, SARS Virus
atgaatattggacaccttatgtaaa

SEQ ID NO: 77937 - DNA, 25 bp, SARS Virus
tgaatattggaccccttatgtaaat

SEQ ID NO: 77938 - DNA, 25 bp, SARS Virus
gaatattggacaccttatgtaaatg

SEQ ID NO: 77939 - DNA, 25 bp, SARS Virus
aatattggacaccttatgtaaatgg

SEQ ID NO: 77940 - DNA, 25 bp, SARS Virus
atattggacaccctatgtaaatggt

SEQ ID NO: 77941 - DNA, 25 bp, SARS Virus
tattggacacctcatgtaaatggtc

SEQ ID NO: 77942 - DNA, 25 bp, SARS Virus
attggacaccttctgtaaatggtcc

SEQ ID NO: 77943 - DNA, 25 bp, SARS Virus
ttggacaccttacgtaaatggtcca

SEQ ID NO: 77944 - DNA, 25 bp, SARS Virus
tggacaccttatctaaatggtccaa

SEQ ID NO: 77945 - DNA, 25 bp, SARS Virus
ggacaccttatgcaaatggtccaat

SEQ ID NO: 77946 - DNA, 25 bp, SARS Virus
gacaccttatgtcaatggtccaatg

SEQ ID NO: 77947 - DNA, 25 bp, SARS Virus
acaccttatgtacatggtccaatgt

SEQ ID NO: 77948 - DNA, 25 bp, SARS Virus
caccttatgtaactggtccaatgtc

SEQ ID NO: 77949 - DNA, 25 bp, SARS Virus
accttatgtaaacggtccaatgtct

SEQ ID NO: 77950 - DNA, 25 bp, SARS Virus
ccttatgtaaatcgtccaatgtctc

SEQ ID NO: 77951 - DNA, 25 bp, SARS Virus
cttatgtaaatgctccaatgtctca

SEQ ID NO: 77952 - DNA, 25 bp, SARS Virus
ttatgtaaatggcccaatgtctcaa

SEQ ID NO: 77953 - DNA, 25 bp, SARS Virus
tatgtaaatggtccaatgtctcaaa

SEQ ID NO: 77954 - DNA, 25 bp, SARS Virus
atgtaaatggtccaatgtctcaaat

SEQ ID NO: 77955 - DNA, 25 bp, SARS Virus
tgtaaatggtcccatgtctcaaatc

SEQ ID NO: 77956 - DNA, 25 bp, SARS Virus
gtaaatggtccactgtctcaaatct

SEQ ID NO: 77957 - DNA, 25 bp, SARS Virus
taaatggtccaacgtctcaaatctt

SEQ ID NO: 77958 - DNA, 25 bp, SARS Virus
aaatggtccaatctctcaaatcttt

SEQ ID NO: 77959 - DNA, 25 bp, SARS Virus
aatggtccaatgcctcaaatctttt

SEQ ID NO: 77960 - DNA, 25 bp, SARS Virus
atggtccaatgtctcaaatctttta

SEQ ID NO: 77961 - DNA, 25 bp, SARS Virus
tggtccaatgtcccaaatcttttac

SEQ ID NO: 77962 - DNA, 25 bp, SARS Virus
ggtccaatgtctcaaatcttttaca

SEQ ID NO: 77963 - DNA, 25 bp, SARS Virus
gtccaatgtctccaatcttttacac

SEQ ID NO: 77964 - DNA, 25 bp, SARS Virus
tccaatgtctcacatcttttacacc

SEQ ID NO: 77965 - DNA, 25 bp, SARS Virus
ccaatgtctcaactcttttacaccg

SEQ ID NO: 77966 - DNA, 25 bp, SARS Virus
caatgtctcaaaccttttacaccga

SEQ ID NO: 77967 - DNA, 25 bp, SARS Virus
aatgtctcaaatcttttacaccgaa

SEQ ID NO: 77968 - DNA, 25 bp, SARS Virus
atgtctcaaatcctttacaccgaat

SEQ ID NO: 77969 - DNA, 25 bp, SARS Virus
tgtctcaaatctcttacaccgaata

SEQ ID NO: 77970 - DNA, 25 bp, SARS Virus
gtctcaaatcttctacaccgaatat

SEQ ID NO: 77971 - DNA, 25 bp, SARS Virus
tctcaaatctttcacaccgaatatt

SEQ ID NO: 77972 - DNA, 25 bp, SARS Virus
ctcaaatcttttccaccgaatatta

SEQ ID NO: 77973 - DNA, 25 bp, SARS Virus
tcaaatcttttacaccgaatattac

SEQ ID NO: 77974 - DNA, 25 bp, SARS Virus
caaatcttttaccccgaatattaca

SEQ ID NO: 77975 - DNA, 25 bp, SARS Virus
aaatcttttacaccgaatattacaa

SEQ ID NO: 77976 - DNA, 25 bp, SARS Virus
aatcttttacaccgaatattacaac

SEQ ID NO: 77977 - DNA, 25 bp, SARS Virus
atcttttacacccaatattacaaca

SEQ ID NO: 77978 - DNA, 25 bp, SARS Virus
tcttttacaccgcatattacaacaa

SEQ ID NO: 77979 - DNA, 25 bp, SARS Virus
cttttacaccgactattacaacaat

SEQ ID NO: 77980 - DNA, 25 bp, SARS Virus
ttttacaccgaacattacaacaatt

SEQ ID NO: 77981 - DNA, 25 bp, SARS Virus
tttacaccgaatcttacaacaatta

SEQ ID NO: 77982 - DNA, 25 bp, SARS Virus
ttacaccgaatactacaacaattat

SEQ ID NO: 77983 - DNA, 25 bp, SARS Virus
tacaccgaatatcacaacaattatt

SEQ ID NO: 77984 - DNA, 25 bp, SARS Virus
acaccgaatattccaacaattattt

SEQ ID NO: 77985 - DNA, 25 bp, SARS Virus
caccgaatattacaacaattatttc

SEQ ID NO: 77986 - DNA, 25 bp, SARS Virus
accgaatattaccacaattatttcc

SEQ ID NO: 77987 - DNA, 25 bp, SARS Virus
ccgaatattacaccaattatttcct

SEQ ID NO: 77988 - DNA, 25 bp, SARS Virus
cgaatattacaacaattatttcctg

SEQ ID NO: 77989 - DNA, 25 bp, SARS Virus
gaatattacaaccattatttcctgt

SEQ ID NO: 77990 - DNA, 25 bp, SARS Virus
aatattacaacacttatttcctgtg

SEQ ID NO: 77991 - DNA, 25 bp, SARS Virus
atattacaacaactatttcctgtga

SEQ ID NO: 77992 - DNA, 25 bp, SARS Virus
tattacaacaatcatttcctgtgaa

SEQ ID NO: 77993 - DNA, 25 bp, SARS Virus
attacaacaattctttcctgtgaaa

SEQ ID NO: 77994 - DNA, 25 bp, SARS Virus
ttacaacaattacttcctgtgaaac

SEQ ID NO: 77995 - DNA, 25 bp, SARS Virus
tacaacaattatctcctgtgaaact

SEQ ID NO: 77996 - DNA, 25 bp, SARS Virus
acaacaattattccctgtgaaacta

SEQ ID NO: 77997 - DNA, 25 bp, SARS Virus
caacaattatttcctgtgaaactac

SEQ ID NO: 77998 - DNA, 25 bp, SARS Virus
aacaattatttcctgtgaaactacc

SEQ ID NO: 77999 - DNA, 25 bp, SARS Virus
acaattatttcccgtgaaactacct

SEQ ID NO: 78000 - DNA, 25 bp, SARS Virus
caattatttcctctgaaactacctg

SEQ ID NO: 78001 - DNA, 25 bp, SARS Virus
aattatttcctgcgaaactacctgt

SEQ ID NO: 78002 - DNA, 25 bp, SARS Virus
attatttcctgtcaaactacctgtg

SEQ ID NO: 78003 - DNA, 25 bp, SARS Virus
ttatttcctgtgcaactacctgtgc

SEQ ID NO: 78004 - DNA, 25 bp, SARS Virus
tatttcctgtgacactacctgtgcg

SEQ ID NO: 78005 - DNA, 25 bp, SARS Virus
atttcctgtgaacctacctgtgcgg

SEQ ID NO: 78006 - DNA, 25 bp, SARS Virus
tttcctgtgaaactacctgtgcggc

SEQ ID NO: 78007 - DNA, 25 bp, SARS Virus
ttcctgtgaaaccacctgtgcggcc

SEQ ID NO: 78008 - DNA, 25 bp, SARS Virus
tcctgtgaaactccctgtgcggccg

SEQ ID NO: 78009 - DNA, 25 bp, SARS Virus
cctgtgaaactacctgtgcggccgc

SEQ ID NO: 78010 - DNA, 25 bp, SARS Virus
ctgtgaaactacctgtgcggccgct

SEQ ID NO: 78011 - DNA, 25 bp, SARS Virus
tgtgaaactacccgtgcggccgctt

SEQ ID NO: 78012 - DNA, 25 bp, SARS Virus
gtgaaactacctctgcggccgcttc

SEQ ID NO: 78013 - DNA, 25 bp, SARS Virus
tgaaactacctgcgcggccgcttcg

SEQ ID NO: 78014 - DNA, 25 bp, SARS Virus
gaaactacctgtccggccgcttcgt

SEQ ID NO: 78015 - DNA, 25 bp, SARS Virus
aaactacctgtgcggccgcttcgtg

SEQ ID NO: 78016 - DNA, 25 bp, SARS Virus
aactacctgtgccgccgcttcgtgg

SEQ ID NO: 78017 - DNA, 25 bp, SARS Virus
actacctgtgcgcccgcttcgtgga

SEQ ID NO: 78018 - DNA, 25 bp, SARS Virus
ctacctgtgcggccgcttcgtggac

SEQ ID NO: 78019 - DNA, 25 bp, SARS Virus
tacctgtgcggccgcttcgtggaca

SEQ ID NO: 78020 - DNA, 25 bp, SARS Virus
acctgtgcggccccttcgtggacaa

SEQ ID NO: 78021 - DNA, 25 bp, SARS Virus
cctgtgcggccgcttcgtggacaaa

SEQ ID NO: 78022 - DNA, 25 bp, SARS Virus
ctgtgcggccgcctcgtggacaaag

SEQ ID NO: 78023 - DNA, 25 bp, SARS Virus
tgtgcggccgctccgtggacaaagg

SEQ ID NO: 78024 - DNA, 25 bp, SARS Virus
gtgcggccgcttcgtggacaaaggt

SEQ ID NO: 78025 - DNA, 25 bp, SARS Virus
tgcggccgcttcctggacaaaggta

SEQ ID NO: 78026 - DNA, 25 bp, SARS Virus
gcggccgcttcgcggacaaaggtag

SEQ ID NO: 78027 - DNA, 25 bp, SARS Virus
cggccgcttcgtcgacaaaggtagt

SEQ ID NO: 78028 - DNA, 25 bp, SARS Virus
ggccgcttcgtgcacaaaggtagta

SEQ ID NO: 78029 - DNA, 25 bp, SARS Virus
gccgcttcgtggccaaaggtagtaa

SEQ ID NO: 78030 - DNA, 25 bp, SARS Virus
ccgcttcgtggacaaaggtagtaat

SEQ ID NO: 78031 - DNA, 25 bp, SARS Virus
cgcttcgtggaccaaggtagtaatt

SEQ ID NO: 78032 - DNA, 25 bp, SARS Virus
gcttcgtggacacaggtagtaatta

SEQ ID NO: 78033 - DNA, 25 bp, SARS Virus
cttcgtggacaacggtagtaattat

SEQ ID NO: 78034 - DNA, 25 bp, SARS Virus
ttcgtggacaaacgtagtaattatt

SEQ ID NO: 78035 - DNA, 25 bp, SARS Virus
tcgtggacaaagctagtaattatta

SEQ ID NO: 78036 - DNA, 25 bp, SARS Virus
cgtggacaaaggcagtaattattac

SEQ ID NO: 78037 - DNA, 25 bp, SARS Virus
gtggacaaaggtcgtaattattacg

SEQ ID NO: 78038 - DNA, 25 bp, SARS Virus
tggacaaaggtactaattattacga

SEQ ID NO: 78039 - DNA, 25 bp, SARS Virus
ggacaaaggtagcaattattacgac

SEQ ID NO: 78040 - DNA, 25 bp, SARS Virus
gacaaaggtagtcattattacgaca

SEQ ID NO: 78041 - DNA, 25 bp, SARS Virus
acaaaggtagtacttattacgacaa

SEQ ID NO: 78042 - DNA, 25 bp, SARS Virus
caaaggtagtaactattacgacaaa

SEQ ID NO: 78043 - DNA, 25 bp, SARS Virus
aaaggtagtaatcattacgacaaat

SEQ ID NO: 78044 - DNA, 25 bp, SARS Virus
aaggtagtaattcttacgacaaatg

SEQ ID NO: 78045 - DNA, 25 bp, SARS Virus
aggtagtaattactacgacaaatgt

SEQ ID NO: 78046 - DNA, 25 bp, SARS Virus
ggtagtaattatcacgacaaatgtg

SEQ ID NO: 78047 - DNA, 25 bp, SARS Virus
gtagtaattattccgacaaatgtgt

SEQ ID NO: 78048 - DNA, 25 bp, SARS Virus
tagtaattattacgacaaatgtgtt

SEQ ID NO: 78049 - DNA, 25 bp, SARS Virus
agtaattattaccacaaatgtgttt

SEQ ID NO: 78050 - DNA, 25 bp, SARS Virus
gtaattattacgccaaatgtgtttc

SEQ ID NO: 78051 - DNA, 25 bp, SARS Virus
taattattacgacaaatgtgtttcc

SEQ ID NO: 78052 - DNA, 25 bp, SARS Virus
aattattacgaccaatgtgtttcca

SEQ ID NO: 78053 - DNA, 25 bp, SARS Virus
attattacgacacatgtgtttccat

SEQ ID NO: 78054 - DNA, 25 bp, SARS Virus
ttattacgacaactgtgtttccatc

SEQ ID NO: 78055 - DNA, 25 bp, SARS Virus
tattacgacaaacgtgtttccatct

SEQ ID NO: 78056 - DNA, 25 bp, SARS Virus
attacgacaaatctgtttccatcta

SEQ ID NO: 78057 - DNA, 25 bp, SARS Virus
ttacgacaaatgcgtttccatctac

SEQ ID NO: 78058 - DNA, 25 bp, SARS Virus
tacgacaaatgtctttccatctacc

SEQ ID NO: 78059 - DNA, 25 bp, SARS Virus
acgacaaatgtgcttccatctacca

SEQ ID NO: 78060 - DNA, 25 bp, SARS Virus
cgacaaatgtgtctccatctaccat

SEQ ID NO: 78061 - DNA, 25 bp, SARS Virus
gacaaatgtgttcccatctaccata

SEQ ID NO: 78062 - DNA, 25 bp, SARS Virus
acaaatgtgtttccatctaccataa

SEQ ID NO: 78063 - DNA, 25 bp, SARS Virus
caaatgtgtttccatctaccataac

SEQ ID NO: 78064 - DNA, 25 bp, SARS Virus
aaatgtgtttccctctaccataact

SEQ ID NO: 78065 - DNA, 25 bp, SARS Virus
aatgtgtttccacctaccataacta

SEQ ID NO: 78066 - DNA, 25 bp, SARS Virus
atgtgtttccatctaccataactac

SEQ ID NO: 78067 - DNA, 25 bp, SARS Virus
tgtgtttccatccaccataactaca

SEQ ID NO: 78068 - DNA, 25 bp, SARS Virus
gtgtttccatctcccataactacac

SEQ ID NO: 78069 - DNA, 25 bp, SARS Virus
tgtttccatctaccataactacacc

SEQ ID NO: 78070 - DNA, 25 bp, SARS Virus
gtttccatctaccataactacacct

SEQ ID NO: 78071 - DNA, 25 bp, SARS Virus
tttccatctaccctaactacacctc

SEQ ID NO: 78072 - DNA, 25 bp, SARS Virus
ttccatctaccacaactacacctct

SEQ ID NO: 78073 - DNA, 25 bp, SARS Virus
tccatctaccatcactacacctcta

SEQ ID NO: 78074 - DNA, 25 bp, SARS Virus
ccatctaccatacctacacctctag

SEQ ID NO: 78075 - DNA, 25 bp, SARS Virus
catctaccataactacacctctaga

SEQ ID NO: 78076 - DNA, 25 bp, SARS Virus
atctaccataaccacacctctagaa

SEQ ID NO: 78077 - DNA, 25 bp, SARS Virus
tctaccataactccacctctagaaa

SEQ ID NO: 78078 - DNA, 25 bp, SARS Virus
ctaccataactacacctctagaaac

SEQ ID NO: 78079 - DNA, 25 bp, SARS Virus
taccataactacccctctagaaact

SEQ ID NO: 78080 - DNA, 25 bp, SARS Virus
accataactacacctctagaaactt

SEQ ID NO: 78081 - DNA, 25 bp, SARS Virus
ccataactacacctctagaaacttt

SEQ ID NO: 78082 - DNA, 25 bp, SARS Virus
cataactacacccctagaaactttt

SEQ ID NO: 78083 - DNA, 25 bp, SARS Virus
ataactacacctctagaaactttta

SEQ ID NO: 78084 - DNA, 25 bp, SARS Virus
taactacacctccagaaacttttat

SEQ ID NO: 78085 - DNA, 25 bp, SARS Virus
aactacacctctcgaaacttttatt

SEQ ID NO: 78086 - DNA, 25 bp, SARS Virus
actacacctctacaaacttttattc

SEQ ID NO: 78087 - DNA, 25 bp, SARS Virus
ctacacctctagcaacttttattct

SEQ ID NO: 78088 - DNA, 25 bp, SARS Virus
tacacctctagacacttttattctg

SEQ ID NO: 78089 - DNA, 25 bp, SARS Virus
acacctctagaaccttttattctgt

SEQ ID NO: 78090 - DNA, 25 bp, SARS Virus
cacctctagaaacttttattctgtt

SEQ ID NO: 78091 - DNA, 25 bp, SARS Virus
acctctagaaacctttattctgttg

SEQ ID NO: 78092 - DNA, 25 bp, SARS Virus
cctctagaaactcttattctgttgt

SEQ ID NO: 78093 - DNA, 25 bp, SARS Virus
ctctagaaacttctattctgttgtg

SEQ ID NO: 78094 - DNA, 25 bp, SARS Virus
tctagaaactttcattctgttgtga

SEQ ID NO: 78095 - DNA, 25 bp, SARS Virus
ctagaaacttttcttctgttgtgaa

SEQ ID NO: 78096 - DNA, 25 bp, SARS Virus
tagaaacttttactctgttgtgaag

SEQ ID NO: 78097 - DNA, 25 bp, SARS Virus
agaaacttttatcctgttgtgaagg

SEQ ID NO: 78098 - DNA, 25 bp, SARS Virus
gaaacttttattctgttgtgaagga

SEQ ID NO: 78099 - DNA, 25 bp, SARS Virus
aaacttttattccgttgtgaaggac

SEQ ID NO: 78100 - DNA, 25 bp, SARS Virus
aacttttattctcttgtgaaggaca

SEQ ID NO: 78101 - DNA, 25 bp, SARS Virus
acttttattctgctgtgaaggacaa

SEQ ID NO: 78102 - DNA, 25 bp, SARS Virus
cttttattctgtcgtgaaggacaat

SEQ ID NO: 78103 - DNA, 25 bp, SARS Virus
ttttattctgttctgaaggacaatt

SEQ ID NO: 78104 - DNA, 25 bp, SARS Virus
tttattctgttgcgaaggacaatta

SEQ ID NO: 78105 - DNA, 25 bp, SARS Virus
ttattctgttgtcaaggacaattac

SEQ ID NO: 78106 - DNA, 25 bp, SARS Virus
tattctgttgtgcaggacaattaca

SEQ ID NO: 78107 - DNA, 25 bp, SARS Virus
attctgttgtgacggacaattacaa

SEQ ID NO: 78108 - DNA, 25 bp, SARS Virus
ttctgttgtgaacgacaattacaac

SEQ ID NO: 78109 - DNA, 25 bp, SARS Virus
tctgttgtgaagcacaattacaacg

SEQ ID NO: 78110 - DNA, 25 bp, SARS Virus
ctgttgtgaaggccaattacaacgt

SEQ ID NO: 78111 - DNA, 25 bp, SARS Virus
tgttgtgaaggacaattacaacgta

SEQ ID NO: 78112 - DNA, 25 bp, SARS Virus
gttgtgaaggaccattacaacgtaa

SEQ ID NO: 78113 - DNA, 25 bp, SARS Virus
ttgtgaaggacacttacaacgtaaa

SEQ ID NO: 78114 - DNA, 25 bp, SARS Virus
tgtgaaggacaactacaacgtaaac

SEQ ID NO: 78115 - DNA, 25 bp, SARS Virus
gtgaaggacaatcacaacgtaaact

SEQ ID NO: 78116 - DNA, 25 bp, SARS Virus
tgaaggacaattccaacgtaaactc

SEQ ID NO: 78117 - DNA, 25 bp, SARS Virus
gaaggacaattacaacgtaaactcg

SEQ ID NO: 78118 - DNA, 25 bp, SARS Virus
aaggacaattaccacgtaaactcga

SEQ ID NO: 78119 - DNA, 25 bp, SARS Virus
aggacaattacaccgtaaactcgaa

SEQ ID NO: 78120 - DNA, 25 bp, SARS Virus
ggacaattacaacgtaaactcgaaa

SEQ ID NO: 78121 - DNA, 25 bp, SARS Virus
gacaattacaacctaaactcgaaac

SEQ ID NO: 78122 - DNA, 25 bp, SARS Virus
acaattacaacgcaaactcgaaacc

SEQ ID NO: 78123 - DNA, 25 bp, SARS Virus
caattacaacgtcaactcgaaaccc

SEQ ID NO: 78124 - DNA, 25 bp, SARS Virus
aattacaacgtacactcgaaacccg

SEQ ID NO: 78125 - DNA, 25 bp, SARS Virus
attacaacgtaacctcgaaacccga

SEQ ID NO: 78126 - DNA, 25 bp, SARS Virus
ttacaacgtaaactcgaaacccgat

SEQ ID NO: 78127 - DNA, 25 bp, SARS Virus
tacaacgtaaacccgaaacccgatt

SEQ ID NO: 78128 - DNA, 25 bp, SARS Virus
acaacgtaaactcgaaacccgattc

SEQ ID NO: 78129 - DNA, 25 bp, SARS Virus
caacgtaaactccaaacccgattcg

SEQ ID NO: 78130 - DNA, 25 bp, SARS Virus
aacgtaaactcgcaacccgattcgc

SEQ ID NO: 78131 - DNA, 25 bp, SARS Virus
acgtaaactcgacacccgattcgca

SEQ ID NO: 78132 - DNA, 25 bp, SARS Virus
cgtaaactcgaaccccgattcgcat

SEQ ID NO: 78133 - DNA, 25 bp, SARS Virus
gtaaactcgaaacccgattcgcatt

SEQ ID NO: 78134 - DNA, 25 bp, SARS Virus
taaactcgaaacccgattcgcattg

SEQ ID NO: 78135 - DNA, 25 bp, SARS Virus
aaactcgaaacccgattcgcattgt

SEQ ID NO: 78136 - DNA, 25 bp, SARS Virus
aactcgaaaccccattcgcattgta

SEQ ID NO: 78137 - DNA, 25 bp, SARS Virus
actcgaaacccgcttcgcattgtaa

SEQ ID NO: 78138 - DNA, 25 bp, SARS Virus
ctcgaaacccgactcgcattgtaat

SEQ ID NO: 78139 - DNA, 25 bp, SARS Virus
tcgaaacccgatccgcattgtaatt

SEQ ID NO: 78140 - DNA, 25 bp, SARS Virus
cgaaacccgattcgcattgtaattt

SEQ ID NO: 78141 - DNA, 25 bp, SARS Virus
gaaacccgattcccattgtaatttg

SEQ ID NO: 78142 - DNA, 25 bp, SARS Virus
aaacccgattcgcattgtaatttgg

SEQ ID NO: 78143 - DNA, 25 bp, SARS Virus
aacccgattcgccttgtaatttggt

SEQ ID NO: 78144 - DNA, 25 bp, SARS Virus
acccgattcgcactgtaatttggtc

SEQ ID NO: 78145 - DNA, 25 bp, SARS Virus
cccgattcgcatcgtaatttggtca

SEQ ID NO: 78146 - DNA, 25 bp, SARS Virus
ccgattcgcattctaatttggtcac

SEQ ID NO: 78147 - DNA, 25 bp, SARS Virus
cgattcgcattgcaatttggtcacg

SEQ ID NO: 78148 - DNA, 25 bp, SARS Virus
gattcgcattgtcatttggtcacgg

SEQ ID NO: 78149 - DNA, 25 bp, SARS Virus
attcgcattgtactttggtcacggt

SEQ ID NO: 78150 - DNA, 25 bp, SARS Virus
ttcgcattgtaacttggtcacggtc

SEQ ID NO: 78151 - DNA, 25 bp, SARS Virus
tcgcattgtaatctggtcacggtct

SEQ ID NO: 78152 - DNA, 25 bp, SARS Virus
cgcattgtaattcggtcacggtctc

SEQ ID NO: 78153 - DNA, 25 bp, SARS Virus
gcattgtaatttcgtcacggtctct

SEQ ID NO: 78154 - DNA, 25 bp, SARS Virus
cattgtaatttgctcacggtctcta

SEQ ID NO: 78155 - DNA, 25 bp, SARS Virus
attgtaatttggccacggtctctaa

SEQ ID NO: 78156 - DNA, 25 bp, SARS Virus
ttgtaatttggtcacggtctctaat

SEQ ID NO: 78157 - DNA, 25 bp, SARS Virus
tgtaatttggtcccggtctctaatt

SEQ ID NO: 78158 - DNA, 25 bp, SARS Virus
gtaatttggtcacggtctctaattc

SEQ ID NO: 78159 - DNA, 25 bp, SARS Virus
taatttggtcaccgtctctaattct

SEQ ID NO: 78160 - DNA, 25 bp, SARS Virus
aatttggtcacgctctctaattcta

SEQ ID NO: 78161 - DNA, 25 bp, SARS Virus
atttggtcacggcctctaattctat

SEQ ID NO: 78162 - DNA, 25 bp, SARS Virus
tttggtcacggtctctaattctatg

SEQ ID NO: 78163 - DNA, 25 bp, SARS Virus
ttggtcacggtccctaattctatga

SEQ ID NO: 78164 - DNA, 25 bp, SARS Virus
tggtcacggtctctaattctatgag

SEQ ID NO: 78165 - DNA, 25 bp, SARS Virus
ggtcacggtctccaattctatgagt

SEQ ID NO: 78166 - DNA, 25 bp, SARS Virus
gtcacggtctctcattctatgagtt

SEQ ID NO: 78167 - DNA, 25 bp, SARS Virus
tcacggtctctacttctatgagtta

SEQ ID NO: 78168 - DNA, 25 bp, SARS Virus
cacggtctctaactctatgagttat

SEQ ID NO: 78169 - DNA, 25 bp, SARS Virus
acggtctctaatcctatgagttatt

SEQ ID NO: 78170 - DNA, 25 bp, SARS Virus
cggtctctaattctatgagttatta

SEQ ID NO: 78171 - DNA, 25 bp, SARS Virus
ggtctctaattccatgagttattaa

SEQ ID NO: 78172 - DNA, 25 bp, SARS Virus
gtctctaattctctgagttattaaa

SEQ ID NO: 78173 - DNA, 25 bp, SARS Virus
tctctaattctacgagttattaaac

SEQ ID NO: 78174 - DNA, 25 bp, SARS Virus
ctctaattctatcagttattaaacc

SEQ ID NO: 78175 - DNA, 25 bp, SARS Virus
tctaattctatgcgttattaaaccc

SEQ ID NO: 78176 - DNA, 25 bp, SARS Virus
ctaattctatgacttattaaaccca

SEQ ID NO: 78177 - DNA, 25 bp, SARS Virus
taattctatgagctattaaacccac

SEQ ID NO: 78178 - DNA, 25 bp, SARS Virus
aattctatgagtcattaaacccaca

SEQ ID NO: 78179 - DNA, 25 bp, SARS Virus
attctatgagttcttaaacccacaa

SEQ ID NO: 78180 - DNA, 25 bp, SARS Virus
ttctatgagttactaaacccacaac

SEQ ID NO: 78181 - DNA, 25 bp, SARS Virus
tctatgagttatcaaacccacaact

SEQ ID NO: 78182 - DNA, 25 bp, SARS Virus
ctatgagttattcaacccacaacta

SEQ ID NO: 78183 - DNA, 25 bp, SARS Virus
tatgagttattacacccacaactat

SEQ ID NO: 78184 - DNA, 25 bp, SARS Virus
atgagttattaaccccacaactata

SEQ ID NO: 78185 - DNA, 25 bp, SARS Virus
tgagttattaaacccacaactatag

SEQ ID NO: 78186 - DNA, 25 bp, SARS Virus
gagttattaaacccacaactatagc

SEQ ID NO: 78187 - DNA, 25 bp, SARS Virus
agttattaaacccacaactatagcg

SEQ ID NO: 78188 - DNA, 25 bp, SARS Virus
gttattaaacccccaactatagcga

SEQ ID NO: 78189 - DNA, 25 bp, SARS Virus
ttattaaacccacaactatagcgac

SEQ ID NO: 78190 - DNA, 25 bp, SARS Virus
tattaaacccaccactatagcgacg

SEQ ID NO: 78191 - DNA, 25 bp, SARS Virus
attaaacccacacctatagcgacga

SEQ ID NO: 78192 - DNA, 25 bp, SARS Virus
ttaaacccacaactatagcgacgat

SEQ ID NO: 78193 - DNA, 25 bp, SARS Virus
taaacccacaaccatagcgacgatt

SEQ ID NO: 78194 - DNA, 25 bp, SARS Virus
aaacccacaactctagcgacgatta

SEQ ID NO: 78195 - DNA, 25 bp, SARS Virus
aacccacaactacagcgacgattat

SEQ ID NO: 78196 - DNA, 25 bp, SARS Virus
acccacaactatcgcgacgattatg

SEQ ID NO: 78197 - DNA, 25 bp, SARS Virus
cccacaactataccgacgattatga

SEQ ID NO: 78198 - DNA, 25 bp, SARS Virus
ccacaactatagcgacgattatgac

SEQ ID NO: 78199 - DNA, 25 bp, SARS Virus
cacaactatagccacgattatgaca

SEQ ID NO: 78200 - DNA, 25 bp, SARS Virus
acaactatagcgccgattatgacat

SEQ ID NO: 78201 - DNA, 25 bp, SARS Virus
caactatagcgacgattatgacatt

SEQ ID NO: 78202 - DNA, 25 bp, SARS Virus
aactatagcgaccattatgacatta

SEQ ID NO: 78203 - DNA, 25 bp, SARS Virus
actatagcgacgcttatgacattag

SEQ ID NO: 78204 - DNA, 25 bp, SARS Virus
ctatagcgacgactatgacattaga

SEQ ID NO: 78205 - DNA, 25 bp, SARS Virus
tatagcgacgatcatgacattagac

SEQ ID NO: 78206 - DNA, 25 bp, SARS Virus
atagcgacgattctgacattagacc

SEQ ID NO: 78207 - DNA, 25 bp, SARS Virus
tagcgacgattacgacattagaccc

SEQ ID NO: 78208 - DNA, 25 bp, SARS Virus
agcgacgattatcacattagaccct

SEQ ID NO: 78209 - DNA, 25 bp, SARS Virus
aagaaaatgataggactatcaggaa

SEQ ID NO: 78210 - DNA, 25 bp, SARS Virus
agaaaatgataagactatcaggaac

SEQ ID NO: 78211 - DNA, 25 bp, SARS Virus
gaaaatgataaggctatcaggaaca

SEQ ID NO: 78212 - DNA, 25 bp, SARS Virus
aaaatgataagagtatcaggaacac

SEQ ID NO: 78213 - DNA, 25 bp, SARS Virus
aaatgataagacgatcaggaacact

SEQ ID NO: 78214 - DNA, 25 bp, SARS Virus
aatgataagactgtcaggaacactc

SEQ ID NO: 78215 - DNA, 25 bp, SARS Virus
atgataagactagcaggaacactca

SEQ ID NO: 78216 - DNA, 25 bp, SARS Virus
tgataagactatgaggaacactcag

SEQ ID NO: 78217 - DNA, 25 bp, SARS Virus
gataagactatcgggaacactcaga

SEQ ID NO: 78218 - DNA, 25 bp, SARS Virus
ataagactatcaggaacactcagag

SEQ ID NO: 78219 - DNA, 25 bp, SARS Virus
taagactatcaggaacactcagagt

SEQ ID NO: 78220 - DNA, 25 bp, SARS Virus
aagactatcagggacactcagagta

SEQ ID NO: 78221 - DNA, 25 bp, SARS Virus
agactatcaggagcactcagagtac

SEQ ID NO: 78222 - DNA, 25 bp, SARS Virus
gactatcaggaagactcagagtacc

SEQ ID NO: 78223 - DNA, 25 bp, SARS Virus
actatcaggaacgctcagagtaccg

SEQ ID NO: 78224 - DNA, 25 bp, SARS Virus
ctatcaggaacagtcagagtaccgt

SEQ ID NO: 78225 - DNA, 25 bp, SARS Virus
tatcaggaacacgcagagtaccgtt

SEQ ID NO: 78226 - DNA, 25 bp, SARS Virus
atcaggaacactgagagtaccgttt

SEQ ID NO: 78227 - DNA, 25 bp, SARS Virus
tcaggaacactcggagtaccgtttg

SEQ ID NO: 78228 - DNA, 25 bp, SARS Virus
caggaacactcagagtaccgtttgt

SEQ ID NO: 78229 - DNA, 25 bp, SARS Virus
aggaacactcagggtaccgtttgtt

SEQ ID NO: 78230 - DNA, 25 bp, SARS Virus
ggaacactcagagtaccgtttgttc

SEQ ID NO: 78231 - DNA, 25 bp, SARS Virus
gaacactcagaggaccgtttgttca

SEQ ID NO: 78232 - DNA, 25 bp, SARS Virus
aacactcagagtgccgtttgttcat

SEQ ID NO: 78233 - DNA, 25 bp, SARS Virus
acactcagagtagcgtttgttcatc

SEQ ID NO: 78234 - DNA, 25 bp, SARS Virus
cactcagagtacggtttgttcatca

SEQ ID NO: 78235 - DNA, 25 bp, SARS Virus
actcagagtaccgtttgttcatcac

SEQ ID NO: 78236 - DNA, 25 bp, SARS Virus
ctcagagtaccggttgttcatcaca

SEQ ID NO: 78237 - DNA, 25 bp, SARS Virus
tcagagtaccgtgtgttcatcacag

SEQ ID NO: 78238 - DNA, 25 bp, SARS Virus
cagagtaccgttggttcatcacagc

SEQ ID NO: 78239 - DNA, 25 bp, SARS Virus
agagtaccgtttgttcatcacagcc

SEQ ID NO: 78240 - DNA, 25 bp, SARS Virus
gagtaccgtttggtcatcacagcct

SEQ ID NO: 78241 - DNA, 25 bp, SARS Virus
agtaccgtttgtgcatcacagccta

SEQ ID NO: 78242 - DNA, 25 bp, SARS Virus
gtaccgtttgttgatcacagcctat

SEQ ID NO: 78243 - DNA, 25 bp, SARS Virus
taccgtttgttcgtcacagcctata

SEQ ID NO: 78244 - DNA, 25 bp, SARS Virus
accgtttgttcagcacagcctataa

SEQ ID NO: 78245 - DNA, 25 bp, SARS Virus
ccgtttgttcatgacagcctataac

SEQ ID NO: 78246 - DNA, 25 bp, SARS Virus
cgtttgttcatcgcagcctataact

SEQ ID NO: 78247 - DNA, 25 bp, SARS Virus
gtttgttcatcagagcctataacta

SEQ ID NO: 78248 - DNA, 25 bp, SARS Virus
tttgttcatcacggcctataactaa

SEQ ID NO: 78249 - DNA, 25 bp, SARS Virus
ttgttcatcacagcctataactaat

SEQ ID NO: 78250 - DNA, 25 bp, SARS Virus
tgttcatcacaggctataactaata

SEQ ID NO: 78251 - DNA, 25 bp, SARS Virus
gttcatcacagcgtataactaatac

SEQ ID NO: 78252 - DNA, 25 bp, SARS Virus
ttcatcacagccgataactaataca

SEQ ID NO: 78253 - DNA, 25 bp, SARS Virus
tcatcacagcctgtaactaatacaa

SEQ ID NO: 78254 - DNA, 25 bp, SARS Virus
catcacagcctagaactaatacaag

SEQ ID NO: 78255 - DNA, 25 bp, SARS Virus
atcacagcctatgactaatacaagg

SEQ ID NO: 78256 - DNA, 25 bp, SARS Virus
tcacagcctatagctaatacaaggt

SEQ ID NO: 78257 - DNA, 25 bp, SARS Virus
cacagcctataagtaatacaaggtg

SEQ ID NO: 78258 - DNA, 25 bp, SARS Virus
acagcctataacgaatacaaggtga

SEQ ID NO: 78259 - DNA, 25 bp, SARS Virus
cagcctataactgatacaaggtgag

SEQ ID NO: 78260 - DNA, 25 bp, SARS Virus
agcctataactagtacaaggtgagt

SEQ ID NO: 78261 - DNA, 25 bp, SARS Virus
gcctataactaagacaaggtgagtt

SEQ ID NO: 78262 - DNA, 25 bp, SARS Virus
cctataactaatgcaaggtgagttt

SEQ ID NO: 78263 - DNA, 25 bp, SARS Virus
ctataactaatagaaggtgagttta

SEQ ID NO: 78264 - DNA, 25 bp, SARS Virus
tataactaatacgaggtgagtttag

SEQ ID NO: 78265 - DNA, 25 bp, SARS Virus
ataactaatacagggtgagtttaga

SEQ ID NO: 78266 - DNA, 25 bp, SARS Virus
taactaatacaaggtgagtttagac

SEQ ID NO: 78267 - DNA, 25 bp, SARS Virus
aactaatacaaggtgagtttagacg

SEQ ID NO: 78268 - DNA, 25 bp, SARS Virus
actaatacaaggggagtttagacga

SEQ ID NO: 78269 - DNA, 25 bp, SARS Virus
ctaatacaaggtgagtttagacgat

SEQ ID NO: 78270 - DNA, 25 bp, SARS Virus
taatacaaggtgggtttagacgatg

SEQ ID NO: 78271 - DNA, 25 bp, SARS Virus
aatacaaggtgagtttagacgatgc

SEQ ID NO: 78272 - DNA, 25 bp, SARS Virus
atacaaggtgaggttagacgatgca

SEQ ID NO: 78273 - DNA, 25 bp, SARS Virus
tacaaggtgagtgtagacgatgcac

SEQ ID NO: 78274 - DNA, 25 bp, SARS Virus
acaaggtgagttgagacgatgcaca

SEQ ID NO: 78275 - DNA, 25 bp, SARS Virus
caaggtgagtttggacgatgcacat

SEQ ID NO: 78276 - DNA, 25 bp, SARS Virus
aaggtgagtttagacgatgcacata

SEQ ID NO: 78277 - DNA, 25 bp, SARS Virus
aggtgagtttaggcgatgcacataa

SEQ ID NO: 78278 - DNA, 25 bp, SARS Virus
ggtgagtttagaggatgcacataat

SEQ ID NO: 78279 - DNA, 25 bp, SARS Virus
gtgagtttagacgatgcacataatg

SEQ ID NO: 78280 - DNA, 25 bp, SARS Virus
tgagtttagacggtgcacataatgt

SEQ ID NO: 78281 - DNA, 25 bp, SARS Virus
gagtttagacgaggcacataatgtg

SEQ ID NO: 78282 - DNA, 25 bp, SARS Virus
agtttagacgatgcacataatgtgc

SEQ ID NO: 78283 - DNA, 25 bp, SARS Virus
gtttagacgatggacataatgtgct

SEQ ID NO: 78284 - DNA, 25 bp, SARS Virus
tttagacgatgcgcataatgtgcta

SEQ ID NO: 78285 - DNA, 25 bp, SARS Virus
ttagacgatgcagataatgtgctac

SEQ ID NO: 78286 - DNA, 25 bp, SARS Virus
tagacgatgcacgtaatgtgctacg

SEQ ID NO: 78287 - DNA, 25 bp, SARS Virus
agacgatgcacagaatgtgctacgt

SEQ ID NO: 78288 - DNA, 25 bp, SARS Virus
gacgatgcacatgatgtgctacgtt

SEQ ID NO: 78289 - DNA, 25 bp, SARS Virus
acgatgcacatagtgtgctacgtta

SEQ ID NO: 78290 - DNA, 25 bp, SARS Virus
cgatgcacataaggtgctacgttaa

SEQ ID NO: 78291 - DNA, 25 bp, SARS Virus
gatgcacataatgtgctacgttaaa

SEQ ID NO: 78292 - DNA, 25 bp, SARS Virus
atgcacataatgggctacgttaaat

SEQ ID NO: 78293 - DNA, 25 bp, SARS Virus
tgcacataatgtgctacgttaaatc

SEQ ID NO: 78294 - DNA, 25 bp, SARS Virus
gcacataatgtggtacgttaaatcc

SEQ ID NO: 78295 - DNA, 25 bp, SARS Virus
cacataatgtgcgacgttaaatcca

SEQ ID NO: 78296 - DNA, 25 bp, SARS Virus
acataatgtgctgcgttaaatccac

SEQ ID NO: 78297 - DNA, 25 bp, SARS Virus
cataatgtgctaggttaaatccacc

SEQ ID NO: 78298 - DNA, 25 bp, SARS Virus
ataatgtgctacgttaaatccacca

SEQ ID NO: 78299 - DNA, 25 bp, SARS Virus
taatgtgctacggtaaatccaccac

SEQ ID NO: 78300 - DNA, 25 bp, SARS Virus
aatgtgctacgtgaaatccaccacg

SEQ ID NO: 78301 - DNA, 25 bp, SARS Virus
atgtgctacgttgaatccaccacga

SEQ ID NO: 78302 - DNA, 25 bp, SARS Virus
tgtgctacgttagatccaccacgac

SEQ ID NO: 78303 - DNA, 25 bp, SARS Virus
gtgctacgttaagtccaccacgaca

SEQ ID NO: 78304 - DNA, 25 bp, SARS Virus
tgctacgttaaagccaccacgacaa

SEQ ID NO: 78305 - DNA, 25 bp, SARS Virus
gctacgttaaatgcaccacgacaaa

SEQ ID NO: 78306 - DNA, 25 bp, SARS Virus
ctacgttaaatcgaccacgacaaac

SEQ ID NO: 78307 - DNA, 25 bp, SARS Virus
tacgttaaatccgccacgacaaacg

SEQ ID NO: 78308 - DNA, 25 bp, SARS Virus
acgttaaatccagcacgacaaacgt

SEQ ID NO: 78309 - DNA, 25 bp, SARS Virus
cgttaaatccacgacgacaaacgtc

SEQ ID NO: 78310 - DNA, 25 bp, SARS Virus
gttaaatccaccgcgacaaacgtct

SEQ ID NO: 78311 - DNA, 25 bp, SARS Virus
ttaaatccaccaggacaaacgtctg

SEQ ID NO: 78312 - DNA, 25 bp, SARS Virus
taaatccaccacgacaaacgtctgt

SEQ ID NO: 78313 - DNA, 25 bp, SARS Virus
aaatccaccacggcaaacgtctgtg

SEQ ID NO: 78314 - DNA, 25 bp, SARS Virus
aatccaccacgagaaacgtctgtgg

SEQ ID NO: 78315 - DNA, 25 bp, SARS Virus
atccaccacgacgaacgtctgtggt

SEQ ID NO: 78316 - DNA, 25 bp, SARS Virus
tccaccacgacagacgtctgtggta

SEQ ID NO: 78317 - DNA, 25 bp, SARS Virus
ccaccacgacaagcgtctgtggtac

SEQ ID NO: 78318 - DNA, 25 bp, SARS Virus
caccacgacaaaggtctgtggtacg

SEQ ID NO: 78319 - DNA, 25 bp, SARS Virus
accacgacaaacgtctgtggtacgt

SEQ ID NO: 78320 - DNA, 25 bp, SARS Virus
ccacgacaaacggctgtggtacgtt

SEQ ID NO: 78321 - DNA, 25 bp, SARS Virus
cacgacaaacgtgtgtggtacgttt

SEQ ID NO: 78322 - DNA, 25 bp, SARS Virus
acgacaaacgtcggtggtacgttta

SEQ ID NO: 78323 - DNA, 25 bp, SARS Virus
cgacaaacgtctgtggtacgtttac

SEQ ID NO: 78324 - DNA, 25 bp, SARS Virus
gacaaacgtctggggtacgtttact

SEQ ID NO: 78325 - DNA, 25 bp, SARS Virus
acaaacgtctgtggtacgtttactc

SEQ ID NO: 78326 - DNA, 25 bp, SARS Virus
caaacgtctgtggtacgtttactca

SEQ ID NO: 78327 - DNA, 25 bp, SARS Virus
aaacgtctgtgggacgtttactcat

SEQ ID NO: 78328 - DNA, 25 bp, SARS Virus
aacgtctgtggtgcgtttactcatg

SEQ ID NO: 78329 - DNA, 25 bp, SARS Virus
acgtctgtggtaggtttactcatgg

SEQ ID NO: 78330 - DNA, 25 bp, SARS Virus
cgtctgtggtacgtttactcatggc

SEQ ID NO: 78331 - DNA, 25 bp, SARS Virus
gtctgtggtacggttactcatggct

SEQ ID NO: 78332 - DNA, 25 bp, SARS Virus
tctgtggtacgtgtactcatggctg

SEQ ID NO: 78333 - DNA, 25 bp, SARS Virus
ctgtggtacgttgactcatggctgt

SEQ ID NO: 78334 - DNA, 25 bp, SARS Virus
tgtggtacgtttgctcatggctgtc

SEQ ID NO: 78335 - DNA, 25 bp, SARS Virus
gtggtacgtttagtcatggctgtca

SEQ ID NO: 78336 - DNA, 25 bp, SARS Virus
tggtacgtttacgcatggctgtcat

SEQ ID NO: 78337 - DNA, 25 bp, SARS Virus
ggtacgtttactgatggctgtcatg

SEQ ID NO: 78338 - DNA, 25 bp, SARS Virus
gtacgtttactcgtggctgtcatga

SEQ ID NO: 78339 - DNA, 25 bp, SARS Virus
tacgtttactcagggctgtcatgaa

SEQ ID NO: 78340 - DNA, 25 bp, SARS Virus
acgtttactcatggctgtcatgaac

SEQ ID NO: 78341 - DNA, 25 bp, SARS Virus
cgtttactcatggctgtcatgaacc

SEQ ID NO: 78342 - DNA, 25 bp, SARS Virus
gtttactcatgggtgtcatgaacct

SEQ ID NO: 78343 - DNA, 25 bp, SARS Virus
tttactcatggcggtcatgaaccta

SEQ ID NO: 78344 - DNA, 25 bp, SARS Virus
ttactcatggctgtcatgaacctac

SEQ ID NO: 78345 - DNA, 25 bp, SARS Virus
tactcatggctggcatgaacctacg

SEQ ID NO: 78346 - DNA, 25 bp, SARS Virus
actcatggctgtgatgaacctacgt

SEQ ID NO: 78347 - DNA, 25 bp, SARS Virus
ctcatggctgtcgtgaacctacgta

SEQ ID NO: 78348 - DNA, 25 bp, SARS Virus
tcatggctgtcaggaacctacgtat

SEQ ID NO: 78349 - DNA, 25 bp, SARS Virus
catggctgtcatgaacctacgtata

SEQ ID NO: 78350 - DNA, 25 bp, SARS Virus
atggctgtcatggacctacgtatat

SEQ ID NO: 78351 - DNA, 25 bp, SARS Virus
tggctgtcatgagcctacgtatatt

SEQ ID NO: 78352 - DNA, 25 bp, SARS Virus
ggctgtcatgaagctacgtatatta

SEQ ID NO: 78353 - DNA, 25 bp, SARS Virus
gctgtcatgaacgtacgtatattat

SEQ ID NO: 78354 - DNA, 25 bp, SARS Virus
ctgtcatgaaccgacgtatattata

SEQ ID NO: 78355 - DNA, 25 bp, SARS Virus
tgtcatgaacctgcgtatattatac

SEQ ID NO: 78356 - DNA, 25 bp, SARS Virus
gtcatgaacctaggtatattatact

SEQ ID NO: 78357 - DNA, 25 bp, SARS Virus
tcatgaacctacgtatattatacta

SEQ ID NO: 78358 - DNA, 25 bp, SARS Virus
catgaacctacggatattatactac

SEQ ID NO: 78359 - DNA, 25 bp, SARS Virus
atgaacctacgtgtattatactact

SEQ ID NO: 78360 - DNA, 25 bp, SARS Virus
tgaacctacgtagattatactacta

SEQ ID NO: 78361 - DNA, 25 bp, SARS Virus
gaacctacgtatgttatactactaa

SEQ ID NO: 78362 - DNA, 25 bp, SARS Virus
aacctacgtatagtatactactaaa

SEQ ID NO: 78363 - DNA, 25 bp, SARS Virus
acctacgtatatgatactactaaag

SEQ ID NO: 78364 - DNA, 25 bp, SARS Virus
cctacgtatattgtactactaaaga

SEQ ID NO: 78365 - DNA, 25 bp, SARS Virus
ctacgtatattagactactaaagac

SEQ ID NO: 78366 - DNA, 25 bp, SARS Virus
tacgtatattatgctactaaagacg

SEQ ID NO: 78367 - DNA, 25 bp, SARS Virus
acgtatattatagtactaaagacga

SEQ ID NO: 78368 - DNA, 25 bp, SARS Virus
cgtatattatacgactaaagacgac

SEQ ID NO: 78369 - DNA, 25 bp, SARS Virus
gtatattatactgctaaagacgacc

SEQ ID NO: 78370 - DNA, 25 bp, SARS Virus
tatattatactagtaaagacgacct

SEQ ID NO: 78371 - DNA, 25 bp, SARS Virus
atattatactacgaaagacgaccta

SEQ ID NO: 78372 - DNA, 25 bp, SARS Virus
tattatactactgaagacgacctaa

SEQ ID NO: 78373 - DNA, 25 bp, SARS Virus
attatactactagagacgacctaaa

SEQ ID NO: 78374 - DNA, 25 bp, SARS Virus
ttatactactaaggacgacctaaat

SEQ ID NO: 78375 - DNA, 25 bp, SARS Virus
tatactactaaagacgacctaaatc

SEQ ID NO: 78376 - DNA, 25 bp, SARS Virus
atactactaaaggcgacctaaatcg

SEQ ID NO: 78377 - DNA, 25 bp, SARS Virus
tactactaaagaggacctaaatcgg

SEQ ID NO: 78378 - DNA, 25 bp, SARS Virus
actactaaagacgacctaaatcgga

SEQ ID NO: 78379 - DNA, 25 bp, SARS Virus
ctactaaagacggcctaaatcggat

SEQ ID NO: 78380 - DNA, 25 bp, SARS Virus
tactaaagacgagctaaatcggata

SEQ ID NO: 78381 - DNA, 25 bp, SARS Virus
actaaagacgacgtaaatcggatac

SEQ ID NO: 78382 - DNA, 25 bp, SARS Virus
ctaaagacgaccgaaatcggatacc

SEQ ID NO: 78383 - DNA, 25 bp, SARS Virus
taaagacgacctgaatcggatacct

SEQ ID NO: 78384 - DNA, 25 bp, SARS Virus
aaagacgacctagatcggataccta

SEQ ID NO: 78385 - DNA, 25 bp, SARS Virus
aagacgacctaagtcggatacctaa

SEQ ID NO: 78386 - DNA, 25 bp, SARS Virus
agacgacctaaagcggatacctaaa

SEQ ID NO: 78387 - DNA, 25 bp, SARS Virus
gacgacctaaatgggatacctaaat

SEQ ID NO: 78388 - DNA, 25 bp, SARS Virus
acgacctaaatcggatacctaaatg

SEQ ID NO: 78389 - DNA, 25 bp, SARS Virus
cgacctaaatcggatacctaaatgt

SEQ ID NO: 78390 - DNA, 25 bp, SARS Virus
gacctaaatcgggtacctaaatgtt

SEQ ID NO: 78391 - DNA, 25 bp, SARS Virus
acctaaatcggagacctaaatgttt

SEQ ID NO: 78392 - DNA, 25 bp, SARS Virus
cctaaatcggatgcctaaatgtttg

SEQ ID NO: 78393 - DNA, 25 bp, SARS Virus
ctaaatcggatagctaaatgtttgt

SEQ ID NO: 78394 - DNA, 25 bp, SARS Virus
taaatcggatacgtaaatgtttgtt

SEQ ID NO: 78395 - DNA, 25 bp, SARS Virus
aaatcggataccgaaatgtttgtta

SEQ ID NO: 78396 - DNA, 25 bp, SARS Virus
aatcggatacctgaatgtttgttaa

SEQ ID NO: 78397 - DNA, 25 bp, SARS Virus
atcggatacctagatgtttgttaaa

SEQ ID NO: 78398 - DNA, 25 bp, SARS Virus
tcggatacctaagtgtttgttaaac

SEQ ID NO: 78399 - DNA, 25 bp, SARS Virus
cggatacctaaaggtttgttaaact

SEQ ID NO: 78400 - DNA, 25 bp, SARS Virus
ggatacctaaatgtttgttaaacta

SEQ ID NO: 78401 - DNA, 25 bp, SARS Virus
gatacctaaatggttgttaaactat

SEQ ID NO: 78402 - DNA, 25 bp, SARS Virus
atacctaaatgtgtgttaaactatg

SEQ ID NO: 78403 - DNA, 25 bp, SARS Virus
tacctaaatgttggttaaactatga

SEQ ID NO: 78404 - DNA, 25 bp, SARS Virus
acctaaatgtttgttaaactatgaa

SEQ ID NO: 78405 - DNA, 25 bp, SARS Virus
cctaaatgtttggtaaactatgaat

SEQ ID NO: 78406 - DNA, 25 bp, SARS Virus
ctaaatgtttgtgaaactatgaata

SEQ ID NO: 78407 - DNA, 25 bp, SARS Virus
taaatgtttgttgaactatgaatat

SEQ ID NO: 78408 - DNA, 25 bp, SARS Virus
aaatgtttgttagactatgaatatt

SEQ ID NO: 78409 - DNA, 25 bp, SARS Virus
aatgtttgttaagctatgaatattg

SEQ ID NO: 78410 - DNA, 25 bp, SARS Virus
atgtttgttaaagtatgaatattgg

SEQ ID NO: 78411 - DNA, 25 bp, SARS Virus
tgtttgttaaacgatgaatattgga

SEQ ID NO: 78412 - DNA, 25 bp, SARS Virus
gtttgttaaactgtgaatattggac

SEQ ID NO: 78413 - DNA, 25 bp, SARS Virus
tttgttaaactaggaatattggaca

SEQ ID NO: 78414 - DNA, 25 bp, SARS Virus
ttgttaaactatgaatattggacac

SEQ ID NO: 78415 - DNA, 25 bp, SARS Virus
tgttaaactatggatattggacacc

SEQ ID NO: 78416 - DNA, 25 bp, SARS Virus
gttaaactatgagtattggacacct

SEQ ID NO: 78417 - DNA, 25 bp, SARS Virus
ttaaactatgaagattggacacctt

SEQ ID NO: 78418 - DNA, 25 bp, SARS Virus
taaactatgaatgttggacacctta

SEQ ID NO: 78419 - DNA, 25 bp, SARS Virus
aaactatgaatagtggacaccttat

SEQ ID NO: 78420 - DNA, 25 bp, SARS Virus
aactatgaatatgggacaccttatg

SEQ ID NO: 78421 - DNA, 25 bp, SARS Virus
actatgaatattggacaccttatgt

SEQ ID NO: 78422 - DNA, 25 bp, SARS Virus
ctatgaatattggacaccttatgta

SEQ ID NO: 78423 - DNA, 25 bp, SARS Virus
tatgaatattgggcaccttatgtaa

SEQ ID NO: 78424 - DNA, 25 bp, SARS Virus
atgaatattggagaccttatgtaaa

SEQ ID NO: 78425 - DNA, 25 bp, SARS Virus
tgaatattggacgccttatgtaaat

SEQ ID NO: 78426 - DNA, 25 bp, SARS Virus
gaatattggacagcttatgtaaatg

SEQ ID NO: 78427 - DNA, 25 bp, SARS Virus
aatattggacacgttatgtaaatgg

SEQ ID NO: 78428 - DNA, 25 bp, SARS Virus
atattggacaccgtatgtaaatggt

SEQ ID NO: 78429 - DNA, 25 bp, SARS Virus
tattggacacctgatgtaaatggtc

SEQ ID NO: 78430 - DNA, 25 bp, SARS Virus
attggacaccttgtgtaaatggtcc

SEQ ID NO: 78431 - DNA, 25 bp, SARS Virus
ttggacaccttaggtaaatggtcca

SEQ ID NO: 78432 - DNA, 25 bp, SARS Virus
tggacaccttatgtaaatggtccaa

SEQ ID NO: 78433 - DNA, 25 bp, SARS Virus
ggacaccttatggaaatggtccaat

SEQ ID NO: 78434 - DNA, 25 bp, SARS Virus
gacaccttatgtgaatggtccaatg

SEQ ID NO: 78435 - DNA, 25 bp, SARS Virus
acaccttatgtagatggtccaatgt

SEQ ID NO: 78436 - DNA, 25 bp, SARS Virus
caccttatgtaagtggtccaatgtc

SEQ ID NO: 78437 - DNA, 25 bp, SARS Virus
accttatgtaaagggtccaatgtct

SEQ ID NO: 78438 - DNA, 25 bp, SARS Virus
ccttatgtaaatggtccaatgtctc

SEQ ID NO: 78439 - DNA, 25 bp, SARS Virus
cttatgtaaatggtccaatgtctca

SEQ ID NO: 78440 - DNA, 25 bp, SARS Virus
ttatgtaaatgggccaatgtctcaa

SEQ ID NO: 78441 - DNA, 25 bp, SARS Virus
tatgtaaatggtgcaatgtctcaaa

SEQ ID NO: 78442 - DNA, 25 bp, SARS Virus
atgtaaatggtcgaatgtctcaaat

SEQ ID NO: 78443 - DNA, 25 bp, SARS Virus
tgtaaatggtccgatgtctcaaatc

SEQ ID NO: 78444 - DNA, 25 bp, SARS Virus
gtaaatggtccagtgtctcaaatct

SEQ ID NO: 78445 - DNA, 25 bp, SARS Virus
taaatggtccaaggtctcaaatctt

SEQ ID NO: 78446 - DNA, 25 bp, SARS Virus
aaatggtccaatgtctcaaatcttt

SEQ ID NO: 78447 - DNA, 25 bp, SARS Virus
aatggtccaatggctcaaatctttt

SEQ ID NO: 78448 - DNA, 25 bp, SARS Virus
atggtccaatgtgtcaaatctttta

SEQ ID NO: 78449 - DNA, 25 bp, SARS Virus
tggtccaatgtcgcaaatcttttac

SEQ ID NO: 78450 - DNA, 25 bp, SARS Virus
ggtccaatgtctgaaatcttttaca

SEQ ID NO: 78451 - DNA, 25 bp, SARS Virus
gtccaatgtctcgaatcttttacac

SEQ ID NO: 78452 - DNA, 25 bp, SARS Virus
tccaatgtctcagatcttttacacc

SEQ ID NO: 78453 - DNA, 25 bp, SARS Virus
ccaatgtctcaagtcttttacaccg

SEQ ID NO: 78454 - DNA, 25 bp, SARS Virus
caatgtctcaaagcttttacaccga

SEQ ID NO: 78455 - DNA, 25 bp, SARS Virus
aatgtctcaaatgttttacaccgaa

SEQ ID NO: 78456 - DNA, 25 bp, SARS Virus
atgtctcaaatcgtttacaccgaat

SEQ ID NO: 78457 - DNA, 25 bp, SARS Virus
tgtctcaaatctgttacaccgaata

SEQ ID NO: 78458 - DNA, 25 bp, SARS Virus
gtctcaaatcttgtacaccgaatat

SEQ ID NO: 78459 - DNA, 25 bp, SARS Virus
tctcaaatctttgacaccgaatatt

SEQ ID NO: 78460 - DNA, 25 bp, SARS Virus
ctcaaatcttttgcaccgaatatta

SEQ ID NO: 78461 - DNA, 25 bp, SARS Virus
tcaaatcttttagaccgaatattac

SEQ ID NO: 78462 - DNA, 25 bp, SARS Virus
caaatcttttacgccgaatattaca

SEQ ID NO: 78463 - DNA, 25 bp, SARS Virus
aaatcttttacagcgaatattacaa

SEQ ID NO: 78464 - DNA, 25 bp, SARS Virus
aatcttttacacggaatattacaac

SEQ ID NO: 78465 - DNA, 25 bp, SARS Virus
atcttttacaccgaatattacaaca

SEQ ID NO: 78466 - DNA, 25 bp, SARS Virus
tcttttacaccggatattacaacaa

SEQ ID NO: 78467 - DNA, 25 bp, SARS Virus
cttttacaccgagtattacaacaat

SEQ ID NO: 78468 - DNA, 25 bp, SARS Virus
ttttacaccgaagattacaacaatt

SEQ ID NO: 78469 - DNA, 25 bp, SARS Virus
tttacaccgaatgttacaacaatta

SEQ ID NO: 78470 - DNA, 25 bp, SARS Virus
ttacaccgaatagtacaacaattat

SEQ ID NO: 78471 - DNA, 25 bp, SARS Virus
tacaccgaatatgacaacaattatt

SEQ ID NO: 78472 - DNA, 25 bp, SARS Virus
acaccgaatattgcaacaattattt

SEQ ID NO: 78473 - DNA, 25 bp, SARS Virus
caccgaatattagaacaattatttc

SEQ ID NO: 78474 - DNA, 25 bp, SARS Virus
accgaatattacgacaattatttcc

SEQ ID NO: 78475 - DNA, 25 bp, SARS Virus
ccgaatattacagcaattatttcct

SEQ ID NO: 78476 - DNA, 25 bp, SARS Virus
cgaatattacaagaattatttcctg

SEQ ID NO: 78477 - DNA, 25 bp, SARS Virus
gaatattacaacgattatttcctgt

SEQ ID NO: 78478 - DNA, 25 bp, SARS Virus
aatattacaacagttatttcctgtg

SEQ ID NO: 78479 - DNA, 25 bp, SARS Virus
atattacaacaagtatttcctgtga

SEQ ID NO: 78480 - DNA, 25 bp, SARS Virus
tattacaacaatgatttcctgtgaa

SEQ ID NO: 78481 - DNA, 25 bp, SARS Virus
attacaacaattgtttcctgtgaaa

SEQ ID NO: 78482 - DNA, 25 bp, SARS Virus
ttacaacaattagttcctgtgaaac

SEQ ID NO: 78483 - DNA, 25 bp, SARS Virus
tacaacaattatgtcctgtgaaact

SEQ ID NO: 78484 - DNA, 25 bp, SARS Virus
acaacaattattgcctgtgaaacta

SEQ ID NO: 78485 - DNA, 25 bp, SARS Virus
caacaattatttgctgtgaaactac

SEQ ID NO: 78486 - DNA, 25 bp, SARS Virus
aacaattatttcgtgtgaaactacc

SEQ ID NO: 78487 - DNA, 25 bp, SARS Virus
acaattatttccggtgaaactacct

SEQ ID NO: 78488 - DNA, 25 bp, SARS Virus
caattatttcctgtgaaactacctg

SEQ ID NO: 78489 - DNA, 25 bp, SARS Virus
aattatttcctgggaaactacctgt

SEQ ID NO: 78490 - DNA, 25 bp, SARS Virus
attatttcctgtgaaactacctgtg

SEQ ID NO: 78491 - DNA, 25 bp, SARS Virus
ttatttcctgtggaactacctgtgc

SEQ ID NO: 78492 - DNA, 25 bp, SARS Virus
tatttcctgtgagactacctgtgcg

SEQ ID NO: 78493 - DNA, 25 bp, SARS Virus
atttcctgtgaagctacctgtgcgg

SEQ ID NO: 78494 - DNA, 25 bp, SARS Virus
tttcctgtgaaagtacctgtgcggc

SEQ ID NO: 78495 - DNA, 25 bp, SARS Virus
ttcctgtgaaacgacctgtgcggcc

SEQ ID NO: 78496 - DNA, 25 bp, SARS Virus
tcctgtgaaactgcctgtgcggccg

SEQ ID NO: 78497 - DNA, 25 bp, SARS Virus
cctgtgaaactagctgtgcggccgc

SEQ ID NO: 78498 - DNA, 25 bp, SARS Virus
ctgtgaaactacgtgtgcggccgct

SEQ ID NO: 78499 - DNA, 25 bp, SARS Virus
tgtgaaactaccggtgcggccgctt

SEQ ID NO: 78500 - DNA, 25 bp, SARS Virus
gtgaaactacctgtgcggccgcttc

SEQ ID NO: 78501 - DNA, 25 bp, SARS Virus
tgaaactacctgggcggccgcttcg

SEQ ID NO: 78502 - DNA, 25 bp, SARS Virus
gaaactacctgtgcggccgcttcgt

SEQ ID NO: 78503 - DNA, 25 bp, SARS Virus
aaactacctgtggggccgcttcgtg

SEQ ID NO: 78504 - DNA, 25 bp, SARS Virus
aactacctgtgcggccgcttcgtgg

SEQ ID NO: 78505 - DNA, 25 bp, SARS Virus
actacctgtgcggccgcttcgtgga

SEQ ID NO: 78506 - DNA, 25 bp, SARS Virus
ctacctgtgcgggcgcttcgtggac

SEQ ID NO: 78507 - DNA, 25 bp, SARS Virus
tacctgtgcggcggcttcgtggaca

SEQ ID NO: 78508 - DNA, 25 bp, SARS Virus
acctgtgcggccgcttcgtggacaa

SEQ ID NO: 78509 - DNA, 25 bp, SARS Virus
cctgtgcggccggttcgtggacaaa

SEQ ID NO: 78510 - DNA, 25 bp, SARS Virus
ctgtgcggccgcgtcgtggacaaag

SEQ ID NO: 78511 - DNA, 25 bp, SARS Virus
tgtgcggccgctgcgtggacaaagg

SEQ ID NO: 78512 - DNA, 25 bp, SARS Virus
gtgcggccgcttggtggacaaaggt

SEQ ID NO: 78513 - DNA, 25 bp, SARS Virus
tgcggccgcttcgtggacaaaggta

SEQ ID NO: 78514 - DNA, 25 bp, SARS Virus
gcggccgcttcggggacaaaggtag

SEQ ID NO: 78515 - DNA, 25 bp, SARS Virus
cggccgcttcgtggacaaaggtagt

SEQ ID NO: 78516 - DNA, 25 bp, SARS Virus
ggccgcttcgtggacaaaggtagta

SEQ ID NO: 78517 - DNA, 25 bp, SARS Virus
gccgcttcgtgggcaaaggtagtaa

SEQ ID NO: 78518 - DNA, 25 bp, SARS Virus
ccgcttcgtggagaaaggtagtaat

SEQ ID NO: 78519 - DNA, 25 bp, SARS Virus
cgcttcgtggacgaaggtagtaatt

SEQ ID NO: 78520 - DNA, 25 bp, SARS Virus
gcttcgtggacagaggtagtaatta

SEQ ID NO: 78521 - DNA, 25 bp, SARS Virus
cttcgtggacaagggtagtaattat

SEQ ID NO: 78522 - DNA, 25 bp, SARS Virus
ttcgtggacaaaggtagtaattatt

SEQ ID NO: 78523 - DNA, 25 bp, SARS Virus
tcgtggacaaaggtagtaattatta

SEQ ID NO: 78524 - DNA, 25 bp, SARS Virus
cgtggacaaagggagtaattattac

SEQ ID NO: 78525 - DNA, 25 bp, SARS Virus
gtggacaaaggtggtaattattacg

SEQ ID NO: 78526 - DNA, 25 bp, SARS Virus
tggacaaaggtagtaattattacga

SEQ ID NO: 78527 - DNA, 25 bp, SARS Virus
ggacaaaggtaggaattattacgac

SEQ ID NO: 78528 - DNA, 25 bp, SARS Virus
gacaaaggtagtgattattacgaca

SEQ ID NO: 78529 - DNA, 25 bp, SARS Virus
acaaaggtagtagttattacgacaa

SEQ ID NO: 78530 - DNA, 25 bp, SARS Virus
caaaggtagtaagtattacgacaaa

SEQ ID NO: 78531 - DNA, 25 bp, SARS Virus
aaaggtagtaatgattacgacaaat

SEQ ID NO: 78532 - DNA, 25 bp, SARS Virus
aaggtagtaattgttacgacaaatg

SEQ ID NO: 78533 - DNA, 25 bp, SARS Virus
aggtagtaattagtacgacaaatgt

SEQ ID NO: 78534 - DNA, 25 bp, SARS Virus
ggtagtaattatgacgacaaatgtg

SEQ ID NO: 78535 - DNA, 25 bp, SARS Virus
gtagtaattattgcgacaaatgtgt

SEQ ID NO: 78536 - DNA, 25 bp, SARS Virus
tagtaattattaggacaaatgtgtt

SEQ ID NO: 78537 - DNA, 25 bp, SARS Virus
agtaattattacgacaaatgtgttt

SEQ ID NO: 78538 - DNA, 25 bp, SARS Virus
gtaattattacggcaaatgtgtttc

SEQ ID NO: 78539 - DNA, 25 bp, SARS Virus
taattattacgagaaatgtgtttcc

SEQ ID NO: 78540 - DNA, 25 bp, SARS Virus
aattattacgacgaatgtgtttcca

SEQ ID NO: 78541 - DNA, 25 bp, SARS Virus
attattacgacagatgtgtttccat

SEQ ID NO: 78542 - DNA, 25 bp, SARS Virus
ttattacgacaagtgtgtttccatc

SEQ ID NO: 78543 - DNA, 25 bp, SARS Virus
tattacgacaaaggtgtttccatct

SEQ ID NO: 78544 - DNA, 25 bp, SARS Virus
attacgacaaatgtgtttccatcta

SEQ ID NO: 78545 - DNA, 25 bp, SARS Virus
ttacgacaaatgggtttccatctac

SEQ ID NO: 78546 - DNA, 25 bp, SARS Virus
tacgacaaatgtgtttccatctacc

SEQ ID NO: 78547 - DNA, 25 bp, SARS Virus
acgacaaatgtggttccatctacca

SEQ ID NO: 78548 - DNA, 25 bp, SARS Virus
cgacaaatgtgtgtccatctaccat

SEQ ID NO: 78549 - DNA, 25 bp, SARS Virus
gacaaatgtgttgccatctaccata

SEQ ID NO: 78550 - DNA, 25 bp, SARS Virus
acaaatgtgtttgcatctaccataa

SEQ ID NO: 78551 - DNA, 25 bp, SARS Virus
caaatgtgtttcgatctaccataac

SEQ ID NO: 78552 - DNA, 25 bp, SARS Virus
aaatgtgtttccgtctaccataact

SEQ ID NO: 78553 - DNA, 25 bp, SARS Virus
aatgtgtttccagctaccataacta

SEQ ID NO: 78554 - DNA, 25 bp, SARS Virus
atgtgtttccatgtaccataactac

SEQ ID NO: 78555 - DNA, 25 bp, SARS Virus
tgtgtttccatcgaccataactaca

SEQ ID NO: 78556 - DNA, 25 bp, SARS Virus
gtgtttccatctgccataactacac

SEQ ID NO: 78557 - DNA, 25 bp, SARS Virus
tgtttccatctagcataactacacc

SEQ ID NO: 78558 - DNA, 25 bp, SARS Virus
gtttccatctacgataactacacct

SEQ ID NO: 78559 - DNA, 25 bp, SARS Virus
tttccatctaccgtaactacacctc

SEQ ID NO: 78560 - DNA, 25 bp, SARS Virus
ttccatctaccagaactacacctct

SEQ ID NO: 78561 - DNA, 25 bp, SARS Virus
tccatctaccatgactacacctcta

SEQ ID NO: 78562 - DNA, 25 bp, SARS Virus
ccatctaccatagctacacctctag

SEQ ID NO: 78563 - DNA, 25 bp, SARS Virus
catctaccataagtacacctctaga

SEQ ID NO: 78564 - DNA, 25 bp, SARS Virus
atctaccataacgacacctctagaa

SEQ ID NO: 78565 - DNA, 25 bp, SARS Virus
tctaccataactgcacctctagaaa

SEQ ID NO: 78566 - DNA, 25 bp, SARS Virus
ctaccataactagacctctagaaac

SEQ ID NO: 78567 - DNA, 25 bp, SARS Virus
taccataactacgcctctagaaact

SEQ ID NO: 78568 - DNA, 25 bp, SARS Virus
accataactacagctctagaaactt

SEQ ID NO: 78569 - DNA, 25 bp, SARS Virus
ccataactacacgtctagaaacttt

SEQ ID NO: 78570 - DNA, 25 bp, SARS Virus
cataactacaccgctagaaactttt

SEQ ID NO: 78571 - DNA, 25 bp, SARS Virus
ataactacacctgtagaaactttta

SEQ ID NO: 78572 - DNA, 25 bp, SARS Virus
taactacacctcgagaaacttttat

SEQ ID NO: 78573 - DNA, 25 bp, SARS Virus
aactacacctctggaaacttttatt

SEQ ID NO: 78574 - DNA, 25 bp, SARS Virus
actacacctctagaaacttttattc

SEQ ID NO: 78575 - DNA, 25 bp, SARS Virus
ctacacctctaggaacttttattct

SEQ ID NO: 78576 - DNA, 25 bp, SARS Virus
tacacctctagagacttttattctg

SEQ ID NO: 78577 - DNA, 25 bp, SARS Virus
acacctctagaagcttttattctgt

SEQ ID NO: 78578 - DNA, 25 bp, SARS Virus
cacctctagaaagttttattctgtt

SEQ ID NO: 78579 - DNA, 25 bp, SARS Virus
acctctagaaacgtttattctgttg

SEQ ID NO: 78580 - DNA, 25 bp, SARS Virus
cctctagaaactgttattctgttgt

SEQ ID NO: 78581 - DNA, 25 bp, SARS Virus
ctctagaaacttgtattctgttgtg

SEQ ID NO: 78582 - DNA, 25 bp, SARS Virus
tctagaaactttgattctgttgtga

SEQ ID NO: 78583 - DNA, 25 bp, SARS Virus
ctagaaacttttgttctgttgtgaa

SEQ ID NO: 78584 - DNA, 25 bp, SARS Virus
tagaaacttttagtctgttgtgaag

SEQ ID NO: 78585 - DNA, 25 bp, SARS Virus
agaaacttttatgctgttgtgaagg

SEQ ID NO: 78586 - DNA, 25 bp, SARS Virus
gaaacttttattgtgttgtgaagga

SEQ ID NO: 78587 - DNA, 25 bp, SARS Virus
aaacttttattcggttgtgaaggac

SEQ ID NO: 78588 - DNA, 25 bp, SARS Virus
aacttttattctgttgtgaaggaca

SEQ ID NO: 78589 - DNA, 25 bp, SARS Virus
acttttattctggtgtgaaggacaa

SEQ ID NO: 78590 - DNA, 25 bp, SARS Virus
cttttattctgtggtgaaggacaat

SEQ ID NO: 78591 - DNA, 25 bp, SARS Virus
ttttattctgttgtgaaggacaatt

SEQ ID NO: 78592 - DNA, 25 bp, SARS Virus
tttattctgttgggaaggacaatta

SEQ ID NO: 78593 - DNA, 25 bp, SARS Virus
ttattctgttgtgaaggacaattac

SEQ ID NO: 78594 - DNA, 25 bp, SARS Virus
tattctgttgtggaggacaattaca

SEQ ID NO: 78595 - DNA, 25 bp, SARS Virus
attctgttgtgagggacaattacaa

SEQ ID NO: 78596 - DNA, 25 bp, SARS Virus
ttctgttgtgaaggacaattacaac

SEQ ID NO: 78597 - DNA, 25 bp, SARS Virus
tctgttgtgaaggacaattacaacg

SEQ ID NO: 78598 - DNA, 25 bp, SARS Virus
ctgttgtgaagggcaattacaacgt

SEQ ID NO: 78599 - DNA, 25 bp, SARS Virus
tgttgtgaaggagaattacaacgta

SEQ ID NO: 78600 - DNA, 25 bp, SARS Virus
gttgtgaaggacgattacaacgtaa

SEQ ID NO: 78601 - DNA, 25 bp, SARS Virus
ttgtgaaggacagttacaacgtaaa

SEQ ID NO: 78602 - DNA, 25 bp, SARS Virus
tgtgaaggacaagtacaacgtaaac

SEQ ID NO: 78603 - DNA, 25 bp, SARS Virus
gtgaaggacaatgacaacgtaaact

SEQ ID NO: 78604 - DNA, 25 bp, SARS Virus
tgaaggacaattgcaacgtaaactc

SEQ ID NO: 78605 - DNA, 25 bp, SARS Virus
gaaggacaattagaacgtaaactcg

SEQ ID NO: 78606 - DNA, 25 bp, SARS Virus
aaggacaattacgacgtaaactcga

SEQ ID NO: 78607 - DNA, 25 bp, SARS Virus
aggacaattacagcgtaaactcgaa

SEQ ID NO: 78608 - DNA, 25 bp, SARS Virus
ggacaattacaaggtaaactcgaaa

SEQ ID NO: 78609 - DNA, 25 bp, SARS Virus
gacaattacaacgtaaactcgaaac

SEQ ID NO: 78610 - DNA, 25 bp, SARS Virus
acaattacaacggaaactcgaaacc

SEQ ID NO: 78611 - DNA, 25 bp, SARS Virus
caattacaacgtgaactcgaaaccc

SEQ ID NO: 78612 - DNA, 25 bp, SARS Virus
aattacaacgtagactcgaaacccg

SEQ ID NO: 78613 - DNA, 25 bp, SARS Virus
attacaacgtaagctcgaaacccga

SEQ ID NO: 78614 - DNA, 25 bp, SARS Virus
ttacaacgtaaagtcgaaacccgat

SEQ ID NO: 78615 - DNA, 25 bp, SARS Virus
tacaacgtaaacgcgaaacccgatt

SEQ ID NO: 78616 - DNA, 25 bp, SARS Virus
acaacgtaaactggaaacccgattc

SEQ ID NO: 78617 - DNA, 25 bp, SARS Virus
caacgtaaactcgaaacccgattcg

SEQ ID NO: 78618 - DNA, 25 bp, SARS Virus
aacgtaaactcggaacccgattcgc

SEQ ID NO: 78619 - DNA, 25 bp, SARS Virus
acgtaaactcgagacccgattcgca

SEQ ID NO: 78620 - DNA, 25 bp, SARS Virus
cgtaaactcgaagcccgattcgcat

SEQ ID NO: 78621 - DNA, 25 bp, SARS Virus
gtaaactcgaaagccgattcgcatt

SEQ ID NO: 78622 - DNA, 25 bp, SARS Virus
taaactcgaaacgcgattcgcattg

SEQ ID NO: 78623 - DNA, 25 bp, SARS Virus
aaactcgaaaccggattcgcattgt

SEQ ID NO: 78624 - DNA, 25 bp, SARS Virus
aactcgaaacccgattcgcattgta

SEQ ID NO: 78625 - DNA, 25 bp, SARS Virus
actcgaaacccggttcgcattgtaa

SEQ ID NO: 78626 - DNA, 25 bp, SARS Virus
ctcgaaacccgagtcgcattgtaat

SEQ ID NO: 78627 - DNA, 25 bp, SARS Virus
tcgaaacccgatgcgcattgtaatt

SEQ ID NO: 78628 - DNA, 25 bp, SARS Virus
cgaaacccgattggcattgtaattt

SEQ ID NO: 78629 - DNA, 25 bp, SARS Virus
gaaacccgattcgcattgtaatttg

SEQ ID NO: 78630 - DNA, 25 bp, SARS Virus
aaacccgattcggattgtaatttgg

SEQ ID NO: 78631 - DNA, 25 bp, SARS Virus
aacccgattcgcgttgtaatttggt

SEQ ID NO: 78632 - DNA, 25 bp, SARS Virus
acccgattcgcagtgtaatttggtc

SEQ ID NO: 78633 - DNA, 25 bp, SARS Virus
cccgattcgcatggtaatttggtca

SEQ ID NO: 78634 - DNA, 25 bp, SARS Virus
ccgattcgcattgtaatttggtcac

SEQ ID NO: 78635 - DNA, 25 bp, SARS Virus
cgattcgcattggaatttggtcacg

SEQ ID NO: 78636 - DNA, 25 bp, SARS Virus
gattcgcattgtgatttggtcacgg

SEQ ID NO: 78637 - DNA, 25 bp, SARS Virus
attcgcattgtagtttggtcacggt

SEQ ID NO: 78638 - DNA, 25 bp, SARS Virus
ttcgcattgtaagttggtcacggtc

SEQ ID NO: 78639 - DNA, 25 bp, SARS Virus
tcgcattgtaatgtggtcacggtct

SEQ ID NO: 78640 - DNA, 25 bp, SARS Virus
cgcattgtaattgggtcacggtctc

SEQ ID NO: 78641 - DNA, 25 bp, SARS Virus
gcattgtaatttggtcacggtctct

SEQ ID NO: 78642 - DNA, 25 bp, SARS Virus
cattgtaatttggtcacggtctcta

SEQ ID NO: 78643 - DNA, 25 bp, SARS Virus
attgtaatttgggcacggtctctaa

SEQ ID NO: 78644 - DNA, 25 bp, SARS Virus
ttgtaatttggtgacggtctctaat

SEQ ID NO: 78645 - DNA, 25 bp, SARS Virus
tgtaatttggtcgcggtctctaatt

SEQ ID NO: 78646 - DNA, 25 bp, SARS Virus
gtaatttggtcagggtctctaattc

SEQ ID NO: 78647 - DNA, 25 bp, SARS Virus
taatttggtcacggtctctaattct

SEQ ID NO: 78648 - DNA, 25 bp, SARS Virus
aatttggtcacggtctctaattcta

SEQ ID NO: 78649 - DNA, 25 bp, SARS Virus
atttggtcacgggctctaattctat

SEQ ID NO: 78650 - DNA, 25 bp, SARS Virus
tttggtcacggtgtctaattctatg

SEQ ID NO: 78651 - DNA, 25 bp, SARS Virus
ttggtcacggtcgctaattctatga

SEQ ID NO: 78652 - DNA, 25 bp, SARS Virus
tggtcacggtctgtaattctatgag

SEQ ID NO: 78653 - DNA, 25 bp, SARS Virus
ggtcacggtctcgaattctatgagt

SEQ ID NO: 78654 - DNA, 25 bp, SARS Virus
gtcacggtctctgattctatgagtt

SEQ ID NO: 78655 - DNA, 25 bp, SARS Virus
tcacggtctctagttctatgagtta

SEQ ID NO: 78656 - DNA, 25 bp, SARS Virus
cacggtctctaagtctatgagttat

SEQ ID NO: 78657 - DNA, 25 bp, SARS Virus
acggtctctaatgctatgagttatt

SEQ ID NO: 78658 - DNA, 25 bp, SARS Virus
cggtctctaattgtatgagttatta

SEQ ID NO: 78659 - DNA, 25 bp, SARS Virus
ggtctctaattcgatgagttattaa

SEQ ID NO: 78660 - DNA, 25 bp, SARS Virus
gtctctaattctgtgagttattaaa

SEQ ID NO: 78661 - DNA, 25 bp, SARS Virus
tctctaattctaggagttattaaac

SEQ ID NO: 78662 - DNA, 25 bp, SARS Virus
ctctaattctatgagttattaaacc

SEQ ID NO: 78663 - DNA, 25 bp, SARS Virus
tctaattctatgggttattaaaccc

SEQ ID NO: 78664 - DNA, 25 bp, SARS Virus
ctaattctatgagttattaaaccca

SEQ ID NO: 78665 - DNA, 25 bp, SARS Virus
taattctatgaggtattaaacccac

SEQ ID NO: 78666 - DNA, 25 bp, SARS Virus
aattctatgagtgattaaacccaca

SEQ ID NO: 78667 - DNA, 25 bp, SARS Virus
attctatgagttgttaaacccacaa

SEQ ID NO: 78668 - DNA, 25 bp, SARS Virus
ttctatgagttagtaaacccacaac

SEQ ID NO: 78669 - DNA, 25 bp, SARS Virus
tctatgagttatgaaacccacaact

SEQ ID NO: 78670 - DNA, 25 bp, SARS Virus
ctatgagttattgaacccacaacta

SEQ ID NO: 78671 - DNA, 25 bp, SARS Virus
tatgagttattagacccacaactat

SEQ ID NO: 78672 - DNA, 25 bp, SARS Virus
atgagttattaagcccacaactata

SEQ ID NO: 78673 - DNA, 25 bp, SARS Virus
tgagttattaaagccacaactatag

SEQ ID NO: 78674 - DNA, 25 bp, SARS Virus
gagttattaaacgcacaactatagc

SEQ ID NO: 78675 - DNA, 25 bp, SARS Virus
agttattaaaccgacaactatagcg

SEQ ID NO: 78676 - DNA, 25 bp, SARS Virus
gttattaaacccgcaactatagcga

SEQ ID NO: 78677 - DNA, 25 bp, SARS Virus
ttattaaacccagaactatagcgac

SEQ ID NO: 78678 - DNA, 25 bp, SARS Virus
tattaaacccacgactatagcgacg

SEQ ID NO: 78679 - DNA, 25 bp, SARS Virus
attaaacccacagctatagcgacga

SEQ ID NO: 78680 - DNA, 25 bp, SARS Virus
ttaaacccacaagtatagcgacgat

SEQ ID NO: 78681 - DNA, 25 bp, SARS Virus
taaacccacaacgatagcgacgatt

SEQ ID NO: 78682 - DNA, 25 bp, SARS Virus
aaacccacaactgtagcgacgatta

SEQ ID NO: 78683 - DNA, 25 bp, SARS Virus
aacccacaactagagcgacgattat

SEQ ID NO: 78684 - DNA, 25 bp, SARS Virus
acccacaactatggcgacgattatg

SEQ ID NO: 78685 - DNA, 25 bp, SARS Virus
cccacaactatagcgacgattatga

SEQ ID NO: 78686 - DNA, 25 bp, SARS Virus
ccacaactatagggacgattatgac

SEQ ID NO: 78687 - DNA, 25 bp, SARS Virus
cacaactatagcgacgattatgaca

SEQ ID NO: 78688 - DNA, 25 bp, SARS Virus
acaactatagcggcgattatgacat

SEQ ID NO: 78689 - DNA, 25 bp, SARS Virus
caactatagcgaggattatgacatt

SEQ ID NO: 78690 - DNA, 25 bp, SARS Virus
aactatagcgacgattatgacatta

SEQ ID NO: 78691 - DNA, 25 bp, SARS Virus
actatagcgacggttatgacattag

SEQ ID NO: 78692 - DNA, 25 bp, SARS Virus
ctatagcgacgagtatgacattaga

SEQ ID NO: 78693 - DNA, 25 bp, SARS Virus
tatagcgacgatgatgacattagac

SEQ ID NO: 78694 - DNA, 25 bp, SARS Virus
atagcgacgattgtgacattagacc

SEQ ID NO: 78695 - DNA, 25 bp, SARS Virus
tagcgacgattaggacattagaccc

SEQ ID NO: 78696 - DNA, 25 bp, SARS Virus
agcgacgattatgacattagaccct

SEQ ID NO: 78697 - DNA, 25 bp, SARS Virus
aagaaaatgatatgactatcaggaa

SEQ ID NO: 78698 - DNA, 25 bp, SARS Virus
agaaaatgataatactatcaggaac

SEQ ID NO: 78699 - DNA, 25 bp, SARS Virus
gaaaatgataagtctatcaggaaca

SEQ ID NO: 78700 - DNA, 25 bp, SARS Virus
aaaatgataagattatcaggaacac

SEQ ID NO: 78701 - DNA, 25 bp, SARS Virus
aaatgataagactatcaggaacact

SEQ ID NO: 78702 - DNA, 25 bp, SARS Virus
aatgataagactttcaggaacactc

SEQ ID NO: 78703 - DNA, 25 bp, SARS Virus
atgataagactatcaggaacactca

SEQ ID NO: 78704 - DNA, 25 bp, SARS Virus
tgataagactattaggaacactcag

SEQ ID NO: 78705 - DNA, 25 bp, SARS Virus
gataagactatctggaacactcaga

SEQ ID NO: 78706 - DNA, 25 bp, SARS Virus
ataagactatcatgaacactcagag

SEQ ID NO: 78707 - DNA, 25 bp, SARS Virus
taagactatcagtaacactcagagt

SEQ ID NO: 78708 - DNA, 25 bp, SARS Virus
aagactatcaggtacactcagagta

SEQ ID NO: 78709 - DNA, 25 bp, SARS Virus
agactatcaggatcactcagagtac

SEQ ID NO: 78710 - DNA, 25 bp, SARS Virus
gactatcaggaatactcagagtacc

SEQ ID NO: 78711 - DNA, 25 bp, SARS Virus
actatcaggaactctcagagtaccg

SEQ ID NO: 78712 - DNA, 25 bp, SARS Virus
ctatcaggaacattcagagtaccgt

SEQ ID NO: 78713 - DNA, 25 bp, SARS Virus
tatcaggaacactcagagtaccgtt

SEQ ID NO: 78714 - DNA, 25 bp, SARS Virus
atcaggaacacttagagtaccgttt

SEQ ID NO: 78715 - DNA, 25 bp, SARS Virus
tcaggaacactctgagtaccgtttg

SEQ ID NO: 78716 - DNA, 25 bp, SARS Virus
caggaacactcatagtaccgtttgt

SEQ ID NO: 78717 - DNA, 25 bp, SARS Virus
aggaacactcagtgtaccgtttgtt

SEQ ID NO: 78718 - DNA, 25 bp, SARS Virus
ggaacactcagattaccgtttgttc

SEQ ID NO: 78719 - DNA, 25 bp, SARS Virus
gaacactcagagtaccgtttgttca

SEQ ID NO: 78720 - DNA, 25 bp, SARS Virus
aacactcagagttccgtttgttcat

SEQ ID NO: 78721 - DNA, 25 bp, SARS Virus
acactcagagtatcgtttgttcatc

SEQ ID NO: 78722 - DNA, 25 bp, SARS Virus
cactcagagtactgtttgttcatca

SEQ ID NO: 78723 - DNA, 25 bp, SARS Virus
actcagagtaccttttgttcatcac

SEQ ID NO: 78724 - DNA, 25 bp, SARS Virus
ctcagagtaccgtttgttcatcaca

SEQ ID NO: 78725 - DNA, 25 bp, SARS Virus
tcagagtaccgtttgttcatcacag

SEQ ID NO: 78726 - DNA, 25 bp, SARS Virus
cagagtaccgtttgttcatcacagc

SEQ ID NO: 78727 - DNA, 25 bp, SARS Virus
agagtaccgttttttcatcacagcc

SEQ ID NO: 78728 - DNA, 25 bp, SARS Virus
gagtaccgtttgttcatcacagcct

SEQ ID NO: 78729 - DNA, 25 bp, SARS Virus
agtaccgtttgttcatcacagccta

SEQ ID NO: 78730 - DNA, 25 bp, SARS Virus
gtaccgtttgtttatcacagcctat

SEQ ID NO: 78731 - DNA, 25 bp, SARS Virus
taccgtttgttcttcacagcctata

SEQ ID NO: 78732 - DNA, 25 bp, SARS Virus
accgtttgttcatcacagcctataa

SEQ ID NO: 78733 - DNA, 25 bp, SARS Virus
ccgtttgttcattacagcctataac

SEQ ID NO: 78734 - DNA, 25 bp, SARS Virus
cgtttgttcatctcagcctataact

SEQ ID NO: 78735 - DNA, 25 bp, SARS Virus
gtttgttcatcatagcctataacta

SEQ ID NO: 78736 - DNA, 25 bp, SARS Virus
tttgttcatcactgcctataactaa

SEQ ID NO: 78737 - DNA, 25 bp, SARS Virus
ttgttcatcacatcctataactaat

SEQ ID NO: 78738 - DNA, 25 bp, SARS Virus
tgttcatcacagtctataactaata

SEQ ID NO: 78739 - DNA, 25 bp, SARS Virus
gttcatcacagcttataactaatac

SEQ ID NO: 78740 - DNA, 25 bp, SARS Virus
ttcatcacagcctataactaataca

SEQ ID NO: 78741 - DNA, 25 bp, SARS Virus
tcatcacagcctttaactaatacaa

SEQ ID NO: 78742 - DNA, 25 bp, SARS Virus
catcacagcctataactaatacaag

SEQ ID NO: 78743 - DNA, 25 bp, SARS Virus
atcacagcctattactaatacaagg

SEQ ID NO: 78744 - DNA, 25 bp, SARS Virus
tcacagcctatatctaatacaaggt

SEQ ID NO: 78745 - DNA, 25 bp, SARS Virus
cacagcctataattaatacaaggtg

SEQ ID NO: 78746 - DNA, 25 bp, SARS Virus
acagcctataactaatacaaggtga

SEQ ID NO: 78747 - DNA, 25 bp, SARS Virus
cagcctataacttatacaaggtgag

SEQ ID NO: 78748 - DNA, 25 bp, SARS Virus
agcctataactattacaaggtgagt

SEQ ID NO: 78749 - DNA, 25 bp, SARS Virus
gcctataactaatacaaggtgagtt

SEQ ID NO: 78750 - DNA, 25 bp, SARS Virus
cctataactaattcaaggtgagttt

SEQ ID NO: 78751 - DNA, 25 bp, SARS Virus
ctataactaatataaggtgagttta

SEQ ID NO: 78752 - DNA, 25 bp, SARS Virus
tataactaatactaggtgagtttag

SEQ ID NO: 78753 - DNA, 25 bp, SARS Virus
ataactaatacatggtgagtttaga

SEQ ID NO: 78754 - DNA, 25 bp, SARS Virus
taactaatacaatgtgagtttagac

SEQ ID NO: 78755 - DNA, 25 bp, SARS Virus
aactaatacaagttgagtttagacg

SEQ ID NO: 78756 - DNA, 25 bp, SARS Virus
actaatacaaggtgagtttagacga

SEQ ID NO: 78757 - DNA, 25 bp, SARS Virus
ctaatacaaggttagtttagacgat

SEQ ID NO: 78758 - DNA, 25 bp, SARS Virus
taatacaaggtgtgtttagacgatg

SEQ ID NO: 78759 - DNA, 25 bp, SARS Virus
aatacaaggtgattttagacgatgc

SEQ ID NO: 78760 - DNA, 25 bp, SARS Virus
atacaaggtgagtttagacgatgca

SEQ ID NO: 78761 - DNA, 25 bp, SARS Virus
tacaaggtgagtttagacgatgcac

SEQ ID NO: 78762 - DNA, 25 bp, SARS Virus
acaaggtgagtttagacgatgcaca

SEQ ID NO: 78763 - DNA, 25 bp, SARS Virus
caaggtgagttttgacgatgcacat

SEQ ID NO: 78764 - DNA, 25 bp, SARS Virus
aaggtgagtttatacgatgcacata

SEQ ID NO: 78765 - DNA, 25 bp, SARS Virus
aggtgagtttagtcgatgcacataa

SEQ ID NO: 78766 - DNA, 25 bp, SARS Virus
ggtgagtttagatgatgcacataat

SEQ ID NO: 78767 - DNA, 25 bp, SARS Virus
gtgagtttagactatgcacataatg

SEQ ID NO: 78768 - DNA, 25 bp, SARS Virus
tgagtttagacgttgcacataatgt

SEQ ID NO: 78769 - DNA, 25 bp, SARS Virus
gagtttagacgatgcacataatgtg

SEQ ID NO: 78770 - DNA, 25 bp, SARS Virus
agtttagacgattcacataatgtgc

SEQ ID NO: 78771 - DNA, 25 bp, SARS Virus
gtttagacgatgtacataatgtgct

SEQ ID NO: 78772 - DNA, 25 bp, SARS Virus
tttagacgatgctcataatgtgcta

SEQ ID NO: 78773 - DNA, 25 bp, SARS Virus
ttagacgatgcatataatgtgctac

SEQ ID NO: 78774 - DNA, 25 bp, SARS Virus
tagacgatgcacttaatgtgctacg

SEQ ID NO: 78775 - DNA, 25 bp, SARS Virus
agacgatgcacataatgtgctacgt

SEQ ID NO: 78776 - DNA, 25 bp, SARS Virus
gacgatgcacattatgtgctacgtt

SEQ ID NO: 78777 - DNA, 25 bp, SARS Virus
acgatgcacatattgtgctacgtta

SEQ ID NO: 78778 - DNA, 25 bp, SARS Virus
cgatgcacataatgtgctacgttaa

SEQ ID NO: 78779 - DNA, 25 bp, SARS Virus
gatgcacataatttgctacgttaaa

SEQ ID NO: 78780 - DNA, 25 bp, SARS Virus
atgcacataatgtgctacgttaaat

SEQ ID NO: 78781 - DNA, 25 bp, SARS Virus
tgcacataatgttctacgttaaatc

SEQ ID NO: 78782 - DNA, 25 bp, SARS Virus
gcacataatgtgttacgttaaatcc

SEQ ID NO: 78783 - DNA, 25 bp, SARS Virus
cacataatgtgctacgttaaatcca

SEQ ID NO: 78784 - DNA, 25 bp, SARS Virus
acataatgtgcttcgttaaatccac

SEQ ID NO: 78785 - DNA, 25 bp, SARS Virus
cataatgtgctatgttaaatccacc

SEQ ID NO: 78786 - DNA, 25 bp, SARS Virus
ataatgtgctactttaaatccacca

SEQ ID NO: 78787 - DNA, 25 bp, SARS Virus
taatgtgctacgttaaatccaccac

SEQ ID NO: 78788 - DNA, 25 bp, SARS Virus
aatgtgctacgttaaatccaccacg

SEQ ID NO: 78789 - DNA, 25 bp, SARS Virus
atgtgctacgtttaatccaccacga

SEQ ID NO: 78790 - DNA, 25 bp, SARS Virus
tgtgctacgttatatccaccacgac

SEQ ID NO: 78791 - DNA, 25 bp, SARS Virus
gtgctacgttaattccaccacgaca

SEQ ID NO: 78792 - DNA, 25 bp, SARS Virus
tgctacgttaaatccaccacgacaa

SEQ ID NO: 78793 - DNA, 25 bp, SARS Virus
gctacgttaaattcaccacgacaaa

SEQ ID NO: 78794 - DNA, 25 bp, SARS Virus
ctacgttaaatctaccacgacaaac

SEQ ID NO: 78795 - DNA, 25 bp, SARS Virus
tacgttaaatcctccacgacaaacg

SEQ ID NO: 78796 - DNA, 25 bp, SARS Virus
acgttaaatccatcacgacaaacgt

SEQ ID NO: 78797 - DNA, 25 bp, SARS Virus
cgttaaatccactacgacaaacgtc

SEQ ID NO: 78798 - DNA, 25 bp, SARS Virus
gttaaatccacctcgacaaacgtct

SEQ ID NO: 78799 - DNA, 25 bp, SARS Virus
ttaaatccaccatgacaaacgtctg

SEQ ID NO: 78800 - DNA, 25 bp, SARS Virus
taaatccaccactacaaacgtctgt

SEQ ID NO: 78801 - DNA, 25 bp, SARS Virus
aaatccaccacgtcaaacgtctgtg

SEQ ID NO: 78802 - DNA, 25 bp, SARS Virus
aatccaccacgataaacgtctgtgg

SEQ ID NO: 78803 - DNA, 25 bp, SARS Virus
atccaccacgactaacgtctgtggt

SEQ ID NO: 78804 - DNA, 25 bp, SARS Virus
tccaccacgacatacgtctgtggta

SEQ ID NO: 78805 - DNA, 25 bp, SARS Virus
ccaccacgacaatcgtctgtggtac

SEQ ID NO: 78806 - DNA, 25 bp, SARS Virus
caccacgacaaatgtctgtggtacg

SEQ ID NO: 78807 - DNA, 25 bp, SARS Virus
accacgacaaacttctgtggtacgt

SEQ ID NO: 78808 - DNA, 25 bp, SARS Virus
ccacgacaaacgtctgtggtacgtt

SEQ ID NO: 78809 - DNA, 25 bp, SARS Virus
cacgacaaacgtttgtggtacgttt

SEQ ID NO: 78810 - DNA, 25 bp, SARS Virus
acgacaaacgtctgtggtacgttta

SEQ ID NO: 78811 - DNA, 25 bp, SARS Virus
cgacaaacgtctttggtacgtttac

SEQ ID NO: 78812 - DNA, 25 bp, SARS Virus
gacaaacgtctgtggtacgtttact

SEQ ID NO: 78813 - DNA, 25 bp, SARS Virus
acaaacgtctgttgtacgtttactc

SEQ ID NO: 78814 - DNA, 25 bp, SARS Virus
caaacgtctgtgttacgtttactca

SEQ ID NO: 78815 - DNA, 25 bp, SARS Virus
aaacgtctgtggtacgtttactcat

SEQ ID NO: 78816 - DNA, 25 bp, SARS Virus
aacgtctgtggttcgtttactcatg

SEQ ID NO: 78817 - DNA, 25 bp, SARS Virus
acgtctgtggtatgtttactcatgg

SEQ ID NO: 78818 - DNA, 25 bp, SARS Virus
cgtctgtggtacttttactcatggc

SEQ ID NO: 78819 - DNA, 25 bp, SARS Virus
gtctgtggtacgtttactcatggct

SEQ ID NO: 78820 - DNA, 25 bp, SARS Virus
tctgtggtacgtttactcatggctg

SEQ ID NO: 78821 - DNA, 25 bp, SARS Virus
ctgtggtacgtttactcatggctgt

SEQ ID NO: 78822 - DNA, 25 bp, SARS Virus
tgtggtacgttttctcatggctgtc

SEQ ID NO: 78823 - DNA, 25 bp, SARS Virus
gtggtacgtttattcatggctgtca

SEQ ID NO: 78824 - DNA, 25 bp, SARS Virus
tggtacgtttactcatggctgtcat

SEQ ID NO: 78825 - DNA, 25 bp, SARS Virus
ggtacgtttacttatggctgtcatg

SEQ ID NO: 78826 - DNA, 25 bp, SARS Virus
gtacgtttactcttggctgtcatga

SEQ ID NO: 78827 - DNA, 25 bp, SARS Virus
tacgtttactcatggctgtcatgaa

SEQ ID NO: 78828 - DNA, 25 bp, SARS Virus
acgtttactcattgctgtcatgaac

SEQ ID NO: 78829 - DNA, 25 bp, SARS Virus
cgtttactcatgtctgtcatgaacc

SEQ ID NO: 78830 - DNA, 25 bp, SARS Virus
gtttactcatggttgtcatgaacct

SEQ ID NO: 78831 - DNA, 25 bp, SARS Virus
tttactcatggctgtcatgaaccta

SEQ ID NO: 78832 - DNA, 25 bp, SARS Virus
ttactcatggctttcatgaacctac

SEQ ID NO: 78833 - DNA, 25 bp, SARS Virus
tactcatggctgtcatgaacctacg

SEQ ID NO: 78834 - DNA, 25 bp, SARS Virus
actcatggctgttatgaacctacgt

SEQ ID NO: 78835 - DNA, 25 bp, SARS Virus
ctcatggctgtcttgaacctacgta

SEQ ID NO: 78836 - DNA, 25 bp, SARS Virus
tcatggctgtcatgaacctacgtat

SEQ ID NO: 78837 - DNA, 25 bp, SARS Virus
catggctgtcattaacctacgtata

SEQ ID NO: 78838 - DNA, 25 bp, SARS Virus
atggctgtcatgtacctacgtatat

SEQ ID NO: 78839 - DNA, 25 bp, SARS Virus
tggctgtcatgatcctacgtatatt

SEQ ID NO: 78840 - DNA, 25 bp, SARS Virus
ggctgtcatgaatctacgtatatta

SEQ ID NO: 78841 - DNA, 25 bp, SARS Virus
gctgtcatgaacttacgtatattat

SEQ ID NO: 78842 - DNA, 25 bp, SARS Virus
ctgtcatgaacctacgtatattata

SEQ ID NO: 78843 - DNA, 25 bp, SARS Virus
tgtcatgaaccttcgtatattatac

SEQ ID NO: 78844 - DNA, 25 bp, SARS Virus
gtcatgaacctatgtatattatact

SEQ ID NO: 78845 - DNA, 25 bp, SARS Virus
tcatgaacctacttatattatacta

SEQ ID NO: 78846 - DNA, 25 bp, SARS Virus
catgaacctacgtatattatactac

SEQ ID NO: 78847 - DNA, 25 bp, SARS Virus
atgaacctacgtttattatactact

SEQ ID NO: 78848 - DNA, 25 bp, SARS Virus
tgaacctacgtatattatactacta

SEQ ID NO: 78849 - DNA, 25 bp, SARS Virus
gaacctacgtattttatactactaa

SEQ ID NO: 78850 - DNA, 25 bp, SARS Virus
aacctacgtatattatactactaaa

SEQ ID NO: 78851 - DNA, 25 bp, SARS Virus
acctacgtatattatactactaaag

SEQ ID NO: 78852 - DNA, 25 bp, SARS Virus
cctacgtatattttactactaaaga

SEQ ID NO: 78853 - DNA, 25 bp, SARS Virus
ctacgtatattatactactaaagac

SEQ ID NO: 78854 - DNA, 25 bp, SARS Virus
tacgtatattattctactaaagacg

SEQ ID NO: 78855 - DNA, 25 bp, SARS Virus
acgtatattatattactaaagacga

SEQ ID NO: 78856 - DNA, 25 bp, SARS Virus
cgtatattatactactaaagacgac

SEQ ID NO: 78857 - DNA, 25 bp, SARS Virus
gtatattatacttctaaagacgacc

SEQ ID NO: 78858 - DNA, 25 bp, SARS Virus
tatattatactattaaagacgacct

SEQ ID NO: 78859 - DNA, 25 bp, SARS Virus
atattatactactaaagacgaccta

SEQ ID NO: 78860 - DNA, 25 bp, SARS Virus
tattatactacttaagacgacctaa

SEQ ID NO: 78861 - DNA, 25 bp, SARS Virus
attatactactatagacgacctaaa

SEQ ID NO: 78862 - DNA, 25 bp, SARS Virus
ttatactactaatgacgacctaaat

SEQ ID NO: 78863 - DNA, 25 bp, SARS Virus
tatactactaaatacgacctaaatc

SEQ ID NO: 78864 - DNA, 25 bp, SARS Virus
atactactaaagtcgacctaaatcg

SEQ ID NO: 78865 - DNA, 25 bp, SARS Virus
tactactaaagatgacctaaatcgg

SEQ ID NO: 78866 - DNA, 25 bp, SARS Virus
actactaaagactacctaaatcgga

SEQ ID NO: 78867 - DNA, 25 bp, SARS Virus
ctactaaagacgtcctaaatcggat

SEQ ID NO: 78868 - DNA, 25 bp, SARS Virus
tactaaagacgatctaaatcggata

SEQ ID NO: 78869 - DNA, 25 bp, SARS Virus
actaaagacgacttaaatcggatac

SEQ ID NO: 78870 - DNA, 25 bp, SARS Virus
ctaaagacgacctaaatcggatacc

SEQ ID NO: 78871 - DNA, 25 bp, SARS Virus
taaagacgaccttaatcggatacct

SEQ ID NO: 78872 - DNA, 25 bp, SARS Virus
aaagacgacctatatcggataccta

SEQ ID NO: 78873 - DNA, 25 bp, SARS Virus
aagacgacctaattcggatacctaa

SEQ ID NO: 78874 - DNA, 25 bp, SARS Virus
agacgacctaaatcggatacctaaa

SEQ ID NO: 78875 - DNA, 25 bp, SARS Virus
gacgacctaaattggatacctaaat

SEQ ID NO: 78876 - DNA, 25 bp, SARS Virus
acgacctaaatctgatacctaaatg

SEQ ID NO: 78877 - DNA, 25 bp, SARS Virus
cgacctaaatcgtatacctaaatgt

SEQ ID NO: 78878 - DNA, 25 bp, SARS Virus
gacctaaatcggttacctaaatgtt

SEQ ID NO: 78879 - DNA, 25 bp, SARS Virus
acctaaatcggatacctaaatgttt

SEQ ID NO: 78880 - DNA, 25 bp, SARS Virus
cctaaatcggattcctaaatgtttg

SEQ ID NO: 78881 - DNA, 25 bp, SARS Virus
ctaaatcggatatctaaatgtttgt

SEQ ID NO: 78882 - DNA, 25 bp, SARS Virus
taaatcggatacttaaatgtttgtt

SEQ ID NO: 78883 - DNA, 25 bp, SARS Virus
aaatcggatacctaaatgtttgtta

SEQ ID NO: 78884 - DNA, 25 bp, SARS Virus
aatcggataccttaatgtttgttaa

SEQ ID NO: 78885 - DNA, 25 bp, SARS Virus
atcggatacctatatgtttgttaaa

SEQ ID NO: 78886 - DNA, 25 bp, SARS Virus
tcggatacctaattgtttgttaaac

SEQ ID NO: 78887 - DNA, 25 bp, SARS Virus
cggatacctaaatgtttgttaaact

SEQ ID NO: 78888 - DNA, 25 bp, SARS Virus
ggatacctaaatttttgttaaacta

SEQ ID NO: 78889 - DNA, 25 bp, SARS Virus
gatacctaaatgtttgttaaactat

SEQ ID NO: 78890 - DNA, 25 bp, SARS Virus
atacctaaatgtttgttaaactatg

SEQ ID NO: 78891 - DNA, 25 bp, SARS Virus
tacctaaatgtttgttaaactatga

SEQ ID NO: 78892 - DNA, 25 bp, SARS Virus
acctaaatgttttttaaactatgaa

SEQ ID NO: 78893 - DNA, 25 bp, SARS Virus
cctaaatgtttgttaaactatgaat

SEQ ID NO: 78894 - DNA, 25 bp, SARS Virus
ctaaatgtttgttaaactatgaata

SEQ ID NO: 78895 - DNA, 25 bp, SARS Virus
taaatgtttgtttaactatgaatat

SEQ ID NO: 78896 - DNA, 25 bp, SARS Virus
aaatgtttgttatactatgaatatt

SEQ ID NO: 78897 - DNA, 25 bp, SARS Virus
aatgtttgttaatctatgaatattg

SEQ ID NO: 78898 - DNA, 25 bp, SARS Virus
atgtttgttaaattatgaatattgg

SEQ ID NO: 78899 - DNA, 25 bp, SARS Virus
tgtttgttaaactatgaatattgga

SEQ ID NO: 78900 - DNA, 25 bp, SARS Virus
gtttgttaaactttgaatattggac

SEQ ID NO: 78901 - DNA, 25 bp, SARS Virus
tttgttaaactatgaatattggaca

SEQ ID NO: 78902 - DNA, 25 bp, SARS Virus
ttgttaaactattaatattggacac

SEQ ID NO: 78903 - DNA, 25 bp, SARS Virus
tgttaaactatgtatattggacacc

SEQ ID NO: 78904 - DNA, 25 bp, SARS Virus
gttaaactatgattattggacacct

SEQ ID NO: 78905 - DNA, 25 bp, SARS Virus
ttaaactatgaatattggacacctt

SEQ ID NO: 78906 - DNA, 25 bp, SARS Virus
taaactatgaattttggacacctta

SEQ ID NO: 78907 - DNA, 25 bp, SARS Virus
aaactatgaatattggacaccttat

SEQ ID NO: 78908 - DNA, 25 bp, SARS Virus
aactatgaatattggacaccttatg

SEQ ID NO: 78909 - DNA, 25 bp, SARS Virus
actatgaatatttgacaccttatgt

SEQ ID NO: 78910 - DNA, 25 bp, SARS Virus
ctatgaatattgtacaccttatgta

SEQ ID NO: 78911 - DNA, 25 bp, SARS Virus
tatgaatattggtcaccttatgtaa

SEQ ID NO: 78912 - DNA, 25 bp, SARS Virus
atgaatattggataccttatgtaaa

SEQ ID NO: 78913 - DNA, 25 bp, SARS Virus
tgaatattggactccttatgtaaat

SEQ ID NO: 78914 - DNA, 25 bp, SARS Virus
gaatattggacatcttatgtaaatg

SEQ ID NO: 78915 - DNA, 25 bp, SARS Virus
aatattggacactttatgtaaatgg

SEQ ID NO: 78916 - DNA, 25 bp, SARS Virus
atattggacaccttatgtaaatggt

SEQ ID NO: 78917 - DNA, 25 bp, SARS Virus
tattggacaccttatgtaaatggtc

SEQ ID NO: 78918 - DNA, 25 bp, SARS Virus
attggacaccttttgtaaatggtcc

SEQ ID NO: 78919 - DNA, 25 bp, SARS Virus
ttggacaccttatgtaaatggtcca

SEQ ID NO: 78920 - DNA, 25 bp, SARS Virus
tggacaccttatttaaatggtccaa

SEQ ID NO: 78921 - DNA, 25 bp, SARS Virus
ggacaccttatgtaaatggtccaat

SEQ ID NO: 78922 - DNA, 25 bp, SARS Virus
gacaccttatgttaatggtccaatg

SEQ ID NO: 78923 - DNA, 25 bp, SARS Virus
acaccttatgtatatggtccaatgt

SEQ ID NO: 78924 - DNA, 25 bp, SARS Virus
caccttatgtaattggtccaatgtc

SEQ ID NO: 78925 - DNA, 25 bp, SARS Virus
accttatgtaaatggtccaatgtct

SEQ ID NO: 78926 - DNA, 25 bp, SARS Virus
ccttatgtaaattgtccaatgtctc

SEQ ID NO: 78927 - DNA, 25 bp, SARS Virus
cttatgtaaatgttccaatgtctca

SEQ ID NO: 78928 - DNA, 25 bp, SARS Virus
ttatgtaaatggtccaatgtctcaa

SEQ ID NO: 78929 - DNA, 25 bp, SARS Virus
tatgtaaatggttcaatgtctcaaa

SEQ ID NO: 78930 - DNA, 25 bp, SARS Virus
atgtaaatggtctaatgtctcaaat

SEQ ID NO: 78931 - DNA, 25 bp, SARS Virus
tgtaaatggtcctatgtctcaaatc

SEQ ID NO: 78932 - DNA, 25 bp, SARS Virus
gtaaatggtccattgtctcaaatct

SEQ ID NO: 78933 - DNA, 25 bp, SARS Virus
taaatggtccaatgtctcaaatctt

SEQ ID NO: 78934 - DNA, 25 bp, SARS Virus
aaatggtccaatttctcaaatcttt

SEQ ID NO: 78935 - DNA, 25 bp, SARS Virus
aatggtccaatgtctcaaatctttt

SEQ ID NO: 78936 - DNA, 25 bp, SARS Virus
atggtccaatgtttcaaatctttta

SEQ ID NO: 78937 - DNA, 25 bp, SARS Virus
tggtccaatgtctcaaatcttttac

SEQ ID NO: 78938 - DNA, 25 bp, SARS Virus
ggtccaatgtcttaaatcttttaca

SEQ ID NO: 78939 - DNA, 25 bp, SARS Virus
gtccaatgtctctaatcttttacac

SEQ ID NO: 78940 - DNA, 25 bp, SARS Virus
tccaatgtctcatatcttttacacc

SEQ ID NO: 78941 - DNA, 25 bp, SARS Virus
ccaatgtctcaattcttttacaccg

SEQ ID NO: 78942 - DNA, 25 bp, SARS Virus
caatgtctcaaatcttttacaccga

SEQ ID NO: 78943 - DNA, 25 bp, SARS Virus
aatgtctcaaattttttacaccgaa

SEQ ID NO: 78944 - DNA, 25 bp, SARS Virus
atgtctcaaatcttttacaccgaat

SEQ ID NO: 78945 - DNA, 25 bp, SARS Virus
tgtctcaaatcttttacaccgaata

SEQ ID NO: 78946 - DNA, 25 bp, SARS Virus
gtctcaaatcttttacaccgaatat

SEQ ID NO: 78947 - DNA, 25 bp, SARS Virus
tctcaaatcttttacaccgaatatt

SEQ ID NO: 78948 - DNA, 25 bp, SARS Virus
ctcaaatctttttcaccgaatatta

SEQ ID NO: 78949 - DNA, 25 bp, SARS Virus
tcaaatcttttataccgaatattac

SEQ ID NO: 78950 - DNA, 25 bp, SARS Virus
caaatcttttactccgaatattaca

SEQ ID NO: 78951 - DNA, 25 bp, SARS Virus
aaatcttttacatcgaatattacaa

SEQ ID NO: 78952 - DNA, 25 bp, SARS Virus
aatcttttacactgaatattacaac

SEQ ID NO: 78953 - DNA, 25 bp, SARS Virus
atcttttacacctaatattacaaca

SEQ ID NO: 78954 - DNA, 25 bp, SARS Virus
tcttttacaccgtatattacaacaa

SEQ ID NO: 78955 - DNA, 25 bp, SARS Virus
cttttacaccgattattacaacaat

SEQ ID NO: 78956 - DNA, 25 bp, SARS Virus
ttttacaccgaatattacaacaatt

SEQ ID NO: 78957 - DNA, 25 bp, SARS Virus
tttacaccgaattttacaacaatta

SEQ ID NO: 78958 - DNA, 25 bp, SARS Virus
ttacaccgaatattacaacaattat

SEQ ID NO: 78959 - DNA, 25 bp, SARS Virus
tacaccgaatattacaacaattatt

SEQ ID NO: 78960 - DNA, 25 bp, SARS Virus
acaccgaatatttcaacaattattt

SEQ ID NO: 78961 - DNA, 25 bp, SARS Virus
caccgaatattataacaattatttc

SEQ ID NO: 78962 - DNA, 25 bp, SARS Virus
accgaatattactacaattatttcc

SEQ ID NO: 78963 - DNA, 25 bp, SARS Virus
ccgaatattacatcaattatttcct

SEQ ID NO: 78964 - DNA, 25 bp, SARS Virus
cgaatattacaataattatttcctg

SEQ ID NO: 78965 - DNA, 25 bp, SARS Virus
gaatattacaactattatttcctgt

SEQ ID NO: 78966 - DNA, 25 bp, SARS Virus
aatattacaacatttatttcctgtg

SEQ ID NO: 78967 - DNA, 25 bp, SARS Virus
atattacaacaattatttcctgtga

SEQ ID NO: 78968 - DNA, 25 bp, SARS Virus
tattacaacaattatttcctgtgaa

SEQ ID NO: 78969 - DNA, 25 bp, SARS Virus
attacaacaattttttcctgtgaaa

SEQ ID NO: 78970 - DNA, 25 bp, SARS Virus
ttacaacaattatttcctgtgaaac

SEQ ID NO: 78971 - DNA, 25 bp, SARS Virus
tacaacaattatttcctgtgaaact

SEQ ID NO: 78972 - DNA, 25 bp, SARS Virus
acaacaattatttcctgtgaaacta

SEQ ID NO: 78973 - DNA, 25 bp, SARS Virus
caacaattattttctgtgaaactac

SEQ ID NO: 78974 - DNA, 25 bp, SARS Virus
aacaattatttcttgtgaaactacc

SEQ ID NO: 78975 - DNA, 25 bp, SARS Virus
acaattatttcctgtgaaactacct

SEQ ID NO: 78976 - DNA, 25 bp, SARS Virus
caattatttcctttgaaactacctg

SEQ ID NO: 78977 - DNA, 25 bp, SARS Virus
aattatttcctgtgaaactacctgt

SEQ ID NO: 78978 - DNA, 25 bp, SARS Virus
attatttcctgttaaactacctgtg

SEQ ID NO: 78979 - DNA, 25 bp, SARS Virus
ttatttcctgtgtaactacctgtgc

SEQ ID NO: 78980 - DNA, 25 bp, SARS Virus
tatttcctgtgatactacctgtgcg

SEQ ID NO: 78981 - DNA, 25 bp, SARS Virus
atttcctgtgaatctacctgtgcgg

SEQ ID NO: 78982 - DNA, 25 bp, SARS Virus
tttcctgtgaaattacctgtgcggc

SEQ ID NO: 78983 - DNA, 25 bp, SARS Virus
ttcctgtgaaactacctgtgcggcc

SEQ ID NO: 78984 - DNA, 25 bp, SARS Virus
tcctgtgaaacttcctgtgcggccg

SEQ ID NO: 78985 - DNA, 25 bp, SARS Virus
cctgtgaaactatctgtgcggccgc

SEQ ID NO: 78986 - DNA, 25 bp, SARS Virus
ctgtgaaactacttgtgcggccgct

SEQ ID NO: 78987 - DNA, 25 bp, SARS Virus
tgtgaaactacctgtgcggccgctt

SEQ ID NO: 78988 - DNA, 25 bp, SARS Virus
gtgaaactacctttgcggccgcttc

SEQ ID NO: 78989 - DNA, 25 bp, SARS Virus
tgaaactacctgtgcggccgcttcg

SEQ ID NO: 78990 - DNA, 25 bp, SARS Virus
gaaactacctgttcggccgcttcgt

SEQ ID NO: 78991 - DNA, 25 bp, SARS Virus
aaactacctgtgtggccgcttcgtg

SEQ ID NO: 78992 - DNA, 25 bp, SARS Virus
aactacctgtgctgccgcttcgtgg

SEQ ID NO: 78993 - DNA, 25 bp, SARS Virus
actacctgtgcgtccgcttcgtgga

SEQ ID NO: 78994 - DNA, 25 bp, SARS Virus
ctacctgtgcggtcgcttcgtggac

SEQ ID NO: 78995 - DNA, 25 bp, SARS Virus
tacctgtgcggctgcttcgtggaca

SEQ ID NO: 78996 - DNA, 25 bp, SARS Virus
acctgtgcggcctcttcgtggacaa

SEQ ID NO: 78997 - DNA, 25 bp, SARS Virus
cctgtgcggccgtttcgtggacaaa

SEQ ID NO: 78998 - DNA, 25 bp, SARS Virus
ctgtgcggccgcttcgtggacaaag

SEQ ID NO: 78999 - DNA, 25 bp, SARS Virus
tgtgcggccgcttcgtggacaaagg

SEQ ID NO: 79000 - DNA, 25 bp, SARS Virus
gtgcggccgctttgtggacaaaggt

SEQ ID NO: 79001 - DNA, 25 bp, SARS Virus
tgcggccgcttcttggacaaaggta

SEQ ID NO: 79002 - DNA, 25 bp, SARS Virus
gcggccgcttcgtggacaaaggtag

SEQ ID NO: 79003 - DNA, 25 bp, SARS Virus
cggccgcttcgttgacaaaggtagt

SEQ ID NO: 79004 - DNA, 25 bp, SARS Virus
ggccgcttcgtgtacaaaggtagta

SEQ ID NO: 79005 - DNA, 25 bp, SARS Virus
gccgcttcgtggtcaaaggtagtaa

SEQ ID NO: 79006 - DNA, 25 bp, SARS Virus
ccgcttcgtggataaaggtagtaat

SEQ ID NO: 79007 - DNA, 25 bp, SARS Virus
cgcttcgtggactaaggtagtaatt

SEQ ID NO: 79008 - DNA, 25 bp, SARS Virus
gcttcgtggacataggtagtaatta

SEQ ID NO: 79009 - DNA, 25 bp, SARS Virus
cttcgtggacaatggtagtaattat

SEQ ID NO: 79010 - DNA, 25 bp, SARS Virus
ttcgtggacaaatgtagtaattatt

SEQ ID NO: 79011 - DNA, 25 bp, SARS Virus
tcgtggacaaagttagtaattatta

SEQ ID NO: 79012 - DNA, 25 bp, SARS Virus
cgtggacaaaggtagtaattattac

SEQ ID NO: 79013 - DNA, 25 bp, SARS Virus
gtggacaaaggttgtaattattacg

SEQ ID NO: 79014 - DNA, 25 bp, SARS Virus
tggacaaaggtattaattattacga

SEQ ID NO: 79015 - DNA, 25 bp, SARS Virus
ggacaaaggtagtaattattacgac

SEQ ID NO: 79016 - DNA, 25 bp, SARS Virus
gacaaaggtagttattattacgaca

SEQ ID NO: 79017 - DNA, 25 bp, SARS Virus
acaaaggtagtatttattacgacaa

SEQ ID NO: 79018 - DNA, 25 bp, SARS Virus
caaaggtagtaattattacgacaaa

SEQ ID NO: 79019 - DNA, 25 bp, SARS Virus
aaaggtagtaattattacgacaaat

SEQ ID NO: 79020 - DNA, 25 bp, SARS Virus
aaggtagtaatttttacgacaaatg

SEQ ID NO: 79021 - DNA, 25 bp, SARS Virus
aggtagtaattattacgacaaatgt

SEQ ID NO: 79022 - DNA, 25 bp, SARS Virus
ggtagtaattattacgacaaatgtg

SEQ ID NO: 79023 - DNA, 25 bp, SARS Virus
gtagtaattatttcgacaaatgtgt

SEQ ID NO: 79024 - DNA, 25 bp, SARS Virus
tagtaattattatgacaaatgtgtt

SEQ ID NO: 79025 - DNA, 25 bp, SARS Virus
agtaattattactacaaatgtgttt

SEQ ID NO: 79026 - DNA, 25 bp, SARS Virus
gtaattattacgtcaaatgtgtttc

SEQ ID NO: 79027 - DNA, 25 bp, SARS Virus
taattattacgataaatgtgtttcc

SEQ ID NO: 79028 - DNA, 25 bp, SARS Virus
aattattacgactaatgtgtttcca

SEQ ID NO: 79029 - DNA, 25 bp, SARS Virus
attattacgacatatgtgtttccat

SEQ ID NO: 79030 - DNA, 25 bp, SARS Virus
ttattacgacaattgtgtttccatc

SEQ ID NO: 79031 - DNA, 25 bp, SARS Virus
tattacgacaaatgtgtttccatct

SEQ ID NO: 79032 - DNA, 25 bp, SARS Virus
attacgacaaatttgtttccatcta

SEQ ID NO: 79033 - DNA, 25 bp, SARS Virus
ttacgacaaatgtgtttccatctac

SEQ ID NO: 79034 - DNA, 25 bp, SARS Virus
tacgacaaatgtttttccatctacc

SEQ ID NO: 79035 - DNA, 25 bp, SARS Virus
acgacaaatgtgtttccatctacca

SEQ ID NO: 79036 - DNA, 25 bp, SARS Virus
cgacaaatgtgtttccatctaccat

SEQ ID NO: 79037 - DNA, 25 bp, SARS Virus
gacaaatgtgtttccatctaccata

SEQ ID NO: 79038 - DNA, 25 bp, SARS Virus
acaaatgtgttttcatctaccataa

SEQ ID NO: 79039 - DNA, 25 bp, SARS Virus
caaatgtgtttctatctaccataac

SEQ ID NO: 79040 - DNA, 25 bp, SARS Virus
aaatgtgtttccttctaccataact

SEQ ID NO: 79041 - DNA, 25 bp, SARS Virus
aatgtgtttccatctaccataacta

SEQ ID NO: 79042 - DNA, 25 bp, SARS Virus
atgtgtttccatttaccataactac

SEQ ID NO: 79043 - DNA, 25 bp, SARS Virus
tgtgtttccatctaccataactaca

SEQ ID NO: 79044 - DNA, 25 bp, SARS Virus
gtgtttccatcttccataactacac

SEQ ID NO: 79045 - DNA, 25 bp, SARS Virus
tgtttccatctatcataactacacc

SEQ ID NO: 79046 - DNA, 25 bp, SARS Virus
gtttccatctactataactacacct

SEQ ID NO: 79047 - DNA, 25 bp, SARS Virus
tttccatctaccttaactacacctc

SEQ ID NO: 79048 - DNA, 25 bp, SARS Virus
ttccatctaccataactacacctct

SEQ ID NO: 79049 - DNA, 25 bp, SARS Virus
tccatctaccattactacacctcta

SEQ ID NO: 79050 - DNA, 25 bp, SARS Virus
ccatctaccatatctacacctctag

SEQ ID NO: 79051 - DNA, 25 bp, SARS Virus
catctaccataattacacctctaga

SEQ ID NO: 79052 - DNA, 25 bp, SARS Virus
atctaccataactacacctctagaa

SEQ ID NO: 79053 - DNA, 25 bp, SARS Virus
tctaccataacttcacctctagaaa

SEQ ID NO: 79054 - DNA, 25 bp, SARS Virus
ctaccataactatacctctagaaac

SEQ ID NO: 79055 - DNA, 25 bp, SARS Virus
taccataactactcctctagaaact

SEQ ID NO: 79056 - DNA, 25 bp, SARS Virus
accataactacatctctagaaactt

SEQ ID NO: 79057 - DNA, 25 bp, SARS Virus
ccataactacacttctagaaacttt

SEQ ID NO: 79058 - DNA, 25 bp, SARS Virus
cataactacacctctagaaactttt

SEQ ID NO: 79059 - DNA, 25 bp, SARS Virus
ataactacacctttagaaactttta

SEQ ID NO: 79060 - DNA, 25 bp, SARS Virus
taactacacctctagaaacttttat

SEQ ID NO: 79061 - DNA, 25 bp, SARS Virus
aactacacctcttgaaacttttatt

SEQ ID NO: 79062 - DNA, 25 bp, SARS Virus
actacacctctataaacttttattc

SEQ ID NO: 79063 - DNA, 25 bp, SARS Virus
ctacacctctagtaacttttattct

SEQ ID NO: 79064 - DNA, 25 bp, SARS Virus
tacacctctagatacttttattctg

SEQ ID NO: 79065 - DNA, 25 bp, SARS Virus
acacctctagaatcttttattctgt

SEQ ID NO: 79066 - DNA, 25 bp, SARS Virus
cacctctagaaatttttattctgtt

SEQ ID NO: 79067 - DNA, 25 bp, SARS Virus
acctctagaaacttttattctgttg

SEQ ID NO: 79068 - DNA, 25 bp, SARS Virus
cctctagaaacttttattctgttgt

SEQ ID NO: 79069 - DNA, 25 bp, SARS Virus
ctctagaaacttttattctgttgtg

SEQ ID NO: 79070 - DNA, 25 bp, SARS Virus
tctagaaacttttattctgttgtga

SEQ ID NO: 79071 - DNA, 25 bp, SARS Virus
ctagaaactttttttctgttgtgaa

SEQ ID NO: 79072 - DNA, 25 bp, SARS Virus
tagaaacttttattctgttgtgaag

SEQ ID NO: 79073 - DNA, 25 bp, SARS Virus
agaaacttttattctgttgtgaagg

SEQ ID NO: 79074 - DNA, 25 bp, SARS Virus
gaaacttttattttgttgtgaagga

SEQ ID NO: 79075 - DNA, 25 bp, SARS Virus
aaacttttattctgttgtgaaggac

SEQ ID NO: 79076 - DNA, 25 bp, SARS Virus
aacttttattcttttgtgaaggaca

SEQ ID NO: 79077 - DNA, 25 bp, SARS Virus
acttttattctgttgtgaaggacaa

SEQ ID NO: 79078 - DNA, 25 bp, SARS Virus
cttttattctgttgtgaaggacaat

SEQ ID NO: 79079 - DNA, 25 bp, SARS Virus
ttttattctgttttgaaggacaatt

SEQ ID NO: 79080 - DNA, 25 bp, SARS Virus
tttattctgttgtgaaggacaatta

SEQ ID NO: 79081 - DNA, 25 bp, SARS Virus
ttattctgttgttaaggacaattac

SEQ ID NO: 79082 - DNA, 25 bp, SARS Virus
tattctgttgtgtaggacaattaca

SEQ ID NO: 79083 - DNA, 25 bp, SARS Virus
attctgttgtgatggacaattacaa

SEQ ID NO: 79084 - DNA, 25 bp, SARS Virus
ttctgttgtgaatgacaattacaac

SEQ ID NO: 79085 - DNA, 25 bp, SARS Virus
tctgttgtgaagtacaattacaacg

SEQ ID NO: 79086 - DNA, 25 bp, SARS Virus
ctgttgtgaaggtcaattacaacgt

SEQ ID NO: 79087 - DNA, 25 bp, SARS Virus
tgttgtgaaggataattacaacgta

SEQ ID NO: 79088 - DNA, 25 bp, SARS Virus
gttgtgaaggactattacaacgtaa

SEQ ID NO: 79089 - DNA, 25 bp, SARS Virus
ttgtgaaggacatttacaacgtaaa

SEQ ID NO: 79090 - DNA, 25 bp, SARS Virus
tgtgaaggacaattacaacgtaaac

SEQ ID NO: 79091 - DNA, 25 bp, SARS Virus
gtgaaggacaattacaacgtaaact

SEQ ID NO: 79092 - DNA, 25 bp, SARS Virus
tgaaggacaatttcaacgtaaactc

SEQ ID NO: 79093 - DNA, 25 bp, SARS Virus
gaaggacaattataacgtaaactcg

SEQ ID NO: 79094 - DNA, 25 bp, SARS Virus
aaggacaattactacgtaaactcga

SEQ ID NO: 79095 - DNA, 25 bp, SARS Virus
aggacaattacatcgtaaactcgaa

SEQ ID NO: 79096 - DNA, 25 bp, SARS Virus
ggacaattacaatgtaaactcgaaa

SEQ ID NO: 79097 - DNA, 25 bp, SARS Virus
gacaattacaacttaaactcgaaac

SEQ ID NO: 79098 - DNA, 25 bp, SARS Virus
acaattacaacgtaaactcgaaacc

SEQ ID NO: 79099 - DNA, 25 bp, SARS Virus
caattacaacgttaactcgaaaccc

SEQ ID NO: 79100 - DNA, 25 bp, SARS Virus
aattacaacgtatactcgaaacccg

SEQ ID NO: 79101 - DNA, 25 bp, SARS Virus
attacaacgtaatctcgaaacccga

SEQ ID NO: 79102 - DNA, 25 bp, SARS Virus
ttacaacgtaaattcgaaacccgat

SEQ ID NO: 79103 - DNA, 25 bp, SARS Virus
tacaacgtaaactcgaaacccgatt

SEQ ID NO: 79104 - DNA, 25 bp, SARS Virus
acaacgtaaacttgaaacccgattc

SEQ ID NO: 79105 - DNA, 25 bp, SARS Virus
caacgtaaactctaaacccgattcg

SEQ ID NO: 79106 - DNA, 25 bp, SARS Virus
aacgtaaactcgtaacccgattcgc

SEQ ID NO: 79107 - DNA, 25 bp, SARS Virus
acgtaaactcgatacccgattcgca

SEQ ID NO: 79108 - DNA, 25 bp, SARS Virus
cgtaaactcgaatcccgattcgcat

SEQ ID NO: 79109 - DNA, 25 bp, SARS Virus
gtaaactcgaaatccgattcgcatt

SEQ ID NO: 79110 - DNA, 25 bp, SARS Virus
taaactcgaaactcgattcgcattg

SEQ ID NO: 79111 - DNA, 25 bp, SARS Virus
aaactcgaaacctgattcgcattgt

SEQ ID NO: 79112 - DNA, 25 bp, SARS Virus
aactcgaaaccctattcgcattgta

SEQ ID NO: 79113 - DNA, 25 bp, SARS Virus
actcgaaacccgtttcgcattgtaa

SEQ ID NO: 79114 - DNA, 25 bp, SARS Virus
ctcgaaacccgattcgcattgtaat

SEQ ID NO: 79115 - DNA, 25 bp, SARS Virus
tcgaaacccgattcgcattgtaatt

SEQ ID NO: 79116 - DNA, 25 bp, SARS Virus
cgaaacccgatttgcattgtaattt

SEQ ID NO: 79117 - DNA, 25 bp, SARS Virus
gaaacccgattctcattgtaatttg

SEQ ID NO: 79118 - DNA, 25 bp, SARS Virus
aaacccgattcgtattgtaatttgg

SEQ ID NO: 79119 - DNA, 25 bp, SARS Virus
aacccgattcgctttgtaatttggt

SEQ ID NO: 79120 - DNA, 25 bp, SARS Virus
acccgattcgcattgtaatttggtc

SEQ ID NO: 79121 - DNA, 25 bp, SARS Virus
cccgattcgcattgtaatttggtca

SEQ ID NO: 79122 - DNA, 25 bp, SARS Virus
ccgattcgcattttaatttggtcac

SEQ ID NO: 79123 - DNA, 25 bp, SARS Virus
cgattcgcattgtaatttggtcacg

SEQ ID NO: 79124 - DNA, 25 bp, SARS Virus
gattcgcattgttatttggtcacgg

SEQ ID NO: 79125 - DNA, 25 bp, SARS Virus
attcgcattgtattttggtcacggt

SEQ ID NO: 79126 - DNA, 25 bp, SARS Virus
ttcgcattgtaatttggtcacggtc

SEQ ID NO: 79127 - DNA, 25 bp, SARS Virus
tcgcattgtaatttggtcacggtct

SEQ ID NO: 79128 - DNA, 25 bp, SARS Virus
cgcattgtaatttggtcacggtctc

SEQ ID NO: 79129 - DNA, 25 bp, SARS Virus
gcattgtaattttgtcacggtctct

SEQ ID NO: 79130 - DNA, 25 bp, SARS Virus
cattgtaatttgttcacggtctcta

SEQ ID NO: 79131 - DNA, 25 bp, SARS Virus
attgtaatttggtcacggtctctaa

SEQ ID NO: 79132 - DNA, 25 bp, SARS Virus
ttgtaatttggttacggtctctaat

SEQ ID NO: 79133 - DNA, 25 bp, SARS Virus
tgtaatttggtctcggtctctaatt

SEQ ID NO: 79134 - DNA, 25 bp, SARS Virus
gtaatttggtcatggtctctaattc

SEQ ID NO: 79135 - DNA, 25 bp, SARS Virus
taatttggtcactgtctctaattct

SEQ ID NO: 79136 - DNA, 25 bp, SARS Virus
aatttggtcacgttctctaattcta

SEQ ID NO: 79137 - DNA, 25 bp, SARS Virus
atttggtcacggtctctaattctat

SEQ ID NO: 79138 - DNA, 25 bp, SARS Virus
tttggtcacggtttctaattctatg

SEQ ID NO: 79139 - DNA, 25 bp, SARS Virus
ttggtcacggtctctaattctatga

SEQ ID NO: 79140 - DNA, 25 bp, SARS Virus
tggtcacggtctttaattctatgag

SEQ ID NO: 79141 - DNA, 25 bp, SARS Virus
ggtcacggtctctaattctatgagt

SEQ ID NO: 79142 - DNA, 25 bp, SARS Virus
gtcacggtctcttattctatgagtt

SEQ ID NO: 79143 - DNA, 25 bp, SARS Virus
tcacggtctctatttctatgagtta

SEQ ID NO: 79144 - DNA, 25 bp, SARS Virus
cacggtctctaattctatgagttat

SEQ ID NO: 79145 - DNA, 25 bp, SARS Virus
acggtctctaattctatgagttatt

SEQ ID NO: 79146 - DNA, 25 bp, SARS Virus
cggtctctaattttatgagttatta

SEQ ID NO: 79147 - DNA, 25 bp, SARS Virus
ggtctctaattctatgagttattaa

SEQ ID NO: 79148 - DNA, 25 bp, SARS Virus
gtctctaattctttgagttattaaa

SEQ ID NO: 79149 - DNA, 25 bp, SARS Virus
tctctaattctatgagttattaaac

SEQ ID NO: 79150 - DNA, 25 bp, SARS Virus
ctctaattctattagttattaaacc

SEQ ID NO: 79151 - DNA, 25 bp, SARS Virus
tctaattctatgtgttattaaaccc

SEQ ID NO: 79152 - DNA, 25 bp, SARS Virus
ctaattctatgatttattaaaccca

SEQ ID NO: 79153 - DNA, 25 bp, SARS Virus
taattctatgagttattaaacccac

SEQ ID NO: 79154 - DNA, 25 bp, SARS Virus
aattctatgagttattaaacccaca

SEQ ID NO: 79155 - DNA, 25 bp, SARS Virus
attctatgagtttttaaacccacaa

SEQ ID NO: 79156 - DNA, 25 bp, SARS Virus
ttctatgagttattaaacccacaac

SEQ ID NO: 79157 - DNA, 25 bp, SARS Virus
tctatgagttattaaacccacaact

SEQ ID NO: 79158 - DNA, 25 bp, SARS Virus
ctatgagttatttaacccacaacta

SEQ ID NO: 79159 - DNA, 25 bp, SARS Virus
tatgagttattatacccacaactat

SEQ ID NO: 79160 - DNA, 25 bp, SARS Virus
atgagttattaatcccacaactata

SEQ ID NO: 79161 - DNA, 25 bp, SARS Virus
tgagttattaaatccacaactatag

SEQ ID NO: 79162 - DNA, 25 bp, SARS Virus
gagttattaaactcacaactatagc

SEQ ID NO: 79163 - DNA, 25 bp, SARS Virus
agttattaaacctacaactatagcg

SEQ ID NO: 79164 - DNA, 25 bp, SARS Virus
gttattaaaccctcaactatagcga

SEQ ID NO: 79165 - DNA, 25 bp, SARS Virus
ttattaaacccataactatagcgac

SEQ ID NO: 79166 - DNA, 25 bp, SARS Virus
tattaaacccactactatagcgacg

SEQ ID NO: 79167 - DNA, 25 bp, SARS Virus
attaaacccacatctatagcgacga

SEQ ID NO: 79168 - DNA, 25 bp, SARS Virus
ttaaacccacaattatagcgacgat

SEQ ID NO: 79169 - DNA, 25 bp, SARS Virus
taaacccacaactatagcgacgatt

SEQ ID NO: 79170 - DNA, 25 bp, SARS Virus
aaacccacaactttagcgacgatta

SEQ ID NO: 79171 - DNA, 25 bp, SARS Virus
aacccacaactatagcgacgattat

SEQ ID NO: 79172 - DNA, 25 bp, SARS Virus
acccacaactattgcgacgattatg

SEQ ID NO: 79173 - DNA, 25 bp, SARS Virus
cccacaactatatcgacgattatga

SEQ ID NO: 79174 - DNA, 25 bp, SARS Virus
ccacaactatagtgacgattatgac

SEQ ID NO: 79175 - DNA, 25 bp, SARS Virus
cacaactatagctacgattatgaca

SEQ ID NO: 79176 - DNA, 25 bp, SARS Virus
acaactatagcgtcgattatgacat

SEQ ID NO: 79177 - DNA, 25 bp, SARS Virus
caactatagcgatgattatgacatt

SEQ ID NO: 79178 - DNA, 25 bp, SARS Virus
aactatagcgactattatgacatta

SEQ ID NO: 79179 - DNA, 25 bp, SARS Virus
actatagcgacgtttatgacattag

SEQ ID NO: 79180 - DNA, 25 bp, SARS Virus
ctatagcgacgattatgacattaga

SEQ ID NO: 79181 - DNA, 25 bp, SARS Virus
tatagcgacgattatgacattagac

SEQ ID NO: 79182 - DNA, 25 bp, SARS Virus
atagcgacgattttgacattagacc

SEQ ID NO: 79183 - DNA, 25 bp, SARS Virus
tagcgacgattatgacattagaccc

SEQ ID NO: 79184 - DNA, 25 bp, SARS Virus
agcgacgattattacattagaccct

SEQ ID NO: 79185 - DNA, 25 bp, SARS Virus
gcgacgattatgacattagaccctg

SEQ ID NO: 79186 - DNA, 25 bp, SARS Virus
cgacgattatgaaattagaccctga

SEQ ID NO: 79187 - DNA, 25 bp, SARS Virus
gacgattatgacattagaccctgat

SEQ ID NO: 79188 - DNA, 25 bp, SARS Virus
acgattatgacaatagaccctgatg

SEQ ID NO: 79189 - DNA, 25 bp, SARS Virus
cgattatgacataagaccctgatgt

SEQ ID NO: 79190 - DNA, 25 bp, SARS Virus
gattatgacattagaccctgatgtt

SEQ ID NO: 79191 - DNA, 25 bp, SARS Virus
attatgacattaaaccctgatgttt

SEQ ID NO: 79192 - DNA, 25 bp, SARS Virus
ttatgacattagaccctgatgtttt

SEQ ID NO: 79193 - DNA, 25 bp, SARS Virus
tatgacattagaacctgatgttttc

SEQ ID NO: 79194 - DNA, 25 bp, SARS Virus
atgacattagacactgatgttttct

SEQ ID NO: 79195 - DNA, 25 bp, SARS Virus
tgacattagaccatgatgttttctc

SEQ ID NO: 79196 - DNA, 25 bp, SARS Virus
gacattagacccagatgttttctct

SEQ ID NO: 79197 - DNA, 25 bp, SARS Virus
acattagaccctaatgttttctctt

SEQ ID NO: 79198 - DNA, 25 bp, SARS Virus
cattagaccctgatgttttctcttc

SEQ ID NO: 79199 - DNA, 25 bp, SARS Virus
attagaccctgaagttttctcttcg

SEQ ID NO: 79200 - DNA, 25 bp, SARS Virus
ttagaccctgatattttctcttcgg

SEQ ID NO: 79201 - DNA, 25 bp, SARS Virus
tagaccctgatgatttctcttcggg

SEQ ID NO: 79202 - DNA, 25 bp, SARS Virus
agaccctgatgtattctcttcgggg

SEQ ID NO: 79203 - DNA, 25 bp, SARS Virus
gaccctgatgttatctcttcggggt

SEQ ID NO: 79204 - DNA, 25 bp, SARS Virus
accctgatgtttactcttcggggtc

SEQ ID NO: 79205 - DNA, 25 bp, SARS Virus
ccctgatgttttatcttcggggtcg

SEQ ID NO: 79206 - DNA, 25 bp, SARS Virus
cctgatgttttcacttcggggtcgt

SEQ ID NO: 79207 - DNA, 25 bp, SARS Virus
ctgatgttttctattcggggtcgtg

SEQ ID NO: 79208 - DNA, 25 bp, SARS Virus
tgatgttttctcatcggggtcgtgt

SEQ ID NO: 79209 - DNA, 25 bp, SARS Virus
gatgttttctctacggggtcgtgta

SEQ ID NO: 79210 - DNA, 25 bp, SARS Virus
atgttttctcttaggggtcgtgtac

SEQ ID NO: 79211 - DNA, 25 bp, SARS Virus
tgttttctcttcagggtcgtgtaca

SEQ ID NO: 79212 - DNA, 25 bp, SARS Virus
gttttctcttcgaggtcgtgtacat

SEQ ID NO: 79213 - DNA, 25 bp, SARS Virus
ttttctcttcggagtcgtgtacata

SEQ ID NO: 79214 - DNA, 25 bp, SARS Virus
tttctcttcgggatcgtgtacatag

SEQ ID NO: 79215 - DNA, 25 bp, SARS Virus
ttctcttcggggacgtgtacataga

SEQ ID NO: 79216 - DNA, 25 bp, SARS Virus
tctcttcggggtagtgtacatagat

SEQ ID NO: 79217 - DNA, 25 bp, SARS Virus
ctcttcggggtcatgtacatagatg

SEQ ID NO: 79218 - DNA, 25 bp, SARS Virus
tcttcggggtcgagtacatagatgt

SEQ ID NO: 79219 - DNA, 25 bp, SARS Virus
cttcggggtcgtatacatagatgtt

SEQ ID NO: 79220 - DNA, 25 bp, SARS Virus
ttcggggtcgtgaacatagatgtta

SEQ ID NO: 79221 - DNA, 25 bp, SARS Virus
tcggggtcgtgtacatagatgttat

SEQ ID NO: 79222 - DNA, 25 bp, SARS Virus
cggggtcgtgtaaatagatgttatc

SEQ ID NO: 79223 - DNA, 25 bp, SARS Virus
ggggtcgtgtacatagatgttatcc

SEQ ID NO: 79224 - DNA, 25 bp, SARS Virus
gggtcgtgtacaaagatgttatcca

SEQ ID NO: 79225 - DNA, 25 bp, SARS Virus
ggtcgtgtacatagatgttatccac

SEQ ID NO: 79226 - DNA, 25 bp, SARS Virus
gtcgtgtacataaatgttatccaca

SEQ ID NO: 79227 - DNA, 25 bp, SARS Virus
tcgtgtacatagatgttatccacag

SEQ ID NO: 79228 - DNA, 25 bp, SARS Virus
cgtgtacatagaagttatccacaga

SEQ ID NO: 79229 - DNA, 25 bp, SARS Virus
gtgtacatagatattatccacagac

SEQ ID NO: 79230 - DNA, 25 bp, SARS Virus
tgtacatagatgatatccacagacg

SEQ ID NO: 79231 - DNA, 25 bp, SARS Virus
gtacatagatgtaatccacagacgt

SEQ ID NO: 79232 - DNA, 25 bp, SARS Virus
tacatagatgttatccacagacgtg

SEQ ID NO: 79233 - DNA, 25 bp, SARS Virus
acatagatgttaaccacagacgtgt

SEQ ID NO: 79234 - DNA, 25 bp, SARS Virus
catagatgttatacacagacgtgtt

SEQ ID NO: 79235 - DNA, 25 bp, SARS Virus
atagatgttatcaacagacgtgtta

SEQ ID NO: 79236 - DNA, 25 bp, SARS Virus
tagatgttatccacagacgtgttac

SEQ ID NO: 79237 - DNA, 25 bp, SARS Virus
agatgttatccaaagacgtgttact

SEQ ID NO: 79238 - DNA, 25 bp, SARS Virus
gatgttatccacagacgtgttactg

SEQ ID NO: 79239 - DNA, 25 bp, SARS Virus
atgttatccacaaacgtgttactga

SEQ ID NO: 79240 - DNA, 25 bp, SARS Virus
tgttatccacagacgtgttactgac

SEQ ID NO: 79241 - DNA, 25 bp, SARS Virus
gttatccacagaagtgttactgact

SEQ ID NO: 79242 - DNA, 25 bp, SARS Virus
ttatccacagacatgttactgactg

SEQ ID NO: 79243 - DNA, 25 bp, SARS Virus
tatccacagacgagttactgactgt

SEQ ID NO: 79244 - DNA, 25 bp, SARS Virus
atccacagacgtattactgactgta

SEQ ID NO: 79245 - DNA, 25 bp, SARS Virus
tccacagacgtgatactgactgtaa

SEQ ID NO: 79246 - DNA, 25 bp, SARS Virus
ccacagacgtgtaactgactgtaac

SEQ ID NO: 79247 - DNA, 25 bp, SARS Virus
cacagacgtgttactgactgtaacg

SEQ ID NO: 79248 - DNA, 25 bp, SARS Virus
acagacgtgttaatgactgtaacgg

SEQ ID NO: 79249 - DNA, 25 bp, SARS Virus
cagacgtgttacagactgtaacggt

SEQ ID NO: 79250 - DNA, 25 bp, SARS Virus
agacgtgttactaactgtaacggtt

SEQ ID NO: 79251 - DNA, 25 bp, SARS Virus
gacgtgttactgactgtaacggttc

SEQ ID NO: 79252 - DNA, 25 bp, SARS Virus
acgtgttactgaatgtaacggttct

SEQ ID NO: 79253 - DNA, 25 bp, SARS Virus
cgtgttactgacagtaacggttctt

SEQ ID NO: 79254 - DNA, 25 bp, SARS Virus
gtgttactgactataacggttcttt

SEQ ID NO: 79255 - DNA, 25 bp, SARS Virus
tgttactgactgaaacggttctttg

SEQ ID NO: 79256 - DNA, 25 bp, SARS Virus
gttactgactgtaacggttctttgg

SEQ ID NO: 79257 - DNA, 25 bp, SARS Virus
ttactgactgtaacggttctttgga

SEQ ID NO: 79258 - DNA, 25 bp, SARS Virus
tactgactgtaaaggttctttggat

SEQ ID NO: 79259 - DNA, 25 bp, SARS Virus
actgactgtaacagttctttggatg

SEQ ID NO: 79260 - DNA, 25 bp, SARS Virus
ctgactgtaacgattctttggatga

SEQ ID NO: 79261 - DNA, 25 bp, SARS Virus
tgactgtaacggatctttggatgac

SEQ ID NO: 79262 - DNA, 25 bp, SARS Virus
gactgtaacggtactttggatgact

SEQ ID NO: 79263 - DNA, 25 bp, SARS Virus
actgtaacggttatttggatgactc

SEQ ID NO: 79264 - DNA, 25 bp, SARS Virus
ctgtaacggttcattggatgactct

SEQ ID NO: 79265 - DNA, 25 bp, SARS Virus
tgtaacggttctatggatgactctc

SEQ ID NO: 79266 - DNA, 25 bp, SARS Virus
gtaacggttcttaggatgactctca

SEQ ID NO: 79267 - DNA, 25 bp, SARS Virus
taacggttctttagatgactctcac

SEQ ID NO: 79268 - DNA, 25 bp, SARS Virus
aacggttctttgaatgactctcacg

SEQ ID NO: 79269 - DNA, 25 bp, SARS Virus
acggttctttggatgactctcacga

SEQ ID NO: 79270 - DNA, 25 bp, SARS Virus
cggttctttggaagactctcacgaa

SEQ ID NO: 79271 - DNA, 25 bp, SARS Virus
ggttctttggataactctcacgaac

SEQ ID NO: 79272 - DNA, 25 bp, SARS Virus
gttctttggatgactctcacgaaca

SEQ ID NO: 79273 - DNA, 25 bp, SARS Virus
ttctttggatgaatctcacgaacaa

SEQ ID NO: 79274 - DNA, 25 bp, SARS Virus
tctttggatgacactcacgaacaag

SEQ ID NO: 79275 - DNA, 25 bp, SARS Virus
ctttggatgactatcacgaacaaga

SEQ ID NO: 79276 - DNA, 25 bp, SARS Virus
tttggatgactcacacgaacaagaa

SEQ ID NO: 79277 - DNA, 25 bp, SARS Virus
ttggatgactctaacgaacaagaag

SEQ ID NO: 79278 - DNA, 25 bp, SARS Virus
tggatgactctcacgaacaagaagt

SEQ ID NO: 79279 - DNA, 25 bp, SARS Virus
ggatgactctcaagaacaagaagtg

SEQ ID NO: 79280 - DNA, 25 bp, SARS Virus
gatgactctcacaaacaagaagtga

SEQ ID NO: 79281 - DNA, 25 bp, SARS Virus
atgactctcacgaacaagaagtgaa

SEQ ID NO: 79282 - DNA, 25 bp, SARS Virus
tgactctcacgaacaagaagtgaat

SEQ ID NO: 79283 - DNA, 25 bp, SARS Virus
gactctcacgaaaaagaagtgaatg

SEQ ID NO: 79284 - DNA, 25 bp, SARS Virus
actctcacgaacaagaagtgaatga

SEQ ID NO: 79285 - DNA, 25 bp, SARS Virus
ctctcacgaacaagaagtgaatgac

SEQ ID NO: 79286 - DNA, 25 bp, SARS Virus
tctcacgaacaaaaagtgaatgaca

SEQ ID NO: 79287 - DNA, 25 bp, SARS Virus
ctcacgaacaagaagtgaatgacag

SEQ ID NO: 79288 - DNA, 25 bp, SARS Virus
tcacgaacaagaagtgaatgacaga

SEQ ID NO: 79289 - DNA, 25 bp, SARS Virus
cacgaacaagaaatgaatgacagaa

SEQ ID NO: 79290 - DNA, 25 bp, SARS Virus
acgaacaagaagagaatgacagaac

SEQ ID NO: 79291 - DNA, 25 bp, SARS Virus
cgaacaagaagtaaatgacagaaca

SEQ ID NO: 79292 - DNA, 25 bp, SARS Virus
gaacaagaagtgaatgacagaacaa

SEQ ID NO: 79293 - DNA, 25 bp, SARS Virus
aacaagaagtgaatgacagaacaaa

SEQ ID NO: 79294 - DNA, 25 bp, SARS Virus
acaagaagtgaaagacagaacaaac

SEQ ID NO: 79295 - DNA, 25 bp, SARS Virus
caagaagtgaataacagaacaaact

SEQ ID NO: 79296 - DNA, 25 bp, SARS Virus
aagaagtgaatgacagaacaaacta

SEQ ID NO: 79297 - DNA, 25 bp, SARS Virus
agaagtgaatgaaagaacaaactac

SEQ ID NO: 79298 - DNA, 25 bp, SARS Virus
gaagtgaatgacagaacaaactacc

SEQ ID NO: 79299 - DNA, 25 bp, SARS Virus
aagtgaatgacaaaacaaactacca

SEQ ID NO: 79300 - DNA, 25 bp, SARS Virus
agtgaatgacagaacaaactaccat

SEQ ID NO: 79301 - DNA, 25 bp, SARS Virus
gtgaatgacagaacaaactaccatc

SEQ ID NO: 79302 - DNA, 25 bp, SARS Virus
tgaatgacagaaaaaactaccatct

SEQ ID NO: 79303 - DNA, 25 bp, SARS Virus
gaatgacagaacaaactaccatctc

SEQ ID NO: 79304 - DNA, 25 bp, SARS Virus
aatgacagaacaaactaccatctca

SEQ ID NO: 79305 - DNA, 25 bp, SARS Virus
atgacagaacaaactaccatctcac

SEQ ID NO: 79306 - DNA, 25 bp, SARS Virus
tgacagaacaaaataccatctcacc

SEQ ID NO: 79307 - DNA, 25 bp, SARS Virus
gacagaacaaacaaccatctcacct

SEQ ID NO: 79308 - DNA, 25 bp, SARS Virus
acagaacaaactaccatctcacctt

SEQ ID NO: 79309 - DNA, 25 bp, SARS Virus
cagaacaaactaacatctcaccttc

SEQ ID NO: 79310 - DNA, 25 bp, SARS Virus
agaacaaactacaatctcaccttcc

SEQ ID NO: 79311 - DNA, 25 bp, SARS Virus
gaacaaactaccatctcaccttcct

SEQ ID NO: 79312 - DNA, 25 bp, SARS Virus
aacaaactaccaactcaccttcctg

SEQ ID NO: 79313 - DNA, 25 bp, SARS Virus
acaaactaccatatcaccttcctgt

SEQ ID NO: 79314 - DNA, 25 bp, SARS Virus
caaactaccatcacaccttcctgtc

SEQ ID NO: 79315 - DNA, 25 bp, SARS Virus
aaactaccatctaaccttcctgtcc

SEQ ID NO: 79316 - DNA, 25 bp, SARS Virus
aactaccatctcaccttcctgtcca

SEQ ID NO: 79317 - DNA, 25 bp, SARS Virus
actaccatctcaacttcctgtccat

SEQ ID NO: 79318 - DNA, 25 bp, SARS Virus
ctaccatctcacattcctgtccatc

SEQ ID NO: 79319 - DNA, 25 bp, SARS Virus
taccatctcaccatcctgtccatct

SEQ ID NO: 79320 - DNA, 25 bp, SARS Virus
accatctcacctacctgtccatctg

SEQ ID NO: 79321 - DNA, 25 bp, SARS Virus
ccatctcaccttactgtccatctgg

SEQ ID NO: 79322 - DNA, 25 bp, SARS Virus
catctcaccttcatgtccatctgga

SEQ ID NO: 79323 - DNA, 25 bp, SARS Virus
atctcaccttccagtccatctggaa

SEQ ID NO: 79324 - DNA, 25 bp, SARS Virus
tctcaccttcctatccatctggaaa

SEQ ID NO: 79325 - DNA, 25 bp, SARS Virus
ctcaccttcctgaccatctggaaaa

SEQ ID NO: 79326 - DNA, 25 bp, SARS Virus
tcaccttcctgtacatctggaaaaa

SEQ ID NO: 79327 - DNA, 25 bp, SARS Virus
caccttcctgtcaatctggaaaaat

SEQ ID NO: 79328 - DNA, 25 bp, SARS Virus
accttcctgtccatctggaaaaatc

SEQ ID NO: 79329 - DNA, 25 bp, SARS Virus
ccttcctgtccaactggaaaaatct

SEQ ID NO: 79330 - DNA, 25 bp, SARS Virus
cttcctgtccatatggaaaaatctt

SEQ ID NO: 79331 - DNA, 25 bp, SARS Virus
ttcctgtccatcaggaaaaatcttt

SEQ ID NO: 79332 - DNA, 25 bp, SARS Virus
tcctgtccatctagaaaaatctttg

SEQ ID NO: 79333 - DNA, 25 bp, SARS Virus
cctgtccatctgaaaaaatctttgc

SEQ ID NO: 79334 - DNA, 25 bp, SARS Virus
ctgtccatctggaaaaatctttgcg

SEQ ID NO: 79335 - DNA, 25 bp, SARS Virus
tgtccatctggaaaaatctttgcgg

SEQ ID NO: 79336 - DNA, 25 bp, SARS Virus
gtccatctggaaaaatctttgcggg

SEQ ID NO: 79337 - DNA, 25 bp, SARS Virus
tccatctggaaaaatctttgcgggc

SEQ ID NO: 79338 - DNA, 25 bp, SARS Virus
ccatctggaaaaatctttgcgggca

SEQ ID NO: 79339 - DNA, 25 bp, SARS Virus
catctggaaaaaactttgcgggcat

SEQ ID NO: 79340 - DNA, 25 bp, SARS Virus
atctggaaaaatatttgcgggcatt

SEQ ID NO: 79341 - DNA, 25 bp, SARS Virus
tctggaaaaatcattgcgggcatta

SEQ ID NO: 79342 - DNA, 25 bp, SARS Virus
ctggaaaaatctatgcgggcattac

SEQ ID NO: 79343 - DNA, 25 bp, SARS Virus
tggaaaaatcttagcgggcattacc

SEQ ID NO: 79344 - DNA, 25 bp, SARS Virus
ggaaaaatctttacgggcattacca

SEQ ID NO: 79345 - DNA, 25 bp, SARS Virus
gaaaaatctttgagggcattaccac

SEQ ID NO: 79346 - DNA, 25 bp, SARS Virus
aaaaatctttgcaggcattaccaca

SEQ ID NO: 79347 - DNA, 25 bp, SARS Virus
aaaatctttgcgagcattaccacaa

SEQ ID NO: 79348 - DNA, 25 bp, SARS Virus
aaatctttgcggacattaccacaaa

SEQ ID NO: 79349 - DNA, 25 bp, SARS Virus
aatctttgcgggaattaccacaaaa

SEQ ID NO: 79350 - DNA, 25 bp, SARS Virus
atctttgcgggcattaccacaaaat

SEQ ID NO: 79351 - DNA, 25 bp, SARS Virus
tctttgcgggcaataccacaaaatt

SEQ ID NO: 79352 - DNA, 25 bp, SARS Virus
ctttgcgggcataaccacaaaatta

SEQ ID NO: 79353 - DNA, 25 bp, SARS Virus
tttgcgggcattaccacaaaattat

SEQ ID NO: 79354 - DNA, 25 bp, SARS Virus
ttgcgggcattaacacaaaattatt

SEQ ID NO: 79355 - DNA, 25 bp, SARS Virus
tgcgggcattacaacaaaattattg

SEQ ID NO: 79356 - DNA, 25 bp, SARS Virus
gcgggcattaccacaaaattattgt

SEQ ID NO: 79357 - DNA, 25 bp, SARS Virus
cgggcattaccaaaaaattattgtc

SEQ ID NO: 79358 - DNA, 25 bp, SARS Virus
gggcattaccacaaaattattgtct

SEQ ID NO: 79359 - DNA, 25 bp, SARS Virus
ggcattaccacaaaattattgtctt

SEQ ID NO: 79360 - DNA, 25 bp, SARS Virus
gcattaccacaaaattattgtcttc

SEQ ID NO: 79361 - DNA, 25 bp, SARS Virus
cattaccacaaaattattgtcttcc

SEQ ID NO: 79362 - DNA, 25 bp, SARS Virus
attaccacaaaaatattgtcttcca

SEQ ID NO: 79363 - DNA, 25 bp, SARS Virus
ttaccacaaaataattgtcttccaa

SEQ ID NO: 79364 - DNA, 25 bp, SARS Virus
taccacaaaattattgtcttccaag

SEQ ID NO: 79365 - DNA, 25 bp, SARS Virus
accacaaaattaatgtcttccaagt

SEQ ID NO: 79366 - DNA, 25 bp, SARS Virus
ccacaaaattatagtcttccaagtc

SEQ ID NO: 79367 - DNA, 25 bp, SARS Virus
cacaaaattattatcttccaagtca

SEQ ID NO: 79368 - DNA, 25 bp, SARS Virus
acaaaattattgacttccaagtcag

SEQ ID NO: 79369 - DNA, 25 bp, SARS Virus
caaaattattgtattccaagtcagt

SEQ ID NO: 79370 - DNA, 25 bp, SARS Virus
aaaattattgtcatccaagtcagtt

SEQ ID NO: 79371 - DNA, 25 bp, SARS Virus
aaattattgtctaccaagtcagttt

SEQ ID NO: 79372 - DNA, 25 bp, SARS Virus
aattattgtcttacaagtcagtttc

SEQ ID NO: 79373 - DNA, 25 bp, SARS Virus
attattgtcttcaaagtcagtttcc

SEQ ID NO: 79374 - DNA, 25 bp, SARS Virus
ttattgtcttccaagtcagtttcca

SEQ ID NO: 79375 - DNA, 25 bp, SARS Virus
tattgtcttccaagtcagtttccag

SEQ ID NO: 79376 - DNA, 25 bp, SARS Virus
attgtcttccaaatcagtttccaga

SEQ ID NO: 79377 - DNA, 25 bp, SARS Virus
ttgtcttccaagacagtttccagat

SEQ ID NO: 79378 - DNA, 25 bp, SARS Virus
tgtcttccaagtaagtttccagatt

SEQ ID NO: 79379 - DNA, 25 bp, SARS Virus
gtcttccaagtcagtttccagattg

SEQ ID NO: 79380 - DNA, 25 bp, SARS Virus
tcttccaagtcaatttccagattgt

SEQ ID NO: 79381 - DNA, 25 bp, SARS Virus
cttccaagtcagattccagattgtg

SEQ ID NO: 79382 - DNA, 25 bp, SARS Virus
ttccaagtcagtatccagattgtgg

SEQ ID NO: 79383 - DNA, 25 bp, SARS Virus
tccaagtcagttaccagattgtgga

SEQ ID NO: 79384 - DNA, 25 bp, SARS Virus
ccaagtcagtttacagattgtggaa

SEQ ID NO: 79385 - DNA, 25 bp, SARS Virus
caagtcagtttcaagattgtggaag

SEQ ID NO: 79386 - DNA, 25 bp, SARS Virus
aagtcagtttccagattgtggaagt

SEQ ID NO: 79387 - DNA, 25 bp, SARS Virus
agtcagtttccaaattgtggaagtt

SEQ ID NO: 79388 - DNA, 25 bp, SARS Virus
gtcagtttccagattgtggaagttt

SEQ ID NO: 79389 - DNA, 25 bp, SARS Virus
tcagtttccagaatgtggaagtttc

SEQ ID NO: 79390 - DNA, 25 bp, SARS Virus
cagtttccagatagtggaagtttcc

SEQ ID NO: 79391 - DNA, 25 bp, SARS Virus
agtttccagattatggaagtttccc

SEQ ID NO: 79392 - DNA, 25 bp, SARS Virus
gtttccagattgaggaagtttccct

SEQ ID NO: 79393 - DNA, 25 bp, SARS Virus
tttccagattgtagaagtttccctg

SEQ ID NO: 79394 - DNA, 25 bp, SARS Virus
ttccagattgtgaaagtttccctgg

SEQ ID NO: 79395 - DNA, 25 bp, SARS Virus
tccagattgtggaagtttccctggt

SEQ ID NO: 79396 - DNA, 25 bp, SARS Virus
ccagattgtggaagtttccctggtc

SEQ ID NO: 79397 - DNA, 25 bp, SARS Virus
cagattgtggaaatttccctggtcg

SEQ ID NO: 79398 - DNA, 25 bp, SARS Virus
agattgtggaagattccctggtcgt

SEQ ID NO: 79399 - DNA, 25 bp, SARS Virus
gattgtggaagtatccctggtcgtg

SEQ ID NO: 79400 - DNA, 25 bp, SARS Virus
attgtggaagttaccctggtcgtgt

SEQ ID NO: 79401 - DNA, 25 bp, SARS Virus
ttgtggaagtttacctggtcgtgtt

SEQ ID NO: 79402 - DNA, 25 bp, SARS Virus
tgtggaagtttcactggtcgtgttc

SEQ ID NO: 79403 - DNA, 25 bp, SARS Virus
gtggaagtttccatggtcgtgttcg

SEQ ID NO: 79404 - DNA, 25 bp, SARS Virus
tggaagtttcccaggtcgtgttcga

SEQ ID NO: 79405 - DNA, 25 bp, SARS Virus
ggaagtttccctagtcgtgttcgat

SEQ ID NO: 79406 - DNA, 25 bp, SARS Virus
gaagtttccctgatcgtgttcgatc

SEQ ID NO: 79407 - DNA, 25 bp, SARS Virus
aagtttccctggacgtgttcgatcg

SEQ ID NO: 79408 - DNA, 25 bp, SARS Virus
agtttccctggtagtgttcgatcgc

SEQ ID NO: 79409 - DNA, 25 bp, SARS Virus
gtttccctggtcatgttcgatcgca

SEQ ID NO: 79410 - DNA, 25 bp, SARS Virus
tttccctggtcgagttcgatcgcag

SEQ ID NO: 79411 - DNA, 25 bp, SARS Virus
ttccctggtcgtattcgatcgcagt

SEQ ID NO: 79412 - DNA, 25 bp, SARS Virus
tccctggtcgtgatcgatcgcagtt

SEQ ID NO: 79413 - DNA, 25 bp, SARS Virus
ccctggtcgtgtacgatcgcagtta

SEQ ID NO: 79414 - DNA, 25 bp, SARS Virus
cctggtcgtgttagatcgcagttac

SEQ ID NO: 79415 - DNA, 25 bp, SARS Virus
ctggtcgtgttcaatcgcagttacc

SEQ ID NO: 79416 - DNA, 25 bp, SARS Virus
tggtcgtgttcgatcgcagttacct

SEQ ID NO: 79417 - DNA, 25 bp, SARS Virus
ggtcgtgttcgaacgcagttacctc

SEQ ID NO: 79418 - DNA, 25 bp, SARS Virus
gtcgtgttcgatagcagttacctca

SEQ ID NO: 79419 - DNA, 25 bp, SARS Virus
tcgtgttcgatcacagttacctcag

SEQ ID NO: 79420 - DNA, 25 bp, SARS Virus
cgtgttcgatcgaagttacctcagt

SEQ ID NO: 79421 - DNA, 25 bp, SARS Virus
gtgttcgatcgcagttacctcagtg

SEQ ID NO: 79422 - DNA, 25 bp, SARS Virus
tgttcgatcgcaattacctcagtgt

SEQ ID NO: 79423 - DNA, 25 bp, SARS Virus
gttcgatcgcagatacctcagtgta

SEQ ID NO: 79424 - DNA, 25 bp, SARS Virus
ttcgatcgcagtaacctcagtgtaa

SEQ ID NO: 79425 - DNA, 25 bp, SARS Virus
tcgatcgcagttacctcagtgtaat

SEQ ID NO: 79426 - DNA, 25 bp, SARS Virus
cgatcgcagttaactcagtgtaatt

SEQ ID NO: 79427 - DNA, 25 bp, SARS Virus
gatcgcagttacatcagtgtaatta

SEQ ID NO: 79428 - DNA, 25 bp, SARS Virus
atcgcagttaccacagtgtaattaa

SEQ ID NO: 79429 - DNA, 25 bp, SARS Virus
tcgcagttacctaagtgtaattaac

SEQ ID NO: 79430 - DNA, 25 bp, SARS Virus
cgcagttacctcagtgtaattaacc

SEQ ID NO: 79431 - DNA, 25 bp, SARS Virus
gcagttacctcaatgtaattaacct

SEQ ID NO: 79432 - DNA, 25 bp, SARS Virus
cagttacctcagagtaattaacctc

SEQ ID NO: 79433 - DNA, 25 bp, SARS Virus
agttacctcagtataattaacctct

SEQ ID NO: 79434 - DNA, 25 bp, SARS Virus
gttacctcagtgaaattaacctctt

SEQ ID NO: 79435 - DNA, 25 bp, SARS Virus
ttacctcagtgtaattaacctctta

SEQ ID NO: 79436 - DNA, 25 bp, SARS Virus
tacctcagtgtaattaacctcttag

SEQ ID NO: 79437 - DNA, 25 bp, SARS Virus
acctcagtgtaaataacctcttagt

SEQ ID NO: 79438 - DNA, 25 bp, SARS Virus
cctcagtgtaataaacctcttagtc

SEQ ID NO: 79439 - DNA, 25 bp, SARS Virus
ctcagtgtaattaacctcttagtca

SEQ ID NO: 79440 - DNA, 25 bp, SARS Virus
tcagtgtaattaacctcttagtcat

SEQ ID NO: 79441 - DNA, 25 bp, SARS Virus
cagtgtaattaaactcttagtcatt

SEQ ID NO: 79442 - DNA, 25 bp, SARS Virus
agtgtaattaacatcttagtcattt

SEQ ID NO: 79443 - DNA, 25 bp, SARS Virus
gtgtaattaaccacttagtcatttt

SEQ ID NO: 79444 - DNA, 25 bp, SARS Virus
tgtaattaacctattagtcattttt

SEQ ID NO: 79445 - DNA, 25 bp, SARS Virus
gtaattaacctcatagtcatttttg

SEQ ID NO: 79446 - DNA, 25 bp, SARS Virus
taattaacctctaagtcatttttgt

SEQ ID NO: 79447 - DNA, 25 bp, SARS Virus
aattaacctcttagtcatttttgtg

SEQ ID NO: 79448 - DNA, 25 bp, SARS Virus
attaacctcttaatcatttttgtgt

SEQ ID NO: 79449 - DNA, 25 bp, SARS Virus
ttaacctcttagacatttttgtgtc

SEQ ID NO: 79450 - DNA, 25 bp, SARS Virus
taacctcttagtaatttttgtgtca

SEQ ID NO: 79451 - DNA, 25 bp, SARS Virus
aacctcttagtcatttttgtgtcaa

SEQ ID NO: 79452 - DNA, 25 bp, SARS Virus
acctcttagtcaattttgtgtcaaa

SEQ ID NO: 79453 - DNA, 25 bp, SARS Virus
cctcttagtcatatttgtgtcaaat

SEQ ID NO: 79454 - DNA, 25 bp, SARS Virus
ctcttagtcattattgtgtcaaatt

SEQ ID NO: 79455 - DNA, 25 bp, SARS Virus
tcttagtcatttatgtgtcaaattg

SEQ ID NO: 79456 - DNA, 25 bp, SARS Virus
cttagtcattttagtgtcaaattga

SEQ ID NO: 79457 - DNA, 25 bp, SARS Virus
ttagtcatttttatgtcaaattgat

SEQ ID NO: 79458 - DNA, 25 bp, SARS Virus
tagtcatttttgagtcaaattgatg

SEQ ID NO: 79459 - DNA, 25 bp, SARS Virus
agtcatttttgtatcaaattgatga

SEQ ID NO: 79460 - DNA, 25 bp, SARS Virus
gtcatttttgtgacaaattgatgaa

SEQ ID NO: 79461 - DNA, 25 bp, SARS Virus
tcatttttgtgtaaaattgatgaaa

SEQ ID NO: 79462 - DNA, 25 bp, SARS Virus
catttttgtgtcaaattgatgaaat

SEQ ID NO: 79463 - DNA, 25 bp, SARS Virus
atttttgtgtcaaattgatgaaatt

SEQ ID NO: 79464 - DNA, 25 bp, SARS Virus
tttttgtgtcaaattgatgaaattc

SEQ ID NO: 79465 - DNA, 25 bp, SARS Virus
ttttgtgtcaaaatgatgaaattct

SEQ ID NO: 79466 - DNA, 25 bp, SARS Virus
tttgtgtcaaatagatgaaattctt

SEQ ID NO: 79467 - DNA, 25 bp, SARS Virus
ttgtgtcaaattaatgaaattcttt

SEQ ID NO: 79468 - DNA, 25 bp, SARS Virus
tgtgtcaaattgatgaaattctttc

SEQ ID NO: 79469 - DNA, 25 bp, SARS Virus
gtgtcaaattgaagaaattctttca

SEQ ID NO: 79470 - DNA, 25 bp, SARS Virus
tgtcaaattgataaaattctttcat

SEQ ID NO: 79471 - DNA, 25 bp, SARS Virus
gtcaaattgatgaaattctttcatc

SEQ ID NO: 79472 - DNA, 25 bp, SARS Virus
tcaaattgatgaaattctttcatct

SEQ ID NO: 79473 - DNA, 25 bp, SARS Virus
caaattgatgaaattctttcatctg

SEQ ID NO: 79474 - DNA, 25 bp, SARS Virus
aaattgatgaaaatctttcatctgc

SEQ ID NO: 79475 - DNA, 25 bp, SARS Virus
aattgatgaaatactttcatctgcc

SEQ ID NO: 79476 - DNA, 25 bp, SARS Virus
attgatgaaattatttcatctgccg

SEQ ID NO: 79477 - DNA, 25 bp, SARS Virus
ttgatgaaattcattcatctgccgt

SEQ ID NO: 79478 - DNA, 25 bp, SARS Virus
tgatgaaattctatcatctgccgta

SEQ ID NO: 79479 - DNA, 25 bp, SARS Virus
gatgaaattcttacatctgccgtaa

SEQ ID NO: 79480 - DNA, 25 bp, SARS Virus
atgaaattctttaatctgccgtaat

SEQ ID NO: 79481 - DNA, 25 bp, SARS Virus
tgaaattctttcatctgccgtaata

SEQ ID NO: 79482 - DNA, 25 bp, SARS Virus
gaaattctttcaactgccgtaataa

SEQ ID NO: 79483 - DNA, 25 bp, SARS Virus
aaattctttcatatgccgtaataag

SEQ ID NO: 79484 - DNA, 25 bp, SARS Virus
aattctttcatcagccgtaataagt

SEQ ID NO: 79485 - DNA, 25 bp, SARS Virus
attctttcatctaccgtaataagtt

SEQ ID NO: 79486 - DNA, 25 bp, SARS Virus
ttctttcatctgacgtaataagttg

SEQ ID NO: 79487 - DNA, 25 bp, SARS Virus
tctttcatctgcagtaataagttgt
